United States Patent Application Publication US 2021/0199660 A1 - sequence listing, part 46

SEQ ID NO: 656723 - DNA, 120 bp, Artificial Sequence
  ENSG00000183778_25 (sequence is synthesized)
gttcaagtaagaaaatgtatccaagtcacaaagaaacataatttggcttttggagacatgagcagcttcatttctcatttgttcattcgaaagtctccactgggcttctgagtgccacat

SEQ ID NO: 656724 - DNA, 120 bp, Artificial Sequence
  ENSG00000183778_26 (sequence is synthesized)
ttgcataccatttcttgtgtttggattaagctgcttctttgtagatgtgtttcctcatcctggctgctctgaacgcactgggtcatgttcagaaaagcctccttctcaggtggaaaaaat

SEQ ID NO: 656725 - DNA, 120 bp, Artificial Sequence
  ENSG00000183778_27 (sequence is synthesized)
cagggactgagcttgtcttttgaagcccaaatttaagagccacgcctctcggttccataggatgggccgcctctcattctgaagatgactgtgctttgagggagaagtcgtctgtttggc

SEQ ID NO: 656726 - DNA, 120 bp, Artificial Sequence
  ENSG00000183778_28 (sequence is synthesized)
agtaggcctgcgtctgtgtttcgtggtctaccttgtcaggtgtgtgtctgtgtggccactggtctcagtcggcgaggccggtccagctgctgcctctgtgtgactggctttgggtctggc

SEQ ID NO: 656727 - DNA, 120 bp, Artificial Sequence
  ENSG00000183778_29 (sequence is synthesized)
cttcacagcatcagctcacagcccacagctccagggacaaatgaggacaggcgtgggctctccctactgcttctgtgtgttcttaaaggattttctttgagacccattgtttcccctccc

SEQ ID NO: 656728 - DNA, 120 bp, Artificial Sequence
  ENSG00000183778_30 (sequence is synthesized)
ctcccctcccctcccatccccttccctcttcttttcttttctttttttctgacagggtctcaccctgtcacccaagctggagcgtagtggcctgatctcgctgcagccttgaactcaacg

SEQ ID NO: 656729 - DNA, 120 bp, Artificial Sequence
  ENSG00000183778_31 (sequence is synthesized)
agcctcaaacgagcctcctgcctcagccagtgggtagttgggattacaggtgtgtatttctttatacaatgaataattctttttcttgaggaaaaaacattatttcatgaatctagaact

SEQ ID NO: 656730 - DNA, 120 bp, Artificial Sequence
  ENSG00000183778_32 (sequence is synthesized)
tgaaggaaccttagagctcattcaatcctgcctcctcttttatgtgggatgcaaacgaggctcagagagacgtaacaacttgcccaggaccttcccagcttgtttgttgcagaaggaggg

SEQ ID NO: 656731 - DNA, 120 bp, Artificial Sequence
  ENSG00000183778_33 (sequence is synthesized)
ttccagctcagcgtgggtttcctggtgctgtcttgtctggatgtgagagtgagaaacaatgtgaaagcatgagtgaggaggccaagcagtgcttccccaggaacacccagcgctagctcc

SEQ ID NO: 656732 - DNA, 120 bp, Artificial Sequence
  ENSG00000183778_34 (sequence is synthesized)
agagtgggaatggagaggtccaggttggccgggccggggcttcaccgcaggcacccagagaggaaggattccgatgggcaggtgctgagctaggggctgtgtaggtattgcctcatctac

SEQ ID NO: 656733 - DNA, 120 bp, Artificial Sequence
  ENSG00000183778_35 (sequence is synthesized)
atgctctcaatgagttttccgggggcagagacctgcagttgctcaggtttacagattaggaaactgaggcagagagagagagggtgaacaactcattcaaggttacataggtgaaaagtg

SEQ ID NO: 656734 - DNA, 120 bp, Artificial Sequence
  ENSG00000183778_36 (sequence is synthesized)
gtggaaacggggtgaccctaagctgccctgtggcctccccagccacctgctgacggagctgtgggagcacattgcattggctgctcccactgcctctctggggtgcctcctcagactccc

SEQ ID NO: 656735 - DNA, 120 bp, Artificial Sequence
  ENSG00000183778_37 (sequence is synthesized)
ccaaccatacacgcctacacccagcccccaaacctccgtactctgccttctactgtgactgtggcagaagccacttggcccccgtggtgccagaacccctggtattggactgactccagc

SEQ ID NO: 656736 - DNA, 120 bp, Artificial Sequence
  ENSG00000183778_38 (sequence is synthesized)
tcttcttccacagctcctgatgtggcctcactctcgtcctaccacctgctgtcccctctgctggatcaccccattagcacacagacacgctgccattttccacctgaccagaaatggcca

SEQ ID NO: 656737 - DNA, 120 bp, Artificial Sequence
  ENSG00000183778_39 (sequence is synthesized)
ccaccttccccgaccccttccctgacccccttccccgtcccgctgccccatcctgttgcgtttctggtggaaccccgcacgagagttttacttgtctgttgcctcgtcctaatccttccc

SEQ ID NO: 656738 - DNA, 120 bp, Artificial Sequence
  ENSG00000183778_40 (sequence is synthesized)
ttctttcccaaatgccgtctcatcagacttctgcacccccactccacccacatggcccttctcagggcacccaccaccccctgtggctgggtcctgtgggcagttcttgttctcctcctg

SEQ ID NO: 656739 - DNA, 120 bp, Artificial Sequence
  ENSG00000183778_41 (sequence is synthesized)
cttgacgtggcgagtcctcatcaccagcttccaggacaccgggtgctcttggtctccctcctccttgctgctcgccttttccatctcccctgcttgctccttctctttgctctgacagtg

SEQ ID NO: 656740 - DNA, 120 bp, Artificial Sequence
  ENSG00000183778_42 (sequence is synthesized)
tcgtgctggaggatcctgggctctgcgtggggccccctttcttccctggttatacccagtcctccgaggggcccaccttgtctcatggctttaaatatgttgatgatgtttccatttatc

SEQ ID NO: 656741 - DNA, 120 bp, Artificial Sequence
  ENSG00000183778_43 (sequence is synthesized)
tccagcctagaactctttcttgctcttcaatccactgcctacctgatttcccatagtgaacaatccaacactgaccttctggttaactgccccacatccagcccatctgcagccattccc

SEQ ID NO: 656742 - DNA, 120 bp, Artificial Sequence
  ENSG00000183778_44 (sequence is synthesized)
gtctcaggtaatggccactccatcttcctgcagctcaagtgggaagccctggagccattccgactcctctcccatctggtgcatcaggaaagactgtgggaactaccttcaaattctctc

SEQ ID NO: 656743 - DNA, 120 bp, Artificial Sequence
  ENSG00000183778_45 (sequence is synthesized)
caggagccaaccacctcctgcccctccactgcgaccacccttgttcaagcctgcattgcctctcacctgcattcgtgcagctacctccagaccctccctcagcttccattattgcatcct

SEQ ID NO: 656744 - DNA, 120 bp, Artificial Sequence
  ENSG00000183778_46 (sequence is synthesized)
ttggtctcttcccagcagcatccagagtgatcctttgaaaatctcatttctctgctcaaaaccctcctgaggtttcccatcaccaaggatattaaggataaaaaccacatccttcatacc

SEQ ID NO: 656745 - DNA, 120 bp, Artificial Sequence
  ENSG00000183778_47 (sequence is synthesized)
attgtctacctgtgattccctaatcgtgtccctttgctcactccctctggcctcttgctgttccctgaacagcagtctgttccagccacagcagcccctttgccctatgtgcccatcccc

SEQ ID NO: 656746 - DNA, 120 bp, Artificial Sequence
  ENSG00000183778_48 (sequence is synthesized)
gtcagccttggcactggctgtcctctctgctgggagtgccctttcttcagatgctctcatgcttcgcttctttgccttgttgacatttggtcaatgtcaccttctcagtgaggcctaccc

SEQ ID NO: 656747 - DNA, 120 bp, Artificial Sequence
  ENSG00000183778_49 (sequence is synthesized)
tgacctccctgtaggaaaatgcaactcacctcactcccatgccccgtaccttatattgttttccttgcacttaccaatttctaacaaagcatgtaatatctgtttattataacatatcta

SEQ ID NO: 656748 - DNA, 120 bp, Artificial Sequence
  ENSG00000183778_50 (sequence is synthesized)
tattttatggtttatgtttcacgcaacttgaatgtaacctttgtgtgggccgtgggtctttctctgtttccttcactgacgcaccttggattcttagcatggtcccagcacatagtagat

SEQ ID NO: 656749 - DNA, 120 bp, Artificial Sequence
  ENSG00000183778_51 (sequence is synthesized)
gctcaataaacatttgttgagtggaactgaatgtattggtatggtaggtgggttttagaagggaatgggtgaaccaggactgaaaaaaaagaaatatttttcaaagtaagccaacactgt

SEQ ID NO: 656750 - DNA, 120 bp, Artificial Sequence
  ENSG00000183778_52 (sequence is synthesized)
ggtttcacttgagtcagtaagtaggaaatgggtgcgactctgtgacctgaaaacctagaaatgctccacagccatgctcttcaccccttttcttccaaaacggaaaacctcacacaatgc

SEQ ID NO: 656751 - DNA, 120 bp, Artificial Sequence
  ENSG00000183778_53 (sequence is synthesized)
agggtggacagaatcacacggtgcagtctgtgcgcctgtcctccagcccgacacctggccagtcctgtctcatctacactgtcatgcaaactcttgtttttgtttgtttgtttttgagac

SEQ ID NO: 656752 - DNA, 78 bp, Artificial Sequence
  ENSG00000183778_54 (sequence is synthesized)
agagtctcactctgtcacctaggctgaagtgcagtggtgcagtcttggatcactgcaacctccacctcctgggttctt

SEQ ID NO: 656753 - DNA, 120 bp, Artificial Sequence
  ENSG00000183778_55 (sequence is synthesized)
ttataggtgtgagccaccacacccagccatgtttcaagaatttgtgcttcagctcagcacttagtggcagtgggaagaccagacctcctgacccttcagcctgctggcatccaccatgcc

SEQ ID NO: 656754 - DNA, 120 bp, Artificial Sequence
  ENSG00000183778_56 (sequence is synthesized)
ccttcagcctgctggcatccaccatgccttaaaaaacaaaacaaaaccctaaatgtatttaattcctgctcctcttcaaacacaccattgtaaccacataatacactgtgtgaaaagaga

SEQ ID NO: 656755 - DNA, 120 bp, Artificial Sequence
  ENSG00000183778_57 (sequence is synthesized)
ggaaagaaaaatccaagtcaacaataacttgccaggccttctttccttgagccccatatcccacgcccgctgtgctaacctctggcttgccgcccacacctgtctggattcatcccgact

SEQ ID NO: 656756 - DNA, 120 bp, Artificial Sequence
  ENSG00000183778_58 (sequence is synthesized)
cgagccacctcctcctaactggtcccacgggcctgtccctgccactttccaatctgtcctccacttgacatttggagtaattttttaaaacagcaaatctgattaggaaactcagaggcc

SEQ ID NO: 656757 - DNA, 120 bp, Artificial Sequence
  ENSG00000183778_59 (sequence is synthesized)
cagggaagccagtgacttgccctctggcaccctgtcctgagggtagagcttcctggcacagggtcagtgagccccgaggccacctccctggaggctgcaggagggtgagcgtggtcaaga

SEQ ID NO: 656758 - DNA, 120 bp, Artificial Sequence
  ENSG00000183778_60 (sequence is synthesized)
gcagcaattttcattgtttcatgtgtcattgcctatttaacgagcttcgcagtgccctcaatttgctaagttaactttggccacgccgtccgtgagaggtcagactggtgatttccaact

SEQ ID NO: 656759 - DNA, 120 bp, Artificial Sequence
  ENSG00000183778_61 (sequence is synthesized)
cccgccgggcaccgggtgctgcaccggttatcccaacaggctggcacagagggctgaaatggacttggaaagccaaataattaattttcatgcgagtttttgatccccttgagtgtggtt

SEQ ID NO: 656760 - DNA, 120 bp, Artificial Sequence
  ENSG00000183778_62 (sequence is synthesized)
atttttgtgcaaaaaattatcccgatgtttactttggtttcataagtaatttattaaaattccttcctaagctttaaatttcagctaacaaatatgagcatggcctctgggaatggtaag

SEQ ID NO: 656761 - DNA, 120 bp, Artificial Sequence
  ENSG00000183778_63 (sequence is synthesized)
aacaaggaagcattgtgtgtgtgtgtgcacaccccaaggttgtgcagctagaagtgcagaatgtggattccgtccgctctttagggcacagctagccctgtgcacctgtagaaactgtac

SEQ ID NO: 656762 - DNA, 120 bp, Artificial Sequence
  ENSG00000183778_64 (sequence is synthesized)
tgacgtacagccttgcagagcctccagcttccatggtggcaggagccatggaaaatagagacccacccggtaaggaggtaactgggacaccaggttactgtctacctggtggggaagctg

SEQ ID NO: 656763 - DNA, 120 bp, Artificial Sequence
  ENSG00000183778_65 (sequence is synthesized)
gggaaaagggcccatgggaggatactaactggggaagaggagaccttgcttccagggctgggcgacccacttacggaggccccattccatttacatctccgctcaagcctccgcctccgg

SEQ ID NO: 656764 - DNA, 120 bp, Artificial Sequence
  ENSG00000183778_66 (sequence is synthesized)
gttccagccctggctctgcaatttgctagctgtggccccaggtggtcattctctctgcacctcagtctctgcatctctataaaatgggatgataatagtgttcacctcagaaggttgtca

SEQ ID NO: 656765 - DNA, 120 bp, Artificial Sequence
  ENSG00000183778_67 (sequence is synthesized)
gaggtgtggaaattaagataattcacattgagttcttggcacggctgtgcctagcactgggtgcaggctgaatgcatgggctgctatcgcgatgttgtatctaatggcctgcagtggttg

SEQ ID NO: 656766 - DNA, 120 bp, Artificial Sequence
  ENSG00000183778_68 (sequence is synthesized)
cttagcagcaatgggtttgcttggttatttcctgatttggggtaaatagatccagagaccaaggctccatgttatccccagcaccgggctgaccccaagtaccagagaggtctccatggc

SEQ ID NO: 656767 - DNA, 120 bp, Artificial Sequence
  ENSG00000183778_69 (sequence is synthesized)
cccaggctgcagaggacccaggttacaacttgctcaagtagacccaggatctaggcttatcctagtagatcttggtaccaggccagcctctgtgacctgagactccaagaccaccattgc

SEQ ID NO: 656768 - DNA, 120 bp, Artificial Sequence
  ENSG00000183778_70 (sequence is synthesized)
agacccaggctctaagctagcctctgcaaactcaggatatatattccaaatatccctgatttggggggcaaggtctgtgtgtgatttgcagagtaacgatatgaagaaggaggtcttgtt

SEQ ID NO: 656769 - DNA, 120 bp, Artificial Sequence
  ENSG00000183778_71 (sequence is synthesized)
aagatggcgtggtgtggagtgcccaggtgtgaaatggttgtctcaatggaagttgtagcctcctcctcccatgacatcatcctcacacgtgctcagtgttaggcattttttccccctcct

SEQ ID NO: 656770 - DNA, 120 bp, Artificial Sequence
  ENSG00000183778_72 (sequence is synthesized)
gctctgaatcaatgcgagtgagatatgcatgcgggagggacaagcttgcatggcacccagctgtggtacatttagaactcggcctcagccctccagtgtgaccttgggcatacccttcac

SEQ ID NO: 656771 - DNA, 120 bp, Artificial Sequence
  ENSG00000183778_73 (sequence is synthesized)
ccccgggctctgttcgctggggcagggtctgcgctctggagtcaggctgcctgggtttgaattttaccttcctcgccaagtcccttgagtggcaagttacttatcttctcattgtctccg

SEQ ID NO: 656772 - DNA, 120 bp, Artificial Sequence
  ENSG00000183778_74 (sequence is synthesized)
ttttgttatctgaagaatgggaccatagtagttcccgcctcatgggatgatcatgtgggttaaatgagaggatgagtataaactgctcaacatcccatggtaggtgctcagtaaatgcag

SEQ ID NO: 656773 - DNA, 120 bp, Artificial Sequence
  ENSG00000183778_75 (sequence is synthesized)
gtgcttatgattatagtcagtgtttgggctgtgaattttggtggattctatggtggtgtatacagcactatctatcagtgtacctgtcagtgtctggtgatctctgtgcaaatcaaaaac

SEQ ID NO: 656774 - DNA, 120 bp, Artificial Sequence
  ENSG00000183778_76 (sequence is synthesized)
tcttcagattgagtctgtagggctttgtttcagctcttgttctttttcttcatttgaatctttcctggaactcttggagaagttcttctgttcgtgacattcttcacaatcagagcactg

SEQ ID NO: 656775 - DNA, 120 bp, Artificial Sequence
  ENSG00000183778_77 (sequence is synthesized)
tgttcttgaccctcttaattcagaatatgtgaaaatctgaatgaggtaaaagaagttggagctggaagatgccttagaaattatctacagtatttttttttttaagataaaaccttttac

SEQ ID NO: 656776 - DNA, 120 bp, Artificial Sequence
  ENSG00000183778_78 (sequence is synthesized)
agttaggaaagccaaagctcagaaaaatggagtgactttgccaggtccttcagcgagtggcacatccaggattaaaagctggcatcagaaatcccatgtcagacattcattcgtttattt

SEQ ID NO: 656777 - DNA, 120 bp, Artificial Sequence
  ENSG00000183778_79 (sequence is synthesized)
attcatctgttgagtgctcagtgctttgaccgggcatcctgaatgagggtcaagctgaggttcgaggccgtgggttttgcatacagagctttcactgggtaaatacacaatgctgagaag

SEQ ID NO: 656778 - DNA, 120 bp, Artificial Sequence
  ENSG00000183778_80 (sequence is synthesized)
attatcaggggcacctgatcccttgacagctgaataaagaagcgttccagtgccttctctgtgggcatcgtaagccatgtccatccatacctgctgtttcactgaaaccccacagcagcc

SEQ ID NO: 656779 - DNA, 120 bp, Artificial Sequence
  ENSG00000183778_81 (sequence is synthesized)
tctggagggcaccattcttataattatgcccctggatttaagaggaggaaactgaggggcaggtgactcagtgacttccccgggggctcagacgtggtggagacacaggccctcggcctc

SEQ ID NO: 656780 - DNA, 120 bp, Artificial Sequence
  ENSG00000183778_82 (sequence is synthesized)
caaatgctgcctcccgcgagcagccttgcttttctccacttggcacagtggtgagtcctccgatgtatctgctttcataggaagcttgggaccagccctgcccaaggagtgtgccacctg

SEQ ID NO: 656781 - DNA, 120 bp, Artificial Sequence
  ENSG00000183778_83 (sequence is synthesized)
accccttttcctgtcttctgtcacttttttttttccaagtgttgatatgagtttcagtctgccccttcctgggcctgtttgacctcctgggattcggcacttagttatctgtgtcattcc

SEQ ID NO: 656782 - DNA, 120 bp, Artificial Sequence
  ENSG00000183778_84 (sequence is synthesized)
caaggacctcccgtttagctggatcccctgacctgtcctgccctggccagccctctcttgaggttactcaagtgtccaatggcagcccaaacaaatgtctggcttcagaaaataaactct

SEQ ID NO: 656783 - DNA, 120 bp, Artificial Sequence
  ENSG00000183778_85 (sequence is synthesized)
gtctggcttcagaaaataaactcttcagtccagcccactttccctgtctccctatctaatgcccttgcaaaacaagcccgggggcgccacactcagactgtgtgtgtgtgtgtgtgtgtg

SEQ ID NO: 656784 - DNA, 120 bp, Artificial Sequence
  ENSG00000183778_86 (sequence is synthesized)
agacagacagatctgaggctctaattagagataccatgctcagtggaagctggttctgaacaatgttaactgccccacccgtgtccatgaagggcagtggaagagcaaggggcggtttaa

SEQ ID NO: 656785 - DNA, 120 bp, Artificial Sequence
  ENSG00000183778_87 (sequence is synthesized)
ttacctgggatgtaaaacagcaggcacccccactgccctcctcagctgttggggtggcagggtggagttgagggcctcactcgttttcacctttgcacaatcagtcacacatttgttata

SEQ ID NO: 656786 - DNA, 120 bp, Artificial Sequence
  ENSG00000183778_88 (sequence is synthesized)
tgacagctatgtgccacacacccatgttcagtaaggtggaagccagctgcaggcgtggtccacagttccagacatctctgaaggatgtgacaccaactttcaggcagaacatttagaaag

SEQ ID NO: 656787 - DNA, 120 bp, Artificial Sequence
  ENSG00000183778_89 (sequence is synthesized)
agtgaaataaagtgaaacagatcaaccagcctattgagtatctacgtgttttttttacaggcaagaactgaggaggcaatactatttagaatccttgataaacagttccaaaagaaaaaa

SEQ ID NO: 656788 - DNA, 120 bp, Artificial Sequence
  ENSG00000183778_90 (sequence is synthesized)
aaaaacaggctttggtgactctcatgggccctccgtgccaagagtctatggctctgtgatatattaaatcaggcttgttaattatttaatctaacagctgccatgcaccctcattttaaa

SEQ ID NO: 656789 - DNA, 120 bp, Artificial Sequence
  ENSG00000183778_91 (sequence is synthesized)
aacagatgaggcaatgtttacattttctccatgtcctccatttggaagtgtcttagtttgttttgtgttgctgtaacagaataccacagactgggcgatttatagacaatagaaattaat

SEQ ID NO: 656790 - DNA, 120 bp, Artificial Sequence
  ENSG00000183778_92 (sequence is synthesized)
ctggctcatggttctagaggctaggaagtccaagagcttggcactggcctctggtgagggccttcatgctgtgtcattgtgggcaaaagagcaaaacttgctttgataaaatcactcttg

SEQ ID NO: 656791 - DNA, 120 bp, Artificial Sequence
  ENSG00000183778_93 (sequence is synthesized)
gcaataactgaccctcctcttataataacattaattcattcatgacagcagaaccctcctgacccagtcacctcttaaaaggtcccacctctcaacgctgttgcactggggattaagttt

SEQ ID NO: 656792 - DNA, 120 bp, Artificial Sequence
  ENSG00000183778_94 (sequence is synthesized)
ccttacacatgcactttgggggacacattcaaactgtagcaggaattatttgctttctcataacatttttttaattaattaattttcagcgtttgttatatcagaatggacattatagca

SEQ ID NO: 656793 - DNA, 120 bp, Artificial Sequence
  ENSG00000183778_95 (sequence is synthesized)
atttccatggctgtgtcgctcctggcagattttaaagttcttccagcctgattcctctctctgtttgggtctctggcatggtgcctgctggagagtagatacttgataattatctattgg

SEQ ID NO: 656794 - DNA, 120 bp, Artificial Sequence
  ENSG00000183778_96 (sequence is synthesized)
gttctcaggggatctctcaaaggtggtattcaggcacccacaaggcaactcccatcacaagaaagaatggtggcctgggagtgagctgtaaggttccttcaaacatcagttcctgaagcc

SEQ ID NO: 656795 - DNA, 120 bp, Artificial Sequence
  ENSG00000183778_97 (sequence is synthesized)
tcttttattcattattgttgggacttgtttttatttctgtttcgttctacgtgaccccaaaatctgtatgtgaacactaggaactttatcatgggctgaggtgtatttgaagtaaactct

SEQ ID NO: 656796 - DNA, 120 bp, Artificial Sequence
  ENSG00000183778_98 (sequence is synthesized)
taactatgtctctgggatatgaaaggtgcttacattctctgttgggaatgtagagagaaggatttgcagtgtgtggcccctgggaatgtagaggcatgaatttctgtctgttttcctgct

SEQ ID NO: 656797 - DNA, 120 bp, Artificial Sequence
  ENSG00000183778_99 (sequence is synthesized)
gttgaaatctgagtgctaggaacggacctcttgctctcagattggccttgaagctgaagggaacctgtccaccctctgcacagggcaagagccacgccaacaggaggaagttggagtgca

SEQ ID NO: 656798 - DNA, 120 bp, Artificial Sequence
  ENSG00000183778_100 (sequence is synthesized)
tcctggcacctgccaatcggaagactgacaaacaaaaaattagtttttaattaatttaaaaaatgatcttcctacttatcagacacaatcacttttaaatatgagcagaaaaacgaactc

SEQ ID NO: 656799 - DNA, 120 bp, Artificial Sequence
  ENSG00000183778_101 (sequence is synthesized)
catagccaaatgcaacattttgtgtcatactgctttacatcatctattctacctccattcactggtcaaagaagcgcagagttaagttggccagtgtggcgtggacacagccaggcgcag

SEQ ID NO: 656800 - DNA, 120 bp, Artificial Sequence
  ENSG00000183778_102 (sequence is synthesized)
accctcctgccagcgaagccagcgtgaggtctgttggctcaggggtccagtccctgggtccccgaagaggtaagccaaagacatagtgatacttggttcaattcggctccagagagtatc

SEQ ID NO: 656801 - DNA, 120 bp, Artificial Sequence
  ENSG00000183778_103 (sequence is synthesized)
agatgggaaatagatgacttgttttacctggtcaaataagacatcactaaaatctaccatgactggaaattacttaatgcaaccagaggagacttcgcagtcaaattttgcttttcctaa

SEQ ID NO: 656802 - DNA, 120 bp, Artificial Sequence
  ENSG00000183778_104 (sequence is synthesized)
aagacacgaaattaaatttacatgtcactgaatgctatttgaaactgtcatttccttgtatattagggggatctgctagactcttatgtcattgtattttggaaatgggtatatgtcctt

SEQ ID NO: 656803 - DNA, 120 bp, Artificial Sequence
  ENSG00000183778_105 (sequence is synthesized)
attattggttaataatcatatttatttttaatgaaaattaaattatgaaaataatgcacttaactaggtgagttttaggttgtcgattgatgtgataattcactcttcccgaaaaattgg

SEQ ID NO: 656804 - DNA, 120 bp, Artificial Sequence
  ENSG00000183778_106 (sequence is synthesized)
caaggtaatggtctgaatcggacaatccttttgtttttacattgatgttttctatatttattttgtacctggaaaaatatttttacaatttattttgattttatatgtgtagaaaaatgt

SEQ ID NO: 656805 - DNA, 120 bp, Artificial Sequence
  ENSG00000183778_107 (sequence is synthesized)
actgaacaatgttgacatgcttatttttgtaagagatgggtacttcttgttccccttggatttcggaagcaaagcaatgggaccctacgcttcagagtcttaatggggtggggcagtgtc

SEQ ID NO: 656806 - DNA, 120 bp, Artificial Sequence
  ENSG00000183778_108 (sequence is synthesized)
cattgaggtgtcctgtcgggaatgacaagtccagggcagattatgaggcaggcatcctttggagttcttctctcaggtatattttaactaaaagctatcatttaagttgaagaaatcaag

SEQ ID NO: 656807 - DNA, 120 bp, Artificial Sequence
  ENSG00000183778_109 (sequence is synthesized)
tcttgtgaattgatacgattgtacttctagagtctttgatgataagttgtctttgcggtacagattggctcctcgatctttcaaagtgtcatttaaatggaaataaatgtctgaaacaga

SEQ ID NO: 656808 - DNA, 120 bp, Artificial Sequence
  ENSG00000183778_110 (sequence is synthesized)
ggaccggccgcgcgccccctgcgtccgcgggccgggatgcggctctgagccagcggcggcttccagcccgactgggcctgccggggctgccccgcgcacgtgattcctgtcagaatcacc

SEQ ID NO: 656809 - DNA, 120 bp, Artificial Sequence
  ENSG00000183778_111 (sequence is synthesized)
cagcctgaagacccgggagggaaaaatgtggcactgctcttgcaagacaaggaacccgtggctcagcaccacctgccataactgcacactggcacagcttctagcaatacccaccaagcg

SEQ ID NO: 656810 - DNA, 120 bp, Artificial Sequence
  ENSG00000183778_112 (sequence is synthesized)
tccactgaggaacttacggtatttgccaactttggcaaaggataagataatgttgtggaaaataccatactctgcggcagttttaggtatggctgcagacactgccacatcccgagacag

SEQ ID NO: 656811 - DNA, 120 bp, Artificial Sequence
  ENSG00000183778_113 (sequence is synthesized)
gaaattgcctgttgccagggcatgtgacccactgtgactctcctggagagcagcaatcaagactaaagtattagttcctggagctgcaggagacattcagagtggcatctgttctcactg

SEQ ID NO: 656812 - DNA, 120 bp, Artificial Sequence
  ENSG00000183778_114 (sequence is synthesized)
gttggcagcagaattggttcatttcagcctgcaatcctcttccagtaaatcctcttccagtaaatcctcttctccacccccatttacctataagacctcctcctccctctccacttcctc

SEQ ID NO: 656813 - DNA, 120 bp, Artificial Sequence
  ENSG00000183778_115 (sequence is synthesized)
cctctccctctttcccttcccctttccctccctcctttttctcttcccttcttctctctctctctttctctgcctccctctctccttccctctcccaccttcctccttccttctctctct

SEQ ID NO: 656814 - DNA, 120 bp, Artificial Sequence
  ENSG00000183779_0 (sequence is synthesized)
ggtttttgtgttgctagccggggccagcggcggtggcggcggcggcggaggcgtcggtggaggaggggaggcggcgaggaggcgcagctcccgctgcaccgcgatcgacgctgcggagcg

SEQ ID NO: 656815 - DNA, 120 bp, Artificial Sequence
  ENSG00000183779_1 (sequence is synthesized)
agcccacccgccccgggagctcgcctccccggtgctcccccgccctccccgcccccccagcggcgctgcctcctccaaatgagcgattcgcccgctggatctaacccaaggacacccgaa

SEQ ID NO: 656816 - DNA, 120 bp, Artificial Sequence
  ENSG00000183779_2 (sequence is synthesized)
agcagcggcagcggcagcggcggcggcgggaagaggccggcggtgccggcagcggtgtccctcttgccaccggcggaccccctgcgccaggcgaaccggctcccgatcagggtcctgaag

SEQ ID NO: 656817 - DNA, 120 bp, Artificial Sequence
  ENSG00000183779_3 (sequence is synthesized)
atgctgagcgctcacaccggtcacctcctgcacccggagtacctgcagccgctgtcctccactcccgtcagccccattgagctggacgccaagaagagccccttggcgctgctggctcag

SEQ ID NO: 656818 - DNA, 120 bp, Artificial Sequence
  ENSG00000183779_4 (sequence is synthesized)
acctgctcgcagatcggcaagccggacccgccgccctcctccaaactcaactcggtggcggcggcggccaacgggctgggagcggagaaggaccccggccgctcagccccgggcgccgcc

SEQ ID NO: 656819 - DNA, 120 bp, Artificial Sequence
  ENSG00000183779_5 (sequence is synthesized)
tccgcagccgcggccctgaagcagctgggggactcaccggccgaggacaagtccagcttcaagccctactccaagggctccggcggcggcgactcccgcaaagacagcggctcctcctcg

SEQ ID NO: 656820 - DNA, 120 bp, Artificial Sequence
  ENSG00000183779_6 (sequence is synthesized)
gtgtcttccacctcctcctcgtcctcctcgtccccgggagacaaggcgggcttcagggtccccagcgccgcctgcccgccctttcccccgcatggagcgccggtctccgcatcctcgtcc

SEQ ID NO: 656821 - DNA, 120 bp, Artificial Sequence
  ENSG00000183779_7 (sequence is synthesized)
tcgtcgtcgcccggcggctcccgcggcggctccccgcaccactctgactgcaagaacggcggcggggttggcggcggggagctggacaagaaagaccaggagcccaagcccagcccggag

SEQ ID NO: 656822 - DNA, 120 bp, Artificial Sequence
  ENSG00000183779_8 (sequence is synthesized)
gacaagaaagaccaggagcccaagcccagcccggagccggcagccgtgagccgcggcggcggtggggagcccggggcgcacggtggcgccgagtccggggcctccgggcgcaagtccgag

SEQ ID NO: 656823 - DNA, 120 bp, Artificial Sequence
  ENSG00000183779_9 (sequence is synthesized)
ccggtgtctccctacaagccgggccactcggtgttcccgctgccgccctccagcattggctaccacggctccatcgtgggcgcctacgccggctacccgtctcagttcgtgcctggcctg

SEQ ID NO: 656824 - DNA, 120 bp, Artificial Sequence
  ENSG00000183779_10 (sequence is synthesized)
gatcctagcaagtccggcctcgtgggaggccagctgtctgggggcctgggcctgccgccgggcaagccccccagctccagcccgctcaccggggcctccccgccctccttcctgcaggga

SEQ ID NO: 656825 - DNA, 120 bp, Artificial Sequence
  ENSG00000183779_11 (sequence is synthesized)
ttatgccgcgacccctattgcttgggaggttaccacggcgcctcgcacctcggcggctccagctgctccacctgcagcgcgcacgaccctgccgggcccagcctgaaggcggggggctac

SEQ ID NO: 656826 - DNA, 120 bp, Artificial Sequence
  ENSG00000183779_12 (sequence is synthesized)
ccgctggtgtaccccgggcacccgctgcagcccgccgcgctctcgtccagcgccgcccaggccgcgctccccggccacccgctctacacctacggcttcatgctgcagaacgaaccgctg

SEQ ID NO: 656827 - DNA, 120 bp, Artificial Sequence
  ENSG00000183779_13 (sequence is synthesized)
ccacctcggaggagctgctcagccacctacggacccacacggccctgccgggagccgagaaacttctggccgcctaccccggggcctcgggcctgggcagcgccgccgccgccgccgccg

SEQ ID NO: 656828 - DNA, 120 bp, Artificial Sequence
  ENSG00000183779_14 (sequence is synthesized)
tccccccgcccgccgcccccggcagccccgggtcgctgtccttgcggaatccacacactttgggcctaagccggtaccacccctatggcaagagccacttatccacagcggggggcctgg

SEQ ID NO: 656829 - DNA, 120 bp, Artificial Sequence
  ENSG00000183779_15 (sequence is synthesized)
ccgtgccgtccctccccacagccggaccctactattcgccatacgcgctgtatggacagagactagcttcagcctcggcgctgggataccagtaactacagctcttcctccaccccagcc

SEQ ID NO: 656830 - DNA, 120 bp, Artificial Sequence
  ENSG00000183779_16 (sequence is synthesized)
ccctcaccctcctccctctccctcctcctccctccccacctgccgtcgccgctgcaacctccactactgcttgaccctgccgggattccccacccagcccttccccaccggactgtgtat

SEQ ID NO: 656831 - DNA, 120 bp, Artificial Sequence
  ENSG00000183779_17 (sequence is synthesized)
ttatttactataatgttagcttacaagctgggaatataagtgcattaacggcccacatgagtcaatggtatgcaaaaagtctgtgttctcccaaataataatattaatcccacaaataac

SEQ ID NO: 656832 - DNA, 120 bp, Artificial Sequence
  ENSG00000183779_18 (sequence is synthesized)
gacatgatccccgcccctgttcctttctgttattttttcttagatataagttttacattttttattccttttcctctttttttggttttgattggtttggtttgagggagagttggggtc

SEQ ID NO: 656833 - DNA, 120 bp, Artificial Sequence
  ENSG00000183779_19 (sequence is synthesized)
tttgggttcttctagacgttttgttttcccttcctggggagtttcttgcatgagtcttaacttaaaactacgtttccgccttctctttttccctcttcccccttcattccctcttgtttc

SEQ ID NO: 656834 - DNA, 120 bp, Artificial Sequence
  ENSG00000183779_20 (sequence is synthesized)
ttttttgttttgttttgttttgttttttcctttgttgtacaagtaacagagaggaggttttttttgtaactcattttgggggtggagggggccacctgggtggcaggggccctggagctc

SEQ ID NO: 656835 - DNA, 120 bp, Artificial Sequence
  ENSG00000183779_21 (sequence is synthesized)
tgggtggcaggggccctggagctctattgacctggtacactgctccgggactcctcccccgccaccctccgcgcatagggtccttggtctggaccctgccccccaaaagtagggccttgc

SEQ ID NO: 656836 - DNA, 120 bp, Artificial Sequence
  ENSG00000183779_22 (sequence is synthesized)
tcctctaccttgctctgagcacggagagccctgaccccaccagtaggctcgcccccagaagggcccaagtggccgtctaccgtcaccttccagactcccgcccctaacacccagtggcta

SEQ ID NO: 656837 - DNA, 120 bp, Artificial Sequence
  ENSG00000183779_23 (sequence is synthesized)
cagtgcgcctgtcggggcacctggagcgctcacctggttgaattcaaagtcccagaaggccccgctggcgtgaagccggccccttacattttgcgaagtgcattatagtccttgtttttc

SEQ ID NO: 656838 - DNA, 120 bp, Artificial Sequence
  ENSG00000183779_24 (sequence is synthesized)
tctccctcgtgggggcaacgacccctcccctggcagtaggggtggggtaggtgactctcgctagatccctccaaagcagaccggtggcgatgtcagcggatgtcacgagctcgttagctg

SEQ ID NO: 656839 - DNA, 120 bp, Artificial Sequence
  ENSG00000183779_25 (sequence is synthesized)
cgttcggggaaggttggggcgtcagggagctctcggatcacagcagcccccgccctctcctaggcctggcccggcagagcccccagagtggaccccccagcgactggggtcttctcccca

SEQ ID NO: 656840 - DNA, 120 bp, Artificial Sequence
  ENSG00000183779_26 (sequence is synthesized)
ctcctccctccttctggtctgatgcggcagcgcgggggctgcggggcctgtttgggacgaacagagctctcccttggtaagacttattttgttaataaatggaatacttggctatattca

SEQ ID NO: 656841 - DNA, 120 bp, Artificial Sequence
  ENSG00000183780_0 (sequence is synthesized)
gacccgacgcctccccgcccgaccaggtgcctcgagagcgcacagctgggagggctctcccggtcgcggcgagactcacgcctgcggtgtgctagggcggcggcgacggtgacgggcgtg

SEQ ID NO: 656842 - DNA, 120 bp, Artificial Sequence
  ENSG00000183780_1 (sequence is synthesized)
gggtcgttgcggcgagcgcgcgggccggcctggagtcaccgggctgaaccgccgcgcctgcatcgtgccgcacgccgcggaggcgctcgggtacagaccgcgcgggcgcgcacaaagcgg

SEQ ID NO: 656843 - DNA, 120 bp, Artificial Sequence
  ENSG00000183780_2 (sequence is synthesized)
gctcgggtacagaccgcgcgggcgcgcacaaagcggcccggggcggccggcgcggcgcagaccctcggtgggcagcgcactccagtcttcccaggctagcggctgcagggagctccggcc

SEQ ID NO: 656844 - DNA, 120 bp, Artificial Sequence
  ENSG00000183780_3 (sequence is synthesized)
gcctcaagtctgggagctgccggtcccactctgtctttgcctatggggattcgagagtttcccagcggcgcacccaggggcaagagcattgccgttggcatgaggaggtcaccggacgtc

SEQ ID NO: 656845 - DNA, 120 bp, Artificial Sequence
  ENSG00000183780_4 (sequence is synthesized)
agcccccggagactgtccgacatcagcccccagctccggcagctcaagtacttggtggtggacgaggcgattaaggaggatctgaaatggtcgcgctccgtggaggatctcaccagcggg

SEQ ID NO: 656846 - DNA, 120 bp, Artificial Sequence
  ENSG00000183780_5 (sequence is synthesized)
ccggtggggctcacgtccatcgaggagcggatcctgcgcatcactggctactatggctaccagccctgggcagcgagctgcaaaagggaggagcgcccccgggactccccgggcccggcg

SEQ ID NO: 656847 - DNA, 120 bp, Artificial Sequence
  ENSG00000183780_6 (sequence is synthesized)
gaggcccaggcaccggccggggtggaggccggcgggagagcgagtcgccgctgctggacgtgctcccgggcgcaactcaagaagatcttctggggcgtggcggtcgtgctgtgcgtgtgc

SEQ ID NO: 656848 - DNA, 120 bp, Artificial Sequence
  ENSG00000183780_7 (sequence is synthesized)
tcctcgtgggcgggctccacgcagctcgccaagctgaccttcaggaagttcgacgcgcccttcaccctcacgtggtttgccaccaactggaactttttattcttcccgttgtactacgtg

SEQ ID NO: 656849 - DNA, 120 bp, Artificial Sequence
  ENSG00000183780_8 (sequence is synthesized)
gggcacgtctgcaagtccacagagaagcagtctgtgaagcagcgatacagggaatgctgtcgattttttggagacaatggcttgactttgaaggtgttttttaccaaggcagcacccttt

SEQ ID NO: 656850 - DNA, 120 bp, Artificial Sequence
  ENSG00000183780_9 (sequence is synthesized)
ggtgttctttggacactcacaaactacctgtacttacatgcaataaagaaaataaacactacggatgtctccgtgttgttctgctgcaacaaagcttttgtgttcttgctctcatggatc

SEQ ID NO: 656851 - DNA, 120 bp, Artificial Sequence
  ENSG00000183780_10 (sequence is synthesized)
gttctcagggacagattcatgggagtgaggattgtggccgccatcctcgccatcgctggcattgtgatgatgacctacgctgatggcttccacagccactccgtcatcggcatcgcactg

SEQ ID NO: 656852 - DNA, 120 bp, Artificial Sequence
  ENSG00000183780_11 (sequence is synthesized)
gtggtggcctcagcatcgatgtctgccctctacaaggttttgttcaagctcctcctgggcagtgctaagtttggagaagccgccttatttttgtccatcttgggtgtgtttaacatcctc

SEQ ID NO: 656853 - DNA, 120 bp, Artificial Sequence
  ENSG00000183780_12 (sequence is synthesized)
ttcatcacctgcattcctattatcctctactttaccaaagtggaatactggagctcttttgatgacattccatggggaaacctttgtggattttcagttcttttattgacattcaatatt

SEQ ID NO: 656854 - DNA, 120 bp, Artificial Sequence
  ENSG00000183780_13 (sequence is synthesized)
tacatatcccactctgatgtctcttggaatcgtcctcagcatacctgtgaatgcagtgattgatcactacaccagtcagatcgtcttcaatggggtccgggtcatcgccatcatcatcat

SEQ ID NO: 656855 - DNA, 120 bp, Artificial Sequence
  ENSG00000183780_14 (sequence is synthesized)
cggcctgggttttctcctcctgctcctgccagaggagtgggatgtctggttgatcaagctgctcacccgactcaaagtgaggaagaaggaggagcctgcagagggcgctgccgacctgag

SEQ ID NO: 656856 - DNA, 120 bp, Artificial Sequence
  ENSG00000183780_15 (sequence is synthesized)
ctcaggacctcagagcaagaacagaagagcccgcccttccttcgcccgctaacaccactcctctagaactcggtggtaatgactgggaggtctattcctgccgggaggaacctcagttgg

SEQ ID NO: 656857 - DNA, 120 bp, Artificial Sequence
  ENSG00000183780_16 (sequence is synthesized)
gtaaggtgtacatacctgtacagttttggtcatctgcggtaagttctatggtatttattggcatgtccaatttgcttgcacttttccacatcagaccttccacttaagggtaccaattca

SEQ ID NO: 656858 - DNA, 120 bp, Artificial Sequence
  ENSG00000183780_17 (sequence is synthesized)
atacaaaagagaaaagaagaacctctcagtgcttttccaacgaatgtaaagtgggtttaaaagttccctgcgtagatcgttttggatggctgacgttcttgacaagccagccatcagggc

SEQ ID NO: 656859 - DNA, 120 bp, Artificial Sequence
  ENSG00000183780_18 (sequence is synthesized)
aagtgttttgaatcttagcaagtgttttgaatcttagcaactgaacatgacattgcacactgtgattatttttcagctatggtaggtcatattttgttttataccagagctgtactctta

SEQ ID NO: 656860 - DNA, 120 bp, Artificial Sequence
  ENSG00000183780_19 (sequence is synthesized)
attttaaggaatttcaatgaaccaaaagataactgtcaatttatttggatggatggatggagggatggaaggagggagggaaggatgtctgggatgtgaagaggcaaggcagaaatggat

SEQ ID NO: 656861 - DNA, 120 bp, Artificial Sequence
  ENSG00000183780_20 (sequence is synthesized)
gatgaacatcaaaaactgtcagaggacaggtctgtgccaggtaccaggaaggacaagataagtccaagccccggctggcctgctctcacgtgtctgtgtaagatcatgcaagagaaatca

SEQ ID NO: 656862 - DNA, 120 bp, Artificial Sequence
  ENSG00000183780_21 (sequence is synthesized)
cagtgccttctacagaattttcgtctttacctatgtgaagcgaggtgacgtgatacgtcactggcgccgtcttataatttagatgtaaaaatctttagaaacaaataaaactctctatat

SEQ ID NO: 656863 - DNA, 120 bp, Artificial Sequence
  ENSG00000183780_22 (sequence is synthesized)
atgtgtatgtctgtgtacaaaaaaatgacagagctgatggccagtgtatacagagcgtggcccgcggtgtacaatacccatataaggtacattgtgcaggaggggaattgctggctgctt

SEQ ID NO: 656864 - DNA, 120 bp, Artificial Sequence
  ENSG00000183780_23 (sequence is synthesized)
ttacttcctgaccaagactgaaaaattatttactgaaatctgtaaacctttttatgaaacttttaagcaccaggctgtttacttacacaatttaggtctgccagaaaattctatctgtga

SEQ ID NO: 656865 - DNA, 120 bp, Artificial Sequence
  ENSG00000183780_24 (sequence is synthesized)
tagatctgtaaagagggtcaggggttagagtttactatttttgaagtttacattgttacatatgaaatggaaacattattttgaaacgttgtcataacccaatggtgcattctgtaacca

SEQ ID NO: 656866 - DNA, 120 bp, Artificial Sequence
  ENSG00000183780_25 (sequence is synthesized)
tggagtcttctgtttcctgggggaaaggggcattcatgacctgaactttttagcaaattattattctcagtttccattacctgtttggccaaacagattaataaaatatttgaaaaagaa

SEQ ID NO: 656867 - DNA, 80 bp, Artificial Sequence
  ENSG00000183780_26 (sequence is synthesized)
ggctgcgcggccggggaggatgtgcgctgcagggcggccgccgcagtgagcaacgcggcaaccggagcccggcgggcagc

SEQ ID NO: 656868 - DNA, 120 bp, Artificial Sequence
  ENSG00000183780_27 (sequence is synthesized)
cccggcggcagagggccgcgtcggccacgggcccgggagagacgcgctccagccggccccaggatgtaggcgatcggcggcagcgctcctgcaggcggccggctcatcatgaagaagcac

SEQ ID NO: 656869 - DNA, 120 bp, Artificial Sequence
  ENSG00000183783_0 (sequence is synthesized)
acacttccccgccctcgccccaaaggagcagcagctccttcttgcctctccattgccgccgccgcaccggcggagctcctctctcgcgcgtctctcctccgatggagctcgggcgccgcc

SEQ ID NO: 656870 - DNA, 120 bp, Artificial Sequence
  ENSG00000183783_1 (sequence is synthesized)
cgctgccccgaaccctgagcggggccgccccggtcggaggaacgcgccgcccagtccgagggcgcagagcgccaggagcacgcggagggctggggcgcgggctccgggaacgagaaagtg

SEQ ID NO: 656871 - DNA, 120 bp, Artificial Sequence
  ENSG00000183783_2 (sequence is synthesized)
agaaagtgcagctctctcgggtcactgggccggcggcggggggactatggctctgaaggacacgggcagcggcggcagcaccatcctgcccattagcgagatggtttcctcgtccagctc

SEQ ID NO: 656872 - DNA, 120 bp, Artificial Sequence
  ENSG00000183783_3 (sequence is synthesized)
gcccggcgcgtcggccgccgccgccccggggccctgcgcaccctcgcccttccctgaagtagtggagctgaacgtaggcggccaggtttatgtgaccaagcactcgacgctgctcagcgt

SEQ ID NO: 656873 - DNA, 120 bp, Artificial Sequence
  ENSG00000183783_4 (sequence is synthesized)
cccggacagtactttggccagcatgttctcgccctctagtccccgtggcggcgcccggcgccggggcgagctgcccagggacagccgggcgcgcttcttcatcgaccgggacggcttcct

SEQ ID NO: 656874 - DNA, 120 bp, Artificial Sequence
  ENSG00000183783_5 (sequence is synthesized)
tttcaggtacgtgctggattatctgcgggacaagcaactcgcgctgccggagcacttccccgagaaggagcggctgctgcgcgaggccgagtatttccagctcaccgacttggtcaagct

SEQ ID NO: 656875 - DNA, 120 bp, Artificial Sequence
  ENSG00000183783_6 (sequence is synthesized)
gctgtcgcccaaggtcaccaagcagaactctctcaacgacgagggctgccagagcgacctggaggacaacgtctcgcagggtagcagcgacgcgctgctgctgcgcggggcggcggccgc

SEQ ID NO: 656876 - DNA, 120 bp, Artificial Sequence
  ENSG00000183783_7 (sequence is synthesized)
cgtgccctcgggcccgggagcgcacggtggtggcggcggcggcggcgcgcaggacaagcgctcgggcttcctcacgctgggctaccggggctcctacaccaccgtgcgcgacaaccaggc

SEQ ID NO: 656877 - DNA, 120 bp, Artificial Sequence
  ENSG00000183783_8 (sequence is synthesized)
cgacgccaaattccggcgtgtggcgcgcatcatggtgtgcgggcgcatcgcgctggccaaggaggtcttcggggacacgctcaacgagagccgcgaccccgaccggcagccggagaagta

SEQ ID NO: 656878 - DNA, 120 bp, Artificial Sequence
  ENSG00000183783_9 (sequence is synthesized)
cacgtcccgcttctacctcaagttcacctacttggagcaggcctttgatcgcctgtccgaggccggcttccacatggtggcgtgtaactcctcgggcaccgccgccttcgtcaaccagta

SEQ ID NO: 656879 - DNA, 120 bp, Artificial Sequence
  ENSG00000183783_10 (sequence is synthesized)
acaagaacatgaagataggaaacatgacaaagtcactgataaaggaagtgaaagtgggacttcctgtaatgagctctccacttccagttgtgacagccattcagaggcaagcactcccca

SEQ ID NO: 656880 - DNA, 120 bp, Artificial Sequence
  ENSG00000183783_11 (sequence is synthesized)
ggacaacccatccagtgcccagcaggcaacagctcaccaacctaacactttaacattggatcgcccctctaaaaaagcacctgtacaatggatacccccaccagacaaacgcagaaacag

SEQ ID NO: 656881 - DNA, 120 bp, Artificial Sequence
  ENSG00000183783_12 (sequence is synthesized)
tgaactctttcagaccctcatcagcaagtcccgggaaacaaatctgtccaaaaagaaagtctgtgagaagctaagtgtggaagaagaaatgaaaaagtgtattcaggattttaaaaaaat

SEQ ID NO: 656882 - DNA, 120 bp, Artificial Sequence
  ENSG00000183783_13 (sequence is synthesized)
ccacattccagattattttccagagcgcaaacgccaatggcaatctgaactgttgcagaagtatgggttatagtaattgtcacattcctgcagtattttgatgacattcaatgtttacta

SEQ ID NO: 656883 - DNA, 120 bp, Artificial Sequence
  ENSG00000183783_14 (sequence is synthesized)
cagtgtcaccacctgactgatgtcctaacaatggtcagtgtgattcttgctgctcttccttgttgtgaacagtggatgtgggacagtattttcttttatgttttagttgttgttcttttt

SEQ ID NO: 656884 - DNA, 120 bp, Artificial Sequence
  ENSG00000183783_15 (sequence is synthesized)
agaaacatgattaaaaaggaaaaaatattaaatcaataagtgttaaatcaaaatggaatatctgattcaaaccattttacaagaatgaaagtaaaatgtgcatgatcaagcttagtatct

SEQ ID NO: 656885 - DNA, 120 bp, Artificial Sequence
  ENSG00000183783_16 (sequence is synthesized)
tggtttttgaactctggtcaactggatatgtttgtcattttgtaacttaccaaaaacaaaccatcatatcataccaactaaaatgatatatggatgaagcaacatcaagtaaaattttag

SEQ ID NO: 656886 - DNA, 120 bp, Artificial Sequence
  ENSG00000183783_17 (sequence is synthesized)
acgatggctataggacccaaatctaaagctgtctaaatgttaattcaatgaaacaagtattatttttgcatgaatacaatgttacaaataaatcacaagaaatagggaagatctgtttgt

SEQ ID NO: 656887 - DNA, 120 bp, Artificial Sequence
  ENSG00000183783_18 (sequence is synthesized)
aaaaaattacaaaaaaaagcaaaaaaaaatgttttagacaaagcctataaatgtaagctgtctaggagattgaattttctttgttctggatctgtgacttttttgtgtatgtgtatggtg

SEQ ID NO: 656888 - DNA, 120 bp, Artificial Sequence
  ENSG00000183783_19 (sequence is synthesized)
atgtgtatggtgtttatgtatattaagatggtgtaaatatgccttatactgttatttatggcatcaacattcatttactaatgctagtcatgattattactgtgaaatgagtcttacatc

SEQ ID NO: 656889 - DNA, 120 bp, Artificial Sequence
  ENSG00000183783_20 (sequence is synthesized)
gggctgtgaaaattggtataatgatgctttgaaagatcctattatcatgttaatcaaaataatagagggaaatggtaaagagctttatgtatttattaaaaaaagaaaaatgtattagaa

SEQ ID NO: 656890 - DNA, 120 bp, Artificial Sequence
  ENSG00000183783_21 (sequence is synthesized)
agtaccgcgacgacaagatctggagcagctacaccgagtacattttcttccgttctctgacgatgtctttgtgctcaatcttacgtttgaatatatggctatttatgattgcttgccaga

SEQ ID NO: 656891 - DNA, 120 bp, Artificial Sequence
  ENSG00000183784_0 (sequence is synthesized)
attatcttttaactagacagtctagctttctcagggcaagacaaaaatgtcccaattacttgtcagcagtttttagtggaggaaaaactgcagttaaagcacctttactgagaactttga

SEQ ID NO: 656892 - DNA, 120 bp, Artificial Sequence
  ENSG00000183784_1 (sequence is synthesized)
gcagtaaatgtgcttacatatttagtttgtgcaactttgattaggaattggatggtgagttgggatcccccagtccttagctttttgctggagttctgtaaatctcaaaatgtcagccac

SEQ ID NO: 656893 - DNA, 120 bp, Artificial Sequence
  ENSG00000183784_2 (sequence is synthesized)
aggccatttcttttggtttatttaagtgtagattttttaaaaaatcactttttccacttcatggctcctttggaccagggtataaaaatagcgatgccaccaggagccaagctctttctg

SEQ ID NO: 656894 - DNA, 120 bp, Artificial Sequence
  ENSG00000183784_3 (sequence is synthesized)
gaataatgaagcaggcgaggacggagccttgctcaggacgacagaaggcttgcagcctgcctcaaacgcaactctaatttcagccacttcacttcttccccccgcgctcagacttgcctc

SEQ ID NO: 656895 - DNA, 120 bp, Artificial Sequence
  ENSG00000183784_4 (sequence is synthesized)
aaaggaaggagccgtttatgagacactccgtggcgcgcccaacacggttacccaggcgcctatcacccttctgggacccggccacctgtaagaacctggagggcggagcgggcgaggttg

SEQ ID NO: 656896 - DNA, 120 bp, Artificial Sequence
  ENSG00000183784_5 (sequence is synthesized)
ttcggggaagggatccccggcggctgaggacatccaggagcaccgagattcttggggaggacctcgccgggcccagcgcaggagccgccgcgcgtccagcggctccaccgccgcagcctc

SEQ ID NO: 656897 - DNA, 120 bp, Artificial Sequence
  ENSG00000183784_6 (sequence is synthesized)
gggaaccgggcgccccaggtctcaggcgcgccccgccgcggacgcgaatggactcgtccggcctcggcccctgcagcgaagctccgcttcacaccagcgctgggctgtccggccgcaacc

SEQ ID NO: 656898 - DNA, 120 bp, Artificial Sequence
  ENSG00000183784_7 (sequence is synthesized)
tgcgcgccgcggggggcgtcttacctgttgatcttgagcgcgaacgcgcggcgctctgcgctcggcagagtggccatggcccgccggcggttcggtggcttctagggtcgcggggtgcgg

SEQ ID NO: 656899 - DNA, 120 bp, Artificial Sequence
  ENSG00000183784_8 (sequence is synthesized)
aaagcgggggcctggcgcgccgcagagtagccgcggaacatgcccagccaagcgcaaacctcgtctgtcggtcggcgctggaaacttccgcatttccaccttctaagccgaaatcacccc

SEQ ID NO: 656900 - DNA, 120 bp, Artificial Sequence
  ENSG00000183784_9 (sequence is synthesized)
gagggtccgagctcggagcagcgacggccggctccgccacccggcctggcgcgcaggcagcggcgggcgaggagggcgtgggcccagcgcggaactggcctcccgatactggggcagacg

SEQ ID NO: 656901 - DNA, 120 bp, Artificial Sequence
  ENSG00000183784_10 (sequence is synthesized)
gacggcgcgctctgcccggggccgccgacctccggccgaagggagcgcgggcggacgacaggcgaccactgcgcgcaggccggaagctccatctgcccgaagctgcgaggctgccaggga

SEQ ID NO: 656902 - DNA, 120 bp, Artificial Sequence
  ENSG00000183784_11 (sequence is synthesized)
aaagctggcgaggtcgggaatcaccccagggattcgtaaggctaggtgttattaagggttgacaccattctcgaagaaggcagccaaaaaaaaagacaaaaaagttagtggaatctatca

SEQ ID NO: 656903 - DNA, 120 bp, Artificial Sequence
  ENSG00000183784_12 (sequence is synthesized)
ggattcaaatcaacttttgcaagcaatatgcccatcatccttcctgagacactaaataaatataatggattcatccaaggaataaacattatgagttctcaaaaaatgttttcgtcacaa

SEQ ID NO: 656904 - DNA, 120 bp, Artificial Sequence
  ENSG00000183784_13 (sequence is synthesized)
cctggcgtgaatgcttttctccggagaaacactgaaggcggcgttcttgcgattcaagggtacgctgcgtccaggtttatttcagtttcagactgaggtctgctaagaagcccggcctca

SEQ ID NO: 656905 - DNA, 120 bp, Artificial Sequence
  ENSG00000183784_14 (sequence is synthesized)
aactcaagataaaaacagaaaagtcccagtgttgacgggagtggaggagcccgtgttcgcttcaaggtgccggcgtgctgctctaacctgtgctatatatactcgagcactctccatata

SEQ ID NO: 656906 - DNA, 80 bp, Artificial Sequence
  ENSG00000183784_15 (sequence is synthesized)
ctctaacctgtgctatatatactcgagcactctccatataatgcctccatttaccaacttgctcttaaaaaataccaaag

SEQ ID NO: 656907 - DNA, 120 bp, Artificial Sequence
  ENSG00000183784_16 (sequence is synthesized)
actgcactccagcctggcgacagagcaagtctccgtctaaaagaaaaaaaaaaaaacaaccaaagcgaagtatttttggttcaaacctgcactatttaatatgatagccactagccacat

SEQ ID NO: 656908 - DNA, 120 bp, Artificial Sequence
  ENSG00000183784_17 (sequence is synthesized)
tcaaacctgcactatttaatatgatagccactagccacatgtggctattgaccactcggcattatggttagtctgaattgcccactgctggatgtgtaaaatgtacactggaatttaaag

SEQ ID NO: 656909 - DNA, 120 bp, Artificial Sequence
  ENSG00000183784_18 (sequence is synthesized)
acagcgcagaaaacatcgtgtaaaatgtcttgttaatgattttcatgttgattgcatgttaaatgatactttggatataaaaaatatattattaaagttaatttcacctgtttgttttcc

SEQ ID NO: 656910 - DNA, 120 bp, Artificial Sequence
  ENSG00000183784_19 (sequence is synthesized)
ccttttaaaaatgtggtttgcatttttaaaaatgtaaaattacacatgtggctcacatttgtgagcctcattatattcctattggacagtgccagtccaatacaacctaatttgtcacct

SEQ ID NO: 656911 - DNA, 120 bp, Artificial Sequence
  ENSG00000183784_20 (sequence is synthesized)
aatactaaaatccacctaaggactatattcagtctcttcctgatacagccttccttcctggtttcagctgtgtcaggtagtttagtaacttttcagtactggttaggtaactccccgccc

SEQ ID NO: 656912 - DNA, 120 bp, Artificial Sequence
  ENSG00000183784_21 (sequence is synthesized)
cccaatgcccaccaaatatcagtgcccttttaagcatataagacaaagttcactgcatagactacaatagactacatacgaaaacaaacccaaagaaaaataaagcttttttgaaattta

SEQ ID NO: 656913 - DNA, 120 bp, Artificial Sequence
  ENSG00000183784_22 (sequence is synthesized)
ttatgagcaaacatttggatagcaaaatacaaagagaacaaatgtgtaagtacttcttcaaactgagactcaacgaatgatacatagaaaacattttgccccagaggcttcggtccacgg

SEQ ID NO: 656914 - DNA, 120 bp, Artificial Sequence
  ENSG00000183784_23 (sequence is synthesized)
tgtaccatgtcagcctttcggatgaactcctctgaatttctgaatgtttatgacatacattttcatatagaacaaaaatatactggtttcacacaaacataaataaaatgtaatgaaagc

SEQ ID NO: 656915 - DNA, 120 bp, Artificial Sequence
  ENSG00000183785_0 (sequence is synthesized)
agcagtcggggcgggcaggcccagctgagaggtgcgcgggcgaggacagcggcagcgatgcgggaatgcatatcagtccacgtgggccaagcgggagttcagattggcaatgcctgctgg

SEQ ID NO: 656916 - DNA, 120 bp, Artificial Sequence
  ENSG00000183785_1 (sequence is synthesized)
gagctcttctgcctggaacacggcatccaggcagacggcacttttgatgctcaagctagcaagatcaacgatgatgactccttcaccacctttttcagcgagactggcaatgggaagcat

SEQ ID NO: 656917 - DNA, 120 bp, Artificial Sequence
  ENSG00000183785_2 (sequence is synthesized)
gtgccccgggccgtcatgatagatctggagcctactgtagtggatgaggttcgggcaggaacctaccgccagctcttccatccagagcagctgatcacaggaaaggaggatgcagccaac

SEQ ID NO: 656918 - DNA, 120 bp, Artificial Sequence
  ENSG00000183785_3 (sequence is synthesized)
aactatgcccggggccactacacggtgggcaaggagagcattgacctggtgctggaccgcatacggaagctgacagatgcttgctctggcctgcagggcttcctgattttccacagtttt

SEQ ID NO: 656919 - DNA, 120 bp, Artificial Sequence
  ENSG00000183785_4 (sequence is synthesized)
ggtgggggcactggctccggcttcacttctctgctgatggaacgcctctccctggattatggcaagaaatccaagctggagtttgccatctacccagccccccaggtctctactgcagtg

SEQ ID NO: 656920 - DNA, 120 bp, Artificial Sequence
  ENSG00000183785_5 (sequence is synthesized)
gtggagccctacaactccatcctgaccacccacaccacactggaacattcagattgtgctttcatggtggacaacgaagccatctatgacatctgccgcaggaaccttgacattgagcgc

SEQ ID NO: 656921 - DNA, 120 bp, Artificial Sequence
  ENSG00000183785_6 (sequence is synthesized)
cctacctataccaacctcaaccgcctcatcagtcagattgtgtcctcaatcactgcttctctccgctttgacggggccctcaatgtggacctcactgagttccagaccaacctggtgccc

SEQ ID NO: 656922 - DNA, 120 bp, Artificial Sequence
  ENSG00000183785_7 (sequence is synthesized)
tacccccgcatccacttcccgctggtcacctacgcgcccatcatctctgccgagaaagcctatcacgaacagctctctgtggccgagataaccagctcctgctttgagcccaacagccag

SEQ ID NO: 656923 - DNA, 120 bp, Artificial Sequence
  ENSG00000183785_8 (sequence is synthesized)
tgtcgctattgctgccatcaagaccaagaggaccatccagtttgtagactggtgtcccacaggcttcaaggtgggcatcaactaccagcccccgaccgtggtccccgggggagacctggc

SEQ ID NO: 656924 - DNA, 120 bp, Artificial Sequence
  ENSG00000183785_9 (sequence is synthesized)
caaggtgcagcgggccgtctgcatgctcagcaacaccacggccattgcggaggcctgggcccgcctcgaccacaagttcgacctcatgtacgccaagcgggcctttgtgcattggtatgt

SEQ ID NO: 656925 - DNA, 120 bp, Artificial Sequence
  ENSG00000183785_10 (sequence is synthesized)
gggagaggggatggaagaaggagaattttctgaggccagggaagacttagctgccctggagaaggattatgaagaagtggggactgattcgtttgaagaagaaaatgaaggggaggaatt

SEQ ID NO: 656926 - DNA, 120 bp, Artificial Sequence
  ENSG00000183785_11 (sequence is synthesized)
ttaaatatataccttccccttggctgtgtctctttatttatgctgtgccattcaaagcacatgttcaagagaacagaacactctccccgccccagcctgattcctgccttacccaggagg

SEQ ID NO: 656927 - DNA, 120 bp, Artificial Sequence
  ENSG00000183785_12 (sequence is synthesized)
agggtgcctggccccagtacccagggtggcacgactgggctaagtggacactgagcttcatcaggccctccctgggtaggagcagctttgtgtcactaaagaaagtgagggccactgtct

SEQ ID NO: 656928 - DNA, 120 bp, Artificial Sequence
  ENSG00000183785_13 (sequence is synthesized)
ccggcgggtgaggctgcagcccagtttcacatgcgaggaggcctaatcaggagtttcaattccagatcgggctgggtccagccccaaaacatggcctgctggctggggagtgggaacact

SEQ ID NO: 656929 - DNA, 120 bp, Artificial Sequence
  ENSG00000183785_14 (sequence is synthesized)
cagagaaaggggagatctgggcctgggaagattccggggcaggggtgagcggacgttcacatgagtgggtctatagcccgctccgggcatcatctagacttagcatgcattcactccccc

SEQ ID NO: 656930 - DNA, 120 bp, Artificial Sequence
  ENSG00000183785_15 (sequence is synthesized)
atcacatattccaatacacaccctgtcctaggcactgagagctggagagttggtgataagcgagacgaacacatttcctgccctcatacacacataaataaagtgaatgagatcatgtca

SEQ ID NO: 656931 - DNA, 120 bp, Artificial Sequence
  ENSG00000183785_16 (sequence is synthesized)
tttgtgacctgcccgcccctccccggcactgtgatgccggggggcagctgcgggcccggcgcgcctgtccccggcgtccccccctcccggtgtgtcacaacggcggaggcggctgtatct

SEQ ID NO: 656932 - DNA, 120 bp, Artificial Sequence
  ENSG00000183785_17 (sequence is synthesized)
tccggttactgaccttcgatgggaacagcacagaagtgataccgcgctggctccactctgtcctctggtggcacgcaattccagtgttccccgcactgatgactttcttgtaccgaatat

SEQ ID NO: 656933 - DNA, 120 bp, Artificial Sequence
  ENSG00000183785_18 (sequence is synthesized)
ttacattaattacattctttatagttataatgtaatattacatatgagaccatggggttcatctgattaggtctgcccaatttagcctgccctgcttgctttgggtcacttgcttttgtt

SEQ ID NO: 656934 - DNA, 120 bp, Artificial Sequence
  ENSG00000183785_19 (sequence is synthesized)
attttttttctgtgaagctgaaggccgcgccactgagcgctgtaacttaaccttgccggcttccttacagataacatgtatgtcactactgtcatgatcgttcaaattgtttttcaggaa

SEQ ID NO: 656935 - DNA, 120 bp, Artificial Sequence
  ENSG00000183785_20 (sequence is synthesized)
cttggggcagctcctgcctagttcaaaccagttgagaccgtgagctttcaagtaggcttgtgcaaacaaaagaagtggccttttgacatcagaggccccaagcgacaccctcagatcacg

SEQ ID NO: 656936 - DNA, 120 bp, Artificial Sequence
  ENSG00000183785_21 (sequence is synthesized)
ctaaggctgtcattttttgaacatgtgccctgtgaagtgccacgaaccctgactatgcttgcagtggtcaccgactgcctcattttcccccactgccaatcacctttgcccataccttac

SEQ ID NO: 656937 - DNA, 120 bp, Artificial Sequence
  ENSG00000183785_22 (sequence is synthesized)
accaccctgcttctctcaccggtaaatatccctaagacttatctttggggaggaagatttgagagctgttctcctgcctcctcactgggctgccttgcgaataaatcttttctcttttac

SEQ ID NO: 656938 - DNA, 120 bp, Artificial Sequence
  ENSG00000183785_23 (sequence is synthesized)
ggcgtaggctgaaggagagtttctgccatgatcgccagttcttccttgggccttcttcaccagtgcaggaatcttgtggtttggaattagccccttgcttcatctttgcaaccaccctcc

SEQ ID NO: 656939 - DNA, 120 bp, Artificial Sequence
  ENSG00000183785_24 (sequence is synthesized)
ttttttctttcctggtataaaaggtcaaccctgggaagcaacctttagagcaaagcacaaaacagctgtgtcttctttggatctaagtcctggtccagctgctatagagctggggcacct

SEQ ID NO: 656940 - DNA, 120 bp, Artificial Sequence
  ENSG00000183785_25 (sequence is synthesized)
gcagcctcaacgccaactggcaatggggggctggggcctggctggcctgcaaggtgaatgttatggggatgtagggcaaaggcatgctgggggcccagactctctgacctcgttgcttcc

SEQ ID NO: 656941 - DNA, 120 bp, Artificial Sequence
  ENSG00000183785_26 (sequence is synthesized)
agcttgccaagcacacacggccctagggcgcccagctgagacggcaccttggcacccgggcccgctgcagcccgctccggtcagctgcaccccagtcaggagcctttccagcgggtcgga

SEQ ID NO: 656942 - DNA, 120 bp, Artificial Sequence
  ENSG00000183785_27 (sequence is synthesized)
ggagaacggaagtttggggagacccgcgcgattcgcctggctgcattttacatttctttctccggcagctggggtcacgaaggctgctctcgccggcggtgttggaacgtggacacgtgc

SEQ ID NO: 656943 - DNA, 120 bp, Artificial Sequence
  ENSG00000183791_0 (sequence is synthesized)
acatcccgaggaacagaagcgggcctgctcagctgtctgcaaggaccggcgttccagaccaagtggcccgctgctccgaggacccagctcgctccaggctgtgactccacatcccgaggt

SEQ ID NO: 656944 - DNA, 120 bp, Artificial Sequence
  ENSG00000183791_1 (sequence is synthesized)
cgccgcctggcgaccgggcagcgaggaccggccaccccagactgcctgtgccgccgccccgagctcggacagagccgcgaccgcgaggacagcgacgcctgcacagctctggcgagatgg

SEQ ID NO: 656945 - DNA, 120 bp, Artificial Sequence
  ENSG00000183791_2 (sequence is synthesized)
cggcagggtccactacgctgcgcgcagtggggaagctgcaggtgcgtctggccactaagacggagccgaaaaagctagagaaatatttgcagaaactctccgccttgcccatgaccgcag

SEQ ID NO: 656946 - DNA, 120 bp, Artificial Sequence
  ENSG00000183791_3 (sequence is synthesized)
acatcctggcggagactggaatcagaaagacggtgaagcgcctgcggaagcaccagcacgtgggcgactttgccagagacttagcggcccggtggaagaagctggtgctcgtggaccgaa

SEQ ID NO: 656947 - DNA, 120 bp, Artificial Sequence
  ENSG00000183791_4 (sequence is synthesized)
acaccgggcctgacccgcaggaccctgaggagagcgcttcccgacagcgcttcggggaggctcttcaggagcgggaaaaggcctggggcttcccagaaaacgcgacggcccccaggagcc

SEQ ID NO: 656948 - DNA, 120 bp, Artificial Sequence
  ENSG00000183791_5 (sequence is synthesized)
catctcacagccctgagcacagacggacagcacgcagaacacctccggggcaacagagacctcacccgaggtctcccagtcgcgagcccagagccgagagaaagcgccccagaatggccc

SEQ ID NO: 656949 - DNA, 120 bp, Artificial Sequence
  ENSG00000183791_6 (sequence is synthesized)
cagctgattccggcccccatcgggaccctccaacgcgcaccgctcccctcccgatgcccgagggccctgagcccgctgtgcccggggagcaacccggaagaggccacgctcacgccgctc

SEQ ID NO: 656950 - DNA, 120 bp, Artificial Sequence
  ENSG00000183791_7 (sequence is synthesized)
aaatcgtcccgcggggcttcggctcagaaatcgcctcctgtccaggaaagccagtcagagaggctgcaggcggccgtcgctgattccgccgggccgaaaacggtgcccagccatgtcttc

SEQ ID NO: 656951 - DNA, 120 bp, Artificial Sequence
  ENSG00000183791_8 (sequence is synthesized)
tcggagctctgggacccctcagaggcctggatgcaggccaactacgatctgctgtccgcttttgaggccatgacctcccaggcaaacccagaagcactctccgcgccaacgctccaggag

SEQ ID NO: 656952 - DNA, 120 bp, Artificial Sequence
  ENSG00000183791_9 (sequence is synthesized)
gaagctgctttccctggacgcagagtgaacgctaagatgccggtgtactcgggctccaggcctgcctgccagctccaggtgccgacgctgcgccagcagtgcctccgggtgcctaggaac

SEQ ID NO: 656953 - DNA, 120 bp, Artificial Sequence
  ENSG00000183791_10 (sequence is synthesized)
aatccggacgccctcggcgacgtggaaggggtcccctactcggctcttgaacccgttctggaagggtggacgcccgatcagccgtaccgcacagagaaagacaatgccgcactcgctcga

SEQ ID NO: 656954 - DNA, 120 bp, Artificial Sequence
  ENSG00000183791_11 (sequence is synthesized)
gagacagatgaattatggaggattcattgcctccaggacttcaaggaagaaaagccacaggagcacgagtcttggcgggagctgtacctgcggcttcgggacgcccgagagcagcggctg

SEQ ID NO: 656955 - DNA, 120 bp, Artificial Sequence
  ENSG00000183791_12 (sequence is synthesized)
cgagtagtgaccacgaaaatccgatccgcacgtgaaaacaaacccagcggccgacagacaaagatgatctgtttcaactctgtggccaagacgccttatgatgcttccaggaggcaagag

SEQ ID NO: 656956 - DNA, 120 bp, Artificial Sequence
  ENSG00000183791_13 (sequence is synthesized)
aagtctgcaggagccgctgaccccggaaatggagagatggagccagcccccaagcccgcaggaagcagccaggctccctccggcctcggggacggcgacggcggcagcgtgagcggcggc

SEQ ID NO: 656957 - DNA, 120 bp, Artificial Sequence
  ENSG00000183791_14 (sequence is synthesized)
ggcagcagcaaccggcacgcggcgcccgcggacaaaacccgaaaacaggctgccaagaaagtggccccgctgatggccaaggcaattcgagactacaagggaagattctcccgacgataa

SEQ ID NO: 656958 - DNA, 84 bp, Artificial Sequence
  ENSG00000183793_0 (sequence is synthesized)
tactctggctgaccatcgtcatcgtgggactgactttggtggaagtccttggttacttatcattactgtgtttctgagaagtta

SEQ ID NO: 656959 - DNA, 79 bp, Artificial Sequence
  ENSG00000183793_1 (sequence is synthesized)
aggaggtccaactgccgtagacaggaaggaattaaaattgtcctggaagacatctttactttatggagacaggtggaaa

SEQ ID NO: 656960 - DNA, 86 bp, Artificial Sequence
  ENSG00000183793_2 (sequence is synthesized)
atcaatggaaagaggaagaccgccaaagaacatctgaggaaactaagcatgaaagaacgtgagcacggagaaaaggagaggcaggt

SEQ ID NO: 656961 - DNA, 88 bp, Artificial Sequence
  ENSG00000183793_3 (sequence is synthesized)
tggatatgaaagaaatacacacctacatggaaatgtttcaacgtgcgcaagcgttgcggcggcgggcagaggactactacagatgcaa

SEQ ID NO: 656962 - DNA, 120 bp, Artificial Sequence; identical to SEQ ID NO: 656361
  ENSG00000183795_0 (sequence is synthesized)

SEQ ID NO: 656963 - DNA, 120 bp, Artificial Sequence; identical to SEQ ID NO: 656362
  ENSG00000183795_1 (sequence is synthesized)

SEQ ID NO: 656964 - DNA, 120 bp, Artificial Sequence; identical to SEQ ID NO: 656363
  ENSG00000183795_2 (sequence is synthesized)

SEQ ID NO: 656965 - DNA, 120 bp, Artificial Sequence; identical to SEQ ID NO: 656364
  ENSG00000183795_3 (sequence is synthesized)

SEQ ID NO: 656966 - DNA, 120 bp, Artificial Sequence; identical to SEQ ID NO: 656365
  ENSG00000183795_4 (sequence is synthesized)

SEQ ID NO: 656967 - DNA, 120 bp, Artificial Sequence; identical to SEQ ID NO: 656366
  ENSG00000183795_5 (sequence is synthesized)

SEQ ID NO: 656968 - DNA, 120 bp, Artificial Sequence; identical to SEQ ID NO: 656367
  ENSG00000183795_6 (sequence is synthesized)

SEQ ID NO: 656969 - DNA, 120 bp, Artificial Sequence; identical to SEQ ID NO: 656368
  ENSG00000183795_7 (sequence is synthesized)

SEQ ID NO: 656970 - DNA, 120 bp, Artificial Sequence; identical to SEQ ID NO: 656369
  ENSG00000183795_8 (sequence is synthesized)

SEQ ID NO: 656971 - DNA, 120 bp, Artificial Sequence; identical to SEQ ID NO: 656370
  ENSG00000183795_9 (sequence is synthesized)

SEQ ID NO: 656972 - DNA, 120 bp, Artificial Sequence; identical to SEQ ID NO: 656371
  ENSG00000183795_10 (sequence is synthesized)

SEQ ID NO: 656973 - DNA, 120 bp, Artificial Sequence; identical to SEQ ID NO: 656372
  ENSG00000183795_11 (sequence is synthesized)

SEQ ID NO: 656974 - DNA, 80 bp, Artificial Sequence
  ENSG00000183798_0 (sequence is synthesized)
ccgggcagaggcgcgggggccgctatgggccgccgccgcctgctcgtctggctgtgcgccgtcgcggcgctgctctcggg

SEQ ID NO: 656975 - DNA, 120 bp, Artificial Sequence
  ENSG00000183798_1 (sequence is synthesized)
ccaggggcaccccgctcctggcgcggcctgcgccgcccggtgcctcccgctacagtctctacacgacgggatggcgcccgcggctgcgcccggggccgcacaaggccctctgtgcctatg

SEQ ID NO: 656976 - DNA, 120 bp, Artificial Sequence
  ENSG00000183798_2 (sequence is synthesized)
tgcctatgtggtgcacaggaatgtgacctgcatcctacaggagggagcggagagctacgtaaaggctgaataccggcagtgtagatgggggcccaagtgccccgggacagtcacgtaccg

SEQ ID NO: 656977 - DNA, 120 bp, Artificial Sequence
  ENSG00000183798_3 (sequence is synthesized)
cacagtactcagacccaaatacaaggttggctacaagacagtgacagacctcgcctggcgttgctgtcccggcttcactgggaaacgctgccctgagcacctcacggaccatggggctgc

SEQ ID NO: 656978 - DNA, 120 bp, Artificial Sequence
  ENSG00000183798_4 (sequence is synthesized)
ctcaccccagctggagcctgagcctcagattccttcagggcagctggacccaggccccaggcccccttcctacagcagagcagcccccagccctcatggaaggaaaggcccagggctgtt

SEQ ID NO: 656979 - DNA, 120 bp, Artificial Sequence
  ENSG00000183798_5 (sequence is synthesized)
tggtgagcggctggaacgcctggagggtgatgtccagcgcctggctcaaacatatggtaccctcagtggcctggtggctagccacgaggatcccaacaggatgactggtggccccagggc

SEQ ID NO: 656980 - DNA, 120 bp, Artificial Sequence
  ENSG00000183798_6 (sequence is synthesized)
tcctgctgtccctgtgggctttggggtcatccctgaggggcttgtgggcccaggagacagagccagagggccactaacacctcccttagacgagatcctaagcaaggtgacagaggtgag

SEQ ID NO: 656981 - DNA, 120 bp, Artificial Sequence
  ENSG00000183798_7 (sequence is synthesized)
caacactcttcagaccaaggtgcagcttctagacaaggtgcatgggctggcacttggccatgaggcccacctgcagcggctgcgggaagccccaccatccccgctcacctccctggccct

SEQ ID NO: 656982 - DNA, 120 bp, Artificial Sequence
  ENSG00000183798_8 (sequence is synthesized)
gctggaggagtacgtggaccgacggctgcaccgactctgggggagcctgctggatggctttgagcagaagctgcaaggcgtccagagtgagtgtgacctgcgggtgcaggaggtacggcg

SEQ ID NO: 656983 - DNA, 120 bp, Artificial Sequence
  ENSG00000183798_9 (sequence is synthesized)
gcaatgtgaggagggtcaggccgccagccggaggctgcaccagagccttgatggccgggagctggccctgcgccaggagctgtcacagctgggcagccagctgcagggcctgagcgtgtc

SEQ ID NO: 656984 - DNA, 120 bp, Artificial Sequence
  ENSG00000183798_10 (sequence is synthesized)
tggcaggggcagctgctgtgggcaactagccttgatcaatgcccgtatggatggccttgagagggccctgcaggcagtcaccgagacccaaaggggccccggtgccccggccggggatga

SEQ ID NO: 656985 - DNA, 120 bp, Artificial Sequence
  ENSG00000183798_11 (sequence is synthesized)
gcttacgaggctctctgctgccatgctcgagggaggtgtggacgggctgcttgagggtctggagacgctcaatgggacagagggtggagcaaggggatgctgtctgaggttggacatggg

SEQ ID NO: 656986 - DNA, 120 bp, Artificial Sequence
  ENSG00000183798_12 (sequence is synthesized)
ggggtggggagtgggcggctttgggaccatgctggaagagcgcgtgcagagcctcgaggagcgcctagcaacattggctggggagctaagccatgacagcgcctctccgggcaggtcagc

SEQ ID NO: 656987 - DNA, 120 bp, Artificial Sequence
  ENSG00000183798_13 (sequence is synthesized)
tcggccccttgtacagacagagctggctgtgctagagcaacggttggtctcactggagacttcgtgcaccccgagcaccacctcagccatcctggacagcctcgtggcagaggtgaaggc

SEQ ID NO: 656988 - DNA, 120 bp, Artificial Sequence
  ENSG00000183798_14 (sequence is synthesized)
gcactgtggccgaggtccagggacagctggcagaagggacgggcagctcacttcaaggcgagatcactctgctcaaggtcaatctgaactcagtgagcaagtcgctcacaggcctcagtg

SEQ ID NO: 656989 - DNA, 120 bp, Artificial Sequence
  ENSG00000183798_15 (sequence is synthesized)
actctgtcagccagtactctgatgccttcttggctgccaacacgtccctggatgagcgggaacgcaaggtggaagccgaagtccaggccatccaggagcaggtcagcagccaaggctcca

SEQ ID NO: 656990 - DNA, 120 bp, Artificial Sequence
  ENSG00000183798_16 (sequence is synthesized)
ggcttcaggctggccacaggcaggtcctgaacctgcgtggggagctggagcaactcaaggctggtgtggccaaggtggccagtgggctgagccgctgccaggacacagcccagaaacttc

SEQ ID NO: 656991 - DNA, 120 bp, Artificial Sequence
  ENSG00000183798_17 (sequence is synthesized)
agcacacagtgggacactttgaccagcgggtggcacaagtggagggtgcgtgcaggaggctgggcctgctggccgcgggcctggacagcttgcccactgagccactgaggcccagagagg

SEQ ID NO: 656992 - DNA, 120 bp, Artificial Sequence
  ENSG00000183798_18 (sequence is synthesized)
gcctgtggagccatgtggaccagctgaatcgtacgctggcccagcacacgcaggacattgcccgcctccgggatgacctactggactgccaggcccagctggctgagcaggtgcggccag

SEQ ID NO: 656993 - DNA, 120 bp, Artificial Sequence
  ENSG00000183798_19 (sequence is synthesized)
ggcaagccaactagacaggctggccaggacccaacccctagatcccaccaactcggggaacatcaccccagagcccagccttatccagcagcgccttccagccttccctggctagcccaa

SEQ ID NO: 656994 - DNA, 120 bp, Artificial Sequence
  ENSG00000183798_20 (sequence is synthesized)
atggcactaaggaggccactgagggaatcctccacgtggctgtcccagccaccaaaacccatgcacagtgctgcagaaactggacagttccggacagcggtcaaggcaaggatgtcatgc

SEQ ID NO: 656995 - DNA, 120 bp, Artificial Sequence
  ENSG00000183798_21 (sequence is synthesized)
ttgaaggccagggtagacttgagagagttcacattccactgtcagcaaatcagtgtctggacagccagctgcagggcctgagcatggctggcaggggcagctgctgtggcaaactggcct

SEQ ID NO: 656996 - DNA, 120 bp, Artificial Sequence
  ENSG00000183798_22 (sequence is synthesized)
tgatcagtgtccgtatgtaaggccttgagaggaccctgcaggcagtcagcaccagcctcagcaactgtgcagagacctacaggcccacagccagtggcctgtccgcattgccctgtgccc

SEQ ID NO: 656997 - DNA, 120 bp, Artificial Sequence
  ENSG00000183798_23 (sequence is synthesized)
acaagcaacagtccacagcccttggtggcttctgttccttgtcccctcggcttctcttcgcagccatcaggactaggtttgtgcaggaaggtgatgcccactggaactctcctcacacct

SEQ ID NO: 656998 - DNA, 120 bp, Artificial Sequence
  ENSG00000183798_24 (sequence is synthesized)
ggcagcttcatggatgttgtatctgaactaaggaccagaggctgccagatgtttctggctcctcacgtgtccttcaggacagaacagaagcacaaagactcagccaagagttctctttat

SEQ ID NO: 656999 - DNA, 120 bp, Artificial Sequence
  ENSG00000183798_25 (sequence is synthesized)
tccctttgatcctcccccaaggtgagggcttaggcagctgtagaaccccaggaaagaacggaatccaggcaatctgtttagagaccccccactccaaatttatccttttcctttccttcc

SEQ ID NO: 657000 - DNA, 120 bp, Artificial Sequence
  ENSG00000183798_26 (sequence is synthesized)
cctaagatgtttccagggccctctggtgcccacactgtcctcttccttccacttgggggtggggaaatccttcctgcgaggtcagggcatttctctacaaagtggcctgaatgaggccag

SEQ ID NO: 657001 - DNA, 120 bp, Artificial Sequence
  ENSG00000183798_27 (sequence is synthesized)
gccctgagaaggagccaccagctggaggaaaggggctccaagccttgcttttaacacccctgcaaaacccccaccctcccaagatgttcacaaaaggtgagaaattcaggtacgaaacca

SEQ ID NO: 657002 - DNA, 120 bp, Artificial Sequence
  ENSG00000183798_28 (sequence is synthesized)
tcaatggacaacttgaaaatgcatgttcctcaggcctatgcagttcccagagactcttgacaccggtctctgctgaggctcccagcctcagtttcccccacagcagcacgggccccactg

SEQ ID NO: 657003 - DNA, 120 bp, Artificial Sequence
  ENSG00000183798_29 (sequence is synthesized)
tgctgctcttcaggtccccacagccctgcctttggttcctggacatttggtattctgccctccactctggtactatcagagtagggcaggctctggattaaagcttttagccggtctaaa

SEQ ID NO: 657004 - DNA, 120 bp, Artificial Sequence
  ENSG00000183801_0 (sequence is synthesized)
atcttcaccccccaccccaatgcacacacaattaagccaggaagcagcttgcaaccactagcctggggagggtccgcatgtgtcaagggtgagggcaacagatgctggacccagggagct

SEQ ID NO: 657005 - DNA, 120 bp, Artificial Sequence
  ENSG00000183801_1 (sequence is synthesized)
ctctgccacaggtcagtctacaaggcctcagggaccaacttgccaacagctggacttgatcactagctggcaaactgagctcacgtatcgggtggaataacaagcggactttgctctctg

SEQ ID NO: 657006 - DNA, 120 bp, Artificial Sequence
  ENSG00000183801_2 (sequence is synthesized)
ctgtgcaaaacgctgtttttagaggatttgccacagcagcggatagagcaggagagcaccaccggagcccttgagacatccttgagaagagccacagcataagagactgccctgcttggt

SEQ ID NO: 657007 - DNA, 120 bp, Artificial Sequence
  ENSG00000183801_3 (sequence is synthesized)
gttttgcaggatgatggtggcccttcgaggagcttctgcattgctggttctgttccttgcagcttttctgcccccgccgcagtgtacccaggacccagccatggtgcattacatctacca

SEQ ID NO: 657008 - DNA, 120 bp, Artificial Sequence
  ENSG00000183801_4 (sequence is synthesized)
gcgctttcgagtcttggagcaagggctggaaaaatgtacccaagcaacgagggcatacattcaagaattccaagagttctcaaaaaatatatctgtcatgctgggaagatgtcagaccta

SEQ ID NO: 657009 - DNA, 120 bp, Artificial Sequence
  ENSG00000183801_5 (sequence is synthesized)
cacaagtgagtacaagagtgcagtgggtaacttggcactgagagttgaacgtgcccaacgggagattgactacatacaataccttcgagaggctgacgagtgcatcgaatcagaggacaa

SEQ ID NO: 657010 - DNA, 120 bp, Artificial Sequence
  ENSG00000183801_6 (sequence is synthesized)
gacactggcagaaatgttgctccaagaagctgaagaagagaaaaagatccggactctgctgaatgcaagctgtgacaacatgctgatgggcataaagtctttgaaaatagtgaagaagat

SEQ ID NO: 657011 - DNA, 120 bp, Artificial Sequence
  ENSG00000183801_7 (sequence is synthesized)
gatggacacacatggctcttggatgaaagatgctgtctataactctccaaaggtgtacttattaattggatccagaaacaacactgtttgggaatttgcaaacatacgggcattcatgga

SEQ ID NO: 657012 - DNA, 120 bp, Artificial Sequence
  ENSG00000183801_8 (sequence is synthesized)
ggataacaccaagccagctccccggaagcaaatcctaacactttcctggcagggaacaggccaagtgatctacaaaggttttctattttttcataaccaagcaacttctaatgagataat

SEQ ID NO: 657013 - DNA, 120 bp, Artificial Sequence
  ENSG00000183801_9 (sequence is synthesized)
caaatataacctgcagaagaggactgtggaagatcgaatgctgctcccaggaggggtaggccgagcattggtttaccagcactccccctcaacttacattgacctggctgtggatgagca

SEQ ID NO: 657014 - DNA, 120 bp, Artificial Sequence
  ENSG00000183801_10 (sequence is synthesized)
tgggctctgggccatccactctgggccaggcacccatagccatttggttctcacaaagattgagccgggcacactgggagtggagcattcatgggataccccatgcagaagccaggatgc

SEQ ID NO: 657015 - DNA, 120 bp, Artificial Sequence
  ENSG00000183801_11 (sequence is synthesized)
cattcctcttgtgtggggttctctatgtggtctacagtactgggggccagggccctcatcgcatcacctgcatctatgatccactgggcactatcagtgaggaggacttgcccaacttgt

SEQ ID NO: 657016 - DNA, 120 bp, Artificial Sequence
  ENSG00000183801_12 (sequence is synthesized)
tcttccccaagagaccaagaagtcactccatgatccattacaaccccagagataagcagctctatgcctggaatgaaggaaaccagatcatttacaaactccagacaaagagaaagctgc

SEQ ID NO: 657017 - DNA, 120 bp, Artificial Sequence
  ENSG00000183801_13 (sequence is synthesized)
ctctgaagtaatgcattacagctgtgagaaagagcactgtggctttggcagctgttctacaggacagtgaggctatagccccttcacaatatagtatccctctaatcacacacaggaaga

SEQ ID NO: 657018 - DNA, 120 bp, Artificial Sequence
  ENSG00000183801_14 (sequence is synthesized)
gtgtgtagaagtggaaatacgtatgcctcctttcccaaatgtcactgccttaggtatcttccaagagcttagatgagagcatatcatcaggaaagtttcaacaatgtccattactccccc

SEQ ID NO: 657019 - DNA, 120 bp, Artificial Sequence
  ENSG00000183801_15 (sequence is synthesized)
aaacctcctggctctcaaggatgaccacattctgatacagcctacttcaagccttttgttttactgctccccagcatttactgtaactctgccatcttccctcccacaattagagttgta

SEQ ID NO: 657020 - DNA, 120 bp, Artificial Sequence
  ENSG00000183801_16 (sequence is synthesized)
tgccagcccctaatattcaccactggcttttctctcccctggcctttgctgaagctcttccctctttttcaaatgtctattgatattctcccattttcactgcccaactaaaatactatt

SEQ ID NO: 657021 - DNA, 75 bp, Artificial Sequence
  ENSG00000183801_17 (sequence is synthesized)
tgatattctcccattttcactgcccaactaaaatactattaatatttctttcttttcttttctttttttgagctc

SEQ ID NO: 657022 - DNA, 120 bp, Artificial Sequence
  ENSG00000183801_18 (sequence is synthesized)
acaggcatgtgccaccacacctggcttaaaatactatttcttattgaggtttaacctctatttcccctagccctgtccttccactaagcttggtagatgtaataataaagtgaaaatatt

SEQ ID NO: 657023 - DNA, 120 bp, Artificial Sequence
  ENSG00000183801_19 (sequence is synthesized)
aacatttgaatatcgctttccaggtgtggagtgtttgcacatcatttaattctcgtttcacctttgtgaaacatgcacaagtctttacagctgtcattctagagtttaggtgagtaacac

SEQ ID NO: 657024 - DNA, 120 bp, Artificial Sequence
  ENSG00000183801_20 (sequence is synthesized)
aattacaaagtgaaagatacagctagaaaatactacaaatcccatagtttttccattgcccaaggaagcatcaaatacgtatgtttgttcacctactcttatagtcaatgcgttcatcgt

SEQ ID NO: 657025 - DNA, 120 bp, Artificial Sequence
  ENSG00000183801_21 (sequence is synthesized)
ttcagcctaaaaataatagtctgtccctttagccagttttcatgtctgcacaagacctttcaataggcctttcaaatgataattcctccagaaaaccagtctaagggtgaggaccccaac

SEQ ID NO: 657026 - DNA, 120 bp, Artificial Sequence
  ENSG00000183801_22 (sequence is synthesized)
tctagcctcctcttgtcttgctgtcctctgtttctctctttctgctttaaattcaataaaagtgacactgagcaaataacctcatcaggttatatttgcccacataccctaagcacaaaa

SEQ ID NO: 657027 - DNA, 120 bp, Artificial Sequence
  ENSG00000183801_23 (sequence is synthesized)
gctccaagaagctgaagaagagaaaaagatccggactctgctgaatgcaagtaagaaaactgcatcttttcctagcccttctagggactattatgctcagaaacacacagactcagagca

SEQ ID NO: 657028 - DNA, 120 bp, Artificial Sequence
  ENSG00000183801_24 (sequence is synthesized)
gtcagggagcatcatagagtaatgagagtaagaattggaggtgtgcttttgtgtgcattgctgagagagaaagctatacagagaacaggtgtccaaagagaaatccattctcgcaaagcc

SEQ ID NO: 657029 - DNA, 120 bp, Artificial Sequence
  ENSG00000183801_25 (sequence is synthesized)
attctttctttcacacacagtgcctaaagcctccatagatggtgaaggctatagtgccaaaagtcagcccaaagagactacctcctgataaatcttggtttggtggagatgtgtggtccc

SEQ ID NO: 657030 - DNA, 120 bp, Artificial Sequence
  ENSG00000183801_26 (sequence is synthesized)
agattttttcagggaaagtagcagtttggtggattctacatccagtacccaggctgtagatagcatctgcaaatgtaccaagaaacagtcttaaattggaaatggcaacagccaaccctc

SEQ ID NO: 657031 - DNA, 120 bp, Artificial Sequence
  ENSG00000183801_27 (sequence is synthesized)
agggatgggaactgcagtgaatcactattgtgtgtgctgtctgagatggtgatatgcatgggatgtggtctaatcttgtgatccatcagaatcacttccaagccattaagaataatgtgt

SEQ ID NO: 657032 - DNA, 120 bp, Artificial Sequence
  ENSG00000183807_0 (sequence is synthesized)
gagtgtgcgagcgccaggggttccagctgcacgtcccaggctctccagcgcgcggcaggccggggcgggacgaggagagctgcggggacaacgcctgtggctgggtccggaggtgcgggt

SEQ ID NO: 657033 - DNA, 120 bp, Artificial Sequence
  ENSG00000183807_1 (sequence is synthesized)
gcggcgcgggacaagcgggcagcatgctcagggcggtcgggagcctactgcgccttggccgcgggctaacagtccgctgcggccccggggcgcctctcgaggccacgcgacggcccgcac

SEQ ID NO: 657034 - DNA, 120 bp, Artificial Sequence
  ENSG00000183807_2 (sequence is synthesized)
cggctcttccgccccggggtctcccctgctactccagcggcggggcccccagcaattctgggccccaaggtcacggggagattcaccgagtccccacgcagcgcaggccttcgcagttcg

SEQ ID NO: 657035 - DNA, 120 bp, Artificial Sequence
  ENSG00000183807_3 (sequence is synthesized)
acaagaaaatcctgctgtggacagggcgtttcaaatcgatggaggagatcccgcctcggatcccgccagaaatgatagacaccgcaagaaacaaagctcgagtgaaagcttgttacataa

SEQ ID NO: 657036 - DNA, 120 bp, Artificial Sequence
  ENSG00000183807_4 (sequence is synthesized)
ccttaacaagttggaacttggcaaagaaagctaagtggcgtgaagaagctgcattggctgcacaggctaaagctaaatgatattctaagtgacaaagtgttcacctgaataccatccctg

SEQ ID NO: 657037 - DNA, 120 bp, Artificial Sequence
  ENSG00000183807_5 (sequence is synthesized)
tcatcagcaacagtagaagatgggaaaaatagaatatttaccaaaatatctgccatggttttattttggtaacaagaagcacaatgtcttttttatttttattttttagtaaacttttac

SEQ ID NO: 657038 - DNA, 120 bp, Artificial Sequence
  ENSG00000183807_6 (sequence is synthesized)
tgaagtataccatgcattcaaaaagtggacaaaactgtatacagtctgatagatatttatgtcgtgaacacctgtgtaaccactgccaaagtgaagatgtagaatattggcaacacttca

SEQ ID NO: 657039 - DNA, 120 bp, Artificial Sequence
  ENSG00000183807_7 (sequence is synthesized)
cagcctcattcctgccttttctcagccattacctcccaaacatagcagtttttctgagtttcatcacctttgattcattttgcctgtttttgaactttatataaatggatttatacatta

SEQ ID NO: 657040 - DNA, 120 bp, Artificial Sequence
  ENSG00000183808_0 (sequence is synthesized)
gtccgtttgtccggaccggaggggcagtgggcgccatcttcttctgggctcactgagggtctacctgttttggggaggctgctgcgacgaagagttccctcagcctccggccttgtgtgt

SEQ ID NO: 657041 - DNA, 120 bp, Artificial Sequence
  ENSG00000183808_1 (sequence is synthesized)
ccgactcggcagcagtgttaagttgcttttacagagttaacaggtctccaagaaattttaaaaaaggtcattattgctgtggtttgagctcagcatggctgtagtcatccgtttactggg

SEQ ID NO: 657042 - DNA, 120 bp, Artificial Sequence
  ENSG00000183808_2 (sequence is synthesized)
gcttccttttattgcggggcctgtggatattcgtcacttcttcacgggattgactattcctgatggaggagtgcatataattggaggggaaattggggaggcttttattatttttgcaac

SEQ ID NO: 657043 - DNA, 120 bp, Artificial Sequence
  ENSG00000183808_3 (sequence is synthesized)
agatgaagatgcaagacgtgccataagtcgttcaggagggtttatcaaggattcatctgtagagctctttcttagtagcaaggcagaaatgcagaagactatagaaatgaaaagaactga

SEQ ID NO: 657044 - DNA, 120 bp, Artificial Sequence
  ENSG00000183808_4 (sequence is synthesized)
tcgtgtaggaagagggcgtccaggatctgggacatcaggggttgacagcctgtctaattttattgagtctgttaaggaagaagcaagtaattctggatatggctcttcaattaatcaaga

SEQ ID NO: 657045 - DNA, 120 bp, Artificial Sequence
  ENSG00000183808_5 (sequence is synthesized)
tgctgggtttcatactaatggtacaggacatggtaatttaaggccaagaaagacaaggccattgaaggccgagaatccttacttgtttctacgaggtttgccttacctagtaaatgaaga

SEQ ID NO: 657046 - DNA, 120 bp, Artificial Sequence
  ENSG00000183808_6 (sequence is synthesized)
tgatgtacgtgtctttttctctggtttgtgcgtggatggagtaattttcttaaaacatcatgatggccgaaataatggtgatgccatagtaaaatttgcttcatgtgttgatgcttcagg

SEQ ID NO: 657047 - DNA, 120 bp, Artificial Sequence
  ENSG00000183808_7 (sequence is synthesized)
aggtcttaaatgtcatagaagttttatgggttcaagatttatagaagtaatgcaaggatcagaacaacagtggattgagtttggtggtaatgcagttaaggagggtgacgttcttaggag

SEQ ID NO: 657048 - DNA, 120 bp, Artificial Sequence
  ENSG00000183808_8 (sequence is synthesized)
atctgaagaacattctccaccaagaggaattaatgatagacattttcgaaaacggtctcattcaaaatctcccagaagaacacgttctcgttcccctcttggattttatgttcacttaaa

SEQ ID NO: 657049 - DNA, 120 bp, Artificial Sequence
  ENSG00000183808_9 (sequence is synthesized)
aaatctgtccctcagtattgacgaaagagatttaagaaatttctttagaggtactgatctgactgatgaacagattaggtttttatataaagatgaaaatagaacaagatatgcctttgt

SEQ ID NO: 657050 - DNA, 120 bp, Artificial Sequence
  ENSG00000183808_10 (sequence is synthesized)
gatgttcaagactctgaaagactataataccgctctgagtttacataagactgttttacaatatcgtccagttcatattgatccaatttctagaaaacaaatgctgaagttcattgcacg

SEQ ID NO: 657051 - DNA, 120 bp, Artificial Sequence
  ENSG00000183808_11 (sequence is synthesized)
ttatgaaaagaagagatcagggtcactagagagagataggcccggacatgtttcacaaaaatactctcaagaaggtaactctggccagaaactgtgcatctatataagaaattttccatt

SEQ ID NO: 657052 - DNA, 120 bp, Artificial Sequence
  ENSG00000183808_12 (sequence is synthesized)
tgatgttacaaaagttgaagtgcagaagttctttgcagactttcttcttgctgaggatgacatttacttgctttatgatgacaaaggtgttggtctgggagaagcattagtgaaatttaa

SEQ ID NO: 657053 - DNA, 120 bp, Artificial Sequence
  ENSG00000183808_13 (sequence is synthesized)
atcagaagaacaggccatgaaagctgaacgtttaaaccgacgaagattcctagggacagaggtgttattaagacttatatctgaggcacaaatacaggagtttggtgtaaatttttctgt

SEQ ID NO: 657054 - DNA, 120 bp, Artificial Sequence
  ENSG00000183808_14 (sequence is synthesized)
gatgtccagtgaaaaaatgcaagctcgctcacagtcacgtgagcgaggtgaccattcccatttatttgactcaaaagacccaccaatatactcagttggtgcttttgaaaactttagaca

SEQ ID NO: 657055 - DNA, 120 bp, Artificial Sequence
  ENSG00000183808_15 (sequence is synthesized)
tcagctagaggacttgaggcaactggataacttcaagcatccccagagggatttccggcagcctgacaggcaccctccagaagacttccgacactcctcagaggactttaggttcccccc

SEQ ID NO: 657056 - DNA, 120 bp, Artificial Sequence
  ENSG00000183808_16 (sequence is synthesized)
ggaggacttcaggcactccccagaggacttcaggcgacctagggaggaagacttcaggcggccttctgaggaggacttcaggcgcccttgggaggaagatttcaggcgccctccggagga

SEQ ID NO: 657057 - DNA, 120 bp, Artificial Sequence
  ENSG00000183808_17 (sequence is synthesized)
tgacttcaggcaccctagggaggaggactggaggaggccccttgaggaggactggaggcggccactggaggaggatttcaggcggtctcccacggaggacttcaggcagctccccgagga

SEQ ID NO: 657058 - DNA, 120 bp, Artificial Sequence
  ENSG00000183808_18 (sequence is synthesized)
ggacttcaggcaaccccctgaggaggacttaaggtggctcccagaggaagatttcaggcggccacctgaggaggactggagacggcccccagaggaggactttaggcggcctcttcaggg

SEQ ID NO: 657059 - DNA, 120 bp, Artificial Sequence
  ENSG00000183808_19 (sequence is synthesized)
agaatggaggcgaccacccgaggatgacttcaggcggcccccagaggaggatttcaggcattcccctgaggaggacttcaggcagtcaccccaggagcatttccggaggccacctcagga

SEQ ID NO: 657060 - DNA, 120 bp, Artificial Sequence
  ENSG00000183808_20 (sequence is synthesized)
gcatttccgtcggccacccccagagcatttccggagaccacctccagagcattttaggcggcctcccccagagcacttccggcggccacccccagagcacttcaggcggccacccccaga

SEQ ID NO: 657061 - DNA, 120 bp, Artificial Sequence
  ENSG00000183808_21 (sequence is synthesized)
gcatttcaggcgcccgcccccggagcacttccggagaccgccccaggagcatttcaggcggccgcctcaggagcatttcaggcgctcccgagaggaagatttcaggcacccaccagatga

SEQ ID NO: 657062 - DNA, 120 bp, Artificial Sequence
  ENSG00000183808_22 (sequence is synthesized)
agacttcaggggccctcctgatgaagactttaggcaccctcctgatgaggacttcaggagcccccaggaggaagattttagatgcccttctgatgaggacttcaggcagctcccagagga

SEQ ID NO: 657063 - DNA, 120 bp, Artificial Sequence
  ENSG00000183808_23 (sequence is synthesized)
agaccttagggaagctccggaggaggaccctagacttcctgacaattttagacctcctggtgaggattttaggagcccgcctgatgattttagaagtcaccgcccttttgtgaattttgg

SEQ ID NO: 657064 - DNA, 120 bp, Artificial Sequence
  ENSG00000183808_24 (sequence is synthesized)
tcgcccagaaggtggcaagtttgattttggaaagcataatatgggaagttttcctgaggggagatttatgcctgatccaaaaataaattgtggttcaggtagagtaactcctattaagat

SEQ ID NO: 657065 - DNA, 120 bp, Artificial Sequence
  ENSG00000183808_25 (sequence is synthesized)
aatgaatcttccatttaaagctaatgtgaatgaaattttagactttttccatggttacagaatcatacctgattcagtttcgatacagtataatgagcaaggcttacctacaggggaagc

SEQ ID NO: 657066 - DNA, 120 bp, Artificial Sequence
  ENSG00000183808_26 (sequence is synthesized)
cattgttgctatgataaactataatgaagctatggctgctattaaagatctaaatgataggccagttgggccccgaaaagttaagttaactttgctgtagagagagagcatttctaaatt

SEQ ID NO: 657067 - DNA, 120 bp, Artificial Sequence
  ENSG00000183808_27 (sequence is synthesized)
cagttatcttccttgcagtattgatggagtaaaatacatttgttttaaaaaagtgttttttttttaaattatctaatgaaatattttatttttgacctgtgaatagaacaaatgtaaata

SEQ ID NO: 657068 - DNA, 120 bp, Artificial Sequence
  ENSG00000183808_28 (sequence is synthesized)
gtagaatgtgaatctggttttcttttgcttgcaaattgccattctttttttttttcaaatttaaaattacacatgctgtttttttctttgatggggagaaagaactcattccctgagttc

SEQ ID NO: 657069 - DNA, 120 bp, Artificial Sequence
  ENSG00000183808_29 (sequence is synthesized)
attcatttttgttgatgtcatcggtaatcttcaagacttattgaagtagagttgtatttggggaagatacattttatattcacttttttttttctttctgtagtctacctcttttactca

SEQ ID NO: 657070 - DNA, 120 bp, Artificial Sequence
  ENSG00000183808_30 (sequence is synthesized)
atgccctcttccttgtctaagatattactgtgttaagtgtcctgttaattataaatagttcaaaatggacagactgtcaacttgaaatttacttatgtaaaaagcttaggtgattcttag

SEQ ID NO: 657071 - DNA, 120 bp, Artificial Sequence
  ENSG00000183808_31 (sequence is synthesized)
ggtttccatgttcataactttacaaagctttataaaaataaaattgcaacttaatagagctaattaacttgtatttgtataaaaagaaaaaagaattgcagctcgatattgtgaagtttt

SEQ ID NO: 657072 - DNA, 120 bp, Artificial Sequence
  ENSG00000183808_32 (sequence is synthesized)
tcaataacttcattaaaccatatttatgatgggagggaccagacattctatagtaataatgtatagtgctgtgtataattccatggtttcttcaacatcttatcaaccaagtaaaattaa

SEQ ID NO: 657073 - DNA, 120 bp, Artificial Sequence
  ENSG00000183808_33 (sequence is synthesized)
tacaagatacgcaaaagatagtaaaataagaatctaattataggtgcaaggggactcaggcttatgctggaagaatctgacaagtggtatagtttgtttttctaggaagaatttactgat

SEQ ID NO: 657074 - DNA, 120 bp, Artificial Sequence
  ENSG00000183808_34 (sequence is synthesized)
gagtcacataacttgcatgtaatattaggttctcattttttagcttcgaaactgtgtccatgcaaagactctataactgttaagacttgtgtggttgaattttgacttctttgatattca

SEQ ID NO: 657075 - DNA, 120 bp, Artificial Sequence
  ENSG00000183808_35 (sequence is synthesized)
gcatttagtgcatacattttgcaactagggaatttgattttctatacccacaataatatttatggctaacatttattaggcacttactatgtgctaggcactgtaagcactttacatgca

SEQ ID NO: 657076 - DNA, 120 bp, Artificial Sequence
  ENSG00000183808_36 (sequence is synthesized)
taatctcggtattccctgtgagtacagggttaattatttacctctatttcacaaatgagataatgaagtgggatgaagtgcgaggttaagcaacttgcttgaagtcataggtagtaaatc

SEQ ID NO: 657077 - DNA, 120 bp, Artificial Sequence
  ENSG00000183808_37 (sequence is synthesized)
gtggggccaattttaacccagacagaccactgactccagttcatgcttttgctgcctcacttttttaagtggtatttttaattaggaagaccatgctaaagatactttcaaggataaatg

SEQ ID NO: 657078 - DNA, 120 bp, Artificial Sequence
  ENSG00000183808_38 (sequence is synthesized)
attattttctcacttcaattgttggtttaaaattagcataaataggtaaaaccagcatgctcaaacactgagctcaaacattaacattactaataaaaaaaaaaagagtgactttaaaag

SEQ ID NO: 657079 - DNA, 120 bp, Artificial Sequence
  ENSG00000183808_39 (sequence is synthesized)
tttctttctatccagggtttctcttgggatactcatatggtatattactggcttatatttcaaaattattttattcaacatgattgactttggccttttataatttacataaaacataat

SEQ ID NO: 657080 - DNA, 120 bp, Artificial Sequence
  ENSG00000183808_40 (sequence is synthesized)
tttcctcagttctgtaatccagattttccccattgagtaaataatacaattaaatttacatatggtaatttagacatttaataggatattgcataggtagaatactttgtcagtacttag

SEQ ID NO: 657081 - DNA, 120 bp, Artificial Sequence
  ENSG00000183808_41 (sequence is synthesized)
ttactacctatatgtatttttgtgttacttttcagtgatttaaagaaatctaacagaaatctgcttaaatttgttttaaatagtgaatatcctgcttgctatggaatgaataaacaggta

SEQ ID NO: 657082 - DNA, 120 bp, Artificial Sequence
  ENSG00000183808_42 (sequence is synthesized)
aatttgatatgaaaaagcacctcagtatgattctttaaagtataagcttgtaagtagctaggataatgttaaattgattgtttggaatatccaaaccaagcacaatgaagaaagtagaaa

SEQ ID NO: 657083 - DNA, 120 bp, Artificial Sequence
  ENSG00000183808_43 (sequence is synthesized)
tgatatttttaattgagcaaagattgtatagatggttcatttggtcacccattttgaataatatatggaaagttaaaaaatgcttctcagatacaaaggaataaagctaagatgaagctt

SEQ ID NO: 657084 - DNA, 120 bp, Artificial Sequence
  ENSG00000183808_44 (sequence is synthesized)
aacgtgagggattacttactgtggaattgcatttcaaactgggctgaggtgggatggtggtggtagataagaggccagctagagtaaacataagctttgtagttttattattttaagagt

SEQ ID NO: 657085 - DNA, 120 bp, Artificial Sequence
  ENSG00000183808_45 (sequence is synthesized)
cagagtcttgttctgctggccaggctggagtgcagtggtctgataatggttcactgcagcttctaactcctgggctcaagctgtcttcctgcctcagcctcctgagagctgggactacag

SEQ ID NO: 657086 - DNA, 84 bp, Artificial Sequence
  ENSG00000183808_46 (sequence is synthesized)
tttattatttctcaaatttctggcctcaagcaatcctcactccttggtctcccagaatgtgttgggattacaggtgtgagccac

SEQ ID NO: 657087 - DNA, 120 bp, Artificial Sequence
  ENSG00000183808_47 (sequence is synthesized)
tacaggtgtgagccactgtgcccagccttgtattttgatttttaaattaatttatatgaatatttccttttaccctataatgtatcagggcttaatatttttaaacttcattataaaaag

SEQ ID NO: 657088 - DNA, 120 bp, Artificial Sequence
  ENSG00000183808_48 (sequence is synthesized)
cattataaaaagttgattacagaaagtggtatcttctagttgggagccatctttgcacatctctctccaactctgcctttagtgatatgtcaataacaaattggccatggcaggagtatt

SEQ ID NO: 657089 - DNA, 120 bp, Artificial Sequence
  ENSG00000183808_49 (sequence is synthesized)
ttacaccatggaaagtgataaatgcagcaaatcaaggaattcccctcctgttgtcccctcagaaagccagcttcccagcacctcatcaatttcaaatataaaaaaagaatagtaaatttt

SEQ ID NO: 657090 - DNA, 120 bp, Artificial Sequence
  ENSG00000183808_50 (sequence is synthesized)
catgtacacatcactcagcttcagtaattgtcgtctcatagccagtttttcctctcctatcctcaaggtataccaggtacactggaggtgtattctctagcctgatacccagtggcattt

SEQ ID NO: 657091 - DNA, 120 bp, Artificial Sequence
  ENSG00000183808_51 (sequence is synthesized)
gtcttaaagccaaacatttttgtctagaaattatctaaaaaaatgtagatcatgtctagaaagtcaatcccacaaccaagagataggtaaaaatcatgttaggagtgcatttctattaat

SEQ ID NO: 657092 - DNA, 120 bp, Artificial Sequence
  ENSG00000183808_52 (sequence is synthesized)
ttactgagatcactgttaagagcagtgattcttgatccatatatcacctgttaagtagtgaccttgctgcctctgtttttgcagtaaatattagctgttgtttattgagctgtattagat

SEQ ID NO: 657093 - DNA, 120 bp, Artificial Sequence
  ENSG00000183808_53 (sequence is synthesized)
actatatgatgtataattatgtatgaattaactatcatttaattctgataatcctagtaaatgtactacaggttgagtattcctaatctggtaatctgaaatttcacatgctccgaaaat

SEQ ID NO: 657094 - DNA, 120 bp, Artificial Sequence
  ENSG00000183808_54 (sequence is synthesized)
cacaaactttttgagtgccaacatgatgctcaaagaaaatgctcattgcagcatttaagatttcagatttttgggttaggaatgttgaactggtataatgcaaatactccaaaatctgaa

SEQ ID NO: 657095 - DNA, 120 bp, Artificial Sequence
  ENSG00000183808_55 (sequence is synthesized)
gaaatccaaagtcttaaatacttctggtcccaagcacttcagataaaggatactcaatttgtattcctattttggagataagagatggagacttacaggctgggttggttggattggttg

SEQ ID NO: 657096 - DNA, 120 bp, Artificial Sequence
  ENSG00000183808_56 (sequence is synthesized)
cctgttttttgttgttgttgtagtggaagctaggaatggtttttcacattttttaagtgtacttaagtcttacatggttacatagttacctgtataatagtcttgaatttgcctaaaccc

SEQ ID NO: 657097 - DNA, 120 bp, Artificial Sequence
  ENSG00000183808_57 (sequence is synthesized)
acgaagaataacagtatttgctatctggccctttaagaagtttgccaacctaggctggtctaaataatgaaaattttacattaatgaaagtattttcatggatagtattccttttgttct

SEQ ID NO: 657098 - DNA, 120 bp, Artificial Sequence
  ENSG00000183808_58 (sequence is synthesized)
tagaatatttctttgaggtaggcagaatgtatgttttattccagaattactgttttacgcagttttaactttacaaacaaggcaaataatgctcaagagaagttgctatttagtaagcag

SEQ ID NO: 657099 - DNA, 120 bp, Artificial Sequence
  ENSG00000183808_59 (sequence is synthesized)
caaaataataactctgttgttttcccccgaagtacaaccaaatttaaatactgagtgaggaagcagtaaatatccaatgatatcttgagtttcttaagaatatcaatttagggttttaaa

SEQ ID NO: 657100 - DNA, 120 bp, Artificial Sequence
  ENSG00000183808_60 (sequence is synthesized)
gggcgccatcttcttctgggctcactgagggtctacctgttttggggaggctgctgcgacgaagagttccctcagcctccggccttgtgtgtccgactcggcagcagtggtgtgtgttta

SEQ ID NO: 657101 - DNA, 120 bp, Artificial Sequence
  ENSG00000183808_61 (sequence is synthesized)
atatgtatagcttatggtgctttctaaaatatcttaaaaagagtagctaagccaatttgcataggagggagtcttgggactttaatatggataaagtaagtattccagaagccatttgta

SEQ ID NO: 657102 - DNA, 120 bp, Artificial Sequence
  ENSG00000183808_62 (sequence is synthesized)
gtttttgttgaagtgttagtatggatattggtttgttgaagaaaataggctttttttctttttttgttactgtgcaaatactttaatagcaaacctgattaatatttttcagatgtagaa

SEQ ID NO: 657103 - DNA, 120 bp, Artificial Sequence
  ENSG00000183808_63 (sequence is synthesized)
tacctgttttggggaggctgctgcgacgaagagttccctcagcctccggccttgtgtgtccgactcggcagcagtgcttccatgtggtggtgtatgtgcgcttcccagggatcttgagag

SEQ ID NO: 657104 - DNA, 120 bp, Artificial Sequence
  ENSG00000183813_0 (sequence is synthesized)
ggcattgcctcacagaccttcctcagagccgctttcagaaaagcaagctgcttctggttgggcccagacctgccttgaggagcctgtagagttaaaaaatgaaccccacggatatagcag

SEQ ID NO: 657105 - DNA, 120 bp, Artificial Sequence
  ENSG00000183813_1 (sequence is synthesized)
acaccaccctcgatgaaagcatatacagcaattactatctgtatgaaagtatccccaagccttgcaccaaagaaggcatcaaggcatttggggagctcttcctgcccccactgtattcct

SEQ ID NO: 657106 - DNA, 120 bp, Artificial Sequence
  ENSG00000183813_2 (sequence is synthesized)
tggtttttgtatttggtctgcttggaaattctgtggtggttctggtcctgttcaaatacaagcggctcaggtccatgactgatgtgtacctgctcaaccttgccatctcggatctgctct

SEQ ID NO: 657107 - DNA, 120 bp, Artificial Sequence
  ENSG00000183813_3 (sequence is synthesized)
tcgtgttttccctccctttttggggctactatgcagcagaccagtgggtttttgggctaggtctgtgcaagatgatttcctggatgtacttggtgggcttttacagtggcatattctttg

SEQ ID NO: 657108 - DNA, 120 bp, Artificial Sequence
  ENSG00000183813_4 (sequence is synthesized)
tcatgctcatgagcattgatagatacctggcaattgtgcacgcggtgttttccttgagggcaaggaccttgacttatggggtcatcaccagtttggctacatggtcagtggctgtgttcg

SEQ ID NO: 657109 - DNA, 120 bp, Artificial Sequence
  ENSG00000183813_5 (sequence is synthesized)
cctcccttcctggctttctgttcagcacttgttatactgagcgcaaccatacctactgcaaaaccaagtactctctcaactccacgacgtggaaggttctcagctccctggaaatcaaca

SEQ ID NO: 657110 - DNA, 120 bp, Artificial Sequence
  ENSG00000183813_6 (sequence is synthesized)
ttctcggattggtgatccccttagggatcatgctgttttgctactccatgatcatcaggaccttgcagcattgtaaaaatgagaagaagaacaaggcggtgaagatgatctttgccgtgg

SEQ ID NO: 657111 - DNA, 120 bp, Artificial Sequence
  ENSG00000183813_7 (sequence is synthesized)
tggtcctcttccttgggttctggacaccttacaacatagtgctcttcctagagaccctggtggagctagaagtccttcaggactgcacctttgaaagatacttggactatgccatccagg

SEQ ID NO: 657112 - DNA, 120 bp, Artificial Sequence
  ENSG00000183813_8 (sequence is synthesized)
ccacagaaactctggcttttgttcactgctgccttaatcccatcatctacttttttctgggggagaaatttcgcaagtacatcctacagctcttcaaaacctgcaggggcctttttgtgc

SEQ ID NO: 657113 - DNA, 120 bp, Artificial Sequence
  ENSG00000183813_9 (sequence is synthesized)
tctgccaatactgtgggctcctccaaatttactctgctgacacccccagctcatcttacacgcagtccaccatggatcatgatctccatgatgctctgtagaaaaatgaaatggtgaaat

SEQ ID NO: 657114 - DNA, 120 bp, Artificial Sequence
  ENSG00000183813_10 (sequence is synthesized)
gcagagtcaatgaactttccacattcagagcttacttaaaattgtattttagtaagagattcctgagccagtgtcaggaggaaggcttacacccacagtggaaagacagcttctcatcct

SEQ ID NO: 657115 - DNA, 120 bp, Artificial Sequence
  ENSG00000183813_11 (sequence is synthesized)
gcaggcagctttttctctcccactagacaagtccagcctggcaagggttcacctgggctgaggcatccttcctcacaccaggcttgcctgcaggcatgagtcagtctgatgagaactctg

SEQ ID NO: 657116 - DNA, 120 bp, Artificial Sequence
  ENSG00000183813_12 (sequence is synthesized)
taatattgcaaggcaaagactattcccttctaacctgaactgatgggtttctccagagggaattgcagagtactggctgatggagtaaatcgctaccttttgctgtggcaaatgggccct

SEQ ID NO: 657117 - DNA, 120 bp, Artificial Sequence
  ENSG00000183813_13 (sequence is synthesized)
ctaattaatttcttgcttttgcggaacaatatagataactgtttttctaataacatatctcaggcaaagtatattccattgagccagatgtatgaagaaacaattagcgaagtgatgaaa

SEQ ID NO: 657118 - DNA, 120 bp, Artificial Sequence
  ENSG00000183813_14 (sequence is synthesized)
ccagatctcaattatttattgtaaaggattatctgttaattgaaaccaaactttttatactgatataagggtaaggatatgaagacattagccaaggtctgctttccaaacgtgaactac

SEQ ID NO: 657119 - DNA, 120 bp, Artificial Sequence
  ENSG00000183813_15 (sequence is synthesized)
aaggcattcaaaatccaaacatatttatgaaaattcaaacacagtttctcacttgtttgtggacatgttttgttctaattttaacagaggaatattaaaaaattttaaataggctgggca

SEQ ID NO: 657120 - DNA, 60 bp, Artificial Sequence
  ENSG00000183813_16 (sequence is synthesized)
ttgtactccataggccaagaatacatttatttgaggtcatttacttgttttttttttttt

SEQ ID NO: 657121 - DNA, 61 bp, Artificial Sequence
  ENSG00000183813_17 (sequence is synthesized)
taggtgggactacaggcacctgccggatggttttaatctcctgacctcgtgatccacccgc

SEQ ID NO: 657122 - DNA, 74 bp, Artificial Sequence
  ENSG00000183813_18 (sequence is synthesized)
gcactcggttcactgcaaacagctgggattagaggtgtgcaccactacgccaggctaatttttgtatttttagt

SEQ ID NO: 657123 - DNA, 120 bp, Artificial Sequence
  ENSG00000183813_19 (sequence is synthesized)
tttacttgtttataaacagtctcttcataattaaaattaaggattaataaagtatgacaatacctccttaatcattttgaagtgcctgctatcaattgaaataaaaacaatcaactaaaa

SEQ ID NO: 657124 - DNA, 120 bp, Artificial Sequence
  ENSG00000183814_0 (sequence is synthesized)
gctgggaccgagtcccggacgtcgcgacgcgcagggggctgctgcggccggcggtctcgggaaaagtgaggggacggaggcgcccaagcaacgtgggtttcgggaactgtgagtatttca

SEQ ID NO: 657125 - DNA, 120 bp, Artificial Sequence
  ENSG00000183814_1 (sequence is synthesized)
ctttgcgtagagccccctcgggcaatgcgacccagaaccgagggcttctttccccccgccggggcctccctcccgttctccactcggaacaaacagcctgcagttcccgcagctgcagcg

SEQ ID NO: 657126 - DNA, 120 bp, Artificial Sequence
  ENSG00000183814_2 (sequence is synthesized)
cggaacaaacagcctgcagttcccgcagctgcagcgcgggccgcggaacatgcgccgggagcggggcccgggcgggactccggagctggtactgctccccccgcgctccggcgccgggcc

SEQ ID NO: 657127 - DNA, 80 bp, Artificial Sequence
  ENSG00000183814_3 (sequence is synthesized)
gcggagccgggcccgcctcagccagccgcggcgggagcagcgcagcgcggcgccgcgggcagcgagctccgcattcgaac

SEQ ID NO: 657128 - DNA, 120 bp, Artificial Sequence
  ENSG00000183814_4 (sequence is synthesized)
gcgcggcgccgcgggcagcgagctccgcattcgaacctccctcgcaaagacagtctccgccccacaatgcaccgcggcgggcagcctttgaaaaagcggcgcggctcgttcaagatggcg

SEQ ID NO: 657129 - DNA, 120 bp, Artificial Sequence
  ENSG00000183814_5 (sequence is synthesized)
gagctcgaccagttgcctgacgagagctcttcagcaaaagcccttgtcagtttaaaagaaggaagcttatctaacacgtggaatgaaaagtacagttctttacagaaaacacctgtttgg

SEQ ID NO: 657130 - DNA, 120 bp, Artificial Sequence
  ENSG00000183814_6 (sequence is synthesized)
aaaggcaggaatacaagctctgctgtggaaatgcctttcagaaattcaaaacgaagtcgacttttttctgatgaagatgataggcaaataaatacaaggtcacctaaaagaaaccagagg

SEQ ID NO: 657131 - DNA, 120 bp, Artificial Sequence
  ENSG00000183814_7 (sequence is synthesized)
gttgcaatggttccacagaaatttacagcaacaatgtcaacaccagataagaaagcttcacagaagattggttttcgattacgtaatctgctcaagcttcctaaagcacataaatggtgt

SEQ ID NO: 657132 - DNA, 120 bp, Artificial Sequence
  ENSG00000183814_8 (sequence is synthesized)
atatacgagtggttctattcaaatatagataaaccactttttgaaggtgataatgacttctgtgtatgtctaaaggaatcttttcctaatttgaaaacaagaaagttaacaagagtagaa

SEQ ID NO: 657133 - DNA, 120 bp, Artificial Sequence
  ENSG00000183814_9 (sequence is synthesized)
tggggaaaaattcggcggcttatgggaaaaccacggagatgttcttctgcattttttgaggaagagagatcagcattaaaacagaaacggcagaaaataaggctcttacaacaaaggaaa

SEQ ID NO: 657134 - DNA, 120 bp, Artificial Sequence
  ENSG00000183814_10 (sequence is synthesized)
gttgcagatgtttcacaattcaaagatctcccagatgaaattcctttgcctctggttattggaacgaaagttacagcacgattacgtggtgttcatgatggtttgttcactggacaaata

SEQ ID NO: 657135 - DNA, 120 bp, Artificial Sequence
  ENSG00000183814_11 (sequence is synthesized)
gatgctgtggatactcttaatgctacttatagagtaacttttgataggacagggcttggaacccataccatccctgactatgaagttctcagtaatgaacctcatgagacaatgccaatt

SEQ ID NO: 657136 - DNA, 120 bp, Artificial Sequence
  ENSG00000183814_12 (sequence is synthesized)
gctgcctttggacaaaaacagcggccttctcgattttttatgaccccaccacggttacattatactcctcctctccagtcaccaattatagataatgatcctttattaggacagtcgccg

SEQ ID NO: 657137 - DNA, 120 bp, Artificial Sequence
  ENSG00000183814_13 (sequence is synthesized)
tggagaagtaaaatttctggctctgacactgaaacattaggtggttttccagtagaatttcttatccaagtgaccagattatcaaaaattctcatgattaaaaaggaacatatcaagaaa

SEQ ID NO: 657138 - DNA, 120 bp, Artificial Sequence
  ENSG00000183814_14 (sequence is synthesized)
gttctggagcttgaacagctgaacaaggacctaaacaaagttttgcataaagttcaacagtattgctatgagcttgctccagaccaggggctccagcctgcagatcagccaacagatatg

SEQ ID NO: 657139 - DNA, 120 bp, Artificial Sequence
  ENSG00000183814_15 (sequence is synthesized)
agacgcaggtgtgaggaagaagcacaggaaattgttcggcatgcaaattcctcaacaggacagccctgcgttgaaaatgaaaatctgacagacttaatttccaggcttacagctattttg

SEQ ID NO: 657140 - DNA, 120 bp, Artificial Sequence
  ENSG00000183814_16 (sequence is synthesized)
ttacaaattaagtgtctagcagaaggaggagacctgaattcctttgaattcaaatcacttacagactcattaaatgatatcaagagtacaatagacgcttctaatatcagttgctttcag

SEQ ID NO: 657141 - DNA, 120 bp, Artificial Sequence
  ENSG00000183814_17 (sequence is synthesized)
aataatgtagaaatccatgttgcacatattcagagtggcctgagccagatgggaaacttacatgcctttgcagcaaataacaccaacagagactgagtaaagatttcattattccaactg

SEQ ID NO: 657142 - DNA, 120 bp, Artificial Sequence
  ENSG00000183814_18 (sequence is synthesized)
cacgggacattgtttttgagaagttcttttcctttatataggcttccaacaccaaataacctaactgctggaaaacaagggaaatttaaatctccaaataaggcattttaatagactgta

SEQ ID NO: 657143 - DNA, 120 bp, Artificial Sequence
  ENSG00000183814_19 (sequence is synthesized)
ctgcttcttaaaccagcattgctgaccagcattatatttatttttcttttattattcagatgcagtagcattgcttatgttacatatgtttatattcacaaatatttttaaactgaaata

SEQ ID NO: 657144 - DNA, 120 bp, Artificial Sequence
  ENSG00000183814_20 (sequence is synthesized)
tctgaacataatataatttcgtggaagaatacattgaccattttttttaatgtgcatgaattcaccgcaacacatgcagacaactgctgcaatggagagtatgaagaaacctggtctttt

SEQ ID NO: 657145 - DNA, 120 bp, Artificial Sequence
  ENSG00000183814_21 (sequence is synthesized)
tattcatgtcggtggcagtgtggaaattccatccagaaaattacaactccacttgatttagttgatcaccatctcagtcttcaaaagataacatcatgaggtgtgggaagtcctagtttt

SEQ ID NO: 657146 - DNA, 120 bp, Artificial Sequence
  ENSG00000183814_22 (sequence is synthesized)
aaggaaaccactgaaatatagatgggaaatgtggactttacaagtatatgttatatatacttgcaatgtgacatggttctgtagatcattttataataataaatattttaatttatcata

SEQ ID NO: 657147 - DNA, 120 bp, Artificial Sequence
  ENSG00000183814_23 (sequence is synthesized)
acatataaaagaaacctttgttgtttgttgaaagaaaatgaaggaacagggggaaaaaaggtgcaaaatgctaaatttctaaaaatggatttggcatgtcttcccatcagttcaggtcaa

SEQ ID NO: 657148 - DNA, 120 bp, Artificial Sequence
  ENSG00000183814_24 (sequence is synthesized)
aagtgcattgttgtgagatttattaaaaaaaaaatgataacacactattttcatatttttttgtttatttgcacaacttttaaaccagattactggttaaaatccaacagtacacaattt

SEQ ID NO: 657149 - DNA, 120 bp, Artificial Sequence
  ENSG00000183814_25 (sequence is synthesized)
ataaagtaaaaagattttataaggaaaacaaatataataaccagtgctgtgaaatgcagaagaaaggcttgttttggttgtttttcttttttaggaaaacgctgcctaaaatgttaatct

SEQ ID NO: 657150 - DNA, 120 bp, Artificial Sequence
  ENSG00000183814_26 (sequence is synthesized)
tgtaaaaagtatgtatttggaattttcttcgttttaatagaatattataaactcaaaatataaatttttttcaaatttggagtttaagatatagctgtagaggtggttttaattccttta

SEQ ID NO: 657151 - DNA, 120 bp, Artificial Sequence
  ENSG00000183814_27 (sequence is synthesized)
gatgtctcataaaatgagactttttatatgttaatgtataataaaactgaaacaagattattttccatttgaaatttttgtatagtttaaaaaggcttccgtattctttgttggtattgt

SEQ ID NO: 657152 - DNA, 120 bp, Artificial Sequence
  ENSG00000183814_28 (sequence is synthesized)
gccactgcagaactttagtgcagagtttatatttagctaaactgttatgttaattaagaaatgcataaatcttctattcttaatatttgtaattctaaataaattgatctatgaaaatta

SEQ ID NO: 657153 - DNA, 120 bp, Artificial Sequence
  ENSG00000183814_29 (sequence is synthesized)
gaaacagctgagcagaacagttctttagctgtcggcctaaatgaccaacttcatgacctctcaaggtctcgctccccggctgcacgcagctcagcttccaacattcgggaaaggcgtgcc

SEQ ID NO: 657154 - DNA, 120 bp, Artificial Sequence
  ENSG00000183814_30 (sequence is synthesized)
cggatcgcgaggggccgctgggaccgagtcccggacgtcgcgacgcgcagggggctgctgcggccggcggtctcgggaaaagtgaggggacggaggcgcccaagcaacgtgggtttcggg

SEQ ID NO: 657155 - DNA, 120 bp, Artificial Sequence
  ENSG00000183814_31 (sequence is synthesized)
ctgctgcttgcccagcggttgcaccggccgggacggacggccgtgccctccgctgggcaggtgggctgactgccagccccactgtggtcccctagtcctcccactccggtgttgccgccg

SEQ ID NO: 657156 - DNA, 120 bp, Artificial Sequence
  ENSG00000183814_32 (sequence is synthesized)
cgtcgccgcctttgttatggtgtctgtgtgttggtttctggggttgtgtgagcgccagggccggaaaccgagagcccgggagtccagcctgtgccaggcggaggcggtggctgctcccct

SEQ ID NO: 657157 - DNA, 120 bp, Artificial Sequence
  ENSG00000183814_33 (sequence is synthesized)
tcattttaatgtgaagttcatagtaattttcagtccaggttttaagaattatgcatatttgtgaagtactcatatattattatccgttaaatatatttgtaagagcttttcacttatatc

SEQ ID NO: 657158 - DNA, 120 bp, Artificial Sequence
  ENSG00000183814_34 (sequence is synthesized)
cagcctatggacagaatagaaatttcacatggattttgtatataaagaaatcaggacatatatttaggtttggggtcagcatggaggttgagcttagaggtagagcttccccagtcagtg

SEQ ID NO: 657159 - DNA, 120 bp, Artificial Sequence
  ENSG00000183814_35 (sequence is synthesized)
agagactcatcttctccttccagccccccgtggctcctttgcttctttagagcatatttgttcaactactactgaagtagaattatggctaatatattagaggagatttattccttccct

SEQ ID NO: 657160 - DNA, 120 bp, Artificial Sequence
  ENSG00000183826_0 (sequence is synthesized)
gcagcagccggggcggcggcgaggacggcggccacggaagcggccaagggggcggtggcgcagagaggggtgcggagcgggcggaagaggcgtctgtgtcgcagcttggtctcagaggag

SEQ ID NO: 657161 - DNA, 120 bp, Artificial Sequence
  ENSG00000183826_1 (sequence is synthesized)
catcgctgggaacaacgactatcgtctattccacaagatgagtaacagccaccctcttcgcccctttactgcagtgggggaaattgatcatgtgcacattttgtctgaacatattggtgc

SEQ ID NO: 657162 - DNA, 120 bp, Artificial Sequence
  ENSG00000183826_2 (sequence is synthesized)
cttgttgattggggaagaatatggcgacgtcacattcgtggtggaaaagaaacgttttcctgcccacagggtaattttagcagccaggtgccaatattttcgagcattattatatggtgg

SEQ ID NO: 657163 - DNA, 120 bp, Artificial Sequence
  ENSG00000183826_3 (sequence is synthesized)
aatgcgagagtctcagcctgaagcagaaattcctctccaagacaccactgcagaagcattcacaatgctactcaaatatatctacactgggcgggcaacgctgacagatgagaaggagga

SEQ ID NO: 657164 - DNA, 120 bp, Artificial Sequence
  ENSG00000183826_4 (sequence is synthesized)
ggtgctgctggactttttgagcctggctcataaatatggatttccagagctagaggattctacctctgagtatctctgcaccatacttaacattcagaatgtctgcatgacttttgatgt

SEQ ID NO: 657165 - DNA, 120 bp, Artificial Sequence
  ENSG00000183826_5 (sequence is synthesized)
tgccagtctctactcacttcccaagttaacttgtatgtgctgcatgtttatggataggaatgctcaggaagtcctctcaagtgaaggtttcctctccctttctaagacagcacttttaaa

SEQ ID NO: 657166 - DNA, 120 bp, Artificial Sequence
  ENSG00000183826_6 (sequence is synthesized)
catcgtgttaagagactcatttgcagctcccgaaaaagatattttcctagccttattaaactggtgtaagcacaattcaaaggagaatcatgctgaaatcatgcaggctgtgcgtttacc

SEQ ID NO: 657167 - DNA, 120 bp, Artificial Sequence
  ENSG00000183826_7 (sequence is synthesized)
tctcatgagcctcacagagcttctgaatgttgtgaggccttcaggactgctgtctcctgatgccatcctggatgccattaaagtgcgatctgagagccgggatatggacctcaattatag

SEQ ID NO: 657168 - DNA, 120 bp, Artificial Sequence
  ENSG00000183826_8 (sequence is synthesized)
aggcatgctcataccagaagaaaacattgcaactatgaagtatggagcccaagttgtaaagggggagctgaaatcagccttattagatggtgatactcaaaattatgatttggatcatgg

SEQ ID NO: 657169 - DNA, 120 bp, Artificial Sequence
  ENSG00000183826_9 (sequence is synthesized)
attttcaaggcacccaattgatgatgactgccgttccggcatcgagattaagctaggtcagccatccattatcaatcacatacggatactcttgtgggaccgagatagccggtcttactc

SEQ ID NO: 657170 - DNA, 120 bp, Artificial Sequence
  ENSG00000183826_10 (sequence is synthesized)
atacttcattgaagtgtcaatggatgaacttgattgggtcagagtgatagatcattcacaatatctgtgtcgttcttggcagaaattatattttccagcccgtgtctgcaggtatattcg

SEQ ID NO: 657171 - DNA, 120 bp, Artificial Sequence
  ENSG00000183826_11 (sequence is synthesized)
aattgttgggactcacaacacagtgaacaagatttttcacattgtggcttttgaatgtatgtttacaaacaaaaccttcactcttgagaaggggctgatagttcccatggagaatgttgc

SEQ ID NO: 657172 - DNA, 120 bp, Artificial Sequence
  ENSG00000183826_12 (sequence is synthesized)
aacaattgctgattgtgccagtgtgattgaaggagtcagtcggagccgaaatgccttgctgaatggggacactaagaattatgactgggattctggctacacatgtcaccagctaggaag

SEQ ID NO: 657173 - DNA, 120 bp, Artificial Sequence
  ENSG00000183826_13 (sequence is synthesized)
tggtgcgattgtggttcagttggcacaaccgtacatgattgggtcaatacggttactactttgggattgtgatgatcgaagctatagctactacgttgaggtttctaccaaccagcaaca

SEQ ID NO: 657174 - DNA, 120 bp, Artificial Sequence
  ENSG00000183826_14 (sequence is synthesized)
gtggaccatggttgctgacagaactaaagtctcctgcaagtcctggcagtcagtaacttttgaaaggcagcctgcctccttcatccgtatcgttgggacacacaacacagcaaatgaggt

SEQ ID NO: 657175 - DNA, 120 bp, Artificial Sequence
  ENSG00000183826_15 (sequence is synthesized)
gttccactgtgtccactttgagtgtccagagcagcagagcagccagaaggaggaaaatagtgaggaatcggggacaggggacaccagcctggccggtcagcagctcgactcccatgcgct

SEQ ID NO: 657176 - DNA, 120 bp, Artificial Sequence
  ENSG00000183826_16 (sequence is synthesized)
gcgggcgcctagtggcagctcactaccctccagcccaggctccaactcacgctcccccaaccggcagcaccaataaaggaggcagcgggcctggtgtgacttggtgggctcgggcaacgg

SEQ ID NO: 657177 - DNA, 120 bp, Artificial Sequence
  ENSG00000183826_17 (sequence is synthesized)
caggaaacggtctcctccctgagcaggggtctctgttgactgcccccacctctgcccctttccagggaggagccgacctagctgcaaaagcagacaccgaacaggttttctcccaaggac

SEQ ID NO: 657178 - DNA, 120 bp, Artificial Sequence
  ENSG00000183826_18 (sequence is synthesized)
agaaaggggctgctttgttcttctcaatttatccaaatcaggcaggtctcaagggggagaaaatgggtcttcaatcttcatcaagtccaccattaacaccctacctctctaatctagccc

SEQ ID NO: 657179 - DNA, 120 bp, Artificial Sequence
  ENSG00000183826_19 (sequence is synthesized)
aggcgcagggaacaggaggaagtcatagacaggcctgtgttggaatacaaaaatggcacgcaaacactcaggcggaggagaaagccattgggcctttgctacctggaggcaccctttagg

SEQ ID NO: 657180 - DNA, 120 bp, Artificial Sequence
  ENSG00000183826_20 (sequence is synthesized)
aatgggcctccatagagtgttcattctgctggaatacattgccctggcaactaaatgattttttatttgttttagttattctccactcagtgaatcataggtgttccggatctatttgaa

SEQ ID NO: 657181 - DNA, 120 bp, Artificial Sequence
  ENSG00000183826_21 (sequence is synthesized)
atgctcaaacagcaaatcactagttttaatcccttttgatgctataattttccttccttggttttgaacggttcagcttgcggggacagagacccatcgtgcatgtctcctaaatgagac

SEQ ID NO: 657182 - DNA, 120 bp, Artificial Sequence
  ENSG00000183826_22 (sequence is synthesized)
acggatgcagctcatcctggcacttgggccacagaggaagtgccacaaatgcacacaagcaaatcaacctgtggacactggagttaatagtcactcgtgtggctgagttactcacctgtc

SEQ ID NO: 657183 - DNA, 120 bp, Artificial Sequence
  ENSG00000183826_23 (sequence is synthesized)
attcctgacatggatccagcctttaagcttgggaggctgacaaggaaatagttactatgcccgctgctaattcactgttccgaagtccatgtagataaacatataccgagttctggcgtg

SEQ ID NO: 657184 - DNA, 120 bp, Artificial Sequence
  ENSG00000183826_24 (sequence is synthesized)
gccaaacctgccggggactgccgtggcttagctgcccctccagttgtgtttatcgaagcattggagaggcagccacctgcccatcagcgtcaggaacgcagaactgggactccgtgcttc

SEQ ID NO: 657185 - DNA, 120 bp, Artificial Sequence
  ENSG00000183826_25 (sequence is synthesized)
ccccacaccacagtactcaactggggactgaaaaatagcagttccaagaagcttttctcctaatcctcatcaaaaggacctcatttgacgatggtggcttgatgtggctccgtctcctac

SEQ ID NO: 657186 - DNA, 120 bp, Artificial Sequence
  ENSG00000183826_26 (sequence is synthesized)
ttagtgatttccattccagtgctgcctgccctgggtaactgcgcacaacattgcctgcccctccgctgtccccagagctccggcctctgtcgccatcagcatcagcctgggagtctcccc

SEQ ID NO: 657187 - DNA, 120 bp, Artificial Sequence
  ENSG00000183826_27 (sequence is synthesized)
aggacggcatggcacgtgagcagcactgcagtccttgggtcttcggcgccaacctgcaaccctgatcaaaggagggtgagggcgtgggagtttcctttcaggtgtgtcaaagacatatca

SEQ ID NO: 657188 - DNA, 120 bp, Artificial Sequence
  ENSG00000183826_28 (sequence is synthesized)
gctgcgctctagaaagagccaacgggtcagccgcttcctcctagtttaacttgattttgagtgatttgtccatatggaaatagtagggtagcatcaaactgcgtgattaaattggaagac

SEQ ID NO: 657189 - DNA, 120 bp, Artificial Sequence
  ENSG00000183826_29 (sequence is synthesized)
tgtctttccgtgtgaacacaggatggcagacatcagagggctaccggggcagggtggacacgttcctgaggagaagccagggtctgcagctctccatcctccccggtagctccagctgca

SEQ ID NO: 657190 - DNA, 120 bp, Artificial Sequence
  ENSG00000183826_30 (sequence is synthesized)
gggctgagctgcttcctatcccctcagctctgatctctgccacttccctgttgtgtgggagagtggaacactcctgggatgccaggcatttcataatgggaggaggctcctgtaaggaac

SEQ ID NO: 657191 - DNA, 120 bp, Artificial Sequence
  ENSG00000183826_31 (sequence is synthesized)
ggtgggcgcccgctcacagtggggggccctccagcatggttgctgactctgtcagcccccagccccgggttgccaattagccagagagctcctgcacacacagcacttccttccccagtg

SEQ ID NO: 657192 - DNA, 120 bp, Artificial Sequence
  ENSG00000183826_32 (sequence is synthesized)
tgttttctacccagatggggacaaaggagccagacagtcatatcaagggcagagttcaaacattttgaaatgagccattcacatgcttctttttaaacatgggcatcacctgcccagagg

SEQ ID NO: 657193 - DNA, 120 bp, Artificial Sequence
  ENSG00000183826_33 (sequence is synthesized)
cccttggcctgaagcagcatgctgctgaccttgggaagagagggtgggctggtgggggtgctggaggagctgcccggccctgcatctgcaaccctccagtcccctgcccacagagcacgc

SEQ ID NO: 657194 - DNA, 120 bp, Artificial Sequence
  ENSG00000183826_34 (sequence is synthesized)
agagccctcctgtgctccgggaacgagatagcagcttggcagctcggcctcgcatctgaaaaggaatacgctgcaaagcctcggccctagacccacatctgcagctccctggcctgtggc

SEQ ID NO: 657195 - DNA, 120 bp, Artificial Sequence
  ENSG00000183826_35 (sequence is synthesized)
ttcggggcatgcccttccagatctctgtccctcctgtcttctagcactttaaagatgccccttatcatcagataaagagaagtatggggacgatggggtggcactaacagtagatgtcat

SEQ ID NO: 657196 - DNA, 120 bp, Artificial Sequence
  ENSG00000183826_36 (sequence is synthesized)
tggtgaggactgatggcaaagtctcattccctcacagccgcgctgccagctcgcctccccctcgctttgctgggagcctgccctggactccaaaaggacacgggttcacctcctttccca

SEQ ID NO: 657197 - DNA, 120 bp, Artificial Sequence
  ENSG00000183826_37 (sequence is synthesized)
ggctggaggggtactgcccttccctgaggggccttctgactggggcaggaactcttttcgtgtgtccagctgggcctggaggccaagtcaaggtgtgtcacaccacacaccagggcaagg

SEQ ID NO: 657198 - DNA, 120 bp, Artificial Sequence
  ENSG00000183826_38 (sequence is synthesized)
acctcatctccagggaacagggacaagtgagtggctaccagaaagtccccgggcagcctggagttccccagagcctggctggtcctacagagcacttctcccctgggccaccaggaccaa

SEQ ID NO: 657199 - DNA, 120 bp, Artificial Sequence
  ENSG00000183826_39 (sequence is synthesized)
agcgacctaaacacttgaagctaaaagcaagtgctgatgatgggatgggctggcacgtggctgggagggctcctgggcaccacagagccctcagcccagcagagagtggaggctcagtcc

SEQ ID NO: 657200 - DNA, 120 bp, Artificial Sequence
  ENSG00000183826_40 (sequence is synthesized)
gtggggagcgggggttgtgaaggagacatggccaagcccctggtcggggagataagctcccccatgcccaggccagccccaggggcaacaagccaacatggagagaggtggcaggtgagg

SEQ ID NO: 657201 - DNA, 120 bp, Artificial Sequence
  ENSG00000183826_41 (sequence is synthesized)
ctgacaggtgggtgcctgtggcctgggcccatgagggcaatggtcctcagtaaccaatggaaaggacacaagggcgccatggtcaccaccacccaggcaaagaaatgggaggtggccagc

SEQ ID NO: 657202 - DNA, 70 bp, Artificial Sequence
  ENSG00000183826_42 (sequence is synthesized)
agaaaggcaacttcattggagcttttggggaaaaaagccttcaaagtcaccttctggcagctctggggag

SEQ ID NO: 657203 - DNA, 120 bp, Artificial Sequence
  ENSG00000183826_43 (sequence is synthesized)
aaaaaagccttcaaagtcaccttctggcagctctggggagggtcatttggggtggactgagagtgtagggcaggtagggtgtgtgctgggcagcagctgtgtccatgcagccagcaccca

SEQ ID NO: 657204 - DNA, 120 bp, Artificial Sequence
  ENSG00000183826_44 (sequence is synthesized)
agccagcacccagcagggcagtctcacaggagccgttgtgagcactttggacttgaagcagctatgaaccaccccccgcccccaccgtctctccctctcacacacacacacacacacaca

SEQ ID NO: 657205 - DNA, 120 bp, Artificial Sequence
  ENSG00000183826_45 (sequence is synthesized)
cacacacacacacacccgttttaccattttctcagtgctttttctgctttcattcctttgattttagttagaagcacaagccatgatggatgtgggactcttctcaattgctctttaaat

SEQ ID NO: 657206 - DNA, 120 bp, Artificial Sequence
  ENSG00000183826_46 (sequence is synthesized)
tgtcactttttaaatcctattaaatgaagtgtcgattcctgacaaatacattaaaagtgttttattcctagaagagttgggaaaagaaattattttcagcaagagtaggatgtttgttaa

SEQ ID NO: 657207 - DNA, 120 bp, Artificial Sequence
  ENSG00000183826_47 (sequence is synthesized)
actgattccttggcaaaaaagagaaaaaaagcttttgaattgtgcaaaaaattgcccagtattatgctgtcgccccagttgtcaaactgctgtgcagatggctccagcccagtcaacttc

SEQ ID NO: 657208 - DNA, 120 bp, Artificial Sequence
  ENSG00000183826_48 (sequence is synthesized)
accttctttttaatttagaagataacaaaattgtaatcacttatcctttccagagccaagggggaaaaggaaggtataatctacaataaaaagcgagcgttctgtgtactgaggccactt

SEQ ID NO: 657209 - DNA, 120 bp, Artificial Sequence
  ENSG00000183826_49 (sequence is synthesized)
ggtgataaagagatggagcgctcccctcacagacttcaattaagaacctccctttggacagggaagaaaggtgtcaaagaggaaaagaaaattaaatttgcttccttccaggagtttttc

SEQ ID NO: 657210 - DNA, 120 bp, Artificial Sequence
  ENSG00000183826_50 (sequence is synthesized)
ctcattagtgcttgcttgtcggtgttattattttaatcttaccttctatgtggtgaccagctcctccgagcgatgcccaggtcgggcacggcccgggcagggcaggtctgcagcgatgcc

SEQ ID NO: 657211 - DNA, 120 bp, Artificial Sequence
  ENSG00000183826_51 (sequence is synthesized)
gtggcagaggtgggcatactccatttgttttggcagctgcagccattgattctgcatatttttcctgacaacagccccggcaggagttcagttaggaatttaaagtgcagttcatggttc

SEQ ID NO: 657212 - DNA, 120 bp, Artificial Sequence
  ENSG00000183826_52 (sequence is synthesized)
tgtgccaccgtggcttttattattataatattaaattagaagttgtcctagtgcctggtgtttgctcagagtttccagaagagagggaagggcaaggtttaaatggcatgcaggacaact

SEQ ID NO: 657213 - DNA, 120 bp, Artificial Sequence
  ENSG00000183826_53 (sequence is synthesized)
ggaatgcccccatctctctcgctgacacggatccagtcatacctggggctggacgggatttggaggccctggtcatttgcagagtgaatggtgaagggcgcggaaaaggtttgcttggag

SEQ ID NO: 657214 - DNA, 120 bp, Artificial Sequence
  ENSG00000183826_54 (sequence is synthesized)
gaaagaccggttgcagaggcgaggcggagggaggaggggcggaggcagcaggtctttgtttgtggtaggtctctggcttccatcagggaggaggaaagaggctgtgcccttcctggctct

SEQ ID NO: 657215 - DNA, 120 bp, Artificial Sequence
  ENSG00000183826_55 (sequence is synthesized)
tggctgcaccactgaggacgctccgagggacagcgtgctcacccatcctttgcacagtgctggccccaagccccacggccttccagctaggattttctgctgggctcatgcagaggcagg

SEQ ID NO: 657216 - DNA, 120 bp, Artificial Sequence
  ENSG00000183826_56 (sequence is synthesized)
ggacaggtgcatggaagagccgccccacccgacacaccattgtttgaaaatcactgttctctttactcacttaaaaaagtgtacagggaacacctgttcctggcataatgctccaacctc

SEQ ID NO: 657217 - DNA, 120 bp, Artificial Sequence
  ENSG00000183826_57 (sequence is synthesized)
gcggaaggggccaggtgcccttcatctggctctggctgcttccgacctgggcccacgtcatcgttcacgtcctctgtgaccaccactggtcacggtgctccctggcccagcctccaaccc

SEQ ID NO: 657218 - DNA, 120 bp, Artificial Sequence
  ENSG00000183826_58 (sequence is synthesized)
acccagcaccctggcatctcccaggccagtctgctgcacccagcgagcttccagtcagaagccaggctgaacggccctcctgccccatcagcttcgtgtcttcttttttttaaagaactg

SEQ ID NO: 657219 - DNA, 120 bp, Artificial Sequence
  ENSG00000183826_59 (sequence is synthesized)
aaatagtccccaagaggcctcatggcctgaagactcacaatcatccacctgtaatttatgataaatgtctgggagcatttaccatttgcgtccgtgagtatttatagccctgaatgggcg

SEQ ID NO: 657220 - DNA, 120 bp, Artificial Sequence
  ENSG00000183826_60 (sequence is synthesized)
ggggggagggggggtggaggaggccctgcagccaggagctacacacctgtccccactagtgtcccctggttgacagagccccctcagcctccccaaggctgtcactgcggctgtgacagc

SEQ ID NO: 657221 - DNA, 120 bp, Artificial Sequence
  ENSG00000183826_61 (sequence is synthesized)
tgaggagtgccgcctttgaaagccagtggacagtcgctccactagggggagaggccctggccctggcgcagaggaggcgttgcgaggcgggacgggggctggaggggctgagcagccttc

SEQ ID NO: 657222 - DNA, 120 bp, Artificial Sequence
  ENSG00000183826_62 (sequence is synthesized)
agggcagggactgggccctgggtcactggagacgttgatattagtccgtctgctgccaaattgctccccaccacatgagccccaggggtttatgtcccaggaaggcgagggtgcccatct

SEQ ID NO: 657223 - DNA, 120 bp, Artificial Sequence
  ENSG00000183826_63 (sequence is synthesized)
gagcggaattgggaggggacggcaccagctcatctccctcagggcctttgcctcctggtgctgccctggtggctgctcctgcaccacagcccctgatggctgctgctagtcctgagttgc

SEQ ID NO: 657224 - DNA, 120 bp, Artificial Sequence
  ENSG00000183826_64 (sequence is synthesized)
tgggtttacccccagcccacacttcccacctgggcctgagggtgcggccagtgccctagtcctagccactacaggagtcattctgagacctgctggaggccatggggtcttcccaggccc

SEQ ID NO: 657225 - DNA, 120 bp, Artificial Sequence
  ENSG00000183826_65 (sequence is synthesized)
ctcaatcagctgcttccagggtcagcagggcagggtgctgccagtaaggtcctcagggagcacagcccggccgcccaggctgggggatactggggcagagcttccaggtctgtggggcct

SEQ ID NO: 657226 - DNA, 120 bp, Artificial Sequence
  ENSG00000183826_66 (sequence is synthesized)
gatctctccccaaggctctccaggccttggtgcgccctccacagtgaccttcagagaggctgcaccccctcagaagaacagtgagaaatctctccatcacacgctccctggtccttatgt

SEQ ID NO: 657227 - DNA, 120 bp, Artificial Sequence
  ENSG00000183826_67 (sequence is synthesized)
ccctgaggccacccttccccaccccccagtgcctggagaagcgtgagactctggaggggcgccaggaggccaggggtcctcagggctaggcctggagctcggcccaagagctgcttttgc

SEQ ID NO: 657228 - DNA, 120 bp, Artificial Sequence
  ENSG00000183826_68 (sequence is synthesized)
gaagcctgtcttgaatccggattcaccagagaacaagagcctcccagcctttggcgtttctgggcctgtaaagatgtgtgtacctcccaggccactctgatgcaagggcagggaccatgc

SEQ ID NO: 657229 - DNA, 120 bp, Artificial Sequence
  ENSG00000183826_69 (sequence is synthesized)
caggcctgggttgggaatggctctgtgactccagaagctccgtctaaaactccaaagatgcccaaaaggctgtgctgctatgtggaatgtgtattatttgtgagcacgatgcggcttctt

SEQ ID NO: 657230 - DNA, 120 bp, Artificial Sequence
  ENSG00000183826_70 (sequence is synthesized)
cctcattttgcagagcaacctaagcgggcagatgtacaaaccgtgtgttcgaaacccctgagtccatgtgtgtgaaaatgcaggttttctcttagaaataaagtggtgacttgtgctgta

SEQ ID NO: 657231 - DNA, 120 bp, Artificial Sequence
  ENSG00000183826_71 (sequence is synthesized)
aagggggcggtggcgcagagaggggtgcggagcgggcggaagaggcgtctgtgtcgcagcttggtctcagaggagcatcgctgggctcgtctcaatttggccctgctgtatttcaagtgc

SEQ ID NO: 657232 - DNA, 120 bp, Artificial Sequence
  ENSG00000183826_72 (sequence is synthesized)
tcggtagccacatgtggcaagtggccatcactgtggccattgcagctccaaagggacaggagagttgatggaaattagacactgcattctacagcctcatgagcccaagagagcaaacct

SEQ ID NO: 657233 - DNA, 120 bp, Artificial Sequence
  ENSG00000183826_73 (sequence is synthesized)
catgtttattgttccaagggagcctcatcaaaaccacttttaaagcattgagaatccaaataaataccatggatcatacaggattggggataagtcttgaggtctccccgagaaggagaa

SEQ ID NO: 657234 - DNA, 120 bp, Artificial Sequence
  ENSG00000183826_74 (sequence is synthesized)
gttctttaatttggtaattttagggtaatggttggatgctctctggattaatggaaaccttcaggggtacttttaggcagagtataacccagtgaagagcaaatcctatttgagggtttc

SEQ ID NO: 657235 - DNA, 120 bp, Artificial Sequence
  ENSG00000183826_75 (sequence is synthesized)
ggagccaggtgccggcagggcagccacaccctggggccccctgttctggaggggcagagggtcgggccgatgcgaaaaagccgcggaagctgccttaggcgactttctgggcctgcatcg

SEQ ID NO: 657236 - DNA, 80 bp, Artificial Sequence
  ENSG00000183828_0 (sequence is synthesized)
agagccgcggtcacgcgcccgcccgaaggctcctgtcgggacagggcgccgccccgtgtcggcccccgcagagctcgcgg

SEQ ID NO: 657237 - DNA, 120 bp, Artificial Sequence
  ENSG00000183828_1 (sequence is synthesized)
ggcgtccgtgggccgctgcgccgcctcaccctacctgcggccgctcacgctgcattaccgccagaatggtgcccagaagtcctgggacttcatgaagacgcatgacagcgtgaccgttct

SEQ ID NO: 657238 - DNA, 120 bp, Artificial Sequence
  ENSG00000183828_2 (sequence is synthesized)
cttattcaactcttctcggaggagcctggtgttggtgaagcagttccggccagctgtgtatgcgggtgaggtggagcgccgcttcccagggtccctagcagctgtagaccaggacgggcc

SEQ ID NO: 657239 - DNA, 120 bp, Artificial Sequence
  ENSG00000183828_3 (sequence is synthesized)
cagccctgcccggctcagcgggggtgacagttgagctgtgtgccggcctcgtggaccagcctgggctctcgctggaggaagtggcttgcaaggaggcttgggaggagtgtggctaccact

SEQ ID NO: 657240 - DNA, 120 bp, Artificial Sequence
  ENSG00000183828_4 (sequence is synthesized)
tggccccctctgatctgcgccgggtcgccacatactggtctggagtgggactgactggctccagacagaccatgttctacacagaggtgacagatgcccagcgtagcggtccaggtgggg

SEQ ID NO: 657241 - DNA, 120 bp, Artificial Sequence
  ENSG00000183828_5 (sequence is synthesized)
gcctggtggaggagggtgagctcattgaggtggtgcacctgcccctggaaggcgcccaggcctttgcagacgacccggacatccccaagaccctcggcgtcatctttggtgtctcatggt

SEQ ID NO: 657242 - DNA, 120 bp, Artificial Sequence
  ENSG00000183828_6 (sequence is synthesized)
tcctcagccaggtggcccccaacctggatctccagtgagactccagggttctagacagaggccagtcttggccactcaccccacaccccgcggaccccaataaaggcttgcatagctcca

SEQ ID NO: 657243 - DNA, 120 bp, Artificial Sequence
  ENSG00000183828_7 (sequence is synthesized)
gaccccagctgaggtcttggggaaggaggagggtgtcacagacccccacccccaccagctgagcaccagcctccacagcctcctccagaggccagggcccgctccactgggagaagcacc

SEQ ID NO: 657244 - DNA, 120 bp, Artificial Sequence
  ENSG00000183828_8 (sequence is synthesized)
ggaagtctctgcacctgtcagcctggcacatgggccactcagggttgagcctggggccctcccacctcagcagcctcaaggacttcacctgggcacgttcctggctggatgggtggactc

SEQ ID NO: 657245 - DNA, 64 bp, Artificial Sequence
  ENSG00000183828_9 (sequence is synthesized)
gacttcacctgggcacgttcctggctggatgggtggactcccaagttaaaggcagcatttccac

SEQ ID NO: 657246 - DNA, 62 bp, Artificial Sequence
  ENSG00000183828_10 (sequence is synthesized)
ggtcaggagttcgagaccagcctgaccacatggagaaaccccgcctctgctaaaagtacaaa

SEQ ID NO: 657247 - DNA, 120 bp, Artificial Sequence
  ENSG00000183828_11 (sequence is synthesized)
gtcccacctccctgctggctgttggcccttcccagcatggcggttgcttccccttcagggccagcaggactggcctgaatttctccctttctggcgttgaaacaccctctggagggcttc

SEQ ID NO: 657248 - DNA, 120 bp, Artificial Sequence
  ENSG00000183828_12 (sequence is synthesized)
gtgatcgggccatgcccgcctaggatgctctcccttctgatgagctcaagtcaccggttagggtccttaatcacatcgacaacacccaccccacctggtctggagtgggactgactggct

SEQ ID NO: 657249 - DNA, 120 bp, Artificial Sequence
  ENSG00000183828_13 (sequence is synthesized)
ccccccgcctcccatcctgccagctggaatacagcaggtctgggtcctggccagactgtgaccctggaaagctctggtcccgcctgggcctcagccatcctatctgagcaaggggcctga

SEQ ID NO: 657250 - DNA, 120 bp, Artificial Sequence
  ENSG00000183828_14 (sequence is synthesized)
cctccctgggctgctggcaaggagcgtgaccgttctcttattcaactcttctcggaggagcctggtgttggtgaagcagttccggccagctgtgtatgcgggtgaggtggagcgccgctt

SEQ ID NO: 657251 - DNA, 120 bp, Artificial Sequence
  ENSG00000183828_15 (sequence is synthesized)
cgccacatactggtgagtgggaccaggccctcaggcctgtggtgtgactcaggagatgggagagagtgagggccccgtccctgggagtgtgcaagcaggatggattcctccttgttttcc

SEQ ID NO: 657252 - DNA, 120 bp, Artificial Sequence
  ENSG00000183831_0 (sequence is synthesized)
gctatggtaaccgaggaggccggggcccgggtgtggtatttttggagttaatggagtcagaaggacctccagagtcagagagttcagaatttttctcacagcaagaagaggaaaatgaag

SEQ ID NO: 657253 - DNA, 120 bp, Artificial Sequence
  ENSG00000183831_1 (sequence is synthesized)
aagaagaagcccaagaaccagaggaaacaggccctaagaacccccttttacaacctgctctcacaggggatgtagagggtttgcagaagatatttgaggatcctgagaatcctcatcatg

SEQ ID NO: 657254 - DNA, 120 bp, Artificial Sequence
  ENSG00000183831_2 (sequence is synthesized)
aacaggccatgcagcttctcttagaagaagacatcgttgggagaaatttgttgtatgcagcttgcatggctgggcaaagtgacgtgattagagctttggcaaaatatggtgtgaatctga

SEQ ID NO: 657255 - DNA, 120 bp, Artificial Sequence
  ENSG00000183831_3 (sequence is synthesized)
atgaaaaaaccaccagagggtacacactcttacattgtgctgcagcctggggtcgtttggaaactttgaaagcactggtagaactggatgttgatatagaagctttgaacttccgggaag

SEQ ID NO: 657256 - DNA, 120 bp, Artificial Sequence
  ENSG00000183831_4 (sequence is synthesized)
aaagggctcgagatgttgctgctagatattctcagactgagtgtgttgaattcctggactgggcagatgcaaggctgactctgaaaaaatatattgcaaaagtctctttagctgttactg

SEQ ID NO: 657257 - DNA, 120 bp, Artificial Sequence
  ENSG00000183831_5 (sequence is synthesized)
acacagaaaagggatcagggaaactccttaaggaagacaagaataccatcctcagtgcatgccgtgcaaaaaatgagtggttggaaacccatacagaagcttccattaatgagctttttg

SEQ ID NO: 657258 - DNA, 120 bp, Artificial Sequence
  ENSG00000183831_6 (sequence is synthesized)
agcagagacaacaactggaagatattgtgactcctatcttcacaaaaatgactacaccatgtcaagtgaaaagtgccaaatctgtaacaagccatgaccagaagagaagtcaagatgata

SEQ ID NO: 657259 - DNA, 120 bp, Artificial Sequence
  ENSG00000183831_7 (sequence is synthesized)
cctccaactgaacatacgttctgtaaaaggccacattttcttttagtatctgaaaggcaaacctattcatgccatttgaaatcgagaaaacagatgtgggtttctttaagtatttaagta

SEQ ID NO: 657260 - DNA, 120 bp, Artificial Sequence
  ENSG00000183831_8 (sequence is synthesized)
caacattacatcgcccttgttttgtttgacctgttcagcatgcttatgtccggactctggcctcgcctctgctcctccaagcacagccccatgtgagtttcacgtgctccttcaggaaag

SEQ ID NO: 657261 - DNA, 120 bp, Artificial Sequence
  ENSG00000183831_9 (sequence is synthesized)
cacttgggtataaatcattcgtgaagaccatgtggaggctttaagaactactcagagaatctaataattttctgtgtaattgaggcattccatataaaaggacatatttggctatttcca

SEQ ID NO: 657262 - DNA, 120 bp, Artificial Sequence
  ENSG00000183831_10 (sequence is synthesized)
gagaaaaaatttgttctccctgcctaaaaaggaaatcttatggaatgacacttggagcaaggaaatattaagaccagcttggattaggagcctctgggtacaactatcactttttatgtc

SEQ ID NO: 657263 - DNA, 120 bp, Artificial Sequence
  ENSG00000183831_11 (sequence is synthesized)
gaggtggggtatacctctgagtaaaacccctctttatctttgacctccttctatctgtaaattaataaacacaaatctgtatagttttatacttagaagagttctcctattctgtaaggc

SEQ ID NO: 657264 - DNA, 120 bp, Artificial Sequence
  ENSG00000183831_12 (sequence is synthesized)
tggcaatacagatattgtaactggactgaagaccatttcccctcccattctgttttatatttcctaggttttaagtacgatagttggtttcatattggtggtttggaaagccttttttct

SEQ ID NO: 657265 - DNA, 120 bp, Artificial Sequence
  ENSG00000183831_13 (sequence is synthesized)
aatttatttaatcaggcgcctcaaccttctcttacgttgtgactttatggaaaagttttatagaaaagaagatggtttttaaaaagcacttattgttcgttcttatggctttctcttctt

SEQ ID NO: 657266 - DNA, 120 bp, Artificial Sequence
  ENSG00000183831_14 (sequence is synthesized)
tgtcctgttctgaaagctagttttcccttatggggagaaggaaaaggaatgggtaattcagtaatactttgtcagttgacatttatttaaccatggttttgagataaccctgttttaaat

SEQ ID NO: 657267 - DNA, 120 bp, Artificial Sequence
  ENSG00000183831_15 (sequence is synthesized)
gtctcccaaagtttttagttttttatccttttaatgtatgagcaattcagtttcaattttttaaagcaaaagaacactgcaataactttcagccacctttttggccgacccagtgggtgt

SEQ ID NO: 657268 - DNA, 120 bp, Artificial Sequence
  ENSG00000183831_16 (sequence is synthesized)
ttatggagcagtacaaagaagacctgtgtttgctccttttttttttttaccctccttctcccttctcccttttcccttcccttccccttctccttcctctcccttcctctcccttcccct

SEQ ID NO: 657269 - DNA, 120 bp, Artificial Sequence
  ENSG00000183831_17 (sequence is synthesized)
cccttcccctcccttcccctcccttcctctcccttcctctcccctcccctcccttcctctcccctcccctcccttcctctcccctcccctccccctcctcttctctctcctcctcctctt

SEQ ID NO: 657270 - DNA, 120 bp, Artificial Sequence
  ENSG00000183831_18 (sequence is synthesized)
ccctctccaactccttcttcttcctctcttatctctctctctctctccacccccgcaaccttcttgacagggtctgcctctcctgcccaggctggaatgcagtggagttatcatgatcat

SEQ ID NO: 657271 - DNA, 120 bp, Artificial Sequence
  ENSG00000183831_19 (sequence is synthesized)
agctcactgtaacctgtaactcctgcactcaagtgatcctcccaccatgcttgggtaattgaaaaaataaacatttgcaggctgggtgctggctcacacctgtaatccaagaactttggg

SEQ ID NO: 657272 - DNA, 120 bp, Artificial Sequence
  ENSG00000183831_20 (sequence is synthesized)
tattttgtcttttttctctcatcagtattacttatgactacctaaagatgcaatgtaatatctttaaggttagatatatttgatgtgcctgttttatactttacatatatgtgtatatac

SEQ ID NO: 657273 - DNA, 120 bp, Artificial Sequence
  ENSG00000183831_21 (sequence is synthesized)
atctatatgggtgtatgtatgtgtatacatgtaaatgtatcaatgttgatattacatagtatagtattttagaacatagactttactatttattagctgtgtgacttggcaagttacctg

SEQ ID NO: 657274 - DNA, 120 bp, Artificial Sequence
  ENSG00000183831_22 (sequence is synthesized)
atctttttgtgtatctgtttttccatctgcaaaatggggataataattatattttccttatagggtataatgaggattaaataggataaaataaatattttagtgcttggcatatcgtaa

SEQ ID NO: 657275 - DNA, 120 bp, Artificial Sequence
  ENSG00000183831_23 (sequence is synthesized)
ggcatatcgtaaattgatatatagtaaatgtgtaataatttactgttatctctttcctttgaagatttattaattttttagcaatcattatctaagtcgctttttaaattcagtaattat

SEQ ID NO: 657276 - DNA, 120 bp, Artificial Sequence
  ENSG00000183831_24 (sequence is synthesized)
gaaaataaaaaaaagatcatcagcatgatcttcagcaaagaaaggatatacattctcttcatgctcacatggaacatttaaaaaatattgatcatatgttgagccataaaggaagtctta

SEQ ID NO: 657277 - DNA, 120 bp, Artificial Sequence
  ENSG00000183831_25 (sequence is synthesized)
acaactatcaaagtatctatagcatatagtctttgatcagtgactacaacaaaataaaattaaaaagtagtaacaaaaaggtaactgaaaactgaaaacaagaacacacttcatttattt

SEQ ID NO: 657278 - DNA, 120 bp, Artificial Sequence
  ENSG00000183831_26 (sequence is synthesized)
gtgctgggattacaggtgtgagctatgcatccagccaagaacacactttaaatcatctattggtcacagaagatataatgaaaattatgaaatgtttaagtgacaacagcatcactctat

SEQ ID NO: 657279 - DNA, 120 bp, Artificial Sequence
  ENSG00000183831_27 (sequence is synthesized)
tgtttaagtgacaacagcatcactctatgtctgaacccatgggatacaactaaaattaaaattctagtataatacatatattagaatataagaaacataaaaaatttagtaaacaaagca

SEQ ID NO: 657280 - DNA, 120 bp, Artificial Sequence
  ENSG00000183831_28 (sequence is synthesized)
tttgactgaagaaattagaaaaagaacaactgagtaaccaaagaaaataaaagaaaaataattgaataaattaatgacattgaaaataaagaaataggccagaggccaggtgcagaggct

SEQ ID NO: 657281 - DNA, 120 bp, Artificial Sequence
  ENSG00000183833_0 (sequence is synthesized)
gttaccatagcgacgtgcacgcagtagccaggcctgacccgctggtcccttgctggcgggaggaaagaggcggcaccatgagccacgcagtaaccatcgaggagccccaggcccagccgc

SEQ ID NO: 657282 - DNA, 120 bp, Artificial Sequence
  ENSG00000183833_1 (sequence is synthesized)
aggtgtctcaaactcggtaccgggagaggtcgcgggctgggagccacatctcctccaatcgagcgtatgattttctgtacgatccattgtttattgtgtcaagtgagaaagaccatacac

SEQ ID NO: 657283 - DNA, 120 bp, Artificial Sequence
  ENSG00000183833_2 (sequence is synthesized)
aggcaaatatccaagctaccctgattcgcagcagactgagaaaagttcccaggtttaaaaccatgttcagtaacctgatccattatccaagatattctctatattggagcaagtcagatc

SEQ ID NO: 657284 - DNA, 120 bp, Artificial Sequence
  ENSG00000183833_3 (sequence is synthesized)
ctgtcccaccatttatcagtcgggaatggaagggacataaggagaaacacagagaagccctccggcagctcaccacaactgacgcttcttttcagatgcctaaagaagtttatgaagatc

SEQ ID NO: 657285 - DNA, 120 bp, Artificial Sequence
  ENSG00000183833_4 (sequence is synthesized)
ctgaagttactggaaagaatcgctataaatactttgaaaggccttttctcccattttttcagcagatgccattcaatgttgtttatgccgtatccaaggcagaaccatacacttttcctc

SEQ ID NO: 657286 - DNA, 120 bp, Artificial Sequence
  ENSG00000183833_5 (sequence is synthesized)
ctacttctactaagcacctatccatcccttcaaagtctactgtgggcactcagactgattatcgggatgctgacgttcaaacagatccatactctgcagaatatgtagtatgtcaggact

SEQ ID NO: 657287 - DNA, 120 bp, Artificial Sequence
  ENSG00000183833_6 (sequence is synthesized)
caatccctgagctcttgaccctggctacgcttacttggggtcggggtctcccagcaggacaagctgaggtggagatgatagaaagagcccgcgagaagcgtgcttgggaagcctctctcc

SEQ ID NO: 657288 - DNA, 120 bp, Artificial Sequence
  ENSG00000183833_7 (sequence is synthesized)
ccgctctgagtgacacctcccagtttgagaagaggaggaaaatgatgaatgaaatggagaggaaggagtgggccttcagagagcaggagattgaaaaactgcaggagattcgcctggaag

SEQ ID NO: 657289 - DNA, 120 bp, Artificial Sequence
  ENSG00000183833_8 (sequence is synthesized)
ttctaaaagagctgttgaggaagcgtgaagagaatcagaatgaagtgaatatgaagcacttgaatgcccggtggtctaaactgcaggagggaaaagaggcaaaaatggcaaaaattcagc

SEQ ID NO: 657290 - DNA, 120 bp, Artificial Sequence
  ENSG00000183833_9 (sequence is synthesized)
gcacgcatgtatcaacaatcagaaaacttgtaggaaagagaaagaatatagaagggaagttggagagaagaaatatcatcaaggattattctgattatgcatcacaggtctatggacctc

SEQ ID NO: 657291 - DNA, 120 bp, Artificial Sequence
  ENSG00000183833_10 (sequence is synthesized)
tgtctcgtcttgggtgtttcccagacaacaactcagaggactttgtagtaaaaaactactatctcaacacctatgaaggattagtggaacttgagtcatgtctcccagattttgtgacac

SEQ ID NO: 657292 - DNA, 120 bp, Artificial Sequence
  ENSG00000183833_11 (sequence is synthesized)
aaccccaaatcagagctccaaaacctaaagtcattaccaccaaagctggttttctgaagagggcagcaaggttggactatgagttggcagaggttcataaggcactgttggataagaaga

SEQ ID NO: 657293 - DNA, 120 bp, Artificial Sequence
  ENSG00000183833_12 (sequence is synthesized)
ataaagttcttgaagtaaagaaaccccctcgcttccttcaaagaaacccaatacctcaacctcggcttccaactccaaccttggaaatgacgtccaatgaagaagaagaaatggaaatgg

SEQ ID NO: 657294 - DNA, 120 bp, Artificial Sequence
  ENSG00000183833_13 (sequence is synthesized)
ctgtgatctaccttcaaaagttactccggggcagagtcgttcagaacatgatgtttgaagggaaagaaaagcgactggagttgatccaggagttgcgcacctgccacgcactacaagaag

SEQ ID NO: 657295 - DNA, 120 bp, Artificial Sequence
  ENSG00000183833_14 (sequence is synthesized)
atgaaaagctggtgaaaaaagccgagaagcaagtgaccctggccttacagcggcagaggaacttgcatgagcacaaggtgtcactggttgaaaaccatttggccggactggaaggaaggg

SEQ ID NO: 657296 - DNA, 120 bp, Artificial Sequence
  ENSG00000183833_15 (sequence is synthesized)
cactagcagacatgtttgacttcctgtccaaagagctggtgagactgcaggaggagaggaggatccatgcctttgtcatgctggctgagcgccagcggcgggtacgagaggctgaagaga

SEQ ID NO: 657297 - DNA, 120 bp, Artificial Sequence
  ENSG00000183833_16 (sequence is synthesized)
gtggtcggcgccaggtggaaaaacagcgcctgcgggaggaggacgagatatttaaggaggtggttaaagttcaccatagtactataagctcctacctagaagacataatactgaataccg

SEQ ID NO: 657298 - DNA, 120 bp, Artificial Sequence
  ENSG00000183833_17 (sequence is synthesized)
aagcgaatactgcagaagaacaagccagggcagaaatagagaagatggctgagaaaatcaatgacattgcttatgaaatggaaagccgccgaacctatcttcagtcagaggagattgttg

SEQ ID NO: 657299 - DNA, 120 bp, Artificial Sequence
  ENSG00000183833_18 (sequence is synthesized)
tacacggaaagcatggttcaaaagaaattaactgagggagagcaagatgaggcctcaaatgctgccatgttacttgagaaagaaactcaaaatgagaacaacagctaagattgtgatttt

SEQ ID NO: 657300 - DNA, 120 bp, Artificial Sequence
  ENSG00000183833_19 (sequence is synthesized)
tttgtaaaagaagctgtacgaatcatcataaataattccaatagtctgcacttctcccaaggtgtgcactgctcataaacttgccagtgtgtgattcatgagaaaggagatttattttcc

SEQ ID NO: 657301 - DNA, 120 bp, Artificial Sequence
  ENSG00000183833_20 (sequence is synthesized)
ttaaacatccaataatttaaaatgattttcaataataataatcaaatgaaaaagcttcattctcttcagtgtcttctagatgccctacttaaagagaacattttcttatgtctcatttca

SEQ ID NO: 657302 - DNA, 120 bp, Artificial Sequence
  ENSG00000183833_21 (sequence is synthesized)
atattttgttaactatgaggatgtgctggtttgttgaatcaaacaaaaggaaatgttgtggaatatttttccaagtagttttggttcactattcacaggacattggcattatctactaag

SEQ ID NO: 657303 - DNA, 120 bp, Artificial Sequence
  ENSG00000183833_22 (sequence is synthesized)
gctgaaaatgtgcatattccatgactcaggattttatctcctagatatatattcaacagaaatgcatgagtatgtgcaccaacaggcatgacaaaaatatttatagtagtggtgttcaca

SEQ ID NO: 657304 - DNA, 120 bp, Artificial Sequence
  ENSG00000183833_23 (sequence is synthesized)
atagtcccaaactggaaacccaagtgtccatctccatcggaacagaaaactatactttggtctgcttctacagtggcacatcaacccacctttgagctttagatctaagaagtgtgttca

SEQ ID NO: 657305 - DNA, 120 bp, Artificial Sequence
  ENSG00000183833_24 (sequence is synthesized)
tgcaacagccatagagatggtgctattgaaaggcaatctgcccatcctgtgtattgacaagcatcaggattccaggaggattcttcctgattcaaagactgtcaaataggaaaaaagaaa

SEQ ID NO: 657306 - DNA, 120 bp, Artificial Sequence
  ENSG00000183833_25 (sequence is synthesized)
acagtaaatgaacaaaaacatcaacatggagtccaagtaatgaatttatagaggaaaatgtatgctactctgaaaacaaagcttatgttagagaatatcttactgtaagaaacaaggaaa

SEQ ID NO: 657307 - DNA, 120 bp, Artificial Sequence
  ENSG00000183833_26 (sequence is synthesized)
attgcagaaacatttgctgagtgtttttaataggagtcaaaaagaaagggtcttttcagaaactgaagtaggaaataataacagacaaggtcaaaaaatagatgcaggctgaaaagaaaa

SEQ ID NO: 657308 - DNA, 120 bp, Artificial Sequence
  ENSG00000183833_27 (sequence is synthesized)
ggaagtgggctaagatgggaaaaatataaaaagatttaaaatccagcaacaaaatttacacattcatttggatgcagtgaaaagggcagaaataccacagcagagaataaaattgataat

SEQ ID NO: 657309 - DNA, 120 bp, Artificial Sequence
  ENSG00000183833_28 (sequence is synthesized)
gttggcaacacatttattaagtgatccaacatgggatgggaaggaatgggcaaagagattaaaatgacagaagttagctgtagatgacctatcccacagcaatcggagttcttgaagaag

SEQ ID NO: 657310 - DNA, 120 bp, Artificial Sequence
  ENSG00000183833_29 (sequence is synthesized)
aaaccagaacaaataaaatagaaacaataatcagagtttaataattaattttctgagtttttttttaaaaaaactaattatacaaacttgaaagggttcaccttgccctagcaaaactag

SEQ ID NO: 657311 - DNA, 120 bp, Artificial Sequence
  ENSG00000183833_30 (sequence is synthesized)
gattgggacacctttttttccccctgaggatcactgacaaaaaacactgcaccagtaaggaagcaactaaattttgttttgttctttgaaaaaggctaacctgagctaggtaaaggttat

SEQ ID NO: 657312 - DNA, 120 bp, Artificial Sequence
  ENSG00000183833_31 (sequence is synthesized)
atcattcacttttgaaataaaccatcgagaacacaaaatgacaagtgagttaggttgggctgatgggatagaaggtgggaggggaatgctatacagctgggaacagcagactttctctga

SEQ ID NO: 657313 - DNA, 120 bp, Artificial Sequence
  ENSG00000183833_32 (sequence is synthesized)
agggccagatggtaactacattagggtttgcgggtctgatggtcgccatcataactgcatactcaactctgccgttgtagggtaagagcagcactcgatgacacagaaatgaatgcacat

SEQ ID NO: 657314 - DNA, 120 bp, Artificial Sequence
  ENSG00000183833_33 (sequence is synthesized)
gactgtgttccagtaaaattttattttaattaaaatcaattcatgtttgaaaaaggatttaaagtagcttctaataaaggacatgtgtaatgaaacttaaaatatgatattttctttaaa

SEQ ID NO: 657315 - DNA, 120 bp, Artificial Sequence
  ENSG00000183833_34 (sequence is synthesized)
aatctttatccttatgtagacttctaaaactatgttttgcatttagacagtcaaggaaaatacaagttgttatacaattctcattgactaattgaagtttactaggagaggaaaactttt

SEQ ID NO: 657316 - DNA, 120 bp, Artificial Sequence
  ENSG00000183833_35 (sequence is synthesized)
tcttgataccggcaatcttttacttataatggcttgagttaaaatgctccaacttttctaatttttgcttttgaaaataaaacacctatagtgacaataaaaacacacatttaaagccaa

SEQ ID NO: 657317 - DNA, 120 bp, Artificial Sequence
  ENSG00000183833_36 (sequence is synthesized)
gacttgtttctaaatcacaattcccaaattattaatttctatggagaaatatgtgttaccatgttatctagactagctggtcagggtatttgcctccccagagacaagtctacttgggaa

SEQ ID NO: 657318 - DNA, 120 bp, Artificial Sequence
  ENSG00000183833_37 (sequence is synthesized)
atcaagtgtatccaaaggctgcttgttaatttaatggcaaatcagttgattttaaagggtggtacagtatagtcaatcatgaatattcttcatcactttaaagatatacctgataaacag

SEQ ID NO: 657319 - DNA, 120 bp, Artificial Sequence
  ENSG00000183833_38 (sequence is synthesized)
atacttataatagcagggcaatattttgttgaactttgtaaaaataacagttccatcatcagcaaacttacaaacttaaggggtgaattctgaagatagctgattttttttttaaccgtg

SEQ ID NO: 657320 - DNA, 120 bp, Artificial Sequence
  ENSG00000183833_39 (sequence is synthesized)
ttcaccaattctgagatatcatgtggtttgcatctttctagtgcaccaaatatgggagatggtataaatgtattgcttctttcacttgcaaattggcatagtgcgtatatacaaggtctt

SEQ ID NO: 657321 - DNA, 120 bp, Artificial Sequence
  ENSG00000183833_40 (sequence is synthesized)
tcccttgaagaattttttgggttacccaggctcaaaaggagttttgttcataggagagaagaaagtgtgttcagggtgtagtacttgaaaacatgctagactttctttatgaattccact

SEQ ID NO: 657322 - DNA, 120 bp, Artificial Sequence
  ENSG00000183833_41 (sequence is synthesized)
tccgtaagctgacttggaatactcagaaaagaaaaacatcttgacaactgttgctggtagaagtggtagagtaacagggccacatgcacaacagagcatgagctgctgcagagtcagaca

SEQ ID NO: 657323 - DNA, 120 bp, Artificial Sequence
  ENSG00000183833_42 (sequence is synthesized)
atatttaaacttttaaatttgttttccaattaagagattacattactttgccattattctcagcctaggggtagatatgttctatctgttatgctacttgattgtttattttgcagatcc

SEQ ID NO: 657324 - DNA, 120 bp, Artificial Sequence
  ENSG00000183833_43 (sequence is synthesized)
tagtttgcctgactgcattgatcagattgactaatcaccaaatcttcactggattttaggttccacagaaattaccttgccaagattactggagggcaaagcatcttaatacgtgtggct

SEQ ID NO: 657325 - DNA, 120 bp, Artificial Sequence
  ENSG00000183833_44 (sequence is synthesized)
cattgtgaggattaagtcaccaataatgaacagagaacccataagctaatttatttcaatgggataaatttaataatatatgcccatgttaaaagaattcaagtagtataaaagcatata

SEQ ID NO: 657326 - DNA, 120 bp, Artificial Sequence
  ENSG00000183833_45 (sequence is synthesized)
cagtgtgaagtaaattctagccctatcccctaccccctccacataaacagccattgtcatcagtttcttgggcatgtatttaaagatattttacgcatacagcaataacccctcttctta

SEQ ID NO: 657327 - DNA, 120 bp, Artificial Sequence
  ENSG00000183833_46 (sequence is synthesized)
tgctgtatacattgttttgtatgtttttaaaaagagtttacaatgtaattaaaatgctttagaaaagctgatggtataattttgtcctttgcctcccttctctaacattagagaaaagtt

SEQ ID NO: 657328 - DNA, 120 bp, Artificial Sequence
  ENSG00000183833_47 (sequence is synthesized)
catgagcacaaggttttcctttttttgttttcttgttactttcttgttaaattttctcccttgattttatcatcacacagcaccattataataaaaattaatgaaatgatgaaaaagaaa

SEQ ID NO: 657329 - DNA, 120 bp, Artificial Sequence
  ENSG00000183833_48 (sequence is synthesized)
aaatccaaatttttttgtggagttaaacaaacttgccaggaatgtgatatttcagatcacttaatcaaggaaaagccgaacctatcttcagtcagaggagattgttgctgagttggttta

SEQ ID NO: 657330 - DNA, 120 bp, Artificial Sequence
  ENSG00000183833_49 (sequence is synthesized)
atgtacaggcaattgtggtttacagtgttgctatataaagtgtcttagtacagcaacttcatagactcataatttttctgatacttctggtcaaataaagatactatctttttattgtga

SEQ ID NO: 657331 - DNA, 120 bp, Artificial Sequence
  ENSG00000183833_50 (sequence is synthesized)
gtcccttccacattaagaactaaggctcaaagagaagtataagactaggtctttatatttgtaagttacttacactctagatatcaaacgaaatgtaactcacatgaagtgcttcaatgc

SEQ ID NO: 657332 - DNA, 120 bp, Artificial Sequence
  ENSG00000183833_51 (sequence is synthesized)
tatgccgtatccaagtaagtaaccattatttgaaaactctttttcagtttatttattgtttgcttccatattttttcttagaagatagttcactaaatcactatttttcaaattgtggat

SEQ ID NO: 657333 - DNA, 120 bp, Artificial Sequence
  ENSG00000183833_52 (sequence is synthesized)
cacaaaacattagaagggtatgaaatcttctagtgtgtcatgagcagcattttaaaacatgaaacagaatagaaaataaccaaagcatcaagtatatggagggtaagttggtttttgttt

SEQ ID NO: 657334 - DNA, 120 bp, Artificial Sequence
  ENSG00000183833_53 (sequence is synthesized)
ataacttttgtttcagaaaaatatatgcatatgtttatatgtatatgatggattatgatataaaatgtatttcttactgttagttgtccatttgtgctgctataacaaattaacagattg

SEQ ID NO: 657335 - DNA, 120 bp, Artificial Sequence
  ENSG00000183833_54 (sequence is synthesized)
ggtgatataaataaaataaatttatttcttgaagttctgaaggctgggcagtccaagaagcaaggcagtccaatgggcagtcagtgtcggtgagggccttcttgctgtgtcttcacatgg

SEQ ID NO: 657336 - DNA, 120 bp, Artificial Sequence
  ENSG00000183837_0 (sequence is synthesized)
atccgcagagattcgaggacatgccgttgaccttgttacaggactggtgtcggggggaacacctgaacacccggaggtgcatgctcatcctggggatccccgaggactgtggcgaggatg

SEQ ID NO: 657337 - DNA, 120 bp, Artificial Sequence
  ENSG00000183837_1 (sequence is synthesized)
agtttgaggagacactccaggaggcttgcaggcacctgggcagatacagggtgattggcaggatgtttaggagggaggagaacgcccaggcgattctactggagctggcacaagatatcg

SEQ ID NO: 657338 - DNA, 120 bp, Artificial Sequence
  ENSG00000183837_2 (sequence is synthesized)
actatgctttgctcccaagggaaataccaggaaagggggggccctgggaagtgattgtaaaaccccgtaactcagatggggaatttctcaacagactgaaccgcttcttagaggaggaga

SEQ ID NO: 657339 - DNA, 120 bp, Artificial Sequence
  ENSG00000183837_3 (sequence is synthesized)
ggcggaccgtgtcagatatgaaccgagtcctcgggtcggacaccaattgttcggctccaagagtgactatatcaccagagttctggacctgggcccagactctgggggcagcagtgcagc

SEQ ID NO: 657340 - DNA, 120 bp, Artificial Sequence
  ENSG00000183837_4 (sequence is synthesized)
ctctgctagaacaaatgttgtaccgagaactaagagtgttttctgggaacaccatatccatcccaggtgcactggcctttgatgcctggcttgagcacaccactgagatgctacagatgt

SEQ ID NO: 657341 - DNA, 120 bp, Artificial Sequence
  ENSG00000183837_5 (sequence is synthesized)
gtgcctggctgccttgcagcaggtgttcggacctgtggagagccataaaattgcccaggtgaagttgtgtaaagcctatcaggaggcaggagagaaagtatctagctttgtgttacgttt

SEQ ID NO: 657342 - DNA, 120 bp, Artificial Sequence
  ENSG00000183837_6 (sequence is synthesized)
ggaacccctgctccaaagagctgtagaaaacaatgtggtatcacgtagaaacgtgaatcagactcgcctgaaacgagtcttaagtggggccacccttcctgacaaactccgagataagct

SEQ ID NO: 657343 - DNA, 120 bp, Artificial Sequence
  ENSG00000183837_7 (sequence is synthesized)
taagctgatgaaacagcgaaggaagcctcctggtttcctggccctggtgaagctcctgcgtgaggaggaggaatgggaggccactttaggtccagatagggagagtctggaggggctgga

SEQ ID NO: 657344 - DNA, 120 bp, Artificial Sequence
  ENSG00000183837_8 (sequence is synthesized)
agtagccccaaggccacctgccaggatcactggggttggggcagtacctctccctgcctctggcaacagttttgatgcgaggccttcccagggctaccggcgccggaggggcagaggcca

SEQ ID NO: 657345 - DNA, 120 bp, Artificial Sequence
  ENSG00000183837_9 (sequence is synthesized)
acaccgaaggggtggtgtggcaagggctggctctcgaggctcaagaaaacggaaacgccacacattctgctatagctgtggggaagacggccacatcagggtacagtgcatcaacccctc

SEQ ID NO: 657346 - DNA, 120 bp, Artificial Sequence
  ENSG00000183837_10 (sequence is synthesized)
caacctgctcttggtaaagcagaagaaacaggctgcagttgagtcgggaaacgggaactgggcttgggacaagagccatcccaagtccaaggccaagtaggctcgggagaacagggcaac

SEQ ID NO: 657347 - DNA, 120 bp, Artificial Sequence
  ENSG00000183837_11 (sequence is synthesized)
ccgccgccgcgcccccgccccgtgtccgcactgcagagagccgcggcgagcaggcgccggcgcactggcccacgtgctgcgcgagcgagggagagccacagtctgagcgaacgtccgcgc

SEQ ID NO: 657348 - DNA, 120 bp, Artificial Sequence
  ENSG00000183837_12 (sequence is synthesized)
tgggagccaggggtgcccgacccccgtccgccgccgccgccgccgccgcgcatagcccccggagagccctctggggaccccgaccagaagggaccttgccctgggagaaggctgtggaga

SEQ ID NO: 657349 - DNA, 120 bp, Artificial Sequence
  ENSG00000183837_13 (sequence is synthesized)
gaagcccagacaaacagcagatgagttgagtggggcagagggacagggcagccagaccaaggccaagccttctcacccttggccagctggaagggacttcagcaaccaagaccacctggc

SEQ ID NO: 657350 - DNA, 120 bp, Artificial Sequence
  ENSG00000183837_14 (sequence is synthesized)
gtccccgaagaggtgctggagaggaaagcagggagccactgcatccagcacatggggtgcctgggcctcagatggggaccccaaagaagcagaagctgaagaaggtacggctgggggttc

SEQ ID NO: 657351 - DNA, 120 bp, Artificial Sequence
  ENSG00000183837_15 (sequence is synthesized)
tgtcctgctcatccaaccacccctaaatacccaccctgtggactttgagctgaacatgcccactggcccccaggccacatgggacctggaggagcctacctggggcctgcccctgccagc

SEQ ID NO: 657352 - DNA, 120 bp, Artificial Sequence
  ENSG00000183837_16 (sequence is synthesized)
aggtgccagggctggtgaggaagagctggggggcagaggtaaagccctgcaggggaggccacagggtccatcccgtcttcaggatcatctacactgcactaggggagccccaggaaggca

SEQ ID NO: 657353 - DNA, 120 bp, Artificial Sequence
  ENSG00000183837_17 (sequence is synthesized)
gcaccctggaggccctgtgccagtgaggacaggagaccctaaggccccgggagcccagtgccagccagaggttgtgcaggcaaggagaccaaagattgatgagaagacccccagcagggg

SEQ ID NO: 657354 - DNA, 120 bp, Artificial Sequence
  ENSG00000183837_18 (sequence is synthesized)
tactgggtacccggcaggccagtgccctcacagttgacttggaccagggtggctgtgaagggaagtctttgttgcaaaggaggaggaaaagggaggacttggtagggttttgtttcttct

SEQ ID NO: 657355 - DNA, 120 bp, Artificial Sequence
  ENSG00000183837_19 (sequence is synthesized)
gcttgtttctgtacagggccaccagactcctggagagatcaagcaaggagaacctggggctgccatggccaaagcaactcaacagatgccaatgccaattccaaggccagccacaaccct

SEQ ID NO: 657356 - DNA, 120 bp, Artificial Sequence
  ENSG00000183837_20 (sequence is synthesized)
gccaccttggggaatccagcctggaggcatcccctaagcagccagccatggcctgggtggaggcacctgaagacgtctgtcccaaactcccccagccctgagctgggagatgacaggggg

SEQ ID NO: 657357 - DNA, 120 bp, Artificial Sequence
  ENSG00000183837_21 (sequence is synthesized)
aaagaggccctctcaagggtgccagatgcctgggtctcccaagaggggtcccccaactcactgttcccgggacaggctgccccctgttccaggaagctcatcctcacctgtgtaggcccc

SEQ ID NO: 657358 - DNA, 120 bp, Artificial Sequence
  ENSG00000183837_22 (sequence is synthesized)
tgtagtgacccacgcgtccagcagacgcccacccaccgctagccgttgttcctgtgcaaagtagtgtgctatgcacccacccaggtggccgcctctgggcccaaggcacatgctgtgagc

SEQ ID NO: 657359 - DNA, 120 bp, Artificial Sequence
  ENSG00000183837_23 (sequence is synthesized)
ttcctgtgagcccaggctctgctcactgctgtcccgcgtcatgagcaccacctctgctttccctgtgtagatctaggccagtggctgcttgttcttgtggagctgtgtgtgttcttctct

SEQ ID NO: 657360 - DNA, 120 bp, Artificial Sequence
  ENSG00000183837_24 (sequence is synthesized)
gagcagctcctccccggagtcccccagcacagtcccaggagatgacaggaaggaagcaccagggcaaggcggacgctcaccctgtgaccacgatggtgaccgtgactgtgggaggaagaa

SEQ ID NO: 657361 - DNA, 120 bp, Artificial Sequence
  ENSG00000183837_25 (sequence is synthesized)
ctggacccaggacggagcggggctgccctgcctgaggctcccgaggagctttgtgctttggtgttccacccctgttgttactcatgactcagtttccttaacctggtagggtgttccctg

SEQ ID NO: 657362 - DNA, 120 bp, Artificial Sequence
  ENSG00000183837_26 (sequence is synthesized)
ctgtgttttccagtgtcctgtgactgtcctgtgcgggccatagggcagggccctgccccagcagatgggcttgggaggggactccctaaagccagtggacactgccagagtctaccttcc

SEQ ID NO: 657363 - DNA, 120 bp, Artificial Sequence
  ENSG00000183837_27 (sequence is synthesized)
tggcaagaggcagaccccggggccctcaggaaggagggagttggcagcgggggctgcagcaggagtaggagcagatgaggcgtcttgccaggaacctcaggaggagggggcccgggacct

SEQ ID NO: 657364 - DNA, 120 bp, Artificial Sequence
  ENSG00000183837_28 (sequence is synthesized)
gtgtgggacctgtgtcctgtggtggccgtttgcagtttctctctgtgttgtgattcccttctcttcaacgttttcagtacgtgtttctcttcaataaacttcattcagtgttccagccgg

SEQ ID NO: 657365 - DNA, 120 bp, Artificial Sequence
  ENSG00000183840_0 (sequence is synthesized)
acatacactcccaaacctcaacacccaggcgcctcctgggcctctcctaggttgggctgctccagcaagtttccatgaaagcacctgaaatactaagttaccttcgcgaggagaactcga

SEQ ID NO: 657366 - DNA, 120 bp, Artificial Sequence
  ENSG00000183840_1 (sequence is synthesized)
gtgagataaaatcgtgcgcccacgcaggtgagtttgcagccaagaattttggacgctgctgggaggagaaagggaagttgagaaagtctttggacctggtagcctggtgctctttctcat

SEQ ID NO: 657367 - DNA, 120 bp, Artificial Sequence
  ENSG00000183840_2 (sequence is synthesized)
ggcttcacccagcctcccgggcagtgactgctcccaaatcattgatcacagtcatgtccccgagtttgaggtggccacctggatcaaaatcacccttattctggtgtacctgatcatctt

SEQ ID NO: 657368 - DNA, 120 bp, Artificial Sequence
  ENSG00000183840_3 (sequence is synthesized)
cgtgatgggccttctggggaacagcgccaccattcgggtcacccaggtgctgcagaagaaaggatacttgcagaaggaggtgacagaccacatggtgagtttggcttgctcggacatctt

SEQ ID NO: 657369 - DNA, 120 bp, Artificial Sequence
  ENSG00000183840_4 (sequence is synthesized)
ggtgttcctcatcggcatgcccatggagttctacagcatcatctggaatcccctgaccacgtccagctacaccctgtcctgcaagctgcacactttcctcttcgaggcctgcagctacgc

SEQ ID NO: 657370 - DNA, 120 bp, Artificial Sequence
  ENSG00000183840_5 (sequence is synthesized)
tacgctgctgcacgtgctgacactcagctttgagcgctacatcgccatctgtcaccccttcaggtacaaggctgtgtcgggaccttgccaggtgaagctgctgattggcttcgtctgggt

SEQ ID NO: 657371 - DNA, 120 bp, Artificial Sequence
  ENSG00000183840_6 (sequence is synthesized)
cacctccgccctggtggcactgcccttgctgtttgccatgggtactgagtaccccctggtgaacgtgcccagccaccggggtctcacttgcaaccgctccagcacccgccaccacgagca

SEQ ID NO: 657372 - DNA, 120 bp, Artificial Sequence
  ENSG00000183840_7 (sequence is synthesized)
gcccgagacctccaatatgtccatctgtaccaacctctccagccgctggaccgtgttccagtccagcatcttcggcgccttcgtggtctacctcgtggtcctgctctccgtagccttcat

SEQ ID NO: 657373 - DNA, 120 bp, Artificial Sequence
  ENSG00000183840_8 (sequence is synthesized)
gtgctggaacatgatgcaggtgctcatgaaaagccagaagggctcgctggccgggggcacgcggcctccgcagctgaggaagtccgagagcgaagagagcaggaccgccaggaggcagac

SEQ ID NO: 657374 - DNA, 120 bp, Artificial Sequence
  ENSG00000183840_9 (sequence is synthesized)
catcatcttcctgaggctgattgttgtgacattggccgtatgctggatgcccaaccagattcggaggatcatggctgcggccaaacccaagcacgactggacgaggtcctacttccgggc

SEQ ID NO: 657375 - DNA, 120 bp, Artificial Sequence
  ENSG00000183840_10 (sequence is synthesized)
acccgctcctgtacacggtgtcctcgcagcagtttcggcgggtgttcgtgcaggtgctgtgctgccgcctgtcgctgcagcacgccaaccacgagaagcgcctgcgcgtacatgcgcact

SEQ ID NO: 657376 - DNA, 120 bp, Artificial Sequence
  ENSG00000183840_11 (sequence is synthesized)
ccaccaccgacagcgcccgctttgtgcagcgcccgttgctcttcgcgtcccggcgccagtcctctgcaaggagaactgagaagattttcttaagcacttttcagagcgaggccgagcccc

SEQ ID NO: 657377 - DNA, 120 bp, Artificial Sequence
  ENSG00000183840_12 (sequence is synthesized)
agtctaagtcccagtcattgagtctcgagtcactagagcccaactcaggcgcgaaaccagccaattctgctgcagagaatggttttcaggagcatgaagtttgaatgtcaagcgagggag

SEQ ID NO: 657378 - DNA, 120 bp, Artificial Sequence
  ENSG00000183840_13 (sequence is synthesized)
ccttgagtgggaactggccctccagccctaagaaaacgtcactctcactctgcagtctcaaactatgcccccatcagggatggaatggacactggaggctttacaaaaggcagatgccca

SEQ ID NO: 657379 - DNA, 120 bp, Artificial Sequence
  ENSG00000183840_14 (sequence is synthesized)
cctcagtgacttctaaggactgactctgccagcctggccttgactccggttacacagacatgggggtgaactttcactccacctccttccttcaagtacatactgaaaattcagtcaggc

SEQ ID NO: 657380 - DNA, 120 bp, Artificial Sequence
  ENSG00000183840_15 (sequence is synthesized)
tgaatttattcagaatgctttaccgagctctttcattatttgcacaggaacaaaagagaacacggactcccgctccctacccagaataaaaggacacccagaagaaactcactcagggag

SEQ ID NO: 657381 - DNA, 120 bp, Artificial Sequence
  ENSG00000183840_16 (sequence is synthesized)
gtggggggttgggggcgagggctggaagaacaatgcaggagggggtggcatctccttcagcttcagcagtgtgccgagaagagggctaatttgaggaacaggatggtggtgcggagccct

SEQ ID NO: 657382 - DNA, 120 bp, Artificial Sequence
  ENSG00000183840_17 (sequence is synthesized)
ggcctgagggccgaggcagaacttccccttttcttgggccttggcccgttacaaagaggggtgttgcagcagctgatgcaaactgagttcagtttccctggggagcagaaggactggtac

SEQ ID NO: 657383 - DNA, 120 bp, Artificial Sequence
  ENSG00000183840_18 (sequence is synthesized)
ccggcagaggcgatgagacaggccgctgatgatgcacaggacttgcggtacatgatccctgtaacacagacccaaaggagctgagttaacgtgcaccggcaaaagaatagctgtccctct

SEQ ID NO: 657384 - DNA, 120 bp, Artificial Sequence
  ENSG00000183840_19 (sequence is synthesized)
cagcccaaatccaaacggacagctcttccttactcctcccacagcccagagactaggtgaggtcagggaagtgcttcggattgtctcattgatattcaagatagatggtgaaagagacag

SEQ ID NO: 657385 - DNA, 120 bp, Artificial Sequence
  ENSG00000183840_20 (sequence is synthesized)
gcactatttcattagttttaacaaaactgttccaaaagcgatttgagatgccaatacctgtgaatacctgttaataaagagctgttaaatagacttatttacattttaagtcagagttca

SEQ ID NO: 657386 - DNA, 120 bp, Artificial Sequence
  ENSG00000183840_21 (sequence is synthesized)
atcacacaagccaacagacctggggagagaatacaacctctacacagaaggatccaattaaacacagcatacagtcccatgctgggtactgcagacaaaaagacggttatgacttgtctc

SEQ ID NO: 657387 - DNA, 120 bp, Artificial Sequence
  ENSG00000183840_22 (sequence is synthesized)
ttgagaggtctgctatctgatggcagagacagacttttaaacaactaaccataaagcagaaggataagtgctgcttttatagaaggttatatataaagtcttatgaacatataaaaagga

SEQ ID NO: 657388 - DNA, 120 bp, Artificial Sequence
  ENSG00000183840_23 (sequence is synthesized)
ggccaagtcattctatctgctctgcttaaggcatatatctcagagaaagggacatttgaattagactttgcagacaaataggagtttgctaggtgagaagcagcaggagagagttttagg

SEQ ID NO: 657389 - DNA, 120 bp, Artificial Sequence
  ENSG00000183840_24 (sequence is synthesized)
cagagagaactgaaagaagtagaaacatgaaaaatgcatggtgcttggaaagtaaggagcagcttaatgtggctgaagctgaggatacgtggatggctggatatagaagcttcctcttcc

SEQ ID NO: 657390 - DNA, 120 bp, Artificial Sequence
  ENSG00000183844_0 (sequence is synthesized)
cttcctgacccaggggctccgctggctgcggtcgcctgggagctgccgccagggccaggaggggagcggcacctggaagatgcgcccattggctggtggcctgctcaaggtggtgttcgt

SEQ ID NO: 657391 - DNA, 120 bp, Artificial Sequence
  ENSG00000183844_1 (sequence is synthesized)
ggtcttcgcctccttgtgtgcctggtattcggggtacctgctcgcagagctcattccagatgcacccctgtccagtgctgcctatagcatccgcagcatcggggagaggcctgtcctcaa

SEQ ID NO: 657392 - DNA, 120 bp, Artificial Sequence
  ENSG00000183844_2 (sequence is synthesized)
agctccagtccccaaaaggcaaaaatgtgaccactggactccctgcccatctgacacctatgcctacaggttactcagcggaggtggcagaagcaagtacgccaaaatctgctttgagga

SEQ ID NO: 657393 - DNA, 120 bp, Artificial Sequence
  ENSG00000183844_3 (sequence is synthesized)
taacctacttatgggagaacagctgggaaatgttgccagaggaataaacattgccattgtcaactatgtaactgggaatgtgacagcaacacgatgttttgatatgtatgaaggtgataa

SEQ ID NO: 657394 - DNA, 120 bp, Artificial Sequence
  ENSG00000183844_4 (sequence is synthesized)
ctctggaccgatgacaaagtttattcagagtgctgctccaaaatccctgctcttcatggtgacctatgacgacggaagcacaagactgaataacgatgccaagaatgccatagaagcact

SEQ ID NO: 657395 - DNA, 120 bp, Artificial Sequence
  ENSG00000183844_5 (sequence is synthesized)
gaacaacagatattctggctggcctgcagagatccagatagaaggctgcatacccaaagaacgaagctgacactgcagggtcctgagtaaatgtgttctgtataaacaaatgcagctgga

SEQ ID NO: 657396 - DNA, 120 bp, Artificial Sequence
  ENSG00000183844_6 (sequence is synthesized)
atcgctcaagaatcttatttttctaaatccaacagcccatatttgatgagtattttgggtttgttgtaaaccaatgaacatttgctagttgtatcaaatcttggtacgcagtatttttat

SEQ ID NO: 657397 - DNA, 120 bp, Artificial Sequence
  ENSG00000183844_7 (sequence is synthesized)
accagtattttatgtagtgaagatgtcaattagcaggaaactaaaatgaatggaaattcttaaagggaatgatgtgattcaagctggaaagagggttgggagaaacagcttgtccaggtg

SEQ ID NO: 657398 - DNA, 120 bp, Artificial Sequence
  ENSG00000183844_8 (sequence is synthesized)
gagctatgttatgatcagatcgaagtgtgacccctgtgtggtccagacagccctgcagagagaaaacctttattccattatcaccaagcacctcctagtttccgacagtcatctccttct

SEQ ID NO: 657399 - DNA, 120 bp, Artificial Sequence
  ENSG00000183844_9 (sequence is synthesized)
gctgggagaattagcagcagttcagggggcttatgttatgtccttgttcaactcaacttgagctcttgaactcctcctgtgggcctgtgaatgtattcattcattccacaactctgggtg

SEQ ID NO: 657400 - DNA, 120 bp, Artificial Sequence
  ENSG00000183844_10 (sequence is synthesized)
actgcgcctgcgcgggcgcctggctgggctcggcgggcatggctggggcaccctggcgccatctttttccaccgtgcgaaggcaggagcccgagactggggaaaggcaggatcctggttt

SEQ ID NO: 657401 - DNA, 120 bp, Artificial Sequence
  ENSG00000183844_11 (sequence is synthesized)
caaaatctcagaagtgttcctggactctgtgcttcctcccccacctctgaagctgctgggtctcctcccatcggggcaggcccactggggctccgcgagtcatcttagtggaagccctgg

SEQ ID NO: 657402 - DNA, 120 bp, Artificial Sequence
  ENSG00000183844_12 (sequence is synthesized)
gctcctaagctttcttcttcccaagtgtgtcccagcttcagcgctgattcttccctactgcctggtgtctgagcctctgtcttgacaggctgcctcggctcctgcccatcctgctttcat

SEQ ID NO: 657403 - DNA, 120 bp, Artificial Sequence
  ENSG00000183844_13 (sequence is synthesized)
ccccaggactgagctctgattgctggtgtccaacccacagagaggctgtgccacagctcgcccggtgctatgttggggctgaattgtgccttccccctgccaaccccccaaccccattta

SEQ ID NO: 657404 - DNA, 120 bp, Artificial Sequence
  ENSG00000183844_14 (sequence is synthesized)
catgttgtagtcctaacccctgcccagtacctcagaatgtgactggatctggagatagggtcgttaaagagctatttcagatatagtgaggtcatcagggtgagccctgatccaatctga

SEQ ID NO: 657405 - DNA, 120 bp, Artificial Sequence
  ENSG00000183844_15 (sequence is synthesized)
ctggtgtccttataagaagaggagatgaggacacccacagaggccctgtgaggacacagggagaagatgccatccacaagccaaggagagaggctcagaggaaacttgatcttggacttc

SEQ ID NO: 657406 - DNA, 120 bp, Artificial Sequence
  ENSG00000183844_16 (sequence is synthesized)
cagcctccagaatcttgagaaaataaatttcaatttcaatttttttttaagagatgatgtctcgctgtcatccaggctggagtgcaatattgcaatcgtagctcactgcaacctcaaagt

SEQ ID NO: 657407 - DNA, 120 bp, Artificial Sequence
  ENSG00000183844_17 (sequence is synthesized)
caggcaatcctcctgcctcagcctcctgtgtaattgggactacaggtctgtgccaccacacctgactattctttttaaaattttttgtagacatgaggtctcattatgttgcccaggctg

SEQ ID NO: 657408 - DNA, 76 bp, Artificial Sequence
  ENSG00000183844_18 (sequence is synthesized)
agcccagccgaaatttctattgttgaagccacccagttggtgttaatttgttacagcagcctgaggaaatgatgct

SEQ ID NO: 657409 - DNA, 120 bp, Artificial Sequence
  ENSG00000183844_19 (sequence is synthesized)
ttggtgttaatttgttacagcagcctgaggaaatgatgctgcctgcctggattttgtctgtcacctcctggctactatgtcctgccctccctctagcggctgggatacttccatgacttt

SEQ ID NO: 657410 - DNA, 120 bp, Artificial Sequence
  ENSG00000183844_20 (sequence is synthesized)
gtgctagacctgagcacaggctgctggttcagctcatcacccatcttctgatgatgtcccgatcccagtgctggcggctggatctgcctcccacccaggaggtggttcagactctagatc

SEQ ID NO: 657411 - DNA, 120 bp, Artificial Sequence
  ENSG00000183844_21 (sequence is synthesized)
ctgggagtcctgaaaagtgtcccggaagagagctccctgccgcatcaggacccgccatgggctacccttcttcttgtgaggacacttggcttatttattctccgttttcttctctgtcgt

SEQ ID NO: 657412 - DNA, 120 bp, Artificial Sequence
  ENSG00000183844_22 (sequence is synthesized)
tggccaggatatactatcccctcttatttttatatatcaatgagactttcaaaaacaagtttttataaagatagtgaagacgaagaatagaaaacgcctgcacccacccaataagaagga

SEQ ID NO: 657413 - DNA, 120 bp, Artificial Sequence
  ENSG00000183844_23 (sequence is synthesized)
gggctccgctggctgcggtcgcctgggagctgccgccagggccaggaggggagcggcacctggaagatgcgcccattggctggtggttcacgttgggcatgctggctcacaaggtgcttg

SEQ ID NO: 657414 - DNA, 120 bp, Artificial Sequence
  ENSG00000183844_24 (sequence is synthesized)
gagtggtcttatgtagatcctcttaaactctaattgaattcatagaacatttgaaggcatcatctagaaatgtcttttcttctgttagttttcctcagtctttctctttttagctctcat

SEQ ID NO: 657415 - DNA, 120 bp, Artificial Sequence
  ENSG00000183844_25 (sequence is synthesized)
gatataataagaaagagaaaaagccttttttttaaaaaaaaaaaaaagccaaatacattatatgtaaaataaagccaccagcatccagccctaaatatcatcatcctttgaaagctgtca

SEQ ID NO: 657416 - DNA, 120 bp, Artificial Sequence
  ENSG00000183844_26 (sequence is synthesized)
cgattactcctggtgactcacagtgctctgctgggctcagggcaagcattcccggaacccacgggtgcccagtctttctcgatggtctctcctttctaggcactgactcttgactgcagt

SEQ ID NO: 657417 - DNA, 120 bp, Artificial Sequence
  ENSG00000183844_27 (sequence is synthesized)
tgacactgggccgggatgaaaagccacaggggggatggggagggccaagggccagggccgccaccaagtcgttcacagcagctgcttggtgtcctctctgcaggcctgctcaaggtggtg

SEQ ID NO: 657418 - DNA, 120 bp, Artificial Sequence
  ENSG00000183850_0 (sequence is synthesized)
gcctttgtttctcgctgccgccgaagctccaattttcgtctgtctgctttgtgtcctctgcacgtagaagcccagcctgtgtggccctgcgacctgcgggtattgggagatccacagcta

SEQ ID NO: 657419 - DNA, 90 bp, Artificial Sequence
  ENSG00000183850_1 (sequence is synthesized)
gtggccctgcgacctgcgggtattgggagatccacagctaagacgccagggccccctggaagcctagaaatgggagcgttgacatttaga

SEQ ID NO: 657420 - DNA, 120 bp, Artificial Sequence
  ENSG00000183850_2 (sequence is synthesized)
atgtaatgttagataactacagaaacctggtcttcctgggtattgctgtctcaaagccagacctgatcacctgtctggagcaagaaaaagagccttggaatttgaagacacatgatatgg

SEQ ID NO: 657421 - DNA, 120 bp, Artificial Sequence
  ENSG00000183850_3 (sequence is synthesized)
tagccaaacccccagttatatgttctcatattgcccaagacctttggccagagcaaggcataaaagattatttccaagaagtcatactgagacaatataaaaaatgtagacatgagaatt

SEQ ID NO: 657422 - DNA, 120 bp, Artificial Sequence
  ENSG00000183850_4 (sequence is synthesized)
tactgttaagaaaaggctgtaaaaatgtggatgagtttaagatgcacaaaaaaggttataatagacataaccagtgtttgacaacttcccatagcaaaatatttcagtgtgacaaatatg

SEQ ID NO: 657423 - DNA, 120 bp, Artificial Sequence
  ENSG00000183850_5 (sequence is synthesized)
tgaaagtctttcataaattttcaaattcaaacagacataagataagacatacttcgaagaaacctttcaaatgtaaagaatgtggaaaattattttgcattctttcacacttagctcaac

SEQ ID NO: 657424 - DNA, 120 bp, Artificial Sequence
  ENSG00000183850_6 (sequence is synthesized)
ataaaaaaattcatactggagagaaatcctacaaatgtgaagaatatggcaaagcctttaatgagtcctcaaactgtactacacataaaagaattactgagaaaaaaccttacaaatgta

SEQ ID NO: 657425 - DNA, 89 bp, Artificial Sequence
  ENSG00000183850_7 (sequence is synthesized)
aaaaccctaccaatgtgagaaatgtggcaaattttttaaccaatccacaaaccttactacacataaaagaattcatactggagagaaac

SEQ ID NO: 657426 - DNA, 81 bp, Artificial Sequence
  ENSG00000183850_8 (sequence is synthesized)
taaccttactgaacataagaaaattcatactaaagagcaaccatacaaatgcgaaaaatgtggcaaagcttttaagtggtc

SEQ ID NO: 657427 - DNA, 85 bp, Artificial Sequence
  ENSG00000183850_9 (sequence is synthesized)
atcctcaacccttaatagacataagataactcatactggagggaaaccctacaaatataaagaatgtggtaaagcttttaaccaa

SEQ ID NO: 657428 - DNA, 120 bp, Artificial Sequence
  ENSG00000183850_10 (sequence is synthesized)
ggaaaccctacaaatataaagaatgtggtaaagcttttaaccaatcctcaactcttactatacataagataattcatactgtagagaaattttacaaatgtgaagaatgtggcaaagcct

SEQ ID NO: 657429 - DNA, 120 bp, Artificial Sequence
  ENSG00000183850_11 (sequence is synthesized)
tgaagaatgtggcaaagcttttaaccggtcctcaaccctcactacacataagataattcattctggggaaaaaatctacaaatgtaaagaatgtggtaaagcctttaggcggttctcaca

SEQ ID NO: 657430 - DNA, 120 bp, Artificial Sequence
  ENSG00000183850_12 (sequence is synthesized)
taaagcctttaggcggttctcacaccttactaggcataagacaattcatacataaaattgtaaagactgtggcaaagcttttaaacaatctttataccttactacacataagataattca

SEQ ID NO: 657431 - DNA, 90 bp, Artificial Sequence
  ENSG00000183850_13 (sequence is synthesized)
gcttttaaccagtcctcaaatctaaaacctacaaatgtgaagaatgtggcaaagtcttcaaccaatcttcacaccttactacacataaga

SEQ ID NO: 657432 - DNA, 78 bp, Artificial Sequence
  ENSG00000183850_14 (sequence is synthesized)
acaaagcctttaacaaatccttaattcttaacagacatgattcataccagagagaaactctacaaacctgaaagtttt

SEQ ID NO: 657433 - DNA, 120 bp, Artificial Sequence
  ENSG00000183850_15 (sequence is synthesized)
gattcataccagagagaaactctacaaacctgaaagttttaacagtgcttttgacaacacctcaaacttttccagatgtcaaagaaatgctggtgagaaattctagaaatatgaagaatg

SEQ ID NO: 657434 - DNA, 120 bp, Artificial Sequence
  ENSG00000183850_16 (sequence is synthesized)
tgacaaagccattaaattgttgtcacatttaattgtaggtaaggtgattcatactggagaaaacttctacaagtgtaaacaaagtggcaaaacttttaaccaatgctcacactttattgc

SEQ ID NO: 657435 - DNA, 120 bp, Artificial Sequence
  ENSG00000183850_17 (sequence is synthesized)
acaggacatttatacttgagaataaatatacaagtgtaaagaaagtgaaaaccctattaatatctgctcacatcaactcaacatcagagttcatacttaataaaatcattaaaagtgcaa

SEQ ID NO: 657436 - DNA, 120 bp, Artificial Sequence
  ENSG00000183850_18 (sequence is synthesized)
ggtctttgtctctcgctcccgccagagcttgggatcggtcttcactgttccgcgtcctctacctgggaaccaccgacccccgcccggcgactttgtcacagactctgttgccctgtgatc

SEQ ID NO: 657437 - DNA, 120 bp, Artificial Sequence
  ENSG00000183850_19 (sequence is synthesized)
cagaaacctggtcttcctgggtattgctgtctcaaagccagacctgatcacctgtctggagcaagaaaaagagccttggaatttgaagacacatgatatggtagccaaacccccaggaac

SEQ ID NO: 657438 - DNA, 120 bp, Artificial Sequence
  ENSG00000183850_20 (sequence is synthesized)
tgctttcagcatcttttatatgtttgtgaagttttataagtatatgcagtgccaatatactttttcagaatttggctattttggaacatcattttttcatttttcaggacagatttgctg

SEQ ID NO: 657439 - DNA, 120 bp, Artificial Sequence
  ENSG00000183850_21 (sequence is synthesized)
atggtgttactctcacttgaaagctattttttttcccaggactttgactgcatcacacagtttctttccggcctacaaaatttttgttgacaattcactggttatatcgtaagactatgt

SEQ ID NO: 657440 - DNA, 120 bp, Artificial Sequence
  ENSG00000183850_22 (sequence is synthesized)
tgtatttgttataaatattttgtatgtattctagtttgtttgttaagcttcttcatgtttacattatttttcttactgagggatttttcaggtattatttcttcttgtattttttacccc

SEQ ID NO: 657441 - DNA, 120 bp, Artificial Sequence
  ENSG00000183850_23 (sequence is synthesized)
cccccataatttctattttttaattttttcaatatttttgttcttatcttcatttctgattttctgtagtctgtgttcctgtttcactcattgaatattcaattttttatcaatttttaa

SEQ ID NO: 657442 - DNA, 120 bp, Artificial Sequence
  ENSG00000183850_24 (sequence is synthesized)
aatgtgtacatcttttctatggtttccttctgaaaattttataatatttttgatggaattatattgccctgttttgtatatattgtaatctttaattgagatttggacattaaaaaaatc

SEQ ID NO: 657443 - DNA, 120 bp, Artificial Sequence
  ENSG00000183853_0 (sequence is synthesized)
agccgcgggcgggcgcacggcgggcggacagcatgctgagcctcctcgtctggatcctcactctctccgatactttctcccaagggacccagacccgcttcagccaggagccagctgacc

SEQ ID NO: 657444 - DNA, 120 bp, Artificial Sequence
  ENSG00000183853_1 (sequence is synthesized)
agacggtggtggctggacagcgggccgtgctcccctgtgtgctgctcaactactctggaattgtgcaatggaccaaggacgggctggccctgggcatgggccagggcctcaaagcctggc

SEQ ID NO: 657445 - DNA, 120 bp, Artificial Sequence
  ENSG00000183853_2 (sequence is synthesized)
cacggtaccgggttgtgggctccgcagacgctgggcagtacaacctggagatcacagatgctgagctctctgacgacgcctcttacgagtgccaggccacggaggccgccctgcgctctc

SEQ ID NO: 657446 - DNA, 120 bp, Artificial Sequence
  ENSG00000183853_3 (sequence is synthesized)
ggcgggccaaactcaccgtgctcatccccccagaggacaccaggattgacggaggccctgtgattctactgcaggcaggcaccccccacaacctcacatgccgggccttcaatgcgaagc

SEQ ID NO: 657447 - DNA, 120 bp, Artificial Sequence
  ENSG00000183853_4 (sequence is synthesized)
ctgctgccaccatcatctggttccgggacgggacgcagcaggagggcgctgtggccagcacggaattgctgaaggatgggaagagggagaccaccgtgagccaactgcttattaacccca

SEQ ID NO: 657448 - DNA, 120 bp, Artificial Sequence
  ENSG00000183853_5 (sequence is synthesized)
cggacctggacatagggcgtgtcttcacttgccgaagcatgaacgaagccatccctagtggcaaggagacttccatcgagctggatgtgcaccaccctcctacagtgaccctgtccattg

SEQ ID NO: 657449 - DNA, 120 bp, Artificial Sequence
  ENSG00000183853_6 (sequence is synthesized)
agccacagacggtgcaggagggtgagcgtgttgtctttacctgccaggccacagccaaccccgagatcttgggctacaggtgggccaaagggggtttcttgattgaagacgcccacgaga

SEQ ID NO: 657450 - DNA, 120 bp, Artificial Sequence
  ENSG00000183853_7 (sequence is synthesized)
gtcgctatgagacaaatgtggattattcctttttcacggagcctgtgtcttgtgaggttcacaacaaagtgggaagcaccaatgtcagcactttagtaaatgtccactttgctccccgga

SEQ ID NO: 657451 - DNA, 120 bp, Artificial Sequence
  ENSG00000183853_8 (sequence is synthesized)
ttgtagttgaccccaaacccacaaccacagacattggctctgatgtgacccttacctgtgtctgggttgggaatccccccctcactctcacctggaccaaaaaggactcaaatatggtcc

SEQ ID NO: 657452 - DNA, 120 bp, Artificial Sequence
  ENSG00000183853_9 (sequence is synthesized)
tgagtaacagcaaccagctgctgctgaagtcggtgactcaggcagacgctggcacctacacctgccgggccatcgtgcctcgaatcggagtggctgagcgggaggtgccgctctatgtga

SEQ ID NO: 657453 - DNA, 120 bp, Artificial Sequence
  ENSG00000183853_10 (sequence is synthesized)
acgggccccccatcatctccagtgaggcagtgcagtatgctgtgaggggtgacggtggcaaggtggagtgtttcattgggagcacaccacccccagaccgcatagcatgggcctggaagg

SEQ ID NO: 657454 - DNA, 120 bp, Artificial Sequence
  ENSG00000183853_11 (sequence is synthesized)
agaacttcttggaggtggggaccctggaacgctatacagtggagaggaccaactcaggcagtggggtgctatccacgctcaccatcaacaatgtcatggaggccgactttcagactcact

SEQ ID NO: 657455 - DNA, 120 bp, Artificial Sequence
  ENSG00000183853_12 (sequence is synthesized)
acaactgcaccgcctggaacagcttcgggccaggcacagccatcatccagctggaagagcgagaggtgttacctgtgggcatcatagctggggccaccatcggcgcgagcatcctgctca

SEQ ID NO: 657456 - DNA, 120 bp, Artificial Sequence
  ENSG00000183853_13 (sequence is synthesized)
tcttcttcttcatcgccttggtattcttcctctaccggcgccgcaaaggcagtcgcaaagacgtgaccctgaggaagctggatatcaaggtggagacagtgaaccgagagccacttacga

SEQ ID NO: 657457 - DNA, 120 bp, Artificial Sequence
  ENSG00000183853_14 (sequence is synthesized)
tgcattctgaccgggaggatgacaccgccagcgtctccacagcaacccgggtcatgaaggccatctactcgtcgtttaaggatgatgtggatctgaagcaggacctgcgctgcgacacca

SEQ ID NO: 657458 - DNA, 120 bp, Artificial Sequence
  ENSG00000183853_15 (sequence is synthesized)
tcgacacccgggaggagtatgagatgaaggaccccaccaatggctactacaacgtgcgtgcccatgaagaccgcccgtcttccagggcagtgctctatgctgactaccgtgcccctggcc

SEQ ID NO: 657459 - DNA, 120 bp, Artificial Sequence
  ENSG00000183853_16 (sequence is synthesized)
ctgcccgcttcgacggccgcccctcatcccgtctctcccactccagcggctatgcccagctcaacacctatagccggggccctgcctctgactatggccctgagcccacaccccctggcc

SEQ ID NO: 657460 - DNA, 120 bp, Artificial Sequence
  ENSG00000183853_17 (sequence is synthesized)
ctgctgccccagctggcactgacacaaccagccagctgtcctacgagaactatgagaagttcaactcccatcccttccctggggcagctgggtaccccacctaccgactgggctaccccc

SEQ ID NO: 657461 - DNA, 120 bp, Artificial Sequence
  ENSG00000183853_18 (sequence is synthesized)
aggccccaccctctggcctggagcggaccccatatgaggcgtatgaccccattggcaagtacgccacagccactcgattctcctacacctcccagcactcggactacggccagcgattcc

SEQ ID NO: 657462 - DNA, 120 bp, Artificial Sequence
  ENSG00000183853_19 (sequence is synthesized)
agcagcgcatgcagactcacgtgtaggggccagagcctggctggggcatctctgcggggcagaggagaaggctttcacagctgttccctgatattcaggggcattgctcattgctccctt

SEQ ID NO: 657463 - DNA, 120 bp, Artificial Sequence
  ENSG00000183853_20 (sequence is synthesized)
ctcggaccagccttcttcctcccaccatggcaggtggggagcaggtctcccagaaacaccccgtcccgaggatggtgctctgtgcatgccccagcctcctgggcctgcccttccctcttc

SEQ ID NO: 657464 - DNA, 120 bp, Artificial Sequence
  ENSG00000183853_21 (sequence is synthesized)
ttcgggaggatgtgtctcttctgacctgcactcttgcctgaccctagaatggggacagggaaagtgaaggttagggaaagcagaggggggcactttttagcattccctttctatcccacc

SEQ ID NO: 657465 - DNA, 120 bp, Artificial Sequence
  ENSG00000183853_22 (sequence is synthesized)
cctctgatctcccataagtggaaatgggggtacccagggatgggcaggctttggcctagggacatgaagtatgggagtgggtggctgtggcacagacaggtggaaaacgggatagcctgg

SEQ ID NO: 657466 - DNA, 120 bp, Artificial Sequence
  ENSG00000183853_23 (sequence is synthesized)
ccagtccctctgttgtctgcattcgtgccctgggtgcctctctccttcctcagggtactgcagaagggagcgaacagggtactgttcgctcttgtctacagaacagccctggcactgcat

SEQ ID NO: 657467 - DNA, 120 bp, Artificial Sequence
  ENSG00000183853_24 (sequence is synthesized)
tcaaatccagtcttcattcagctgggatcaaaatgccagtcaccttggctacccactgtggacagctgtctgtcagcatgcagagggatccaggaatccccccggcagcacggcccgctt

SEQ ID NO: 657468 - DNA, 120 bp, Artificial Sequence
  ENSG00000183853_25 (sequence is synthesized)
tccttctcctccatgctgggccagccagataagtcagggtcctggtggagaaagaaaggctaggaccatgtcctcattgacccagatactgctgtgtgctgcacagcagtgaaccaacac

SEQ ID NO: 657469 - DNA, 120 bp, Artificial Sequence
  ENSG00000183853_26 (sequence is synthesized)
tagagggagccacacaagcctcctctccccagtctgccccacttcctggctttaactcttgagctggtttggggagtggtgaggtaggggtgggggtgctgtaggctctttttcaaagaa

SEQ ID NO: 657470 - DNA, 120 bp, Artificial Sequence
  ENSG00000183853_27 (sequence is synthesized)
aacaaaaaacaatgaaaacctcatttgggaagaaaagctgtagggattcccccacccaaatacaagtcccagtggaaaggaaaggtagtacctattcttctccatggggttcctaacacc

SEQ ID NO: 657471 - DNA, 120 bp, Artificial Sequence
  ENSG00000183853_28 (sequence is synthesized)
ctccattactctttcagtctccaagcactttgaatccatttttaaacattcaggttgccagacctgtcacacagtggactctgatagggttacggagggggcctggctctcagtctctac

SEQ ID NO: 657472 - DNA, 120 bp, Artificial Sequence
  ENSG00000183853_29 (sequence is synthesized)
tctcctatgtcccatcagttggttggaggccaccttccagggggtatgggagacaggttttggtttttaagtgtcttttttttttttcttggaccaatcagattccttcttccactttca

SEQ ID NO: 657473 - DNA, 120 bp, Artificial Sequence
  ENSG00000183853_30 (sequence is synthesized)
gtgccttgagtgtcaagctttggatgaccgaccctatgtgggcggttgtgtggggagtgggtacttgtgagcctcggacacactgttaagtgttacagtgttaggagagagatgggtgag

SEQ ID NO: 657474 - DNA, 120 bp, Artificial Sequence
  ENSG00000183853_31 (sequence is synthesized)
gagaggtaaggggcctggaaatggccctgacagagaacttgtgctgaccgggagaaggtggtgcggaagggcaccgcaggcattacacaggccatttctcctcctccatgtgcacgcaca

SEQ ID NO: 657475 - DNA, 120 bp, Artificial Sequence
  ENSG00000183853_32 (sequence is synthesized)
tccaacacacaccttccatgtgactgcttctcagccaccactttctgaccaaagagaacaggcgctccaaggagaacctgtacccctgccccagcctcgccttcctaaaaagcagtgtct

SEQ ID NO: 657476 - DNA, 120 bp, Artificial Sequence
  ENSG00000183853_33 (sequence is synthesized)
ggagttggctgtttcccgcctccccagctgcatgtccagcccagtgggagacagggcctctggtgcagttcccaaaatgttcctcgccctttctccgtggtcaccattcataattcatgt

SEQ ID NO: 657477 - DNA, 120 bp, Artificial Sequence
  ENSG00000183853_34 (sequence is synthesized)
tcgctttaatgagttacatgcttatcagccacaggccattaccacccttatggatgggtctggggggcgacattcctggccaaccccttgtaggaaggaccagataatacccaggaagca

SEQ ID NO: 657478 - DNA, 120 bp, Artificial Sequence
  ENSG00000183853_35 (sequence is synthesized)
agtagctctaattttaacttcacaggaagtctgtgcatcctccttcatttcagcagggaaaactcctgtggagtgggccctatctggggcatttacaggcttccagctgtattccatccc

SEQ ID NO: 657479 - DNA, 120 bp, Artificial Sequence
  ENSG00000183853_36 (sequence is synthesized)
tggaagctgatacctttctatagagtccttttatgagagctcagtgggaaggtctgtcaagaaattcaggttcttgtacagacaaattcatgcaaatttctattattttcacaaaaacca

SEQ ID NO: 657480 - DNA, 120 bp, Artificial Sequence
  ENSG00000183853_37 (sequence is synthesized)
gaaaccatgggggaatccaaagacttgaagtctaaagatggtggcttttaaaacatgcatattccaaaaagaattcatttttgttttgggtttggctagattctcttatttatccccttt

SEQ ID NO: 657481 - DNA, 120 bp, Artificial Sequence
  ENSG00000183853_38 (sequence is synthesized)
tagcttaagtattagtttcattctactgaaatgatggagagagggcctaaggttactaggtaattgagctgatggtgcagggagaattgttgagaaaggaagcctagtttccagaagcct

SEQ ID NO: 657482 - DNA, 120 bp, Artificial Sequence
  ENSG00000183853_39 (sequence is synthesized)
gacacagagctacttcactgtcctctactccttaacaaggtaactggagcctcttgggtgtcaaacaagcaccctggaaggcacagggaagcatcagcaaccaaggtagtctctgccctc

SEQ ID NO: 657483 - DNA, 120 bp, Artificial Sequence
  ENSG00000183853_40 (sequence is synthesized)
tgtaacttacgtgttggtgcatcagaatctgaattggaacctacctgatgggcccagtggaatagcttttctggggagtggaaggcgtccttgatcacagagctttgctgtcgaatcctg

SEQ ID NO: 657484 - DNA, 120 bp, Artificial Sequence
  ENSG00000183853_41 (sequence is synthesized)
gagtcctgcaacatggtgatgcctcagtagttggtgatcctgatcacctttggtggcttgttttagtggaaagagcaagggactaaaggtcaggagacccaggacccagtcctgaagctg

SEQ ID NO: 657485 - DNA, 120 bp, Artificial Sequence
  ENSG00000183853_42 (sequence is synthesized)
caaaggttagatctcggcctaactttctgttcattgcccccaatttgtctggcctgtaaaatgaagggggagggttgcataaacctaaaactattctggttttgttatacccatagggtt

SEQ ID NO: 657486 - DNA, 120 bp, Artificial Sequence
  ENSG00000183853_43 (sequence is synthesized)
gggggtagggatgggactgcccattgctggcaaggaactgggaacagtagcaagcatggtgagggctggagagctggctgggggggttctctcctgttcaaagaagctttcaccatgggc

SEQ ID NO: 657487 - DNA, 120 bp, Artificial Sequence
  ENSG00000183853_44 (sequence is synthesized)
ttcattatcttgtcagaagtgaattagtttccaccagggacccctttatcccaaacagcaacacaaaatacaccctaaacctcagagtaaaattgatgtggggctatcctttggctatcg

SEQ ID NO: 657488 - DNA, 120 bp, Artificial Sequence
  ENSG00000183853_45 (sequence is synthesized)
ggtcatctgtgctgctccccactcatttctgatgggtttgcaaaggtgccttttgccagggcaggacatagtatgcacatagggatattgttatgtgcctaggtttcaggcactccttct

SEQ ID NO: 657489 - DNA, 120 bp, Artificial Sequence
  ENSG00000183853_46 (sequence is synthesized)
gtaggggaaaatgggaggagccttcctccaccctgatccttaggaacattcctctggcccagggacagcttgttcttctcaccaaacaggtgaagcctgcagtccaaggtgcctggagcc

SEQ ID NO: 657490 - DNA, 120 bp, Artificial Sequence
  ENSG00000183853_47 (sequence is synthesized)
agaggtcggggagtaagcacagctgcccctgcctgagaaggagcagcttgcaaggggagccggtggagggaaaggggtacaacagctttggaatacattctggatcttgaggaggatctt

SEQ ID NO: 657491 - DNA, 120 bp, Artificial Sequence
  ENSG00000183853_48 (sequence is synthesized)
gtgattttggctgagccacggtcacttccctcgtgaaggacccgccctatatcctaaattctggatccctcaaagtccagccacagagtttgcatgaagcaaaaagcctagtaagtgaga

SEQ ID NO: 657492 - DNA, 120 bp, Artificial Sequence
  ENSG00000183853_49 (sequence is synthesized)
aaggaaaggggccagggatgggagcagtgctgtgctgttatcactgtcttgcttggaatgaaaacatctgagcaccctgtcttcaagcggtacgctctccccttattccagcagggctac

SEQ ID NO: 657493 - DNA, 120 bp, Artificial Sequence
  ENSG00000183853_50 (sequence is synthesized)
tttcctcttcactctgatgaggggagctttatctgctttcaaaatggagcacgtcgcactggagtttcgtgccctctcgttaacctgtcaggagccacagggctccataaaacggaatca

SEQ ID NO: 657494 - DNA, 120 bp, Artificial Sequence
  ENSG00000183853_51 (sequence is synthesized)
gtgtctcaatatacatgacctatgttcatagcaatgttcagccatttgggtttgaagaaaaccacattaaagccaagacccgtttggagcgaactgccttgttctttgctgtgtggaagg

SEQ ID NO: 657495 - DNA, 120 bp, Artificial Sequence
  ENSG00000183853_52 (sequence is synthesized)
ttctgtccctactgctgaactccagttcctccccaagcaccctggcctcagaaatcctggcttccccaagttagtgctgtctgacctgagccaggccactgcttggtgcctctacaggcc

SEQ ID NO: 657496 - DNA, 120 bp, Artificial Sequence
  ENSG00000183853_53 (sequence is synthesized)
actgtgcatgttgagaattgcccaaaaggattagtgaagctcctgaccctggcgaggccataatgaacactgaagtgcacaggccaagggatgtaattgaaaggcatttatttttgtgaa

SEQ ID NO: 657497 - DNA, 120 bp, Artificial Sequence
  ENSG00000183853_54 (sequence is synthesized)
gatgctgtaaaattagcatttaaatatcccattcccttctcttggcctcctcctatccccctatggtatttctcctcctctcctcaaggccaggctttttgtgaaaggcattggctcatc

SEQ ID NO: 657498 - DNA, 120 bp, Artificial Sequence
  ENSG00000183853_55 (sequence is synthesized)
tttgtcagcgtggtcctgacgttcacctctgggctgctggagaggactgagagatgtgtggtttggtaggaagggggtgtgtgtgggggttagtggggaatcccatttttttgcatcact

SEQ ID NO: 657499 - DNA, 120 bp, Artificial Sequence
  ENSG00000183853_56 (sequence is synthesized)
gtgaggtagcttcaggccctgtccctggagaaataattgctgcgcagaagtcacaggccatactgggcagttctggtacaaacctgcccttattaataataacaataataataataactc

SEQ ID NO: 657500 - DNA, 120 bp, Artificial Sequence
  ENSG00000183853_57 (sequence is synthesized)
catttgcatagaactgtcactcattcctgccagtctgctgtccctaccctggttttttgctggccccaaccactggccttgttgagtatcgatgggccctgagctcttctgtttgctttt

SEQ ID NO: 657501 - DNA, 120 bp, Artificial Sequence
  ENSG00000183853_58 (sequence is synthesized)
ggagctcttcagatgctgtcccccctgagaataccctaactctggggaaagagcagccaaaatcccaatacagtaaaactccacacaatcttgttagcaacagtgacccagaaaattttg

SEQ ID NO: 657502 - DNA, 120 bp, Artificial Sequence
  ENSG00000183853_59 (sequence is synthesized)
agaagtccaatttcaccagaagaggcccagggctccctgtggtcacattttctacccagccattcttggcattgcaacctccatttctagctcctgttgaattttctccacccagacccc

SEQ ID NO: 657503 - DNA, 120 bp, Artificial Sequence
  ENSG00000183853_60 (sequence is synthesized)
aaaaataaatggatccatgatgataattaagagaagagaaaaaaagatattatttttgttaggacaaaccattgtaggtttttagcaatgtgtatctgtgtgtccctcacaccttttcct

SEQ ID NO: 657504 - DNA, 120 bp, Artificial Sequence
  ENSG00000183853_61 (sequence is synthesized)
tgtgtatctgtgtgtccctcacaccttttcctattctacttttttttcctttttttaaaaatattatgtactatatttttagtctcaaacacactatatattatatatatttaatttttt

SEQ ID NO: 657505 - DNA, 120 bp, Artificial Sequence
  ENSG00000183853_62 (sequence is synthesized)
ggcgccgtcggagggagagtagacgtcaggcggagggagggaggcaggcaggcagggaggcagggagggagagagggaaggaagagaaggggagagaaagggggagcaaagaccgaaaga

SEQ ID NO: 657506 - DNA, 120 bp, Artificial Sequence
  ENSG00000183853_63 (sequence is synthesized)
gacccagagagatacagcttgagaggagaaataattaaagggggagggcgaccaggaggagaaaaaggtctgggaggaaagagagataaagagaatcggagggcagggaaatgagtttgt

SEQ ID NO: 657507 - DNA, 120 bp, Artificial Sequence
  ENSG00000183853_64 (sequence is synthesized)
aaatgagtttgtgcgcgtgagtgtgcgcgcgcgcgtgtgtgtgtgcaggggcgggcgcgggcgggcggggggcgggctcccgggctcccgggctcccctcctccccagcccgctcctctg

SEQ ID NO: 657508 - DNA, 120 bp, Artificial Sequence
  ENSG00000183853_65 (sequence is synthesized)
actccgggccccagccgcgggcgggcgcacggcgggcggacagcatgctgagcctcctcgtctggatcctcactctctccgatactttctcccaagtccccccagaggacaccaggattg

SEQ ID NO: 657509 - DNA, 120 bp, Artificial Sequence
  ENSG00000183856_0 (sequence is synthesized)
aacggcgggagattcaaacctggaagaaggaggaacatggagaggagagcagcgggcccaggctgggcagcctatgaacgcctcacagctgaggagatggatgagcagaggcggcagaat

SEQ ID NO: 657510 - DNA, 120 bp, Artificial Sequence
  ENSG00000183856_1 (sequence is synthesized)
gttgcctatcagtacctgtgccggctggaggaggccaagcgctggatggaggcctgcctgaaggaggagcttccttccccggtggagctggaggagagccttcggaatggagtgctgctg

SEQ ID NO: 657511 - DNA, 120 bp, Artificial Sequence
  ENSG00000183856_2 (sequence is synthesized)
gccaagctaggccactgttttgcaccctccgtggttcccttgaagaagatctacgatgtggagcagctgcggtaccaggcaactggcttacatttccgtcacacagacaacatcaacttt

SEQ ID NO: 657512 - DNA, 120 bp, Artificial Sequence
  ENSG00000183856_3 (sequence is synthesized)
tggctatctgcaatagcccacatcggtctgccttcgaccttcttcccagagaccacggacatctatgacaaaaagaacatgccccgggtagtctactgcatccatgctctcagtctcttc

SEQ ID NO: 657513 - DNA, 120 bp, Artificial Sequence
  ENSG00000183856_4 (sequence is synthesized)
ctcttccggctgggattggcccctcagatacatgatctatacgggaaagtgaaattcacagctgaggaactcagcaacatggcgtccgaactggccaaatatggcctccagctgcctgcc

SEQ ID NO: 657514 - DNA, 120 bp, Artificial Sequence
  ENSG00000183856_5 (sequence is synthesized)
ttcagcaagatcgggggcatcttggccaatgagctctcggtggatgaggctgcagtccatgcagctgttcttgccatcaatgaagcagtggagcgaggggtggtggaggacaccctggct

SEQ ID NO: 657515 - DNA, 120 bp, Artificial Sequence
  ENSG00000183856_6 (sequence is synthesized)
gccttgcagaatcccagtgctcttctggagaatctccgagagcctctggcagccgtctaccaagagatgctggcccaggccaagatggagaaggcagccaatgccaggaaccatgatgac

SEQ ID NO: 657516 - DNA, 120 bp, Artificial Sequence
  ENSG00000183856_7 (sequence is synthesized)
agagaaagccaggacatctatgaccactacctaactcaggctgaaatccagggcaatatcaaccatgtcaacgtccatggggctctagaagttgttgatgatgccctggaaagacagagc

SEQ ID NO: 657517 - DNA, 120 bp, Artificial Sequence
  ENSG00000183856_8 (sequence is synthesized)
cctgaagccttgctcaaggcccttcaagaccctgccctggccctgcgaggggtgaggagagactttgctgactggtacctggagcagctgaactcagacagagagcagaaggcacaggag

SEQ ID NO: 657518 - DNA, 120 bp, Artificial Sequence
  ENSG00000183856_9 (sequence is synthesized)
ctgggcctggtggagcttctggaaaaggaggaagtccaggctggtgtggctgcagccaacacaaagggtgatcaggaacaagccatgctccacgctgtgcagcggatcaacaaagccatc

SEQ ID NO: 657519 - DNA, 120 bp, Artificial Sequence
  ENSG00000183856_10 (sequence is synthesized)
cggaggagagtggcggctgacactgtgaaggagctgatgtgccctgaggcccagctgcctccagtgtaccctgttgcatcgtctatgtaccagctggagctggcagtgctccagcagcag

SEQ ID NO: 657520 - DNA, 120 bp, Artificial Sequence
  ENSG00000183856_11 (sequence is synthesized)
cagggggagcttggccaggaggagctcttcgtggctgtggagatgctctcagctgtggtcctgattaaccgggccctggaggcccgggatgccagtggcttctggagcagcctggtgaac

SEQ ID NO: 657521 - DNA, 120 bp, Artificial Sequence
  ENSG00000183856_12 (sequence is synthesized)
cctgccacaggcctggctgaggtggaaggagaaaatgcccagcgttacttcgatgccctgctgaaattgcgacaggagcgtgggatgggtgaggacttcctgagctggaatgacctgcag

SEQ ID NO: 657522 - DNA, 120 bp, Artificial Sequence
  ENSG00000183856_13 (sequence is synthesized)
gccaccgtgagccaggtcaatgcacagacccaggaagagactgaccgggtccttgcagtcagcctcatcaatgaggctctggacaaaggcagccctgagaagactctgtctgccctactg

SEQ ID NO: 657523 - DNA, 120 bp, Artificial Sequence
  ENSG00000183856_14 (sequence is synthesized)
cttcctgcagctggcctagatgatgtcagcctccctgtcgcccctcggtaccatctcctccttgtggcagccaaaaggcagaaggcccaggtgacaggggatcctggagctgtgctgtgg

SEQ ID NO: 657524 - DNA, 120 bp, Artificial Sequence
  ENSG00000183856_15 (sequence is synthesized)
cttgaggagatccgccagggagtggtcagagccaaccaggacactaatacagctcagagaatggctcttggtgtggctgccatcaatcaagccatcaaggagggcaaggcagcccagact

SEQ ID NO: 657525 - DNA, 120 bp, Artificial Sequence
  ENSG00000183856_16 (sequence is synthesized)
gagcgggtgttgaggaaccccgcagtggcccttcgaggggtagttcccgactgtgccaacggctaccagcgagccctggaaagtgccatggcaaagaaacagcgtccagcagacacagct

SEQ ID NO: 657526 - DNA, 120 bp, Artificial Sequence
  ENSG00000183856_17 (sequence is synthesized)
ttctgggttcaacatgacatgaaggatggcactgcctactacttccatctgcagaccttccaggggatctgggagcaacctcctggctgccccctcaacacctctcacctgacccgggag

SEQ ID NO: 657527 - DNA, 120 bp, Artificial Sequence
  ENSG00000183856_18 (sequence is synthesized)
gagatccagtcagctgtcaccaaggtcactgctgcctatgaccgccaacagctctggaaagccaacgtcggctttgttatccagctccaggcccgcctccgtggcttcctagttcggcag

SEQ ID NO: 657528 - DNA, 120 bp, Artificial Sequence
  ENSG00000183856_19 (sequence is synthesized)
aagtttgctgagcattcccactttctgaggacctggctcccagcagtcatcaagatccaggctcattggcggggttataggcagcggaagatttacctggagtggttgcagtattttaaa

SEQ ID NO: 657529 - DNA, 120 bp, Artificial Sequence
  ENSG00000183856_20 (sequence is synthesized)
gcaaacctggatgccataatcaagatccaggcctgggcccggatgtgggcagctcggaggcaatacctgaggcgtctgcactacttccagaagaatgttaactccattgtgaagatccag

SEQ ID NO: 657530 - DNA, 120 bp, Artificial Sequence
  ENSG00000183856_21 (sequence is synthesized)
gcatttttccgagccaggaaagcccaagatgactacaggatattagtgcatgcaccccaccctcctctcagtgtggtacgcagatttgcccatctcttgaatcaaagccagcaagacttc

SEQ ID NO: 657531 - DNA, 120 bp, Artificial Sequence
  ENSG00000183856_22 (sequence is synthesized)
ttggctgaggcagagctgctgaagctccaggaagaggtagttaggaagatccgatccaatcagcagctggagcaggacctcaacatcatggacatcaagattggcctgctggtgaagaac

SEQ ID NO: 657532 - DNA, 120 bp, Artificial Sequence
  ENSG00000183856_23 (sequence is synthesized)
cggatcactctgcaggaagtggtctcccactgcaagaagctgaccaagaggaataaggaacagctgtcagatatgatggttctggacaagcagaagggtttaaagtcgctgagcaaagag

SEQ ID NO: 657533 - DNA, 120 bp, Artificial Sequence
  ENSG00000183856_24 (sequence is synthesized)
aaacggcagaaactagaagcataccaacacctcttctacctgctccagactcagcccatctacctggccaagctgatctttcagatgccacagaacaaaaccaccaagttcatggaggca

SEQ ID NO: 657534 - DNA, 120 bp, Artificial Sequence
  ENSG00000183856_25 (sequence is synthesized)
tgtacaactatgcctccagccgccgagaggcctatctcctgctccagctgttcaagacagcactccaggaggaaatcaagtcaaaggtggagcagccccaggacgtggtgacaggcaacc

SEQ ID NO: 657535 - DNA, 120 bp, Artificial Sequence
  ENSG00000183856_26 (sequence is synthesized)
caacagtggtgaggctggtggtgagattctaccgtaatgggcggggacagagtgccctgcaggagattctgggcaaggttatccaggatgtgctagaagacaaagtgctcagcgtccaca

SEQ ID NO: 657536 - DNA, 120 bp, Artificial Sequence
  ENSG00000183856_27 (sequence is synthesized)
cagaccctgtccacctctataagaactggatcaaccagactgaggcccagacagggcagcgcagccatctcccatatgatgtcaccccggagcaggccttgagccaccccgaggtccaga

SEQ ID NO: 657537 - DNA, 120 bp, Artificial Sequence
  ENSG00000183856_28 (sequence is synthesized)
gacgactggacatcgccctacgcaacctcctcgccatgactgataagttccttttagccatcacctcatctgtggaccaaattccgtatgggatgcgatatgtggccaaagtcctgaagg

SEQ ID NO: 657538 - DNA, 120 bp, Artificial Sequence
  ENSG00000183856_29 (sequence is synthesized)
caactctggcagagaaattccctgacgccacagacagcgaggtctataaggtggtcgggaacctcctgtactaccgcttcctgaacccagctgtggtggctcctgacgccttcgacattg

SEQ ID NO: 657539 - DNA, 120 bp, Artificial Sequence
  ENSG00000183856_30 (sequence is synthesized)
tggccatggcagctggtggagccctggctgccccccagcgccatgccctgggggctgtggctcagctcctacagcacgctgcggctggcaaggccttctctgggcagagccagcacctac

SEQ ID NO: 657540 - DNA, 120 bp, Artificial Sequence
  ENSG00000183856_31 (sequence is synthesized)
gggtcctgaatgactatctggaggaaacacacctcaagttcaggaagttcatccatagagcctgccaggtgccagagccagaggagcgttttgcagtggacgagtactcagacatggtgg

SEQ ID NO: 657541 - DNA, 120 bp, Artificial Sequence
  ENSG00000183856_32 (sequence is synthesized)
ctgtggccaaacccatggtgtacatcaccgtgggggagctggtcaacacgcacaggctgttgctggagcaccaggactgcattgcccctgatcaccaagaccccctgcatgagctcctgg

SEQ ID NO: 657542 - DNA, 120 bp, Artificial Sequence
  ENSG00000183856_33 (sequence is synthesized)
aggatcttggggagctgcccaccatccctgaccttattggtgagagcatcgctgcagatgggcacacggacctgagcaagctagaagtgtccctgacgctgaccaacaagtttgaaggac

SEQ ID NO: 657543 - DNA, 120 bp, Artificial Sequence
  ENSG00000183856_34 (sequence is synthesized)
tagaggcagatgctgatgactccaacacccgtagcctgcttctgagcaccaagcagctgttggccgatatcatacagttccatcctggggacaccctcaaggagatcctgtccctctcgg

SEQ ID NO: 657544 - DNA, 120 bp, Artificial Sequence
  ENSG00000183856_35 (sequence is synthesized)
cttccagagagcaagaagcagcccacaagcagctgatgagccgacgccaggcctgtacagcccagacaccggagccactgcgacgacaccgctcactgacagctcactccctcctgccac

SEQ ID NO: 657545 - DNA, 120 bp, Artificial Sequence
  ENSG00000183856_36 (sequence is synthesized)
tggcagagaagcagcggcgcgtcctgcggaacctacgccgacttgaagccctggggttggtcagcgccagaaatggctaccaggggctagtggacgagctggccaaggacatccgcaacc

SEQ ID NO: 657546 - DNA, 120 bp, Artificial Sequence
  ENSG00000183856_37 (sequence is synthesized)
agcacagacacaggcacaggcggaaggcagagctggtgaagctgcaggccacattacagggcctgagcactaagaccaccttctatgaggagcagggtgactactacagccagtacatcc

SEQ ID NO: 657547 - DNA, 120 bp, Artificial Sequence
  ENSG00000183856_38 (sequence is synthesized)
gggcctgcctggaccacctggcccccgactccaagagttctgggaaggggaagaagcagccttctcttcattacactgctgctcagctcctggaaaagggtgtcttggtggaaattgaag

SEQ ID NO: 657548 - DNA, 120 bp, Artificial Sequence
  ENSG00000183856_39 (sequence is synthesized)
atcttcccgcctctcacttcagaaacgtcatctttgacatcacgccgggagatgaggcaggaaagtttgaagtaaatgccaagttcctgggtgtggacatggagcgatttcagcttcact

SEQ ID NO: 657549 - DNA, 120 bp, Artificial Sequence
  ENSG00000183856_40 (sequence is synthesized)
atcaggatctcctgcagctccagtatgagggtgtggctgtcatgaaactcttcaacaaggccaaagtcaatgtcaaccttctcatcttcctcctcaacaagaagtttttgcggaagtgac

SEQ ID NO: 657550 - DNA, 120 bp, Artificial Sequence
  ENSG00000183856_41 (sequence is synthesized)
agaggcaaagggtgctacccaagcccctcttacctctctggatgctttctttaacactaactcaccactgtgcttccctgcagacacctagagctcaggactgggcaaggcccagggatt

SEQ ID NO: 657551 - DNA, 120 bp, Artificial Sequence
  ENSG00000183856_42 (sequence is synthesized)
ctcaccccttccccagctgggaggagcttgcctgcctggccacagacagtgtatcttctaattggctaaagtgggccttgcccagagtccagctgtgtggcttttatcatgcatgacaaa

SEQ ID NO: 657552 - DNA, 120 bp, Artificial Sequence
  ENSG00000183856_43 (sequence is synthesized)
cccctggctttcctgccagatggtaggacatggaccttgacctgggaaagccattactcttgtgtctgctactgccctcccacagtcaccccaatattacaagcactgccccagcggctt

SEQ ID NO: 657553 - DNA, 120 bp, Artificial Sequence
  ENSG00000183856_44 (sequence is synthesized)
gatttcccctctgccttccttctctctgcactcccacaaagccagggccaggctccccatccctacctcccactgcatcagcagtgggtgttcctgcccttcctgagtctaggcagctct

SEQ ID NO: 657554 - DNA, 120 bp, Artificial Sequence
  ENSG00000183856_45 (sequence is synthesized)
gctgctgtgatctgcacaccctccaacctgggcagggactggggggatgcagtgtgtgttagtgcccatgtggcattgtggcactgttgccccccatggcggcatgggcaagatgacctt

SEQ ID NO: 657555 - DNA, 120 bp, Artificial Sequence
  ENSG00000183856_46 (sequence is synthesized)
ccattagcttcaagtcttgttctcttgtctgtggtctgtttaatatgtgggtcactagggtatttattctttctcccatccttacactctggatcattgtgcagacttaatcagggtttt

SEQ ID NO: 657556 - DNA, 120 bp, Artificial Sequence
  ENSG00000183856_47 (sequence is synthesized)
tttttttttttttttttttttttgagctcaaagagagttctcattttccctattcaaactaatacccatgccgtgttttttaccttggatttaaagtcaccttaggttggggcaacagat

SEQ ID NO: 657557 - DNA, 120 bp, Artificial Sequence
  ENSG00000183856_48 (sequence is synthesized)
ggggcaacagattctcactcatgtttaagatcttgttatttcagcttcataagatcaaagaggagtctttcccttttctcttttaccctcaggattctcatcccttacagctgactcttc

SEQ ID NO: 657558 - DNA, 120 bp, Artificial Sequence
  ENSG00000183856_49 (sequence is synthesized)
caggcaatttccatagatctgcagtcctgcctctgccacagtctctctgttgtccccacatctacccaacttcctgtactgttgcccttctgatgttaataaaagcagctgttactccca

SEQ ID NO: 657559 - DNA, 120 bp, Artificial Sequence
  ENSG00000183856_50 (sequence is synthesized)
gtcctgtctggcggtgccgacggtgaggggcggtggcccaacggcgggagattcaaacctggaagaaggaggaacatggagaggagagcagcgggcccaggctgggcagcctctggatgg

SEQ ID NO: 657560 - DNA, 120 bp, Artificial Sequence
  ENSG00000183856_51 (sequence is synthesized)
atggagccaggggtactcagaggggttcctgaagagatgtggggaatgctcgaagctcctgctagagagctgagctgagagacggcgtgcaagtctgtgtgtggcctggtaggatgtcag

SEQ ID NO: 657561 - DNA, 120 bp, Artificial Sequence
  ENSG00000183856_52 (sequence is synthesized)
tggaaccagaggagggaccctaaaatgatctcagggacactttattagctaagagcaaatgaggagaaaatgggactcttcagttcccaatatcaaaaataaatattttaagcccataaa

SEQ ID NO: 657562 - DNA, 120 bp, Artificial Sequence
  ENSG00000183856_53 (sequence is synthesized)
gtgattttcagcctgtacaactatgcctccagccgccgagaggcctatctcctgctccagctgttcaagacagcactccaggaggaaatcaagtaggctctccagacacaaaggaatggg

SEQ ID NO: 657563 - DNA, 120 bp, Artificial Sequence
  ENSG00000183856_54 (sequence is synthesized)
gagagaatgggttaagagatccccctgttggctccttcacaaggtgacaacttgttgaggcctaagggtagaaatggaatcagaagacctcttttctctacctcctgtggagaaaccgta

SEQ ID NO: 657564 - DNA, 120 bp, Artificial Sequence
  ENSG00000183856_55 (sequence is synthesized)
aaacatctgggacagcacagtgggaggatatgggctgacatgctaacacaaaggatgagagagatatcaagacattccttaagagcggggacaccagggcaggctttgagagccaaaatc

SEQ ID NO: 657565 - DNA, 120 bp, Artificial Sequence
  ENSG00000183862_0 (sequence is synthesized)
ctggcagataagtgctctggttgtacatggaggatgaccgaaaaaaccaatggtgtgaagagctccccagccaataatcacaaccatcatgcacctcctgccatcaaggccaatggcaaa

SEQ ID NO: 657566 - DNA, 120 bp, Artificial Sequence
  ENSG00000183862_1 (sequence is synthesized)
gatgaccacaggacaagcagcaggccacactctgcagctgacgatgacacctcctcagaactgcagaggctggcagacgtggatgccccacagcagggaaggagtggcttccgcaggata

SEQ ID NO: 657567 - DNA, 120 bp, Artificial Sequence
  ENSG00000183862_2 (sequence is synthesized)
gttcgcctggtggggatcatcagagaatgggccaacaagaatttccgagaggaggaacctaggcctgactcattcctcgagcgttttcgtgggcctgaactccagactgtgaccacacag

SEQ ID NO: 657568 - DNA, 120 bp, Artificial Sequence
  ENSG00000183862_3 (sequence is synthesized)
gagggggatggcaaaggcgacaaggatggcgaggacaaaggcaccaagaagaaatttgaactatttgtcttggacccagctggggattggtactactgctggctatttgtcattgccatg

SEQ ID NO: 657569 - DNA, 120 bp, Artificial Sequence
  ENSG00000183862_4 (sequence is synthesized)
cccgtcctttacaactggtgcctgctggtggccagagcctgcttcagtgacctacagaaaggctactacctggtgtggctggtgctggattatgtctcagatgtggtctacattgcggac

SEQ ID NO: 657570 - DNA, 120 bp, Artificial Sequence
  ENSG00000183862_5 (sequence is synthesized)
ctcttcatccgattgcgcacaggtttcctggagcaggggctgctggtcaaagataccaagaaactgcgagacaactacatccacaccctgcagttcaagctggatgtggcttccatcatc

SEQ ID NO: 657571 - DNA, 120 bp, Artificial Sequence
  ENSG00000183862_6 (sequence is synthesized)
cccactgacctgatctattttgctgtggacatccacagccctgaggtgcgcttcaaccgcctgctgcactttgcccgcatgtttgagttctttgaccggacagagacacgcaccaactac

SEQ ID NO: 657572 - DNA, 120 bp, Artificial Sequence
  ENSG00000183862_7 (sequence is synthesized)
cctaacatcttccgcatcagcaaccttgtcctctacatcttggtcatcatccactggaatgcctgcatctattatgccatctccaaatccataggctttggggtcgacacctgggtttac

SEQ ID NO: 657573 - DNA, 120 bp, Artificial Sequence
  ENSG00000183862_8 (sequence is synthesized)
ccaaacatcactgaccctgagtatggctacctggctagggaatacatctattgcctttactggtccacactgactctcactaccattggggagacaccaccccctgtaaaggatgaggag

SEQ ID NO: 657574 - DNA, 120 bp, Artificial Sequence
  ENSG00000183862_9 (sequence is synthesized)
tacctatttgtcatctttgacttcctgattggcgtcctcatctttgccaccatcgtgggaaatgtgggctccatgatctccaacatgaatgccacccgggcagagttccaggctaagatc

SEQ ID NO: 657575 - DNA, 120 bp, Artificial Sequence
  ENSG00000183862_10 (sequence is synthesized)
gatgccgtgaaacactacatgcagttccgaaaggtcagcaaggggatggaagccaaggtcattaggtggtttgactacttgtggaccaataagaagacagtggatgagcgagaaattctc

SEQ ID NO: 657576 - DNA, 120 bp, Artificial Sequence
  ENSG00000183862_11 (sequence is synthesized)
cttccatgattgtgaggctggcctgctggtagagctggtactgaaactccgtcctcaggtcttcagtcctggggattacatttgccgcaaaggggacatcggcaaggagatgtacatcat

SEQ ID NO: 657577 - DNA, 120 bp, Artificial Sequence
  ENSG00000183862_12 (sequence is synthesized)
taaggagggcaaactggcagtggtggctgatgatggtgtgactcagtatgctctgctgtcggctggaagctgctttggcgagatcagtatccttaacattaagggcagtaaaatgggcaa

SEQ ID NO: 657578 - DNA, 120 bp, Artificial Sequence
  ENSG00000183862_13 (sequence is synthesized)
tcgacgcacagctaatatccgcagcctgggctactcagatctcttctgcttgtccaaggatgatcttatggaagctgtgactgagtaccctgatgccaagaaagtcctagaagagagggg

SEQ ID NO: 657579 - DNA, 120 bp, Artificial Sequence
  ENSG00000183862_14 (sequence is synthesized)
tcgggagatcctcatgaaggagggactgctggatgagaacgaagtggcaaccagcatggaggtcgacgtgcaggagaagctagggcagctggagaccaacatggaaaccttgtacactcg

SEQ ID NO: 657580 - DNA, 120 bp, Artificial Sequence
  ENSG00000183862_15 (sequence is synthesized)
ctttggccgcctgctggctgagtacacgggggcccagcagaagctcaagcagcgcatcacagttctggaaaccaagatgaaacagaacaatgaagatgactacctgtctgatgggatgaa

SEQ ID NO: 657581 - DNA, 120 bp, Artificial Sequence
  ENSG00000183862_16 (sequence is synthesized)
cagccctgagctggctgctgctgacgagccataagacctggggcccaactgcctctccagcattggccttggccttgatcccagaagctagaggagctatttagatctccggatttacat

SEQ ID NO: 657582 - DNA, 120 bp, Artificial Sequence
  ENSG00000183862_17 (sequence is synthesized)
gcattaccctcatgttccctgaattctcccaaaagcctctctgaccctgggtttttggcctaaacatccaagattccgcctccaagtttagcccaagtttgtggagagtacagactgcgt

SEQ ID NO: 657583 - DNA, 120 bp, Artificial Sequence
  ENSG00000183862_18 (sequence is synthesized)
tggctgggcttccgagagcttcggcctgcctaagtctgaggaagggagaagggggcagctgtctgccaggagtctggctcttttgctcatagcgacccctcccttggttctggcccccgc

SEQ ID NO: 657584 - DNA, 120 bp, Artificial Sequence
  ENSG00000183862_19 (sequence is synthesized)
tttttctaacatgtcttctgaatgcttcctttttccctgcacacgcatgtacttcgagcaccgactatagacatttagatcaggtacccagtgtctgtctcccacgacaggccaagggat

SEQ ID NO: 657585 - DNA, 120 bp, Artificial Sequence
  ENSG00000183862_20 (sequence is synthesized)
gtgatagtgttgttgggagggggtagaagggtgcccactcagggttattcctcccccatcagatgctccagctcctgctctgtagattgatctgtctgtctgctagccaggatgggatct

SEQ ID NO: 657586 - DNA, 120 bp, Artificial Sequence
  ENSG00000183862_21 (sequence is synthesized)
ctgcagtcttctgtggaccaaggagatagacccggcttctggtccattccagggcagggagtgaggagcaaggcaactggcatttgtccacctggagacagaggtagctggcagctctgg

SEQ ID NO: 657587 - DNA, 120 bp, Artificial Sequence
  ENSG00000183862_22 (sequence is synthesized)
ccatccctcccctatgaagagcattcctaaagaggccctgaaaactgctggtggtggggagactcttcaagttaatatctgcattagaggcacctatgagttaaaaaattcctttgaact

SEQ ID NO: 657588 - DNA, 120 bp, Artificial Sequence
  ENSG00000183864_0 (sequence is synthesized)
gctcacttcgggccggggcgcgggaaggtgcgggttgttggctgaggcaagccgtggctcgggcgacgcggggccaggagggcaggaccgtctgccggcgacagcccataccgtctgccg

SEQ ID NO: 657589 - DNA, 120 bp, Artificial Sequence
  ENSG00000183864_1 (sequence is synthesized)
ttgcgcgacacgaaccaccctccgatccgccatccccgcgtcgtcgccgctagtccgcccgcccgccctcgggccccccgctgccgagcccgacctcctaagagctgaaagaaattattg

SEQ ID NO: 657590 - DNA, 120 bp, Artificial Sequence
  ENSG00000183864_2 (sequence is synthesized)
agagtcatagtccatagccccctgcttcgtcccccaaccctcaacgacgaaaaggacttcggtcccctggcccggcgacgcccgggaaggaaaggagagcgacctccgccccgcgctcag

SEQ ID NO: 657591 - DNA, 120 bp, Artificial Sequence
  ENSG00000183864_3 (sequence is synthesized)
gccaccctggagggagaagccgccccgcggccggtagagcgccccgccgccgcggagacccgaagccgcctggagcccaaggctgtacacgtgccctgtgctgattctctgcctaggaaa

SEQ ID NO: 657592 - DNA, 120 bp, Artificial Sequence
  ENSG00000183864_4 (sequence is synthesized)
ggaccatgcagctagagatcaaagtggccctgaacttcatcatctcctacttgtacaacaagctgccccggcgccgggcagacctgtttggggaggagctagagcggcttttgaaaaaga

SEQ ID NO: 657593 - DNA, 120 bp, Artificial Sequence
  ENSG00000183864_5 (sequence is synthesized)
aatatgaaggccactggtaccctgagaagccactgaaaggctctggcttccgctgtgttcacattggggagatggtggaccccgtggtggagctggccgccaagcggagtggcctggcgg

SEQ ID NO: 657594 - DNA, 120 bp, Artificial Sequence
  ENSG00000183864_6 (sequence is synthesized)
tggaagatgtgcgggccaatgtgcctgaggagctgagtgtctggattgatccctttgaggtgtcctaccagattggtgagaagggagctgtgaaagtgctgtacctggatgacagtgagg

SEQ ID NO: 657595 - DNA, 120 bp, Artificial Sequence
  ENSG00000183864_7 (sequence is synthesized)
gttgcggtgccccagagctggacaaggagatcaagagcagcttcaaccctgacgcccaggtgttcgtgcccattggcagccaggacagctccctgtccaactccccatcgccatcctttg

SEQ ID NO: 657596 - DNA, 120 bp, Artificial Sequence
  ENSG00000183864_8 (sequence is synthesized)
gccagtcacccagccctaccttcattccccgctccgctcagcccatcaccttcaccaccgcctccttcgctgccaccaaatttggctccactaagatgaagaaggggggcggggcagcaa

SEQ ID NO: 657597 - DNA, 120 bp, Artificial Sequence
  ENSG00000183864_9 (sequence is synthesized)
gtggtgggggtgtagccagcagtggggcgggtggccagcagccaccacagcagcctcgcatggcccgctcacccaccaacagcctgctgaagcacaagagcctctctctgtctatgcatt

SEQ ID NO: 657598 - DNA, 120 bp, Artificial Sequence
  ENSG00000183864_10 (sequence is synthesized)
cactgaacttcatcacggccaacccggcccctcagtcccagctctcacccaatgccaaggagttcgtgtacaacggtggtggctcacccagcctcttctttgatgcggccgatggccagg

SEQ ID NO: 657599 - DNA, 120 bp, Artificial Sequence
  ENSG00000183864_11 (sequence is synthesized)
gcagcggcaccccaggcccgtttggaggcagtggggctggcacctgcaacagcagcagctttgacatggcccaggtatttggaggtggtgccaacagcctcttcctggagaagacaccct

SEQ ID NO: 657600 - DNA, 120 bp, Artificial Sequence
  ENSG00000183864_12 (sequence is synthesized)
ttgtggaaggcctcagctacaacctgaacaccatgcagtatcccagccagcagttccagcccgtggtgctggccaactgaccatctacctgcccgtggggccaggagcacccaagaccac

SEQ ID NO: 657601 - DNA, 120 bp, Artificial Sequence
  ENSG00000183864_13 (sequence is synthesized)
agaaaagagaaaggaaaggccaaaaaaaagaggaaaagaaaaatgtacaaaaagattttcgatcttctcactcttacttctagaaaaaagatccagcccaggcacggaatgggagggccc

SEQ ID NO: 657602 - DNA, 120 bp, Artificial Sequence
  ENSG00000183864_14 (sequence is synthesized)
cggaatgggagggccctgcaaagcacccaagtgtgtttcactcaccccttaccgctcgcccaccggcctgtgatttatttggttggtttgggttttatatttctttttcttttttttttt

SEQ ID NO: 657603 - DNA, 120 bp, Artificial Sequence
  ENSG00000183864_15 (sequence is synthesized)
ctatataacatctttaatgagtggcttcctgtgctaagaatggtccagatgtgaactgctgctccctgctcctcccttcctccttcacactcctagtttaggattgatgtgtccaagctc

SEQ ID NO: 657604 - DNA, 120 bp, Artificial Sequence
  ENSG00000183864_16 (sequence is synthesized)
atagggaagaaagagctgcagctggagcctgaccctccctggaacagggagaggctggcccgtgtcactgcctctgtcacccagctatcctcgcactcaaagccatccaacctcagcagg

SEQ ID NO: 657605 - DNA, 120 bp, Artificial Sequence
  ENSG00000183864_17 (sequence is synthesized)
ccttctcgggccctgccacctgaataggtctgaccccagtccccactccctttcaggctgggccacagggagttgctggctggccacttgacaccctccccctggagctgatgtctgtga

SEQ ID NO: 657606 - DNA, 120 bp, Artificial Sequence
  ENSG00000183864_18 (sequence is synthesized)
cttcgtctagtgaaactcctttcatctctgtcctatggccccaccccaccattccctctaggcccagaccatcatcatggccctggccattgatgtgtatgggctttctttccctcatgc

SEQ ID NO: 657607 - DNA, 120 bp, Artificial Sequence
  ENSG00000183864_19 (sequence is synthesized)
agccccttcttccccaggctggatgttgtgggtagggaggggtgtgtgtgtgtgtatttggtttgctgtccttttttaaaggattccaagccatgtgaaacttcccttctggatgtgatt

SEQ ID NO: 657608 - DNA, 120 bp, Artificial Sequence
  ENSG00000183864_20 (sequence is synthesized)
ctgggtcgcaagtccttatttatatgtgaggctggggaatgggctgggggtattggcagtccttttgcagggcagtgtgtgtggtggggtgacaccgctgtggcttagcccaagacactc

SEQ ID NO: 657609 - DNA, 120 bp, Artificial Sequence
  ENSG00000183864_21 (sequence is synthesized)
ccagaggaaaacactgcagaaggaactggtttgcagactgtggaaggatctgcagttttgtttttgaccaaaaaaataataataagttagctctgaagggcagagggaatacccaagccc

SEQ ID NO: 657610 - DNA, 120 bp, Artificial Sequence
  ENSG00000183864_22 (sequence is synthesized)
ctgatgcctatgagaagtccctggacttcaaccctcctgttgtttggccttagcccagagggagctgctcacctgagcacccttgggggtgggcagagaggcagggtgggattttagagt

SEQ ID NO: 657611 - DNA, 120 bp, Artificial Sequence
  ENSG00000183864_23 (sequence is synthesized)
tagtgtctgtgcgggggcagccctgagcctggagttgagactttggggtctcttagtttggaggtgttgagtgcatttgtgcccctgcctggttgagagcttcttggtacctcttgccac

SEQ ID NO: 657612 - DNA, 120 bp, Artificial Sequence
  ENSG00000183864_24 (sequence is synthesized)
cccttctcactgccctgacccaaccccactggaccttgatgctgcgaggagtggtgtcctgacggactcagcactcccgcctgatgtattggatcataggagagcacttgctctcctgcc

SEQ ID NO: 657613 - DNA, 120 bp, Artificial Sequence
  ENSG00000183864_25 (sequence is synthesized)
tctgccaggagagggcttgttcctccaactctaggaggccaggcaagcatggacaggagccaagggagcagggtcattaactttttcttctttgcaaagtgggcacttggcatcagggtc

SEQ ID NO: 657614 - DNA, 120 bp, Artificial Sequence
  ENSG00000183864_26 (sequence is synthesized)
ccaatcaccagaaagcaccaaagcccctggcaccccacccactccatcctacccagggaccccaagtaggcaactgttatggcagtgggtccagcccaggccagcactgccagcctcctc

SEQ ID NO: 657615 - DNA, 120 bp, Artificial Sequence
  ENSG00000183864_27 (sequence is synthesized)
tccctgcagtaggcaccagctctacctcccccggcaggcaatgtcctggcttctcagcccagcaccatctgttcccctagacttctcaggggccagcccagtctgggccaccctttgttt

SEQ ID NO: 657616 - DNA, 120 bp, Artificial Sequence
  ENSG00000183864_28 (sequence is synthesized)
ccctcatcctcggctcccacacaggtgacagacccagcagatagcttctctctgggaaaggttggatgctgccttacatccccttctagccctcctcccatccacacacacaggcaccca

SEQ ID NO: 657617 - DNA, 120 bp, Artificial Sequence
  ENSG00000183864_29 (sequence is synthesized)
cccacaccaggtcggcttgtttctcacatgtagggagagaggggagaccaacccctttgtgtcttttgaaatacgaagaaaaatgtgtgttcaggagcatgactccagtgctgcgctctt

SEQ ID NO: 657618 - DNA, 120 bp, Artificial Sequence
  ENSG00000183864_30 (sequence is synthesized)
gggcccagttcagtctgtcttgtctcaaatctaggcatttttgcttcaattttattttttttaagaatacaaaaacagaaatctgcactaatttacctggtttcgtaggaaaactttttt

SEQ ID NO: 657619 - DNA, 120 bp, Artificial Sequence
  ENSG00000183864_31 (sequence is synthesized)
tttttacattttttggtgtccgtttgtattgaataatttgctacatttgtaaaatgtaagaggtatataatatatgtatatttctaacgtaaaaaacataatttttttcttttcaagatt

SEQ ID NO: 657620 - DNA, 120 bp, Artificial Sequence
  ENSG00000183864_32 (sequence is synthesized)
gattttttcttaaaaagatgagagaaacatattttttcaggaaaaacaaactttaaaaaaaaaagaggagaaataaaaccttttctcccctttccccatcctctatctatccctctttcc

SEQ ID NO: 657621 - DNA, 120 bp, Artificial Sequence
  ENSG00000183864_33 (sequence is synthesized)
caggaacaaatcaaaaggtggattatcttctgaagaatggaaactgttagtccagaatgatgtgtttttctcaatgcagtgagttatagattctctagttttctccctagggatgggaag

SEQ ID NO: 657622 - DNA, 120 bp, Artificial Sequence
  ENSG00000183864_34 (sequence is synthesized)
ggggcattgaggcaagcctggagaggagcccggggagcagggtcatgaacttttttctttagtgaaggaggaatacaatcaagggttttgtattcagaatgttgtgcaatattttggaat

SEQ ID NO: 657623 - DNA, 120 bp, Artificial Sequence
  ENSG00000183864_35 (sequence is synthesized)
gggacattggtgtgtttagagattttagtttaaaaacaaaacaaaaagattgatcaaatctgtacagtttctattgttccagatttttttaagtttgtattaaaagcatgatacataata

SEQ ID NO: 657624 - DNA, 120 bp, Artificial Sequence
  ENSG00000183873_0 (sequence is synthesized)
ctgagcctgcgcccagtgccccgagccccgcgccgagccgagtccgcgccaagcagcagccgcccaccccggggcccggccgggggaccagcagcttccccacaggcaacgtgaggagag

SEQ ID NO: 657625 - DNA, 120 bp, Artificial Sequence
  ENSG00000183873_1 (sequence is synthesized)
agagcctgtgcccagaagcaggatgagaagatggcaaacttcctattacctcggggcaccagcagcttccgcaggttcacacgggagtccctggcagccatcgagaagcgcatggcagag

SEQ ID NO: 657626 - DNA, 120 bp, Artificial Sequence
  ENSG00000183873_2 (sequence is synthesized)
aagcaagcccgcggctcaaccaccttgcaggagagccgagaggggctgcccgaggaggaggctccccggccccagctggacctgcaggcctccaaaaagctgccagatctctatggcaat

SEQ ID NO: 657627 - DNA, 120 bp, Artificial Sequence
  ENSG00000183873_3 (sequence is synthesized)
ccaccccaagagctcatcggagagcccctggaggacctggaccccttctatagcacccaaaagactttcatcgtactgaataaaggcaagaccatcttccggttcagtgccaccaacgcc

SEQ ID NO: 657628 - DNA, 120 bp, Artificial Sequence
  ENSG00000183873_4 (sequence is synthesized)
ttgtatgtcctcagtcccttccaccccatccggagagcggctgtgaagattctggttcactcgctcttcaacatgctcatcatgtgcaccatcctcaccaactgcgtgttcatggcccag

SEQ ID NO: 657629 - DNA, 120 bp, Artificial Sequence
  ENSG00000183873_5 (sequence is synthesized)
cacgaccctccaccctggaccaagtatgtcgagtacaccttcaccgccatttacacctttgagtctctggtcaagattctggctcgaggcttctgcctgcacgcgttcactttccttcgg

SEQ ID NO: 657630 - DNA, 120 bp, Artificial Sequence
  ENSG00000183873_6 (sequence is synthesized)
gacccatggaactggctggactttagtgtgattatcatggcatacacaactgaatttgtggacctgggcaatgtctcagccttacgcaccttccgagtcctccgggccctgaaaactata

SEQ ID NO: 657631 - DNA, 120 bp, Artificial Sequence
  ENSG00000183873_7 (sequence is synthesized)
tcagtcatttcagggctgaagaccatcgtgggggccctgatccagtctgtgaagaagctggctgatgtgatggtcctcacagtcttctgcctcagcgtctttgccctcatcggcctgcag

SEQ ID NO: 657632 - DNA, 120 bp, Artificial Sequence
  ENSG00000183873_8 (sequence is synthesized)
ctcttcatgggcaacctaaggcacaagtgcgtgcgcaacttcacagcgctcaacggcaccaacggctccgtggaggccgacggcttggtctgggaatccctggacctttacctcagtgat

SEQ ID NO: 657633 - DNA, 120 bp, Artificial Sequence
  ENSG00000183873_9 (sequence is synthesized)
ccagaaaattacctgctcaagaacggcacctctgatgtgttactgtgtgggaacagctctgacgctgggacatgtccggagggctaccggtgcctaaaggcaggcgagaaccccgaccac

SEQ ID NO: 657634 - DNA, 120 bp, Artificial Sequence
  ENSG00000183873_10 (sequence is synthesized)
ggctacaccagcttcgattcctttgcctgggcctttcttgcactcttccgcctgatgacgcaggactgctgggagcgcctctatcagcagaccctcaggtccgcagggaagatctacatg

SEQ ID NO: 657635 - DNA, 120 bp, Artificial Sequence
  ENSG00000183873_11 (sequence is synthesized)
atcttcttcatgcttgtcatcttcctggggtccttctacctggtgaacctgatcctggccgtggtcgcaatggcctatgaggagcaaaaccaagccaccatcgctgagaccgaggagaag

SEQ ID NO: 657636 - DNA, 120 bp, Artificial Sequence
  ENSG00000183873_12 (sequence is synthesized)
gaaaagcgcttccaggaggccatggaaatgctcaagaaagaacacgaggccctcaccatcaggggtgtggataccgtgtcccgtagctccttggagatgtcccctttggccccagtaaac

SEQ ID NO: 657637 - DNA, 120 bp, Artificial Sequence
  ENSG00000183873_13 (sequence is synthesized)
agccatgagagaagaagcaagaggagaaaacggatgtcttcaggaactgaggagtgtggggaggacaggctccccaagtctgactcagaagatggtcccagagcaatgaatcatctcagc

SEQ ID NO: 657638 - DNA, 120 bp, Artificial Sequence
  ENSG00000183873_14 (sequence is synthesized)
ctcacccgtggcctcagcaggacttctatgaagccacgttccagccgcgggagcattttcacctttcgcaggcgagacctgggttctgaagcagattttgcagatgatgaaaacagcaca

SEQ ID NO: 657639 - DNA, 120 bp, Artificial Sequence
  ENSG00000183873_15 (sequence is synthesized)
gcgggggagagcgagagccaccacacatcactgctggtgccctggcccctgcgccggaccagtgcccagggacagcccagtcccggaacctcggctcctggccacgccctccatggcaaa

SEQ ID NO: 657640 - DNA, 120 bp, Artificial Sequence
  ENSG00000183873_16 (sequence is synthesized)
aagaacagcactgtggactgcaatggggtggtctcattactgggggcaggcgacccagaggccacatccccaggaagccacctcctccgccctgtgatgctagagcacccgccagacacg

SEQ ID NO: 657641 - DNA, 120 bp, Artificial Sequence
  ENSG00000183873_17 (sequence is synthesized)
accacgccatcggaggagccaggcgggccccagatgctgacctcccaggctccgtgtgtagatggcttcgaggagccaggagcacggcagcgggccctcagcgcagtcagcgtcctcacc

SEQ ID NO: 657642 - DNA, 120 bp, Artificial Sequence
  ENSG00000183873_18 (sequence is synthesized)
agcgcactggaagagttagaggagtctcgccacaagtgtccaccatgctggaaccgtctcgcccagcgctacctgatctgggagtgctgcccgctgtggatgtccatcaagcagggagtg

SEQ ID NO: 657643 - DNA, 120 bp, Artificial Sequence
  ENSG00000183873_19 (sequence is synthesized)
aagttggtggtcatggacccgtttactgacctcaccatcactatgtgcatcgtactcaacacactcttcatggcgctggagcactacaacatgacaagtgaattcgaggagatgctgcag

SEQ ID NO: 657644 - DNA, 120 bp, Artificial Sequence
  ENSG00000183873_20 (sequence is synthesized)
gtcggaaacctggtcttcacagggattttcacagcagagatgaccttcaagatcattgccctcgacccctactactacttccaacagggctggaacatcttcgacagcatcatcgtcatc

SEQ ID NO: 657645 - DNA, 120 bp, Artificial Sequence
  ENSG00000183873_21 (sequence is synthesized)
cttagcctcatggagctgggcctgtcccgcatgagcaacttgtcggtgctgcgctccttccgcctgctgcgggtcttcaagctggccaaatcatggcccaccctgaacacactcatcaag

SEQ ID NO: 657646 - DNA, 120 bp, Artificial Sequence
  ENSG00000183873_22 (sequence is synthesized)
atcatcgggaactcagtgggggcactggggaacctgacactggtgctagccatcatcgtgttcatctttgctgtggtgggcatgcagctctttggcaagaactactcggagctgagggac

SEQ ID NO: 657647 - DNA, 120 bp, Artificial Sequence
  ENSG00000183873_23 (sequence is synthesized)
agcgactcaggcctgctgcctcgctggcacatgatggacttctttcatgccttcctcatcatcttccgcatcctctgtggagagtggatcgagaccatgtgggactgcatggaggtgtcg

SEQ ID NO: 657648 - DNA, 120 bp, Artificial Sequence
  ENSG00000183873_24 (sequence is synthesized)
gggcagtcattatgcctgctggtcttcttgcttgttatggtcattggcaaccttgtggtcctgaatctcttcctggccttgctgctcagctccttcagtgcagacaacctcacagcccct

SEQ ID NO: 657649 - DNA, 120 bp, Artificial Sequence
  ENSG00000183873_25 (sequence is synthesized)
gatgaggacagagagatgaacaacctccagctggccctggcccgcatccagaggggcctgcgctttgtcaagcggaccacctgggatttctgctgtggtctcctgcggcagcggcctcag

SEQ ID NO: 657650 - DNA, 120 bp, Artificial Sequence
  ENSG00000183873_26 (sequence is synthesized)
aagcccgcagcccttgccgcccagggccagctgcccagctgcattgccaccccctactccccgccacccccagagacggagaaggtgcctcccacccgcaaggaaacacggtttgaggaa

SEQ ID NO: 657651 - DNA, 120 bp, Artificial Sequence
  ENSG00000183873_27 (sequence is synthesized)
ggcgagcaaccaggccagggcacccccggggatccagagcccgtgtgtgtgcccatcgctgtggccgagtcagacacagatgaccaagaagaagatgaggagaacagcctgggcacggag

SEQ ID NO: 657652 - DNA, 120 bp, Artificial Sequence
  ENSG00000183873_28 (sequence is synthesized)
gaggagtccagcaagcagcaggaatcccagcctgtgtccggtggcccagaggcccctccggattccaggacctggagccaggtgtcagcgactgcctcctctgaggccgaggccagtgca

SEQ ID NO: 657653 - DNA, 120 bp, Artificial Sequence
  ENSG00000183873_29 (sequence is synthesized)
tctcaggccgactggcggcagcagtggaaagcggaaccccaggccccagggtgcggtgagaccccagaggacagttgctccgagggcagcacagcagacatgaccaacaccgctgagctc

SEQ ID NO: 657654 - DNA, 120 bp, Artificial Sequence
  ENSG00000183873_30 (sequence is synthesized)
ctggagcagatccctgacctcggccaggatgtcaaggacccagaggactgcttcactgaaggctgtgtccggcgctgtccctgctgtgcggtggacaccacacaggccccagggaaggtc

SEQ ID NO: 657655 - DNA, 120 bp, Artificial Sequence
  ENSG00000183873_31 (sequence is synthesized)
tggtggcggttgcgcaagacctgctaccacatcgtggagcacagctggttcgagacattcatcatcttcatgatcctactcagcagtggagcgctggccttcgaggacatctacctagag

SEQ ID NO: 657656 - DNA, 120 bp, Artificial Sequence
  ENSG00000183873_32 (sequence is synthesized)
gagcggaagaccatcaaggttctgcttgagtatgccgacaagatgttcacatatgtcttcgtgctggagatgctgctcaagtgggtggcctacggcttcaagaagtacttcaccaatgcc

SEQ ID NO: 657657 - DNA, 120 bp, Artificial Sequence
  ENSG00000183873_33 (sequence is synthesized)
tggtgctggctcgacttcctcatcgtagacgtctctctggtcagcctggtggccaacaccctgggctttgccgagatgggccccatcaagtcactgcggacgctgcgtgcactccgtcct

SEQ ID NO: 657658 - DNA, 120 bp, Artificial Sequence
  ENSG00000183873_34 (sequence is synthesized)
ctgagagctctgtcacgatttgagggcatgagggtggtggtcaatgccctggtgggcgccatcccgtccatcatgaacgtcctcctcgtctgcctcatcttctggctcatcttcagcatc

SEQ ID NO: 657659 - DNA, 120 bp, Artificial Sequence
  ENSG00000183873_35 (sequence is synthesized)
agacttgcctttgaactacaccatcgtgaacaacaagagccagtgtgagtccttgaacttgaccggagaattgtactggaccaaggtgaaagtcaactttgacaacgtgggggccgggta

SEQ ID NO: 657660 - DNA, 120 bp, Artificial Sequence
  ENSG00000183873_36 (sequence is synthesized)
cctggcccttctgcaggtggcaacatttaaaggctggatggacattatgtatgcagctgtggactccagggggtatgaagagcagcctcagtgggaatacaacctctacatgtacatcta

SEQ ID NO: 657661 - DNA, 120 bp, Artificial Sequence
  ENSG00000183873_37 (sequence is synthesized)
ttttgtcattttcatcatctttgggtctttcttcaccctgaacctctttattggtgtcatcattgacaacttcaaccaacagaagaaaaagttagggggccaggacatcttcatgacaga

SEQ ID NO: 657662 - DNA, 120 bp, Artificial Sequence
  ENSG00000183873_38 (sequence is synthesized)
ggagcagaagaagtactacaatgccatgaagaagctgggctccaagaagccccagaagcccatcccacggcccctgaacaagtaccagggcttcatattcgacattgtgaccaagcaggc

SEQ ID NO: 657663 - DNA, 120 bp, Artificial Sequence
  ENSG00000183873_39 (sequence is synthesized)
ctttgacgtcaccatcatgtttctgatctgcttgaatatggtgaccatgatggtggagacagatgaccaaagtcctgagaaaatcaacatcttggccaagatcaacctgctctttgtggc

SEQ ID NO: 657664 - DNA, 120 bp, Artificial Sequence
  ENSG00000183873_40 (sequence is synthesized)
catcttcacaggcgagtgtattgtcaagctggctgccctgcgccactactacttcaccaacagctggaatatcttcgacttcgtggttgtcatcctctccatcgtgggcactgtgctctc

SEQ ID NO: 657665 - DNA, 120 bp, Artificial Sequence
  ENSG00000183873_41 (sequence is synthesized)
ggacatcatccagaagtacttcttctccccgacgctcttccgagtcatccgcctggcccgaataggccgcatcctcagactgatccgaggggccaaggggatccgcacgctgctctttgc

SEQ ID NO: 657666 - DNA, 120 bp, Artificial Sequence
  ENSG00000183873_42 (sequence is synthesized)
cctcatgatgtccctgcctgccctcttcaacatcgggctgctgctcttcctcgtcatgttcatctactccatctttggcatggccaacttcgcttatgtcaagtgggaggctggcatcga

SEQ ID NO: 657667 - DNA, 120 bp, Artificial Sequence
  ENSG00000183873_43 (sequence is synthesized)
cgacatgttcaacttccagaccttcgccaacagcatgctgtgcctcttccagatcaccacgtcggccggctgggatggcctcctcagccccatcctcaacactgggccgccctactgcga

SEQ ID NO: 657668 - DNA, 120 bp, Artificial Sequence
  ENSG00000183873_44 (sequence is synthesized)
ccccactctgcccaacagcaatggctctcggggggactgcgggagcccagccgtgggcatcctcttcttcaccacctacatcatcatctccttcctcatcgtggtcaacatgtacattgc

SEQ ID NO: 657669 - DNA, 120 bp, Artificial Sequence
  ENSG00000183873_45 (sequence is synthesized)
catcatcctggagaacttcagcgtggccacggaggagagcaccgagcccctgagtgaggacgacttcgatatgttctatgagatctgggagaaatttgacccagaggccactcagtttat

SEQ ID NO: 657670 - DNA, 120 bp, Artificial Sequence
  ENSG00000183873_46 (sequence is synthesized)
tgagtattcggtcctgtctgactttgccgatgccctgtctgagccactccgtatcgccaagcccaaccagataagcctcatcaacatggacctgcccatggtgagtggggaccgcatcca

SEQ ID NO: 657671 - DNA, 120 bp, Artificial Sequence
  ENSG00000183873_47 (sequence is synthesized)
ttgcatggacattctctttgccttcaccaaaagggtcctgggggagtctggggagatggacgccctgaagatccagatggaggagaagttcatggcagccaacccatccaagatctccta

SEQ ID NO: 657672 - DNA, 120 bp, Artificial Sequence
  ENSG00000183873_48 (sequence is synthesized)
cgagcccatcaccaccacactccggcgcaagcacgaagaggtgtcggccatggttatccagagagccttccgcaggcacctgctgcaacgctctttgaagcatgcctccttcctcttccg

SEQ ID NO: 657673 - DNA, 120 bp, Artificial Sequence
  ENSG00000183873_49 (sequence is synthesized)
tcagcaggcgggcagcggcctctccgaagaggatgcccctgagcgagagggcctcatcgcctacgtgatgagtgagaacttctcccgaccccttggcccaccctccagctcctccatctc

SEQ ID NO: 657674 - DNA, 120 bp, Artificial Sequence
  ENSG00000183873_50 (sequence is synthesized)
ctccacttccttcccaccctcctatgacagtgtcactagagccaccagcgataacctccaggtgcgggggtctgactacagccacagtgaagatctcgccgacttccccccttctccgga

SEQ ID NO: 657675 - DNA, 120 bp, Artificial Sequence
  ENSG00000183873_51 (sequence is synthesized)
cagggaccgtgagtccatcgtgtgagcctcggcctggctggccaggacacactgaaaagcagcctttttcaccatggcaaacctaaatgcagtcagtcacaaaccagcctggggccttcc

SEQ ID NO: 657676 - DNA, 120 bp, Artificial Sequence
  ENSG00000183873_52 (sequence is synthesized)
tggctttgggagtaagaaatgggcctcagccccgcggatcaaccaggcagagttctgtggcgccgcgtggacagccggagcagttggcctgtgcttggaggcctcagatagacctgtgac

SEQ ID NO: 657677 - DNA, 120 bp, Artificial Sequence
  ENSG00000183873_53 (sequence is synthesized)
ctggtctggtcaggcaatgccctgcggctctggaaagcaacttcatcccagctgctgaggcgaaatataaaactgagactgtatatgttgtgaatgggctttcataaatttattatattt

SEQ ID NO: 657678 - DNA, 120 bp, Artificial Sequence
  ENSG00000183873_54 (sequence is synthesized)
gatatttttttacttgagcaaagaactaaggatttttccatggacatgggcagcaattcacgctgtctcttcttaaccctgaacaagagtgtctatggagcagccggaagtctgttctca

SEQ ID NO: 657679 - DNA, 120 bp, Artificial Sequence
  ENSG00000183873_55 (sequence is synthesized)
aagcagaagtggaatccagtgtggctcccacaggtcttcactgcccaggggtcgaatggggtccccctcccacttgacctgagatgctgggagggctgaacccccactcacacaagcaca

SEQ ID NO: 657680 - DNA, 120 bp, Artificial Sequence
  ENSG00000183873_56 (sequence is synthesized)
cacacacagtcctcacacacggaggccagacacaggccgtgggacccaggctcccagcctaagggagacaggcctttccctgccggccccccaaggatggggttcttgtccacggggctc

SEQ ID NO: 657681 - DNA, 120 bp, Artificial Sequence
  ENSG00000183873_57 (sequence is synthesized)
actctggccccctattgtctccaaggtcccattttccccctgtgttttcacgcaggtcatattgtcagtcctacaaaaataaaaggcttccagaggagagtggcctgggtcccagggctg

SEQ ID NO: 657682 - DNA, 120 bp, Artificial Sequence
  ENSG00000183873_58 (sequence is synthesized)
gccctaggcactgatagttgccttttcttcccctcctgtaagagtattaacaaaaccaaaggacacaagggtgcaagccccattcacggcctggcatgcagcttgtccttgctcctggaa

SEQ ID NO: 657683 - DNA, 120 bp, Artificial Sequence
  ENSG00000183873_59 (sequence is synthesized)
cctggcaggccctgcccagccagccatcggaagagagggctgagccatgggggtttggggctaagaagttcaccagccctgagccatggcggcccctcagcctgcctgaagagaggaaac

SEQ ID NO: 657684 - DNA, 120 bp, Artificial Sequence
  ENSG00000183873_60 (sequence is synthesized)
tggcgatctcccagggctctctggaccatacgcggaggagttttctgtgtggtctccagctcctctccagacacagagacatgggagtggggagcggagcttggccctgcgccctgtgca

SEQ ID NO: 657685 - DNA, 120 bp, Artificial Sequence
  ENSG00000183873_61 (sequence is synthesized)
gggaaagggatggtcaggcccagttctcgtgcccttagaggggaatgaaccatggcacctttgagagagggggcactgtggtcaggcccagcctctctggctcagcccgggatcctgatg

SEQ ID NO: 657686 - DNA, 120 bp, Artificial Sequence
  ENSG00000183873_62 (sequence is synthesized)
gcacccacacagaggacctctttggggcaagatccaggtggtcccataggtcttgtgaaaaggctttttcagggaaaaatattttactagtccaatcacccccaggacctcttcagctgc

SEQ ID NO: 657687 - DNA, 120 bp, Artificial Sequence
  ENSG00000183873_63 (sequence is synthesized)
tgacaatcctatttagcatatgcaaatcttttaacatagagaactgtcaccctgaggtaacagggtcaactggcgaagcctgagcaggcaggggcttggctgccccattccagctctccc

SEQ ID NO: 657688 - DNA, 120 bp, Artificial Sequence
  ENSG00000183873_64 (sequence is synthesized)
atggagcccctccaccgggcgcatgcctcccaggccacctcagtctcacctgccggctctgggctggctgctcctaacctacctcgccgagctgtcggagggctggacatttgtggcagt

SEQ ID NO: 657689 - DNA, 120 bp, Artificial Sequence
  ENSG00000183873_65 (sequence is synthesized)
gctgaagggggcattgccggcgagtaaagtattatgtttcttcttgtcaccccagttcccttggtggcaaccccagacccaacccatgcccctgacagatctagttctcttctcctgtgt

SEQ ID NO: 657690 - DNA, 120 bp, Artificial Sequence
  ENSG00000183873_66 (sequence is synthesized)
tccctttgagtccagtgtgggacacggtttaactgtcccagcgacatttctccaagtggaaatcctatttttgtagatctccatgctttgctctcaaggcttggagaggtatgtgcccct

SEQ ID NO: 657691 - DNA, 120 bp, Artificial Sequence
  ENSG00000183873_67 (sequence is synthesized)
cctgggtgctcaccgcctgctacacaggcaggaatgcggttgggaggcaggtcgggctgccagcccagctggccggaaggagactgtggtttttgtgtgtgtggacagcccgggagcttt

SEQ ID NO: 657692 - DNA, 120 bp, Artificial Sequence
  ENSG00000183873_68 (sequence is synthesized)
gagacaggtgcctggggctggctgcagacggtgtggttgggggtgggaggtgagctagacccaacccttagcttttagcctggctgtcacctttttaatttccagaactgcacaatgacc

SEQ ID NO: 657693 - DNA, 120 bp, Artificial Sequence
  ENSG00000183873_69 (sequence is synthesized)
agcaggagggaaggacagacatcaagtgccagatgttgtctgaactaatcgagcacttctcaccaaacttcatgtataaataaaatacatatttttaaaacaaaccaataaatggcttac

SEQ ID NO: 657694 - DNA, 120 bp, Artificial Sequence
  ENSG00000183873_70 (sequence is synthesized)
atggaactggctggactttagtgtgattatcatggcgtatgtatcagaaaatataaaactaggcaatttgtcggctcttcgaactttcagagtcctgagagctctaaaaactatttcagt

SEQ ID NO: 657695 - DNA, 120 bp, Artificial Sequence
  ENSG00000183873_71 (sequence is synthesized)
ctgattccctgctggtcctaagacaaatgcatggtcatgacctgggagctggttggaaatgaagaacctctgaccctcctccagacctgccaagtcagcacctgcattttcatttgatcc

SEQ ID NO: 657696 - DNA, 120 bp, Artificial Sequence
  ENSG00000183873_72 (sequence is synthesized)
ccaggggattcttgggcacatgaaagtttgagaaaccctcttctgattcttcagaacattctagaagctaagctactgaggatcccagaagaaatgacgtctgtcgggctctgatattgg

SEQ ID NO: 657697 - DNA, 120 bp, Artificial Sequence
  ENSG00000183873_73 (sequence is synthesized)
ctccaaatatccctccccaccacacccccttggtccgtcctcctccccacccacttgcagggaccttcaagcaggtcaccagaacttagccaaggaaaaaccatttcccaataaagaggc

SEQ ID NO: 657698 - DNA, 120 bp, Artificial Sequence
  ENSG00000183873_74 (sequence is synthesized)
ggactttagtgtgattatcatggctgcctctgtcttgggaactctgttttttccaatgagtattcaggccacctccacctcatgatttcaaggacttctgagccaggcacaagctgatca

SEQ ID NO: 657699 - DNA, 120 bp, Artificial Sequence
  ENSG00000183873_75 (sequence is synthesized)
acagatcacagaagatgtgaaccaaaactaggaccagaaatgcacttgcttcctgtatcacctgacctgagcctcctggaaaacaggcttctctcttcactctgatgtgtccccagcccc

SEQ ID NO: 657700 - DNA, 120 bp, Artificial Sequence
  ENSG00000183873_76 (sequence is synthesized)
agactccacatgtggtttcatgtcatgggtcccagtggtgtggcgagagtggcagagtggttgccttctagcaccagttatccttagcaccatcaccaagagagccaccgggaagcttgc

SEQ ID NO: 657701 - DNA, 120 bp, Artificial Sequence
  ENSG00000183873_77 (sequence is synthesized)
tgtgtggacatccttacggcactcaagccgaagtcctatgttaggagggttgaaatccagaagaaaacctgagggaggccctgggctatccacagcactgcccccacccccgtgggaggg

SEQ ID NO: 657702 - DNA, 120 bp, Artificial Sequence
  ENSG00000183873_78 (sequence is synthesized)
ggccaagggagagggctggtcggggagggcaggcggtggttctgctttgtaattcccaataactgtggtttgattctgcaggtatgtatcagaaaatataaaactaggcaatttgtcggc

SEQ ID NO: 657703 - DNA, 120 bp, Artificial Sequence
  ENSG00000183873_79 (sequence is synthesized)
ggacatctttccatgtgcatgttggtcatttatatatcttccttggagaaatctctattcagatccttagctcatttttaattgggttatttctctttttcttgttgagttgtaagagtt

SEQ ID NO: 657704 - DNA, 120 bp, Artificial Sequence
  ENSG00000183873_80 (sequence is synthesized)
ctttacatattctggatcatagtctcttatcagatatatgatttaaaaatattttctcctagtctgtgagttttttcatttcctagtggtgtccattaaagcacaaaagttttacatgtt

SEQ ID NO: 657705 - DNA, 120 bp, Artificial Sequence
  ENSG00000183876_0 (sequence is synthesized)
gaattctctcccgccgtgtcccctcgacccgcccaacttgtgcctccctccccttcccctctggggtcctgcccacctccctgcagggagctgggctgttttaaggactccgggtggggc

SEQ ID NO: 657706 - DNA, 120 bp, Artificial Sequence
  ENSG00000183876_1 (sequence is synthesized)
gagaggccgggaaagcagaggagagagaaattaggaggcgggagaaatccagggcaagaaggaagaggggagtcagaggatggtagagagcactttttggaagctgccacgccgcgtctc

SEQ ID NO: 657707 - DNA, 120 bp, Artificial Sequence
  ENSG00000183876_2 (sequence is synthesized)
aggctggccgggctgagctggggaagagggagcaaaggcggcgcagggcctgcgcttaggcagcgggaggcagctcggcgcgggcctgacctccccagagcgccccgctgcggccgagca

SEQ ID NO: 657708 - DNA, 120 bp, Artificial Sequence
  ENSG00000183876_3 (sequence is synthesized)
gatccggcccagccgtccggcagccagtcccggaccagacactggaccgtccccggggggcgctgaactccctcgcagcatccgagccggcgggccggtggtgcgccctgggcgcgcgag

SEQ ID NO: 657709 - DNA, 120 bp, Artificial Sequence
  ENSG00000183876_4 (sequence is synthesized)
gtggtgaggccccaggagcccggcgcgccgggacgcgcgggccggcttggcgatgcacaccctcactggcttctccctggtcagcctgctcagcttcggctacctgtcctgggactgggc

SEQ ID NO: 657710 - DNA, 120 bp, Artificial Sequence
  ENSG00000183876_5 (sequence is synthesized)
caagccgagcttcgtggccgacgggcccggggaggctggcgagcagccctcggccgctccgccccagcctccccacatcatcttcatcctcacggacgaccaaggctaccacgacgtggg

SEQ ID NO: 657711 - DNA, 120 bp, Artificial Sequence
  ENSG00000183876_6 (sequence is synthesized)
ctaccatggttcagatatcgagacccctacgctggacaggctggcggccaagggggtcaagttggagaattattacatccagcccatctgcacgccttcgcggagccagctcctcactgg

SEQ ID NO: 657712 - DNA, 120 bp, Artificial Sequence
  ENSG00000183876_7 (sequence is synthesized)
caggtaccagatccacacaggactccagcattccatcatccgcccacagcagcccaactgcctgcccctggaccaggtgacactgccacagaagctgcaggaggcaggttattccaccca

SEQ ID NO: 657713 - DNA, 120 bp, Artificial Sequence
  ENSG00000183876_8 (sequence is synthesized)
tatggtgggcaagtggcacctgggcttctaccggaaggagtgtctgcccacccgtcggggcttcgacaccttcctgggctcgctcacgggcaatgtggactattacacctatgacaactg

SEQ ID NO: 657714 - DNA, 120 bp, Artificial Sequence
  ENSG00000183876_9 (sequence is synthesized)
tgatggcccaggcgtgtgcggcttcgacctgcacgagggtgagaatgtggcctgggggctcagcggccagtactccactatgctttatgcccagcgcgccagccatatcctggccagcca

SEQ ID NO: 657715 - DNA, 120 bp, Artificial Sequence
  ENSG00000183876_10 (sequence is synthesized)
cagccctcagcgtcccctcttcctctatgtggccttccaggcagtacacacacccctgcagtcccctcgtgagtacctgtaccgctaccgcaccatgggcaatgtggcccggcggaagta

SEQ ID NO: 657716 - DNA, 120 bp, Artificial Sequence
  ENSG00000183876_11 (sequence is synthesized)
cgcggccatggtgacctgcatggatgaggctgtgcgcaacatcacctgggccctcaagcgctacggtttctacaacaacagtgtcatcatcttctccagtgacaatggtggccagacttt

SEQ ID NO: 657717 - DNA, 120 bp, Artificial Sequence
  ENSG00000183876_12 (sequence is synthesized)
gccgggcactgatgcacatcactgactggtacccgaccctggtgggtctggcaggtggtaccacctcagcagccgatgggctagatggctacgacgtgtggccggccatcagcgagggcc

SEQ ID NO: 657718 - DNA, 120 bp, Artificial Sequence
  ENSG00000183876_13 (sequence is synthesized)
gggcctcaccacgcacggagatcctgcacaacattgacccactctacaaccatgcccagcatggctccctggagggcggctttggcatctggaacaccgccgtgcaggctgccatccgcg

SEQ ID NO: 657719 - DNA, 120 bp, Artificial Sequence
  ENSG00000183876_14 (sequence is synthesized)
tgggtgagtggaagctgctgacaggagaccccggctatggcgattggatcccaccgcagacactggccaccttcccgggtagctggtggaacctggaacgaatggccagtgtccgccagg

SEQ ID NO: 657720 - DNA, 120 bp, Artificial Sequence
  ENSG00000183876_15 (sequence is synthesized)
ccgtgtggctcttcaacatcagtgctgacccttatgaacgggaggacctggctggccagcggcctgatgtggtccgcaccctgctggctcgcctggccgaatataaccgcacagccatcc

SEQ ID NO: 657721 - DNA, 120 bp, Artificial Sequence
  ENSG00000183876_16 (sequence is synthesized)
cggtacgctacccagctgagaacccccgggctcatcctgactttaatgggggtgcttgggggccctgggccagtgatgaggaagaggaggaagaggaagggagggctcgaagcttctccc

SEQ ID NO: 657722 - DNA, 120 bp, Artificial Sequence
  ENSG00000183876_17 (sequence is synthesized)
ggggtcgtcgcaagaaaaaatgcaagatttgcaagcttcgatcctttttccgtaaactcaacaccaggctaatgtcccaacggatctgatggtggggagggagaaaactgtcctttagag

SEQ ID NO: 657723 - DNA, 120 bp, Artificial Sequence
  ENSG00000183876_18 (sequence is synthesized)
gatcttccccactccggcttggccctgctgtttctcagggagaagcctgtcacatctccatctacagggagttggagggtgtagagtcccttggttgaacagggtagggagcctggatag

SEQ ID NO: 657724 - DNA, 120 bp, Artificial Sequence
  ENSG00000183876_19 (sequence is synthesized)
gagtgggtgggaataaaccagactgggatgcctgtgtctcagtcctgcctcctcacggacttgctctgtgacctcaggtgacccacatgagcttttagcctcagtttcctcatctgtaaa

SEQ ID NO: 657725 - DNA, 120 bp, Artificial Sequence
  ENSG00000183876_20 (sequence is synthesized)
atgagctctaatgactttgtgactctttggtgtggccctggagcctggggccacggtggagttcctggccggccttgccacttgacaactcctttaaggcttcccccttaacacgggatc

SEQ ID NO: 657726 - DNA, 120 bp, Artificial Sequence
  ENSG00000183876_21 (sequence is synthesized)
cctgtggtggtgtttgggagttgcctggaggcaactccaagcctggcccccagctgaagcatggcaatctggctgctctctacagggacccccaagcgctgtgggtggagggcaggggtc

SEQ ID NO: 657727 - DNA, 120 bp, Artificial Sequence
  ENSG00000183876_22 (sequence is synthesized)
gggggggttgaccttcttgggtcttcacatggcctaggccagtcctccggtcagactggtgtcaggcaccgtggtgcaaaattcctcttctggcccctccagtacccagagaaactggct

SEQ ID NO: 657728 - DNA, 120 bp, Artificial Sequence
  ENSG00000183876_23 (sequence is synthesized)
gggccattaactgctgcagcaccaagggtggtagaaagagctgtgaagagcccccaaaccagtaccaggacacctgggttctcctgtgacctggggcacagttcttgccctctaggcctt

SEQ ID NO: 657729 - DNA, 120 bp, Artificial Sequence
  ENSG00000183876_24 (sequence is synthesized)
gatttccccacctgcaagtggggatgccagccctggctctgcctccttcatgaggctctggaagactggccaaggttgtggaggagcttgtgaacttgattaaagtgtcgtaacatggaa

SEQ ID NO: 657730 - DNA, 120 bp, Artificial Sequence
  ENSG00000183878_0 (sequence is synthesized)
tttgctcatcgtttgttgtttagataatatcatgaactgataaatgcagttgccacgttgattccctagggcctggcttaccgactgaggtcataagatattatgccttctctttagact

SEQ ID NO: 657731 - DNA, 120 bp, Artificial Sequence
  ENSG00000183878_1 (sequence is synthesized)
tggtcagtggagaggaaatgggcaaagaaccagcctatggaggtgacaaggccttagggccaaaagtcttgagggtgaaggtttagggcctgcgcagcttccctgccatgccccgcaagg

SEQ ID NO: 657732 - DNA, 120 bp, Artificial Sequence
  ENSG00000183878_2 (sequence is synthesized)
tctcgcattcgcaaggcttgtgacagtgggagcctcattacggactctcctaaagtccatggtgtcctcttttcgcatttgcgccccgtgggtgatgcccgatgccgcccttcccatcgc

SEQ ID NO: 657733 - DNA, 120 bp, Artificial Sequence
  ENSG00000183878_3 (sequence is synthesized)
tctcttccccttcaagcgtatcgcaactgcaaaaacacccagcacagacactccattttctatcttaatgcatttaactagcacaacctacaggttgttccatcccagagactacccttt

SEQ ID NO: 657734 - DNA, 120 bp, Artificial Sequence
  ENSG00000183878_4 (sequence is synthesized)
tctccatagacgtgaccatcaaccaaccagcggtcagaatcagtcagcctctgtcatgttcctaggtccttggcgaactggctgggcggggtcccagcagcctaggagtacagtggagca

SEQ ID NO: 657735 - DNA, 120 bp, Artificial Sequence
  ENSG00000183878_5 (sequence is synthesized)
atgcctgacgtaagtcaacaaagatcacgtgagacgaatcagtcgcctagattggctacaactaagtggttgggagcggggaggtcgcggcggctgcgtggggttcgcccgtgacacaat

SEQ ID NO: 657736 - DNA, 120 bp, Artificial Sequence
  ENSG00000183878_6 (sequence is synthesized)
tacaactttgtgctggtgctggcaaagtttgtgattttaagaaattctgctgtgctctccagcactgcgagcttctgccttccctgtagtttcccagatgtgatccaggtagccgagttc

SEQ ID NO: 657737 - DNA, 120 bp, Artificial Sequence
  ENSG00000183878_7 (sequence is synthesized)
cgctgcccgtgcttcggtagcttaagtctttgcctcagcttttttccttgcagccgctgaggaggcgataaaattggcgtcacagtctcaagcagcgattgaaggcgtcttttcaactac

SEQ ID NO: 657738 - DNA, 120 bp, Artificial Sequence
  ENSG00000183878_8 (sequence is synthesized)
tcgattaaggttgggtatcgtcgtgggacttggaaatttgttgtttccatgaaatcctgcgcagtgtcgctcactaccgccgctgttgccttcggtgatgaggcaaagaaaatggcggaa

SEQ ID NO: 657739 - DNA, 120 bp, Artificial Sequence
  ENSG00000183878_9 (sequence is synthesized)
ggaaaagcgagccgcgagagtgaagaggagtctgttagcctgacagtcgaggaaagggaggcgcttggtggcatggacagccgtctcttcgggttcgtgaggcttcatgaagatggcgcc

SEQ ID NO: 657740 - DNA, 120 bp, Artificial Sequence
  ENSG00000183878_10 (sequence is synthesized)
agaacgaagaccctactaggcaaggctgttcgctgctacgaatctttaatcttaaaagctgaaggaaaagtggagtctgacttcttttgccaattaggtcacttcaacctcttgttggaa

SEQ ID NO: 657741 - DNA, 120 bp, Artificial Sequence
  ENSG00000183878_11 (sequence is synthesized)
gattattcaaaagcattatctgcatatcagagatattacagtttacaggctgactactggaagaatgctgcgtttttatatggccttggtttggtctacttctactacaatgcatttcat

SEQ ID NO: 657742 - DNA, 120 bp, Artificial Sequence
  ENSG00000183878_12 (sequence is synthesized)
tgggcaattaaagcatttcaagatgtcctttatgttgaccccagcttttgtcgagccaaggaaattcatttacgacttgggctcatgttcaaagtgaacacagactacaagtctagttta

SEQ ID NO: 657743 - DNA, 120 bp, Artificial Sequence
  ENSG00000183878_13 (sequence is synthesized)
aagcattttcagttagccttgattgactgtaatccatgtactttgtccaatgctgaaattcaatttcatattgcccatttgtatgaaacccagaggaagtatcattctgcaaaggaggca

SEQ ID NO: 657744 - DNA, 120 bp, Artificial Sequence
  ENSG00000183878_14 (sequence is synthesized)
tatgaacaacttttgcagacagaaaaccttcctgcacaagtaaaagcaactgtattgcaacagttaggttggatgcatcataatatggatctagtaggagacaaagccacaaaggaaagc

SEQ ID NO: 657745 - DNA, 120 bp, Artificial Sequence
  ENSG00000183878_15 (sequence is synthesized)
tatgctattcagtatctccaaaagtctttggaggcagatcctaattctggccaatcgtggtattttcttggaaggtgttattcaagtattgggaaagttcaggatgcctttatatcttac

SEQ ID NO: 657746 - DNA, 120 bp, Artificial Sequence
  ENSG00000183878_16 (sequence is synthesized)
aggcaatctattgataaatcagaagcaagtgcagatacatggtgttcaataggtgtgttgtatcagcagcaaaatcagcctatggatgctttacaggcatatatttgtgctgtacaattg

SEQ ID NO: 657747 - DNA, 120 bp, Artificial Sequence
  ENSG00000183878_17 (sequence is synthesized)
gaccatgggcatgccgcagcctggatggacctaggtactctctatgaatcctgcaatcaacctcaagatgccattaaatgctacctaaatgcagctagaagcaaacgttgtagtaatacc

SEQ ID NO: 657748 - DNA, 120 bp, Artificial Sequence
  ENSG00000183878_18 (sequence is synthesized)
tctacgcttgctgcaagaattaaatttctacagaatggttctgataactggaatggtggccagagtctttcacatcatccagtacagcaagtttattcgttgtgtttgacaccacagaaa

SEQ ID NO: 657749 - DNA, 120 bp, Artificial Sequence
  ENSG00000183878_19 (sequence is synthesized)
ttacagcacttggaacaactgcgagcaaatagagataatttaaatccagcacagaagcatcagctggaacagttagaaagtcagtttgtcttaatgcagcaaatgagacacaaagaagtt

SEQ ID NO: 657750 - DNA, 120 bp, Artificial Sequence
  ENSG00000183878_20 (sequence is synthesized)
gctcaggtacgaactactggaattcataacggggccataactgattcatcactgcctacaaactctgtctctaatcgacaaccacatggtgctctgaccagagtatctagcgtctctcag

SEQ ID NO: 657751 - DNA, 120 bp, Artificial Sequence
  ENSG00000183878_21 (sequence is synthesized)
cctggagttcgccctgcttgtgttgaaaaacttttgtccagtggagctttttctgcaggctgtattccttgtggcacatcaaaaattctaggaagtacagacactatcttgctaggcagt

SEQ ID NO: 657752 - DNA, 120 bp, Artificial Sequence
  ENSG00000183878_22 (sequence is synthesized)
aattgtatagcaggaagtgaaagtaatggaaatgtgccttacctgcagcaaaatacacacactctacctcataatcatacagacctgaacagcagcacagaagagccatggagaaaacag

SEQ ID NO: 657753 - DNA, 120 bp, Artificial Sequence
  ENSG00000183878_23 (sequence is synthesized)
ctatctaactccgctcaggggcttcataaaagtcagagttcatgtttgtcaggacctaatgaagaacaacctctgttttccactgggtcagcccagtatcaccaggcaactagcactggt

SEQ ID NO: 657754 - DNA, 120 bp, Artificial Sequence
  ENSG00000183878_24 (sequence is synthesized)
attaagaaggcgaatgaacatctcactctgcctagtaattcagtaccacagggggatgctgacagtcacctctcctgtcatactgctacctcaggtggacaacaaggcattatgtttacc

SEQ ID NO: 657755 - DNA, 120 bp, Artificial Sequence
  ENSG00000183878_25 (sequence is synthesized)
aaagagagcaagccttcaaaaaatagatccttggtgcctgaaacaagcaggcatactggagacacatctaatggctgtgctgatgtcaagggactttctaatcatgttcatcagttgata

SEQ ID NO: 657756 - DNA, 120 bp, Artificial Sequence
  ENSG00000183878_26 (sequence is synthesized)
gcagatgctgtttccagtcctaaccatggagattcaccaaatttattaattgcagacaatcctcagctctctgctttgttgattggaaaagccaatggcaatgtgggtactggaacctgt

SEQ ID NO: 657757 - DNA, 120 bp, Artificial Sequence
  ENSG00000183878_27 (sequence is synthesized)
ctgttgcctcttcaccctcttcagccatttccacagcaacaccttctcctaaatccactgagcagagaagcataaacagtgttaccagccttaacagtcctcacagtggattacacacag

SEQ ID NO: 657758 - DNA, 120 bp, Artificial Sequence
  ENSG00000183878_28 (sequence is synthesized)
tcaatggagaggggctggggaagtcacagagctctacaaaagtagacctgcctttagctagccacagatctacttctcagatcttaccatcaatgtcagtgtctatatgccccagttcaa

SEQ ID NO: 657759 - DNA, 120 bp, Artificial Sequence
  ENSG00000183878_29 (sequence is synthesized)
cagaagttctgaaagcatgcaggaatccaggtaaaaatggcttgtctaatagctgcattttgttagataaatgtccacctccaagaccaccaacttcaccatacccacccttgccaaagg

SEQ ID NO: 657760 - DNA, 120 bp, Artificial Sequence
  ENSG00000183878_30 (sequence is synthesized)
acaagttgaatccacccacacctagtatttacttggaaaataaacgtgatgctttctttcctccattacatcaattttgtacaaatccaaaaaaccctgttacagtaatacgtggccttg

SEQ ID NO: 657761 - DNA, 120 bp, Artificial Sequence
  ENSG00000183878_31 (sequence is synthesized)
ctggagctcttaaattagatcttggacttttctctaccaaaactttggtagaagctaacaatgaacatatggtagaagtgaggacacagttgctgcaaccagcagatgaaaactgggatc

SEQ ID NO: 657762 - DNA, 120 bp, Artificial Sequence
  ENSG00000183878_32 (sequence is synthesized)
ccactggaacaaagaaaatctggcgttgtgaaagcaatagatctcatactacaattgccaaatacgcacaataccaggcttcctccttccaggaatcattgagagaagaaaatgagaaaa

SEQ ID NO: 657763 - DNA, 120 bp, Artificial Sequence
  ENSG00000183878_33 (sequence is synthesized)
gaacacaacacaaagatcattcagataacgaatccacatcttcagagaattctggaaggagaaggaaaggaccttttaaaaccataaaatttgggaccaacattgacctctctgataaca

SEQ ID NO: 657764 - DNA, 120 bp, Artificial Sequence
  ENSG00000183878_34 (sequence is synthesized)
aaaagtggaagttgcagttacatgaactgactaaacttcctgcttttgcgcgtgtggtgtcagcaggaaatcttctaacccatgttgggcataccattctgggcatgaatacagtacaac

SEQ ID NO: 657765 - DNA, 120 bp, Artificial Sequence
  ENSG00000183878_35 (sequence is synthesized)
tgtatatgaaagttccagggagtcggacaccaggtcaccaagaaaataacaacttctgctctgttaacataaatattggtccaggagattgtgaatggtttgttgtacctgaagattatt

SEQ ID NO: 657766 - DNA, 120 bp, Artificial Sequence
  ENSG00000183878_36 (sequence is synthesized)
ggggtgttctgaatgacttctgtgaaaaaaataatttgaattttttaatgagttcttggtggcccaaccttgaagatctttatgaagcaaatgtccctgtgtatagatttattcagcgac

SEQ ID NO: 657767 - DNA, 120 bp, Artificial Sequence
  ENSG00000183878_37 (sequence is synthesized)
ctggagatttggtctggataaatgcaggcactgtgcattgggttcaagctgttggctggtgcaataacattgcctggaatgttggtccacttacagcctgccagtataaattggcagtgg

SEQ ID NO: 657768 - DNA, 120 bp, Artificial Sequence
  ENSG00000183878_38 (sequence is synthesized)
aacggtatgaatggaacaaattgaaaagtgtgaagtcaccagtacccatggtgcatctttcctggaatatggcacgaaatatcaaagtctcagatccaaagctttttgaaatgattaagt

SEQ ID NO: 657769 - DNA, 120 bp, Artificial Sequence
  ENSG00000183878_39 (sequence is synthesized)
attgtcttttgaaaattctgaagcaatatcagacattgagagaagctcttgttgcagcaggaaaagaggttatatggcatgggcggacaaatgatgaaccagctcattactgtagcattt

SEQ ID NO: 657770 - DNA, 120 bp, Artificial Sequence
  ENSG00000183878_40 (sequence is synthesized)
gtgaggtggaggtttttaatctgctttttgtcactaatgaaagcaatactcaaaaaacctacatagtacattgccatgattgtgcacgaaaaacaagcaaaagtttggaaaattttgtgg

SEQ ID NO: 657771 - DNA, 120 bp, Artificial Sequence
  ENSG00000183878_41 (sequence is synthesized)
tgctcgaacagtacaaaatggaggacctaatccaagtttatgatcaatttacactagctctttcattatcatcctcatcttgatatagttccatgaatattaaatgagattatttctgct

SEQ ID NO: 657772 - DNA, 120 bp, Artificial Sequence
  ENSG00000183878_42 (sequence is synthesized)
cttcaggaaatttctgcaccactggttttgtagctgtttcataaaactgttgactaaaagctatgtctatgcaaccttccaagaatagtatgtcaagcaactggacacagtgctgcctct

SEQ ID NO: 657773 - DNA, 120 bp, Artificial Sequence
  ENSG00000183878_43 (sequence is synthesized)
gcttcaggacttaacatgctgatccagctgtacttcagaaaaataatattaatcatatgttttgtgtacgtatgacaaactgtcaaagtgacacagaatactgatttgaagatagccttt

SEQ ID NO: 657774 - DNA, 120 bp, Artificial Sequence
  ENSG00000183878_44 (sequence is synthesized)
tttatgtttctctatttctgggctgatgaattaatattcatttgtattttaaccctgcagaattttccttagttaaaaacactttcctagctggtcatttcttcataagatagcaaattt

SEQ ID NO: 657775 - DNA, 120 bp, Artificial Sequence
  ENSG00000183878_45 (sequence is synthesized)
aaatctctcctcgatcagcttttaaaaaatgtgtactattatctgaggaagttttttactgctttatgtttttgtgtgttttgaggccatgatgattacatttgtggttccaaaataatt

SEQ ID NO: 657776 - DNA, 120 bp, Artificial Sequence
  ENSG00000183878_46 (sequence is synthesized)
tttttaaatattaatagcccatatacaaagataatggattgcacatagacaaagaaataaacttcagatttgtgatttttgtttctaaacttgatacagatttacactatttataaatac

SEQ ID NO: 657777 - DNA, 120 bp, Artificial Sequence
  ENSG00000183878_47 (sequence is synthesized)
gtatttattgcctgaaaatatttgtgaatggaatgttgtttttttccagacgtaactgccattaaatactaaggagttctgtagttttaaacactactcctattacattttatatgtgta

SEQ ID NO: 657778 - DNA, 120 bp, Artificial Sequence
  ENSG00000183878_48 (sequence is synthesized)
gataaaactgcttagtattatacagaaatttttattaaaattgttaaatgtttaaagggtttcccaatgtttgagtttaaaaaagactttctgaaaaaatccactttttgttcattttca

SEQ ID NO: 657779 - DNA, 120 bp, Artificial Sequence
  ENSG00000183878_49 (sequence is synthesized)
atatgtattttatatgtgtgtgtatgtgtacacacatgtataatatatacagaaacctcgatatataattgtatagattttaaaagttttattttttacatctatggtagtttttgaggt

SEQ ID NO: 657780 - DNA, 120 bp, Artificial Sequence
  ENSG00000183878_50 (sequence is synthesized)
agtttttgaggtgcctattataaagtattacggaagtttgctgtttttaaagtaaatgtcttttagtgtgatttattaagttgtagtcaccatagtgatagcccataaataattgctgga

SEQ ID NO: 657781 - DNA, 120 bp, Artificial Sequence
  ENSG00000183878_51 (sequence is synthesized)
ttgctggaaaattgtattttataacagtagaaaacatatagtcagtgaagtaaatattttaaaggaaacattatatagatttgataaatgttgtttataattaagagtttcttatggaaa

SEQ ID NO: 657782 - DNA, 120 bp, Artificial Sequence
  ENSG00000183878_52 (sequence is synthesized)
agaatgataacctcttttagagaacaaataagtgacttatttttttaaagctagatgactttgaaatgctatactgtcctgcttgtacaacatggtttggggtgaaggggaggaaagtat

SEQ ID NO: 657783 - DNA, 120 bp, Artificial Sequence
  ENSG00000183878_53 (sequence is synthesized)
ggtgaaggggaggaaagtattaaaaaatctatatcgctagtaaattgtaataagttctattaaaacttgtatttcatatgaaaaatttgctaatttaatattaactcatttgataataat

SEQ ID NO: 657784 - DNA, 120 bp, Artificial Sequence
  ENSG00000183878_54 (sequence is synthesized)
acgcttgctgcaagaattaaatttctacaggctcagttgtgtaaccttccacaaagtagtctacagaataaaactaaattacttcctagtattgaggaggcatggagcctaccaatcccc

SEQ ID NO: 657785 - DNA, 120 bp, Artificial Sequence
  ENSG00000183878_55 (sequence is synthesized)
gcagagcttacctccaggcagggtgccatgaacacagcacagcaggcttatagagctcatgatccaaatactgaacatgtattaaaccacagtcaaacaccaattttacagcaatccttg

SEQ ID NO: 657786 - DNA, 120 bp, Artificial Sequence
  ENSG00000183878_56 (sequence is synthesized)
tccatcacccgcctggttggctggcgatactctccgggaaggcctggacgcagcttgcccacgttgatgacggggtcatcctcagcttggcactcaccaatctgtcgctgtcgctcttgg

SEQ ID NO: 657787 - DNA, 120 bp, Artificial Sequence
  ENSG00000183878_57 (sequence is synthesized)
gtatgaaacccaggtaagtgttttaacttaagaacaagaatgaaacagtcacctatgctttagatgaaatgaaatgtacttgaaaatatcaggctttaaatgaaataaatatattagacg

SEQ ID NO: 657788 - DNA, 120 bp, Artificial Sequence
  ENSG00000183878_58 (sequence is synthesized)
atttgagttgtgggtattatactcttgcatgtattttgtattctactcctcattaaatgtgtttgaaatttttagtgaacaaattgttaaagacaaatgaaggcatttgagatttgtact

SEQ ID NO: 657789 - DNA, 120 bp, Artificial Sequence
  ENSG00000183878_59 (sequence is synthesized)
taatatatatatatatagcagtttgtgtaactaccttaaactgtgtattttatttcctaaatacaatacttgctatgtatgcagtgctttgacttaatgtaatttgcctctataccttta

SEQ ID NO: 657790 - DNA, 120 bp, Artificial Sequence
  ENSG00000183878_60 (sequence is synthesized)
tttagaagctttcatgtaaccctgcatgtaatgtctacttttcttttaaaattttcatgaatgattgtaataagtcactgttattgaagttttctgtttttctttaagactgaggtatct

SEQ ID NO: 657791 - DNA, 120 bp, Artificial Sequence
  ENSG00000183878_61 (sequence is synthesized)
tttaagcatcataccatttcaaatgatagttaccattagttcaaggctgtttgtttttaaagttatttcagctttttaaaaaaatattttgctttgtatagcagattttattataatatt

SEQ ID NO: 657792 - DNA, 120 bp, Artificial Sequence
  ENSG00000183878_62 (sequence is synthesized)
taaactgtaacatacagatttacagtttgtggtggagttggtagacttaaaaaaatgggtagcattttttcatattatgagtagctgaacattttgaatttaaattgtgaaataaagaga

SEQ ID NO: 657793 - DNA, 120 bp, Artificial Sequence
  ENSG00000183878_63 (sequence is synthesized)
tttctctttgggggtattggtagccattcagtatttttttcaaaagaattctgttgacattaaatgatatcagcagtccagaagtcttggcaaaatgtaataagatgtaaataatcttat

SEQ ID NO: 657794 - DNA, 120 bp, Artificial Sequence
  ENSG00000183878_64 (sequence is synthesized)
atattcataagtgttataaaatctcataagattaaaatattgccttcccttacagatagtcacttgtgtttattacaatttagagaggaataaagatgtacatgaatatacactggtaaa

SEQ ID NO: 657795 - DNA, 120 bp, Artificial Sequence
  ENSG00000183878_65 (sequence is synthesized)
tgctccatggccaaggggtcggaaaagtgtttcttgcctttgctgtccccgtactctggaatacttcgccccttgctccagactcccttctactctgaggaaaaaaaaaatcggacgctt

SEQ ID NO: 657796 - DNA, 120 bp, Artificial Sequence
  ENSG00000183878_66 (sequence is synthesized)
gaaatacttttgagtaaagaatattaatgatacctttttttctactgatacctttgtttctgttcattcttgagaagagaagtgagaaggcatgtgcctgattcagagagtttaaatcac

SEQ ID NO: 657797 - DNA, 120 bp, Artificial Sequence
  ENSG00000183878_67 (sequence is synthesized)
tggagttgagttgatttgggtactatttttcttgctcaaagacagtcagtattattatttgataactgtagaaatgattggtatgtcacagagcactaacaaatagtgattacctacttt

SEQ ID NO: 657798 - DNA, 120 bp, Artificial Sequence
  ENSG00000183878_68 (sequence is synthesized)
agtagtttttctccctttatggtgtctatgttttcatattaatgaattacttcaccttttaatattttaggatttgcacataccgtaagcttgactattttttgaaacttttttgtgtac

SEQ ID NO: 657799 - DNA, 120 bp, Artificial Sequence
  ENSG00000183878_69 (sequence is synthesized)
ttggtgatgttgcaaaaatcaaaagttttcaaagccaattttaaacaaaacctgaataagttaaaaatgtgtagtttaaaaaataaatactgttttttgaactctttcagatgaatgact

SEQ ID NO: 657800 - DNA, 120 bp, Artificial Sequence
  ENSG00000183878_70 (sequence is synthesized)
acagttaatattttgggaaaaaaacatgtttaaaaagaatatgaaactttaaattatgtgattttcctttgtgataaaaatgttagaatattaaagaccttttatgtcaattttttacct

SEQ ID NO: 657801 - DNA, 82 bp, Artificial Sequence
  ENSG00000183878_71 (sequence is synthesized)
aaacttttaaaaatgtaagcaaaattacagtatgtaaaacacacattgctaatggagaaataaagttcctactttacatcta

SEQ ID NO: 657802 - DNA, 120 bp, Artificial Sequence
  ENSG00000183888_0 (sequence is synthesized)
acatcctggaagagtggcctaggacagctcctctcctgccagagctaggcaggcgccgaagtagccgcatggccccgtcagaagaccccagggactggagagccaacctcaaaggcacca

SEQ ID NO: 657803 - DNA, 120 bp, Artificial Sequence
  ENSG00000183888_1 (sequence is synthesized)
tccgtgagacaggcctggagaccagctccggtgggaagctggctggccatcagaagaccgtccccacggctcacctgacttttgttattgactgcacccacgggaagcagctctccctgg

SEQ ID NO: 657804 - DNA, 120 bp, Artificial Sequence
  ENSG00000183888_2 (sequence is synthesized)
cagcaaccgcatcaccaccccaagcccccagtcccaatcgagggcttgtcaccccaccaatgaagacctacatcgtgttctgtggggaaaactggccccatctgactcgggtgaccccca

SEQ ID NO: 657805 - DNA, 120 bp, Artificial Sequence
  ENSG00000183888_3 (sequence is synthesized)
tgggtgggggatgccttgcccaggccagggccaccctgccgctctgcagagggtctgtggcctcagcttccttcccagtcagcccgctctgcccccaggaggttcccgaggctaagggga

SEQ ID NO: 657806 - DNA, 120 bp, Artificial Sequence
  ENSG00000183888_4 (sequence is synthesized)
aacccgtgaaggctgcgcctgtgaggtcttcaacttggggaacagtcaaggactcactgaaagccctctcctcttgtgtctgtgggcaggccgattagctggaagggccgggctctgatg

SEQ ID NO: 657807 - DNA, 120 bp, Artificial Sequence
  ENSG00000183888_5 (sequence is synthesized)
cccagaggctgcaattcccagggcctggccctgcttccccagctaagcaggagtcttttgtgcttgagccaaggaaacatcattagatccgctaaggggcatctgaaacatccgtcgagt

SEQ ID NO: 657808 - DNA, 120 bp, Artificial Sequence
  ENSG00000183888_6 (sequence is synthesized)
ggcagaggcaggataagtcacctgcacatgaagagactcattcattcatacagcaaatattactggtacatcttccacatgccaggccctgcaaagtgctggggagataccatggttttc

SEQ ID NO: 657809 - DNA, 120 bp, Artificial Sequence
  ENSG00000183888_7 (sequence is synthesized)
ctggagctggtatttttggggtggagggaacccaccctgaataaataaagtaacccaataaataaagaagatgattttgaacagcgatgaatgctctgcaggaactgaaacaggatgcta

SEQ ID NO: 657810 - DNA, 120 bp, Artificial Sequence
  ENSG00000183888_8 (sequence is synthesized)
gagggagagtgattggggtgaagacctttcctgatgcagtgcttggtaagggcctctctgcgcaggcaacaaagtgtgatctaaaagatgagaaggggccagccctgagaaaatccaccc

SEQ ID NO: 657811 - DNA, 120 bp, Artificial Sequence
  ENSG00000183888_9 (sequence is synthesized)
tccccagggccacctgctgtcatcttaccccagggcaggccagagcagtggtcagaatgccccagcatgacggggaggggcaacgggtttcttgctgccatcttggctcagaggcgagtg

SEQ ID NO: 657812 - DNA, 120 bp, Artificial Sequence
  ENSG00000183888_10 (sequence is synthesized)
tgtaggtcactgcaaaggcaggggataccacgtggggagactcgagggccatgccagttggggctgggaggctcagggaagttggctccaggagactccatcccataaggcagcccaggt

SEQ ID NO: 657813 - DNA, 120 bp, Artificial Sequence
  ENSG00000183888_11 (sequence is synthesized)
gggacctggggatctgagatgggaaataaggggatctggcttctcaaaagggagggaggtactcaaaaatagagtatcatgtttgaacgaatgaaaacaagacatgttatttattgagca

SEQ ID NO: 657814 - DNA, 120 bp, Artificial Sequence
  ENSG00000183888_12 (sequence is synthesized)
caaaaaaaaaaaaaaaaggtggggggaggaggttcacccctcagggcaatcgtgttccctgagcaggaggtggagttactggtgtgggtgtgaaggtgtctgtgagtctaaggcatgcac

SEQ ID NO: 657815 - DNA, 120 bp, Artificial Sequence
  ENSG00000183888_13 (sequence is synthesized)
agcactgtgagaaaccctaaagcaacctatttaaggaagtcagtctcaaagctcccagataaaaatcactgggtttttctgtatttattttagagacagagtctcactctatcacccagg

SEQ ID NO: 657816 - DNA, 61 bp, Artificial Sequence
  ENSG00000183888_14 (sequence is synthesized)
gcaccactacgcccagcttgacttcttttagtagagaagaggtctcactgtgctgcccagg

SEQ ID NO: 657817 - DNA, 86 bp, Artificial Sequence
  ENSG00000183888_15 (sequence is synthesized)
cgcttcagcttccctaagtgcttggattataggtgtgagccaccgtatctggtcattaatttattcaatgactattttactaggtt

SEQ ID NO: 657818 - DNA, 120 bp, Artificial Sequence
  ENSG00000183888_16 (sequence is synthesized)
atctggtcattaatttattcaatgactattttactaggttcctacaaatactagctgctaacatttaacatgtaattgaccatttactctgtgtcagagaaacaacatgggcactgtatt

SEQ ID NO: 657819 - DNA, 120 bp, Artificial Sequence
  ENSG00000183888_17 (sequence is synthesized)
tgtgaccattttatagattagagagctgaggcacagagaggttgaagaatggactcaaagttccatagactggtaccattgagattagaactcaggcaagtctggtgcccatattcttgc

SEQ ID NO: 657820 - DNA, 120 bp, Artificial Sequence
  ENSG00000183888_18 (sequence is synthesized)
ttgtaactgtaaggtatataccctctcatcctggtagcgtctcttctaggcagaggggacacacagaggataaatgtaaccctgtcctcaaggagctcacagccaggtgggggaggccag

SEQ ID NO: 657821 - DNA, 120 bp, Artificial Sequence
  ENSG00000183888_19 (sequence is synthesized)
aaagaaagcacacaattgccatagcttctgagaagtgcaacagtaagggcaacacagaatgatgctggaggacaaccagcccactctagagagaggagatcagggaggacttcctgcagg

SEQ ID NO: 657822 - DNA, 120 bp, Artificial Sequence
  ENSG00000183888_20 (sequence is synthesized)
aagtgatgccgaaaatgagatctgaccggtgactaagctatacaaaagggtggggtgggggagcaagtggggagtgctctgggcagaaggaccagtcgttcagtctggctagggtaattg

SEQ ID NO: 657823 - DNA, 120 bp, Artificial Sequence
  ENSG00000183888_21 (sequence is synthesized)
tcattcattcatttattcaccaagtatttattgggcatccactgaatgccaggctttgggctaaaccatgagatggagcaatgaataagacaatgaggcccagccacaaaatagtttatc

SEQ ID NO: 657824 - DNA, 120 bp, Artificial Sequence
  ENSG00000183888_22 (sequence is synthesized)
gacaatgaggcccagccacaaaatagtttatcctctagttgggggagacaggcaatgcacacacacaaaacaaacagatcagaaaggtggcaggaggccaggcgcggtggctcatgcctg

SEQ ID NO: 657825 - DNA, 120 bp, Artificial Sequence
  ENSG00000183889_0 (sequence is synthesized)
acccgctgagcgtcgacacagtcgctgttggcctggtgtccagcgtggttgtctatcccgtctacctggccatcctctttctcttccggatgtcccggagcaaggtggctgggagcccga

SEQ ID NO: 657826 - DNA, 120 bp, Artificial Sequence
  ENSG00000183889_1 (sequence is synthesized)
gccccacacctgccgggcagcaggtgctggacgtcgacagctgcctggactcatccgtgctggacagctccttcctcacgttctcaggcctccacgctgaggtgagggctctactggggg

SEQ ID NO: 657827 - DNA, 120 bp, Artificial Sequence
  ENSG00000183889_2 (sequence is synthesized)
tcctgccgccttggcgcagcttggactcaagaccctgtgcacctctcagcaggcctttgctggacagatgaagagtgacttgtttctggatgattctaagaggttgatggacggatggct

SEQ ID NO: 657828 - DNA, 82 bp, Artificial Sequence
  ENSG00000183889_3 (sequence is synthesized)
ctctggctgaccatcgtcatcgtgggactgactttggtggaagtccttggttacttatcattactgtgtttctgagaagtta

SEQ ID NO: 657829 - DNA, 85 bp, Artificial Sequence
  ENSG00000183889_4 (sequence is synthesized)
aggaggtccaactgccgtagacaggaaggaattaaaattgtcctggaagacatctttactttatggagacaggtggaaaccaaag

SEQ ID NO: 657830 - DNA, 86 bp, Artificial Sequence; identical to SEQ ID NO: 656960
  ENSG00000183889_5 (sequence is synthesized)

SEQ ID NO: 657831 - DNA, 88 bp, Artificial Sequence; identical to SEQ ID NO: 656961
  ENSG00000183889_6 (sequence is synthesized)

SEQ ID NO: 657832 - DNA, 64 bp, Artificial Sequence
  ENSG00000183889_7 (sequence is synthesized)
aggaccaggacatgcgggtgcggtggctgctcttttggctgggtgctgtggctgctcttttggc

SEQ ID NO: 657833 - DNA, 76 bp, Artificial Sequence
  ENSG00000183889_8 (sequence is synthesized)
gtcccatccctgttggtaacatctaatattctaagtatcagaggttccgtatttgtaatagcaaatgggccctgac

SEQ ID NO: 657834 - DNA, 120 bp, Artificial Sequence
  ENSG00000183889_9 (sequence is synthesized)
gaggtacagccccgtggtggaggccggctcggacatggtcttccggtggaccatcaacgacaagcagtccctgaccttccagaacgtggtcttcaatgtcatttatcagagcgcggcggt

SEQ ID NO: 657835 - DNA, 120 bp, Artificial Sequence
  ENSG00000183889_10 (sequence is synthesized)
cttcaagctctcacccgaggacgctgccatggctgtgctgacggcctccaaccacgtgagcaacgtcaccgtgaactacaacatcaccgtggagcggatgaacaggatgcagggcctgcg

SEQ ID NO: 657836 - DNA, 120 bp, Artificial Sequence
  ENSG00000183889_11 (sequence is synthesized)
ggtctctacagtgccagccgtgctgtcccccaatgccacgctggcactgacggcgggcgtgctggtggactcggccgtggaggtggccttcctgtggacctttggggatggggagcaggc

SEQ ID NO: 657837 - DNA, 120 bp, Artificial Sequence
  ENSG00000183889_12 (sequence is synthesized)
cctccaccagttccagcctccgtacaacgagtccttcccggttccagacccctcggtggcccaggtgctggtggagcacaatgtcacccacacctacgctgccccaggtgctgatccgca

SEQ ID NO: 657838 - DNA, 120 bp, Artificial Sequence
  ENSG00000183889_13 (sequence is synthesized)
gtggccgggtgcccattgtgtccttggagtgtgtgtcctgcaaggcacaggccgtgtacgaagtgagccgcagctcctacgtgtacctggagggccgctgcctcaattgcagcagcggct

SEQ ID NO: 657839 - DNA, 120 bp, Artificial Sequence
  ENSG00000183889_14 (sequence is synthesized)
ccaagcgagggcggtgggctgcacgtacgttcagcaacaagacgctggtgctggatgagaccaccacatccacgggcagcgcaggcatgtgactggtgctgcggcggggcgtgctgcggg

SEQ ID NO: 657840 - DNA, 120 bp, Artificial Sequence
  ENSG00000183889_15 (sequence is synthesized)
acggcgagggatacaccttcacgctgacggtgctgggccgctctggcgaggaggagggctgcgcctccatccccctgtcccccaaccgcccgccgctggggggctcttgctgcctcttcc

SEQ ID NO: 657841 - DNA, 120 bp, Artificial Sequence
  ENSG00000183889_16 (sequence is synthesized)
cactgggcgctgtgcacgctctcaccaccaaggtgcacttcgaatgcatgggctggcatgacgcggaggatgctggcgccccgctggtgtacgccctgctgctgcagcgctgtcgccagg

SEQ ID NO: 657842 - DNA, 120 bp, Artificial Sequence
  ENSG00000183889_17 (sequence is synthesized)
gccactgcgaggagttctgtgtctacaagggcagcctctccggctacggagccgtgctgcccccgggtttcaggccacacttcgaggtgggcctggccgtggtggtgcaggaccagctgg

SEQ ID NO: 657843 - DNA, 120 bp, Artificial Sequence
  ENSG00000183889_18 (sequence is synthesized)
gagccgctgtggtcgccctcaacaggtctctggccatcaccctcccagagcccaacggcagcgcaatggggctcacagtctggctgcacgggctcaccgctagtgtgctcccggggctgc

SEQ ID NO: 657844 - DNA, 120 bp, Artificial Sequence
  ENSG00000183889_19 (sequence is synthesized)
tgcggcaggccgatccccagcacgtcatcgagtactcgctggccctggtcactgtgctgaacgagtacgagcgggccctggacgtggcggcagagcccaagcacgagcggcagcgccgag

SEQ ID NO: 657845 - DNA, 120 bp, Artificial Sequence
  ENSG00000183889_20 (sequence is synthesized)
cccagatacgcaagaacatcacggagactctggtgtccctgagggtccacactgtggatgacatccagcagatcgctgctgcgctggcccagtgcatggggcccagcagggagctcgtat

SEQ ID NO: 657846 - DNA, 120 bp, Artificial Sequence
  ENSG00000183889_21 (sequence is synthesized)
gccgctcgtgcctgaagcagacgctgcacaagctggaggccatgatgcgcatcctgcaggcagagaccaccgcgggcaccgtgacgcccaccgccatcggagacagcatcctcaacatca

SEQ ID NO: 657847 - DNA, 120 bp, Artificial Sequence
  ENSG00000183889_22 (sequence is synthesized)
caggagacctcatccacctggccagctcagacgtgcgggcaccacagcgctcagagctgggagccgagtcaccatcgcggatggtggcgtcccaggcctacaacctgacctctgccctca

SEQ ID NO: 657848 - DNA, 120 bp, Artificial Sequence
  ENSG00000183889_23 (sequence is synthesized)
cgcccatcgtcacgcgctcccgcgtgctcaacgaggagcccctgacgctggcgggtgaggagatcgtggcccagggcaagcgctcggacccgcggagcctgctgtgctatggcggcgccc

SEQ ID NO: 657849 - DNA, 120 bp, Artificial Sequence
  ENSG00000183889_24 (sequence is synthesized)
cagggcctggctgccacttctccatcccctaggctttcagcagggccccggccaacctcagtgacgtggtgcagctcatctttctggtggactccaatccctttccctttggctatatca

SEQ ID NO: 657850 - DNA, 120 bp, Artificial Sequence
  ENSG00000183889_25 (sequence is synthesized)
gcaactacaccgtctccaccaaggtggcctcgatggcgttccagacacaggccggcgcccagatccccatcgagcggctggcctcagagcgcgcctcaccgtgaaggccgctacctgtct

SEQ ID NO: 657851 - DNA, 120 bp, Artificial Sequence
  ENSG00000183889_26 (sequence is synthesized)
gaggaacccgagccctacctggcagtctacctgcactcggagccccggcccaatgagcgcaactgctcggctagcaggaggatccgcccagagtccctccagggtgccgaccaccggccc

SEQ ID NO: 657852 - DNA, 120 bp, Artificial Sequence
  ENSG00000183889_27 (sequence is synthesized)
ctggtcggcgctggaggtgtccgtgggcttgtacacgtccctgtgccagtacttcagcgaggaggacgtggtgtggcggacagaggggctgctgcccctggaggagacctcgccccgcca

SEQ ID NO: 657853 - DNA, 120 bp, Artificial Sequence
  ENSG00000183889_28 (sequence is synthesized)
ggccgtctgcctcacccgccacctcaccgccttcggcaccagcctcttcatgcccccaagccatgtacgctttgtgtttcctgagccaacagcggatgtaaactacatcgtcatgctgac

SEQ ID NO: 657854 - DNA, 120 bp, Artificial Sequence
  ENSG00000183889_29 (sequence is synthesized)
atgtgctgtgtgcctggtgacctacatggtcatggccgccatcctgcacaagctggaccagttggatgccagccggggctgcgccatccccttctgtgggcagcggggccgcttcaagta

SEQ ID NO: 657855 - DNA, 85 bp, Artificial Sequence
  ENSG00000183889_30 (sequence is synthesized)
ggacagccggagcggccaccggcacctggacggcgacagagccttccaccgcaacagtctggacatcttccagatcgccaccccg

SEQ ID NO: 657856 - DNA, 120 bp, Artificial Sequence
  ENSG00000183889_31 (sequence is synthesized)
ccaccgcaacagtctggacatcttccagatcgccaccccgcacagcctgggtagcatgtggaagatccgagtgtggcacgacaacaaagggctcagccctgcctggttcctgcagcacat

SEQ ID NO: 657857 - DNA, 120 bp, Artificial Sequence
  ENSG00000183889_32 (sequence is synthesized)
catcgtcagggacctgcagacggcacgcagcaccttcttcctggtcaatgactggctttcggtggagacggaggccaacgggggcctggtggagaaggaggtgctggccgcgagtcacgc

SEQ ID NO: 657858 - DNA, 120 bp, Artificial Sequence
  ENSG00000183889_33 (sequence is synthesized)
agccctgttgcgcttccggcgcctgctggtggctgagctgcagcgtggcttctttgacaagcacatctggctctccatatgggaccggccgcctcggagctgtttcactcgcatccagag

SEQ ID NO: 657859 - DNA, 76 bp, Artificial Sequence
  ENSG00000183889_34 (sequence is synthesized)
ggagacaggtggaaaccaaagttcgagctaaaatccgtaagatgaaggtgacaacaaaaagaacaatcaccccttc

SEQ ID NO: 657860 - DNA, 120 bp, Artificial Sequence
  ENSG00000183889_35 (sequence is synthesized)
gcagccttccacatcgctgccccgctccctgtcactgccacacgctgggacttcggagacggctcccccgaggtggatgccgctgggccggctgcctcgcatcgctatgtgctgcctggg

SEQ ID NO: 657861 - DNA, 120 bp, Artificial Sequence
  ENSG00000183889_36 (sequence is synthesized)
cgctatcacgtgacggccgtgctggccctggggaccggctcagccctgctggggacagacgtgcaggtggaagcggcacctgccgccctggagctcgtgtgcccgtcctcggtgcagagt

SEQ ID NO: 657862 - DNA, 120 bp, Artificial Sequence
  ENSG00000183889_37 (sequence is synthesized)
gagcggtgcacccgctctgcccctcggacacggagatcttctctggcaatgggcactgctaccgcctggtggtggagaaggcggcctggctgcaggcgcaggagcagtgtcgggcctggg

SEQ ID NO: 657863 - DNA, 120 bp, Artificial Sequence
  ENSG00000183889_38 (sequence is synthesized)
ccggggccaccctggcaatggtggacagtcccgccgtgcagcgcttcctggtctcccgggtcaccaggcccagtgcaggatgccgagaacctcctcgtgggagcgcccagtggggacctg

SEQ ID NO: 657864 - DNA, 120 bp, Artificial Sequence
  ENSG00000183889_39 (sequence is synthesized)
aggtgggcccagcgccgcagggcgaggccttcagcctggagagctgccagaactggctgcccggggagccacacccagccacagccgagcactgcgtccggctcgggcccaccgggtggt

SEQ ID NO: 657865 - DNA, 120 bp, Artificial Sequence
  ENSG00000183889_40 (sequence is synthesized)
gtaacaccgacctgtgctcagcgccgcacagctacgtctgcgagctgcggcctggaggcccagtgcaggatgccgagaacctcctcgtgggagcgcccagtggggacctgtagggacccc

SEQ ID NO: 657866 - DNA, 120 bp, Artificial Sequence
  ENSG00000183889_41 (sequence is synthesized)
tgatgcctctggcacggcaggacggcctctcagccccgcacgagcccgtggaggtcatggtattcccgggcctgcgtctgagccgtgaagccttcctcaccacggccgaatttgggaccc

SEQ ID NO: 657867 - DNA, 120 bp, Artificial Sequence
  ENSG00000183889_42 (sequence is synthesized)
aggagctccggcggcccgcccagctgcggctgcaggtgtaccggctcctcagcacagcagggaccccggagaacggcagcgagcctgagagcaggtccccggacaacaggacccagctgg

SEQ ID NO: 657868 - DNA, 120 bp, Artificial Sequence
  ENSG00000183889_43 (sequence is synthesized)
tccccgcgtgcatgccagggggacgctggtgccctggagccaacatctgcttgccgctggacgcctcctgccacccccaggcctgcgccaatggctgcacgtcagggccagggctactcg

SEQ ID NO: 657869 - DNA, 120 bp, Artificial Sequence
  ENSG00000183889_44 (sequence is synthesized)
ggtccccctatgcgctatggagagagttcctcttctccgttcccgcggggccccccgcgcagtactcggtcaccctccacggccaggatgtcctcatgctccctggtgacctcgttggct

SEQ ID NO: 657870 - DNA, 120 bp, Artificial Sequence
  ENSG00000183889_45 (sequence is synthesized)
tgcagcacgacgctggccctggcgccctcccgcactgctcgccggctcccggccaccctggtccccaggccccgtacctctccgccaacgcctcgtcatggctgccccacttgccagccc

SEQ ID NO: 657871 - DNA, 120 bp, Artificial Sequence
  ENSG00000183889_46 (sequence is synthesized)
gaggtccgggcagaggtgggcaatggcgtgtccaggcacaacctgtcctgcagctttgacgtggtctccccagtggctgggctgcgggtcatctaccctgccccccgcgacggccgcctc

SEQ ID NO: 657872 - DNA, 120 bp, Artificial Sequence
  ENSG00000183889_47 (sequence is synthesized)
tacgtgcccaccaacggctcagcctcggtgctccaggtggactctggtgccagcgccacggccacggctcgctggcctgggggcagtgtcagcgcccgctttgagaatgcctgccctgcc

SEQ ID NO: 657873 - DNA, 120 bp, Artificial Sequence
  ENSG00000183889_48 (sequence is synthesized)
ctggtggccaccttcgtgcccagctgcccctgggagaccaatgataccctgttctcagtggtagcactgccgtggctcggtgagggggagcacgtgatggacgttgtggtggaaaacagc

SEQ ID NO: 657874 - DNA, 120 bp, Artificial Sequence
  ENSG00000183891_0 (sequence is synthesized)
aggcacaaacctagcgccaaggttggctgtcaaggtagattccagggtgtggaagtggctttgtggtgccacctctaaccgctcggaggtcaacccccattctacaccgaaaactaggcc

SEQ ID NO: 657875 - DNA, 120 bp, Artificial Sequence
  ENSG00000183891_1 (sequence is synthesized)
ttggctgctatggaaggacagcggcaagaaagccacgcaaccctaacactcgcccaggctcatttcaacaatggagagtacgcggaggccgaggcactgtactccgcttacattcgccgg

SEQ ID NO: 657876 - DNA, 120 bp, Artificial Sequence
  ENSG00000183891_2 (sequence is synthesized)
tgcgcttgcgcggcctccagcgacgagagtcccgggagcaaatgcagccctgaggatttggctactgcatataacaacagggggcaaatcaagtacttcagggttgatttttatgaagcc

SEQ ID NO: 657877 - DNA, 120 bp, Artificial Sequence
  ENSG00000183891_3 (sequence is synthesized)
tttggaagatttcaagaaggtcttagacttaaatcctggatttcaagatgctactttgagcttaaaacagactattctagacaaagaagaaaaacaaagaagaaatgttgcaaaaaatta

SEQ ID NO: 657878 - DNA, 120 bp, Artificial Sequence
  ENSG00000183891_4 (sequence is synthesized)
ttgatatttttaacttaatggaagtattgattcatgatccttacatctgcatctagttatcagtaatttagatattgagctattttgatttatatttaagaaattaatacattagcactg

SEQ ID NO: 657879 - DNA, 120 bp, Artificial Sequence
  ENSG00000183891_5 (sequence is synthesized)
tagcactgaaagttaaatagtgtgtttaaggtagttaatttcaggttgaatgggttttttttaatgaagtgtaaataataccaatgtataagtgtatattattatattaaatattatagt

SEQ ID NO: 657880 - DNA, 120 bp, Artificial Sequence
  ENSG00000183891_6 (sequence is synthesized)
atgtgtggtattttcttcagcaaaactatttttgtgatttttttattctcaactttttatttaaaaaatgttacatctgcagaaaagttgaaagtataataaactcttcagttaaattca

SEQ ID NO: 657881 - DNA, 120 bp, Artificial Sequence
  ENSG00000183891_7 (sequence is synthesized)
tttaagatcacttaaaaatttgagaatgaaattgattcacattgtgacatatccatagcaaactcgggctttgggctggctttccctctttgcttagtatttatctgttctgtcttcttt

SEQ ID NO: 657882 - DNA, 120 bp, Artificial Sequence
  ENSG00000183891_8 (sequence is synthesized)
gccctgctggtgtgtgcttagaaaaatgaacaatcattttaatgttatattcagcagaacaaattggcagtgaacacactgtaaagttagtatgcttttcaggttgacattgcagtggta

SEQ ID NO: 657883 - DNA, 120 bp, Artificial Sequence
  ENSG00000183891_9 (sequence is synthesized)
tgtgaagtttgacaatacccaaaagagaatgaaagtggaaatgagaggaatttggtaacacggtgtttttaatgtgaactttttgtttaaagcaaatgcagccctgaggatttggctact

SEQ ID NO: 657884 - DNA, 120 bp, Artificial Sequence
  ENSG00000183891_10 (sequence is synthesized)
ctcctatctttgcctctggagctcacggtcggcgcttgtcataacccagcactaggactgagcgggcggacgttcgtctttctagaaaggcctaggcgaggcctaggacgagggcggcgg

SEQ ID NO: 657885 - DNA, 120 bp, Artificial Sequence
  ENSG00000183891_11 (sequence is synthesized)
agaacgcggggagaagcccacccgtgaggagccagctgccgcgacggtgcggagagatttccgggaaccaagccctctgcgcgatcctcgggcgcgggccgccgcctctcaccccgccgt

SEQ ID NO: 657886 - DNA, 120 bp, Artificial Sequence
  ENSG00000183891_12 (sequence is synthesized)
ctctccttccacgttcctcattcgcacccagagacttaggacagataggaattttccactcgtgattttagctggcgggaaatccgcgacctgggaagggaaggggtcacggctgcgtag

SEQ ID NO: 657887 - DNA, 120 bp, Artificial Sequence
  ENSG00000183891_13 (sequence is synthesized)
cacttgtgaaaaacgtttaaatatgtggaagagagcataacgaacgtctaggtgtttatcacttggcttaagcattatcagtttacctattgtattcatccatggatgtttcagaaggaa

SEQ ID NO: 657888 - DNA, 120 bp, Artificial Sequence
  ENSG00000183908_0 (sequence is synthesized)
ttctcaggttttgatcatcattccagaccctaggggacctcaactgggtgtcttgccccctaggctccggaaggggacctcccgtggatctcaggaagccctctggtgctcagaggctcc

SEQ ID NO: 657889 - DNA, 120 bp, Artificial Sequence
  ENSG00000183908_1 (sequence is synthesized)
tgggaaagtccctagccatgataccacatgctcagaagccccaccttcacagacgctggccccagatgtagctgccttcctgtgtcacagactctcgattccatggacacagtcctcatg

SEQ ID NO: 657890 - DNA, 120 bp, Artificial Sequence
  ENSG00000183908_2 (sequence is synthesized)
ggctccctccagcactgctgttgcctgctgcctaagatgggtgacacttgggcccagcttccctggcccgggccaccccacccagcaatgctgctgatctccctcctcttggcagccggg

SEQ ID NO: 657891 - DNA, 120 bp, Artificial Sequence
  ENSG00000183908_3 (sequence is synthesized)
ttgatgcactcggatgccggcaccagctgccccgtcctttgcacatgccgtaaccaggtggtggattgtagcagccagcggctattctccgtgcccccagacctgccaatggacacccga

SEQ ID NO: 657892 - DNA, 120 bp, Artificial Sequence
  ENSG00000183908_4 (sequence is synthesized)
aacctcagcctggcccacaaccgcatcacagcagtgccgcctggctacctcacatgctacatggagctccaggtgctggatttgcacaacaactccttaatggagctgccccggggcctc

SEQ ID NO: 657893 - DNA, 120 bp, Artificial Sequence
  ENSG00000183908_5 (sequence is synthesized)
ttcctccatgccaagcgcttggcacacttggacctgagctacaacaatttcagccatgtgccagccgacatgttccaggaggcccatgggctagtccacatcgacctgagccacaacccc

SEQ ID NO: 657894 - DNA, 120 bp, Artificial Sequence
  ENSG00000183908_6 (sequence is synthesized)
tggctgcggagggtgcatccccaggcctttcagggcctcatgcagctccgagacctggacctcagttatgggggcctggccttcctcagcctggaggctcttgagggcctaccggggctg

SEQ ID NO: 657895 - DNA, 120 bp, Artificial Sequence
  ENSG00000183908_7 (sequence is synthesized)
gtgaccctgcagatcggtggcaatccctgggtgtgtggctgcaccatggaacccctgctgaagtggctgcgaaaccggatccagcgctgtacagcagattctcagctggctgagtgccgg

SEQ ID NO: 657896 - DNA, 120 bp, Artificial Sequence
  ENSG00000183908_8 (sequence is synthesized)
ggccctcctgaagtcgagggcgccccgctcttctcactcactgaggagagcttcaaggcctgccacctgaccctgaccctggatgattacctattcattgcgttcgtgggcttcgtggtc

SEQ ID NO: 657897 - DNA, 120 bp, Artificial Sequence
  ENSG00000183908_9 (sequence is synthesized)
tccattgcttctgtggccaccaacttcctcctgggcatcactgccaactgctgccaccgctggagcaaggccagtgaagaggaagagatctgacatgcctgcctctcatccctccatgct

SEQ ID NO: 657898 - DNA, 120 bp, Artificial Sequence
  ENSG00000183908_10 (sequence is synthesized)
gctgaccgccacagctgctggccaccagacgccctccctgactgctcactctggttccatggtgacctggctgcctcagtcatggttcaagcaaggtggggacactcattttgtatgagc

SEQ ID NO: 657899 - DNA, 120 bp, Artificial Sequence
  ENSG00000183908_11 (sequence is synthesized)
atctgctttgggccaggcggcacgctaggaattgggaacatcagatgaactgactcagtccctgccctcaaggcacttccctctggtcaaggagagagatccaaaaactattccctttaa

SEQ ID NO: 657900 - DNA, 120 bp, Artificial Sequence
  ENSG00000183908_12 (sequence is synthesized)
gactatatgtcaggactctgagcacgtcattatggaggcccagaggaggagccatcatctgtatctagcaatgtccatgagaattataagattagagtgatttgtgaactgggtcatcag

SEQ ID NO: 657901 - DNA, 120 bp, Artificial Sequence
  ENSG00000183908_13 (sequence is synthesized)
gaaatatctactttgtcaggtaggcaaagaagggtgtctgcacatggcagaggccagaatatgcatagtgtgctgtgttgagaagagtgaacagttcctggtcacttacttgtatagagg

SEQ ID NO: 657902 - DNA, 120 bp, Artificial Sequence
  ENSG00000183908_14 (sequence is synthesized)
gggtgtggcacagaactcaaacctacccctcacctcctgacaccaaaactgtcagctctcagcaatgccagccactgcctacagggagtaagaacacctctatgacagcccctggcctcc

SEQ ID NO: 657903 - DNA, 120 bp, Artificial Sequence
  ENSG00000183908_15 (sequence is synthesized)
ttccaccagcagctaccaggtgagaccacctcccagtgactgcccccatatgaccaaatgtcaccagttggtgaggtcccaggcagcaggctgaggatggacactttcaatgcccttgct

SEQ ID NO: 657904 - DNA, 120 bp, Artificial Sequence
  ENSG00000183908_16 (sequence is synthesized)
cctgcctctcactcaagttttgcttcagaagagagaggcaggaggcccagcaactggggcagcaagagtcctggcaccttgggatcctaatcatgtgactgttcttgccacagtgctcat

SEQ ID NO: 657905 - DNA, 120 bp, Artificial Sequence
  ENSG00000183908_17 (sequence is synthesized)
gccacagggtctcaccaggaaagtgcactgtgggccacagacccacagcctggcagcacccagagctaaaaggggacaaaggcagcacagttatgaccatatgaggctttgcattttctt

SEQ ID NO: 657906 - DNA, 120 bp, Artificial Sequence
  ENSG00000183908_18 (sequence is synthesized)
ctaagcaacttacccacgttaagcatgagggtgagagagctattaaatactaagcccttgccagtgtcaggtactttgaaaagctctctgcacaaaccattccctttgacacacacacac

SEQ ID NO: 657907 - DNA, 120 bp, Artificial Sequence
  ENSG00000183908_19 (sequence is synthesized)
acaaatcttttgaggtgaacgctgttgttcccattttacggatgaggcaactaaggctcagagaggttaaagtcacatgccactatgagcaagataaagtctgtgctctttctactgccc

SEQ ID NO: 657908 - DNA, 120 bp, Artificial Sequence
  ENSG00000183908_20 (sequence is synthesized)
catccaagttggggaacatcaccattccctctagagttatataaattcaaattcaactagagctgacaaagttcctcataaggtccaggcactcctctgggcacttttatatctattgac

SEQ ID NO: 657909 - DNA, 120 bp, Artificial Sequence
  ENSG00000183908_21 (sequence is synthesized)
tcacttctttcaattctcacagcaacactgcctggtggtttttattatccccatttgacagatgaattaatcgtagagagttgagtgacttacccaaggttgtctggataagccctagaa

SEQ ID NO: 657910 - DNA, 120 bp, Artificial Sequence
  ENSG00000183908_22 (sequence is synthesized)
ggtaggcagctccattcagggaaactgcatctaatcagtcagtcaaaaatcaagtaactttacgagcaaagcacaattatcatcatcgtggtcttcttcatcagtttcgtcagcagcatc

SEQ ID NO: 657911 - DNA, 120 bp, Artificial Sequence
  ENSG00000183908_23 (sequence is synthesized)
attatcttccctctatttgttcagcaccggatagttcatgagtatttttgcatcattctccttgacttttcacatccctgtgcaggaggtaaatcaaacatcagtaatcctgttttacag

SEQ ID NO: 657912 - DNA, 120 bp, Artificial Sequence
  ENSG00000183908_24 (sequence is synthesized)
atggggaaaaaagtctcaaggttggatatgacttgctatgtggcaaggttggggctcaaccctaacacagttctctttccagtgctttctcaagtgcttggggaagagaatgcctcagaa

SEQ ID NO: 657913 - DNA, 120 bp, Artificial Sequence
  ENSG00000183908_25 (sequence is synthesized)
ggctgggtagtggggccctggaattcagcatccatgaatgtgctagtggataagctaaatagaaggcagccaaacccatctgctgtacagattgaactatgctcacggtagggcaaattg

SEQ ID NO: 657914 - DNA, 120 bp, Artificial Sequence
  ENSG00000183908_26 (sequence is synthesized)
caggctctgaaacagagactacacaggtaacacctgaataggagactcctgctttacaatgtgtagataaaacatcagcaatggtggccatggtggcagtcatgtgaaaagtaagatctt

SEQ ID NO: 657915 - DNA, 120 bp, Artificial Sequence
  ENSG00000183908_27 (sequence is synthesized)
tgggaatcaagaaaggaagctgtgttaaccactcctgctcaagccctgctgcgtgtgttgcaagagatactaagagagcaagaaagctataggtgagaacctctgcagtttaggagaaga

SEQ ID NO: 657916 - DNA, 120 bp, Artificial Sequence
  ENSG00000183908_28 (sequence is synthesized)
acatcaaggcacagtccaacatgctgataagtctggccaggaggagaattaaaacaggggctttccacacctcccttgccccaagctccagcggtattctatcagcccatcctcctggaa

SEQ ID NO: 657917 - DNA, 120 bp, Artificial Sequence
  ENSG00000183908_29 (sequence is synthesized)
agcctgaaaggaatgaaggaggctaataagtcatcttccaggaaggcatccctcactcgtgcttccctgagctagtcaaccaaaagagtcttcagaaactttgctagacctgaagtactt

SEQ ID NO: 657918 - DNA, 120 bp, Artificial Sequence
  ENSG00000183908_30 (sequence is synthesized)
gaacctgtgtcccctgaatctttcttacaacatctgggacaaatccctggccctgtgacatccgaagcagaactgtgccctgctctctccttctgtgatgaccaaggatggtgaactcaa

SEQ ID NO: 657919 - DNA, 120 bp, Artificial Sequence
  ENSG00000183908_31 (sequence is synthesized)
gttgttctctacaagccaggccagcaacctaaatacttggagaggaacttttagaaactataatcctgacaaaatagaaaagtttcccataggggcataccataatactataataacctc

SEQ ID NO: 657920 - DNA, 120 bp, Artificial Sequence
  ENSG00000183908_32 (sequence is synthesized)
ccaggaactattgtttgccaaaatgtagttaatatattttaagatatatgcttttttgcataggactagaaccagaaaagacaccaaatgcccccttgacatcaatgtcctttctagtgg

SEQ ID NO: 657921 - DNA, 120 bp, Artificial Sequence
  ENSG00000183908_33 (sequence is synthesized)
gacaatttggtctccattaatgccaagcctttctgaacaggatacatggcttttaaaggacagatgtttctcctgctgctagaagttcctcagtttactagagcacaatgaggaaagtat

SEQ ID NO: 657922 - DNA, 120 bp, Artificial Sequence
  ENSG00000183908_34 (sequence is synthesized)
tcaacctccctactgccaaggaattccctgcttctcccccaccgccatcatcttgtccaagctatcagaagcaaccttctagagataatctaacaatcctgattagaattgctcccatat

SEQ ID NO: 657923 - DNA, 120 bp, Artificial Sequence
  ENSG00000183908_35 (sequence is synthesized)
ccctggtgaccacaggcttcattcaaattgtccaaactggttaacatgtatgtgatggggtatctctgcatctgtatgtctgtctgcgaggttccttgtatattggctgtccgctgactt

SEQ ID NO: 657924 - DNA, 120 bp, Artificial Sequence
  ENSG00000183908_36 (sequence is synthesized)
gggacagatctctctagaacttgggttcagttctctgacatagtccactcagccataggctgagtggctaaatatgcataaataagcatgcctaaataggcatatataggttggtgcaaa

SEQ ID NO: 657925 - DNA, 120 bp, Artificial Sequence
  ENSG00000183908_37 (sequence is synthesized)
agtaattgcggtttttgccattaaaaatgatagcaaaaatcccaattacttttgcgtcaatctaatattacattgcttgatagattaagatggaatcccaccaggtttagggtaggactg

SEQ ID NO: 657926 - DNA, 120 bp, Artificial Sequence
  ENSG00000183908_38 (sequence is synthesized)
gatgctcaaaaaataaagaaggagaaaaatctgtggcagaggcatcctaatgagaacctgacttctccttgcttccctctgctctctcctgcgcctcagagacttgtccccattgcagaa

SEQ ID NO: 657927 - DNA, 120 bp, Artificial Sequence
  ENSG00000183908_39 (sequence is synthesized)
gcttcctccatgctaggccagaggatatcaaagtttagtttggtcaagatttgggccaagaaaattcctttttagaagagccctcatatctgaatcacatcactttgggccagttatctc

SEQ ID NO: 657928 - DNA, 120 bp, Artificial Sequence
  ENSG00000183908_40 (sequence is synthesized)
tggtcaccctcagacaaaccctcgtctctttttctcccttcctagaggaattcccagggaactttgcagaaataggtctccagagttgctacagaggttcatggctcctttcgaggaggg

SEQ ID NO: 657929 - DNA, 120 bp, Artificial Sequence
  ENSG00000183908_41 (sequence is synthesized)
acatgtatgaaatttgaacagatcaagacaggtgtttgtcttcaaccatgggggaagacctccagcttccattttcccctatacgtgtctgtgctgacatcctttccagcagtagaagac

SEQ ID NO: 657930 - DNA, 120 bp, Artificial Sequence
  ENSG00000183908_42 (sequence is synthesized)
taaaaagatatatcttaacccattcctcaaaaggacatcttcctaaagccagagaaaattgtctgcgcttccccaccccaggaagaggcaaaagggaagtgagggcgtcacaaggtcttt

SEQ ID NO: 657931 - DNA, 120 bp, Artificial Sequence
  ENSG00000183908_43 (sequence is synthesized)
tgtaaatcactattgtgtttgtcacagcactgggcggagagctggatccacagagctctcagtttttctaagcactgtcctgtaatgtgctaatgtctgggggtgggagggctggggagg

SEQ ID NO: 657932 - DNA, 120 bp, Artificial Sequence
  ENSG00000183908_44 (sequence is synthesized)
ggtggggttagagggaagatgccaacctttgtatggagatgattttataaccatgcacttttgtaactgtgcagaatttttcataaatgtacattaataataaagagtgtatagtttaac

SEQ ID NO: 657933 - DNA, 120 bp, Artificial Sequence
  ENSG00000183914_0 (sequence is synthesized)
gttttgcctgcacgatgtccagcaaagctgagaagaagcagcgattgagtggccgaggaagctcccaggcaagctggtcagggcgggccactcgggctgctgtggccacacaggagcagg

SEQ ID NO: 657934 - DNA, 120 bp, Artificial Sequence
  ENSG00000183914_1 (sequence is synthesized)
ggaatgccccggctgtcagtgagccagagctgcaggctgagctccccaaggaggagcctgagccacggttggagggacctcaagcacagagtgaagaatcagtggagcccgaggcagatg

SEQ ID NO: 657935 - DNA, 120 bp, Artificial Sequence
  ENSG00000183914_2 (sequence is synthesized)
tgaagcccctcttcctttcccgagctgcgctgacaggactggcggatgcagtgtggacacaggagcatgatgccattctggaacactttgcccaggaccctacagaatccatcctcacca

SEQ ID NO: 657936 - DNA, 120 bp, Artificial Sequence
  ENSG00000183914_3 (sequence is synthesized)
tcttcattgacccttgttttgggctgaagctagagctgggcatgcctgtacagacccagaaccagcttgtctacttcattcgccaagcaccagttcccatcacctgggagaacttcgagg

SEQ ID NO: 657937 - DNA, 120 bp, Artificial Sequence
  ENSG00000183914_4 (sequence is synthesized)
caactgtgcagtttgggacggtgcggggcccctatatcccggccctgcttcggctgctcggtggagtctttgcccctcagatctttgcaaacacaggctggcctgagagcattagaaatc

SEQ ID NO: 657938 - DNA, 120 bp, Artificial Sequence
  ENSG00000183914_5 (sequence is synthesized)
attttgcttctcatctgcacaagttcttggcctgcctgacagacactcggtacaaactggaggggcacacggtcctctacatccctgcagaggccatgaacatgaagcctgagatggtga

SEQ ID NO: 657939 - DNA, 120 bp, Artificial Sequence
  ENSG00000183914_6 (sequence is synthesized)
taaaggacaaagagctggtgcaacggctagagacctccatgatccactggacccggcagataaaggagatgctcagtgcccaggagactgtggagacaggagaaaatttaggtcctctgg

SEQ ID NO: 657940 - DNA, 120 bp, Artificial Sequence
  ENSG00000183914_7 (sequence is synthesized)
aggagattgagttctggcgcaaccgatgcatggacctgtctggcatcagtaagcagctggtgaagaagggagtgaagcacgttgaatccatcctgcaccttgccaagtcgtcctacttgg

SEQ ID NO: 657941 - DNA, 120 bp, Artificial Sequence
  ENSG00000183914_8 (sequence is synthesized)
cgccctttatgaaactggcacagcagatccaggatggctctcgtcaagcacagtcaaacctgacctttttgtcaatcctgaaggaaccttaccaggagttggctttcatgaagcccaagg

SEQ ID NO: 657942 - DNA, 120 bp, Artificial Sequence
  ENSG00000183914_9 (sequence is synthesized)
acatctctagcaagctccctaagctgatcagtctcatccgcatcatctgggtcaactctccccactacaacactcgggagagactgacctcgctcttccgaaaggtatgtgactgtcagt

SEQ ID NO: 657943 - DNA, 120 bp, Artificial Sequence
  ENSG00000183914_10 (sequence is synthesized)
atcacttcgcccgctgggaagatggcaagcagggtccccttccttgcttctttggtgcccaggggccacagataacacggaacttgctggagattgaggacatctttcataaaaatctgc

SEQ ID NO: 657944 - DNA, 120 bp, Artificial Sequence
  ENSG00000183914_11 (sequence is synthesized)
acacgctgcgagccgttcgcgggggtatcctggatgtcaagaacacctgttggcatgaagactacaataagttccgtgccggaatcaaggacctggaggtgatgacccagaacctgatca

SEQ ID NO: 657945 - DNA, 120 bp, Artificial Sequence
  ENSG00000183914_12 (sequence is synthesized)
cctcagccttcgagttggtgcgggacgtgccgcacggcgtgcttctgctggacaccttccacaggcttgcctcccgcgaggctatcaagcggacttatgacaagaaggcggtggatctct

SEQ ID NO: 657946 - DNA, 120 bp, Artificial Sequence
  ENSG00000183914_13 (sequence is synthesized)
acatgctgttcaatagcgagctggccctggtgaaccgtgaacggaacaagaaatggccagacctggagccctacgtggcccagtattccggaaaggcgcgctgggtgcacatcctccggc

SEQ ID NO: 657947 - DNA, 120 bp, Artificial Sequence
  ENSG00000183914_14 (sequence is synthesized)
gtcgcatcgacagagtcatgacctgccttgctggtgctcatttcctgccccgtattgggactggaaaggagagtgtgcacacctatcagcagatggtccaggccattgatgagctggttc

SEQ ID NO: 657948 - DNA, 120 bp, Artificial Sequence
  ENSG00000183914_15 (sequence is synthesized)
gaaaaaccttccaagagtggacatcaagtctggacaaggattgcattcggcggttggataccccattgctgcgaatcagccaggagaaggcgggcatgctggatgtcaactttgacaagt

SEQ ID NO: 657949 - DNA, 120 bp, Artificial Sequence
  ENSG00000183914_16 (sequence is synthesized)
cccttctgattctctttgcggaaattgactactgggagcggctgctgtttgagacgccccattacgtggtgaacgtagctgagcgagccgaggacctgcgcattctgcgtgaaaatctgc

SEQ ID NO: 657950 - DNA, 120 bp, Artificial Sequence
  ENSG00000183914_17 (sequence is synthesized)
tactcgttgctagagactacaataggattattgccatgctgtccccagatgagcaggccctattcaaagagcgtattcggctcctggataagaagatccacccgggactcaagaaactgc

SEQ ID NO: 657951 - DNA, 120 bp, Artificial Sequence
  ENSG00000183914_18 (sequence is synthesized)
actgggccttgaagggggccagtgccttcttcatcacggagtgccgtatacatgccagcaaggtgcagatgattgtgaatgagttcaaggcatccactctgaccattggctggcgagccc

SEQ ID NO: 657952 - DNA, 120 bp, Artificial Sequence
  ENSG00000183914_19 (sequence is synthesized)
aagagatgtcagagaagctgctggtacgcattagtggcaaacgggtatacagggacctggaatttgaagaggaccaaagagagcatcgggcagctgtacagcagaaattgatgaacctgc

SEQ ID NO: 657953 - DNA, 120 bp, Artificial Sequence
  ENSG00000183914_20 (sequence is synthesized)
accaggatgtggtgaccatcatgaccaactcctatgaggtcttcaagaatgatggtcctgagattcagcagcagtggatgctgtacatgattcggctggaccgcatgatggaggatgccc

SEQ ID NO: 657954 - DNA, 120 bp, Artificial Sequence
  ENSG00000183914_21 (sequence is synthesized)
tgcgcctgaatgtgaagtggtcactgctagaactatccaaggctatcaacggggatggaaagaccagcccaaacccactcttccaagtccttgtcattttgaagaatgatctgcaaggaa

SEQ ID NO: 657955 - DNA, 120 bp, Artificial Sequence
  ENSG00000183914_22 (sequence is synthesized)
gtgtggcacaggtggaattctcacccactctgcagactttggcaggtgtggtcaatgacattggcaaccacctcttttccaccatctctgtcttctgccacctccctgacattctcacca

SEQ ID NO: 657956 - DNA, 120 bp, Artificial Sequence
  ENSG00000183914_23 (sequence is synthesized)
agcgcaagttacatcgtgaacccatccaaacagttgtggagcaagatgaggacatcaagaagatccagacccaaatcagcagcggcatgactaacaacgcaagcctgctgcagaactacc

SEQ ID NO: 657957 - DNA, 120 bp, Artificial Sequence
  ENSG00000183914_24 (sequence is synthesized)
tcaagacctgggacatgtaccgggagatctgggagatcaacaaggactccttcattcatcgctaccagcgcctcaaccctcctgtctcttcttttgttgccgacattgcccgctacacgg

SEQ ID NO: 657958 - DNA, 120 bp, Artificial Sequence
  ENSG00000183914_25 (sequence is synthesized)
aagttgctaataacgtgcagaaggaggagacagtcaccaacatccagtttgtgctgctggactgttcgcacctcaagttctccctggtgcagcactgcaatgaatggcagaacaagttcg

SEQ ID NO: 657959 - DNA, 120 bp, Artificial Sequence
  ENSG00000183914_26 (sequence is synthesized)
cgactctgctcagggagatggctgctgggcgcctcctggagctgcacacctacctgaaggagaacgcagagaaaatcagccgccctccgcagacactggaggaactgggggtcagcttgc

SEQ ID NO: 657960 - DNA, 120 bp, Artificial Sequence
  ENSG00000183914_27 (sequence is synthesized)
agctcgtggatgccctgaagcacgacttggccaacgtggagactcagatccctcccatacacgagcaatttgccattcttgaaaagtacgaggtgccagtcgaggacagtgtcctggaga

SEQ ID NO: 657961 - DNA, 120 bp, Artificial Sequence
  ENSG00000183914_28 (sequence is synthesized)
tgctggacagtctcaacggggagtgggttgtcttccaacaaactctgctggacagtaagcaaatgctgaagaaacacaaggagaaattcaagacaggcctgatccactcggcagatgact

SEQ ID NO: 657962 - DNA, 120 bp, Artificial Sequence
  ENSG00000183914_29 (sequence is synthesized)
tcaagaagaaagcacatacacttctggaagatttcgaattcaaaggccatttcaccagcaacgtgggatacatgtctgccttagaccagattacacaagtgcgggccatgctgatggcca

SEQ ID NO: 657963 - DNA, 120 bp, Artificial Sequence
  ENSG00000183914_30 (sequence is synthesized)
tgcgggaagaggaaaatagtctccgagccaacctgggcatcttcaagatcgagcagccaccctccaaggaccttcagaacctggagaaggagctcgatgccctccagcaaatctgggaga

SEQ ID NO: 657964 - DNA, 120 bp, Artificial Sequence
  ENSG00000183914_31 (sequence is synthesized)
tcgcacgagactgggaggagaactggaatgagtggaagactggccggttcctgatcctgcagacggaaaccatggagaccacggcccacgggctgtttcgtcgcctcacaaaattagcca

SEQ ID NO: 657965 - DNA, 120 bp, Artificial Sequence
  ENSG00000183914_32 (sequence is synthesized)
aagagtataaggaccgaaactgggaaattattgaaaccactcgctcaaaaatagagcagttcaagaggaccatgcctctcatctcagacctgcggaaccctgcccttagagagaggcact

SEQ ID NO: 657966 - DNA, 120 bp, Artificial Sequence
  ENSG00000183914_33 (sequence is synthesized)
gggaccaggtccgggatgagatccagcgggagtttgatcaggaatctgaaagcttcaccttggagcagattgtggagcttgggatggatcagcatgtggagaaaattggggagatctctg

SEQ ID NO: 657967 - DNA, 120 bp, Artificial Sequence
  ENSG00000183914_34 (sequence is synthesized)
cttcagcaactaaagagctggctatagaagtggctttacaaaacattgccaagacctgggatgtgactcagctcgacatagtaccctacaaggataagggccatcatcggctcagaggta

SEQ ID NO: 657968 - DNA, 120 bp, Artificial Sequence
  ENSG00000183914_35 (sequence is synthesized)
cagaagaagtattccaggcactggaagataaccaggtagctctgtctaccatgaaggcatcacgctttgtcaaggcctttgagaaggatgtggaccactgggaacgctgcctctccctca

SEQ ID NO: 657969 - DNA, 120 bp, Artificial Sequence
  ENSG00000183914_36 (sequence is synthesized)
ttttggaggttattgagatgattctcacagtgcagcgtcagtggatgtacttagagaatatcttcctaggagaagacatccgcaagcagctgcccaatgaatcgaccttatttgaccagg

SEQ ID NO: 657970 - DNA, 120 bp, Artificial Sequence
  ENSG00000183914_37 (sequence is synthesized)
tcaacagcaactggaaagccatcatggacaggatgaacaaggacaacaatgctctccggagcacccatcacccaggcctcctggacacattgatagaaatgaatacaatcctggaagata

SEQ ID NO: 657971 - DNA, 120 bp, Artificial Sequence
  ENSG00000183914_38 (sequence is synthesized)
ttcagaaatctctggatatgtatttagagaccaagcgacatattttcccccgcttctacttcttgtccaatgatgacctgctggagattctgggccagtcccgaaacccagaggctgtgc

SEQ ID NO: 657972 - DNA, 120 bp, Artificial Sequence
  ENSG00000183914_39 (sequence is synthesized)
agccacacctcaaaaaatgctttgacaacatcaagttgctgagaatccagaaggttggagggcccagcagcaaatgggaagctgtggggatgttctcgggcgacggcgagtacattgact

SEQ ID NO: 657973 - DNA, 120 bp, Artificial Sequence
  ENSG00000183914_40 (sequence is synthesized)
tcctccactcagtatttttagaaggccctgtggagtcctggcttggcgatgtggaacagaccatgagggtgaccctgcgggaccttctccggaactgccacctggccctcaggaagttcc

SEQ ID NO: 657974 - DNA, 120 bp, Artificial Sequence
  ENSG00000183914_41 (sequence is synthesized)
tcaacaagagggacaaatgggtgaaggagtgggctggccaggtggtgatcactgccagtcagatccagtggacggctgatgtcaccaagtgcctgctgacagcgaaggagcgggcagaca

SEQ ID NO: 657975 - DNA, 120 bp, Artificial Sequence
  ENSG00000183914_42 (sequence is synthesized)
agaaaatcctcaaggtcatgaagaagaaccaggtgtcaatcctgaataagtattcagaagccatcagggggaacttgaccaagatcatgcggcttaaaattgtggctctggtgacgatag

SEQ ID NO: 657976 - DNA, 120 bp, Artificial Sequence
  ENSG00000183914_43 (sequence is synthesized)
aaattcatgcccgggatgtgttggagaagctttacaagagtggcctcatggatgtcaattcctttgactggctcagccaacttcggttctactgggagaaggatcttgatgactgtgtca

SEQ ID NO: 657977 - DNA, 120 bp, Artificial Sequence
  ENSG00000183914_44 (sequence is synthesized)
tccgccagaccaacacgcaatttcagtataattatgagtacttgggtaactcgggccggctcgtcatcacccccctgacggacaggtgttacatgacactgaccacggcattgcacctgc

SEQ ID NO: 657978 - DNA, 120 bp, Artificial Sequence
  ENSG00000183914_45 (sequence is synthesized)
accgagggggctcccccaaaggccctgcaggcacaggcaagaccgagaccgtcaaggacctgggcaaggccctgggcatatatgtcattgtggtcaactgctctgagggcctggactaca

SEQ ID NO: 657979 - DNA, 120 bp, Artificial Sequence
  ENSG00000183914_46 (sequence is synthesized)
agtccatgggccgaatgtactcaggtctggcccagactggagcttggggctgctttgatgagtttaaccgcatcaacatcgaggtgctgtcagtggtggcccaccagatcctgtgcatcc

SEQ ID NO: 657980 - DNA, 120 bp, Artificial Sequence
  ENSG00000183914_47 (sequence is synthesized)
tgtctgccctggctgccggcctcacccatttccattttgatggctttgaaataaatctggtgtggtcctgtgggatcttcattaccatgaatcctggctatgctggccgcacagagcttc

SEQ ID NO: 657981 - DNA, 120 bp, Artificial Sequence
  ENSG00000183914_48 (sequence is synthesized)
ccgaaaatcttaaatccatgttccgcccaattgccatggtggtgcctgactccaccctcattgcagaaatcattctctttggagagggctttggcaactgcaagattctggccaagaagg

SEQ ID NO: 657982 - DNA, 120 bp, Artificial Sequence
  ENSG00000183914_49 (sequence is synthesized)
tgtacacactctactcactggctgtgcagcagctgtccagacaggaccactatgactttggcctgcgtgccctcacctcccttctgcgctatgctggcaagaagcgccgcctacagccgg

SEQ ID NO: 657983 - DNA, 120 bp, Artificial Sequence
  ENSG00000183914_50 (sequence is synthesized)
atctgactgatgaagaggttctgctgctctcaatgagagatatgaacatcgccaagctcacttcagttgatgcacccctgttcaatgccatcgtgcaagatctgtttcccaacattgagc

SEQ ID NO: 657984 - DNA, 120 bp, Artificial Sequence
  ENSG00000183914_51 (sequence is synthesized)
tgcctgtcattgactatggcaagctgcgggagaccgttgagcaggagattcgagacatgggcctgcaaagcacgccgttcaccctcaccaaggttttccagttgtatgaaaccaagaact

SEQ ID NO: 657985 - DNA, 120 bp, Artificial Sequence
  ENSG00000183914_52 (sequence is synthesized)
cccgccactccaccatgatcgtgggctgcacgggcagcggcaagactgcctcatggcgcattctacaggcctccctgtcctctctgtgccgcgccggagaccctaacttcaacattgtta

SEQ ID NO: 657986 - DNA, 120 bp, Artificial Sequence
  ENSG00000183914_53 (sequence is synthesized)
gagagttccctttgaaccccaaggcattgtccctaggggaactgtatggggaatatgacctcagcaccaatgaatggacagatggcatcttgtccagtgtcatgcggacggcatgtgcag

SEQ ID NO: 657987 - DNA, 120 bp, Artificial Sequence
  ENSG00000183914_54 (sequence is synthesized)
atgagaaacccgacgagaagtggatcctgttcgatggccccgtggacacactgtggatcgagaacatgaactccgtcatggacgataacaaggtgttgaccctcatcaacggcgagcgca

SEQ ID NO: 657988 - DNA, 120 bp, Artificial Sequence
  ENSG00000183914_55 (sequence is synthesized)
tcgcgatgcccgagcaggtgtctctcctgtttgaagtggaggacctggcaatggcctctccggccactgtatcccgctgcgggatggtctacactgactacgctgacctgggctggaagc

SEQ ID NO: 657989 - DNA, 120 bp, Artificial Sequence
  ENSG00000183914_56 (sequence is synthesized)
gaaaagctcatcaacaagatgctggcctttaagaaggacaactgcaaggagctggtgcccctgcccgagtacagcggtatcacctccctctgcaagctgtactctgccctggccacgcca

SEQ ID NO: 657990 - DNA, 120 bp, Artificial Sequence
  ENSG00000183914_57 (sequence is synthesized)
gagaatggggtgaacccagctgacggcgagaactatgtcaccatggtagagatgacatttgtgttcagcatgatctggtctgtgtgtgcctctgtggatgaggagggccggaagaggatc

SEQ ID NO: 657991 - DNA, 120 bp, Artificial Sequence
  ENSG00000183914_58 (sequence is synthesized)
gacagctacctccgagagatcgagggctcctttcccaataaggacacggtatatgagtattttgtggaccccaaaatacggagttggacatcatttgaggacaagctccctaagagttgg

SEQ ID NO: 657992 - DNA, 120 bp, Artificial Sequence
  ENSG00000183914_59 (sequence is synthesized)
cgctaccctccaaacgcccccttctataagatcatggtgcccaccgtcgacactgttcgctacaactacctggtgagcagcttggtggccaaccagaatcccattctgctggtgggtccc

SEQ ID NO: 657993 - DNA, 120 bp, Artificial Sequence
  ENSG00000183914_60 (sequence is synthesized)
gtggggactgggaagacctccatcgcccagagcgttctgcagtccctgccctccagccagtggtcggtgctcgttgtcaacatgtccgcacagaccacatccaataacgtgcagagcatc

SEQ ID NO: 657994 - DNA, 120 bp, Artificial Sequence
  ENSG00000183914_61 (sequence is synthesized)
attgagagcagggttgagaagcgaaccaagggtgtctacgtgccattcgggggcaaaagcatgatcacctttatggatgacctaaatatgcccgctaaggacatgtttgggtcccagcca

SEQ ID NO: 657995 - DNA, 120 bp, Artificial Sequence
  ENSG00000183914_62 (sequence is synthesized)
cccctggagctgatccgcctctggattgactatggcttctggtatgaccgtacgaagcagaccatcaagtacattcgagaaatgttcctgatggctgccatgggcccccctgggggtgga

SEQ ID NO: 657996 - DNA, 120 bp, Artificial Sequence
  ENSG00000183914_63 (sequence is synthesized)
cggactgtcatctccccaaggctacggagtcgcttcaacattatcaacatgaccttccccacaaagtcccagatcatccgcatattcggcaccatgatcaatcagaagcttcaggacttt

SEQ ID NO: 657997 - DNA, 120 bp, Artificial Sequence
  ENSG00000183914_64 (sequence is synthesized)
gaggaagaggtgaagcccattgggaacgtggtgacagaggccaccctggacatgtacaacaccgtggtacagcgcttcctgcccacgcccaccaagatgcattacctcttcaaccttcga

SEQ ID NO: 657998 - DNA, 120 bp, Artificial Sequence
  ENSG00000183914_65 (sequence is synthesized)
gacatctccaaggtgttccagggcatgcttagagccaacaaggacttccatgataccaagtccagcatcacacggctctggatccatgaatgtttcagagtcttctctgaccggctggtt

SEQ ID NO: 657999 - DNA, 120 bp, Artificial Sequence
  ENSG00000183914_66 (sequence is synthesized)
gatgcggcagacacagaagccttcatgggcatcataagcgacaagctcggctccttctttgacctcacatttcatcatctctgtcccagcaagcgtcctcctatctttggggatttcctg

SEQ ID NO: 658000 - DNA, 120 bp, Artificial Sequence
  ENSG00000183914_67 (sequence is synthesized)
aaggagcccaaggtgtatgaagacctcacggatctgacagtgctgaagacagtcatggagacagctctaaatgagtataacctgtcaccctctgtcgtgcccatgcagctagtgctcttc

SEQ ID NO: 658001 - DNA, 120 bp, Artificial Sequence
  ENSG00000183914_68 (sequence is synthesized)
cgagaggctattgaacacatcacacggatcgtgcgggtcattggacagcctcggggcaacatgctcctggtgggtatcgggggcagcggacgccagagtctggcccgcctggcttcatcc

SEQ ID NO: 658002 - DNA, 120 bp, Artificial Sequence
  ENSG00000183914_69 (sequence is synthesized)
atctgcgactacaccaccttccagatcgaggtcaccaaacattatcggaagcaggagttccgagatgatatcaagcgtctgtatcgccaggctggggtggagctcaagaccacgtccttc

SEQ ID NO: 658003 - DNA, 120 bp, Artificial Sequence
  ENSG00000183914_70 (sequence is synthesized)
atttttgtggacacccaaatagctgatgagtccttcctagaggacatcaacaacatcctcagctcaggcgaggtgcccaatctctacaagcctgatgaatttgaagagatccagtcgcat

SEQ ID NO: 658004 - DNA, 120 bp, Artificial Sequence
  ENSG00000183914_71 (sequence is synthesized)
atcatagaccaggcccgggtggagcaggtgcctgagtcatcggacagcctcttcgcctacctcattgaacgcgtgcagaacaacctgcacatcgtgctctgcctcagccccatgggggat

SEQ ID NO: 658005 - DNA, 120 bp, Artificial Sequence
  ENSG00000183914_72 (sequence is synthesized)
cccttcaggaactggatccgccagtacccagccttggtgaactgcacaaccatcaactggttctcagagtggccccaagaggccctgctcgaggtggctgagaagtgcctcataggagta

SEQ ID NO: 658006 - DNA, 120 bp, Artificial Sequence
  ENSG00000183914_73 (sequence is synthesized)
gacctgggaactcaggagaatatccacaggaaggtggcccagatctttgtcactatgcactggtcagtagctcagtattcccagaagatgctgttggaactgcggagacacaactatgtc

SEQ ID NO: 658007 - DNA, 120 bp, Artificial Sequence
  ENSG00000183914_74 (sequence is synthesized)
acacccaccaaatacctggaactcctgtctggatataagaagttgctgggagaaaaacggcaggagctgctggcccaagccaataaactgcggacaggcttgttcaagatcgacgaaact

SEQ ID NO: 658008 - DNA, 120 bp, Artificial Sequence
  ENSG00000183914_75 (sequence is synthesized)
agggaaaaggtgcaagtgatgtcgttggagctggaggatgccaagaagaaggtggctgagttccagaagcagtgtgaggagtacctggtcatcattgtgcagcagaagcgggaggcagat

SEQ ID NO: 658009 - DNA, 120 bp, Artificial Sequence
  ENSG00000183914_76 (sequence is synthesized)
gagcagcagaaggccgtaacagccaacagtgaaaagattgcagttgaggaaatcaagtgtcaggcactggctgacaatgcccagaaagatctagaagaggcactgcccgccctggaagag

SEQ ID NO: 658010 - DNA, 120 bp, Artificial Sequence
  ENSG00000183914_77 (sequence is synthesized)
gccatgcgggccctggagtctctgaacaagaaggatataggagagatcaagtcttatggacggcccccagcccaagtggagatagtgatgcaggcagttatgattcttcgaggcaacgag

SEQ ID NO: 658011 - DNA, 120 bp, Artificial Sequence
  ENSG00000183914_78 (sequence is synthesized)
cccacatgggcagaggccaagaggcagctaggggaacagaacttcatcaagtcactgatcaactttgataaagacaatatctcagataaggttctgaagaagattggggcctactgcgcc

SEQ ID NO: 658012 - DNA, 120 bp, Artificial Sequence
  ENSG00000183914_79 (sequence is synthesized)
cagcctgacttccagcctgatatcatcggccgcgtctccctggctgccaagtccctctgcatgtgggtgcgggccatggagctgtatgggcggctatatcgggtggtggagcccaagcga

SEQ ID NO: 658013 - DNA, 120 bp, Artificial Sequence
  ENSG00000183914_80 (sequence is synthesized)
atccgaatgaacgctgccttggctcagcttcgggagaagcaagccgcgctcgctgaggcccaggagaagctgcgggaggtagctgagaaactggagatgctaaagaaacagtatgatgag

SEQ ID NO: 658014 - DNA, 120 bp, Artificial Sequence
  ENSG00000183914_81 (sequence is synthesized)
aagctggcacagaaggaggagcttcgcaagaagtctgaagagatggagctgaagctggagcgagctgggatgctcgtgtcggggttggctggcgagaaggccagatgggaggagacagtc

SEQ ID NO: 658015 - DNA, 120 bp, Artificial Sequence
  ENSG00000183914_82 (sequence is synthesized)
cagggcctggaggaggacctgggctacctggtgggggactgtctcctggcagctgccttcctgtcctacatgggacccttcctgaccaactaccgggatgagattgtcaaccaaatctgg

SEQ ID NO: 658016 - DNA, 120 bp, Artificial Sequence
  ENSG00000183914_83 (sequence is synthesized)
atcgggaagatctgggagcttcaggttccttgctccccttctttcgccatcgataacttcctgtgcaatcctaccaaagtccgggactggaacatccaagggttgccctcagacgccttc

SEQ ID NO: 658017 - DNA, 120 bp, Artificial Sequence
  ENSG00000183914_84 (sequence is synthesized)
tccactgagaatggcatcatcgtcacccgaggcaacaggtgggcactgatgatcgaccctcaggcccaggccctgaaatggattaagaacatggaaggaggccagggcctgaagatcatc

SEQ ID NO: 658018 - DNA, 120 bp, Artificial Sequence
  ENSG00000183914_85 (sequence is synthesized)
gacctgcagatgagcgattacctgcgaatcctagaacacgccattcactttggatacccggtgctacttcagaacgtgcaggaatatctggaccccacactgaaccccatgctcaacaaa

SEQ ID NO: 658019 - DNA, 120 bp, Artificial Sequence
  ENSG00000183914_86 (sequence is synthesized)
tctgtagcccgaatcggtggtcggctgttgatgcgcattggcgataaggaggtggaatataataccaatttccgtttctacatcaccaccaagctctccaacccccactacagcccagag

SEQ ID NO: 658020 - DNA, 120 bp, Artificial Sequence
  ENSG00000183914_87 (sequence is synthesized)
acctcagccaagaccaccatcgtcaactttgctgttaaagaacagggcctggaggcccagctgctgggcattgtggtgcggaaggagcggcctgagctggaggagcagaaggactcactg

SEQ ID NO: 658021 - DNA, 120 bp, Artificial Sequence
  ENSG00000183914_88 (sequence is synthesized)
gtcatcaacatcgcggctggtaaaaggaagctcaaggagctggaggatgagatcctgcggctgctgaatgaggccaccggctccctgctggatgatgtgcagctggtgaacacgctgcat

SEQ ID NO: 658022 - DNA, 120 bp, Artificial Sequence
  ENSG00000183914_89 (sequence is synthesized)
acctccaagatcacagccacagaggtgactgagcagctggagaccagtgagaccacagagatcaacactgacttggcgcgggaggcttaccgcccatgcgcccagcgggcatcaatcctg

SEQ ID NO: 658023 - DNA, 120 bp, Artificial Sequence
  ENSG00000183914_90 (sequence is synthesized)
ttcttcgtgctcaatgatatgggctgcatcgaccccatgtaccagttctcactggatgcctacatcagcctctttattctcagcattgacaaaagccaccgcagcaataagctggaggac

SEQ ID NO: 658024 - DNA, 120 bp, Artificial Sequence
  ENSG00000183914_91 (sequence is synthesized)
cgcattgactacctgaatgactaccacacctacgctgtctacaggtacacctgccgtacccttttcgaacgccacaaactactattcagttttcatatgtgtgccaaaatcttggagact

SEQ ID NO: 658025 - DNA, 120 bp, Artificial Sequence
  ENSG00000183914_92 (sequence is synthesized)
tctggcaagctcaacatggatgaatacaacttctttctacgtgggggtgtggtcttggatcgggagggccaaatggacaatccatgtagtagctggcttgcagatgcctactgggataac

SEQ ID NO: 658026 - DNA, 120 bp, Artificial Sequence
  ENSG00000183914_93 (sequence is synthesized)
atcacagagctagacaaactgaccaacttccacggactcatgaactcctttgagcagtaccctcgtgactggcacctgtggtataccaatgctgccccggagaaggcgatgctgccaggt

SEQ ID NO: 658027 - DNA, 120 bp, Artificial Sequence
  ENSG00000183914_94 (sequence is synthesized)
gagtgggaaaatgcctgcaatgaaatgcaacggatgctgatcgttcgctccctgcgccaggaccgcgtggccttctgcgtgacctccttcatcatcaccaaccttggctcccgcttcatc

SEQ ID NO: 658028 - DNA, 120 bp, Artificial Sequence
  ENSG00000183914_95 (sequence is synthesized)
gagccgcctgtgctgaatatgaagtcggtgctggaggattcaaccccacgatccccactcgtgttcatcctgtcccctggtgtggaccccaccagtgccctgctgcagctggcagagcac

SEQ ID NO: 658029 - DNA, 120 bp, Artificial Sequence
  ENSG00000183914_96 (sequence is synthesized)
atgggcatggcccagcgcttccacgccctgtccctgggccagggccaggcccccatcgctgctcggctcctccgagagggtgtgactcagggacactgggtgttcctggcaaactgccac

SEQ ID NO: 658030 - DNA, 120 bp, Artificial Sequence
  ENSG00000183914_97 (sequence is synthesized)
ctgtcactgtcttggatgcctaatctggacaagctggtggagcagctgcaggtggaggatcctcatccatccttccgcctctggctcagctccatcccccacccagacttccctatctca

SEQ ID NO: 658031 - DNA, 120 bp, Artificial Sequence
  ENSG00000183914_98 (sequence is synthesized)
atcttgcaggtcagcatcaagatgaccacagagccaccaaagggcctaaaggccaacatgacacgtctttaccaactgatgtcagaaccacagttttcccgctgctccaaacctgccaaa

SEQ ID NO: 658032 - DNA, 120 bp, Artificial Sequence
  ENSG00000183914_99 (sequence is synthesized)
tataagaagctgctgttttcactctgtttcttccactctgtgttacttgaacgcaaaaagttcctgcagcttggctggaacatcatctatggcttcaatgactccgactttgaggtgtca

SEQ ID NO: 658033 - DNA, 120 bp, Artificial Sequence
  ENSG00000183914_100 (sequence is synthesized)
gaaaacttgctgagcctctatctcgatgagtacgaggagacaccttgggacgcacttaagtacctcattgccggcatcaactatggtggacatgtcacagatgactgggaccggcgcctg

SEQ ID NO: 658034 - DNA, 120 bp, Artificial Sequence
  ENSG00000183914_101 (sequence is synthesized)
ctgaccacctacatcaatgattatttctgtgaccagtctctatcaactcccttccaccggttgtcagcactggagacttatttcatccccaaggatggcagcctcgcttcttacaaggaa

SEQ ID NO: 658035 - DNA, 120 bp, Artificial Sequence
  ENSG00000183914_102 (sequence is synthesized)
tacatcagcttattgcctggcatggacccccctgaggcctttggccagcaccccaatgctgatgtggcctctcagatcactgaggcacaaaccctctttgatactttgctttccttgcaa

SEQ ID NO: 658036 - DNA, 120 bp, Artificial Sequence
  ENSG00000183914_103 (sequence is synthesized)
cctcagattacacccaccagggctggaggccagacccgggaagagaaggtccttgagttggccgctgatgtgaagcagaagatccctgaaatgatcgactatgaggggactcaaaaactg

SEQ ID NO: 658037 - DNA, 120 bp, Artificial Sequence
  ENSG00000183914_104 (sequence is synthesized)
ctagctctcgacccctcccccctcaatgtggtccttctgcaggagatccagagatacaacacactgatgcagaccatcctgttctcactgacagacctagagaaaggcatccagggtctc

SEQ ID NO: 658038 - DNA, 120 bp, Artificial Sequence
  ENSG00000183914_105 (sequence is synthesized)
atcgtcatgtctacaagcctggaagagattttcaattgcatctttgatgcccatgttcctccgctctggggaaaggcatacccctcacaaaagccattggctgcctggacccgggacttg

SEQ ID NO: 658039 - DNA, 120 bp, Artificial Sequence
  ENSG00000183914_106 (sequence is synthesized)
gccatgcgtgtggagcagtttgagctgtgggccagccgggcccggcctcctgtgatcttctggttgtctggtttcacctttcccactggcttcctcactgctgtgctgcagtcttcagct

SEQ ID NO: 658040 - DNA, 120 bp, Artificial Sequence
  ENSG00000183914_107 (sequence is synthesized)
cgccaaaacaacgtttcagtggacagcctctcctgggagtttatcgtttccactgtggatgacagcaacctagtgtatccccccaaggatggtgtctgggtccggggcctgtacctggaa

SEQ ID NO: 658041 - DNA, 120 bp, Artificial Sequence
  ENSG00000183914_108 (sequence is synthesized)
ggtgctggctgggaccggaagaactcctgcttggtggaggcagagcccatgcagcttgtctgcctcatgcccacgatccacttccggcctgcagagagccgcaagaagagcgccaagggc

SEQ ID NO: 658042 - DNA, 120 bp, Artificial Sequence
  ENSG00000183914_109 (sequence is synthesized)
atgtactcctgcccctgctattactatcccaaccgggcaggcagctcagaccgagcctcctttgtcatcggcattgacctgcggtctggggccatgacacctgatcattggatcaagagg

SEQ ID NO: 658043 - DNA, 120 bp, Artificial Sequence
  ENSG00000183914_110 (sequence is synthesized)
ggcactgctctactcatgagcctggacagctgagacctcctcctcttctccgcttgagagagagggtcagggactccaggagctaagacagatgttgcacctaggactgaggccggacct

SEQ ID NO: 658044 - DNA, 120 bp, Artificial Sequence
  ENSG00000183914_111 (sequence is synthesized)
cactcagactttgaccttggccgaatttgtgtgatgtggccctggagatacctagttgtgttagccataaaagtgaaagagttgtattggagctcagtgctgtaaaacacccgcgacaac

SEQ ID NO: 658045 - DNA, 120 bp, Artificial Sequence
  ENSG00000183914_112 (sequence is synthesized)
cttctacatcgcgaatatccctcgccggcctggcgcccggcgccatctgctggacccgttccggctggggcgcacagacctgggcgcggggtcgggcgattgggttctccctgccttttc

SEQ ID NO: 658046 - DNA, 120 bp, Artificial Sequence
  ENSG00000183914_113 (sequence is synthesized)
aatgtcctgcggggcggtggctcactgtctctcgccccagcccttccagctgggtcctgacaccaggccccccgcacccttcggctcgccagatgtggctactttcctttagtcccggag

SEQ ID NO: 658047 - DNA, 120 bp, Artificial Sequence
  ENSG00000183914_114 (sequence is synthesized)
ccttcaagccctgggtccctgaggggtagacctgggcggggtggggccgcgaagcagggatccagggcgcctgcgcggaggaggcgggctccgaggggccgcacaccggccactcgcccc

SEQ ID NO: 658048 - DNA, 120 bp, Artificial Sequence
  ENSG00000183914_115 (sequence is synthesized)
tccctgcccggggttgccatggggacgcgtgcagacgccggcccgagagggctgcgaggggcaacttcttagagtggcccatcggtcggtctagggaggggagggtcagcgtggcaaggt

SEQ ID NO: 658049 - DNA, 120 bp, Artificial Sequence
  ENSG00000183914_116 (sequence is synthesized)
gtgtgtcgggggcagagggaaggagggaaggagtgctggggagaaggggcagtagtgtcggggtaggaagggacagttgttggggagaagaggcagttgtggagggagagggagcaagga

SEQ ID NO: 658050 - DNA, 120 bp, Artificial Sequence
  ENSG00000183914_117 (sequence is synthesized)
atatttgtgtgggggagggggaggagaaggggcagttgtgacagctgggggggaagagccattctgaggggaaatttgcctgctggtaaccagtttaaggataccagctgctggtataaa

SEQ ID NO: 658051 - DNA, 120 bp, Artificial Sequence
  ENSG00000183914_118 (sequence is synthesized)
tactgctggataaatactgctggatttatactgcaggataaatactgctggcccctgcggtatttcctagtactagagtgagccccgacttagcagagcagttcctcctggggcctgcgg

SEQ ID NO: 658052 - DNA, 120 bp, Artificial Sequence
  ENSG00000183914_119 (sequence is synthesized)
tgtgggatcgcgtggtgaaccccacggtgcatgcgcctcaggctctagtttgaggcaggaaagcgcagcttgatgcttctctggagactgatggaggaagcctccttgctgtagttggtt

SEQ ID NO: 658053 - DNA, 120 bp, Artificial Sequence
  ENSG00000183914_120 (sequence is synthesized)
ttattgatttgctggcctaacagaacgtttttccttggagcaaagtacaaatccttcaagtttgaaattcataacctgagatcaatgcctgtggcagcctgtggggatgaggaaggagag

SEQ ID NO: 658054 - DNA, 120 bp, Artificial Sequence
  ENSG00000183914_121 (sequence is synthesized)
ccacaggtgccgttaggctgcagcctaatgaaaagagagtgcccagcgcctcagactttgcgcctgggattctgagcacctgtccgagatccccgcttcctgccatcctacctttctgag

SEQ ID NO: 658055 - DNA, 120 bp, Artificial Sequence
  ENSG00000183914_122 (sequence is synthesized)
agaggcaccactgtgaccttcctcgtgccccaattgctttttcctcatgacacaatttgaaatttatgattggatgacttttgtccttctttcttccaatctgttctcagggcattttga

SEQ ID NO: 658056 - DNA, 120 bp, Artificial Sequence
  ENSG00000183914_123 (sequence is synthesized)
gtcaaataaatgatcctgactgatcttaaccattagcacagagttcctcagccaactctgctaagagacctcagtacacacaaaacagtgttcctgcccctcaggacttcaaagcgatag

SEQ ID NO: 658057 - DNA, 120 bp, Artificial Sequence
  ENSG00000183914_124 (sequence is synthesized)
cctggagtccctccttccggaggccctcctgcctccacgtgtgcccttctccatgtccagcattcgggcgcctcttgtctttcttctgttccctggcttcggcgtccccgggagtgtgac

SEQ ID NO: 658058 - DNA, 120 bp, Artificial Sequence
  ENSG00000183914_125 (sequence is synthesized)
tcccgcagcggggtgcagctttcctctgggatgagtgaccggagggaacccgccttcccgggcacgtcgccagcctcttcctcttcttccctaggctatcaagcggacttatgacaagaa

SEQ ID NO: 658059 - DNA, 120 bp, Artificial Sequence
  ENSG00000183914_126 (sequence is synthesized)
tgtctcttccagcaaggaggacctgcaaggctgcattctctgttgtcacgcttggaaagatcactacgtacaggctgtgcagatgcacatccagttctccagtcggggctgggtcctaga

SEQ ID NO: 658060 - DNA, 120 bp, Artificial Sequence
  ENSG00000183914_127 (sequence is synthesized)
tctgcagctctcccaagaatttcactcccatcttttgactcctctcttcattattctctctctttctcatacaatatgtttgctatcgtcattttacttttttttttcttcttttatttt

SEQ ID NO: 658061 - DNA, 120 bp, Artificial Sequence
  ENSG00000183914_128 (sequence is synthesized)
ttcttttatttttgtctctccccacctcccaccctgctatcaacattttaattttacaacttatcttaaaacacaacaaaacaaaacaatgatcggccaggcacggtggctcacacctgt

SEQ ID NO: 658062 - DNA, 69 bp, Artificial Sequence
  ENSG00000183914_129 (sequence is synthesized)
tagctgggcgtggtggcacaagcctgtagtctcagctacttgggagggtgaggtgggaggatcgcctga

SEQ ID NO: 658063 - DNA, 120 bp, Artificial Sequence
  ENSG00000183914_130 (sequence is synthesized)
tcaaaaacaaaaatcaaaaaccactccactatctgactaaaccagtgatgtcgctgttctgccactagatggccataatggctcagctaagtcacccaaaccctgtccctttcctgactg

SEQ ID NO: 658064 - DNA, 120 bp, Artificial Sequence
  ENSG00000183914_131 (sequence is synthesized)
ttggtggggctgtcagaccatgccttcttctacagcttcattgttatgaaactgtcatactataattatttaaaatgtaattaatcaattaactaatttattaaaaatatatagtgagca

SEQ ID NO: 658065 - DNA, 120 bp, Artificial Sequence
  ENSG00000183914_132 (sequence is synthesized)
agtacggggctgggacagtggagtcagtgggcagagacttgagtagtaagaagacaatggagggtgggggccagggaggaccttgcaaggccgggagagctgtacctgggaccatggtgg

SEQ ID NO: 658066 - DNA, 120 bp, Artificial Sequence
  ENSG00000183914_133 (sequence is synthesized)
caggtcagggacgcggctgactcctggaggcctgcagaggcaggcaccggagggcgtgggccggggctggggaggagagccagaaatctcagagcagggcaggttctgtgggagagagct

SEQ ID NO: 658067 - DNA, 120 bp, Artificial Sequence
  ENSG00000183914_134 (sequence is synthesized)
gaaaggtggatgcctggattcagggaaacctgcagctgaagaaaaatgctttgcttgccgcggctgttgagaacaatgataagaaaaacaccctctgttgtaagcactgtgtaggcttgg

SEQ ID NO: 658068 - DNA, 120 bp, Artificial Sequence
  ENSG00000183914_135 (sequence is synthesized)
gcggccctcctcggctcgttctcacggatgcatgaggcaggaccctcgtttgtgcacccagaggtatgaattcacggactggcaagcacacccttttccacccactccaacaatgcgagc

SEQ ID NO: 658069 - DNA, 120 bp, Artificial Sequence
  ENSG00000183914_136 (sequence is synthesized)
cccactccaacaatgcgagcaagagagtgatttttcaaaaggacaaccttgaataagctctagtttcttttaaagcaaactgggccgggccgggtggctcacgcctgtaatcctagcact

SEQ ID NO: 658070 - DNA, 120 bp, Artificial Sequence
  ENSG00000183918_0 (sequence is synthesized)
aaatccttcttccaatgttcctcccctctctgtatgaaccctgtgttggggggcagaagatggaagcccttggcaagctcgatcgaaccaagctactaaattgctgagctcgttttaact

SEQ ID NO: 658071 - DNA, 120 bp, Artificial Sequence
  ENSG00000183918_1 (sequence is synthesized)
gaagtgtgagaaggaggtttaaggcaagtagacaacatcctgttgttggggtgcttctctcttttttgcacatctggctgaactgggagtcaggtggttgacttgtgcctggctgcagta

SEQ ID NO: 658072 - DNA, 120 bp, Artificial Sequence
  ENSG00000183918_2 (sequence is synthesized)
gcagcggcatctcccttgcacagttctcctcctcggcctgcccaagagtccaccaggccatggacgcagtggctgtgtatcatggcaaaatcagcagggaaaccggcgagaagctcctgc

SEQ ID NO: 658073 - DNA, 120 bp, Artificial Sequence
  ENSG00000183918_3 (sequence is synthesized)
ttgccactgggctggatggcagctatttgctgagggacagcgagagcgtgccaggcgtgtactgcctatgtgtgctgtatcacggttacatttatacataccgagtgtcccagacagaaa

SEQ ID NO: 658074 - DNA, 120 bp, Artificial Sequence
  ENSG00000183918_4 (sequence is synthesized)
caggttcttggagtgctgagacagcacctggggtacataaaagatatttccggaaaataaaaaatctcatttcagcatttcagaagccagatcaaggcattgtaatacctctgcagtatc

SEQ ID NO: 658075 - DNA, 120 bp, Artificial Sequence
  ENSG00000183918_5 (sequence is synthesized)
cagttgagaagaagtcctcagctagaagtacacaaggtactacagggataagagaagatcctgatgtctgcctgaaagccccatgaagaaaaataaaacaccttgtactttattttctat

SEQ ID NO: 658076 - DNA, 120 bp, Artificial Sequence
  ENSG00000183918_6 (sequence is synthesized)
aatttaaatatatgctaagtcttatatattgtagataatacagttcggtgagctacaaatgcatttctaaagccattgtagtcctgtaatggaagcatctagcatgtcgtcaaagctgaa

SEQ ID NO: 658077 - DNA, 120 bp, Artificial Sequence
  ENSG00000183918_7 (sequence is synthesized)
atggacttttgtacatagtgaggagctttgaaacgaggattgggaaaaagtaattccgtaggttattttcagttattatatttacaaatgggaaacaaaaggataatgaatactttataa

SEQ ID NO: 658078 - DNA, 120 bp, Artificial Sequence
  ENSG00000183918_8 (sequence is synthesized)
aggattaatgtcaattcttgccaaatataaataaaaataatcctcagtttttgtgaaaagctccatttttagtgaaatattattttatagctactaattttaaaatgtcttgcttgattg

SEQ ID NO: 658079 - DNA, 120 bp, Artificial Sequence
  ENSG00000183918_9 (sequence is synthesized)
tatggtgggaagttggctggtgtcccttgtctttgccaagttctccactagctatggtgtcataggctcttttgggatttttgaagctgtatactgtgtgctaaaacaagcactaaacaa

SEQ ID NO: 658080 - DNA, 120 bp, Artificial Sequence
  ENSG00000183918_10 (sequence is synthesized)
tctgatattggacagtaaaatccacagaccaacctggagttgaaaatcttataatttaaaatatgctctaaacatgtttatcgtatttgatgctacaggatttgaaattgtattacaaat

SEQ ID NO: 658081 - DNA, 120 bp, Artificial Sequence
  ENSG00000183918_11 (sequence is synthesized)
ccaatgaaatgagtttttcttttcatttacctctgccccagttgtttctactacatggaagacctcattttgaagggaaatttcagcagctgcagctcatgagtaactgatttgtaacaa

SEQ ID NO: 658082 - DNA, 120 bp, Artificial Sequence
  ENSG00000183918_12 (sequence is synthesized)
gcctccttttaaagtaaccctacaaaaccactggaaagtttatggttgtattattttttaaaaaaattccaagtgattgaaacctacacgagatacagaattttatgcggcattttcttc

SEQ ID NO: 658083 - DNA, 120 bp, Artificial Sequence
  ENSG00000183918_13 (sequence is synthesized)
tcacatttatatttttgtgattttgtgattgattatatgtcactttgctacagggctcacagaattcattcactcaacaaacataatagggcgctgagggcatagaagtaaaaacacctg

SEQ ID NO: 658084 - DNA, 120 bp, Artificial Sequence
  ENSG00000183918_14 (sequence is synthesized)
gtccctgctctcagttcactgtcttgttggacgagaaaacaataacgataaaagacagtgaaagaaaataacgataaaagacagtgaaagaaaataacaataaaagacaaggaaaaaata

SEQ ID NO: 658085 - DNA, 120 bp, Artificial Sequence
  ENSG00000183918_15 (sequence is synthesized)
acaatgaaagttgataagtacatgataagcgaggttccccgtgtgtaggtagatctggtctttagaggcagatagataggtcagtgcaaatactctggtccatgggccatatgaaaaggc

SEQ ID NO: 658086 - DNA, 120 bp, Artificial Sequence
  ENSG00000183918_16 (sequence is synthesized)
taagcttcactgtaaaataataactgggaattctggattgtgtatgggtgttggtgaacttggttttaattagtgaactgctgagagacagagctattctccatgtactggcaagacctg

SEQ ID NO: 658087 - DNA, 120 bp, Artificial Sequence
  ENSG00000183918_17 (sequence is synthesized)
atttctgagcatttaatatggatgccgtgggagtacaaaagtggagtgtggcctgagtaatgcattatgggtggtttaccatttcttgaggtaaaagcatcacatgaacttgtaaaggaa

SEQ ID NO: 658088 - DNA, 120 bp, Artificial Sequence
  ENSG00000183918_18 (sequence is synthesized)
tttaaaaatcctactttcataataagttgcataggtttaataatttttaattatatggcttgagtttaaattgtaataggcgtaactaattttaactctataatgtgttcattctggaat

SEQ ID NO: 658089 - DNA, 120 bp, Artificial Sequence
  ENSG00000183918_19 (sequence is synthesized)
aatcctaaacatatgaattatgtttgcatgttcacttccaagagcctttttttgaaaaaaagctttttttgaatcatcaagtctttcacatttaaataaagtgtttgaaagctttattta

SEQ ID NO: 658090 - DNA, 120 bp, Artificial Sequence
  ENSG00000183918_20 (sequence is synthesized)
gagctctttcatggggtcgagttgtttagaggacttgatagtcctagcagcttctctggcctttttgtgcctcacttttcagagccgtgtcgttcttttctctggagtcaggaagcccct

SEQ ID NO: 658091 - DNA, 120 bp, Artificial Sequence
  ENSG00000183918_21 (sequence is synthesized)
ccataattttttttttccccactgaccaaggtccagaacagggagtgtggacacaggaatcaaggaatgttctgcagtgtgctgtcttctaacttcctgatatagatgtccagcatgcct

SEQ ID NO: 658092 - DNA, 120 bp, Artificial Sequence
  ENSG00000183918_22 (sequence is synthesized)
tgctgattgatgatgttcatggagatgaaaccatcctttcaggaccatggtgtgcctgaaacgacaccgcattctgacggatcagctggcgccacccagaccagaaatctgactcaacta

SEQ ID NO: 658093 - DNA, 80 bp, Artificial Sequence
  ENSG00000183918_23 (sequence is synthesized)
atcagctggcgccacccagaccagaaatctgactcaactagttcaggaactgaagacagcaagaactaccccttgactcc

SEQ ID NO: 658094 - DNA, 120 bp, Artificial Sequence
  ENSG00000183921_0 (sequence is synthesized)
atgaagtccaaccccccacgctcctccctagaggcctgcaaagctgcaggccaggcgccgcagcagaagactcaagccaaacctacaaaggctgccaggcagaaggttctagtgactgga

SEQ ID NO: 658095 - DNA, 120 bp, Artificial Sequence
  ENSG00000183921_1 (sequence is synthesized)
ggaggaggctacctgggcttcagcctgggatcccacctagccaagagcggcacttccgtcattctgcttgaccgccgcagaccccagtgggaactgtccccggaaaccaagttcatccag

SEQ ID NO: 658096 - DNA, 120 bp, Artificial Sequence
  ENSG00000183921_2 (sequence is synthesized)
gctgatgtccgagatgaagaagccctgtaccgtgccttcgaaggggtggactgtgtcttccacgtggcttcctatggaatgtccggggctgagaagctgcagaaagagcagattgagtct

SEQ ID NO: 658097 - DNA, 120 bp, Artificial Sequence
  ENSG00000183921_3 (sequence is synthesized)
ataaatgttggaggcaccaaactagtgattgatgtctgtgttcgccggcgggttccaaggctcatctataccagcactgtcaatgttgcatttggagggaagcccatagagcagggcgat

SEQ ID NO: 658098 - DNA, 120 bp, Artificial Sequence
  ENSG00000183921_4 (sequence is synthesized)
gaggactctgtgccatatttcccattggacgagcacgtagaccactactcccgaaccaaagccatcgccgaccaattgaccctcatggccaatgggatgcctctcccaggaggaggcact

SEQ ID NO: 658099 - DNA, 120 bp, Artificial Sequence
  ENSG00000183921_5 (sequence is synthesized)
cttcggacgtgtgtgctccggcctccagggatctacggccctgaagagcagaggcacctgccccgtgtggcgggccacatcaagaagaggctgttcatgttccgatttggggaccacaag

SEQ ID NO: 658100 - DNA, 120 bp, Artificial Sequence
  ENSG00000183921_6 (sequence is synthesized)
gcacggatgaactgggtccacgtacacaatctggtgcaggcacacgtgctggcggccgaggccctcaccacggccaagggctacgtggctagtgggcaggcgtactacatcaacgatggg

SEQ ID NO: 658101 - DNA, 120 bp, Artificial Sequence
  ENSG00000183921_7 (sequence is synthesized)
gagagcgtcaacctctttgagtggatggccccactgtttgagaagctggggtacagccagccctggatccaggtgcctacttcctgggtttacctgacagcagcagttatggagcgcctc

SEQ ID NO: 658102 - DNA, 120 bp, Artificial Sequence
  ENSG00000183921_8 (sequence is synthesized)
catctggccctgagacccatctgcagcctcccaccgctgctcactcgtagtgaggtgcgcagcgtggccgtgacgcacaccttccagatagccaaggcccgcgcccagctcggctacgcg

SEQ ID NO: 658103 - DNA, 120 bp, Artificial Sequence
  ENSG00000183921_9 (sequence is synthesized)
ccggataagtttaggttcgccgacgccgtggagctatacgtgcagtccacgacccggcggccccgcggctccacggcgcggaccctcctgcgcctgctgctcaggctgctgctgttcctc

SEQ ID NO: 658104 - DNA, 120 bp, Artificial Sequence
  ENSG00000183921_10 (sequence is synthesized)
ccctcgcccacgcccggctccctgggcttgtaccagcccctgccccgccttctgggtttgagcgcgcctccgctccgccccttgaatcctggtcacgcccccgagccgctctccagacct

SEQ ID NO: 658105 - DNA, 120 bp, Artificial Sequence
  ENSG00000183921_11 (sequence is synthesized)
agcccggaccgccgacttctggccacgcccctatctactcccagaccttgccttgcgcccttcctgtgttttggccccgcccctgtcctgtcccgccccgccctccgaagtgggcacgct

SEQ ID NO: 658106 - DNA, 120 bp, Artificial Sequence
  ENSG00000183921_12 (sequence is synthesized)
cctgctccgccccctgaatcctggccacgtccctggtcggcccagacgcgtagccccgagtctctttccatgttttgaccacgcccttgacccgcccttcaaattgggcacgccttcttc

SEQ ID NO: 658107 - DNA, 120 bp, Artificial Sequence
  ENSG00000183921_13 (sequence is synthesized)
cccgctcactgatttcctggcctagcccctgagcagacctccagacctagccccgcccccgttttataaccccgcccctgcttcacggcttgggcacgcctcttccccgccccctgactt

SEQ ID NO: 658108 - DNA, 120 bp, Artificial Sequence
  ENSG00000183921_14 (sequence is synthesized)
cagagcctagtcctgagccgctctccaggcctaaccccgccttcatgtcatagccacgccccttcccgcccttccatgtttgggcacgccttctgagtcctggtcacgcctctgtcccgc

SEQ ID NO: 658109 - DNA, 120 bp, Artificial Sequence
  ENSG00000183921_15 (sequence is synthesized)
cccctgaatctttcctacgtccatgaccctccctccaggccctggccctgccccttttttcctccctccggcctgtccggtttctgatatgggccaaggctcacagcttcctccgccttc

SEQ ID NO: 658110 - DNA, 120 bp, Artificial Sequence
  ENSG00000183921_16 (sequence is synthesized)
tggaccttctcctagtccctgcccagtcccggcccacccccagattctccctcattctggtttcgccccctttctggtcctccccgcgcgcttgagcccaccctttggcttctccttttg

SEQ ID NO: 658111 - DNA, 120 bp, Artificial Sequence
  ENSG00000183921_17 (sequence is synthesized)
ggtctgtccttgctcctgcctctggacccggtcccgcccttctcgcgtgtaattgagtcctggccccgccccctccctctctggcttcacccctttccagctccgcctcccgggtaggtt

SEQ ID NO: 658112 - DNA, 120 bp, Artificial Sequence
  ENSG00000183921_18 (sequence is synthesized)
ctccccggaaccaggctgccgcgtcgctatgggctaacgcaggctcgggtgacgttggtatgagtttgcgccgtcggctgctgctctgtctggtaacattgcattcgatccaccccgacc

SEQ ID NO: 658113 - DNA, 120 bp, Artificial Sequence
  ENSG00000183921_19 (sequence is synthesized)
caatgttctgggcttctcattcacacagatctgtgtgttgacagccagggtttggggaaaaaccgagactcaagcttctgccgagcccgacttggcctttttgggttcctgtctgaggat

SEQ ID NO: 658114 - DNA, 120 bp, Artificial Sequence
  ENSG00000183921_20 (sequence is synthesized)
gacagcatagtaagcacaggttttagtaccagaaagagcatgaaaaatttaaaaaaaaaaactcttaaaataattggatgtctcgatgaagtaccaataaagctataatgggaaaaatag

SEQ ID NO: 658115 - DNA, 80 bp, Artificial Sequence
  ENSG00000183943_0 (sequence is synthesized)
aggcggcttccgcccgccccaacagcgcgcacgcggctaccgagctggaggaggcggcgggcgcgagacccggaatgcgc

SEQ ID NO: 658116 - DNA, 120 bp, Artificial Sequence
  ENSG00000183943_1 (sequence is synthesized)
ccgccttccccgcagtcgtcccgcactcggtgcccgccccccgaggccggcggctgctcccactcggggccgttgctgcttgtgccgtgagcgccgcccagccattgtccccgtcgctcc

SEQ ID NO: 658117 - DNA, 120 bp, Artificial Sequence
  ENSG00000183943_2 (sequence is synthesized)
gtcagccgcgccggaccgcgcaccaggaggcgagagcgcgcatggggagcctctgttgatgccgccgccgcgccgccctccgaggctgcgtcccgggaagcccggctccccgagcgctcc

SEQ ID NO: 658118 - DNA, 80 bp, Artificial Sequence
  ENSG00000183943_3 (sequence is synthesized)
atggaggcgcccgggctggcccaggcggccgcggcggagagcgactcccgcaaggtggcggaggagacccccgacggggc

SEQ ID NO: 658119 - DNA, 120 bp, Artificial Sequence
  ENSG00000183943_4 (sequence is synthesized)
gcgctctgccccagccctgaggcgctgtcgccggagccgcctgtgtacagcctgcaggactttgacacgctggccaccgtgggcactgggacgttcgggcgggtgcacctggtgaaggag

SEQ ID NO: 658120 - DNA, 120 bp, Artificial Sequence
  ENSG00000183943_5 (sequence is synthesized)
aagacagccaagcatttcttcgccctcaaggtgatgagcattcccgacgtcatccgcctaaagcaggagcaacacgtacacaatgagaagtctgtcctgaaggaagtcagccacccgttc

SEQ ID NO: 658121 - DNA, 120 bp, Artificial Sequence
  ENSG00000183943_6 (sequence is synthesized)
ctcatcaggctgttctggacgtggcatgacgagcgcttcctctacatgctcatggagtacgtgccgggcggcgagctcttcagctacctgcgcaaccgggggcgcttctccagcaccacg

SEQ ID NO: 658122 - DNA, 120 bp, Artificial Sequence
  ENSG00000183943_7 (sequence is synthesized)
gggctcttctactctgcagagatcatctgtgccatcgagtacctgcactccaaagagatcgtctacagggacttgaagccagagaacatcctgctggatagggatggccacattaagctc

SEQ ID NO: 658123 - DNA, 120 bp, Artificial Sequence
  ENSG00000183943_8 (sequence is synthesized)
acggactttgggttcgccaagaagctggtagacaggacttggaccctctgtggaacacccgagtacctagcccccgaagtcattcagagcaagggccacggaagggccgtggactggtgg

SEQ ID NO: 658124 - DNA, 120 bp, Artificial Sequence
  ENSG00000183943_9 (sequence is synthesized)
gccctcggcatcctgatattcgagatgctttcggggtttcctccgttttttgatgacaacccgtttggcatttatcagaaaattcttgcaggcaaaatagatttccccagacatttggat

SEQ ID NO: 658125 - DNA, 120 bp, Artificial Sequence
  ENSG00000183943_10 (sequence is synthesized)
ttccatgtaaaagacctcattaagaaactgctcgtggttgacagaacaaggcgattaggaaacatgaagaacggggcgaatgatgtgaagcatcatcggtggttccgctccgtggactgg

SEQ ID NO: 658126 - DNA, 120 bp, Artificial Sequence
  ENSG00000183943_11 (sequence is synthesized)
gaagctgttccgcagagaaaactgaagcctcccatcgtgcccaagatagctggtgacggcgacacttccaacttcgaaacttaccctgagaatgactgggacacagccgcgcccgtgccg

SEQ ID NO: 658127 - DNA, 120 bp, Artificial Sequence
  ENSG00000183943_12 (sequence is synthesized)
cagaaggatttagaaatcttcaagaatttctgaggacaggagctcacatctggaagaaacaggaagattggaatctgcctggaacaaagaactgcacctaagcagaccagaagcaaaatg

SEQ ID NO: 658128 - DNA, 120 bp, Artificial Sequence
  ENSG00000183943_13 (sequence is synthesized)
tcttcttcacggcataaggacatctccacttttctctgtacctgtgtgtatagaaatagattagagcacagttgaaattcatggaactggcattatttaagcaactggaattccacactg

SEQ ID NO: 658129 - DNA, 120 bp, Artificial Sequence
  ENSG00000183943_14 (sequence is synthesized)
taggaaggttttgaaaattgtttggttgtagattttatcttatcctttagtgttgtgttcctactgtgatgtcttggtttttgtcatagacttaagtttataagtttgaactggacttgt

SEQ ID NO: 658130 - DNA, 90 bp, Artificial Sequence
  ENSG00000183943_15 (sequence is synthesized)
tgtgtatatatagaagtcattatggcagatgcacagaaattgtgcagtgatgtaaatgttcatactttacagagcctataatttttattt

SEQ ID NO: 658131 - DNA, 120 bp, Artificial Sequence
  ENSG00000183943_16 (sequence is synthesized)
tgtaaatgttcatactttacagagcctataatttttatttttcaatttgttttttcaaaaatctcttctcggggacaacatctgaagggtatgttgcatgcattaaaaaaaatcatctca

SEQ ID NO: 658132 - DNA, 120 bp, Artificial Sequence
  ENSG00000183943_17 (sequence is synthesized)
catgcattttatagttttggggaagaaaatatcatggggaggtctaccttcagtatctttagtgcttcttacctggtaacttgagactttaaaagaagaaacaaagaggggaagatatgg

SEQ ID NO: 658133 - DNA, 120 bp, Artificial Sequence
  ENSG00000183943_18 (sequence is synthesized)
gagcgaatttattccaagaatctacaatgacattgaagttgttggaggaatgtactgtatttaaaaaaaccttctgtgacacattcaaaaatttcatctgagctggatgcagtggcttgt

SEQ ID NO: 658134 - DNA, 83 bp, Artificial Sequence
  ENSG00000183943_19 (sequence is synthesized)
ttgcttgagcccaggagttggagaccagtctgggaaacgtggtgagacctcatctctacagtgtagtctcagctactcaggag

SEQ ID NO: 658135 - DNA, 72 bp, Artificial Sequence
  ENSG00000183943_20 (sequence is synthesized)
gccgggcatggtggcacgtgagtggggaggtccaggccgcagtgatccgagatcacaccactgcattccagc

SEQ ID NO: 658136 - DNA, 120 bp, Artificial Sequence
  ENSG00000183943_21 (sequence is synthesized)
aaaaaaaaaaaaaaaaaaagaaggcaatggctttgtgcttttgaagatggattgaagagaacgtccaccttaaggctttaaaagacagtgaagctgggtgcggtggtgcactcctgtaac

SEQ ID NO: 658137 - DNA, 120 bp, Artificial Sequence
  ENSG00000183943_22 (sequence is synthesized)
ggtgcggtggtgcactcctgtaaccctgggactttgggaagctgaggcaggaagattgagcctaggagttcgagaccgacctgggcagcatagcgagaccccatctctatataaaaaaaa

SEQ ID NO: 658138 - DNA, 120 bp, Artificial Sequence
  ENSG00000183943_23 (sequence is synthesized)
agatgttaaaacagtgaaattacagaaacagaacatagccaccctttttcatcagtgaccttttcttcacgtggaggtcaactcagtaggtgagaataattagtaggttcagcagaataa

SEQ ID NO: 658139 - DNA, 120 bp, Artificial Sequence
  ENSG00000183943_24 (sequence is synthesized)
actctttacaattaataactcagtggaaaatgatgttcagatggtgaaatgtggaaatgttttagacaactctattttcagcctgtgcttctcactcaccatcctgttgggattaacagt

SEQ ID NO: 658140 - DNA, 120 bp, Artificial Sequence
  ENSG00000183943_25 (sequence is synthesized)
aaaattggaatgacacagaggagattagcatggccccctgcgcgaggaagatctgcagattcatgcagcattccatatttttttaagaaaaggttacactgtgcaccgacatgtggagct

SEQ ID NO: 658141 - DNA, 120 bp, Artificial Sequence
  ENSG00000183943_26 (sequence is synthesized)
agaaggaaaagcttttaagtctcatgtttgctgactataaaaataaatcatagtaataatattgaacattctactttaaaaattattaataaaaccataaatgaaacacttgagcacact

SEQ ID NO: 658142 - DNA, 120 bp, Artificial Sequence
  ENSG00000183943_27 (sequence is synthesized)
ttaaaaagtacataaatccatgagtccatatgcctatttttaggttgtctgttttattatccaggatttcatactcagatgagaattagcatcaggaaagcctgaaatgccttaattgtg

SEQ ID NO: 658143 - DNA, 120 bp, Artificial Sequence
  ENSG00000183943_28 (sequence is synthesized)
aactgatatgcaggaaaatgaaatatgcaagcacattggtgaccttgttctttacagacgtcgtgatcagcctccagccatacagaacaaatgagaaattagaagcgattccaagaacgt

SEQ ID NO: 658144 - DNA, 120 bp, Artificial Sequence
  ENSG00000183943_29 (sequence is synthesized)
gtgatggtgtgaaacccactttggaccatcacacacatttcagcatttgaagtgacacaagctacctggtaactgcccatggcggggtcatagtttaaatggcccaatgtcatgtagagg

SEQ ID NO: 658145 - DNA, 120 bp, Artificial Sequence
  ENSG00000183943_30 (sequence is synthesized)
catagtttaaatggcccaatgtcatgtagaggttaatttaatcaaaatgagctataaacatggagcaatcactgtataattttaaaatagtttacctggccaggcatggtggctcacgcc

SEQ ID NO: 658146 - DNA, 120 bp, Artificial Sequence
  ENSG00000183943_31 (sequence is synthesized)
aaaatacaaatagctgacccgggtgggcattccaaaatgtccgcatggacgatcacgaaacaatcacggtgcgaaatgtccgcatggatgatcacgaaacaatcacggtgcagaatgtcc

SEQ ID NO: 658147 - DNA, 120 bp, Artificial Sequence
  ENSG00000183943_32 (sequence is synthesized)
gtatggatgatcatgacaaacaatcactgcgcaaaatgtggaggaaaattcattaccataatcacaacatttgtatcagaaaaacattacaaatttactttgcttcatgtaattttacga

SEQ ID NO: 658148 - DNA, 120 bp, Artificial Sequence
  ENSG00000183943_33 (sequence is synthesized)
gttggcaatattttcttaaattggaatactctaagagaataggacatggatatgttacaagaagaagtgtattggggcaagtcttgtttttctgaagggaaatgccaccggcctgctttc

SEQ ID NO: 658149 - DNA, 120 bp, Artificial Sequence
  ENSG00000183943_34 (sequence is synthesized)
ataggcattgataaagccaggaaggaaataaagtcacaaccaaatagtatacactgtctctactgaattcttctaattccttcgcaacagaagtctaaatcctgcttagcctaaacatat

SEQ ID NO: 658150 - DNA, 120 bp, Artificial Sequence
  ENSG00000183943_35 (sequence is synthesized)
ctatagccagcgatgggcaaattatatttgctgtcagcatgatagaataagaagcagaaaccccccagcagtggggtaagattgcgcgcttcatcccctcaaaatgcagttcagccccac

SEQ ID NO: 658151 - DNA, 120 bp, Artificial Sequence
  ENSG00000183943_36 (sequence is synthesized)
tccctctccatgcccatcaaacaactgcacaatcacttgttactgaatttcccattcagcgttttgtttctttctgtccatacttaaagaccaaatcatttgtttgctttgaagaaaaag

SEQ ID NO: 658152 - DNA, 120 bp, Artificial Sequence
  ENSG00000183943_37 (sequence is synthesized)
caaaaacaagaacaaaaacaccaaatcatttgaaatcactgtccattaaaaaaaatcaccagtggaactaaacagttgagtggtttgggatgtgttcgccatttctgtgtttgacctaca

SEQ ID NO: 658153 - DNA, 120 bp, Artificial Sequence
  ENSG00000183943_38 (sequence is synthesized)
tggcctctaattctttggaccattgtaactgtgaaactatggcttaatactgttaaagaccccaaggctccactctgtagccaggtgcacctcaggctgcacaaataccccaccagaatg

SEQ ID NO: 658154 - DNA, 120 bp, Artificial Sequence
  ENSG00000183943_39 (sequence is synthesized)
tcacaatcattcattgctccagctactgagtgaacagggtgcaagacagcactggcttgggttgtatttttgcagccagttaactttgcatcaggtctacacagtccttgcagcctttga

SEQ ID NO: 658155 - DNA, 120 bp, Artificial Sequence
  ENSG00000183943_40 (sequence is synthesized)
tttctccagttgtagagatttgaaatggggtgcccgggttcctctcgtttttccttcaatctacctagcatgcattttacacacattggaggagtcgtatgcactgtttttctgttgctg

SEQ ID NO: 658156 - DNA, 120 bp, Artificial Sequence
  ENSG00000183943_41 (sequence is synthesized)
atggaggcaagcaggccttctaattagtctaacttaaacggatgggattcacttaacaaaagcaagaagaaaagcacacgaacaggtgtcttaatgcatttggatagtttctttgcgggg

SEQ ID NO: 658157 - DNA, 120 bp, Artificial Sequence
  ENSG00000183943_42 (sequence is synthesized)
tgtgtgtgtgtgtgtgtgtgtgtcttggtgaaggtgaggggctgtattttcaccaagccttttcataatcaagtttgctttgcaaaccttatggccttgcaccccgcagaacagtccctt

SEQ ID NO: 658158 - DNA, 120 bp, Artificial Sequence
  ENSG00000183943_43 (sequence is synthesized)
ttgcaccccgcagaacagtcccttcctaatagcagggatgctctgtcatggttttctgtaaattatcgtgtgttgggaagttctgttgaggcttagtttgatcttccatggtggacacgt

SEQ ID NO: 658159 - DNA, 120 bp, Artificial Sequence
  ENSG00000183943_44 (sequence is synthesized)
ctgttctgtatgtaaaaggcattacaattgtgttttagcagatgagacttgaagcctttccacagtccttgtgctctgagatggctgttgagctctgctcaactgtcgtagctgaattct

SEQ ID NO: 658160 - DNA, 120 bp, Artificial Sequence
  ENSG00000183943_45 (sequence is synthesized)
ttctttgcgctgaacactgggcagcctcaccatgttgccaacgtgcttctggggcccctgtcactgccgccggatgccgcgcacacaggcagagtgccttggcaggtttgtgcacccctt

SEQ ID NO: 658161 - DNA, 120 bp, Artificial Sequence
  ENSG00000183943_46 (sequence is synthesized)
ggcgagccagaactgggaaccccgcggggtgaccccttctcatggggggtcggggaggggagtgcctatttttaatcctgtctgtttgttgcacaatggaaatcactgtgatttgtacat

SEQ ID NO: 658162 - DNA, 120 bp, Artificial Sequence
  ENSG00000183943_47 (sequence is synthesized)
atgccctaggaaaattttactgctgtctaatttatgtaataatactgttgattccaggtttgtttaataaaactttgtatcttttcagaagtctgagtttcatctgcttctgtctccaaa

SEQ ID NO: 658163 - DNA, 120 bp, Artificial Sequence
  ENSG00000183943_48 (sequence is synthesized)
gggacacagccgcgcccgtgccgcagaaggatttagaaatcttcaagaatttctgaggacaggagctcacatctggaagtcttcccagttatgtgaagtggaaagccaattggctaacca

SEQ ID NO: 658164 - DNA, 120 bp, Artificial Sequence
  ENSG00000183943_49 (sequence is synthesized)
tttacatggatgtaccaagaggaaagctggatacaaattgaaataatagacaacaaaatgatagaggaataggtggctatgacctcgagaagataacctgtctccatggcatggcttcac

SEQ ID NO: 658165 - DNA, 120 bp, Artificial Sequence
  ENSG00000183943_50 (sequence is synthesized)
ctctcagtgtgtgatgaacgctttcacagtggtgactggtttgtattaacatgagagcgtgtaactttaccaacttcataaacgctcatgaaatccagttgcgggttttaaaaatcataa

SEQ ID NO: 658166 - DNA, 120 bp, Artificial Sequence
  ENSG00000183955_0 (sequence is synthesized)
gagttgttgcaacttttttcgaaagctgggtttcccgggagatcccaggcggtgacagagtggagccatggctagaggcaggaagatgtccaagccccgcgcggtggaggcggcggcggc

SEQ ID NO: 658167 - DNA, 120 bp, Artificial Sequence
  ENSG00000183955_1 (sequence is synthesized)
ggcggcggcggtggcagcgacggccccgggcccggagatggtggagcggaggggcccggggaggccccgcaccgacggggagaacgtatttaccgggcagtcaaagatctattcctacat

SEQ ID NO: 658168 - DNA, 120 bp, Artificial Sequence
  ENSG00000183955_2 (sequence is synthesized)
gagcccgaacaaatgctctggaatgcgtttcccccttcaggaagagaactcagttacacatcacgaagtcaaatgccaggggaaaccattagccggaatctacaggaaacgagaagagaa

SEQ ID NO: 658169 - DNA, 120 bp, Artificial Sequence
  ENSG00000183955_3 (sequence is synthesized)
aagaaatgctgggaacgcagtacggagcgccatgaagtccgaggaacagaagatcaaagacgccaggaaaggtcccctggtaccttttccaaaccaaaaatctgaagcagcagaacctcc

SEQ ID NO: 658170 - DNA, 120 bp, Artificial Sequence
  ENSG00000183955_4 (sequence is synthesized)
aaaaactccaccctcatcttgtgattccaccaatgcagccatcgccaagcaagccctgaaaaagcccatcaagggcaaacaggccccccgaaaaaaagctcaaggaaaaacgcaacagaa

SEQ ID NO: 658171 - DNA, 120 bp, Artificial Sequence
  ENSG00000183955_5 (sequence is synthesized)
tcgcaaacttacggatttctaccctgtccgaaggagctccaggaagagcaaagccgagctgcagtctgaagaaaggaaaagaatagatgaattgattgaaagtgggaaggaagaaggaat

SEQ ID NO: 658172 - DNA, 120 bp, Artificial Sequence
  ENSG00000183955_6 (sequence is synthesized)
gaagattgacctcatcgatggcaaaggcaggggtgtgattgccaccaagcagttctcccggggtgactttgtggtggaataccacggggacctcatcgagatcaccgacgccaagaaacg

SEQ ID NO: 658173 - DNA, 120 bp, Artificial Sequence
  ENSG00000183955_7 (sequence is synthesized)
ggaggctctgtacgcacaggacccttccacgggctgctacatgtactattttcagtatctgagcaaaacctactgcgtggatgcaactagagagacaaatcgcctaggaagactgatcaa

SEQ ID NO: 658174 - DNA, 120 bp, Artificial Sequence
  ENSG00000183955_8 (sequence is synthesized)
tcacagcaaatgtgggaactgccaaaccaaactgcacgacatcgacggcgtacctcacctcatcctcatcgcctcccgagacatcgcggctggggaggagctcctgtatgactatgggga

SEQ ID NO: 658175 - DNA, 120 bp, Artificial Sequence
  ENSG00000183955_9 (sequence is synthesized)
ccgcagcaaggcttccattgaagcccacccgtggctgaagcattaaccggtgggccccgtgccctccccgccccactttcccttcttcaaaggacaaagtgccctcaaagggaattgaat

SEQ ID NO: 658176 - DNA, 120 bp, Artificial Sequence
  ENSG00000183955_10 (sequence is synthesized)
tttttttttacacacttaatcttagcggattacttcagatgtttttaaaaagtatattaagatgccttttcactgtagtatttaaatatctgttacaggtttccaaggtggacttgaaca

SEQ ID NO: 658177 - DNA, 120 bp, Artificial Sequence
  ENSG00000183955_11 (sequence is synthesized)
caaaacttttatattctagttgtttttgtactttttttgcatacaagccgaacgtttgtgcttcccgtgcatgcagtcaaagactcagcacaggttttagaggaaatagtcaaacatgaa

SEQ ID NO: 658178 - DNA, 120 bp, Artificial Sequence
  ENSG00000183955_12 (sequence is synthesized)
ctaggaagccaggtgagtctcctttctccagtggaagagccgggaccttccccctgcacccccgacatccagggacggggtgtgaggaagacgctgcctcccaatggcctggacgggatg

SEQ ID NO: 658179 - DNA, 120 bp, Artificial Sequence
  ENSG00000183955_13 (sequence is synthesized)
tttccaagctcttgttcccctaacgtctcaacaggcgctcactgaagtgtatgaatattttttaaaaaggtttttgcagtaagctagtcttcccctctgctttctcgaaagcttactgag

SEQ ID NO: 658180 - DNA, 120 bp, Artificial Sequence
  ENSG00000183955_14 (sequence is synthesized)
ccccgggccccaagcacgggccgggcatagatttcctcttccacaagctgccgcttttctgggcaccttgaagcatcagggcgtgaaatcaaactagatgtgggcagggagagggttgct

SEQ ID NO: 658181 - DNA, 120 bp, Artificial Sequence
  ENSG00000183955_15 (sequence is synthesized)
tacctgccctgctggggcagggtttcctgaaactgggttaattctttatagaaatgtgaacactgaatttattttaaaaaataataataaaaatttaaaaaaattaaaaataaaaaaaac

SEQ ID NO: 658182 - DNA, 77 bp, Artificial Sequence
  ENSG00000183955_16 (sequence is synthesized)
atttaaaaaaattaaaaataaaaaaaaccacagaaaacaactttacatgtatataggtcttgaagtgagtgaagtgg

SEQ ID NO: 658183 - DNA, 120 bp, Artificial Sequence
  ENSG00000183955_17 (sequence is synthesized)
aaaaataaagttttgtagtgggaccagaaattacttacctgacatccacccccattccccctcatcctgctggggttgaaagttccagacctgctgtcgaggccttgtgtttgtcagaca

SEQ ID NO: 658184 - DNA, 120 bp, Artificial Sequence
  ENSG00000183955_18 (sequence is synthesized)
cccagtgtcctcctgcaaggacgcaactgtgagctgaggtgtgagcctaggagcccaggacccctgaccccggccgctgctgccagcctcagaaaggcacccaggtgtgcaggggagcac

SEQ ID NO: 658185 - DNA, 120 bp, Artificial Sequence
  ENSG00000183955_19 (sequence is synthesized)
acagggcccggcagcccccaggaatcaaggatagggctaaggttttcaccttaactgtgaaggcaggaggaataggtgactgcttcctcccgcccttcacagaactgattctcacacact

SEQ ID NO: 658186 - DNA, 120 bp, Artificial Sequence
  ENSG00000183955_20 (sequence is synthesized)
gtcccttcagtccagggggccggggctcaggagccatgacctggtgtctcctgcccaccctggtcccaggtaaatgtgaatggagacaggtatgagaggctgtcctcgtctttgattccc

SEQ ID NO: 658187 - DNA, 120 bp, Artificial Sequence
  ENSG00000183955_21 (sequence is synthesized)
ccccaaccccacctcgggcctcacgacggtgctacctaagaaagtcttccctcccaccccccgctagcctggtcagtggtcagcaaattggaagaggatccgatgggagtgtaaatgtga

SEQ ID NO: 658188 - DNA, 120 bp, Artificial Sequence
  ENSG00000183955_22 (sequence is synthesized)
gacacaatgtcttgattatacctgtttgtggtttagctttgtatttaaacaaggaaataaacttgaaaattatttgtcatcataaaaatgaaacaaattaaaatatttattgccaggcaa

SEQ ID NO: 658189 - DNA, 80 bp, Artificial Sequence
  ENSG00000183955_23 (sequence is synthesized)
cccggccctcccggctgcgcgggcggctcaccagagccggggcctcgaaatatggctgcggcgggaggcgccgtcgcggc

SEQ ID NO: 658190 - DNA, 120 bp, Artificial Sequence
  ENSG00000183955_24 (sequence is synthesized)
aaatggcctcgttctgatcccagctggtcgggttgcagaagcctctgtcctctgcaagaatgcacatatgtatttatccaaccttttcagtctcagattcgagaggtttgagccatgttc

SEQ ID NO: 658191 - DNA, 120 bp, Artificial Sequence
  ENSG00000183955_25 (sequence is synthesized)
cccagggtgtgtgccctgttggtttgacaggttttccctgctttcacaagagttagcatatccttcaagcttgattgtcttgcttagttgcaaaaataacatacctgacccacaattaga

SEQ ID NO: 658192 - DNA, 120 bp, Artificial Sequence
  ENSG00000183955_26 (sequence is synthesized)
gaggctcacaagtgctgaaagtgcagaagtcatgaattcaggttgtacagaccaggcaattgcagacctaactaatgtgttcatgtagggaactgacttccttcccttttatgagctggc

SEQ ID NO: 658193 - DNA, 120 bp, Artificial Sequence
  ENSG00000183955_27 (sequence is synthesized)
tcatgtagggaactgacttccttcccttttatgagctggccttgaccccatttctttttctttttttgagacggatttccgctctcgtccctcaggctgaagtgcaatggcacgatctca

SEQ ID NO: 658194 - DNA, 120 bp, Artificial Sequence
  ENSG00000183955_28 (sequence is synthesized)
agatccggtcggctcggagcccagggctccagccgggctactcacgctccggaggcggagcttcagcagcgggagggggaggaatctggggcctcccaatggcagctcgggtgtcttcca

SEQ ID NO: 658195 - DNA, 120 bp, Artificial Sequence
  ENSG00000183955_29 (sequence is synthesized)
tcgcagccattcaacgtctggcgacggtcaaatttaaacacccctcccacctcctccgccgggacctgtcgggaaagcgtttgcagttattgcggcggctggacacgccccgccgccgaa

SEQ ID NO: 658196 - DNA, 80 bp, Artificial Sequence
  ENSG00000183955_30 (sequence is synthesized)
gtgggcggctgcgagcgggcgggagggctgcggaggacgcgccgcctgcgcctccttcccttcgtgcctcgccccgggcg

SEQ ID NO: 658197 - DNA, 120 bp, Artificial Sequence
  ENSG00000183955_31 (sequence is synthesized)
atcccaggcggtgacagagtggagccatggctagagggcttcctaccggtcaagtacagcccttctgggtttgacacctggccccatcacttcctagttctgtggcccgggacaaacccc

SEQ ID NO: 658198 - DNA, 120 bp, Artificial Sequence
  ENSG00000183955_32 (sequence is synthesized)
cgccgggcacacccgagggcctggcctggcgcgttcaccgctgctgatttcgtctggcacagaccgggttcccaaaatatccgcagagccagcggaaaaaggagccgggcgggctggcgg

SEQ ID NO: 658199 - DNA, 120 bp, Artificial Sequence
  ENSG00000183955_33 (sequence is synthesized)
ccgaatgcgctggctgtggctcctgctcttcccagattccccagtcaccctgagagaagtcctcccgtcgcagccctggaggctgcggggctgcagtgatttgagaggggagaacgtatt

SEQ ID NO: 658200 - DNA, 120 bp, Artificial Sequence
  ENSG00000183960_0 (sequence is synthesized)
gctcttggggctcctcctgccacagccggggcggctggaactctctccctttctccctccatccttccacttcccctgctcggccccgccgtcaggccgggtcccccttccctgccgtca

SEQ ID NO: 658201 - DNA, 120 bp, Artificial Sequence
  ENSG00000183960_1 (sequence is synthesized)
tcaggttccccttctcccttcttggcactttcctttcgaaccatccttctggacaaactttgatggagaatttcacaccacgctggaaaaatgccggttatgaaaggattactggcgccg

SEQ ID NO: 658202 - DNA, 120 bp, Artificial Sequence
  ENSG00000183960_2 (sequence is synthesized)
caaaacaccttcctggacaccatcgccacccgttttgacggaacacatagcaacttcatccttgccaatgcccaggtggctaagggtttccccatagtctactgttccgatggcttctgc

SEQ ID NO: 658203 - DNA, 120 bp, Artificial Sequence
  ENSG00000183960_3 (sequence is synthesized)
gagcttgctggatttgcccgaactgaagtcatgcagaagagttgtagctgcaagttcttatttggggttgaaaccaatgagcaactgatgcttcaaatagaaaagtcactggaggagaaa

SEQ ID NO: 658204 - DNA, 120 bp, Artificial Sequence
  ENSG00000183960_4 (sequence is synthesized)
acagaattcaaaggagaaattatgttctacaagaaaaacgggtctccattttggtgcctactggatattgttcccataaagaatgaaaaaggagatgtagtactttttctggcctcgttc

SEQ ID NO: 658205 - DNA, 120 bp, Artificial Sequence
  ENSG00000183960_5 (sequence is synthesized)
aaagatataacagatacaaaagtgaagattactccagaagataaaaaagaagacaaagtcaaaggaagatcaagagcagggacccactttgactcagcccggagacggagtcgagcagtc

SEQ ID NO: 658206 - DNA, 120 bp, Artificial Sequence
  ENSG00000183960_6 (sequence is synthesized)
ctttatcacatctctgggcacctgcaaagaagagaaaagaacaaattgaaaataaataacaatgtttttgtagataaaccagcatttccggagtataaagtttctgatgcaaaaaagtcc

SEQ ID NO: 658207 - DNA, 120 bp, Artificial Sequence
  ENSG00000183960_7 (sequence is synthesized)
aaattcatacttctgcattttagcacttttaaagctggctgggactggcttattttgttggcaacgttttatgttgctgtgactgtaccttacaacgtttgctttattggcaatgacgac

SEQ ID NO: 658208 - DNA, 120 bp, Artificial Sequence
  ENSG00000183960_8 (sequence is synthesized)
ctgtccacaactcggagcacaaccgtcagtgacattgcagtggagattctttttattatagatattattttaaatttccgaacaacttatgtcagcaagtctggccaagttatctttgaa

SEQ ID NO: 658209 - DNA, 120 bp, Artificial Sequence
  ENSG00000183960_9 (sequence is synthesized)
gcaagatcaatttgcatccactatgtcacaacctggttcatcattgatttaatcgctgccctgccttttgatcttctgtatgctttcaacgtcacagtggtgtctctcgtgcatcttcta

SEQ ID NO: 658210 - DNA, 120 bp, Artificial Sequence
  ENSG00000183960_10 (sequence is synthesized)
aagacagtgcgcctcttgcgtcttttgcgtctgctgcagaagttagaccgctattcccaacacagtactatcgtcctgactctgctcatgtccatgtttgcactccttgcacactggatg

SEQ ID NO: 658211 - DNA, 120 bp, Artificial Sequence
  ENSG00000183960_11 (sequence is synthesized)
gcgtgtatctggtacgtcattggaaaaatggagagggaagacaacagccttctgaagtgggaagttggttggcttcatgagttgggaaagagactggaatctccatactatggcaacaat

SEQ ID NO: 658212 - DNA, 120 bp, Artificial Sequence
  ENSG00000183960_12 (sequence is synthesized)
accttggggggcccgtcgatccgaagtgcctatattgccgctctgtacttcacgctgagcagcctcaccagcgtgggttttgggaacgtctctgctaatacagatgcagaaaagatcttc

SEQ ID NO: 658213 - DNA, 120 bp, Artificial Sequence
  ENSG00000183960_13 (sequence is synthesized)
tccatctgcaccatgctgattggtgccttgatgcacgccttggtgtttggaaacgtgacagcaatcatacagaggatgtactccagatggtccctctatcacactagaactaaggatctg

SEQ ID NO: 658214 - DNA, 120 bp, Artificial Sequence
  ENSG00000183960_14 (sequence is synthesized)
aaagatttcatccgtgtccatcacttgccccaacaactcaagcagaggatgctcgaatattttcaaacaacctggtcagtcaacaatggaatagattcaaatgagcttttgaaagacttt

SEQ ID NO: 658215 - DNA, 120 bp, Artificial Sequence
  ENSG00000183960_15 (sequence is synthesized)
ccagatgaactgcgttctgacatcactatgcacttgaacaaggagatcttacagttgtccctttttgaatgtgccagccggggctgcctcaggtctctgtctctacacatcaaaacctct

SEQ ID NO: 658216 - DNA, 120 bp, Artificial Sequence
  ENSG00000183960_16 (sequence is synthesized)
ttctgtgctccgggggagtatctgctgcgtcaaggggatgctttgcaggccatctactttgtatgctcgggctccatggaagttcttaaagacagcatggtgctggctattcttgggaaa

SEQ ID NO: 658217 - DNA, 120 bp, Artificial Sequence
  ENSG00000183960_17 (sequence is synthesized)
ggggatttaattggagcaaatctatcaattaaggaccaagtgatcaagaccaatgcagatgtaaaggctttaacctactgtgatctccagtgtatcatcctcaaaggactctttgaagtg

SEQ ID NO: 658218 - DNA, 120 bp, Artificial Sequence
  ENSG00000183960_18 (sequence is synthesized)
ctagacctttacccagaatatgctcacaaattcgtggaagacattcagcatgacctcacatacaacctccgagaaggtcatgagagtgatgtgatatcaagactatcaaacaaatctatg

SEQ ID NO: 658219 - DNA, 120 bp, Artificial Sequence
  ENSG00000183960_19 (sequence is synthesized)
gtctcacagtcagagcccaagggaaatggcaacatcaacaagcgactcccatccattgtggaagatgaggaagaggaggaggagggggaggaagaggaggcagtctccctctctcccatc

SEQ ID NO: 658220 - DNA, 120 bp, Artificial Sequence
  ENSG00000183960_20 (sequence is synthesized)
tgcacaaggggatcttcttcgcgcaacaagaaggttggaagcaataaagcctacctgggcttaagcttaaagcaactggcctcgggaacggtgccctttcactcgcctatcagagtctcc

SEQ ID NO: 658221 - DNA, 120 bp, Artificial Sequence
  ENSG00000183960_21 (sequence is synthesized)
cccccaaccataataaaaggaaagagaagaacttgaaattgcaactttcaactttgaataatgctggacccccagacctcagtccaaggattgttgatggaattgaagatggaaacagca

SEQ ID NO: 658222 - DNA, 120 bp, Artificial Sequence
  ENSG00000183960_22 (sequence is synthesized)
gtgaagaaagtcagacttttgattttggctctgaacgaatcagatcagagcccagaatttctcctcctcttggagatccagagattggagctgctgttctcttcatcaaagcagaggaga

SEQ ID NO: 658223 - DNA, 120 bp, Artificial Sequence
  ENSG00000183960_23 (sequence is synthesized)
ccaagcagcagataaacaaactcaacagtgaggtaacaacattgactcaggaagtttctcagttgggtaaagacatgagaaatgtgatccagcttctggaaaacgttctgtcacctcagc

SEQ ID NO: 658224 - DNA, 120 bp, Artificial Sequence
  ENSG00000183960_24 (sequence is synthesized)
agccatcacggttttgctctttgcacagcacctctgtgtgtccctccagggagagcttacagaccagaacgagctggagtgcacaccagccttgcctacacttgcaaacaggcggggctg

SEQ ID NO: 658225 - DNA, 120 bp, Artificial Sequence
  ENSG00000183960_25 (sequence is synthesized)
cttatacccaagcacaactttgtagcagtaatatcacctcagacatttggagtgtggatccctcctctgtggggagcagcccccaacgaactggagctcatgagcaaaatcctgcagaca

SEQ ID NO: 658226 - DNA, 120 bp, Artificial Sequence
  ENSG00000183960_26 (sequence is synthesized)
gtgaactttatcattctccaagccttgattattcaccttcccactaccaggttgtccaagaaggtcatttgcaatttttaaggtgcatctctccacattcagattctacgttgacgcctc

SEQ ID NO: 658227 - DNA, 120 bp, Artificial Sequence
  ENSG00000183960_27 (sequence is synthesized)
tgcagtccatttcagcaactctctcatcttctgtctgctcctcttcggaaacatctttgcacctagttctcccaagcagatcagaggagggcagcttcagtcagggaactgtgagttcct

SEQ ID NO: 658228 - DNA, 120 bp, Artificial Sequence
  ENSG00000183960_28 (sequence is synthesized)
tcagtctggaaaacttaccaggatcttggaaccaggaaggaatggcatcagcttctacaaaacctttggagaaccttccactggaagttgtcacaagcacagcagaagtgaaagataaca

SEQ ID NO: 658229 - DNA, 120 bp, Artificial Sequence
  ENSG00000183960_29 (sequence is synthesized)
aagccataaatgtatgatattagtgcccatgatgcagcagctaatttcaaacctaccactgcatgacagttttagtttgcctttttgcctctggtgggcatgaagactgagcaaagctgg

SEQ ID NO: 658230 - DNA, 120 bp, Artificial Sequence
  ENSG00000183960_30 (sequence is synthesized)
gaatcctgcagaaaagagtgtgaggagccagggaaaggcagaaccacctccatgctgtagcaaacaatttctagatactagaagcataatagaaacatttttctgtacaggtattaaact

SEQ ID NO: 658231 - DNA, 120 bp, Artificial Sequence
  ENSG00000183960_31 (sequence is synthesized)
actggtctgtttgacagactttggtaacaatccaaagaccctgagggtctgagcagctagaagtcctagacaaagaacttgtggatgacttttgtcccatgtggcttttgtgaagtatgg

SEQ ID NO: 658232 - DNA, 120 bp, Artificial Sequence
  ENSG00000183960_32 (sequence is synthesized)
caaaggtttttcatgagtgcctgattgttattcctgaacaatatccatagcactgttggcctcaggagtgcacagctcctgctgatgtatttttctttttgtgaaggcaaagggacaatt

SEQ ID NO: 658233 - DNA, 120 bp, Artificial Sequence
  ENSG00000183960_33 (sequence is synthesized)
atcactgcatgtcatctcctagacaatcagtcaaatagagctggtggccagtggttagctattcgcacgttatttgccatgtaaatgaaaacgtctttatttatcaaaaaaacacagagg

SEQ ID NO: 658234 - DNA, 120 bp, Artificial Sequence
  ENSG00000183960_34 (sequence is synthesized)
ctatttttatatccttggtatgaaatatgtatttaaactatttaaatatttataaagaaatgaatgttttcttttcattttggtaaaaaaaaagcttgctgttttaacaagaaatgcact

SEQ ID NO: 658235 - DNA, 120 bp, Artificial Sequence
  ENSG00000183960_35 (sequence is synthesized)
actgttgtgtatagtagatcaaaaattatttattactaagaggatgtagtttccaaaggaatcccccattttttctgcatgcagtttgcaacaaatgtattctcatgcttctggattata

SEQ ID NO: 658236 - DNA, 120 bp, Artificial Sequence
  ENSG00000183960_36 (sequence is synthesized)
aaagaaaagtgaagtcatattttgttaatgaaataaaaacatggactgagtgtcaactacatgagctttggcatggggatagagaggctccatctaggctctgccaactcatgtcaatga

SEQ ID NO: 658237 - DNA, 120 bp, Artificial Sequence
  ENSG00000183960_37 (sequence is synthesized)
catgatttaaggtcgttgtgccagcagaaatgtctctcctctaggtatcgtattttgttgctcaagaatccaaaatgggtctgtggacatagggcaatttggggctcaaagtgagggaga

SEQ ID NO: 658238 - DNA, 120 bp, Artificial Sequence
  ENSG00000183960_38 (sequence is synthesized)
aaacctgggtgtgtcctttcccagtgcttttcttttacaagaggtagtagactagtggaaatccccaaatggagccaagacttctgagctataacttgtgggagtaataccagcttgcaa

SEQ ID NO: 658239 - DNA, 120 bp, Artificial Sequence
  ENSG00000183960_39 (sequence is synthesized)
tgggtcagcactttaccttttttctttaaggctcccaacaatgctatacagcgcagttgtttccattcctatttttaataaatctcaggggaagcctcagagattacacagttaggatgc

SEQ ID NO: 658240 - DNA, 120 bp, Artificial Sequence
  ENSG00000183960_40 (sequence is synthesized)
tgacacagtctagaatccataatgctccctacatctcacactaacaggcaaattcagatgctgggattggcaatgatttaagcaccttcactaaagtcttattttatgttttagaacagt

SEQ ID NO: 658241 - DNA, 120 bp, Artificial Sequence
  ENSG00000183960_41 (sequence is synthesized)
tacagtctaattgtcttggacattttgggaagatatattgggttcacattctggagttctctttattttccaccacaaaaaataatctgagaattgtatcattaaaagtatctaaacaca

SEQ ID NO: 658242 - DNA, 120 bp, Artificial Sequence
  ENSG00000183960_42 (sequence is synthesized)
caaagaagagaaaagaacaaattgaaaataaataacgtacttcaggatccctgaacacatcacattaatctgcccttccctcaatgagtgagacaagaacacaacattgtgacctacaaa

SEQ ID NO: 658243 - DNA, 120 bp, Artificial Sequence
  ENSG00000183960_43 (sequence is synthesized)
tatcagaagtgaaaagcataccaacttctttattcctttacatttttaattattcatgaatcccaatccatcttctttcacttgctttggcttgtgttttcacaatgccaatttggattg

SEQ ID NO: 658244 - DNA, 120 bp, Artificial Sequence
  ENSG00000183960_44 (sequence is synthesized)
accgaagttttatattaacttgctgcttattcgatcaggtggatttattttccttcttattgtctcttttcaaaggaatcaattcttacgataatttaacagtgtaatctgggataatta

SEQ ID NO: 658245 - DNA, 120 bp, Artificial Sequence
  ENSG00000183960_45 (sequence is synthesized)
tattaatcaagtttctgtttcccttaacatcaataaagttaaaaaattccatcaaaggggttatctttatacttccagaaacaccccagactgccactataaaaacagtattatataaat

SEQ ID NO: 658246 - DNA, 120 bp, Artificial Sequence
  ENSG00000183960_46 (sequence is synthesized)
caacgaaccatttcatcaacccaccagccaaacctgtaaccaacattttagtagtgattaattggtttctcctctcttcgcataatcaccagtgggtccaaattccatatcttctgtcct

SEQ ID NO: 658247 - DNA, 120 bp, Artificial Sequence
  ENSG00000183960_47 (sequence is synthesized)
gactaggactctctgtgagaaggaagtcacaatgagttatatgttttcctgctagaggcttttttaatttgttctgtttctccagacttcttatcagctgattattcagtagcacataat

SEQ ID NO: 658248 - DNA, 120 bp, Artificial Sequence
  ENSG00000183960_48 (sequence is synthesized)
atttcctcttctgtatgctggatggccaaacagcaggagacagtaggaagagcatccctgctgtcttgcaaagtaaatcagttagactacacttaccccaatttgatttcctccttcatc

SEQ ID NO: 658249 - DNA, 120 bp, Artificial Sequence
  ENSG00000183963_0 (sequence is synthesized)
cagaatccaggggacggttgctgagcgggcctgggacagcgggtcgcggcacctccggcctgcgcgtgtctaatccgtctgtcgggtcccgaaagagctaagccgagcctgcgccggacg

SEQ ID NO: 658250 - DNA, 120 bp, Artificial Sequence
  ENSG00000183963_1 (sequence is synthesized)
ggtgggctggactgagagaattctctgagctggtgacaggtgccacaggcactggggatctcaccagaaaggaaccgacggagctaggggccagcgagatggcggacgaggccttagctg

SEQ ID NO: 658251 - DNA, 120 bp, Artificial Sequence
  ENSG00000183963_2 (sequence is synthesized)
ggctggatgagggagcccttcggaagctgctggaggtcacagcagatctggcagagcggcggcgcatccgctcagccatccgggaactgcagcggcaggagctggagcgcgaggaggagg

SEQ ID NO: 658252 - DNA, 120 bp, Artificial Sequence
  ENSG00000183963_3 (sequence is synthesized)
ccctggcatccaagcgtttccgtgccgagcggcaggacaacaaggagaactggctgcactctcagcagcgggaagctgagcagcgggctgccctggcacggctggcagggcagctggagt

SEQ ID NO: 658253 - DNA, 120 bp, Artificial Sequence
  ENSG00000183963_4 (sequence is synthesized)
ccatgaacgatgtggaggaattgactgcactgttgcgaagcgctggtgagtatgaggagcgcaagctgatccgagctgccatccgccgtgtacgggctcaggagattgaggctgccacct

SEQ ID NO: 658254 - DNA, 120 bp, Artificial Sequence
  ENSG00000183963_5 (sequence is synthesized)
tggctgggaggttgtacagcgggcgtcccaacagtggctcaagagaggacagcaaggggctagcggcacacaggctggaacagtgtgaggtgccagagcgagaggaacaggaacagcagg

SEQ ID NO: 658255 - DNA, 120 bp, Artificial Sequence
  ENSG00000183963_6 (sequence is synthesized)
cagaggtttcaaagccaacccccacccctgaaggcaccagccaggatgtgaccacagtgacactcctgctgcgagccccacctgggagcacatccagctcacctgcctcacccagcagtt

SEQ ID NO: 658256 - DNA, 120 bp, Artificial Sequence
  ENSG00000183963_7 (sequence is synthesized)
cacccacccctgcctctcctgagcctccattggagcctgccgaggcccagtgccttacagctgaggttccaggcagcccagagccaccccccagcccacccaagaccaccagccctgagc

SEQ ID NO: 658257 - DNA, 120 bp, Artificial Sequence
  ENSG00000183963_8 (sequence is synthesized)
ctcaggagtctccaacgctccccagcactgagggccaggtggtcaacaagcttctgtctggccccaaagagacccctgctgcccagagccccaccagaggcccctctgacaccaagagag

SEQ ID NO: 658258 - DNA, 120 bp, Artificial Sequence
  ENSG00000183963_9 (sequence is synthesized)
cagacgtggctggaccccgaccctgccaacgctccctgtcggtgctcagcccccgccaaccagcccagaaccgagagtccaccccccttgccagcggaccttcctcattccagcgggctg

SEQ ID NO: 658259 - DNA, 120 bp, Artificial Sequence
  ENSG00000183963_10 (sequence is synthesized)
gctctgtgcgggatcgtgtccacaagttcacatctgattctcctatggctgctaggctccaggatggcacaccccaggctgccctaagtcccctgacccccgcaaggctcctgggcccct

SEQ ID NO: 658260 - DNA, 120 bp, Artificial Sequence
  ENSG00000183963_11 (sequence is synthesized)
ccctcaccagcaccacccctgcctcctcctccagcggctcctcctctcggggccccagtgatacctcctcccggttcagcaaggagcaacgaggagtagcccagcccctggcccagcttc

SEQ ID NO: 658261 - DNA, 120 bp, Artificial Sequence
  ENSG00000183963_12 (sequence is synthesized)
gaagctgcccccaggaggagggccccagggggcggggcttggctgctaggccccttgaaaacagagcaggggggcctgtggcacgttcagaggagcctggtgccccgctgcccgtggccg

SEQ ID NO: 658262 - DNA, 120 bp, Artificial Sequence
  ENSG00000183963_13 (sequence is synthesized)
caggccgggtgctgctgcccacaggcaaccagagggcagaactgacactggggctgcgggcgcccccgaccctactcagcaccagtagtgggggcaagagcaccatcacccgtgtcaaca

SEQ ID NO: 658263 - DNA, 120 bp, Artificial Sequence
  ENSG00000183963_14 (sequence is synthesized)
gccctgggaccctggctcggctgggcagtgtcactcatgtcaccagcttcagccatgccccccccagtagccgaggaggctgcagcatcaagatggaagcagagccagcagagcctctcg

SEQ ID NO: 658264 - DNA, 120 bp, Artificial Sequence
  ENSG00000183963_15 (sequence is synthesized)
ctgcagcagtggaagcggccaatggggctgagcagacccgagtgaacaaagcaccagaagggcggagccctctgagcgctgaggagctgatgactattgaggatgaaggagtcttggaca

SEQ ID NO: 658265 - DNA, 120 bp, Artificial Sequence
  ENSG00000183963_16 (sequence is synthesized)
agatgctggatcagagcacggactttgaagagcggaagctcatccgggctgcacttcgtgagctccgacaaaggaagagagaccagcgggacaaggagcgggaacggcggctgcaggagg

SEQ ID NO: 658266 - DNA, 120 bp, Artificial Sequence
  ENSG00000183963_17 (sequence is synthesized)
cacggggccggccaggggaggggcgcggcaacacagccactgagaccaccacgaggcacagccagcgggcagctgatggctctgctgtcagcactgttaccaagactgagcggctcgtcc

SEQ ID NO: 658267 - DNA, 120 bp, Artificial Sequence
  ENSG00000183963_18 (sequence is synthesized)
actccaatgatggcacacggacggcccgcaccaccacagtggagtcgagtttcgtgaggcgctcggagaatggcagtggcagcaccatgatgcaaaccaagaccttctcctcttcctcct

SEQ ID NO: 658268 - DNA, 120 bp, Artificial Sequence
  ENSG00000183963_19 (sequence is synthesized)
catccaagaagatgggcagcatcttcgaccgcgaggaccaggccagcccacgggccggcagcctggcggcgctcgagaaacggcaggccgagaagaagaaagagctgatgaaggcgcaga

SEQ ID NO: 658269 - DNA, 120 bp, Artificial Sequence
  ENSG00000183963_20 (sequence is synthesized)
gtctgcccaagacctcagcctcccaggcgcgcaaggccatgattgagaagctggagaaggagggcgcggccggcagccctggcggaccccgcgcagccgtgcagcgatccaccagcttcg

SEQ ID NO: 658270 - DNA, 120 bp, Artificial Sequence
  ENSG00000183963_21 (sequence is synthesized)
gggtccccaacgccaacagcatcaagcagatgctgctggactggtgtcgagccaagactcgcggctacgagcacgtcgacatccagaacttctcctccagctggagtgatgggatggcct

SEQ ID NO: 658271 - DNA, 120 bp, Artificial Sequence
  ENSG00000183963_22 (sequence is synthesized)
tctgtgccctggtgcacaacttcttccctgaggccttcgactatgggcagcttagccctcagaaccgacgccagaacttcgaggtggccttctcatctgcggagacccatgcggactgcc

SEQ ID NO: 658272 - DNA, 120 bp, Artificial Sequence
  ENSG00000183963_23 (sequence is synthesized)
cgcagctcctggatacagaggacatggtgcggcttcgagagcctgactggaagatgctggtggactgtgtgcccctggtggaggtggacgacatgatgatcatgggcaagaagcctgacc

SEQ ID NO: 658273 - DNA, 120 bp, Artificial Sequence
  ENSG00000183963_24 (sequence is synthesized)
ccaagtgtgtcttcacctatgtgcagtcgctctacaaccacctgcgacgccacgaactgcgcctgcgcggcaagaatgtctagcctgcccgcccgcatggccagccagtggcaagctgcc

SEQ ID NO: 658274 - DNA, 120 bp, Artificial Sequence
  ENSG00000183963_25 (sequence is synthesized)
gcccccactctccgggcaccgtctcctgcctgtgcgtccgcccaccgctgccctgtctgttgcgacaccctcccccccacatacacacgcagcgttttgataaattattggttttcaacg

SEQ ID NO: 658275 - DNA, 120 bp, Artificial Sequence
  ENSG00000183963_26 (sequence is synthesized)
catgcgggtgagaaggtgagtgtgagccctggctcagctcatgtgtgcaggcaggcgtgagcacaagtgtatctgtggattgcatgtgctaatggcagtacgtccacacacgcttctgga

SEQ ID NO: 658276 - DNA, 120 bp, Artificial Sequence
  ENSG00000183963_27 (sequence is synthesized)
tcagagcacggactttgaagagcggaagctcatccgggctgcacttcgtgagctccgacaaaggaagagaggtagagagccagttgccctaccctagatccagctgccccattccccagc

SEQ ID NO: 658277 - DNA, 120 bp, Artificial Sequence
  ENSG00000183963_28 (sequence is synthesized)
tgctcccctcatactctggggtccatttgtggacaccccagcttaataactgccctacccagcttctccttctctagacccagcagttcccttggctattccctgctggatccagctgct

SEQ ID NO: 658278 - DNA, 120 bp, Artificial Sequence
  ENSG00000183963_29 (sequence is synthesized)
ccttccctagctccttctctcccgctggtgaccccagttattctccccaaccagcttctcttctccttcctagacccagatactccctcccgcagctactctctccttggatccagttgc

SEQ ID NO: 658279 - DNA, 120 bp, Artificial Sequence
  ENSG00000183963_30 (sequence is synthesized)
ctctcaaagtactgtcaacgactccttccctgaatccagatactccttctccctgctgctcctctctccctgaagtccattgatggccatcttagcctctgccccatccagcttcccttt

SEQ ID NO: 658280 - DNA, 120 bp, Artificial Sequence
  ENSG00000183963_31 (sequence is synthesized)
tcctggacacaactacttcctcccccagatagttcttccctggacacatctattcattcccttagattctgggttcaattgcttctcctctcaaacactctcaattactcctctgaatct

SEQ ID NO: 658281 - DNA, 120 bp, Artificial Sequence
  ENSG00000183963_32 (sequence is synthesized)
agctgcttctgccagggcccactgatggccaccccagtctctatctctacccacctacttctattttaagcccagttaacccccttcactagcttctctcccagctactcttcccctgga

SEQ ID NO: 658282 - DNA, 120 bp, Artificial Sequence
  ENSG00000183963_33 (sequence is synthesized)
tcagattgcttctcagatcccatcaattgctcccttcctggatctaaatattcctgcctccagctgctcttctcctccaaccaaagacctgctgatggcccacccagctacttcctcact

SEQ ID NO: 658283 - DNA, 120 bp, Artificial Sequence
  ENSG00000183963_34 (sequence is synthesized)
tctagatacccctcctgacttagctactcatgcctatagaaaccctttttggatccatacccctttgagtttagctactccgtattctctagtttctgcctgagtccatcaaacccttcc

SEQ ID NO: 658284 - DNA, 120 bp, Artificial Sequence
  ENSG00000183963_35 (sequence is synthesized)
cacactccattccctgtcaagttatggctgtcccctcaccccagctgctcctagagaggcccttgttacctgtgtcattcatgtttctaacaagccaccctccaccccgtcttgtgtgcc

SEQ ID NO: 658285 - DNA, 120 bp, Artificial Sequence
  ENSG00000183963_36 (sequence is synthesized)
tccttcttagcagagctcctattacccagtacacttcctgccactgtgtggcctcacagggaacatggaaaggctcttggggtgaggaaactgaggctcaaagaggacacaaggcaagcc

SEQ ID NO: 658286 - DNA, 120 bp, Artificial Sequence
  ENSG00000183963_37 (sequence is synthesized)
ctagattccagaatcagtgatgaagtaacagggcctcttgggtggtgggcagggttcaaggccggatcccactcttggagtcccctccttgttgctctgtaggaggccctgagtcaattt

SEQ ID NO: 658287 - DNA, 120 bp, Artificial Sequence
  ENSG00000183963_38 (sequence is synthesized)
ctctaaatgagggaaggagtgatgaggcatgaccatagccttagctgggtggcgctgggcctctcagtagctctgtcccttgaaattgcaaatatgggagttgacaggctgacttggagg

SEQ ID NO: 658288 - DNA, 120 bp, Artificial Sequence
  ENSG00000183963_39 (sequence is synthesized)
aggctcatgttccaactattcactcattgtgcaagctacggggcctctttgtgcccagtgccctaggtctggaataacagaatgctgaggggtagacagcaggggggagttgcccccagg

SEQ ID NO: 658289 - DNA, 120 bp, Artificial Sequence
  ENSG00000183963_40 (sequence is synthesized)
ctgactggaagtgcgtgtacacgtacatccaggaattctaccgctgtctggtccagaaggggctggtaaaaaccaaaaagtcctaacccctgctcggggccccacggtgagaaacgccgc

SEQ ID NO: 658290 - DNA, 120 bp, Artificial Sequence
  ENSG00000183963_41 (sequence is synthesized)
ctctaccacctgccccgtttcaccagaatctgctcagcaaggccagagagggtccagggaggcgggtgggggaagtaaggggggcatttagtcaagccagaggagccagacatagccctg

SEQ ID NO: 658291 - DNA, 120 bp, Artificial Sequence
  ENSG00000183963_42 (sequence is synthesized)
tcttctggcagttcagggcccagcaggtgagaccattctaaatgggcagtgatgacccaggtgggcagcactgtgatgggggaagcccaggggagatgcctgacccaggctgcaggtctg

SEQ ID NO: 658292 - DNA, 120 bp, Artificial Sequence
  ENSG00000183963_43 (sequence is synthesized)
ggccccccatctgaaaaaagtgcaaactaagctgggatctgaacaagttcaggctaaaggagggagagggagttccaggcagaggaatcagcctaggcttagcagggcaagagagctgga

SEQ ID NO: 658293 - DNA, 120 bp, Artificial Sequence
  ENSG00000183963_44 (sequence is synthesized)
aagagagctggagagcacagcacatcaggaagggaagaaacttgagtctggatatgagggaggagggggccacagttagaagtttgaccttctggccgagcacggtggctcatgcctgta

SEQ ID NO: 658294 - DNA, 66 bp, Artificial Sequence
  ENSG00000183963_45 (sequence is synthesized)
aaaatacaaaaattagccaggcgtgtggcgcacacctgtaatcctagcatgagctgaaatcatgcc

SEQ ID NO: 658295 - DNA, 120 bp, Artificial Sequence
  ENSG00000183963_46 (sequence is synthesized)
gaccagctgcaaagactcagacactcagccagagacagcagcccctgccactgccccaccattaccccccatagagtccccaccagcaccatgccgggggtaccagggcctgggcctgag

SEQ ID NO: 658296 - DNA, 120 bp, Artificial Sequence
  ENSG00000183963_47 (sequence is synthesized)
ctggccgcagcccttgaggagcagttgggccgggcactggaggagctgcgggcggtggctgaagcaggccgggtggcagtgacccaggcagccgaggtagctgtagccaccgtggagccg

SEQ ID NO: 658297 - DNA, 120 bp, Artificial Sequence
  ENSG00000183963_48 (sequence is synthesized)
gtggcccgggcagctgaagagctgcgggcagagagagcagcactgagccggcggctggatgcactgagcaggcaggtggaggtgctgagcctacggctgggggtcccacttgtgtccggc

SEQ ID NO: 658298 - DNA, 120 bp, Artificial Sequence
  ENSG00000183963_49 (sequence is synthesized)
cttgagcctgagctggagcccagcgagctgctcctggctgccgccgaccccgaggccctctttcaggctgccgaggatgccgggacccccgtggcccacccacctgccttcagcacccgc

SEQ ID NO: 658299 - DNA, 120 bp, Artificial Sequence
  ENSG00000183963_50 (sequence is synthesized)
ggagagtaaggccacctggtgtcgccctgtgcctgcctgcctgtccgcccacctcctccggctcttccttgagctctctctccgtgtcttcaactgtgccgtcactttctcttctctgcc

SEQ ID NO: 658300 - DNA, 120 bp, Artificial Sequence
  ENSG00000183963_51 (sequence is synthesized)
tgcggctatcaccacccctccatacagcctcccatcccatctcctgatgtccagcccaggccctcacctggtgccccttccccttttttgcagatggcagtggcagcaccatgatgcaaa

SEQ ID NO: 658301 - DNA, 120 bp, Artificial Sequence
  ENSG00000183963_52 (sequence is synthesized)
gtaacaacatggcagctcccatgagaacggcatggttggagtcagaagaggaagaagcagaactgggcaggactccagaccccatcctcccaactccacccactttagtctccatggaga

SEQ ID NO: 658302 - DNA, 120 bp, Artificial Sequence
  ENSG00000183963_53 (sequence is synthesized)
cccaagggcggctttagggcctctggcactgaagatggaatagctttgccttgtggatctgacctcctgggtaccctggctgattccttgtttggtcttggacatgtcagctctctctgg

SEQ ID NO: 658303 - DNA, 120 bp, Artificial Sequence
  ENSG00000183963_54 (sequence is synthesized)
cctggcatccaagcgtttccgtgccgagcggcaggacaacaaggagaactggctgcacccacatcctccacgacctggccatggcagtggtggttacagtcatgatgtctctgcagctct

SEQ ID NO: 658304 - DNA, 120 bp, Artificial Sequence
  ENSG00000183963_55 (sequence is synthesized)
ggggacttgcacgccgcgtgcccctccaccacccgccgggacgccctctgcctcggtcccgagttcgagttcgacctccgccactcagctgggtgtcctggggaccttggtttcttccct

SEQ ID NO: 658305 - DNA, 120 bp, Artificial Sequence
  ENSG00000183963_56 (sequence is synthesized)
ttagatccggacactgaagcaggcggtagcgggtgtcttcctacctggctaccccttcggcgcctagcgcgaggcagggggaaccctgggccagtcctctctcccttgagccacggagga

SEQ ID NO: 658306 - DNA, 120 bp, Artificial Sequence
  ENSG00000183963_57 (sequence is synthesized)
cattctaggaccttcctcggatgaggcttggatgagagatgggatggactagatgactggaatagcttaagagctagagagacaggcttcccaatagatctggtttggagagggagaggg

SEQ ID NO: 658307 - DNA, 120 bp, Artificial Sequence
  ENSG00000183963_58 (sequence is synthesized)
aagatggttaggtcagagctggggccagaaactgagactccaaactccccacttagtggctgttttccttgccccatcactgtgttcccgcccattttgtagagaggattgaaaatagag

SEQ ID NO: 658308 - DNA, 120 bp, Artificial Sequence
  ENSG00000183963_59 (sequence is synthesized)
gcccagaaggagcaaggggattggctgaaggaatgtgagtcagtgacaggtaggggcacactcagatgcccctcagggcctggagccattgtggggggcagtccacatgtgcacacacac

SEQ ID NO: 658309 - DNA, 120 bp, Artificial Sequence
  ENSG00000183963_60 (sequence is synthesized)
actcagagaaggagcacagatgagtggcggatgggcttggtgctatctccagatcatatatggacttaggagctgctgcccagcaagccagcttggagggagaggggcccagcccagccc

SEQ ID NO: 658310 - DNA, 120 bp, Artificial Sequence
  ENSG00000183963_61 (sequence is synthesized)
tgatccagttggaaagtgtgactcagccgtgctgttgctcaagttgcctggtgtttggcctgtcactggggcagcctgagccctgagccctgagccccagtgtaaacaatggctttataa

SEQ ID NO: 658311 - DNA, 120 bp, Artificial Sequence
  ENSG00000183963_62 (sequence is synthesized)
ggtctccagggaagggagtggggcgggagggagcaccaggttggagagggcggtcgggatccccaggacgatagccacagctggaagaagcttcagagagaggctgcctttgcatcatgg

SEQ ID NO: 658312 - DNA, 120 bp, Artificial Sequence
  ENSG00000183963_63 (sequence is synthesized)
tacagctcgggaaacaagcccagtctgggatagggatgaccctaggggcacgtggcacatcagcagcagacccagaaccctctcactcatcctaaattcttgtaaggtctcaaatgagat

SEQ ID NO: 658313 - DNA, 120 bp, Artificial Sequence
  ENSG00000183963_64 (sequence is synthesized)
agagaataactgtcctgttctaaagagggggaaacagtcatagaaaagggccttatctagcacccacaactggttagggatacagtctggactaaaacagaggtgttcggtgttctgcct

SEQ ID NO: 658314 - DNA, 120 bp, Artificial Sequence
  ENSG00000183963_65 (sequence is synthesized)
cccaggtttcttctctgaaggagtccaggtgagctgggggtaggcccagccctaccacagttctgagtttgtccataagggcacgagatgggaggtggtcttgggttctcaggtgtcttg

SEQ ID NO: 658315 - DNA, 120 bp, Artificial Sequence
  ENSG00000183963_66 (sequence is synthesized)
agaataaggagcaattgttgccattatgccttccctgccataggaaactcattcagcaacattgaatgcttgctatgtcccaggtatggcagataggagggatcaaggcagaagaggtct

SEQ ID NO: 658316 - DNA, 120 bp, Artificial Sequence
  ENSG00000183963_67 (sequence is synthesized)
acaacccactcactccagagtggggaaaaggctttgccaacacccagaactgggggcctgggtcccatgcggcctagcctgcacttactaagccatggggcttgaaacaaatggctcctc

SEQ ID NO: 658317 - DNA, 120 bp, Artificial Sequence
  ENSG00000183963_68 (sequence is synthesized)
tgctctgtgactcagtttccttatctgtgaagggcagctagcattctgaaggatggccagaagggtggtccccccgagcatggcatagatggtccattggtattggctgggatcctcatc

SEQ ID NO: 658318 - DNA, 120 bp, Artificial Sequence
  ENSG00000183963_69 (sequence is synthesized)
tgcctcctctgctctacccaaggcaggtgataagggttagagaacccctctgctgcccacacgttccctggcctccatctccagcagcagggttatccccaccccctgtcaaagaatagg

SEQ ID NO: 658319 - DNA, 120 bp, Artificial Sequence
  ENSG00000183963_70 (sequence is synthesized)
ggtccctgggcctctcaacaggaagtaccagatcaggcagctagcagacaatcatcggtggaccacagggccactagagtgagacctatccatagataaagattggccagtgatgaagcc

SEQ ID NO: 658320 - DNA, 120 bp, Artificial Sequence
  ENSG00000183963_71 (sequence is synthesized)
catctgggtgcaaaggccgagctgagaggcttctaccaactggagtgtgccagtgagggtgagcagaaggtggtctccagggagaacatgggcagggtttggagccagcacctccccagg

SEQ ID NO: 658321 - DNA, 120 bp, Artificial Sequence
  ENSG00000183963_72 (sequence is synthesized)
gttggaggaagcagacccaggacctgcctgactgggatggggctctcttctgccatctccgcctccacctgcctagctctgctcccccgccccgagagatgcctccaggcttgggtagat

SEQ ID NO: 658322 - DNA, 120 bp, Artificial Sequence
  ENSG00000183963_73 (sequence is synthesized)
gaagccaggggcttcctgccttcctggaaggcttttccctgtctggagtttatgaaagaccagcaggcaatgcggcaataaaaaagaccttggggtagaggggcgccacgagaggcgggt

SEQ ID NO: 658323 - DNA, 120 bp, Artificial Sequence
  ENSG00000183963_74 (sequence is synthesized)
ctgcgtctcctgggggtggggagggggtttgaaccgaaggcagctccgcaaggtctccaactccagcagggatcctcagaggttcttcttccgacctcccaccccacccgcccgcagcaa

SEQ ID NO: 658324 - DNA, 120 bp, Artificial Sequence
  ENSG00000183963_75 (sequence is synthesized)
ttgccaggccctggcttctcaatccaggtccctgccctccctgttttgaggtttagacaggatgagagtccatcccaggccacacagcagactggcggccaagctggcagggctggaacc

SEQ ID NO: 658325 - DNA, 120 bp, Artificial Sequence
  ENSG00000183971_0 (sequence is synthesized)
ctggcgtggcgcccaggggagcggggggctcccgcgagccggccgcggctggcactgctgctgcttctgctcctgctgccgctgccctccggcgcgtggtacaagcacgtggcgagtccc

SEQ ID NO: 658326 - DNA, 120 bp, Artificial Sequence
  ENSG00000183971_1 (sequence is synthesized)
acaagcacgtggcgagtccccgctaccacacggtgggccgcgccgctggcctgctcatggggctgcgtcgctcaccctatctgtggcgccgcgcgctgcgcgcggccgccgggcccctgg

SEQ ID NO: 658327 - DNA, 120 bp, Artificial Sequence
  ENSG00000183971_2 (sequence is synthesized)
gctcctctcctgctgccctcgtgggttcaggagctgtgggagacgcgacgcaggagctcccaggcagggatccccgtccgtgcgccccggagcccgcgcgccccagagcctgcgctggaa

SEQ ID NO: 658328 - DNA, 120 bp, Artificial Sequence
  ENSG00000183971_3 (sequence is synthesized)
ccggagtccctggacttcagcggagctggccagagacttcggagagacgtctcccgcccagcggtggaccccgcagcaaaccgccttggcctgccctgcctggcccccggaccgttctga

SEQ ID NO: 658329 - DNA, 120 bp, Artificial Sequence
  ENSG00000183971_4 (sequence is synthesized)
cccgtggcgcctccgcgcctgacccaggaggagtggccgcgcgcttccaggagccgctcatagaccccgcctgccgtccggtcaataaaatccgcctgactcctgcgcccccgcatgcga

SEQ ID NO: 658330 - DNA, 120 bp, Artificial Sequence
  ENSG00000183971_5 (sequence is synthesized)
ggccgctctaccatgagccgaccgctcgaaggtccgcgcggccacgcggccagccccgggctcctctgggccacgcgtgtcacgtcaacactcgccgggctccacgaactggcgttgtca

SEQ ID NO: 658331 - DNA, 120 bp, Artificial Sequence
  ENSG00000183977_0 (sequence is synthesized)
attccacacagggagctctaccatcaagtgaggggaatgcccaccatcgctatcatcaccatcaccactacttctgccacagccatcacattcacctctacctccaccatcaccatcact

SEQ ID NO: 658332 - DNA, 120 bp, Artificial Sequence
  ENSG00000183977_1 (sequence is synthesized)
actcaagttggagaaatagaggccaggggaaggggataaagggagggcaaagaaaggtaattccaaaggaacatgagcaccaataatgctttaagagtgttttggaaatcaagagaatgg

SEQ ID NO: 658333 - DNA, 120 bp, Artificial Sequence
  ENSG00000183977_2 (sequence is synthesized)
aatatgaaaacatcaacatttgattcagatgaggatattctacttttacccaaaagaaaacgttttagaaagaaaaagtcaagaccagtgagacacaccaaacgccatgaagaggagcag

SEQ ID NO: 658334 - DNA, 120 bp, Artificial Sequence
  ENSG00000183977_3 (sequence is synthesized)
gtctatgagcaagggaccacattaccctgttccatatgcaagcacgaaattgacctaactggtatttttctccataagaagcaacatgtagctctggccacgctgggtttccaatggatg

SEQ ID NO: 658335 - DNA, 120 bp, Artificial Sequence
  ENSG00000183977_4 (sequence is synthesized)
ggtagaaagaaaccacagccctcagtgattgctgttcagagacagttcatgatttctaaactattgtcatcttttatgttcactgaaaaaaccctacagagcattaataatgcttttgag

SEQ ID NO: 658336 - DNA, 120 bp, Artificial Sequence
  ENSG00000183977_5 (sequence is synthesized)
ctgctttggaaaaaacaaataccagcatactataagatttttgataacattgacaggagtgtcatatattctcaaaaaatatgtcatctgttaattaaaggagtgggcatttgtgaagac

SEQ ID NO: 658337 - DNA, 120 bp, Artificial Sequence
  ENSG00000183977_6 (sequence is synthesized)
aggaattctacatggaaagctgacatgaatgataaattcactgtagtgagtaattttggtaacaaacctaatgtgtgtttttttggtttgtttgatggacatcacggtgcctcagcggca

SEQ ID NO: 658338 - DNA, 120 bp, Artificial Sequence
  ENSG00000183977_7 (sequence is synthesized)
gagttgacatcaatggaactcccagttttacttctccatcagctttccaaatttgatccttcttaccaaatgacaactgatgagcaacaaataatcaattccttttacactgtgtttaga

SEQ ID NO: 658339 - DNA, 120 bp, Artificial Sequence
  ENSG00000183977_8 (sequence is synthesized)
acaaagcctttgcaaaagcattttggagaatggataggcttttaggtcttggaagaaaagaagtgtccagggttcaatggagtggctgctctgcagttacttgtatattggaaggcaaac

SEQ ID NO: 658340 - DNA, 120 bp, Artificial Sequence
  ENSG00000183977_9 (sequence is synthesized)
ctaaaagtccttatgctcataagaattggaaaagaaaaaatacccatgatgggttggcagagagctccccttcccaggagatgccaaaaataatttctggaatattacatgttgcaaaca

SEQ ID NO: 658341 - DNA, 120 bp, Artificial Sequence
  ENSG00000183977_10 (sequence is synthesized)
ctggtaatgtgcaagcagtcttatgcagaaatgggaaaggtttttgcctaaccaaagaacatactacacgaaacacaaatgaaagaagaagaatacttcagaatggagcagtcattagtt

SEQ ID NO: 658342 - DNA, 120 bp, Artificial Sequence
  ENSG00000183977_11 (sequence is synthesized)
caaatgaaccatacgggcttgtagaggggcaagtaaaaactacacgaggacttggatttcatggaaatctcaagctgaaaaaatccattatcccagcacctcaaactatttctgtcccta

SEQ ID NO: 658343 - DNA, 120 bp, Artificial Sequence
  ENSG00000183977_12 (sequence is synthesized)
tagatgacctatgtcaattccttattgtagctactaatggactttgggaagttttggataaagaggaagttactgccctggcaatgacaacatttcacatgtataaagaaacatactgtc

SEQ ID NO: 658344 - DNA, 120 bp, Artificial Sequence
  ENSG00000183977_13 (sequence is synthesized)
ctatcatacctaacaaatcaccatccaaagggcctctgcttttttcaaccagtgaaccaaaccttactaaatcacagagtaatatccacgtattgtttcagtataaatctgtatctgaag

SEQ ID NO: 658345 - DNA, 120 bp, Artificial Sequence
  ENSG00000183977_14 (sequence is synthesized)
tacgtgtgtcaactacaaattccaaagaaaatttatccgattcaaactattctaaatactgtatttataaccctgagaatgtagaaacatttccagcagaaacgactcatcgtaaacctt

SEQ ID NO: 658346 - DNA, 120 bp, Artificial Sequence
  ENSG00000183977_15 (sequence is synthesized)
gcagtgaaaaagtaactgacagaccaactagtgtaaatgatgtggcaacaaatgaaaaagaatcagacactaagagtttctatgaaggcgcagctgagtatgttagccatgaacttgtaa

SEQ ID NO: 658347 - DNA, 120 bp, Artificial Sequence
  ENSG00000183977_16 (sequence is synthesized)
atgctgctttactggctggctccagagacaacattacagttatggtaatatttctcaatggaagtgaatatcagcttctgacataaaaaaataaagttccaattatccagagcaccaaaa

SEQ ID NO: 658348 - DNA, 120 bp, Artificial Sequence
  ENSG00000183977_17 (sequence is synthesized)
agaatgtttttgaaaagcccaaattaatgtgattctgggtgtcatctgtcacatttgtaaaatgagtatattatcacacaatccttcgcaactgtgccagcacttccctagcaaactgca

SEQ ID NO: 658349 - DNA, 120 bp, Artificial Sequence
  ENSG00000183977_18 (sequence is synthesized)
aacttgagtttttcaggaaaacagtttacatgagaaaaggcaagttctttcccatttcgaatgaagtaccattaaactctgtcacctagtgaaaaataataaaaatacttgcaactttta

SEQ ID NO: 658350 - DNA, 120 bp, Artificial Sequence
  ENSG00000183978_0 (sequence is synthesized)
accgcgaagggaggagtggcaacatggcgtcttcgggagctggtgaccctctggattctaagcgtggagaggccccgttcgctcagcgtatcgacccgactcgggagaagctgacacccg

SEQ ID NO: 658351 - DNA, 120 bp, Artificial Sequence
  ENSG00000183978_1 (sequence is synthesized)
agcaactgcattccatgcggcaggcggagcttgcccagtggcagaaggtcctaccacggcggcgaacccggaacatcgtgaccggcctaggcatcggggccctggtgttggctatttatg

SEQ ID NO: 658352 - DNA, 120 bp, Artificial Sequence
  ENSG00000183978_2 (sequence is synthesized)
gttacaccttctactcgatttcccaggagcgtttcctagatgagctagaagacgaggccaaagctgcccgagcccgagctctggcaagggcgtcagggtcctaatctggatgggtattga

SEQ ID NO: 658353 - DNA, 120 bp, Artificial Sequence
  ENSG00000183978_3 (sequence is synthesized)
attgaatcctgctcacaacattgttggccttcttactaaccttggaccgtgattgagcccaagaaaccagggacttacgcatttggccaatgtcaaaagaacagaactttgcccactgca

SEQ ID NO: 658354 - DNA, 120 bp, Artificial Sequence
  ENSG00000183978_4 (sequence is synthesized)
cacttgctgtgtacaatgactgagccctttcttgtagtttgtttccttgtttgagaggtgtgcatgcgaccgtggcttttcccaaagtttctgactttgtggtttacccccttcaccttc

SEQ ID NO: 658355 - DNA, 120 bp, Artificial Sequence
  ENSG00000183978_5 (sequence is synthesized)
cagggacgcagttgttacgaggttagacgtggcagctctgtgcagtgtttgagcctacagtgggatacatagggtcaaattgagaataataaactgagtcattctcctggagtcaagtga

SEQ ID NO: 658356 - DNA, 120 bp, Artificial Sequence
  ENSG00000183978_6 (sequence is synthesized)
gaacacaagctccatggtgggccctggtgtgggggagatacatggcttctgttctgaattcactggagggaaaagaaaaagtgatgaagaaacctccaaggtgggaggaaggcgaagctg

SEQ ID NO: 658357 - DNA, 120 bp, Artificial Sequence
  ENSG00000183978_7 (sequence is synthesized)
cagccagtgtctgtagtgtttccacctctgacaagtgcctgaggatgcacggagggcatgaaagggctagccacacaccttgctctcccaggttctcctctcactcctccatcctcccga

SEQ ID NO: 658358 - DNA, 120 bp, Artificial Sequence
  ENSG00000183978_8 (sequence is synthesized)
gactcacttctgccgaagactctgcagctcagcccagaactcctcatcttccccactgctttctgactcctcgctgctcaaacacaggctgctgtaggagtagttcatccacactgggct

SEQ ID NO: 658359 - DNA, 120 bp, Artificial Sequence
  ENSG00000183978_9 (sequence is synthesized)
tccttcctcctcaactccagcccccagaccctcagctgcacggtcgctctcagccagagcttccctggtctctggcccgcctccagcactgtcctctgtatctgagctctctgaagtgag

SEQ ID NO: 658360 - DNA, 120 bp, Artificial Sequence
  ENSG00000183978_10 (sequence is synthesized)
ctgaggggttgaaggttttggagaaccagagagagtgggggatgttggctgcaagggaagaggctcagccggttccttggatgaagtcacttggaaacgcccaacaagctgcggctttcc

SEQ ID NO: 658361 - DNA, 120 bp, Artificial Sequence
  ENSG00000183978_11 (sequence is synthesized)
ctctgtagggcgacgaggaagaaggcatgaggaaaggagagcagtgacaggacagacagtgagtagggataatggcaggggaaggtcagtggtcagaggccttaccttcagagatgggcg

SEQ ID NO: 658362 - DNA, 120 bp, Artificial Sequence
  ENSG00000183978_12 (sequence is synthesized)
ccagcctggcttcccctgggaggggccgagcaggaggtggtgaggcctagaaagtggggggccatgagaagggaagagtgcagagtggagtctccctaatcatccctcttggttttctac

SEQ ID NO: 658363 - DNA, 120 bp, Artificial Sequence
  ENSG00000183978_13 (sequence is synthesized)
tcacctcactctccacctcagctgtgtggggtgaagggctttcctggccaccaggagcaacgggagggggaaggggcaggctagggaggggactaggaggggctggaggagactgggaaa

SEQ ID NO: 658364 - DNA, 120 bp, Artificial Sequence
  ENSG00000183978_14 (sequence is synthesized)
ggagcccaggtgagggggacagcagggactgggccacagtcatcacagccagtgagaaggcactagccagagaaaggagaggggctgctgtggtggaggggaaggaagaagtggaggggc

SEQ ID NO: 658365 - DNA, 120 bp, Artificial Sequence
  ENSG00000183979_0 (sequence is synthesized)
gtcagccggcgtccccatggcccggtccgcgacactggcggccgccgccctggcgctgtgcctgctgctggcgccgcctggcctcgcgtggtacaagccagcggcggggcacagctccta

SEQ ID NO: 658366 - DNA, 120 bp, Artificial Sequence
  ENSG00000183979_1 (sequence is synthesized)
acaagccagcggcggggcacagctcctactcggtgggccgcgccgcggggctgctgtccggcctccgcaggtccccgtacgcgcggcgctcccagccctacagaggggcggaacccccgg

SEQ ID NO: 658367 - DNA, 120 bp, Artificial Sequence
  ENSG00000183979_2 (sequence is synthesized)
ggctccccgacggccgcgggacctaccagtgcaaggcgaacgtcttcctgtccctgcgcgcagccgactgcctcgccgcctgagcccggacctctcctggcaccgctgggggccccccgc

SEQ ID NO: 658368 - DNA, 120 bp, Artificial Sequence
  ENSG00000183979_3 (sequence is synthesized)
ccccaccgtcccactcggtgaccccaggcccctccggcgcgggatggcgccccaggtctcccctactccgctcaccccgcagttaatggcaaacgaataaataaatgaggcggcctcgga

SEQ ID NO: 658369 - DNA, 120 bp, Artificial Sequence
  ENSG00000183979_4 (sequence is synthesized)
aggggccgctgggggagtggcagccccggcatctcaggctgcttctggacagagcacaggctgtgtctccagtaacctagggagcccttggcattcatggggccagtgacccgtgcccag

SEQ ID NO: 658370 - DNA, 120 bp, Artificial Sequence
  ENSG00000183979_5 (sequence is synthesized)
tgtctcttgacccttcctcacagcaacctgaggagtagaccaggcctcacctgaaatctgtgtcagggttctctagagagacaggactctatatgaagagtatatatgaagagtttattg

SEQ ID NO: 658371 - DNA, 120 bp, Artificial Sequence
  ENSG00000183979_6 (sequence is synthesized)
gactctatatgaagagtatatatgaagagtttattgggagtattgactcacgtgatcacaaggtgaagtcccacaataagccatgtgcaaggtgaggagcaaggaagccagtctgagtcc

SEQ ID NO: 658372 - DNA, 120 bp, Artificial Sequence
  ENSG00000183979_7 (sequence is synthesized)
atcctgtggccaaaggctgcagagcccctggcaagccactggtgtaggtccgagagtccaaaagctgaagaacctggaggccgacgtgcgagggcgggaagcatccagcatgggagaaag

SEQ ID NO: 658373 - DNA, 120 bp, Artificial Sequence
  ENSG00000183979_8 (sequence is synthesized)
atggaggccagattcagccagtctagtctttccacgttcctctgcctgcttgtatcctggctgtgctggcagccgattaggtggtgcccacctggattgagggtgggtctgcctctccca

SEQ ID NO: 658374 - DNA, 89 bp, Artificial Sequence
  ENSG00000183979_9 (sequence is synthesized)
cacagacacacccagtgctgacactcagcattcaccatcacacctgggaagcatggaacccagaaacaagtgccagggctccagtgcca

SEQ ID NO: 658375 - DNA, 120 bp, Artificial Sequence
  ENSG00000183979_10 (sequence is synthesized)
agcatggaacccagaaacaagtgccagggctccagtgccagtgcctgtcctgggaagatacccaagagaagacatgaccaggaccttgggggagcatgaaatggtgagggcacagtgagc

SEQ ID NO: 658376 - DNA, 120 bp, Artificial Sequence
  ENSG00000183979_11 (sequence is synthesized)
ttgaaggctgatgtcacctgccaggagagcggctggcagtcctgcctggtgccccccaaggggcagagctggcagagaggggcctccaatcgaaggccaggagtcgtggagctccagtgc

SEQ ID NO: 658377 - DNA, 120 bp, Artificial Sequence
  ENSG00000183979_12 (sequence is synthesized)
gactctgatgcctggagccaagaataccccttagggtggtagaaaccgcccccggggcactgtgcagtgtggctggctctccagcatcaggagtactggggattgcctgggggacgactc

SEQ ID NO: 658378 - DNA, 120 bp, Artificial Sequence
  ENSG00000183979_13 (sequence is synthesized)
ctagggctgggcgcccgtgggccctcccctgctgccactgcggcccacgcaagccgggcctgaagggcgcgagcggcatgggtggggagcttgagggggcgttgggctcccaccaagcgc

SEQ ID NO: 658379 - DNA, 120 bp, Artificial Sequence
  ENSG00000183979_14 (sequence is synthesized)
cccaccaagcgccagatccttgcgcgcctccagcgctcgcccgcgcggctggttcctttgggatgcggaggtgcgacggctcctccgcgcgcgcccgctgcaccccagcccgcccgccgc

SEQ ID NO: 658380 - DNA, 120 bp, Artificial Sequence
  ENSG00000183979_15 (sequence is synthesized)
tgccggggactgatggggggcggcggcaggacgtgggtgggggtgcggcggcccctcagcctttgcttgcctgccccccaggctgtgtgcgtccaggacgtcgccccaaacctgcagagg

SEQ ID NO: 658381 - DNA, 120 bp, Artificial Sequence
  ENSG00000184005_0 (sequence is synthesized)
ggatctgcgggaatgtgggctggagaggtcctgccgtggtaccagcctccagcctgcccccaggactgcccctgacccaggcgcgcccgctgctcggtggcaggagggccggcggagcgc

SEQ ID NO: 658382 - DNA, 120 bp, Artificial Sequence
  ENSG00000184005_1 (sequence is synthesized)
catggcctgcatcctgaagagaaagtctgtgattgctgtgagcttcatagcagcgttccttttcctgctggttgtgcgtcttgtaaatgaagtgaatttcccattgctactaaactgctt

SEQ ID NO: 658383 - DNA, 120 bp, Artificial Sequence
  ENSG00000184005_2 (sequence is synthesized)
tggacaacctggtacaaagtggataccattctcctacacatacaggcggccccttcgaactcactatggatacataaatgtgaagacacaagagcctttgcaactggactgtgacctttg

SEQ ID NO: 658384 - DNA, 120 bp, Artificial Sequence
  ENSG00000184005_3 (sequence is synthesized)
tgccatagtgtcaaactcaggtcagatggttggccagaaggtgggaaatgagatagatcgatcctcctgcatttggagaatgaacaatgcccccaccaaaggttatgaagaagatgtcgg

SEQ ID NO: 658385 - DNA, 120 bp, Artificial Sequence
  ENSG00000184005_4 (sequence is synthesized)
ccgcatgaccatgattcgagttgtgtcccataccagcgttcctcttttgctaaaaaaccctgattattttttcaaggaagcgaatactactatttatgttatttggggacctttccgcaa

SEQ ID NO: 658386 - DNA, 120 bp, Artificial Sequence
  ENSG00000184005_5 (sequence is synthesized)
tatgaggaaagatggcaatggcatcgtttacaacatgttgaaaaagacagttggtatctatccgaatgcccaaatatacgtgaccacagagaagcgcatgagttactgtgatggagtttt

SEQ ID NO: 658387 - DNA, 120 bp, Artificial Sequence
  ENSG00000184005_6 (sequence is synthesized)
taagaaggaaactgggaaggacagagtccagtctggctcatatctcagcacagggtggtttaccttccttctggccatggacgcctgttatggcattcacgtctacgggatgataaatga

SEQ ID NO: 658388 - DNA, 120 bp, Artificial Sequence
  ENSG00000184005_7 (sequence is synthesized)
cacctactgcaagacagaagggtatagaaaagtcccctaccattattatgaacaaggaagagatgagtgtgatgaatattttcttcatgaacatgccccatatgggggtcataggtttat

SEQ ID NO: 658389 - DNA, 120 bp, Artificial Sequence
  ENSG00000184005_8 (sequence is synthesized)
cactgaaaagaaagtgtttgctaaatgggccaagaagcacaggataatatttacacatccaaactggacattgtcttgataatggttttcctgatcttgccgcatcacttaatgtgatcc

SEQ ID NO: 658390 - DNA, 120 bp, Artificial Sequence
  ENSG00000184005_9 (sequence is synthesized)
ccatactgcaactgtgatgctgatgatgctaatggagatgatggtaatgataaagacaacaacaatgattatcaagttcctgtacactctcagatgtggatggtgactctgctagtaatt

SEQ ID NO: 658391 - DNA, 120 bp, Artificial Sequence
  ENSG00000184005_10 (sequence is synthesized)
taaacttggcatttcatggaggatggttgtgctcatgatgttctttctggaggttcaacactacgtaccgcactttataatttaactggaattgagatgaaggccagtgacatgacaact

SEQ ID NO: 658392 - DNA, 120 bp, Artificial Sequence
  ENSG00000184005_11 (sequence is synthesized)
gtgacctaagaaatgggaagattatctttcaagatagctgcctagaattgttcaacagtgagtaacttccagaagccaaaagagtttggcttcatgaggcaaggtgattgactcaatggc

SEQ ID NO: 658393 - DNA, 120 bp, Artificial Sequence
  ENSG00000184005_12 (sequence is synthesized)
ttgttgaatctcagcagttccgccatcttgaagaatgattgattgtcaaacactgacccaagaactgctatcagggtgcaagtatcttactacttagcctaaggatgggaaaatatctct

SEQ ID NO: 658394 - DNA, 120 bp, Artificial Sequence
  ENSG00000184005_13 (sequence is synthesized)
tcctaatataccatctttctacagtatttcctacagctaaagcctcaggccattgcctaattaacaatgaagatttcatggacatcctacacttcaggattacttgactatctcaaacac

SEQ ID NO: 658395 - DNA, 120 bp, Artificial Sequence
  ENSG00000184005_14 (sequence is synthesized)
ataaatcaaaatgggccaagtagcaaatcttgatgaatttccactcttaccatccattcttactaccaacagtataactgaacatgtgattagaatgatctatattaatgtttagttatt

SEQ ID NO: 658396 - DNA, 120 bp, Artificial Sequence
  ENSG00000184005_15 (sequence is synthesized)
tttggttgagtgctaaatatttcagaaggctacttaacatgtaagataccaacttcaacactgtaataacatatactgtgaaaacattcctaaaaagtaaccaaagggtttgctaactct

SEQ ID NO: 658397 - DNA, 120 bp, Artificial Sequence
  ENSG00000184005_16 (sequence is synthesized)
gcttcaacatccaacaacacaaaactatatgatttttaaaatcatgaaatagagacagcaaagcatatttttacatcaatttgtatcctatcatacttcataatatatatttgtatattc

SEQ ID NO: 658398 - DNA, 120 bp, Artificial Sequence
  ENSG00000184005_17 (sequence is synthesized)
aaatttctattttataggcccaaggtgtgtttctccaaacattacattctcattgccaagtgccagctgttacacatggagaggaaatgattccttatattaaacctgaccagagctttt

SEQ ID NO: 658399 - DNA, 120 bp, Artificial Sequence
  ENSG00000184005_18 (sequence is synthesized)
tgccttctagggatttatttttcccatagtgtatcagttgttatgccacaataacaacaataataatgttcttaatgtccaaagtgctttgtcatttagagtcctttaacatctgttata

SEQ ID NO: 658400 - DNA, 120 bp, Artificial Sequence
  ENSG00000184005_19 (sequence is synthesized)
ccatgtgatgcccttgaacaccccattgggctattgtctgtgtattctgctctctttagcagatgatctgtaatttggtcattgttctgttatattccagattgctctacttgctaatat

SEQ ID NO: 658401 - DNA, 120 bp, Artificial Sequence
  ENSG00000184005_20 (sequence is synthesized)
ttgtatagaatagaatttatgtaaactagtaaccagttgatctctgtgccaaatacattatatcaggattacacaaaaagtatcacaaaggatggtcttggccatatgctagggcccctg

SEQ ID NO: 658402 - DNA, 120 bp, Artificial Sequence
  ENSG00000184005_21 (sequence is synthesized)
tgaaaataagtagttttgagaagtttttctatatacgtatatatacacgtgtggttctatttaggtggggaaaaaatgaaaaagcagggacaacaggaggaaatgaaggcagagaaatat

SEQ ID NO: 658403 - DNA, 120 bp, Artificial Sequence
  ENSG00000184005_22 (sequence is synthesized)
agtttcctttcctaggattgagacaattctatttttcatatactcgttgctcattaaatagtaaagggttgatttgctgcaagagtagctgagaattcaaaaacatccttgcagaatgat

SEQ ID NO: 658404 - DNA, 120 bp, Artificial Sequence
  ENSG00000184005_23 (sequence is synthesized)
tcaaaagacaaaagccaggctcaacttatagaatgttttggaaactggaagtaatgatacatttcacttcagaagcacttgtaggtctttactagtgctaagtattatggtgagctatca

SEQ ID NO: 658405 - DNA, 120 bp, Artificial Sequence
  ENSG00000184005_24 (sequence is synthesized)
ttaaagtgtgccatcttggataaaggccttttgcctactctcttctgcaattttgacacctcaatattcacacccataaacattactaagccccagttctatcgttggaaggagttgtta

SEQ ID NO: 658406 - DNA, 120 bp, Artificial Sequence
  ENSG00000184005_25 (sequence is synthesized)
ttcttttgttgttcccttatgcaatttttaattctatgaatgttaagtttttttgagctaatgatagatagaaatgcccactcaaagaaaaataaacagagacaaatgttaaaattgcca

SEQ ID NO: 658407 - DNA, 120 bp, Artificial Sequence
  ENSG00000184005_26 (sequence is synthesized)
tacagactgtttttccccctgttgtttcactttaaaataaaaagaaatccttgattaatcagaatggcttgggacatgaacttaatttatttagttttctaataaatgaagggccaactc

SEQ ID NO: 658408 - DNA, 120 bp, Artificial Sequence
  ENSG00000184005_27 (sequence is synthesized)
ttatttgttctagcccctactgatgagaaacatttgaaaacttgcttgctctcctgcctcgttgtagctttctctgatgaagacttctgcagtatattgtatccctcactctatagcaga

SEQ ID NO: 658409 - DNA, 120 bp, Artificial Sequence
  ENSG00000184005_28 (sequence is synthesized)
gctactctacactttttattgttgttttctttgtctttttctttctacaaacaggaaacaaaaaaaaaaaaaaacaagtttttctcaatttggagactcaattgaataatttccagtata

SEQ ID NO: 658410 - DNA, 120 bp, Artificial Sequence
  ENSG00000184005_29 (sequence is synthesized)
atcagcattttgatagaatctcacaacttatttttctctgcttttatttcctgtttttctttgttccatctttctaattctagtgaaaatgcaaagtctaatttctcccatgttgagaat

SEQ ID NO: 658411 - DNA, 120 bp, Artificial Sequence
  ENSG00000184005_30 (sequence is synthesized)
aaatttttcatctatgatttgctgatagagaagagcttggtaagggagcaattcaaggaaactattttgccatgcacatttctgatcaattcccacagattctggtcaaatgaaagatat

SEQ ID NO: 658412 - DNA, 120 bp, Artificial Sequence
  ENSG00000184005_31 (sequence is synthesized)
tctatccaacatttaaacattgaaaaatttaactgaacttacttatcactgatgtgtatttatcccagaaattaattaatatctgtgaaaaataaaaatatttcaatactatccgtgctt

SEQ ID NO: 658413 - DNA, 120 bp, Artificial Sequence
  ENSG00000184005_32 (sequence is synthesized)
cttggaaaatgaactataaaaaagggtcacaatttttctgaaattggcatgaaaacattcaagataaaaataatagactaaacattattttctgttatgcataattctatgaaaaagcaa

SEQ ID NO: 658414 - DNA, 120 bp, Artificial Sequence
  ENSG00000184005_33 (sequence is synthesized)
ggtaatttaaaaagagttttaaaatgtgtgtttgaatcttttccaatttaaccaagtgagaagtagcaatgatttacattgttatgatgataatgtgaataagaaaccttttagagtata

SEQ ID NO: 658415 - DNA, 120 bp, Artificial Sequence
  ENSG00000184005_34 (sequence is synthesized)
tgattttacattgctatcaaacctatcaaagaaaaggcaattggaatttggaggaatgtttgtatatatgcacatagagtctatttgtgtgtgtgtgaacgcacatatatatacatctat

SEQ ID NO: 658416 - DNA, 120 bp, Artificial Sequence
  ENSG00000184005_35 (sequence is synthesized)
atacttataactatatataaaagcatatatataatcctatattcttcactggtgcatgtgaatcacagaaagccctattttagacttcatctgaaattcgttgggttacattttgaatcc

SEQ ID NO: 658417 - DNA, 120 bp, Artificial Sequence
  ENSG00000184005_36 (sequence is synthesized)
tgatgaaaaaagcaaaaatccaaattaaatggactgattgctaagagtacgtaaaatcatattcaaaagctggccagaagaataaagctagagaagctgctaaatctagaaaacacaatc

SEQ ID NO: 658418 - DNA, 120 bp, Artificial Sequence
  ENSG00000184005_37 (sequence is synthesized)
agatgccacagttgtcacaaatcagacttgtaagtatagcaatctgtattgtaggttctgccgattgcaggcttagctaaagtcacattgaaaaacattgcatcaagcttcattcacact

SEQ ID NO: 658419 - DNA, 120 bp, Artificial Sequence
  ENSG00000184005_38 (sequence is synthesized)
gaagtaaatgaacattggtcctcctattcaaataagccagtctttagcataagcaaaatccagatttgcatgatttttattatatagctacagaactgtgaccactgtgaaaaaggaaaa

SEQ ID NO: 658420 - DNA, 120 bp, Artificial Sequence
  ENSG00000184005_39 (sequence is synthesized)
ttatacaaggagattgctcttggaggatttggtatgaatcagctgaggtaggaacaagagtctgaattggggacctgctgaccttccaagaagtagaaggccatcagaagaaaatcactg

SEQ ID NO: 658421 - DNA, 120 bp, Artificial Sequence
  ENSG00000184005_40 (sequence is synthesized)
ttacttagagaagagacaacactaaagtacttcacctggtagtgttaattggatgttaattatgagctcggtttaatttcaataagcaagaaaatataatcagatgactgatttaaaaaa

SEQ ID NO: 658422 - DNA, 120 bp, Artificial Sequence
  ENSG00000184005_41 (sequence is synthesized)
aaacaacaacaatgtgcccatctagcctttaatgtgacatgtcaaatgcaaataataaattatgttattcagtatcagttgtttgcatgtcttagcacaacaaaggatttacagtctgag

SEQ ID NO: 658423 - DNA, 120 bp, Artificial Sequence
  ENSG00000184005_42 (sequence is synthesized)
ggccaagagagaaaaaatgcttttttcttaaaacagcatatttaaaagacaagacctcatcatttcagtagtgtacatagattagtgactgaaggagccagtgctagcctttttaagtag

SEQ ID NO: 658424 - DNA, 120 bp, Artificial Sequence
  ENSG00000184005_43 (sequence is synthesized)
gtcaggcttttagagctgaaagagattttaaagaccagccaattcaactcctacaccttggagctgaggaaacagacagaggtgaagtgacttgcctgtagttataaactggactaatgg

SEQ ID NO: 658425 - DNA, 120 bp, Artificial Sequence
  ENSG00000184005_44 (sequence is synthesized)
cagtactgagactcaaattcttgtctcatgttttcttctctagtgctttttccactacactttttagacagaagagtagctggaaaaagaatgcctaactgatttactaaagagtctatt

SEQ ID NO: 658426 - DNA, 120 bp, Artificial Sequence
  ENSG00000184005_45 (sequence is synthesized)
catggaatccaagggctccaaattgtgctaattctgctcaggatgaaacaaatccccacgctgaagtggagaaatattttcataattgaaggaacatatcccattgattgtctacacttt

SEQ ID NO: 658427 - DNA, 120 bp, Artificial Sequence
  ENSG00000184005_46 (sequence is synthesized)
cttctctctgtttgttgctattggtaaggctaggctatgttctgttatcacaaaattctaggacttgtttaaagaacttaaaggtcagtttcttagtttctctttgtgattgaggatgag

SEQ ID NO: 658428 - DNA, 120 bp, Artificial Sequence
  ENSG00000184005_47 (sequence is synthesized)
caagccattgatacaccaagagctgctgagtgttggaggttgcctggtgaaactggcaggccctgttgttgacatttccccagagctaaaatgtcctcatactcaaaccaactgtgctgc

SEQ ID NO: 658429 - DNA, 120 bp, Artificial Sequence
  ENSG00000184005_48 (sequence is synthesized)
ccaagttagtgaaattatccatcagcactaacaccaccctttgggttcatgctcatccctgcactccatgtgacctttgagcccagatacccttctagaaggtgaatgaaagccccacat

SEQ ID NO: 658430 - DNA, 120 bp, Artificial Sequence
  ENSG00000184005_49 (sequence is synthesized)
gtcccgcaagacttagtctgcataaaagatttaaaaggatttttttttctctacagtccatttatatgatactgttagaagtgaagaattttgaaactacatacactggcctctgaaaat

SEQ ID NO: 658431 - DNA, 120 bp, Artificial Sequence
  ENSG00000184005_50 (sequence is synthesized)
ggttcttgtggctcagaaatagtatattgttctgttgcttgtttttgctgaactgtagagaaaacaccagagtaaaattccatgtaaattgctaaggcatcgaatcagaactgtccttgg

SEQ ID NO: 658432 - DNA, 120 bp, Artificial Sequence
  ENSG00000184005_51 (sequence is synthesized)
gcgttgtaacagtgcagaaaatctcatttagtttttttctttttttttttcagttaactacttgtttgtttcttttcagaataggcacttttttttgagtagaaaacctcttctttctcc

SEQ ID NO: 658433 - DNA, 120 bp, Artificial Sequence
  ENSG00000184005_52 (sequence is synthesized)
acagatacatctctttttgttcacgccttgaagacttcagaaaaatagaagctcacttccttccataaaggtgaagaacatcttgatgaataaacagtcaactaccaagttcacatattt

SEQ ID NO: 658434 - DNA, 120 bp, Artificial Sequence
  ENSG00000184005_53 (sequence is synthesized)
gcctatgaagtgagagctatttctaagaaacttcaaaaagatcaaaacgaggcaattttatagctttttgttacctaatctacaaagtactaatttccttgtgtttagctttgttgtcac

SEQ ID NO: 658435 - DNA, 120 bp, Artificial Sequence
  ENSG00000184005_54 (sequence is synthesized)
tgttactgagtaaatacccatttctgttacatatggtacattttttgcttcacttattttcctgagttcccatgattttttttctgtagtttctcattcattttaaaacccataatcttc

SEQ ID NO: 658436 - DNA, 120 bp, Artificial Sequence
  ENSG00000184005_55 (sequence is synthesized)
atctatttttagaagaaagtgtaaatgcacagttgtacgtttgttgagagtttttatggcattatagtgctttatttataagcattgtgtcttagaataaagcttacaaaatggcaaaga

SEQ ID NO: 658437 - DNA, 120 bp, Artificial Sequence
  ENSG00000184005_56 (sequence is synthesized)
gagtgaccatgcagtgttgattgatcgaacagcaaccaccacatacatgtcctgccccaccacaaaaggaaggaaggaataaaagaaagaaagaaagaaacaaacaaacaaacaaacaaa

SEQ ID NO: 658438 - DNA, 120 bp, Artificial Sequence
  ENSG00000184005_57 (sequence is synthesized)
actaagcaagacaaaacaaatacccatgtcagtggttcaaagattaagattgtggctttgtgtaaagttctttccctttgtagacttgctgcataattattcaggtatgatggttacagt

SEQ ID NO: 658439 - DNA, 120 bp, Artificial Sequence
  ENSG00000184005_58 (sequence is synthesized)
ttttaaaaaggaagggaaattgtggtatgtggtatgtaaatatttttaaatgttgtctctctgttttgatcagtttttgttttattcaatttgtctttattaaatcttatcaaagcaaaa

SEQ ID NO: 658440 - DNA, 120 bp, Artificial Sequence
  ENSG00000184007_0 (sequence is synthesized)
tttttttttttttaattgcaagcatatttcttttaatgactccagtaaaattaagcatcaagtaaacaagtggaaagtgacctacacttttaacttgtctcactagtgcctaaatgtagt

SEQ ID NO: 658441 - DNA, 120 bp, Artificial Sequence
  ENSG00000184007_1 (sequence is synthesized)
aaaggctgcttaagttttgtatgtagttggattttttggagtccgaaggtatccatctgcagaaattgaggcccaaattgaatttggattcaagtggattctaaatactttgcttatctt

SEQ ID NO: 658442 - DNA, 120 bp, Artificial Sequence
  ENSG00000184007_2 (sequence is synthesized)
gaagagagaagcttcataaggaataaacaagttgaatagagaaaacactgattgataataggcattttagtggtctttttaatgttttctgctgtgaaacatttcaagatttattgattt

SEQ ID NO: 658443 - DNA, 120 bp, Artificial Sequence
  ENSG00000184007_3 (sequence is synthesized)
ttttttttcactttccccatcacactcacacgcacgctcacactttttatttgccataatgaaccgtccagcccctgtggagatctcctatgagaacatgcgttttctgataactcacaa

SEQ ID NO: 658444 - DNA, 120 bp, Artificial Sequence
  ENSG00000184007_4 (sequence is synthesized)
ccctaccaatgctactctcaacaagttcacagaggaacttaagaagtatggagtgacgactttggttcgagtttgtgatgctacatatgataaagctccagttgaaaaagaaggaatcca

SEQ ID NO: 658445 - DNA, 120 bp, Artificial Sequence
  ENSG00000184007_5 (sequence is synthesized)
cgttctagattggccatttgatgatggagctccaccccctaatcagatagtagatgattggttaaacctgttaaaaaccaaatttcgtgaagagccaggttgctgtgttgcagtgcattg

SEQ ID NO: 658446 - DNA, 120 bp, Artificial Sequence
  ENSG00000184007_6 (sequence is synthesized)
tgttgcaggattgggaagggcacctgtgctggttgcacttgctttgattgaatgtggaatgaagtacgaagatgcagttcagtttataagacaaaaaagaaggggagcgttcaattccaa

SEQ ID NO: 658447 - DNA, 120 bp, Artificial Sequence
  ENSG00000184007_7 (sequence is synthesized)
acagctgctttatttggagaaataccgacctaagatgcgattacgcttcagagataccaatgggcattgctgtgttcagtagaaggaaatgtaaacgaaggctgacttgattgtgccatt

SEQ ID NO: 658448 - DNA, 120 bp, Artificial Sequence
  ENSG00000184007_8 (sequence is synthesized)
tagagggaactcttggtacctggaaatgtgaatctggaatattacctgtgtcatcaaagtagtgatggattcagtactcctcaaccactctcctaatgattggaacaaaagcaaacaaaa

SEQ ID NO: 658449 - DNA, 120 bp, Artificial Sequence
  ENSG00000184007_9 (sequence is synthesized)
aagaaatctctctataaaatgaataaaatgtttaagaaaagagaaagagaaaaggaattaattcagtgaaggatgattttgctcctagttttggagtttgaatttctgccaggattgaat

SEQ ID NO: 658450 - DNA, 120 bp, Artificial Sequence
  ENSG00000184007_10 (sequence is synthesized)
tattttgaaatctcctgtctttttaaactttttcaaaataggtctctaaggaaaaccagcagaacattagcctgtgcaaaaccatctgtttggggagcacactcttccattatgcttggc

SEQ ID NO: 658451 - DNA, 120 bp, Artificial Sequence
  ENSG00000184007_11 (sequence is synthesized)
acatagatctccctgtggtgggattttttttttccctttttttgtgggggagggttggtggtatatttttcccctcttttttccttcctctcctacatctcccttttcccccgatccaag

SEQ ID NO: 658452 - DNA, 120 bp, Artificial Sequence
  ENSG00000184007_12 (sequence is synthesized)
tttcccccgatccaagttgtagatggaatagaagcccttgttgctgtagatgtgcgtgcagtctggcagccttaagcccacctgggcacttttagataaaaaaaaaaaaaaaacaaaaaa

SEQ ID NO: 658453 - DNA, 120 bp, Artificial Sequence
  ENSG00000184007_13 (sequence is synthesized)
tttagtctttactgatgaaagggtgttcatgttagtttcttcaaaaccctatctaatactaggcaaagtagccaagagccttttgttttgtttttattttgataaattagtggagaaatg

SEQ ID NO: 658454 - DNA, 120 bp, Artificial Sequence
  ENSG00000184007_14 (sequence is synthesized)
gcattttaagaggagtctcttctcaacttacctgagagtcgaattcttctcttccctaaccaatgaagctaagtggttatcccagaaacttgtcttctaaaagggaggactccaggccat

SEQ ID NO: 658455 - DNA, 120 bp, Artificial Sequence
  ENSG00000184007_15 (sequence is synthesized)
caataaagatgtccaggcagtgagcgtactttttacaccctgtagaattgtgggctgtagcgttactctgattttctgtctagtatcagagaatgctggtagcttaaaatttttatttta

SEQ ID NO: 658456 - DNA, 120 bp, Artificial Sequence
  ENSG00000184007_16 (sequence is synthesized)
ggacttgtactctgaattttcaggaaccgtcaaaggagcagcagcaaattcacatattttcgacttgagaaatgcttgtggtatgtgttttccaaactgccccctatatgtaaagttcag

SEQ ID NO: 658457 - DNA, 120 bp, Artificial Sequence
  ENSG00000184007_17 (sequence is synthesized)
tttaaccactgattgccttgttattactaggttttttgagattaaaaaaaaaaaatccctggtttaaaaccaacaatgatgcctagtgagtatgtgtccacaggccataacagggtagaa

SEQ ID NO: 658458 - DNA, 120 bp, Artificial Sequence
  ENSG00000184007_18 (sequence is synthesized)
gagagacatcgtgcaacccaatgagtagtgaagggactgtgttgcttgtgaagcggtgtagtagcatttttgcagattcttggctgggtttagtgtactgatctagaaaagctgtttttc

SEQ ID NO: 658459 - DNA, 120 bp, Artificial Sequence
  ENSG00000184007_19 (sequence is synthesized)
tgctcctttgtggaaggcagttatgatcaggctgcatggacaaagcaggtagaggggcaccatcaggggctcttgcactattttcacctctaaatattacgtactcagtagtgccctgct

SEQ ID NO: 658460 - DNA, 120 bp, Artificial Sequence
  ENSG00000184007_20 (sequence is synthesized)
tctagggctctgaatacgggcttaaagtcatcttgtcctgctggaatttgctgtgcagagccataagcctcccattttgttagcgtcagctaggccaataggaacagaccgggaccttgt

SEQ ID NO: 658461 - DNA, 120 bp, Artificial Sequence
  ENSG00000184007_21 (sequence is synthesized)
ctcacactgatgatacctcacatgttgaccggctatgtgaactgcctatttcctatgctggagttttgatttttaactaaacgcaaatctgtagattctctcctctcccatcccagaaaa

SEQ ID NO: 658462 - DNA, 120 bp, Artificial Sequence
  ENSG00000184007_22 (sequence is synthesized)
caaaacaaaataatgcttttcgaaattgtttctaggactttaaaacataatggtatatccaaaattctttatttcagaatgcaacaatagattccattaatatagactcaagatcaaaac

SEQ ID NO: 658463 - DNA, 120 bp, Artificial Sequence
  ENSG00000184007_23 (sequence is synthesized)
agcatacctgctaagctaagatagatggtgttgattccactgggttttgatcaatacaataacaaacctttttcctttgacatactctgaattttgttgtttggggggagggggtgtgtg

SEQ ID NO: 658464 - DNA, 120 bp, Artificial Sequence
  ENSG00000184007_24 (sequence is synthesized)
tgtgtgtgtatgtgtgtgtgtgtgtgtgcacgcgcagtgtccatcagtatcagtgcctgcctgagttaggaaaattacattcctggttctgtattgaggagaaggatgtataaagcaaca

SEQ ID NO: 658465 - DNA, 120 bp, Artificial Sequence
  ENSG00000184007_25 (sequence is synthesized)
gatgtataaagcaacatgaaacattagccctccttttattttaaagactaatgttaattgttcttaaaactggattttttttccttaaagcaatttttttcttttcgatttaatgaagta

SEQ ID NO: 658466 - DNA, 120 bp, Artificial Sequence
  ENSG00000184007_26 (sequence is synthesized)
ttgctagctgaagccagtttgacatagagagatgtcagattgatttgaaaggtgtgcagcctgatttaaaaccaaaccctgaacccttttaaagaacaataaaacatattttacacgctc

SEQ ID NO: 658467 - DNA, 120 bp, Artificial Sequence
  ENSG00000184007_27 (sequence is synthesized)
ctgcgcgcgcagcggtggtggtggcggcgcgatcggccgggctgtaaccgtcgtctgtccgggagcggctggagcggcagcggcggccgggcacggcgcgaggtgacgccacagggcagc

SEQ ID NO: 658468 - DNA, 120 bp, Artificial Sequence
  ENSG00000184007_28 (sequence is synthesized)
cgcgaggtgacgccacagggcagcggcggcagcggaggcagcggcggcagcaggagacgcagcggcggccgcagcagcagcagcaagacggactcgtggagacgcgccgccgccgccgcc

SEQ ID NO: 658469 - DNA, 120 bp, Artificial Sequence
  ENSG00000184007_29 (sequence is synthesized)
gcgcgccgaggctgggggggagtcgtcgccgccgccgccaccgctaccgccgccgccgccgccgccgaggtgactgaggagagaggcgcctcctcgctcccgccaccgccggacttcaat

SEQ ID NO: 658470 - DNA, 120 bp, Artificial Sequence
  ENSG00000184007_30 (sequence is synthesized)
gcccagtccccagctcgccagcgtttttcgttggaatatacgttgcacatttatggcgattctgagtgtgagggcagacttctgccaggctcagcacagcattttcgctgacaagtgagc

SEQ ID NO: 658471 - DNA, 120 bp, Artificial Sequence
  ENSG00000184007_31 (sequence is synthesized)
gagttggtgaagggagggcgtgagcttgatcctggatagtgtttgtatgatgtgcacacgtctctgcaaatgcttgtttgaagattggctgtgctgcattttggtataattgggaggtga

SEQ ID NO: 658472 - DNA, 120 bp, Artificial Sequence
  ENSG00000184007_32 (sequence is synthesized)
catattgtcccttatctcagtaaacatttggaggaagaggacgagaaagattgaattttgcattctttaattgggaagaaaaggaaggtgaatccatgttgagctgagctaatggagtct

SEQ ID NO: 658473 - DNA, 72 bp, Artificial Sequence
  ENSG00000184007_33 (sequence is synthesized)
aaggaaggtgaatccatgttgagctgagctaatggagtctcgttccgcccccccggggttcacgccattctc

SEQ ID NO: 658474 - DNA, 120 bp, Artificial Sequence
  ENSG00000184007_34 (sequence is synthesized)
agctggggatcctgactgtggatcggccccgggaaggatcccgcggaggccgccgccttcccgtccactcaggccccagccgaagctttccagctcccgctggcaccgggacagcgagcc

SEQ ID NO: 658475 - DNA, 120 bp, Artificial Sequence
  ENSG00000184007_35 (sequence is synthesized)
cctccgcgcgcggacccacgccccgagcgacccttgacttctcccggaattcacagcttcactccctcccctcccccaaaggcggacgcaggggaagctctagtgcctgaggaggccgca

SEQ ID NO: 658476 - DNA, 120 bp, Artificial Sequence
  ENSG00000184007_36 (sequence is synthesized)
ttctagtgagtgtgtagtatttaaatttttcaaaacaagttgtatctttcaaacataaatatttataaaactaggccaggtgcactggctcacacctataatcccaatattgtgggaaga

SEQ ID NO: 658477 - DNA, 89 bp, Artificial Sequence
  ENSG00000184007_37 (sequence is synthesized)
gttcaagaccagcctgggcaatgtggcgagatctcatctgtacagataattaaaaaactggtggggcatgttttttgaggtgagggaat

SEQ ID NO: 658478 - DNA, 120 bp, Artificial Sequence
  ENSG00000184007_38 (sequence is synthesized)
tttgaggtgagggaatcacttgagcccaggtggttgagactgcagtgagctgtggccacaccaccacattccagcctgggtgacagagggaaaccccgtctcaaaaaaaaaaaaaaaaaa

SEQ ID NO: 658479 - DNA, 120 bp, Artificial Sequence
  ENSG00000184007_39 (sequence is synthesized)
tcttaaaaccttttcccctgagcattgcttagaatggtgttgcaacgctgtcatcagcagcagattaaatgccaatttaggatgcacactttgactcaaaacattagtgtaggctgccat

SEQ ID NO: 658480 - DNA, 120 bp, Artificial Sequence
  ENSG00000184007_40 (sequence is synthesized)
tgcctcaaggtggtgattactcaagctgttagttctgctctgcccttttgtttgctatttccttttttgtagtgtggtactgtttgttcataaggttagaagttttagtccttatcctga

SEQ ID NO: 658481 - DNA, 120 bp, Artificial Sequence
  ENSG00000184007_41 (sequence is synthesized)
aggttgaagataatgttgtaacgtgagttggcagttttataactagtagctatcctagttttaggtagcccaaaattggtgccctgtaatgggctttataaaaacatcatttcctttgtt

SEQ ID NO: 658482 - DNA, 120 bp, Artificial Sequence
  ENSG00000184007_42 (sequence is synthesized)
aaatttttttaaaaagatagaacttcttctagtcatcaattcttgggcattttcctagctcatcaaaaggattttcttgaaaacgtctagcacctttttagcatttgataaggaaatatt

SEQ ID NO: 658483 - DNA, 120 bp, Artificial Sequence
  ENSG00000184007_43 (sequence is synthesized)
aaaatcaattggtaatgaaaattctgacacattggagataagtaatatgtttggtcatttattttactgtgataatggctaaaggccaatgaaggatttttgatcatatctagtgatgag

SEQ ID NO: 658484 - DNA, 120 bp, Artificial Sequence
  ENSG00000184007_44 (sequence is synthesized)
agaatttaatatataatgtgatgttttaaagagtaaagatttcttaaggtttagaatttagtgctttactaaaagtagataatcaggctgggcgctatggttcacgcctgtaatcccagc

SEQ ID NO: 658485 - DNA, 120 bp, Artificial Sequence
  ENSG00000184007_45 (sequence is synthesized)
ggcatggtggcgggcacctatagtccgagctatttgaggaactgaggcaggaggatcacctgagctttgggaggttgaggctgcggtgagccgtgattgtgccactgcactctggcctgg

SEQ ID NO: 658486 - DNA, 120 bp, Artificial Sequence
  ENSG00000184007_46 (sequence is synthesized)
gtgatagagcgagaccctgtcccctgccccgccaaaaaaaaaaatcatagaattaatgatgatgagatatatttactgtattaggcagataccagctactttagtatacaggaaaaagaa

SEQ ID NO: 658487 - DNA, 120 bp, Artificial Sequence
  ENSG00000184007_47 (sequence is synthesized)
gcgcagcggtggtggtggcggcgcgatcggccgggctgtaaccgtcgtctgtccgggagcggctggagcggcagcggcggccgggcacggcgcgaggtgactgaggagagaggcgcctcc

SEQ ID NO: 658488 - DNA, 120 bp, Artificial Sequence
  ENSG00000184007_48 (sequence is synthesized)
ggagagtgagttggtgaagggagggcgtgcactagggatacagcgatgagctcccatggatttacagtggtgagaagaagagatacagaaactcaaaagttccccattgtggagttacca

SEQ ID NO: 658489 - DNA, 120 bp, Artificial Sequence
  ENSG00000184007_49 (sequence is synthesized)
agacacacactggagactaggtagaaaacttaatgctggagctgtagcctttaagcctggctgtcactacaatgcaggtctttcagtgcctttactcagctgacacacatttgcagtgat

SEQ ID NO: 658490 - DNA, 120 bp, Artificial Sequence
  ENSG00000184007_50 (sequence is synthesized)
aacgtcattgaaccaaagggattcaaataggtttttcgttggaatatacgttgcacatttatggcgattctgagtgtgagggcagacttctgccaggctcagcacagcattttcgctgac

SEQ ID NO: 658491 - DNA, 120 bp, Artificial Sequence
  ENSG00000184009_0 (sequence is synthesized)
ctcagtcgccgctgccagctctcgcactctgttcttccgccgctccgccgtcgcgtttctctgccggtcgcaatggaagaagagatcgccgcgctggtcattgacaatggctccggcatg

SEQ ID NO: 658492 - DNA, 120 bp, Artificial Sequence
  ENSG00000184009_1 (sequence is synthesized)
tgcaaagctggttttgctggggacgacgctccccgagccgtgtttccttccatcgtcgggcgccccagacaccagggcgtcatggtgggcatgggccagaaggactcctacgtgggcgac

SEQ ID NO: 658493 - DNA, 120 bp, Artificial Sequence
  ENSG00000184009_2 (sequence is synthesized)
aggactcctacgtgggcgacgaggcccagagcaagcgtggcatcctgaccctgaagtaccccattgagcatggcatcgtcaccaactgggacgacatggagaagatctggcaccacacct

SEQ ID NO: 658494 - DNA, 120 bp, Artificial Sequence
  ENSG00000184009_3 (sequence is synthesized)
gccccggaggagcacccagtgctgctgaccgaggcccccctgaaccccaaggccaacagagagaagatgactcagattatgtttgagaccttcaacaccccggccatgtacgtggccatc

SEQ ID NO: 658495 - DNA, 120 bp, Artificial Sequence
  ENSG00000184009_4 (sequence is synthesized)
caggccgtgctgtccctctacgcctctgggcgcaccactggcattgtcatggactctggagacggggtcacccacacggtgcccatctacgagggctacgccctcccccacgccatcctg

SEQ ID NO: 658496 - DNA, 120 bp, Artificial Sequence
  ENSG00000184009_5 (sequence is synthesized)
cgtctggacctggctggccgggacctgaccgactacctcatgaagatcctcactgagcgaggctacagcttcaccaccacggccgagcgggaaatcgtgcgcgacatcaaggagaagctg

SEQ ID NO: 658497 - DNA, 120 bp, Artificial Sequence
  ENSG00000184009_6 (sequence is synthesized)
tgctacgtcgccctggacttcgagcaggagatggccaccgccgcatcctcctcttctctggagaagagctacgagctgcccgatggccaggtcatcaccattggcaatgagcggttccgg

SEQ ID NO: 658498 - DNA, 120 bp, Artificial Sequence
  ENSG00000184009_7 (sequence is synthesized)
cacggtgctgtcgggcggcaccaccatgtacccgggcattgccgacaggatgcagaaggagatcaccgccctggcgcccagcaccatgaagatcaagatcatcgcacccccagagcgcaa

SEQ ID NO: 658499 - DNA, 120 bp, Artificial Sequence
  ENSG00000184009_8 (sequence is synthesized)
gtactcggtgtggatcggtggctccatcctggcctcactgtccaccttccagcagatgtggattagcaagcaggagtacgacgagtcgggcccctccatcgtccaccgcaaatgcttcta

SEQ ID NO: 658500 - DNA, 120 bp, Artificial Sequence
  ENSG00000184009_9 (sequence is synthesized)
aacggactcagcagatgcgtagcatttgctgcatgggttaattgagaatagaaatttgcccctggcaaatgcacacacctcatgctagcctcacgaaactggaataagccttcgaaaaga

SEQ ID NO: 658501 - DNA, 120 bp, Artificial Sequence
  ENSG00000184009_10 (sequence is synthesized)
aattgtccttgaagcttgtatctgatatcagcactggattgtagaacttgttgctgattttgaccttgtattgaagttaactgttccccttggtatttgtttaataccctgtacatatct

SEQ ID NO: 658502 - DNA, 120 bp, Artificial Sequence
  ENSG00000184009_11 (sequence is synthesized)
ttgagttcaacctttagtacgtgtggcttggtcacttcgtggctaaggtaagaacgtgcttgtggaagacaagtctgtggcttggtgagtctgtgtggccagcagcctctgatctgtgca

SEQ ID NO: 658503 - DNA, 120 bp, Artificial Sequence
  ENSG00000184009_12 (sequence is synthesized)
gggtattaacgtgtcagggctgagtgttctgggatttctctagaggctggcaagaaccagttgttttgtcttgcgggtctgtcagggttggaaagtccaagccgtaggacccagtttcct

SEQ ID NO: 658504 - DNA, 120 bp, Artificial Sequence
  ENSG00000184009_13 (sequence is synthesized)
ttcttagctgatgtctttggccagaacaccgtgggctgttacttgctttgagttggaagcggtttgcatttacgcctgtaaatgtattcattcttaatttatgtaaggttttttttgtac

SEQ ID NO: 658505 - DNA, 120 bp, Artificial Sequence
  ENSG00000184009_14 (sequence is synthesized)
gcaattctcgattctttgaagagatgacaacaaattttggttttctactgttatgtgagaacattaggccccagcaacacgtcattgtgtaaggaaaaataaaagtgctgccgtaaccaa

SEQ ID NO: 658506 - DNA, 120 bp, Artificial Sequence
  ENSG00000184009_15 (sequence is synthesized)
cgctgccagctctcgcactctgttcttccgccgctccgccgtcgcgtttctctgccggtgagcgccccgccccggggcctgagctggacgtcgcaggcctgcgccccccgaccccggctg

SEQ ID NO: 658507 - DNA, 120 bp, Artificial Sequence
  ENSG00000184009_16 (sequence is synthesized)
cttccccgggaacaaaaggcggggtgggccgggtcaggcggacggggctgggggggcgccgggggtccagggcggggcccggccgcagtgcagacttccgagccgtggacgttacgtaaa

SEQ ID NO: 658508 - DNA, 120 bp, Artificial Sequence
  ENSG00000184009_17 (sequence is synthesized)
tccgagccgtggacgttacgtaaaaggcccggccttcggttccaggcggttgcgatcttggaggccacggccgctggggttggggcagggccgaggcttccccgcgggagggcattaggt

SEQ ID NO: 658509 - DNA, 120 bp, Artificial Sequence
  ENSG00000184009_18 (sequence is synthesized)
gcgggtggcggggaacccgggggtctcgaggcgccagcctcgcccccgcccccacgaccctggcggcctcgggtccgcaacgtggggaagaaaggtcgcaatggaagaagagatcgccgc

SEQ ID NO: 658510 - DNA, 120 bp, Artificial Sequence
  ENSG00000184009_19 (sequence is synthesized)
ggagaggtggctcctcgccctgctggactggagccctgaaaactgggaaatggagccctggggccaccccgcggctgaggaccacgcctttcacaggccagcagtgcctgcagccctccc

SEQ ID NO: 658511 - DNA, 120 bp, Artificial Sequence
  ENSG00000184009_20 (sequence is synthesized)
tgcaggcatcggaggagcccccacctcagtgccaggccctgaccgctgccactcctgttggcatccctgtctccagtgattcccaggtcgcaatggaagaagagatcgccgcgctggtca

SEQ ID NO: 658512 - DNA, 120 bp, Artificial Sequence
  ENSG00000184009_21 (sequence is synthesized)
cccggcttgatttctgacatttaagtgtttctttcgctgttccaggctctgttcctctcccggcatttcctccctgaagcctccaggtttctcatttggtttctgcctgcgttcttttct

SEQ ID NO: 658513 - DNA, 120 bp, Artificial Sequence
  ENSG00000184009_22 (sequence is synthesized)
tttctccacacatcacactggcatgcagcatgttgtggcgtgtgagcatggggtggccgtgggtctctgtccctgactaagccgccccttgtcccttctcagattatgtttgagaccttc

SEQ ID NO: 658514 - DNA, 120 bp, Artificial Sequence
  ENSG00000184009_23 (sequence is synthesized)
agccttccttcctgggtaggtgttgtgagctaaaggtttctactcttacatcctcggtgacacagcatcactaagggagggctctgtcccctaggtatggaatcttgcggcatccacgag

SEQ ID NO: 658515 - DNA, 120 bp, Artificial Sequence
  ENSG00000184012_0 (sequence is synthesized)
gagtaggcgcgagctaagcaggaggcggaggcggaggcggagggcgaggggcggggagcgccgcctggagcgcggcaggtcatattgaacattccagatacctatcattactcgatgctg

SEQ ID NO: 658516 - DNA, 120 bp, Artificial Sequence
  ENSG00000184012_1 (sequence is synthesized)
ttgataacagcaagatggctttgaactcagggtcaccaccagctattggaccttactatgaaaaccatggataccaaccggaaaacccctatcccgcacagcccactgtggtccccactg

SEQ ID NO: 658517 - DNA, 120 bp, Artificial Sequence
  ENSG00000184012_2 (sequence is synthesized)
tctacgaggtgcatccggctcagtactacccgtcccccgtgccccagtacgccccgagggtcctgacgcaggcttccaaccccgtcgtctgcacgcagcccaaatccccatccgggacag

SEQ ID NO: 658518 - DNA, 120 bp, Artificial Sequence
  ENSG00000184012_3 (sequence is synthesized)
tgtgcacctcaaagactaagaaagcactgtgcatcaccttgaccctggggaccttcctcgtgggagctgcgctggccgctggcctactctggaagttcatgggcagcaagtgctccaact

SEQ ID NO: 658519 - DNA, 120 bp, Artificial Sequence
  ENSG00000184012_4 (sequence is synthesized)
ctgggatagagtgcgactcctcaggtacctgcatcaacccctctaactggtgtgatggcgtgtcacactgccccggcggggaggacgagaatcggtgtgttcgcctctacggaccaaact

SEQ ID NO: 658520 - DNA, 120 bp, Artificial Sequence
  ENSG00000184012_5 (sequence is synthesized)
tcatccttcaggtgtactcatctcagaggaagtcctggcaccctgtgtgccaagacgactggaacgagaactacgggcgggcggcctgcagggacatgggctataagaataatttttact

SEQ ID NO: 658521 - DNA, 120 bp, Artificial Sequence
  ENSG00000184012_6 (sequence is synthesized)
ctagccaaggaatagtggatgacagcggatccaccagctttatgaaactgaacacaagtgccggcaatgtcgatatctataaaaaactgtaccacagtgatgcctgttcttcaaaagcag

SEQ ID NO: 658522 - DNA, 120 bp, Artificial Sequence
  ENSG00000184012_7 (sequence is synthesized)
tggtttctttacgctgtatagcctgcggggtcaacttgaactcaagccgccagagcaggattgtgggcggcgagagcgcgctcccgggggcctggccctggcaggtcagcctgcacgtcc

SEQ ID NO: 658523 - DNA, 120 bp, Artificial Sequence
  ENSG00000184012_8 (sequence is synthesized)
agaacgtccacgtgtgcggaggctccatcatcacccccgagtggatcgtgacagccgcccactgcgtggaaaaacctcttaacaatccatggcattggacggcatttgcggggattttga

SEQ ID NO: 658524 - DNA, 120 bp, Artificial Sequence
  ENSG00000184012_9 (sequence is synthesized)
gacaatctttcatgttctatggagccggataccaagtagaaaaagtgatttctcatccaaattatgactccaagaccaagaacaatgacattgcgctgatgaagctgcagaagcctctga

SEQ ID NO: 658525 - DNA, 120 bp, Artificial Sequence
  ENSG00000184012_10 (sequence is synthesized)
ctttcaacgacctagtgaaaccagtgtgtctgcccaacccaggcatgatgctgcagccagaacagctctgctggatttccgggtggggggccaccgaggagaaagggaagacctcagaag

SEQ ID NO: 658526 - DNA, 120 bp, Artificial Sequence
  ENSG00000184012_11 (sequence is synthesized)
tgctgaacgctgccaaggtgcttctcattgagacacagagatgcaacagcagatatgtctatgacaacctgatcacaccagccatgatctgtgccggcttcctgcaggggaacgtcgatt

SEQ ID NO: 658527 - DNA, 120 bp, Artificial Sequence
  ENSG00000184012_12 (sequence is synthesized)
cttgccagggtgacagtggagggcctctggtcacttcgaagaacaatatctggtggctgataggggatacaagctggggttctggctgtgccaaagcttacagaccaggagtgtacggga

SEQ ID NO: 658528 - DNA, 120 bp, Artificial Sequence
  ENSG00000184012_13 (sequence is synthesized)
atgtgatggtattcacggactggatttatcgacaaatgagggcagacggctaatccacatggtcttcgtccttgacgtcgttttacaagaaaacaatggggctggttttgcttccccgtg

SEQ ID NO: 658529 - DNA, 120 bp, Artificial Sequence
  ENSG00000184012_14 (sequence is synthesized)
caggctgcagtggctcccctgcccagcctgctctccctaaccccttgtccgcaaggggtgatggccggctggttgtgggcactggcggtcaagtgtggaggagaggggtggaggctgccc

SEQ ID NO: 658530 - DNA, 120 bp, Artificial Sequence
  ENSG00000184012_15 (sequence is synthesized)
cattgagatcttcctgctgagtcctttccaggggccaattttggatgagcatggagctgtcacctctcagctgctggatgacttgagatgaaaaaggagagacatggaaagggagacagc

SEQ ID NO: 658531 - DNA, 120 bp, Artificial Sequence
  ENSG00000184012_16 (sequence is synthesized)
caggtggcacctgcagcggctgccctctggggccacttggtagtgtccccagcctacctctccacaaggggattttgctgatgggttcttagagccttagcagccctggatggtggccag

SEQ ID NO: 658532 - DNA, 120 bp, Artificial Sequence
  ENSG00000184012_17 (sequence is synthesized)
aaataaagggaccagcccttcatgggtggtgacgtggtagtcacttgtaaggggaacagaaacatttttgttcttatggggtgagaatatagacagtgcccttggtgcgagggaagcaat

SEQ ID NO: 658533 - DNA, 120 bp, Artificial Sequence
  ENSG00000184012_18 (sequence is synthesized)
tgaaaaggaacttgccctgagcactcctggtgcaggtctccacctgcacattgggtggggctcctgggagggagactcagccttcctcctcatcctccctgaccctgctcctagcaccct

SEQ ID NO: 658534 - DNA, 120 bp, Artificial Sequence
  ENSG00000184012_19 (sequence is synthesized)
ggagagtgcacatgccccttggtcctggcagggcgccaagtctggcaccatgttggcctcttcaggcctgctagtcactggaaattgaggtccatgggggaaatcaaggatgctcagttt

SEQ ID NO: 658535 - DNA, 120 bp, Artificial Sequence
  ENSG00000184012_20 (sequence is synthesized)
aaggtacactgtttccatgttatgtttctacacattgctacctcagtgctcctggaaacttagcttttgatgtctccaagtagtccaccttcatttaactctttgaaactgtatcatctt

SEQ ID NO: 658536 - DNA, 120 bp, Artificial Sequence
  ENSG00000184012_21 (sequence is synthesized)
tgccaagtaagagtggtggcctatttcagctgctttgacaaaatgactggctcctgacttaacgttctataaatgaatgtgctgaagcaaagtgcccatggtggcggcgaagaagagaaa

SEQ ID NO: 658537 - DNA, 120 bp, Artificial Sequence
  ENSG00000184012_22 (sequence is synthesized)
gatgtgttttgttttggactctctgtggtcccttccaatgctgtgggtttccaaccaggggaagggtcccttttgcattgccaagtgccataaccatgagcactactctaccatggttct

SEQ ID NO: 658538 - DNA, 120 bp, Artificial Sequence
  ENSG00000184012_23 (sequence is synthesized)
gcctcctggccaagcaggctggtttgcaagaatgaaatgaatgattctacagctaggacttaaccttgaaatggaaagtcatgcaatcccatttgcaggatctgtctgtgcacatgcctc

SEQ ID NO: 658539 - DNA, 120 bp, Artificial Sequence
  ENSG00000184012_24 (sequence is synthesized)
tgtagagagcagcattcccagggaccttggaaacagttggcactgtaaggtgcttgctccccaagacacatcctaaaaggtgttgtaatggtgaaaacgtcttccttctttattgcccct

SEQ ID NO: 658540 - DNA, 120 bp, Artificial Sequence
  ENSG00000184012_25 (sequence is synthesized)
tcttatttatgtgaacaactgtttgtctttttttgtatcttttttaaactgtaaagttcaattgtgaaaatgaatatcatgcaaataaattatgcaatttttttttcaaagtaactactg

SEQ ID NO: 658541 - DNA, 120 bp, Artificial Sequence
  ENSG00000184012_26 (sequence is synthesized)
catctttgaagttctgcctggtgagtaggaccagcctccatttccttataagggggtgatgttgaggctgctggtcagaggaccaaaggtgaggcaaggccagacttggtgctcctgtgg

SEQ ID NO: 658542 - DNA, 120 bp, Artificial Sequence
  ENSG00000184012_27 (sequence is synthesized)
ttggtgccctcagttcctgcagcctgtcctgttggagaggtccctcaaatgactccttcttattattctattagtctgtttccatgctcctaataaagacatacccaagactgcaattta

SEQ ID NO: 658543 - DNA, 80 bp, Artificial Sequence
  ENSG00000184012_28 (sequence is synthesized)
gagtaggcgcgagctaagcaggaggcggaggcggaggcggagggcgaggggcggggagcgccgcctggagcgcggcaggt

SEQ ID NO: 658544 - DNA, 120 bp, Artificial Sequence
  ENSG00000184012_29 (sequence is synthesized)
tggggaggggaacctgggcgcctgggacccgccgatgccccctgccccgcccggaggtgaaagcgggtgtgaggagcgcggcgcggcaggtcatattgaacattccagatacctatcatt

SEQ ID NO: 658545 - DNA, 120 bp, Artificial Sequence
  ENSG00000184012_30 (sequence is synthesized)
agcccaccagaggcaaaaagaggacagtctcacggtccccaagcccagagaccactgggaggggagcaagtggggtctggaccaccgaccttagcttcacctcaacccccaagaacacct

SEQ ID NO: 658546 - DNA, 120 bp, Artificial Sequence
  ENSG00000184012_31 (sequence is synthesized)
gccccgttggaggcagactggagctggctgtggattttatttctcaggagaaggaggtgggagctggagagagtgacccgtgcatctttccagcttttccttggccacctgggtggcatg

SEQ ID NO: 658547 - DNA, 120 bp, Artificial Sequence
  ENSG00000184012_32 (sequence is synthesized)
ggagctgggagtcagagttctgctgagctgtaggaccaaaggccactggctccgctgcacctgcggactgagacacccacctgctgagtgagacccagcctctgcgtgcttaggggtccc

SEQ ID NO: 658548 - DNA, 120 bp, Artificial Sequence
  ENSG00000184012_33 (sequence is synthesized)
tgggtgaataagagggggattccatggcactgatagagccctatagtttcagagctgggaatttctttccctgaagctgaactccagagctgcattcagcacaggcaccgccagttgtaa

SEQ ID NO: 658549 - DNA, 120 bp, Artificial Sequence
  ENSG00000184012_34 (sequence is synthesized)
ggagaatccaggtttcccaggagaggggttggtgctgggatgagctgaccggggcagggctggaaaatagggctgtgaccatctgtgtagtgcgtgtggaggtctcagggagggaagtgt

SEQ ID NO: 658550 - DNA, 120 bp, Artificial Sequence
  ENSG00000184012_35 (sequence is synthesized)
tgaactcaagactaagaaagcactgtgcatcaccttgaccctggggaccttcctcgtgggagctgcgctggccgctggcctactctggaagttcatgggcagcaagtgctccaactctgg

SEQ ID NO: 658551 - DNA, 120 bp, Artificial Sequence
  ENSG00000184012_36 (sequence is synthesized)
ttgtttctttttgaacttgccacctccccacttagagaatatttctggggacagagtttcgtaactcctgccgcatagttggtgcctgctctcgactacattaaatctattttcagtgcc

SEQ ID NO: 658552 - DNA, 120 bp, Artificial Sequence
  ENSG00000184012_37 (sequence is synthesized)
ctggctcctgagctgctgctgtgaagggaggacctggtgggctaggtaaccgggagctcccccagaaagtcactggaggttgctcaggacttccccacctttactgagtgcttttgaaga

SEQ ID NO: 658553 - DNA, 120 bp, Artificial Sequence
  ENSG00000184012_38 (sequence is synthesized)
tttagcttgaacagattaaaattcaggatgggggctatctctttgggggttacatctctgttaccatcaccccttgatggtggagattcgaagcccacacagtcactcgtaactcacact

SEQ ID NO: 658554 - DNA, 80 bp, Artificial Sequence
  ENSG00000184014_0 (sequence is synthesized)
cttctccaggctcgctcgggccgcggcgctctcggctagctgcagcggcggcggcgcggaggggaaggcatccaggatgc

SEQ ID NO: 658555 - DNA, 120 bp, Artificial Sequence
  ENSG00000184014_1 (sequence is synthesized)
gtgccgctccgcactgcccggccggtctcggccccggcgccatgagtggcggcggcggcggagggggctcggcgcccagtcgcttcgccgactactttgtcatctgcggactggacacgg

SEQ ID NO: 658556 - DNA, 120 bp, Artificial Sequence
  ENSG00000184014_2 (sequence is synthesized)
agaccgggctggagccggacgagctgtcggcattatgccagtacatacaggcttctaaagccagggatggtgccagccctttcatttcaagtacgactgaaggagaaaattttgagcaga

SEQ ID NO: 658557 - DNA, 120 bp, Artificial Sequence
  ENSG00000184014_3 (sequence is synthesized)
caccattgagaagaacattcaaatctaaggtccttgcacgatatcctgagaacgtagaatggaatccctttgaccaagatgcagtaggaatgctatgtatgccgaaagggctggcattca

SEQ ID NO: 658558 - DNA, 120 bp, Artificial Sequence
  ENSG00000184014_4 (sequence is synthesized)
agacccaggctgatcccagggagccccaattccatgcctttattatcacaagggaggatggctctcggacatttgggtttgccctcacattttatgaagaggtgactagcaagcagatct

SEQ ID NO: 658559 - DNA, 120 bp, Artificial Sequence
  ENSG00000184014_5 (sequence is synthesized)
gcagtgcaatgcagaccctctaccacatgcacaatgctgagtatgatgtcctacatgctccccctgctgatgacagagaccagagcagcatggaggatggtgaagacactcctgtgacca

SEQ ID NO: 658560 - DNA, 120 bp, Artificial Sequence
  ENSG00000184014_6 (sequence is synthesized)
aactgcagcgcttcaactcctatgacattagccgggacactctctacgtctctaagtgcatctgcctcatcacacccatgtctttcatgaaggcatgtcggagcgtgctggagcaactcc

SEQ ID NO: 658561 - DNA, 120 bp, Artificial Sequence
  ENSG00000184014_7 (sequence is synthesized)
accaggcagtcacttcacctcagccccctccactgccccttgagagctacatatacaacgtactctacgaggtgccgctcccacctcctggccggtccttgaagttttctggggtctatg

SEQ ID NO: 658562 - DNA, 120 bp, Artificial Sequence
  ENSG00000184014_8 (sequence is synthesized)
ggccaataatctgccagagaccaagtaccaatgagcttcccctatttgactttcctgtcaaagaggtttttgaactgctcggggtggagaatgtgtttcagctttttacttgtgcccttc

SEQ ID NO: 658563 - DNA, 120 bp, Artificial Sequence
  ENSG00000184014_9 (sequence is synthesized)
tggagtttcaaatcctgctctactcacagcattaccagagactgatgactgtggcggagacgattacagctctcatgtttcctttccagtggcagcatgtctatgtccctattctcccag

SEQ ID NO: 658564 - DNA, 120 bp, Artificial Sequence
  ENSG00000184014_10 (sequence is synthesized)
cttctctcctgcatttcttagatgctcctgttccatacctgatgggtttgcattccaatggcctggatgaccggtcaaagctggagctgcctcaagaggctaacctctgctttgtggaca

SEQ ID NO: 658565 - DNA, 120 bp, Artificial Sequence
  ENSG00000184014_11 (sequence is synthesized)
ttgacaaccacttcattgagttgccagaggacttgccacagttccccaacaaattggagtttgtccaggaagtctctgagattctcatggcatttggaattccccctgaagggaatcttc

SEQ ID NO: 658566 - DNA, 120 bp, Artificial Sequence
  ENSG00000184014_12 (sequence is synthesized)
attgcagtgagagtgcctccaagctgaagaggctgcgggcctctgagcttgtctcggacaagaggaatgggaacattgctggctcccctttgcattcctacgagcttcttaaggagaatg

SEQ ID NO: 658567 - DNA, 120 bp, Artificial Sequence
  ENSG00000184014_13 (sequence is synthesized)
aaactattgcccggctgcaagccttggtcaagagaactggggtgagcctggaaaagttggaagtgcgtgaagaccccagcagcaataaggatctcaaagttcagtgtgatgaagaagaac

SEQ ID NO: 658568 - DNA, 120 bp, Artificial Sequence
  ENSG00000184014_14 (sequence is synthesized)
tcaggatttaccagctaaacattcagatccgggaagtttttgcaaatcgtttcactcagatgtttgcagattatgaggtgtttgtcatccaacccagccaggataaggaatcctggttta

SEQ ID NO: 658569 - DNA, 120 bp, Artificial Sequence
  ENSG00000184014_15 (sequence is synthesized)
ccaacagggagcaaatgcaaaactttgataaagcatcttttctgtcagatcagcctgagccctacctgcccttcctctcaagattcctggagacccagatgtttgcatctttcattgaca

SEQ ID NO: 658570 - DNA, 120 bp, Artificial Sequence
  ENSG00000184014_16 (sequence is synthesized)
acaaaataatgtgtcatgatgatgatgataaagaccctgtactccgggtatttgattcccgagttgacaagatcaggctgttgaatgttcggacacctactctccgtacatccatgtacc

SEQ ID NO: 658571 - DNA, 120 bp, Artificial Sequence
  ENSG00000184014_17 (sequence is synthesized)
agaagtgtaccactgtggatgaagcagagaaagcaattgagctgcgtctggcaaaaattgaccatactgcaattcacccacatttacttgacatgaagattggacaagggaaatatgagc

SEQ ID NO: 658572 - DNA, 120 bp, Artificial Sequence
  ENSG00000184014_18 (sequence is synthesized)
cgggcttcttccctaagctgcagtctgatgtactttccactgggccagccagcaacaagtggacgaaaaggaatgcccctgcccagtggaggcggaaagatcggcagaagcagcacacag

SEQ ID NO: 658573 - DNA, 120 bp, Artificial Sequence
  ENSG00000184014_19 (sequence is synthesized)
cgccagcccaaactgtccaacctctctccatcagtgattgcccagaccaattggaagtttgtagagggcctgctgaaggaatgccgcaataagaccaagaggatgctggtggaaaagatg

SEQ ID NO: 658574 - DNA, 120 bp, Artificial Sequence
  ENSG00000184014_20 (sequence is synthesized)
ggccgagaagctgtggagctagggcatggggaggtgaacatcacaggggtggaagagaacaccctgattgccagcctttgtgatctcctggaaaggatctggagtcatggactacaagtg

SEQ ID NO: 658575 - DNA, 120 bp, Artificial Sequence
  ENSG00000184014_21 (sequence is synthesized)
aaacaggggaaatcagccttatggtcccacctgttacattatcaggacaaccggcagagaaaactcacatcaggaagcctcagtacctcaggaatacttcttgattcagaacgtaggaag

SEQ ID NO: 658576 - DNA, 120 bp, Artificial Sequence
  ENSG00000184014_22 (sequence is synthesized)
tctgatgccagctcactcatgcctcccctgaggatctccctgattcaggatatgaggcacatccagaacatcggggaaatcaagactgatgtgggaaaggccagagcatgggtgcgactg

SEQ ID NO: 658577 - DNA, 120 bp, Artificial Sequence
  ENSG00000184014_23 (sequence is synthesized)
tccatggaaaaaaagttactttccagacacctgaagcagctcctctcagaccatgagctcaccaaaaagttatataagcgctatgccttcctgcgctgtgatgacgagaaggagcagttc

SEQ ID NO: 658578 - DNA, 120 bp, Artificial Sequence
  ENSG00000184014_24 (sequence is synthesized)
ctctatcacctcctgtctttcaatgccgtcgattacttttgcttcaccaatgtcttcacaactatcctgatcccgtaccacattctgatcgtaccaagcaagaagctggggggctccatg

SEQ ID NO: 658579 - DNA, 120 bp, Artificial Sequence
  ENSG00000184014_25 (sequence is synthesized)
ttcactgccaacccatggatctgtatatcaggagaattgggtgagacacagatcatgcagattcccaggaatgtgctagagatgaccttcgagtgccagaacttggggaagcttactact

SEQ ID NO: 658580 - DNA, 120 bp, Artificial Sequence
  ENSG00000184014_26 (sequence is synthesized)
gtccagattggccatgataactctgggctgtatgccaaatggctggtggagtatgtgatggtcaggaatgagatcacaggacatacctacaagttcccgtgtggccggtggttagggaag

SEQ ID NO: 658581 - DNA, 120 bp, Artificial Sequence
  ENSG00000184014_27 (sequence is synthesized)
ggcatggatgatggaagcctggagcggatcctagttggggagctgctcacatcccagcctgaggtggatgagaggccatgccggaccccgccgctgcagcagtcccccagtgtcatccgg

SEQ ID NO: 658582 - DNA, 120 bp, Artificial Sequence
  ENSG00000184014_28 (sequence is synthesized)
aggcttgttaccatctcacccaacaacaagcccaagctgaacactgggcagatccaggagtccatcggggaggcagtcaatggcattgtgaagcacttccataagcctgagaaagagcga

SEQ ID NO: 658583 - DNA, 120 bp, Artificial Sequence
  ENSG00000184014_29 (sequence is synthesized)
ggcagtctgacgctgttgctctgtggagagtgtggccttgtctcggccttggaacaggctttccagcatggatttaaatcgccccggctcttcaaaaatgtcttcatttgggatttcctg

SEQ ID NO: 658584 - DNA, 120 bp, Artificial Sequence
  ENSG00000184014_30 (sequence is synthesized)
gaaaaagcacaaacctattatgagacattagagaagaatgaagtagtccctgaggaaaactggcatacaagagcccggaacttctgccgatttgtcactgcaatcaacaatactccccgg

SEQ ID NO: 658585 - DNA, 120 bp, Artificial Sequence
  ENSG00000184014_31 (sequence is synthesized)
aacatcggcaaggatggcaagtttcagatgctggtgtgcttgggagccagagatcacctcctacaccactggattgccctgctggctgactgccccatcactgcacacatgtatgaggat

SEQ ID NO: 658586 - DNA, 120 bp, Artificial Sequence
  ENSG00000184014_32 (sequence is synthesized)
gtggcactgatcaaagaccatacacttgtcaattccttgattcgtgtgctgcagacattgcaggagttcaacatcacgctggagacgtcccttgtcaagggcatcgacatctgacctccc

SEQ ID NO: 658587 - DNA, 120 bp, Artificial Sequence
  ENSG00000184014_33 (sequence is synthesized)
agcaccagccagcagcaggactgagaaagactcaccctgcagctctgaccttttttcccaaagggacttaagcgattgtgcaggagtaggagacaaaatgtacactcactgtaaaaagaa

SEQ ID NO: 658588 - DNA, 120 bp, Artificial Sequence
  ENSG00000184014_34 (sequence is synthesized)
aactagaggatttttggaataaataatctattttagagtttatttgctgatttgctttttacacactttcatgtgaaagagtgatagggagagggagcgaggctggtgccgcttattttg

SEQ ID NO: 658589 - DNA, 120 bp, Artificial Sequence
  ENSG00000184014_35 (sequence is synthesized)
aagctggtgccctccctcgccgtggccacatgctggaagcctgaggcctccctggactgagcctgtggcactgcgtgcgggacagttatgtttccttgccccgtcgcattaatgaggccc

SEQ ID NO: 658590 - DNA, 120 bp, Artificial Sequence
  ENSG00000184014_36 (sequence is synthesized)
ttccacatcatttttaaactaatgtttttctatattaacattattatggatatttggctttcataggccacacacaggtgtgctgcgcgggaagccccatgctccaatcaaagggatttt

SEQ ID NO: 658591 - DNA, 120 bp, Artificial Sequence
  ENSG00000184014_37 (sequence is synthesized)
tagtagtgcctctaagcaagcaccgatgagtcagtcccacgtattttcttttttgtcagtattgtttgggaaggagacatgccgggatgtgtcatcgtgccaaataccacatttcctgtt

SEQ ID NO: 658592 - DNA, 120 bp, Artificial Sequence
  ENSG00000184014_38 (sequence is synthesized)
ggcacagtttcacagaagtaaacataagcatgttttaacaggtttttcttttcttttttcttttttaaaatgttttatttatttaacccgccattgtgtgtttttaagtattttcttttt

SEQ ID NO: 658593 - DNA, 120 bp, Artificial Sequence
  ENSG00000184014_39 (sequence is synthesized)
ttaaggaaaggaaaagcttgtcacaatctaactggctatgttattattattaaatttatgttttgcaacttagaaaccagctacagtatggcccacttaataaaacacctgaaacaaaaa

SEQ ID NO: 658594 - DNA, 120 bp, Artificial Sequence
  ENSG00000184014_40 (sequence is synthesized)
gggaaaggccagagcatgggtgcgactgtccatggaaaaaaagttactttccagacacctgaagcagctcctctcagaccatgagctcaccaatgatcccgtaccacattctgatcgtac

SEQ ID NO: 658595 - DNA, 120 bp, Artificial Sequence
  ENSG00000184014_41 (sequence is synthesized)
ttatctgtttctgcctttgtgtatgtggttcccattgcctgcagtcttcttccttgttttctttttgcctggttatcttcttctcatcctttaacactgttagttaggaatggatctcat

SEQ ID NO: 658596 - DNA, 120 bp, Artificial Sequence
  ENSG00000184014_42 (sequence is synthesized)
gtgcttactagagccttctgcctgcctcaggcttctttgctttccatgttcagatacagtgaggctgactgtaaaggttaagagctattacagtttgagcaaaacccagatcttttgcag

SEQ ID NO: 658597 - DNA, 120 bp, Artificial Sequence
  ENSG00000184014_43 (sequence is synthesized)
actatccgtgagtagccctgtgctcccagctggccttctcaaggcagtctttatgaacctgcctgagactcactcattgtcccctttttaaagaaagaagattatcccttgtactttcta

SEQ ID NO: 658598 - DNA, 120 bp, Artificial Sequence
  ENSG00000184014_44 (sequence is synthesized)
tttgtcttttgcctctgtggggagagaggtgcacttgccctccttggaggctgtgttttctctgaagtttctcattcttgttctgaactggagagctcagtcttttttgccattgtgttg

SEQ ID NO: 658599 - DNA, 120 bp, Artificial Sequence
  ENSG00000184014_45 (sequence is synthesized)
gtgctttttagatctgtggattttttgtttacgtcaaatttgtaaaaattctggccagtatttcttctagtaatttttctgttctccccatccctaccttagggactgcagttacacata

SEQ ID NO: 658600 - DNA, 120 bp, Artificial Sequence
  ENSG00000184014_46 (sequence is synthesized)
catgtaatatctgggattgcgtagttatcccagaaccgctgatactcttttaatggcaacagttttttctctctctctgtggcttctttgggatcatttctcttgctatggcttcaagct

SEQ ID NO: 658601 - DNA, 120 bp, Artificial Sequence
  ENSG00000184014_47 (sequence is synthesized)
cacttattttttctcctgcattgttgagtgtgcttttaacccagcccgtgtatttttcatctcagatattacagctttcatcttcagaagtttgagttccatgtttctagttttttgttg

SEQ ID NO: 658602 - DNA, 120 bp, Artificial Sequence
  ENSG00000184014_48 (sequence is synthesized)
ttgatgttgtttgtttgtttgtttttaagaggttctgctttgttgcccaggctggagtgcggtagtgtaattatagctcaccataaccttaaactcctgggctcaagtgatcttctggcc

SEQ ID NO: 658603 - DNA, 120 bp, Artificial Sequence
  ENSG00000184014_49 (sequence is synthesized)
ctgggctcaagtgatcttctggccttggcctcctgaatagctaggaataaaggtgtatgccaccatgtctggctcattttttttttttttttgaagagatgaggtctcactatgttgccc

SEQ ID NO: 658604 - DNA, 120 bp, Artificial Sequence
  ENSG00000184014_50 (sequence is synthesized)
cccagagtgctgggattacaggcgtaagctatcaggccctggtaatctttgattagatgccagacactgtgaattttactatttgagtcctggacacttccatattcctataaatattct

SEQ ID NO: 658605 - DNA, 120 bp, Artificial Sequence
  ENSG00000184014_51 (sequence is synthesized)
cttccatattcctataaatattctcagtctttgttctgggatgtagttaagttacttagaaataatttgatttctttgtgctttcctctggcaggaccagagcatcctttaggctgtgat

SEQ ID NO: 658606 - DNA, 120 bp, Artificial Sequence
  ENSG00000184014_52 (sequence is synthesized)
taattatctactactgaggcaagaccctctgagtactttactcagtgccccatgagtgattaggttttctagtctggcaggtggggacaggcattattcccagccctgtgtgagcatttt

SEQ ID NO: 658607 - DNA, 120 bp, Artificial Sequence
  ENSG00000184014_53 (sequence is synthesized)
gtattgtttctcctaatcctttccggtgattctttctccagccttgagtagtttctttacttgcgtgaactgacccattaccctgctgaatgccctgcagatcccctggattctctctct

SEQ ID NO: 658608 - DNA, 120 bp, Artificial Sequence
  ENSG00000184014_54 (sequence is synthesized)
tctctggtactgttcatatgaactctagccaccttggtctccttaactcagggagtccaccagtctctgcctagaactcccctccctgtgccacagcctggaagctttctctaagcagtt

SEQ ID NO: 658609 - DNA, 120 bp, Artificial Sequence
  ENSG00000184014_55 (sequence is synthesized)
agctgggatagttctaggggttacctcatttgttacctgtttctcagggtcctgcccttcattgcctgatgtccagtattctgaagtttatcattttatattattttgcatgggtttttt

SEQ ID NO: 658610 - DNA, 120 bp, Artificial Sequence
  ENSG00000184014_56 (sequence is synthesized)
cctattaggcaggaaaatcagtcccttttactctatcttggctggaaatggaagagtagctagattcttaaagaatgtttgacttgatttatttgtgtgtgtatttatgtgtgtgtgtgt

SEQ ID NO: 658611 - DNA, 120 bp, Artificial Sequence
  ENSG00000184014_57 (sequence is synthesized)
ttacttgtctggacatgcacatctctccatgcatagtgtgttgagaagtccccaggagttctttcagctactcagcccacctgttcccagagacctcagaacccacttccagaatctctt

SEQ ID NO: 658612 - DNA, 120 bp, Artificial Sequence
  ENSG00000184014_58 (sequence is synthesized)
gctccctgaccctgttcttctaggtagagtgttttctttctcagccttgggcacccccatgagatagtgctgtaccgcagttctggcggtatgtagagccatgacctctaagcctgcaga

SEQ ID NO: 658613 - DNA, 120 bp, Artificial Sequence
  ENSG00000184014_59 (sequence is synthesized)
tgctgaggggtcaggttgcaggcagccagtcagatctgtgcctccgagaactactgttcttttctctgattttcctgacctacctcatcttctctattctctaatagtgccagaacttgg

SEQ ID NO: 658614 - DNA, 120 bp, Artificial Sequence
  ENSG00000184014_60 (sequence is synthesized)
ctagagtcttgtagagtgtgtgcctcagctagttggagatggagcagactccttcctctgggggcctttgcctcaggttaccctgttttccctccatactgatgacccaatagagtccct

SEQ ID NO: 658615 - DNA, 120 bp, Artificial Sequence
  ENSG00000184014_61 (sequence is synthesized)
gggcccctagtgaacagtgcctattcctgtcctcttctagatttgcctgggtctccttgaatagtggccacactggctttgtcctccagtggagaatctccttgtgtgtgacccagatcc

SEQ ID NO: 658616 - DNA, 120 bp, Artificial Sequence
  ENSG00000184014_62 (sequence is synthesized)
atcatctcttctttcatccatttattcagcagctcttcactgggagctgctctgagccaggcactgtgccaggtgttagggaaacagacaaagtcctagcctgtcttttgcagccctccc

SEQ ID NO: 658617 - DNA, 120 bp, Artificial Sequence
  ENSG00000184014_63 (sequence is synthesized)
aagaccctgtactccgggtatttgattcccgagttgacaagatcaggctgttgaatgttcggacacctactctccgtacatccatgtaccagaagtgtaccactgtggatgaagcagtct

SEQ ID NO: 658618 - DNA, 120 bp, Artificial Sequence
  ENSG00000184014_64 (sequence is synthesized)
gtatatgtgttcgtctacttctggattctctgttctgtttcattgatctgttggtctacatttataccaataccacactgtcttgattactgtagcttacattaaatgattactgtagct

SEQ ID NO: 658619 - DNA, 120 bp, Artificial Sequence
  ENSG00000184014_65 (sequence is synthesized)
catatttagagtcaacttgccaacttctgcaaagaaacctttcaagattttgattgatatttgacatcctaacagtaccgagtcttctgatccattaacatggcatatctttccatttat

SEQ ID NO: 658620 - DNA, 120 bp, Artificial Sequence
  ENSG00000184014_66 (sequence is synthesized)
ttaggtcatctttaatttttctcaacagcattatgtacttttcagggtacaggttttatatgtcttatcagatttttccctaagtagttcatattttttggtgttattttaaattgtttt

SEQ ID NO: 658621 - DNA, 120 bp, Artificial Sequence
  ENSG00000184022_0 (sequence is synthesized)
caggtaaagccacttcagccgatcatacagcatgcggctggccaaccagaccctgggtggtgactttttcctgttgggaatcttcagccagatctcacaccctggccgcctctgcttgct

SEQ ID NO: 658622 - DNA, 120 bp, Artificial Sequence
  ENSG00000184022_1 (sequence is synthesized)
tatcttcagtatatttttgatggctgtgtcttggaatattacattgatacttctgatccacattgactcctctctgcatactcccatgtacttctttataaaccagctctcactcataga

SEQ ID NO: 658623 - DNA, 120 bp, Artificial Sequence
  ENSG00000184022_2 (sequence is synthesized)
cttgacatatatttctgtcactgtccccaaaatgctggtgaaccagctggccaaagacaagaccatctcggtccttgggtgtggcacccagatgtacttctacctgcagttgggaggtgc

SEQ ID NO: 658624 - DNA, 120 bp, Artificial Sequence
  ENSG00000184022_3 (sequence is synthesized)
agagtgctgccttctagccgccatggcctatgaccgctatgtggctatctgccatcctctccgttactctgtgctcatgagccatagggtatgtctcctcctggcatcaggctgctggtt

SEQ ID NO: 658625 - DNA, 120 bp, Artificial Sequence
  ENSG00000184022_4 (sequence is synthesized)
aggtccctgctgttttgaagctctcttgctcagacacctcactttacaagattttcatgtacttgtgctgtgtcatcatgctcctgatacctgtgacggtcatttcagtgtcttactact

SEQ ID NO: 658626 - DNA, 120 bp, Artificial Sequence
  ENSG00000184022_5 (sequence is synthesized)
atatcatcctcaccatccataagatgaactcagttgagggtcggaaaaaggccttcaccacctgctcctcccacattacagtggtcagcctcttctatggagctgctatttacaactaca

SEQ ID NO: 658627 - DNA, 120 bp, Artificial Sequence
  ENSG00000184022_6 (sequence is synthesized)
tgctccccagctcctaccaaactcctgagaaagatatgatgtcatcctttttctacactatccttacacctgtcttgaatcctatcatttacagtttcaggaataaggatgtcacaaggg

SEQ ID NO: 658628 - DNA, 120 bp, Artificial Sequence
  ENSG00000184022_7 (sequence is synthesized)
ctttgaaaaaaatgctgagcgtgcagaaacctccatattaaagtgtgaaagaacttaagttggtcctctcttcttagagtctctcttcactttaggtgtccttccaccaaacaatcagca

SEQ ID NO: 658629 - DNA, 120 bp, Artificial Sequence
  ENSG00000184022_8 (sequence is synthesized)
tcagctgctcttcagggagagtcatcaagttcataagtgtttcatcatctgaaaccctttcgcagaaaagcaggctggtgtttcactgatcacagagcagattgatcacaacgaaaatga

SEQ ID NO: 658630 - DNA, 120 bp, Artificial Sequence
  ENSG00000184022_9 (sequence is synthesized)
ctataatcacacttgagatgatgttcacttatcccccccttccctcgtagcattgatctctagtccagtccttcggggccaatggtcctttttttagattacagtggagaaatatgaaaa

SEQ ID NO: 658631 - DNA, 120 bp, Artificial Sequence
  ENSG00000184022_10 (sequence is synthesized)
taaatgtgtttatgacccttgagcaccttccaccacagagaaaatttgttttgctatcatgggcccattgatgagtatgaaataacaccatattcagagtgttcctcagcatccactctg

SEQ ID NO: 658632 - DNA, 120 bp, Artificial Sequence
  ENSG00000184022_11 (sequence is synthesized)
tgctaaacgcttttcgttcaccacctcattcgaccttcaccctctgtggctgaggctaaggtcacccacatttcacaaatgacaaaacagcctttgaggcttcccctgacttgccccaag

SEQ ID NO: 658633 - DNA, 120 bp, Artificial Sequence
  ENSG00000184022_12 (sequence is synthesized)
ggcatttggagataaacacattcaagacctcagagatgctaaatgtacagttgagatttttcttccatcagaatttctagaatgtgttctcaatcaaattcttattttctgtgagcatat

SEQ ID NO: 658634 - DNA, 120 bp, Artificial Sequence
  ENSG00000184022_13 (sequence is synthesized)
aagaagtcaaacctcccaaaattagagcagagacatgggctatccagtagacatgggctacaacatgtttggagtataattggtttattcatagacttaaccagagaaatatggaagttt

SEQ ID NO: 658635 - DNA, 120 bp, Artificial Sequence
  ENSG00000184022_14 (sequence is synthesized)
cgcacacttctccctgttcaagccaatggtgacacatacttagaatataatttcaaatcacagttttacgtatgtgcatggttgtatttgtatttaacaaataacataataattataacg

SEQ ID NO: 658636 - DNA, 120 bp, Artificial Sequence
  ENSG00000184022_15 (sequence is synthesized)
tcttgtgtgattattatgatctggcaccatttttagtgcgtgacatgtatggaacacttttattttcacagcctattattagccttattctacagttgatttaactgaaacccatgggtt

SEQ ID NO: 658637 - DNA, 120 bp, Artificial Sequence
  ENSG00000184022_16 (sequence is synthesized)
tgagtaacatgaacaaaagggtgtgcagcttataaagtgctcaacagggatttaagcccaggcaggcaggccggagtccctgcccctgaccactgcatgtgccacgtcttgtggagtctg

SEQ ID NO: 658638 - DNA, 120 bp, Artificial Sequence
  ENSG00000184022_17 (sequence is synthesized)
tggccttttccacactgcattgcctctccctctgggagggccatactccaaccttggaaacactatagttctttccatacccaatgttttcacgtggctttccctctcttcggaatgttt

SEQ ID NO: 658639 - DNA, 120 bp, Artificial Sequence
  ENSG00000184022_18 (sequence is synthesized)
ttttatctgtaagtacaaggatacgaagataactttccatgactacataatcttcctttaggccccaagtcattcattcattcaacaaataactactgagcccctatagtttgccaggcc

SEQ ID NO: 658640 - DNA, 120 bp, Artificial Sequence
  ENSG00000184022_19 (sequence is synthesized)
ccgttctacaaactgaggatacatcagtgagcaaaacaaataaaaatcttcatcttttttagcacttaaagggtgtatacagaaaataaatttggtaattgagaagaagacatggagtat

SEQ ID NO: 658641 - DNA, 120 bp, Artificial Sequence
  ENSG00000184022_20 (sequence is synthesized)
tatcagaagaaaagtgttggaaaatcttgagcaggagaggggtcttggagtgtgtaggggtcacgttttatgtagggatttaggctaatcctcactggttatagttgagcaaagatgtgg

SEQ ID NO: 658642 - DNA, 120 bp, Artificial Sequence
  ENSG00000184022_21 (sequence is synthesized)
agtttacaagttaatgagccacattgatattgggagaaatgctttcaagacagagcatagggacatctaccagcctgtcaatcaagagtccagtaggaccatgtctcagtaatagggatg

SEQ ID NO: 658643 - DNA, 120 bp, Artificial Sequence
  ENSG00000184022_22 (sequence is synthesized)
aactagatgtagattgagtctaactccaattataaaaaatgatagtaaaataaatttttccaacaaacaaaagtggataaaattcttcagccatagaaaaattatctcaaaagtaaactc

SEQ ID NO: 658644 - DNA, 120 bp, Artificial Sequence
  ENSG00000184022_23 (sequence is synthesized)
agaaatataagcaaaaatgacaaacatcaaccccaaagagtaatatgtaaatgagtcataatcaatattgacttagcaataattttaatgtaatatacagtttagatttgtgcaaaactt

SEQ ID NO: 658645 - DNA, 120 bp, Artificial Sequence
  ENSG00000184022_24 (sequence is synthesized)
aaatgtatgaaaaatcatgttgaagatatatcaatattgatgtagtagaggtagtaatttgtgttaaactttagtaaatcaagagtacatgctgtaatgtttatagtaaacgccaaaaca

SEQ ID NO: 658646 - DNA, 120 bp, Artificial Sequence
  ENSG00000184022_25 (sequence is synthesized)
agtttataaaatgaaaaaatgatagatttttatatttctaaaagaagcaacgaaagaatgaaaaagagacgtgaaacagatgggccaaatagaatatggttagaagttatagctcacata

SEQ ID NO: 658647 - DNA, 120 bp, Artificial Sequence
  ENSG00000184022_26 (sequence is synthesized)
gaaccccaattatatcagtaattattacacattgcatgcatgtatcaaaatatcacatgtgccccataagtatgtagaaatattatgtatcaataaaatatgtaatatactaaatgttcc

SEQ ID NO: 658648 - DNA, 120 bp, Artificial Sequence
  ENSG00000184032_0 (sequence is synthesized)
attcaaactgaagaaactgattccttgctcctcaaccaaatcctccactcttgaaaccatgtgctactacagcaactactatggtggtctgcgttatggctatggagtcctgggcggtgg

SEQ ID NO: 658649 - DNA, 120 bp, Artificial Sequence
  ENSG00000184032_1 (sequence is synthesized)
tggccgtggctatggtggctatggatatggctgctgccgcccatcttgctatggaagatactggtcctgtggcttctactgagaaatatctggcaactcaacctcgtggtctcttccaca

SEQ ID NO: 658650 - DNA, 120 bp, Artificial Sequence
  ENSG00000184032_2 (sequence is synthesized)
tggacttcctaaatttgccttcataattcttcatatgagtaattcatttttctgttgtaaaatgtcaacatcatccttaagtatctggaagaaaaaataggtcagatgctgcaagcctca

SEQ ID NO: 658651 - DNA, 120 bp, Artificial Sequence; identical to SEQ ID NO: 268859
  ENSG00000184033_0 (sequence is synthesized)

SEQ ID NO: 658652 - DNA, 120 bp, Artificial Sequence
  ENSG00000184033_1 (sequence is synthesized)
gaggccctggcattcctgatggcccagggggcaatgctggcggcccaggagaggcgggtgccacgggcggcagaggtccccggggcgcaggggcagcaagggcctcggggccgggaggag

SEQ ID NO: 658653 - DNA, 120 bp, Artificial Sequence
  ENSG00000184033_2 (sequence is synthesized)
gtccgcatggcggcgcggcttcagggctgaatggatgctgcagatgcggggccagggggccggagagccgcctgcttgagttctacctcgccatgcctttcgcgacacccatggaagcag

SEQ ID NO: 658654 - DNA, 120 bp, Artificial Sequence
  ENSG00000184033_3 (sequence is synthesized)
tgccccaccgcttcccgtgccaggggtgcttctgaaggagttcactgtgtccggcaacatactgactatccgactgactgctgcagaccaccgccaactgcagctctccatcagctcctg

SEQ ID NO: 658655 - DNA, 120 bp, Artificial Sequence
  ENSG00000184033_4 (sequence is synthesized)
tctccagcagctttccctgttgatgtggatcacgcagtgctttctgcccgtgtttttggctcagcctccctcagggcagaggcgctaagcccagcctggcgccccttcctaggtcatgcc

SEQ ID NO: 658656 - DNA, 120 bp, Artificial Sequence
  ENSG00000184033_5 (sequence is synthesized)
tcctcccctagggaatggtcccagcacgagtggccagttcattgtgggggcctgattgtttgtcgctggaggaggacggcttacatgtttgtttctgtagaaaataaaactgagctacga

SEQ ID NO: 658657 - DNA, 120 bp, Artificial Sequence
  ENSG00000184033_6 (sequence is synthesized)
gcgtggcagggtgggggctgggatccgcctacaccccacggtcaggctgctagaaacctgggaacaccccagcacagggtctcagaacagagacctggtacaccaggcccgccgccaccc

SEQ ID NO: 658658 - DNA, 120 bp, Artificial Sequence
  ENSG00000184033_7 (sequence is synthesized)
gagggagcccagggagatgggtgcagaggtgtcgcctttaacgtgatgttctctgcccctcacatttagccgactgactgctgcagaccaccgccaactgcagctctccatcagctcctg

SEQ ID NO: 658659 - DNA, 120 bp, Artificial Sequence
  ENSG00000184047_0 (sequence is synthesized)
acttccggcgtgtgcgtctggcgtccgcgcgctgcacaatggcggctctgaagagttggctgtcgcgcagcgtaacttcattcttcaggtacagacagtgtttgtgtgttcctgttgtgg

SEQ ID NO: 658660 - DNA, 120 bp, Artificial Sequence
  ENSG00000184047_1 (sequence is synthesized)
ctaactttaagaagcggtgtttctcagaattgataagaccatggcacaaaactgtgacgattggctttggagtaaccctgtgtgcggttcctattgcacagaaatcagagcctcattccc

SEQ ID NO: 658661 - DNA, 120 bp, Artificial Sequence
  ENSG00000184047_2 (sequence is synthesized)
ttagtagtgaagcattgatgaggagagcagtgtctttggtaacagatagcacctctacctttctctctcagaccacatatgcgttgattgaagctattactgaatatactaaggctgttt

SEQ ID NO: 658662 - DNA, 120 bp, Artificial Sequence
  ENSG00000184047_3 (sequence is synthesized)
ataccttaacttctctttaccgacaatatacaagtttacttgggaaaatgaattcagaggaggaagatgaagtgtggcaggtgatcataggagccagagctgagatgacttcaaaacacc

SEQ ID NO: 658663 - DNA, 120 bp, Artificial Sequence
  ENSG00000184047_4 (sequence is synthesized)
aagagtacttgaagctggaaaccacttggatgactgcagttggtctttcagagatggcagcagaagctgcatatcaaactggcgcagatcaggcctctataaccgccaggaatcacattc

SEQ ID NO: 658664 - DNA, 120 bp, Artificial Sequence
  ENSG00000184047_5 (sequence is synthesized)
agctggtgaaactgcaggtggaagaggtgcaccagctctcccggaaagcagaaaccaagctggcagaagcacagatagaagagctccgtcagaaaacacaggaggaaggggaggagcggg

SEQ ID NO: 658665 - DNA, 120 bp, Artificial Sequence
  ENSG00000184047_6 (sequence is synthesized)
ggattgagggcctgagcacactgccctgtctccccactcagtggggaaagcaggggcagatgccaccctgcccagggttggcatgactgtctgtgcaccgagaagaggcggcagatcctg

SEQ ID NO: 658666 - DNA, 120 bp, Artificial Sequence
  ENSG00000184047_7 (sequence is synthesized)
ccctggccaatcaggcgagacgcctttgtgagctgtgagtgcctcctgtggtctcaggcttgcgctggacctggttcttagcccttgggcactgcaccctgtttaacatttcaccccact

SEQ ID NO: 658667 - DNA, 120 bp, Artificial Sequence
  ENSG00000184047_8 (sequence is synthesized)
ctgtacagctgctcttacccattttttttacctcacacccaaagcattttgcctacctgggtcagagagaggagtcctttttgtcatgcccttaagttcagcaactgtttaacctgtttt

SEQ ID NO: 658668 - DNA, 120 bp, Artificial Sequence
  ENSG00000184047_9 (sequence is synthesized)
cagtcttatttacgtcgtcaaaaatgatttagtacttgttccctctgttgggatgccagttgtggcagggggaggggaacctgtccagtttgtacgatttctttgtatgtatttctgatg

SEQ ID NO: 658669 - DNA, 120 bp, Artificial Sequence
  ENSG00000184047_10 (sequence is synthesized)
tgttctctgatctgcccccactgtcctgtgaggacagctgaggccaaggagtgaaaaacctattactactaagagaaggggtgcagagtgtttacctggtgctctcaacaggacttaaca

SEQ ID NO: 658670 - DNA, 120 bp, Artificial Sequence
  ENSG00000184047_11 (sequence is synthesized)
tcaacaggacttaacacaggcctcttgttccttcctttctttccgtttctctattgtatccaaaggagaagagtgtaagattttgtttgcatctgaaagagaaaatgcgtctctcctggg

SEQ ID NO: 658671 - DNA, 120 bp, Artificial Sequence
  ENSG00000184047_12 (sequence is synthesized)
agttctgccgagatcgcagaatacacacaagctacctttgggcaccagagcagacagaaccgcggagcttcagggtggaagattcgtggaaactttgccaaggccaggacctcgtgtgtt

SEQ ID NO: 658672 - DNA, 120 bp, Artificial Sequence
  ENSG00000184047_13 (sequence is synthesized)
tgttcccgtccgcccctctgggacggcgccagcccggcaggccgccgaccgtcctggggctcccgcgcagcgcgatgccggcctcgtccaccgtccacgtgctgcagctgctgcgggagc

SEQ ID NO: 658673 - DNA, 120 bp, Artificial Sequence
  ENSG00000184047_14 (sequence is synthesized)
cgccttcgtgctcctcagctacacggtgctcatcggggcgctgctgctggccggctggaccacttacttcctggtgctgaagtgacagcgccgtcgccgcgcccggccccgcctcccgcc

SEQ ID NO: 658674 - DNA, 120 bp, Artificial Sequence
  ENSG00000184047_15 (sequence is synthesized)
cggccccgcctcccgcccggccccgcctccctaactcaccaggaaattcccttcaagccctggcccgaactgagtccccgcccacccgccagcgtcacggcgcccgactcagctccgcgc

SEQ ID NO: 658675 - DNA, 120 bp, Artificial Sequence
  ENSG00000184047_16 (sequence is synthesized)
cggacccacctccgcgccctcaggccctgcatatgccccgccccgcgcggaagttccggcggttggttgccttgcgcggccgttacagcctttgccctaagcctcgccccctttccccct

SEQ ID NO: 658676 - DNA, 120 bp, Artificial Sequence
  ENSG00000184047_17 (sequence is synthesized)
tgctggtattacaggtgtgagccaccgtaccccgccacaatttattttatatgtaaagaaataatttgctttttggagcagagaatgaaagttggtagaaagcatactccggaattattt

SEQ ID NO: 658677 - DNA, 120 bp, Artificial Sequence
  ENSG00000184047_18 (sequence is synthesized)
ctctatattgtcttaaattgccaaaataaggccttaaaaaatataacccaaagaaatatagtgcagtttcagcctaaaacactaagcagcatgacaattacgttttttgcttgcctattg

SEQ ID NO: 658678 - DNA, 120 bp, Artificial Sequence
  ENSG00000184047_19 (sequence is synthesized)
tgggaggccaaggcgggaggatcacttggggccaggagttcaagaccaacccagtcaatgtagcaagccccatctctagcagaaaaaaaattttaaacttagccaggcatggtgtgttgt

SEQ ID NO: 658679 - DNA, 120 bp, Artificial Sequence
  ENSG00000184047_20 (sequence is synthesized)
tgtgttgtgtgcctgtagtcccagttactccaggggctgaggtgggaggatcacttgagtctaggagtttgagattacagtgagctatgaacatgccagtgcacttccgtctgggtgaca

SEQ ID NO: 658680 - DNA, 120 bp, Artificial Sequence
  ENSG00000184047_21 (sequence is synthesized)
tagcatcctgtttgtaaaaaataataaatttttttttttgagatggagtcttgcttacgcaggctggagtgcagtggagtgatgtcagctcgctgcaatctccgcctcctgggttcaagc

SEQ ID NO: 658681 - DNA, 79 bp, Artificial Sequence
  ENSG00000184047_22 (sequence is synthesized)
taaaaattttttagcgtatatggataatcaaaagtattgaagtctcatttgtgcatttgttttacatatattttccagc

SEQ ID NO: 658682 - DNA, 120 bp, Artificial Sequence
  ENSG00000184047_23 (sequence is synthesized)
aagtctcatttgtgcatttgttttacatatattttccagcagcttttttcccctcaacctttaaagttttcccttgcattgttttctctttctgtgtctgaattgctgacaagcttttaa

SEQ ID NO: 658683 - DNA, 120 bp, Artificial Sequence
  ENSG00000184047_24 (sequence is synthesized)
aaacacagaagtttacagatggagatactaatgtcctgatacctttacttcataggataatagtgcaatttcattgaggcagcaggatggaagagccagtttgctgtaatgggacttaat

SEQ ID NO: 658684 - DNA, 120 bp, Artificial Sequence
  ENSG00000184047_25 (sequence is synthesized)
gcgtctggcgtccgcgcgctgcacaatggcggctctgaagagttggctgtcgcgcagcgtaacttcattcttcaggttcctgcttggctcgagtttgagtttacagcccctgcaagtaaa

SEQ ID NO: 658685 - DNA, 120 bp, Artificial Sequence
  ENSG00000184047_26 (sequence is synthesized)
aagctgcgtcacttccggcgtgtgcgtctggcgtccgcgcgctgcacaatggcggctctgaagagttggctgtcgcgcagcgtaacttcattcttcaggtaccgctgcggccgcgtagag

SEQ ID NO: 658686 - DNA, 120 bp, Artificial Sequence
  ENSG00000184047_27 (sequence is synthesized)
gggacaggaccagagggagggaccgacgcggacagcgctgtggcccggcccacggcgcccgccttccttacgcgctcatctctcgtccgcccagctgggtcgcggcgtctcgctccggtc

SEQ ID NO: 658687 - DNA, 120 bp, Artificial Sequence
  ENSG00000184047_28 (sequence is synthesized)
gggaggactgaggacagccccgcctccgccccctgggtcaagcccggcttccttttcagttcgtccatcttctagaaacgagtccccgagaccccgggctgccttcttggggctgctccg

SEQ ID NO: 658688 - DNA, 120 bp, Artificial Sequence
  ENSG00000184047_29 (sequence is synthesized)
cctcctgaccagccctcgtcagccactcgaagtccctgaggagacgtggagaggaggagggacacggcatggggggagtccgggaagggagacgagcgtctgaagacgtcctcccgaggg

SEQ ID NO: 658689 - DNA, 120 bp, Artificial Sequence
  ENSG00000184047_30 (sequence is synthesized)
cagaaggggccgggggagctggcgcagggctctctacctagcgctgcaggctcctgggcgattgtagcgggaccgtcacacacaactggcacccaggccaggggtccagagctaaattct

SEQ ID NO: 658690 - DNA, 120 bp, Artificial Sequence
  ENSG00000184047_31 (sequence is synthesized)
ttctgcctgcaggagcggttattgtggcatccgtttctaaaaagtttaaaggcaacattttattttattttaatttttttgagacaagatctgcctctgtcgcccaggctggagtgcagt

SEQ ID NO: 658691 - DNA, 120 bp, Artificial Sequence
  ENSG00000184047_32 (sequence is synthesized)
tcaagtgatccacccgcctcggcctttatttacttatttttttttaatagacacggggtcatgttgccagccatgttgcccaggctggtcgtgaactcctgggctcaagtgatcctcccg

SEQ ID NO: 658692 - DNA, 120 bp, Artificial Sequence
  ENSG00000184047_33 (sequence is synthesized)
acattttaaacttggtgtatgttgaaaatttcaaaacccctcagctgtcctgcatcctcatttaggttcctgcttggctcgagtttgagtttacagcccctgcaagtaaatccaagagcc

SEQ ID NO: 658693 - DNA, 120 bp, Artificial Sequence
  ENSG00000184047_34 (sequence is synthesized)
tccaagattttttaaaggccttagcaactgaatgaatggcgatgccatttagtaggatggagaggagtgggttttgaaaggaaaaaaattttttggaaatgtcatttctaagatgtctag

SEQ ID NO: 658694 - DNA, 120 bp, Artificial Sequence
  ENSG00000184047_35 (sequence is synthesized)
gaaacatctaggtggagctgtcaattaagtagttgatataaaagtggcacttcatttaaaaaaatcatagcttatatgctttatggggaagagctagagaggaaaccagcaagctccatt

SEQ ID NO: 658695 - DNA, 120 bp, Artificial Sequence
  ENSG00000184047_36 (sequence is synthesized)
tcagcaaaatattcctgccacttaacgtgtgtgttcatcacaaaaggaagattaattccatgtattacaagtattttcagcatcttctgaggctcattcatgagccctcaccttactgtg

SEQ ID NO: 658696 - DNA, 120 bp, Artificial Sequence
  ENSG00000184047_37 (sequence is synthesized)
cctcacttcagttgtcatctctgcatgctgatgaatccatagccctaaaacccctcacttgaataccaggctattttcgaccacaattgggacaacctttgtttttttcattcaaaagat

SEQ ID NO: 658697 - DNA, 120 bp, Artificial Sequence
  ENSG00000184047_38 (sequence is synthesized)
ttttttttaggtttgtcctttctcagttattatattactttctaagcccagttaacctcagttctgggccacatgactggggtctctagtcatttagtacagcaatgccacttccattct

SEQ ID NO: 658698 - DNA, 120 bp, Artificial Sequence
  ENSG00000184047_39 (sequence is synthesized)
tcaaaacccctcagtggtcagctaggcacgatggctctctcttgtaatcccagtacttttggaggctgaggtgggaggatcactgtaggccaagagttcgagaccagcctgagaaacata

SEQ ID NO: 658699 - DNA, 120 bp, Artificial Sequence
  ENSG00000184047_40 (sequence is synthesized)
gcgagaccacccctctacaaaaaataattagctaggtgtggtggcgtgtgtcggtagtcctagctacctgggaggcaggaggatgatttgatttcaggagttcaaggctgcagtgagctg

SEQ ID NO: 658700 - DNA, 120 bp, Artificial Sequence
  ENSG00000184047_41 (sequence is synthesized)
ggatcacaacactatactccatcctgggcaacagaatgagaaatgaaaaacctacagtggctttccatgaggcgttcagaactaaaattaaactaagtctccctgcactccagggcccta

SEQ ID NO: 658701 - DNA, 120 bp, Artificial Sequence
  ENSG00000184047_42 (sequence is synthesized)
gtgagtctcatttctcttagctccaaccaggctagatccctggacatcccctgcaacaaaagtattattttcctcattgttacctattctccaggatgcgtggccattctgattctaggt

SEQ ID NO: 658702 - DNA, 120 bp, Artificial Sequence
  ENSG00000184047_43 (sequence is synthesized)
atctttagtaccaagtctcacctctatttaaagcctttccttattcctgtccaacaactatctcctcctttttggccacttaatattgtatattttgatatttgatgataatcctttggc

SEQ ID NO: 658703 - DNA, 120 bp, Artificial Sequence
  ENSG00000184047_44 (sequence is synthesized)
tgagcttccatgtcattgcttgtaaataagaaaggataataactggactgttgtgaggaacaagtgaaaacacattataaaatgtagcacattatgaagacttatcagaatattgagaca

SEQ ID NO: 658704 - DNA, 120 bp, Artificial Sequence
  ENSG00000184047_45 (sequence is synthesized)
aaattagcttcttgtgagcagaggtgtctttcttccttttgtagtcctgtataagatgcctaatgaatacttaattatttgaaatataaagttcttgatttgttcatatcaaaaatattt

SEQ ID NO: 658705 - DNA, 120 bp, Artificial Sequence
  ENSG00000184047_46 (sequence is synthesized)
tcaaaaatatttcttgactgcctctttcaacatgcagtgattctgagtgtttgtactctgaatagcaaaaacaagacaacatagagtgattgattttttgtttttgtttttgttttgttt

SEQ ID NO: 658706 - DNA, 120 bp, Artificial Sequence
  ENSG00000184047_47 (sequence is synthesized)
cctgaaggttcttgttaatgcagtaagatcaaaatgttctacagacgaattgataaaatgtatatacccagatggtgaaatacactaactagcagcaggcgcagatcaggcctctataac

SEQ ID NO: 658707 - DNA, 120 bp, Artificial Sequence
  ENSG00000184056_0 (sequence is synthesized)
gagatctaggaagtcgcttctttttctggtagaaggcggggttctcctcgtacgctgcggagtctctgcggggtgtagaccggaatcctgctgacgggcagagtggatcagggagggagg

SEQ ID NO: 658708 - DNA, 120 bp, Artificial Sequence
  ENSG00000184056_1 (sequence is synthesized)
gtcgagacacggtggctgcaggtctgagacaaggctgctccgaggtagtagctctcttgcctggaggtggccattcattcctggagtgctgctgaggagcgagggcccatctggggtctc

SEQ ID NO: 658709 - DNA, 120 bp, Artificial Sequence
  ENSG00000184056_2 (sequence is synthesized)
tggaagtcggtgcccaggcctgaaggatagccccccttgcgcttccctgggctgcggccggccttctcagaacgaagggcgtccttccaccccgcggcgcaggtgaccgctgccatggct

SEQ ID NO: 658710 - DNA, 120 bp, Artificial Sequence
  ENSG00000184056_3 (sequence is synthesized)
tttccccatcggccggacgcccctgagctgcctgacttctccatgctgaagaggctggctcgagaccagctcatctatctgctggagcagcttcctggaaaaaaggatttattcattgag

SEQ ID NO: 658711 - DNA, 120 bp, Artificial Sequence
  ENSG00000184056_4 (sequence is synthesized)
gcagatctcatgagccctttggatcgaattgccaatgtctccatcctgaagcaacacgaagtagacaagctatacaaggtggagaacaagccagccctcagctccaatgaacaattgtgc

SEQ ID NO: 658712 - DNA, 120 bp, Artificial Sequence
  ENSG00000184056_5 (sequence is synthesized)
ttcttggtcagaccccgcatcaagaatatgcgatacattgccagtcttgtcaatgctgacaaattggctggccgaactcgcaaatacaaagtgatcttcagccctcaaaagttctatgcg

SEQ ID NO: 658713 - DNA, 120 bp, Artificial Sequence
  ENSG00000184056_6 (sequence is synthesized)
tgtgagatggtgcttgaggaagagggaatctatggagatgtgagctgtgatgaatgggccttctctttgctgcctcttgatgtggatctgctgagcatggaactaccagaatttttcagg

SEQ ID NO: 658714 - DNA, 120 bp, Artificial Sequence
  ENSG00000184056_7 (sequence is synthesized)
gattactttctggaaggagatcagcgttggatcaacactgtagctcaggccttacaccttctcagcactctctatggaccctttccaaactgctatggaattggcaggtgcgccaagatg

SEQ ID NO: 658715 - DNA, 120 bp, Artificial Sequence
  ENSG00000184056_8 (sequence is synthesized)
gcatatgaattgtggaggaacctggaggaggaggaggatggcgaaaccaagggccgaaggccagagattggacatatctttctcttggacagagatgtggactttgtgacagcactttgc

SEQ ID NO: 658716 - DNA, 120 bp, Artificial Sequence
  ENSG00000184056_9 (sequence is synthesized)
tcccaagtggtttatgagggcctagtagatgacaccttccgcatcaagtgtgggagtgtcgactttggcccagaagtcacatcctctgacaagagcctgaaggtgctactcaatgccgag

SEQ ID NO: 658717 - DNA, 120 bp, Artificial Sequence
  ENSG00000184056_10 (sequence is synthesized)
gacaaggtgtttaatgagattcggaacgagcacttctccaatgtctttggcttcttgagccagaaggcccggaacttgcaggcccagtatgatcgccggagaggcatggacattaagcag

SEQ ID NO: 658718 - DNA, 120 bp, Artificial Sequence
  ENSG00000184056_11 (sequence is synthesized)
atttcgtgtcccaggagctcaagggcctgaaacaggagcaccgcctgctgagtctccatattggggcctgtgaatccatcatgaagaagaaaaccaagcaggatttccaggagctaatca

SEQ ID NO: 658719 - DNA, 120 bp, Artificial Sequence
  ENSG00000184056_12 (sequence is synthesized)
agactgagcatgcactgctagaggggttcaacatccgggagagcaccagctacattgaggaacacatagaccggcaggtgtcgcctatagaaagcctgcgcctcatgtgccttttgtcca

SEQ ID NO: 658720 - DNA, 120 bp, Artificial Sequence
  ENSG00000184056_13 (sequence is synthesized)
tcactgagaatggtttgatccccaaggattaccgatctctgaaaacacagtatctgcagagctatggccctgagcacctgctaaccttctccaatctgcgaagagctgggctcctaacgg

SEQ ID NO: 658721 - DNA, 120 bp, Artificial Sequence
  ENSG00000184056_14 (sequence is synthesized)
agcaggcccccggggacaccctcacagccgtggagagtaaagtgagcaagctggtgaccgacaaggctgcaggaaagattactgatgccttcagttctctggccaagaggagcaattttc

SEQ ID NO: 658722 - DNA, 120 bp, Artificial Sequence
  ENSG00000184056_15 (sequence is synthesized)
gtgccatcagcaaaaagctgaatttgatcccacgtgtggacggcgagtatgatctgaaagtgccccgagacatggcttacgtcttcggtggtgcttatgtgcccctgagctgccgaatca

SEQ ID NO: 658723 - DNA, 120 bp, Artificial Sequence
  ENSG00000184056_16 (sequence is synthesized)
ttgagcaggtgctagagcggcgaagctggcagggccttgatgaggtggtacggctgctcaactgcagtgactttgcattcacagatatgactaaggaagacaaggcttccagtgagtccc

SEQ ID NO: 658724 - DNA, 120 bp, Artificial Sequence
  ENSG00000184056_17 (sequence is synthesized)
tgcgcctcatcttggtggtgttcttgggtggttgtacattctctgagatctcagccctccggttcctgggcagagagaaaggctacaggttcattttcctgacgacagcagtcacaaaca

SEQ ID NO: 658725 - DNA, 120 bp, Artificial Sequence
  ENSG00000184056_18 (sequence is synthesized)
gcgctcgccttatggaggccatgagtgaggtgaaagcctgatgtttttcccggccagtgttgacatcttccctgaacacattcctcagtgagatgcaggcatctggcacccagctgctat

SEQ ID NO: 658726 - DNA, 120 bp, Artificial Sequence
  ENSG00000184056_19 (sequence is synthesized)
aaccaagtgtccaccaactacctgctaagagccgggagcatggaacgtgttgggatttagagaacattatctgagaaaagagttcacttcctgctcccaggatatttctcttttctgttt

SEQ ID NO: 658727 - DNA, 120 bp, Artificial Sequence
  ENSG00000184056_20 (sequence is synthesized)
atgaagtacaacccatgctgctaagatgcgagcaggaagaggcatcctttgctaaatcctgtttgaatgtcattgtaaataaagcctctgctctcagatgtaatacgttggtcgttctgg

SEQ ID NO: 658728 - DNA, 120 bp, Artificial Sequence
  ENSG00000184056_21 (sequence is synthesized)
acacgcacttccatctttattagtgaaagcccattggagcttgctacaggggcttcctgtgcttcttggcctggactttgtagtggctccaggcctggtctggttcttccctgtaaaaat

SEQ ID NO: 658729 - DNA, 120 bp, Artificial Sequence
  ENSG00000184056_22 (sequence is synthesized)
cactctaccactctgtacctgagtttcctctaccataaaatgagggagatggctgaggtgaccagcaagcacgtttccagttctaaaatgttgtgattcattacatttttgagaaaatga

SEQ ID NO: 658730 - DNA, 120 bp, Artificial Sequence
  ENSG00000184056_23 (sequence is synthesized)
acctttttgtcatttcatgtgtataaagattcttttgtttggtagtcttatagcatggtagattcattcatttaatcaacatgtaacaagcacctgccaatgccagagaatattctaagt

SEQ ID NO: 658731 - DNA, 120 bp, Artificial Sequence
  ENSG00000184056_24 (sequence is synthesized)
gctgcttcagtgacaaccatatcctgtgtcacttaagggtagggaaaggagaagccatccctccagcccctttacattattcaataatggcgcatgggaactcattccagagaactggca

SEQ ID NO: 658732 - DNA, 120 bp, Artificial Sequence
  ENSG00000184056_25 (sequence is synthesized)
gttactgaacaaaaactgccatcttccgttatggattctcttttcagggctattgctggttctccctttagttgaaataagaattgttccttgggccatgccactttatctgacccttta

SEQ ID NO: 658733 - DNA, 120 bp, Artificial Sequence
  ENSG00000184056_26 (sequence is synthesized)
tcctgggcagagagaaaggtaagagagagcagaaaggtgagaattggcctgcattgtatctgggtaacaaagtgtcagctgggcacggtggttcatacctgtaatctcagcactttggga

SEQ ID NO: 658734 - DNA, 120 bp, Artificial Sequence
  ENSG00000184056_27 (sequence is synthesized)
gcagatctcatgagccctttggatcgaattgccaatgtctccatcctgaaggcactcttatgtccattgtcttattggattctctctgtagcaacacgaagtagacaagctatacaaggt

SEQ ID NO: 658735 - DNA, 120 bp, Artificial Sequence
  ENSG00000184056_28 (sequence is synthesized)
tagaagacacgggaatatggaaggcgtggtggcaaagttaaaatcctaaagttagggctgtgaatcccagctttgaggagcgtgggtccttggccctatggaaagtatcaaagctgccct

SEQ ID NO: 658736 - DNA, 120 bp, Artificial Sequence
  ENSG00000184056_29 (sequence is synthesized)
tggacatgctgtgtagaaggctgggtcagggagaaccttcatggtcagggatctctgtttcagatgtggactttgtgacagcactttgctcccaagtggtttatgagggcctagtagatg

SEQ ID NO: 658737 - DNA, 120 bp, Artificial Sequence
  ENSG00000184056_30 (sequence is synthesized)
acaccttccgcatcaagtgtggtaagtgctatggtcctctgcatcttggcaagatggacgggtcatcagccttggcacctcccacgtggggcagggtttgtgggagagacccagaccctg

SEQ ID NO: 658738 - DNA, 120 bp, Artificial Sequence
  ENSG00000184056_31 (sequence is synthesized)
aatgaactgctggcttccaaatagtttgaggacctttatggcagttcagggaatggtaggagaagtcctcattggagatcctaatagctgtccctctgctctcaaagggagtgtcgactt

SEQ ID NO: 658739 - DNA, 120 bp, Artificial Sequence
  ENSG00000184058_0 (sequence is synthesized)
ccggcagggggagcgaggaggaagggaaccgcggccgggccagcggaggcggcggagcgcaccgcccaccagggctcagggtcctccgaccgggtgaagcttcgctggctgccaggatcc

SEQ ID NO: 658740 - DNA, 120 bp, Artificial Sequence
  ENSG00000184058_1 (sequence is synthesized)
ccggcagggatgcacttcagcaccgtcaccagggacatggaagccttcacggccagcagcctgagcagcctgggggccgcggggggcttcccgggcgccgcgtcgcccggcgccgacccg

SEQ ID NO: 658741 - DNA, 120 bp, Artificial Sequence
  ENSG00000184058_2 (sequence is synthesized)
gccgccaccagcgccgccgccgagcccgagggccccggggccagctgcgcggccgcagccaaggcgccggtgaagaagaacgcgaaggtggccggtgtgagcgtgcagctagagatgaag

SEQ ID NO: 658742 - DNA, 120 bp, Artificial Sequence
  ENSG00000184058_3 (sequence is synthesized)
gcgctgtgggacgagttcaaccagctgggcaccgagatgatcgtcaccaaggccggcaggcggatgtttcccaccttccaagtgaagctcttcggcatggatcccatggccgactatatg

SEQ ID NO: 658743 - DNA, 120 bp, Artificial Sequence
  ENSG00000184058_4 (sequence is synthesized)
ctgctcatggacttcgtgccggtggacgataagcgctaccggtacgccttccacagctcctcctggctggtggcggggaaggccgaccctgccacgccaggccgcgtgcactaccacccg

SEQ ID NO: 658744 - DNA, 120 bp, Artificial Sequence
  ENSG00000184058_5 (sequence is synthesized)
gactcgcctgccaagggcgcgcagtggatgaagcaaatcgtgtccttcgacaagctcaagctgaccaacaacctactggacgacaacggccacattattctgaattccatgcacagatac

SEQ ID NO: 658745 - DNA, 120 bp, Artificial Sequence
  ENSG00000184058_6 (sequence is synthesized)
cagccccgcttccacgtggtctatgtggacccacgcaaagatagcgagaaatatgccgaggagaacttcaaaacctttgtgttcgaggagacacgattcaccgcggtcactgcctaccag

SEQ ID NO: 658746 - DNA, 120 bp, Artificial Sequence
  ENSG00000184058_7 (sequence is synthesized)
gaaaggcttccgggactgtgaccctgaggactggccccggaaccaccggcccggcgcactgccgctcatgagcgccttcgcgcgctcgcggaaccccgtggcttccccgacgcagcccag

SEQ ID NO: 658747 - DNA, 120 bp, Artificial Sequence
  ENSG00000184058_8 (sequence is synthesized)
cagcccagcggcacggagaaagacgcggctgaggcccggcgagaattccagcgcgacgcgggcgggccagcagtgctcggggacccggcgcatcctccgcagctgctggcccgggtgcta

SEQ ID NO: 658748 - DNA, 120 bp, Artificial Sequence
  ENSG00000184058_9 (sequence is synthesized)
ccggcggcttagtcccgctgcccggcgcgcccggaggccggcccagtcccccgaaccccgagctgcgcctggaggcgcccggcgcatcggagccgctgcaccaccacccctacaaatatc

SEQ ID NO: 658749 - DNA, 120 bp, Artificial Sequence
  ENSG00000184058_10 (sequence is synthesized)
ccaccacccctacaaatatccggccgccgcctacgaccactatctcggggccaagagccggccggcgccctacccgctgcccggcctgcgtggccacggctaccacccgcacgcgcatcc

SEQ ID NO: 658750 - DNA, 120 bp, Artificial Sequence
  ENSG00000184058_11 (sequence is synthesized)
gcaccaccaccaccaccccgtgagtccagccgccgcggccgccgccgccgctgccgcagctgccgcggccgccaacatgtactcgtcggccggagccgcgccgcccggctcctacgacta

SEQ ID NO: 658751 - DNA, 120 bp, Artificial Sequence
  ENSG00000184058_12 (sequence is synthesized)
ttgccccagataacacgggccctgtcgcgctcccgccccggtcctgcacagccccgaagttcgccgggcccggccaccctgccccaagggcaagcaaggaatacgttcccccagccccag

SEQ ID NO: 658752 - DNA, 120 bp, Artificial Sequence
  ENSG00000184058_13 (sequence is synthesized)
gggccaccgcggctctccccttccccagcctcgaagccatgggggccccctcgccacccccagccccttgggctatcgaagtatccggttccccagtccctggagccaccgcgggtcctt

SEQ ID NO: 658753 - DNA, 120 bp, Artificial Sequence
  ENSG00000184058_14 (sequence is synthesized)
ccccggccccgagggccaagggggtccccgcccgccagtgccaaagcgcccggtcggaggcggaaggaagtgatatttattgttctccccgagaccgcgtcgcccgcggcccggccggca

SEQ ID NO: 658754 - DNA, 120 bp, Artificial Sequence
  ENSG00000184058_15 (sequence is synthesized)
gttgcagtgtagacagcccgagagccccgcctgcaggcggtgtagatacatgtagatactgtagatactgtagataccgccccggcgccgacttgataaacggtttcgcctcttttggaa

SEQ ID NO: 658755 - DNA, 120 bp, Artificial Sequence
  ENSG00000184058_16 (sequence is synthesized)
gtggctgtgtgaacctggggctcccctgccccgcagagtgccaacccttcaatacccagggcctggtggctgggaggaccgcaggtgaccgtctttgttgaatgctgaggccgggccatg

SEQ ID NO: 658756 - DNA, 120 bp, Artificial Sequence
  ENSG00000184058_17 (sequence is synthesized)
ggcacatggagttgtcgtgtttcccttcactttggttcatgtttgaaatttccaaaattaaaaaaacagtgacttgttcagtaaattccaatatgaataaagtgcatgttttgtaataaa

SEQ ID NO: 658757 - DNA, 120 bp, Artificial Sequence
  ENSG00000184058_18 (sequence is synthesized)
ggacgtgctcttgaagcccccaagtaagaagtctgagtccctgagaccaccacactgcaaggacacttgaaggtactcaggtttcagagcccaagtcaggaggtcaagtgtgcatgcaag

SEQ ID NO: 658758 - DNA, 120 bp, Artificial Sequence
  ENSG00000184058_19 (sequence is synthesized)
catgcaagaggtggcaggggacagatgtgctgctgttcccaggccacctgcacagctggatggtggaagcagttcacttaaaggccatgagttactcgggaggctgaggcaggaggatca

SEQ ID NO: 658759 - DNA, 120 bp, Artificial Sequence
  ENSG00000184058_20 (sequence is synthesized)
gcggcggcggcggcccgcgggtcatgatctccgccgtgtccagcccgtggctcacgcagctctcgcatttctgcgacgttgcagccttcacggccagcagcctgagcagcctgggggccg

SEQ ID NO: 658760 - DNA, 80 bp, Artificial Sequence
  ENSG00000184058_21 (sequence is synthesized)
gctccaggctttcgcgccggttgcacaacggccgcggcggcgggcaagcgcgcactcgcccgcccggcccgacggctgcg

SEQ ID NO: 658761 - DNA, 120 bp, Artificial Sequence
  ENSG00000184058_22 (sequence is synthesized)
gcgcgggccccggggagggctcggggcgccggcgacttggggtctcgggcacgctggcaccgactggtcggggaacaccgagggcggccaagagccttctctccgccagggcctcgcatg

SEQ ID NO: 658762 - DNA, 120 bp, Artificial Sequence
  ENSG00000184058_23 (sequence is synthesized)
gctgcccgatcaacccgctccctcctccactcccatctgaccccagacccacaaccctactccatgccctctcagaacccgcctctggagccgcaggctgcagacagctcttgctcccct

SEQ ID NO: 658763 - DNA, 120 bp, Artificial Sequence
  ENSG00000184058_24 (sequence is synthesized)
gggctggtgtggccctagggtggtcagccaagtactcagccccggacttcttcaagtctccctctcccaggaggccggcctgagcgcctagtccccttcccccatccccagggaactctg

SEQ ID NO: 658764 - DNA, 120 bp, Artificial Sequence
  ENSG00000184060_0 (sequence is synthesized)
gtccctctccacctgccgggcggagcgcacgggccatgggctgagccccgctgagcccgccgggccggccatgggcgatcgcgagcgcaacaagaagcggctgctggagctgctgcgggc

SEQ ID NO: 658765 - DNA, 120 bp, Artificial Sequence
  ENSG00000184060_1 (sequence is synthesized)
gccggacacaggcaacgcgcactgcgccgactgcggggcggcagatcccgactgggcctcttacaagctggggatcttcatctgtctcaactgctgcggcgtccaccgtaacttccctga

SEQ ID NO: 658766 - DNA, 120 bp, Artificial Sequence
  ENSG00000184060_2 (sequence is synthesized)
catcagcagagttaaatctgtgcgacttgacttctgggacgacagtattgtggagtttatgatccacaatggaaacctccgtgtgaaggccaagttcgaagccagagtcccagctttcta

SEQ ID NO: 658767 - DNA, 120 bp, Artificial Sequence
  ENSG00000184060_3 (sequence is synthesized)
ctacatcccccaggccaacgactgcctggtcttaaaggaacaatggattcgagctaagtatgagagacgggaatttatggctgatggggaaaccatctcgctcccaggtaaccgagaagg

SEQ ID NO: 658768 - DNA, 120 bp, Artificial Sequence
  ENSG00000184060_4 (sequence is synthesized)
attcctgtggaagcgaggaagggacaactcacagtttctgagaaggaagtttgtacttctggcaagagaaggcctcctgaagtacttcacaaaggaacagggtaaaagccccaaagctgt

SEQ ID NO: 658769 - DNA, 120 bp, Artificial Sequence
  ENSG00000184060_5 (sequence is synthesized)
catcagcattaaggacttgaatgccaccttccagacagagaagatagggcacccccatgggctgcagatcacctacaggagagatggccacaccaggaacctgtttgtgtatcatgaaag

SEQ ID NO: 658770 - DNA, 120 bp, Artificial Sequence
  ENSG00000184060_6 (sequence is synthesized)
tgggaaggagatagtggactggttcaatgccctccgtgcagcccgtctgcagtacctaaaaatggcctttcctgaactcccagagtctgagctcgtgccattcctcaccaggaactacct

SEQ ID NO: 658771 - DNA, 120 bp, Artificial Sequence
  ENSG00000184060_7 (sequence is synthesized)
caaacaaggcttcatggaaaagactgggccaaagcagaaagaacctttcaagaaaaggtggttcgccctggattgccatgagcggaggctgctctattacaagaacccactggatgcctt

SEQ ID NO: 658772 - DNA, 120 bp, Artificial Sequence
  ENSG00000184060_8 (sequence is synthesized)
cgagcagggccaggtttttcttgggaacaaggagcagggatatgaagcctacgaagacctgcccaagggcatccgaggaaatcgctggaaagccggactcaccattgtcaccccagagcg

SEQ ID NO: 658773 - DNA, 120 bp, Artificial Sequence
  ENSG00000184060_9 (sequence is synthesized)
gagatttgtcctcacttgccccagtgagaaggaacagcaggaatggctggaaagtttgcggggtgtcctgtccagccccttgacgcccctcaaccggcttactgcatcaacagagagtgg

SEQ ID NO: 658774 - DNA, 120 bp, Artificial Sequence
  ENSG00000184060_10 (sequence is synthesized)
ccgcagcagcaggtgacccattaactgaggaactggctgccactgaacacctggaactccttgtgggaagaagtttgcacctcggccctggctgcccaccatcagtgccccgcagtcagc

SEQ ID NO: 658775 - DNA, 120 bp, Artificial Sequence
  ENSG00000184060_11 (sequence is synthesized)
actgaagctgtggctttatccatcagctccctgggccttccccgcaacccacctcggggatctgaggatctggtgcatagatgaacatctatcccctcctcccccatacacacctaggct

SEQ ID NO: 658776 - DNA, 120 bp, Artificial Sequence
  ENSG00000184060_12 (sequence is synthesized)
tgaaatgccctacaggcccagaactttctcacatctgaaatggaggcattgcaatgaaaaggcacccacagcatcatgcaagtggcatcttgtaaaaaaaaaaaaaaagtttaatctgaa

SEQ ID NO: 658777 - DNA, 120 bp, Artificial Sequence
  ENSG00000184060_13 (sequence is synthesized)
tctaaccatgaggaaataatcagacaaatccacattaggggcattctgctaaacatctgacccagactcttcaaaaatgaagagtgaaagataaagtagtcaatggccgggcgcagtgag

SEQ ID NO: 658778 - DNA, 120 bp, Artificial Sequence
  ENSG00000184060_14 (sequence is synthesized)
cctgggtgacagagcgagactccgtatcagaaagaaaaagaggaactgaatgaaatctcagatggctgaaatgttagagaaacagagcaccaagtcccctgctctgtgactcgttgttcc

SEQ ID NO: 658779 - DNA, 120 bp, Artificial Sequence
  ENSG00000184060_15 (sequence is synthesized)
gctctgtgactcgttgttcctttcctctgtcttcaagcaccacgcagaaatacactggatgttctctctttgcttcaatggagacccaaggagctgggaggtctcttaagagactctctg

SEQ ID NO: 658780 - DNA, 120 bp, Artificial Sequence
  ENSG00000184060_16 (sequence is synthesized)
attctccgtggctgggtgtgatggctcatgcccataatcccagccctttgggaagctgaggcaggaggattgagaccaggagttcgagaagagcctgggcaacatagtgagaccccatct

SEQ ID NO: 658781 - DNA, 120 bp, Artificial Sequence
  ENSG00000184060_17 (sequence is synthesized)
ctacaaagaaaaaaaaattagctggacatggtaatgaatgcctgtagtcccagctactccggacactgatgtgagaggatcacttgagccagggaggtcatggctacagtgacccctcat

SEQ ID NO: 658782 - DNA, 120 bp, Artificial Sequence
  ENSG00000184060_18 (sequence is synthesized)
gagaccctatctcaaaaaaaaaaaaaatctatgcattgtatgggactttcctttggatcccccaatcaaaggataagcaatgcgtaagcctgtgtccttcctgaagcttctcgactgccc

SEQ ID NO: 658783 - DNA, 120 bp, Artificial Sequence
  ENSG00000184060_19 (sequence is synthesized)
cctgtgtccttcctgaagcttctcgactgcccagatagggaggtgagtcctctctatctcctctggctctggaagcaccttgaaaatgtgcattttcaaggacacttgctgggttgtgca

SEQ ID NO: 658784 - DNA, 120 bp, Artificial Sequence
  ENSG00000184060_20 (sequence is synthesized)
ttaagggccagtttacttgtctgcctctttgaccacctgtgaactctgttgggtgtactctgctaagttctggggatgaggaaattaataaaggtacagtcttgccttcaaggaacttat

SEQ ID NO: 658785 - DNA, 120 bp, Artificial Sequence
  ENSG00000184060_21 (sequence is synthesized)
ggtctagaggagaagaacgagaagtatagataggcagtaacaaagctacttgaagaggccaactgggattctaagggtgggaaagaacagacacaagagataaagtcctaatgaaatgga

SEQ ID NO: 658786 - DNA, 120 bp, Artificial Sequence
  ENSG00000184060_22 (sequence is synthesized)
gcagtgggtcgtccgcgtctgggctgcgggcttccaggcgggcgcctgccgaggccctgtccccggatcccgagtccctggctggcccgcagtcttcttccactgcaccggggaaacgtt

SEQ ID NO: 658787 - DNA, 120 bp, Artificial Sequence
  ENSG00000184060_23 (sequence is synthesized)
ctagacacttagattgaggagctcctgttggggcccagcctgtggcgccgggagcgggatcagacgcggaaactgagacccacagaggttgaataggttgtccacagtctcgtagctacc

SEQ ID NO: 658788 - DNA, 120 bp, Artificial Sequence
  ENSG00000184060_24 (sequence is synthesized)
ggcaaagggtatggtggggttggaaggggaatgggcagaaccttcagagcctgagggctcctatccaggccccagggagaagcactaggatgtctgactgaggaggctgggctggagaac

SEQ ID NO: 658789 - DNA, 120 bp, Artificial Sequence
  ENSG00000184060_25 (sequence is synthesized)
cagtgggactggccagctcctttggtttgggctgggctggcccctgacctctatcctcagaaactgacctggtcatctgtggtaagaagttccctcttttgcagcagaaagaacctttca

SEQ ID NO: 658790 - DNA, 120 bp, Artificial Sequence
  ENSG00000184060_26 (sequence is synthesized)
tatgcccttgttcctctttcatagacgcggaaactgagacccacagaggttgaataggttgtccacagtctcgtagctaccaagtgacaggccacgatttgatctcaggccagtgtgtta

SEQ ID NO: 658791 - DNA, 120 bp, Artificial Sequence
  ENSG00000184060_27 (sequence is synthesized)
aactccaatttgcgtgctcctgtccctccccgcgcgtcggcggagctcggggccggactggacctgccgagggaggggcggacagtcctgacggtgcggggcggggctggcggctgccca

SEQ ID NO: 658792 - DNA, 120 bp, Artificial Sequence
  ENSG00000184060_28 (sequence is synthesized)
gaaagtgggaaggagatagtggactggttcaatgccctccgtgcagcccgtctgcagtacctaaaaatggcctttcctgaactcccagagtctgagcagaaagaacctttcaagaaaagg

SEQ ID NO: 658793 - DNA, 120 bp, Artificial Sequence
  ENSG00000184060_29 (sequence is synthesized)
gggtgttcttttggacaagggcagaggacagaaaattgcttcttcacttaggttcagctttgataccacaaaagattcctgattcctgactatgctcttttcattgtcttctcttcctgc

SEQ ID NO: 658794 - DNA, 120 bp, Artificial Sequence
  ENSG00000184060_30 (sequence is synthesized)
aaaagaaaagcacagacatgccattattgccaaaaggtctcctctgtccactctgggttcccctaaccgagcccttccccaggagcttttagaggagtttggccctggcagaacccctgg

SEQ ID NO: 658795 - DNA, 120 bp, Artificial Sequence
  ENSG00000184076_0 (sequence is synthesized)
gcggtggcgcgagttggactgtgaagaaacatggcggccgcgacgttgacttcgaaattgtactccctgctgttccgcaggacctccaccttcgccctcaccatcatcgtgggcgtcatg

SEQ ID NO: 658796 - DNA, 120 bp, Artificial Sequence
  ENSG00000184076_1 (sequence is synthesized)
ttcttcgagcgcgccttcgatcaaggcgcggacgctatctacgaccacatcaacgaggggaagctgtggaaacacatcaagcacaagtatgagaacaagtagttccttggaggcccccat

SEQ ID NO: 658797 - DNA, 120 bp, Artificial Sequence
  ENSG00000184076_2 (sequence is synthesized)
ccaggccagaaggaccaggtccacccagcagctgtttgcccagagctggagcctcagcttgaagatgatgctcaaggtactcttcatggaccaccattcgctgttggcaagaaacggctt

SEQ ID NO: 658798 - DNA, 120 bp, Artificial Sequence
  ENSG00000184076_3 (sequence is synthesized)
attgcccttgagacctgcttctacattggttgctttgttaactctacctgatcttcacttgtcagtaatttgagaccacttcaaagccctctgcaaacaccccaaaggcagaatctgcta

SEQ ID NO: 658799 - DNA, 120 bp, Artificial Sequence
  ENSG00000184076_4 (sequence is synthesized)
ttttgagttttccattaacttccaaagaattctggttttcaaaacaggagccagagttggagatattacagtcaactttggcttctaagccagtaattccattcttaaatacctcactgt

SEQ ID NO: 658800 - DNA, 120 bp, Artificial Sequence
  ENSG00000184076_5 (sequence is synthesized)
cttggccatggggaagcactatggcctcagctgggggaaagaccctggcctaggggtcttagccactccccaccctagggtatagttcaggggtatccaatcctttggcttccctgggcc

SEQ ID NO: 658801 - DNA, 85 bp, Artificial Sequence
  ENSG00000184076_6 (sequence is synthesized)
atggtaaccatagctgatgagctaaaacaaaaaacaatggtttgtgcaaaaatctcataatgttttaataaagttgaagaatttg

SEQ ID NO: 658802 - DNA, 120 bp, Artificial Sequence
  ENSG00000184076_7 (sequence is synthesized)
cgagcgcgccttcgatcaaggcgcggacgctatctacgaccacatcaacgagggggtgagggcctgtgccatccctgaccttggacccgcctgaggggtgacagtggagtagagaagctg

SEQ ID NO: 658803 - DNA, 120 bp, Artificial Sequence
  ENSG00000184083_0 (sequence is synthesized)
agatcgtcgcctatcctgcttgcgcagccgctatcgcgtctgcccaccgacgaagcatgggtgtccagggcttccaagagttcctggagaagcgctgtcccggggccgtggtgcccgtgg

SEQ ID NO: 658804 - DNA, 120 bp, Artificial Sequence
  ENSG00000184083_1 (sequence is synthesized)
acctcctaaaactcgcgcgcacggtctcgcgccagcagcagcagcagcacttgcaccgccagctgccgccgactgcagccctagcgcccggggctccacgcgccgccaggggctccgtgc

SEQ ID NO: 658805 - DNA, 120 bp, Artificial Sequence
  ENSG00000184083_2 (sequence is synthesized)
ctctgcaaccgccgcttccgcccgctgccttgggtgcctactccgggggcgcggggccgactcggcaccatcaccccgctcaccacttccaccatcatggccaagcgcagcccgggctgc

SEQ ID NO: 658806 - DNA, 120 bp, Artificial Sequence
  ENSG00000184083_3 (sequence is synthesized)
ctgcaccctccgctgccgccgccgccgccccctcagctgcccggggcccgggtgctggtggacgccggctcggcgctgccgcggctctatggcggctaccagacggattgggtgtgtggc

SEQ ID NO: 658807 - DNA, 120 bp, Artificial Sequence
  ENSG00000184083_4 (sequence is synthesized)
aatggaacgccatgctgggctacttgtcagcgctgtgccaggcttgtgcctatcctggcggcgacggcctggagctcgtggtcatgttcccggggggcctgggcaaggaccggctggccg

SEQ ID NO: 658808 - DNA, 120 bp, Artificial Sequence
  ENSG00000184083_5 (sequence is synthesized)
agtggggccgtcggtgccaggccgagcggcagacagcgcaactgatcgtgggacacgtgggcaacaagggcacccctccaccgcgggcctggttcctgccaccggcctgcctgagccact

SEQ ID NO: 658809 - DNA, 120 bp, Artificial Sequence
  ENSG00000184083_6 (sequence is synthesized)
gcgtgaggctagcactcatccgcttccgggtcaaggtctttcagagccttgaagaccaccatttggaagtggtggcgtttttcagggaaaatggcttccatggccttcttgcccatgact

SEQ ID NO: 658810 - DNA, 120 bp, Artificial Sequence
  ENSG00000184083_7 (sequence is synthesized)
ccgagtatgctctctacaatattccctcttactacagttcccatgctctgaaactgagctggaatgggaagaacctcactaccaaccagttcctgatgcaagaagtagccaagcagctgg

SEQ ID NO: 658811 - DNA, 120 bp, Artificial Sequence
  ENSG00000184083_8 (sequence is synthesized)
gcctgaagaggatgaatttccccatatttgctgcactgctaggtaaccacatcctcccagatgaggacctggctgcttttcactggagcctcttgggaccagaacatcctcttgcatcac

SEQ ID NO: 658812 - DNA, 120 bp, Artificial Sequence
  ENSG00000184083_9 (sequence is synthesized)
ttaaggttcgagctcatcagctggttcttcctccctgtgacgtggtgatcaaggctgtttctgagtatgtcagttccatcaaagatccctcaaacctggatgtagttgggaaggatgttt

SEQ ID NO: 658813 - DNA, 120 bp, Artificial Sequence
  ENSG00000184083_10 (sequence is synthesized)
tcaaacagtctcagtccaggacagaagataaaatagagcgattcaagaaagcagttgagtattattcagtcacaaccaaactctcttcgctgccagtgggtccctcctttctaggttttc

SEQ ID NO: 658814 - DNA, 120 bp, Artificial Sequence
  ENSG00000184083_11 (sequence is synthesized)
ggaataataggcttggaaatcctccccttccacgaaatcaagtgggcaccatttctgctggaaagccaatgttttctcatcaagtgccccagaaagtgaaatatccaccaccattcccag

SEQ ID NO: 658815 - DNA, 120 bp, Artificial Sequence
  ENSG00000184083_12 (sequence is synthesized)
tgggacccaactcatctcttctcttctcctcccatgctttgggggaatcccatgctttttctgaggatcccatgctgcagaacagcccctttgccaattgggctgtctcctatgactctt

SEQ ID NO: 658816 - DNA, 120 bp, Artificial Sequence
  ENSG00000184083_13 (sequence is synthesized)
ctgcatcccagtttcccaattacctgccttctaaagcctcacctcctttgggaccagactcttcccactcctcttcctctgatggtgatgagccaaatggagctagctctgatcatatca

SEQ ID NO: 658817 - DNA, 120 bp, Artificial Sequence
  ENSG00000184083_14 (sequence is synthesized)
cagaagcatttcatcaccagcctgagtggggaaatcccaatcgtgacagagggtcctgggcacagcctgttgatactggagtttcagaagcgagcctaggtgatggtgagccccacatcc

SEQ ID NO: 658818 - DNA, 120 bp, Artificial Sequence
  ENSG00000184083_15 (sequence is synthesized)
catctctgctgtctatgtctacaaggaaccacatggatatcaccattccacccttacctccagtagctccagaagtcttgagagttgctgaacacagacaccggaggggtcttatgtacc

SEQ ID NO: 658819 - DNA, 120 bp, Artificial Sequence
  ENSG00000184083_16 (sequence is synthesized)
catatatctaccatgtcctcactaagggtgaaattaagatccccgtatgtattgaggatgagtgtaacatggagctgcctccagctgctctcttattccggtcagctcgtcaatatgtat

SEQ ID NO: 658820 - DNA, 120 bp, Artificial Sequence
  ENSG00000184083_17 (sequence is synthesized)
atggagttctttttagtctggcagagacacagaggaaaatggaacgcttggccatgcgacggcggctgcctgtggaagttccttcagtgatccttaaagagtggtctgcctataaaggga

SEQ ID NO: 658821 - DNA, 120 bp, Artificial Sequence
  ENSG00000184083_18 (sequence is synthesized)
agtcacctcaaacccctgagctggtgtctgcactgacatttcgggaatggacttgcccaaacctcaagaagctctggctaggcaaagcagttgaagacaagaacagaaggatgcgggcct

SEQ ID NO: 658822 - DNA, 120 bp, Artificial Sequence
  ENSG00000184083_19 (sequence is synthesized)
tcctggcctgtatgaagtcggacacgcccagtatgctcaatccagctaatgtccccacccatctgctgctcatgtgttgtgtactccggtacatggttcagtggcctggtggccgaatcc

SEQ ID NO: 658823 - DNA, 120 bp, Artificial Sequence
  ENSG00000184083_20 (sequence is synthesized)
tgcatcgccatgagctagacaccttccttgcacaggcagtgtctacccagctttatgaaccagatcgactccaagaactcaagattgagaaactggatgcccgagggatccagcttgctg

SEQ ID NO: 658824 - DNA, 120 bp, Artificial Sequence
  ENSG00000184083_21 (sequence is synthesized)
ccctcttcatgagtggagtcgacacagctctgtttgctaatgatgcctgtggccagccagtcccttgggagcattgctgtccatggatttactttgatggcaagctgttccagagcaagc

SEQ ID NO: 658825 - DNA, 120 bp, Artificial Sequence
  ENSG00000184083_22 (sequence is synthesized)
taattaaagcaggccgagagcgagtatctctggttgagctctgtgatggccaggctgacctggcaaccaaagtggaaaagatgagacagagcatccttgaaggagtcaacatgaatcatc

SEQ ID NO: 658826 - DNA, 120 bp, Artificial Sequence
  ENSG00000184083_23 (sequence is synthesized)
caccgccttctgctctacttccgtcacctacttttgtgcctcccatggtgccctctctctaccctgtttcactttattcccgagctatgggctccatgccacttccccctcaagggagga

SEQ ID NO: 658827 - DNA, 120 bp, Artificial Sequence
  ENSG00000184083_24 (sequence is synthesized)
gccggggatttgcaggtctccatccaatcccaccccaaggaggaaaactggagattgctgggatggttgtgggccagtgggctggcagcagatcctccaggggccgaggatccttcggca

SEQ ID NO: 658828 - DNA, 120 bp, Artificial Sequence
  ENSG00000184083_25 (sequence is synthesized)
tgcaagtggtttctgtcggtgggccaggaaaggggcatggaaaagaacagactggtagaggatccaagggacacaaaaaaggaaataagcaaggctcttcagatggagtttctaaatccc

SEQ ID NO: 658829 - DNA, 120 bp, Artificial Sequence
  ENSG00000184083_26 (sequence is synthesized)
tggagcttcatcaaggtcggtctcgctcccaggtaaatggaaacagtggcgcattgatcaaggaagagaagagtgatcatcgtcttccagctccatcacaatgtgccttatccagagaca

SEQ ID NO: 658830 - DNA, 120 bp, Artificial Sequence
  ENSG00000184083_27 (sequence is synthesized)
gcaatgagtgtaataatggtaaccgctacctccctatgaataatagggagaagaaccacttacaagagcaaaagctagaaactgtggcacaacggaaagaggactgataagctgaagatg

SEQ ID NO: 658831 - DNA, 120 bp, Artificial Sequence
  ENSG00000184083_28 (sequence is synthesized)
gcttcaccaaaccaggaagagggaaaaacttttacttttctgattttaggcccaagctagaggaggatataaatgcttaccctagatttctccaggattttggtgggatgtcctattgtg

SEQ ID NO: 658832 - DNA, 120 bp, Artificial Sequence
  ENSG00000184083_29 (sequence is synthesized)
tccatcttttccccttccctgcctgtttctgggacttcagattcagtggtctgtttctggagaagttctggtcaaagatgaatggcagtaagactaggtcctagtctcaaattgaagata

SEQ ID NO: 658833 - DNA, 120 bp, Artificial Sequence
  ENSG00000184083_30 (sequence is synthesized)
tagcaccaatagtttatttatctcctctgggagcctagtaaggcagtagctgtcagaaattgggtatcatcacataaggtcctatagaaaagctctagctttggtttttctgagcattta

SEQ ID NO: 658834 - DNA, 120 bp, Artificial Sequence
  ENSG00000184083_31 (sequence is synthesized)
taatgatactcattatcaaagacttatatgataaacctatgaggttgtggggacagctgtggcctcctgaggtttttttttgttttttttttttctctatgaagtggtatctacctcttc

SEQ ID NO: 658835 - DNA, 120 bp, Artificial Sequence
  ENSG00000184083_32 (sequence is synthesized)
ttcactccttccaacttacctacccctggattttgtaccaccacctctagctttggcctgacaatcagataggtagatgttttcagaaaagtaaggtagtattggttattttaattttta

SEQ ID NO: 658836 - DNA, 120 bp, Artificial Sequence
  ENSG00000184083_33 (sequence is synthesized)
cttcaaaaaaactatcaatggcctttgtactgggggattcaagtgaatcagaaaagtactgggcagatttttcctgcctctcaaccagtgcattgtttgtaaaatagaagatgtggcaca

SEQ ID NO: 658837 - DNA, 120 bp, Artificial Sequence
  ENSG00000184083_34 (sequence is synthesized)
tagaagatgtggcacagttcattcactccctattgcccacaccatgaaagggtgggaatcagtgtaatgaacttgagtacgaaagggactcaagagactgtgtgtgtgtgtgtgtgtgtg

SEQ ID NO: 658838 - DNA, 120 bp, Artificial Sequence
  ENSG00000184083_35 (sequence is synthesized)
tgtgaatgtgtgcttgtgtgtgggtgtgggtggatgttgtgtgggtgggtgtatatatgaatgtgtgtatatgcatacacataccctttatataaagagacagatctatttatctataca

SEQ ID NO: 658839 - DNA, 77 bp, Artificial Sequence
  ENSG00000184083_36 (sequence is synthesized)
ttatatatatgtaagtgtgtgtgtatgtgtgtatatatgtgtgtatatatatatacacacataggtgatgtcccaga

SEQ ID NO: 658840 - DNA, 120 bp, Artificial Sequence
  ENSG00000184083_37 (sequence is synthesized)
cagaggatttactcaatttcccagaaatgcttccactgctatggagtggaaggtttcaaaagaccacacttttaatctgaaattcttactaagtcacagtgcattcacaactatgagaag

SEQ ID NO: 658841 - DNA, 120 bp, Artificial Sequence
  ENSG00000184083_38 (sequence is synthesized)
ttggatgggcttctctaaatcagacaaaaagtactttccagaaattgcctgttcagaacaataaactcttgggttgttacaagcttaatcttgaacagagccctcacatcccatatggtg

SEQ ID NO: 658842 - DNA, 120 bp, Artificial Sequence
  ENSG00000184083_39 (sequence is synthesized)
aaaacaggaggttggaatgggattgggaagagttgggcatttccttatgaaggtttggagagaaaaggggggatgggaggtgactaccatttgaaagggctttcagccaatttggaggaa

SEQ ID NO: 658843 - DNA, 120 bp, Artificial Sequence
  ENSG00000184083_40 (sequence is synthesized)
atctcttctggaactccagggtcaaattggtttcaggctagaattgattgacatgaatccctgaaggagagaggactagctttggaaagatagggtagggaagtgtgaggaaactatttg

SEQ ID NO: 658844 - DNA, 120 bp, Artificial Sequence
  ENSG00000184083_41 (sequence is synthesized)
attttacacgcctagattgtttcatttgttcattgacattctgactactggatcttttcatttgctttgcaaggaagactttagaggactctggcctgggccttgagaagaattctatta

SEQ ID NO: 658845 - DNA, 120 bp, Artificial Sequence
  ENSG00000184083_42 (sequence is synthesized)
aaagattctcagcctcctgtgtggccaggatctgcccaggataaagaggctattcctccttgctggagataatcttgagacaaccttgcatttccagtttccctccttgggcagcctaac

SEQ ID NO: 658846 - DNA, 120 bp, Artificial Sequence
  ENSG00000184083_43 (sequence is synthesized)
tatgagggagggaaacatggcttgcaataaattagcattgtgtcttcattcaggaattgaggcttccagcctcatatacctccttttgggctttgtgatattcttgcccaagaagtacca

SEQ ID NO: 658847 - DNA, 120 bp, Artificial Sequence
  ENSG00000184083_44 (sequence is synthesized)
tttctacagaaatacaactgactaatcttctagcagggttctttttgaaaaaccccatgcaccttaacccacagcaggtccttggtgatttttgcccagacaaccagaaggctatttgct

SEQ ID NO: 658848 - DNA, 120 bp, Artificial Sequence
  ENSG00000184083_45 (sequence is synthesized)
tactgcccacttacaatgaccagatcataggaaattgaaaacagtgtcagactatttagtcctaatctgtcccagattaagagaatccatgattttcagggggagggagccctgcaatgc

SEQ ID NO: 658849 - DNA, 120 bp, Artificial Sequence
  ENSG00000184083_46 (sequence is synthesized)
cttgacccctgcccagatacttcttacataaaccaaagaaaaatgacaagagtgtacatctaaccagacagaagtagaaacaaagtatagaaaaacctcctctttggaatcagctccctt

SEQ ID NO: 658850 - DNA, 120 bp, Artificial Sequence
  ENSG00000184083_47 (sequence is synthesized)
aatgtggtcccccttctcttggacctgcccaacctttcacaacgtcttgaaggtaggacttctatatccagcaaaggaagggatagtagtaaatttacatggcttggaattttctttctg

SEQ ID NO: 658851 - DNA, 120 bp, Artificial Sequence
  ENSG00000184083_48 (sequence is synthesized)
gagccacagagggatgaatcctttggagctctaaaagcaaccagtatcactgagctgtgagatacctatatctccattttctaataggaagcacttggacttaaaattgctaagatattt

SEQ ID NO: 658852 - DNA, 120 bp, Artificial Sequence
  ENSG00000184083_49 (sequence is synthesized)
tttgcagttgctatttctgtgcatcttgaatctatctgacacaatcaaatgacagtattgttaactctcacaccattaagaaaatttcttattttgtaggcattcactgtgagaggtaaa

SEQ ID NO: 658853 - DNA, 120 bp, Artificial Sequence
  ENSG00000184083_50 (sequence is synthesized)
attgctgctttggcaggtatgattccagtttgccaaacggcttttcttccttccacaacctctttttcccctagcccagggtgaaacaagtgggtcatctccaaccttgatttttatttg

SEQ ID NO: 658854 - DNA, 120 bp, Artificial Sequence
  ENSG00000184083_51 (sequence is synthesized)
gattcagcattttgggtttggaaggttacaagaaggaaccataaatggccatattcctagatttttatttatctgacaaaatacacaacttaaaagccaggaaaactaaggttcattaca

SEQ ID NO: 658855 - DNA, 120 bp, Artificial Sequence
  ENSG00000184083_52 (sequence is synthesized)
gggagatgaactttttctaattggaggacaaattgtggaaggtggggtctgatctttgcttcaccacttgaagagactgtcatccttcacctgaggttccatttctagcttttatgtgac

SEQ ID NO: 658856 - DNA, 120 bp, Artificial Sequence
  ENSG00000184083_53 (sequence is synthesized)
ctctcttgaacaaagtcatttgggaacccccagaaatgacccctttacattgtaggaccataagcaaaacactggttgtgtatagtcactgatccccaaggacttgcagttttttatttc

SEQ ID NO: 658857 - DNA, 120 bp, Artificial Sequence
  ENSG00000184083_54 (sequence is synthesized)
tgctggtgtgtcttgggatcagcttataactcctactcttacttagtcagtgaccagtccagtctggtctggaccaggcctgacaaacttctgctcacttgcatcattttcattctgagc

SEQ ID NO: 658858 - DNA, 120 bp, Artificial Sequence
  ENSG00000184083_55 (sequence is synthesized)
cagtaggactttgggtagactttaaagcccaagaattggtactcgctttggctagtgacatttgatttttgtctccatcttgatttctgacatcattggccaagtcacattaactttttt

SEQ ID NO: 658859 - DNA, 120 bp, Artificial Sequence
  ENSG00000184083_56 (sequence is synthesized)
tgatcactgagaaaaacagtcgaacaaggcattacagagggtggttaaggtagagggtggggggcaggaatgcttatgtaggatagaaagaatgtgggggtagctgtttggttatggtga

SEQ ID NO: 658860 - DNA, 120 bp, Artificial Sequence
  ENSG00000184083_57 (sequence is synthesized)
tccagtcctttggaaccttacaaggctcctgtgggcatgtcaatgttaccattacagcctctacgacccacccacctttgaaaagtcagtacaagtagaccacagtttaaagtagttagt

SEQ ID NO: 658861 - DNA, 120 bp, Artificial Sequence
  ENSG00000184083_58 (sequence is synthesized)
ataattctactaaggtttaatcattatacttgttcacttcctggtgcatatttcctaaatatgcttggggtgtggggtggggggttgagttttcactgttccattgcgtgtcatcttata

SEQ ID NO: 658862 - DNA, 120 bp, Artificial Sequence
  ENSG00000184083_59 (sequence is synthesized)
tttttctccatcctgtgactttggcatcttactcgactttctattttcttttcccttggcttattgcagtagtctgctggtgcaggtagagagctcagtgcacctattcccctgttactg

SEQ ID NO: 658863 - DNA, 120 bp, Artificial Sequence
  ENSG00000184083_60 (sequence is synthesized)
ctaattatcttgaatattgtcagaggttattttgatgttctaagaatataaagtcattttttacaaaatcatcttttccaagttaaaagcaaaataaaaaaatcccctgtgctagggtgc

SEQ ID NO: 658864 - DNA, 120 bp, Artificial Sequence
  ENSG00000184083_61 (sequence is synthesized)
ccatttcagcttttgacattgcccctgtacttttatagatgctctttttgtccgtgttggtagtaactaatgactagtgaattttcatgtaaatgaagcaaaataaatatttcagatttt

SEQ ID NO: 658865 - DNA, 120 bp, Artificial Sequence
  ENSG00000184083_62 (sequence is synthesized)
aaataaatatttcagattttattaatctctcataacccagccaaatctgatgacttcattttaattgcttcccagaaagcacttcccctcctaccttctattctattctattctattcta

SEQ ID NO: 658866 - DNA, 120 bp, Artificial Sequence
  ENSG00000184083_63 (sequence is synthesized)
ttctattctattctgttctattctgttctattctgtttttagaataacacactaggtaaagaaactttaactgcaaggagtcagtgacttttagtgctccctgataaatgatgttattga

SEQ ID NO: 658867 - DNA, 120 bp, Artificial Sequence
  ENSG00000184083_64 (sequence is synthesized)
caaaagtaaaaaattatttcattgtttttttcctgtattactatctcctctcctgtgcttttgacagtgtgtttagtggatggataatatgtatttctctttcccactcccagattccaa

SEQ ID NO: 658868 - DNA, 120 bp, Artificial Sequence
  ENSG00000184083_65 (sequence is synthesized)
attccctgcctttttggcccacctcaccacaaaagctccatagtttattaatgtaagtttgaatggatgcttctttggggaaacttcaggagttaatggaagagtttcagaaaggaatga

SEQ ID NO: 658869 - DNA, 120 bp, Artificial Sequence
  ENSG00000184083_66 (sequence is synthesized)
gaatgcctcaggagttgttctgtgatggaaattggtctgttgttctgttaatgctgatggaaagaaacttacaacgcttaataaaaatctattcttttagtaaaaaaaattgtgaaataa

SEQ ID NO: 658870 - DNA, 120 bp, Artificial Sequence
  ENSG00000184083_67 (sequence is synthesized)
agcaagctgccatgttgtgagctgccctatggagaggcccacaggaaaagaaactgagggaagcctccaaccaacactcagtgaggaactgaggccctcagtccaactacagcctgcaag

SEQ ID NO: 658871 - DNA, 120 bp, Artificial Sequence
  ENSG00000184083_68 (sequence is synthesized)
gaactgaattgctgccaacagccacgtacgtgagtgagcttggaagcggatccttccccaggcaagccttgagatgactgcagccctggctggcaccttgattgaagcctgtaggagacc

SEQ ID NO: 658872 - DNA, 120 bp, Artificial Sequence
  ENSG00000184083_69 (sequence is synthesized)
ttgagccagaggacccagctaagccatgcctacagatactatgagataataaatgttgttttaagccactaagtttgggggctactttgttacacagaaatagataactgaaacaccatt

SEQ ID NO: 658873 - DNA, 120 bp, Artificial Sequence
  ENSG00000184083_70 (sequence is synthesized)
agcctttctcagtgttcagagtatgaaagaagagctacaatggagattcagaattactgtgccatggtactgaaaatgaagcatgatgtcattgaaatgccgaattctacaaatacctcg

SEQ ID NO: 658874 - DNA, 120 bp, Artificial Sequence
  ENSG00000184083_71 (sequence is synthesized)
gaagtagttaccgaaatataaaaaacactatgccaaacttctgtgtttggaaatgcctacatttctaaacagctgttttccattatgaaataggatcaaattagtcacttgaagtgaaag

SEQ ID NO: 658875 - DNA, 120 bp, Artificial Sequence
  ENSG00000184083_72 (sequence is synthesized)
cattcaaggctcaattctgtactgcatgttgtaacaaaaatataagacctaacattgacctcttggcacataaatgtgtcaggccaccagttccaagtcaaaggagaataaacaaacaaa

SEQ ID NO: 658876 - DNA, 120 bp, Artificial Sequence
  ENSG00000184108_0 (sequence is synthesized)
gtcataacaacataggaacaggtcacccgcgtgttactcaaaactgtaggacggcagtgagggctttgctaatcccagaacagaggtgtaacctggctgcatatccagcctcgagaaaat

SEQ ID NO: 658877 - DNA, 120 bp, Artificial Sequence
  ENSG00000184108_1 (sequence is synthesized)
gtctacagcagatctgatggagaacctcagggaggaactcacctgtttcatctgcttagactatttcagcagcccagtgaccaccgagtgtgggcacagcttttgtctggtgtgtctcct

SEQ ID NO: 658878 - DNA, 120 bp, Artificial Sequence
  ENSG00000184108_2 (sequence is synthesized)
caggagctgggaggaacataacacacctttatcttgtcctgagtgctggaggaccttggagggcccgcatttccagtcaaacgagcgtctggggaggctggccagcatcgccaggcagct

SEQ ID NO: 658879 - DNA, 120 bp, Artificial Sequence
  ENSG00000184108_3 (sequence is synthesized)
ccggtcccaggtgctgcagagcgaggatgagcagggcagctacgggaggatgcccaccactgccaaggcgctctccgatgacgagcagggtggaagcgccttcgtagcccagagccatgg

SEQ ID NO: 658880 - DNA, 120 bp, Artificial Sequence
  ENSG00000184108_4 (sequence is synthesized)
tgcaaacagagtgcatctctccagcgaggctgaggagcatcacagagagaaactccaggaaatcctgaatcttttgcgtgtaaggagaaaggaagctcaggctgtactaacccatgagaa

SEQ ID NO: 658881 - DNA, 120 bp, Artificial Sequence
  ENSG00000184108_5 (sequence is synthesized)
ggagagagtgaaactgtgccaggaagaaacaaagacttgtaaacaggttgttgtgtcagaatacatgaaaatgcaccagttcctgaaggaagaggagcagctgcaactccagctactaga

SEQ ID NO: 658882 - DNA, 120 bp, Artificial Sequence
  ENSG00000184108_6 (sequence is synthesized)
acaggaagagaaagagaacatgaggaagctgaggaacaatgagatcaaactgacccagcaaatcagaagcctaagcaaaatgatcgcacagattgagtcctcaagtcaaagctcggcttt

SEQ ID NO: 658883 - DNA, 120 bp, Artificial Sequence
  ENSG00000184108_7 (sequence is synthesized)
catcacgggaatgaaggagatgctaagaaaattcagcacggagataacgctggacccagccacagctaatgcctatctcgtgttgtcggaggatctgaagagtgtgaaatatgggggaag

SEQ ID NO: 658884 - DNA, 120 bp, Artificial Sequence
  ENSG00000184108_8 (sequence is synthesized)
cagacagcagctacccgacaacccggaaagatttgaccagtctgcgactgtgctgggtactcagatcttcaccagtgggagacactactgggaggtggaggtgggaaacaagaccgagtg

SEQ ID NO: 658885 - DNA, 120 bp, Artificial Sequence
  ENSG00000184108_9 (sequence is synthesized)
ggaagtgggcatctgcaaggactctgtgagcagaaaggggaatctccccaagccacctggggacctgttctcactaataggtttaaaaatcggagatgattacagcctctgggtctcgtc

SEQ ID NO: 658886 - DNA, 120 bp, Artificial Sequence
  ENSG00000184108_10 (sequence is synthesized)
acctttgaaaggtcagcacgtcagagagcctgtgtgtaaggttggtgtcttcctggactatgaatctggacatatagcattctacaacgggacggatgaatccctcatctacagcttccc

SEQ ID NO: 658887 - DNA, 120 bp, Artificial Sequence
  ENSG00000184108_11 (sequence is synthesized)
gcaggcttctttccaagaggccctcaggcctatcttttccccctgcctcccaaatgaggggacaaacacagaccctctcaccatctgctcactgaacagccacgtctgaggggcgtgccc

SEQ ID NO: 658888 - DNA, 120 bp, Artificial Sequence
  ENSG00000184108_12 (sequence is synthesized)
tgagccgtcacagcgggcgatgtctgagaccaagacacaactattaagacgatgaaggcatcgacagtattaatgtcaggtgatctgaaataaactcccgtaaccccaccccacccccaa

SEQ ID NO: 658889 - DNA, 120 bp, Artificial Sequence
  ENSG00000184108_13 (sequence is synthesized)
gagtttccattaacttgatcccattatgaacagccacattacacaatcaacttcaaccccaatagaagagagctgatcatattctgtgtctttaagtaaatgtattctctgggctacccc

SEQ ID NO: 658890 - DNA, 120 bp, Artificial Sequence
  ENSG00000184108_14 (sequence is synthesized)
atgtgtgtgctggtcactcaaatattgagcccctattaccatgaatcctactgccataggccagattttataaatatatgtcactttttcaagtgtatttaattatttgactcttaaaaa

SEQ ID NO: 658891 - DNA, 120 bp, Artificial Sequence
  ENSG00000184108_15 (sequence is synthesized)
gaaacaccttgtgttcaccacagcacatccctggaagaaactggggacgcttttctctgctctctgtgctcccactcatggtgtgcttcatgggaagcagattctgtgagctttgcaagg

SEQ ID NO: 658892 - DNA, 120 bp, Artificial Sequence
  ENSG00000184108_16 (sequence is synthesized)
actgtatgcaaaatgaatttcgtctgtgttatgatcaaagcgcaccatgctaacttctttcttttttacccgtaggaagtgagaggagccctggaaaggagcgagccactcttgcttcag

SEQ ID NO: 658893 - DNA, 120 bp, Artificial Sequence
  ENSG00000184108_17 (sequence is synthesized)
cagcacatccctggaagaaactggggacgcttttctctgctctctgtgctcccactcatggtgtgcttcatgggaagcagattctgaagtgagaggagccctggaaaggagcgagccact

SEQ ID NO: 658894 - DNA, 120 bp, Artificial Sequence
  ENSG00000184110_0 (sequence is synthesized)
aggcttgtccccgcccccttatggcgcgaaggccactgggagttgtagtctcccagtgtagttagtcggcgcttcccggaagtgacgcgaggacccgccttctctctcggcgtttccgct

SEQ ID NO: 658895 - DNA, 120 bp, Artificial Sequence
  ENSG00000184110_1 (sequence is synthesized)
gtcagggccctgcggtgtgactcgcgggctcagctggtccggccgtagcacctccgcgccgtcgccatgtcgcggtttttcaccaccggttcggacagcgagtccgagtcgtccttgtcc

SEQ ID NO: 658896 - DNA, 120 bp, Artificial Sequence
  ENSG00000184110_2 (sequence is synthesized)
ggggaggagctcgtcaccaaacctgtcggaggcaactatggcaaacagccattgttgctgagcgaggatgaagaagataccaagagagttgtccgcagtgccaaggacaagaggtttgag

SEQ ID NO: 658897 - DNA, 120 bp, Artificial Sequence
  ENSG00000184110_3 (sequence is synthesized)
gagctgaccaaccttatccggaccatccgtaatgccatgaagattcgtgatgtcaccaagtgcctggaagagtttgagctcctgggaaaagcatatgggaaggccaaaagcattgtggac

SEQ ID NO: 658898 - DNA, 120 bp, Artificial Sequence
  ENSG00000184110_4 (sequence is synthesized)
aaagaaggtgtcccccggttctatatccgcatcctggctgacctagaggactatcttaatgagctttgggaagataaggaagggaagaagaagatgaacaagaacaatgccaaggctctg

SEQ ID NO: 658899 - DNA, 120 bp, Artificial Sequence
  ENSG00000184110_5 (sequence is synthesized)
agcaccttgcgtcagaagatccgaaaatacaaccgtgatttcgagtcccatatcacaagctacaagcagaaccccgagcagtctgcggatgaagatgctgagaaaaatgaggaggattca

SEQ ID NO: 658900 - DNA, 120 bp, Artificial Sequence
  ENSG00000184110_6 (sequence is synthesized)
gaaggctcttcagatgaggatgaggatgaggacggagtcagtgctgcaactttcttgaagaagaaatcagaagctccttctggggagagtcgcaagttcctcaaaaagatggatgatgaa

SEQ ID NO: 658901 - DNA, 120 bp, Artificial Sequence
  ENSG00000184110_7 (sequence is synthesized)
gatgaggactcagaagattccgaagatgatgaagactgggacacaggttccacatcttccgattccgactcagaggaggaagaagggaaacaaaccgcgctggcctcaagatttcttaaa

SEQ ID NO: 658902 - DNA, 120 bp, Artificial Sequence
  ENSG00000184110_8 (sequence is synthesized)
aaggcacccaccacagatgaggacaagaaggcagccgagaagaaacgggaggacaaagctaagaagaagcacgacaggaaatccaagcgcctggatgaggaggaggaggacaatgaaggc

SEQ ID NO: 658903 - DNA, 120 bp, Artificial Sequence
  ENSG00000184110_9 (sequence is synthesized)
ggggagtgggaaagggtccggggcggagtgccgttggttaaggagaagccaaaaatgtttgccaagggaactgagatcacccatgctgttgttatcaagaaactgaatgagatcctacag

SEQ ID NO: 658904 - DNA, 120 bp, Artificial Sequence
  ENSG00000184110_10 (sequence is synthesized)
gcacgaggcaagaagggaactgatcgtgctgcccagattgagctgctgcaactgctggttcagattgcagcggaaaacaacctgggagagggcgtcattgtcaagatcaagttcaatatc

SEQ ID NO: 658905 - DNA, 120 bp, Artificial Sequence
  ENSG00000184110_11 (sequence is synthesized)
atcgcctctctctatgactacaaccccaacctggcaacctacatgaagccagagatgtgggggaagtgcctggactgcatcaatgagctgatggatatcctgtttgcaaatcccaacatt

SEQ ID NO: 658906 - DNA, 120 bp, Artificial Sequence
  ENSG00000184110_12 (sequence is synthesized)
tttgttggagagaatattctggaagagagtgagaacctgcacaacgctgaccagccactgcgtgtccgtggctgcatcctaactctggtggaacgaatggatgaagaatttaccaaaata

SEQ ID NO: 658907 - DNA, 120 bp, Artificial Sequence
  ENSG00000184110_13 (sequence is synthesized)
aagagtacgtggagcacttgaaggatgaggcccaggtgtgtgccatcatcgagcgtgtgcagcgctacctggaggagaagggcactaccgaggaggtctgccgcatctacctgctgcgca

SEQ ID NO: 658908 - DNA, 120 bp, Artificial Sequence
  ENSG00000184110_14 (sequence is synthesized)
tcctgcacacctactacaagtttgattacaaggcccatcagcgacagctgaccccgcctgagggctcctcaaagtctgagcaagaccaggcagaaaatgagggcgaggactcggctgtgt

SEQ ID NO: 658909 - DNA, 120 bp, Artificial Sequence
  ENSG00000184110_15 (sequence is synthesized)
tgatggagagactgtgcaagtacatctacgccaaggaccgcacagaccggatccgcacatgtgccatcctctgccacatctaccaccatgctctgcactcgcgctggtaccaggcccgcg

SEQ ID NO: 658910 - DNA, 120 bp, Artificial Sequence
  ENSG00000184110_16 (sequence is synthesized)
acctcatgctcatgagccacttgcaggacaacattcagcatgcagacccgccagtgcagatcctttacaaccgcaccatggtgcagctgggcatctgtgccttccgccaaggcctgacca

SEQ ID NO: 658911 - DNA, 120 bp, Artificial Sequence
  ENSG00000184110_17 (sequence is synthesized)
aggacgcacacaacgccctgctggacatccagtcgagtggccgagccaaggagcttctgggccagggcctgctgctgcgcagcctgcaggagcgcaaccaggagcaggagaaggtggagc

SEQ ID NO: 658912 - DNA, 120 bp, Artificial Sequence
  ENSG00000184110_18 (sequence is synthesized)
ggcgccgtcaggtccccttccacctgcacatcaacctggagctgctggagtgtgtctacctggtgtctgccatgctcctggagatcccctacatggccgcccatgagagcgatgcccgcc

SEQ ID NO: 658913 - DNA, 120 bp, Artificial Sequence
  ENSG00000184110_19 (sequence is synthesized)
gacgcatgatcagcaagcagttccaccaccagctgcgcgtgggcgagcgacagcccctgctgggtccccctgagtccatgcgggaacatgtggtcgctgcctccaaggccatgaagatgg

SEQ ID NO: 658914 - DNA, 120 bp, Artificial Sequence
  ENSG00000184110_20 (sequence is synthesized)
gtgactggaagacctgtcacagttttatcatcaatgagaagatgaatgggaaagtgtgggaccttttccccgaggctgacaaagtccgcaccatgctggttaggaagatccaggaagagt

SEQ ID NO: 658915 - DNA, 120 bp, Artificial Sequence
  ENSG00000184110_21 (sequence is synthesized)
cactgaggacctacctcttcacctacagcagtgtctatgactccatcagcatggagacgctgtcagacatgtttgagctggatctgcccactgtgcactccatcatcagcaaaatgatca

SEQ ID NO: 658916 - DNA, 120 bp, Artificial Sequence
  ENSG00000184110_22 (sequence is synthesized)
ttaatgaggagctgatggcctccctggaccagccaacacagacagtggtgatgcaccgcactgagcccactgcccagcagaacctggctctgcagctggccgagaagctgggcagcctgg

SEQ ID NO: 658917 - DNA, 120 bp, Artificial Sequence
  ENSG00000184110_23 (sequence is synthesized)
tggagaacaacgaacgggtgtttgaccacaagcagggcacctacgggggctacttccgagaccagaaggacggctaccgcaaaaacgagggctacatgcgccgcggtggctaccgccagc

SEQ ID NO: 658918 - DNA, 120 bp, Artificial Sequence
  ENSG00000184110_24 (sequence is synthesized)
agcagtctcagacggcctactgagctctccactctgtttcccgcctgggccatccaaccttgaagtcctaaaccacacctcagtcactaaaggtctgtttaaagttgttctggttgattg

SEQ ID NO: 658919 - DNA, 120 bp, Artificial Sequence
  ENSG00000184110_25 (sequence is synthesized)
cttgttgccacaaaggtgtgttgagcccattcatttgctgattatatttctgagctgctaccacatgacagacacaaggctcagatgaagaggtgaattgaacacgttcctgacctcaaa

SEQ ID NO: 658920 - DNA, 120 bp, Artificial Sequence
  ENSG00000184110_26 (sequence is synthesized)
agtgtagttagtcggcgcttcccggaagtgacgcgaggacccgccttctctctcggcgtttccgctgtcagggccctgcggtgtgactcgcgggctcagctggttggtattttttgggcc

SEQ ID NO: 658921 - DNA, 120 bp, Artificial Sequence
  ENSG00000184110_27 (sequence is synthesized)
gtggcaggcagccctgcaccggacacacagtggcattcaacttcctgcctgccagccccagtgtgtggttcccagcctgacaaccttggcaccccagcaccccagcaggaggggtttctg

SEQ ID NO: 658922 - DNA, 120 bp, Artificial Sequence
  ENSG00000184110_28 (sequence is synthesized)
cttgtggtcccctggccaccagcctcggccagctggttgtggaccagccgtgacctggggcaacccagccaacctcaccgtccaatgggctgcagccacctctctccagtgaggtctgag

SEQ ID NO: 658923 - DNA, 120 bp, Artificial Sequence
  ENSG00000184110_29 (sequence is synthesized)
tttttgggcctcgtgcttcgtggtgggagacccaggtcgaggtccgggtggggccggtgaggggttgggcgtcgggaggtgttggctcgggcctcttcgcgtggccggtgacgccttggc

SEQ ID NO: 658924 - DNA, 120 bp, Artificial Sequence
  ENSG00000184110_30 (sequence is synthesized)
tggcttaaccagaacagccacctgtctggccggtgcaaatttaagtagacacttggtctttcccagttgccagcatcctgcagtcctcctgcatgtaaacacataatttcgtgtcaaaaa

SEQ ID NO: 658925 - DNA, 88 bp, Artificial Sequence
  ENSG00000184110_31 (sequence is synthesized)
cagtcctcctgcatgtaaacacataatttcgtgtcaaaaaaaaaaattatccaggcttggtagtgcttgagcccaagaggcagaggtt

SEQ ID NO: 658926 - DNA, 120 bp, Artificial Sequence
  ENSG00000184110_32 (sequence is synthesized)
tttttgtttttgttttttaagtgaaccccaggatctctagtgagactgaatgtccgagttaggatcctaagcaagggtatacatctagggctttccatcagtagttgtggttgggaaggc

SEQ ID NO: 658927 - DNA, 120 bp, Artificial Sequence
  ENSG00000184110_33 (sequence is synthesized)
atgggaaaatggtgtggtcctctgcagtgtagttaggcctgacttccgttggtgtctctcaataatgagtttttagtctcttaactatgtattaagtagaggtaatactcgtttagaaat

SEQ ID NO: 658928 - DNA, 120 bp, Artificial Sequence
  ENSG00000184110_34 (sequence is synthesized)
gttgcttttatctgttgattatatagctgaggatataaacatttgttatctgataatttctaacaagatatgaatataccagagtataatctgtcataggagaggtcaagccaagtctta

SEQ ID NO: 658929 - DNA, 120 bp, Artificial Sequence
  ENSG00000184110_35 (sequence is synthesized)
ggtctttcagttagaatttcatacaatagtacatttcccttttgaggtgtgtatcatactatctttagtgctagaagtaatactttagccaaggaagtttaagttcttttgaagcattca

SEQ ID NO: 658930 - DNA, 120 bp, Artificial Sequence
  ENSG00000184110_36 (sequence is synthesized)
ttttaaaaaatagctttagttcttctgatctcagagctatacagatggtttggaccaagaggttttagtttaatgaacatgctttgcatatttgcaaaggattttacctataaagtgagt

SEQ ID NO: 658931 - DNA, 83 bp, Artificial Sequence
  ENSG00000184110_37 (sequence is synthesized)
gctttgcatatttgcaaaggattttacctataaagtgagtcatcattagagtcttgcagtggtacaggggaaagatccataag

SEQ ID NO: 658932 - DNA, 83 bp, Artificial Sequence
  ENSG00000184110_38 (sequence is synthesized)
tggccagtccatacacttttgttgagagttatggcattggtcttctggcaagggaagacttaatttaactggtaaacttatag

SEQ ID NO: 658933 - DNA, 120 bp, Artificial Sequence
  ENSG00000184110_39 (sequence is synthesized)
tctggcaagggaagacttaatttaactggtaaacttatagactattccaaaaacatattcaaaccttttaagcagtgaaaatgaaatttatttataaatgttcaaatggtagattatggt

SEQ ID NO: 658934 - DNA, 120 bp, Artificial Sequence
  ENSG00000184110_40 (sequence is synthesized)
tattacatatgagttttcaaaaatgttgagtctttctggaaagatttattcttcagtatctgtgcaaagtttgaagtaatttgtctttgccatttggtttgtattttgttacataaatac

SEQ ID NO: 658935 - DNA, 120 bp, Artificial Sequence
  ENSG00000184110_41 (sequence is synthesized)
atactcaagtctggagatggtttcaggcaacatccagtagcctaagaccattttaaggtagctggtgatctttttctgttttgtggggaccttttttgtaatgaacattttttttaaatt

SEQ ID NO: 658936 - DNA, 120 bp, Artificial Sequence
  ENSG00000184110_42 (sequence is synthesized)
cagaatttagattaatcggttgtcaagagaggagagaaagcgataaaacagtttaggaatagtaaaaaagaaaaaaatgtttttatatatttgggggaactgattcattgattagttggt

SEQ ID NO: 658937 - DNA, 120 bp, Artificial Sequence
  ENSG00000184110_43 (sequence is synthesized)
cagtctggagaaagcagctggtatcaaagaaaataagttgtttgtggattctttggaaaactgtagatgttagctttggagcaaaatgacaggttggtttttttttgttttgttttgttt

SEQ ID NO: 658938 - DNA, 120 bp, Artificial Sequence
  ENSG00000184110_44 (sequence is synthesized)
ttgttttgttttgttttgtttttttggagactgagtcttgctctgtcaccccggcttaagtgcagtggcatgattgtggctcactgcagccttctctgcctcccaagttcaagtgattct

SEQ ID NO: 658939 - DNA, 79 bp, Artificial Sequence
  ENSG00000184110_45 (sequence is synthesized)
cccaggctggtcttggattcctgacgtcaagtgatctaccatgcttagctgacaggttgtttctattaatatgtctaca

SEQ ID NO: 658940 - DNA, 120 bp, Artificial Sequence
  ENSG00000184110_46 (sequence is synthesized)
catgcttagctgacaggttgtttctattaatatgtctacagtggcctggttagtactctgtcttgttagagatggctatggttatggttcactgtgccctctaggtcattgttgtagagc

SEQ ID NO: 658941 - DNA, 120 bp, Artificial Sequence
  ENSG00000184110_47 (sequence is synthesized)
ttcttaactggccttaagtctacagcctctacctgtctcctctcattttaccgccgagaagtccttagtgacttctcactgctcacagaaggaaatgcaaaatgcttgattggtatctgg

SEQ ID NO: 658942 - DNA, 120 bp, Artificial Sequence
  ENSG00000184110_48 (sequence is synthesized)
gcaggatttatataggagaaagaggaacaaggagagagggcaaaaccacagaacagtggattctgtttgcccgtttttctgtgtaaactctgatattaactctccttgagtatgccaccc

SEQ ID NO: 658943 - DNA, 120 bp, Artificial Sequence
  ENSG00000184110_49 (sequence is synthesized)
agggttggtggatgctctagaaaacacgataggccctctgccagtaagggttttcagcaactccagattcagccagtctaaatataccctttccatcatcagcatttctcagccttcatc

SEQ ID NO: 658944 - DNA, 120 bp, Artificial Sequence
  ENSG00000184110_50 (sequence is synthesized)
gccatctgttgtcttatggtgatctgaaggtattagggggaagttcatctatacctgatgtcatgattgacctgtgaactctttttctttttttctttttttagatggagtcttgctctg

SEQ ID NO: 658945 - DNA, 120 bp, Artificial Sequence
  ENSG00000184110_51 (sequence is synthesized)
aagacagcgcctgacaggaggagcagagagcgagcttgatgttccaggagtaaaaaggccagtgggactccagcacaggaagccagagggagaatcgtgggagaccaggcaagggccagg

SEQ ID NO: 658946 - DNA, 120 bp, Artificial Sequence
  ENSG00000184110_52 (sequence is synthesized)
cctggcagacccttattggcagaggttggcagttgggatttttttcctaagctgtgggactggaaggttctgggtcctgggagtgggagatggcctttctggggcacactgactagactt

SEQ ID NO: 658947 - DNA, 120 bp, Artificial Sequence
  ENSG00000184113_0 (sequence is synthesized)
gtgcgacagacccgcggggcaaacggactggggccaagagccgggagcgcgggcgcaaaggcaccagggcccgcccagggcgccgcgcagcacggccttgggggttctgcgggccttcgg

SEQ ID NO: 658948 - DNA, 120 bp, Artificial Sequence
  ENSG00000184113_1 (sequence is synthesized)
tcgggtgcgcgtctcgcctctagccatggggtccgcagcgttggagatcctgggcctggtgctgtgcctggtgggctgggggggtctgatcctggcgtgcgggctgcccatgtggcaggt

SEQ ID NO: 658949 - DNA, 120 bp, Artificial Sequence
  ENSG00000184113_2 (sequence is synthesized)
gaccgccttcctggaccacaacatcgtgacggcgcagaccacctggaaggggctgtggatgtcgtgcgtggtgcagagcaccgggcacatgcagtgcaaagtgtacgactcggtgctggc

SEQ ID NO: 658950 - DNA, 120 bp, Artificial Sequence
  ENSG00000184113_3 (sequence is synthesized)
tctgagcaccgaggtgcaggcggcgcgggcgctcaccgtgagcgccgtgctgctggcgttcgttgcgctcttcgtgaccctggcgggcgcgcagtgcaccacctgcgtggccccgggccc

SEQ ID NO: 658951 - DNA, 120 bp, Artificial Sequence
  ENSG00000184113_4 (sequence is synthesized)
ggccaaggcgcgtgtggccctcacgggaggcgtgctctacctgttttgcgggctgctggcgctcgtgccactctgctggttcgccaacattgtcgtccgcgagttttacgacccgtctgt

SEQ ID NO: 658952 - DNA, 120 bp, Artificial Sequence
  ENSG00000184113_5 (sequence is synthesized)
caccgcgctgctcatggtaggcggctgcctcttgtgctgcggcgcctgggtctgcaccggccgtcccgacctcagcttccccgtgaagtactcagcgccgcggcggcccacggccaccgg

SEQ ID NO: 658953 - DNA, 120 bp, Artificial Sequence
  ENSG00000184113_6 (sequence is synthesized)
cgactacgacaagaagaactacgtctgagggcgctgggcacggccgggcccctcctgccagccacgcctgcgaggcgttggataagcctggggagccccgcatggaccgcggcttccgcc

SEQ ID NO: 658954 - DNA, 120 bp, Artificial Sequence
  ENSG00000184113_7 (sequence is synthesized)
gggtagcgcggcgcgcaggctcctcggaacgtccggctctgcgccccgacgcggctcctggatccgctcctgcctgcgcccgcagctgaccttctcctgccactagcccggccctgccct

SEQ ID NO: 658955 - DNA, 120 bp, Artificial Sequence
  ENSG00000184113_8 (sequence is synthesized)
taacagacggaatgaagtttccttttctgtgcgcggcgctgtttccataggcagagcgggtgtcagactgaggatttcgcttcccctccaagacgctgggggtcttggctgctgccttac

SEQ ID NO: 658956 - DNA, 120 bp, Artificial Sequence
  ENSG00000184113_9 (sequence is synthesized)
ttcccagaggctcctgctgacttcggaggggcggatgcagagcccagggcccccaccggaagatgtgtacagctggtctttactccatcggcagggcccgagcccagggaccagtgactt

SEQ ID NO: 658957 - DNA, 120 bp, Artificial Sequence
  ENSG00000184113_10 (sequence is synthesized)
ggcctggacctcccggtctcactccagcatctccccaggcaaggcttgtgggcaccggagcttgagagagggcgggagtgggaaggctaagaatctgcttagtaaatggtttgaactctc

SEQ ID NO: 658958 - DNA, 120 bp, Artificial Sequence
  ENSG00000184113_11 (sequence is synthesized)
ttccggagggtggcctgggggctggggtgccagggacaccatcgccactggtgggagggcagggcacagcccctccgtgtccctttgtctctcctgtctgaaggccagagcaggctgcta

SEQ ID NO: 658959 - DNA, 120 bp, Artificial Sequence
  ENSG00000184113_12 (sequence is synthesized)
ggcctggggccaccactgcccctgggtgctacacccagtgtgctgggtcactgggaacttcctgaagtggtgtcacctgaactgggcccccaaggatggggtgcgggcagtaccgcagga

SEQ ID NO: 658960 - DNA, 120 bp, Artificial Sequence
  ENSG00000184113_13 (sequence is synthesized)
agaggagcagcccctgtgaagattgagagctgccagaggctctgtgattggctgcggcacgatgacccgcgcacggattggctgcttcgggccggggggccgggcccgggggacagaatc

SEQ ID NO: 658961 - DNA, 120 bp, Artificial Sequence
  ENSG00000184113_14 (sequence is synthesized)
ccctgcggcttgggagagtgggggtcgccaggcagggggaaagcccctgtgccaccgctttttgccagagactcaggctccagagaggcagtgagtggcatggggggtgaggctggggcc

SEQ ID NO: 658962 - DNA, 120 bp, Artificial Sequence
  ENSG00000184113_15 (sequence is synthesized)
ctgggcctgacctccacacgcctgcctggcctctctgtttgccatgggatgagagagacagtgctgggactcagagcggggctggagagtgagagtgcgagaaagggcctgggtggggct

SEQ ID NO: 658963 - DNA, 120 bp, Artificial Sequence
  ENSG00000184113_16 (sequence is synthesized)
tggaccccggggcgggctttctggagagcccccctacgagggcctctacggcggtgacggggtggggggcttctgcaaaccttggtcagggaagtggagctggctcgagtggaagagacc

SEQ ID NO: 658964 - DNA, 120 bp, Artificial Sequence
  ENSG00000184113_17 (sequence is synthesized)
acccggctcagtcggggatgtgggagtggactgggtggtgcagactgggggtcgagcgccttctgaagtgacggggccgggacgcgcagggaggcggcccaagaagcgcgccctaggcca

SEQ ID NO: 658965 - DNA, 120 bp, Artificial Sequence
  ENSG00000184113_18 (sequence is synthesized)
gcccagaatgcgctcggccgcgactaggacaacggcgggtggggctgggggcggctgccgggcggggagcggtcccgcgccctcagctacccctcaagagccgttgtttccctaacttca

SEQ ID NO: 658966 - DNA, 120 bp, Artificial Sequence
  ENSG00000184113_19 (sequence is synthesized)
aaagcagaacaatggctgggggtgagcaggtggccttggccagtgctctgccccaagggccctttaccagagatcaggggtttgtgtccctgcctaaccaggacacctccgatctccacc

SEQ ID NO: 658967 - DNA, 120 bp, Artificial Sequence
  ENSG00000184113_20 (sequence is synthesized)
tgcaggccctggaccactgtggcactgtggacacaaggccgcttctgccccttggacgccgagccccttcccacctctgggatcttgcactggctattgcttctgctctgcctggaactt

SEQ ID NO: 658968 - DNA, 120 bp, Artificial Sequence
  ENSG00000184113_21 (sequence is synthesized)
cttccccggatccctgtgaaatgtcacctcttcagagaggccttcaccactgtctttcctgcccagttcttggttgataggttcctgtcagctccttctgggcaggagcttcttgtgctg

SEQ ID NO: 658969 - DNA, 120 bp, Artificial Sequence
  ENSG00000184113_22 (sequence is synthesized)
tgtgctctgcctagagacagtgcttgccacgaagtaggtgagcagaccctccatgagtggcaggaaaggtgggtgcaccctcatgcccctccggagtctggcctgggctactcagaggcc

SEQ ID NO: 658970 - DNA, 120 bp, Artificial Sequence
  ENSG00000184113_23 (sequence is synthesized)
agcctccatctgaggtgggtttgtctggggtggcgtcagcccctgcggccctctctgggcctctctgcattggcattgttccactgcagcctggggcctcgaccaacatagtggggtcag

SEQ ID NO: 658971 - DNA, 120 bp, Artificial Sequence
  ENSG00000184113_24 (sequence is synthesized)
ggtagaaaccagattgtgaaaggtgaagcctgagactcctctgccacgtccctgagatgctgtgaggctgccgccaaagaaacatgagcttgctggggccaccctagggtgacagctagg

SEQ ID NO: 658972 - DNA, 120 bp, Artificial Sequence
  ENSG00000184113_25 (sequence is synthesized)
agagaagaaaaacaggcagccaggtgagaagggagagccttgggctggctgcagctccaagctggctagagggcaacaggcagcctcctgtgcaggacagacgcatgaagacagccaccc

SEQ ID NO: 658973 - DNA, 120 bp, Artificial Sequence
  ENSG00000184113_26 (sequence is synthesized)
tgtggaggttattcctggatactaggtgggaaagtcggcaagcaaaaggacaggtccagctcaagcttctaaaagcaatgctgggggacggtgcagcaaggtgttcctggaaatgacctc

SEQ ID NO: 658974 - DNA, 120 bp, Artificial Sequence
  ENSG00000184117_0 (sequence is synthesized)
ggggccttcctgcaacctttgcggctccaacatggctccgcggctgtgcagcatctctgtgacggcgcggcggctgctggggggcccggggcctcgcgctggggacgttgcgtctgcagc

SEQ ID NO: 658975 - DNA, 120 bp, Artificial Sequence
  ENSG00000184117_1 (sequence is synthesized)
tgcggcgcgtttctattccaaggacaatgaaggcagctggttccgctccctctttgttcacaaagtggatccccggaaggatgcccactccaccctgctgtccaagaaggaaaccagcaa

SEQ ID NO: 658976 - DNA, 120 bp, Artificial Sequence
  ENSG00000184117_2 (sequence is synthesized)
cctctataagatccagtttcacaatgtaaagcctgaatacctggatgcctacaacagcctcacggaggctgtgctgcccaagcttcacctggatgaggactacccatgctcactcgtggg

SEQ ID NO: 658977 - DNA, 120 bp, Artificial Sequence
  ENSG00000184117_3 (sequence is synthesized)
caactggaacacgtggtatggggagcaggaccaggcagtgcacctgtggcgattctcaggtggctacccagccctcatggactgcatgaacaagctcaaaaacaataaggagtacctgga

SEQ ID NO: 658978 - DNA, 120 bp, Artificial Sequence
  ENSG00000184117_4 (sequence is synthesized)
gttccgaagggagcggagccagatgctgctgtccaggagaaaccagctgctcctcgagttcagcttctggaatgagccacagcccagaatgggtcccaacatctatgagctgaggacata

SEQ ID NO: 658979 - DNA, 120 bp, Artificial Sequence
  ENSG00000184117_5 (sequence is synthesized)
caagctcaagccaggaaccatgatcgagtgggggaacaactgggctcgggccatcaagtaccggcaggagaaccaggaggcagtgggcggcttcttctcacagataggagagctctacgt

SEQ ID NO: 658980 - DNA, 120 bp, Artificial Sequence
  ENSG00000184117_6 (sequence is synthesized)
ggtgcaccatctctgggcctataaagacctgcagtctcgggaggagactcgaaacgctgcctggaggaagagaggctgggatgaaaatgtctactatacagtccccctggtgcgacacat

SEQ ID NO: 658981 - DNA, 120 bp, Artificial Sequence
  ENSG00000184117_7 (sequence is synthesized)
ggagtctaggatcatgatccccttgaagatctcgcctctgcagtgatgctgcctacacctccacctccttccccttctccctcaggcaaccccgacagacagtggcactcctggtcctgc

SEQ ID NO: 658982 - DNA, 120 bp, Artificial Sequence
  ENSG00000184117_8 (sequence is synthesized)
cagctctgcccaggccctttctactttccctgcctgcctccctccccctgctagaagtagtttctgatttccctgaatgaaagatagtgatcttttaggccttcatttatcttctaaaat

SEQ ID NO: 658983 - DNA, 120 bp, Artificial Sequence
  ENSG00000184117_9 (sequence is synthesized)
tcctcatctcaaggccaccagtccccagttatcacccttggaaatcctctgtttagcttagttgcacaaaaggtagtatgtccagtggctagaggtggggtgggaagagaggaggccagg

SEQ ID NO: 658984 - DNA, 120 bp, Artificial Sequence
  ENSG00000184117_10 (sequence is synthesized)
ccaggccctcaggaattccctggtttccactgggccacccacttgctggacagtctgagccaagtccctcctgctggagaaaagcctggaactgccaaaacaaaaaaacaaatacaaaca

SEQ ID NO: 658985 - DNA, 120 bp, Artificial Sequence
  ENSG00000184117_11 (sequence is synthesized)
aacctcgtcaccacggtcaggaggaggttcagacattctgcccagaggggctggggaaagggatgggagccaggaaagatttaggggcaggagacagacacgtaacaggaactcggaagg

SEQ ID NO: 658986 - DNA, 120 bp, Artificial Sequence
  ENSG00000184117_12 (sequence is synthesized)
tagaacttagaattcagaacttgggtttcaattgtagaatttggaatctggaatacagaattgggaagaagaacagagatgacaaaagaccacttgaagagaggttcctaatactagaca

SEQ ID NO: 658987 - DNA, 120 bp, Artificial Sequence
  ENSG00000184117_13 (sequence is synthesized)
gatggagagtggcttggctgtttccccctgcatattggggttgaaaacttaaatgtgtagttccagtccttctatgcagagtctctcctgccctccctccttcctgcaggcaaatataca

SEQ ID NO: 658988 - DNA, 120 bp, Artificial Sequence
  ENSG00000184117_14 (sequence is synthesized)
agctagaccctgttccctcaccctgtatcctgtctcccctaattgacattctatcagcccaaccctcattctgcagggccacctggtgtgtggaggtggcgggaggggtcagtgactctg

SEQ ID NO: 658989 - DNA, 120 bp, Artificial Sequence
  ENSG00000184117_15 (sequence is synthesized)
ggggtctcctcagtgacccccatacctcatcatgaacccttgggtagcttgattctgcctaccatccaggaaaacttgtgctggaattgctgatggaaacaattaaatatttactataaa

SEQ ID NO: 658990 - DNA, 120 bp, Artificial Sequence
  ENSG00000184117_16 (sequence is synthesized)
gaacacactttcagcaaatttgcggaacatcctccaccctgttcttttctgtagaaatccaggagatgtagatttcttttatttctgcctttttctttctttctttctttctctctttct

SEQ ID NO: 658991 - DNA, 120 bp, Artificial Sequence
  ENSG00000184117_17 (sequence is synthesized)
gggagcaggaccaggcaggtcattcctggttttggtagatttctatccatacagtacttttgccatttcctttgggaaaaagacctttaaaccatagggtcaggccattttgcagatggg

SEQ ID NO: 658992 - DNA, 120 bp, Artificial Sequence
  ENSG00000184117_18 (sequence is synthesized)
aaaatcaaggcacagatggagtcaaaaaacagtgcacctgtggcgattctcaggtggctacccagccctcatggactgcatgaacaagctcaaaaacaataaggagtacctggagttccg

SEQ ID NO: 658993 - DNA, 120 bp, Artificial Sequence
  ENSG00000184117_19 (sequence is synthesized)
gcggctgtgcagcatctctgtgacggcgcggcggctgctggggggcccggggcctcgcgctggggacgttgcgtctgcagctgcggcgcgcctcccaccctcagagggctcaggactgtg

SEQ ID NO: 658994 - DNA, 120 bp, Artificial Sequence
  ENSG00000184117_20 (sequence is synthesized)
ggggcctcgcgctggggacgttgcgtctgcagctgcggcgcgcctcccaccctcagagggctcaggactgtgtatggtcaaggaatatttaccaaagaagtgaggccacctgttccccct

SEQ ID NO: 658995 - DNA, 120 bp, Artificial Sequence
  ENSG00000184117_21 (sequence is synthesized)
ccatgagatgttacagcacagagcagtggggcttttggacagctgggaaagaggagtggcataagcgccccacctagactgcccaataattagggataaagctgacaccgtgggaaaagc

SEQ ID NO: 658996 - DNA, 120 bp, Artificial Sequence
  ENSG00000184117_22 (sequence is synthesized)
ctagagtttgcctggcactaacagatctaactcagactttgtaggtggggtgacctcaggactctttaagcctcgggttcctcatctgtaaaatgggagtaatcaggatgtatctcatag

SEQ ID NO: 658997 - DNA, 120 bp, Artificial Sequence
  ENSG00000184117_23 (sequence is synthesized)
attttaccgaggtggatcctgaggcccagagtgggcaaagggcttgccaaggtcgcagagcgcgcagaggattagaaccctgacttccgtccagcacctgcggagttggagacgcccaca

SEQ ID NO: 658998 - DNA, 120 bp, Artificial Sequence
  ENSG00000184140_0 (sequence is synthesized)
ctgcattttgtgatcctctatttcaacactggtccagttagcatgagagttgtcacagccgacagaggcaatggatgaagccaatcactctgtggtctctgagtttgtgttcctgggact

SEQ ID NO: 658999 - DNA, 120 bp, Artificial Sequence
  ENSG00000184140_1 (sequence is synthesized)
ctctgactcgcggaagatccagctcctcctcttcctctttttctcagtgttctatgtgtcaagcctgatgggaaatctcctcattgtgctaactgtgacctctgaccctcgtttacagtc

SEQ ID NO: 659000 - DNA, 120 bp, Artificial Sequence
  ENSG00000184140_2 (sequence is synthesized)
ccccatgtacttcctgctggccaacctttccatcatcaatttggtattttgttcctccacagctcccaagatgatttatgaccttttcaggaagcacaagaccatctcttttgggggctg

SEQ ID NO: 659001 - DNA, 120 bp, Artificial Sequence
  ENSG00000184140_3 (sequence is synthesized)
tgtagttcagatcttctttatccatgcagttgggggaactgagatggtgctgctcatagccatggcttttgaccgatatgtggccatatgtaagcctctccactacctgaccatcatgaa

SEQ ID NO: 659002 - DNA, 120 bp, Artificial Sequence
  ENSG00000184140_4 (sequence is synthesized)
cccacaaaggtgcattttgtttttagtcatttcctggattataggtattattcactcagtgattcagttggcttttgttgtagacctgctgttctgtggccctaatgaattagatagttt

SEQ ID NO: 659003 - DNA, 120 bp, Artificial Sequence
  ENSG00000184140_5 (sequence is synthesized)
tagagacctacacattgggattcatggttactgccaatagtggatttatttctctggcttcttttttaattctcataatctcttacatctttattttggtgactgttcagaaaaaatctt

SEQ ID NO: 659004 - DNA, 120 bp, Artificial Sequence
  ENSG00000184140_6 (sequence is synthesized)
caggtggtatattcaaggctttctctatgctgtcagctcatgtcattgtggtggttttggtctttgggccattaatctttttctatatttttccatttcccacatcacatcttgataaat

SEQ ID NO: 659005 - DNA, 120 bp, Artificial Sequence
  ENSG00000184140_7 (sequence is synthesized)
tccttgccatctttgatgcagttatcactcccgttttgaatccagtcatctatacttttagaaataaagagatgatggtggcaatgagaagacgatgctctcagtttgtgaattacagta

SEQ ID NO: 659006 - DNA, 120 bp, Artificial Sequence
  ENSG00000184140_8 (sequence is synthesized)
aaatcttttaaatatattgagaatatacaaaaaggcaaattatactagaatttcagacagatatgtgttaagtaagctatgttaaatttaaccagaatatcactttctactagtatgtat

SEQ ID NO: 659007 - DNA, 120 bp, Artificial Sequence
  ENSG00000184140_9 (sequence is synthesized)
tgtgttgtcttttttttcttcccaaattgaattgtggtatcaatctcttgcttatataggagatttaaagattaaacagtgtggctactttatttcaccaacattattacctatatataa

SEQ ID NO: 659008 - DNA, 80 bp, Artificial Sequence
  ENSG00000184144_0 (sequence is synthesized)
cgccgcacccggacagcgagcggctgaggccgccagggcccaaaggacagcggcccagacaggggctggcggcccggccg

SEQ ID NO: 659009 - DNA, 120 bp, Artificial Sequence
  ENSG00000184144_1 (sequence is synthesized)
gccccggctcaccgactcgggcagcatccacctgccccagccaacacccttctctcgccccaggtcctttctcagcctccagctgggctgtccccaagctgagctgaggctcttctcctc

SEQ ID NO: 659010 - DNA, 120 bp, Artificial Sequence
  ENSG00000184144_2 (sequence is synthesized)
cgatccccacctctgcccggacatccaccatggggacagccaccaggaggaagccacacctgctgctggtagctgctgtggcccttgtctcctcttcagcttggagttcagccctgggat

SEQ ID NO: 659011 - DNA, 120 bp, Artificial Sequence
  ENSG00000184144_3 (sequence is synthesized)
cccaaaccaccttcgggcctgtctttgaagaccagcccctcagtgtgctattcccagaggagtccacggaggagcaggtgttgctggcatgccgcgcccgggccagccctccagccacct

SEQ ID NO: 659012 - DNA, 120 bp, Artificial Sequence
  ENSG00000184144_4 (sequence is synthesized)
atcggtggaagatgaatggtaccgagatgaagctggagccaggttcccgtcaccagctggtggggggcaacctggtcatcatgaaccccaccaaggcacaggatgccggggtctaccagt

SEQ ID NO: 659013 - DNA, 120 bp, Artificial Sequence
  ENSG00000184144_5 (sequence is synthesized)
gcctggcctccaacccagtgggcaccgttgtcagcagggaggccatcctccgcttcggctttctgcaggaattctccaaggaggagcgagacccagtgaaagctcatgaaggctgggggg

SEQ ID NO: 659014 - DNA, 120 bp, Artificial Sequence
  ENSG00000184144_6 (sequence is synthesized)
tgatgttgccctgtaacccacctgcccactacccaggcttgtcctaccgctggctcctcaacgagttccccaacttcatcccgacggacgggcgtcacttcgtgtcccagaccacaggga

SEQ ID NO: 659015 - DNA, 120 bp, Artificial Sequence
  ENSG00000184144_7 (sequence is synthesized)
acctgtacattgcccgaaccaatgcctcagacctgggcaactactcctgtttggccaccagccacatggacttctccaccaagagcgtcttcagcaagtttgctcagctcaacctggctg

SEQ ID NO: 659016 - DNA, 120 bp, Artificial Sequence
  ENSG00000184144_8 (sequence is synthesized)
ctgaagatacccggctctttgcacccagcatcaaggcccggttcccagcagagacctatgcactggtggggcagcaggtcaccctggagtgcttcgcctttgggaaccctgtcccccgga

SEQ ID NO: 659017 - DNA, 120 bp, Artificial Sequence
  ENSG00000184144_9 (sequence is synthesized)
tcaagtggcgcaaagtggacggctccctgtccccgcagtggaccacagctgagcccaccctgcagatccccagcgtcagctttgaggatgagggcacctacgagtgtgaggcggagaact

SEQ ID NO: 659018 - DNA, 120 bp, Artificial Sequence
  ENSG00000184144_10 (sequence is synthesized)
ccaagggccgagacaccgtgcagggccgcatcatcgtgcaggctcagcctgagtggctaaaagtgatctcggacacagaggctgacattggctccaacctgcgttggggctgtgcagccg

SEQ ID NO: 659019 - DNA, 120 bp, Artificial Sequence
  ENSG00000184144_11 (sequence is synthesized)
ccggcaagccccggcctacagtgcgctggctgcggaacggggagcctctggcctcccagaaccgggtggaggtgttggctggggacctgcggttctccaagctgagcctggaagactcgg

SEQ ID NO: 659020 - DNA, 120 bp, Artificial Sequence
  ENSG00000184144_12 (sequence is synthesized)
gcatgtaccagtgtgtggcagagaataagcacggtaccatctacgccagcgccgagctagccgtgcaagcactcgcccctgacttcaggctgaatcccgtgaggcgtctgatccccgcgg

SEQ ID NO: 659021 - DNA, 120 bp, Artificial Sequence
  ENSG00000184144_13 (sequence is synthesized)
cccgcgggggagagatccttatcccctgccagccccgggcagctccaaaggccgtggtgctctggagcaaaggcacggagattttggtcaacagcagcagagtgactgtaactccagatg

SEQ ID NO: 659022 - DNA, 120 bp, Artificial Sequence
  ENSG00000184144_14 (sequence is synthesized)
gcaccttgatcataagaaacatcagccggtcagatgaaggcaaatacacctgctttgctgagaacttcatgggcaaagccaacagcactggaatcctatctgtgcgagatgcaaccaaaa

SEQ ID NO: 659023 - DNA, 120 bp, Artificial Sequence
  ENSG00000184144_15 (sequence is synthesized)
tcactctagccccctcaagtgccgacatcaacttgggtgacaacctgaccctacagtgccatgcctcccacgaccccaccatggacctcaccttcacctggaccctggacgacttcccca

SEQ ID NO: 659024 - DNA, 120 bp, Artificial Sequence
  ENSG00000184144_16 (sequence is synthesized)
tcgactttgataagcctggagggcactaccggagaactaatgtgaaggagaccattggggatctgaccatcctgaacgcccagctgcgccatggggggaagtacacgtgcatggcccaga

SEQ ID NO: 659025 - DNA, 120 bp, Artificial Sequence
  ENSG00000184144_17 (sequence is synthesized)
cggtggtggacagcgcgtccaaggaggccacagtcctggtccgaggtccgccaggtcccccaggaggtgtggtggtgagggacattggcgacaccaccatccagctcagctggagccgtg

SEQ ID NO: 659026 - DNA, 120 bp, Artificial Sequence
  ENSG00000184144_18 (sequence is synthesized)
gcttcgacaaccacagccccatcgctaagtacaccctgcaagctcgcactccacctgcagggaagtggaagcaggttcggaccaatcctgcaaacatcgagggcaatgccgagactgcac

SEQ ID NO: 659027 - DNA, 120 bp, Artificial Sequence
  ENSG00000184144_19 (sequence is synthesized)
aggtgctgggcctcaccccctggatggactatgagttccgggtcatagccagcaacattctgggcactggggagcctagtgggccctccagcaaaatccggaccagggaagcagccccct

SEQ ID NO: 659028 - DNA, 120 bp, Artificial Sequence
  ENSG00000184144_20 (sequence is synthesized)
cggtggcaccctcaggactcagcggaggaggtggagcccccggagagctcatcgtcaactggacgcccatgtcacgggagtaccagaacggagacggcttcggctacctgctgtccttcc

SEQ ID NO: 659029 - DNA, 120 bp, Artificial Sequence
  ENSG00000184144_21 (sequence is synthesized)
gcaggcagggcagcactcactggcagaccgcccgggtgcctggcgccgatgcccagtactttgtctacagcaacgagagcgtccggccctacacgccctttgaggtcaagatccgcagct

SEQ ID NO: 659030 - DNA, 120 bp, Artificial Sequence
  ENSG00000184144_22 (sequence is synthesized)
acaaccgccgcggggatgggcccgagagcctcactgcactcgtgtactcagctgaggaagagcccagggtggcccctaccaaggtgtgggccaaaggggtctcatcctcagagatgaacg

SEQ ID NO: 659031 - DNA, 120 bp, Artificial Sequence
  ENSG00000184144_23 (sequence is synthesized)
tgacctgggaacccgtgcagcaggacatgaatggtatcctcctggggtatgagatccgctactggaaagctggggacaaagaagcagctgcggaccgagtgaggacagcagggctggaca

SEQ ID NO: 659032 - DNA, 120 bp, Artificial Sequence
  ENSG00000184144_24 (sequence is synthesized)
ccagtgcccgagtcagcggcctgcatcccaacaccaagtaccatgtgaccgtgagggcctacaaccgggctggcactgggcctgccagcccttctgccaacgccacgaccatgaagcccc

SEQ ID NO: 659033 - DNA, 120 bp, Artificial Sequence
  ENSG00000184144_25 (sequence is synthesized)
ctccgcggcgacctcctggcaacatctcctggactttctcaagctctagtcttagcattaagtgggaccctgtggtccctttccgaaatgagtctgcagtcaccggctataagatgctgt

SEQ ID NO: 659034 - DNA, 120 bp, Artificial Sequence
  ENSG00000184144_26 (sequence is synthesized)
accagaatgacttacacctgactcccacgctccacctcaccggcaagaactggatagaaatcccagtgcctgaagacattggccatgccctggtacaaattcggaccacagggcccggag

SEQ ID NO: 659035 - DNA, 120 bp, Artificial Sequence
  ENSG00000184144_27 (sequence is synthesized)
gggatgggatccctgcagaagtccacatcgtgaggaatggaggcacaagcatgatggtggagaacatggcagtccgcccagcaccacaccctggcaccgtcatttcccactccgtggcga

SEQ ID NO: 659036 - DNA, 120 bp, Artificial Sequence
  ENSG00000184144_28 (sequence is synthesized)
tgctgatcctcataggctccctggagctctgatcctggaacccctccctctgcgccgcagctggacgccacctccgacggacacagccagccccttcctgctgccaaggtggcctgacac

SEQ ID NO: 659037 - DNA, 120 bp, Artificial Sequence
  ENSG00000184144_29 (sequence is synthesized)
tgtgccagagagtggctggttttaaatacctactttaaacagtgccctttttgtaggaggtaggatattttatattctgccgcaggatagaacccacgcaaggattttctttaaattgag

SEQ ID NO: 659038 - DNA, 120 bp, Artificial Sequence
  ENSG00000184144_30 (sequence is synthesized)
aggcaccaggcagtaacttccatgatgacactgacgcctatacctgagctctaggctgcctggagggaaggaacaggcccatgggaagaagggggttttaaaaacatgtcttcaactcag

SEQ ID NO: 659039 - DNA, 120 bp, Artificial Sequence
  ENSG00000184144_31 (sequence is synthesized)
cagagatggccctctgggaccctatacggactccgccacttgagagcagtcctaggcccggcaggaacaccagacatgaacaggttgaagaactggagcgaagtgcacacctcaccatcc

SEQ ID NO: 659040 - DNA, 120 bp, Artificial Sequence
  ENSG00000184144_32 (sequence is synthesized)
ccaagcggctgagaaccagcgccccgatgcctgaggctgggagcctgagccccttcagctttgaggggggtgatactccaggctgtttggggtgggagccaaaaagagttgagaggccag

SEQ ID NO: 659041 - DNA, 120 bp, Artificial Sequence
  ENSG00000184144_33 (sequence is synthesized)
ggcccttggtggaaaggggcaccagccttggtctgagatagtcacaacccaggtgacgatgccctctcagccaacactgccaacctgaccctgtcatcccgattgacagcgccacttcag

SEQ ID NO: 659042 - DNA, 120 bp, Artificial Sequence
  ENSG00000184144_34 (sequence is synthesized)
gtggctgggtgactaaagggcttgtcttggtggggtctcccacccctccaagacccattctgcacagtccctccagggtttgggcaggagatggccaatcatgcgcccacctctccagtg

SEQ ID NO: 659043 - DNA, 120 bp, Artificial Sequence
  ENSG00000184144_35 (sequence is synthesized)
ctgcctgcagtcagctcggcctccccgacctgcagccccagactctgctctcccagcactgactcactcctgcctgggaggggaatgcagcattcatgctgtgtgtcctggtattgggag

SEQ ID NO: 659044 - DNA, 120 bp, Artificial Sequence
  ENSG00000184144_36 (sequence is synthesized)
gtttctgggaagggcagaggataaatgtggccctgcctgctcccaggtatacctaggaccacctggccagatccgctcccagacggccttggactgcttgcatttccccggagaaaaagg

SEQ ID NO: 659045 - DNA, 120 bp, Artificial Sequence
  ENSG00000184144_37 (sequence is synthesized)
ggttaataaatgggccatcctttcctgagctctgggtatactaccagtcacagaacgtcagagctggaagaagccttagagctcaacttcttcaagcccctcactttacagatgaggaaa

SEQ ID NO: 659046 - DNA, 120 bp, Artificial Sequence
  ENSG00000184144_38 (sequence is synthesized)
tggaggtggtccagagagggtctgggattcccaaggtcacacagcccagaagagatggggctgggttaagaactcgagtcttccacctttctgttcaaggctgtttgtctacccagagga

SEQ ID NO: 659047 - DNA, 120 bp, Artificial Sequence
  ENSG00000184144_39 (sequence is synthesized)
aggaggcactgctgaatggctatggcctggctaagaaggtgattagtcagtagggtgtgaaaattctacttcaaggggttcggattggtgatcatggggattggcatggctgggttcccg

SEQ ID NO: 659048 - DNA, 120 bp, Artificial Sequence
  ENSG00000184144_40 (sequence is synthesized)
tccaaggtgtgggcagagcttctaccaaacttcaacatggagggctgacttgaagctccctgtccccctcactcttgccccaagaaaagaggccaaagcaagagcagattccctaggcaa

SEQ ID NO: 659049 - DNA, 120 bp, Artificial Sequence
  ENSG00000184144_41 (sequence is synthesized)
gagcagcagcacaactaggaaaccccaaagcccatgctccgacaggtggcccttcacagggggcagcgggacaggcatcttgaagggcatatgtcctcggaagctccgagcctgttttct

SEQ ID NO: 659050 - DNA, 120 bp, Artificial Sequence
  ENSG00000184144_42 (sequence is synthesized)
gtagtttatagttagagctctattttgttatggttttttaaacttttaagtcctgctctattttcctgggcaggtttatgttgatgtttacccactacaattttttaaaaatataagctc

SEQ ID NO: 659051 - DNA, 120 bp, Artificial Sequence
  ENSG00000184144_43 (sequence is synthesized)
acatgccttttccctgccacagccaaacccccactgcaccctacccacccacccctagcccaggtcagctttcctggagctggctaatgaaagcctcctcacctcttcccaacccttaca

SEQ ID NO: 659052 - DNA, 120 bp, Artificial Sequence
  ENSG00000184144_44 (sequence is synthesized)
agcaagggtgctaggggctcagctatacgaccattctccctgacagggagtccaaacttggcctagcatccctcctggcccccctctggccacgacttggcctgtgcctggttctctatc

SEQ ID NO: 659053 - DNA, 120 bp, Artificial Sequence
  ENSG00000184144_45 (sequence is synthesized)
agaaaggggatgctgaacaaaacctccttccaagttttatccaattcgttcctcattgcctcgggctgcgtcaggggaagcaggggacaggtgtccagttgctgggccgagggaggagct

SEQ ID NO: 659054 - DNA, 120 bp, Artificial Sequence
  ENSG00000184144_46 (sequence is synthesized)
ggtttggcataggacctaaccagtgaagctagaggctacagccactaaacttgcttcaggccaacgatagttactcacaagtaagtaccttaatgctaatgaggtccactaaaaagggga

SEQ ID NO: 659055 - DNA, 120 bp, Artificial Sequence
  ENSG00000184144_47 (sequence is synthesized)
ggaaggcagacctcctgggagacccacgaagggtttttagccagggaaaactgagccccaggaaaacctaaccactgggcaggcagaatttgtttgagggatagaacgacaacaaaataa

SEQ ID NO: 659056 - DNA, 120 bp, Artificial Sequence
  ENSG00000184144_48 (sequence is synthesized)
atgttcctgcagcctgagatttcaggtagagtactgactaaggtttaataagacaataggtgacctgaggacatgcaagcttgtaaaatgcaacagcctcctgctagagtgacttgtaca

SEQ ID NO: 659057 - DNA, 120 bp, Artificial Sequence
  ENSG00000184144_49 (sequence is synthesized)
tgagcttgcttgcagaagactagattagatgtttctcaggatcccctcctgcgcaggggttctctgattttcgtgttctctgcccagatgggctgggggagttgagagtgtgcttatttt

SEQ ID NO: 659058 - DNA, 120 bp, Artificial Sequence
  ENSG00000184144_50 (sequence is synthesized)
cactgcgatcatgagaccacagttctgggttatctcctctcatacatcaagccccagaggaggcggcaagaggaacagccacaaacaagtactttaccccacagcttagtggccagtaaa

SEQ ID NO: 659059 - DNA, 120 bp, Artificial Sequence
  ENSG00000184144_51 (sequence is synthesized)
caccctggggactaggaaaaggaaccaactgtaggcacctctccagggcctagggagacaagtgtcctctcttctgcatacatttgggctccccttacagagccctttgccctggctctc

SEQ ID NO: 659060 - DNA, 120 bp, Artificial Sequence
  ENSG00000184144_52 (sequence is synthesized)
tggtccttgttgctctaacagtccagatgtacacccagcctcagggggaaggcagctctctccagacagagtctcagggcccagcaaggtcaggttatctgctttcattcagggcaacaa

SEQ ID NO: 659061 - DNA, 120 bp, Artificial Sequence
  ENSG00000184144_53 (sequence is synthesized)
atgatacaaatggtgccagggagtggcaaggccatgggggtaggtgggggtgtctttttcttttcataaagtaacaacagacgagactgaggttaaacatcagaaaaaaacctctggaat

SEQ ID NO: 659062 - DNA, 120 bp, Artificial Sequence
  ENSG00000184144_54 (sequence is synthesized)
gaccttcctcattccaggaggccctggaataaggaagaggcttctttctgagggagctttgaggaattttgacagctgttgacatgggatttgggaaaggtgaagctgtgactggagggg

SEQ ID NO: 659063 - DNA, 120 bp, Artificial Sequence
  ENSG00000184144_55 (sequence is synthesized)
caggagatggtccaagtgtccatccagagatgagactcttagaatcaaagtgttcagcccaggaagtcttggagatcccaccttctgtggccctgcaccttatgggaagccattaagggg

SEQ ID NO: 659064 - DNA, 120 bp, Artificial Sequence
  ENSG00000184144_56 (sequence is synthesized)
gctcatctaggaattctggttacagcccagtgctcatcccagcgtatgctgcctctttagggcagccccaagggccagccagcctgtactctgggcaagagcccaaaatggctaggaatg

SEQ ID NO: 659065 - DNA, 120 bp, Artificial Sequence
  ENSG00000184144_57 (sequence is synthesized)
tttgactcccttaatctcttccccagctacagaggaatcttttctctgcctggtctcagaatgggactgccaactggctcattggtgggagacacagtatcctcaaacctgtggccactg

SEQ ID NO: 659066 - DNA, 120 bp, Artificial Sequence
  ENSG00000184144_58 (sequence is synthesized)
gcatgacagtggtgctctgtctccctgggtgacacccaccctaggcttcctcctggatgtgatggggattgccagagaggctcttagcataaaaggcattaggtgggcatttttctgtgt

SEQ ID NO: 659067 - DNA, 120 bp, Artificial Sequence
  ENSG00000184144_59 (sequence is synthesized)
gcccccaaaaagctccatggaaacaggcacctggtagctgcggaacacccgtggacttgtgtatatggtcataggctttgggaagacaggacgtaaaggaaaatgagagaaacaaaatgg

SEQ ID NO: 659068 - DNA, 120 bp, Artificial Sequence
  ENSG00000184144_60 (sequence is synthesized)
gtcagatagctttggccacagccccaggcagcctttggggcctatgacacttagtgcccttagatgggatacatcttgcctcggccccaagactcctccaacttacccgtcccatccagg

SEQ ID NO: 659069 - DNA, 120 bp, Artificial Sequence
  ENSG00000184144_61 (sequence is synthesized)
gcctgcacagcttagagaggctcacagcttggcaaatgctagggcttcatcagaccactgacttgactcagtgtttgttaaaatggaaccactcccgttggcctactgtttctctcctgt

SEQ ID NO: 659070 - DNA, 120 bp, Artificial Sequence
  ENSG00000184144_62 (sequence is synthesized)
acttcttgtaatgatagttatttattgactctggtagcaggcagttcttaaataaagatggtttctcaacctgttggggaagctggcacgagctgtgggtgttatcatcaggctaaagca

SEQ ID NO: 659071 - DNA, 120 bp, Artificial Sequence
  ENSG00000184144_63 (sequence is synthesized)
tacctccttgtcctgttcttcactccagaggcttttatccaagaatttctttaccccccacacagtgaaatataagtaagttacaacatacagtctatattgcttcatccagtcccagga

SEQ ID NO: 659072 - DNA, 120 bp, Artificial Sequence
  ENSG00000184144_64 (sequence is synthesized)
ggagggaaaaattaggccaagatcttaaggcaggtccaagcagagcacaggcaggcatttggctagaatcagttggctttacctaatacagtggcagtaaacaatgcttatgtgatggta

SEQ ID NO: 659073 - DNA, 120 bp, Artificial Sequence
  ENSG00000184144_65 (sequence is synthesized)
gtccatgagcggcccatgcattatggaagacgcgcgctgggctcgctccctggtccttaaatgacagcaaatgaggtcctttctcagcctccagctgggctgtccccaagctgagctgag

SEQ ID NO: 659074 - DNA, 120 bp, Artificial Sequence
  ENSG00000184144_66 (sequence is synthesized)
gtggtggacagcgcgtccaaggaggccacagtcctggtccgaggtgaggggtttcccacctctacccctaccccaactcccttaaaacccagctgggctgttctgacctgctcgcctcat

SEQ ID NO: 659075 - DNA, 120 bp, Artificial Sequence
  ENSG00000184144_67 (sequence is synthesized)
ctcccctcccttccctcaaagctgcggggaagggcttccggcggaactcctgtgagctggatataccctgtggttcttcacaggtcctaaatgatcaggacatttttcttccaaagtcaa

SEQ ID NO: 659076 - DNA, 120 bp, Artificial Sequence
  ENSG00000184144_68 (sequence is synthesized)
agtttaaaaaatccactcctaaacacatcccaagacaggagtgctttactgagccctgaagttttcaaagcctagtgctgggagatctatgcacctctccatgtgacagcctctgtgagc

SEQ ID NO: 659077 - DNA, 120 bp, Artificial Sequence
  ENSG00000184144_69 (sequence is synthesized)
tcccccagccttgagacacatccctccacccaacaactggcacccgccccaactgcccacaccccttgcccgccctcccgcctgggtgtgtgttcactgcatcctctgctgccctgtctt

SEQ ID NO: 659078 - DNA, 120 bp, Artificial Sequence
  ENSG00000184144_70 (sequence is synthesized)
gagtctgtctgcctggggtgggggtagggcaatattttggagggtgggtgcctctgagatcattccttccccaatgataagacaaatgctctagcccaccagctctgggctgaacagaaa

SEQ ID NO: 659079 - DNA, 120 bp, Artificial Sequence
  ENSG00000184144_71 (sequence is synthesized)
ttaggcagcgagcctaatggaaataagggaatggaattcatggcccctgaagcgtctcacacttctccaacctttggattttcatgggctttgtttcgtgggcatgacagaatgtgctgg

SEQ ID NO: 659080 - DNA, 120 bp, Artificial Sequence
  ENSG00000184144_72 (sequence is synthesized)
gtgtaactgctagaggcaaacatccagagaagggctggttaaaggtgagggggtgcggggtgccagggaaacgtttggacatctctccaattcttcctctctggcagctccgcggcgacc

SEQ ID NO: 659081 - DNA, 120 bp, Artificial Sequence
  ENSG00000184144_73 (sequence is synthesized)
gcccagaatgggaaggaacagctcctctgtgtttccagtgaacataagcagcagcaatttatagcaagaggcatctgagtgagacataagcaaagggtttgtgactgtgagaggaatgaa

SEQ ID NO: 659082 - DNA, 120 bp, Artificial Sequence
  ENSG00000184144_74 (sequence is synthesized)
attcatgaactattctctcagtaacttgcagtagaaactataaaaacgggcagatggtatcactgcagaaaggcagagttcacaggggcagtgatggactatggggatggagtatggggg

SEQ ID NO: 659083 - DNA, 120 bp, Artificial Sequence
  ENSG00000184144_75 (sequence is synthesized)
ttcttctagcttaaggagtctacggaaacagttcagtggcctgcaagctttcctccaccaatgaggagctttgtcaatggggaggaggggtgaggaggctggacctcaagagcccagaac

SEQ ID NO: 659084 - DNA, 120 bp, Artificial Sequence
  ENSG00000184144_76 (sequence is synthesized)
gaaagctcatgaaggctggggggtgatgttgccctgtaacccacctgcccactacccaggtgagtccagacctggggccagggttagagagggcacaggaagggcttccagatgcttggc

SEQ ID NO: 659085 - DNA, 120 bp, Artificial Sequence
  ENSG00000184144_77 (sequence is synthesized)
agaggaaggatggaataaaaggagacccctggaaatgacccttagaagcacccatccctgggaccctaactttaaatgatctgtgtttcctttataggtctgtcactttccatcgttgtg

SEQ ID NO: 659086 - DNA, 120 bp, Artificial Sequence
  ENSG00000184144_78 (sequence is synthesized)
ccctgcttccgccttcaaactgggtggcccctgagggctgcgatccctggcagacttagcgctccctgagggcaggaataaagtcacttcttccctctaggtctccccttagccccagtt

SEQ ID NO: 659087 - DNA, 120 bp, Artificial Sequence
  ENSG00000184144_79 (sequence is synthesized)
cagagcatggtggctgtcaggacagggcttgcagaaccgcaccagcatgctggggtcccacccagagtggccctgttagcccagcaccccctggtttcctcaaactcctcacatcctagg

SEQ ID NO: 659088 - DNA, 120 bp, Artificial Sequence
  ENSG00000184144_80 (sequence is synthesized)
cagggcactgattccaggccctggacccccagatcctcctgcttcaaatcctgaggcccttgccccaggcctcaaggagattccacacagctgcctagacagagttggctctgaaaggtg

SEQ ID NO: 659089 - DNA, 120 bp, Artificial Sequence
  ENSG00000184144_81 (sequence is synthesized)
agctagccgtgcaaggtaaggggcccagggaggcaggggacatcccaaggacatgcatatggtggctttcagagctctgagtttaggtgtttccaaacacacatgcacataccctgtggc

SEQ ID NO: 659090 - DNA, 120 bp, Artificial Sequence
  ENSG00000184144_82 (sequence is synthesized)
agggttgacagctgccagagggcagggtctctgacttgttccatgtctggcacacagtaaatgtttgctgcagtgagtgaaaaaaacagaaaccaaatcaatcagatttgtgtaacccaa

SEQ ID NO: 659091 - DNA, 120 bp, Artificial Sequence
  ENSG00000184144_83 (sequence is synthesized)
ccctttcagctatgtgagctttggcaagttacttagtgtttctgtgtttcagtttcttgattataaaatataggcaataatagtcctgccctcctgggctgctgtatggaacaagtgaga

SEQ ID NO: 659092 - DNA, 120 bp, Artificial Sequence
  ENSG00000184144_84 (sequence is synthesized)
tgaaagaggtacagcataaagggcctgcccaccatacagcaggtgcccgggaaatgtaagccagtgctaatatttagttgtgtgacttgagctcactgagcctcagtttcctcatccata

SEQ ID NO: 659093 - DNA, 120 bp, Artificial Sequence
  ENSG00000184144_85 (sequence is synthesized)
aaatggacacagtgatacccaccacatcaggttttagtgaagctttgctaagaagcattcattcgttccttcatccattcaaccactacttactcaacacttcacagggatgaatataaa

SEQ ID NO: 659094 - DNA, 120 bp, Artificial Sequence
  ENSG00000184144_86 (sequence is synthesized)
agatacggtctctgcctttaagtagcttacaatccagtagagggaaagggacaaataaaccccaaatcaaacaattaaataatttcagctagccatcaaatatagtataaagaaaatcca

SEQ ID NO: 659095 - DNA, 120 bp, Artificial Sequence
  ENSG00000184144_87 (sequence is synthesized)
caaatatagtataaagaaaatccaggcagggtgcagtggctcatgcctgtgtaatcccagcactttgggaggcaggggtgagtggatctcctcaagctcaggagtttgagaccagcctgg

SEQ ID NO: 659096 - DNA, 68 bp, Artificial Sequence
  ENSG00000184144_88 (sequence is synthesized)
ctgggcaacatggtgaaaccccatgtctatgaaaaacacaaaatttagccaggcatggtagcacacac

SEQ ID NO: 659097 - DNA, 120 bp, Artificial Sequence
  ENSG00000184144_89 (sequence is synthesized)
tttgggggagggggagagggggctaggagaaattactgagaaaggataagggacaccctcaagccgggccttcctgacctcacatgacatgccttagtgaactgctgcttctccgtgaag

SEQ ID NO: 659098 - DNA, 120 bp, Artificial Sequence
  ENSG00000184144_90 (sequence is synthesized)
ggaacggggagcctctggcctcccaggtaggagacatggggcttcccccgacacatcacaactgtcctctgctcacttggttccctcccccgcccagaacttcccctgcaccactagtag

SEQ ID NO: 659099 - DNA, 120 bp, Artificial Sequence
  ENSG00000184144_91 (sequence is synthesized)
cccctctgggctaattagggtgtcagagggtggtcctaggaccacctaaggacttcttcccatcccagtcccattgtcacaggctaggcctggatccaggcacagttcagccacaaaaga

SEQ ID NO: 659100 - DNA, 120 bp, Artificial Sequence
  ENSG00000184144_92 (sequence is synthesized)
agtgatgtggtcctgactgggtcacctcacccttccagctttggggaggcctgggtaatctgcatcctgaggttccaggcagccctgaggtaggactggacatataagccatatcctcta

SEQ ID NO: 659101 - DNA, 120 bp, Artificial Sequence
  ENSG00000184144_93 (sequence is synthesized)
aagtgagtgtgaagagggaggggaagcagagcacggtctctcgggggcacaggtgaccccagggtgagggcaggcagagtcagggctcttatcttggtgtccctcacagggtctagcaaa

SEQ ID NO: 659102 - DNA, 120 bp, Artificial Sequence
  ENSG00000184144_94 (sequence is synthesized)
gtactgggcacacagtgggtatcgaccaccactcactggacagtacctctctgggtgaggcatcgcatatgccaggggccttccatggccaggatcacttggtcttccagcagtgcatgg

SEQ ID NO: 659103 - DNA, 120 bp, Artificial Sequence
  ENSG00000184144_95 (sequence is synthesized)
caggctcagacagcttgagtaacacccagggctggaggcaggcagcacagtgtacagactccaaccctgtctgtctcattcagatcccagctctgccacccgcagaccttgggtaaactg

SEQ ID NO: 659104 - DNA, 120 bp, Artificial Sequence
  ENSG00000184144_96 (sequence is synthesized)
cctaacctctctgtgcctcagtttctttatggtggtgataatagtacctacctcatagggttgtcatgaggattaaatcagttcatatatgtgagatacttagaacagtgcctggaattt

SEQ ID NO: 659105 - DNA, 120 bp, Artificial Sequence
  ENSG00000184144_97 (sequence is synthesized)
agttaagtgttccgtgaatgttaacagtgatctatttgagaatggcagcagaaagtgttctctttctcgtactcctagaagaaggagtcactagaacagggctaagcaaatagcaggtgc

SEQ ID NO: 659106 - DNA, 120 bp, Artificial Sequence
  ENSG00000184144_98 (sequence is synthesized)
tcaataaatgtttgtagtatgaaagaaagaatgtgatttgtactttggccccctcctccctcaactatctcctatggttacctgggagaatctctgccttgtgggaagttttgggcttcc

SEQ ID NO: 659107 - DNA, 80 bp, Artificial Sequence
  ENSG00000184144_99 (sequence is synthesized)
cctgggagaatctctgccttgtgggaagttttgggcttccagaaaatccacatgaaaagcatgtggaagtggggccaggt

SEQ ID NO: 659108 - DNA, 120 bp, Artificial Sequence
  ENSG00000184144_100 (sequence is synthesized)
ttccacatcattggcctcacttccagctcttgctaccttgtctcccttcggggttaggaaaagggaggctctctgggaatagaagtgggccctggagcattgcttggggggctcccactc

SEQ ID NO: 659109 - DNA, 120 bp, Artificial Sequence
  ENSG00000184144_101 (sequence is synthesized)
ggccttcatcctgaaggctttcctccaaaatcttaagcaaaggcaatcctggttgggggctgctctgcaggacacaggggggccctgggaatccaaacccattctgtattggtccccaga

SEQ ID NO: 659110 - DNA, 120 bp, Artificial Sequence
  ENSG00000184144_102 (sequence is synthesized)
caacctgggacttgggagaggaaggggtgctggggcttcaaagccaggtgggaacaactcacagaccactaatcattcctcctggcgtccctggttcgctgacatggcaaactgagcatc

SEQ ID NO: 659111 - DNA, 120 bp, Artificial Sequence
  ENSG00000184144_103 (sequence is synthesized)
ctgcctcgccgccacctttctacccagcccccagaacatccccgagggccagggaagggcgcagggtgcagggggaggctgaggaccaaccagcaatagcaaacggcctacaaagcaccg

SEQ ID NO: 659112 - DNA, 120 bp, Artificial Sequence
  ENSG00000184144_104 (sequence is synthesized)
taggagtcggactgagaagaccacccagccgtccgctcccaggcctgcagctggccctgtgagtctccttaggaaaggtctcaatcttgccacaagggtggggctagggtagtcccaggc

SEQ ID NO: 659113 - DNA, 120 bp, Artificial Sequence
  ENSG00000184144_105 (sequence is synthesized)
acactgccccagtaagggtattaggctccagggacacacatcctctctgcatgtttgtggctggcgacgtctcatgcacctcacaccccacagatcagttcttctgtaagggtcccttga

SEQ ID NO: 659114 - DNA, 120 bp, Artificial Sequence
  ENSG00000184144_106 (sequence is synthesized)
aagccccctgggaggtagaactgcttccattctgaggccccagcatcttgaactttatggcatttgctaccttgcactgtcaatttcctgtctccctccttggaccgcaagccccttgaa

SEQ ID NO: 659115 - DNA, 120 bp, Artificial Sequence
  ENSG00000184144_107 (sequence is synthesized)
gaagagggactgtgtcttaatcatctttacaagccagtctctagcccagtgctgggtatagagcaggtgctcaatacctaagtgtaggatgggtgattgattgaactagtatggccagat

SEQ ID NO: 659116 - DNA, 120 bp, Artificial Sequence
  ENSG00000184144_108 (sequence is synthesized)
ggggcctgcccagcctatttaaattcaaatttaaattaattaagtaatataaaatgtaaaatgtcgttcttcagtcgcaatagccacatgtcaagtgctcgatagccctacgtggctagt

SEQ ID NO: 659117 - DNA, 120 bp, Artificial Sequence
  ENSG00000184144_109 (sequence is synthesized)
ggttaccacattgaacagtgcagaaaatgggacattcccatcatcagagaaagttttactggacagcacagcccaagaggccaggctccagccaggccaaggctctgaggcatctggtgg

SEQ ID NO: 659118 - DNA, 120 bp, Artificial Sequence
  ENSG00000184144_110 (sequence is synthesized)
aaaaagctatcatcagggcagagaccctggcaccacttatagggaatgccaagccagccgcaattatgctgagttccaaccctgctcacagggttcagactctcacaaaacagaggagga

SEQ ID NO: 659119 - DNA, 120 bp, Artificial Sequence
  ENSG00000184144_111 (sequence is synthesized)
cagaacaccaagttgggaccagggccactgcatggacaaaccatctagtccaaactcctcatttaaaaactggccaaccttacaactgcatgtgcatctataatttttttaagtttaatt

SEQ ID NO: 659120 - DNA, 120 bp, Artificial Sequence
  ENSG00000184144_112 (sequence is synthesized)
tttaaaagtggaaaaaccaaagttcggagaaaggaagagtcacattgacagagcttggacttgaacccaggaccatggggtggtagacagatgtcttcctggaagagtatgcactacaga

SEQ ID NO: 659121 - DNA, 120 bp, Artificial Sequence
  ENSG00000184144_113 (sequence is synthesized)
gtattaactgtgtgaccttaggcaagttgattaactgctctgggcctcagtctttccaccctgaaaagggcaataataacacccacctcacaggatcaaatggccaatgtgtttaagtac

SEQ ID NO: 659122 - DNA, 120 bp, Artificial Sequence
  ENSG00000184144_114 (sequence is synthesized)
ctcttgcaaattacacggtcctaaactattgtcatcagaagcaagtgaaaaatctccagctgctggattctctacggaaatattttgacccccagccaagttactttctgccaagctgca

SEQ ID NO: 659123 - DNA, 120 bp, Artificial Sequence
  ENSG00000184144_115 (sequence is synthesized)
agcctgcttgccctaggactgcactgagtctgggaccagaggaggctagtgctgtggtcacctcagagcttcagtcaggggtgcagaaagcacacaggaggctccagaatgatttaagtt

SEQ ID NO: 659124 - DNA, 120 bp, Artificial Sequence
  ENSG00000184144_116 (sequence is synthesized)
gcaaaagcagccactggcacagccacagagtgccagctttcttgtgcctccttcttccggccccctcctctttgtcctctccatctcagaatgctcatggcgccctctgctgtctggcac

SEQ ID NO: 659125 - DNA, 120 bp, Artificial Sequence
  ENSG00000184144_117 (sequence is synthesized)
aggtgctgctgccctgattttctgttccttttaatgagctggaagctcctcctagctcatgccaggttttcttttccgggctcccacagctcagcctgagtggctaaaagtgatctcgga

SEQ ID NO: 659126 - DNA, 120 bp, Artificial Sequence
  ENSG00000184144_118 (sequence is synthesized)
attaaaactgatacctcagtccgttttagtgcacagattactactaactaaagtccctttcaaagtaggggcaaggcctgccctgtagaggcaacggaaaagagaacccgtaaagaccca

SEQ ID NO: 659127 - DNA, 120 bp, Artificial Sequence
  ENSG00000184144_119 (sequence is synthesized)
ggtcacaggccactgtggcggagggcagacccagaggcatggtgaccggtgcgggagagggcaggccagcttcagggtgcagaccccgcagaagcccggcttcactggctccagggttgt

SEQ ID NO: 659128 - DNA, 120 bp, Artificial Sequence
  ENSG00000184144_120 (sequence is synthesized)
tgcaggggggatgggtagagcagccctgcctcttgccccttccctgcgtgtgctccgagcctacctgggagaggagagtgaggatcagccagaaggcaccctctctccctctgttcctcc

SEQ ID NO: 659129 - DNA, 120 bp, Artificial Sequence
  ENSG00000184144_121 (sequence is synthesized)
caggcccagcatctcaggagggcctgagagtctgggtatgaggagctgcgggcactggaggggtaggcccagctcagcccacaccctctggctttgtctctcctgccagccctgtccccc

SEQ ID NO: 659130 - DNA, 120 bp, Artificial Sequence
  ENSG00000184144_122 (sequence is synthesized)
ggagcagatggaattgaataacctgcccacaaccctcagcaaaaagcgtgtgggtgtcagaacttgagtggagaaggagggggagaaaagaacccaggagagagtaggggaggcacaggc

SEQ ID NO: 659131 - DNA, 120 bp, Artificial Sequence
  ENSG00000184144_123 (sequence is synthesized)
tccagtcagcatctgctgagaggctcctgcccatctccgagccattcgcaggggaaggcctggaatgagagcccggggatcctgggaccaggagcatagattaaggaccctgcctcacct

SEQ ID NO: 659132 - DNA, 120 bp, Artificial Sequence
  ENSG00000184144_124 (sequence is synthesized)
cctctacagacctgttgcactggatgtgtagtgagggtccaccttcttgtctgcctgaaacatgttctcctacatgccccagactgactctccaggccctttttctagaatcactcaaca

SEQ ID NO: 659133 - DNA, 120 bp, Artificial Sequence
  ENSG00000184144_125 (sequence is synthesized)
tttttagctggtacctctcctgagtaagaaattccagaggcagcactttctttgattgatcctgaacttcttggagggtcaaatgtggagaaatgaggggactcctttattctatttaca

SEQ ID NO: 659134 - DNA, 120 bp, Artificial Sequence
  ENSG00000184144_126 (sequence is synthesized)
ctgttttaatatcagccttgtttaatactagagacaattaggagattaaatctgcaacaaaaagaaaaatagataatatatcaccctggagcccaaaagtagtttgttttgtttgtttgt

SEQ ID NO: 659135 - DNA, 120 bp, Artificial Sequence
  ENSG00000184144_127 (sequence is synthesized)
ttgtttgtttgtttgtttgtttgtttgcattaactgcagttctgggttatttattccccttattttaaagcgagtgagagttggtctctgtgatttagtttaagttgatggagtaaggag

SEQ ID NO: 659136 - DNA, 120 bp, Artificial Sequence
  ENSG00000184144_128 (sequence is synthesized)
gacaatgatcatgtgtgcatcatctgctctatactaaccaccgtcttgtctaatttcattctcattatggcctctgagagaaacatgattatcttcatggagaagagaatcagaggctca

SEQ ID NO: 659137 - DNA, 120 bp, Artificial Sequence
  ENSG00000184144_129 (sequence is synthesized)
gaaaggttaagtgacttgcccagggaagcacagctagtaaatggcagaggtgggatttgatttcaggactgcctgactccaaagcctatgttcagagggaccactggggggcaaacccag

SEQ ID NO: 659138 - DNA, 120 bp, Artificial Sequence
  ENSG00000184144_130 (sequence is synthesized)
aggcacaggctcagggctttcattttttccttgctcattaacaagccatatcggtgtcccttggcccttgacagccccctcggtggcaccctcaggactcagcggaggaggtggagcccc

SEQ ID NO: 659139 - DNA, 120 bp, Artificial Sequence
  ENSG00000184144_131 (sequence is synthesized)
cggagagctcatcgtcaactggacggtaagctgcaagggtcagatgtcctcctcctcctccctgacccctctcccgcttgagcagctgcagaaaggaccactgcacagctctgactcaaa

SEQ ID NO: 659140 - DNA, 120 bp, Artificial Sequence
  ENSG00000184144_132 (sequence is synthesized)
cgcggataacttcctgtcccccttccacgcacccgctgccccttacgcgaatccacgctgcaggcgtaggcgtccagggccgctactcttggcaaaggttgggtggggccagggaacggg

SEQ ID NO: 659141 - DNA, 120 bp, Artificial Sequence
  ENSG00000184144_133 (sequence is synthesized)
atgggcccgagagcctcactgcactcgtgtactcagctgaggaaggtgggctgcccctgggccccctgctcgtccctaccccagccacttgtccacagggatgtggggtgggggaacgct

SEQ ID NO: 659142 - DNA, 120 bp, Artificial Sequence
  ENSG00000184144_134 (sequence is synthesized)
tgtaccagctcaagcctggctgggaggaggttggctcaaattggaagctgcccaattctgacccactgtgctctgacctcttggtgcaggtccgccaggtcccccaggaggtgtggtggt

SEQ ID NO: 659143 - DNA, 63 bp, Artificial Sequence
  ENSG00000184144_135 (sequence is synthesized)
catggcaaactgagcatccagtctgtgtagcactgtgaatgcaaatttcactaagaccccatg

SEQ ID NO: 659144 - DNA, 120 bp, Artificial Sequence
  ENSG00000184144_136 (sequence is synthesized)
ccttatcccctcgagagattcaggatccacccagatacctgagaggatcattcccacccaggccaactccaatctctacccgcaaaggaaagtggaaggcaggcaggaaccaagtgcaaa

SEQ ID NO: 659145 - DNA, 120 bp, Artificial Sequence
  ENSG00000184148_0 (sequence is synthesized)
ggacaagggctcagcctcctctcctggggtccagcttgtcgcctctggctcacctgttcctagagcaatgtcttcccagcagcagcagcggcagcagcagcagtgcccaccccagagggc

SEQ ID NO: 659146 - DNA, 120 bp, Artificial Sequence
  ENSG00000184148_1 (sequence is synthesized)
ccagcagcagcaagtgaagcagccttgtcagccaccccctgttaaatgtcaagagacatgtgcacccaaaaccaaggatccatgtgctccccaggtcaagaagcaatgcccaccgaaagg

SEQ ID NO: 659147 - DNA, 120 bp, Artificial Sequence
  ENSG00000184148_2 (sequence is synthesized)
caccatcattccagcccagcagaagtgtccctcagcccagcaagcctccaagagcaaacagaagtaaggatggactggatattaccatcatccaccatcctggctaccagatggaacctt

SEQ ID NO: 659148 - DNA, 120 bp, Artificial Sequence
  ENSG00000184148_3 (sequence is synthesized)
ttgagcctaccctcctctcacatctcctcctgcccaagatgtaaggaagcattgtaaggatttcttcccatcgtacccttccccacacataccaccttggcttcttctatatcccacccc

SEQ ID NO: 659149 - DNA, 120 bp, Artificial Sequence
  ENSG00000184148_4 (sequence is synthesized)
gatgctctcccaggtgggtgtgagagagacctcattctctgcaggctccagcgtggccacagctaaggcccatccatttcccaaagtgaggaaagtgtctgggcttcttctggggttcca

SEQ ID NO: 659150 - DNA, 120 bp, Artificial Sequence
  ENSG00000184148_5 (sequence is synthesized)
ccctgacaagtagggtcacagaggctggtgcacagtttctgcctcattcctctccatgatgccccctgctctgggcttctctcctgttttccccaataaatatgtgcctcatgtaataaa

SEQ ID NO: 659151 - DNA, 120 bp, Artificial Sequence
  ENSG00000184154_0 (sequence is synthesized)
tttcggactcggttatggaggaggccttccgctcgcagcggcctctccagcaccccttttaggcctgagcacccgcaggggtgcccaggccgcacgccaaacgcgggcccgcgccggtta

SEQ ID NO: 659152 - DNA, 120 bp, Artificial Sequence
  ENSG00000184154_1 (sequence is synthesized)
cctggctgcgcgctcccgctctgcctcgcgattctccggaatcgtacctcttcgtgggctcgcgccagcgctgtgagcgcacaattagtttaaactatggccccgccccctcgcgctgcc

SEQ ID NO: 659153 - DNA, 120 bp, Artificial Sequence
  ENSG00000184154_2 (sequence is synthesized)
ctctgattggcctctgtcggcggggcccgcttaaggacccgggaaaaggaagtttgagggccactgggaaagagaaggggtatcaccgcttccggaccccggcctgtacttgaaggcaaa

SEQ ID NO: 659154 - DNA, 120 bp, Artificial Sequence
  ENSG00000184154_3 (sequence is synthesized)
gagaactacaaatcccagcgtcacccgcggccttgaagccccgcccctgacaaactgaaggtcccggtaagcatcgcgtcagtacttatggcgcctgccgggttgtggtgacgaaagcag

SEQ ID NO: 659155 - DNA, 120 bp, Artificial Sequence
  ENSG00000184154_4 (sequence is synthesized)
ttgccatggagttgctctgagtaaccctgaggcagtgggacgccaagactggagaggaagcgactgcggggagtatttccattttaaccggaaacaatccctgaacccacaggaatgaat

SEQ ID NO: 659156 - DNA, 120 bp, Artificial Sequence
  ENSG00000184154_5 (sequence is synthesized)
gcctaatggtggagtttcagccatcagtgacaggctgaacccagactcccagggcacctgcttgcacctttgaatgatggcctgaactatgaacaaacgggactatatgaacacttcggt

SEQ ID NO: 659157 - DNA, 120 bp, Artificial Sequence
  ENSG00000184154_6 (sequence is synthesized)
acaggagccccctcttgactactccttcagaagcatccacgtcattcaagatctggtaaatgaggagccaaggacaggactacgaccactgaagcgttcaaagtcggggaaatcactgac

SEQ ID NO: 659158 - DNA, 120 bp, Artificial Sequence
  ENSG00000184154_7 (sequence is synthesized)
ccagtccctgtggctgaataacaatgttctcaatgatctgagagacttcaaccaggtggcttcacagctgttggagcacccagagaacctggcctggatcgacctgtcctttaatgacct

SEQ ID NO: 659159 - DNA, 120 bp, Artificial Sequence
  ENSG00000184154_8 (sequence is synthesized)
gacttccattgaccctgtcctaacaactttcttcaacctgagtgtcctctatcttcacggcaacagcatccagcgcctgggggaggtgaataagctggctgtccttcctcggctccgtag

SEQ ID NO: 659160 - DNA, 120 bp, Artificial Sequence
  ENSG00000184154_9 (sequence is synthesized)
cctgacactccatgggaaccccatggaggaagagaaagggtataggcaatatgtgctgtgcaccctgtcccgtatcaccacgttcgacttcagtggggtcaccaaagcagaccgcaccac

SEQ ID NO: 659161 - DNA, 120 bp, Artificial Sequence
  ENSG00000184154_10 (sequence is synthesized)
agctgaagtctggaaacgcatgaacatcaagcccaagaaggcctggaccaagcagaatacactttgaggctcccacgaccctagtagtcctaaaggcctaagcatagacagcatggtttg

SEQ ID NO: 659162 - DNA, 120 bp, Artificial Sequence
  ENSG00000184154_11 (sequence is synthesized)
tgacaataaataatttgagctgttgagcagatgagaagtcacttacaccttgtagagatgttctctaactcaggcaactgcaagtagctctagccttttcttttcttttttttttttttg

SEQ ID NO: 659163 - DNA, 120 bp, Artificial Sequence
  ENSG00000184154_12 (sequence is synthesized)
cctccccagtagctgtgattaaaggcgcctgccaccatgactggctaattttgttgttgttgttgttgttttgagacggtttcactcgtcaccccagctggagtgcagtggtgcgatctc

SEQ ID NO: 659164 - DNA, 120 bp, Artificial Sequence
  ENSG00000184154_13 (sequence is synthesized)
cagctctagtcttattttgctgaaaaagggaggcaattgagggaaaggcctgctggcctgggacactggagacgtgggtttaccacacagccttgggaaatttatctaactctctgggcc

SEQ ID NO: 659165 - DNA, 120 bp, Artificial Sequence
  ENSG00000184154_14 (sequence is synthesized)
cctttgtacttttcagcttagagatttgggggttaaagtagatcagtaatttccaaactcttcacagagtaccagggtctgtagagatgcctcacaggcctccatgacaggccaagaaga

SEQ ID NO: 659166 - DNA, 120 bp, Artificial Sequence
  ENSG00000184154_15 (sequence is synthesized)
tggcctatgatctctgaaaccagcccccacttcaatcagatcaaagtaattccattctgttttatatgctgggattctgcttaagatttcatttgataaaaagaatcttctgcttaaaaa

SEQ ID NO: 659167 - DNA, 120 bp, Artificial Sequence
  ENSG00000184154_16 (sequence is synthesized)
ggagtaaacaaagttggttataatgaaattaacagagaatacaactgcttccatttattgagcacctgatgccagatgtacaatagttctcaagggagtatttccattttaaccggaaac

SEQ ID NO: 659168 - DNA, 120 bp, Artificial Sequence
  ENSG00000184154_17 (sequence is synthesized)
cagtagttgatcatctttaaaagaagccaggctacagcaggaaagtcaagtggaagaaaactgggaagccagtctatcagccaatagttttattctcctgtttttacctgaagagaggag

SEQ ID NO: 659169 - DNA, 120 bp, Artificial Sequence
  ENSG00000184154_18 (sequence is synthesized)
agagaaagggtatagcaggccctggactccccgacctgtcctgtgctctggtcctccagcccagggcccaggtagggaccatgtcccctgccattgcattggccttcctgccactggtgg

SEQ ID NO: 659170 - DNA, 120 bp, Artificial Sequence
  ENSG00000184154_19 (sequence is synthesized)
taacattgctggtgcggtaccggcactacttccgattgctggtgcgcacggtcttgctgcgaagcctccgagactgcctgtcagggctgcggatcgaggagcgggccttcagctacgtgc

SEQ ID NO: 659171 - DNA, 120 bp, Artificial Sequence
  ENSG00000184154_20 (sequence is synthesized)
tcacccatgccctgcccggtgaccctggtcacatcctcaccaccctggaccactggagcagccgctgcgagtacttgagccacatggggcctgtcaaaggtcagatcctgatgcggctgg

SEQ ID NO: 659172 - DNA, 120 bp, Artificial Sequence
  ENSG00000184154_21 (sequence is synthesized)
tggaggagaaggcccctgcttgtgtgctggaattgggaacctactgtggatactctaccctgcttattgcccgagccctgccccctgggggtcgccttcttactgtggagcgggacccac

SEQ ID NO: 659173 - DNA, 120 bp, Artificial Sequence
  ENSG00000184154_22 (sequence is synthesized)
gcacggcagcagtggctgaaaaactcatccgcctggccggctttgatgagcacatggtggagctcatcgtgggcagctcagaggacgtgatcccgtgcctacgcacccagtatcagctga

SEQ ID NO: 659174 - DNA, 120 bp, Artificial Sequence
  ENSG00000184154_23 (sequence is synthesized)
gtcgggcagacctggtgctcctggcacaccggccacgatgttacctgagggacctgcagctgctggaggcccatgccctactgccagcaggtgccaccgtgctggctgaccatgtgctct

SEQ ID NO: 659175 - DNA, 120 bp, Artificial Sequence
  ENSG00000184154_24 (sequence is synthesized)
tccctggtgcaccccgcttcttgcagtatgctaagagctgtggccgctaccgctgccgcctccaccacactggccttccagacttccctgccatcaaggatggaatagctcagctcacct

SEQ ID NO: 659176 - DNA, 120 bp, Artificial Sequence
  ENSG00000184154_25 (sequence is synthesized)
atgctggaccaggctgaggtccaggcccaggggtacttactgatgcccacccccacccccacccaagcagggacctcaaaatcccctccctttcctgtttggggccttgacacacgctgg

SEQ ID NO: 659177 - DNA, 120 bp, Artificial Sequence
  ENSG00000184154_26 (sequence is synthesized)
gctcagggctagggagtctctcttcccacctctgacctctttcagcctctacactgacctcaagtgtcaagttctatcaggctgcttggtctcactaggccccctctttccagagagaac

SEQ ID NO: 659178 - DNA, 120 bp, Artificial Sequence
  ENSG00000184154_27 (sequence is synthesized)
ccccaccttgctctgagatttaatcttctctcttaacacgaaggaagctggatgggagagctccaggggcctcccagttctcggcctcagaaagcctcccatcctcagcccatgccattc

SEQ ID NO: 659179 - DNA, 120 bp, Artificial Sequence
  ENSG00000184154_28 (sequence is synthesized)
tgggtgggatcagaggaagtggcaatgagttagacgccctgcaggaatagctggatgcaagctgggccagagaaaatggcacagaaccctggacccagggccagggatgccctggccttc

SEQ ID NO: 659180 - DNA, 120 bp, Artificial Sequence
  ENSG00000184154_29 (sequence is synthesized)
cctaactctggcccacctagccaattaggtgtggctgatgtcccttgagtgccctcttcctaaagcccaaaagaagatgctggactcctctgggccccaccaacaaatagggaatagaca

SEQ ID NO: 659181 - DNA, 120 bp, Artificial Sequence
  ENSG00000184154_30 (sequence is synthesized)
tgggtggaaaatcactcctttgtctttattaaagaaacttagaccagacctggcaatcaaggggtgaggtactggccaggaaggtggagtaggtttcaggccctggggatttcaagtgca

SEQ ID NO: 659182 - DNA, 120 bp, Artificial Sequence
  ENSG00000184154_31 (sequence is synthesized)
gactgatggcctgggaggggccaaagagaccagatcctggcagcagctgaggaggtgcccaagggcactttcaggcactggggccatcagctggttctgtgggcaggggttgggggttgg

SEQ ID NO: 659183 - DNA, 120 bp, Artificial Sequence
  ENSG00000184154_32 (sequence is synthesized)
gatgcagggtagtttgggctggcctggaatctccctgaggccaccctgccttgtctacctagatcatccactggtcctgatcctgttcgttgccttccatgtccacctggagaggaggct

SEQ ID NO: 659184 - DNA, 120 bp, Artificial Sequence
  ENSG00000184154_33 (sequence is synthesized)
gggtgtgggtggggaggggcctcagccagcctcagccccagatcctgcccctggctggatccagggtttctgtaccccttggccatcaactgggtcaggagcaagggtccaggaacagag

SEQ ID NO: 659185 - DNA, 120 bp, Artificial Sequence
  ENSG00000184154_34 (sequence is synthesized)
gccctcccccataccccttgcctacctcattgacctctccatcatccggtgactcattgtagtcattcatctcgtccatgtcctgcatatcctcatcatcctctgagtcctcttcactat

SEQ ID NO: 659186 - DNA, 120 bp, Artificial Sequence
  ENSG00000184154_35 (sequence is synthesized)
cctcatcatcttcatcatcctcttcttcctcgtcatcatagtgctggtgggcaggacagagcctgtaagccctacaggcctgcatggaccagttcaagaactgacccacttgagcctctc

SEQ ID NO: 659187 - DNA, 120 bp, Artificial Sequence
  ENSG00000184154_36 (sequence is synthesized)
tctagggccaatgaatgaccccctaccccgacactccctccttgagtctagcaggctggtgcatgttctgcaggaccttaatgctaggcccaatgcccaccccttctatctcccctttta

SEQ ID NO: 659188 - DNA, 120 bp, Artificial Sequence
  ENSG00000184154_37 (sequence is synthesized)
ggcttttacccagatctgagaaccacaactgctctgggtcagagacaggacattcagaattagagcagagcctcggtccactgcggcccccacacaggccccacctgctagagccactca

SEQ ID NO: 659189 - DNA, 120 bp, Artificial Sequence
  ENSG00000184154_38 (sequence is synthesized)
cctctgaggctggcttgccaataggaaccaggttgttgtctttctccgcgatgctttggagctgtgggcaaaggcacagaggaacaaggccagagcccaagtagggcaggtcaggggcat

SEQ ID NO: 659190 - DNA, 120 bp, Artificial Sequence
  ENSG00000184154_39 (sequence is synthesized)
gggactggcccattctgcccagaagacaacccacacgtgttggggagaagcttcctcccagttctcagggagatacaatccctttcttgtcatctgccatttatgaacttgatccaaata

SEQ ID NO: 659191 - DNA, 120 bp, Artificial Sequence
  ENSG00000184154_40 (sequence is synthesized)
taggtaagtgccctgcccctggaggtagcgtctagctgggctcccctaaaggaaaggaggaggagaaacaagaaatctacgaccattcttctgccatgcttggacctgggaagggagtaa

SEQ ID NO: 659192 - DNA, 120 bp, Artificial Sequence
  ENSG00000184154_41 (sequence is synthesized)
cagacctctaagcattccttgctctcagtcaggataaacctaatctttcccaaactatgctcaagtccctccattccttgcagtcagggaagacaacagcaactagtggagggggaaggg

SEQ ID NO: 659193 - DNA, 120 bp, Artificial Sequence
  ENSG00000184154_42 (sequence is synthesized)
ctatattccaagcagacagagctggaaggagacactgttccacttagaggcccagtggcaggtgcagggaacttatgggagtatttccattttaaccggaaacaatccctgaacccacag

SEQ ID NO: 659194 - DNA, 120 bp, Artificial Sequence
  ENSG00000184154_43 (sequence is synthesized)
ggcaacagcatccagcgcctgggggaggtgaataagctggctgtccttcctcggctccgtagcctgacactccatgggaaccccatggaggaagagaaagggtatagacggagtctcact

SEQ ID NO: 659195 - DNA, 120 bp, Artificial Sequence
  ENSG00000184154_44 (sequence is synthesized)
ttcaaggtcagcccccagagcacagtactccactcactaaggcagcaggcccagtgtggtccctaggaagaaaccataatctacttaaaagcctaaagagattcttcccatatgcttgca

SEQ ID NO: 659196 - DNA, 120 bp, Artificial Sequence
  ENSG00000184155_0 (sequence is synthesized)
atgaagagaaagaacttcacagaagtgtcagaattcattttcttgggattttctagctttggaaagcatcagataaccctctttgtggttttcctaactgtctacattttaactctggtt

SEQ ID NO: 659197 - DNA, 120 bp, Artificial Sequence
  ENSG00000184155_1 (sequence is synthesized)
gctaacatcatcattgtgactatcatctgcattgaccatcatctccacactcccatgtatttcttcctaagcatgctggctagttcagagacggtgtacacactggtcattgtgccacga

SEQ ID NO: 659198 - DNA, 120 bp, Artificial Sequence
  ENSG00000184155_2 (sequence is synthesized)
atgcttttgagcctcatttttcataaccaacctatctccttggcaggctgtgctacacaaatgttcttttttgttatcttggccactaataattgcttcctgcttactgcaatggggtat

SEQ ID NO: 659199 - DNA, 120 bp, Artificial Sequence
  ENSG00000184155_3 (sequence is synthesized)
attggtctgactatggcagttctccatgtgacagccatgttcaatttgccgttctgtggcacagtggtagaccacttcttttgtgacatttacccagtcatgaaactttcttgcattgat

SEQ ID NO: 659200 - DNA, 120 bp, Artificial Sequence
  ENSG00000184155_4 (sequence is synthesized)
accactatcaatgagataataaattatggtgtaagttcatttgtgatttttgtgcccataggcctgatatttatctcctatgtccttgtcatctcttccatccttcaaattgcctcagct

SEQ ID NO: 659201 - DNA, 120 bp, Artificial Sequence
  ENSG00000184155_5 (sequence is synthesized)
gagggccggaagaagacctttgccacctgtgtctcccacctcactgtggttattgtccactgtggctgtgcctccattgcctacctcaagccgaagtcagaaagttcaatagaaaaagac

SEQ ID NO: 659202 - DNA, 120 bp, Artificial Sequence
  ENSG00000184155_6 (sequence is synthesized)
cttgttctctcagtgacgtacaccatcatcactcccttgctgaaccctgttgtttacagtctgagaaacaaggaggtaaaggatgccctatgcagagttgtgggcagaaatatttcttaa

SEQ ID NO: 659203 - DNA, 80 bp, Artificial Sequence
  ENSG00000184156_0 (sequence is synthesized)
ggcgtgctctcggcccgcggcgcgctcgctgctgctgctgctgacaggctgaggctggaacgggcggggaggggcgcggg

SEQ ID NO: 659204 - DNA, 120 bp, Artificial Sequence
  ENSG00000184156_1 (sequence is synthesized)
tgtggctggcgggcgggagggcggctggcaccgggcttgtaaataaactgcgatgctgtcttgggctcgccggcctgggtgccgccgccgccgccgccgccccggagcgccggttccagg

SEQ ID NO: 659205 - DNA, 80 bp, Artificial Sequence
  ENSG00000184156_2 (sequence is synthesized)
gcgcgccctcccagcttctccgcagcccccggcccgcgaccctcggggtcctgcggctgacccgcgcgggatgtgacccc

SEQ ID NO: 659206 - DNA, 120 bp, Artificial Sequence
  ENSG00000184156_3 (sequence is synthesized)
ctgaccccctgcctggcctcccctgccccccagggggcccgcctttgcctgcttttgggggggggtggggaggggcgcgcggatcatggcattggagttcccgggcttgcagccgccgcc

SEQ ID NO: 659207 - DNA, 120 bp, Artificial Sequence
  ENSG00000184156_4 (sequence is synthesized)
gccgcctcgttcacgcaccccgagcgccccttcttcccagagcagcagcggagaaggcgaagcggccggcgggggcgaggcagatggggctcaaggcgcgcagggcggcgggggcggctg

SEQ ID NO: 659208 - DNA, 120 bp, Artificial Sequence
  ENSG00000184156_5 (sequence is synthesized)
gaggcggcggggcggctaacccagccggaggggacgcggcggcggccggcgacgaggagcggaaagtggggctggcgcccggcgacgtggagcaagtcaccttggcgctcggggccggag

SEQ ID NO: 659209 - DNA, 120 bp, Artificial Sequence
  ENSG00000184156_6 (sequence is synthesized)
tcaccttggcgctcggggccggagccgacaaagacgggaccctgctgctggagggcggcggccgcgacgaggggcagcggaggaccccgcagggcatcgggctcctggccaagaccccgc

SEQ ID NO: 659210 - DNA, 120 bp, Artificial Sequence
  ENSG00000184156_7 (sequence is synthesized)
tgagccgcccagtcaagagaaacaacgccaagtaccggcgcatccaaactttgatctacgacgccctggagagaccgcggggctgggcgctgctttaccacgcgttggtgttcctgattg

SEQ ID NO: 659211 - DNA, 120 bp, Artificial Sequence
  ENSG00000184156_8 (sequence is synthesized)
tcctggggtgcttgattctggctgtcctgaccacattcaaggagtatgagactgtctcgggagactggcttctgttactggagacatttgctattttcatctttggagccgagtttgctt

SEQ ID NO: 659212 - DNA, 120 bp, Artificial Sequence
  ENSG00000184156_9 (sequence is synthesized)
tgaggatctgggctgctggatgttgctgccgatacaaaggctggcggggccgactgaagtttgccaggaagcccctgtgcatgttggacatctttgtgctgattgcctctgtgccagtgg

SEQ ID NO: 659213 - DNA, 120 bp, Artificial Sequence
  ENSG00000184156_10 (sequence is synthesized)
ttgctgtgggaaaccaaggcaatgttctggccacctccctgcgaagcctgcgcttcctgcagatcctgcgcatgctgcggatggaccggagaggtggcacctggaagcttctgggctcag

SEQ ID NO: 659214 - DNA, 120 bp, Artificial Sequence
  ENSG00000184156_11 (sequence is synthesized)
ccatctgtgcccacagcaaagaactcatcacggcctggtacatcggtttcctgacactcatcctttcttcatttcttgtctacctggttgagaaagacgtcccagaggtggatgcacaag

SEQ ID NO: 659215 - DNA, 120 bp, Artificial Sequence
  ENSG00000184156_12 (sequence is synthesized)
gagaggagatgaaagaggagtttgagacctatgcagatgccctgtggtggggcctgatcacactggccaccattggctatggagacaagacacccaaaacgtgggaaggccgtctgattg

SEQ ID NO: 659216 - DNA, 120 bp, Artificial Sequence
  ENSG00000184156_13 (sequence is synthesized)
ccgccaccttttccttaattggcgtctccttttttgcccttccagcgggcatcctggggtccgggctggccctcaaggtgcaggagcaacaccgtcagaagcactttgagaaaaggagga

SEQ ID NO: 659217 - DNA, 120 bp, Artificial Sequence
  ENSG00000184156_14 (sequence is synthesized)
agccagctgctgagctcattcaggctgcctggaggtattatgctaccaaccccaacaggattgacctggtggcgacatggagattttatgaatcagtcgtctcttttcctttcttcagga

SEQ ID NO: 659218 - DNA, 120 bp, Artificial Sequence
  ENSG00000184156_15 (sequence is synthesized)
aagaacagctggaggcagcatccagccaaaagctgggtctcttggatcgggttcgcctttctaatcctcgtggtagcaatactaaaggaaagctatttacccctctgaatgtagatgcca

SEQ ID NO: 659219 - DNA, 120 bp, Artificial Sequence
  ENSG00000184156_16 (sequence is synthesized)
tagaagaaagtccttctaaagaaccaaagcctgttggcttaaacaataaagagcgtttccgcacggccttccgcatgaaagcctacgctttctggcagagttctgaagatgccgggacag

SEQ ID NO: 659220 - DNA, 120 bp, Artificial Sequence
  ENSG00000184156_17 (sequence is synthesized)
gtgaccccatggcggaagacaggggctatgggaatgacttccccatcgaagacatgatccccaccctgaaggccgccatccgagccgtcagaattctacaattccgtctctataaaaaaa

SEQ ID NO: 659221 - DNA, 120 bp, Artificial Sequence
  ENSG00000184156_18 (sequence is synthesized)
aattcaaggagactttgaggccttacgatgtgaaggatgtgattgagcagtattctgccgggcatctcgacatgctttccaggataaagtaccttcagacgagaatagatatgattttca

SEQ ID NO: 659222 - DNA, 120 bp, Artificial Sequence
  ENSG00000184156_19 (sequence is synthesized)
cccctggacctccctccacgccaaaacacaagaagtctcagaaagggtcagcattcaccttcccatcccagcaatctcccaggaatgaaccatatgtagccagaccatccacatcagaaa

SEQ ID NO: 659223 - DNA, 120 bp, Artificial Sequence
  ENSG00000184156_20 (sequence is synthesized)
tcgaagaccaaagcatgatggggaagtttgtaaaagttgaaagacaggttcaggacatggggaagaagctggacttcctcgtggatatgcacatgcaacacatggaacggttgcaggtgc

SEQ ID NO: 659224 - DNA, 120 bp, Artificial Sequence
  ENSG00000184156_21 (sequence is synthesized)
aggtcacggagtattacccaaccaagggcacctcctcgccagctgaagcagagaagaaggaggacaacaggtattccgatttgaaaaccatcatctgcaactattctgagacaggccccc

SEQ ID NO: 659225 - DNA, 120 bp, Artificial Sequence
  ENSG00000184156_22 (sequence is synthesized)
cggaaccaccctacagcttccaccaggtgaccattgacaaagtcagcccctatgggttttttgcacatgaccctgtgaacctgccccgagggggacccagttctggaaaggttcaggcaa

SEQ ID NO: 659226 - DNA, 120 bp, Artificial Sequence
  ENSG00000184156_23 (sequence is synthesized)
ctcctccttcctcagcaacaacgtatgtggagaggcccacggtcctgcctatcttgactcttctcgactcccgagtgagctgccactcccaggctgacctgcagggcccctactcggacc

SEQ ID NO: 659227 - DNA, 120 bp, Artificial Sequence
  ENSG00000184156_24 (sequence is synthesized)
gaatctccccccggcagagacgtagcatcacgcgagacagtgacacacctctgtccctgatgtcggtcaaccacgaggagctggagaggtctccaagtggcttcagcatctcccaggaca

SEQ ID NO: 659228 - DNA, 120 bp, Artificial Sequence
  ENSG00000184156_25 (sequence is synthesized)
gagatgattatgtgttcggccccaatggggggtcgagctggatgagggagaagcggtacctcgccgagggtgagacggacacagacacggaccccttcacgcccagcggctccatgcctc

SEQ ID NO: 659229 - DNA, 120 bp, Artificial Sequence
  ENSG00000184156_26 (sequence is synthesized)
tgtcgtccacaggggatgggatttctgattcagtatggaccccttccaataagcccatttaaaagaggtcactggctgacccctccttgtaatgtagacagactttgtatagttcactta

SEQ ID NO: 659230 - DNA, 120 bp, Artificial Sequence
  ENSG00000184156_27 (sequence is synthesized)
ctcttacacccgacgcttaccagcggggacaccaatggctgcatcaaatgcatgcgtgtgcgtggtggccccacccaggcaggggcttcccacagcctcttcctccccatgtcaccacaa

SEQ ID NO: 659231 - DNA, 120 bp, Artificial Sequence
  ENSG00000184156_28 (sequence is synthesized)
caaagtgcttccttttcagcatggtttgcatgactttacactatataaatggttccgctaatctcttctaggatacacatttatctgctgttcttacttttaatcacgattggaccagta

SEQ ID NO: 659232 - DNA, 120 bp, Artificial Sequence
  ENSG00000184156_29 (sequence is synthesized)
cagggagaaattactgatgagccatgctatttgtctgtttggttggctggtttgggttttggtttggtaagcagagaaagtagtttaagttatttctaggatcactgccctcttgtgtaa

SEQ ID NO: 659233 - DNA, 120 bp, Artificial Sequence
  ENSG00000184156_30 (sequence is synthesized)
aacgctccagcaattaactgtttttgaaagcaaggaaataattttctcaacaaaaccacattgtgtatcagtggggctgcctactgagctaacattaggaaaggaatgagatagtcattg

SEQ ID NO: 659234 - DNA, 120 bp, Artificial Sequence
  ENSG00000184156_31 (sequence is synthesized)
tgtctctaaaacaaagaatttaaacaaatatttaaggcaaaaccttttaaaagctctccaaaagacctcacttggcctgatgttacttagtatcatgcctcagtttccttatctgtaaaa

SEQ ID NO: 659235 - DNA, 90 bp, Artificial Sequence
  ENSG00000184156_32 (sequence is synthesized)
tgttacttagtatcatgcctcagtttccttatctgtaaaaagtggtggtaatcccaagtgtagcatttctgatgagttatgaattggcag

SEQ ID NO: 659236 - DNA, 120 bp, Artificial Sequence
  ENSG00000184156_33 (sequence is synthesized)
atttatgtagccaaggacaatggaatttatcagaagtgaagtgcccctctgggcaggagctgagttcagtgcctttaaaatgaatttccaactctcatttcttcccatgatactgaagta

SEQ ID NO: 659237 - DNA, 120 bp, Artificial Sequence
  ENSG00000184156_34 (sequence is synthesized)
caaaatatccatctaaaatagaaattaaagtcaagaaggcacacagaaattttctagtccaaggacttccttttataaatgaagaatcttaggctcaggtaaagtgacatacccagagtc

SEQ ID NO: 659238 - DNA, 120 bp, Artificial Sequence
  ENSG00000184156_35 (sequence is synthesized)
actcagttgtcccatagagaaccaggactcaaaagtcaggtctgcccactctccctgaccttgtttcccctcaccacaccattcttccatttatataatgcatcctagagattgtgtcaa

SEQ ID NO: 659239 - DNA, 120 bp, Artificial Sequence
  ENSG00000184156_36 (sequence is synthesized)
gatatatgactttgtgtcgcgtggaaagcacccagtttatccagcaggagggggatttccacttttattgcaaaacatgcttgcttgatgcaatgcatttcagatctagaaaaaaataat

SEQ ID NO: 659240 - DNA, 120 bp, Artificial Sequence
  ENSG00000184156_37 (sequence is synthesized)
gcaagcaagctacatttacagatgtgtaaacaggcaaaatttccagaaccgtccaattttacttttccaaatttatggaaccaacccagattttttaaatgaaaatactaaaaccatatg

SEQ ID NO: 659241 - DNA, 120 bp, Artificial Sequence
  ENSG00000184156_38 (sequence is synthesized)
taaccgtaagacaagctaaaatgtaagcagacagcctgggaagcactgccctactgtacaggtgtgatattaagcacaagccatcctctggcctcttatgagatgttgttattctctgaa

SEQ ID NO: 659242 - DNA, 120 bp, Artificial Sequence
  ENSG00000184156_39 (sequence is synthesized)
aaactttgatggaaaaggtttctgttaggcttagactgaattagctaaatgaccatgccacagtattattgtatcactcttctcacacacctaggcactggttgtggatagttgccatgg

SEQ ID NO: 659243 - DNA, 120 bp, Artificial Sequence
  ENSG00000184156_40 (sequence is synthesized)
tgacaatcaagataatccagatgacctaaacaaatgtctgtatgcagctgacactgctattctccctcacagtcttgtcaagagccacagtagctatggcagacatttggttgatggttt

SEQ ID NO: 659244 - DNA, 120 bp, Artificial Sequence
  ENSG00000184156_41 (sequence is synthesized)
catcatttcctaatacgagagtctggcactatgttggagagaggaatcacttcctcagagataggttcctttcaactcacatgtcaacagttactgtacaaaaagctcagaatacagtaa

SEQ ID NO: 659245 - DNA, 120 bp, Artificial Sequence
  ENSG00000184156_42 (sequence is synthesized)
tgattagagcttgacccctgactttaggaacttagaaccaaagcccaaagtcccaggccaagggcagacattgtgagcagcagaagggtgttttttatggagagccccataaatggatgg

SEQ ID NO: 659246 - DNA, 120 bp, Artificial Sequence
  ENSG00000184156_43 (sequence is synthesized)
gtgtagaccttgaagtctgagatgggaaatataccagaatgctcaatgcatcagacatgaagccccacgggcttccatttgacatgctggcaatctgaaggacaaagggcatgggttatt

SEQ ID NO: 659247 - DNA, 120 bp, Artificial Sequence
  ENSG00000184156_44 (sequence is synthesized)
tgggccttttccccactccttcaatatggctgaaagtgccagtggggattacaacctaagaaaccctatgccccttcctgagggcttgattattgaatcctgatcttcctggaatctttc

SEQ ID NO: 659248 - DNA, 120 bp, Artificial Sequence
  ENSG00000184156_45 (sequence is synthesized)
acttgagatgatcacctgcctaacatccaacatgttactatgctcttctttatgtacatgagttactggaaaccaacaataaaggagagtgagtcatactctccacatatgcgccaatta

SEQ ID NO: 659249 - DNA, 120 bp, Artificial Sequence
  ENSG00000184156_46 (sequence is synthesized)
attttttaacttacttattagtattcttgaagaacttactatcttaagtattttaccaatagatgatgcattttccagcaactcaatggagttctaccttaaagtatttaccattgatcc

SEQ ID NO: 659250 - DNA, 120 bp, Artificial Sequence
  ENSG00000184156_47 (sequence is synthesized)
aaaattggaggaactaccttagattcttttaataacctagaaaggattggagcttgtattatttcctaaaccataggcaggcagtctagcttccctgctggatcataagaccaggacagc

SEQ ID NO: 659251 - DNA, 120 bp, Artificial Sequence
  ENSG00000184156_48 (sequence is synthesized)
tctttatcagtatagacatagacaaaatacatgttttatgaatgaataaataataagaaccttaagagctgtttttttcccatttaagaaaacaaaaaggaaaagagaaaaatgatcttc

SEQ ID NO: 659252 - DNA, 120 bp, Artificial Sequence
  ENSG00000184156_49 (sequence is synthesized)
tggaataactctgctttgatattctccttttgttccccaaaaaatatattccagaaaggcaaaccaaacctgctcaagttgcctatgcacagacaatctcaacaatatggctcacagtga

SEQ ID NO: 659253 - DNA, 120 bp, Artificial Sequence
  ENSG00000184156_50 (sequence is synthesized)
gcaagcagaaattcagggtctggaattgaatgtgagttatgggaagaaacagtgtgtgctttcacaaagatccttttgtcagacaagggaacagcatgataatccaatggaactggttaa

SEQ ID NO: 659254 - DNA, 120 bp, Artificial Sequence
  ENSG00000184156_51 (sequence is synthesized)
catgacccaagatgacatgaccacagatatactagtcgttctgaaacttgcccaagaaattgcaatcgtttcagcagaactccatgaaatattgacaaattaattccatcatcaaactag

SEQ ID NO: 659255 - DNA, 120 bp, Artificial Sequence
  ENSG00000184156_52 (sequence is synthesized)
gagtgatattatcaggtaaaactatgatctcatgtatgtatttggtctttctgggtcacaatgtgacatgaaaaattttaaaggtcatattttagcaagatcaaaatgaattagataaat

SEQ ID NO: 659256 - DNA, 120 bp, Artificial Sequence
  ENSG00000184156_53 (sequence is synthesized)
caacttcacaaatgttaagcgaaacatgatcctattgagctgagaaagaagtacttgagatcgtttgagttttgactatcaaatgtcagcacaaaagcaaatatcaaaagcttaagaaaa

SEQ ID NO: 659257 - DNA, 120 bp, Artificial Sequence
  ENSG00000184156_54 (sequence is synthesized)
aaattatttcaggaaaagaaaaacacatcaaattgagaaagtgttgttgaataactttgtttttagaactggaaatttaggcttattagacatgacattgatattacaaagccctagttt

SEQ ID NO: 659258 - DNA, 120 bp, Artificial Sequence
  ENSG00000184156_55 (sequence is synthesized)
tcatgaaaacataactagataaccccaaggtgtataggttaaaatgaactaattaatcaacaattatgcatcctgtgtctattttgtgcaaggtacttcctagacactgtagtttgaaag

SEQ ID NO: 659259 - DNA, 120 bp, Artificial Sequence
  ENSG00000184156_56 (sequence is synthesized)
aataatttcctgtagaaaaacctaatctaataggacctactcataatttggcaaaatcatcctcataattccatgctactgaaatgggggtgtaataaagaaaaaatcatttgtttattc

SEQ ID NO: 659260 - DNA, 120 bp, Artificial Sequence
  ENSG00000184156_57 (sequence is synthesized)
atttaacagggtttattaagcaccaatatatgcccagaactttgcagtgcactggaagttcagagataagaaaaccacagtttctgccatcaaaatgctaggaatctagaggtctcaaac

SEQ ID NO: 659261 - DNA, 120 bp, Artificial Sequence
  ENSG00000184156_58 (sequence is synthesized)
atcagaggtcccttcaaactatgtctaccaggaaaataaaatacctgatttcatccctgcaaacaactctatacagacagaaatgcttcctagcttggaaactatagaaaattgaacatg

SEQ ID NO: 659262 - DNA, 120 bp, Artificial Sequence
  ENSG00000184156_59 (sequence is synthesized)
aaaatgagagcaaaggttctacatcaaaatggcaatgatccaatcagcccagtcaaggctgagtgggttgaatggggacttcgagtttggattcaatgctttgaacttcatagctccaga

SEQ ID NO: 659263 - DNA, 120 bp, Artificial Sequence
  ENSG00000184156_60 (sequence is synthesized)
gaagctgtgcaaaaaggggggattctagggaatctgaggaagattgttggagaaaccagctttcttcttgtctcctaatccctgctaagattgataccagtcaaggagctgagttacttt

SEQ ID NO: 659264 - DNA, 120 bp, Artificial Sequence
  ENSG00000184156_61 (sequence is synthesized)
catttcattatgttgaccaagagaagcttatgatacagactatgacacagcacctatttcaagagaaagatgttactctacttatgggaacctgcagatcaaattctcctggggcaagag

SEQ ID NO: 659265 - DNA, 120 bp, Artificial Sequence
  ENSG00000184156_62 (sequence is synthesized)
aagaaatttgttcagcagcctaagaagtcaactgtactttggacagtgctgccaaacacaccccaggattctcccacccctgtgctttcccagaagatgccacatagctggtatttggtt

SEQ ID NO: 659266 - DNA, 120 bp, Artificial Sequence
  ENSG00000184156_63 (sequence is synthesized)
ttcatgaataaccaaagattcttctttgcttcctgaaccccaggcatccttaggaatttgcttcatgtcctcacttgtccttgaaggcttgtttttcaggatgaacttttaaagtctaag

SEQ ID NO: 659267 - DNA, 120 bp, Artificial Sequence
  ENSG00000184156_64 (sequence is synthesized)
ttgtttatattcaaatcaacccaatgctattgttgctgatattaaaccattccaaactgagccaactggcccctaaacaagccagcaggcagcccctcactaatgcccagtttagaacat

SEQ ID NO: 659268 - DNA, 120 bp, Artificial Sequence
  ENSG00000184156_65 (sequence is synthesized)
gttaggaccaggctatctgcatagctttagtggttttagaagccagtaatggcagtgtaaaagaggaatcatacagagatgacctggaagaaaatttgagtttcagcacattcaaaagca

SEQ ID NO: 659269 - DNA, 120 bp, Artificial Sequence
  ENSG00000184156_66 (sequence is synthesized)
tttgactcttctgccgtgttttgattttcaagtgagacaatcaatgtacacacaaagcctctagtacaatgactgatgcatactagggactgttatttatgttatttttttacagtatgc

SEQ ID NO: 659270 - DNA, 120 bp, Artificial Sequence
  ENSG00000184156_67 (sequence is synthesized)
atggacttcattgtctcagtctttggtgttacttataaactctaaatttacaccaaaaaaattttttttcagaaaaagaatcgtggagaaacaatcctaattattaaatcaaatgctttc

SEQ ID NO: 659271 - DNA, 120 bp, Artificial Sequence
  ENSG00000184156_68 (sequence is synthesized)
acaattgctttttaaataagtacatctctgcaaataaaaatgcttgctcttgtctaccacaataaagaacagaaggaatcttggaatgaagagaggcaggaatgttggatctcagtggct

SEQ ID NO: 659272 - DNA, 120 bp, Artificial Sequence
  ENSG00000184156_69 (sequence is synthesized)
gagttgtggcaattccattggacatatagtaccagatgttgcaccatctggatgatgtgtaggagataaagccaaattgcaaaaataaaagactcatgatttcccaaggaaagtcaactg

SEQ ID NO: 659273 - DNA, 120 bp, Artificial Sequence
  ENSG00000184156_70 (sequence is synthesized)
tgcatggtggctatcagacaacaccctagcaatgaatgggggaacttgcagaagaaagagttaatgcttgcttaaaccttccctggggagatttgttcccaggctttcacggctttaacc

SEQ ID NO: 659274 - DNA, 120 bp, Artificial Sequence
  ENSG00000184156_71 (sequence is synthesized)
tcagcaaccctgtaagaaaattgtgattcatattttgatttgttatcatagatgcaaagagacataatttcatggattctaagatacacagagcaagaagagattttgatcacccagaac

SEQ ID NO: 659275 - DNA, 120 bp, Artificial Sequence
  ENSG00000184156_72 (sequence is synthesized)
aaccacctgtctttttagatcaagaagcagaagctcagagcaaagaacatcacaccacgtccctcagtgattgaagcagtgattgagtcacagaataaatctggaactcaggtcttctga

SEQ ID NO: 659276 - DNA, 120 bp, Artificial Sequence
  ENSG00000184156_73 (sequence is synthesized)
tctttgctccagatgttagagacaaaactaaaagtaaaataccaagtgaaatcaaagcatcacgattgagcccagaacatgaaaaagaacttcctggcccacttgagaaactgttaaacc

SEQ ID NO: 659277 - DNA, 120 bp, Artificial Sequence
  ENSG00000184156_74 (sequence is synthesized)
ggacatacctttggggacttcttcccttctctggaataagattgatgtttccatgctgtgaaagacgatgatgttccttctcccagattcctgctgtcttcaaaaggcctagcaaaaacc

SEQ ID NO: 659278 - DNA, 120 bp, Artificial Sequence
  ENSG00000184156_75 (sequence is synthesized)
actgctgctgggtgcagttgagaaagggaatgaagaacaatcccatggccatgcaggcactcctcccctccacctctctgccctccacccctctgccctctcctaccttgttccttcttg

SEQ ID NO: 659279 - DNA, 120 bp, Artificial Sequence
  ENSG00000184156_76 (sequence is synthesized)
gtcctgccatgtttggactggttcacctttttggcccatcacttgggctcattcagcaacagtcatgccttaggttgcatcctcatctataggccaattaaacagggtttcttcttgata

SEQ ID NO: 659280 - DNA, 120 bp, Artificial Sequence
  ENSG00000184156_77 (sequence is synthesized)
aatccctatggttttgattttaggaagtcaggcatgatttcttttgggatctatatgacccaaagtggccagttttaccaaaggtgtccctttgcactgggatctctgggtctcatttga

SEQ ID NO: 659281 - DNA, 120 bp, Artificial Sequence
  ENSG00000184156_78 (sequence is synthesized)
acacagcttgggtcctcttgccttgtcccagagaatccccatgttgtcaggacataagcagatactctagggccttcaccaaaagctacaaagaagcagacaggactcaacttaggacat

SEQ ID NO: 659282 - DNA, 120 bp, Artificial Sequence
  ENSG00000184156_79 (sequence is synthesized)
cttatggttatgtaactaagagattattttaggaagtaaacaggcctctgttggctcaaatgaacatcttcattgttagtttccacttacattgttctcgggataaatcggccagaattt

SEQ ID NO: 659283 - DNA, 120 bp, Artificial Sequence
  ENSG00000184156_80 (sequence is synthesized)
ggcagggctccccagcagtccttgtgaatccctgtggtaggatgtttcagttctcctgagtcaggctgaagtgaaagctcctaagagatattcagaaagaaggatggtcaagttctagaa

SEQ ID NO: 659284 - DNA, 120 bp, Artificial Sequence
  ENSG00000184156_81 (sequence is synthesized)
caacaatagttggcccagtaattttaaagattgtcattctacctaagccttcatcctccagatagcactgttatgggcttaaaataagcttcaagggaaataatgaatttctttgacacc

SEQ ID NO: 659285 - DNA, 120 bp, Artificial Sequence
  ENSG00000184156_82 (sequence is synthesized)
gccaaaaatcggctgtatataagaataacttgagaatggcttacaatgaggtagtcaaaagcccagctcagtgctcaggaatgtatttgtaattcctcttagacttgtcgaatggactgc

SEQ ID NO: 659286 - DNA, 120 bp, Artificial Sequence
  ENSG00000184156_83 (sequence is synthesized)
aatttgatacctaagagtaataaaaaatgagaccatattttatgttaatgttcccttctcttcctctgcccacaaaagtgaggtcagggaaggggagagaaacttatcctaagcactcct

SEQ ID NO: 659287 - DNA, 120 bp, Artificial Sequence
  ENSG00000184156_84 (sequence is synthesized)
tatgagttgcttgtgacatgatagctctctctaaagttcatgcaatcctcatcgcaaccccatgagggagatgttattgtctccatcttatagatgaggaaactgaagacaagaccttgt

SEQ ID NO: 659288 - DNA, 120 bp, Artificial Sequence
  ENSG00000184156_85 (sequence is synthesized)
caaaggtcacacattgtaagaagtagagctgcatattcaaccaaagcccgtgtacctggaaagctcattctctctcccccttcttcctctcaaatcaggccctagctcctccacaatgct

SEQ ID NO: 659289 - DNA, 120 bp, Artificial Sequence
  ENSG00000184156_86 (sequence is synthesized)
tcgggcttctacgttcactcagctttacagtaaaatgatcacagacccatgagttccctggagagtagagtgatgcctgggtcagctgttcctcttgtctgttcagcaggtcctttgagt

SEQ ID NO: 659290 - DNA, 120 bp, Artificial Sequence
  ENSG00000184156_87 (sequence is synthesized)
ggcttcacaatccagctgtcagtggcagaaaataatgcctcataaattattcacctggttcacattggaatccattagctctcggggcttggtgtggctgcagatcatccacaagtgccc

SEQ ID NO: 659291 - DNA, 120 bp, Artificial Sequence
  ENSG00000184156_88 (sequence is synthesized)
cttgttctctgcccccaaggagctcctgtcattgtttttaaccaaacaagttcaaatatctccacgtctctgctgactctggtcttttgtctctagactgtacctttatttctgagctct

SEQ ID NO: 659292 - DNA, 120 bp, Artificial Sequence
  ENSG00000184156_89 (sequence is synthesized)
gaaattctgcagaaacaggtgagtctataaaaacattctgtgggaggccaaaagctcagaacagttgtgtctctctttctcagtattaaaagatcaaggtttcccatggaagccaacctg

SEQ ID NO: 659293 - DNA, 120 bp, Artificial Sequence
  ENSG00000184156_90 (sequence is synthesized)
atctggtaattgggcccttctatacccctctgaatacttttccaaggagggggcagttcccacccccatagttcccctgagggttaagagtccaggtggtggccaagttgcaagatttgg

SEQ ID NO: 659294 - DNA, 120 bp, Artificial Sequence
  ENSG00000184156_91 (sequence is synthesized)
ggcagccattttgccaaggatcagagatttgctgttggagaggtgaagtcggctctgtgccatcctgaaaaatcaacttagaaagataggtggacttcatcagatttgtcagtccttcct

SEQ ID NO: 659295 - DNA, 120 bp, Artificial Sequence
  ENSG00000184156_92 (sequence is synthesized)
tgttttaaagagaaaaatgatctctgccttgcttcagataggatatggctattttttttccttctttttctaatgtagcagtgatggaaaacaccagtctttgaagaacaaatggaggtt

SEQ ID NO: 659296 - DNA, 120 bp, Artificial Sequence
  ENSG00000184156_93 (sequence is synthesized)
cccagtgacatgaatccattatatttgattttggattgtattttttaacccctttttatggcatagaattctggtgccttgctccctgggtttgtctctgtgctacgagtaggctttctt

SEQ ID NO: 659297 - DNA, 120 bp, Artificial Sequence
  ENSG00000184156_94 (sequence is synthesized)
cacattctggcttacaggggaacacaactattccacaagtggcctttagtgctctttataatatgatttcctgtaatttttaaactgtatgtgtaatttatattctggctctgtccaata

SEQ ID NO: 659298 - DNA, 120 bp, Artificial Sequence
  ENSG00000184156_95 (sequence is synthesized)
tttgaacaactttaataggttgatttccatatatattatgcaaataattcttacctgattttttatgttctatcttaaataaatactgcaccacttattaataaatagacatttcagtga

SEQ ID NO: 659299 - DNA, 120 bp, Artificial Sequence
  ENSG00000184156_96 (sequence is synthesized)
ttgcccacttaagaacctttgactccacaaggtaactctctcccttccctcgacaagccaacttcttgcttccctaactcctcctgtcccttgggctgaggcattgtgatgtattcccag

SEQ ID NO: 659300 - DNA, 120 bp, Artificial Sequence
  ENSG00000184156_97 (sequence is synthesized)
gagtctagggctgcaggctcccaagttaggagcctggaaacctgtcaccttggtttctaagggtccgccccgaccccccgccccatgattggattgttatggaggtcaacttgaaggatg

SEQ ID NO: 659301 - DNA, 120 bp, Artificial Sequence
  ENSG00000184156_98 (sequence is synthesized)
gggcggtgccaggtgcaaagcaatttagagaccagggcacgggaagagtggcagaaaagcgccctctggaggctgtaggagccatggcctcatgtgcctcttttacttatgcaaagggag

SEQ ID NO: 659302 - DNA, 120 bp, Artificial Sequence
  ENSG00000184156_99 (sequence is synthesized)
aaagtgacttctccaaggtcaccaggatagagactgacagagcaaaagtcccagctgaggcctgcacagtgtgtgttgtttgctggcttctgtgtcctttgctggcttctggctctgggg

SEQ ID NO: 659303 - DNA, 120 bp, Artificial Sequence
  ENSG00000184156_100 (sequence is synthesized)
gccactctggaactgcggagctcacttctcctccctgctagccttttccctcactaccagtcatgagctgcgcacacttttgacttggacttctgggtaatagaatgagggtgccaagaa

SEQ ID NO: 659304 - DNA, 120 bp, Artificial Sequence
  ENSG00000184156_101 (sequence is synthesized)
aggctgaacagcatcacagcttgagaataccgtggagtcttgcaacgtggaaataaagactctggggattgacacatccagaggcgtggaaggctttgaccgaacagtggggtccccaag

SEQ ID NO: 659305 - DNA, 80 bp, Artificial Sequence
  ENSG00000184160_0 (sequence is synthesized)
acttacacgctcggcagctgcggggagcccggcagccacgctctccggcgcgccgcccgcggagccaccacggccgaggg

SEQ ID NO: 659306 - DNA, 80 bp, Artificial Sequence
  ENSG00000184160_1 (sequence is synthesized)
cgcccgagctgccgcggctgcgccccggctccaggagggacggcgtagctcgcgggaggaccatggcgtccccggcgctg

SEQ ID NO: 659307 - DNA, 80 bp, Artificial Sequence
  ENSG00000184160_2 (sequence is synthesized)
cgagcggcgcgggcgagaggggcagcggcggggttgccaatgcctcgggggcttcctgggggccgccgcgcggccagtac

SEQ ID NO: 659308 - DNA, 120 bp, Artificial Sequence
  ENSG00000184160_3 (sequence is synthesized)
tcggcgggcgcggtggcagggctggctgccgtggtgggcttcctcatcgtcttcaccgtggtgggcaacgtgctggtggtgatcgccgtgctgaccagccgggcgctgcgcgcgccacag

SEQ ID NO: 659309 - DNA, 120 bp, Artificial Sequence
  ENSG00000184160_4 (sequence is synthesized)
aacctcttcctggtgtcgctggcctcggccgacatcctggtggccacgctggtcatgcccttctcgttggccaacgagctcatggcctactggtacttcgggcaggtgtggtgcggcgtg

SEQ ID NO: 659310 - DNA, 120 bp, Artificial Sequence
  ENSG00000184160_5 (sequence is synthesized)
tacctggcgctcgatgtgctgttttgcacctcgtcgatcgtgcatctgtgtgccatcagcctggaccgctactggtcggtgacgcaggccgtcgagtacaacctgaagcgcacaccacgc

SEQ ID NO: 659311 - DNA, 120 bp, Artificial Sequence
  ENSG00000184160_6 (sequence is synthesized)
cgcgtcaaggccaccatcgtggccgtgtggctcatctcggccgtcatctccttcccgccgctggtctcgctctaccgccagcccgacggcgccgcctacccgcagtgcggcctcaacgac

SEQ ID NO: 659312 - DNA, 120 bp, Artificial Sequence
  ENSG00000184160_7 (sequence is synthesized)
gagacctggtacatcctgtcctcctgcatcggctccttcttcgcgccctgcctcatcatgggcctggtctacgcgcgcatctaccgagtggccaagctgcgcacgcgcacgctcagcgag

SEQ ID NO: 659313 - DNA, 80 bp, Artificial Sequence
  ENSG00000184160_8 (sequence is synthesized)
cgagaacgggcactgcgcgcccccgcccgccgacgtggagccggacgagagcagcgcagcggccgagaggcggcggcgcc

SEQ ID NO: 659314 - DNA, 120 bp, Artificial Sequence
  ENSG00000184160_9 (sequence is synthesized)
ctgaccgcctccaggtccccggggcccggtggccgcctgtcgcgcgccagctcgcgctccgtcgagttcttcctgtcgcgccggcgccgggcgcgcagcagcgtgtgccgccgcaaggtg

SEQ ID NO: 659315 - DNA, 120 bp, Artificial Sequence
  ENSG00000184160_10 (sequence is synthesized)
cgccgggcgcgcagcagcgtgtgccgccgcaaggtggcccaggcgcgcgagaagcgcttcacctttgtgctggctgtggtcatgggcgtgttcgtgctctgctggttccccttcttcttc

SEQ ID NO: 659316 - DNA, 120 bp, Artificial Sequence
  ENSG00000184160_11 (sequence is synthesized)
agctacagcctgtacggcatctgccgcgaggcctgccaggtgcccggcccgctcttcaagttcttcttctggatcggctactgcaacagctcgctcaacccggtcatctacacggtcttc

SEQ ID NO: 659317 - DNA, 120 bp, Artificial Sequence
  ENSG00000184160_12 (sequence is synthesized)
aaccaggatttccggcgatcctttaagcacatcctcttccgacggaggagaaggggcttcaggcagtgactcgcacccgtctgggaatcctggacagctccgcgctcggggctgggcaga

SEQ ID NO: 659318 - DNA, 120 bp, Artificial Sequence
  ENSG00000184160_13 (sequence is synthesized)
aggggcggcccggacgggggagctttcccagagacccggggatggattggcctccagggcgcaggggagggtgcggcagggcaggagcttggcagagagatagccgggctccagggagtg

SEQ ID NO: 659319 - DNA, 120 bp, Artificial Sequence
  ENSG00000184160_14 (sequence is synthesized)
gggaggagagagggggagacccctttgccttcccccctcagcaaggggctgcttctggggctccctgcctggatccagctctgggagccctgccgaggtgtggctgtgaggtcagggttt

SEQ ID NO: 659320 - DNA, 120 bp, Artificial Sequence
  ENSG00000184160_15 (sequence is synthesized)
tagagagcagtggcagaggtagccccctaaatgggcaagcaaggagccccccaaagacactaccactccccatccccgtctgaccaagggctgacttctccaggacctagtcggggggtg

SEQ ID NO: 659321 - DNA, 120 bp, Artificial Sequence
  ENSG00000184160_16 (sequence is synthesized)
gctgccagggggcaaggagaaagcaccgacaatctttgattactgaaagtatttaaatgtttgccaaaaacaacagccaaaacaaccaaactattttctaaataaacctttgtaatctaa

SEQ ID NO: 659322 - DNA, 120 bp, Artificial Sequence
  ENSG00000184162_0 (sequence is synthesized)
ccaagcccacgcggttccgggtcccaagatttggctccaagagctattcgcagagaaacagcctcgcacaaaaagccaccgcccccgaaacccgcgggaaatctgtttcctgtgaaaggc

SEQ ID NO: 659323 - DNA, 120 bp, Artificial Sequence
  ENSG00000184162_1 (sequence is synthesized)
ctggcctccgggcattggcggtttccctgatcctctctcccaaattttccggcaggggattgatcgaggcgacatttaggactggggtgggcgagggagtggcggttctcgtcccaagtt

SEQ ID NO: 659324 - DNA, 120 bp, Artificial Sequence
  ENSG00000184162_2 (sequence is synthesized)
acaggtgaggacgttcaggccaaggcgtagccaagatcgcgccgccctgtagcttgaggaggcgccgggattcgaaccaaggctgtgcccaatcctaagccctgcgaggtcttgtggaac

SEQ ID NO: 659325 - DNA, 120 bp, Artificial Sequence
  ENSG00000184162_3 (sequence is synthesized)
cgacatgacccactctttggtttgtccagagacagtgagcagggtgagttcagtgctgaatcgcaacactcggcagtttggaaaaaaacatcttttcgaccaggatgaggagacatgttg

SEQ ID NO: 659326 - DNA, 120 bp, Artificial Sequence
  ENSG00000184162_4 (sequence is synthesized)
gaactcagaccagggcccctcccagtgggtgacgctggagtttccccagctcatccgtgtctcccagctgcagatccagtttcagggtggcttctccagtcgccggggctgcctggaagg

SEQ ID NO: 659327 - DNA, 120 bp, Artificial Sequence
  ENSG00000184162_5 (sequence is synthesized)
ggaccggctgaaggtgacgtttgaggatgccactgacttttttggccgtgtggtcatctaccacctgcgggtgcttggggagaaggtgtgagacctctaggggctgtctcctccaggaag

SEQ ID NO: 659328 - DNA, 120 bp, Artificial Sequence
  ENSG00000184162_6 (sequence is synthesized)
ccctccgggaagcacagcaaagtccctcattctgcacagaaggtttattggttcctcttgggaagggtcccctcccaccacctgtccagaagctgcctttgaagtcagttctgggtttcc

SEQ ID NO: 659329 - DNA, 120 bp, Artificial Sequence
  ENSG00000184162_7 (sequence is synthesized)
ccagctctggctgaccattttgttccctgagtgtctgagtccccggcaggcggccttcactcagggtcagcgggcaccaggttgctctggaagagcttgaggatgtggttctcgatcacc

SEQ ID NO: 659330 - DNA, 120 bp, Artificial Sequence
  ENSG00000184162_8 (sequence is synthesized)
tgttgcactgagatggggcagggaaaaggtgggctgtgagcttgaatcgggagtggggtggaggcacaggccaacctgcgctctccccttaggggacaaacagggacccttgcagagacc

SEQ ID NO: 659331 - DNA, 120 bp, Artificial Sequence
  ENSG00000184162_9 (sequence is synthesized)
tgcattacagagcaaagctgggagaaccgaggactcaccccaggaacctcaacttcccctaagtttgtaaaaatgcacttttgtagcttttcagaattaatataaaaatatttcctacca

SEQ ID NO: 659332 - DNA, 120 bp, Artificial Sequence
  ENSG00000184162_10 (sequence is synthesized)
tctttggtttgtccagagacagtgagcaggtaagagtctgtggggacaggcagtggcgaggccctaagcctggggtcgagccctcagtggacagatctgggggtcaggccctccgcggag

SEQ ID NO: 659333 - DNA, 120 bp, Artificial Sequence
  ENSG00000184162_11 (sequence is synthesized)
gcttctggggtgggtggtctgtgcctctggaagctttggactcacccaaacccgaatgggaaccctgatgtgtgatcttgaacacgtgacctctaggactccactttttctgtaaaatgg

SEQ ID NO: 659334 - DNA, 120 bp, Artificial Sequence
  ENSG00000184162_12 (sequence is synthesized)
tgctgatgaccacctgttctgtgtgagaggcttagagggacctgcagcttccccaggttgcccacatcggtggagtgtgagctgggtctggaaggggtgggggcctgcgggtgggaaacc

SEQ ID NO: 659335 - DNA, 80 bp, Artificial Sequence
  ENSG00000184163_0 (sequence is synthesized)
ctcgccgcgctgagccgcctcgggacggagccatgcggcgctgggcctgggccgcggtcgtggtcctcctcgggccgcag

SEQ ID NO: 659336 - DNA, 120 bp, Artificial Sequence
  ENSG00000184163_1 (sequence is synthesized)
agaggacgcagcagcctggccagcgcgcagatccccccaacgccaccgccagcgcgtcctcccgcgaggggctgcccgaggcccccaagccatcccaggcctcaggacctgagttctccg

SEQ ID NO: 659337 - DNA, 120 bp, Artificial Sequence
  ENSG00000184163_2 (sequence is synthesized)
acgcccacatgacatggctgaactttgtccggcggccggacgacggcgccttaaggaagcggtgcggaagcagggacaagaagccgcgggatctcttcggtcccccaggacctccaggtg

SEQ ID NO: 659338 - DNA, 120 bp, Artificial Sequence
  ENSG00000184163_3 (sequence is synthesized)
cagaagtgaccgcggagactctgcttcacgagtttcaggagctgctgaaagaggccacggagcgccggttctcagggcttctggacccgctgctgccccagggggcgggcctgcggctgg

SEQ ID NO: 659339 - DNA, 120 bp, Artificial Sequence
  ENSG00000184163_4 (sequence is synthesized)
ccaggctcctgctgcccaaggtgccttcctgcgaggctccggtctgagcctggcctcgggtcggttcacggcccccgtgtccggcatcttccagttctctgccagtctgcacgtggacca

SEQ ID NO: 659340 - DNA, 120 bp, Artificial Sequence
  ENSG00000184163_5 (sequence is synthesized)
cagtgagctgcagggcaaggcccggctgcgggcccgggacgtggtgtgtgttctcatctgtattgagtccctgtgccagcgccacacgtgcctggaggccgtctcaggcctggagagcaa

SEQ ID NO: 659341 - DNA, 120 bp, Artificial Sequence
  ENSG00000184163_6 (sequence is synthesized)
cagcagggtcttcacgctacaggtgcaggggctgctgcagctgcaggctggacagtacgcttctgtgtttgtggacaatggctccggggccgtcctcaccatccaggcgggctccagctt

SEQ ID NO: 659342 - DNA, 120 bp, Artificial Sequence
  ENSG00000184163_7 (sequence is synthesized)
ctccgggctgctcctgggcacgtgagggcgcccaggggggctggcgaggagctgccgccggatcccggggaccctcctactgatgcccgtggtcaccacaataaagagccctccaccctc

SEQ ID NO: 659343 - DNA, 120 bp, Artificial Sequence
  ENSG00000184163_8 (sequence is synthesized)
ccgcagaccacagtgagctgcagggcaaggcccggctgcgggcccgggacgtggtgtgtgttctcatctgtattgagtccctgtgccagcgccacacgtgagtgacctcagcccccgctc

SEQ ID NO: 659344 - DNA, 120 bp, Artificial Sequence
  ENSG00000184163_9 (sequence is synthesized)
caggcggcagcccccggaccacccttggaggggctcacaggccacaggggtctctgggcactggagcaggtcttggccccctggacctgcaacgcctccctcttgccctgtggggctgtg

SEQ ID NO: 659345 - DNA, 120 bp, Artificial Sequence
  ENSG00000184163_10 (sequence is synthesized)
aaggtcagccgccctgcactgcccagagaccagacgtgcctgggccctgtgctgaccctgctggccgcctgtgccctcctccccacagaggccacggagcgccggttctcagggcttctg

SEQ ID NO: 659346 - DNA, 120 bp, Artificial Sequence
  ENSG00000184163_11 (sequence is synthesized)
ggcgcctggcatcgccggccccgggtgcgggtcctgttagggacctatcccctgccccatggggggccttggactgggcatggggtccctgctgcacgcctggcctcaggcgccccctcc

SEQ ID NO: 659347 - DNA, 120 bp, Artificial Sequence
  ENSG00000184163_12 (sequence is synthesized)
ggggctcagggcatcaggctctggctgtgtccacagaagccccgcatgcctgccctgctggtggcattgggacgtcagggttctgactcccccaagggcggccgtgggtccttctcctgg

SEQ ID NO: 659348 - DNA, 120 bp, Artificial Sequence
  ENSG00000184163_13 (sequence is synthesized)
ccggcgatgccttccctggttctgccctgagtgctccccgctgccctggggtcccagctctctgcagggtgcagcctcagtgcgctagccccgtcccgtcccttcagccatcccaggcct

SEQ ID NO: 659349 - DNA, 120 bp, Artificial Sequence
  ENSG00000184164_0 (sequence is synthesized)
gaggccggagcagcacggccgcaggacctggagctccggctgcgtcttcccgcagcgctacccgccatgcgcctgccgcgccgggccgcgctggggctcctgccgcttctgctgctgctg

SEQ ID NO: 659350 - DNA, 120 bp, Artificial Sequence
  ENSG00000184164_1 (sequence is synthesized)
tgctgctgccgcccgcgccggaggccgccaagaagccgacgccctgccaccggtgccgggggctggtggacaagtttaaccaggggatggtggacaccgcaaagaagaactttggcggcg

SEQ ID NO: 659351 - DNA, 120 bp, Artificial Sequence
  ENSG00000184164_2 (sequence is synthesized)
ggaacacggcttgggaggaaaagacgctgtccaagtacgagtccagcgagattcgcctgctggagatcctggaggggctgtgcgagagcagcgacttcgaatgcaatcagatgctagagg

SEQ ID NO: 659352 - DNA, 120 bp, Artificial Sequence
  ENSG00000184164_3 (sequence is synthesized)
cgcaggaggagcacctggaggcctggtggctgcagctgaagagcgaatatcctgacttattcgagtggttttgtgtgaagacactgaaagtgtgctgctctccaggaacctacggtcccg

SEQ ID NO: 659353 - DNA, 120 bp, Artificial Sequence
  ENSG00000184164_4 (sequence is synthesized)
actgtctcgcatgccagggcggatcccagaggccctgcagcgggaatggccactgcagcggagatgggagcagacagggcgacgggtcctgccggtgccacatggggtaccagggcccgc

SEQ ID NO: 659354 - DNA, 120 bp, Artificial Sequence
  ENSG00000184164_5 (sequence is synthesized)
ccggaacgagacccacagcatctgcacagcctgtgacgagtcctgcaagacgtgctcgggcctgaccaacagagactgcggcgagtgtgaagtgggctgggtgctggacgagggcgcctg

SEQ ID NO: 659355 - DNA, 120 bp, Artificial Sequence
  ENSG00000184164_6 (sequence is synthesized)
tgtggatgtggacgagtgtgcggccgagccgcctccctgcagcgctgcgcagttctgtaagaacgccaacggctcctacacgtgcgaagagtgtgactccagctgtgtgggctgcacagg

SEQ ID NO: 659356 - DNA, 120 bp, Artificial Sequence
  ENSG00000184164_7 (sequence is synthesized)
ggaaggcccaggaaactgtaaagagtgtatctctggctacgcgagggagcacggacagtgtgcagatgtggacgagtgctcactagcagaaaaaacctgtgtgaggaaaaacgaaaactg

SEQ ID NO: 659357 - DNA, 120 bp, Artificial Sequence
  ENSG00000184164_8 (sequence is synthesized)
ctacaatactccagggagctacgtctgtgtgtgtcctgacggcttcgaagaaacggaagatgcctgtgtgccgccggcagaggctgaagccacagaaggagaaagcccgacacagctgcc

SEQ ID NO: 659358 - DNA, 120 bp, Artificial Sequence
  ENSG00000184164_9 (sequence is synthesized)
ctcccgcgaagacctgtaatgtgccggacttaccctttaaattattcagaaggatgtcccgtggaaaatgtggccctgaggatgccgtctcctgcagtggacagcggcggggagaggctg

SEQ ID NO: 659359 - DNA, 120 bp, Artificial Sequence
  ENSG00000184164_10 (sequence is synthesized)
cctgctctctaacggttgattctcatttgtcccttaaacagctgcatttcttggttgttcttaaacagacttgtatattttgatacagttctttgtaataaaattgaccattgtaggtaa

SEQ ID NO: 659360 - DNA, 120 bp, Artificial Sequence
  ENSG00000184164_11 (sequence is synthesized)
cctctccgattcttacccgccttgctgtctgtctcttggatgttggcgtggcgtgggccacgcatggatccgtggccggaacacgcacacccagccaggctacagctccagagtatggat

SEQ ID NO: 659361 - DNA, 120 bp, Artificial Sequence
  ENSG00000184164_12 (sequence is synthesized)
agctgtgctatgcagggtcccttgttgacctaaacgtcatcatgcagcacgtggccatagtgaagcccaggagcctgtggcttgctccactcaggcgatccaccgccagccctgcagacc

SEQ ID NO: 659362 - DNA, 120 bp, Artificial Sequence
  ENSG00000184164_13 (sequence is synthesized)
ggcgggtctgcactccggggcctgccgggtttcgttgctgcctttgtcaacattcatttatggcttcttagtgtcacttccatacatcctgcctgccctgagaacacttagtgtggcaaa

SEQ ID NO: 659363 - DNA, 120 bp, Artificial Sequence
  ENSG00000184164_14 (sequence is synthesized)
gtaagtcataggtatttgctgcaggaaaatcagaaaattcaagtcagatgaaaagaaaacagttaaaaacccaggaactccctggagagcgcaccctgctggtgcctccactgctcgtgc

SEQ ID NO: 659364 - DNA, 120 bp, Artificial Sequence
  ENSG00000184164_15 (sequence is synthesized)
ccccccagcgcccccgcaacgtgccctgcgtgactttccgcagcgcctgtcgggtgttttccactcagcagcttgttgcgaacgtctctgcgtcctgtggtttctctgtcacgctaatga

SEQ ID NO: 659365 - DNA, 120 bp, Artificial Sequence
  ENSG00000184164_16 (sequence is synthesized)
ttttggagccattatttcatacttttacaacaatgtctgttgctggacgtttacgtcataacagtttttcaacttataaactgtgaacacttgaaggtaaacttttcacattccttatga

SEQ ID NO: 659366 - DNA, 120 bp, Artificial Sequence
  ENSG00000184164_17 (sequence is synthesized)
ttttctgtggattaatttccaaatcgctcagtcaagggaatgtgtcttttagagccatagtgccccagaaaagttgtgctgatccccagtcccagcagcagggaggaggccgcctctgcc

SEQ ID NO: 659367 - DNA, 120 bp, Artificial Sequence
  ENSG00000184164_18 (sequence is synthesized)
ccgtgtgtgtgacagccccaggcagttttcactgttgggagtgcagacagtgggtccctcagtgagccactaatactggaagccatgcgagaggctctggttattcttaggaagctcctg

SEQ ID NO: 659368 - DNA, 120 bp, Artificial Sequence
  ENSG00000184164_19 (sequence is synthesized)
gcaggctggcaaaccaatggtcaccgagctggaggtgggtttgtttctagaatctctgtagcacccagtttctcccaaagagttccaagccaggtggtctgcaccatggctctccgggag

SEQ ID NO: 659369 - DNA, 120 bp, Artificial Sequence
  ENSG00000184164_20 (sequence is synthesized)
cacctgctgcacagcaggacgcgagtctgtgcttttgccgggagacagagacagatcgttataaagtcacttggtgatgaatgaggagaaaacccaaatcctggcggcaccggtgccttg

SEQ ID NO: 659370 - DNA, 120 bp, Artificial Sequence
  ENSG00000184164_21 (sequence is synthesized)
tgcatgtcggggtctgacgggcactggtgccttgtgcatgtcggggtctgacgctggctccctgttgcagagtgtgactccagctgtgtgggctgcacaggggaaggcccaggaaactgt

SEQ ID NO: 659371 - DNA, 120 bp, Artificial Sequence
  ENSG00000184164_22 (sequence is synthesized)
tgaatggccccagcaggtactgccagggatgggaagcagttgagacccgtcctgcagacgtggctcccccagggtcactgtgcactcgccctgaggtccacgtgagacacagaagcagtg

SEQ ID NO: 659372 - DNA, 120 bp, Artificial Sequence
  ENSG00000184164_23 (sequence is synthesized)
ggggtgggggacgggctctgcatggccgaccctggtgtggatggcgctgctgcaccagcctctcgccggtggcctcgttccccaggtccaccgcctctgctctccctccagctcctgggt

SEQ ID NO: 659373 - DNA, 120 bp, Artificial Sequence
  ENSG00000184164_24 (sequence is synthesized)
ggcgattgccccgaggcttaagtccaggcctgccatggttgtgggctgcctgggtgagcctgggcgtggatggaacccggtggagaaagtgggtttcctgggcaggcgccatggttcatg

SEQ ID NO: 659374 - DNA, 120 bp, Artificial Sequence
  ENSG00000184164_25 (sequence is synthesized)
gactccgcctcaaaaaaaaaaaaaaaaggaaaagaaagtgggcttcctgggcgcatgctggccttccggccccacctggaggtctcttctctgcattttctaccagttgagggcccaact

SEQ ID NO: 659375 - DNA, 120 bp, Artificial Sequence
  ENSG00000184164_26 (sequence is synthesized)
gcccaacttggagacgtgaaattcttccctctcgaagcctttcctgatctttgctcctttctgtaacgtgacgtttgtcatcgttgtgctttctttatgtgaatgaatctgaatgaatga

SEQ ID NO: 659376 - DNA, 120 bp, Artificial Sequence
  ENSG00000184164_27 (sequence is synthesized)
atttcataatccgctgcgcgtctgctgagcaaagtaattattaaaacggagtcttttcattttagatgtggacgagtgctcactagcagaaaaaacctgtgtgaggaaaaacgaaaactg

SEQ ID NO: 659377 - DNA, 120 bp, Artificial Sequence
  ENSG00000184164_28 (sequence is synthesized)
atcagaggatagaggcagaggttgtcgggcacttcctgtcccgtaacagccctcagaagggagaagctactcacctttctctctagttcaaggtccaccccgaccttgagttgtgatggg

SEQ ID NO: 659378 - DNA, 120 bp, Artificial Sequence
  ENSG00000184164_29 (sequence is synthesized)
cggcagaggctggtgagtggcacggctgccctccacacaggctgccctcccctgggccgcagggcttgcacgtagactggctgcttggtctgaaatccacacagatggtggccttgagat

SEQ ID NO: 659379 - DNA, 120 bp, Artificial Sequence
  ENSG00000184164_30 (sequence is synthesized)
ggtgagagggggattcccggaagacaggtgcatgacatctctgtgtgggcacgcttgcgcgagaggtactggcttcctgaggatgaagccccaggttcacagctcaaacggaagttcagg

SEQ ID NO: 659380 - DNA, 120 bp, Artificial Sequence
  ENSG00000184164_31 (sequence is synthesized)
cgatgaagggggaagtctctgaagctcagacctcagcgggcgatgagcagaggagcagacgcaggagaagaggcagctaaagagctggaaaagtcatccggggaagctgcccagggtgcc

SEQ ID NO: 659381 - DNA, 120 bp, Artificial Sequence
  ENSG00000184164_32 (sequence is synthesized)
gcagagacagggacaggcaggaagtggtggagggcaagcgggtcccccacacctgtttcctggggctaccttaccaagaaccaggaacttagggctccagcaacagaaatgtgccgctca

SEQ ID NO: 659382 - DNA, 120 bp, Artificial Sequence
  ENSG00000184164_33 (sequence is synthesized)
caggagccagaagtcagaggcccagacgcaagcaggctgcttccttgggaggctgggtgggcgcgtctgttccgggcctctgtcctcgcctggggatgccacctgctccccgtgtcttca

SEQ ID NO: 659383 - DNA, 120 bp, Artificial Sequence
  ENSG00000184164_34 (sequence is synthesized)
cgtggtctccatgcgggtgtctgtctctgtccaaacctcccctctttgtaaggacaccagtcactaatgccctcatgttaacctggccagtggtaaagaccctatttccaaacaaggtca

SEQ ID NO: 659384 - DNA, 120 bp, Artificial Sequence
  ENSG00000184164_35 (sequence is synthesized)
caatcacaggtactgggagtaaagacttcagcgtgttttgggggacataaatctgcccgtgacagtcctcacagaagtctagaatatagagagtgggaaagaagcagtgttcaaggagat

SEQ ID NO: 659385 - DNA, 120 bp, Artificial Sequence
  ENSG00000184164_36 (sequence is synthesized)
attggctaagggtttttcagaatgaataaggcacgattcagattccagaagctgtttcctgagcaggacaaataaaagcaattccacatctagaagcatcgtagtaaacagcaacagcaa

SEQ ID NO: 659386 - DNA, 120 bp, Artificial Sequence
  ENSG00000184164_37 (sequence is synthesized)
tcctccctggtctcgccgcgcgcccgcctgaaggccccggtcgcggcagcgcgcactgacctccgcagctcccggcggcgtccttcgaagcgcggctgcctgggccagcctcggcaggaa

SEQ ID NO: 659387 - DNA, 120 bp, Artificial Sequence
  ENSG00000184164_38 (sequence is synthesized)
tcgaagcgcggctgcctgggccagcctcggcaggaagcaggacggcggaaacagaacagagcccgaatctaaagtccttgcccaaatctaaagtggctaccgcagccccggccgctacgg

SEQ ID NO: 659388 - DNA, 120 bp, Artificial Sequence
  ENSG00000184166_0 (sequence is synthesized)
atggatggaggcaaccagagtgaaggttcagagttccttctcctggggatgtcagagagtcctgagcagcagcggatcctgttttggatgttcctgtccatgtacctggtcacggtggtg

SEQ ID NO: 659389 - DNA, 120 bp, Artificial Sequence
  ENSG00000184166_1 (sequence is synthesized)
ggaaatgtgctcatcatcctggccatcagctctgattcccgcctgcacacccccgtgtacttcttcctggccaacctctccttcactgacctcttctttgtcaccaacacaatccccaag

SEQ ID NO: 659390 - DNA, 120 bp, Artificial Sequence
  ENSG00000184166_2 (sequence is synthesized)
atgctggtgaacctccagtcccataacaaagccatctcctatgcagggtgtctgacacagctctacttcctggtctccttggtggccctggacaacctcatcctggctgtgatggcatat

SEQ ID NO: 659391 - DNA, 120 bp, Artificial Sequence
  ENSG00000184166_3 (sequence is synthesized)
ctctatggcctcatacacaccctcctcatgaccagagtgaccttctgtgggtcacgaaaaatccactacatcttctgtgagatgtatgtattgctgaggatggcatgttccaacattcag

SEQ ID NO: 659392 - DNA, 120 bp, Artificial Sequence
  ENSG00000184166_4 (sequence is synthesized)
attaatcacacagtgctgattgccacaggctgcttcatcttcctcattccctttggattcgtgatcatttcctatgtgctgattatcagagccatcctcagaataccctcagtctctaag

SEQ ID NO: 659393 - DNA, 120 bp, Artificial Sequence
  ENSG00000184166_5 (sequence is synthesized)
aaatacaaagccttctccacctgtgcctcccatttgggtgcagtctccctcttctatgggacactttgtatggtatacctaaagcccctccatacctactctgtgaaggactcagtagcc

SEQ ID NO: 659394 - DNA, 120 bp, Artificial Sequence
  ENSG00000184166_6 (sequence is synthesized)
acagtgatgtatgctgtggtgacacccatgatgaatcccttcatctacagcctgaggaacaaggacatgcatggggctctgggaagactcctagataaacactttaagaggctgacatga

SEQ ID NO: 659395 - DNA, 120 bp, Artificial Sequence
  ENSG00000184166_7 (sequence is synthesized)
aaaatggataagcagacctgatgtgctccctgttcatcccgtttcttcatgaatctaggatccaagactcagttctcatatcccacaaatctcattggggcatcaatagcctgaaatcct

SEQ ID NO: 659396 - DNA, 120 bp, Artificial Sequence
  ENSG00000184166_8 (sequence is synthesized)
gtctccttttttacagaagctgaagacccaggcaacaagttctctgctctgtacctttagccaataggatgagtctccaagacctattcagaaaataatgcattctggtcttttatgacc

SEQ ID NO: 659397 - DNA, 120 bp, Artificial Sequence
  ENSG00000184166_9 (sequence is synthesized)
tgaatgtgttttcatcctgtagaacaggaacgtggaggaagctgaaccagtgaactctgagagcagcacagagcagtgggacttttggtaaacatttgctggtgttaatgttaaaagaga

SEQ ID NO: 659398 - DNA, 120 bp, Artificial Sequence
  ENSG00000184166_10 (sequence is synthesized)
aagacagcattaaagtggagactaggaatatccttcaccctatgtaagggattgtcctgtgtgttatacagcagtgattgggacatggctccagctcagagacagcatatagatatgtgg

SEQ ID NO: 659399 - DNA, 120 bp, Artificial Sequence
  ENSG00000184166_11 (sequence is synthesized)
tgataaaaaagacatatttgtaacctggtgtcccccaggtctcatcagccttggccgtaaataaggtcacactaacaccaacactagaatgttgcagggtcaaattcttcaatgtacttg

SEQ ID NO: 659400 - DNA, 120 bp, Artificial Sequence
  ENSG00000184166_12 (sequence is synthesized)
actacagggccacattcttggccttatctgactatatccagtttaaacctagaagtgtctctcatctagcacacatccaaagtacagaaagtaaatagtagctgataagaaagttagtca

SEQ ID NO: 659401 - DNA, 120 bp, Artificial Sequence
  ENSG00000184166_13 (sequence is synthesized)
catggctgtggaggtttgaaagagattgcaatcatacatatttgtatcagctgatccagcacgtgatatagacctcgacaggtggtgttcaattcatttgacattcatgcagtcattcat

SEQ ID NO: 659402 - DNA, 120 bp, Artificial Sequence
  ENSG00000184166_14 (sequence is synthesized)
caactcattctattcataatgacagtgtacagaggcctcaaactgggttacaaatgtgaggtcacagtctactcggggaagtacataaatttacattaaacataaatggacctaactcat

SEQ ID NO: 659403 - DNA, 120 bp, Artificial Sequence
  ENSG00000184166_15 (sequence is synthesized)
caattaaaaagtaatgttcaacatactgattaaaaaataaaatatagatagatgtatttaaagagacacgatgaaagcacaggaatatataaagcttgaaattaaaaagagaaacagaca

SEQ ID NO: 659404 - DNA, 120 bp, Artificial Sequence
  ENSG00000184166_16 (sequence is synthesized)
tatttggaaaatactaaatattttaagtgaaatattgctgcaatgacatcaggtaaaagatatttcaaaacgggtgaaaggagtgatgtcaacaagatggtggaatcgacagttgtatct

SEQ ID NO: 659405 - DNA, 120 bp, Artificial Sequence
  ENSG00000184166_17 (sequence is synthesized)
ctcatccaccaacatacagactaatttatcaaccatccacagatgaaaatacctttgtgagagctccagaatccaagtgaaagtttatagcaccctggtagtacacagaagtagaaaaaa

SEQ ID NO: 659406 - DNA, 120 bp, Artificial Sequence
  ENSG00000184166_18 (sequence is synthesized)
caccatattgaacattgtagaaaaaactctgtcacattacctgaatcacccctcacccaagccagcacagagtagcacaaagagagatcccctcatctcatgagttcttccataagtaaa

SEQ ID NO: 659407 - DNA, 120 bp, Artificial Sequence
  ENSG00000184166_19 (sequence is synthesized)
aatactgaggcaattcacatggccagacccctctgagtagctaagaacaagaaaaaaaaaaaataagaaaatggttgggagctcttaatagtcagtatgtgtattttaacaactggggcc

SEQ ID NO: 659408 - DNA, 120 bp, Artificial Sequence
  ENSG00000184166_20 (sequence is synthesized)
ttgcaccctacagtgggcctgtgcatggtgcccagaagctggcccatccacccacatccccaagcactaggcctgcctgcccatagaccctgccaactggccagcccagaatatctggct

SEQ ID NO: 659409 - DNA, 120 bp, Artificial Sequence
  ENSG00000184166_21 (sequence is synthesized)
aagctgactggtgaaaaacagttcctatcaaattggactttccctatcaaaaccagcctgtaaagactaaaagagatgactgcttcttcaaatgtgcaaacacaaatgtgaagctacagg

SEQ ID NO: 659410 - DNA, 120 bp, Artificial Sequence
  ENSG00000184166_22 (sequence is synthesized)
aaacacaaggaatcaaggaaacttagcaaagccaaaggaacaaaataaagcttcagaaaccatcaaagaaatggagaaatatgaactgcctgacaaagaattcaagtgatcatttgaaga

SEQ ID NO: 659411 - DNA, 120 bp, Artificial Sequence
  ENSG00000184166_23 (sequence is synthesized)
aacatggtgacccacacaaaaacacaggtaaactactaaacaaaatcaggaaatcaatacataaataaaatgtaaatttcaacaaacagaaaccacaaaaaagaaacagtaattctggag

SEQ ID NO: 659412 - DNA, 120 bp, Artificial Sequence
  ENSG00000184166_24 (sequence is synthesized)
ctaaataatacaatgactaaactttaaaaaactcaaaagagcttcagcagcagatatgaagaaacagaagaaagaattcactactcaaaaacaggtcatttgaaagtactagtaagagaa

SEQ ID NO: 659413 - DNA, 120 bp, Artificial Sequence
  ENSG00000184166_25 (sequence is synthesized)
acaaatggaaaaagagtgaagaaagcctatgggacatatgggacccatcaaacaaatacacacattacataagtatcagaaggaaaagtgaaagaaaaggaggcagaaaacttatttttc

SEQ ID NO: 659414 - DNA, 120 bp, Artificial Sequence
  ENSG00000184166_26 (sequence is synthesized)
taaaaatggctattcacagcagccaccacaggcaggaaaacagaaacctgaaagtgctgcttgctttctcaacagggagacttgcagcctggaacaagttttcagccctgctcaccagct

SEQ ID NO: 659415 - DNA, 120 bp, Artificial Sequence
  ENSG00000184166_27 (sequence is synthesized)
acccggaaataaactcagcactgttaggggtagggcacattgggagtgacatggccacttggacagcatgggagctgggtgaggcctatcactgctggctttccaccacttccctggcaa

SEQ ID NO: 659416 - DNA, 120 bp, Artificial Sequence
  ENSG00000184166_28 (sequence is synthesized)
cctgtatgacacagcagaggcagccataatccccatgggaacataacttcattggcctgttaaccacacccccatccctcacagtggccacagcaagccccaccgaaggagagtcggagc

SEQ ID NO: 659417 - DNA, 120 bp, Artificial Sequence
  ENSG00000184166_29 (sequence is synthesized)
tcacacatgcctaaccctgccccaacctaatggtctttctctacgcaccctggtagccgaagacaaagggcataatctcttgggagctctatggtcccactcaccacctgagaaactgga

SEQ ID NO: 659418 - DNA, 120 bp, Artificial Sequence
  ENSG00000184166_30 (sequence is synthesized)
atacttatccaggccaccttagggcaagtttgtatcccccctatgctaccacagctggtgcactcttgaaaggaccacctcttggctggaggccaactagtacactaaacaaaacttcaa

SEQ ID NO: 659419 - DNA, 120 bp, Artificial Sequence
  ENSG00000184166_31 (sequence is synthesized)
ccaaggaccatagactcctagataaacacttggaccatgagagttcactttactccactgctacctccactggaccaggcactggtatccatgcctgagggactgaagacagatcacatc

SEQ ID NO: 659420 - DNA, 120 bp, Artificial Sequence
  ENSG00000184166_32 (sequence is synthesized)
acaggactcttcacagacaccccccagtaccagctcagagcccagaagctctgttggatggctagaccagcagagaaataacaatcattgcagtttggctctcaggaagccccatcccca

SEQ ID NO: 659421 - DNA, 120 bp, Artificial Sequence
  ENSG00000184166_33 (sequence is synthesized)
catccccaggagatggggtagagccccatatcaaggggggatcccatggacaaaaacaatctgataagtagcccttgagccccagatcttccttctgacatagtctacccaaatgagaag

SEQ ID NO: 659422 - DNA, 66 bp, Artificial Sequence
  ENSG00000184166_34 (sequence is synthesized)
ccaaatgagaaggaaccagaaaaacaaatctggtaatatgacaaaacaaggttctttaacaccctt

SEQ ID NO: 659423 - DNA, 120 bp, Artificial Sequence
  ENSG00000184166_35 (sequence is synthesized)
aaaaagaattcagaaagttgagtattaagctaatcaaggaggtgcccgagaaaggtgaagttcaacttaaattaaaaaaaaaaaaagtaagggtggagaccacccctcatattgtcttat

SEQ ID NO: 659424 - DNA, 66 bp, Artificial Sequence
  ENSG00000184166_36 (sequence is synthesized)
taaaaactaaaaggcagaaatgaaatctaaaggcagacagcctgtcaccacatagattacagacat

SEQ ID NO: 659425 - DNA, 60 bp, Artificial Sequence
  ENSG00000184166_37 (sequence is synthesized)
gattacagacattgtatggaaaagcattgtaaaaatccctgtcctgttctgttttggact

SEQ ID NO: 659426 - DNA, 61 bp, Artificial Sequence
  ENSG00000184166_38 (sequence is synthesized)
cgtaccccctgcttgctcaattgatcatgacgggggagctcagctcttgagacaggagtct

SEQ ID NO: 659427 - DNA, 120 bp, Artificial Sequence
  ENSG00000184178_0 (sequence is synthesized)
agaggccgaccacgtgtactgtggagactgtcaaagtctcccggagcccaatttccggaagcggtgagttctgaaagaagttcctgcaccgtagtttcccaagtctgcgaatccccaacc

SEQ ID NO: 659428 - DNA, 120 bp, Artificial Sequence
  ENSG00000184178_1 (sequence is synthesized)
atgagcgcctcgggcgtactgtcctttacccagcaaggatgggagcaggtgctggccaaagtgaaacgggctgtggtttacctggacgccgcctgcgccgagagcctgcactggggctgc

SEQ ID NO: 659429 - DNA, 120 bp, Artificial Sequence
  ENSG00000184178_2 (sequence is synthesized)
ggatccacccgtctcctggaggcggtggggggtcctgactgtcacctgcgagagttcgagcccgacgcaattggtggtggagccaagcagcccaaggcagtgtttgtgctgagctgcctg

SEQ ID NO: 659430 - DNA, 120 bp, Artificial Sequence
  ENSG00000184178_3 (sequence is synthesized)
ctgaaaggccggaccgtggagatcctacgggacatcatctgccgcagtcacttccagtattgtgtggtggtcacaaccgtgagccacgctgtccacctcacagctaatcatgtcccagcg

SEQ ID NO: 659431 - DNA, 120 bp, Artificial Sequence
  ENSG00000184178_4 (sequence is synthesized)
gcggcagcggccgagatggaggggcagcagccggtgttcgagcagctggaggagaagctgtgtgaatggatgggcaacatgaactacacggccgaggtgttccatgtcccgttattgctt

SEQ ID NO: 659432 - DNA, 120 bp, Artificial Sequence
  ENSG00000184178_5 (sequence is synthesized)
gcccctgttgctccccactttgccttgactccagcttttgcatcccttttcccactgctaccccaggatgtgcacctccttaatagcgcccgaccggacaagaggaagctgggaagcctg

SEQ ID NO: 659433 - DNA, 120 bp, Artificial Sequence
  ENSG00000184178_6 (sequence is synthesized)
ggtgatgtggactccactacgctaaccccagagctgctgctgcagatcagatgcctagtgtcaggcctcagttctctgtgtgaacatttaggagtacgggaggagtgttttgctgtaggt

SEQ ID NO: 659434 - DNA, 120 bp, Artificial Sequence
  ENSG00000184178_7 (sequence is synthesized)
tccttaagtcaggtcatcgctgcggatctggccaattatgcccctgcaaagaacaggaagaagactgctgcaggcagggcatcagtggtttttgtggacagaaccctggatctcacagga

SEQ ID NO: 659435 - DNA, 120 bp, Artificial Sequence
  ENSG00000184178_8 (sequence is synthesized)
gcagttggacatcatggagacaacttagtagagaagatcatttcagcacttccccagctcccaggccacacaaatgatgtgatggttaacatgatagcgctcactgcactccatactgag

SEQ ID NO: 659436 - DNA, 120 bp, Artificial Sequence
  ENSG00000184178_9 (sequence is synthesized)
gaggaaaattataatgtggttgcaccaggctgtctttcacaatccagtgacaccacagccaaagccctatgggaagctttactgaacactaagcacaaagaggcagtgatggaagttcgg

SEQ ID NO: 659437 - DNA, 120 bp, Artificial Sequence
  ENSG00000184178_10 (sequence is synthesized)
agacatctagtggaagcggcaagcagagaaaacctgccaatcaagatgagtatggggagagtcacaccgggacagctcatgtcctatattcagctcttcaagaacaacctcaaagctcta

SEQ ID NO: 659438 - DNA, 120 bp, Artificial Sequence
  ENSG00000184178_11 (sequence is synthesized)
atgaatcattgtggcctcctccagcttggactggccacagctcaaacgttgaaacacccacagactgccaagtgggacaactttctggcttttgaaaggctccttcttcagagcattggg

SEQ ID NO: 659439 - DNA, 120 bp, Artificial Sequence
  ENSG00000184178_12 (sequence is synthesized)
gagtcagcaatgtccgttgtgttaaatcagctgctgcccatgattaagcctgtaacccagagaaccaacgaggactacagccctgaggaactgctgatccttctcatatatatttattct

SEQ ID NO: 659440 - DNA, 120 bp, Artificial Sequence
  ENSG00000184178_13 (sequence is synthesized)
gaagaaaaagtcaagaaagcattggctcaggtcttctgtgaggaatctggattgtcacctttgctgcaaaaaattacggactgggactcttcaattaatctgacatttcacaaatccaaa

SEQ ID NO: 659441 - DNA, 120 bp, Artificial Sequence
  ENSG00000184178_14 (sequence is synthesized)
attgccgtggatgaactctttacttcacttcgggatattgctggagctcggagtctcctgaaacagtttaagtctgtatatgttcctggaaatcatacccaccaggcatcttataagcca

SEQ ID NO: 659442 - DNA, 120 bp, Artificial Sequence
  ENSG00000184178_15 (sequence is synthesized)
ttgttgaagcaagttgtggaggaaatatttcatcccgagaggccagattccgttgatattgaacacatgtcttcaggcctcactgatctccttaaaactggatttagcatgttcatgaag

SEQ ID NO: 659443 - DNA, 120 bp, Artificial Sequence
  ENSG00000184178_16 (sequence is synthesized)
gtgagccggcctcatcctagtgactaccccctcctgatcctctttgtggtaggtggggtcacagtctctgaagtgaaaatggtcaaagatcttgtggcatcgttgaagccaggaacccag

SEQ ID NO: 659444 - DNA, 120 bp, Artificial Sequence
  ENSG00000184178_17 (sequence is synthesized)
gtaatcgtgctgtccacacgactcctgaagccacttaacattcctgagctgttatttgcaactgaccgactgcatccagaccttggcttctgagcatccgctaagaagataagacctact

SEQ ID NO: 659445 - DNA, 120 bp, Artificial Sequence
  ENSG00000184178_18 (sequence is synthesized)
caagctggaaatgccgatgcaattttctgccaccactccaaatactcctccacaaccagcgtccctgtcactaattgcgagaatgatggaattctgcctgaagggtcttgatacctactc

SEQ ID NO: 659446 - DNA, 120 bp, Artificial Sequence
  ENSG00000184178_19 (sequence is synthesized)
agtgaggtactttgcttggattgctgtgattcttaaaaaaaaaaaaaaaaagtttttttattttcctgaaggcgacagtctgtcttttggcgagtccaattagtgatcgtttccatttat

SEQ ID NO: 659447 - DNA, 120 bp, Artificial Sequence
  ENSG00000184178_20 (sequence is synthesized)
ccttaaccctctgtttgtgatcttcctgattccacctacaagttcattagttctaaataaaagcctgttggcaagtgttggtagattacaactctttttatttgaagttgctcgagaagt

SEQ ID NO: 659448 - DNA, 120 bp, Artificial Sequence
  ENSG00000184178_21 (sequence is synthesized)
tagacatgctttagaattatgagtgtggggaaaatttgatgttccttaggattatataactgaggagggaacattgcaaatagggtctgaggctttgtttctctcttgctctgaaacatt

SEQ ID NO: 659449 - DNA, 120 bp, Artificial Sequence
  ENSG00000184178_22 (sequence is synthesized)
tctgaaaaggcaaggaagggaggggtagtgtctggggcagtgctggtagcctgcatgtgttgtaaatcatcctgccataacaaaggactgcattgttctagctggcccactgggcaggtc

SEQ ID NO: 659450 - DNA, 120 bp, Artificial Sequence
  ENSG00000184178_23 (sequence is synthesized)
tgccaggctacttggaactgtagtgggaaggtggttgattggagggttatctgtatataaaaggttttctcccctccaaagaaagactccagtacaagatacctggtcccagggagtcta

SEQ ID NO: 659451 - DNA, 120 bp, Artificial Sequence
  ENSG00000184178_24 (sequence is synthesized)
aattgtaacagcaacccctgtggactttgtgggtatgagttttgattgaaatataaagctttcttttctgtaagtttaagttttccatctgaccatagcagaaaaacctagacccaccta

SEQ ID NO: 659452 - DNA, 120 bp, Artificial Sequence
  ENSG00000184178_25 (sequence is synthesized)
gtgaaactttgtaagaactccagggcaaaaacgaaccacttgcaacccacatgtttgtaggtgtatggtcgatggaagtttctggcatccatgttggtaataaagagataaaactgaaaa

SEQ ID NO: 659453 - DNA, 120 bp, Artificial Sequence
  ENSG00000184178_26 (sequence is synthesized)
gtgtcagaggccgaccacgtgtactgtggagactgtcaaagtctcccggagcccaatttccggaagcggatgtgcacctccttaatagcgcccgaccggacaagaggaagctgggaagcc

SEQ ID NO: 659454 - DNA, 80 bp, Artificial Sequence
  ENSG00000184182_0 (sequence is synthesized)
aaagcgcccgctgctgtctcggctgccgcgggcgagagcggccgagtccccgccccgccacttccggtcccgccgccggg

SEQ ID NO: 659455 - DNA, 120 bp, Artificial Sequence
  ENSG00000184182_1 (sequence is synthesized)
cccggaccgggcatggtgttgggcgccgggcccgcctcgcctgtctcggggagcccagggtaaaggcagcagtaatgctaacgctagcaagtaaactgaagcgtgacgatggtctcaaag

SEQ ID NO: 659456 - DNA, 120 bp, Artificial Sequence
  ENSG00000184182_2 (sequence is synthesized)
ggtcccggacggcagccacagcgtccgactcgactcggagggtttctgtgagagacaaattgcttgttaaagaggttgcagaacttgaagctaatttaccttgtacatgtaaagtgcatt

SEQ ID NO: 659457 - DNA, 120 bp, Artificial Sequence
  ENSG00000184182_3 (sequence is synthesized)
ttcctgatccaaacaagcttcattgttttcagctaacagtaaccccagatgagggttactaccagggtggaaaatttcagtttgaaactgaagttcccgatgcgtacaacatggtgcctc

SEQ ID NO: 659458 - DNA, 120 bp, Artificial Sequence
  ENSG00000184182_4 (sequence is synthesized)
ccaaagtgaaatgcctgaccaagatctggcaccccaacatcacagagacaggggaaatatgtctgagtttattgagagaacattcaattgatggcactggctgggctcccacaagaacat

SEQ ID NO: 659459 - DNA, 120 bp, Artificial Sequence
  ENSG00000184182_5 (sequence is synthesized)
taaaggatgtcgtttggggattaaactctttgtttactgatcttttgaattttgatgatccactgaatattgaagctgcagaacatcatttgcgggacaaggaggacttccggaataaag

SEQ ID NO: 659460 - DNA, 120 bp, Artificial Sequence
  ENSG00000184182_6 (sequence is synthesized)
tggatgactacatcaaacgttatgccagatgataaaaggggacgattgcaggcccatggactgtgttacagtttgtctctaacatgaaacagcaagaggtagccccctctcccgtcctca

SEQ ID NO: 659461 - DNA, 120 bp, Artificial Sequence
  ENSG00000184182_7 (sequence is synthesized)
tgctccctctcagtcccctggattgccccagtcctgtgaccatgttgccctgaagaagaccatcttcatgactgctcattgtagatggagaattcaacataaatacagcaagaaaatgtg

SEQ ID NO: 659462 - DNA, 120 bp, Artificial Sequence
  ENSG00000184182_8 (sequence is synthesized)
gttgtaatgaactcaaaattgaggccagagcttgctttcccttttcccaaacaaaattggttttctgcacaagcgatgctaatgatgtgttcagtgtaactcgcagattggcaataagat

SEQ ID NO: 659463 - DNA, 120 bp, Artificial Sequence
  ENSG00000184182_9 (sequence is synthesized)
acccgctacaaactgtgattggatgcaaaatctcttagcttctttcacgaatgttggccctgcctagatgttgtgaagcctcccagaatgcatagagtcattcactgtagatctcttatt

SEQ ID NO: 659464 - DNA, 120 bp, Artificial Sequence
  ENSG00000184182_10 (sequence is synthesized)
gaaatgcgtattttatttaatgtaagtatattttggaacagatttgtaatttgtacaattcaatgctttaattattttttctattctcatttagtttgtattttcattgtatagagcaga

SEQ ID NO: 659465 - DNA, 120 bp, Artificial Sequence
  ENSG00000184182_11 (sequence is synthesized)
cagaaagatgttgggtcaagcaactattgaagagaaatacaaagaaaatatgaaaggcacattattcattttgtccaaatgcaatgagaatctcactcttaaaaatcagctcttgctttc

SEQ ID NO: 659466 - DNA, 120 bp, Artificial Sequence
  ENSG00000184182_12 (sequence is synthesized)
gggtccggatgtggtgagcacattttggagccctttgaagctagatttggatgatcaaaacaaaaaggcagggagcccattctaacatgctgcccagaggaaactggctggagcctggac

SEQ ID NO: 659467 - DNA, 120 bp, Artificial Sequence
  ENSG00000184182_13 (sequence is synthesized)
cagctggggttgatgcttttgcagtggtcatgtgattgtgacctggtagctacttatcagagagccagaccctgctgtcctgggagacaggagcgatgcctcaggaatcagcccaatgtc

SEQ ID NO: 659468 - DNA, 120 bp, Artificial Sequence
  ENSG00000184182_14 (sequence is synthesized)
tgatgtcactgagactgtacctgtggccttcttctgagtttgctatggctccaggccctgccggtggggtgagcctcctaggccttggaggaccaggagtcaacagtggcatatgccatc

SEQ ID NO: 659469 - DNA, 120 bp, Artificial Sequence
  ENSG00000184182_15 (sequence is synthesized)
ctcggccaggttaatatactgcagaggaaaagccctgaagagaggcaagtggatttactccagcatgtagacatttgaaccagtgaaatcaaacacaaaataaatgtctgtctagtttca

SEQ ID NO: 659470 - DNA, 120 bp, Artificial Sequence
  ENSG00000184182_16 (sequence is synthesized)
gttaccgaaatgctgccttagagcgtaatttgcaggaaagaggaagttttgttttaaaccagatcttcaagagttgaagcatattgaagaaggaaaagaattctgaagcaactgcagggt

SEQ ID NO: 659471 - DNA, 120 bp, Artificial Sequence
  ENSG00000184182_17 (sequence is synthesized)
gccatctactgggtttagtttgtttttcttaatttatagaatctctgattgtgagatcagtctgtcacggagacccagcaggtgaggaatgtaggccttgcttcctctttgcacccatta

SEQ ID NO: 659472 - DNA, 120 bp, Artificial Sequence
  ENSG00000184182_18 (sequence is synthesized)
aattgcttgttaaagaggttgcagaacttgaagctaatttaccttacagggtctctctttgttgcccaagttggagtacagtggcatgagtgtggctcactgcagtctcaacctcctggg

SEQ ID NO: 659473 - DNA, 120 bp, Artificial Sequence
  ENSG00000184182_19 (sequence is synthesized)
attgttttcagctaacagtaaccccagaatttggctggtgtgatgcttctttgcttactgtgcctactgagtaggccaccccatcatctgatacagagacacctgatctgttctcacatt

SEQ ID NO: 659474 - DNA, 120 bp, Artificial Sequence
  ENSG00000184182_20 (sequence is synthesized)
tggccgcgccctctgccaatgagcgaggtccgagaggcccgtcgcccagcccagtcccgatcggcgcacgccgctgttcgcgtgtctggttccaaataaagtttttcgcgactttgaatt

SEQ ID NO: 659475 - DNA, 120 bp, Artificial Sequence
  ENSG00000184182_21 (sequence is synthesized)
tggtgtagagcgcagtggtgtggtcccggcttactgcagcctcgacttcccaggctcaggtgatcctcccacttcaatatcttgagcagttgggactacagaggttgcagaacttgaagc

SEQ ID NO: 659476 - DNA, 87 bp, Artificial Sequence
  ENSG00000184182_22 (sequence is synthesized)
agcactttgggtggatccccacttgagtccaggaggcccttgggcatagtggcacatgtctgtagtcccagctgcttggaaggctga

SEQ ID NO: 659477 - DNA, 68 bp, Artificial Sequence
  ENSG00000184182_23 (sequence is synthesized)
ctctgcctcaaaaaacagatacacacaaaaaccccccaaaaacatgctggctgggcatggtggctcac

SEQ ID NO: 659478 - DNA, 120 bp, Artificial Sequence
  ENSG00000184182_24 (sequence is synthesized)
ggtcaaagcctacggcgaatcttgtgaaaaattagttctcttcacggaattaataacatatagtgttctagagttttcgtgacttctgctatccatgttgaggttgcagaacttgaagct

SEQ ID NO: 659479 - DNA, 120 bp, Artificial Sequence
  ENSG00000184182_25 (sequence is synthesized)
cgccgggagccggtgcggctgtgaggggccgcgtctcgcagcagccgcccggaccgggcatggtgttgggcgccgggcccgcctcgcctgtctcggggagcccagaggttgcagaacttg

SEQ ID NO: 659480 - DNA, 120 bp, Artificial Sequence
  ENSG00000184182_26 (sequence is synthesized)
ggcgtgagccaccgtgcccagccaggcaagccccctgattctcaacaagagggctgagcagtgtgaagataagatgcggctttggtccaaagtccagagtgcttcttggggctgaggggc

SEQ ID NO: 659481 - DNA, 120 bp, Artificial Sequence
  ENSG00000184182_27 (sequence is synthesized)
tttggtccaaagtccagagtgcttcttggggctgaggggcgtagccattgcagtgcttttccaggggagaatgggttgggctccctctcctgagtcgggggacatgagcctagcgacact

SEQ ID NO: 659482 - DNA, 120 bp, Artificial Sequence
  ENSG00000184182_28 (sequence is synthesized)
gctgtgcagtttgctcgggttctagacatcgtccctattggctgtgcatgggaggcttggtgaagcagagaaaggaaagtccagggaaggggcccaaaaagtcaaaactgttaatcacaa

SEQ ID NO: 659483 - DNA, 120 bp, Artificial Sequence
  ENSG00000184182_29 (sequence is synthesized)
aacaaaagaaaaagtgaatttttatggaaaagaaggggatttttatttggaaatgcttaataatagtggttttcattctccagttatcacaaatagcattagaaatgaatgcgattgcaa

SEQ ID NO: 659484 - DNA, 120 bp, Artificial Sequence
  ENSG00000184182_30 (sequence is synthesized)
tttactccatcttcaccaaactttgtagaactacatgtcaacatatctctgacttctttcagtcagttgtcagtcaccattttgaaaaaaatacccacatgttcgatattttggtatcac

SEQ ID NO: 659485 - DNA, 120 bp, Artificial Sequence
  ENSG00000184182_31 (sequence is synthesized)
aagcacttgagttcttagtgggattctcagctctccagtttggtctgccatttgctaattagacttctcttactgtgccataaaatgaagactttaacagcagaaaagcagttctcccaa

SEQ ID NO: 659486 - DNA, 120 bp, Artificial Sequence
  ENSG00000184185_0 (sequence is synthesized)
agcaggccacagggaggcttgggcacagccagctttccgtcctgttgggaagcctgtttctgctttcagtgcccacgtggtgtcaggaacgccggtcacagtgaacgcctgcaggaccca

SEQ ID NO: 659487 - DNA, 120 bp, Artificial Sequence
  ENSG00000184185_1 (sequence is synthesized)
cactgctgcatcgtctctgtgggacagatactgaagccagggcttggcttacccttgtgacagtctcccgaggatgttctagtgactggatcctttccagttggtgcctgggaaatggca

SEQ ID NO: 659488 - DNA, 120 bp, Artificial Sequence
  ENSG00000184185_2 (sequence is synthesized)
gccactactaattcagccttgaagacagtaccgtgcccactcagcaccattacatagaagatagaactcaagaggagccgccctgcctggagctagcctgggggcgagccagggtccccc

SEQ ID NO: 659489 - DNA, 120 bp, Artificial Sequence
  ENSG00000184185_3 (sequence is synthesized)
aacccccgggatgaccgcggccagccgggccaacccctacagcatcgtgtcatcggaggaggacgggctgcacctggtcaccatgtcgggcgccaacggcttcggcaacggcaaggtgca

SEQ ID NO: 659490 - DNA, 120 bp, Artificial Sequence
  ENSG00000184185_4 (sequence is synthesized)
cacgcggcgcaggtgccgcaaccgcttcgtcaagaagaatggccagtgcaacattgagttcgccaacatggacgagaagtcacagcgctacctggctgacatgttcaccacctgtgtgga

SEQ ID NO: 659491 - DNA, 120 bp, Artificial Sequence
  ENSG00000184185_5 (sequence is synthesized)
catccgctggcggtacatgctgctcatcttctcgctggccttccttgcctcctggctgctgttcggcatcatcttctgggtcatcgcggtggcacacggtgacctggagccggctgaggg

SEQ ID NO: 659492 - DNA, 120 bp, Artificial Sequence
  ENSG00000184185_6 (sequence is synthesized)
ccggggccgcacaccctgtgtgatgcaggtgcacggcttcatggcggccttcctcttctccatcgagacgcagaccaccatcggctacgggctgcgctgtgtgacggaggagtgcccggt

SEQ ID NO: 659493 - DNA, 120 bp, Artificial Sequence
  ENSG00000184185_7 (sequence is synthesized)
ggccgtcttcatggtggtggcccagtccatcgtgggctgcatcatcgactccttcatgattggtgccatcatggccaagatggcaaggcccaagaagcgggcacagacgctgctgttcag

SEQ ID NO: 659494 - DNA, 120 bp, Artificial Sequence
  ENSG00000184185_8 (sequence is synthesized)
ccacaacgccgtggtggccctgcgtgacggcaagctctgcctcatgtggcgtgtgggtaacctgcgcaagagccacattgtggaggcccatgtgcgcgcgcagctcatcaagccgcgggt

SEQ ID NO: 659495 - DNA, 120 bp, Artificial Sequence
  ENSG00000184185_9 (sequence is synthesized)
acatcgatgtgggcttcgacaagggcctggaccgcatctttctggtgtcgcccatcaccatcttgcatgagattgacgaggccagcccgctcttcggcatcagccggcaggacctggaga

SEQ ID NO: 659496 - DNA, 120 bp, Artificial Sequence
  ENSG00000184185_10 (sequence is synthesized)
cggacgactttgagatcgtggtcatcctggaaggcatggtggaggccacagccatgaccacccaggcccgcagctcctacctggccaatgagatcctgtggggtcaccgctttgagcccg

SEQ ID NO: 659497 - DNA, 120 bp, Artificial Sequence
  ENSG00000184185_11 (sequence is synthesized)
tgctcttcgaggagaagaaccagtacaagattgactactcgcacttccacaagacctatgaggtgccctctacgccccgctgcagtgcgaaggatctggtagagaacaagttcctgctgc

SEQ ID NO: 659498 - DNA, 120 bp, Artificial Sequence
  ENSG00000184185_12 (sequence is synthesized)
ccagcgccaactccttctgctacgagaacgagctggccttcctgagccgtgacgaggaggatgaggcggacggagaccaggacggccgaagccgggacggcctcagcccccaggccaggc

SEQ ID NO: 659499 - DNA, 120 bp, Artificial Sequence
  ENSG00000184185_13 (sequence is synthesized)
atgactttgacagactccaggctggcggcggggtcctggagcagcggccctacagacgggagtcagagatctgagccaaccttggccgacatgcagcatccacccccggctggggagagg

SEQ ID NO: 659500 - DNA, 120 bp, Artificial Sequence
  ENSG00000184185_14 (sequence is synthesized)
ccccgcggtcgctcaggggccccgggtttgagcagaacgggcccagtgccctgggttgcagactcagtagcgttttagtcgttttatgtttctttgcaacggcctcagaagtttggccgg

SEQ ID NO: 659501 - DNA, 120 bp, Artificial Sequence
  ENSG00000184185_15 (sequence is synthesized)
agagggggcagccagagcggcagcccccggcctcagaggctatcacaggctcagggcaaagaagtggcctcctggggggccaggccacgagggccagggcttctgcctgaagatggagct

SEQ ID NO: 659502 - DNA, 120 bp, Artificial Sequence
  ENSG00000184185_16 (sequence is synthesized)
gcagcctgcggggaagcagctcagctcgatggtgggcccagcctctgctgtccaaggctggctagctgcggtgctccttgctggtttttaacttggggagaaacaccgggtttcagcttt

SEQ ID NO: 659503 - DNA, 120 bp, Artificial Sequence
  ENSG00000184185_17 (sequence is synthesized)
cttgaccttagcttgggtgagactgtttacaaaaaaaaaaaattaccatgcaattgaaaaaatttttttttaattcacagggggcaaaaagaacaattagaattccatgggtctgccagg

SEQ ID NO: 659504 - DNA, 120 bp, Artificial Sequence
  ENSG00000184185_18 (sequence is synthesized)
gagttgccgagctgagctccggtggagcgaggcgcggagctgggtgcgcgccgagcctctgcctcccgccgcctcctcgccctccattcctcgctccccgtcttctcccggccacaccgc

SEQ ID NO: 659505 - DNA, 120 bp, Artificial Sequence
  ENSG00000184185_19 (sequence is synthesized)
cactgctgccgcctccctgggaacagtagccgggggagggggactggcgcggtcagagcctgcgaggaggtgcggggcgccggggcgtaggggagcgcgccgggccctgcccgagatcag

SEQ ID NO: 659506 - DNA, 120 bp, Artificial Sequence
  ENSG00000184185_20 (sequence is synthesized)
gcgtaggggagcgcgccgggccctgcccgagatcagataacagccggcgggggagggggtgggccggccgtgctcacagccggaccgagggaccgacgccagccgccccggcccaagcga

SEQ ID NO: 659507 - DNA, 120 bp, Artificial Sequence
  ENSG00000184185_21 (sequence is synthesized)
ccccgacccgtggctggaccagggcgatccgctttgcagagaagacgcgcccctcggcatggagcgcccccgggagctgccctgaggcggtggcggcagcggcggcgatgcagccagcgc

SEQ ID NO: 659508 - DNA, 120 bp, Artificial Sequence
  ENSG00000184185_22 (sequence is synthesized)
ggcagctgccggggccaggaacggccgcccggagcttggaggacgccgagcgcgccgcgcccgggccactgaccgaggatgttctagtgactggatcctttccagttggtgcctgggaaa

SEQ ID NO: 659509 - DNA, 120 bp, Artificial Sequence
  ENSG00000184185_23 (sequence is synthesized)
gtgtgtgggcaccacagtccctgggcaagcagggtgctctgggaccgcacttcatcgagctcacgagccagctaggctctgtttgtgatagaaaaatcaagaccatgttaatgatcgtaa

SEQ ID NO: 659510 - DNA, 120 bp, Artificial Sequence
  ENSG00000184185_24 (sequence is synthesized)
taaaagctttctactgtcgttggggtggtgggtggggctgggaagaaactggtttgagcttttagagtttgcctttgtaccttagagatgtgtctcagggccaggcatgggacctgccat

SEQ ID NO: 659511 - DNA, 120 bp, Artificial Sequence
  ENSG00000184185_25 (sequence is synthesized)
cgagggttcctccccgcaccctcgattttcctgttttgcttctctctccatttctgtccaggcctccgcccaattccacagtgaggggtggttaggagctataggccgggatggctcctt

SEQ ID NO: 659512 - DNA, 120 bp, Artificial Sequence
  ENSG00000184185_26 (sequence is synthesized)
gggaagggaagtcgggatcccaggctaggaggaagctggcagccccgtccccactgggcccacagtgtgagtcgtgccttagagactccgggttgtcctgttctttctgggcttgctcat

SEQ ID NO: 659513 - DNA, 120 bp, Artificial Sequence
  ENSG00000184185_27 (sequence is synthesized)
ctccccccaaccctgtcccaccccacccctcccatacctccactgctgaagttcctccagcccctctgtctgccttgtgaaggtggcaggggccaggtctgcctgacataggaccacatc

SEQ ID NO: 659514 - DNA, 120 bp, Artificial Sequence
  ENSG00000184185_28 (sequence is synthesized)
ctgtccctccctcacctggagcagcacagcagagttcaggcagggcacagccaggccctggtcagcgctgaatggcagaggaaagatcttaggaaaggagaggaatcgccaccccctcct

SEQ ID NO: 659515 - DNA, 120 bp, Artificial Sequence
  ENSG00000184185_29 (sequence is synthesized)
gccaactgggatgactggggagggccacgctcattcaaagctgaatcagaaaccagccgtggaacagaattcctgccgagtcttccagggccgctcctccaccaccctcccccaggttga

SEQ ID NO: 659516 - DNA, 120 bp, Artificial Sequence
  ENSG00000184185_30 (sequence is synthesized)
ggcactatggcaccctcatcaggaagaggtttggggtccccttgttgtcactgctggctctgccaccccatcttgttcatggcagctggttgggtcaggtccatggtagagccaggccct

SEQ ID NO: 659517 - DNA, 120 bp, Artificial Sequence
  ENSG00000184185_31 (sequence is synthesized)
tcccagggctgcggagaaaacctgctctcttctagtcgggcttctccagaagccagtaatcagaaaggatgtgtctcctgctccaactctgcccccgagacagctcagagccagaaggca

SEQ ID NO: 659518 - DNA, 120 bp, Artificial Sequence
  ENSG00000184185_32 (sequence is synthesized)
ccccgagacagctcagagccagaaggcaccccgagacagctcagagccagaaggcaccgaggactctggcccaagtggggaagctgaggcagagagcagagggggtcatgcagtgagtgg

SEQ ID NO: 659519 - DNA, 120 bp, Artificial Sequence
  ENSG00000184185_33 (sequence is synthesized)
gtggggtgcaggagacagagaggggctgggggcgtggggtgggggtgtctgcctcttccctccacctcctcccctccttagcagctgaagactcagccctgaggtctggggcaatggaag

SEQ ID NO: 659520 - DNA, 120 bp, Artificial Sequence
  ENSG00000184185_34 (sequence is synthesized)
tcaagacacccgacccctacatcctggggtaggcccgactcagcatcctgtcccagcttcagccccacactcatttctggcatagaagattccgccgaggcagctctttcctctcggggt

SEQ ID NO: 659521 - DNA, 120 bp, Artificial Sequence
  ENSG00000184185_35 (sequence is synthesized)
ctgccaggggtgcctcagctggttcctgctcccaggcctagccccgaagccttaggggccttctcagccttagccctgggtactggggtgaagttggcaggggagagcttgacacttcgc

SEQ ID NO: 659522 - DNA, 120 bp, Artificial Sequence
  ENSG00000184185_36 (sequence is synthesized)
ctccctgatggccatgctgagggacagtggtgaccctggtcacttggtgctggtgtaggggcctgtgcccttccagggccagtgagacagccttctactcccccgacccagagctgagtc

SEQ ID NO: 659523 - DNA, 120 bp, Artificial Sequence
  ENSG00000184185_37 (sequence is synthesized)
cgaggaccccaggcccacctcctggccctcttggaggtctgtgctcttacctcccagcccccaccctgcgggagagcagccccagcgcctcatctccccaaaggcggcagatgcttgatt

SEQ ID NO: 659524 - DNA, 120 bp, Artificial Sequence
  ENSG00000184185_38 (sequence is synthesized)
ctcctgccctctttcttccttccctcgtatttatttatttatttattgcttgtgctaaagaccaaaatagtctccctctttagtgcacttgaagcgggagggcggatgggatgagccagg

SEQ ID NO: 659525 - DNA, 120 bp, Artificial Sequence
  ENSG00000184185_39 (sequence is synthesized)
agcgaggaagacttggcccctggggagtgtgtgtgtggaggcgtgtgcctgtgtgagcctgcatgcatacatgtgtggtgcacacatgcacactcggctcttcatgtgtatgactgggtt

SEQ ID NO: 659526 - DNA, 120 bp, Artificial Sequence
  ENSG00000184185_40 (sequence is synthesized)
tgtgtgtgtgtgtgtgtgtatgcaggcggttatgtgtctgtctacccccaggtgtttccgtgtacaagtttcctgtgagggagggcacccacccatcaggttgggcactggcacaggtga

SEQ ID NO: 659527 - DNA, 120 bp, Artificial Sequence
  ENSG00000184185_41 (sequence is synthesized)
gagggcacccacccatcaggttgggcactggcacaggtgaaccccacagtccccgaccctctgccctgattatgcacgtctgctcctgagtggagcttgtgttccaggatgagacatctg

SEQ ID NO: 659528 - DNA, 120 bp, Artificial Sequence
  ENSG00000184185_42 (sequence is synthesized)
gaggtgagcgtgtgcgtccggctcgtgtgtaggaggctgtgtgtgtgcccatgtgaaaccgtgtacttgagtgtgtgtctgtgtgcagcctatgcctgctgctcagagcacggtggccac

SEQ ID NO: 659529 - DNA, 120 bp, Artificial Sequence
  ENSG00000184185_43 (sequence is synthesized)
cccctgagcctctgctggtgctgtgctgcgtggtccccacccagagggtcctggggggcggggaggagccaccgttgggaggcccctgtacggggtgtctgccctgcgtgagggcataga

SEQ ID NO: 659530 - DNA, 120 bp, Artificial Sequence
  ENSG00000184185_44 (sequence is synthesized)
atgtcaaattattttaaatggtgaaactggagagttttcatgttattttcaatacatagcagtatctaaagacgtaggcgatgagactagaccacattaaatgcattttgatctctttga

SEQ ID NO: 659531 - DNA, 120 bp, Artificial Sequence
  ENSG00000184194_0 (sequence is synthesized)
accggcagccaggcaggcagacgggtagcaggggccagcactggcccccctcccagcttggcagtggcatgaagatgggagtgggagtgtatagtggaggaagcacctgccgggaccccc

SEQ ID NO: 659532 - DNA, 120 bp, Artificial Sequence
  ENSG00000184194_1 (sequence is synthesized)
acctgccagctagttggacaccccaaggctgtgtgctgcccacctggtgttccccaacacccccagccctacccagtgcacccctccggtgcctgctttccctgatgcctgcgatttaga

SEQ ID NO: 659533 - DNA, 120 bp, Artificial Sequence
  ENSG00000184194_2 (sequence is synthesized)
ccagcccggctgtatccacggcaacagaagcaggagtgtcactggccgccagatcactgagggtcccacaatgtggcccgggctgtgatttacctgggtgagacagcttgagccccatcg

SEQ ID NO: 659534 - DNA, 120 bp, Artificial Sequence
  ENSG00000184194_3 (sequence is synthesized)
tggattccaagacatccctgctgagagagccaaggtgcaatgtagcaggacaactcatggagcccccccgggcccatcgagtaccggactggctgaccccctagggttggcagtagcccc

SEQ ID NO: 659535 - DNA, 120 bp, Artificial Sequence
  ENSG00000184194_4 (sequence is synthesized)
tgaccctcagtatggccaacactaccggagagcctgaggaggtgagcggcgctctgtccccaccgtccgcatcagcttatgtgaagctggtactgctgggactgattatgtgcgtgagcc

SEQ ID NO: 659536 - DNA, 120 bp, Artificial Sequence
  ENSG00000184194_5 (sequence is synthesized)
tggcgggtaacgccatcttgtccctgctggtgctcaaggagcgtgccctgcacaaggctccttactacttcctgctggacctgtgcctggccgatggcatacgctctgccgtctgcttcc

SEQ ID NO: 659537 - DNA, 120 bp, Artificial Sequence
  ENSG00000184194_6 (sequence is synthesized)
cctttgtgctggcttctgtgcgccacggctcttcatggaccttcagtgcactcagctgcaagattgtggcctttatggccgtgctcttttgcttccatgcggccttcatgctgttctgca

SEQ ID NO: 659538 - DNA, 120 bp, Artificial Sequence
  ENSG00000184194_7 (sequence is synthesized)
tcagcgtcacccgctacatggccatcgcccaccaccgcttctacgccaagcgcatgacactctggacatgcgcggctgtcatctgcatggcctggaccctgtctgtggccatggccttcc

SEQ ID NO: 659539 - DNA, 120 bp, Artificial Sequence
  ENSG00000184194_8 (sequence is synthesized)
cacctgtctttgacgtgggcacctacaagtttattcgggaggaggaccagtgcatctttgagcatcgctacttcaaggccaatgacacgctgggcttcatgcttatgttggctgtgctca

SEQ ID NO: 659540 - DNA, 120 bp, Artificial Sequence
  ENSG00000184194_9 (sequence is synthesized)
tggcagctacccatgctgtctacggcaagctgctcctcttcgagtatcgtcaccgcaagatgaagccagtgcagatggtgccagccatcagccagaactggacattccatggtcccgggg

SEQ ID NO: 659541 - DNA, 120 bp, Artificial Sequence
  ENSG00000184194_10 (sequence is synthesized)
ccaccggccaggctgctgccaactggatcgccggctttggccgtgggcccatgccaccaaccctgctgggtatccggcagaatgggcatgcagccagccggcggctactgggcatggacg

SEQ ID NO: 659542 - DNA, 120 bp, Artificial Sequence
  ENSG00000184194_11 (sequence is synthesized)
aggtcaagggtgaaaagcagctgggccgcatgttctacgcgatcacactgctctttctgctcctctggtcaccctacatcgtggcctgctactggcgagtgtttgtgaaagcctgtgctg

SEQ ID NO: 659543 - DNA, 120 bp, Artificial Sequence
  ENSG00000184194_12 (sequence is synthesized)
tgccccaccgctacctggccactgctgtttggatgagcttcgcccaggctgccgtcaacccaattgtctgcttcctgctcaacaaggacctcaagaagtgcctgaggactcacgccccct

SEQ ID NO: 659544 - DNA, 120 bp, Artificial Sequence
  ENSG00000184194_13 (sequence is synthesized)
gctggggcacaggaggtgccccggctcccagagaaccctactgtgtcatgtgaagcaggctggtaggcagacaggcagagagaaggtcatggccaccgtgatggggccaacagcaaggga

SEQ ID NO: 659545 - DNA, 120 bp, Artificial Sequence
  ENSG00000184194_14 (sequence is synthesized)
ggggtaggggcccatacaggagtcctcctttctgagctccagccccagcccctcgaaccacctgtaatctaggcacctttgccaacacctcccaaggatggaggactgggcgagggactg

SEQ ID NO: 659546 - DNA, 120 bp, Artificial Sequence
  ENSG00000184194_15 (sequence is synthesized)
gatggaggactgggcgagggactgggaaagaggcatatttagttttgtggggcctgtctccgctgcctccttctccacttctacaatctcattctctctctctctctctctgtctctctc

SEQ ID NO: 659547 - DNA, 120 bp, Artificial Sequence
  ENSG00000184194_16 (sequence is synthesized)
gtgacaattcagaaaaagaaaagaacactgagaatgcaggtttttctactaacagctgaggagacaggctttcttactttaatgtctctccttctgacactgtccagaagggggaatttg

SEQ ID NO: 659548 - DNA, 120 bp, Artificial Sequence
  ENSG00000184194_17 (sequence is synthesized)
tcctgtaaaatagacttccagagctcttttgccccctctgctcccatgcaccctccccttccaagtcctttagcaaggcctggatgtttagggagaaagtggtccaaggctgctgacaag

SEQ ID NO: 659549 - DNA, 120 bp, Artificial Sequence
  ENSG00000184194_18 (sequence is synthesized)
attactatgtcatgtgcaatgttgttttaggccaacccttgccccaagcccagtctcttctccctccccaccatgtccagacctcccaaatggttcttgtgcatctgttggagaagtcaa

SEQ ID NO: 659550 - DNA, 120 bp, Artificial Sequence
  ENSG00000184194_19 (sequence is synthesized)
gggagtagggagaagggccccaaggatgggcccaggttaggtgaagagtaagatgtgagctgaactcctcgaactgaagagacccacacttggtcacattctctcacgctgccttcagga

SEQ ID NO: 659551 - DNA, 120 bp, Artificial Sequence
  ENSG00000184194_20 (sequence is synthesized)
tccccagcccccaactcttcttcctgaggatggaaatccactccagccccactaggactgatgtgggtgccatacaggcaggagcagcccaccaggaaagtgtaaggagggagctgaact

SEQ ID NO: 659552 - DNA, 120 bp, Artificial Sequence
  ENSG00000184194_21 (sequence is synthesized)
ccccagagtagctggaccacagagacttgggtcagagctgatttcaaccccagaattgtctctcgggttcaccctactcttctgaagatgaaaatttgtttggggccttggtaaccgata

SEQ ID NO: 659553 - DNA, 120 bp, Artificial Sequence
  ENSG00000184194_22 (sequence is synthesized)
gcggtacaaactccaaggcactgtggacttgagtccattcctatctgacctctttttgtccccctcaagcctcaggggcctcaagcccctccttagtagcccttggctgactgggccctg

SEQ ID NO: 659554 - DNA, 120 bp, Artificial Sequence
  ENSG00000184194_23 (sequence is synthesized)
agccccaagcatccttctttcccaacaaccctccttccccatccttcccccacccttacctacacccaaagtggagcacactgcagtcagattctccaggagggagatccaagcctcctc

SEQ ID NO: 659555 - DNA, 120 bp, Artificial Sequence
  ENSG00000184194_24 (sequence is synthesized)
ccaggggtggagtccactctgggcttactttgaggcctgttctgtggattggtgagccaagctggcactccttgccctggtcttacccaggctctctgtccccctctcacttcctgtggg

SEQ ID NO: 659556 - DNA, 120 bp, Artificial Sequence
  ENSG00000184194_25 (sequence is synthesized)
gccggaatctgtatttatccatccccctttcccttctttatagaagtccctgtcctaaactccctccctagcccaagagagccccagaactggggaagcctgacccatacagaatgggga

SEQ ID NO: 659557 - DNA, 120 bp, Artificial Sequence
  ENSG00000184194_26 (sequence is synthesized)
gggcactctaggcaggagagacattaatgagcctggctgcagagtggccctggaaaggcaggccagagtggctgagaggctgggagtaggggagcctgttctctcagcgatagtgatggg

SEQ ID NO: 659558 - DNA, 120 bp, Artificial Sequence
  ENSG00000184194_27 (sequence is synthesized)
ggtgcctttccgagggggtggggtgggaagaccaagggggtggggggtagatagggtacatttaggagggttttcctccatttcttttttctaactgcctggattcaccattggattttg

SEQ ID NO: 659559 - DNA, 120 bp, Artificial Sequence
  ENSG00000184194_28 (sequence is synthesized)
taaatggaaaaactgaaatgaacaatgctatactggatgttttctctttctgactgtgtgtgtgtgtgtgcgtgcgtgcgtgcatgtgccctgtctgaccacatgtggagagacatgatt

SEQ ID NO: 659560 - DNA, 120 bp, Artificial Sequence
  ENSG00000184194_29 (sequence is synthesized)
gagtgatagtgtgtgtctgtgtgactttgtgtggggaggcactcctgaagaaaacttgcccggtgcacacacgtaaaatgcctgtatatggggacagatacagcacgtgcatgcatacac

SEQ ID NO: 659561 - DNA, 120 bp, Artificial Sequence
  ENSG00000184194_30 (sequence is synthesized)
acacacacacacacaccacagttgagaggagacaaactagagtatgtgcccgtggtaggaagtcgagtggtcaagagatggatcttggaaactacataggtcggtagcaagagggtagac

SEQ ID NO: 659562 - DNA, 120 bp, Artificial Sequence
  ENSG00000184194_31 (sequence is synthesized)
tcccatctcacaagatgggcctcccttggcccaggccctgagcacgggagggctggggccgccagggaacttgaaaacctcatctcctcacaaagcctgtagccccatctcaaccccgtc

SEQ ID NO: 659563 - DNA, 120 bp, Artificial Sequence
  ENSG00000184194_32 (sequence is synthesized)
tcagtctccttcccaaactcaaacaaggtgttcctaaaattggaccaccatggagaatggggactgggaattgaggatcaaatgtgagggaaactgatgaggttaggaaatgccccccac

SEQ ID NO: 659564 - DNA, 120 bp, Artificial Sequence
  ENSG00000184194_33 (sequence is synthesized)
aaagtaatggcttctggagggactgctcagtctgggatgggagcccttcctaggggccactgtatgcagctgggactttggtcagctttgaccaaatttagagggagggatgtcatgggg

SEQ ID NO: 659565 - DNA, 120 bp, Artificial Sequence
  ENSG00000184194_34 (sequence is synthesized)
aaaaaaaacccaagcccaggagtctacccagccagcctgctccctagacagttaatttactatctggttattctctcaggtgcacagaattgagttgaccatactcctcagttcttggca

SEQ ID NO: 659566 - DNA, 120 bp, Artificial Sequence
  ENSG00000184194_35 (sequence is synthesized)
cactatatcatcattggtccatgtgaggcccttttatttttttttcttcagttttgtccccttcatcacccattcctgatcccatcctccccgccccctacacaggcacccactctcgtg

SEQ ID NO: 659567 - DNA, 120 bp, Artificial Sequence
  ENSG00000184194_36 (sequence is synthesized)
tatttaacgtacgtccttccaatccaccgttcatgtgtttatttacatatatgtgtatctgtgaaaaatgtatggtattgctgtgtgttttaatttacataaacagtattgtactataaa

SEQ ID NO: 659568 - DNA, 120 bp, Artificial Sequence
  ENSG00000184203_0 (sequence is synthesized)
gcttcggcgtcgcgtcgctcctgcgctggagctctaggccggcgtctctccgcgagccgcgggtcaagtgccagtggctaagggtgcgcgagtagccgccacccgttcggcgttggctct

SEQ ID NO: 659569 - DNA, 120 bp, Artificial Sequence
  ENSG00000184203_1 (sequence is synthesized)
ggcgtcggggtcgttgtgtcgtgacaaccgctgcggtagccgtttccgaggcagcagttgcggccgctttagccctgagcgggatctgcggctgcctgcgagtctctgctgtgccgaccc

SEQ ID NO: 659570 - DNA, 120 bp, Artificial Sequence
  ENSG00000184203_2 (sequence is synthesized)
ttctcttcgcggaccccacgccaagcagcgaccctgagccgacagccggagcgcccggcaatggcggcctcgacggcctcgcaccggcccatcaaggggatcttgaagaacaagacctct

SEQ ID NO: 659571 - DNA, 120 bp, Artificial Sequence
  ENSG00000184203_3 (sequence is synthesized)
acgacttcctctatggtggcgtcggccgaacagccccgcgggaatgtcgacgaggagctgagcaaaaaatcccagaagtgggatgaaatgaacatcttggcgacgtatcatccagcagac

SEQ ID NO: 659572 - DNA, 120 bp, Artificial Sequence
  ENSG00000184203_4 (sequence is synthesized)
aaagactatggtttaatgaaaatagatgaaccaagcactccttaccatagtatgatgggggatgatgaagatgcctgtagtgacaccgaggccactgaagccatggcgccagacatctta

SEQ ID NO: 659573 - DNA, 120 bp, Artificial Sequence
  ENSG00000184203_5 (sequence is synthesized)
gccaggaaattagctgcagctgaaggcttggagccaaagtatcggattcaggaacaagaaagcagtggagaggaggatagtgacctctcacctgaagaacgagaaaaaaagcgacaattt

SEQ ID NO: 659574 - DNA, 120 bp, Artificial Sequence
  ENSG00000184203_6 (sequence is synthesized)
gaaatgaaaaggaagcttcactacaatgaaggactcaatatcaaactagccagacaattaatttcaaaagacctacatgatgatgatgaagatgaagaaatgttagagactgcagatgga

SEQ ID NO: 659575 - DNA, 120 bp, Artificial Sequence
  ENSG00000184203_7 (sequence is synthesized)
gaaagcatgaatacggaagaatcaaatcaaggatctactccaagtgaccaacagcaaaacaaattacgaagttcatagacgagatttgttcaacactgcaattgtttgttagatgtaaac

SEQ ID NO: 659576 - DNA, 120 bp, Artificial Sequence
  ENSG00000184203_8 (sequence is synthesized)
cctgtgactatagtacgttgcttcttgttcttcacaattcatgacttaagtaccaaaatgcataccagttattatatattgccaagaattaaatgataaacttagagactgattagactg

SEQ ID NO: 659577 - DNA, 120 bp, Artificial Sequence
  ENSG00000184203_9 (sequence is synthesized)
aaaatgcctaatcgatatatatattcttgtgcctagtactttaccacaaatacagtgtaatatcatcagtccaaaactgcattacttttgtaaaaacactggttaatttgtataagatat

SEQ ID NO: 659578 - DNA, 120 bp, Artificial Sequence
  ENSG00000184203_10 (sequence is synthesized)
tatagagctttttatgctttagaagttaaacaatatctttgggggggaactaatttattttcatcacttgaaatgtggtagctcttacaaagtttattgatttgatttttttaaaaatca

SEQ ID NO: 659579 - DNA, 120 bp, Artificial Sequence
  ENSG00000184203_11 (sequence is synthesized)
aaagccaattgaacaacaggatatatagactgataaatatttaggctgaatagtattttaacacttgtcttcaacttgatttgtctgtttaattgaaaagaattataagagttactgttg

SEQ ID NO: 659580 - DNA, 120 bp, Artificial Sequence
  ENSG00000184203_12 (sequence is synthesized)
cattttctgacctactatttttaaaattcctgttgagtttctttgtgtttacaaggaaaggactgaactttttctcatcaaaactagcttttttccccacaaataaattatcaggttaaa

SEQ ID NO: 659581 - DNA, 120 bp, Artificial Sequence
  ENSG00000184203_13 (sequence is synthesized)
ctttcaccaatgtctgctctgttttttgtttttggggggtttttgtttgtttttgttttttaatgtttttggtacactgggcagacttcagagcagttttttaaaaaaataaatattcta

SEQ ID NO: 659582 - DNA, 120 bp, Artificial Sequence
  ENSG00000184203_14 (sequence is synthesized)
aatacctgtcttaacctcctgcttttctttcctactcctttccacacatacgcacacaatcttctaccttttaaaggatcattaagactgtcaccacattaggagctctttctctcactc

SEQ ID NO: 659583 - DNA, 120 bp, Artificial Sequence
  ENSG00000184203_15 (sequence is synthesized)
ttctgtcatttgctgctatgttgaaattcttattttgaccatcaatgcctatgaattcttctaatacgtgaagaaaatagtttgagtagcagcagtgctataggtgggaaatacagttta

SEQ ID NO: 659584 - DNA, 120 bp, Artificial Sequence
  ENSG00000184203_16 (sequence is synthesized)
gctgctgaatttctatacctctctgatttacagattgctaattaaatggctattattagtttggattaattagacttaagaaaacaactaactgagggttttttttgtttgttttttgag

SEQ ID NO: 659585 - DNA, 120 bp, Artificial Sequence
  ENSG00000184203_17 (sequence is synthesized)
ggttttctttgcatgagaattgtatgtaaccagtgatatgattattcctgaatgtacagacagaagtaagcctggacattgttaaatagtccctgctttaagggactacgataatgtgta

SEQ ID NO: 659586 - DNA, 120 bp, Artificial Sequence
  ENSG00000184203_18 (sequence is synthesized)
ctatgacaaacgtgctttattcttctaacgcagtaagaattaggtggaattttttccttcaaccaagtgcaggaaagccctgtgtgtcttggtttagttatggtttcatttctagccata

SEQ ID NO: 659587 - DNA, 120 bp, Artificial Sequence
  ENSG00000184203_19 (sequence is synthesized)
caattgatgaattgtgtacaacttttgttagtaccaaaataatctgttatatgaacagacttctaaaataacgtctgtatattttatatatagatacatatatgaaagaaggcttttatt

SEQ ID NO: 659588 - DNA, 120 bp, Artificial Sequence
  ENSG00000184203_20 (sequence is synthesized)
gaacagcttatcttccacttgcaggtttatggaaacagcagtatttgaaaataaataaaaagtgggagaattccttgctgttagaagaatgtggccattattttgattttttgaatgaga

SEQ ID NO: 659589 - DNA, 120 bp, Artificial Sequence
  ENSG00000184203_21 (sequence is synthesized)
tatataatcaaagtactgctgaactgtgagtgcagtattctaaacatttcagctaggaataccactgatttagaaacaaaactgtttgtctctggtttctgaatttaaaatgttgggatt

SEQ ID NO: 659590 - DNA, 120 bp, Artificial Sequence
  ENSG00000184203_22 (sequence is synthesized)
acctgtttaaatctgtcttgggggatgtagagattaagtctgtacatgtgcgtgcacatatattcatgcaccctctgattttggttttcttgtttctgagttcttagaaagtacccacat

SEQ ID NO: 659591 - DNA, 120 bp, Artificial Sequence
  ENSG00000184203_23 (sequence is synthesized)
actctttttttttttttgtagaagtagctgtcatagagtgaagaaaaggataagactttaaacagttgattctttttgtgttttctacaaactattttttgaaatttaaatcacaaactc

SEQ ID NO: 659592 - DNA, 120 bp, Artificial Sequence
  ENSG00000184203_24 (sequence is synthesized)
attttctggtttttagaaagtagatgatgatttcagaggagtaaggcatgccaagcagcatgctcagtggggttttaggctgtcacatgcagctgagaaaaggtatgttcaagtcataag

SEQ ID NO: 659593 - DNA, 120 bp, Artificial Sequence
  ENSG00000184203_25 (sequence is synthesized)
taggtaattgatagggtatgaactagtcaaaatatgaaccattatgattcaagttagattttcctctggagagacagatctgaatgttcagttctagccaaggtagattttactttcaac

SEQ ID NO: 659594 - DNA, 120 bp, Artificial Sequence
  ENSG00000184203_26 (sequence is synthesized)
tttttaatcagtatcactttctgtgcttaactatttggtgttaccttgtctgttttcatttgtctaaaattctgcagagatgactaaaatttgacataatggtgtaaatggattgttaag

SEQ ID NO: 659595 - DNA, 120 bp, Artificial Sequence
  ENSG00000184203_27 (sequence is synthesized)
gtaactttcagttgaagattaaagcaagatgccattttccccatgactttggttttgtttacatttttccctttcagttagtatacactacacgtactgtaataaaatacaataatatga

SEQ ID NO: 659596 - DNA, 120 bp, Artificial Sequence
  ENSG00000184203_28 (sequence is synthesized)
ataataaaatattaaaactacttcattgttccttgactcagaattaaacactgttaattgctgagtcttatttttctctctgtgtgtgtatgtgacaggcattgtacatagtaaatatag

SEQ ID NO: 659597 - DNA, 120 bp, Artificial Sequence
  ENSG00000184203_29 (sequence is synthesized)
tatatggtgttgtaactcgctcttttgtcaccatttaactctttctggataattttcccatagctttaatctttcttcacaaatataatttctaatggctggatatattcttgttcttcc

SEQ ID NO: 659598 - DNA, 120 bp, Artificial Sequence
  ENSG00000184203_30 (sequence is synthesized)
attgagatgaatgccagatagtaaatattttaaattttgcagggcccagtggtctctattacgaactactcaactctgccattgaacacaaaagcagccttaagcatgacaaaaacaaat

SEQ ID NO: 659599 - DNA, 120 bp, Artificial Sequence
  ENSG00000184203_31 (sequence is synthesized)
cgtagacgtcattcctcttgtgacttacttccattttgcatttcatatgaacgtctggataacagcctatttgaatttgttttattgtagatttgttactggagcactagtgaagtcagt

SEQ ID NO: 659600 - DNA, 120 bp, Artificial Sequence
  ENSG00000184203_32 (sequence is synthesized)
ctcagtggttgctagctactaatggtgcatatattagttttaacttccatgaaaggaagatgagatatgggcttgtttgcttcccaagtagaaatctggggtttactcagtctctttgca

SEQ ID NO: 659601 - DNA, 120 bp, Artificial Sequence
  ENSG00000184203_33 (sequence is synthesized)
gagaagcataactgcatggatggtaacccactgaaagataggtgtcattattactgtttatgtcttcattttttaacttaatgtaatattgttgttcagatcattacatgtaatttttga

SEQ ID NO: 659602 - DNA, 120 bp, Artificial Sequence
  ENSG00000184203_34 (sequence is synthesized)
caatttcaagtctcagaatttcctaaatgaattgtgaaattacattacgcagcagtaaccagtatgaagacaaaaataatgcaagaagcattatgagaagatgaggattctaaataggta

SEQ ID NO: 659603 - DNA, 74 bp, Artificial Sequence
  ENSG00000184203_35 (sequence is synthesized)
gcaagaagcattatgagaagatgaggattctaaataggtatagatacctaattaagataataccttgggccggt

SEQ ID NO: 659604 - DNA, 67 bp, Artificial Sequence
  ENSG00000184203_36 (sequence is synthesized)
ataccttggctgggcatggtgactcttgcctgtactcccagcactttgagattacagaggcagaggt

SEQ ID NO: 659605 - DNA, 120 bp, Artificial Sequence
  ENSG00000184203_37 (sequence is synthesized)
gcctgtactcccagcactttgagattacagaggcagaggtgggagtattgcttcaggccaggagatcaaaaccagcctaagcaacatagtaagactctttctacaaaaaaaaaaaaaaaa

SEQ ID NO: 659606 - DNA, 120 bp, Artificial Sequence
  ENSG00000184203_38 (sequence is synthesized)
agcactccttaccataggtatatactttaaaaatcttaaaaaaaaaaaaagatacaagatctggctatgttgcccagtgcagtggctattaacaggcacagttatagcacactacagcct

SEQ ID NO: 659607 - DNA, 120 bp, Artificial Sequence
  ENSG00000184205_0 (sequence is synthesized)
agagcgaggtggtgaggagagctggttgcgtgagtctcctcagctctgcttaccggtgcgactagcggcagcgacgcggctaaaagcgaaggggcgagtgcgagtcccctgagctgtacg

SEQ ID NO: 659608 - DNA, 120 bp, Artificial Sequence
  ENSG00000184205_1 (sequence is synthesized)
tacgaacgcggtcgccatggaccgcccagatgaggggcctccggccaagacccgccgcctgagcagctccgagtctccacagcgcgacccgcccccgccgccgccgccgccgccgctcct

SEQ ID NO: 659609 - DNA, 120 bp, Artificial Sequence
  ENSG00000184205_2 (sequence is synthesized)
ctgccgctgcctccaccccagcagcgcccgaggctccaggaggaaacggaggcggcacaggtgctggccgatatgaggggggtgggactgggccccgcgctgcccccgccgcctccctat

SEQ ID NO: 659610 - DNA, 120 bp, Artificial Sequence
  ENSG00000184205_3 (sequence is synthesized)
gtcattctcgaggagggggggatccgcgcatacttcacgctcggtgctgagtgtcccggctgggattctaccatcgagtcggggtatggggaggcgcccccgcccacggagagcctggaa

SEQ ID NO: 659611 - DNA, 120 bp, Artificial Sequence
  ENSG00000184205_4 (sequence is synthesized)
gcactccccactcctgaggcctcgggggggagcctggaaatcgattttcaggttgtacagtcgagcagttttggtggagagggggccctagaaacctgtagcgcagtggggtgggcgccc

SEQ ID NO: 659612 - DNA, 120 bp, Artificial Sequence
  ENSG00000184205_5 (sequence is synthesized)
cagaggttagttgacccgaagagcaaggaagaggcgatcatcatagtggaggatgaggatgaggatgagcgggagagtatgaggagcagcaggaggcggcggcggcggcggaggaggaag

SEQ ID NO: 659613 - DNA, 120 bp, Artificial Sequence
  ENSG00000184205_6 (sequence is synthesized)
cagaggaaggtgaagagggaaagcagagagagaaatgccgagaggatggagagcatcctgcaggcactggaggatattcagctggatctggaggcagtgaacatcaaggcaggcaaagcc

SEQ ID NO: 659614 - DNA, 120 bp, Artificial Sequence
  ENSG00000184205_7 (sequence is synthesized)
ttcctgcgtctcaagcgcaagttcatccagatgcgaagacccttcctggagcgcagagacctcatcatccagcatatcccaggcttctgggtcaaagcattcctcaaccaccccagaatt

SEQ ID NO: 659615 - DNA, 120 bp, Artificial Sequence
  ENSG00000184205_8 (sequence is synthesized)
tcaattttgatcaaccgacgtgatgaagacattttccgctacttgaccaatctgcaggtacaggatctcagacatatctccatgggctacaaaatgaagctgtacttccagactaacccc

SEQ ID NO: 659616 - DNA, 120 bp, Artificial Sequence
  ENSG00000184205_9 (sequence is synthesized)
tacttcacaaacatggtgattgtcaaggagttccagcgcaaccgctcaggccggctggtgtctcactcaaccccaatccgctggcaccggggccaggaaccccaggcccgtcgtcacggg

SEQ ID NO: 659617 - DNA, 120 bp, Artificial Sequence
  ENSG00000184205_10 (sequence is synthesized)
aaccaggatgcgagccacagctttttcagctggttctcaaaccatagcctcccagaggctgacaggattgctgagattatcaagaatgatctgtgggttaaccctctacgctactacctg

SEQ ID NO: 659618 - DNA, 120 bp, Artificial Sequence
  ENSG00000184205_11 (sequence is synthesized)
ccaggggcagatgtgaggtggtgatcatggaagacgcccctgactattatgcagtggaagacattttcagcgagatctcagacattgatgagacaattcatgacatcaagatctctgact

SEQ ID NO: 659619 - DNA, 120 bp, Artificial Sequence
  ENSG00000184205_12 (sequence is synthesized)
tcatggagaccaccgactacttcgagaccactgacaatgagataactgacatcaatgagaacatctgcgacagcgagaatcctgaccacaatgaggtccccaacaacgagaccactgata

SEQ ID NO: 659620 - DNA, 120 bp, Artificial Sequence
  ENSG00000184205_13 (sequence is synthesized)
acaacgagagtgctgatgaccacgaaaccactgacaacaatgagagtgcagatgacaacaacgagaatcctgaagacaataacaagaacactgatgacaacgaagagaaccctaacaaca

SEQ ID NO: 659621 - DNA, 120 bp, Artificial Sequence
  ENSG00000184205_14 (sequence is synthesized)
acgagaacacttacggcaacaacttcttcaaaggtggcttctggggcagccatggcaacaaccaggacagcagcgacagtgacaatgaagcagatgaggccagtgatgatgaagataatg

SEQ ID NO: 659622 - DNA, 120 bp, Artificial Sequence
  ENSG00000184205_15 (sequence is synthesized)
atggcaacgaaggtgacaatgagggcagtgatgatgatggcaatgaaggtgacaatgaaggcagcgatgatgacgacagagacattgagtactatgagaaagttattgaagactttgaca

SEQ ID NO: 659623 - DNA, 120 bp, Artificial Sequence
  ENSG00000184205_16 (sequence is synthesized)
aggatcaggctgactacgaggacgtgatagagatcatctcagacgaatcagtggaagaagagggcattgaggaaggcatccagcaagatgaggacatctatgaggaaggaaactatgagg

SEQ ID NO: 659624 - DNA, 120 bp, Artificial Sequence
  ENSG00000184205_17 (sequence is synthesized)
aggaaggaagtgaagatgtctgggaagaaggggaagattcggacgactctgacctagaggatgtgcttcaggtcccaaacggttgggccaatccggggaagagggggaaaaccggataag

SEQ ID NO: 659625 - DNA, 120 bp, Artificial Sequence
  ENSG00000184205_18 (sequence is synthesized)
ggttttccccttttggggatcacctctctgtatcccccacccactatcccatttgccctcctcctcagctagggccacgcggccccacattgcacttctggggggtgaccgacttcgtac

SEQ ID NO: 659626 - DNA, 120 bp, Artificial Sequence
  ENSG00000184205_19 (sequence is synthesized)
acgggtttaaagtttatttttatggtttagtcattgcagagttcttattttggggggagggaaagggggctagtccccttcttttggccctccgcccccgcaggcttctgtgtgctgcta

SEQ ID NO: 659627 - DNA, 120 bp, Artificial Sequence
  ENSG00000184205_20 (sequence is synthesized)
actgtatttattgtgatgccttggtcagggcccctctacccacttctcccagtcagttgtggccccagcccctctccctgtgctgtgtggagtggacaccctgacccccgaagcggggag

SEQ ID NO: 659628 - DNA, 120 bp, Artificial Sequence
  ENSG00000184205_21 (sequence is synthesized)
ggccgctgtggccttcgtcacagccgcgcagtgcccatggaggcgctgctgccaccttcctctcccaagttctttctccatccctctcctcttcccgccgcgccgctagcccgcctcggt

SEQ ID NO: 659629 - DNA, 120 bp, Artificial Sequence
  ENSG00000184205_22 (sequence is synthesized)
gtctatgcaaggccgcttcgccattgcggtattctttgcggtattcttgtccccgtcccccagaaggctcgcctctccccgtggaccctgttaatcccaataaaattctgagcaagttca

SEQ ID NO: 659630 - DNA, 120 bp, Artificial Sequence
  ENSG00000184205_23 (sequence is synthesized)
cgctacttgaccaatctgcaggtcaggccagagagacattttttagtaggatcgggcacgaatctggttcttggaggtgacgggaggtgggtgggaagggccgtggtgtgttgggggggg

SEQ ID NO: 659631 - DNA, 120 bp, Artificial Sequence
  ENSG00000184205_24 (sequence is synthesized)
aaggagttccagcgcaaccgctcaggtaagtggcagtaccagagtaaatccatgttccccccctcaatctgtccttgttttgtcccatctccatagccttctctctccctaggccggctg

SEQ ID NO: 659632 - DNA, 120 bp, Artificial Sequence
  ENSG00000184205_25 (sequence is synthesized)
gctgacaggattgctgaggtggggcccttcctggcatcaccagagaaggccttgctaggcttgttcctgggtgcgtggggaattaagaggaggatctggagcttgtactaatggctgtct

SEQ ID NO: 659633 - DNA, 120 bp, Artificial Sequence
  ENSG00000184205_26 (sequence is synthesized)
gtaatgggagtttggtcgctgagaggtggtttgttggggatggggaaaagactagtgtaacacaggatttatggagccaaaaagggacctttgagataatcccagtggaatatgttttac

SEQ ID NO: 659634 - DNA, 120 bp, Artificial Sequence
  ENSG00000184205_27 (sequence is synthesized)
aagtgggaaatcatgcccagaaatggcttgaggttacacagtcaggggcagaagtgggactttacccaccctagccccattcctgggatcccttatagcctactgcttccccagttactt

SEQ ID NO: 659635 - DNA, 120 bp, Artificial Sequence
  ENSG00000184205_28 (sequence is synthesized)
atcagtggaagaagagggcattgaggaaggtgagctaatccccccccacccttgtcttccctcttttcttttctcagagcaagcctggccaaggacagggtatcaaggcatgaacacaat

SEQ ID NO: 659636 - DNA, 120 bp, Artificial Sequence
  ENSG00000184205_29 (sequence is synthesized)
atcattttagttctaggtgatggatagatggttgtaacagcagaagatgaagagtacacagagataggagacagtgggtggaaaactgaaaaggacacttcacatcgaggtgggggagtg

SEQ ID NO: 659637 - DNA, 120 bp, Artificial Sequence
  ENSG00000184205_30 (sequence is synthesized)
gcaaaacacagtgcatttcagcacagtctgtacccggccttggcctttggcgcatttccaggcttgtgttgggagcagagcatgaagtgaacagtgtgctctctgagtccagaaaagggt

SEQ ID NO: 659638 - DNA, 120 bp, Artificial Sequence
  ENSG00000184205_31 (sequence is synthesized)
gcagccagttctacctcaagaatcggggtggggggggtggcgggggaagagctagaggaaaaaggtgacatttgaactggaggatgcattcacactgaggagctttatggagcattctcc

SEQ ID NO: 659639 - DNA, 120 bp, Artificial Sequence
  ENSG00000184205_32 (sequence is synthesized)
gtggagtggatcatctgaacaaggacctggaagggtgaaaatgcatcgtaggttgggcagggtttccaaaattatgtcctgaggatcactcaccagatctgaaagctgcttcccacaaaa

SEQ ID NO: 659640 - DNA, 120 bp, Artificial Sequence
  ENSG00000184205_33 (sequence is synthesized)
ggtttcagtggtcgtatatgttggacaagtactgcatatagtaataccctcttgtagagtcacattagcaccttaaaggctctgagaataacacgagaattataaaggtgctgagaagta

SEQ ID NO: 659641 - DNA, 120 bp, Artificial Sequence
  ENSG00000184205_34 (sequence is synthesized)
ctcagatgggaggtggaaggggcaggaaaatcaactactcttcgggtttttttggctatggggtccctggcaaacttccattgagggcaaggccagggcactaagggaagaggaatgaat

SEQ ID NO: 659642 - DNA, 120 bp, Artificial Sequence
  ENSG00000184205_35 (sequence is synthesized)
gtggagcctcaatctagacatgttcaggtaggagagagaaacagggattctcagttctcttcccctcccacctgatggcatctcttttctcagaaggggaggcagagctatctgcccagc

SEQ ID NO: 659643 - DNA, 120 bp, Artificial Sequence
  ENSG00000184205_36 (sequence is synthesized)
cctgagggtgggagtgggggtggggaattgggttgcagaacacaaactagggcctctttggatcagactgggggagaaagcgaggaagctgcctggagatgaataggtttattcagctga

SEQ ID NO: 659644 - DNA, 120 bp, Artificial Sequence
  ENSG00000184205_37 (sequence is synthesized)
ggtcagagctcaggaagagacacacattgaggagtacaagggggagaaaaagctactatcagagatgtatcagttttgacagaggcagggatcccacactgccttcctgcctccctccat

SEQ ID NO: 659645 - DNA, 120 bp, Artificial Sequence
  ENSG00000184205_38 (sequence is synthesized)
ctccctctcattctgtgggcttgcttgagtacacccacacacactcttggctgtttgttccaagcagaggcgctgacaagttgtcccaggccgctaaaaaccctggctatggtctctgtt

SEQ ID NO: 659646 - DNA, 120 bp, Artificial Sequence
  ENSG00000184205_39 (sequence is synthesized)
cccttttagagtgacacctatctgctcatctaactgccttcctccatttccccttccttgcttctcccctatgcaggcatccagcaagatgaggacatctatgaggaaggaaactatgag

SEQ ID NO: 659647 - DNA, 120 bp, Artificial Sequence
  ENSG00000184206_0 (sequence is synthesized)
agttgcacagctgcctggtaggtgactggaggcattgagcagtgctcactggtatttcgctgatgtggccccaaccccgcttccctccccaccccgcgatgtcagaaaaaacacaacagg

SEQ ID NO: 659648 - DNA, 80 bp, Artificial Sequence
  ENSG00000184206_1 (sequence is synthesized)
ttccctccccaccccgcgatgtcagaaaaaacacaacaggggaaattggccgcagccaagaaacagcaggagctaacagg

SEQ ID NO: 659649 - DNA, 120 bp, Artificial Sequence
  ENSG00000184206_2 (sequence is synthesized)
ctggtggttaccactcacctggggattcagcaacaggtatctacggggagggccgtgcatcctctactaccctggaggatctggagagccagtaccaagaactagcagtggccctggatt

SEQ ID NO: 659650 - DNA, 120 bp, Artificial Sequence
  ENSG00000184206_3 (sequence is synthesized)
caagctccgcaataatcagtcaactcactgaaaacatcaattcactggttcgcacatctaaggaggagaagaagcatgagatacatctggtacagaagcttgggaggagcttgttcaaac

SEQ ID NO: 659651 - DNA, 120 bp, Artificial Sequence
  ENSG00000184206_4 (sequence is synthesized)
atctggtacagaagcttgggaggagcttgttcaaactcaaaaaccagacggctgaacccctggccccagagcccccagcagggccatctaaggtagagcagctacaagatgagaccaacc

SEQ ID NO: 659652 - DNA, 83 bp, Artificial Sequence
  ENSG00000184206_5 (sequence is synthesized)
gaggtggaggagctcctggatgaggtggaggagctcctggagcaggagaggcttcggcaacaggatgagaggctgtggcagca

SEQ ID NO: 659653 - DNA, 120 bp, Artificial Sequence
  ENSG00000184206_6 (sequence is synthesized)
aggagaggcttcggcaacaggatgagaggctgtggcagcaggagactctgcaggagctggagaggctgcgggagctggagaggctgcgggagctggagaggatgctggagctggggtggg

SEQ ID NO: 659654 - DNA, 120 bp, Artificial Sequence
  ENSG00000184206_7 (sequence is synthesized)
tgcgggagctggagaggatgctggagctggggtgggaagccctgtacgagcagcgggccgagccacgcagcggcttcgaggagctgaacaacgagaacaagagcacactgcagttggagc

SEQ ID NO: 659655 - DNA, 120 bp, Artificial Sequence
  ENSG00000184206_8 (sequence is synthesized)
aagagccaagaggctccgagtctgcagcagcagccagaccagtagctggagccccagtcccacaaggagcttggatgtgcggacaagcagggtggactccccaggagcacccaggcttga

SEQ ID NO: 659656 - DNA, 120 bp, Artificial Sequence
  ENSG00000184206_9 (sequence is synthesized)
aggcggcaggaggagcaggagaggctgcatgccattcttttcgggctgcggagaacagggagctaaacatcaccatcatctaagagcgggtcaaggaattgaaaaaaaaaaacaaaacat

SEQ ID NO: 659657 - DNA, 120 bp, Artificial Sequence
  ENSG00000184206_10 (sequence is synthesized)
ggtcaaggaattgaaaaaaaaaaacaaaacatttaaggggttaatatcctacacaattcatttacttcatttgaatgttagagccacttatgtttatttgtgtttctaatttatagttta

SEQ ID NO: 659658 - DNA, 82 bp, Artificial Sequence
  ENSG00000184206_11 (sequence is synthesized)
tttaaatttatttgtaaaaagttaaatgagagtgggtgtttctctcatgttcactctggcatcttttagcatttttttaatt

SEQ ID NO: 659659 - DNA, 120 bp, Artificial Sequence
  ENSG00000184206_12 (sequence is synthesized)
ggtgtttctctcatgttcactctggcatcttttagcatttttttaatttgataattataggacgttagcatgcatatcgagtttgcccttatgtggtgggagttcaaacacacaaagacc

SEQ ID NO: 659660 - DNA, 120 bp, Artificial Sequence
  ENSG00000184206_13 (sequence is synthesized)
aatttccttatgttctgctgttatgtttgatcgaatcctaatcacagtgagctcttcattagctcaatatgcagtttgccctcaagtgcgcggtctattactttgtaatatgccactgtg

SEQ ID NO: 659661 - DNA, 85 bp, Artificial Sequence
  ENSG00000184206_14 (sequence is synthesized)
tttttaaatctcccagaagaggaaagtggcctgctttggcaggtgtgtgcaggatagaatatgtttcatttgttccggtgccaag

SEQ ID NO: 659662 - DNA, 120 bp, Artificial Sequence
  ENSG00000184206_15 (sequence is synthesized)
ctcccagaagaggaaagtggcctgctttggcaggtgtgtgcaggatagaatatgtttcatttgttccggtgccaagaatgagcgctgtactacggtagttcccttaggatttgtatgtgc

SEQ ID NO: 659663 - DNA, 79 bp, Artificial Sequence
  ENSG00000184206_16 (sequence is synthesized)
gtgctctgggctcatgaagatactgcctcatgagctgtggcagttgtactcttttttgatgacctactgtggatgtgga

SEQ ID NO: 659664 - DNA, 64 bp, Artificial Sequence
  ENSG00000184206_17 (sequence is synthesized)
tctacaatacattttaaagtcagcgttcatgttttctccttaatgtatttagtaaagatcagaa

SEQ ID NO: 659665 - DNA, 66 bp, Artificial Sequence
  ENSG00000184206_18 (sequence is synthesized)
ttcatggagcttatttgaggctagaagatggattttaccatctagacctctctggctaatagctag

SEQ ID NO: 659666 - DNA, 120 bp, Artificial Sequence
  ENSG00000184206_19 (sequence is synthesized)
gatggattttaccatctagacctctctggctaatagctagtcttcaaccatctgacataggaatttacttcttttccttgaatggagaacactttaaaaataataacaaacattattata

SEQ ID NO: 659667 - DNA, 120 bp, Artificial Sequence
  ENSG00000184206_20 (sequence is synthesized)
gttttagtagacagtattatactacatttgaaaatcaaggagcagtttatgcaacgtaaaatgtttacaaactgcagcgcaatctactgtttgtgactgtcaaagtgtcatgaggaaagt

SEQ ID NO: 659668 - DNA, 120 bp, Artificial Sequence
  ENSG00000184206_21 (sequence is synthesized)
tgcagcgcaatctactgtttgtgactgtcaaagtgtcatgaggaaagtgtctatacaatcacagagttatatttcctcacaaagttctttacgaagagtgaaatatgtttttatacctct

SEQ ID NO: 659669 - DNA, 73 bp, Artificial Sequence
  ENSG00000184206_22 (sequence is synthesized)
cagtttcagttagaggcatattttgtgtaatatttatggcttaaaatggactaaaggtcctgttcttgccttt

SEQ ID NO: 659670 - DNA, 120 bp, Artificial Sequence
  ENSG00000184206_23 (sequence is synthesized)
cacttactttaactccattttaaaccctcgggctagaaatcgtaccactgttaattagccacgttatttggtctaacagtttttgtttatcattctgaaactgagcttatctaatacatt

SEQ ID NO: 659671 - DNA, 86 bp, Artificial Sequence
  ENSG00000184206_24 (sequence is synthesized)
caaaggtatttttatagttcaaatcgcttcacttttaccctgacacgtataaatgaataggaatgaccttcagatagcgtttagca

SEQ ID NO: 659672 - DNA, 120 bp, Artificial Sequence
  ENSG00000184206_25 (sequence is synthesized)
gtacctgtggattaaatcacatactggcatatttaagatgaatgtcagtctgaaaaataaatatactatattaattcaaatacgactctttgtgtaggtattttgtcatatgtttaagaa

SEQ ID NO: 659673 - DNA, 120 bp, Artificial Sequence
  ENSG00000184206_26 (sequence is synthesized)
aaagctaaagagaatggaaatcctatgacaataactcaagtctttcttcaaagtgcatgcagtcttttgcagtacctcattcagccaagtatttgttctctacctcattcagtataaggc

SEQ ID NO: 659674 - DNA, 120 bp, Artificial Sequence
  ENSG00000184206_27 (sequence is synthesized)
agcctttaatttgcttagaaggcaacattagaaggttagagttcagcaggaacatagaattttaaaatgtgacttcaactgaataaatttgaatttctctagggagtaaagaatcaaaac

SEQ ID NO: 659675 - DNA, 120 bp, Artificial Sequence
  ENSG00000184206_28 (sequence is synthesized)
atcaaaacacctatttaaagactgcaaaatatgataattatttttaaagtaattgattaaacctggtaggttttcccaaaatgaaaaacaatcagttctaaaaccaaagctgatttttag

SEQ ID NO: 659676 - DNA, 120 bp, Artificial Sequence
  ENSG00000184206_29 (sequence is synthesized)
taaaatatgaatactgtagtttaaaacaaagaatctaggggaaggaaaagtagacaaagaaatgccaattccagtccaaagctgtatttgccaagttttcttagaatgacttttaccgat

SEQ ID NO: 659677 - DNA, 120 bp, Artificial Sequence
  ENSG00000184206_30 (sequence is synthesized)
ttatgaattcttatacacagaatgcataatggaaatactgatttttgtctaaagtggcattattgactgcttctgtgatgctactgtaatgtaatacattattaaattgtttcaaggtgc

SEQ ID NO: 659678 - DNA, 80 bp, Artificial Sequence
  ENSG00000184206_31 (sequence is synthesized)
cagttggagcagcaagtaaaggagctgaagaagtcgggtgagctgaaagagactgtaacctccgacccatccaagaagat

SEQ ID NO: 659679 - DNA, 62 bp, Artificial Sequence
  ENSG00000184206_32 (sequence is synthesized)
ggccacaggcagctgcagcctggggacaggtgaccccagcaccctccggggcagtcctccca

SEQ ID NO: 659680 - DNA, 120 bp, Artificial Sequence
  ENSG00000184206_33 (sequence is synthesized)
taatagaggtggtattttttgacttccatttgtgaagtttaaatgagattcgttattgttgcttttatgtgaatccttagtacatggcctgctgcaaacacccaggacaccgaggaaatg

SEQ ID NO: 659681 - DNA, 120 bp, Artificial Sequence
  ENSG00000184206_34 (sequence is synthesized)
catctccatgtgcactctcatctcttgcagtcagcaacaggtatctacggggagggccgtgcatcctctactaccctggaggatctggaggtaagaggccctgggccgaggtgcagtgac

SEQ ID NO: 659682 - DNA, 76 bp, Artificial Sequence
  ENSG00000184206_35 (sequence is synthesized)
cagcccacacacccccaccagccctaatgattattctctctacccctccccacaatcttcctccaactccttctct

SEQ ID NO: 659683 - DNA, 76 bp, Artificial Sequence
  ENSG00000184206_36 (sequence is synthesized)
gaggcagcccacacacccccaccagccctaatgattattctctctacccctccccacaatcttcctccaactcctg

SEQ ID NO: 659684 - DNA, 77 bp, Artificial Sequence
  ENSG00000184206_37 (sequence is synthesized)
attacagctggtgctaggggcccctgatgccaagggcaaatggggagctgggcacccaggtctcacctggagggacc

SEQ ID NO: 659685 - DNA, 77 bp, Artificial Sequence
  ENSG00000184206_38 (sequence is synthesized)
gccctgaagaaaggagctaggggcccctgatgccaagggcaaatggggagctgggcacccaggtcttctgcactgcc

SEQ ID NO: 659686 - DNA, 120 bp, Artificial Sequence
  ENSG00000184206_39 (sequence is synthesized)
agacacccctgctctagtccttgccacacatgccctggggttgtcacctctctgggaagcactagcctgactggttgtcaggggtccatatttctgccctgcctcagtccctaatttgct

SEQ ID NO: 659687 - DNA, 120 bp, Artificial Sequence
  ENSG00000184206_40 (sequence is synthesized)
ctcagggccaagggctcctgtctgtcctttgctgttttatatctctgctatgaagaactgtacctggcctgtacatgctcagtaaatgtttattgaatgaatgcacgtttctaaatcaca

SEQ ID NO: 659688 - DNA, 120 bp, Artificial Sequence
  ENSG00000184206_41 (sequence is synthesized)
aactggcagaaggggggtgggcccttctcaaactctgtctctggaggttcaccagcccctccctccagggcccttttccccctttgctttgggcaggttcgcacatctaaggaggagaag

SEQ ID NO: 659689 - DNA, 80 bp, Artificial Sequence
  ENSG00000184207_0 (sequence is synthesized)
gcgatggcggcggcggaggccggtggcgacgacgcccgctgcgtgcggctgagcgccgagcgggcacaggcgctgctggc

SEQ ID NO: 659690 - DNA, 120 bp, Artificial Sequence
  ENSG00000184207_1 (sequence is synthesized)
cgggcacaggcgctgctggccgacgtggacacgctgctgttcgactgcgacggcgtgctgtggcgcggggagaccgccgtgcctggcgcgcccgaggccctgcgggcgctgcgagcccgc

SEQ ID NO: 659691 - DNA, 120 bp, Artificial Sequence
  ENSG00000184207_2 (sequence is synthesized)
ggcaagcgcctgggcttcatcaccaacaacagcagcaagacccgcgctgcctacgccgagaagctgcggcgcctgggcttcggcggccccgcggggcccggcgccagcctggaggtcttc

SEQ ID NO: 659692 - DNA, 120 bp, Artificial Sequence
  ENSG00000184207_3 (sequence is synthesized)
aggtcttcggcacggcctactgcaccgcgctctacctgcgccagcgcctggccggcgcccccgcgcccaaggcctacgtgctgggcagcccagccctggccgcggagctggaggccgtgg

SEQ ID NO: 659693 - DNA, 120 bp, Artificial Sequence
  ENSG00000184207_4 (sequence is synthesized)
agcgtgggcgtggggcccgagccactgcagggcgagggtcccggcgactggctgcacgcgccgctggagcccgacgtgcgcgcggtggtggtgggctttgacccgcacttcagctacatg

SEQ ID NO: 659694 - DNA, 120 bp, Artificial Sequence
  ENSG00000184207_5 (sequence is synthesized)
aagctcaccaaggccctgcgctacctgcagcagcccggctgcctgctcgtgggcaccaacatggacaaccggcttccgcttgagaacggccgcttcatcgcgggtaccgggtgtctggtc

SEQ ID NO: 659695 - DNA, 120 bp, Artificial Sequence
  ENSG00000184207_6 (sequence is synthesized)
cgagccgtggagatggccgcccagcgccaggccgacatcatcgggaagcccagccgcttcattttcgactgcgtgtcccaggaatacggcatcaaccccgagcgcaccgtcatggtggga

SEQ ID NO: 659696 - DNA, 120 bp, Artificial Sequence
  ENSG00000184207_7 (sequence is synthesized)
gaccgcctggacacagacatcctcctaggcgccacctgtggcctgaagaccatcctgaccctcaccggagtctccactctaggggatgtgaagaataatcaggaaagtgactgcgtgtct

SEQ ID NO: 659697 - DNA, 120 bp, Artificial Sequence
  ENSG00000184207_8 (sequence is synthesized)
aagaagaaaatggtccctgacttctatgttgacagcatagccgaccttttgcctgcccttcaaggttaaagattgagtgtctttaatctgcagaataaaaaaaaagaaattgaaaaccag

SEQ ID NO: 659698 - DNA, 120 bp, Artificial Sequence
  ENSG00000184207_9 (sequence is synthesized)
ttacccaaattaataggtggggcttaagcatctgctcggctaagtggcttcaaagagtgtaattggagttaagcaaaggcattcattgttaaccttgtaagtacacgtttgggggacgat

SEQ ID NO: 659699 - DNA, 120 bp, Artificial Sequence
  ENSG00000184207_10 (sequence is synthesized)
tttgtttacagatgcttgtaatcgaagatgcacttttaggcttggaaggcgttgtgggctgggttctgggccttgggtggggttggcaggggcaggctctgcacctgtccgggattcagg

SEQ ID NO: 659700 - DNA, 120 bp, Artificial Sequence
  ENSG00000184207_11 (sequence is synthesized)
taaccagggcctgccgatgggactgaggcgggtctaggggtgtgtgtcctgtattttattgaaaaactcattcagggatccagcccctcagggggcagagggactgattattctgactgt

SEQ ID NO: 659701 - DNA, 120 bp, Artificial Sequence
  ENSG00000184207_12 (sequence is synthesized)
tgggagaggcttgcatggaccagagccccatcagtatgactgaaagtccagcggagccttctgtgtccctgtgcctcccagcagggtgggagtggaggaggcggctgctcccaggtggca

SEQ ID NO: 659702 - DNA, 120 bp, Artificial Sequence
  ENSG00000184207_13 (sequence is synthesized)
acctcccttacttccttgaaaaccactctgatgtcacaactgagtgtctgttccgtttcagatacccagggctgctgcccagttctgtaaacgcagcccagctaaagctctgctgtctca

SEQ ID NO: 659703 - DNA, 120 bp, Artificial Sequence
  ENSG00000184207_14 (sequence is synthesized)
agtgtgcatttatacccaggtgatttggacggagcagctaccatggcgtggacgccttcactgaactccgggctgcagtgcagggagctcagagcagtgctgctaccagtttttaacttt

SEQ ID NO: 659704 - DNA, 120 bp, Artificial Sequence
  ENSG00000184207_15 (sequence is synthesized)
gaacaactgtgtcaggcaatggatttgaattttaagtgtattaatagctgtgctctgtgtcgtaggcaaaattccactgaaggagcctctgtgccctgcagccggcagcgcggctgaagc

SEQ ID NO: 659705 - DNA, 120 bp, Artificial Sequence
  ENSG00000184207_16 (sequence is synthesized)
atgtgttggccaaggaatgcctgtcatccaggtgccctgcagccagcagcgcggctcaagcatgtgttggccaaggaatgcctgtcagtcatccagggctctgggaggggacgagagtta

SEQ ID NO: 659706 - DNA, 120 bp, Artificial Sequence
  ENSG00000184207_17 (sequence is synthesized)
tgtccccaagaacaggaagtcctttacaaagcatccagtctcttcctgtcctccccttccctaggctggggtaggggttagagactggtggcccaggaggtcacctgccttgccctggat

SEQ ID NO: 659707 - DNA, 120 bp, Artificial Sequence
  ENSG00000184207_18 (sequence is synthesized)
tccctcttcagtggccagcaggacttggcagggccaccagctcgccaaggttctgggcggggctccagcctctcctgcctgctccttggctctgctgacctttcacaggcctgacagcag

SEQ ID NO: 659708 - DNA, 120 bp, Artificial Sequence
  ENSG00000184207_19 (sequence is synthesized)
actcagcagggccatcccgggatgctgcaccttctggctggctccctaccagcgcctttccctgtacctggcagcttctctcttggccccacagtcacagcactccacttggtcacaaag

SEQ ID NO: 659709 - DNA, 120 bp, Artificial Sequence
  ENSG00000184207_20 (sequence is synthesized)
acttcagagcaataagaggcgtcctgagccttcagcacctcccaggcctgggatatcgggttcagagggtgctgcagagcagcatgagggtggctccacccatgaggctggtgacactga

SEQ ID NO: 659710 - DNA, 120 bp, Artificial Sequence
  ENSG00000184207_21 (sequence is synthesized)
cgctggcttggctaagttggctcaagccgggtctggcctgacagggtgcagtcacaccaggagcgcatggcagatgcagcctcagtgatgcctctcttgccgggtaggggctgggagtcc

SEQ ID NO: 659711 - DNA, 120 bp, Artificial Sequence
  ENSG00000184207_22 (sequence is synthesized)
ccgtgcatcctgtctctggcccatgaggggctgcagcactgtgggcgccagagcacagattaaactctcaaacccacactggctcaggtgtccttgctctcaccttgcattggcccgggt

SEQ ID NO: 659712 - DNA, 120 bp, Artificial Sequence
  ENSG00000184207_23 (sequence is synthesized)
gatgccgtctcaccacgggtgggaggactcaaagtagatgggtaactggggttccaactccagagctggaatgccaactgcccactcccagcctggttcagaggaagatgttttgaagaa

SEQ ID NO: 659713 - DNA, 120 bp, Artificial Sequence
  ENSG00000184207_24 (sequence is synthesized)
tgagggaaagccaggcacaaagggaagccagggaagcaaagggccctggagtgaagctggtgggctgccgtgtcagagcgcccagggcagggagcagagctcagaagtaatgctggcccg

SEQ ID NO: 659714 - DNA, 89 bp, Artificial Sequence
  ENSG00000184207_25 (sequence is synthesized)
gggcagggagcagagctcagaagtaatgctggcacgctttggaaggctgaggcaggtggattacttgagatcaggagttcaagaccagc

SEQ ID NO: 659715 - DNA, 120 bp, Artificial Sequence
  ENSG00000184209_0 (sequence is synthesized)
aggcgtgagccaccgcgtctggcctcagccaaggtttttaagtaacatatttcagcattggctctacagcgttgcagaacatgaacgattggatgcccatcgccaaggagtatgatccac

SEQ ID NO: 659716 - DNA, 120 bp, Artificial Sequence
  ENSG00000184209_1 (sequence is synthesized)
agtatgatccactcaaagcgggcagcattgatggcaccgatgaagacccacacgaccgcgcggtctggagggcaatgctggcacgatatgtccccaacaaaggtgtcataggagatcccc

SEQ ID NO: 659717 - DNA, 120 bp, Artificial Sequence
  ENSG00000184209_2 (sequence is synthesized)
tcctcaccctgtttgtggccagactaaacttgcagaccaaggaggacaaattaaaggaagtcttttcccgctatggtgacatccggcggcttcggctggtcagggacttggtcacaggtt

SEQ ID NO: 659718 - DNA, 120 bp, Artificial Sequence
  ENSG00000184209_3 (sequence is synthesized)
tggactacgagctggaaaggactctcaaagggtggatccctcggcgacttggaggcggtcttgggggaaaaaaggagtctgggcaactgagatttgggggacgggaccggccttttcgaa

SEQ ID NO: 659719 - DNA, 120 bp, Artificial Sequence
  ENSG00000184209_4 (sequence is synthesized)
aacctattaacttgccagttgttaaaaacgacctctatagagagggaaaacgggaaaggcgggagcgatctcgatcccgagaaagacactgggactcgaggacaagggatcgagaccatg

SEQ ID NO: 659720 - DNA, 120 bp, Artificial Sequence
  ENSG00000184209_5 (sequence is synthesized)
acaggggccgggagaagagatggcaagaaagagagccgaccagggtgtggcccgacaatgactgggagagagagagggacttcagagatgacaggatcaaggggagggagaagaaggaaa

SEQ ID NO: 659721 - DNA, 120 bp, Artificial Sequence
  ENSG00000184209_6 (sequence is synthesized)
gaggcaagtagaggcccaacagcagaaccccaaagtgaagttacagtggaaatgagtggagggggattgtctttcaacgcagcgtgagtctaatggttgaataaaacttactgatgatca

SEQ ID NO: 659722 - DNA, 120 bp, Artificial Sequence
  ENSG00000184209_7 (sequence is synthesized)
aatttatcatcttcctcacatagttctaaggacatgttatttaacaggatcaagaagcaattttgtagttactggcatctgtacagaagggcattttcttttcttttctttttttttttt

SEQ ID NO: 659723 - DNA, 63 bp, Artificial Sequence
  ENSG00000184209_8 (sequence is synthesized)
tgctgggattacaggtgtgagccactactcctggcctggtctccaactcttgacctcaaatga

SEQ ID NO: 659724 - DNA, 120 bp, Artificial Sequence
  ENSG00000184209_9 (sequence is synthesized)
aaaggtcaggccgaggccggcgcggagaatctgctgtcgcctgcagctgctcgcctgtctccgtcggaagggagcccaagctttgcagagagagagcgtttcaccgtgttagccaggatg

SEQ ID NO: 659725 - DNA, 75 bp, Artificial Sequence
  ENSG00000184209_10 (sequence is synthesized)
agccaaggtttttaagtaacatatttcagcattggctctacagcgttgcaggttggtcacataagcattagctgg

SEQ ID NO: 659726 - DNA, 120 bp, Artificial Sequence
  ENSG00000184209_11 (sequence is synthesized)
tcacatgaattaactatgtatcagaaggcatgacaactgcagtgtgcttgctggacaaaaaattaccattgcagtaaattctcatgctcccagtctaaacggattatcagctagggatct

SEQ ID NO: 659727 - DNA, 120 bp, Artificial Sequence
  ENSG00000184209_12 (sequence is synthesized)
gagaagaaatcccatgttccttttgagacaaataacccgctcccgctgctgggtcactgtagccttagctttgttgtctgtttactacagaatggtgcatccaaatccctgttttctctt

SEQ ID NO: 659728 - DNA, 120 bp, Artificial Sequence
  ENSG00000184209_13 (sequence is synthesized)
accaatgtaaaggtcaggccgaggccggcgcggagaatctgctgtcgcctgcagctgctcgcctgtctccgtcggaagggagcccaagctttgcagagatgaagtctcactctgtcgccc

SEQ ID NO: 659729 - DNA, 87 bp, Artificial Sequence
  ENSG00000184209_14 (sequence is synthesized)
tagaattctcctgtctcggcctcctgagcagctgggattataggcatgcaccacctcgcctggctaatttttttgtatttttgtaga

SEQ ID NO: 659730 - DNA, 73 bp, Artificial Sequence
  ENSG00000184209_15 (sequence is synthesized)
gttggccaagctggtctcgaactccgcaggcgtgagccactgtgcccagcctcacctaatggtttcttagcaa

SEQ ID NO: 659731 - DNA, 120 bp, Artificial Sequence
  ENSG00000184209_16 (sequence is synthesized)
gagccactgtgcccagcctcacctaatggtttcttagcaaacttcagtagaatgtttagaacgcggccctgataaacttgagtgctggtaggaggtgctacctcgctcaatctgtgagca

SEQ ID NO: 659732 - DNA, 120 bp, Artificial Sequence
  ENSG00000184209_17 (sequence is synthesized)
accagccctgtgccctggatgcttggcgggtggagagaaagacagtgttatgtgggcaagcctccaactcaccagttgcagtagagcatctggctctctgtctgctgctatagccctgtg

SEQ ID NO: 659733 - DNA, 120 bp, Artificial Sequence
  ENSG00000184209_18 (sequence is synthesized)
agtcagccagacgtgtggtccccaagccagcttcccacctagcacccttgttctgctacagctcccccacctgccctcctgcattgcctaggatcccacgccccgctttcagtctgctct

SEQ ID NO: 659734 - DNA, 120 bp, Artificial Sequence
  ENSG00000184209_19 (sequence is synthesized)
gggacatctgtcttcttctttgcaggggactaagtatatgacttaatgaatcctaaaaggaaaaaaagatgtcaggaaaaaaaagtgcacacaagaaatgttgcaacatctcatccttag

SEQ ID NO: 659735 - DNA, 120 bp, Artificial Sequence
  ENSG00000184209_20 (sequence is synthesized)
caactttgtttggttagtactgcataactcacagcagattccaaggcacctgccttgaacattgctacatgctctaggcattatcaggaacgcagccagggtgcctgcaaagttgtctcc

SEQ ID NO: 659736 - DNA, 120 bp, Artificial Sequence
  ENSG00000184209_21 (sequence is synthesized)
agtttctgggtaagaggaccatcatccatattgtctgtggctttgtgtctgagttgggctactgagcctgtgacttcagaccccttgtctgcctgatggatacattctgtataatacgtt

SEQ ID NO: 659737 - DNA, 120 bp, Artificial Sequence
  ENSG00000184209_22 (sequence is synthesized)
ccatcacaatttcatgaatgtaactaatgaagatctagcccttccatgcctcctgctgaactatgtcacctgtgataataaaacctctacacatagcattttatacaaagcaagtcaaac

SEQ ID NO: 659738 - DNA, 120 bp, Artificial Sequence
  ENSG00000184209_23 (sequence is synthesized)
agcaatgatagtggcaagtgatgtatttggcttaaagaagcttgtgttactgaagttaacgcagaagtctggcctccgtttgtgggattattaaatatatatcctacgggatcagagtca

SEQ ID NO: 659739 - DNA, 120 bp, Artificial Sequence
  ENSG00000184209_24 (sequence is synthesized)
tctattagaaacagtgatagccctgggtataaataaacatttctttagagtttggcgtcagtttttcaatgtccatcctcaaatcagacagtctgtttgaggggtcagttttcagggtgc

SEQ ID NO: 659740 - DNA, 120 bp, Artificial Sequence
  ENSG00000184209_25 (sequence is synthesized)
atctgcaccgagaggcttgaggcagcaatgacccctgggctgcagttcggttgcaggcgctggtggcgggcagtccaggttggagggtggagatgggccaaggtcacagatgctgcaggg

SEQ ID NO: 659741 - DNA, 120 bp, Artificial Sequence
  ENSG00000184209_26 (sequence is synthesized)
cttcctgtccttgctctgtgtaaccgtcatcgcggtgggtgtttgcccactgtccaaaggactcctggatgtgcacgtttctctgtgtgttggccaggcgcttcttatctcgggagaaga

SEQ ID NO: 659742 - DNA, 120 bp, Artificial Sequence
  ENSG00000184209_27 (sequence is synthesized)
agctaaacctttggaagggaaagcaaacacagaaatgagagctgaccctttgctgtgcaagtcacgttttttgcaatgccggagacatatagcagcaaacttagaagggagcaaatcaat

SEQ ID NO: 659743 - DNA, 120 bp, Artificial Sequence
  ENSG00000184209_28 (sequence is synthesized)
tcaaggtgtgaaagacaaagttgggggtgcaggtcaaagttattccaagaaagcagcagggtattctgcgtgtcatttggacacggtaccttggaggtcacgcggtatgggcaaggcatg

SEQ ID NO: 659744 - DNA, 120 bp, Artificial Sequence
  ENSG00000184209_29 (sequence is synthesized)
catgctgatgtgatgtgtgaggtgtcttccacgttagccgctatggaggatttatcccgttaccagtggaaatcaaaagctgctgaaacaaatcttgggtttctttaattaccctaatga

SEQ ID NO: 659745 - DNA, 120 bp, Artificial Sequence
  ENSG00000184209_30 (sequence is synthesized)
cgcagagaaaggaatacttgaaaaccgtgtggaatataagaggattctgttgtaaacgaatgagtatttctaatttaaatagttctgtatttgtttaatgtcagtcaggaaactgtggcc

SEQ ID NO: 659746 - DNA, 120 bp, Artificial Sequence
  ENSG00000184209_31 (sequence is synthesized)
ggtgacagagtgagactttgtctcgagtaaaaaaagagaatgtaaaaatcgaaagagattgttgtaggaaatctcaacctaatgctgccggggaggaagtgcacctagaaagattaatga

SEQ ID NO: 659747 - DNA, 120 bp, Artificial Sequence
  ENSG00000184209_32 (sequence is synthesized)
ggaaacgagcgtcggcggcgaatctgctgctaccaatgtaaaggtcaggccgaggccggcgcggagaatctgctgtcgcctgcagctgctcgcctgtctccgtcggaagggagcccaagc

SEQ ID NO: 659748 - DNA, 120 bp, Artificial Sequence
  ENSG00000184209_33 (sequence is synthesized)
cccaggctggagagcggtggcgcgatctcggctcactgcagcgtcgacatttcgggtcaagcagtcctcccgcctcagcctctcaagtatctgggaccacaggcgcgaccccacgcccgg

SEQ ID NO: 659749 - DNA, 86 bp, Artificial Sequence
  ENSG00000184209_34 (sequence is synthesized)
tctcaagtatctgggaccacaggcgcgaccccacgcccggagaattgattattgattgattgattgaaactttctgggctcaagcg

SEQ ID NO: 659750 - DNA, 120 bp, Artificial Sequence
  ENSG00000184210_0 (sequence is synthesized)
cacagtaagagattatagcaaagcatctataatcaactcagcttaagaagttttgaccttctggttaggcttcttgccacaacagaacagcaccataaccatggctttcttctcccgact

SEQ ID NO: 659751 - DNA, 120 bp, Artificial Sequence
  ENSG00000184210_1 (sequence is synthesized)
gaatctccaggagggcctccaaaccttctttgttttgcaatggatcccagtctatatatttttaggagctattcccattctccttataccctactttctgttattcagtaagttctggcc

SEQ ID NO: 659752 - DNA, 120 bp, Artificial Sequence
  ENSG00000184210_2 (sequence is synthesized)
cttggctgtgctctccttagcctggctcacctatgattggaacacccacagtcaaggtggcaggcgttcagcttgggtacgaaactggaccctatggaagtatttccgaaattacttccc

SEQ ID NO: 659753 - DNA, 120 bp, Artificial Sequence
  ENSG00000184210_3 (sequence is synthesized)
agtaaagctggtgaagactcatgatctttctcccaaacacaactacatcattgccaatcacccccatggcattctctcttttggtgtcttcatcaactttgccactgaggccactggcat

SEQ ID NO: 659754 - DNA, 120 bp, Artificial Sequence
  ENSG00000184210_4 (sequence is synthesized)
tgctcggattttcccatccatcactccctttgtagggaccttagaaaggatattttggatcccaattgtgcgagaatatgtgatgtcaatgggtgtgtgccctgtgagtagctcagcctt

SEQ ID NO: 659755 - DNA, 120 bp, Artificial Sequence
  ENSG00000184210_5 (sequence is synthesized)
gaagtacttgctgacccagaaaggctcaggcaatgccgtggttattgtggtgggtggagctgctgaagctctcttgtgccgaccaggagcctccactctcttcctcaagcagcgtaaagg

SEQ ID NO: 659756 - DNA, 120 bp, Artificial Sequence
  ENSG00000184210_6 (sequence is synthesized)
ttttgtgaagatggcactgcaaacaggggcataccttgtcccttcatattcctttggtgagaacgaagttttcaatcaggagaccttccctgagggcacgtggttaaggttgttccaaaa

SEQ ID NO: 659757 - DNA, 120 bp, Artificial Sequence
  ENSG00000184210_7 (sequence is synthesized)
gactaaatttctgtaccttccatggccggggcttcactcgcggatcctggggcttcctgcctttcaatcggcccattaccactgttgttggggaaccccttccaattcccaggattaaga

SEQ ID NO: 659758 - DNA, 120 bp, Artificial Sequence
  ENSG00000184210_8 (sequence is synthesized)
ggccaaaccagaagacagtagacaagtatcacgcactctacatcagtgccctgcgcaagctctttgaccaacacaaagttgaatatggcctccctgagacccaagagctgacaattacat

SEQ ID NO: 659759 - DNA, 120 bp, Artificial Sequence
  ENSG00000184210_9 (sequence is synthesized)
aacaggagccacattccccattgatcaacccccaaagccatgagggatccaagtagagccacagaaaaagaagaattccaggagagggaaagatcgtaaggatgagagaggagaccatcc

SEQ ID NO: 659760 - DNA, 120 bp, Artificial Sequence
  ENSG00000184210_10 (sequence is synthesized)
aagccagaaattatttaataaatcagagttctagcaatagagtcctctcccaagtggctgaggcaggcttaggggaaagaaccagaggggcaggggaggactggggagggctggctagcc

SEQ ID NO: 659761 - DNA, 120 bp, Artificial Sequence
  ENSG00000184210_11 (sequence is synthesized)
agaggagttggctgtatcacccctggttattttagggcaacaacccagttggggagtcttatgaatcattccagccaactctctgatcacaaagaatactgtgcccctttctcctaaacc

SEQ ID NO: 659762 - DNA, 120 bp, Artificial Sequence
  ENSG00000184210_12 (sequence is synthesized)
ttagttcaccatcactacgtaggtttagacttagaagctttatttggaacagggatagtttgtttcctcttggtcctttccttacaacttgggaactgccacaaggtaaaccagggacct

SEQ ID NO: 659763 - DNA, 120 bp, Artificial Sequence
  ENSG00000184210_13 (sequence is synthesized)
gaactgtagctgcctggtccaagcagacaggattccgtcagttgtgatagagttctagattggcaatgcagttacattgtttcttctttgaaaataaagttctagacatataaaacagga

SEQ ID NO: 659764 - DNA, 120 bp, Artificial Sequence
  ENSG00000184216_0 (sequence is synthesized)
gcagcccccggcgcccagcacttcttgtacgaggtgccgccctgggtcatgtgccgcttctacaaagtgatggacgccctggagcccgccgactggtgccagttcgccgccctgatcgtg

SEQ ID NO: 659765 - DNA, 120 bp, Artificial Sequence
  ENSG00000184216_1 (sequence is synthesized)
cgcgaccagaccgagctgcggctgtgcgagcgctccgggcagcgcacggccagcgtcctgtggccctggatcaaccgcaacgcccgtgtggccgacctcgtgcacatcctcacgcacctg

SEQ ID NO: 659766 - DNA, 120 bp, Artificial Sequence
  ENSG00000184216_2 (sequence is synthesized)
cagctgctccgtgcgcgggacatcatcacagcctggcaccctcccgccccgcttccgtccccaggcaccactgccccgaggcccagcagcatccctgcacccgccgaggccgaggcctgg

SEQ ID NO: 659767 - DNA, 120 bp, Artificial Sequence
  ENSG00000184216_3 (sequence is synthesized)
agcccccggaagttgccatcctcagcctccaccttcctctccccagcttttccaggctcccagacccattcagggcctgagctcggcctggtcccaagccctgcttccctgtggcctcca

SEQ ID NO: 659768 - DNA, 120 bp, Artificial Sequence
  ENSG00000184216_4 (sequence is synthesized)
ccgccatctccagccccttcttctaccaagccaggcccagagagctcagtgtccctcctgcagggagcccgcccctttccgttttgctggcccctctgtgagatttcccggggcacccac

SEQ ID NO: 659769 - DNA, 120 bp, Artificial Sequence
  ENSG00000184216_5 (sequence is synthesized)
aacttctcggaggagctcaagatcggggagggtggctttgggtgcgtgtaccgggcggtgatgaggaacacggtgtatgctgtgaagaggctgaaggagaacgctgacctggagtggact

SEQ ID NO: 659770 - DNA, 120 bp, Artificial Sequence
  ENSG00000184216_6 (sequence is synthesized)
gcagtgaagcagagcttcctgaccgaggtggagcagctgtccaggtttcgtcacccaaacattgtggactttgctggctactgtgctcagaacggcttctactgcctggtgtacggcttc

SEQ ID NO: 659771 - DNA, 120 bp, Artificial Sequence
  ENSG00000184216_7 (sequence is synthesized)
ctgcccaacggctccctggaggaccgtctccactgccagacccaggcctgcccacctctctcctggcctcagcgactggacatccttctgggtacagcccgggcaattcagtttctacat

SEQ ID NO: 659772 - DNA, 120 bp, Artificial Sequence
  ENSG00000184216_8 (sequence is synthesized)
caggacagccccagcctcatccatggagacatcaagagttccaacgtccttctggatgagaggctgacacccaagctgggagactttggcctggcccggttcagccgctttgccgggtcc

SEQ ID NO: 659773 - DNA, 120 bp, Artificial Sequence
  ENSG00000184216_9 (sequence is synthesized)
agccccagccagagcagcatggtggcccggacacagacagtgcggggcaccctggcctacctgcccgaggagtacatcaagacgggaaggctggctgtggacacggacaccttcagcttt

SEQ ID NO: 659774 - DNA, 120 bp, Artificial Sequence
  ENSG00000184216_10 (sequence is synthesized)
ggggtggtagtgctagagaccttggctggtcagagggctgtgaagacgcacggtgccaggaccaagtatctgaaagacctggtggaagaggaggctgaggaggctggagtggctttgaga

SEQ ID NO: 659775 - DNA, 120 bp, Artificial Sequence
  ENSG00000184216_11 (sequence is synthesized)
agcacccagagcacactgcaagcaggtctggctgcagatgcctgggctgctcccatcgccatgcagatctacaagaagcacctggaccccaggcccgggccctgcccacctgagctgggc

SEQ ID NO: 659776 - DNA, 120 bp, Artificial Sequence
  ENSG00000184216_12 (sequence is synthesized)
ctgggcctgggccagctggcctgctgctgcctgcaccgccgggccaaaaggaggcctcctatgacccaggtgtacgagaggctagagaagctgcaggcagtggtggcgggggtgcccggg

SEQ ID NO: 659777 - DNA, 120 bp, Artificial Sequence
  ENSG00000184216_13 (sequence is synthesized)
ggcagcgccatcaggagccagtgcccaggcagcagagcagctgcagagaggccccaaccagcccgtggagagtgacgagagcctaggcggcctctctgctgccctgcgctcctggcactt

SEQ ID NO: 659778 - DNA, 120 bp, Artificial Sequence
  ENSG00000184216_14 (sequence is synthesized)
gactccaagctgccctctggacccagcacccctcagggaggccggctgtcctcagggggacacggcaggagaatcgagctgggggagtggcccaggatcccggcccacagccgtggaagg

SEQ ID NO: 659779 - DNA, 120 bp, Artificial Sequence
  ENSG00000184216_15 (sequence is synthesized)
actggcccttggcagctctgcatcatcgtcgtcagagccaccgcagattatcatcaaccctgcccgacagaagatggtccagaagctggccctgtacgaggatggggccctggacagcct

SEQ ID NO: 659780 - DNA, 120 bp, Artificial Sequence
  ENSG00000184216_16 (sequence is synthesized)
gcagctgctgtcgtccagctccctcccaggcttgggcctggaacaggacaggcaggggcccgaagaaagtgatgaatttcagagctgatgtgttcacctgggcagatcccccaaatccgg

SEQ ID NO: 659781 - DNA, 120 bp, Artificial Sequence
  ENSG00000184216_17 (sequence is synthesized)
aagtcaaagttctcatggtcagaagttctcatggtgcacgagtcctcagcactctgccggcagtgggggtgggggcccatgcccgcgggggagagaaggaggtggccctgctgttctagg

SEQ ID NO: 659782 - DNA, 120 bp, Artificial Sequence
  ENSG00000184216_18 (sequence is synthesized)
ctctgtgggcataggcaggcagagtggaaccctgcctccatgccagcatctgggggcaaggaaggctggcatcatccagtgaggaggctggcgcatgttgggaggctgctggctgcacag

SEQ ID NO: 659783 - DNA, 120 bp, Artificial Sequence
  ENSG00000184216_19 (sequence is synthesized)
acccgtgaggggaggagaggggctgctgtgcaggggtgtggagtagggagctggctcccctgagagccatgcagggcgtctgcagcccaggcctctggcagcagctctttgcccatctct

SEQ ID NO: 659784 - DNA, 120 bp, Artificial Sequence
  ENSG00000184216_20 (sequence is synthesized)
gcagctctttgcccatctctttggacagtggccaccctgcacaatggggccgacgaggcctagggccctcctacctgcttacaatttggaaaagtgtggccgggtgcggtggctcacgcc

SEQ ID NO: 659785 - DNA, 120 bp, Artificial Sequence
  ENSG00000184216_21 (sequence is synthesized)
aggccaaggcaggaggatcgctggagcccagtaggtcaagaccagccagggcaacatgatgagaccctgtctctgccaaaaaattttttaaactattagcctggcgtggtagcgcacgcc

SEQ ID NO: 659786 - DNA, 120 bp, Artificial Sequence
  ENSG00000184216_22 (sequence is synthesized)
cgcacgcctgtggtcccagctgctggggaggctgaagtaggaggatcatttatgcttgggaggtcgaggctgcagtgagtcatgattgtatgactgcactccagcctgggtgacagagca

SEQ ID NO: 659787 - DNA, 120 bp, Artificial Sequence
  ENSG00000184216_23 (sequence is synthesized)
tttcaaaaagaaaaaccctgggaaaagtgaagtatggctgtaagtctcatggttcagtcctagcaagaagcgagaattctgagatcctccagaaagtcgagcagcacccacctccaacct

SEQ ID NO: 659788 - DNA, 120 bp, Artificial Sequence
  ENSG00000184216_24 (sequence is synthesized)
cgggccagtgtcttcaggctttactggggacctgcgagctggcctaatgtggtggcctgcaagccaggccatccctgggcgccacagacgagctccgagccaggtcaggcttcggaggcc

SEQ ID NO: 659789 - DNA, 120 bp, Artificial Sequence
  ENSG00000184216_25 (sequence is synthesized)
acaagctcagcctcaggcccaggcactgattgtggcagaggggccactacccaaggtctagctaggcccaagacctagttacccagacagtgagaagcccctggaaggcagaaaagttgg

SEQ ID NO: 659790 - DNA, 120 bp, Artificial Sequence
  ENSG00000184216_26 (sequence is synthesized)
gagcatggcagacagggaagggaaacattttcagggaaaagacatgtatcacatgtcttcagaagcaagtcaggtttcatgtaaccgagtgtcctcttgcgtgtccaaaagtagcccagg

SEQ ID NO: 659791 - DNA, 120 bp, Artificial Sequence
  ENSG00000184216_27 (sequence is synthesized)
gctgtagcacaggcttcacagtgattttgtgttcagccgtgagtcacactacatgcccccgtgaagctgggcattggtgacgtccaggttgtccttgagtaataaaaacgtatgttgcaa

SEQ ID NO: 659792 - DNA, 120 bp, Artificial Sequence
  ENSG00000184216_28 (sequence is synthesized)
ttttttatcaaaacccatacgattgagtgacaaggacctgaggactgcagctgcaggtgtggccacctggtagccatactgacagtatttatcccacagaaagacctggtggaagaggag

SEQ ID NO: 659793 - DNA, 120 bp, Artificial Sequence
  ENSG00000184216_29 (sequence is synthesized)
tcgagacaaggaggaaggaattcagcctttgatgtagcgcagagccccagtcagccaagctgggtcagctgggaggcagctgtggtggggagagcctggagccttgggcagaagggaaga

SEQ ID NO: 659794 - DNA, 120 bp, Artificial Sequence
  ENSG00000184216_30 (sequence is synthesized)
ggctgtgaagacgcacggtgccaggaccaagtctagctaggcccaagacctagttacccagacagtgagaagcccctggaaggcagaaaagttgggagcatggcagacagggaagggaaa

SEQ ID NO: 659795 - DNA, 120 bp, Artificial Sequence
  ENSG00000184220_0 (sequence is synthesized)
agtgtctagcgggagctccgcgtgtagctacgccggccgcctggctttgagacaacgtgattctccgcagctggtcgcctacccgtgatgttctgcccacgtcgagacctgagctgaaat

SEQ ID NO: 659796 - DNA, 120 bp, Artificial Sequence
  ENSG00000184220_1 (sequence is synthesized)
ggcagacgatctcggagacgagtggtgggagaaccagccgactggagcaggcagcagcccagaagcatcagatggtgaaggagaaggagacacagaagtgatgcagcaggagacagttcc

SEQ ID NO: 659797 - DNA, 120 bp, Artificial Sequence
  ENSG00000184220_2 (sequence is synthesized)
agttcctgtaccttcagagaaaaccaaacagcctaaagaatgttttttgatacaaccaaaggaaagaaaagagaataccaccaagaccaggaaaagaagaaagaagaaaattactgatgt

SEQ ID NO: 659798 - DNA, 120 bp, Artificial Sequence
  ENSG00000184220_3 (sequence is synthesized)
tcttgcaaaatcagaaccaaaaccagggttacctgaagacctacagaagctgatgaaggactattatagcagcagacgcttggtgattgaattagaagaactgaacctgccagactcctg

SEQ ID NO: 659799 - DNA, 120 bp, Artificial Sequence
  ENSG00000184220_4 (sequence is synthesized)
tttcctcaaggccaatgatttgactcacagtctttcctcatacctaaaagaaatttgtcctaagtgggtaaaacttaggaagaaccacagtgagaagaaatcggtcctgatgctgatcat

SEQ ID NO: 659800 - DNA, 120 bp, Artificial Sequence
  ENSG00000184220_5 (sequence is synthesized)
ctgcagctcggccgtccgagccctggagctcattaggtcgatgacagcattcagaggagacggcaaagttataaaattatttgcaaagcacataaaggtccaggcgcaggtaaagttgct

SEQ ID NO: 659801 - DNA, 120 bp, Artificial Sequence
  ENSG00000184220_6 (sequence is synthesized)
ggagaagcgtgtggtgcacctgggtgtaggaactccggggagaattaaagaacttgttaaacaaggtggccttaatttgagccccttaaaatttctggtttttgactggaactggagaga

SEQ ID NO: 659802 - DNA, 120 bp, Artificial Sequence
  ENSG00000184220_7 (sequence is synthesized)
tcagaagttgaggagaatgatggacattcccgagataagaaaggaggtattcgaacttctggaaatgggagtgctcagtctgtgcaagtcagaatccttgaaactgggccttttctaagt

SEQ ID NO: 659803 - DNA, 120 bp, Artificial Sequence
  ENSG00000184220_8 (sequence is synthesized)
ctgtgtcctaatgaagattccagttttcacagtagaagttgcatcttatttaatgactctgatacattgcaagcactcagtaaatatcagcaaatagtttatgttaattgtgtcaacaga

SEQ ID NO: 659804 - DNA, 120 bp, Artificial Sequence
  ENSG00000184220_9 (sequence is synthesized)
tggatcactggaatgtggggattctgaaacagaaatgaaactgtccttttgacaactctcttatataataaagtatcaccggcttgtgtatgatccttgttgagcggaccgtgtttttct

SEQ ID NO: 659805 - DNA, 120 bp, Artificial Sequence
  ENSG00000184220_10 (sequence is synthesized)
gtcaccaactggcttctgatgtaactgtgcaggagaaaggaaagagcagctgggtgaccttaggcaagcgtaaggtcttgcctctctgagccccatcttatcaactcaaagtgggaatgt

SEQ ID NO: 659806 - DNA, 120 bp, Artificial Sequence
  ENSG00000184220_11 (sequence is synthesized)
ctcacagcattgttgaggattccaggagatagtacatggggagcagatttgtaaactctgaggcatggtcccagcaaaaagggtggcaggtatattaatccattctcacattgctataaa

SEQ ID NO: 659807 - DNA, 120 bp, Artificial Sequence
  ENSG00000184220_12 (sequence is synthesized)
aagaggtttaattgactcacagtttcacaggctgtacaggaggcatggctgagaggcctcaggaaacttggcagaaggtgaaggggaagcaagcacatcttcacatggcgacaagagagc

SEQ ID NO: 659808 - DNA, 120 bp, Artificial Sequence
  ENSG00000184220_13 (sequence is synthesized)
gcaagcacatcttcacatggcgacaagagagcaagagagtgaagggagaaatgccacacacttttaaacgactagatcttgtgagaactcactccctatcatgagaacagcagaacagca

SEQ ID NO: 659809 - DNA, 120 bp, Artificial Sequence
  ENSG00000184220_14 (sequence is synthesized)
aggggaaaatctgtccctatgatccagtcaccttccaccaggtccctcccccaacattgggaattataattcaacataagattcgggtggagacacagagccaaaccatgtcaattccac

SEQ ID NO: 659810 - DNA, 65 bp, Artificial Sequence
  ENSG00000184220_15 (sequence is synthesized)
attcgggtggagacacagagccaaaccatgtcaattccaccccggcctcttccaaatttcatgtt

SEQ ID NO: 659811 - DNA, 120 bp, Artificial Sequence
  ENSG00000184220_16 (sequence is synthesized)
gagcctgtaaaataaaaaacaagttagtcatttccaagatacaatggaggtacaggcattgggtaaatgctcccattccaagtgggagaaactggcccaaaggagctaaaggcctcatgc

SEQ ID NO: 659812 - DNA, 120 bp, Artificial Sequence
  ENSG00000184220_17 (sequence is synthesized)
atccaggccactctgatgcaaggagtgggctcccaaggccttaggcagctctgcccctgtggctctgcagggtacagtccccatggttgctttcacaggctggtgttgagtgcctacagc

SEQ ID NO: 659813 - DNA, 71 bp, Artificial Sequence
  ENSG00000184220_18 (sequence is synthesized)
ccatggttgctttcacaggctggtgttgagtgcctacagcatatccaggtacacatctcttctcacagctc

SEQ ID NO: 659814 - DNA, 78 bp, Artificial Sequence
  ENSG00000184220_19 (sequence is synthesized)
agtggggactctgtgtagggctctccatgagggcttcacccctgtagcagacttctgcctggacatccaggcgtttcc

SEQ ID NO: 659815 - DNA, 85 bp, Artificial Sequence
  ENSG00000184220_20 (sequence is synthesized)
ccaggcgtttccatacatcctctgaaattgaggcagaggctcccaaacctcagctcttgccttctgcacacccataagcccaaca

SEQ ID NO: 659816 - DNA, 120 bp, Artificial Sequence
  ENSG00000184220_21 (sequence is synthesized)
ttagtcacagctggagctggggcagctgggaattaggctgccatgtcctaaggctgcacagagcagctgggcccagggcctagcccacgaaaccatttttttcctcctaggcctctgggc

SEQ ID NO: 659817 - DNA, 120 bp, Artificial Sequence
  ENSG00000184220_22 (sequence is synthesized)
ctgtttggtggggctggggagggctgccacgaaggtctctgaagtgccctggaggcattttatccattgttttggctattaacatttggctcctcttgtgcaaacttctgcagtgagctt

SEQ ID NO: 659818 - DNA, 120 bp, Artificial Sequence
  ENSG00000184220_23 (sequence is synthesized)
gaatttctccccagaaaatggcttttcttttctaccacatggtcaggctgcaaattttcaagcttttatactctgctttgcttttaaatataagttatctctgcttatgcaaatgagcat

SEQ ID NO: 659819 - DNA, 120 bp, Artificial Sequence
  ENSG00000184220_24 (sequence is synthesized)
ttgaacactttgctgcttagaaatttctgccggataccctaagtcatctctcccaagttcaaagttacacagatccctaaagcaggggcacaatgccaccagtctctgctaaagcatagc

SEQ ID NO: 659820 - DNA, 87 bp, Artificial Sequence
  ENSG00000184220_25 (sequence is synthesized)
ccaagttcaaagttacacagatccctaaagcaggggcacaatgccaccagtctcgttcctgataagttcctcatctccatttgagac

SEQ ID NO: 659821 - DNA, 120 bp, Artificial Sequence
  ENSG00000184220_26 (sequence is synthesized)
ttttggtcaaaactgttcaacaagtctctaggaggttccaaacatccctcatattcctgtcttcttctgatccttccaaactgttgcaacttctccccgttacccagtttcaaagttgct

SEQ ID NO: 659822 - DNA, 120 bp, Artificial Sequence
  ENSG00000184220_27 (sequence is synthesized)
tccacattttttaggtatctttatagaaatgtcccacttctctggtaccaattttttgtattcttccatttttacactgctatgaagaactacctgagactgggtagtttataatgaaaa

SEQ ID NO: 659823 - DNA, 80 bp, Artificial Sequence
  ENSG00000184220_28 (sequence is synthesized)
tatgaagaactacctgagactgggtagtttataatgaaaagaggtttaattgacttccagttccacagactgtacaggag

SEQ ID NO: 659824 - DNA, 120 bp, Artificial Sequence
  ENSG00000184220_29 (sequence is synthesized)
aagatgaaagggatgcaaccacatcttgtggcaacaagagagcaagagagtgaagggggaagtgctatacacttttaaacaatcagatctcttgagaactcactatcatgagaacagcaa

SEQ ID NO: 659825 - DNA, 120 bp, Artificial Sequence
  ENSG00000184220_30 (sequence is synthesized)
atccctcccccaacactgggaattacaattcgacatgaaacttgggtggggacacagccaaaccacatcagcagggtagtggtagaaagagcatcaagtgaatttggccctttgtaaacg

SEQ ID NO: 659826 - DNA, 120 bp, Artificial Sequence
  ENSG00000184220_31 (sequence is synthesized)
tataaaaagacaacaatataattacagctgtcttattaacttttttttaaaaactttctattttgaaacttcaggcttaatagaaaagtttaaaaaatagagaattcccatatccccttc

SEQ ID NO: 659827 - DNA, 120 bp, Artificial Sequence
  ENSG00000184220_32 (sequence is synthesized)
cctgagctttccctgtgttaaattcttgtataaccataatagagttatcaaaactaagaagtcatcactggtactgtataattaactaaactacagagtttatttggatttctccaattt

SEQ ID NO: 659828 - DNA, 120 bp, Artificial Sequence
  ENSG00000184220_33 (sequence is synthesized)
ttccactaatgtccttgttctattccaggattcactgcaggatcccacattgcacttacttagttgttgtatctttttggtttcttcagaccagtgacagttcctcagtatttccctgtc

SEQ ID NO: 659829 - DNA, 120 bp, Artificial Sequence
  ENSG00000184220_34 (sequence is synthesized)
tttcatgaccttcacacttttgaacagtatccatcgtgtattttgtagaatgtccttcaatttggatttgtctgtaatgttctcatgatttgattaaagttatgcattttttgaccagaa

SEQ ID NO: 659830 - DNA, 120 bp, Artificial Sequence
  ENSG00000184220_35 (sequence is synthesized)
caaaaagtaacccggagaataaaaaatcattttaataagcttatgtcatgaggtctttactacagcaactctcttcctgtctctttcaggtggccttaatttgagccccttaaaatttct

SEQ ID NO: 659831 - DNA, 120 bp, Artificial Sequence
  ENSG00000184220_36 (sequence is synthesized)
gtggtgggagaaccagccgactggagcaggcagcagcccagggcccctcccagtgtcttcaagagtttgtgcaagcaaatacctgaaaacctaaggaaaatgatgggaaactgaacttca

SEQ ID NO: 659832 - DNA, 120 bp, Artificial Sequence
  ENSG00000184220_37 (sequence is synthesized)
tttagtgtcacaggagacacgagggcaaagtgctgaggaaactctagagcaacatcggaatgcatggtgaagcatcagatggtgaaggagaaggagacacagaagtgatgcagcaggaga

SEQ ID NO: 659833 - DNA, 120 bp, Artificial Sequence
  ENSG00000184220_38 (sequence is synthesized)
gcagcagcccagaagactgtcccatctctacccataggctccacttcacaggtccaagagcccatcagagcctggctctcaagagacagtgtgtctgaaagtcaaacatggatggcagcc

SEQ ID NO: 659834 - DNA, 120 bp, Artificial Sequence
  ENSG00000184220_39 (sequence is synthesized)
attggcacacaaaggagtcagaaaccacagattgttttctcgttggatgaacagcttaaagcaacgtaaagttaattgaagaattccttgaaagtgaagtcagactaaaaagaaatgctc

SEQ ID NO: 659835 - DNA, 120 bp, Artificial Sequence
  ENSG00000184220_40 (sequence is synthesized)
cgagtctataatttactaaatgtgaaagaacttgttgtcttccttccccacccactttcagaaaggatttgatgttgcctagggttaaaatagataaataaaatcaaaaccattaggatg

SEQ ID NO: 659836 - DNA, 78 bp, Artificial Sequence
  ENSG00000184220_41 (sequence is synthesized)
agggttaaaatagataaataaaatcaaaaccattaggatgaatacgaaggaacggggaaagatgttatactcgaatcc

SEQ ID NO: 659837 - DNA, 75 bp, Artificial Sequence
  ENSG00000184220_42 (sequence is synthesized)
agttaacaactttcttgatctatctacctgcattttataattggatacatgaatcaatccaagctgtctgaatat

SEQ ID NO: 659838 - DNA, 120 bp, Artificial Sequence
  ENSG00000184220_43 (sequence is synthesized)
tataattggatacatgaatcaatccaagctgtctgaatatttttttttcttcctgcacccacaaaagccagtgagaagtaggaacctaagacaatctctggaacaggtaaccatctctta

SEQ ID NO: 659839 - DNA, 120 bp, Artificial Sequence
  ENSG00000184220_44 (sequence is synthesized)
tattcaaataaatactatttatccaggccataaacagtatattaaagttctctccccgagaatcatttgtatagttccagataatagcattccattttaatatagatgagtacacagatg

SEQ ID NO: 659840 - DNA, 120 bp, Artificial Sequence
  ENSG00000184220_45 (sequence is synthesized)
tgaccgtggttttagaaacagtttaggtagcatcaagaaacatctgcacattttcccagcagcctgagtaactagtagtgatttgtacagacttctctgcatctgctttttccccccttc

SEQ ID NO: 659841 - DNA, 120 bp, Artificial Sequence
  ENSG00000184220_46 (sequence is synthesized)
cttttttcagcacatctagatgattaatagactgaacaggcccttatatatgcattctgacagcctttaggacggtcttggttgacaatacacacataagccagtgttgttatcatgaaa

SEQ ID NO: 659842 - DNA, 120 bp, Artificial Sequence
  ENSG00000184220_47 (sequence is synthesized)
cacttcatttgaatgactattacaggctgaacaggatgtcctatgccaagaggttgtgacattttgagagggtggtgctgggagccatgtgggactcttttcccatcacagccaagttga

SEQ ID NO: 659843 - DNA, 120 bp, Artificial Sequence
  ENSG00000184220_48 (sequence is synthesized)
cattttctcaggttgtaggatcattagggctgcaaagggagaaactttgtcagtggctgggtagatgtcccttgagcctggattatgcatttgaaaaaatggtttctttgccttagggaa

SEQ ID NO: 659844 - DNA, 120 bp, Artificial Sequence
  ENSG00000184220_49 (sequence is synthesized)
gagagtctcattttaaaaagaaaaaggtttttataacgagttcatgtattccactatgaattttgctgaaaaatctgtcctgaagtatgtctttgctgccaaatcccacgctttacagtt

SEQ ID NO: 659845 - DNA, 120 bp, Artificial Sequence
  ENSG00000184220_50 (sequence is synthesized)
aaccaaagttgactctgtatgacctgttacattttccttagacagttggatgtgatcacagaagggtgactgccaaagttttatttcagctcagatatagctaaatgcaagaaatcactt

SEQ ID NO: 659846 - DNA, 120 bp, Artificial Sequence
  ENSG00000184220_51 (sequence is synthesized)
cctgacacctttcttctgcctgccccaccctaaatcaccatttttcaaacaagctatggaatctacaaaatggcctacctgtgttccaagttaattttgagaatggctttttatggctgg

SEQ ID NO: 659847 - DNA, 120 bp, Artificial Sequence
  ENSG00000184220_52 (sequence is synthesized)
tttgtaatctctttagaaaagcaaaattatgatggaaactctatgacatcctaagctgtaagcacttgaagatgaatgtaacttcaggtctgtgaagctaaatatttaccttccacatga

SEQ ID NO: 659848 - DNA, 120 bp, Artificial Sequence
  ENSG00000184220_53 (sequence is synthesized)
agatactgtggtgctgagacggttatcagactagtagcaaagacattcattttgtagtcattatagcaaaggcatttgatgcagctggtttataaaaaccctaaagaatgttttttgata

SEQ ID NO: 659849 - DNA, 120 bp, Artificial Sequence
  ENSG00000184220_54 (sequence is synthesized)
cggagacgagtggtgggagaaccagccgactggagcaggcagcagcccaggtttttaaaactcatttggacacccacctcaatatatgctgtgcaattagaataatccagaagactgaaa

SEQ ID NO: 659850 - DNA, 120 bp, Artificial Sequence
  ENSG00000184220_55 (sequence is synthesized)
gagtaaagcatcagatggtgaaggagaaggagacacagaagtgatgcagcaggagacagttccagttcctgtaccttcagagaaaaccaaacagcctaaagaatgttttttgatacaacc

SEQ ID NO: 659851 - DNA, 120 bp, Artificial Sequence
  ENSG00000184220_56 (sequence is synthesized)
ctcctaatctccttagcacatattttattgagttccttccttatgtaacatttaacaacttttctggttttttaaattctatgcttctgcatacctacctccccagtatggcagtcgcta

SEQ ID NO: 659852 - DNA, 120 bp, Artificial Sequence
  ENSG00000184220_57 (sequence is synthesized)
ctgccatgctctgtccctgtatagaacctgaggcttgaccctttgattccttgaagattaccagttttctagggatatgctcatctctgccctggaagtcgaccctacacaagggtagct

SEQ ID NO: 659853 - DNA, 120 bp, Artificial Sequence
  ENSG00000184220_58 (sequence is synthesized)
ccatttgtatttcactttcttaactttgagataaaatgttctaaattggtgtaagatagcactttcttaatgacttccttttctttcttctctttcatcttggaacaggtccaggcgcag

SEQ ID NO: 659854 - DNA, 120 bp, Artificial Sequence
  ENSG00000184221_0 (sequence is synthesized)
accatcgtttccccgcgcgcaggtccgcggggaggggcggcctgccgaccggcccaccccagggcgttcctgaagggcgtcctcggccgcccccaccgcctcccagatgtactatgcggt

SEQ ID NO: 659855 - DNA, 120 bp, Artificial Sequence
  ENSG00000184221_1 (sequence is synthesized)
ttcccaggcgcgcgtgaacgcggtccccgggaccatgctgcggccacagcggcccggagacttgcagctcggggcctccctctacgagctggtgggctacaggcagccgccctcctcctc

SEQ ID NO: 659856 - DNA, 120 bp, Artificial Sequence
  ENSG00000184221_2 (sequence is synthesized)
ctcctcctccacctcctccacctcctccacttcctcctcctccacgacggcccccctcctccccaaggctgcgcgcgagaagccggaggcgccggccgagcctccaggccccgggcccgg

SEQ ID NO: 659857 - DNA, 120 bp, Artificial Sequence
  ENSG00000184221_3 (sequence is synthesized)
gtcaggcgcgcacccgggcggcagcgcccggccggacgccaaggaggagcagcagcagcagctgcggcgcaagatcaacagccgcgagcggaagcgcatgcaggacctgaacctggccat

SEQ ID NO: 659858 - DNA, 120 bp, Artificial Sequence
  ENSG00000184221_4 (sequence is synthesized)
ggacgccctgcgcgaggtcatcctgccctactcagcggcgcactgccagggcgcgcccggccgcaagctctccaagatagccacgctgctgctcgcccgcaactacatcctactgctggg

SEQ ID NO: 659859 - DNA, 80 bp, Artificial Sequence
  ENSG00000184221_5 (sequence is synthesized)
acatcctactgctgggcagctcgctgcaggagctgcgccgcgcgctgggcgagggcgccgggcccgccgcgccgcgcctg

SEQ ID NO: 659860 - DNA, 120 bp, Artificial Sequence
  ENSG00000184221_6 (sequence is synthesized)
gctgcgccccgccaagtacctgtcgctggcgctggacgagccgccgtgcggccagttcgctctccccggcggcggcgcaggcggccccggcctctgcacctgcgccgtgtgcaagttccc

SEQ ID NO: 659861 - DNA, 120 bp, Artificial Sequence
  ENSG00000184221_7 (sequence is synthesized)
cacctgcgccgtgtgcaagttcccgcacctggtcccggccagcctgggcctggccgccgtgcaggcgcaattctccaagtgagggcgggcctgggcctggggcgcgacctcggcccggcc

SEQ ID NO: 659862 - DNA, 120 bp, Artificial Sequence
  ENSG00000184221_8 (sequence is synthesized)
tcccttcgctcagcttctccgcgcccctgctccctgcgtctgggagagcgaggccgagcaaggaaagcatttcgaaccttccagtccagaggaagggactgtcgggcacccccttccccg

SEQ ID NO: 659863 - DNA, 120 bp, Artificial Sequence
  ENSG00000184221_9 (sequence is synthesized)
ccagcacatctctctccttgtccctggagttgcgcgcttcgcggggccgatgtagaacttagggcgccttgccgtggttggcgcgccccgggtgcagcgagaggccatccccgagcgcta

SEQ ID NO: 659864 - DNA, 120 bp, Artificial Sequence
  ENSG00000184221_10 (sequence is synthesized)
cctccccggagcggagcacgccggctcccagtactaggggctgcgctcgagcagtggcgggggcggaggggtggttcttttccttctcctccgccagaggccacgggcgcccttgttccc

SEQ ID NO: 659865 - DNA, 120 bp, Artificial Sequence
  ENSG00000184221_11 (sequence is synthesized)
gccggccaggtcctatcaaaggaggctgccggaactcaagaggcagaaaaagaccagttaggcggtgcagacggtctgggacgtggcagacggacggaccctcggcggacaggtggtcgg

SEQ ID NO: 659866 - DNA, 120 bp, Artificial Sequence
  ENSG00000184221_12 (sequence is synthesized)
cgtcggggtgcggtgggtaggggcgaggacaacgcagggtgcgctgggttgggacgtgggtccacttttgtagaccagctgtttggagagctgtatttaagactcgcgtatccagtgttt

SEQ ID NO: 659867 - DNA, 120 bp, Artificial Sequence
  ENSG00000184221_13 (sequence is synthesized)
tgtcgcagagagttttcgctcttaaatcctgggggtttcttagaaagcaacttagaactcgagattcacctttcgtttccctttccccaaaagtagcgtaaccaacatttaagcttgctt

SEQ ID NO: 659868 - DNA, 120 bp, Artificial Sequence
  ENSG00000184221_14 (sequence is synthesized)
aaaaacgaaaaccaaccgccttgcatccagtgttcccgatttactaaaataggtaaccaggcgtctcacagtcgccgtcctgtcaagagcgctaatgaacgttctcattaacacgcagga

SEQ ID NO: 659869 - DNA, 120 bp, Artificial Sequence
  ENSG00000184221_15 (sequence is synthesized)
gtaccgggagccctgaaccgcccgctgctcggcggatcccagctgcggtggcgacggcgggaaggcgctttccgctgttcctcagcgggccgggcccttgaccagcgcggcccgcaggtc

SEQ ID NO: 659870 - DNA, 120 bp, Artificial Sequence
  ENSG00000184221_16 (sequence is synthesized)
ttccttctcgccgtcttgcagttgaagagctacatacgtagtcagtttcgatttgttacagacgttaacaaattcctttacccaaggttatgctatgacctttccgcagtttactttgat

SEQ ID NO: 659871 - DNA, 120 bp, Artificial Sequence
  ENSG00000184221_17 (sequence is synthesized)
tttctatgtttaaggttttggttgttggtagtagccgaatttaactggcactttattttacttctaaccttgtttcctgacggtgtacagaatcaacaaaataaaacatttaaagtctga

SEQ ID NO: 659872 - DNA, 120 bp, Artificial Sequence
  ENSG00000184226_0 (sequence is synthesized)
agttcagagagaggagagggagaaggagagaggggcagaggggaagggagagagggagagcacgcgagacggaaaggagcgcctcagagtctctgaagcacgcaagagataaccgattag

SEQ ID NO: 659873 - DNA, 120 bp, Artificial Sequence
  ENSG00000184226_1 (sequence is synthesized)
gaatttttcgggcaactgtcacccggatagctgtcagagaatcatcatcaccgcaactctgacgtttcctacaagaagttagagacttaagcagtattggcatcggatggaaatggtatg

SEQ ID NO: 659874 - DNA, 120 bp, Artificial Sequence
  ENSG00000184226_2 (sequence is synthesized)
catgctgctgtggaaaatatccctgagctgaagaagtgcaactatgtgttgtgtgtgctaaatgcccagaagaacccagacccagtgggtaagagagacgaaatgtggagagaatgacta

SEQ ID NO: 659875 - DNA, 120 bp, Artificial Sequence
  ENSG00000184226_3 (sequence is synthesized)
acgacaaatccgtgaatttgttctctggagttgctaatttgccagcccgaagcaacacattttacaaggaggaaacattttgctgcttctgatttctccccaaactggtgctaccagatg

SEQ ID NO: 659876 - DNA, 120 bp, Artificial Sequence
  ENSG00000184226_4 (sequence is synthesized)
catggctttctatgtgttggaacaaatcattcctaactgcagcatactgggaaaggggaaaggttgaggcaactaaccggctgtctccaaataagtgatgagatataatgcatcctccag

SEQ ID NO: 659877 - DNA, 120 bp, Artificial Sequence
  ENSG00000184226_5 (sequence is synthesized)
tccatgcacgcttcctcttgcaatttgtgcatcattcctcagtggaaacctttaaaccctaaaatccaggaaaagaaaataaatacattatcatggacctgagggatttttacctgttgg

SEQ ID NO: 659878 - DNA, 120 bp, Artificial Sequence
  ENSG00000184226_6 (sequence is synthesized)
ctgctctgattgcctgtttaaggctggattccgcaatagctcaagaacttatttacactattagagaggaattgcctgaaaatgtgcccataggaaacataccaaaggatctgaacattt

SEQ ID NO: 659879 - DNA, 120 bp, Artificial Sequence
  ENSG00000184226_7 (sequence is synthesized)
ctcacatcaatgctgccacagggaccagcgccagccttgtctacagactggtttctaaagctggggatgcccctttggtgaaagtttccagcagcactggggaaattttcacaacctcca

SEQ ID NO: 659880 - DNA, 120 bp, Artificial Sequence
  ENSG00000184226_8 (sequence is synthesized)
acagaatagacagagaaaaactctgtgctggcgcctcatatgctgaggagaatgagtgtttctttgaacttgaggtggtgatcctccccaatgatttcttcaggctgatcaaaataaaaa

SEQ ID NO: 659881 - DNA, 120 bp, Artificial Sequence
  ENSG00000184226_9 (sequence is synthesized)
taattgtcaaggataccaatgataatgcccccatgtttccatctcctgtcatcaatatttccattccagaaaacactttgatcaacagccgctttccaattccatcagcaacagatcctg

SEQ ID NO: 659882 - DNA, 120 bp, Artificial Sequence
  ENSG00000184226_10 (sequence is synthesized)
acacaggcttcaatggtgtacagcattatgaattgttaaatgggcagagtgtttttggactggatatcgtggaaactccagagggagagaagtggccacaactgattgttcagcaaaact

SEQ ID NO: 659883 - DNA, 120 bp, Artificial Sequence
  ENSG00000184226_11 (sequence is synthesized)
tggatagagaacagaaagatacctatgtgatgaaaatcaaagtagaggatggaggcactccacagaaatccagtacggccatactgcaggtcacagtaagtgatgtaaatgacaacaggc

SEQ ID NO: 659884 - DNA, 120 bp, Artificial Sequence
  ENSG00000184226_12 (sequence is synthesized)
cagtgtttaaagagggtcaagtggaggtgcatattccagagaatgctcccgtaggtacctctgtaattcagctccatgccactgatgcagatataggcagtaatgctgaaatccggtaca

SEQ ID NO: 659885 - DNA, 120 bp, Artificial Sequence
  ENSG00000184226_13 (sequence is synthesized)
tttttggtgcccaggtcgcccctgcaaccaaaagactctttgctttaaataatactactgggctgattacagttcagaggtccttagatagagaggagacagccattcacaaagtgacag

SEQ ID NO: 659886 - DNA, 120 bp, Artificial Sequence
  ENSG00000184226_14 (sequence is synthesized)
tgctggctagtgacggcagctccactcctgctcgagcaacggttaccatcaatgtcaccgatgtaaatgataaccctcctaatatagacctcaggtacattataagtcccatcaatggca

SEQ ID NO: 659887 - DNA, 120 bp, Artificial Sequence
  ENSG00000184226_15 (sequence is synthesized)
ccgtgtatttatctgagaaagatcctgtcaatacaaagattgccctaattacagtttcagataaggacacagatgtgaatggcaaagtgatctgttttattgaaagagaggtcccatttc

SEQ ID NO: 659888 - DNA, 120 bp, Artificial Sequence
  ENSG00000184226_16 (sequence is synthesized)
atttgaaggcggtatatgacaaccaatatttgttagagacctcttctttgttggactatgagggcaccaaagaattcagctttaaaattgttgcctctgattctgggaagcccagtttaa

SEQ ID NO: 659889 - DNA, 120 bp, Artificial Sequence
  ENSG00000184226_17 (sequence is synthesized)
atcagactgccctggtaagggttaagcttgaggatgaaaatgacaacccaccaattttcaaccagcctgtaattgagctgtcagtttctgaaaacaaccgacgtgggttatacttaacaa

SEQ ID NO: 659890 - DNA, 120 bp, Artificial Sequence
  ENSG00000184226_18 (sequence is synthesized)
ctattagtgccacagatgaagacagtgggaaaaatgcagacattgtttatcagcttggaccgaatgcctccttctttgatctggaccgaaaaacaggagttttgacagcctccagagtat

SEQ ID NO: 659891 - DNA, 120 bp, Artificial Sequence
  ENSG00000184226_19 (sequence is synthesized)
ttgacagagaagaacaagaacgattcatttttacagtaactgccagggacaatgggacccctcccctccaaagccaagcggctgtgattgttactgttctggatgagaatgacaatagcc

SEQ ID NO: 659892 - DNA, 120 bp, Artificial Sequence
  ENSG00000184226_20 (sequence is synthesized)
ccaagtttactcataatcattttcaattttttgtgtctgagaatctgccaaagtatagtactgtgggggtaatcacagtgacagatgcagatgctggagagaataaagctgtgactcttt

SEQ ID NO: 659893 - DNA, 120 bp, Artificial Sequence
  ENSG00000184226_21 (sequence is synthesized)
ccattctaaatgacaatgataattttgtgttggatccctattctggagtcataaagtcaaatgtctcatttgatagagagcagcagagttcctacacttttgatgtcaaagccactgatg

SEQ ID NO: 659894 - DNA, 120 bp, Artificial Sequence
  ENSG00000184226_22 (sequence is synthesized)
gaggacaaccacctcgttcctctactgcaaaagtaactatcaacgtcatggatgtcaatgacaacagcccagttgtcatttctccaccgtctaatacttcctttaagttggtgcccctct

SEQ ID NO: 659895 - DNA, 120 bp, Artificial Sequence
  ENSG00000184226_23 (sequence is synthesized)
cagccattcctggctccgtggtagcagaagtttttgcagtggatgttgacactggaatgaacgctgaactaaagtatactatagtgagtggaaacaataaaggcttattccggattgatc

SEQ ID NO: 659896 - DNA, 120 bp, Artificial Sequence
  ENSG00000184226_24 (sequence is synthesized)
cagtaacaggtaacattactctggaagaaaaaccagcacctactgatgtgggattgcatcgtttggtggtcaacataagtgacctggggtaccctaagtctttgcacacgcttgtgcttg

SEQ ID NO: 659897 - DNA, 120 bp, Artificial Sequence
  ENSG00000184226_25 (sequence is synthesized)
ccctatcaaaatgaggactatctaaccatcatgattgccatcatcgccggtgccatggtggtcattgttgtgatcttcgtcaccgttctggtgcgctgtcgccatgcatcaaggttcaaa

SEQ ID NO: 659898 - DNA, 120 bp, Artificial Sequence
  ENSG00000184226_26 (sequence is synthesized)
gcagctcagaggagcaagcaaggtgccgaatggatgtccccaaaccaggagaacaagcaaaacaagaaaaagaaaagaaagaaaaggaagtctcccaaaagctctcttttgaactttgtt

SEQ ID NO: 659899 - DNA, 120 bp, Artificial Sequence
  ENSG00000184226_27 (sequence is synthesized)
actatcgaagagtccaaacccgatgatgcagttcatgaacctatcaatgggacaataagcctgccggctgaactggaggagcaaagtataggaagatttgactggggcccggcacctcca

SEQ ID NO: 659900 - DNA, 120 bp, Artificial Sequence
  ENSG00000184226_28 (sequence is synthesized)
acaacattcaagcctaacagtcctgacctggccaagcactacaaatctgcttctccacagcctgcttttcatctcaaaccagacactccagtttccgtgaaaaagcaccacgtgattcag

SEQ ID NO: 659901 - DNA, 120 bp, Artificial Sequence
  ENSG00000184226_29 (sequence is synthesized)
gaactccctttggacaacacctttgttgggggttgtgacaccctttctaaacgctcttccactagttcagatcacttcagtgcctcagagtgcagttcccaaggaggcttcaagacaaag

SEQ ID NO: 659902 - DNA, 120 bp, Artificial Sequence
  ENSG00000184226_30 (sequence is synthesized)
ggccccttacacaccagacagtgtaactcacacagcaaaagtgacaatattcctgtcactcctcagaaatgtcccagctccacgggtttccacattcaggagaatgaagaaagccattac

SEQ ID NO: 659903 - DNA, 120 bp, Artificial Sequence
  ENSG00000184226_31 (sequence is synthesized)
gagtcgcagcgccgtgttacgtttcatctccctgatggctcccaggaaagctgcagtgacagtggtctaggagaccatgagccggtgggtagtggaaccctgatctcacaccctcttcct

SEQ ID NO: 659904 - DNA, 120 bp, Artificial Sequence
  ENSG00000184226_32 (sequence is synthesized)
ctggttcagccacaggacgaattctatgaccaggcctctccggacaagaggactgaagcagatggcaactctgatcccaactctgatgggcctttgggtccccgaggattagctgaagct

SEQ ID NO: 659905 - DNA, 120 bp, Artificial Sequence
  ENSG00000184226_33 (sequence is synthesized)
acagagatgtgcactcaagagtgcttggttttgggtcactctgataattgctggatgcctcctggcttgggtccatatcaacaccccaaatctcctctctcaacctttgcaccccagaaa

SEQ ID NO: 659906 - DNA, 120 bp, Artificial Sequence
  ENSG00000184226_34 (sequence is synthesized)
gaatgggtgaagaaggacaagcttgtgaatgggcacaccctgaccagagcctggaaagaagacagcaacaggaaccagttcaatgaccgtaagcagtatggctccaatgaaggccatttc

SEQ ID NO: 659907 - DNA, 120 bp, Artificial Sequence
  ENSG00000184226_35 (sequence is synthesized)
aacaatggcagccacatgacagacattcctctggcaaatctgaagtcttataagcaagcaggaggtgctactgagagtcctaaggagcaccaactctaagaaaaggctatatgggaccta

SEQ ID NO: 659908 - DNA, 120 bp, Artificial Sequence
  ENSG00000184226_36 (sequence is synthesized)
ataactttaaatagacatgctaataccgtgtgcgtcagagctttatgtattcaatagatctctacaactatgccccttctagcagggatacctataactttgtgttagcaccatggagaa

SEQ ID NO: 659909 - DNA, 120 bp, Artificial Sequence
  ENSG00000184226_37 (sequence is synthesized)
tacaatgtttttgcaacatatgagagaagatagttctagccatgcaattttgtttactagaattgattacactctccagagatctctccattgtgcaaattttttttattattgcatttt

SEQ ID NO: 659910 - DNA, 120 bp, Artificial Sequence
  ENSG00000184226_38 (sequence is synthesized)
attttgaccctggactgctgctatgaacaatagaatatgcatttggaaagtaagaaagtttcatggattagagtgactgaaaaacatatccagttagaaaattgtgcttttttttttttt

SEQ ID NO: 659911 - DNA, 120 bp, Artificial Sequence
  ENSG00000184226_39 (sequence is synthesized)
tttttttttttttgtcattgatttgtgctgggactgctatacttgacattatactgcaaacaaaacttaaagagataagcattaaacctattgtgctgttaacaacgttagtggacactt

SEQ ID NO: 659912 - DNA, 120 bp, Artificial Sequence
  ENSG00000184226_40 (sequence is synthesized)
gtaagtcaatcagtgttaaagtatttgtaaatagaagcaagctattattaacaacttttgtgtacttataatgttcacctaaaaatgttgtagcataattctgtgttttatggttgcttc

SEQ ID NO: 659913 - DNA, 120 bp, Artificial Sequence
  ENSG00000184226_41 (sequence is synthesized)
tgtccttctttttatttacctctttgttgttatttttgttgtttctttcagtgaggtgtttctgtgttagtagtctgtcttgacacacattgttcaaacaatctcaagcacttgtgttta

SEQ ID NO: 659914 - DNA, 120 bp, Artificial Sequence
  ENSG00000184226_42 (sequence is synthesized)
aaaaaggttctgaaatcttgcttctcatatgatagcttatgatgccggaattctgtaaacaataaagatgaaagaaaaaatgaaaactttatacaaaaaaggacttctgcaaaagcttgg

SEQ ID NO: 659915 - DNA, 120 bp, Artificial Sequence
  ENSG00000184226_43 (sequence is synthesized)
aaattcagaacctattttttatcatcttattttcaaagtaggcaaaagcaaaatcacttaattagtaccattaagtgagagagtaatggaaaactgttatccatcaaaagtgatataata

SEQ ID NO: 659916 - DNA, 120 bp, Artificial Sequence
  ENSG00000184226_44 (sequence is synthesized)
tcctgtacttgtcactcatgtaaaactaatgtatcaaaattagcatatatggaagaaaaatcactattcaaaaatagtttcaattgggcaaatgtgtgtctacaactttgttgaaatggc

SEQ ID NO: 659917 - DNA, 120 bp, Artificial Sequence
  ENSG00000184226_45 (sequence is synthesized)
agagtctgtgttgatcctcatatacaataatgttgttgtaacacaagtgttattagaccatagccacaaaatatttaatgtgttgtgccttcatgatgtaacagaacattctccaggtag

SEQ ID NO: 659918 - DNA, 120 bp, Artificial Sequence
  ENSG00000184226_46 (sequence is synthesized)
ggtagttgggggaaataaagggataaatctctaattattgctgtttaactgtttgttatcatagttggtcaatgcctggcaggtaccagcatattgtcacttaggtcaaaccaataaagt

SEQ ID NO: 659919 - DNA, 120 bp, Artificial Sequence
  ENSG00000184226_47 (sequence is synthesized)
gacaactaatgttaataagatctcagttgcacgtgcaaacaaatccaaattcgaacattcttaggaggtttttgttaaggcatgacagatgatttaaacaaataaatagcatgcaacaaa

SEQ ID NO: 659920 - DNA, 120 bp, Artificial Sequence
  ENSG00000184226_48 (sequence is synthesized)
acagatgatttaaacaaataaatagcatgcaacaaaatgtctttattgaaagaagtggaagttatcttaatgccacggttcaccatcaatttaaaagtaaaaaaaacaaaaaaaaaacaa

SEQ ID NO: 659921 - DNA, 120 bp, Artificial Sequence
  ENSG00000184226_49 (sequence is synthesized)
atttgttcttaccaaaaaataaaattactttgtaaatagcagttcacatttttccacagtataatggaaaataatgggtaggggtgcattgcttattgaagtacatttttgtcggtttgt

SEQ ID NO: 659922 - DNA, 120 bp, Artificial Sequence
  ENSG00000184226_50 (sequence is synthesized)
gaggggtgtttgatgactttgacagaataaatatctaaacaattatccttgttactgctttgccagttctacgttatttacaattattcagctcttgcaataaatgttctgaattcctga

SEQ ID NO: 659923 - DNA, 120 bp, Artificial Sequence
  ENSG00000184226_51 (sequence is synthesized)
aatattataaaggcaaatagaaagctcacaattattggacgtttaaaaatattagttgtgctaactttggttttagcaaagacctacattccaattattgagcgatttaaattgatgact

SEQ ID NO: 659924 - DNA, 120 bp, Artificial Sequence
  ENSG00000184226_52 (sequence is synthesized)
tgtaactcacacagcaaaagtgacaatattcctgtcactcctcagaaatgtcccagctccacgggtttccacattcaggagaatgaagaaagccattacgagggcacactcccttacttg

SEQ ID NO: 659925 - DNA, 120 bp, Artificial Sequence
  ENSG00000184226_53 (sequence is synthesized)
aacgagcacttttactggtctataagtactgcatacaagtgcccagtcaaccagtattaacgtgccagtatgtctattgttttggtctaactttagcttagttagaaagaggtaaaaaaa

SEQ ID NO: 659926 - DNA, 120 bp, Artificial Sequence
  ENSG00000184226_54 (sequence is synthesized)
aacttgaccccttttctattcctctggggctcagtcaagaatttttagaacagctttgaaatttctgagttctgagaatattttctcctttcagtttccttcaaatggcaaaagatgaaa

SEQ ID NO: 659927 - DNA, 120 bp, Artificial Sequence
  ENSG00000184226_55 (sequence is synthesized)
agagaaaattattccaaaatgtcccaagataatgtttgctgaagaagaaaaaacctgtcctgatatgccaaattctgctcctgggggtttccaaattgactgcttcaagactttcacctt

SEQ ID NO: 659928 - DNA, 120 bp, Artificial Sequence
  ENSG00000184226_56 (sequence is synthesized)
accttttgatctaaaaagtcaccttcaaatctcaagttttcaatgacttttgaaggtgtgactgcaattatgttgcagctatggttgctaaaggggttaattttttttttagtctctaaa

SEQ ID NO: 659929 - DNA, 120 bp, Artificial Sequence
  ENSG00000184226_57 (sequence is synthesized)
caggatagtagaatattaaatgtacatcagctgtgaagcacatgatcgttgatagattgcaactaagccatataggaagtcttctctttgatttcaaattattttattgtaatatattaa

SEQ ID NO: 659930 - DNA, 120 bp, Artificial Sequence
  ENSG00000184226_58 (sequence is synthesized)
attcggtacttaatagaaagatttttagtgtccgcagtggccaaatactctttcaaaaaaaaaaaaaaaaagaatgcttgctgcctaatataactgatttaaaaagaaaagaatgaatcc

SEQ ID NO: 659931 - DNA, 120 bp, Artificial Sequence
  ENSG00000184226_59 (sequence is synthesized)
attgtaaatattctctcatcttagtaatgcataagtgatctgtcataactcattttaaactgtgaaatatgccatatgaagagggattaagaggctgagaaactcatatttcaaccaaat

SEQ ID NO: 659932 - DNA, 120 bp, Artificial Sequence
  ENSG00000184226_60 (sequence is synthesized)
ccagaattagtttttcttaggtctaataattccttgttaataaagatttaaatgcagcgctgtctaatttatttcactggtgcttgtctgttgccacaaaatttgaatatcgataatagc

SEQ ID NO: 659933 - DNA, 120 bp, Artificial Sequence
  ENSG00000184226_61 (sequence is synthesized)
ctgtagatggcactagggtatcatgtcgcttgtgctggccaggtgccaatcccgcagtagcaaggagaagggggagggaaggatcaagctggtagtacagccaaagataccttttattta

SEQ ID NO: 659934 - DNA, 120 bp, Artificial Sequence
  ENSG00000184226_62 (sequence is synthesized)
atgatagttgctctggagcaactagcatttaagttcattcgcttgctcttttgtgattagctctcagcacaccaactttctaggatttcgtaatgctagttctgtctttgtcgatatgga

SEQ ID NO: 659935 - DNA, 120 bp, Artificial Sequence
  ENSG00000184226_63 (sequence is synthesized)
gttcacctatggtgatggcccatctgtacttgtttataaataaggaacacatagattttagaaaatcaagtaaagcaaaattagtttgcagaacagtatcaacagttatcattgattagt

SEQ ID NO: 659936 - DNA, 120 bp, Artificial Sequence
  ENSG00000184226_64 (sequence is synthesized)
ctttggagaatcaagagtttttattttctgagggtggggtgaagtaggatgttttattgaaacagtttcccccttaccaactatcatttattgctctggaaggacttaaggcttcatggt

SEQ ID NO: 659937 - DNA, 120 bp, Artificial Sequence
  ENSG00000184226_65 (sequence is synthesized)
aataaaatatttataagagtaattttgacaatgagtcatacagatactcccagaacatcaagtataatacatattaccatacaactaaaatctccattcttaaagtaaaatattaaacag

SEQ ID NO: 659938 - DNA, 120 bp, Artificial Sequence
  ENSG00000184226_66 (sequence is synthesized)
tagagcgttttaaaagtacaaatatttacagcttaaatacacaggaagaaaggactttaatcagtatagaattttaaaggagactatgagattattacatataagtcaaagttagaacga

SEQ ID NO: 659939 - DNA, 120 bp, Artificial Sequence
  ENSG00000184226_67 (sequence is synthesized)
acgacttaatttttgtgttaactttgttagtatttgaaaagaggttgatgttttaaaatttaaaaaatgttcagtcttagtaaaggtttttaaaagttaaatagttaactatgataagaa

SEQ ID NO: 659940 - DNA, 120 bp, Artificial Sequence
  ENSG00000184226_68 (sequence is synthesized)
aatttatgaaactaaatgagtttgattaaaaagttgctcttaatgaacagaaagaaaattttttaaattatttacttctgttatggttactcacaatacacatggtattttatgatatgc

SEQ ID NO: 659941 - DNA, 120 bp, Artificial Sequence
  ENSG00000184226_69 (sequence is synthesized)
ataattatgttgagaaactaatatgacttaaactttttcatgtaaaatctgacattttctttccaaagaaatgtactgatatacttccagcatcatctttttttctgtctatacgtggtg

SEQ ID NO: 659942 - DNA, 120 bp, Artificial Sequence
  ENSG00000184226_70 (sequence is synthesized)
atattagcattgatgtatagatccactttttctgacctccccaaaagttgaacctatatatagtgtagtgacataaatgttaagtgcatttcagcaaagtatgcaagagatcttttcttg

SEQ ID NO: 659943 - DNA, 120 bp, Artificial Sequence
  ENSG00000184226_71 (sequence is synthesized)
aggcttagtcagtcataaaagtctttgtatgatgtaatctttcaaataggatactgagtaattctctaactggaactaaagtgcgttttagaaatttcttgtgaccatgtgtcactttgc

SEQ ID NO: 659944 - DNA, 120 bp, Artificial Sequence
  ENSG00000184226_72 (sequence is synthesized)
agttctcctatgggtattccaatgttcatatggaactaggtaattcactcttatgataaagagctattaaaatggctttgcttacaccttttaaaagttttcatgctgaaaaagaaatag

SEQ ID NO: 659945 - DNA, 120 bp, Artificial Sequence
  ENSG00000184226_73 (sequence is synthesized)
tgtgatgttggagaaaagagatagaagtcggtggagaagtggtagtgatatacaaagtaatatgtacatttttttggataaaagaagcatatttcctatgaatgaacgacatcaaatata

SEQ ID NO: 659946 - DNA, 120 bp, Artificial Sequence
  ENSG00000184226_74 (sequence is synthesized)
tactactctttaaaaatttgttttcactgaactgtatgattgctatctgcagatgttctagttaagctaaaaagtaaaaacttttttaactagtggcttttatataaaatgtgctcctga

SEQ ID NO: 659947 - DNA, 120 bp, Artificial Sequence
  ENSG00000184226_75 (sequence is synthesized)
agctacacaattttgaaagagtaacatttcttgctacaaaaactttcaaaggaatttatttaaaaaaatacaatctgtgaagattttagttgtgtgacgactattgctcacaccatcttt

SEQ ID NO: 659948 - DNA, 120 bp, Artificial Sequence
  ENSG00000184226_76 (sequence is synthesized)
tcattttatgctattaattgatatgtgggtaaaatgcaagattcttggttaaaagcttaccaaacttaaatttcactcatttatactgtatgtataacgaaaacataacgtctgatgttt

SEQ ID NO: 659949 - DNA, 120 bp, Artificial Sequence
  ENSG00000184226_77 (sequence is synthesized)
tcatcatgaatttgtttgtggtacatcaattcctatattgtctgatatttttccccttgctgttttcccttgtgttaacctgcaaagaacataggaaacactgtaaatcatattcctcat

SEQ ID NO: 659950 - DNA, 120 bp, Artificial Sequence
  ENSG00000184226_78 (sequence is synthesized)
tcactctattttataaagctttcatgtgtcactaaatttttcacagattatttcttacaaatttttggaagtgcgattagcctttataggttaagaatttacttttttttttttggcaaa

SEQ ID NO: 659951 - DNA, 120 bp, Artificial Sequence
  ENSG00000184226_79 (sequence is synthesized)
aggtcatgtctcggtaattatttgtaaaaaaaaaaaaaacaacaaagtttacagccaaaaggtgaagaggatgaaaacgacaacattatccattccaacaaggctttaaatgataaaatt

SEQ ID NO: 659952 - DNA, 120 bp, Artificial Sequence
  ENSG00000184226_80 (sequence is synthesized)
cattggtatatttgcctaaaagaaaaatggtcttgttgacagatattgttttaaaatatgatactgattctccctgtggaatgtctgggaatcatttggagcactacttaaaacatggat

SEQ ID NO: 659953 - DNA, 120 bp, Artificial Sequence
  ENSG00000184226_81 (sequence is synthesized)
tgttgggttctaccccagaggctctgatttcgtaccactgaggtcaggactgaaaatatacattgctaacaagttcctaggtggtactgatgctgctagtccagggcccacactttgaga

SEQ ID NO: 659954 - DNA, 120 bp, Artificial Sequence
  ENSG00000184226_82 (sequence is synthesized)
accactaccttagcatattgaaacaggaagtgtcagcctctttccctctcgtattatcatatccagagaacctgtttttgcacagcccaactctcagcccacttattgacagctgtttta

SEQ ID NO: 659955 - DNA, 120 bp, Artificial Sequence
  ENSG00000184226_83 (sequence is synthesized)
ttgtagctggaggctttacagtaagctgtttattgctgtttcccaacccagttgacagcatttagggaattaatttcttggcccctgtgtggttttttgggggtgggaagagggaagata

SEQ ID NO: 659956 - DNA, 120 bp, Artificial Sequence
  ENSG00000184226_84 (sequence is synthesized)
aatgaaaatgttaaagtaaaagaaatagtcacccatttacatttgacaacttcttcaagtagtaaaacagtctgtaagagttgcactagacattggttctgggtaaactgtcatttaatt

SEQ ID NO: 659957 - DNA, 120 bp, Artificial Sequence
  ENSG00000184226_85 (sequence is synthesized)
ttctaaaggaaatactcattttagagctttaaacatcctgacttttcacaatctagagtatttactcacatatatttttctatatattgaggaatgtatacactgaaaatgtgtatgcgt

SEQ ID NO: 659958 - DNA, 120 bp, Artificial Sequence
  ENSG00000184226_86 (sequence is synthesized)
gctgtacttaagtgtatacatgtatttttacagtgtaaagggaatttcttctattccaaaccatttagagatactatattacatttatgattacttttcatttttgaataatctactaca

SEQ ID NO: 659959 - DNA, 120 bp, Artificial Sequence
  ENSG00000184226_87 (sequence is synthesized)
accactactgaaatgttattatgttatgtaaaatgcggaaggcagtcacagaattgatatttagaacagctagggaaaaaatgcaattgaaagtgaagggggcaaatgttaactaatgtg

SEQ ID NO: 659960 - DNA, 120 bp, Artificial Sequence
  ENSG00000184226_88 (sequence is synthesized)
aggctaaccaaaatctttaagatattttcaattattaaattctggaatagatatatatagtgacagttgaacacaggtgacaactgatcccccaaatgcaaattgtttttaaaatgttat

SEQ ID NO: 659961 - DNA, 120 bp, Artificial Sequence
  ENSG00000184226_89 (sequence is synthesized)
cggttgtgatttttatttctatggctctttggctaagtgccctatggtcatgaagtcagttttcatacttatgaggtagaagatacccagagcccttggatattaacacagatttttgaa

SEQ ID NO: 659962 - DNA, 120 bp, Artificial Sequence
  ENSG00000184226_90 (sequence is synthesized)
atgaggataggccacccattcaaactggctatctttccatttgggtttgtaagataaatatttgactatttttctttccatcttgatattcctaagctataaaattcaagacgcattttg

SEQ ID NO: 659963 - DNA, 120 bp, Artificial Sequence
  ENSG00000184226_91 (sequence is synthesized)
gccttccattgctaataacattaagcagaataaaaatgaaaagttactattgtattaaacatagacatgtctgttgattcttgaatatttgttaacgtagagaaaatagtatatgtggtg

SEQ ID NO: 659964 - DNA, 120 bp, Artificial Sequence
  ENSG00000184226_92 (sequence is synthesized)
acaatattctattctcttattatttgtttttgttgccattaattcaagatatagaaacaaggaacattaatgttctccttagtttcagaccagtcatcctatggtgagacagggcaggct

SEQ ID NO: 659965 - DNA, 120 bp, Artificial Sequence
  ENSG00000184226_93 (sequence is synthesized)
ttggtgtcattgaaattactttgaaaatattgtacttgtaataacatgttacattcttatggtgtaaacatattcttattatttaaataattgcaagctatcatttatcttcttatgatt

SEQ ID NO: 659966 - DNA, 120 bp, Artificial Sequence
  ENSG00000184226_94 (sequence is synthesized)
tcatacattaaattaaaatatgtgaaatagtaaagtagagggaatttagatttaaggaaaagcctcaaatctaaaatcaaattttctcataattaactatgatttatattgaaccttaag

SEQ ID NO: 659967 - DNA, 120 bp, Artificial Sequence
  ENSG00000184226_95 (sequence is synthesized)
gtttcattttcatattgatgtgtgtaaaatatctataaattatacttatattattagatatggcattgtaacgcatcctttttcatattactaattttacactacagtactgaagtatga

SEQ ID NO: 659968 - DNA, 120 bp, Artificial Sequence
  ENSG00000184226_96 (sequence is synthesized)
aaatgacacctttaaatcattttgttttctgtaatcttatttccacaacaatttttgttgtcttatttagattgtttttatttctaatttttttttttcggttgggggaattcagaaatc

SEQ ID NO: 659969 - DNA, 120 bp, Artificial Sequence
  ENSG00000184226_97 (sequence is synthesized)
caccaaatgctgaacgttacagttgtagccttggtcccactataccagtctgggtgtttacagggtttcagggccaagtcagatgtctgtattgctcttttacaatacttctcagtttga

SEQ ID NO: 659970 - DNA, 120 bp, Artificial Sequence
  ENSG00000184226_98 (sequence is synthesized)
ctttgttaaaggtgaactcttagcttgtatatagttaaaaacataacaaaactggaaatccagtggattgtttactactttgacttaaaatccttggtgcaatctttctttgaatttagt

SEQ ID NO: 659971 - DNA, 120 bp, Artificial Sequence
  ENSG00000184226_99 (sequence is synthesized)
attctttattataactagaaattactctcttaatattagtaaatcatttaatatcttatatatttcactgagttggaaagtacaaattagttaatgcagatttttaaaggtttggccttt

SEQ ID NO: 659972 - DNA, 120 bp, Artificial Sequence
  ENSG00000184226_100 (sequence is synthesized)
tttttaaaggtttggcctttctgacactcaacttcacatttaatattttttccacaatttattacatataaggaccctaaccattatatcagatttattaaaatatgactctaatcacag

SEQ ID NO: 659973 - DNA, 120 bp, Artificial Sequence
  ENSG00000184226_101 (sequence is synthesized)
gccaggtattagtgaaaatttggaaatgcaagtcaggaagaggcttattctaaagtttcatggaggcataaaagtcagactctttcgtaagtaataatgctaatgtcttatagactttga

SEQ ID NO: 659974 - DNA, 120 bp, Artificial Sequence
  ENSG00000184226_102 (sequence is synthesized)
catagtcagcgacccccaaatctacattatactacagaagtaaagacaaatgtaaaaataggatctctcatgtacataaggagatgtactctgtttttaagatttcattggttgttattt

SEQ ID NO: 659975 - DNA, 120 bp, Artificial Sequence
  ENSG00000184226_103 (sequence is synthesized)
aagaaaactgtcaaatctgtcaaacatttcatttagaaaggaacacatgctttttgcctttgtttgatacaaacctattgggctgtcagtcaccagaaacatagaacaaaaaagatttat

SEQ ID NO: 659976 - DNA, 120 bp, Artificial Sequence
  ENSG00000184226_104 (sequence is synthesized)
taccatgattgacattttgcttttgatttatattcttttcttctgtaagccaagactcattaaattttcaaattcctaaataagttaaacaactgtccttttttaacagtaaagagtgat

SEQ ID NO: 659977 - DNA, 120 bp, Artificial Sequence
  ENSG00000184226_105 (sequence is synthesized)
acagaaataaactggaaaaacaacccatatttaatctttctcattcatatttttgtcctatagacagtttgtctctgatagacaagaatagtggcagaatcagtagaattttctgaggca

SEQ ID NO: 659978 - DNA, 120 bp, Artificial Sequence
  ENSG00000184226_106 (sequence is synthesized)
tagcatataaatataagaaatgcagaactcaaagtcattcattagggatctgtttttacatatttattcattatttaaatggcatatgaaaatattttcccttgatcttttacagtttga

SEQ ID NO: 659979 - DNA, 120 bp, Artificial Sequence
  ENSG00000184226_107 (sequence is synthesized)
ttgattagagtgccataagcacatatcacgttttaaatgatgggcttgagaccacctgtacagctaagaatggcaaagatagaagcacagtcaaggtctttgaggaatatttgattgatt

SEQ ID NO: 659980 - DNA, 120 bp, Artificial Sequence
  ENSG00000184226_108 (sequence is synthesized)
ctatcattttatactaattattctggatccttgagaaaatatatgaaatgaacttacctgttcttgaaaggagcctgctacgtacagcttcaccacttagtaatttatgtggatatttaa

SEQ ID NO: 659981 - DNA, 120 bp, Artificial Sequence
  ENSG00000184226_109 (sequence is synthesized)
ttgtgtgggctgtaggaaagaatggaaatgtggtcaattttatcatgtttgtgtaatatcttgtattttaacattcttctatagtttgtctctctatccaaccatctctgcatttgagta

SEQ ID NO: 659982 - DNA, 120 bp, Artificial Sequence
  ENSG00000184226_110 (sequence is synthesized)
ttacactgctttgttaataaccactctctgggcctttttcagcctgttagcagttgattaagaaacactctaatccctttcaggatattgaggagctaatggattgcagactatttggat

SEQ ID NO: 659983 - DNA, 120 bp, Artificial Sequence
  ENSG00000184226_111 (sequence is synthesized)
ctttaagcttctattgtaaacggtatgaagaattgtcattgagctgatatttgcatatatctctcccagtgctagttactttgcctccttttttgtcctcttaatcttcagctttcattc

SEQ ID NO: 659984 - DNA, 120 bp, Artificial Sequence
  ENSG00000184226_112 (sequence is synthesized)
tgagaatatttattttagtcggaaataagcatgccagtgatagaaatttgggattcacctccagatgaatgccatcacagacagggaagctctggcacattttgcatagatctgtatgaa

SEQ ID NO: 659985 - DNA, 120 bp, Artificial Sequence
  ENSG00000184226_113 (sequence is synthesized)
cacagtgaacccttcataagctcttagattgcaggaaatcagtgctgaaaattaagtggggttttaaagatttgcaaagtagagagctttgtataatgctggtattgcaggtgcctatta

SEQ ID NO: 659986 - DNA, 120 bp, Artificial Sequence
  ENSG00000184226_114 (sequence is synthesized)
aatatgaagtaaaggctttgtaatacaactagctaacacatttccctccacattagagtgatttatagcctagggaattagtcttgcctattttttccaaatgcagaaacactggatgtg

SEQ ID NO: 659987 - DNA, 120 bp, Artificial Sequence
  ENSG00000184226_115 (sequence is synthesized)
actgaaagaataaaaatctcaaatacatgccttacaatggactgatttgctgttggatgattctaattattcaagatagatgatgcaggcttgtttgtacttccttgtggtatctctgat

SEQ ID NO: 659988 - DNA, 120 bp, Artificial Sequence
  ENSG00000184226_116 (sequence is synthesized)
gcccatgatctggccttcatttctcctaagaagaaactctcaattgtgtatgcagactctcttctgaacctaaatcagattaacaccccaggtgtctataagactatatagcattaccat

SEQ ID NO: 659989 - DNA, 120 bp, Artificial Sequence
  ENSG00000184226_117 (sequence is synthesized)
aatgaagaggcctgggtaccaagtgaatgcttccatcctcataggaattactattgaatcatttctcaaactgtatttttagaattcatctttgctgcatttgtaaatatggtgtgtatt

SEQ ID NO: 659990 - DNA, 120 bp, Artificial Sequence
  ENSG00000184226_118 (sequence is synthesized)
tgtagcacagcattttgttctagacatacatggatttcaatatatttagcttcatgacaatgttcagtaaaatcccttgcagttctttaatacttaatgtctttgactagccctgttaga

SEQ ID NO: 659991 - DNA, 120 bp, Artificial Sequence
  ENSG00000184226_119 (sequence is synthesized)
tataaattggagcaaatagccatgcatattttaaaatgattttataaatcctatattttcacctattagaaaaagtgtgtaatccatatgcagcccacagtaggcacaggggcctgtgag

SEQ ID NO: 659992 - DNA, 120 bp, Artificial Sequence
  ENSG00000184226_120 (sequence is synthesized)
agtcataatagatgattgatttagaaaagaaaacagtttttgtgcaagacaatagcaactgcaattcagtgaattaggtttttttttttcctcattaaacaaacctcaataaagaaaaga

SEQ ID NO: 659993 - DNA, 120 bp, Artificial Sequence
  ENSG00000184226_121 (sequence is synthesized)
acggaaacacagaagcagttatgaaatgaagctgtatcttttatagaaggagaatgtcttctgctgacagtagtagttctatagtagacattttctggaaagaaaaatactggtggtttt

SEQ ID NO: 659994 - DNA, 120 bp, Artificial Sequence
  ENSG00000184226_122 (sequence is synthesized)
ttggattcggtggatgcaaccaatctgtgcctctgtgtgatagcagctgcatgctgaggactttcaaatacacagctacataggattcggcaggaaactttttgtagaaggtgcaaatga

SEQ ID NO: 659995 - DNA, 120 bp, Artificial Sequence
  ENSG00000184226_123 (sequence is synthesized)
caaatggagacaaaatggagtgagttctgagttgtgagttgatgccctcctgtgtcatatattcatgtcattgaaccgattttcacattggatgtctagaatcacaatagccttccttct

SEQ ID NO: 659996 - DNA, 120 bp, Artificial Sequence
  ENSG00000184226_124 (sequence is synthesized)
gtgtgtcagctgggaacacacctggactggctacttttctttgctccatttcttgtcattcactaggtggactatattcatgtatgttgttaatacatctgatttcttagtttcttgatg

SEQ ID NO: 659997 - DNA, 90 bp, Artificial Sequence
  ENSG00000184226_125 (sequence is synthesized)
ttttccgtatatgttgcttaagacaaccacaaagtgtgaaataaaatctatgatgtgtcctttcttgctagaaatagtaaattcatattt

SEQ ID NO: 659998 - DNA, 120 bp, Artificial Sequence
  ENSG00000184226_126 (sequence is synthesized)
gtgtcctttcttgctagaaatagtaaattcatatttattctgacttatggtctcagataatatattttcctttgctattttttgtattgagtttttcttactgatgcctttttccaagtt

SEQ ID NO: 659999 - DNA, 120 bp, Artificial Sequence
  ENSG00000184226_127 (sequence is synthesized)
aaggaataatgttagatttaggtatatagagtaataatatttcaatgcattctcaacccattcaaatttccaacataaaagagatggtagaatttatacaaaatcatcattttttgcctt

SEQ ID NO: 660000 - DNA, 120 bp, Artificial Sequence
  ENSG00000184226_128 (sequence is synthesized)
aaaacttaaataggtatcaaaattgtattacaccatagtaaaaattgacacaatttttaggatattttagtatgacataaactcattttcattcttggtcttaaatggcaagattttctg

SEQ ID NO: 660001 - DNA, 120 bp, Artificial Sequence
  ENSG00000184226_129 (sequence is synthesized)
ccatgcagtggtagcaaaatatgttgaattcattgattgatttttaagcatgataataattaagtaaaagcttcttgacacctaaagtctctgttttagacaattaaattctgctttagc

SEQ ID NO: 660002 - DNA, 120 bp, Artificial Sequence
  ENSG00000184226_130 (sequence is synthesized)
taagggttattgacttctgtatgatactgggagcaacactcctcagggtttaaactattcttgcaggaccatctgttatttgcagggactgtgcatcctctccagctgatactgtgtgaa

SEQ ID NO: 660003 - DNA, 120 bp, Artificial Sequence
  ENSG00000184226_131 (sequence is synthesized)
cccaggcgtatttcaggattgttcctcacatggccctggttcctgatgatcttttggtctcaaatggcaactcagtaaatccaaatactggtatgccactacttaaagtatgaaaatctt

SEQ ID NO: 660004 - DNA, 120 bp, Artificial Sequence
  ENSG00000184226_132 (sequence is synthesized)
agagaatataagaaagttcctcaaagtaagagactgtgtcttacttacctttgtatttctaacactgaacccacaacagtgctgaaaagagtgaacttagtaggcattcagtaaattttg

SEQ ID NO: 660005 - DNA, 120 bp, Artificial Sequence
  ENSG00000184226_133 (sequence is synthesized)
atgcaacctgaagatcagtgatcttgaaattttattttatatatataagattttccactgatttaatctttacaacaatcattcaagaaagacatcatttatgttcaaaatatattcttc

SEQ ID NO: 660006 - DNA, 120 bp, Artificial Sequence
  ENSG00000184226_134 (sequence is synthesized)
catcacttagagatgtctgtgggtcccattttctcagtaattttggacatatcattatgtctgcccatcatatcatggtttttcatattaggaaataatgagaaggcaagaggtgagcta

SEQ ID NO: 660007 - DNA, 120 bp, Artificial Sequence
  ENSG00000184226_135 (sequence is synthesized)
aacaaacaggatcaaattccttcacttccaagcctcttcaccccaaccttttatttaaacctttcagtacttagatcattgatttattacttctaaacataatgatcaatatatgtactt

SEQ ID NO: 660008 - DNA, 120 bp, Artificial Sequence
  ENSG00000184226_136 (sequence is synthesized)
tcataggtgcttgatagagatacgtgtttgtaagaaaaataccgtatcacattaaagttttcttaatagacttttgagccatccagacagtatgccagaatcaagtataaattctataaa

SEQ ID NO: 660009 - DNA, 120 bp, Artificial Sequence
  ENSG00000184226_137 (sequence is synthesized)
aagaagcaaaataataactgaatagtgattaatgcagtgtctagcaactatattaattttagaaagataaacttggtgtctaatagaacttatagaatagttacacattctcaagtttcc

SEQ ID NO: 660010 - DNA, 120 bp, Artificial Sequence
  ENSG00000184226_138 (sequence is synthesized)
tttaattctttttctgactgaagaaatggagactagagaactaatttgatatttggagtaacaaaaactgacttgatgaactactacataaagactgtgatactgggcacatcatttaaa

SEQ ID NO: 660011 - DNA, 120 bp, Artificial Sequence
  ENSG00000184226_139 (sequence is synthesized)
gggcacatcatttaaatgcactagtccttgctttccttgtctgcaaaatgggtgtaatcatgccaaatccatataaagttgtcctaagattaagtgaatatatatatatatatatatata

SEQ ID NO: 660012 - DNA, 120 bp, Artificial Sequence
  ENSG00000184226_140 (sequence is synthesized)
tggctcgcaatagccagacactcagaaaatgttacctgtttttctacctcctgtccaagaataccagcttgccattgacagatgtttgcacattcatttagtgaatgctttcttgatttt

SEQ ID NO: 660013 - DNA, 120 bp, Artificial Sequence
  ENSG00000184226_141 (sequence is synthesized)
gtttttggttgttttcttgaatctgatttctattgtatctttttcacgactcacctgtgttcatctgcttttgtgttaaaacactatctggtttcagattatttaggacttttggaaaat

SEQ ID NO: 660014 - DNA, 120 bp, Artificial Sequence
  ENSG00000184226_142 (sequence is synthesized)
tgatcttcataacagtatctcaatatagcatatttgatgttgttttttatcttaatccctgttgtttcacatttgtataattgcttcgtctttcattttgagtattttacctatttcatt

SEQ ID NO: 660015 - DNA, 120 bp, Artificial Sequence
  ENSG00000184226_143 (sequence is synthesized)
tgcatgtcatgttttaaaattattctgttccttttagtgtttgtaatgaatttacgtccccatagattacccagaagctccacccatctgggaattttcaccgtatccatcactcctatt

SEQ ID NO: 660016 - DNA, 120 bp, Artificial Sequence
  ENSG00000184226_144 (sequence is synthesized)
acaaaatcacatataagagagaatctgtttcacagtcagtacttaacacagctggaatcatttgaaacctgctggttcttgcttccaattattccatagactggaaagcatccctgttga

SEQ ID NO: 660017 - DNA, 120 bp, Artificial Sequence
  ENSG00000184226_145 (sequence is synthesized)
agtaatggcatccatggtgtaatcaaaccagctaaaatgcctcaaagtatatggatcatatttctgagattgattgaattcatggtagaagcataatcaccaacagcttttactattttt

SEQ ID NO: 660018 - DNA, 120 bp, Artificial Sequence
  ENSG00000184226_146 (sequence is synthesized)
ttttcttaatttaacttatattcattttataagtaagtttttcatgtctcaatatacaagtttgtaatgtttgagtatgtgagtgacataataacataaatgagacacaacaaataaaaa

SEQ ID NO: 660019 - DNA, 120 bp, Artificial Sequence
  ENSG00000184226_147 (sequence is synthesized)
acacactacggtagtaccccaaaaataccttttgataatatcctggggccaaaatcatttccttttgttggaacagctgaaaccatcacgataaagttactgatttgtatttagagcaga

SEQ ID NO: 660020 - DNA, 120 bp, Artificial Sequence
  ENSG00000184226_148 (sequence is synthesized)
atgtagtggagatttgttactagttcaattaactttatcaactaaataagaagtagatatagtcaaatttcaattggctttgttgtgattttgattgaataaattaaatatgtaacttct

SEQ ID NO: 660021 - DNA, 120 bp, Artificial Sequence
  ENSG00000184226_149 (sequence is synthesized)
tgttgaacttaaccaccctctcagtgcaatacaattgttttggattggtcttttagtttagttctagttttatataagaagacagtttcataagacaagaatttaaaacaaaacaaactt

SEQ ID NO: 660022 - DNA, 120 bp, Artificial Sequence
  ENSG00000184226_150 (sequence is synthesized)
aaaattaaaatactcattctttgtgcttagaaagcttaatctaacacataaaacctggaaaactggtgtgattttctttaggcttctgcttgttttatgctaagatgtgatatccatttt

SEQ ID NO: 660023 - DNA, 120 bp, Artificial Sequence
  ENSG00000184226_151 (sequence is synthesized)
atagcattgggataccaaacagggcagggacatagtgtggatattatcttgaatatcagacctcttagggttattacaaggattgtagcatggcatatagtacatgtttggtaaattcta

SEQ ID NO: 660024 - DNA, 120 bp, Artificial Sequence
  ENSG00000184226_152 (sequence is synthesized)
tttaatcccaccacataggcagacatggacctaatcaggcaaaatgttaaacacattttaaatggttaaaatcaggctttaaggatttggattcattgttttatttgaaatatttagcat

SEQ ID NO: 660025 - DNA, 120 bp, Artificial Sequence
  ENSG00000184226_153 (sequence is synthesized)
tctcatggcatcaagtatgtatacatgtatactgtatgaagcgatatatttattatatactgctaaatgtatattcaaaaggctaccattttatgtttttcatatcagtcgtttcctcta

SEQ ID NO: 660026 - DNA, 83 bp, Artificial Sequence
  ENSG00000184226_154 (sequence is synthesized)
gccttctattagcttttataatggagaggtaactgtcctagaaagtccatgtaaattccagttcagataatgaacaattactt

SEQ ID NO: 660027 - DNA, 120 bp, Artificial Sequence
  ENSG00000184226_155 (sequence is synthesized)
agtccatgtaaattccagttcagataatgaacaattacttattctatgaagacatttatatttcctggactgtacctttcacatctttccctatgtgaatgggttccctgaagaactttt

SEQ ID NO: 660028 - DNA, 120 bp, Artificial Sequence
  ENSG00000184226_156 (sequence is synthesized)
tctgcctgctgagcacttatttggaggtaagtctaacaatgagatgatatccaaacttatcactagactactgaacgatattctattttccctaatggataccaatgcttattccagaat

SEQ ID NO: 660029 - DNA, 120 bp, Artificial Sequence
  ENSG00000184226_157 (sequence is synthesized)
tatattctatagttttaaattttcatgctttcaaaagtatctgacatttagctgtgaaattttctgctgccaaagaccttgtcatatgatccacggacagatacacagctaggcttttta

SEQ ID NO: 660030 - DNA, 120 bp, Artificial Sequence
  ENSG00000184226_158 (sequence is synthesized)
aattttgtattaattctgttattcaacacacatctaataaataactgctgtgatccaggaacagcattagacaataggaaattttttttaagataaaaaaaattgtctttggtttaaaat

SEQ ID NO: 660031 - DNA, 120 bp, Artificial Sequence
  ENSG00000184226_159 (sequence is synthesized)
attccattaaattttaagcacagtacttttttcccttggaatttccttattaaaaaaaatatgagttcactctcaattttaaatagatgtcatcatttccctgaaatatattttttaaag

SEQ ID NO: 660032 - DNA, 120 bp, Artificial Sequence
  ENSG00000184226_160 (sequence is synthesized)
tctctctctctcacattttttttaactactgctggagacttgatctttcaatggggtaataagattctaagatctattactctaattataagaatgccaggtttaaatttatcctttggt

SEQ ID NO: 660033 - DNA, 120 bp, Artificial Sequence
  ENSG00000184226_161 (sequence is synthesized)
taatttggagggaaatgtactttttcattcttaaaatcacactccttctacaggcaaaggtgttaataaaatatagtagcaagtaaaacttcatttttttactagatgagattagcatat

SEQ ID NO: 660034 - DNA, 120 bp, Artificial Sequence
  ENSG00000184226_162 (sequence is synthesized)
ttgctatattaaaaattactttaaaaacatggcacacatgaataatgttgaatgataacccaagctaaagtagacagtggttctctaaaaatggaatttcacttgtagagacatccattt

SEQ ID NO: 660035 - DNA, 120 bp, Artificial Sequence
  ENSG00000184226_163 (sequence is synthesized)
tgaaaagggctgtttcaagtcatgatattttgaaaaaatgttttagccttcgtacgttgaaaggacatgtttaccacagatatggaacatagatattaaattctggctggaataaatgtt

SEQ ID NO: 660036 - DNA, 120 bp, Artificial Sequence
  ENSG00000184226_164 (sequence is synthesized)
tggtttaattggcttctgcctccagatggttctgattttatcaagtccattttcttatgaatatttatcacagtacttcaaggaaccaatgcaatgatataaacgttgaaaacaagagac

SEQ ID NO: 660037 - DNA, 120 bp, Artificial Sequence
  ENSG00000184226_165 (sequence is synthesized)
ctttattttatatatatatgttttcctaaattgagaaacatacatatcctgaaaatttagttttctttcatcatcgaagaaaatgtcataattcggctattacagccaagacagactatg

SEQ ID NO: 660038 - DNA, 120 bp, Artificial Sequence
  ENSG00000184226_166 (sequence is synthesized)
tttttttaactcaattatttctaaaacactaacttacatatggataaatgtttatataggaaggtcatccccaaatttcaaatttttatttaagccaaaaatttgtattttaaaaaataa

SEQ ID NO: 660039 - DNA, 120 bp, Artificial Sequence
  ENSG00000184226_167 (sequence is synthesized)
tgcatataatgcctcacctgcacattcttgtacaaacatattttaggagataaatctttattgccagaaaacatactattttaattgcaattagacttctgtgataaccatcaagctggt

SEQ ID NO: 660040 - DNA, 120 bp, Artificial Sequence
  ENSG00000184226_168 (sequence is synthesized)
gcctaaatctaaaaggatctttccaactgttctgtggatgcttaggcttaggcaactatcaccaagtaattactataatttaaatgaactacgaaattgaaacctgctaaaatatgtaga

SEQ ID NO: 660041 - DNA, 120 bp, Artificial Sequence
  ENSG00000184226_169 (sequence is synthesized)
cctcaggaatcaaatgtgtattaacacttgttaattaaatattattggttaaaattaatttagaaattattattgggttgatatgaccaaccaaaaaactatatgtaaatcacttcttaa

SEQ ID NO: 660042 - DNA, 120 bp, Artificial Sequence
  ENSG00000184226_170 (sequence is synthesized)
tactatgaaaatatgaacagtttggtaaactaatttagaaccaagcaacaggatatattaagcttaggaagatacagacatttaaataaaggttggtatagaagtcacatgatagttgct

SEQ ID NO: 660043 - DNA, 120 bp, Artificial Sequence
  ENSG00000184226_171 (sequence is synthesized)
ctgtctgtagtaaccaatttctaaataaaatcaaaaatgtggcattctcaccacttttcacagtgacaattaacttggtgtttttacgtagtttcaattccttgcttattctgattttta

SEQ ID NO: 660044 - DNA, 120 bp, Artificial Sequence
  ENSG00000184226_172 (sequence is synthesized)
taagtgactatgcaatgtattaccacataaaataaaacagtagtggttattaaaatcagtacttaaattttcccattttaaaaagtgtagaatacattattttctctctttttggctaca

SEQ ID NO: 660045 - DNA, 120 bp, Artificial Sequence
  ENSG00000184226_173 (sequence is synthesized)
ataatgtctattcaaaaccatttatactttgctagaattacacttagcatcttgagaattcagttttctcctctgaaaattagataattggactcaaccatttttttatttctattatta

SEQ ID NO: 660046 - DNA, 120 bp, Artificial Sequence
  ENSG00000184226_174 (sequence is synthesized)
aaaattgaactacagcttttgttaattacttagggaaacattactccttggcaggttttctcttgccacccaacatccatctggcctacttctttctattatcagttgatatatgttcaa

SEQ ID NO: 660047 - DNA, 120 bp, Artificial Sequence
  ENSG00000184226_175 (sequence is synthesized)
atagtgcacatcagtgttaacattggctcaagaaaaacaattacaaaataaatcacatggttcagtctctcctgacaatgaatgatttgcaatattcccattgtttgtatgatctatgtt

SEQ ID NO: 660048 - DNA, 120 bp, Artificial Sequence
  ENSG00000184226_176 (sequence is synthesized)
atcactctcttgcattagtgttgataacacagtattgcctctatcttttttgaggttgctctgtgattaattttccccttctgaactagaaaattaacttttttctcttgaattagaaat

SEQ ID NO: 660049 - DNA, 120 bp, Artificial Sequence
  ENSG00000184226_177 (sequence is synthesized)
caaaaaacagaactacaaaaccttgagcagattgttggcatttattatttgattggaaaaccatgaacttaaaatcattatgtagctgccatatttttatcagtaatattactcttataa

SEQ ID NO: 660050 - DNA, 120 bp, Artificial Sequence
  ENSG00000184226_178 (sequence is synthesized)
tgtttgattttattgtctatagtaacacattaaggtgactttagcatatttcaacttttgttaatgttggagaattacacatagttttgcaataatgtgtaaatgtaataaaaatatcaa

SEQ ID NO: 660051 - DNA, 120 bp, Artificial Sequence
  ENSG00000184226_179 (sequence is synthesized)
acagtggtaattttgactgataatgttagttatcaggacaagtgttagaaaagcaaatttaatcaaatggtgcccactgattttataggcagtttcttcattcaaagtaaaagtgatgtt

SEQ ID NO: 660052 - DNA, 120 bp, Artificial Sequence
  ENSG00000184226_180 (sequence is synthesized)
aaattgaagaacttgtcagtctcatgctggaggaaaatcagctttaggattagaaaaaccaaactgcaaattagatgaaataccacattaattagatgaaataccacattaatgttaaaa

SEQ ID NO: 660053 - DNA, 120 bp, Artificial Sequence
  ENSG00000184226_181 (sequence is synthesized)
aaaaccggtgttatttggttacatggaaataaaataaaacggttttgccatcaatgagtctaacacattttcttcacaacactgcagaaataagaacccacaggatggttctgaatcttg

SEQ ID NO: 660054 - DNA, 120 bp, Artificial Sequence
  ENSG00000184226_182 (sequence is synthesized)
aacagcagcttaggaatacttactcgtctaataactcaatttgcttgcatttactactacttactgcattgtaccctttcatcttctaacaagtttaggaagaccaaattcttttggtgt

SEQ ID NO: 660055 - DNA, 120 bp, Artificial Sequence
  ENSG00000184226_183 (sequence is synthesized)
ttttgatagagatatggtaaagagactattttacactgtagatggatcggtctaggagtcactttgtaagtttggaaaattgacatcgatggaggagatgtattaaatagttccagaaat

SEQ ID NO: 660056 - DNA, 120 bp, Artificial Sequence
  ENSG00000184226_184 (sequence is synthesized)
gccacattttggatgcaagacactttttaatcatattaagcagtctctttaatgctcacaccctgaatgccttccttaaaatgttctaaacacttccaatttgaagaggggttaaaatat

SEQ ID NO: 660057 - DNA, 120 bp, Artificial Sequence
  ENSG00000184226_185 (sequence is synthesized)
aaatgtggtaaacaaatcacagaaagaatatacattcttaaggaattgttcttcttatgttatggtcttccaagtgcgccaatgacatcggaagtatgtggtgctaaggtgaggcattct

SEQ ID NO: 660058 - DNA, 120 bp, Artificial Sequence
  ENSG00000184226_186 (sequence is synthesized)
gtgtaatggcttagttgcaggactcaagtactgggaattcagtcaattctgctcttgtaatacattgtgttggctttcagaacaatactccagtgtttttcaggggaaggtatgagtgtt

SEQ ID NO: 660059 - DNA, 120 bp, Artificial Sequence
  ENSG00000184226_187 (sequence is synthesized)
tccctaatagaagagcagatgttgtagccaatactgagaggtaggaaagatatataatacttacacaatctaaaatttcacctaaagtaacgtttaaataaagtttgtttagtaatcatc

SEQ ID NO: 660060 - DNA, 120 bp, Artificial Sequence
  ENSG00000184226_188 (sequence is synthesized)
agtgttctgttgtctgtaatgaccaacttcaccataaaatcagaaaggtggcaatgtcaacatcacaaacagtggcagcaaacatggtgctgttctaaatacagattgtgtatcccaagc

SEQ ID NO: 660061 - DNA, 120 bp, Artificial Sequence
  ENSG00000184226_189 (sequence is synthesized)
cctttgcttttttctatggatattcctccaactactcgtatcaaagatgtatgttctggtaaagccttctgtattggcagctcctgctgcttttctgtcatattcaaacatgaccaacag

SEQ ID NO: 660062 - DNA, 120 bp, Artificial Sequence
  ENSG00000184226_190 (sequence is synthesized)
caaatgtacttacattttttttcagccaattctttcttatttctagtgacagtagtaaatttacttatagcagtaaagaaaatatgagaaatacttttctgtagtgccaaatgttttaat

SEQ ID NO: 660063 - DNA, 120 bp, Artificial Sequence
  ENSG00000184226_191 (sequence is synthesized)
cactgcctatatcagcctaattgtttcctaatcaaaaattgtgagaatctaatttttggtcaaaattgtttattatggagattttgcacatataggaaaaaagtgacataaatattatta

SEQ ID NO: 660064 - DNA, 120 bp, Artificial Sequence
  ENSG00000184226_192 (sequence is synthesized)
atactaagtgacattaatatgtcattggggaataaccatatggctctctgaacatgatatgctttctaagtattcatccaacaaatatatggtcatttggaggctactaaaaataaagcc

SEQ ID NO: 660065 - DNA, 120 bp, Artificial Sequence
  ENSG00000184226_193 (sequence is synthesized)
caccaattttttaatgttgataatgcctctgacaggaaattttaaggaatatgaaagtaaaacaaaaaaatagtttgtgtcaaatgaacacgcaaggatttttgcataagacacacatta

SEQ ID NO: 660066 - DNA, 120 bp, Artificial Sequence
  ENSG00000184226_194 (sequence is synthesized)
gctatttagggcattaattgattgatgaaatattagcagtatctggcaaggttagaagatggacagataaagaaaattctgtgagttcatagagcattgtcagagtgagcattccaggga

SEQ ID NO: 660067 - DNA, 120 bp, Artificial Sequence
  ENSG00000184226_195 (sequence is synthesized)
caatacagtgtgaattacagctatttgattaatcgaatcagttctgtattgtaaaagtacaaagagatggtgttactggaatctgatttggaattggatgcttgtagattaataaactgg

SEQ ID NO: 660068 - DNA, 120 bp, Artificial Sequence
  ENSG00000184226_196 (sequence is synthesized)
tatagactgtgcttcccaatattttgcctcaaaaaagaataaattcattaggaattggaacaaaagcaatgttacataacctttgtagtattagagtagtctatatagggaaaaagctaa

SEQ ID NO: 660069 - DNA, 120 bp, Artificial Sequence
  ENSG00000184226_197 (sequence is synthesized)
taataaaaagtaatcaattcattaatctcaatggtttgctattggcattgaaactaattattgatcgcattgacatgattagtcatagctttattactagaaatgtgaacatgattttaa

SEQ ID NO: 660070 - DNA, 120 bp, Artificial Sequence
  ENSG00000184226_198 (sequence is synthesized)
acatatgtaaaactaactggccaaaataatccacagttaatttcagctaaatagctaacaatttcacaggaaaagtggaagatatttgaggctttgtaaagagaagatcacagcattcac

SEQ ID NO: 660071 - DNA, 120 bp, Artificial Sequence
  ENSG00000184226_199 (sequence is synthesized)
cttggtaccattatcttttgatttctagaaacacagtttgcaatgccttgaaagtagatgtcaaacaccagctaatgataataactgatatttattaagtactccatgtgcgtgaagttc

SEQ ID NO: 660072 - DNA, 120 bp, Artificial Sequence
  ENSG00000184226_200 (sequence is synthesized)
ctctcagcactttacatgtattaattcaaatagaaccaactactttctgaggaggatactgttattattgtccgtattttacagctgaggagaagttgaatgatttgcttcaggtcacag

SEQ ID NO: 660073 - DNA, 120 bp, Artificial Sequence
  ENSG00000184226_201 (sequence is synthesized)
ttctagtcaggggagaatagtttacggttccaaccctagcagtcttagacactgcgctctcttagctgctaattaatactgtctctatcatggaacttttatacaaaacataaacttgta

SEQ ID NO: 660074 - DNA, 120 bp, Artificial Sequence
  ENSG00000184226_202 (sequence is synthesized)
gttagtcagcaaaagtaaattttgccaaaaagaaatttggccattttaacctttttttaaaggttaaaaaaaaaatcaccgaagtctaatttaaccttttttttttttttgcttcattat

SEQ ID NO: 660075 - DNA, 120 bp, Artificial Sequence
  ENSG00000184226_203 (sequence is synthesized)
tatacaaattttgccactgagcacatagcattatgacagaactattcctgagacatggggagatactttacagtttacaatgaacattcacagacagtatatgtgaaaagtagaaattag

SEQ ID NO: 660076 - DNA, 120 bp, Artificial Sequence
  ENSG00000184226_204 (sequence is synthesized)
catttgtatcttttaggcagtacgattcgagatatttttcacaaacgtgaattttagttgttaatttaaataaatttgctcatctcaaagcagagttttgtgattattcttattttatac

SEQ ID NO: 660077 - DNA, 120 bp, Artificial Sequence
  ENSG00000184226_205 (sequence is synthesized)
aatgcctcatatcagataagaaaagatctagaagaggggaaagtcaaactctaatgataacaagtgtatctcagtcctagactacttgactggaatgatgctttcctttctttttaaatc

SEQ ID NO: 660078 - DNA, 120 bp, Artificial Sequence
  ENSG00000184226_206 (sequence is synthesized)
tttattccagcccctgtgcctgaatggttcagaagcaaccaccaggcatctctgcacaaatttgccagctaagatcagtataggccctcctccaacttatctgcaatgcactgggagaat

SEQ ID NO: 660079 - DNA, 120 bp, Artificial Sequence
  ENSG00000184226_207 (sequence is synthesized)
atatcttcatatctatttagaaacatgcatataagttattttaatactatttatacaattttagcattttcctagagtaggttttccactttcatcacccacagctacaaaattattcag

SEQ ID NO: 660080 - DNA, 120 bp, Artificial Sequence
  ENSG00000184226_208 (sequence is synthesized)
ctacaaaattattcagttattttctacagttttacaaatataccatattacgggctgcttaatatcttccttgtttaagactttaacagtatcagccgggcgtggtggctcacgcttgta

SEQ ID NO: 660081 - DNA, 90 bp, Artificial Sequence
  ENSG00000184226_209 (sequence is synthesized)
gcaaacaaaaaaaaaaactttaacagtattttgtaaatgccagtgtggtggcttacacctttaatcccagcactttgtgaggccgaggcg

SEQ ID NO: 660082 - DNA, 120 bp, Artificial Sequence
  ENSG00000184226_210 (sequence is synthesized)
accccatctctacaaaaaatacaaaaaatatccaggcgtggtgacgccttggcactagagcaagaccctgtctaaaacataaataagtacataaataaaaataaaattcatcaaccgcgt

SEQ ID NO: 660083 - DNA, 120 bp, Artificial Sequence
  ENSG00000184226_211 (sequence is synthesized)
ataaaattcatcaaccgcgtgttgaattctcaagattccccttaaacctgagaactggagagagccatttcagttatatagtaaaattaaatttgtttatcatggattattataatggac

SEQ ID NO: 660084 - DNA, 120 bp, Artificial Sequence
  ENSG00000184226_212 (sequence is synthesized)
gtatattgataaaatgtctaggtgagaattttacagttgtaattggaggtccatttaaaggttaaaatgaaatagagagttatggatgcacagctttccatattgtgtttggcaaaggaa

SEQ ID NO: 660085 - DNA, 120 bp, Artificial Sequence
  ENSG00000184226_213 (sequence is synthesized)
attgattctcggaatgatatgctaccctttttgtccactatgtgtagtgcatatggatgatggaatcactttcatgagtacagttcttatttagaacacacattccgtaatatccctaga

SEQ ID NO: 660086 - DNA, 120 bp, Artificial Sequence
  ENSG00000184226_214 (sequence is synthesized)
aaataaaaaagatttatgtgttcaaaaggagtttcttgatatgagacaagcagactgactttcaattacaaacacttagaattctgaaccttgcatttttattgcgagaactcagttatt

SEQ ID NO: 660087 - DNA, 120 bp, Artificial Sequence
  ENSG00000184226_215 (sequence is synthesized)
ttccaaagcttggtttgagagctattttcaggcagcagctttttcttgaagtcccttactgataagtatagtaagcagaaatatttcaattactctaattaaaaagcagtattcaacatg

SEQ ID NO: 660088 - DNA, 120 bp, Artificial Sequence
  ENSG00000184226_216 (sequence is synthesized)
ttgactgaaggtggagtttatgttgttcaccagacaatgagaaattgggaagggactattttagatagatcattgatgtgagaaagttaaattcacctgttaatttgtcaataaactaga

SEQ ID NO: 660089 - DNA, 120 bp, Artificial Sequence
  ENSG00000184226_217 (sequence is synthesized)
acagcagggtttcctttgttaaaatataagataatatattggaaacgcataattcttagacatgaactcaaagacatgcaggcaggtttacttttagctcatggcatatgcaaagatagg

SEQ ID NO: 660090 - DNA, 120 bp, Artificial Sequence
  ENSG00000184226_218 (sequence is synthesized)
catcaatttgtggtgaggatatgaggaagtttttatctgtacatttgtttaaagagtcatgtttagagaagcattttttaatagatactcttttcaatggaactcatatttaattagacc

SEQ ID NO: 660091 - DNA, 120 bp, Artificial Sequence
  ENSG00000184226_219 (sequence is synthesized)
aaacataaaagccaacactttaagtaatctctttttagcagattttcatggaagagtgccaaattgttttggtttcactataggtttacagtcttctgatagaattcccagttgggattt

SEQ ID NO: 660092 - DNA, 120 bp, Artificial Sequence
  ENSG00000184226_220 (sequence is synthesized)
gaaaaccaaactgtgtcatacagacatgaatacagtggcctaacgtgatgtgttgaattagctttctagatgacttaaagtatagctggggttttcctttatccagggactaacattcaa

SEQ ID NO: 660093 - DNA, 120 bp, Artificial Sequence
  ENSG00000184226_221 (sequence is synthesized)
ggttttgtgaaaaagaaaattaattttgcattgacattctggatgttggtgataatttgtagtgacattatgcctattggttgtgattgtgacaggcaggcagactggatccaaatggac

SEQ ID NO: 660094 - DNA, 120 bp, Artificial Sequence
  ENSG00000184226_222 (sequence is synthesized)
attacaagagccaaattaaatagtctgagcattggaaatttctgccttaaggaaagcagaagcttttcagcatgcacttgttttctacctccacaattatggattaatatacatcaattc

SEQ ID NO: 660095 - DNA, 120 bp, Artificial Sequence
  ENSG00000184226_223 (sequence is synthesized)
taggcagttgaggaatgacatgagaggattaatggaactggacaacattacacaagtgaagtgaaaattctgtaatgatttttctgaggtgatgtagtagacaaggcaaatgggcatcag

SEQ ID NO: 660096 - DNA, 120 bp, Artificial Sequence
  ENSG00000184226_224 (sequence is synthesized)
ctcctagactttgcacctttagaatttcaagaaaatgattgaaaagagaaatggaaaacaactatctaactaaagctggcataataatttttctcatcaaatatatacatcatttttcac

SEQ ID NO: 660097 - DNA, 120 bp, Artificial Sequence
  ENSG00000184226_225 (sequence is synthesized)
aaataaggaggagttattcaactgagtaagccagtactgtgtgcagtgtatgattttatccaaaaattgtggccacttttatctcttaaaactgtttagagaaaaattgtgcttagtgtg

SEQ ID NO: 660098 - DNA, 120 bp, Artificial Sequence
  ENSG00000184226_226 (sequence is synthesized)
tatccacaataagaaaaacagattagatgcaaaaataaatatacataaccagccttatatgtaatcatactcattttgctttatgaaatatctctgaggggaaaatattttttccatgtc

SEQ ID NO: 660099 - DNA, 120 bp, Artificial Sequence
  ENSG00000184226_227 (sequence is synthesized)
tttttgaagttttaataagattttttaaccccaatatattgagctgccctaatgcctactatttatttttttctcttctacaaagtttacctatcatatcatatttatggcaacattttc

SEQ ID NO: 660100 - DNA, 120 bp, Artificial Sequence
  ENSG00000184226_228 (sequence is synthesized)
tactactaagactgtggcggtttttttccaagttatctgaaaacttgactgtcattattgcaaattgattatttccataaaggtgctttaataaaatttctgttcttagactttaatttg

SEQ ID NO: 660101 - DNA, 120 bp, Artificial Sequence
  ENSG00000184226_229 (sequence is synthesized)
gtaagctcttacacatatttatacataatttgtgataggagttttaatctttagatttttacaatgtgattttctcatatctattcattggaagaggtagacttcttttctttaattgca

SEQ ID NO: 660102 - DNA, 120 bp, Artificial Sequence
  ENSG00000184226_230 (sequence is synthesized)
tgcattttatcctttaaccacaaaatgtgtttaaaagctatgcaagaattagcaaaagtaaactacagcaatattaaaatgacttatttggtatcacctttacagacccagctcacttag

SEQ ID NO: 660103 - DNA, 120 bp, Artificial Sequence
  ENSG00000184226_231 (sequence is synthesized)
gcaatggtattctagtaaattacaatattttttaaagcatagttttttttgttacctcttgaaatagtgattttaaagccaaaagggtcaagagtatgccaaatttaagatgattatttg

SEQ ID NO: 660104 - DNA, 120 bp, Artificial Sequence
  ENSG00000184226_232 (sequence is synthesized)
gaaaagagagatatcagcaacttaagtatgctgtatttaaggtgattgtaaaagagtttttttatatacaggacagcattaaaacagaattacaaagtctattaaccataatgaaggagt

SEQ ID NO: 660105 - DNA, 120 bp, Artificial Sequence
  ENSG00000184226_233 (sequence is synthesized)
tcaagatgcagataaaattaaatgattgtctttaagctttcaataaatttgttagccaatttaagaataattgcagcttatgaaagcttgtttatatttatctaatttcaaaaattaaga

SEQ ID NO: 660106 - DNA, 120 bp, Artificial Sequence
  ENSG00000184226_234 (sequence is synthesized)
aagaattaaaggatatttgaagttcttattatgtagtttctaacattgtgagagaatggtcaaaagactgctatgtcttatttagtgtaaatgtgtacatactttacagttaaaggaatt

SEQ ID NO: 660107 - DNA, 120 bp, Artificial Sequence
  ENSG00000184226_235 (sequence is synthesized)
actgctttgctaccatcaaggtcttaaaaccctgtatcaaaacaacctagagatttgcttcattaactcctgttcatttcgcagggcaagaaataagatcctctttggcaatcacgtgtt

SEQ ID NO: 660108 - DNA, 120 bp, Artificial Sequence
  ENSG00000184226_236 (sequence is synthesized)
acctgaattatatttaatctctttattaccttggaaatataccaagacactcacatattcacatacacacagcacacacacatacaaccctgatgcaaatatggacaaaatgaacaccct

SEQ ID NO: 660109 - DNA, 120 bp, Artificial Sequence
  ENSG00000184226_237 (sequence is synthesized)
cacttatacatcagtccatttcttcctctcataaattgaatgtgaatagctctgatggcatttctctctgactgaaaaataaggtgccatgcttactccatgcaaaacccctgttttaca

SEQ ID NO: 660110 - DNA, 120 bp, Artificial Sequence
  ENSG00000184226_238 (sequence is synthesized)
gttttatgcccctcactaaaaatagataaatctgcatttgtatgtgtcctctactcagcctccctcatgccgcctgacttcttgcagaaggtgtatatgcttttcattctgaccaataag

SEQ ID NO: 660111 - DNA, 120 bp, Artificial Sequence
  ENSG00000184226_239 (sequence is synthesized)
aggcaacttggtgagttatagagattgactgggtgcttgacatgtggtgctgctccattaaaacagtgggcagttggtactggggaggtttaggagaatttaagttgtctttattgttat

SEQ ID NO: 660112 - DNA, 120 bp, Artificial Sequence
  ENSG00000184226_240 (sequence is synthesized)
tagatgtgctcttagatgtggtaatattctaatattctattaaaaaatataaaaatgcaacttcagttcacattataataggttttctcatattgcttttgtggtccagatgtgaaacat

SEQ ID NO: 660113 - DNA, 120 bp, Artificial Sequence
  ENSG00000184226_241 (sequence is synthesized)
aacaataataatatgtaattctataatcatcttctaatgttaccaggtaatttttgtagacagagccagataaccctattgctcattatttaagtgcaaagtacattttttcaatcatta

SEQ ID NO: 660114 - DNA, 120 bp, Artificial Sequence
  ENSG00000184226_242 (sequence is synthesized)
ttgcctaagaaatttttaggagatgatggttgaatggtccttctcctcacctcaccacaccaagataggttggtatgtgtgtttgtgtttccttgctttcactttttaaaggatcctata

SEQ ID NO: 660115 - DNA, 120 bp, Artificial Sequence
  ENSG00000184226_243 (sequence is synthesized)
gaaaataacagtattgtttccatttaaaaaaaaaacttgataatttatattccattttatttctgaaaaatagccacatttttacataccccaaataaatcgccatgtgtaactatgtgc

SEQ ID NO: 660116 - DNA, 120 bp, Artificial Sequence
  ENSG00000184226_244 (sequence is synthesized)
aaaaaataattgaatgtggctgaaaacgatctcacttgttgtactataatgtatgaataataataaatgtaaaacccttgaaatcacattttcttataatactattctataggtaacact

SEQ ID NO: 660117 - DNA, 120 bp, Artificial Sequence
  ENSG00000184226_245 (sequence is synthesized)
tacagtacagtatattaaattggtactttgtgaaatgaattcttgagatacttaggcactacacaaagcattattattaaagaattataggggaaattttcccaattgaaaattgataat

SEQ ID NO: 660118 - DNA, 120 bp, Artificial Sequence
  ENSG00000184226_246 (sequence is synthesized)
taaaggtatttaaattatgtatgttgcagagcaggtaagaagttcaatgtagcaatatatttctattttgatttcaaattaagttttaattacacaaaaaattggctcaagaactaggtg

SEQ ID NO: 660119 - DNA, 120 bp, Artificial Sequence
  ENSG00000184226_247 (sequence is synthesized)
ggtgatacattttagaaaattttaaatagccaaaataatgttgaaatatgttatatggataatttatcaataaaaattattactgttaaaaattggtagaattctttcctccctgtgata

SEQ ID NO: 660120 - DNA, 120 bp, Artificial Sequence
  ENSG00000184226_248 (sequence is synthesized)
atttaagttgaatgggaatttaagtaacatacagggatgcatcttaatacctatatttgctcaacagtggtaaacacacaattaaaacttgtcctcattaaaatggacttttgtacacta

SEQ ID NO: 660121 - DNA, 120 bp, Artificial Sequence
  ENSG00000184226_249 (sequence is synthesized)
taatttgaagtaagtaatgaatatataaagtatttaaagagttgtatatcaaaatgtataacgttccatttttggctatattttgtaaaacatttttggtgtaatcagtatgactatcac

SEQ ID NO: 660122 - DNA, 120 bp, Artificial Sequence
  ENSG00000184226_250 (sequence is synthesized)
atatgtcaaatcaagtattctactatttatttaaacggatatatacctaatgtatttgaaagcttattgcactcataaaattgtatatattgtggcttcaaaagtctgtacttattcttg

SEQ ID NO: 660123 - DNA, 120 bp, Artificial Sequence
  ENSG00000184226_251 (sequence is synthesized)
cttgctttaaaaaagtagtatgtgcatttctttccaatttatttttaattaattatattaaggataacattctttactaaatgtaccttaaaattcacaataaagtttcagaaattgttt

SEQ ID NO: 660124 - DNA, 120 bp, Artificial Sequence
  ENSG00000184227_0 (sequence is synthesized)
attccgcgagccagcaagcttctgaaaagcaaacctaggaagttgctttccaacataaagtggaggtttcaacacaggagactttaagcaagttccagtgtgtctatatttggtctggct

SEQ ID NO: 660125 - DNA, 120 bp, Artificial Sequence
  ENSG00000184227_1 (sequence is synthesized)
gatcggctggactctggccttccccgctcacattagcagacagctctgccctagtgggcgtttagcctgcgacggcagcccgagaggaagagttgggcagagttgcaggggtctccacag

SEQ ID NO: 660126 - DNA, 120 bp, Artificial Sequence
  ENSG00000184227_2 (sequence is synthesized)
ctgaggcagtttggccggattatttgggttcctgctcggatggcggcgacgctgatcctggagcccgcgggccgctgctgctgggacgaaccggtgcgaatcgccgtgcgcggcctagcc

SEQ ID NO: 660127 - DNA, 120 bp, Artificial Sequence
  ENSG00000184227_3 (sequence is synthesized)
ccggagcagccggtcacgctgcgcgcgtccctgcgcgacgagaagggcgcgcttttccaggcccacgcgcgctaccgcgccgacacccttggcgagctggacctggagcgcgcgcccgcg

SEQ ID NO: 660128 - DNA, 120 bp, Artificial Sequence
  ENSG00000184227_4 (sequence is synthesized)
ctgggcggcagcttcgcggggcttgagcccatggggctgctctgggccttggagcccgagaaacccttggtgcggctggtgaagcgcgacgtgcgaacgcccttggccgtggagctggag

SEQ ID NO: 660129 - DNA, 120 bp, Artificial Sequence
  ENSG00000184227_5 (sequence is synthesized)
ccttggccgtggagctggaggtgctggatggccacgaccccgaccccgggcggctgctgtgccgggtgcggcacgagcgctacttcctcccgcccggggtgcggcgcgagccggtgcgcg

SEQ ID NO: 660130 - DNA, 120 bp, Artificial Sequence
  ENSG00000184227_6 (sequence is synthesized)
ctcttcctgccgccagaacctgggccctttcctggcattgtggacatgttcggaactggaggtggcctgctggagtatcgggctagtctgctggctgggaagggttttgctgtgatggct

SEQ ID NO: 660131 - DNA, 120 bp, Artificial Sequence
  ENSG00000184227_7 (sequence is synthesized)
tactataactatgaagacctccccaagaccatggagacgctccatctggagtactttgaagaagctgtgaactacttgctcagtcatcctgaggtaaaaggtccaggagttgggctgctt

SEQ ID NO: 660132 - DNA, 120 bp, Artificial Sequence
  ENSG00000184227_8 (sequence is synthesized)
ggaatttccaaagggggtgagctctgcctttccatggcctctttcctgaagggcatcacggctgctgtcgtcatcaacggctctgtggccaatgttgggggaaccttacgctacaagggc

SEQ ID NO: 660133 - DNA, 120 bp, Artificial Sequence
  ENSG00000184227_9 (sequence is synthesized)
gagaccctgccccctgtgggcgtcaacagaaatcgcatcaaggtgaccaaagatggctatgcagacattgtggatgtcctgaacagccctttggaaggacctgaccagaagagcttcatt

SEQ ID NO: 660134 - DNA, 120 bp, Artificial Sequence
  ENSG00000184227_10 (sequence is synthesized)
cctgtggaaagggcagagagcaccttcctgttcctggtaggtcaggatgaccacaactggaagagtgagttctatgctaatgaggcctgtaaacgcttgcaggcccatgggaggagaaag

SEQ ID NO: 660135 - DNA, 120 bp, Artificial Sequence
  ENSG00000184227_11 (sequence is synthesized)
ccccagatcatctgttacccagagacagggcactatattgagcctccttacttccccctgtgtcgggcttccctgcatgccttggtgggcagtcctattatctggggaggggagcccagg

SEQ ID NO: 660136 - DNA, 120 bp, Artificial Sequence
  ENSG00000184227_12 (sequence is synthesized)
gctcatgccatggctcaggtggatgcttggaaacaactccagactttcttccacaaacacttgggtggccacgaggggacaatcccatcaaaagtgtaaattttatttgatcatgtggcc

SEQ ID NO: 660137 - DNA, 120 bp, Artificial Sequence
  ENSG00000184227_13 (sequence is synthesized)
tctctgttgctaatctctcctggaaacatctgccacatttagtgtgtgtatgtgtattcattctttctcataacttcttaaagtttcttcccctcattattaaaatgaatttaccagtaa

SEQ ID NO: 660138 - DNA, 80 bp, Artificial Sequence
  ENSG00000184232_0 (sequence is synthesized)
gtctccgcctcggggccgccgggggcgccctgctgagcgctacccacgtgcgtccgcgccacctcgcgggcgaccccgcg

SEQ ID NO: 660139 - DNA, 120 bp, Artificial Sequence
  ENSG00000184232_1 (sequence is synthesized)
cacgtgcgtccgcgccacctcgcgggcgaccccgcggccaaggcccccggcggagcggctcccgggcgccccgaactagcccccaactttgggcgaagtttgcctgcgcctctccccgcc

SEQ ID NO: 660140 - DNA, 120 bp, Artificial Sequence
  ENSG00000184232_2 (sequence is synthesized)
gccctgcgctgctgctgctgctgccgctgctcgcgccgctgctgggaacgggtgcgccggccgagctgcgggtccgcgtgcggctgccggacggccaggtgaccgaggagagcctgcagg

SEQ ID NO: 660141 - DNA, 120 bp, Artificial Sequence
  ENSG00000184232_3 (sequence is synthesized)
tgccggacggccaggtgaccgaggagagcctgcaggcggacagcgacgcggacagcatcagcctcgagctgcgcaagcccgacggcaccctcgtctccttcaccgccgacttcaagaagg

SEQ ID NO: 660142 - DNA, 120 bp, Artificial Sequence
  ENSG00000184232_4 (sequence is synthesized)
atgtgaaggtcttccgggccctgatcctgggggagctggagaaggggcagagtcagttccaggccctctgctttgtcacccagctgcagcacaatgagatcatccccagtgaggccatgg

SEQ ID NO: 660143 - DNA, 120 bp, Artificial Sequence
  ENSG00000184232_5 (sequence is synthesized)
ccaagctccggcagaaaaatccccgggcagtgcggcaggcggaggaggttcggggtctggagcatctgcacatggatgtcgctgtcaacttcagccagggggccctgctgagcccccatc

SEQ ID NO: 660144 - DNA, 120 bp, Artificial Sequence
  ENSG00000184232_6 (sequence is synthesized)
tccacaacgtgtgtgccgaggccgtggatgccatctacacccgccaggaggatgtccggttctggctggagcaaggtgtggacagttctgtgttcgaggctctgcccaaggcctcagagc

SEQ ID NO: 660145 - DNA, 120 bp, Artificial Sequence
  ENSG00000184232_7 (sequence is synthesized)
aggcggagctgcctcgctgcaggcaggtgggggaccacgggaagccctgcgtctgccgctatggcctgagcctggcctggtacccctgcatgctcaagtactgccacagccgcgaccggc

SEQ ID NO: 660146 - DNA, 120 bp, Artificial Sequence
  ENSG00000184232_8 (sequence is synthesized)
ccacgccctacaagtgtggcatccgcagctgccagaagagctacagcttcgacttctacgtgccccagaggcagctgtgtctctgggatgaggatccctacccaggctagggtgggagca

SEQ ID NO: 660147 - DNA, 120 bp, Artificial Sequence
  ENSG00000184232_9 (sequence is synthesized)
gccctagagcctgggcccctctggccccatctcacatgactgtgaagggggtgtggcatggcagggggtctcatgaaggcacccccattcccaccctgtgccttccttgcgggcagagag

SEQ ID NO: 660148 - DNA, 120 bp, Artificial Sequence
  ENSG00000184232_10 (sequence is synthesized)
ggagagaagggctccccagatctacacccctccctcctgcatctcccctggagtgttcacttgcaagctgccaaaacatgatggcctctggttgttctgttgaactccttgaacgtttag

SEQ ID NO: 660149 - DNA, 120 bp, Artificial Sequence
  ENSG00000184232_11 (sequence is synthesized)
accctaaaaggagtctatacctggacacccacctccccagacacaactcccttccccatgcacacatctggaaggagctggcccctcagtcccttcctactccccaacaaggggctcact

SEQ ID NO: 660150 - DNA, 120 bp, Artificial Sequence
  ENSG00000184232_12 (sequence is synthesized)
atccccaaagaaggagctgttggggacccacgacgcagcccctgtactggattacagcatattctcatctctggccccgaggctgcctgtggggcgagtggagacctcccatcactgaga

SEQ ID NO: 660151 - DNA, 120 bp, Artificial Sequence
  ENSG00000184232_13 (sequence is synthesized)
cagatcacagaccacgagtgcctttcccggacctggacgttgcctccagagcaggcaccagctctttccctctctacacagaaatatttttgtaaggttctggggcagggagggagcatg

SEQ ID NO: 660152 - DNA, 120 bp, Artificial Sequence
  ENSG00000184232_14 (sequence is synthesized)
aagtacgaggaaaacttgaattccagatttttagtgcaaagtatttatcatttctaccagaaataaacgttttaagtttttacttgactaatgagacccagagtttggagaaaacttttg

SEQ ID NO: 660153 - DNA, 120 bp, Artificial Sequence
  ENSG00000184232_15 (sequence is synthesized)
gccaatgctgccacctgatgtcagaaagtgtccccacaccctagcagtggcctatcttggaacaagaacttcgaaagcacctactgtgtgctcagccatttgaggaaggaaggaggagaa

SEQ ID NO: 660154 - DNA, 120 bp, Artificial Sequence
  ENSG00000184232_16 (sequence is synthesized)
ggaagatgttactagggaaggatgagataaaacttctgcacccaagacaatgagacagacatagctgcaaccgtagtaagccagtcagaaatagccagcgcgaaggcaagagatggggtg

SEQ ID NO: 660155 - DNA, 120 bp, Artificial Sequence
  ENSG00000184232_17 (sequence is synthesized)
gagattggaaccccgcttcagatctgggctcggctacttacctgctgtgcagccatgggtcaagttgcttgacctctctgtgcctccactcccttagctataaaatgagcttacttaaga

SEQ ID NO: 660156 - DNA, 120 bp, Artificial Sequence
  ENSG00000184232_18 (sequence is synthesized)
ttccataagaaagtttggtctagaaggaatgatttttcctataagaaaaagacttcggctcggtgtggtggctcacatctgtaatcccaggatttggggaggctgaggcaggcttatcgc

SEQ ID NO: 660157 - DNA, 120 bp, Artificial Sequence
  ENSG00000184232_19 (sequence is synthesized)
ttgaaaccaggaatatgaaatcttcaggccaaacgagacccctgtctctacaaaaaatttaaaaattagcggagcacgctggtgtgtgccttgtagtcccagctattcaaggaggctgga

SEQ ID NO: 660158 - DNA, 120 bp, Artificial Sequence
  ENSG00000184232_20 (sequence is synthesized)
cttgggctggaccacttcccccacgctcttacctccagtggatggagtgttggctacttggccatgcctgcaactcctctctcccctgcatggcctcttggggagctgggtgagggggat

SEQ ID NO: 660159 - DNA, 62 bp, Artificial Sequence
  ENSG00000184232_21 (sequence is synthesized)
ctcccctgcatggcctcttggggagctgggtgagggggatgagtttggaaaatatctcacca

SEQ ID NO: 660160 - DNA, 120 bp, Artificial Sequence
  ENSG00000184254_0 (sequence is synthesized)
agcgggctgcgcagtgtccgggccgagccggtgcgccgcagactagggcgcctcgggccagggagcgcggaggagccatggccaccgctaacggggccgtggaaaacgggcagccggaca

SEQ ID NO: 660161 - DNA, 120 bp, Artificial Sequence
  ENSG00000184254_1 (sequence is synthesized)
ggaagccgccggccctgccgcgccccatccgcaacctggaggtcaagttcaccaagatatttatcaacaatgaatggcacgaatccaagagtgggaaaaagtttgctacatgtaaccctt

SEQ ID NO: 660162 - DNA, 120 bp, Artificial Sequence
  ENSG00000184254_2 (sequence is synthesized)
caactcgggagcaaatatgtgaagtggaagaaggagataagcccgacgtggacaaggctgtggaggctgcacaggttgccttccagaggggctcgccatggcgccggctggatgccctga

SEQ ID NO: 660163 - DNA, 120 bp, Artificial Sequence
  ENSG00000184254_3 (sequence is synthesized)
gtcgtgggcggctgctgcaccagctggctgacctggtggagagggaccgcgccaccttggccgccctggagacgatggatacagggaagccatttcttcatgcttttttcatcgacctgg

SEQ ID NO: 660164 - DNA, 120 bp, Artificial Sequence
  ENSG00000184254_4 (sequence is synthesized)
agggctgtattagaaccctcagatactttgcagggtgggcagacaaaatccagggcaagaccatccccacagatgacaacgtcgtgtgcttcaccaggcatgagcccattggtgtctgtg

SEQ ID NO: 660165 - DNA, 120 bp, Artificial Sequence
  ENSG00000184254_5 (sequence is synthesized)
gggccatcactccatggaacttccccctgctgatgctggtgtggaagctggcacccgccctctgctgtgggaacaccatggtcctgaagcctgcggagcagacacctctcaccgcccttt

SEQ ID NO: 660166 - DNA, 120 bp, Artificial Sequence
  ENSG00000184254_6 (sequence is synthesized)
atctcggctctctgatcaaagaggccgggttccctccaggagtggtgaacattgtgccaggattcgggcccacagtgggagcagcaatttcttctcaccctcagatcaacaagatcgcct

SEQ ID NO: 660167 - DNA, 120 bp, Artificial Sequence
  ENSG00000184254_7 (sequence is synthesized)
tcaccggctccacagaggttggaaaactggttaaagaagctgcgtcccggagcaatctgaagcgggtgacgctggagctgggggggaagaacccctgcatcgtgtgtgcggacgctgact

SEQ ID NO: 660168 - DNA, 120 bp, Artificial Sequence
  ENSG00000184254_8 (sequence is synthesized)
tggacttggcagtggagtgtgcccatcagggagtgttcttcaaccaaggccagtgttgcacggcagcctccagggtgttcgtggaggagcaggtctactctgagtttgtcaggcggagcg

SEQ ID NO: 660169 - DNA, 120 bp, Artificial Sequence
  ENSG00000184254_9 (sequence is synthesized)
tggagtatgccaagaaacggcccgtgggagaccccttcgatgtcaaaacagaacaggggcctcagattgatcaaaagcagttcgacaaaatcttagagctgatcgagagtgggaagaagg

SEQ ID NO: 660170 - DNA, 120 bp, Artificial Sequence
  ENSG00000184254_10 (sequence is synthesized)
aaggggccaagctggaatgcgggggctcagccatggaagacaaggggctcttcatcaaacccactgtcttctcagaagtcacagacaacatgcggattgccaaagaggagattttcgggc

SEQ ID NO: 660171 - DNA, 120 bp, Artificial Sequence
  ENSG00000184254_11 (sequence is synthesized)
cagtgcaaccaatactgaagttcaaaagtatcgaagaagtgataaaaagagcgaatagcaccgactatggactcacagcagccgtgttcacaaaaaatctcgacaaagccctgaagttgg

SEQ ID NO: 660172 - DNA, 120 bp, Artificial Sequence
  ENSG00000184254_12 (sequence is synthesized)
cttctgccttagagtctggaacggtctggatcaactgctacaacgccctctatgcacaggctccatttggtggctttaaaatgtcaggaaatggcagagaactaggtgaatacgctttgg

SEQ ID NO: 660173 - DNA, 120 bp, Artificial Sequence
  ENSG00000184254_13 (sequence is synthesized)
ccgaatacacagaagtgaaaactgtcaccatcaaacttggcgacaagaacccctgaaggaaaggcggggctccttcctcaaacatcggacggcggaatgtggcagatgaaatgtgctgga

SEQ ID NO: 660174 - DNA, 120 bp, Artificial Sequence
  ENSG00000184254_14 (sequence is synthesized)
gactggggatgcctataggttgtctgtgaaatcgcagtcctgcctggggagggagctgttggccatttctgtgtttccctttaaaccagatcctggagacagtgagatactcagggcgtt

SEQ ID NO: 660175 - DNA, 120 bp, Artificial Sequence
  ENSG00000184254_15 (sequence is synthesized)
gttaacagggagtggtatttgaagtgtccagcagttgcttgaaatgctttgccgaatctgactccagtaagaatgtgggaaaaccccctgtgtgttctgcaagcagggctcttgcaccag

SEQ ID NO: 660176 - DNA, 120 bp, Artificial Sequence
  ENSG00000184254_16 (sequence is synthesized)
cggtctcctcagggtggacctgcttacagagcaagccacgcctctttccgaggtgaaggtgggaccattccttgggaaaggattcacagtaaggttttttggtttttgttttttgttttc

SEQ ID NO: 660177 - DNA, 120 bp, Artificial Sequence
  ENSG00000184254_17 (sequence is synthesized)
ttgtttttaaaaaaaggatttcacagtgagaaagttttggttagtgcataccgtggaagggcgccagggtctttgtggattgcatgttgacattgaccgtgagattcggcttcaaaccaa

SEQ ID NO: 660178 - DNA, 120 bp, Artificial Sequence
  ENSG00000184254_18 (sequence is synthesized)
tactgcctttggaatatgacagaatcaatagcccagagagcttagtcaaagacgatatcacggtctaccttaaccaaggcactttcttaagcagaaaatattgttgaggttacctttgct

SEQ ID NO: 660179 - DNA, 120 bp, Artificial Sequence
  ENSG00000184254_19 (sequence is synthesized)
gctaaagatccaatcttctaacgccacaacagcatagcaaatcctaggataattcacctcctcatttgacaaatcagagctgtaattcgctttaacaaattacgcatttctatcacgttc

SEQ ID NO: 660180 - DNA, 120 bp, Artificial Sequence
  ENSG00000184254_20 (sequence is synthesized)
actaacagcttatgataagtctgtgtagtcttccttttctccagttctgttacccaatttagattagtaaagcgtacacaactggaaagactgctgtaataacacagccttgttattttt

SEQ ID NO: 660181 - DNA, 120 bp, Artificial Sequence
  ENSG00000184254_21 (sequence is synthesized)
aagtcctattttgatattaatttctgattagttagtaaataacacctggattctatggaggacctcggtcttcatccaagtggcctgagtatttcactggcaggttgtgaatttttcttt

SEQ ID NO: 660182 - DNA, 120 bp, Artificial Sequence
  ENSG00000184254_22 (sequence is synthesized)
tcctctttggggatccaaatgatgatgtgcaatttcatgttttaacttgggaaactgaaagtgttcccatatagcttcaaaaacaaaaacaaatgtgttatccgacggatacttttatgg

SEQ ID NO: 660183 - DNA, 120 bp, Artificial Sequence
  ENSG00000184254_23 (sequence is synthesized)
ttactaactagtactttcctaattgggaaagtagtgcttaagtttgcaaattaagttggggagggcaataataaaatgagggcccgtaacagaaccagtgtgtgtataacgaaaaccatg

SEQ ID NO: 660184 - DNA, 120 bp, Artificial Sequence
  ENSG00000184254_24 (sequence is synthesized)
tataaaatgggcctatcacccttgtcagagatataaattaccacatttgccttcccttcatcagctaacacttatcacttatactaccaataacttgttaaatcaggatttggcttcata

SEQ ID NO: 660185 - DNA, 120 bp, Artificial Sequence
  ENSG00000184254_25 (sequence is synthesized)
cactgaattttcagtattttatctcaagtagatatagacactaaccttgatagtgatacgttagagggttcctattcttccattgtacgataatgtctttaatatgaaatgctacattat

SEQ ID NO: 660186 - DNA, 120 bp, Artificial Sequence
  ENSG00000184254_26 (sequence is synthesized)
ttataattggtagagttattgtatctttttatagttgtaagtacacagaggtggtatatttaaacttctgtaatatactgtatttagaaatggaaatatatatagtgttaggtttcactt

SEQ ID NO: 660187 - DNA, 120 bp, Artificial Sequence
  ENSG00000184254_27 (sequence is synthesized)
cttttaaggtttacccctgtggtgtggtttaaaaatctataggcctgggaattccgatcctagctgcagatcgcatcccacaatgcgagaatgataaaataaaattggatatttgagaaa

SEQ ID NO: 660188 - DNA, 120 bp, Artificial Sequence
  ENSG00000184254_28 (sequence is synthesized)
ctgggaacacacaagcacacacgactggccacacagcagaggccactgtgctacagatggaagatcagatgccagtgtgcgttccttcccagcacagctttaaatccgcctggcctccaa

SEQ ID NO: 660189 - DNA, 120 bp, Artificial Sequence
  ENSG00000184254_29 (sequence is synthesized)
ggaagccgccggccctgccgcgccccatccgcaacctggaggtcaagttcaccaaggtgaggcgggcgcccctcccacccgacggccgcgggcccctgcgctgggcagccagactcgggg

SEQ ID NO: 660190 - DNA, 120 bp, Artificial Sequence
  ENSG00000184254_30 (sequence is synthesized)
gggtccgccgggcgccgccgagacccgagcctccctgcccgggcgcggctctccagaaaccgcacctttcgcgggacgtctcgggcgggatcgcaggcggcggggctcggcgctgtgagc

SEQ ID NO: 660191 - DNA, 120 bp, Artificial Sequence
  ENSG00000184254_31 (sequence is synthesized)
cggggctcggcgctgtgagcctcgaagccgggaaaccgaggccgtccagcgcccgcgcggggccgggccgcccgcatccctgcgaggccccgacgtgtccctgcgctgcccgctttgatc

SEQ ID NO: 660192 - DNA, 120 bp, Artificial Sequence
  ENSG00000184254_32 (sequence is synthesized)
gcgagtggaggtgcgcgccgcgttgactcggagcgcgctggttttggggagctccctccccaaaaacccctgcgatgatttccagggtggacgagtctggctttgagagggtcggagggt

SEQ ID NO: 660193 - DNA, 120 bp, Artificial Sequence
  ENSG00000184254_33 (sequence is synthesized)
ccgagagcgccaagagagagtccgggaggcagatggcggagctgcagttggaagactggggaagcgggtcctccgagcaaagcgcagcgggcgccttccgtgcttagtttatacccggct

SEQ ID NO: 660194 - DNA, 120 bp, Artificial Sequence
  ENSG00000184254_34 (sequence is synthesized)
acctgggcctttgggaagcggtgggtcgcgaggccgcagaagcgcacggttctctgcctcctcgctctgtgggctgggaggctacagcgttggcagaacggcgagattacctgcccgggg

SEQ ID NO: 660195 - DNA, 120 bp, Artificial Sequence
  ENSG00000184254_35 (sequence is synthesized)
cagaaaggaataaaagaagatggtgaggcctccgaggcctctgagctggggctgaggagggccgagagacccgggtccgggagcgcgacccgatggaggacacccccaggctgtctggcg

SEQ ID NO: 660196 - DNA, 120 bp, Artificial Sequence
  ENSG00000184254_36 (sequence is synthesized)
tgcgcgtctgtcgtgggccggtgctggggcactttagaggcacaggccaggccgagagccattgccttaactttccccacctttggcttctcttgatttttgcttttacccatagccccc

SEQ ID NO: 660197 - DNA, 120 bp, Artificial Sequence
  ENSG00000184254_37 (sequence is synthesized)
aactccagctgacaccgcacttagagaatttcctcatccgttttactttaagaagtagcaattatctttctcaaagaattttaatcaagcggagaaagttgcagggcactatgtgtggcc

SEQ ID NO: 660198 - DNA, 120 bp, Artificial Sequence
  ENSG00000184254_38 (sequence is synthesized)
ttcagatttgggtctcttggcacttaattcccaatgtcggctgagcctctgatcacaagacatttaaattaactgttttcagaaggctctgtaatcaacaaagacacgtcgctgtaaact

SEQ ID NO: 660199 - DNA, 120 bp, Artificial Sequence
  ENSG00000184254_39 (sequence is synthesized)
aaacgctggaaattattcttaatgtagttttatttgtaatatcagcttcagagtgaaaattccaacacgaattctgggaagagtgaaaatggtacccgaattttgtaagaccctaacccc

SEQ ID NO: 660200 - DNA, 120 bp, Artificial Sequence
  ENSG00000184254_40 (sequence is synthesized)
aggtgcttggctgctgctactgatggttaagtggggaggttgtttgttttcttttggttgtacaggatttcaaaatactgtatatagaaaccagacagtaaatgtattatggtcctttta

SEQ ID NO: 660201 - DNA, 120 bp, Artificial Sequence
  ENSG00000184254_41 (sequence is synthesized)
gacaaagtctatggctgagtgctccagtctgatctcaggctcccaggatcacgtgggtatcaaacggaggagctgcaggtgagccagtcggcatctttgcaactggctcctgagaccaga

SEQ ID NO: 660202 - DNA, 120 bp, Artificial Sequence
  ENSG00000184258_0 (sequence is synthesized)
atggcttggttggaagacgtggattttctggaagacgtacctttgttggaagacatacctttgttggaagacgtacctttgttggaagacgtacctttgttggaagacacaagtaggctg

SEQ ID NO: 660203 - DNA, 120 bp, Artificial Sequence
  ENSG00000184258_1 (sequence is synthesized)
gaagacattaatttgatggaagacatggctttgttggaagacgtggatttgctggaagacacggatttcctggaagacctggatttttcggaagctatggatttgagggaagacaaggat

SEQ ID NO: 660204 - DNA, 120 bp, Artificial Sequence
  ENSG00000184258_2 (sequence is synthesized)
tttctggaagacatggatagtctggaagacatggctttgttggaagacgtggacttgctggaagacacggatttcctggaagacccggattttttggaagctatagatttaagggaagac

SEQ ID NO: 660205 - DNA, 120 bp, Artificial Sequence
  ENSG00000184258_3 (sequence is synthesized)
agacatggcttttttggaagacgtagattttcaggaagacccaaattatccggaagacttggattgttgggaagacgtggattttctggaagactgggaggttactggaagacatggatt

SEQ ID NO: 660206 - DNA, 120 bp, Artificial Sequence
  ENSG00000184258_4 (sequence is synthesized)
ttctggaagacatggattttctggaagacgtggatcttcaggaagacatatattggctggaagacctggattttttccggaagatgtggattgactggaagacctggatttggtggaaga

SEQ ID NO: 660207 - DNA, 120 bp, Artificial Sequence
  ENSG00000184258_5 (sequence is synthesized)
cgtagatttttctggaagacactgactgactggaagacctggatttctttctggaagacactgattgactggaagacctggatttctttctggaagacactgattgactggaagatctag

SEQ ID NO: 660208 - DNA, 120 bp, Artificial Sequence
  ENSG00000184260_0 (sequence is synthesized)
atgtctggtcgtggcaaacaaggaggcaaggcccgcgccaaggccaagtcgcgctcgtcccgcgctggcctccagttcccggtagggcgagtgcaccgcttgctgcgcaaaggcaactac

SEQ ID NO: 660209 - DNA, 120 bp, Artificial Sequence
  ENSG00000184260_1 (sequence is synthesized)
tacatggcggcggtcctcgagtacctgaccgccgagatcctggagctggcgggcaacgcggctcgggacaacaagaagacgcgcatcatccctcgtcacctccagctggccatccgcaac

SEQ ID NO: 660210 - DNA, 120 bp, Artificial Sequence
  ENSG00000184260_2 (sequence is synthesized)
gacgaggaactgaacaagctgctgggcaaagtcaccatcgcccagggcggcgttttgcctaacatccaggccgttctgttaccaaagaaaaccgaaagccacaaagccaaaagcaaataa

SEQ ID NO: 660211 - DNA, 120 bp, Artificial Sequence
  ENSG00000184261_0 (sequence is synthesized)
gaaaggagcgcttccccggactcggctcggctccgaggctctgaagccgacgccgccagctcagccccgggggcgggagcaggactgcccgcacagcccgcacctaggaggcgccgatcc

SEQ ID NO: 660212 - DNA, 120 bp, Artificial Sequence
  ENSG00000184261_1 (sequence is synthesized)
cgaacgcctcatgggacgcccccgggggctctctccacgccttgctgccgcgtcccggtcctaggcgcccgggatccacggcccaccccgcccgcagcccgcggcctgtctggagaggag

SEQ ID NO: 660213 - DNA, 80 bp, Artificial Sequence
  ENSG00000184261_2 (sequence is synthesized)
caggggcctagctgcggagccccgcgcccgagagcggcgggtaaggagccgcgggagccggcgaggcgtcggggcgcgca

SEQ ID NO: 660214 - DNA, 120 bp, Artificial Sequence
  ENSG00000184261_3 (sequence is synthesized)
gaggagcgcccctgcccgggcacccgctgggccacgggactcgcgtgtggcctgagcgccggggaggaggcggaggcgcccctctgtccgggctctgggaaggcgacgaggggctctgcg

SEQ ID NO: 660215 - DNA, 120 bp, Artificial Sequence
  ENSG00000184261_4 (sequence is synthesized)
cgggctctgggaaggcgacgaggggctctgcgaaggcggcgaggggctccgcggcggccccggacccctggccaccatcctcacgctcctgctcccgccggggggatgtcgtggcccggg

SEQ ID NO: 660216 - DNA, 120 bp, Artificial Sequence
  ENSG00000184261_5 (sequence is synthesized)
gagctccggaccatgtcctcccgcagcccccggcccccgccccgccgtagccgccgccgcctgccgcgcccctcctgctgctgctgctgctgccgccgttcgcacctcaacgaggacacc

SEQ ID NO: 660217 - DNA, 120 bp, Artificial Sequence
  ENSG00000184261_6 (sequence is synthesized)
gcttcgtgctgctggcggcgctcatcggcctctacctggtggcgggtgccacagtcttctcggcgctcgagagccccggcgaggcggaggcgcgggcgcgctggggcgccacgctgcgca

SEQ ID NO: 660218 - DNA, 120 bp, Artificial Sequence
  ENSG00000184261_7 (sequence is synthesized)
cgcaacttcagcgctgcgcacggcgtggccgagccagagctgcgcgccttcctccggcactacgaggccgcgctggccgccggcgtccgcgccgacgcgctgcgcccgcgctgggacttc

SEQ ID NO: 660219 - DNA, 120 bp, Artificial Sequence
  ENSG00000184261_8 (sequence is synthesized)
gcgccttctacttcgtgggcaccgtggtgtcaaccataggtttcggcatgaccacccccgcgacggtgggcgggaaggccttcctcatcgcctacgggctgttcggctgcgctgggacca

SEQ ID NO: 660220 - DNA, 120 bp, Artificial Sequence
  ENSG00000184261_9 (sequence is synthesized)
tcctgttcttcaacctcttcctggagcgcatcatctcgctgctggccttcatcatgcgcgcctgccgggagcgccagctgcgccgcagcggcctgctgcccgccaccttccgccgcggct

SEQ ID NO: 660221 - DNA, 120 bp, Artificial Sequence
  ENSG00000184261_10 (sequence is synthesized)
ccgcgctctcggaggccgacagcctggcgggctggaagccctcggtgtaccacgtgctgctcatcctgggcctgttcgccgtgctgctgtcctgctgcgcctcggccatgtacaccagcg

SEQ ID NO: 660222 - DNA, 120 bp, Artificial Sequence
  ENSG00000184261_11 (sequence is synthesized)
tggagggctgggactacgtggactcgctctacttctgcttcgtcaccttcagcaccatcggcttcggggacctggtgagcagccagcacgccgcctaccggaaccaggggctctaccgcc

SEQ ID NO: 660223 - DNA, 120 bp, Artificial Sequence
  ENSG00000184261_12 (sequence is synthesized)
tgggcaacttcctcttcatcctgctcggcgtgtgctgcatttactcgctcttcaacgtcatctccatcctcatcaagcaggtgctcaactggatgctgcgcaagctgagctgccgctgct

SEQ ID NO: 660224 - DNA, 120 bp, Artificial Sequence
  ENSG00000184261_13 (sequence is synthesized)
tcaactggatgctgcgcaagctgagctgccgctgctgcgcgcgctgctgcccggctcctggcgcgcccctggcccggcgcaatgccatcaccccaggctcccggctgcgccgccgcctgg

SEQ ID NO: 660225 - DNA, 120 bp, Artificial Sequence
  ENSG00000184261_14 (sequence is synthesized)
acgccgagggccgccgcctctcgggcgagctcatctccatgcgcgacctcacggcctccaacaaggtgtcgctggcgctgctgcagaagcagctgtcggagacggccaacggctacccgc

SEQ ID NO: 660226 - DNA, 120 bp, Artificial Sequence
  ENSG00000184261_15 (sequence is synthesized)
gcagcgtgtgcgtcaacacgcgccagaacggcttctcgggcggcgtgggcgcgctgggcatcatgaacaaccggctggccgagaccagcgcctccaggtagaccgcccgtccgcccgcgc

SEQ ID NO: 660227 - DNA, 120 bp, Artificial Sequence
  ENSG00000184261_16 (sequence is synthesized)
cggggaccctctccaggccgcggggccgccgggcgtggtttgcttctctcagtcactgctggcgctttcttaatctttatccaataaaatgaaacaaaaaaaatttttttaaagaaatac

SEQ ID NO: 660228 - DNA, 120 bp, Artificial Sequence
  ENSG00000184261_17 (sequence is synthesized)
tatttggccaggcctgatgttatcaagggcaggttttggggacgcctgtgttccttgtgagtcccctcttggagaaccgtggcccccagcagattctccttcagggagagaaaacgtggc

SEQ ID NO: 660229 - DNA, 120 bp, Artificial Sequence
  ENSG00000184261_18 (sequence is synthesized)
cccccaggcccacacccagggcataccgcagcgaggagggttttgcagactggcactaaaccccgtccccatgcacagaagcagccggcaaccccaaagcatatggtgcaacttttcgtg

SEQ ID NO: 660230 - DNA, 120 bp, Artificial Sequence
  ENSG00000184261_19 (sequence is synthesized)
gctctgaattacctcctcagcatttagaatcctggcccagcctagcagcttccttctggtcgtcagaagtgatatagtcacagttttgacaggtgggggttgggacagccatatgttgcc

SEQ ID NO: 660231 - DNA, 120 bp, Artificial Sequence
  ENSG00000184261_20 (sequence is synthesized)
tcccgatgtatatatatagaacagccactacacacagagaatggtgtagtattatgcaatgagatgaaacatagcaccaacttgcggactgtggcatttcccccagatttggaaattgca

SEQ ID NO: 660232 - DNA, 120 bp, Artificial Sequence
  ENSG00000184261_21 (sequence is synthesized)
gtggtgaggggcttagctggcctttctcagctcagagttagtccatttagcacagagcacagggcagctacttctaatggtgggcggtccagggcacctgtgaggaggggagcggtgagg

SEQ ID NO: 660233 - DNA, 120 bp, Artificial Sequence
  ENSG00000184261_22 (sequence is synthesized)
ctgcaggagccctgctgggcttttagctggctgatctccaggctcggatcggcagatcttgaatcccccaaccgtcctttctttcacaagctcatccacagcagtgcttttcaatattaa

SEQ ID NO: 660234 - DNA, 120 bp, Artificial Sequence
  ENSG00000184261_23 (sequence is synthesized)
ccaggaatatctgagtcttctcagacaagatatttatttgttggtgtggattttttttttcttaactactgttgatcagttcaacttttccccctttaagagatcatggggttgccgggc

SEQ ID NO: 660235 - DNA, 120 bp, Artificial Sequence
  ENSG00000184261_24 (sequence is synthesized)
gcagccctccagcttctcctcctcctcctctgaaggaggcacctctgccagctgcgtccttgggaaccagggcctgcagcaccaggaacccaaaagaagccatcttgcaaatgtcagggt

SEQ ID NO: 660236 - DNA, 120 bp, Artificial Sequence
  ENSG00000184261_25 (sequence is synthesized)
gcagaggaaggcaggagggaggtagctggtgaaactggtggatggaagtaatgttaggattacagttttgctctcgggctgagggacagattctcccagacttgccttctgcagcatagg

SEQ ID NO: 660237 - DNA, 120 bp, Artificial Sequence
  ENSG00000184261_26 (sequence is synthesized)
gggtccctgacctggaggaaggccagatacccaggcttcattgaaaggatagtggtctgggggtgtaaacgaacactctctctgcccatttttctcatatatgatgagggcaaggacagg

SEQ ID NO: 660238 - DNA, 120 bp, Artificial Sequence
  ENSG00000184261_27 (sequence is synthesized)
tgccagagtttatacaggcacggcgtgacccaccagtatgcacagcttctgataggaagtcttagaaaagcaccgcctcaccgcctccagctggagccatgctgtgaaatctctctccct

SEQ ID NO: 660239 - DNA, 120 bp, Artificial Sequence
  ENSG00000184261_28 (sequence is synthesized)
ggcaaatgtgcgtggaacacacacacacacaaacatgcacgcatgcgctcacgcacccagcattagagtcaaacttgaatgtcaaactcttctttccccttctagttcatggcaggaagg

SEQ ID NO: 660240 - DNA, 120 bp, Artificial Sequence
  ENSG00000184261_29 (sequence is synthesized)
gaaagcttacctgagatctcagtgactctccagctattttgggtaatttctgatttgagttgggattggtttttaaacacaggccctaatctggggtgaagccagtgaagcagcgctggc

SEQ ID NO: 660241 - DNA, 120 bp, Artificial Sequence
  ENSG00000184261_30 (sequence is synthesized)
caggagagacgtcagtcttgctaaatcctgaaggtgggttcctgtgaaaaccatgctttcaggattcactgtgactgtcaggccagcccagtgagtgccccccatccaacccatggttgc

SEQ ID NO: 660242 - DNA, 120 bp, Artificial Sequence
  ENSG00000184261_31 (sequence is synthesized)
ggtcacagtgaagggattgcccacgcaggggcgcacgtgttctctagggcagggccctctgacaggacctggaaataaaatccacatttatccctttaaaaaagggaacgattaaaaggc

SEQ ID NO: 660243 - DNA, 120 bp, Artificial Sequence
  ENSG00000184261_32 (sequence is synthesized)
atccaattagaggtgttacctaggcaacaggaaataacttggggatcagagccatccagagagggaagaagagatccccatgatagaggcatctagacagtgaggacttgatctgcgggc

SEQ ID NO: 660244 - DNA, 120 bp, Artificial Sequence
  ENSG00000184261_33 (sequence is synthesized)
aaaataacagcctacccacaggaagtgagccccagcaacagtacagcagcctaaaacccaggcatcaagactgtgtgagctagacaggtctaaagaaacctccaggcaatcccccgccca

SEQ ID NO: 660245 - DNA, 120 bp, Artificial Sequence
  ENSG00000184261_34 (sequence is synthesized)
gcgtgcaggactacacagaatcgtggtctccatgggaggaaccaggacccacctccagagaagaaaaactcaaaatgtttcttggcagtcttctctgttggcggtgcttcctagactcta

SEQ ID NO: 660246 - DNA, 120 bp, Artificial Sequence
  ENSG00000184261_35 (sequence is synthesized)
tcctaagttgcttatgctgcagcctcagctgtttttacttgttttcctatgctttggttttggaaagaggcaattggaggcagcttgagcaatcttctaaaggaatggtaagcatggttt

SEQ ID NO: 660247 - DNA, 120 bp, Artificial Sequence
  ENSG00000184261_36 (sequence is synthesized)
caaggggcaggaaaatgagacccttcctcttcccacctcccaacttcccagagaaacgccagtcctccaaggtacaatggcagctcaggatccagtggcacatgtgtatttttgcctatg

SEQ ID NO: 660248 - DNA, 120 bp, Artificial Sequence
  ENSG00000184261_37 (sequence is synthesized)
ttcccctgtccccatcccccaatccagtctcagtcacactgccatgatacatcacaccatcatccttcatctcaggccaaagggctcagcgccccagacgacagggactgcttccctgaa

SEQ ID NO: 660249 - DNA, 120 bp, Artificial Sequence
  ENSG00000184261_38 (sequence is synthesized)
gcagggatgtggttctcccatcatttcaggaacagtgacattgatagggatgcctttctttggtgcaggttcttctgaacctcaggccaagaaagagctccattccctcagatgctgtgg

SEQ ID NO: 660250 - DNA, 120 bp, Artificial Sequence
  ENSG00000184261_39 (sequence is synthesized)
cctctctcactgtcttgggggtctccagtttgcacaccactggtagctcactgtagcctacaatttcctcatgctccaggatttgcttcctaaccttaggcctggacttacccatcatgc

SEQ ID NO: 660251 - DNA, 120 bp, Artificial Sequence
  ENSG00000184261_40 (sequence is synthesized)
cggtgctgtggggctcccttaaagtttgaatgaactccaagaggccctcaccatatgactgtggccacagagaatccagagtcttggctagcagccttctcagagctgaggagaaaggta

SEQ ID NO: 660252 - DNA, 120 bp, Artificial Sequence
  ENSG00000184261_41 (sequence is synthesized)
aagaagccaccctgggtgtcctagcttgctaaagccaggtggtcaggcctttgtgtcctctgaatgaagcagtgcctccaggcctggagaaggcatcagaaggcttaggcaatctcaggc

SEQ ID NO: 660253 - DNA, 120 bp, Artificial Sequence
  ENSG00000184261_42 (sequence is synthesized)
tctcattttgtggaaaatgccagacagccctgggcatttgcacagcatcatgcatatatgtatatatatatacacacacacatacacaccagccttacaaagagctactaacccttttcc

SEQ ID NO: 660254 - DNA, 120 bp, Artificial Sequence
  ENSG00000184261_43 (sequence is synthesized)
ccaaggaaaagtctcagtctgggccactttaagaagaaagatttcccatttttaactctctagagatgtaccagggcctggaaaatccctctctgccttgggggagttttatgtacaatt

SEQ ID NO: 660255 - DNA, 120 bp, Artificial Sequence
  ENSG00000184261_44 (sequence is synthesized)
tgcatgtattcaggtttcacacagaagccagcatccaaacccaagccaaaccctggaaaatagctgctaaattgacccaggatcctccgtccttcagacaggcctcccagcagaccccct

SEQ ID NO: 660256 - DNA, 120 bp, Artificial Sequence
  ENSG00000184261_45 (sequence is synthesized)
cttcctgtggactctggggtgagggatgactgagccctcatggccaaaggagaagcttctggggaactgaggcagacggcagcccagtcaggcagagaccataggagcgacgggccctgt

SEQ ID NO: 660257 - DNA, 120 bp, Artificial Sequence
  ENSG00000184261_46 (sequence is synthesized)
ggttcgatcttactgtaactttttacattcttaaaaaacaaaaagcacaattccacatacacactgtctggaaagcacagccagacagccagcctagggcatctgagtccagaagaggcg

SEQ ID NO: 660258 - DNA, 120 bp, Artificial Sequence
  ENSG00000184261_47 (sequence is synthesized)
ctggggctttatctgttgcagggttcttgtattgttgtataatgtgctggtggtgactcaaggctcctcactttgtagggtggagagggagggagggagggcctgctgaggccattcctg

SEQ ID NO: 660259 - DNA, 120 bp, Artificial Sequence
  ENSG00000184261_48 (sequence is synthesized)
acccccagggtgggctcatcagcatggacttggggcctggactcttgcccctgaagcagctctggcactttcaggcaccccagagcacaattgctacaccttccacgctagtctcatgca

SEQ ID NO: 660260 - DNA, 120 bp, Artificial Sequence
  ENSG00000184261_49 (sequence is synthesized)
ttgaggatttctgcactcggacctggccccaaaccctcttccccttccccttcttccctaaggaagctcccccttgctttacaaatcattttttatgctatctgttctctcaggaggggg

SEQ ID NO: 660261 - DNA, 120 bp, Artificial Sequence
  ENSG00000184261_50 (sequence is synthesized)
ctagagcatgcgggacaagcctgcagggtttctcaaacaatacatctatttttctgagcagcattccaagagaggacttgaagggtgtttaaattaacgatgaataaaatgcagcctgcc

SEQ ID NO: 660262 - DNA, 120 bp, Artificial Sequence
  ENSG00000184261_51 (sequence is synthesized)
gtgccagcctgcatgaccgtcctgatccccgactctgccctttctgccaaagagccagcagagcacatgtctcggagaagaccccctatcaccttctaggttgtcttgccacagaacagg

SEQ ID NO: 660263 - DNA, 120 bp, Artificial Sequence
  ENSG00000184261_52 (sequence is synthesized)
agcacccagcaatacagcagagcttcccacgggtttctacagtgtcttcagagaaccgcaaggagggtcagcccttgtggagtctctgacccaaattctgacattacctctatgacttat

SEQ ID NO: 660264 - DNA, 120 bp, Artificial Sequence
  ENSG00000184261_53 (sequence is synthesized)
tcacaaagtgacctcacactgcacttttctgagcctcagattgtgcatctaaaaaccgaggataatgcttacctcactaggtggttgtgaagaaatgtaaataaaccgtgtgtgaaaatg

SEQ ID NO: 660265 - DNA, 120 bp, Artificial Sequence
  ENSG00000184270_0 (sequence is synthesized)
cacccctcccggtagctcttataaattacatcaaattggttattctttccacattcttctccttgtaaaagaagctgtaactgcaattttagccgtaatgtcaggacgcggaaagcaggg

SEQ ID NO: 660266 - DNA, 120 bp, Artificial Sequence
  ENSG00000184270_1 (sequence is synthesized)
aggcaaggcccgcgctaaggccaagtcgcgctcgtcccgcgctggtctccagttcccggtggggcgagtgcaccgcttgctgcgcaaaggcaactacgcggagcgggtcggggcaggcgc

SEQ ID NO: 660267 - DNA, 120 bp, Artificial Sequence
  ENSG00000184270_2 (sequence is synthesized)
agctggcgggcaacgcggctcgggacaacaagaagacgcgcatcatccctcgccatctgcaactagccgtgaggaatgacgaagagctcaacaagttactcgggggtgtcaccattgccc

SEQ ID NO: 660268 - DNA, 120 bp, Artificial Sequence
  ENSG00000184270_3 (sequence is synthesized)
agggcggcgtcttgcccaatatccaggctgtcctgttgcccaagaaaacggagagtcacaagcctggcaagaacaagtaattaagaggcttgacaccatactcattcaccccaaaggctc

SEQ ID NO: 660269 - DNA, 120 bp, Artificial Sequence
  ENSG00000184271_0 (sequence is synthesized)
gcggcgaaggcggctcgggctcgggctccggatgtgctaggtgtgggccggcccccacccgaccctgacaagtgaccatggatcctggagccgggtcagagacatctctgactgtcaatg

SEQ ID NO: 660270 - DNA, 120 bp, Artificial Sequence
  ENSG00000184271_1 (sequence is synthesized)
agcaggtcatcgtgatgtcaggtcatgagaccatccgagtgctggaagtcggagtggatgcccaactccctgctgaggaagagagcaaaggactggagggtgtggccgccgagggctccc

SEQ ID NO: 660271 - DNA, 120 bp, Artificial Sequence
  ENSG00000184271_2 (sequence is synthesized)
agagcggagaccctgctgaagccagtcaagctgctggtgaagctgggccagacaacctgggctcctctgcagaggcaactgtgaagtcacccccggggatccctccgagccctgccactg

SEQ ID NO: 660272 - DNA, 120 bp, Artificial Sequence
  ENSG00000184271_3 (sequence is synthesized)
ccattgccaccttcagccaagccccaagccagcctcaggcatcgcagaccctgacgccactggctgtacaagctgccccccaggtcttgactcaggaaaacttagccacagttctgacag

SEQ ID NO: 660273 - DNA, 120 bp, Artificial Sequence
  ENSG00000184271_4 (sequence is synthesized)
gagttatggttccagcaggggcagttactcaacctcttcttatccccatcagtattgcaggtcaagtggctggtcagcaggggctggccgtgtggacaattcctacagcaactgtggctg

SEQ ID NO: 660274 - DNA, 120 bp, Artificial Sequence
  ENSG00000184271_5 (sequence is synthesized)
ccctcccaggactgaccgctgcttctcctacggggggagtgttcaagccacctttagccggtctccaagcagctgctgtgctgaacaccgctcttccggcaccggtacaagctgccgcac

SEQ ID NO: 660275 - DNA, 120 bp, Artificial Sequence
  ENSG00000184271_6 (sequence is synthesized)
cagtacaggcctcctcgacggcccaaccccggccaccagcccagccccagacgctgttccagacccagccgctgctgcagaccacacctgccatcctcccgcagcccactgctgccaccg

SEQ ID NO: 660276 - DNA, 120 bp, Artificial Sequence
  ENSG00000184271_7 (sequence is synthesized)
ctgctgcccctacccccaagccagtggacacccccccacagatcaccgtccagcctgcaggcttcgcatttagcccaggaatcatcagtgctgcttccctcgggggacagacccagatcc

SEQ ID NO: 660277 - DNA, 120 bp, Artificial Sequence
  ENSG00000184271_8 (sequence is synthesized)
tggggtccctcactacagctccagtcattaccagcgccattcccagcatgccagggatcagcagtcagatcctcaccaatgctcagggacaggttattggaacccttccatgggtagtga

SEQ ID NO: 660278 - DNA, 120 bp, Artificial Sequence
  ENSG00000184271_9 (sequence is synthesized)
actcagctagtgtggcggccccagcaccagcccaaagcctgcaggtccaggccgtgaccccccagctgttgttgaacgcccagggccaggtgattgcgaccctggctagcagccccctgc

SEQ ID NO: 660279 - DNA, 120 bp, Artificial Sequence
  ENSG00000184271_10 (sequence is synthesized)
ctccacctgtggctgtccggaagccaagcacacctgagtcccctgctaagagtgaggtgcagcccatccagcccacaccaaccgtgccccagcctgctgtggtcattgccagcccagctc

SEQ ID NO: 660280 - DNA, 120 bp, Artificial Sequence
  ENSG00000184271_11 (sequence is synthesized)
cagccgccaagccatctgcctctgctcctatcccaattacctgctcagagacccccaccgtcagccagttggtgtccaagccacatactccaagtctggatgaggatgggatcaacttag

SEQ ID NO: 660281 - DNA, 120 bp, Artificial Sequence
  ENSG00000184271_12 (sequence is synthesized)
ctgactgcaacggaaggtccagcctacagccagtcagccatctgccggttcgagaagctagacatcacacccaagagtgcccagaagctaaagccggtgctggaaaagtggctaaacgaa

SEQ ID NO: 660282 - DNA, 120 bp, Artificial Sequence
  ENSG00000184271_13 (sequence is synthesized)
gctgaactgcggaaccaggaaggccagcagaacctgatggagtttgtgggaggcgagccctccaagaaacgcaaacgccgcacctccttcaccccccaggccatagaggctctcaatgcc

SEQ ID NO: 660283 - DNA, 120 bp, Artificial Sequence
  ENSG00000184271_14 (sequence is synthesized)
tattttgagaagaacccactgcccacaggccaggagatcactgaaattgctaaggagctcaactacgaccgtgaggtagtgcgggtctggttctgcaatcggcgccagacgctcaagaac

SEQ ID NO: 660284 - DNA, 120 bp, Artificial Sequence
  ENSG00000184271_15 (sequence is synthesized)
accagcaagctgaacgtctttcagatcccttagggctcagcccctggccctgtgttctagcactttgtccatttcccgtggcatccggctgcagccactgccatgacagcacctgtcatt

SEQ ID NO: 660285 - DNA, 120 bp, Artificial Sequence
  ENSG00000184271_16 (sequence is synthesized)
ttgccacgtgcagctgtgctcaccccaggtcatcagactccaccgtgtgcatgtgcatcaatgtccctcttttctcccacacatctcacatcatggggaggccagagggggccacacgag

SEQ ID NO: 660286 - DNA, 120 bp, Artificial Sequence
  ENSG00000184271_17 (sequence is synthesized)
agctccaggctctgggctggtcactccgaagaagaggatttgtgacgtcacttagagaagcaccttgctagcatggtttctgaagggtgaattctggtggggaaccagaaactccctgtc

SEQ ID NO: 660287 - DNA, 120 bp, Artificial Sequence
  ENSG00000184271_18 (sequence is synthesized)
tttggggcagggctaaagcagctcctaaggaccactggccattagctcttgcttttgatggcattctctttccaccttgtcttctcctttgctcctctgtgttagtgtggcaggtatgac

SEQ ID NO: 660288 - DNA, 120 bp, Artificial Sequence
  ENSG00000184271_19 (sequence is synthesized)
aactcatccagtggaaacacagcctcacactgcccttccgccccccacactttgcctgcaggtgcaccgaaaggacctgggagataaaattcaaaaaagtgtgatgtgctgctcagaagg

SEQ ID NO: 660289 - DNA, 120 bp, Artificial Sequence
  ENSG00000184271_20 (sequence is synthesized)
tcagactccatgtctgccttgacctcaaggtcagaaggttcccaaacccctggggctggaacatgggatctcctcttccacctcttcctggttcctttgcggggaaaattgcactaaaac

SEQ ID NO: 660290 - DNA, 120 bp, Artificial Sequence
  ENSG00000184271_21 (sequence is synthesized)
agaaccttttcttaatccatgttggaaggaagcaacagtgaactctacctgttctggagttctcctgggtctgcagaaggttgggaatttagaaaataaggctgttctttcatattttaa

SEQ ID NO: 660291 - DNA, 120 bp, Artificial Sequence
  ENSG00000184271_22 (sequence is synthesized)
tttaatctctgtcaatggccatccctcccacaaaaaaacgtgggttaagagaacttgcagactggatatgcaagcaaacgggcaactctggagaaaaataaggaaaggaatgctgacttt

SEQ ID NO: 660292 - DNA, 120 bp, Artificial Sequence
  ENSG00000184271_23 (sequence is synthesized)
ctctttctttctcttgtccccacacccattcccaacccaatactggggccttctcaaaaggagcaaattaaacaataaaccagacagcaaggccctgggggaaaggacaacatcctgaaa

SEQ ID NO: 660293 - DNA, 120 bp, Artificial Sequence
  ENSG00000184271_24 (sequence is synthesized)
agtgagactgagtcccactctactctgtactttaattgatataaatactaacatttttactaagtgctccaggtgatgatcatgcatattaaagttggagagcactttaatttatgtttt

SEQ ID NO: 660294 - DNA, 120 bp, Artificial Sequence
  ENSG00000184271_25 (sequence is synthesized)
taccatctattccaggaagtctgcccagatttctcccttgctccttacctaagtctaaggttctgagggtcagggtcagattcccattgggttctgctgggtgtgctctcccaccggact

SEQ ID NO: 660295 - DNA, 120 bp, Artificial Sequence
  ENSG00000184271_26 (sequence is synthesized)
cctcaccctaagcccagatgttcctggtactactgagtgtagattctcctaggatgctgtaggaaatgcaacataatcttttttttttggccaggtgcagtggctcatgcctgttatccc

SEQ ID NO: 660296 - DNA, 120 bp, Artificial Sequence
  ENSG00000184271_27 (sequence is synthesized)
attcaagaccagcctggccaacatgatggtatagaaattgtattactgtgtcacatcaccctttgcctttccaatcccatcttacccaggatgtgctaggtgtgggccggcccccacccg

SEQ ID NO: 660297 - DNA, 120 bp, Artificial Sequence
  ENSG00000184271_28 (sequence is synthesized)
gaagcccacattcacatctacccaccccaatgccctctgtcctcttccctctgcccggggttcttctcaccccttggcttctgagcaaggctcttcctccacccacagatcagtgctgct

SEQ ID NO: 660298 - DNA, 120 bp, Artificial Sequence
  ENSG00000184271_29 (sequence is synthesized)
gtctcagaccatgtctgtgtgtaagcaatccccacagtgtcctctgagccaaggacacccccagatcagattgagttttgcttctagacggggtagctatggtaccttgggggttagctc

SEQ ID NO: 660299 - DNA, 120 bp, Artificial Sequence
  ENSG00000184271_30 (sequence is synthesized)
tcatccaagctgttaagtgagtttccagcctcactgtggctggaaagcccctaaaattcagtatgtaactccaggaagtcaggagagaactgagatttgcctagatgaccacaggcttgc

SEQ ID NO: 660300 - DNA, 120 bp, Artificial Sequence
  ENSG00000184271_31 (sequence is synthesized)
ggtgtagattatccctaaagggccccaagtcacgggggtcaaccacccctgtcttcagtactcttatccttacagaggctggtctctaacagctgcctccagtggacctcccatgatcca

SEQ ID NO: 660301 - DNA, 120 bp, Artificial Sequence
  ENSG00000184271_32 (sequence is synthesized)
ccctgagggaaggaccgtcagctggggacacatcaccacctctgtcagtcactggtgcagagccacctcctagcctagcttcctctggtgtcctgtttcctttcccacttactgttggtg

SEQ ID NO: 660302 - DNA, 120 bp, Artificial Sequence
  ENSG00000184271_33 (sequence is synthesized)
cctcccaggccctgcagtgccagcgtggccaccctcttggtagcctggccagtaagaggaggacagttgtgtgctgaattagcacacgcacgtgcagcgcgcacagacgcgcgcacacac

SEQ ID NO: 660303 - DNA, 120 bp, Artificial Sequence
  ENSG00000184271_34 (sequence is synthesized)
acacacatacacgctctgctgcatttggacaaaccatgcctgccagagtgtagcagaggtgaggaagcaggtgggcagcttgcctgacccagcttttcaggagagcgtgtctccaacaga

SEQ ID NO: 660304 - DNA, 120 bp, Artificial Sequence
  ENSG00000184271_35 (sequence is synthesized)
gagtctccacactctagttcagggttatcgacctgcctcaatgagatgacagactcatttgggaggggtgttgcaaacaagttttcagtgagaatagttaagttccagagcttgtaaagg

SEQ ID NO: 660305 - DNA, 120 bp, Artificial Sequence
  ENSG00000184271_36 (sequence is synthesized)
attcagtgactgacacttcagtaaattaggccaggcacattggcttatgcctgtaattccaacactttggaaggccgaggtgggcggatcatttgaggtctggagttcgagaccagcctg

SEQ ID NO: 660306 - DNA, 120 bp, Artificial Sequence
  ENSG00000184271_37 (sequence is synthesized)
ggtgacagagcaagactcggtctcaaacaaacaaaaacttatggcgatgcaggttttcatgctcagacgcttgcattcaggtatgctttcttttttgagagagacaaatgggtcacagct

SEQ ID NO: 660307 - DNA, 120 bp, Artificial Sequence
  ENSG00000184271_38 (sequence is synthesized)
gtatgctttcttttttgagagagacaaatgggtcacagctggcaccctgggaatagcacataatccagggtgtgtctgtggtggtggacgtgcaggggaacaccatctgtcctgtgtcat

SEQ ID NO: 660308 - DNA, 120 bp, Artificial Sequence
  ENSG00000184271_39 (sequence is synthesized)
gatgggaaaacaatcatgaaccactggtctaaattaggcctggccatgctttctcagcccctccctcatttaaatttgtcttcccaaagctgagctaaaactaaaccatttctcctctgc

SEQ ID NO: 660309 - DNA, 120 bp, Artificial Sequence
  ENSG00000184271_40 (sequence is synthesized)
tggaatgatggattggtcattcagaggaacaataccaggggtgggaggtttgcaggctgagttccccaggcatgggggtgcagggtgtccctgaggtttacccaaagcacagctcgctgg

SEQ ID NO: 660310 - DNA, 120 bp, Artificial Sequence
  ENSG00000184271_41 (sequence is synthesized)
cctgtgacctctgcccttcctcccacagtgtaagaccccccaggaagcagctggggcctgaacctctcacctaggaggtaggtttattttattttttgttagcatcaggctctgaaggag

SEQ ID NO: 660311 - DNA, 120 bp, Artificial Sequence
  ENSG00000184271_42 (sequence is synthesized)
ttggtatacattttgttttgaaaacatcttctggacttacaccagagcttagtgtcgtctttactatggaaagagaggagaatggacagaaatggtttaactgtgtggagttttgtttgt

SEQ ID NO: 660312 - DNA, 120 bp, Artificial Sequence
  ENSG00000184271_43 (sequence is synthesized)
tttgttttaaatggaagaaagaccaaaactttcctggtggatcagctagggcctttgaccctgcattaccacggcattttatccaggtgaagtccagggaaagaactcagccaaatggac

SEQ ID NO: 660313 - DNA, 120 bp, Artificial Sequence
  ENSG00000184271_44 (sequence is synthesized)
taaggaacacacgagtttggaatgcgagactctgacatttttgtgttcttggaaatccaattaccttcccatgcccagatttccttcctgcctcttggaccaggctctggcactgaggtt

SEQ ID NO: 660314 - DNA, 120 bp, Artificial Sequence
  ENSG00000184271_45 (sequence is synthesized)
ctcactgttcccaacacagacaaagcttcctgagggctggaggggcagcaaggggagaggagaatggggaagaagcgcttgatgtagttgtgtggaataaacagtattttttcttttgta

SEQ ID NO: 660315 - DNA, 120 bp, Artificial Sequence
  ENSG00000184271_46 (sequence is synthesized)
aggatcaagggaatcgtggctgcctgccccactgagcccactgccccaaccccctctccttcttgtgccagatcccttgggattggagccgctgtgagcagtggctaggcatttgagcac

SEQ ID NO: 660316 - DNA, 120 bp, Artificial Sequence
  ENSG00000184276_0 (sequence is synthesized)
atgaggattgctgtcctcctcttcgccattttcttctttatgagccaagttctaccagccaggggcaaattcaaggagatctgtgaacgtccaaatggctcctgtcgggacttttgcctt

SEQ ID NO: 660317 - DNA, 120 bp, Artificial Sequence
  ENSG00000184276_1 (sequence is synthesized)
tccatgttgggagatgtttaaatagccaaccctgctgcctgcctctggggcatcaaccaagaattgagagcactacacccaaaaaggactgaagcctgttgttttctggaggttttatgt

SEQ ID NO: 660318 - DNA, 120 bp, Artificial Sequence
  ENSG00000184276_2 (sequence is synthesized)
tctcttttttctctctccctctctctgtctccctgtctccctttccctctctccatttttctcacagggatttttattgaatcctcaaaaaagaataaaccaaaaccaaccagcacaaaa

SEQ ID NO: 660319 - DNA, 120 bp, Artificial Sequence
  ENSG00000184276_3 (sequence is synthesized)
ggacacagagagagggcaagagtggaaaatagaatgaggctcagaataccaagccttagtgccatccctatcatctgtctcactccatcactgggtgatcttgagcaagtttctttcttt

SEQ ID NO: 660320 - DNA, 120 bp, Artificial Sequence
  ENSG00000184276_4 (sequence is synthesized)
ccgtcagcttatttcctcatctttaaggaaaatccatagtgcaagacattaaatttttttaaaaggctgaaatctcccatcagtgttagaagataataaggaagaaataaactgaaactt

SEQ ID NO: 660321 - DNA, 120 bp, Artificial Sequence
  ENSG00000184277_0 (sequence is synthesized)
ccggcccggaagtgcgcaggcgctggcaagatggcgggaggggtgctcccgctgaggggcctccgcgccttgtgtcgcgtgctgctcttcctctcgcagttctgcattctgtcgggcggt

SEQ ID NO: 660322 - DNA, 120 bp, Artificial Sequence
  ENSG00000184277_1 (sequence is synthesized)
gaaagtactgaaatcccaccttatgtgatgaagtgtccgagcaatggtttgtgtagcaggcttcctgcagactgtatagactgcacaacaaatttctcctgtacctatgggaagcctgtc

SEQ ID NO: 660323 - DNA, 120 bp, Artificial Sequence
  ENSG00000184277_2 (sequence is synthesized)
acttttgactgtgcagtgaaaccatctgttacctgtgttgatcaagacttcaaatcccaaaagaacttcatcattaacatgacttgcagattttgctggcagcttcctgaaacagattac

SEQ ID NO: 660324 - DNA, 120 bp, Artificial Sequence
  ENSG00000184277_3 (sequence is synthesized)
gagtgtaccaactccaccagctgcatgacggtgtcctgtcctcggcagcgctaccctgccaactgcacggtgcgggaccacgtccactgcttgggtaaccgtacttttcccaaaatgcta

SEQ ID NO: 660325 - DNA, 120 bp, Artificial Sequence
  ENSG00000184277_4 (sequence is synthesized)
tattgcaattggactggaggctataagtggtctacggctctggctctaagcatcaccctcggtgggtttggagcagaccgtttctacctgggccagtggcgggaaggcctcggcaagctc

SEQ ID NO: 660326 - DNA, 120 bp, Artificial Sequence
  ENSG00000184277_5 (sequence is synthesized)
ggtggcctgggaatatggacgctgatagacgtcctgctcattggagttggctatgttggaccagcagatggctctttgtacatttagctgtggtgtgtgcttcagaaaggagcagggctt

SEQ ID NO: 660327 - DNA, 120 bp, Artificial Sequence
  ENSG00000184277_6 (sequence is synthesized)
agaaaaagcccttttgtccgtaggagttgatgtggtgtgagtgatatatttctatgtttttaatgtacagcatctgtactttgtttgccttgataaaggtaagataaatgaaacgctgaa

SEQ ID NO: 660328 - DNA, 120 bp, Artificial Sequence
  ENSG00000184277_7 (sequence is synthesized)
ctatgctaatctggaatttgtttttatttgcctgaaatatatttttttctgtgaaaaaattaaaacgtacttaagccaggagaatgaattatacagtgattgaaaatccatttaattcct

SEQ ID NO: 660329 - DNA, 120 bp, Artificial Sequence
  ENSG00000184277_8 (sequence is synthesized)
atgacttttgttttgtattgcccaagtcaaactacatcacttgtatctccagcccaaatgtagtctgccttgaaaagtctttcagctgtgactgcaggaagtgggagtgtttttattgtt

SEQ ID NO: 660330 - DNA, 120 bp, Artificial Sequence
  ENSG00000184277_9 (sequence is synthesized)
agctaattgctgtgactgcaggaagtgggagtgtttctgttgttggctaattgaagttattaggctcagcttcagtcatgtgtaagttttgcagtgtaatacatatgtagtctggtctgt

SEQ ID NO: 660331 - DNA, 120 bp, Artificial Sequence
  ENSG00000184277_10 (sequence is synthesized)
ctgtatatatgaaaatttgaattaaactgcagaatgtttatgtctagttatggtttaaattttcttagtagtatataaaaggtaagagtactgaaaaattaataaaattgcaagttaaga

SEQ ID NO: 660332 - DNA, 120 bp, Artificial Sequence
  ENSG00000184277_11 (sequence is synthesized)
cactgcttgggtaggtcagagttcaaggacatttgtcaacaaaatgtttttctccaagtttattgaagggactttaaccagaaatttgcgagtcaagttacttaattagaaacatttatc

SEQ ID NO: 660333 - DNA, 120 bp, Artificial Sequence
  ENSG00000184277_12 (sequence is synthesized)
agtgcgcaggcgctggcaagatggcgggaggggtgctcccgctgaggggcctccgcgccttgtgtcgcgtgctgctcttcctctcgcagttctgcattctgtcgggcggtgagcaatcgc

SEQ ID NO: 660334 - DNA, 120 bp, Artificial Sequence
  ENSG00000184277_13 (sequence is synthesized)
aggcgctggctcagtcaataaaggatccgggcccaacacgcacattcacagtagttcccagggcagcagcaaatttcctctactgctaaaaccctgttcctgatgttggaatattaaagg

SEQ ID NO: 660335 - DNA, 120 bp, Artificial Sequence
  ENSG00000184277_14 (sequence is synthesized)
gaacaaattatttatcctctttggaccttggtcctcatctttaaagcggtggggttggtctgacgacctaaagtcatttctgctttgtgattctaagtgtccaccttccagccacatagt

SEQ ID NO: 660336 - DNA, 120 bp, Artificial Sequence
  ENSG00000184277_15 (sequence is synthesized)
cacgggatcaaaaagagtattttgtagaattgttccttaatacagtgagtaaagtaggaccagttttaaacaagcattagtgtgttttgctaggtggaggctctgactataatttcatca

SEQ ID NO: 660337 - DNA, 120 bp, Artificial Sequence
  ENSG00000184277_16 (sequence is synthesized)
tgtggcttatcgaagtaccagtgtgaaataatgacattttaaagttgatgccctgaggatgtcagtggcttcatttctgaattagtgaattcagatgaaaagaacacgggattggaaatg

SEQ ID NO: 660338 - DNA, 120 bp, Artificial Sequence
  ENSG00000184277_17 (sequence is synthesized)
gagagatttgggttctagttccagttttgccacagacttcctctgtgattttgcaaaaccctactgtaagttttttttcaacttacaaaatgatagtcttttttttaagcccttaatgta

SEQ ID NO: 660339 - DNA, 120 bp, Artificial Sequence
  ENSG00000184277_18 (sequence is synthesized)
tacccagaattttctatacattatttgtatatgagcacctttagttttcacggccacgtgggaggcaggaatgaagtaatgttttacaagtgtggtgctcaccaggtcccacagctggcc

SEQ ID NO: 660340 - DNA, 120 bp, Artificial Sequence
  ENSG00000184277_19 (sequence is synthesized)
gtgggcagaattctgctttaattgcaggtgtctctgactccagtcccatgcttcttcccttccagtgcagtgtctacttgctaatgatcacgtctcttaaccttagaagattgttctctg

SEQ ID NO: 660341 - DNA, 120 bp, Artificial Sequence
  ENSG00000184277_20 (sequence is synthesized)
cgggccgcttgtcgctgcatctggagtctggcgccctggccgcccggcccgaggccgcccctccgctccggcgacaccgagcccgccatcgcggctgcggagccctggcacggagatgga

SEQ ID NO: 660342 - DNA, 120 bp, Artificial Sequence
  ENSG00000184277_21 (sequence is synthesized)
ggctgcggagccctggcacggagatggagcgcttgggggctgggccggggaggcggaactggagcgcgatgtcatccttcggtccctcgttgccggctgacctgaactgatgtctactct

SEQ ID NO: 660343 - DNA, 120 bp, Artificial Sequence
  ENSG00000184277_22 (sequence is synthesized)
ggaggctataagtggtctacggctctggctctaagtctgcaggcccaggtggggcttcatgttcagctcactgttggacttcattgacatcaccctgaaaaaggtggatttttgaggagc

SEQ ID NO: 660344 - DNA, 120 bp, Artificial Sequence
  ENSG00000184277_23 (sequence is synthesized)
gcagtccttgaagaagaaagatggtctgataggaactgcttattcaggaacacattgcaaaatctgtgggtgtccttcgggatctgagggcctcactcctacaactgcaaggaattgaat

SEQ ID NO: 660345 - DNA, 120 bp, Artificial Sequence
  ENSG00000184277_24 (sequence is synthesized)
tcttctaacagtgtgatgaggttggaagaagactccaagatccagaaaggaacacagtcccaccaacacctgtgttgtaacctggtgacaccctgaaacagagaatccagctaagcgatg

SEQ ID NO: 660346 - DNA, 120 bp, Artificial Sequence
  ENSG00000184277_25 (sequence is synthesized)
cccaaaatattcatccacaacgtgttgttttaagcttccaagtttctagtaatttgttataaagcaatagaaaagtaatatatcctttccgaggctcatcttcattccaaacgttccaca

SEQ ID NO: 660347 - DNA, 120 bp, Artificial Sequence
  ENSG00000184277_26 (sequence is synthesized)
tttccttctgttatcatttattttctgtcggaattacttcctccagcaaaaaaatttttaaggcagttctgctggtaacaaattttcttagattttcttcatctgagaatatctttattt

SEQ ID NO: 660348 - DNA, 120 bp, Artificial Sequence
  ENSG00000184277_27 (sequence is synthesized)
caccctcatacttgaaagttagttttgccaaacatagaattctgggtgacagtttttctttttctttcagcacttgaaaagtcttatgacacgtccttctggccttcatgatttctgctg

SEQ ID NO: 660349 - DNA, 120 bp, Artificial Sequence
  ENSG00000184277_28 (sequence is synthesized)
ctcccgtgctttctacatcccacatggaagcagcaatgagatgttttaaaacgagatgtttcaaaatcaccatctcactctagtttgtctacaaagccatctatcaagaacattatatga

SEQ ID NO: 660350 - DNA, 120 bp, Artificial Sequence
  ENSG00000184277_29 (sequence is synthesized)
acttttgcctagagaaagtaagctttccttggagcctttgttttttgtgcctgttggtatttctgagtgtgggcctctccggtactcaaatgaagatatacgggagggaaatcataacaa

SEQ ID NO: 660351 - DNA, 120 bp, Artificial Sequence
  ENSG00000184277_30 (sequence is synthesized)
ggaactcaccacctggttgttcctcatgtctcagaatccctggccaagtcaccttcttttctctgcctctcagtcttctgatggttgctttagagatttcatccagagtttggttgtaaa

SEQ ID NO: 660352 - DNA, 120 bp, Artificial Sequence
  ENSG00000184277_31 (sequence is synthesized)
tagtgggaaatataagatggaatgtggttactccaatagaaatgagaggaatcttttatacttacttccatgttttaccatttctgatgctcttcatttctttgtgtaaaccaagcttgt

SEQ ID NO: 660353 - DNA, 86 bp, Artificial Sequence
  ENSG00000184277_32 (sequence is synthesized)
ctaaaacattatgggattttttgcgattttttgaagctcattagctatccttagggttagcatattttatgtgtggcccaagacaa

SEQ ID NO: 660354 - DNA, 86 bp, Artificial Sequence
  ENSG00000184277_33 (sequence is synthesized)
cattatgggattttttgcgattttttgaagctcattagctatccttagggttagcatattttatgtgtggcccaagacaattctat

SEQ ID NO: 660355 - DNA, 120 bp, Artificial Sequence
  ENSG00000184277_34 (sequence is synthesized)
tccatgtaatagagagtaagattccattttttatgtttgacctttgatagctttcaaacctcattccttctccagttacaaggacctgcatatttcttcccttggtgtcagcaggaagtc

SEQ ID NO: 660356 - DNA, 120 bp, Artificial Sequence
  ENSG00000184277_35 (sequence is synthesized)
tgaaccacacaagccccaccctttgtgcttgaaccttttcctcagtcccaccacctactcacaatacaagccaaatccattaactctgcctcactcccaccatttatactgacttgcacc

SEQ ID NO: 660357 - DNA, 120 bp, Artificial Sequence
  ENSG00000184277_36 (sequence is synthesized)
tgaccttttctcttcagaaagtcccatggcatgagcaagaagcatttccatatcttctcggtgcatacggccttatcattcttgacatttaaactattccagtgagagggggccgatccc

SEQ ID NO: 660358 - DNA, 120 bp, Artificial Sequence
  ENSG00000184277_37 (sequence is synthesized)
atcctcctcaaggtgatcataatacactcttactatctgaagaaatttctttaaatgaatcgagaatgaattgtctcagcctttgtttgtttgaaaatgtttttattttaccctaatttt

SEQ ID NO: 660359 - DNA, 120 bp, Artificial Sequence
  ENSG00000184277_38 (sequence is synthesized)
taaaaatatttttatttaatatagaattctgggttgagagattttttccctttctttcagcattttaaaaatgtcactccattgtcttttggcttgtgtagtttctgatcagaagtgtcc

SEQ ID NO: 660360 - DNA, 120 bp, Artificial Sequence
  ENSG00000184277_39 (sequence is synthesized)
tgtaattcttatctttactgttctgcatgtaatgttcccttttttctctgctatcttcaagcttttctcttcatcttccacttttgacagtttcactatgatgtgtatagttaagtggga

SEQ ID NO: 660361 - DNA, 120 bp, Artificial Sequence
  ENSG00000184277_40 (sequence is synthesized)
ttttttgctgatggtggtgttggtgttttctttttcctttcttttatttttggtattaattctgcatagggttctctgagagtcttggatctgtggtttaatgtctgttattacttttgg

SEQ ID NO: 660362 - DNA, 120 bp, Artificial Sequence
  ENSG00000184277_41 (sequence is synthesized)
aaaatccttgactattgtctcttctaatatttcttcttcttcattccctcctctcctgtgactgataacatatacgttagcccgtctcatgatgtcctacagctcttgaatactctgctt

SEQ ID NO: 660363 - DNA, 120 bp, Artificial Sequence
  ENSG00000184277_42 (sequence is synthesized)
tgcttttgccattattttttctttgtgtttctctttggataatttttattgacctattttcaaatttgttgatttttttcaaagctgtattcattctactcatgtgcctgtcaaaagaat

SEQ ID NO: 660364 - DNA, 120 bp, Artificial Sequence
  ENSG00000184277_43 (sequence is synthesized)
ttgtagtgttcctctcgctggtgaaattccctatctgtttgcgtttgttgccccttttacattagatgcattaacatatttattatagttattttaaaatctctgtctaatggttccaac

SEQ ID NO: 660365 - DNA, 120 bp, Artificial Sequence
  ENSG00000184277_44 (sequence is synthesized)
tattggggtcatcaagtctatttctgttgattgctttgtctctagattgttttatcttttgctttttaaaaaattataatttttgatcgaatgccagacattgtgtgttaacagtacaga

SEQ ID NO: 660366 - DNA, 120 bp, Artificial Sequence
  ENSG00000184277_45 (sequence is synthesized)
ctgaggtaaataatattcacatctccaaattattatgcctattatgtctgacttctagtgtgcaaggtgaagtcgatctagttaggagctgagctgggtttgggtttactttgttgctat

SEQ ID NO: 660367 - DNA, 120 bp, Artificial Sequence
  ENSG00000184277_46 (sequence is synthesized)
tgctatcttcagtgctgctaaggcttcaagtttctgtaaatacgagatgtttctataatatcttgtactagattggggactggggtgttgggtggttttcttctgtgttcctaatgctcc

SEQ ID NO: 660368 - DNA, 120 bp, Artificial Sequence
  ENSG00000184277_47 (sequence is synthesized)
ctttaccttttagctattcctgcatgtctttgccacagagggactctatctatactctcgcctcttcagggatagactctctttacttgttactctgtgctaggcttatggtgagatagg

SEQ ID NO: 660369 - DNA, 120 bp, Artificial Sequence
  ENSG00000184277_48 (sequence is synthesized)
gttttctttgttgtcttgctgcaacctcaatcttagacagatataaaccttagggtggggctgtctcagcaattctgctcttccttcctacggcaattaaattctgccttgtatctgtga

SEQ ID NO: 660370 - DNA, 120 bp, Artificial Sequence
  ENSG00000184277_49 (sequence is synthesized)
tggtcttggacaggagattcctgctctcccctccctcagtgtagcagacttctggttggtactggtataggatcctgggcctggaatagcttctttattttatctcagaactaggacatt

SEQ ID NO: 660371 - DNA, 120 bp, Artificial Sequence
  ENSG00000184277_50 (sequence is synthesized)
tttgcatctacccttcccacagtaccaaaggattttctcctgtgtccttggggctagagttttcctacccctcttccagaggcatataagttttgcttctagtctttctataagagcaat

SEQ ID NO: 660372 - DNA, 120 bp, Artificial Sequence
  ENSG00000184277_51 (sequence is synthesized)
ggattttgcctgtgccctgtgtgtgggaggatgcggtcccctcccctcaatgtcttaaggcgtttactgcatagaaaggaaggatccaggggaagtgggtggggctttgttcctgtcctc

SEQ ID NO: 660373 - DNA, 120 bp, Artificial Sequence
  ENSG00000184277_52 (sequence is synthesized)
caacagcagctgatcttgtcctgcacacccacatacctgtgcctctgaaggagcagcccccgtttcctgcccactcctaatatgtctcttgagagccctcagtgattttgtgagtgagtg

SEQ ID NO: 660374 - DNA, 120 bp, Artificial Sequence
  ENSG00000184277_53 (sequence is synthesized)
tgactccctgagtttcccagttattccaaacttacatcctaggccacacttggactttaatgatttactaacattttatctgatagcttcatacctaatgggggccacatgtttttcctg

SEQ ID NO: 660375 - DNA, 120 bp, Artificial Sequence
  ENSG00000184277_54 (sequence is synthesized)
tgctcaggcaaaggtgagaaacgccatgtgtctcgtgtctccctggagtgcctgctccctctttggaattctgcttatttggttgccttgccatcttagatctttgatagactcaagaaa

SEQ ID NO: 660376 - DNA, 120 bp, Artificial Sequence
  ENSG00000184277_55 (sequence is synthesized)
aattataatgttggtacactagccaggtttttttattattctttgcagctttctacatcccacatggaagcagcaatgagatgttttaaaacgagatgtttcaaaatcaccatctcactc

SEQ ID NO: 660377 - DNA, 120 bp, Artificial Sequence
  ENSG00000184277_56 (sequence is synthesized)
tagtttgtctacaaagccatctatcaagaacattatatgaacttttaaatacattcttctgtatttatagaatgatttttaaagcatttccagccatgtttaaaagctgtgaatagtctt

SEQ ID NO: 660378 - DNA, 120 bp, Artificial Sequence
  ENSG00000184277_57 (sequence is synthesized)
ttttttgtaacctagtaaccaaagttattaatgaaagtcacagttaaacttttttcctttgaaaataaaatgaatcaacacataacgagaaggttaacatttttctctatcttctggaaa

SEQ ID NO: 660379 - DNA, 120 bp, Artificial Sequence
  ENSG00000184277_58 (sequence is synthesized)
gttttctggctgaccagccgtgaggttttcatgagcagcttattggcctggtgtagacccgccgtgttaaccacacaaaataaggttttcttgtcccgggataacgtgtttctctaattg

SEQ ID NO: 660380 - DNA, 120 bp, Artificial Sequence
  ENSG00000184277_59 (sequence is synthesized)
catttgaagtataaagcataatacacagtaattgacctttacccaaaataacaatgaaagcagcaccaataccattgcggccgcctgagtgcctgagtgcttgccttcacctggttgcct

SEQ ID NO: 660381 - DNA, 120 bp, Artificial Sequence
  ENSG00000184277_60 (sequence is synthesized)
atctttgggtgtttcttggttcattgtggcatgggtatcttggattgcaatcccccaccaatcccagataaactcctttggagagcctatctgtctattgttattttaggttttaggaca

SEQ ID NO: 660382 - DNA, 120 bp, Artificial Sequence
  ENSG00000184277_61 (sequence is synthesized)
tacactaaaaaactcgtttacagcaccattattcatagtaaaaaagtggaaacaacccaaatgtcccactgatgaataatacataaacaaaatgtagttcattcatataatggaatacta

SEQ ID NO: 660383 - DNA, 120 bp, Artificial Sequence
  ENSG00000184277_62 (sequence is synthesized)
tttcatcacataaaggaatgaagtactgatacacaccataaggtgaataaacctcaaaaacacggtgctaagggaagaaagccagttacactttaagctggtaacctttacagcatataa

SEQ ID NO: 660384 - DNA, 120 bp, Artificial Sequence
  ENSG00000184277_63 (sequence is synthesized)
attacttcttaataaagcggtcttaaaaaaaaagaaacggctcagtaaccacacatacatatgatagaaggggaacgagagaacccagatgaaaggaaagacaggaagaaacacagtctg

SEQ ID NO: 660385 - DNA, 120 bp, Artificial Sequence
  ENSG00000184277_64 (sequence is synthesized)
cgaaagaaagatgaagagttcatcttgaggaaaatataatccaagaaacacaggaaaagcccctgcgaaaactctgtactatagaacacttaagcgtatttcttcattcagcgaaagtac

SEQ ID NO: 660386 - DNA, 120 bp, Artificial Sequence
  ENSG00000184277_65 (sequence is synthesized)
tgagcccctatgtggcatgcaccctcctgagccctggggatttagcactaagctaagttcttcctttcatgaagcatgtcatattcttgtgcacaaaaatataagcacaaagagatgatt

SEQ ID NO: 660387 - DNA, 120 bp, Artificial Sequence
  ENSG00000184277_66 (sequence is synthesized)
ccactgaacccccgcccctccccatcaagcagggaacgttgatttgtccacactggaatagatgcttactttgaacacggattcgccttctctagctttattcactgtttcacacaagat

SEQ ID NO: 660388 - DNA, 120 bp, Artificial Sequence
  ENSG00000184277_67 (sequence is synthesized)
tgcttctgatcaaagaatttatttcacagtaaaagaaatgtggcaccaaaagtgagttcatgctgagaaagtggaaaatggccctgatagtagccaggctgtgattttaatcactaaata

SEQ ID NO: 660389 - DNA, 120 bp, Artificial Sequence
  ENSG00000184277_68 (sequence is synthesized)
taaaaaatgctcacagattgcaaacagtattccttttttctccctagtttcttaaggtagatgcttgggtcactaatttgagacatttctccttttctaatataagtattataagtaatg

SEQ ID NO: 660390 - DNA, 120 bp, Artificial Sequence
  ENSG00000184277_69 (sequence is synthesized)
aagtaatgctataaatttccgtctgaactttgagaacatttcacaaattctattatgtataatttaaaatattttataatttcacttttgaattccttttggtcaaaagatttatattat

SEQ ID NO: 660391 - DNA, 120 bp, Artificial Sequence
  ENSG00000184277_70 (sequence is synthesized)
gctctgtcacccaagctggagtgcagaggcacgatctcagttcactgcaatctccacctcccaggctcaagagattctcccaccttagcctcccgggtagctgggaccacaggtctgcat

SEQ ID NO: 660392 - DNA, 120 bp, Artificial Sequence
  ENSG00000184277_71 (sequence is synthesized)
acaggtctgcatcaccatggtgggctaatttttaaatttttttctagaggtagggtcccactatgttgcccaggcttgtcttgaacccttgggctcaagtgagcctcctgccttggcctc

SEQ ID NO: 660393 - DNA, 120 bp, Artificial Sequence
  ENSG00000184277_72 (sequence is synthesized)
aaaaatgtcctcaaagacattttcaagatatatttttgtacttagtttgtagctggttttcactgtggtaagagaataaaatttgtattattttagttattttaaatttgttgatttgct

SEQ ID NO: 660394 - DNA, 120 bp, Artificial Sequence
  ENSG00000184277_73 (sequence is synthesized)
ttatggctcacatacggtctatcatgctgaatgttacatgtgcacttgaaaataatgtgtattccactggtccaggtcatgtgttttatcagtgacgattaggtcaatttgcttgatagt

SEQ ID NO: 660395 - DNA, 120 bp, Artificial Sequence
  ENSG00000184277_74 (sequence is synthesized)
atttttcagcatttttctatctttgccaatattccgtgttcttattctgtcaattactgacagagaaatgttgcagtctccaactctaatggtggctttctgtatttctcttttcagttt

SEQ ID NO: 660396 - DNA, 120 bp, Artificial Sequence
  ENSG00000184277_75 (sequence is synthesized)
caaagtgctgggattacaggcatgagtccccatgcctggcccagactggacatttctattgatatgcttttgagttcatcgatttttcgttcctctatcatctcttgtccactactgagg

SEQ ID NO: 660397 - DNA, 120 bp, Artificial Sequence
  ENSG00000184277_76 (sequence is synthesized)
atcatctcttgtccactactgaggcagcccagtgagtttttaatttcaattattatattttttgttacataatttcccttggtacctttttatatcttctatttattttctactttctat

SEQ ID NO: 660398 - DNA, 120 bp, Artificial Sequence
  ENSG00000184277_77 (sequence is synthesized)
ttgtattaagagtgttagtaattgctcagtgaggcattttcatgatagttgctttaaaattcttgtcaggtaatcccaatgtctgagtcttctcaacgctggcaccttttgatcatctct

SEQ ID NO: 660399 - DNA, 120 bp, Artificial Sequence
  ENSG00000184277_78 (sequence is synthesized)
tctcaatcaagttgtgaatgtcctggttcttggtatatggattttttattgtctcctggacatgttggatattatgtcataagaactaattgttttttcttttaaattcttcttcttttt

SEQ ID NO: 660400 - DNA, 120 bp, Artificial Sequence
  ENSG00000184277_79 (sequence is synthesized)
gcctgagtgcctgagtgcttgccttcacctggttgcctttcctcctcttccaaggtaaccacccttttgaattttttatttcacttccttttaaattttttctgtagttttattgtctat

SEQ ID NO: 660401 - DNA, 120 bp, Artificial Sequence
  ENSG00000184277_80 (sequence is synthesized)
atgtaataaaataatattcaataatgcatgttttagaaccgtgtaaaatgatttcaggctgtgtgctcttctgggacttgcttatttcctaaacattgtggctctaggattcatccacgt

SEQ ID NO: 660402 - DNA, 120 bp, Artificial Sequence
  ENSG00000184277_81 (sequence is synthesized)
gacttctcttcttttttttacttctgtgtaataatctattgtaagattgtatcacagtttattctccaatatatttggttaagtgctgttttccgctgttgtgactgttcaaatttcttt

SEQ ID NO: 660403 - DNA, 120 bp, Artificial Sequence
  ENSG00000184277_82 (sequence is synthesized)
gcctgtctcccaatggcacaggtgcaagagcttcttcagcatgtactttccagcgtgtgtcattctttaaatggctgtattgactggcattcccacccgcgctatgtaactgttcctgat

SEQ ID NO: 660404 - DNA, 120 bp, Artificial Sequence
  ENSG00000184277_83 (sequence is synthesized)
gagccatattctctccaagagtggttattcttaaatttggtcttaaagttgtctagacttcttttatattttggatattacctgtgctgtccctgaaaccctctcccagattttgatttt

SEQ ID NO: 660405 - DNA, 120 bp, Artificial Sequence
  ENSG00000184277_84 (sequence is synthesized)
ttttttttttgcattattgtatattttcatgaacagaactttaaaaatataattactggaagttattagagttagtccttttttgtggtggttttaagaaatctttttctaccccaggtt

SEQ ID NO: 660406 - DNA, 120 bp, Artificial Sequence
  ENSG00000184277_85 (sequence is synthesized)
aataaagacaatttgctacattttcttttgaaagttgtaagtataacatttcacatttaggtttagaatccacctggaattggtcctggtagatggtgtgaggtagattctactttaatt

SEQ ID NO: 660407 - DNA, 120 bp, Artificial Sequence
  ENSG00000184277_86 (sequence is synthesized)
gtccccccacatggatggccagttgtctcaactcttccctgttgatccgtgtgtgacctctgtcataacactcatacatgaagtgtttgtatatttctggttcttgactttctcttcttt

SEQ ID NO: 660408 - DNA, 120 bp, Artificial Sequence
  ENSG00000184277_87 (sequence is synthesized)
tcctcacgttgtaatcctaacttagctgatttaaatattacatctatgtagatagatggtaagcgctttgtactcttcacttcaacatgtattaccgtaaagagagttgacttttcacat

SEQ ID NO: 660409 - DNA, 120 bp, Artificial Sequence
  ENSG00000184277_88 (sequence is synthesized)
ttggaccttggtcctcatctttaaagcgaaagtactgaaatcccaccttatgtgatgaagtgtccgagcaatggtttgtgtagcaggcttcctgcagactgtatagactgcacaacaaat

SEQ ID NO: 660410 - DNA, 120 bp, Artificial Sequence
  ENSG00000184277_89 (sequence is synthesized)
agtggtctacggctctggctctaagagttggactcttcatcgacactgtgaccacaccactgcactccagcctgagccacagagcgagacactgtctctaaaaaataaaagaaaaagaaa

SEQ ID NO: 660411 - DNA, 120 bp, Artificial Sequence
  ENSG00000184277_90 (sequence is synthesized)
acacaataacaagtattgatgagaatgtggagaaattggaaccttcatatattgctggtggggatgtaaagtgatgtagctgcccaggaaaacagtctggcaatttgtgaaaatgttaaa

SEQ ID NO: 660412 - DNA, 120 bp, Artificial Sequence
  ENSG00000184277_91 (sequence is synthesized)
catagagttaccatgtgacttggggaatcttctaggtatacacccaagagaagtggagatatgttgtgaaagttgtcagcaccaaaatggggtcacttaggtcaaaccctagcaaaatga

SEQ ID NO: 660413 - DNA, 120 bp, Artificial Sequence
  ENSG00000184277_92 (sequence is synthesized)
atccgggaggccctgaaggaggagtactcacgcacatgtacctatgataagaactattacaaggactccctggaaaccataaacactccatgttaagctgctgctgtgaagacatctccc

SEQ ID NO: 660414 - DNA, 120 bp, Artificial Sequence
  ENSG00000184281_0 (sequence is synthesized)
ggaggtgcggcgccgaccaagatggagactgccgagcagccttgagccgttgagcagctgaacagaggccatgccggggcactccgaggcctgagacgaccacgcctgtgccgctgagga

SEQ ID NO: 660415 - DNA, 120 bp, Artificial Sequence
  ENSG00000184281_1 (sequence is synthesized)
ccttcatcagggctccgtccacttggcccgcttggctgtccaatcacactccagtgtcaaccactggcacccagcagccaagagaggtgtggcgtggccctggggacgcatggctgaggc

SEQ ID NO: 660416 - DNA, 120 bp, Artificial Sequence
  ENSG00000184281_2 (sequence is synthesized)
aggaacaggtgagccgtcccccagcgtggagggcgaacacgggacggagtatgacacgctgccttccgacacagtctccctcagtgactcggactctgacctcagcttgcccggtggtgc

SEQ ID NO: 660417 - DNA, 120 bp, Artificial Sequence
  ENSG00000184281_3 (sequence is synthesized)
tgaagtggaagcactgtccccgatggggctgcctggggaggaggattcaggtcctgatgagccgccctcacccccgtcaggcctcctcccagccacggtgcagccattccatctgagagg

SEQ ID NO: 660418 - DNA, 120 bp, Artificial Sequence
  ENSG00000184281_4 (sequence is synthesized)
catgagctccaccttctcccagcgcagccgtgacatctttgactgcctggagggggcggccagacgggctccatcctctgtggcccacaccagcatgagtgacaacggaggcttcaagcg

SEQ ID NO: 660419 - DNA, 120 bp, Artificial Sequence
  ENSG00000184281_5 (sequence is synthesized)
gcccctagcgccctcaggccggtctccagtggaaggcctgggcagggcccatcggagccctgcctcaccaagggtgcctccggtccccgactacgtggcacaccccgagcgctggaccaa

SEQ ID NO: 660420 - DNA, 120 bp, Artificial Sequence
  ENSG00000184281_6 (sequence is synthesized)
agcagagcaatcaggccaccgccctggccttcctgggctcccagagcctggctgcccccactgactgcgtgtcctccttcaaccaggatccctccagctgtggggaggggagggtcatct

SEQ ID NO: 660421 - DNA, 120 bp, Artificial Sequence
  ENSG00000184281_7 (sequence is synthesized)
tcaccaaaccagtccgaggggtcgaagccagacacgagaggaagagggtcctggggaaggtgggagagccaggcaggggcggccttgggaatcctgccacagacaggggcgagggccctg

SEQ ID NO: 660422 - DNA, 120 bp, Artificial Sequence
  ENSG00000184281_8 (sequence is synthesized)
tggagctggcccatctggccgggcccgggagcccagaggctgaggagtggggcagccaccatggaggcctgcaggaggtggaggcactgtcagggtctgtccacagtgggtctgtgccag

SEQ ID NO: 660423 - DNA, 120 bp, Artificial Sequence
  ENSG00000184281_9 (sequence is synthesized)
gtctcccgccggtggaaactgttggcttccatggcagcaggaagcggagtcgagaccacttccggaacaagagcagcagccccgaggacccaggtgctgaggtctgagagggagatggcc

SEQ ID NO: 660424 - DNA, 120 bp, Artificial Sequence
  ENSG00000184281_10 (sequence is synthesized)
cagcctgaccccactggccactgccatcctgctgccttcccagtggggctggtcagggggcagcctggccactgcctagctggaatgggaggaagcctgcaggtggcaccggtggccctg

SEQ ID NO: 660425 - DNA, 120 bp, Artificial Sequence
  ENSG00000184281_11 (sequence is synthesized)
gctgcagttctgggcagcatcctcccaagcagagaccttgctgaagctcctggggtgtggggtgtgggctggaagcactggctccctggtagggacaataaaggttttgggtctttctga

SEQ ID NO: 660426 - DNA, 120 bp, Artificial Sequence
  ENSG00000184281_12 (sequence is synthesized)
ccctcctcttcctgttcttggtcaattccggtcttgtttccccaacaaatgccgtcgtttccggggctgcttccgagccggacccaagggccggggcgtggaggagtagaggggcgagcg

SEQ ID NO: 660427 - DNA, 120 bp, Artificial Sequence
  ENSG00000184281_13 (sequence is synthesized)
catgcgcacaggactacacgtcccgacaggcgtcgggagcggcggcccagttccttgtgggagctgtagttctgcaggcgcggaagccgtggtgctcggccggcagagcactcggtttcc

SEQ ID NO: 660428 - DNA, 120 bp, Artificial Sequence
  ENSG00000184281_14 (sequence is synthesized)
ccattaaatgaggtaacgagtcaaaagtccctaccctgggtcctagcctgtcaggggctccgaaaacccaggctcaggtcggtcctgcccggcacctgtttcacacatgtacactccggt

SEQ ID NO: 660429 - DNA, 120 bp, Artificial Sequence
  ENSG00000184281_15 (sequence is synthesized)
cgagagttcgtttgttctctggcggggaggtcttgctggcacatatagtggagaaaggccgggctctgcgttcatgtggagaaagagacggcttccttcagcctacggacatgaaggagt

SEQ ID NO: 660430 - DNA, 120 bp, Artificial Sequence
  ENSG00000184281_16 (sequence is synthesized)
caactctaccttccactcgttgccggctttcgccgagaaccccgagaaacggactaccggagtccctatcttgcagcccgatccccgctacccgtcggagtgccccgctgaccaggctgc

SEQ ID NO: 660431 - DNA, 120 bp, Artificial Sequence
  ENSG00000184281_17 (sequence is synthesized)
ttctggccgcggcggcgttccgctgcagaggacgggagtgcgaatctgggaagcagggttctggttgaactccagcttcgtctgcaacatactgtgtgacttgggcaaattatttccccc

SEQ ID NO: 660432 - DNA, 120 bp, Artificial Sequence
  ENSG00000184281_18 (sequence is synthesized)
gccccgttcctgccagctttaaaacggtcatcagtggggggtgctgcgtatcccctttcactggggtggcttcttcactgaggagagtcgcgcctcagaggaactgagttgagcagctga

SEQ ID NO: 660433 - DNA, 120 bp, Artificial Sequence
  ENSG00000184281_19 (sequence is synthesized)
acggaggtgcggcgccgaccaagatggagactgccgagcagccttgagccggaaggtgcacgctctttgtggaatacgactgctcaccccgcacagcaagcagcttataagtggccctcc

SEQ ID NO: 660434 - DNA, 120 bp, Artificial Sequence
  ENSG00000184281_20 (sequence is synthesized)
tgcctgatttcagccctgggttcaagccctgggtggctgcttactaccaaaatcgctcagtagctccaagcctgcctgcagagggttggcaccattaaatgagttgagcagctgaacaga

SEQ ID NO: 660435 - DNA, 120 bp, Artificial Sequence
  ENSG00000184281_21 (sequence is synthesized)
cgaccaagatggagactgccgagcagccttgagccgggctgctcaaggtgatggtcgacaccccactttcctgagagcttgaccctcagatgccagggccttggctgcagattccttggg

SEQ ID NO: 660436 - DNA, 120 bp, Artificial Sequence
  ENSG00000184292_0 (sequence is synthesized)
agacgcctgcagaccatcccagacgccggagcccgagccccgacgagtccccgcgcctcatccgcccgcgtccggtccgcgttcctccgccccaccatggctcggggccccggcctcgcg

SEQ ID NO: 660437 - DNA, 120 bp, Artificial Sequence
  ENSG00000184292_1 (sequence is synthesized)
ccgccaccgctgcggctgccgctgctgctgctggtgctggcggcggtgaccggccacacggccgcgcaggacaactgcacgtgtcccaccaacaagatgaccgtgtgcagccccgacggc

SEQ ID NO: 660438 - DNA, 120 bp, Artificial Sequence
  ENSG00000184292_2 (sequence is synthesized)
cccggcggccgctgccagtgccgcgcgctgggctcgggcatggcggtcgactgctccacgctgacctccaagtgtctgctgctcaaggcgcgcatgagcgcccccaagaacgcccgcacg

SEQ ID NO: 660439 - DNA, 120 bp, Artificial Sequence
  ENSG00000184292_3 (sequence is synthesized)
ctggtgcggccgagtgagcacgcgctcgtggacaacgatggcctctacgaccccgactgcgaccccgagggccgcttcaaggcgcgccagtgcaaccagacgtcggtgtgctggtgcgtg

SEQ ID NO: 660440 - DNA, 120 bp, Artificial Sequence
  ENSG00000184292_4 (sequence is synthesized)
aactcggtgggcgtgcgccgcacggacaagggcgacctgagcctacgctgcgatgagctggtgcgcacccaccacatcctcattgacctgcgccaccgccccaccgccggcgccttcaac

SEQ ID NO: 660441 - DNA, 120 bp, Artificial Sequence
  ENSG00000184292_5 (sequence is synthesized)
cactcagacctggacgccgagctgaggcggctcttccgcgagcgctatcggctgcaccccaagttcgtggcggccgtgcactacgagcagcccaccatccagatcgagctgcggcagaac

SEQ ID NO: 660442 - DNA, 120 bp, Artificial Sequence
  ENSG00000184292_6 (sequence is synthesized)
acgtctcagaaggccgccggtgacgtggatatcggcgatgccgcctactacttcgagagggacatcaagggcgagtctctattccagggccgcggcggcctggacttgcgcgtgcgcgga

SEQ ID NO: 660443 - DNA, 120 bp, Artificial Sequence
  ENSG00000184292_7 (sequence is synthesized)
cacgctcatctattacctggacgagattcccccgaagttctccatgaagcgcctcaccgccggcctcatcgccgtcatcgtggtggtcgtggtggccctcgtcgccggcatggccgtcct

SEQ ID NO: 660444 - DNA, 120 bp, Artificial Sequence
  ENSG00000184292_8 (sequence is synthesized)
ggtgatcaccaaccggagaaagtcggggaagtacaagaaggtggagatcaaggaactgggggagttgagaaaggaaccgagcttgtaggtacccggcggggcaggggatggggtggggta

SEQ ID NO: 660445 - DNA, 120 bp, Artificial Sequence
  ENSG00000184292_9 (sequence is synthesized)
ccggatttcggtatcgtcccagacccaagtgagtcacgcttcctgattcctcggcgcaaaggagacgtttatcctttcaaattcctgccttccccctcccttttgcgcacacaccaggtt

SEQ ID NO: 660446 - DNA, 120 bp, Artificial Sequence
  ENSG00000184292_10 (sequence is synthesized)
taatagatcctggcctcagggtctcctttctttctcacttctgtcttgaaggaagcatttctaaaatgtatcccctttcggtccaacaacaggaaacctgactggggcagtgaaggaagg

SEQ ID NO: 660447 - DNA, 120 bp, Artificial Sequence
  ENSG00000184292_11 (sequence is synthesized)
gatggcatagcgttatgtgtaaaaaacaagtatctgtatgacaacccgggatcgtttgcaagtaactgaatccattgcgacattgtgaaggcttaaatgagtttagatgggaaatagcgt

SEQ ID NO: 660448 - DNA, 120 bp, Artificial Sequence
  ENSG00000184292_12 (sequence is synthesized)
tgttatcgccttgggtttaaattatttgatgagttccacttgtatcatggcctacccgaggagaagaggagtttgttaactgggcctatgtagtagcctcatttaccatcgtttgtatta

SEQ ID NO: 660449 - DNA, 120 bp, Artificial Sequence
  ENSG00000184292_13 (sequence is synthesized)
ctgaccacatatgcttgtcactgggaaagaagcctgtttcagctgcctgaacgcagtttggatgtctttgaggacagacattgcccggaaactcagtctatttattcttcagcttgccct

SEQ ID NO: 660450 - DNA, 120 bp, Artificial Sequence
  ENSG00000184292_14 (sequence is synthesized)
tactgccactgatattggtaatgttcttttttgtaaaatgtttgtacatatgttgtctttgataatgttgctgtaattttttaaaataaaacacgaatttaataaaatatgggaaaggca

SEQ ID NO: 660451 - DNA, 120 bp, Artificial Sequence
  ENSG00000184293_0 (sequence is synthesized)
ggcagaaaactaactgaaaaacgagaacctactgtatggttagtaatttcttccatgtcatacaagtattcgagaaatctgctaccttgattagtaagactgaacacattggttttgtca

SEQ ID NO: 660452 - DNA, 120 bp, Artificial Sequence
  ENSG00000184293_1 (sequence is synthesized)
tttattcatggaggaagtccaccacccacttggggagcagaaggaaatttgccatctcaatttacttatcagaagtttctttgcagaaatatgattgtcccttcagtgggacatcatttg

SEQ ID NO: 660453 - DNA, 120 bp, Artificial Sequence
  ENSG00000184293_2 (sequence is synthesized)
gacttccccgttagaactcgcgtttccacttcagagatctgtttctttcaacttttctactgtccataaatcatgtcctgccaaagactggaaggtgcataagggaaaatgttactggat

SEQ ID NO: 660454 - DNA, 120 bp, Artificial Sequence
  ENSG00000184293_3 (sequence is synthesized)
tgctgaaactaagaaatcttggaacaaaagtcaaaatgactgtgccataaacaattcatatctcatggtgattcaagacattactgctatggtgagatttaacatttagaggtgacagca

SEQ ID NO: 660455 - DNA, 120 bp, Artificial Sequence
  ENSG00000184293_4 (sequence is synthesized)
tcccccacactggcagtgaattttttgtgctacaaacttggcaaaagtctgtgaaaagaagtttcaacttcatgtgttattaactatacaaatattagttgaatgaattgttgaattaca

SEQ ID NO: 660456 - DNA, 120 bp, Artificial Sequence
  ENSG00000184293_5 (sequence is synthesized)
caagacattactgctatgctgatcacctttttgctgtaccttcaaatggcatttcttcaatgtgtgtacatctctgatgtctctgtgtatccaaatttcttcttgtaaggacattatcag

SEQ ID NO: 660457 - DNA, 120 bp, Artificial Sequence
  ENSG00000184293_6 (sequence is synthesized)
attggattagggcccaccgcaatggcctcactaaatccaatcttttttgacatatgcatatagaagttcctagacttcagtgctgaggagacagaggctacaggcatccatatgtctgtc

SEQ ID NO: 660458 - DNA, 120 bp, Artificial Sequence
  ENSG00000184293_7 (sequence is synthesized)
tctggggtcttcttaggaagaggcctctgatgaagagaacaaagctcttgtttgatatcccagcttgagcaagaggaatgggacaagttcgtggcagccaccagccgccaggagatggct

SEQ ID NO: 660459 - DNA, 120 bp, Artificial Sequence
  ENSG00000184293_8 (sequence is synthesized)
gaagtagacaatcaatttccaggttattgggaaattcaagaccaatcaatagaattatctggagataaactctctgggacagtgttcatcaagttgcagtgccctgtttgagtccgagtt

SEQ ID NO: 660460 - DNA, 120 bp, Artificial Sequence
  ENSG00000184293_9 (sequence is synthesized)
gcgagaagacaatactatgagagaaggtgtccagagacagagtgagacacagatataggaacaggatcctgggccttcctgctccaggaaaagcatggaaaaggcaagttgtgagggcag

SEQ ID NO: 660461 - DNA, 120 bp, Artificial Sequence
  ENSG00000184293_10 (sequence is synthesized)
aagacagtcccacaagaacatgaaattcagtcatgcaaagggctgggaaggcagaaacacagtggtgagagtgagccagaaaggagatgtggggagcaaggactcatggcagagaaggcc

SEQ ID NO: 660462 - DNA, 120 bp, Artificial Sequence
  ENSG00000184293_11 (sequence is synthesized)
ctggtaaccaagataagaaagtcaactgtgaaggtgaactaagaacacatgatggatgagtggaaaccaggggccagaaagtctttgaaggcagaagatacaaggcaatttgtgggcagg

SEQ ID NO: 660463 - DNA, 120 bp, Artificial Sequence
  ENSG00000184293_12 (sequence is synthesized)
agggaaaaaagtagtgaaaatgtgcaggccaatgtgagaggggcctgtgatggcagagaggaggccaatgatgtgagtaaaaggagcactgcaggaaccggacccagtgtgacgttatga

SEQ ID NO: 660464 - DNA, 120 bp, Artificial Sequence
  ENSG00000184302_0 (sequence is synthesized)
aatagcggagccagctcgcctgccggcgtgcctgagccgagccgagcccgaaccccaagccgcggagccagcacctcctccagtcggggtcgtccgctcccggccgttgagccaccgccg

SEQ ID NO: 660465 - DNA, 120 bp, Artificial Sequence
  ENSG00000184302_1 (sequence is synthesized)
ccacccggtagtgtgtcccgctgccccaatccgcctcatcaacaagcgcctggcacactcagccaggcccgcgggcatctgctgcgtgtcccgctccgggctcagtgccctcgccgccgc

SEQ ID NO: 660466 - DNA, 120 bp, Artificial Sequence
  ENSG00000184302_2 (sequence is synthesized)
cggcactgcctcgatgttccagctgcccatcttgaatttcagcccccagcaagtggccggggtatgtgagaccctggaagagagcggcgatgtggagcgcctgggtcgcttcctctggtc

SEQ ID NO: 660467 - DNA, 120 bp, Artificial Sequence
  ENSG00000184302_3 (sequence is synthesized)
gctgcccgtggcccctgcggcctgcgaggccctcaacaagaatgagtcggtgctacgcgcacgagccatcgtggcctttcacggtggcaactaccgcgagctctatcatatcctggaaaa

SEQ ID NO: 660468 - DNA, 120 bp, Artificial Sequence
  ENSG00000184302_4 (sequence is synthesized)
ccacaagttcaccaaggagtcgcacgccaagctgcaggcgctgtggcttgaagcacactaccaggaggctgagaagctgcgtggaagacccctgggacctgtggacaagtaccgagtaag

SEQ ID NO: 660469 - DNA, 120 bp, Artificial Sequence
  ENSG00000184302_5 (sequence is synthesized)
gaagaagttcccgctgccgcgcaccatttgggacggcgaacagaagacacactgcttcaaggagcgcacgcggcacctgctacgcgagtggtacctgcaggatccataccctaaccccag

SEQ ID NO: 660470 - DNA, 120 bp, Artificial Sequence
  ENSG00000184302_6 (sequence is synthesized)
caaaaaacgtgagctcgcccaggcaaccggactgacccctacgcaggtgggcaactggttcaaaaaccgccgacaaagggaccgagcggctgcagccaagaacagactccagcagcaggt

SEQ ID NO: 660471 - DNA, 120 bp, Artificial Sequence
  ENSG00000184302_7 (sequence is synthesized)
cctgtcacagggttccgggcgggcactacgggcggagggcgacggcacgccagaggtgctgggcgtcgccaccagcccggccgccagtctatccagcaaggcggccacttcagccatctc

SEQ ID NO: 660472 - DNA, 120 bp, Artificial Sequence
  ENSG00000184302_8 (sequence is synthesized)
catcacgtccagcgacagcgagtgcgacatctgagttgcccatccaggatgctcagaagcagattccagtgtaaaaacgagaaaaacaaaatgaaagaggggaagaagatgagagacctg

SEQ ID NO: 660473 - DNA, 120 bp, Artificial Sequence
  ENSG00000184302_9 (sequence is synthesized)
caaatccagcgccacagaagccaggtgaccagggacccgcgggctcgggttgccgtttcccgccccaccccgcggccggcctggcttcactggcgccctttggccgcgaccacgggaacc

SEQ ID NO: 660474 - DNA, 120 bp, Artificial Sequence
  ENSG00000184302_10 (sequence is synthesized)
cttcggaacccgaactgcaagctgagcgcctgcccagattctcccatgggtatttcacgtcgaaaggacgctgttacatatgtataactttcgctttaaagtttttttttaacaaaacat

SEQ ID NO: 660475 - DNA, 120 bp, Artificial Sequence
  ENSG00000184302_11 (sequence is synthesized)
atatatgctgtttatttacttatttaagagaccgccatggtaggtttctctgtagcttggggaacttgctgtttctaaacatgcaggctggtggtgatgggttctgtgtggagaagccaa

SEQ ID NO: 660476 - DNA, 120 bp, Artificial Sequence
  ENSG00000184302_12 (sequence is synthesized)
acaataaaacaacctagtgggcaaccttcttaattaagggagctgctctcagattccttttcttcttattattattaatatcattcccttcaccaggcatgcagggacccttgagcaaat

SEQ ID NO: 660477 - DNA, 120 bp, Artificial Sequence
  ENSG00000184302_13 (sequence is synthesized)
ggtctccggaaggtcttacctatatatcttttgccttctttggtgcttcctggtatatgttttaaacaacctatggtaggtctataaccacctcccacgtcaaattacacgtatgtgcat

SEQ ID NO: 660478 - DNA, 120 bp, Artificial Sequence
  ENSG00000184302_14 (sequence is synthesized)
atatgtatgtacctatacaaacatatgtatgtacctatacaaacatatgtatgtatgcatacacgtgatatatttaaggctagaaattggcaacatgtgagcgtcctctctaaggcaagt

SEQ ID NO: 660479 - DNA, 120 bp, Artificial Sequence
  ENSG00000184302_15 (sequence is synthesized)
ccccgcatccccagcacaggtaattatggcttgtccacttgacactcgtttacatgaagtgtcaacagctttcaggagcaatttaggaagccaaactatgggactcaataagtgagtcct

SEQ ID NO: 660480 - DNA, 120 bp, Artificial Sequence
  ENSG00000184302_16 (sequence is synthesized)
attttctaaaaatgcaaaactatcctgactcaggctctgcagcaagaaaggctttctgtctccttcaaggccccctccaatacaaaagcagcaggcacccatgatcatgctagagtgagc

SEQ ID NO: 660481 - DNA, 120 bp, Artificial Sequence
  ENSG00000184302_17 (sequence is synthesized)
atatactgcatttaggattgagctattattaaaataagacaaaagatgatagaagaggttgtaaataattagactaacatcttcttgctgcagaatttggttttaatcaaatgaatggtt

SEQ ID NO: 660482 - DNA, 120 bp, Artificial Sequence
  ENSG00000184302_18 (sequence is synthesized)
tttaacaagagggatactgagatgggggaaaggatgtaatcatgtcacatactgagggtaaaacaaggctgtagaaataactggcattttaaaaacctaatctccgaattaagcatagaa

SEQ ID NO: 660483 - DNA, 120 bp, Artificial Sequence
  ENSG00000184302_19 (sequence is synthesized)
caagtcatcaagggcctcattgtcctggtaatggcctcgattaaaacataaaatatttttagcatttaatttttcctcgtgcacatgcatgtatgcacctatacatgaacaaatgcatgc

SEQ ID NO: 660484 - DNA, 120 bp, Artificial Sequence
  ENSG00000184302_20 (sequence is synthesized)
atatacaacgcaaaaacatctaccatctttgcactaagaaaataaatgctagccagagtctctaattttgttcctagtgaaacagattgcatattataaaatttgacattgatctttaaa

SEQ ID NO: 660485 - DNA, 120 bp, Artificial Sequence
  ENSG00000184304_0 (sequence is synthesized)
gtccttccgagcgcgccaggcggcagattcttggcggcggcggcgcctccccagtgccggcggccccgagccggctgccgcgttccgggcctcagagtcctcccgcctcggccattttcc

SEQ ID NO: 660486 - DNA, 120 bp, Artificial Sequence
  ENSG00000184304_1 (sequence is synthesized)
cattttccctcctccccatctcctccccttagtcccctcccctcccgatcctcatccccttgccctcccccagcccagggacttttccggaaagtttttattttccgtctgggctctcgg

SEQ ID NO: 660487 - DNA, 120 bp, Artificial Sequence
  ENSG00000184304_2 (sequence is synthesized)
agaaagaagctcctggctcagcggctgcaaaactttcctgctgccgcgccgccagcccccgccctccgctgcccggccctgcgccccgccgagcgatgagcgcccctccggtcctgcggc

SEQ ID NO: 660488 - DNA, 120 bp, Artificial Sequence
  ENSG00000184304_3 (sequence is synthesized)
gtggcggcggcagctgccgcagcggccgccgcactggtcccagggtccgggcccgggcccgcgccgttcttggctcctgtcgcggccccggtcgggggcatctcgttccatctgcagatc

SEQ ID NO: 660489 - DNA, 120 bp, Artificial Sequence
  ENSG00000184304_4 (sequence is synthesized)
tctcgttccatctgcagatcggcctgagccgtgagccggtgctgctgctgcaggactcgtccggggactacagcctggcgcacgtccgcgagatggcttgctccattgtcgaccagaagt

SEQ ID NO: 660490 - DNA, 120 bp, Artificial Sequence
  ENSG00000184304_5 (sequence is synthesized)
tccctgaatgtggtttctacggaatgtatgataagatcctgctttttcgccatgaccctacctctgaaaacatccttcagctggtgaaagcggccagtgatatccaggaaggcgatctta

SEQ ID NO: 660491 - DNA, 120 bp, Artificial Sequence
  ENSG00000184304_6 (sequence is synthesized)
ttgaagtggtcttgtcagcttccgccacctttgaagactttcagattcgtccccacgctctctttgttcattcatacagagctccagctttctgtgatcactgtggagaaatgctgtggg

SEQ ID NO: 660492 - DNA, 120 bp, Artificial Sequence
  ENSG00000184304_7 (sequence is synthesized)
ggctggtacgtcaaggtcttaaatgtgaagggtgtggtctgaattaccataagagatgtgcatttaaaatacccaacaattgcagcggtgtgaggcggagaaggctctcaaacgtttccc

SEQ ID NO: 660493 - DNA, 120 bp, Artificial Sequence
  ENSG00000184304_8 (sequence is synthesized)
tcactggggtcagcaccatccgcacatcatctgctgaactctctacaagtgcccctgatgagccccttctgcaaaaatcaccatcagagtcgtttattggtcgagagaagaggtcaaatt

SEQ ID NO: 660494 - DNA, 120 bp, Artificial Sequence
  ENSG00000184304_9 (sequence is synthesized)
ctcaatcatacattggacgaccaattcaccttgacaagattttgatgtctaaagttaaagtgccgcacacatttgtcatccactcctacacccggcccacagtgtgccagtactgcaaga

SEQ ID NO: 660495 - DNA, 120 bp, Artificial Sequence
  ENSG00000184304_10 (sequence is synthesized)
agcttctgaaggggcttttcaggcagggcttgcagtgcaaagattgcagattcaactgccataaacgttgtgcaccgaaagtaccaaacaactgccttggcgaagtgaccattaatggag

SEQ ID NO: 660496 - DNA, 120 bp, Artificial Sequence
  ENSG00000184304_11 (sequence is synthesized)
atttgcttagccctggggcagagtctgatgtggtcatggaagaagggagtgatgacaatgatagtgaaaggaacagtgggctcatggatgatatggaagaagcaatggtccaagatgcag

SEQ ID NO: 660497 - DNA, 120 bp, Artificial Sequence
  ENSG00000184304_12 (sequence is synthesized)
agatggcaatggcagagtgccagaacgacagtggcgagatgcaagatccagacccagaccacgaggacgccaacagaaccatcagtccatcaacaagcaacaatatcccactcatgaggg

SEQ ID NO: 660498 - DNA, 120 bp, Artificial Sequence
  ENSG00000184304_13 (sequence is synthesized)
tagtgcagtctgtcaaacacacgaagaggaaaagcagcacagtcatgaaagaaggatggatggtccactacaccagcaaggacacgctgcggaaacggcactattggagattggatagca

SEQ ID NO: 660499 - DNA, 120 bp, Artificial Sequence
  ENSG00000184304_14 (sequence is synthesized)
aatgtattaccctctttcagaatgacacaggaagcaggtactacaaggaaattcctttatctgaaattttgtctctggaaccagtaaaaacttcagctttaattcctaatggggccaatc

SEQ ID NO: 660500 - DNA, 120 bp, Artificial Sequence
  ENSG00000184304_15 (sequence is synthesized)
gatgtggccaggatgtgggagatagccatccagcatgcccttatgcccgtcattcccaagggctcctccgtgggtacaggaaccaacttgcacagagatatctctgtgagtatttcagta

SEQ ID NO: 660501 - DNA, 120 bp, Artificial Sequence
  ENSG00000184304_16 (sequence is synthesized)
tcaaattgccagattcaagaaaatgtggacatcagcacagtatatcagatttttcctgatgaagtactgggttctggacagtttggaattgtttatggaggaaaacatcgtaaaacagga

SEQ ID NO: 660502 - DNA, 120 bp, Artificial Sequence
  ENSG00000184304_17 (sequence is synthesized)
agagatgtagctattaaaatcattgacaaattacgatttccaacaaaacaagaaagccagcttcgtaatgaggttgcaattctacagaaccttcatcaccctggtgttgtaaatttggag

SEQ ID NO: 660503 - DNA, 120 bp, Artificial Sequence
  ENSG00000184304_18 (sequence is synthesized)
tgtatgtttgagacgcctgaaagagtgtttgttgttatggaaaaactccatggagacatgctggaaatgatcttgtcaagtgaaaagggcaggttgccagagcacataacgaagttttta

SEQ ID NO: 660504 - DNA, 120 bp, Artificial Sequence
  ENSG00000184304_19 (sequence is synthesized)
attactcagatactcgtggctttgcggcaccttcattttaaaaatatcgttcactgtgacctcaaaccagaaaatgtgttgctagcctcagctgatccttttcctcaggtgaaactttgt

SEQ ID NO: 660505 - DNA, 120 bp, Artificial Sequence
  ENSG00000184304_20 (sequence is synthesized)
gattttggttttgcccggatcattggagagaagtctttccggaggtcagtggtgggtacccccgcttacctggctcctgaggtcctaaggaacaagggctacaatcgctctctagacatg

SEQ ID NO: 660506 - DNA, 120 bp, Artificial Sequence
  ENSG00000184304_21 (sequence is synthesized)
tggtctgttggggtcatcatctatgtaagcctaagcggcacattcccatttaatgaagatgaagacatacacgaccaaattcagaatgcagctttcatgtatccaccaaatccctggaag

SEQ ID NO: 660507 - DNA, 120 bp, Artificial Sequence
  ENSG00000184304_22 (sequence is synthesized)
gaaatatctcatgaagccattgatcttatcaacaatttgctgcaagtaaaaatgagaaagcgctacagtgtggataagaccttgagccacccttggctacaggactatcagacctggtta

SEQ ID NO: 660508 - DNA, 120 bp, Artificial Sequence
  ENSG00000184304_23 (sequence is synthesized)
gatttgcgagagctggaatgcaaaatcggggagcgctacatcacccatgaaagtgatgacctgaggtgggagaagtatgcaggcgagcaggggctgcagtaccccacacacctgatcaat

SEQ ID NO: 660509 - DNA, 120 bp, Artificial Sequence
  ENSG00000184304_24 (sequence is synthesized)
ccaagtgctagccacagtgacactcctgagactgaagaaacagaaatgaaagccctcggtgagcgtgtcagcatcctctgagttccatctcctataatctgtcaaaacactgtggaacta

SEQ ID NO: 660510 - DNA, 120 bp, Artificial Sequence
  ENSG00000184304_25 (sequence is synthesized)
ataaatacatacggtcaggtttaacatttgccttgcagaactgccattattttctgtcagatgagaacaaagctgttaaactgttagcactgttgatgtatctgagttgccaagacaaat

SEQ ID NO: 660511 - DNA, 120 bp, Artificial Sequence
  ENSG00000184304_26 (sequence is synthesized)
caacagaagcatttgtattttgtgtgaccaactgtgttgtattaacaaaagttccctgaaacacgaaacttgttattgtgaatgattcatgttatatttaatgcattaaacctgtctcca

SEQ ID NO: 660512 - DNA, 120 bp, Artificial Sequence
  ENSG00000184304_27 (sequence is synthesized)
ctgtgcctttgcaaatcagtgtttttcttactggagcttcattttggtaagagacagaatgtatctgtgaagtagttctgtttggtgtgtcccattggtgttgtcattgtaaacaaactc

SEQ ID NO: 660513 - DNA, 120 bp, Artificial Sequence
  ENSG00000184304_28 (sequence is synthesized)
ttgaagagtcgattatttccagtgttctatgaacaactccaaaacccatgtgggaaaaaaatgaatgaggagggtagggaataaaatcctaagacacaaatgcatgaacaagttttaatg

SEQ ID NO: 660514 - DNA, 120 bp, Artificial Sequence
  ENSG00000184304_29 (sequence is synthesized)
tatagttttgaatcctttgcctgcctggtgtgcctcagtatatttaaactcaagacaatgcacctagctgtgcaagacctagtgctcttaagcctaaatgccttagaaatgtaaactgcc

SEQ ID NO: 660515 - DNA, 120 bp, Artificial Sequence
  ENSG00000184304_30 (sequence is synthesized)
atatataacagatacatttccctctttcttataatactctgttgtactatggaaaatcagctgctcagcaacctttcacctttgtgtatttttcaataataaaaaatattcttgtcaaaa

SEQ ID NO: 660516 - DNA, 120 bp, Artificial Sequence
  ENSG00000184304_31 (sequence is synthesized)
caatcctctggtctcagttttcttttctgatatggtgatgctaattcctaccttactgggttattatatacaatatcaggacatgtaacttgttcatgttacagattgccatgaaaatag

SEQ ID NO: 660517 - DNA, 120 bp, Artificial Sequence
  ENSG00000184304_32 (sequence is synthesized)
tgagaataagaaaagaagcacaagtatcttttttcaggaataaagaagaaacaactataaacaccagggaaatacaaaaagttgtataacaaagtcgtgtataataaagatgcaactaac

SEQ ID NO: 660518 - DNA, 120 bp, Artificial Sequence
  ENSG00000184304_33 (sequence is synthesized)
cggcctcccaaagtgctggcattacagccgtgagccactgcgcccggcctgtagcagtctcctgtgagtcctggctttgagcaaaaatcaccatcagagtcgtttattggtcgagagaag

SEQ ID NO: 660519 - DNA, 120 bp, Artificial Sequence
  ENSG00000184304_34 (sequence is synthesized)
aaacccgggactggagatggcagatttctgtctcctttgcctgtgggactgaggccccgggacagaggagacctgggaaacttggtgccaatgggagagcttcagccctgaaggggatag

SEQ ID NO: 660520 - DNA, 120 bp, Artificial Sequence
  ENSG00000184304_35 (sequence is synthesized)
gccctcccatgtcccggtgcccttccagacagtgcaacggaaccagtaaaggggattcctggatggcatcaggagcactgcacagacatctgaaccgtgcaaaaatcaccatcagagtcg

SEQ ID NO: 660521 - DNA, 120 bp, Artificial Sequence
  ENSG00000184304_36 (sequence is synthesized)
tcttataccaatcagcctgtcaacttcagcaagagaccatacaagtggaaaagtaagacagtaagttggattaatcaagcagagaaaggagttgaaagccatagctgggtctgcaaactg

SEQ ID NO: 660522 - DNA, 120 bp, Artificial Sequence
  ENSG00000184304_37 (sequence is synthesized)
aagccttctctaaattctcagaaattctggaagaaaatgttggaaattcctcaggaaatggaaagtttctcttgctgccatgatgtaagaagtgcctttcacctctcaccatgattctga

SEQ ID NO: 660523 - DNA, 120 bp, Artificial Sequence
  ENSG00000184304_38 (sequence is synthesized)
gtttttggttttggttttggttcagatatttcagacacagtctaaagtaaattatggccagtgtttgttctactttacaatagaaaagcatccatggagttttgataacagtcaaagacc

SEQ ID NO: 660524 - DNA, 120 bp, Artificial Sequence
  ENSG00000184304_39 (sequence is synthesized)
cttgcttagtaaacatgtgccctgcccttcctaagaacagaatgaagaaagacttcttggggatgacttagtttattgtagaatgtagggtgtctaaataaaagctgctgcacatactaa

SEQ ID NO: 660525 - DNA, 120 bp, Artificial Sequence
  ENSG00000184305_0 (sequence is synthesized)
gtctcaacatgactgactgggaagcggtggctcgggcagagcagctccgctggcgcaggcaggaggagcaggaggattattaaataacgcagctggactctgtgcaactgggagtggaga

SEQ ID NO: 660526 - DNA, 120 bp, Artificial Sequence
  ENSG00000184305_1 (sequence is synthesized)
ggagcccaacagccgagaaggggagggagggcagaggagggggaccaggaaggacacccccgtgccccgaagacataaatccctgagtgcccgggaggagccttaacaagcgcacggagc

SEQ ID NO: 660527 - DNA, 120 bp, Artificial Sequence
  ENSG00000184305_2 (sequence is synthesized)
cctcaaggctgcaaagttggctttcacagtgcaagcctttgattcccaatgggggactcaggatcaagacgatctaccctggtctcccggttgccaatattcagaagaagtattaacaga

SEQ ID NO: 660528 - DNA, 120 bp, Artificial Sequence
  ENSG00000184305_3 (sequence is synthesized)
agacatgattctcttccttcttcaccttcttccagtaatacagttggtgtccacagttcctctccttccagcactaactcaagctcaggtagcacaggtaaacggaggagcatattccgt

SEQ ID NO: 660529 - DNA, 120 bp, Artificial Sequence
  ENSG00000184305_4 (sequence is synthesized)
actccttccattagcttccaccataagaaggggagtgagcctaagcaagagcctaccaaccagaaccttagtatttcaaatggtgctcaacctggtcacagcaatatgcagaaactgagt

SEQ ID NO: 660530 - DNA, 120 bp, Artificial Sequence
  ENSG00000184305_5 (sequence is synthesized)
ttggaagaacatattaagaccaggggaagacattctgttggttttagtagttcacgaaataagaagataacaagatctttgacagaggattttgaaagggaaaaagagcactcaactaac

SEQ ID NO: 660531 - DNA, 120 bp, Artificial Sequence
  ENSG00000184305_6 (sequence is synthesized)
aagaatgtctttataaattgtctaagttctggcaaaagtgaaggggatgattctggtttcacagaagaccaaactcgtcgttctgttaagcagtcaacaaggaagctactccctaaatct

SEQ ID NO: 660532 - DNA, 120 bp, Artificial Sequence
  ENSG00000184305_7 (sequence is synthesized)
ttttcatctcactataaattttctaagccagttctacagagccaatccatttcattggtacaacagtctgaattctcattggaagttacacagtaccaagagagagaacctgtattagta

SEQ ID NO: 660533 - DNA, 120 bp, Artificial Sequence
  ENSG00000184305_8 (sequence is synthesized)
agagcttcgccatcctgttctgtggatgtaacagaacgggcaggaagctctttacaatctcctttgctttctgctgatcttaccacagctcagacaccttcagaatttttagccttgact

SEQ ID NO: 660534 - DNA, 120 bp, Artificial Sequence
  ENSG00000184305_9 (sequence is synthesized)
gaagattctgtgtctgaaatggatgcattttctaaaagtggaagcatggcatcccactgtgacaactttggccacaatgattctacctctcagatgtccctcaattctgctgctgttaca

SEQ ID NO: 660535 - DNA, 120 bp, Artificial Sequence
  ENSG00000184305_10 (sequence is synthesized)
aagacaacaacagaacttacgggaactgttccctgtgcaattatgtctcctgggaaatataggttagagggtcaatgtagcactgaatctaattcattaccggaaacctctgctgctaat

SEQ ID NO: 660536 - DNA, 120 bp, Artificial Sequence
  ENSG00000184305_11 (sequence is synthesized)
cagaaggaagtgttattacaaattgctgaactacctgctacaagtgtgagccactcagagagtaacctaccagcagatagtgaaagagaagaaaatatagggttacaaaatggtgaaaca

SEQ ID NO: 660537 - DNA, 120 bp, Artificial Sequence
  ENSG00000184305_12 (sequence is synthesized)
atgctggggacaaactccccaaggaaacttggattttatgagcaacataaagcaatagcggaacatgtaaaagggatccatcctatttcagattcaaagataatacctacttctggtgat

SEQ ID NO: 660538 - DNA, 120 bp, Artificial Sequence
  ENSG00000184305_13 (sequence is synthesized)
catcatatttttaacaaaacatcacatggatatgaagcaaatcctgccaaagttcttgccagtagtctcagtccatttcgtgaaggaagatttatagagaggagactgcgatcctcgtca

SEQ ID NO: 660539 - DNA, 120 bp, Artificial Sequence
  ENSG00000184305_14 (sequence is synthesized)
gaaggcactgcagggagtagcagaatgattttgaaaccgaaagatggaaatatagaagaagttaatagtttaagaaagcaaagagcaggttcttcatcttcaaaaatgaacagtttggat

SEQ ID NO: 660540 - DNA, 120 bp, Artificial Sequence
  ENSG00000184305_15 (sequence is synthesized)
gttttgaataatttgggatcttgtgaactggatgaagatgatctaatgcttgatcttgaatttttagaggaacagagtcttcacccttctgtttgccgggaggactcatatcactctgtc

SEQ ID NO: 660541 - DNA, 120 bp, Artificial Sequence
  ENSG00000184305_16 (sequence is synthesized)
gtctcatgtgccgcagtagttcttactcctatggaaccaatgatagaaatgaagaaaagagaagaaccagaatttcctgagccttccaaacagaatctttccctgaaattaacaaaggac

SEQ ID NO: 660542 - DNA, 120 bp, Artificial Sequence
  ENSG00000184305_17 (sequence is synthesized)
gttgatcaagaagccaggtgttcccacatcagccgaatgcccaacagtccatctgcggattggcctctacaaggtgtggaagaaaacggaggcatagattctctgccattcagactgatg

SEQ ID NO: 660543 - DNA, 120 bp, Artificial Sequence
  ENSG00000184305_18 (sequence is synthesized)
ttacaggactgcacggcagtcaagacgttattattaaagatgaagagagttcttcaagagagtgcagacatgagtccagcaagcagtaccacgtcacttcctgttagtcctcttactgaa

SEQ ID NO: 660544 - DNA, 120 bp, Artificial Sequence
  ENSG00000184305_19 (sequence is synthesized)
gagccagtgcctttcaaggatataatgaaagatgaatgctcgatgctcaagctgcagctgaaagagaaggatgaactcatttcccaacttcaggaagagctgggaaaagtccggcattta

SEQ ID NO: 660545 - DNA, 120 bp, Artificial Sequence
  ENSG00000184305_20 (sequence is synthesized)
cagaaggcttttgcttcaagagtagataaatccacacagactgaactactatgctatgatggtttaaacttgaaaagactagagacagtacaaggagggagagaggctacatatcgaaat

SEQ ID NO: 660546 - DNA, 120 bp, Artificial Sequence
  ENSG00000184305_21 (sequence is synthesized)
cgaattgtgagccaaaatctcagcacaagggacagaaaagcaatacatactcccaccgaggaccgttttaggtattcggcagcggaccagacaagcccctacaaaaacaagacctgtcaa

SEQ ID NO: 660547 - DNA, 120 bp, Artificial Sequence
  ENSG00000184305_22 (sequence is synthesized)
ctcccaagtctctgtttaagtaatttcctgaaggacaaggaactagcagaagttatcaaacattcaagaggaacttatgaaaccctcacttcagacgttacacagaacttacgggccacc

SEQ ID NO: 660548 - DNA, 120 bp, Artificial Sequence
  ENSG00000184305_23 (sequence is synthesized)
gttgggcagagctctctgaagccaacagctaagacagaagggctctccacgttcttagagaaaccaaaggaccaagttgctacggcccgacagcattcgacctttacaggcaggtttgga

SEQ ID NO: 660549 - DNA, 120 bp, Artificial Sequence
  ENSG00000184305_24 (sequence is synthesized)
actctaggccagcaggatgggtaattaaatcaccgtattcctgtctttgggtaggataaagatggttagtgtttctcgtgcatagttcatattaaaattgtcatgtactttttcttacat

SEQ ID NO: 660550 - DNA, 120 bp, Artificial Sequence
  ENSG00000184305_25 (sequence is synthesized)
tttagttataaacagagttgtgttgttgggttttttttcttagtcataaacaaagacttgtgggttttttttttccaagagtgaaagtttgagcatgttaattgaactaggttgcattgc

SEQ ID NO: 660551 - DNA, 120 bp, Artificial Sequence
  ENSG00000184305_26 (sequence is synthesized)
cttgaagactttactatataggtgtataataaatgggaccatcatgatcgtttatatagtccataatttatttattttttatctctatcacttactgatatgcattaaggtttcagaaga

SEQ ID NO: 660552 - DNA, 120 bp, Artificial Sequence
  ENSG00000184305_27 (sequence is synthesized)
taatatcaaatagcaatctgttcactgttaatggtgttactataaaagtagacctgatgaaaaatagataaaggaattataaagaattttaaattatataattaatagaaggaggaaaaa

SEQ ID NO: 660553 - DNA, 120 bp, Artificial Sequence
  ENSG00000184305_28 (sequence is synthesized)
agagaaatgttaacgtcttatatttggtggtatatttatttgaagaatgtggcttgcttgcatgtaacctagagatgtgtttgtctctattacatacattcaagctcatcttgtgatact

SEQ ID NO: 660554 - DNA, 120 bp, Artificial Sequence
  ENSG00000184305_29 (sequence is synthesized)
agtaagggggaaatggctgtattttttttcctttaaacgtttagttcatactagttcacaaaggatttcagacagagtaattgctagccaaatagagaatgacagctctgatctttgaaa

SEQ ID NO: 660555 - DNA, 120 bp, Artificial Sequence
  ENSG00000184305_30 (sequence is synthesized)
aattttgcttttagtttttgttattgatgttgaagtaccgtgacataacacaaggtgataaagttggttgaattttgtcagatgatgcataaatactgacatgctatattctttgagcca

SEQ ID NO: 660556 - DNA, 120 bp, Artificial Sequence
  ENSG00000184305_31 (sequence is synthesized)
ctgtcatggcaatataaacattttttcaaaatttcaaggatgaaacatcctaagaaaattattctttttctttactttccttattttttaaaatgttcttttttatgtaaatccaatttt

SEQ ID NO: 660557 - DNA, 120 bp, Artificial Sequence
  ENSG00000184305_32 (sequence is synthesized)
ggtttatatacatcaacccatatctataattttatgaactgaagaacagaaagtcagtattttagtagccagcatacaatattctgactatgcagaaatctagatttggaacaaaagtaa

SEQ ID NO: 660558 - DNA, 120 bp, Artificial Sequence
  ENSG00000184305_33 (sequence is synthesized)
agtaaatgtgaacattggcaatttaatcttagaaataagcttctaacaggaatatttaaaacccatttgatggcaaatatttctctttgacaaataaggcccaaatatgttataatatgt

SEQ ID NO: 660559 - DNA, 120 bp, Artificial Sequence
  ENSG00000184305_34 (sequence is synthesized)
tatatacttatgtgcactttagatcaatatatgaattgatctatggataattccatcatgttcaattagtagcagagcagaatcaaagagtacaattgaatacataaataaataattttt

SEQ ID NO: 660560 - DNA, 120 bp, Artificial Sequence
  ENSG00000184305_35 (sequence is synthesized)
aaaagactaataggaatcaaggctgcagttttcttatacacatcagagctgttaagtacatccacattagccatagtccatgcaaattgaaactgtcatacctactgcatgatctgtttc

SEQ ID NO: 660561 - DNA, 120 bp, Artificial Sequence
  ENSG00000184305_36 (sequence is synthesized)
ccttgcattttctaacagaatctgtcagcgtgcacaagcaagatgaacaaagggaaattgagatagcagttttagcatggcatctgacaacttgcttaaattaaagctgtgtgcaaaatg

SEQ ID NO: 660562 - DNA, 120 bp, Artificial Sequence
  ENSG00000184305_37 (sequence is synthesized)
catctcctattataaaaatgtatttgtgccctgtgctttggggaaaagccattagacactccacccctgagctttaactactgaactttgatacatttgcaaacttagattggaactgat

SEQ ID NO: 660563 - DNA, 120 bp, Artificial Sequence
  ENSG00000184305_38 (sequence is synthesized)
aaagtaaggagtcgagtggatatgttgtacttgtaattttggttttccaaaggaacacacatgtgcatcaaggcagacatttgccaaatgttttctttctttgcgtgtttgtaattctgc

SEQ ID NO: 660564 - DNA, 120 bp, Artificial Sequence
  ENSG00000184305_39 (sequence is synthesized)
caaaagagaacaatatacactgcaaattgcttgacttaatgagattgccatctaaagttcccaccatactttggaagctataatgatcatgcagatatacactttgggctgggcaatatt

SEQ ID NO: 660565 - DNA, 120 bp, Artificial Sequence
  ENSG00000184305_40 (sequence is synthesized)
taagaaatgataggaaaatagaaaaatcatgattattaattgtggaattcagcttgatttgtcctaaatgttggtgtctgttgctagagtattttaaatctgtacataaataagcatgat

SEQ ID NO: 660566 - DNA, 120 bp, Artificial Sequence
  ENSG00000184305_41 (sequence is synthesized)
aaaataatcaaggattttttcccaggatatggaagaactatgtatcacaaataatgtttttgatttggacttttggagttgatagttttgttttcctggaagatagacttttgaattata

SEQ ID NO: 660567 - DNA, 120 bp, Artificial Sequence
  ENSG00000184305_42 (sequence is synthesized)
ataaaaataatctatttatagaagatctgtcatttaatagacattttaagagatgttttaaacgctagtattttcttgaaaaatcttttttaaagctgaatcattcaaaagaaaacctgg

SEQ ID NO: 660568 - DNA, 120 bp, Artificial Sequence
  ENSG00000184305_43 (sequence is synthesized)
ctggattaaacagttcgattttaaaaggaagggtattttttggaaatatcatcttaaagctgttttgtatcagtattttcaacattgttataatattatttgtaatactaagtgtaactc

SEQ ID NO: 660569 - DNA, 120 bp, Artificial Sequence
  ENSG00000184305_44 (sequence is synthesized)
aggcctggagaaggtgtaagcccactatgctaatgtacatcagtaactgtaaaacaggggttctttgtaagttcctcttgtgtatatatagtaacttataacaatggcatgtgggcattc

SEQ ID NO: 660570 - DNA, 120 bp, Artificial Sequence
  ENSG00000184305_45 (sequence is synthesized)
tttcagtgaattgctttctttgtactaaaatctctagttttctaagacagttccatgtataaaaatgatttatgcatttctccaaggcggtacatatccaaagacatgacaccaggggga

SEQ ID NO: 660571 - DNA, 120 bp, Artificial Sequence
  ENSG00000184305_46 (sequence is synthesized)
aaaagtgcttgtttttctgatggaagcagtggtcttttcttttctttcctctttcttttgtgcatgtgtatgtgtagctaagcctaaataaccctgtaaaatttctgctgcaaattgtct

SEQ ID NO: 660572 - DNA, 120 bp, Artificial Sequence
  ENSG00000184305_47 (sequence is synthesized)
cttctgaatttagaatgtgttttaaaggaacacttaggaagagaaataccttgaagaaaagctgtttccacctgaaataaactgttcccatttttataattattggaacatgaaactgta

SEQ ID NO: 660573 - DNA, 120 bp, Artificial Sequence
  ENSG00000184305_48 (sequence is synthesized)
aaaaaactgtgagtctgcttgctttctcaatgggaggctcgtggtccggggcaagttctcagttctggtcactggctgcttggaaaatagactcagtgctgttgtgggacacgatgggag

SEQ ID NO: 660574 - DNA, 120 bp, Artificial Sequence
  ENSG00000184305_49 (sequence is synthesized)
gttaccatcgagaccggggctgtgtatgctcgaggtgcagggagctaatgtataaggagttaaatgaactcttgctgctgccaaatatgttgttatcactaactgcaccgctgctgtcat

SEQ ID NO: 660575 - DNA, 120 bp, Artificial Sequence
  ENSG00000184305_50 (sequence is synthesized)
tagtgctgctgccaacactgcaagccctgctgctgccagtgccaattctgctgatgccttgggctctccatgtcccagggtgattccatagacaagcagctgcttttagatttcacttgc

SEQ ID NO: 660576 - DNA, 120 bp, Artificial Sequence
  ENSG00000184305_51 (sequence is synthesized)
acataccctagggaattctgaaaacctgactaacatcaattgaagattggggttcaggaggcctagatgatccaccatgacttattcaaaagttgaagatgaaaggaaagaataaagact

SEQ ID NO: 660577 - DNA, 120 bp, Artificial Sequence
  ENSG00000184305_52 (sequence is synthesized)
ctttccatccagttctctagtctgaaaggaaaagaaataggcaaaggacagtaggcttttctatatcattatattcattcaaatgattctcttaaaataataatgaactaaggaggctct

SEQ ID NO: 660578 - DNA, 120 bp, Artificial Sequence
  ENSG00000184305_53 (sequence is synthesized)
gtaagcaagacaaacggtcaggaggcctccttgctccaagaatactccctttttactttattaaaatggtttgtaaaggtaaactaaattgactaaagtatcaatatttccatatatgcg

SEQ ID NO: 660579 - DNA, 120 bp, Artificial Sequence
  ENSG00000184305_54 (sequence is synthesized)
tgatcttttagagaccataaactgtcagtgtattaggctgttcttgcatggctataaagaaatacctgagactaggtgatttataagaaaaggggtataattggcccacagttctgcaga

SEQ ID NO: 660580 - DNA, 120 bp, Artificial Sequence
  ENSG00000184305_55 (sequence is synthesized)
ctgtacaggaagcatagtagcatgtgcttctggggaggcctcaggaagcttccaatcgtggcggaaggcaaagggaagcaggcacattgcatggtgagaacagaaacaagaacaaggaag

SEQ ID NO: 660581 - DNA, 120 bp, Artificial Sequence
  ENSG00000184305_56 (sequence is synthesized)
ggtggctgggaggcgccacataattttaaattaccagatctcacaagaactcactatccggaagacagcacccagccatgagggatccaccctcatgattcaaacacctcccaccaagcc

SEQ ID NO: 660582 - DNA, 120 bp, Artificial Sequence
  ENSG00000184305_57 (sequence is synthesized)
ccacctccagcactggggatcacaactcgacatgagatttgagcagagacaaatttccaaactatatcactcagaatctggaatagaaagagtatgcaccataacacttttattctctac

SEQ ID NO: 660583 - DNA, 120 bp, Artificial Sequence
  ENSG00000184305_58 (sequence is synthesized)
agaaacagacactgtgctgagctcaaaaaatagtgattcatcaaatatgaatgtgcaaacctcttttgtactgtatctgtggaatcctggttactggggctttgagcccctgtcccataa

SEQ ID NO: 660584 - DNA, 120 bp, Artificial Sequence
  ENSG00000184305_59 (sequence is synthesized)
aatctctgtaatactaacctaactcatggcatttctttaaaatcaaatttaatgaaatgatggacataaagcccatggaactgagtgtgtaatcttctcttatttgattagatgttaaac

SEQ ID NO: 660585 - DNA, 120 bp, Artificial Sequence
  ENSG00000184305_60 (sequence is synthesized)
ttgaaacacttttttttgataaaatatgaaatacataaatgagttaaattgttgtgactttccttataagattgaaaacaataaggtgtttttaatactttttttctgtgttctcttgaa

SEQ ID NO: 660586 - DNA, 120 bp, Artificial Sequence
  ENSG00000184305_61 (sequence is synthesized)
agtagctttacatgtattaagcaatcctggctttagatattagggacaataaaaatatctgcaattttcccagttttatatagccattgtttgcaagtatgaaaacctgtcttttgttac

SEQ ID NO: 660587 - DNA, 120 bp, Artificial Sequence
  ENSG00000184305_62 (sequence is synthesized)
tgaaatattatcttttattttggcttttttgataacttttatgtttgccttgagcaagtcacttatcttttctatttgtgttttctatttcagtttatttatgaaagacagtaataatga

SEQ ID NO: 660588 - DNA, 120 bp, Artificial Sequence
  ENSG00000184305_63 (sequence is synthesized)
ttgtgatgtaccttacaaaaaaagataaaatcgtattgaagagactgttgaatatgaacgcagtgtattaaatgcccgatataggaacaaaaataaaatgaagaacatttctattataaa

SEQ ID NO: 660589 - DNA, 120 bp, Artificial Sequence
  ENSG00000184305_64 (sequence is synthesized)
aaccagtacttatttcaacttaggttaaatcattatctgacaataagaaatgcatcactaatctgtgacatgtaaaatattgagtaaaatcaattttttcatcatttcatattttaagta

SEQ ID NO: 660590 - DNA, 120 bp, Artificial Sequence
  ENSG00000184305_65 (sequence is synthesized)
agataaatccacacagactgaactactatgctatgatgtaagtagctctgtaaaaccatttttaacttcattattggcattcagacctccacagcttattgacctctgcggctgctgtgt

SEQ ID NO: 660591 - DNA, 120 bp, Artificial Sequence
  ENSG00000184305_66 (sequence is synthesized)
gagtagataaatccacacagactgaactactatgctatgatgagcgttaacgtcatgaatcctgtggctcaccacttcatgtctgaaggttagtgagccaatgactcatccctcaaggct

SEQ ID NO: 660592 - DNA, 120 bp, Artificial Sequence
  ENSG00000184305_67 (sequence is synthesized)
ctggatttgtttacttatttagcaaggtatagcagaaaatgacagcatgcccttaacacaaagcttttcctctagtactcttgtccaggaagaggtaataaaatttactttaaaaaacta

SEQ ID NO: 660593 - DNA, 120 bp, Artificial Sequence
  ENSG00000184305_68 (sequence is synthesized)
ccagaatttcctgagccttccaaacagtgagttgttcatttaatttttcaaggccttgtaaaatcaattagataactgataagaaaatgtgatttataataaatgtgttaatattagtat

SEQ ID NO: 660594 - DNA, 120 bp, Artificial Sequence
  ENSG00000184305_69 (sequence is synthesized)
ttaatgaattaacttctgtgtctcctaacttcatgtctttgaaccatgtgtcattcaagtttcattttgttaccttatcttaaggacatgggcaagtaggctgatgtactttatttccct

SEQ ID NO: 660595 - DNA, 120 bp, Artificial Sequence
  ENSG00000184305_70 (sequence is synthesized)
gtctctaccatgtgaggacacagtgagaaggcagctatttgcaagccaggaagagagccatcaccaagaactgaatctgccagccccttcatcttggatttcccagcctccaaaactagt

SEQ ID NO: 660596 - DNA, 120 bp, Artificial Sequence
  ENSG00000184305_71 (sequence is synthesized)
gcagacatgagtccagcaagcagtaccacgtcacttcctgttagtcctcttactgaagagccagtgcctttcaagaatattcagcattatatcaactgtacacacatatggtctgacaca

SEQ ID NO: 660597 - DNA, 120 bp, Artificial Sequence
  ENSG00000184305_72 (sequence is synthesized)
tgaggacacagtgagaaggcagctatttgcaagccaggaagagagccatcaccaagaactgaatctgccagccccttcatcttggatttcccagcctccaaaactctacaagttagagtt

SEQ ID NO: 660598 - DNA, 120 bp, Artificial Sequence
  ENSG00000184305_73 (sequence is synthesized)
tcacttgtaaaacaactcacatacttttgtgtgattcgatgggctaaatccgacattaagaatttcaagctgcaacataacaggtatacagcagacggcaccctgcagaatctccaagga

SEQ ID NO: 660599 - DNA, 120 bp, Artificial Sequence
  ENSG00000184305_74 (sequence is synthesized)
atgggttttggaaaaagacagtgagcagagaatcacttaagcaaagtggaaaagccgtaattgtgttcctctgagacacatttttactgaaattatgttttgtttttgtttgaaaatcag

SEQ ID NO: 660600 - DNA, 120 bp, Artificial Sequence
  ENSG00000184305_75 (sequence is synthesized)
aatcaaaggcatatttaactacagttaaaatagctgtttttaatgagtgattctatcaaatatgatgttacaactttagataacataatgcaatttcttaaaagtagtatgaatctaata

SEQ ID NO: 660601 - DNA, 120 bp, Artificial Sequence
  ENSG00000184305_76 (sequence is synthesized)
atattcacatgtttacagatgagcaaaagtgtttcagaatctagtgactcgtttagctggaatgcacttattccttaactgtatcattttaaccttgataaaattgaaaacttgtggaaa

SEQ ID NO: 660602 - DNA, 120 bp, Artificial Sequence
  ENSG00000184305_77 (sequence is synthesized)
cccattaaagattctaaagcaaactactacacgtaggccatcatgttccaagtttttgaaagttcatctttttcatcttgttgataaatttcatcaacttttatgtagggaaaagtccgg

SEQ ID NO: 660603 - DNA, 120 bp, Artificial Sequence
  ENSG00000184305_78 (sequence is synthesized)
gtcctaattatttaaataaacagaaggaagaaaggaaggaaattaattttgacaaaggacctgaataatccataaaccagatgcctttagtgaaaacgaagtaagatcagctctggatac

SEQ ID NO: 660604 - DNA, 120 bp, Artificial Sequence
  ENSG00000184305_79 (sequence is synthesized)
ctcctaactcttcccctccttctcctgatgagggagaagtggaggcccaaggaaaatgagcaagttttgtaacaacacgaatggggaaggatgggaaagagaacagaatcggtggagggt

SEQ ID NO: 660605 - DNA, 120 bp, Artificial Sequence
  ENSG00000184305_80 (sequence is synthesized)
ttaaacttgaaaagactagagacagtacaaggagggagagaggtggcaaaatgtacccaggccctgtattgattaggaattttcaagttctggacataaagttttctctaagaagtgaat

SEQ ID NO: 660606 - DNA, 120 bp, Artificial Sequence
  ENSG00000184305_81 (sequence is synthesized)
ttcttctgtatatgttgtccttttttcaacatgtctccaaattggttgaagaaatatgttatgaattactgtattaaaggctgtggatcacataaatagagctctgtctcttcttaggta

SEQ ID NO: 660607 - DNA, 120 bp, Artificial Sequence
  ENSG00000184307_0 (sequence is synthesized)
gcggctgcggcgagggagcggccgagcggagcccgggtcccggagactcctgccgtcacgcccggggctccgcgtagcagagatcgggagacgcgtctgtgcctccggggaagccgaccc

SEQ ID NO: 660608 - DNA, 120 bp, Artificial Sequence
  ENSG00000184307_1 (sequence is synthesized)
atctcccctccgcctctttggctgcagttgcacctccggccagagggcaggtgcaaatcatgacacagaagggcagtatgaagcctgtgaagaaaaagaaaaccgaagaacctgaattgg

SEQ ID NO: 660609 - DNA, 120 bp, Artificial Sequence
  ENSG00000184307_2 (sequence is synthesized)
agcccctgtgctgctgcgagtacatagatcggaatggggaaaagaaccacgtggctacttgtttgtgtgattgtcaagatctggatgaagggtgtgatcgatggattacatgtaaatctt

SEQ ID NO: 660610 - DNA, 120 bp, Artificial Sequence
  ENSG00000184307_3 (sequence is synthesized)
tacagccagagacttgtgaaagaatcatggatacaatttctgatcgcctccgaattccttggcttaggggagccaaaaaagtgaacatcagcatcatccctccgcttgtcctgctgcctg

SEQ ID NO: 660611 - DNA, 120 bp, Artificial Sequence
  ENSG00000184307_4 (sequence is synthesized)
tcttccttcatgtggcttcctggcatttcctcctgggggtggtggttttgacctcccttcctgtgctggcactgtggtactactacctcactcacagaaggaaagaacagaccctgtttt

SEQ ID NO: 660612 - DNA, 120 bp, Artificial Sequence
  ENSG00000184307_5 (sequence is synthesized)
tcctgagccttggactgttctctctgggctacatgtactatgtgttcctgcaggaagtggtccccaaagggcgtgtgggtcccgttcagctggcggttcttacctgcgggttatttctga

SEQ ID NO: 660613 - DNA, 120 bp, Artificial Sequence
  ENSG00000184307_6 (sequence is synthesized)
tactcttagccttgcacagagccaagaagaatccaggctacctcagcaatccagcaagcggtgacagatctctaagcagcagccagctggagtgcctgagcagaaaagggcaggagaaga

SEQ ID NO: 660614 - DNA, 120 bp, Artificial Sequence
  ENSG00000184307_7 (sequence is synthesized)
ccaaagggttccctggggcagacatgtcgggcagtctcaacaatcgcacaacaaaggatgaccccaagggctcttccaagatgccagctggaagccccaccaaagcgaaggaggactggt

SEQ ID NO: 660615 - DNA, 120 bp, Artificial Sequence
  ENSG00000184307_8 (sequence is synthesized)
gtgccaagtgccagctggtgcgaccagcccgggcatggcactgccggatatgtggcatctgtgtgaggagaatggatcatcattgtgtctggataaatagctgcgttggagaatcaaatc

SEQ ID NO: 660616 - DNA, 120 bp, Artificial Sequence
  ENSG00000184307_9 (sequence is synthesized)
atcaagcatttatacttgcccttttgatcttcttgctcacctcggtgtatgggatcacactgaccttggacaccatttgtagagacagaagtgtcttcacagctcttttctattgtcctg

SEQ ID NO: 660617 - DNA, 120 bp, Artificial Sequence
  ENSG00000184307_10 (sequence is synthesized)
gagtttatgcaaattacagctcggctctgtccttcacctgcgtgtggtactctgtgatcatcacagcaggcatggcctacatcttcctgatccagctgatcaacatcagctacaatgtga

SEQ ID NO: 660618 - DNA, 120 bp, Artificial Sequence
  ENSG00000184307_11 (sequence is synthesized)
ctgagcgggaagtccagcaggccctccgacagaagactgggcgccggctcctctgcgggctcatcgtggacacagggttacttggatgagccaactccgcttccttcccatggataggaa

SEQ ID NO: 660619 - DNA, 120 bp, Artificial Sequence
  ENSG00000184307_12 (sequence is synthesized)
gggactctgtgtattattcaggtttattggcacgaagatacttgttttaagttccttgagaacccatgatggacagttgacagaatgcttaaacctgtcaaaagatgagtgatcttgtgt

SEQ ID NO: 660620 - DNA, 120 bp, Artificial Sequence
  ENSG00000184307_13 (sequence is synthesized)
gggaaaagccttcccaggcgtctgtaccgaaaggagcagcaaacaaggggctaatccatgagcagtgttctgtaggctctgtgacatctttggtttataggattttggagccttttatga

SEQ ID NO: 660621 - DNA, 120 bp, Artificial Sequence
  ENSG00000184307_14 (sequence is synthesized)
gtttattgtggaatctttgaaaggacaaggcctctgtgaatgaatcagtcccagggaagcatttggtggtggcggcagtggaggattgcccggtgaacctataaatcagcagtctcttgg

SEQ ID NO: 660622 - DNA, 120 bp, Artificial Sequence
  ENSG00000184307_15 (sequence is synthesized)
gcagaggagcaagcccctcgaacatgatttcaaacaagcaggtcctcttctctcatctcacgtccttagtctctgttaatgaacatactggatgtggagtttaataaattacctactatc

SEQ ID NO: 660623 - DNA, 120 bp, Artificial Sequence
  ENSG00000184307_16 (sequence is synthesized)
atctggccacttagattattatcacaccactgtggactgttcctggggggagaagaacagaccgatttgaaagattcaagggagaaagattaaggatcaggattgcatgaaagaagaaaa

SEQ ID NO: 660624 - DNA, 120 bp, Artificial Sequence
  ENSG00000184307_17 (sequence is synthesized)
tccttcaatatttaaaatgtttcttacaatacccacggagcacttttatggttccagccgagcgttcctgaaatgaactgaccattaacagcgcctctttgataggttaccctgatgctg

SEQ ID NO: 660625 - DNA, 120 bp, Artificial Sequence
  ENSG00000184307_18 (sequence is synthesized)
ctaaagtaaagccttaagtgtgtttttgggacaacgtgctgcttattccacctcagccacatatgtgtttgtgtttaggatattgtaaatctttgctaagtagtgttttccttggtgaat

SEQ ID NO: 660626 - DNA, 120 bp, Artificial Sequence
  ENSG00000184307_19 (sequence is synthesized)
gaagtcattgttgtcttcaagtgtaccatctgcctagcaaaaaattgctacaaactttctcttatgcaatagtccttggtacttctaatatttttagcaagagacaattttctgtactag

SEQ ID NO: 660627 - DNA, 120 bp, Artificial Sequence
  ENSG00000184307_20 (sequence is synthesized)
aatcttccactgccagaaaacacagtgccagtaaggttctacataccactgaccatctgcttaatagacatgtatttcctttgagtaggacattagcttttgattataaagctcaactag

SEQ ID NO: 660628 - DNA, 120 bp, Artificial Sequence
  ENSG00000184307_21 (sequence is synthesized)
tataagcaaaaatataacatctagaagcacagttttagccaggatgtttaaaaattacagttttgtgagacttaagggtctttttaacctaggtaagtttatatgacctaacttaattgt

SEQ ID NO: 660629 - DNA, 120 bp, Artificial Sequence
  ENSG00000184307_22 (sequence is synthesized)
agccatattctggtaccttccattttgaaaagtagaggttgcttaagcaagcaatggataataagagacttttcctgaggcacctgtttggaatctggttttctcagcggcagcttgaca

SEQ ID NO: 660630 - DNA, 120 bp, Artificial Sequence
  ENSG00000184307_23 (sequence is synthesized)
tgtgcacccttttgtattaaacactgcaagggtgatgcaggggagcaggaaagccatcctaaactcactactgagtacgattcagtatgttcctgtggatgtctgctgtgactaatataa

SEQ ID NO: 660631 - DNA, 120 bp, Artificial Sequence
  ENSG00000184307_24 (sequence is synthesized)
atttcttgcagaatcagctacacttaattatgttgctgatagacaagcatccacgcttcagctggcactaagtgttttcattgtaggatcagcagcaggttaaagactgaacggttagtg

SEQ ID NO: 660632 - DNA, 120 bp, Artificial Sequence
  ENSG00000184307_25 (sequence is synthesized)
aagacaaatgtcttaagaggctgcgatgtctaggttgggcttgtgacttcttagtggcctagccttcttgatggcaccttgaaagtgaacttctagaaatctacatttaaaaggcaaagc

SEQ ID NO: 660633 - DNA, 120 bp, Artificial Sequence
  ENSG00000184307_26 (sequence is synthesized)
tttaaaagcagagctagtctattctagttactgatgcaactaaaattctgtatttcttaagatggagccactgacgagatgtcacagtatagagcctgcagtctcaactcattgtgatcc

SEQ ID NO: 660634 - DNA, 120 bp, Artificial Sequence
  ENSG00000184307_27 (sequence is synthesized)
taatggtctgggtgattggatggtttgagttgttagggattttgagtttttcattttattgcatatctgggttggatgttagactaaaggaaacccaggaatatttacctggtgttacat

SEQ ID NO: 660635 - DNA, 120 bp, Artificial Sequence
  ENSG00000184307_28 (sequence is synthesized)
ttaatatttaatgtaactggtctagcaacattaagggggatttctgaagccaactccggaggctgtgggctgcacattttgcactgtttttatatacttgtattcatatcctcttatcac

SEQ ID NO: 660636 - DNA, 120 bp, Artificial Sequence
  ENSG00000184307_29 (sequence is synthesized)
ctcagactcagacacaaggccttttacatggaaattttacaaattacttccatttatgtaaaataacgtcctgtgaccaagttgtttaaatggaaaataaagtgctttctttaaggaaaa

SEQ ID NO: 660637 - DNA, 120 bp, Artificial Sequence
  ENSG00000184307_30 (sequence is synthesized)
accctgctctgtgcaggcgattcacagcacctcatctttttggttaggtccttggatttaatagtctttgaggtcccttcagcttttacaaatgaagattctgaatgaacttatttctaa

SEQ ID NO: 660638 - DNA, 120 bp, Artificial Sequence
  ENSG00000184307_31 (sequence is synthesized)
ctaactcttaatttgcgaatgttggaaaatcatcaaatggcagaggctaactggcagcctgtctcattagtgagcctgagaggagcttccctaccttgtgtgattgtgttgggctttagg

SEQ ID NO: 660639 - DNA, 120 bp, Artificial Sequence
  ENSG00000184307_32 (sequence is synthesized)
aactggcaccagttctccaccctgggcacacgtgcattccaccaccctgccgaggacattgtctgaagtgccttctatgtggctctctgagggatgatggctcctccttccgtctccctt

SEQ ID NO: 660640 - DNA, 120 bp, Artificial Sequence
  ENSG00000184307_33 (sequence is synthesized)
ccattttacacttcagtgtccatttctatccccagtttcttaaaggcattatagggccatgctcaggtttagagactggagtgggaagaagttaatttttctgacgccacaacttaagag

SEQ ID NO: 660641 - DNA, 120 bp, Artificial Sequence
  ENSG00000184307_34 (sequence is synthesized)
acttttatactgaggcagtaaaagtagagccattcctttccagtcacctttttaattgactcagttgcctgaacttgagaaggatgtggattgctaatgcacaaattgatagaagcaatt

SEQ ID NO: 660642 - DNA, 120 bp, Artificial Sequence
  ENSG00000184307_35 (sequence is synthesized)
cccatccattagtatggaggaaagagtgttggattaggatagtttctagtccctctttcgattcttaatagccatgtgacccctagctgagtcactttcccaagtctcagggtcatctgc

SEQ ID NO: 660643 - DNA, 120 bp, Artificial Sequence
  ENSG00000184307_36 (sequence is synthesized)
aaagtggggtactgatgcctgccctggctacctcacagagccgtcatgagggtcacgtgagggaagatggatgtggaaagcactaaaaaacaactcaagagccatggaaatacaaagtat

SEQ ID NO: 660644 - DNA, 120 bp, Artificial Sequence
  ENSG00000184307_37 (sequence is synthesized)
taggaaaatattatgatggaagaaaaacgtttatagtctagaatattgaagccaatattattagggtaatcagttttcagcatataccttgttgtacagttatgagaatttctccttctt

SEQ ID NO: 660645 - DNA, 120 bp, Artificial Sequence
  ENSG00000184307_38 (sequence is synthesized)
attagacatgaactactcaaacagagaagatgaccagatggattgatgctaagttgtctcatcttgaaaagacagttgacaacagttataaagataattattgctagtgtaatgtagtgt

SEQ ID NO: 660646 - DNA, 120 bp, Artificial Sequence
  ENSG00000184307_39 (sequence is synthesized)
ggccatgagtttaggtgatgagttcttctatttatattttataaattctgcttgggtttcttataaataactccaacaggcattcatgtgtttttcctcttcccatgtttcaccaggtaa

SEQ ID NO: 660647 - DNA, 120 bp, Artificial Sequence
  ENSG00000184307_40 (sequence is synthesized)
ggtgctagcacacttgtgactgtggctggaagaggagaacagacactcctgtggggatgctttactctcttttctggtaggaaggctgagtaacatcacgggctcgattattttcttcat

SEQ ID NO: 660648 - DNA, 120 bp, Artificial Sequence
  ENSG00000184307_41 (sequence is synthesized)
gtatttcaaatgctgtcagttatagcactaaattgtgaaaatcagccttctggcattcacattattctggtatgaactttgaggagttgagtgacatcttcccacttaacttgcacatta

SEQ ID NO: 660649 - DNA, 120 bp, Artificial Sequence
  ENSG00000184307_42 (sequence is synthesized)
attctcaattacccctccctaaataacagtatctcactaagagagaagaaacagggtatatgtggtttccactattaatggattactgttcttccctggctcttccgacaataacaagtt

SEQ ID NO: 660650 - DNA, 120 bp, Artificial Sequence
  ENSG00000184307_43 (sequence is synthesized)
gtttctttaatcatatcttaaaaccgaaaatgtataaaagattaaatatttatgtacaatgggttgttctactatagaattaagatgagggaatttcagatgaggaaaatacccttttga

SEQ ID NO: 660651 - DNA, 120 bp, Artificial Sequence
  ENSG00000184307_44 (sequence is synthesized)
aatgttagttttgaacatgtactgttgtgcaatcccaaagataattcatgactccttaaatttgccttggcttatagcttaatatagggaaaatattgccagcgttttcagtcattctgt

SEQ ID NO: 660652 - DNA, 120 bp, Artificial Sequence
  ENSG00000184307_45 (sequence is synthesized)
gcatgctgctttaagcaagagatttatatttgttgagaggaaatattgctacttcctgcacttccaccctctgcagccagcaccgtccctactgttgccattaattggagctgtccttaa

SEQ ID NO: 660653 - DNA, 120 bp, Artificial Sequence
  ENSG00000184307_46 (sequence is synthesized)
gatggtcaccatattcttattcaggctgttgtcattttccccagagatggtttgtttaacgaatgataggctctgtgcctggggatgttagcagactctggggtttgtacagtgatgcct

SEQ ID NO: 660654 - DNA, 120 bp, Artificial Sequence
  ENSG00000184307_47 (sequence is synthesized)
tctccctggcccagagctgaatattcatctagaattaaagttggatttgatataacaaatttctttctatacaggttttacataagagagacagtaataatgtcaaggatagcctgtgtg

SEQ ID NO: 660655 - DNA, 120 bp, Artificial Sequence
  ENSG00000184307_48 (sequence is synthesized)
ggcagaaattggtagtcgtgcttttgaatgtcagctgtagagccaactctgattatctagccattgatcatacaaattgatagaaacattagtcagtaattttagcttcttgccaaattg

SEQ ID NO: 660656 - DNA, 120 bp, Artificial Sequence
  ENSG00000184307_49 (sequence is synthesized)
ttcacaacatctaaatgtaatgtgatgtgatgaagataagtagtacaaagagaccaaaataatttgggagaattaggaatgatgacaattttttttaacaacttacctctaatagggtta

SEQ ID NO: 660657 - DNA, 120 bp, Artificial Sequence
  ENSG00000184307_50 (sequence is synthesized)
ctcctgaagtcttctgatttctgaaaaccctgcattatacctgtgctgcctctgtggctccctcaatgtctctatcctgtggccctgtccctagccctaaactgttatgttcccggtggc

SEQ ID NO: 660658 - DNA, 120 bp, Artificial Sequence
  ENSG00000184307_51 (sequence is synthesized)
aatttctccagttttgtgggtcagggatactgcttgttggggcattatgttaacagtaacattttgaaacatactttcatgatagtccagcaaaaaacagcatcaaaactatttccattg

SEQ ID NO: 660659 - DNA, 120 bp, Artificial Sequence
  ENSG00000184307_52 (sequence is synthesized)
tatctctttagaaggctctgtattcggtaaaaagtctagctggcgccattggaatatgggctgctaaagactcaatttctagttgatgtttgaggtgaggcaaaaataaagctaaggtag

SEQ ID NO: 660660 - DNA, 120 bp, Artificial Sequence
  ENSG00000184307_53 (sequence is synthesized)
ggctgtcgccataggaacggctggtgcccagacggcgcctgcccaggctgggaaggggcggtgaaggcagctcagacctccaagaaccctggagccccctgtgtggccaggcggagccac

SEQ ID NO: 660661 - DNA, 120 bp, Artificial Sequence
  ENSG00000184307_54 (sequence is synthesized)
agaagcctgatgaaaacgggaccccctccccctctctcttctcatttttgattgctcaggcgttggaggttaagcagagagagagaggcgtggacctatttacgagatgtaagttgtgtt

SEQ ID NO: 660662 - DNA, 120 bp, Artificial Sequence
  ENSG00000184307_55 (sequence is synthesized)
tacaatgtgactgagcgggaagtccagcaggccctccgacagaagactgggcgccggctcctctgcgggctcatcgtggacacagacttgtcttactcaaggaccaagtatctgattgct

SEQ ID NO: 660663 - DNA, 120 bp, Artificial Sequence
  ENSG00000184307_56 (sequence is synthesized)
ctttcttcttttactctttcctctttcataaattttacaaacttcttccatgtccgaagggtgatccagaggatcctcctttaagaataaagaaggaaaaaagtgaaatgttgagaaaaa

SEQ ID NO: 660664 - DNA, 120 bp, Artificial Sequence
  ENSG00000184313_0 (sequence is synthesized)
gaggggcagctctgggaaagtcctaggggtgggggcagtctccacagcctcccacaagggagttaccaccttcccgcacttctgggtacaagtctcctgctctggctgtattccacagtt

SEQ ID NO: 660665 - DNA, 120 bp, Artificial Sequence
  ENSG00000184313_1 (sequence is synthesized)
agaacttcatatctttggcttagagctggattttctgttaccatgtggatgctccaggtgaaggggcccgctcctgcttaaaaacaccatgcatgcagactgctgctgggaatgtgacag

SEQ ID NO: 660666 - DNA, 120 bp, Artificial Sequence
  ENSG00000184313_2 (sequence is synthesized)
ttggctgttggagagaagcgggcactggcattgagagacctccagactggacatggccctgagtccaggggctaacctggtcttccatgaagacccaaagatgacaccaagtcccccctc

SEQ ID NO: 660667 - DNA, 120 bp, Artificial Sequence
  ENSG00000184313_3 (sequence is synthesized)
ctgtggggccccgggattagggtctggtaccatccctcagccccacccagacatggctcaggtgcctatgttgaatctgctcccaagtcctggcttggctctcgttccagatcttaatga

SEQ ID NO: 660668 - DNA, 120 bp, Artificial Sequence
  ENSG00000184313_4 (sequence is synthesized)
ttctttgagtccagtctcaggggaggcctcaggcctggtgtctgaaaacacccccagacctgatgacagcagagctatcgctccagcctccctccagatcaccagttcttgttctggtga

SEQ ID NO: 660669 - DNA, 120 bp, Artificial Sequence
  ENSG00000184313_5 (sequence is synthesized)
agccctggacctggattccaaggatgtctcaaggcctgactcacaggggcgcctctgtccagcctcaaaccccattctgagccctagctctactgaggcccctcgtctgagctctgggaa

SEQ ID NO: 660670 - DNA, 120 bp, Artificial Sequence
  ENSG00000184313_6 (sequence is synthesized)
ccaccctcagtcaaattctgaagatgccttcaagtgcctctcaagtaagattttcaagttgggtcagagaaactccaacccttctaggcatgaattaaacccatttataaggcaccattc

SEQ ID NO: 660671 - DNA, 120 bp, Artificial Sequence
  ENSG00000184313_7 (sequence is synthesized)
cagagaaggtctggttctgggccactgcatctctaggccaagctcaaaagcactccttattccaacctcaaactcttctctggaccttgactccaatccattgctcaacatgggctcaag

SEQ ID NO: 660672 - DNA, 120 bp, Artificial Sequence
  ENSG00000184313_8 (sequence is synthesized)
aaacacctccaagctgaacctgaatgtagctccagattctcatgggaccctaatcccagacacaaatgagaccatcactttggcttcacataatatctctgagtctgtttcaaaaggagc

SEQ ID NO: 660673 - DNA, 120 bp, Artificial Sequence
  ENSG00000184313_9 (sequence is synthesized)
ctttagtaccacctggagcacaagttcaaaggaaaccatgaatgtggcttccagcggccactccagatctgatttgagcgtgaccatcactcaagcctcgtatgtgaccctgattcctgg

SEQ ID NO: 660674 - DNA, 120 bp, Artificial Sequence
  ENSG00000184313_10 (sequence is synthesized)
ctccagctatggtatcagcctgcactccagcacccatgagcccaactccaccatctctccaccctcatgcatgactctaatcctgggttccaatgagactctgagcctggactccagcct

SEQ ID NO: 660675 - DNA, 120 bp, Artificial Sequence
  ENSG00000184313_11 (sequence is synthesized)
cctgttcagcgacacctccaccttgacgctgagcagtcagcaggatgatgccaaggacaacagcatccacactgtgcccctggaggagaatctggagagttggagtgagatggccagcat

SEQ ID NO: 660676 - DNA, 120 bp, Artificial Sequence
  ENSG00000184313_12 (sequence is synthesized)
taaggtgggccagttcccgctgggattccccatctccaaccccgcaggcaaggacgccgtgaccttgcaaggcatccctgagggagcctttgatgaagtgacctcatgcctggtgaaggt

SEQ ID NO: 660677 - DNA, 120 bp, Artificial Sequence
  ENSG00000184313_13 (sequence is synthesized)
gccagagaagacagaaggtggcaacaacatggctctggttgagaatgtcaccacccttcagaagagccaggatctgctggaggcagaaggagaaaagaagaccatgataaagaagattat

SEQ ID NO: 660678 - DNA, 120 bp, Artificial Sequence
  ENSG00000184313_14 (sequence is synthesized)
gaggcagatccaggaggagccactggattctctctcaagctccgtccgcaagcaggccatggagatcctgacccagctgagccacacccagcccaccctgggcatgcgggagaggtcgga

SEQ ID NO: 660679 - DNA, 120 bp, Artificial Sequence
  ENSG00000184313_15 (sequence is synthesized)
gctggtgaacgtgtgtgtgcacagcgtgttctccctgccctccgtgcaggcgatgcaggagaaggacgaggccaaggctgagaccatccaggctctttaccatcagaccctggaggccct

SEQ ID NO: 660680 - DNA, 120 bp, Artificial Sequence
  ENSG00000184313_16 (sequence is synthesized)
gcagacactgctcaaagccctctttatcgaggaccccactcctgctgggctgaagagcatcttggaggccctggggccttggatgaactctgggaaggcccatgagcgagcacgggctgt

SEQ ID NO: 660681 - DNA, 120 bp, Artificial Sequence
  ENSG00000184313_17 (sequence is synthesized)
gaacaccaatgtctctgtgttgaaccacatgcttctaactctgcctttctttatgcccttggggttcccggcgctggggcttctgctggggagactcatccttcacattggggatcctga

SEQ ID NO: 660682 - DNA, 120 bp, Artificial Sequence
  ENSG00000184313_18 (sequence is synthesized)
tggacggcatcatcatcctctacactattctggagctccaaaaacgagccagagataaggaagagaccaacaaaaaggagctatatgagagcaacaagcatttcctggggccctacaacc

SEQ ID NO: 660683 - DNA, 120 bp, Artificial Sequence
  ENSG00000184313_19 (sequence is synthesized)
ctgtgagcccgtgccagaacattctgcgggtgatcgaggaatttggagacttcctggggccccagcagataaaggacctgctgctggccgccctggaagggctgaaaggcagctcagagg

SEQ ID NO: 660684 - DNA, 120 bp, Artificial Sequence
  ENSG00000184313_20 (sequence is synthesized)
ctccagggaaggactccagggagatgatgcagctggcctcggaggtcatgctcagctcggtgctggagtggtaccgccacagggcgctggaggtgatcccagaaatcatgcaaggcatct

SEQ ID NO: 660685 - DNA, 120 bp, Artificial Sequence
  ENSG00000184313_21 (sequence is synthesized)
acatgcagctgagccacatccaggagcctcgggcccgccaggtggccctgctgcccgtctccctcctggctagctccttcatgaccgaggttgtggtggccctgctcatgtgccccctcc

SEQ ID NO: 660686 - DNA, 120 bp, Artificial Sequence
  ENSG00000184313_22 (sequence is synthesized)
cactgaacagcaatggagcagagatgtggaggcagctgatactgtgtaagcccagctgtgatgtccgagacctcctggatctgctcctgggcagcctgaaggagaagcccgtcaccaagg

SEQ ID NO: 660687 - DNA, 120 bp, Artificial Sequence
  ENSG00000184313_23 (sequence is synthesized)
agggccgggcttccatcgtgcccctggcggcagccagcggcctgtgcgagctcctgtccgtcaacagctgcatgggccgtgtgaggcgcatctaccctcagctgctcctggccctgctca

SEQ ID NO: 660688 - DNA, 120 bp, Artificial Sequence
  ENSG00000184313_24 (sequence is synthesized)
ttcaggtccattaccacatcggcctcaacctgcctggctgcgtggctcctcccaaggacaccaagaagggtgcacagccctctcccttcgtacctgtgcgctgggtggtgaaagtggtga

SEQ ID NO: 660689 - DNA, 120 bp, Artificial Sequence
  ENSG00000184313_25 (sequence is synthesized)
aaaccctgctactgaggatgggctgctcttatgagaccacgtttctggaggaccagggtggctgggagctcatggagcaggtggagagccaccaccgcggagtggccttgctggcaaggg

SEQ ID NO: 660690 - DNA, 120 bp, Artificial Sequence
  ENSG00000184313_26 (sequence is synthesized)
ccatggtgcagtactcctgccaggagctgtgccgcatcctctacctgctcatcccgctcctggagcgaggcgacgagaagcacaggatcacggccaccgccttcttcgtggagctcctcc

SEQ ID NO: 660691 - DNA, 120 bp, Artificial Sequence
  ENSG00000184313_27 (sequence is synthesized)
agatggagcaggtgcgccggatccccgaggaatactctctggggcggatggcagaaggcctgagccaccacgaccccatcatgaaggtgctgtccattcgaggcctggtcatcctggccc

SEQ ID NO: 660692 - DNA, 120 bp, Artificial Sequence
  ENSG00000184313_28 (sequence is synthesized)
gcaggtctgagaagaccgccaaggtgaaggccctcctgccctccatggtgaagggcctgaagaacatggatgggatgctggtggtggaagcggtccacaacctcaaggctgtcttcaagg

SEQ ID NO: 660693 - DNA, 120 bp, Artificial Sequence
  ENSG00000184313_29 (sequence is synthesized)
ggcgggaccagaagctgatggacagtgcggtctatgtggagatgctgcagatcctgctgccgcacttcagcgacgcacgagaggtcgtgcgctcctcctgcatcaacctgtatgggaagg

SEQ ID NO: 660694 - DNA, 120 bp, Artificial Sequence
  ENSG00000184313_30 (sequence is synthesized)
tggtccagaagcttcgggcaccacgcactcaggccatggaggagcagctggtcagcaccttggtgcccctactgctgaccatgcaggagggcaactccaaggtaagccagaagtgtgtga

SEQ ID NO: 660695 - DNA, 120 bp, Artificial Sequence
  ENSG00000184313_31 (sequence is synthesized)
agaccctgttacgctgttcttacttcatggcttgggagttgccaaaaagagcttatagccggaagccctgggacaaccaacagcagacagtggccaaaatttgcaagtgccttgtgaaca

SEQ ID NO: 660696 - DNA, 120 bp, Artificial Sequence
  ENSG00000184313_32 (sequence is synthesized)
cccaccgagacagcgccttcatattcctcagccagagcctggagtatgccaagaactcacgggcctccctccggaagtgctcagtcatgttcatagggtccctggtcccctgcatggaga

SEQ ID NO: 660697 - DNA, 120 bp, Artificial Sequence
  ENSG00000184313_33 (sequence is synthesized)
gcataatgacagaagatcgtctgaatgaagtgaaagctgctctggataacttgagacatgacccagaagcatcagtgtgcatctacgcagcccaggtccaggaccacatcctggccagct

SEQ ID NO: 660698 - DNA, 120 bp, Artificial Sequence
  ENSG00000184313_34 (sequence is synthesized)
gctggcagaactcctggctgccgcacgggaactcatgggtgtgttactcagccaccacccaccgctggagccccagctgtgagaacctgcccacttcccaccagcggcgctcctggatca

SEQ ID NO: 660699 - DNA, 120 bp, Artificial Sequence
  ENSG00000184313_35 (sequence is synthesized)
tgcaggcactgggctcctggaagatgtccttgaagaagtgacgtccctgagccccaaaccctcctcagggtggttgagttccagccatgctccctataaatgtcatgtggcttacctctc

SEQ ID NO: 660700 - DNA, 120 bp, Artificial Sequence
  ENSG00000184313_36 (sequence is synthesized)
aggcaacaacaagcagtcacaggggctcggagctggagagtgacacactcagctttgccacatggtgctgatggacatcagacggagacttccagcaatctgttggttttgcaagtctga

SEQ ID NO: 660701 - DNA, 120 bp, Artificial Sequence
  ENSG00000184313_37 (sequence is synthesized)
tagaaattggcagagaacaaggcagatgcagtttctgcatcagtggagctcattggctagtggggaagccagataccgtgagccaagagacgggaaggaacaaggtggcctgagaacttt

SEQ ID NO: 660702 - DNA, 120 bp, Artificial Sequence
  ENSG00000184313_38 (sequence is synthesized)
caggtggcccccacctgtctaggggacctggaaggctcttagcatttgagctgaaacctgaaagggtgaagcagcagtcattagctggggaaggggagtggagatggatgcccagcctgt

SEQ ID NO: 660703 - DNA, 120 bp, Artificial Sequence
  ENSG00000184313_39 (sequence is synthesized)
ggaagacccagacctaactgggagagcctgcctctttggaggaagtcaaaagaactctgcaagggtggaacggaaaaggaaagggacatatggaggggcaaaaagggtgaaaaggggact

SEQ ID NO: 660704 - DNA, 120 bp, Artificial Sequence
  ENSG00000184313_40 (sequence is synthesized)
ggggccagatacagagggccttttgggtctgctaacaactggaggactctatcctaaagataacaggaagccatggaggggtttaggcaaggggatggcttagagatggtgttggctgcc

SEQ ID NO: 660705 - DNA, 120 bp, Artificial Sequence
  ENSG00000184313_41 (sequence is synthesized)
tagagatggtgttggctgcccagaaggccagtggggtgagtgaccttcctctctttgaccttcacttccttatgtataaatattaaacttactctctctctctctctctctctctgtgtg

SEQ ID NO: 660706 - DNA, 120 bp, Artificial Sequence
  ENSG00000184313_42 (sequence is synthesized)
tgtgtagtgcggagcttgttaacagacgtgcatgcctggcctgtggactgtgcagtaagtgttgaaaaaggcactcttccctgacttgatttctttctgcatctcctcccaggggcccgc

SEQ ID NO: 660707 - DNA, 120 bp, Artificial Sequence
  ENSG00000184313_43 (sequence is synthesized)
caaggagccttgttccttttagtggggaaaggtatttagaagctaagatcttggtgttggctgtgttcactacaattggtgtatctacttctccatcctccagcgtcctctggtgatcga

SEQ ID NO: 660708 - DNA, 120 bp, Artificial Sequence
  ENSG00000184313_44 (sequence is synthesized)
gaatctgaagttccaggttttcataggccccagtgaccttgtcctcagaaggagaaagatcctctctcctttggtgttcccctcaactcccttaaataaaggactctattggtcctgccc

SEQ ID NO: 660709 - DNA, 120 bp, Artificial Sequence
  ENSG00000184313_45 (sequence is synthesized)
agtgtgaaggttaaggaaggcttcctggaggagatgacatttaaactgaaccttaaagtttgccaaatgaacaagaggcagcatgggcatcctaggtacttttgtcatcttttctgccac

SEQ ID NO: 660710 - DNA, 120 bp, Artificial Sequence
  ENSG00000184313_46 (sequence is synthesized)
tgcaggtgggctatgagttgggagaagggaccatgtcacattggtattgcacccccaggtccagctttaggagggccccaagaagtggggatgggatggatgaaggagtgcctgaacaaa

SEQ ID NO: 660711 - DNA, 120 bp, Artificial Sequence
  ENSG00000184313_47 (sequence is synthesized)
tactgcaggtcaccagcagaatgtgtcacctccagggagagcaaacctggccttggggtcgggagtcctgggttccagccccagctccatccagttctaactccaatttccctgaccatg

SEQ ID NO: 660712 - DNA, 120 bp, Artificial Sequence
  ENSG00000184313_48 (sequence is synthesized)
gtgagggaaagagaaagggaaactaccattacttacaggcctactatgtgccaaacacttgtattgacctctttcaaatgttatttcactaatctgcacagcaaccctgcgaagaaggaa

SEQ ID NO: 660713 - DNA, 120 bp, Artificial Sequence
  ENSG00000184313_49 (sequence is synthesized)
ttgtgatactcatgcttaggtgagttaaggggaattttttaaggtcacagagctcagagagtccagagagattcagaacaggcctgcctgacacggtcctctactttggtcagcctcttg

SEQ ID NO: 660714 - DNA, 120 bp, Artificial Sequence
  ENSG00000184313_50 (sequence is synthesized)
gagaggcacttctaagtctgttagtgtctaccacatgggttcttgcaggagaggagggagggtggatcttgccagaccttatggggcattcctgtgtccaccacaaagtcagggactcta

SEQ ID NO: 660715 - DNA, 120 bp, Artificial Sequence
  ENSG00000184313_51 (sequence is synthesized)
ggtttaacttctccccaccattccctggactcctgaccagcagcccttccgccctgcagcaagggtcttggcccaggttcagtcttttccacctccccagaagaggtgtctgctcctggc

SEQ ID NO: 660716 - DNA, 120 bp, Artificial Sequence
  ENSG00000184313_52 (sequence is synthesized)
cagtcagccccaccattaaagccgtggcactttgatgcagctcagatgcccctttcaccctcgtcccctccgccccggcttcctgtcgccctctctgctgtgatggtgtgtgtgcttgct

SEQ ID NO: 660717 - DNA, 120 bp, Artificial Sequence
  ENSG00000184313_53 (sequence is synthesized)
tctcccagtggaaggtgaactccttaagggagctgtgccatcttggacaagtcacttaacctgcctgtgcctctgtttcctcacctgtagtatggggatgatgacttgaccacctcctag

SEQ ID NO: 660718 - DNA, 120 bp, Artificial Sequence
  ENSG00000184313_54 (sequence is synthesized)
agtggtcaggtttacataaagcacttagaacagtgcctggcacataggaagtgctctctgtgagtcagttaaattgcttttagggttctcatgactcttttccgtgtctccagtgcccag

SEQ ID NO: 660719 - DNA, 120 bp, Artificial Sequence
  ENSG00000184313_55 (sequence is synthesized)
cccagaagctgtgcacagcaggcctgaatattggtggtgtgaattggtggatggcgggtgataggtggagcccctccttttctgcctcctcccccggtgacctgtcctgccccctcctcc

SEQ ID NO: 660720 - DNA, 120 bp, Artificial Sequence
  ENSG00000184313_56 (sequence is synthesized)
agctctgcctccccagctctttcctcccacaatacagacacacgggctcaacagtcacaggagatgtcaggcaagggcatggaggggagaagcgtttgtgagagtcatgcagcaggcatc

SEQ ID NO: 660721 - DNA, 120 bp, Artificial Sequence
  ENSG00000184313_57 (sequence is synthesized)
gaagtcctgttggctgccgtgggtggggaggccagtgggggagaggagggggataagggtgaggctggtgtgcagcttggacgatggggggctggtagtgctaaccctgccacagggagt

SEQ ID NO: 660722 - DNA, 120 bp, Artificial Sequence
  ENSG00000184313_58 (sequence is synthesized)
ctaaccctgccacagggagtgcaagaggagggcatgcctaaggaggaaaggagccaagtttctttcttttttttttttttggacggcgtttcattcttgtctcccaggctggagtgcaat

SEQ ID NO: 660723 - DNA, 63 bp, Artificial Sequence
  ENSG00000184313_59 (sequence is synthesized)
ccctctctttctttctcctttcttccttctttcccctttccttccttccttcctccctccttc

SEQ ID NO: 660724 - DNA, 120 bp, Artificial Sequence
  ENSG00000184313_60 (sequence is synthesized)
ctttccttccttccttcctccctccttccctccctccttctctctctttatttctttctttatttccttctcttttcaaggtggagtcttgctcttgtcacccaggctagagtgcagtgg

SEQ ID NO: 660725 - DNA, 120 bp, Artificial Sequence
  ENSG00000184313_61 (sequence is synthesized)
attcatgttggacctgaactcatgcagcaagcagtccctgagcacatattccgcaccagagttgatgttagctaacaggggcccatggaggaacaactcgggttttgtcctcagggaaat

SEQ ID NO: 660726 - DNA, 120 bp, Artificial Sequence
  ENSG00000184313_62 (sequence is synthesized)
cccctgttggataggggaggcagatggaggcactgaaggtttccagctgtcgcctcaggaggaagtccagggcacccaagggcccagggaaggaggcagtcagcctaaatgaggccaggg

SEQ ID NO: 660727 - DNA, 120 bp, Artificial Sequence
  ENSG00000184313_63 (sequence is synthesized)
gcagtgtcaagcctagctttaaggctctgagttttggatggagccctgcgaggtggcaggggtcagagtggaggtgggcatcccaggagaagggcattttgccagcacagaaggggtgga

SEQ ID NO: 660728 - DNA, 120 bp, Artificial Sequence
  ENSG00000184313_64 (sequence is synthesized)
acagcctgggtagttcagagaacaggagacagcttggttggaagctggctggctggtggtgagggtgtgggctggagggtgggcacgctgctgttaatgaggccacaggatctcatggga

SEQ ID NO: 660729 - DNA, 120 bp, Artificial Sequence
  ENSG00000184313_65 (sequence is synthesized)
cacgtcactggtcatttctcctatgtaaacagtactttatagtttacaaagccttcccatgggcatgacttctcttgactatgatgatcttgttggtctccctccctcccctccctgtct

SEQ ID NO: 660730 - DNA, 120 bp, Artificial Sequence
  ENSG00000184313_66 (sequence is synthesized)
ctccaccctttactccattccactcttaaccagactcccctagtgcccagggaaccaccaacctttgctgggcacctctgtgtgtcaggcacgagacatataaatgtgaatttgactcta

SEQ ID NO: 660731 - DNA, 120 bp, Artificial Sequence
  ENSG00000184313_67 (sequence is synthesized)
ccatgtggcaggctcaggaggcccaagaagaccagtccagcaggtgaggcacacttgcatctgcaggacttggagatggccagtggggaagactagacaaaccggtggacgtgagtgcga

SEQ ID NO: 660732 - DNA, 120 bp, Artificial Sequence
  ENSG00000184330_0 (sequence is synthesized)
caagttccttctgctccatcttagggctgtttttactctgtcctcagccctccttctaacacccccacatagagaccttaattcaaactaaggtaagaaatgattgtctttatttcctga

SEQ ID NO: 660733 - DNA, 120 bp, Artificial Sequence
  ENSG00000184330_1 (sequence is synthesized)
aggctttttgaaagcaaagatgagcaacactcaagctgagaggtccataataggcatgatcgacatgtttcacaaatacaccggacgtgatggcaagattgagaagccaagcctgctgac

SEQ ID NO: 660734 - DNA, 120 bp, Artificial Sequence
  ENSG00000184330_2 (sequence is synthesized)
agaacttccccaatttcctcagtgcctgtgacaaaaagggcatacattacctcgccactgtctttgagaaaaaggacaagaatgaggataagaagattgatttttctgagtttctgtcct

SEQ ID NO: 660735 - DNA, 120 bp, Artificial Sequence
  ENSG00000184330_3 (sequence is synthesized)
tgctgggagacatagccgcagactaccacaagcagagccatggagcggcgccctgttctgggggaagccagtgatccagccccaccaaggggcctccagagaccccaggaacaataagtg

SEQ ID NO: 660736 - DNA, 120 bp, Artificial Sequence
  ENSG00000184330_4 (sequence is synthesized)
attccaggttaactttgttggagaatttcccccacccccatccagtgggtcacccaggagtaatgtccctccagcaacgttccccctatggcctccagcagagctgatctgcctctcaca

SEQ ID NO: 660737 - DNA, 120 bp, Artificial Sequence
  ENSG00000184330_5 (sequence is synthesized)
caggtcctggtgtctgcctctgcaccgttccctaaatgcagccaccttggcaggttccaggtggaagttggtagaaggcccctgccaggtcacagcaatgctctccttgtcaaggcatgg

SEQ ID NO: 660738 - DNA, 120 bp, Artificial Sequence
  ENSG00000184330_6 (sequence is synthesized)
accagggtcattcagacacattcagatactgcactgagaaggagctggcatctctcagtgtgctcctgccctcccactcctgccccagctgttctccagggcttggggaaacagaaacca

SEQ ID NO: 660739 - DNA, 120 bp, Artificial Sequence
  ENSG00000184330_7 (sequence is synthesized)
ctcacatagggattcctggatggcttcaggttcagcgcccttggggctatgaatgggaggctcagcagtgccctgaggatgggcttccttgtcctgtggcctctgctccaggggcagtgt

SEQ ID NO: 660740 - DNA, 120 bp, Artificial Sequence
  ENSG00000184330_8 (sequence is synthesized)
cctttccctgtgctgtgtgcttgtgtgcatgtgcctatgtgggtgaccctgtggaagtgagaaggagtcactgtgatgcttagctgtcctaaatgatggtttgctcaatgccaggactgg

SEQ ID NO: 660741 - DNA, 120 bp, Artificial Sequence
  ENSG00000184330_9 (sequence is synthesized)
gtttctggtgatgaatgaatattccagattttgaggagctctaagtggtccaggagtccaagtaagcagtctggctggaataaggcagcatcacggaaattctgtaaggactgacacaga

SEQ ID NO: 660742 - DNA, 120 bp, Artificial Sequence
  ENSG00000184330_10 (sequence is synthesized)
gagctcatgctgactgtgatgagaaattgcagcacctctatctcgcaggtaatggagtagtttgttattggtagtctactccaggccaggcagtgtgttatgggctgaggatgcagaaac

SEQ ID NO: 660743 - DNA, 120 bp, Artificial Sequence
  ENSG00000184330_11 (sequence is synthesized)
aggcaggacacagtgctgtcctagcagtgcactggcgggtctctccatgcaggccacaacacagggtcagtgttcacctggtgtcacttccaggcaatgttctgtgcagccgctcttagt

SEQ ID NO: 660744 - DNA, 120 bp, Artificial Sequence
  ENSG00000184330_12 (sequence is synthesized)
attcttccttgaggctcacatcatgtgtccctatcactcttactactctggtcagtctccagctaacctctcaatcaggcaaacattcttcttggaggaatcaggcaaacatctcaaaaa

SEQ ID NO: 660745 - DNA, 120 bp, Artificial Sequence
  ENSG00000184330_13 (sequence is synthesized)
ttctctttccatcctaccagcagcagtgtgtaagatgggctatttgttctttggaatgactgctccactccacactcacacctctattcacagaccagcatctcctctccttatcaggaa

SEQ ID NO: 660746 - DNA, 120 bp, Artificial Sequence
  ENSG00000184330_14 (sequence is synthesized)
cattccttcctgaacatattctgcacctcgtcagccttcaggactgatctgccattttcacctctaaatccccatgtctgaccattagttttcttctctttccttctctccctttctcat

SEQ ID NO: 660747 - DNA, 120 bp, Artificial Sequence
  ENSG00000184330_15 (sequence is synthesized)
tctcattccacctgttcttggaactcacggagacctacagtccctgggctttcattttctcctcccagccccctgctgccttctctatgcagcctgccctccatcatccaccccagaatt

SEQ ID NO: 660748 - DNA, 120 bp, Artificial Sequence
  ENSG00000184330_16 (sequence is synthesized)
gctctctttcctctcttagctctgttgcccactttccttgggccataccttccctgcagatctccagcccagaaccatcttcccctgttgtcctcctctctcctccaccgggactgctgg

SEQ ID NO: 660749 - DNA, 120 bp, Artificial Sequence
  ENSG00000184330_17 (sequence is synthesized)
tcctattcaccttgctgctgttattccccgaatgcgcaacataccccccatcaatatatctcagtatttcatgtctcaataccaatcttttaaactactgcctctaccagaaatgtcttt

SEQ ID NO: 660750 - DNA, 120 bp, Artificial Sequence
  ENSG00000184330_18 (sequence is synthesized)
taatacttcttctgtctcattaacattacatttcaaggctgagctttaatgtcagtgtctcttagacattcagagggtgaaccaccatcccttcaccccaaagaaatgatctctgcttca

SEQ ID NO: 660751 - DNA, 120 bp, Artificial Sequence
  ENSG00000184330_19 (sequence is synthesized)
tttgtgcctccctcaccatgaccccactcttaccatagtggctacattacttcagattcccctaatgtctttccagccagacttggaatcatggagggaaaacattgttacctcggatct

SEQ ID NO: 660752 - DNA, 120 bp, Artificial Sequence
  ENSG00000184330_20 (sequence is synthesized)
cctggttacccagcacatagtagtactggattccagctcataataagtactctatatcatttttcaatataaaatgtatttgtgcaaattctagtcaatactactttatgtaaacagcag

SEQ ID NO: 660753 - DNA, 120 bp, Artificial Sequence
  ENSG00000184330_21 (sequence is synthesized)
tgtaaaatccaaaaacttccagtcctggaggcaggttgtgcagcttaggggaggaccccagaatctggaccccagagtctggaagcaggccagaaaggataaggcaaatgactgaacagt

SEQ ID NO: 660754 - DNA, 120 bp, Artificial Sequence
  ENSG00000184330_22 (sequence is synthesized)
tccctcaggactcacgtactgatctcccaaaagaagagagggtctccctggggtggggttgctggaccttcaatccatcgctacagtccagaaggcaattggccactcctaatgtgggcc

SEQ ID NO: 660755 - DNA, 120 bp, Artificial Sequence
  ENSG00000184330_23 (sequence is synthesized)
tgccctccctttatttttccagttcttatttcacctgataatattccgtccaattggcaatggcacataaaaattaggatggagtgtgtggacaaatacttcttcatcttcttgtctagg

SEQ ID NO: 660756 - DNA, 120 bp, Artificial Sequence
  ENSG00000184330_24 (sequence is synthesized)
ttttagaaatcaccttctcaagggagccttgtctaatgttcctgagactatttcacactctccatgcttatgtcaatgcaggactcatcacatctattcggatattctgtttacacaccc

SEQ ID NO: 660757 - DNA, 120 bp, Artificial Sequence
  ENSG00000184330_25 (sequence is synthesized)
atgtcatcccagagaggtgatcacagggcagggacacatgtgtggcatacagttcctagttaagatcccaaatcctgagatattgctgatttgctatggcaggtcgtcaagagaactgtg

SEQ ID NO: 660758 - DNA, 120 bp, Artificial Sequence
  ENSG00000184330_26 (sequence is synthesized)
tcattccaaactcaccaaggtggcttatagaacagaagcagatggatatgaagaggagaggggaccagaccatctccgcaaccacagcccagagctccagtcaccagatagaaaattgat

SEQ ID NO: 660759 - DNA, 120 bp, Artificial Sequence
  ENSG00000184330_27 (sequence is synthesized)
ttgatttcatccaatattccttcgaaagagtgtcaaggaatagggtggggcaatgtgtcattctgcattggaaggaggacattttagagcaaggcctaagggcacaggtattagtgtcat

SEQ ID NO: 660760 - DNA, 120 bp, Artificial Sequence
  ENSG00000184330_28 (sequence is synthesized)
attgatcagaattcaacctttgttctaacacatactagagcaagaatttacttgatttggaataattaatagctactggacattatattggtactaaagagaaagaatacttgacagctc

SEQ ID NO: 660761 - DNA, 120 bp, Artificial Sequence
  ENSG00000184330_29 (sequence is synthesized)
tatgcccacactcacattacagctgatgtgaaagagattctggaaatccaaatgttccccagaaattctgatatcaaaacattccaataacttttttttttcaggcgcagtctcactctg

SEQ ID NO: 660762 - DNA, 120 bp, Artificial Sequence
  ENSG00000184330_30 (sequence is synthesized)
tcgcccgggctggagtgctgtgagctgtccgtggtgctgaattcactgtgacgtcactcctgtctctctttgctttcttctgactgacatttattcagccttctctacaggaatctctta

SEQ ID NO: 660763 - DNA, 120 bp, Artificial Sequence
  ENSG00000184330_31 (sequence is synthesized)
tgttcccccacatgcaggtggtttttcagtaggctcctgaagagtgatctcaactttccaggaagaaaagagggcaaagggaacaatgtgaaaagaagcagaaaatcataaaagaccatg

SEQ ID NO: 660764 - DNA, 120 bp, Artificial Sequence
  ENSG00000184330_32 (sequence is synthesized)
tgtttgataaacaaccagattgtttctggttccctgccactataaaaacaccatgagagcatactcatacatgttcccttataaatctgcgaggtagtttctttggtattcttgcccagg

SEQ ID NO: 660765 - DNA, 120 bp, Artificial Sequence
  ENSG00000184330_33 (sequence is synthesized)
aaatgggttgattcatcacagattttatatatatacttttttttaactaagtgtgagataatatcttattgtttttgtaacttgcattttacaagagttctgaccagcaccagataagct

SEQ ID NO: 660766 - DNA, 120 bp, Artificial Sequence
  ENSG00000184330_34 (sequence is synthesized)
tcagtgctctcctttctttggccttaatattattggattaaagaattactgcctctcactaggagcatcatttatttaccattattttcaatttcatattaaaactcaatttctagtaga

SEQ ID NO: 660767 - DNA, 120 bp, Artificial Sequence
  ENSG00000184343_0 (sequence is synthesized)
aggagcagccgcccggggcaccggagctgcgggctgcgtggccgggatgagcgccagcacgggcggtggtggggacagcggcggcagcggcggcagtagcagcagctcacaggcctcctg

SEQ ID NO: 660768 - DNA, 120 bp, Artificial Sequence
  ENSG00000184343_1 (sequence is synthesized)
cgggcccgagtcctcgggctccgaactagccctggccacaccggtgcctcagatgctgcagggccttctgggctccgacgacgaggaacaggaagaccccaaagactactgcaagggcgg

SEQ ID NO: 660769 - DNA, 120 bp, Artificial Sequence
  ENSG00000184343_2 (sequence is synthesized)
ctaccaccctgtgaagatcggcgacgtgttcaatgggcggtaccacgtggtgcgcaaactgggctggggccacttctccaccgtctggctctgctgggacatccagcgcaagcgctttgt

SEQ ID NO: 660770 - DNA, 120 bp, Artificial Sequence
  ENSG00000184343_3 (sequence is synthesized)
ggccctcaaagtggtgaagagtgcggggcattacacggagacagctgtggatgagatcaagctcctgaaatgtgtccgggacagcgaccccagtgaccccaaaagagagaccattgtcca

SEQ ID NO: 660771 - DNA, 120 bp, Artificial Sequence
  ENSG00000184343_4 (sequence is synthesized)
gctcattgatgacttcaggatctcaggagtcaatggagtccatgtgtgcatggtgctggaggtgctgggccaccagctcctcaaatggatcatcaagtccaactaccagggcctgcccgt

SEQ ID NO: 660772 - DNA, 120 bp, Artificial Sequence
  ENSG00000184343_5 (sequence is synthesized)
gccctgcgtgaagagcatcgtgaggcaggtgctgcacggcctggactacctccacaccaagtgcaagatcatccacacggacatcaagcccgagaacatcttgctgtgtgtgggggacgc

SEQ ID NO: 660773 - DNA, 120 bp, Artificial Sequence
  ENSG00000184343_6 (sequence is synthesized)
ttacatcaggcgcctggctgccgaggccacggagtggcaacaggcaggggcgccgcccccctcccgctccatagtcagcactgccccccaggaggtcttgcagaccggtaagctgtccaa

SEQ ID NO: 660774 - DNA, 120 bp, Artificial Sequence
  ENSG00000184343_7 (sequence is synthesized)
aaacaagaggaagaagatgaggcgcaaacggaaacagcagaagcggctgctggaggagcggctgcgggacctgcagaggctggaggccatggaggctgccacccaggctgaggactctgg

SEQ ID NO: 660775 - DNA, 120 bp, Artificial Sequence
  ENSG00000184343_8 (sequence is synthesized)
ggctgtcaccccgggggcgccagagcaggtccctccccagcctcttcctcccccgccccagggggcggccgtagcctcagcgcgggctcacagacctcaggcttctccggctccctcttc

SEQ ID NO: 660776 - DNA, 120 bp, Artificial Sequence
  ENSG00000184343_9 (sequence is synthesized)
tctcctgcctcctgctccatcctctccggctcgtccaatcagcgagagaccgggggcctcctgtcgcctagcacaccattcggtgcctcgaacctcctggtgaaccccctggagccccaa

SEQ ID NO: 660777 - DNA, 120 bp, Artificial Sequence
  ENSG00000184343_10 (sequence is synthesized)
aatgcagataagatcaagatcaagatcgcagacctgggcaacgcctgctgggtgcacaagcacttcacggaagacatccagactcggcagtaccgggccgtcgaggtgctgatcggcgcc

SEQ ID NO: 660778 - DNA, 120 bp, Artificial Sequence
  ENSG00000184343_11 (sequence is synthesized)
gaatacggccccccggcagacatctggagcacagcctgcatggccttcgagctggccactggtgactacctgttcgagccgcattctggagaagactacagtcgtgatgaggaccacatc

SEQ ID NO: 660779 - DNA, 120 bp, Artificial Sequence
  ENSG00000184343_12 (sequence is synthesized)
gctcacatagtggagcttctgggggacatccccccagccttcgccctctcaggccgctattcccgggagttcttcaaccggagaggagagctgcggcacatccacaatctcaagcactgg

SEQ ID NO: 660780 - DNA, 120 bp, Artificial Sequence
  ENSG00000184343_13 (sequence is synthesized)
ggcctgtacgaggtactcatggaaaagtacgagtggcccctagagcaggccacacagttcagcgcctttctgctgcccatgatggagtacatccccgaaaagcgggccagtgccgctgac

SEQ ID NO: 660781 - DNA, 120 bp, Artificial Sequence
  ENSG00000184343_14 (sequence is synthesized)
tgcctccagcacccctggctcaacccctaggcccggctgtggctccacctccagctctccgtgccttaagggaaaagcgggacagctcccaccaccctgctgggcgccagttctccacaa

SEQ ID NO: 660782 - DNA, 120 bp, Artificial Sequence
  ENSG00000184343_15 (sequence is synthesized)
ccacagggcagagagacgctggagccaggcccggctctcagagcgtgttctgcctgagacccccgtgagggctctcggagaaagtgtgtgtattcctttcttaataaagtgtggactgaa

SEQ ID NO: 660783 - DNA, 120 bp, Artificial Sequence
  ENSG00000184343_16 (sequence is synthesized)
gtgacccaaaaccactggaagagactcaacaccttgcaacactacaaggtcccagatggagcaacagtggggctcgtccctcagctgcaccgtggcagcaccatctcccagagcctggcc

SEQ ID NO: 660784 - DNA, 120 bp, Artificial Sequence
  ENSG00000184343_17 (sequence is synthesized)
cagaggtgccccttgggagagaacatacccacgctggaggatggcgaggaggggggggtgtgcctctggcacctggtgaaagccaccgaggagccagaaggggccaaggtgcggtgcagc

SEQ ID NO: 660785 - DNA, 120 bp, Artificial Sequence
  ENSG00000184343_18 (sequence is synthesized)
agcctgcgggagcgcgagccagcaagggccaaggccattccggaaatctacctcacccgtctgctgtccatgaagggcacgctgcagaagtttgtggacgacaccttccaggccattctc

SEQ ID NO: 660786 - DNA, 120 bp, Artificial Sequence
  ENSG00000184343_19 (sequence is synthesized)
agcgtgaaccggcccatccccatcgccgtcaagtacctgtttgaccttctggatgagctagcagagaagcacggcatcgaggacccagggaccctgcacatctggaagaccaacagtctg

SEQ ID NO: 660787 - DNA, 120 bp, Artificial Sequence
  ENSG00000184343_20 (sequence is synthesized)
ctgctgcggttctgggtgaatgccttgaagaacccacagctcatctttgatgtacgggtgtcggacaatgtggacgccatccttgctgtcatcgcccagaccttcattgactcctgtacc

SEQ ID NO: 660788 - DNA, 120 bp, Artificial Sequence
  ENSG00000184343_21 (sequence is synthesized)
acctcggagcataaagtgggccgggtgagagcagtgccagcagcagcagctggcaggggcttgaggaggaaaggcttatgggggaagcctagagggctgtgcacagagctctgggtgggc

SEQ ID NO: 660789 - DNA, 120 bp, Artificial Sequence
  ENSG00000184343_22 (sequence is synthesized)
agtggcagcatcatgggggcaccttcacctccgagctcatgcctagcgcctcccctccctccggagcaggattccccagtgaacaaactgctctacgcccgggagatcccacgctacaag

SEQ ID NO: 660790 - DNA, 120 bp, Artificial Sequence
  ENSG00000184343_23 (sequence is synthesized)
cagatggtggagaggtgggtgtcagaggcatcggggctgcggggaagggggctgccccacccctaacgaagtctgctcctccaggtactatgcggacattcgccagagctctccggcgag

SEQ ID NO: 660791 - DNA, 120 bp, Artificial Sequence
  ENSG00000184343_24 (sequence is synthesized)
ctaccaggagatgaactctgctttggctgagctctccgggaactacacttctgctccccactgtctggaggctctgcaagaactctacaaccacatccacaggtactatgatcagattat

SEQ ID NO: 660792 - DNA, 120 bp, Artificial Sequence
  ENSG00000184343_25 (sequence is synthesized)
cagtgccctggaggaggaccctgtgggccagaagctgcagctggcctgccgcctgcagcaggtcgccgccctggtggaaaacaaagtgactgacctgtgagctctggctcagacagcagc

SEQ ID NO: 660793 - DNA, 120 bp, Artificial Sequence
  ENSG00000184343_26 (sequence is synthesized)
aagccggatccaccaacaccgcagcgccttatgaccccggaaccgagccagccactgaggggagctggcagagcctgggggcacagggtgcaaagccaggcactgtgcccagcagtgggc

SEQ ID NO: 660794 - DNA, 120 bp, Artificial Sequence
  ENSG00000184343_27 (sequence is synthesized)
tccctgcctgccacctcccctgccagcccacccaccttccccccacctgagattgtttctaatttataaggatccccctccttccccctctccccattgtatttatttgcctgctggaaa

SEQ ID NO: 660795 - DNA, 88 bp, Artificial Sequence
  ENSG00000184343_28 (sequence is synthesized)
cttccccctctccccattgtatttatttgcctgctggaaaatcacatccggaaataaaatagaaatatgtctctctcccaggctggag

SEQ ID NO: 660796 - DNA, 85 bp, Artificial Sequence
  ENSG00000184343_29 (sequence is synthesized)
actaattttggtatttttagtaaagacagggtttccccatgtcggacaggctggtctcaaaactcctgacttcaggtgatctgcc

SEQ ID NO: 660797 - DNA, 70 bp, Artificial Sequence
  ENSG00000184343_30 (sequence is synthesized)
agaaatgtcttttgacaaagggcccaatccccagcccctgctgttccctgcaggagctgactcagtgctc

SEQ ID NO: 660798 - DNA, 120 bp, Artificial Sequence
  ENSG00000184343_31 (sequence is synthesized)
ccagcccctgctgttccctgcaggagctgactcagtgctctcctgactgagagtccctcagccccatgcctataacctgctacccacagacaaagagaggccatcaggtacccgggcttc

SEQ ID NO: 660799 - DNA, 120 bp, Artificial Sequence
  ENSG00000184343_32 (sequence is synthesized)
actttccctcccactctctgacctcgctggcccctccagcaatgcctggcccacccctaccagttcacggaccctggtacagggacactgcaccaatatcttgggacaaacaccctctct

SEQ ID NO: 660800 - DNA, 120 bp, Artificial Sequence
  ENSG00000184343_33 (sequence is synthesized)
gccgagccccctccctttcattgggactcctctgtcaggccccagctggcctcccggctccaccctcgcctctccattcccttgtccttgaagtggccagagtgatcttttgctgagcag

SEQ ID NO: 660801 - DNA, 120 bp, Artificial Sequence
  ENSG00000184343_34 (sequence is synthesized)
tccacattaagcctacagacaccaggcctctagtcctcgccctcgaaccatgcggcagccgtggccagcacgtgaagggctggaacgcgtcttggccgcaggccttgccccactgtgccc

SEQ ID NO: 660802 - DNA, 120 bp, Artificial Sequence
  ENSG00000184343_35 (sequence is synthesized)
tgtgctgccctggatgcttctggggacccaatttctcctggtctctcatgatgcagcccctgggtcacaggcccctcagtcaccaccgcactcatggggaagtggctatgggcttgcttg

SEQ ID NO: 660803 - DNA, 120 bp, Artificial Sequence
  ENSG00000184343_36 (sequence is synthesized)
tccccagcagtgagcagcttcctgctgcctccctcatgtctggctatggagcagcccacgacaggcaccttgcaaatggtggagaggaagagcaggcgctgggagccagagcgccaggca

SEQ ID NO: 660804 - DNA, 120 bp, Artificial Sequence
  ENSG00000184344_0 (sequence is synthesized)
agtctggcagtggagctctccccggtctgacagccactccagaggccatgcttcgtttcttgccagatttggctttcagcttcctgttaattctggctttgggccaggcagtccaatttc

SEQ ID NO: 660805 - DNA, 120 bp, Artificial Sequence
  ENSG00000184344_1 (sequence is synthesized)
aagaatatgtctttctccaatttctgggcttagataaggcgccttcaccccagaagttccaacctgtgccttatatcttgaagaaaattttccaggatcgcgaggcagcagcgaccactg

SEQ ID NO: 660806 - DNA, 120 bp, Artificial Sequence
  ENSG00000184344_2 (sequence is synthesized)
gggtctcccgagacttatgctacgtaaaggagctgggcgtccgcgggaatgtacttcgctttctcccagaccaaggtttctttctttacccaaagaaaatttcccaagcttcctcctgcc

SEQ ID NO: 660807 - DNA, 120 bp, Artificial Sequence
  ENSG00000184344_3 (sequence is synthesized)
tgcagaagctcctctactttaacctgtctgccatcaaagaaagggaacagttgacattggcccagctgggcctggacttggggcccaattcttactataacctgggaccagagctggaac

SEQ ID NO: 660808 - DNA, 120 bp, Artificial Sequence
  ENSG00000184344_4 (sequence is synthesized)
tggctctgttcctggttcaggagcctcatgtgtggggccagaccacccctaagccaggtaaaatgtttgtgttgcggtcagtcccatggccacaaggtgctgttcacttcaacctgctgg

SEQ ID NO: 660809 - DNA, 120 bp, Artificial Sequence
  ENSG00000184344_5 (sequence is synthesized)
atttcgggttattcctggagatactggtcaaagaagatagagactcaggggtgaattttcagcctgaagacacctgtgccagactaagatgctcccttcatgcttccctgctggtggtga

SEQ ID NO: 660810 - DNA, 120 bp, Artificial Sequence
  ENSG00000184344_6 (sequence is synthesized)
ctctcaaccctgatcagtgccacccttctcggaaaaggagagcagccatccctgtccccaagctttcttgtaagaacctctgccaccgtcaccagctattcattaacttccgggacctgg

SEQ ID NO: 660811 - DNA, 120 bp, Artificial Sequence
  ENSG00000184344_7 (sequence is synthesized)
gttggcacaagtggatcattgcccccaaggggttcatggcaaattactgccatggagagtgtcccttctcactgaccatctctctcaacagctccaattatgctttcatgcaagccctga

SEQ ID NO: 660812 - DNA, 120 bp, Artificial Sequence
  ENSG00000184344_8 (sequence is synthesized)
tgcatgccgttgacccagagatcccccaggctgtgtgtatccccaccaagctgtctcccatttccatgctctaccaggacaataatgacaatgtcattctacgacattatgaagacatgg

SEQ ID NO: 660813 - DNA, 120 bp, Artificial Sequence
  ENSG00000184344_9 (sequence is synthesized)
tagtcgatgaatgtgggtgtgggtaggatgtcagaaatgggaatagaaggagtgttcttagggtaaatcttttaataaaactacctatctggtttatgaccacttagatcgaaatgtcaa

SEQ ID NO: 660814 - DNA, 120 bp, Artificial Sequence
  ENSG00000184345_0 (sequence is synthesized)
agaccttgggaagcagagaaatcagggctaatgaaccatctaaggacaggccatgagggttcgattttgtaccaaaggcaatttaattttggttataattgaggatgttgaagaaagcat

SEQ ID NO: 660815 - DNA, 120 bp, Artificial Sequence
  ENSG00000184345_1 (sequence is synthesized)
tgaatggaagacattgcagaagaagaaacagcagaaaatcaaggaaaaacttagaataagaacaaaagcagctgtaaagatccaggcctggtggcggggcaccctggtgcgcaggacact

SEQ ID NO: 660816 - DNA, 120 bp, Artificial Sequence
  ENSG00000184345_2 (sequence is synthesized)
ctgcatgcagccctcagggcctggataattcagtgctggtggcggatgacgctgtcgagggtgctggagaagaaacggcaggcagctctgatcgcctacgcaaccagagagagggcagtg

SEQ ID NO: 660817 - DNA, 120 bp, Artificial Sequence
  ENSG00000184345_3 (sequence is synthesized)
atcaagctccagtctttggtccgtatgtggcgtgtccgctggcgatactgccaggtgctcaatgccatctacatcatccagggccactggcaatgccacaactgccagacctgcgctctc

SEQ ID NO: 660818 - DNA, 120 bp, Artificial Sequence
  ENSG00000184345_4 (sequence is synthesized)
ctccagggccactgtgtggtcacagccactcacctgcagttccacattgagatcatcaactcctaagggctggcaagaagggcactgtgtctactgtccctattaaaggtctaacctggt

SEQ ID NO: 660819 - DNA, 120 bp, Artificial Sequence
  ENSG00000184345_5 (sequence is synthesized)
agagaaatcagggctaatgaaccatctaaggacaggccatgagggttcgattttgtgtaagagacatggccagatctattaggtggaccaggaatggaccaaaggcaatttaattttggt

SEQ ID NO: 660820 - DNA, 80 bp, Artificial Sequence
  ENSG00000184347_0 (sequence is synthesized)
gccgcgctccccagcccagccccaagccggacctccccgggcgccacgccccattgcgctcgccccaggtccccaacccg

SEQ ID NO: 660821 - DNA, 80 bp, Artificial Sequence
  ENSG00000184347_1 (sequence is synthesized)
ctccgcacctgggcactcccagcgatgcgcagcggggcagcgccggccccgccgatggagctgctgttgctgccgccgcc

SEQ ID NO: 660822 - DNA, 80 bp, Artificial Sequence
  ENSG00000184347_2 (sequence is synthesized)
gccgcccggagcgccccgctccgcccgcgccccgtgcgcctgagcaccgagctcgcccctcctccgcgctaactccgccg

SEQ ID NO: 660823 - DNA, 80 bp, Artificial Sequence
  ENSG00000184347_3 (sequence is synthesized)
gggctccacgcgtcttgccccgcagaggcagcctcctccaggagcggggccctgcacaccatggcccccgggtgggcagg

SEQ ID NO: 660824 - DNA, 120 bp, Artificial Sequence
  ENSG00000184347_4 (sequence is synthesized)
gcgctggcgagcgtcctgagtgggcctccagccgtcgcctgccccaccaagtgtacctgctccgctgccagcgtggactgccacgggctgggcctccgcgcggttcctcggggcatcccc

SEQ ID NO: 660825 - DNA, 120 bp, Artificial Sequence
  ENSG00000184347_5 (sequence is synthesized)
cgcaacgctgagcgccttgacctggacagaaataatatcaccaggatcaccaagatggacttcgctgggctcaagaacctccgagtcttgcatctggaagacaaccaggtcagcgtcatc

SEQ ID NO: 660826 - DNA, 120 bp, Artificial Sequence
  ENSG00000184347_6 (sequence is synthesized)
gagagaggcgccttccaggacctgaagcagctagagcgactgcgcctgaacaagaataagctgcaagtccttccagaattgcttttccagagcacgccgaagctcaccagactagatttg

SEQ ID NO: 660827 - DNA, 120 bp, Artificial Sequence
  ENSG00000184347_7 (sequence is synthesized)
agtgaaaaccagatccaggggatcccgaggaaggcgttccgcggcatcaccgatgtgaagaacctgcaactggacaacaaccacatcagctgcattgaagatggagccttccgagcgctg

SEQ ID NO: 660828 - DNA, 120 bp, Artificial Sequence
  ENSG00000184347_8 (sequence is synthesized)
cgcgatttggagatccttaccctcaacaacaacaacatcagtcgcatcctggtcaccagcttcaaccacatgccgaagatccgaactctgcgcctccactccaaccacctgtactgcgac

SEQ ID NO: 660829 - DNA, 120 bp, Artificial Sequence
  ENSG00000184347_9 (sequence is synthesized)
tgccacctggcctggctctcggattggctgcgacagcgacggacagttggccagttcacactctgcatggctcctgtgcatttgaggggcttcaacgtggcggatgtgcagaagaaggag

SEQ ID NO: 660830 - DNA, 120 bp, Artificial Sequence
  ENSG00000184347_10 (sequence is synthesized)
tacgtgtgcccagccccccactcggagcccccatcctgcaatgccaactccatctcctgcccttcgccctgcacgtgcagcaataacatcgtggactgtcgaggaaagggcttgatggag

SEQ ID NO: 660831 - DNA, 120 bp, Artificial Sequence
  ENSG00000184347_11 (sequence is synthesized)
attcctgccaacttgccggagggcatcgtcgaaatacgcctagaacagaactccatcaaagccatccctgcaggagccttcacccagtacaagaaactgaagcgaatagacatcagcaag

SEQ ID NO: 660832 - DNA, 120 bp, Artificial Sequence
  ENSG00000184347_12 (sequence is synthesized)
aatcagatatcggatattgctccagatgccttccagggcctgaaatcactcacatcgctggtcctgtatgggaacaagatcaccgagattgtcaagggactgtttgatgggctggtgtcc

SEQ ID NO: 660833 - DNA, 120 bp, Artificial Sequence
  ENSG00000184347_13 (sequence is synthesized)
ctacagctgctcctcctcaatgccaacaagatcaactgcctgcgggtgaacacgtttcaggacctgcagaacctcaacttgctctccctgtatgacaacaagctgcagaccatcagcaag

SEQ ID NO: 660834 - DNA, 120 bp, Artificial Sequence
  ENSG00000184347_14 (sequence is synthesized)
gggctcttcgcccctctgcagtccatccagacactccacttagcccaaaacccatttgtgtgcgactgccacttgaagtggctggccgactacctccaggacaaccccatcgagacaagc

SEQ ID NO: 660835 - DNA, 120 bp, Artificial Sequence
  ENSG00000184347_15 (sequence is synthesized)
ggggcccgctgcagcagcccgcgccgactcgccaacaagcgcatcagccagatcaagagcaagaagttccgctgctcaggctccgaggattaccgcagcaggttcagcagcgagtgcttc

SEQ ID NO: 660836 - DNA, 120 bp, Artificial Sequence
  ENSG00000184347_16 (sequence is synthesized)
atggacctcgtgtgccccgagaagtgtcgctgtgagggcacgattgtggactgctccaaccagaagctggtccgcatcccaagccacctccctgaatatgtcaccgacctgcgactgaat

SEQ ID NO: 660837 - DNA, 120 bp, Artificial Sequence
  ENSG00000184347_17 (sequence is synthesized)
gacaatgaggtatctgttctggaggccactggcatcttcaagaagttgcccaacctgcggaaaataaatctgagtaacaataagatcaaggaggtgcgagagggagctttcgatggagca

SEQ ID NO: 660838 - DNA, 120 bp, Artificial Sequence
  ENSG00000184347_18 (sequence is synthesized)
gccagcgtgcaggagctgatgctgacagggaaccagctggagaccgtgcacgggcgcgtgttccgtggcctcagtggcctcaaaaccttgatgctgaggagtaacttgatcggctgtgtg

SEQ ID NO: 660839 - DNA, 120 bp, Artificial Sequence
  ENSG00000184347_19 (sequence is synthesized)
agtaatgacacctttgccggcctgagttcggtgagactgctgtccctctatgacaatcggatcaccaccatcacccctggggccttcaccacgcttgtctccctgtccaccataaacctc

SEQ ID NO: 660840 - DNA, 120 bp, Artificial Sequence
  ENSG00000184347_20 (sequence is synthesized)
ctgtccaaccccttcaactgcaactgccacctggcctggctcggcaagtggttgaggaagaggcggatcgtcagtgggaaccctaggtgccagaagccatttttcctcaaggagattccc

SEQ ID NO: 660841 - DNA, 120 bp, Artificial Sequence
  ENSG00000184347_21 (sequence is synthesized)
atccaggatgtggccatccaggacttcacctgtgatggcaacgaggagagtagctgccagctgagcccgcgctgcccggagcagtgcacctgtatggagacagtggtgcgatgcagcaac

SEQ ID NO: 660842 - DNA, 120 bp, Artificial Sequence
  ENSG00000184347_22 (sequence is synthesized)
aaggggctccgcgccctccccagaggcatgcccaaggatgtgaccgagctgtacctggaaggaaaccacctaacagccgtgcccagagagctgtccgccctccgacacctgacgcttatt

SEQ ID NO: 660843 - DNA, 120 bp, Artificial Sequence
  ENSG00000184347_23 (sequence is synthesized)
gacctgagcaacaacagcatcagcatgctgaccaattacaccttcagtaacatgtctcacctctccactctgatcctgagctacaaccggctgaggtgcatccccgtccacgccttcaac

SEQ ID NO: 660844 - DNA, 120 bp, Artificial Sequence
  ENSG00000184347_24 (sequence is synthesized)
gggctgcggtccctgcgagtgctaaccctccatggcaatgacatttccagcgttcctgaaggctccttcaacgacctcacatctctttcccatctggcgctgggaaccaacccactccac

SEQ ID NO: 660845 - DNA, 120 bp, Artificial Sequence
  ENSG00000184347_25 (sequence is synthesized)
tgtgactgcagtcttcggtggctgtcggagtgggtgaaggcggggtacaaggagcctggcatcgcccgctgcagtagccctgagcccatggctgacaggctcctgctcaccaccccaacc

SEQ ID NO: 660846 - DNA, 120 bp, Artificial Sequence
  ENSG00000184347_26 (sequence is synthesized)
caccgcttccagtgcaaagggccagtggacatcaacattgtggccaaatgcaatgcctgcctctccagcccgtgcaagaataacgggacatgcacccaggaccctgtggagctgtaccgc

SEQ ID NO: 660847 - DNA, 120 bp, Artificial Sequence
  ENSG00000184347_27 (sequence is synthesized)
tgtgcctgcccctacagctacaagggcaaggactgcactgtgcccatcaacacctgcatccagaacccctgtcagcatggaggcacctgccacctgagtgacagccacaaggatgggttc

SEQ ID NO: 660848 - DNA, 120 bp, Artificial Sequence
  ENSG00000184347_28 (sequence is synthesized)
agctgctcctgccctctgggctttgaggggcagcggtgtgagatcaacccagatgactgtgaggacaacgactgcgaaaacaatgccacctgcgtggacgggatcaacaactacgtgtgt

SEQ ID NO: 660849 - DNA, 120 bp, Artificial Sequence
  ENSG00000184347_29 (sequence is synthesized)
atctgtccgcctaactacacaggtgagctatgcgacgaggtgattgaccactgtgtgcctgagctgaacctctgtcagcatgaggccaagtgcatccccctggacaaaggattcagctgc

SEQ ID NO: 660850 - DNA, 120 bp, Artificial Sequence
  ENSG00000184347_30 (sequence is synthesized)
gagtgtgtccctggctacagcgggaagctctgtgagacagacaatgatgactgtgtggcccacaagtgccgccacggggcccagtgcgtggacacaatcaatggctacacatgcacctgc

SEQ ID NO: 660851 - DNA, 120 bp, Artificial Sequence
  ENSG00000184347_31 (sequence is synthesized)
ccccagggcttcagtggacccttctgtgaacaccccccacccatggtcctactgcagaccagcccatgcgaccagtacgagtgccagaacggggcccagtgcatcgtggtgcagcaggag

SEQ ID NO: 660852 - DNA, 120 bp, Artificial Sequence
  ENSG00000184347_32 (sequence is synthesized)
cccacctgccgctgcccaccaggcttcgccggccccagatgcgagaagctcatcactgtcaacttcgtgggcaaagactcctacgtggaactggcctccgccaaggtccgaccccaggcc

SEQ ID NO: 660853 - DNA, 120 bp, Artificial Sequence
  ENSG00000184347_33 (sequence is synthesized)
aacatctccctgcaggtggccactgacaaggacaacggcatccttctctacaaaggagacaatgaccccctggcactggagctgtaccagggccacgtgcggctggtctatgacagcctg

SEQ ID NO: 660854 - DNA, 120 bp, Artificial Sequence
  ENSG00000184347_34 (sequence is synthesized)
agttcccctccaaccacagtgtacagtgtggagacagtgaatgatgggcagtttcacagtgtggagctggtgacgctaaaccagaccctgaacctagtagtggacaaaggaactccaaag

SEQ ID NO: 660855 - DNA, 120 bp, Artificial Sequence
  ENSG00000184347_35 (sequence is synthesized)
agcctggggaagctccagaagcagccagcagtgggcatcaacagccccctctaccttggaggcatccccacctccaccggcctctctgccttgcgccagggcacggaccggcctctaggc

SEQ ID NO: 660856 - DNA, 120 bp, Artificial Sequence
  ENSG00000184347_36 (sequence is synthesized)
ggcttccacggatgcatccatgaggtgcgcatcaacaacgagctgcaggacttcaaggccctcccaccacagtccctgggggtgtcaccaggctgcaagtcctgcaccgtgtgcaagcac

SEQ ID NO: 660857 - DNA, 120 bp, Artificial Sequence
  ENSG00000184347_37 (sequence is synthesized)
ggcctgtgccgctccgtggagaaggacagcgtggtgtgcgagtgccgcccaggctggaccggcccactctgcgatcaggaggcccgggacccctgcctcggccacagatgccaccatgga

SEQ ID NO: 660858 - DNA, 120 bp, Artificial Sequence
  ENSG00000184347_38 (sequence is synthesized)
aaatgtgtggcaactgggacctcatacatgtgcaagtgtgccgagggctatggaggggacttgtgtgacaacaagaatgactctgccaatgcctgctcagccttcaagtgtcaccatggg

SEQ ID NO: 660859 - DNA, 120 bp, Artificial Sequence
  ENSG00000184347_39 (sequence is synthesized)
cagtgccacatctcagaccaaggggagccctactgcctgtgccagcccggctttagcggcgagcactgccaacaagagaatccgtgcctgggacaagtagtccgagaggtgatccgccgc

SEQ ID NO: 660860 - DNA, 120 bp, Artificial Sequence
  ENSG00000184347_40 (sequence is synthesized)
aatacgtcttccagtgcacggacggctcctcgtttgtagaagaggtggagagacacttagagtgcggctgcctcgcgtgttcctaagcccctgcccgcctgcctgccacctctcggactc

SEQ ID NO: 660861 - DNA, 120 bp, Artificial Sequence
  ENSG00000184347_41 (sequence is synthesized)
cagcttgatggagttgggacagccatgtgggaccccctggtgattcagcatgaaggaaatgaagctggagaggaaggtaaagaagaagagaatattaagtatattgtaaaataaacaaaa

SEQ ID NO: 660862 - DNA, 120 bp, Artificial Sequence
  ENSG00000184347_42 (sequence is synthesized)
aatagaacttatttttattatggaaagtgactattttcatcttttattatataaatatattacaccatctgcgtatatgtaccatatagtgagttatttttaccaagttttgtgttgtgt

SEQ ID NO: 660863 - DNA, 120 bp, Artificial Sequence
  ENSG00000184347_43 (sequence is synthesized)
atttgttgtgtttttaaaaatagctgtttaaaaatttaagaaaaaaatagactaataaaaatgctttaaaacaaaaggataagaataaagaatgatagcctgtctgaggaaggaggaaga

SEQ ID NO: 660864 - DNA, 120 bp, Artificial Sequence
  ENSG00000184347_44 (sequence is synthesized)
tgttttcatgtttatgaaacggtattatgtcggcagtagaccaagagctgctcattgagatcagaaaaaggaataagaggaagagagagaaggaaaagacctttgtttcttgttttttaa

SEQ ID NO: 660865 - DNA, 120 bp, Artificial Sequence
  ENSG00000184347_45 (sequence is synthesized)
ctcccttttatttttcctcccctaaaattacccagcttttcggagtcctggatgtcagtgcccaaaatgcccagttcttccaggaaaagctgctgagccctggccttctcagtctcactg

SEQ ID NO: 660866 - DNA, 120 bp, Artificial Sequence
  ENSG00000184347_46 (sequence is synthesized)
ccactcaaaaatattgctgtccctgtctgtcccagaccccccttcagggtatctgaacccactgggggacccctcttctccttcctgggtggccctggcttccgtatctgaacccactgg

SEQ ID NO: 660867 - DNA, 120 bp, Artificial Sequence
  ENSG00000184347_47 (sequence is synthesized)
gggacccctcttctccttcctggctggccctggcttccaatcgaggactgactattgaagtctgctacaggtgtcatttggaactgtcttaccaaattttaaaacagctgctatttttcc

SEQ ID NO: 660868 - DNA, 120 bp, Artificial Sequence
  ENSG00000184347_48 (sequence is synthesized)
tgctcctccccaggagaggggtcttcctagaggaggcgagggaagagaatatcatggtgtctcctcaggacccatgcactggccctctctcctccttccaggtaatttttcattggaatg

SEQ ID NO: 660869 - DNA, 120 bp, Artificial Sequence
  ENSG00000184347_49 (sequence is synthesized)
tatcccagtagagaaggtagtcagcccttcttggaagcggaaggctgggagccaagtcaagtctgcccacagcgctagatgtccaactctggaaggttcttggaggctcttgttgtaaga

SEQ ID NO: 660870 - DNA, 120 bp, Artificial Sequence
  ENSG00000184347_50 (sequence is synthesized)
caggcctctgccacctgatcctccaggtcaccagcatgacgatagagactccttgcccatctgtgacactttccaatgcatatccaaactttaccttattttatctatgcaacccctgcc

SEQ ID NO: 660871 - DNA, 120 bp, Artificial Sequence
  ENSG00000184347_51 (sequence is synthesized)
tccctgggaaggataagggagtagagctgggttcactaagaaggaagtttaggccctcacaggctctggaacttgccttaagccacacaccagataagtggaggagccagaccagaagtc

SEQ ID NO: 660872 - DNA, 120 bp, Artificial Sequence
  ENSG00000184347_52 (sequence is synthesized)
cagacccaaagcttgagattcttcctctagaatgggtgagcacaggtgattcaggcggcttaaatccatcagagcagccctgccggaaaaggaaataatatgatgttttttcctgctctt

SEQ ID NO: 660873 - DNA, 120 bp, Artificial Sequence
  ENSG00000184347_53 (sequence is synthesized)
gttctgccttgctcactccttctccctccgcagtatctggaaagattctggagaccagggcttatgcatctagggaaagtgaccaagggcagcctatccagcctctgcctccattcctga

SEQ ID NO: 660874 - DNA, 120 bp, Artificial Sequence
  ENSG00000184347_54 (sequence is synthesized)
aggggacttccctgcccctgtttctttccatgtctctccctccctcactcccatttgcccccttccaccccatcaggttagccacatatcttccagggctcagctgttcacaccaactcc

SEQ ID NO: 660875 - DNA, 120 bp, Artificial Sequence
  ENSG00000184347_55 (sequence is synthesized)
ctggctcttatcatccatccctccttcccccaggagcttccactgtaggagtttcagggagaagagtttggaattcattggacctttcagccctcaggttccctagaggagcctagttga

SEQ ID NO: 660876 - DNA, 120 bp, Artificial Sequence
  ENSG00000184347_56 (sequence is synthesized)
tctgtgagtaccaatggtgggccaaagacgcagggaataatgaagggagaaagaaaagaaaggaagatggaggaaaacgaggcaactggaagaaggaaggaaggaaagaaggaagggatg

SEQ ID NO: 660877 - DNA, 120 bp, Artificial Sequence
  ENSG00000184347_57 (sequence is synthesized)
gaggggatgaagagaagggagagagggatatagctgaggaatttatctaaaaatgtgcatgtaaatctccattatgttccaggtactgtgccttatgatggctttgttttttgttgtcat

SEQ ID NO: 660878 - DNA, 87 bp, Artificial Sequence
  ENSG00000184347_58 (sequence is synthesized)
agagtggttcgatcatagctcaccgcagcctcaacctcctaggctcaagccatcttcctgcctcagtctcccaaaatgctgggatta

SEQ ID NO: 660879 - DNA, 120 bp, Artificial Sequence
  ENSG00000184347_59 (sequence is synthesized)
attacaggtgtgagccactatgctcagcctgtttcaaacattattataatagcagatttatttagtactttattatacatcagataccactctaattgtgaaatagatatatattcattt

SEQ ID NO: 660880 - DNA, 120 bp, Artificial Sequence
  ENSG00000184347_60 (sequence is synthesized)
aattattgaaacaaccatgtagttaaaacactattaactcattttacagttgagtagactgagacacagagaagttaaagaacttgcccaagagtaaatgtctaataaaccgtagagcca

SEQ ID NO: 660881 - DNA, 120 bp, Artificial Sequence
  ENSG00000184347_61 (sequence is synthesized)
ggatctgggcccaggctgtctgactccagaacttgctcactcaaccactaaaccatcctgcttctcatgggaaagaaacacatcctgcctttgaggatcctacagcctgtgacaaaaaca

SEQ ID NO: 660882 - DNA, 120 bp, Artificial Sequence
  ENSG00000184347_62 (sequence is synthesized)
gtcataaaaatggacaattgccttattacacaaggagctcttaagtggcaatacaagcaatggaagtggctgtccagaggagggaacttctagtcctaggtctttaaggatgaataggag

SEQ ID NO: 660883 - DNA, 120 bp, Artificial Sequence
  ENSG00000184347_63 (sequence is synthesized)
tttgccagagtgagaaagggaattgaactttcctgggagtggccttttaaaaagcaatgagatatggccaggcctggcttgtttggggaagagtcaaaatctagggtggcaagagtatgg

SEQ ID NO: 660884 - DNA, 120 bp, Artificial Sequence
  ENSG00000184347_64 (sequence is synthesized)
gaagcacactgaggagcagagagaaatggggtaggtaggaaggtagggttttgaccacaaagagctgtgcatgctaaactgggccacaggtgccagcagggttgtttgaggaagggaaga

SEQ ID NO: 660885 - DNA, 120 bp, Artificial Sequence
  ENSG00000184347_65 (sequence is synthesized)
gcaagacaagctctggtttaggaagagagctgtggcagcataaaggcctgaaagaggagacagagctgtcacccaaaatggacttgagagctccctgtggtttactctgtggctagaaaa

SEQ ID NO: 660886 - DNA, 120 bp, Artificial Sequence
  ENSG00000184347_66 (sequence is synthesized)
cactgccggccagatggatcacaaatgtctatggtagcttagaagctctgctcttgaagaggatcctgggatctgcccaacacccttcccaacctccatttccccatccccacctccatt

SEQ ID NO: 660887 - DNA, 120 bp, Artificial Sequence
  ENSG00000184347_67 (sequence is synthesized)
gccccatcccccctctccccctaggcaggtggatctgagccttatcccaccaccaatgcccctgctagcctctccccacccagcccagagcctactcagcctgccatctcaagagcccca

SEQ ID NO: 660888 - DNA, 120 bp, Artificial Sequence
  ENSG00000184347_68 (sequence is synthesized)
ccgagggtcactggcttcctgggaggagtcaccaggctgccagctttccctctgcctccccaaggaacctgagacctccctctgctcatcaccctgggcccaatcctgaatccagccccc

SEQ ID NO: 660889 - DNA, 120 bp, Artificial Sequence
  ENSG00000184347_69 (sequence is synthesized)
atcaaccaagacagcaaaagggccaggtctgtcccttataattttgagccttctccctcaagtttggaagccctgactttaagaaatgccaaatgcaaggaccattaagaaaattctccc

SEQ ID NO: 660890 - DNA, 120 bp, Artificial Sequence
  ENSG00000184347_70 (sequence is synthesized)
cgaaatgaggctcctctaacaaatgatgattaaaacgctctctccttgagcagtcacattctagaaacaggacattccatgaggcaggaagagttcagttaatttgctcctgaaaaagtg

SEQ ID NO: 660891 - DNA, 120 bp, Artificial Sequence
  ENSG00000184347_71 (sequence is synthesized)
tggttcagtgtttgtgtggcaatgtacgtgggcagaagaggccgctcaagctgtgtcccccctgagcaggattcaggaaagggaaaagaagttctcttcaactcagccaaggggccgtac

SEQ ID NO: 660892 - DNA, 120 bp, Artificial Sequence
  ENSG00000184347_72 (sequence is synthesized)
gatggccgatgagattatgtatttaaaagttctttgtaaagtgtaaactaaaaaccttaaatgtaagatgctgttgttattattactgttgttgttgctgttatggacatgccaaaaggc

SEQ ID NO: 660893 - DNA, 120 bp, Artificial Sequence
  ENSG00000184347_73 (sequence is synthesized)
ccttgttagaagacagttttgccttttcaatctcatagcaaggaactcaagtctgatgcttcaaaaagatgagaagaagggcaagaagagggataactcccaagctcagagggaaaaaaa

SEQ ID NO: 660894 - DNA, 120 bp, Artificial Sequence
  ENSG00000184347_74 (sequence is synthesized)
aggtgggggaaaagagccccagggtgaccttcaggaaaggccaggaccaggatgatctaacctttcccttcaccagaaacaaagctattgccagactgaaccctaaagtcaagcagtcac

SEQ ID NO: 660895 - DNA, 120 bp, Artificial Sequence
  ENSG00000184347_75 (sequence is synthesized)
ccactgcctttgctgggagcagaagcccatagcaacaagtgacctgcccctcagactcaagatcccagataccagagctggaggagtcatagggcattactggtaggcaggaaaactgag

SEQ ID NO: 660896 - DNA, 120 bp, Artificial Sequence
  ENSG00000184347_76 (sequence is synthesized)
ggtcgaacaaatggaagaatgcggtgatcatagaccaaagacacacagataattaaccccatgtgtccacccaggccaaagttcttcctgctaccccacagtggatgtccaggcagatgg

SEQ ID NO: 660897 - DNA, 120 bp, Artificial Sequence
  ENSG00000184347_77 (sequence is synthesized)
tccccacatgatggggaagcagagggcatagtgtggttttgtgggacttgttcatgttttgtagtgtgggctcaacagtgccaaaggaaacactagggaaaagttggtgaaacatgccag

SEQ ID NO: 660898 - DNA, 120 bp, Artificial Sequence
  ENSG00000184347_78 (sequence is synthesized)
ctagcaggaccagtaaaggcataatcaggcatttggcaaagcttgcttttctaattcaatgataggttctaataggaaatttttgaagattttttaaaacaatgttatagtggcacttcc

SEQ ID NO: 660899 - DNA, 120 bp, Artificial Sequence
  ENSG00000184347_79 (sequence is synthesized)
ccagtatggaataaataacatgcattcttttttcaatatactgtcatattcagatgtcattaaaataaatggatgagtcacagaggagctatcagatgctctcatgactaccataactca

SEQ ID NO: 660900 - DNA, 120 bp, Artificial Sequence
  ENSG00000184347_80 (sequence is synthesized)
ctggagtgcatttttaatctacaccctcgtgaggtttgagaagcactggtcaagagtcatcccagtgcccagaatcagttctaggagcagctgctgtggctagggacagggtcatgcatg

SEQ ID NO: 660901 - DNA, 120 bp, Artificial Sequence
  ENSG00000184347_81 (sequence is synthesized)
gaggtcagtgggcagctggagccatctcccatctgccttccagctcaatgccctgcattgtgcctccatcacaacaaaatagcagagggggccttgagctgataggagacttgagatgct

SEQ ID NO: 660902 - DNA, 120 bp, Artificial Sequence
  ENSG00000184347_82 (sequence is synthesized)
tgctctgtgcccaaatggctgtgtccagtcacttatggctccaggtacttcacctctcagggctgctgtttccttcttgcagaattaagaattaagacgcagtttgccaaatgttctcac

SEQ ID NO: 660903 - DNA, 120 bp, Artificial Sequence
  ENSG00000184347_83 (sequence is synthesized)
ttatacatggaatctaaacaaagccaaactcttagaagcagaaagtagaatggtgatgttcagaggccggtggggtgagggtggggtagagatgaagatgacacagatgttcgtcaaagg

SEQ ID NO: 660904 - DNA, 120 bp, Artificial Sequence
  ENSG00000184347_84 (sequence is synthesized)
gtgcaaaatttcaggtagacaggagaagtaagttcaagagatccattgtgttatacaacacggtgaatgtagttaacaacaatgtatcgtatacttgaaaatagctcagagagtagattt

SEQ ID NO: 660905 - DNA, 120 bp, Artificial Sequence
  ENSG00000184347_85 (sequence is synthesized)
taagtgttcttaccacaaataaatgataagcatgtgaggtaatgcataggttaagtagcttgacttagctattccacaatgaaagcatatatcaaaacattgtgttgcacaccaaatatg

SEQ ID NO: 660906 - DNA, 120 bp, Artificial Sequence
  ENSG00000184347_86 (sequence is synthesized)
gaaagcatatatcaaaacattgtgttgcacaccaaatatgtatacatttttaaaagactagttgagtacagtagtgaaaaaggaggaaagagtagaacaaggagtttgatctgtaactga

SEQ ID NO: 660907 - DNA, 120 bp, Artificial Sequence
  ENSG00000184347_87 (sequence is synthesized)
agcctaaatatgcagtttttataataataaagaaaaagacaaagtgaccaaggtcaattcccagctaaactgtctatcacttctccaattcccactctccagcacctccaaaccgtgggg

SEQ ID NO: 660908 - DNA, 120 bp, Artificial Sequence
  ENSG00000184347_88 (sequence is synthesized)
catctcacctcatactgtagggagagatgggtccagaagtctagttgtggactgaaaaccagtttgccctcccagagctaaagcagagggtttccgtgctggccacatagcttcctcttg

SEQ ID NO: 660909 - DNA, 120 bp, Artificial Sequence
  ENSG00000184347_89 (sequence is synthesized)
caactagaggtctcagcaccttgaagggacaattcataatcaggggaaaaaaagacaacacaggccttcccgctagtccagtctaaacagatccttcgtgtttgtctggaatgctttgca

SEQ ID NO: 660910 - DNA, 120 bp, Artificial Sequence
  ENSG00000184347_90 (sequence is synthesized)
taggcagccatgctgagggcaagtgagattaggataatccagagtatttgcttgttaagacccttaaacaaaaccggagcgcggaagaaaagcccggtgtaagctgacgagtttgtgagt

SEQ ID NO: 660911 - DNA, 120 bp, Artificial Sequence
  ENSG00000184347_91 (sequence is synthesized)
gcaatctgcggatttgtcggaggtgatttcgccagctaaagggataaactagacagctgtgccgaagagccttaacctgtgaaatatcgttcaaagtacaggctttggaggcagggaggg

SEQ ID NO: 660912 - DNA, 120 bp, Artificial Sequence
  ENSG00000184347_92 (sequence is synthesized)
gaggaagtagaggcctcagcaaaggttgtggcatggttcttttgaaatctattagaagaaggaaggaaacaggctcagagagattcccactgcatgtgcttaagaggctggagtgtctgg

SEQ ID NO: 660913 - DNA, 120 bp, Artificial Sequence
  ENSG00000184347_93 (sequence is synthesized)
cttcgctggagtcaattgcttaagaatctgctctgttgtgcttttttttctccacattctctcttcacctccttgttgaccttccaagatcccagctctcccacttctgcacaaaagcaa

SEQ ID NO: 660914 - DNA, 120 bp, Artificial Sequence
  ENSG00000184347_94 (sequence is synthesized)
agacccatttatttattttgttaaagaaaaggaactggagaggtttgatgtcgcaggaaattggagcatctctccttccagtgacaggatcccagaggccatccctgagctaatgactct

SEQ ID NO: 660915 - DNA, 120 bp, Artificial Sequence
  ENSG00000184347_95 (sequence is synthesized)
aagagaaagaatttcccctcagtgaagggccattagcaagagctggtgtccaggttctcagaagtcactgggatgcccgtaattgagcagcctcagggcctctgggaaggagccagggtc

SEQ ID NO: 660916 - DNA, 120 bp, Artificial Sequence
  ENSG00000184347_96 (sequence is synthesized)
gaggagattcctttgcacctgcaaagcctggttagctgccccagaccccgggcccagcattaatagaatcctcctggcccacagcatccctcttgctctcattatccaaagcctgggaca

SEQ ID NO: 660917 - DNA, 120 bp, Artificial Sequence
  ENSG00000184347_97 (sequence is synthesized)
gaggaacacactgccagccagtgacaagcccacatctccaaggcgtcccctgagaatcccaggatgtgcttacatcacacagcctagagtttgcaccagaccagacagagacttaagtca

SEQ ID NO: 660918 - DNA, 120 bp, Artificial Sequence
  ENSG00000184347_98 (sequence is synthesized)
ctgctcaaaagctcctttcaggtcagggaggaaaagtcactggggaggtgaaatgactctggactttctgggagaaaaatgagcagctgctgaggcatgaggcaagaagatgatgcctac

SEQ ID NO: 660919 - DNA, 120 bp, Artificial Sequence
  ENSG00000184347_99 (sequence is synthesized)
aggaaccctggcttgtggttggttgggtgaagccggttcctgtttcatctgtgtcgttaattgcttggtaatgaaacgtaaggccctaatttgactgggctcaattttccacctacaaag

SEQ ID NO: 660920 - DNA, 120 bp, Artificial Sequence
  ENSG00000184347_100 (sequence is synthesized)
tgatggttcacgtgttcacagcctcgtgtcccgatgaagatgccacgggtgagtattctttgaaaaccaagaagagtgatgtaaatgtggtgcactttatcatgaggtagttgaactgaa

SEQ ID NO: 660921 - DNA, 120 bp, Artificial Sequence
  ENSG00000184347_101 (sequence is synthesized)
ggctctttaagctccttctcttgcactatgagtaaatgaattgcttgattgattgattaatccttaccattttgaatgtctgaaatgcttgattcacacttaggagtgaccgttatcgca

SEQ ID NO: 660922 - DNA, 120 bp, Artificial Sequence
  ENSG00000184347_102 (sequence is synthesized)
tgctacctctagccaggctcatctatctgtctgtccacttaaaaactcgtcaggctttctgtatgtgccaggcaggcatcgtctaggtgttgaggctgcacacacccggcccctccttcc

SEQ ID NO: 660923 - DNA, 120 bp, Artificial Sequence
  ENSG00000184347_103 (sequence is synthesized)
aggctgcacacacccggcccctccttcctggaactcacagcatagtgaattgccacagaaagcatgtccacagtgatttgaaaacccaagctggaaggccaggcatggtggctcacgcct

SEQ ID NO: 660924 - DNA, 86 bp, Artificial Sequence
  ENSG00000184347_104 (sequence is synthesized)
tcaaaagttagccagttatggtggtgagtatccgtaatcccagctacctgggagactgaggcaggacagttgctggaacccgggag

SEQ ID NO: 660925 - DNA, 69 bp, Artificial Sequence
  ENSG00000184347_105 (sequence is synthesized)
gttagccagttatggtggtgagtatccgtaatcccagctacctgggagactgaggcaggacagttgctg

SEQ ID NO: 660926 - DNA, 120 bp, Artificial Sequence
  ENSG00000184347_106 (sequence is synthesized)
gacagtcagagaggagagacggagcagcgtggcagacaggctggctctgcacgagctcctggcggggaccagcagcgcctgcaagggggtggagggacaggcgctcgggtggcctgggcc

SEQ ID NO: 660927 - DNA, 120 bp, Artificial Sequence
  ENSG00000184347_107 (sequence is synthesized)
gctcaggtaatcaggttacggggctgggccccgctttctgactcagaatgcagcagccccagagaggccaataatccaatctggaggacagcgagcactgtaatggctcctggggagcat

SEQ ID NO: 660928 - DNA, 120 bp, Artificial Sequence
  ENSG00000184347_108 (sequence is synthesized)
ctttgcaaattaaattggggaaattcagttagccctgcagaaaaccagttaccttatggatttaaaataaaacacacacacacacacacacacacaataaaagcatggggaggaggagac

SEQ ID NO: 660929 - DNA, 120 bp, Artificial Sequence
  ENSG00000184347_109 (sequence is synthesized)
ggttgcaggggagacaggacccaggcagcagcgtgtctccaagagctaaggagaaggtggggctggggcggcctttgcacatgtgcctgttacaggctaagatttatatttttcgtttcc

SEQ ID NO: 660930 - DNA, 120 bp, Artificial Sequence
  ENSG00000184347_110 (sequence is synthesized)
aaagtgtgctccccaaagggcaagtagagaaatacatatagctcaggcgaggctacagacggtgtgtaatcttggggacctcccactcccttcggagacagaccatggtacagccctttg

SEQ ID NO: 660931 - DNA, 120 bp, Artificial Sequence
  ENSG00000184347_111 (sequence is synthesized)
accacagtatgttataggttccacatgttcacgaaaaacactttcactagcttagctcctccatccctgattactgtgttctgagtacggagagaacagtaaagagtcgtgcttgggaag

SEQ ID NO: 660932 - DNA, 120 bp, Artificial Sequence
  ENSG00000184347_112 (sequence is synthesized)
aactctgttggatggcactagacagaaatcacatccctcctacaggatttctacaaagcacgtgttcctggagcaactattatgaggaagatagagaaggcctagaaaatttggtccctg

SEQ ID NO: 660933 - DNA, 120 bp, Artificial Sequence
  ENSG00000184347_113 (sequence is synthesized)
ttgcctttgagacttgcaccatcaccctgcaactgagcactctgaccaaatatcaagatcaactgtgctttctgaaagatcaaattaagtctaattttaaatgggacaaaaggtagcact

SEQ ID NO: 660934 - DNA, 120 bp, Artificial Sequence
  ENSG00000184347_114 (sequence is synthesized)
ctttttatattcctacttaagaagatatccttcttggttctgttccattttgcacatggagtagttttaaagagccacatccaaggctggatttgaaagctgatgaacgtagctatgaag

SEQ ID NO: 660935 - DNA, 120 bp, Artificial Sequence
  ENSG00000184347_115 (sequence is synthesized)
agctttatgatgaaaagggttattactggcctcccatctactggcttatctttttttattctttaagtcatgtgacaaatgagggttctgataggattgtctttggtgtggtttcatgag

SEQ ID NO: 660936 - DNA, 120 bp, Artificial Sequence
  ENSG00000184349_0 (sequence is synthesized)
acctcttcccccgccctcgccgccgccaccacacacacgcacgcttctctccatcttgtgattcctttttcctcctgaaccctccagtgggggtgcgagtttgtctttatcaccccccat

SEQ ID NO: 660937 - DNA, 120 bp, Artificial Sequence
  ENSG00000184349_1 (sequence is synthesized)
cccaccgccttcttttcttctcgctctcctacccctccccagcttggtgggcgcctctttcctttctcgcccactttcatttttatttattcatatttatttggcgcccgctctctctct

SEQ ID NO: 660938 - DNA, 120 bp, Artificial Sequence
  ENSG00000184349_2 (sequence is synthesized)
gtccctttgcctgcctccctccctccggatccccgctctctccccggagtggcgcgtcgggggctccgccgctggccaggcgtgatgttgcacgtggagatgttgacgctggtgtttctg

SEQ ID NO: 660939 - DNA, 120 bp, Artificial Sequence
  ENSG00000184349_3 (sequence is synthesized)
gtgctctggatgtgtgtgttcagccaggacccgggctccaaggccgtcgccgaccgctacgctgtctactggaacagcagcaaccccagattccagaggggtgactaccatattgatgtc

SEQ ID NO: 660940 - DNA, 120 bp, Artificial Sequence
  ENSG00000184349_4 (sequence is synthesized)
tgtatcaatgactacctggatgttttctgccctcactatgaggactccgtcccagaagataagactgagcgctatgtcctctacatggtgaactttgatggctacagtgcctgcgaccac

SEQ ID NO: 660941 - DNA, 120 bp, Artificial Sequence
  ENSG00000184349_5 (sequence is synthesized)
acttccaaagggttcaagagatgggaatgtaaccggcctcactctccaaatggaccgctgaagttctctgaaaaattccagctcttcactcccttttctctaggatttgaattcaggcca

SEQ ID NO: 660942 - DNA, 120 bp, Artificial Sequence
  ENSG00000184349_6 (sequence is synthesized)
ggccgagaatatttctacatctcctctgcaatcccagataatggaagaaggtcctgtctaaagctcaaagtctttgtgagaccaacaaatagctgtatgaaaactataggtgttcatgat

SEQ ID NO: 660943 - DNA, 120 bp, Artificial Sequence
  ENSG00000184349_7 (sequence is synthesized)
cgtgttttcgatgttaacgacaaagtagaaaattcattagaaccagcagatgacaccgtacatgagtcagccgagccatcccgcggcgagaacgcggcacaaacaccaaggatacccagc

SEQ ID NO: 660944 - DNA, 120 bp, Artificial Sequence
  ENSG00000184349_8 (sequence is synthesized)
cgccttttggcaatcctactgttcctcctggcgatgcttttgacattatagcacagtctcctcccatcacttgtcacagaaaacatcagggtcttggaacaccagagatccacctaactg

SEQ ID NO: 660945 - DNA, 120 bp, Artificial Sequence
  ENSG00000184349_9 (sequence is synthesized)
ctcatcctaagaagggacttgttattgggttttggcagatgtcagatttttgttttctttctttcagcctgaattctaagcaacaacttcaggttgggggcctaaacttgttcctgcctc

SEQ ID NO: 660946 - DNA, 120 bp, Artificial Sequence
  ENSG00000184349_10 (sequence is synthesized)
cctcaccccaccccgccccacccccagccctggcccttggcttctctcacccctcccaaattaaatggactccagatgaaaatgccaaattgtcatagtgacaccagtggttcgtcagct

SEQ ID NO: 660947 - DNA, 120 bp, Artificial Sequence
  ENSG00000184349_11 (sequence is synthesized)
cctgtgcattctcctctaagaactcacctccgttagcgcactgtgtcagcgggctatggacaaggaagaatagtggcagatgcagccagcgctggctagggctgggagggttttgctctc

SEQ ID NO: 660948 - DNA, 120 bp, Artificial Sequence
  ENSG00000184349_12 (sequence is synthesized)
ctatgcaatatttatgccttctcattcagaactgtaagatgatcgcgcagggcatcatgtcaccatgtcaggtccggaggggaggtattaagaatagatacgatattacaccatttccta

SEQ ID NO: 660949 - DNA, 120 bp, Artificial Sequence
  ENSG00000184349_13 (sequence is synthesized)
taggagtatgtaaatgaacaggcttctaaaaggttgagacactggtttttttttttaatatgactgtcttaaagcattcttgacagcaaaacttgtgctctctaaaagaagccttttttt

SEQ ID NO: 660950 - DNA, 120 bp, Artificial Sequence
  ENSG00000184349_14 (sequence is synthesized)
tttttctaggaggcaggttgggtgtggaatgctaatacagagcaggtgtgaaaacagagaaaactacaggtttgctgggggtgtgtatgtgtgagtgcctctaatttttttggtgactgg

SEQ ID NO: 660951 - DNA, 88 bp, Artificial Sequence
  ENSG00000184349_15 (sequence is synthesized)
gtgtgtatgtgtgagtgcctctaatttttttggtgactgggcagtgcacaccagatattttttctttgaatacagatcaccatggtgc

SEQ ID NO: 660952 - DNA, 120 bp, Artificial Sequence
  ENSG00000184349_16 (sequence is synthesized)
aaagtgaccttccccaaggctgacaagccagggttgatgagtgcatagtggaatagctttggatactcctctgggggatgacatgtaccaaggagaggaccgcagtggccagaggagaca

SEQ ID NO: 660953 - DNA, 120 bp, Artificial Sequence
  ENSG00000184349_17 (sequence is synthesized)
tgatttggctttgctggagcgccagtgtgctgtggcctttccccgcctcccaccctagtacccacgttttgctccacactccttgaccgcaggggctcggacacaaacccctgtcaccag

SEQ ID NO: 660954 - DNA, 120 bp, Artificial Sequence
  ENSG00000184349_18 (sequence is synthesized)
gagagtcagtcagcactacttgggagggctaaagggaaatttggaaataaaattccaaagtttggagtaaaaaaattcaagtgttgattttatattctttccctttctgacacagcctaa

SEQ ID NO: 660955 - DNA, 120 bp, Artificial Sequence
  ENSG00000184349_19 (sequence is synthesized)
agcgtagggggaacatgtgtttatctgtgggagataaacaagatggagtcccaaagactttaacaaaatatttttttaaaaatccactagaatagaaaatacattatttagatatacttt

SEQ ID NO: 660956 - DNA, 120 bp, Artificial Sequence
  ENSG00000184349_20 (sequence is synthesized)
atgctgagagtgagtatatatgcttgtcctatttaaacttgtgagaaaaagtggtatcccttgatacatttagaaatatgggggctatcttgtttcattgtgggggtggggcagaaggag

SEQ ID NO: 660957 - DNA, 120 bp, Artificial Sequence
  ENSG00000184349_21 (sequence is synthesized)
aataaatgcaggatgaccctgttgaaggaatcttagcatggccaacaggggacgtttccagtcgattaccaggaaatgcaagccttggggtttctactggtggtggggctgtcatgaact

SEQ ID NO: 660958 - DNA, 120 bp, Artificial Sequence
  ENSG00000184349_22 (sequence is synthesized)
tgtcaacagaaaccatgcctttcaatataagaaataaatgtgatgatcatgtaaaatgtgaaaaattgaaagcattccagcaaaataagaattttttatatatttgttttttaagatgta

SEQ ID NO: 660959 - DNA, 120 bp, Artificial Sequence
  ENSG00000184349_23 (sequence is synthesized)
tatgttaaaaaaagagaaggtcgcattatggacagacttcgtgaatgggaatttgcttagaattgtgagtagttctgaattagaaaagtatgtgaaggaaaggcagctgtaaacgtattg

SEQ ID NO: 660960 - DNA, 120 bp, Artificial Sequence
  ENSG00000184349_24 (sequence is synthesized)
tgccctggagagttgtacacatgttgaaatgtaatctgggcttacctgatccatttggagtggatgtcactgccgagtctgttctcacatggaaccatgtgtgtggggttgccagcctca

SEQ ID NO: 660961 - DNA, 120 bp, Artificial Sequence
  ENSG00000184349_25 (sequence is synthesized)
cagatacaatcaatcctattcccctctgacataaggaactcctctggagtggcagagtcttatcacagaaggcagccaccatttcaccaaaacaaaagttcacggcattcaattcctttt

SEQ ID NO: 660962 - DNA, 120 bp, Artificial Sequence
  ENSG00000184349_26 (sequence is synthesized)
tcctttagctatttatatatgcagtactctcagtcatatgcagaaatacttttttttttttaattaatagttacaggcttgttggtccagtgggatttgggtagggggagaaagatacct

SEQ ID NO: 660963 - DNA, 120 bp, Artificial Sequence
  ENSG00000184349_27 (sequence is synthesized)
tctaaaatggatcaatagaaccaaaataatacagcatgttctataaccacaaggaaatcaaatgatcctgtcatgattccagttagtcataactatgttagcagtgctaaatgcatttta

SEQ ID NO: 660964 - DNA, 120 bp, Artificial Sequence
  ENSG00000184349_28 (sequence is synthesized)
gaaatggtgacttctgtggttttcctagcatttgtctctaacaaatggtgaaataattactcatggccctctctgccattgtctttcattttttcacagtgaaattagacccctttactt

SEQ ID NO: 660965 - DNA, 120 bp, Artificial Sequence
  ENSG00000184349_29 (sequence is synthesized)
caccattctgccactgcaaattaagtataaagaaaatagcaagagtgtccacaccagtagacagtaagcttctctacctgtaagtgatgaaatcatagctaatgcacttgccatggagtt

SEQ ID NO: 660966 - DNA, 120 bp, Artificial Sequence
  ENSG00000184349_30 (sequence is synthesized)
ttcaagatgattggtgtcagacagttttcactttgtttaaaaagtgttggtggccttttgtggtggtgttacaatcctctgggggcttaggaggatgttgatgcaacttttagaagcttt

SEQ ID NO: 660967 - DNA, 120 bp, Artificial Sequence
  ENSG00000184349_31 (sequence is synthesized)
taatttcaaaaacaactcaaaaatctgaaggacagtcatagctgccactcagccccagttagtcaaaccccagtgacctttgcccctggttgccaagggctttgcaacatcaagcaggga

SEQ ID NO: 660968 - DNA, 120 bp, Artificial Sequence
  ENSG00000184349_32 (sequence is synthesized)
aataaggatctgtctgtttagtggataccgtgtatcctttaatagaccaggtaacagttcgtgttagtttagactattgttttgtactgtactttcttgggtggcagaggaaagaaaagt

SEQ ID NO: 660969 - DNA, 120 bp, Artificial Sequence
  ENSG00000184349_33 (sequence is synthesized)
aaaacattaaaaaaaaaaaaaaaactgcgttctttaaattctgtattattagcaacctctgttgtacatagtgtttgataataaagtattaatttgattcttatgtcttttgtaagtgag

SEQ ID NO: 660970 - DNA, 120 bp, Artificial Sequence
  ENSG00000184349_34 (sequence is synthesized)
aacaatagactttcaggatacaaaacatgcattgaggctttgaaacatccaatgtgtaccatggctgaaaaaaagagtcacaagtggctgagacactgctccatacaggactcatgtgtg

SEQ ID NO: 660971 - DNA, 120 bp, Artificial Sequence
  ENSG00000184349_35 (sequence is synthesized)
gtcattgcccacccaatcttatgactccatcatcttgggacctggaacaacatgacttttttgatcgatattttgtcctcggtgttttcaaggtctgatgttggagccctgtggcccacc

SEQ ID NO: 660972 - DNA, 120 bp, Artificial Sequence
  ENSG00000184349_36 (sequence is synthesized)
ctcccttctccaccagcatgttggtttgaaaaggatagggaatttagaaacagttctgtactttggtttggtttggttttctgtttgtgattgttttcatggactgttttattttttccc

SEQ ID NO: 660973 - DNA, 120 bp, Artificial Sequence
  ENSG00000184349_37 (sequence is synthesized)
aggaagagtctttatcaatatcatgtgcagctcactcatggaaatggttgcaaaccaatcagtgtaggaagcttaaatggggctgtttccctctctgtgtcgttgtgaaaggaagagtca

SEQ ID NO: 660974 - DNA, 120 bp, Artificial Sequence
  ENSG00000184349_38 (sequence is synthesized)
cacagtacctgtggattttcagggactctgtttttctccggtgccttagcaacggcagcagccatttgtattattttcaaataattagaaaaacagttttcaactcctcctttccattca

SEQ ID NO: 660975 - DNA, 120 bp, Artificial Sequence
  ENSG00000184349_39 (sequence is synthesized)
ttgctctcagagttgtggtcactgacttttcttttgaaaaccgcctccaccaacacccccgtttgcctacaccaccccccttttacttagtatgtttattttttgtgtgtctcttgcctt

SEQ ID NO: 660976 - DNA, 120 bp, Artificial Sequence
  ENSG00000184349_40 (sequence is synthesized)
cctcccacgttttatttcccctcagagctgtgaatgggcaggtctgtctctggtttggcatcactgagtttttcccatgcattggccccagggctgctaggatgtgagacaaatctccct

SEQ ID NO: 660977 - DNA, 120 bp, Artificial Sequence
  ENSG00000184349_41 (sequence is synthesized)
acaatgggcttgctcccattgtctgtacagtttaatagatgctggcatgtcggaggttacccatgagtcaaaatccgctctccatgcttactcttgacaccccattgaagccactcattg

SEQ ID NO: 660978 - DNA, 120 bp, Artificial Sequence
  ENSG00000184349_42 (sequence is synthesized)
tgtgtgcgtctgggtgtgaagtccagctccgtgtggtcctgtgcttgtactgccctgctttgcagttcctttgcacttactcatcgagtgctgttttgaaatgctgacattatataaacg

SEQ ID NO: 660979 - DNA, 120 bp, Artificial Sequence
  ENSG00000184349_43 (sequence is synthesized)
taaaagaaaatgtaaaaaaaaaaaacccacacacaaacaaacccatacgatctgtatttgtatatacacgtgtccgtacaagtataactaaataaaaattaaagattttcatcattttaa

SEQ ID NO: 660980 - DNA, 120 bp, Artificial Sequence
  ENSG00000184349_44 (sequence is synthesized)
tgagtatatagagatttatcgtgttgtagggcagctgcaagaacccagactaattttttacccatgtttcagagaattgcagagagctggactctgcattacagatatctccttgtaaat

SEQ ID NO: 660981 - DNA, 120 bp, Artificial Sequence
  ENSG00000184349_45 (sequence is synthesized)
gcgtacatcaggatccctagatacattagctgggaattgagagcacaaattagattaaagacagagcgcgtctccccctatgaaattacgtgtcagcctgttcactgaaccactgctgac

SEQ ID NO: 660982 - DNA, 120 bp, Artificial Sequence
  ENSG00000184350_0 (sequence is synthesized)
gcctgccaggcctgcctggaaggctgcagggaggttcagggtttctcttgctgtccacacctgggcgagagctgagcggaagagaaggggtcctcagagagacaccttcctgaccggccc

SEQ ID NO: 660983 - DNA, 120 bp, Artificial Sequence
  ENSG00000184350_1 (sequence is synthesized)
cattccagctggatgccatgtgactcggaggagctggtggacactgaacaggagccgcccagaggctctggggactggagccctcggccgcggccaggatagatccaaggcccagggtca

SEQ ID NO: 660984 - DNA, 120 bp, Artificial Sequence
  ENSG00000184350_2 (sequence is synthesized)
gagcaggcagggctcggccagtcctctgccccaaacggggcatcaggagagagagcgagcagaacacactcctgcagcatcccctggccccccgccccatgatggagcccagagaagctg

SEQ ID NO: 660985 - DNA, 120 bp, Artificial Sequence
  ENSG00000184350_3 (sequence is synthesized)
gacagcacgtgggggccgccaacggcgcccaggaggatgtggccttcaacctcatcatcctgtccctcaccgaggggctcggcctcggtgggctgctggggaatggggcagtcctctggc

SEQ ID NO: 660986 - DNA, 120 bp, Artificial Sequence
  ENSG00000184350_4 (sequence is synthesized)
tgctcagctccaatgtctacagaaaccccttcgccatctacctcctggacgtggcctgcgcggatctcatcttccttggctgccacatggtggccatcgtccccgacttgctgcaaggcc

SEQ ID NO: 660987 - DNA, 120 bp, Artificial Sequence
  ENSG00000184350_5 (sequence is synthesized)
ggctggacttcccgggcttcgtgcagaccagcctggcaacgctgcgcttcttctgctacatcgtgggcctgagtctcctggcggccgtcagcgtggagcagtgcctggccgccctcttcc

SEQ ID NO: 660988 - DNA, 120 bp, Artificial Sequence
  ENSG00000184350_6 (sequence is synthesized)
cagcctggtactcgtgccgccgcccacgccacctgaccacctgtgtgtgcgccctcacctgggccctctgcctgctgctgcacctgctgctcagcggcgcctgcacccagttcttcgggg

SEQ ID NO: 660989 - DNA, 120 bp, Artificial Sequence
  ENSG00000184350_7 (sequence is synthesized)
agcccagccgccacttgtgccggacgctgtggctggtggcagcggtgctgctggctctgctgtgttgcaccatgtgtggggccagccttatgctgctgctgcgggtggagcgaggccccc

SEQ ID NO: 660990 - DNA, 120 bp, Artificial Sequence
  ENSG00000184350_8 (sequence is synthesized)
agcggcccccaccccggggcttccctgggctcatcctcctcaccgtcctcctcttcctcttctgcggcctgcccttcggcatctactggctgtcccggaacctgctctggtacatccccc

SEQ ID NO: 660991 - DNA, 120 bp, Artificial Sequence
  ENSG00000184350_9 (sequence is synthesized)
actacttctaccacttcagcttcctcatggccgccgtgcactgcgcggccaagcccgtcgtctacttctgcctgggcagtgcccagggccgcaggctgcccctccggctggtcctccagc

SEQ ID NO: 660992 - DNA, 120 bp, Artificial Sequence
  ENSG00000184350_10 (sequence is synthesized)
gagcgctgggagacgaggctgagctgggggccgtcagggagacctcccgccggggcctggtggacatagcagcctgagccctggggcccccgaccccagctgcagcccccgtgaggcaag

SEQ ID NO: 660993 - DNA, 120 bp, Artificial Sequence
  ENSG00000184350_11 (sequence is synthesized)
agggtgacttggggaaggtggtggggtcagaggctggggccagccggacctggaggaggccttggtgggtgacccggtcatgtgctgtcaaagttgtgacccttggtctggagcatgagg

SEQ ID NO: 660994 - DNA, 120 bp, Artificial Sequence
  ENSG00000184350_12 (sequence is synthesized)
ctcccctgggaggcagctggaaaggcaaggtctctacatgcccaggcaggcgggccgggtctctggggagaaggccgaggaacgtgcatttttgggaaacctccccaacggttcacgcac

SEQ ID NO: 660995 - DNA, 120 bp, Artificial Sequence
  ENSG00000184350_13 (sequence is synthesized)
tggcactcgagagctgctgctgctacccattccctgctcagctgcagtgaggagaccccggaaagcaaggaagcaaggccagacgccaggtgaggggcaggtccaggcctttccgcaggc

SEQ ID NO: 660996 - DNA, 120 bp, Artificial Sequence
  ENSG00000184350_14 (sequence is synthesized)
cacctcccctcccactccagcttcctcaatgctgcaggtgcacccacagataacacaaccatcccctcagctcgccttgtgcccgctgtggaagctaaattgaccctaaaatggaagact

SEQ ID NO: 660997 - DNA, 120 bp, Artificial Sequence
  ENSG00000184350_15 (sequence is synthesized)
gcccaaaacttgaccccctccccgtccttgatcatcagccagttgctcaaggccgtgcacctcagaccgggacgatgcaaccctcactcggagcttcagaaaagccggccccatgggtgt

SEQ ID NO: 660998 - DNA, 120 bp, Artificial Sequence
  ENSG00000184350_16 (sequence is synthesized)
ccctggatattaggagggtgcaccctgggtgggtggagaggcttcttacagccccacccagcagcctgcagccctgtctccccacaggacccaggtcttcagcaaccagaaagcttcaca

SEQ ID NO: 660999 - DNA, 120 bp, Artificial Sequence
  ENSG00000184350_17 (sequence is synthesized)
ctctgtcctgagcaagtcccgctccagaggatccctctgaggaaggaacccaggcttcacccctcaacaggtttccgagcttccgctgagtgccaggcctggctgccatccaggagcatg

SEQ ID NO: 661000 - DNA, 120 bp, Artificial Sequence
  ENSG00000184350_18 (sequence is synthesized)
tgccaggggtgctagagtgggggctttggagcccacagcctgggctgagccccgctagccaccccactgtgctgccaaggccatctctgaacatccctacgcctctgtttgctggtctgt

SEQ ID NO: 661001 - DNA, 120 bp, Artificial Sequence
  ENSG00000184350_19 (sequence is synthesized)
aaaatatgagaacccagtgctttgaggcctgtccagcctctcgtgagcccaagagaaatgtctgtcgattctactgccaccaacgccacacatccaagtccacagtgcaattcttagcca

SEQ ID NO: 661002 - DNA, 120 bp, Artificial Sequence
  ENSG00000184350_20 (sequence is synthesized)
cagaccaaggcatctgagagtgttttctttgatttctgactccggcctccatggctggtgatggaaggacattccctctggaccatgactgaaccagcccctcttgagtctgggtgtgag

SEQ ID NO: 661003 - DNA, 120 bp, Artificial Sequence
  ENSG00000184350_21 (sequence is synthesized)
tcgcagatccctggtcagcaccctggaatccggctgcaccgggcccctcccagcccacacagtgcgttcacctcaggctcccgcacgtgcccagcaggcctgggtccaggtatcccttga

SEQ ID NO: 661004 - DNA, 120 bp, Artificial Sequence
  ENSG00000184350_22 (sequence is synthesized)
gactgggagccccaggggctggacccacctctcctagagcacctccagcccccacttggggacttacctcctcccaaattatctccagcccaggatctgcacagggccctctctccccac

SEQ ID NO: 661005 - DNA, 120 bp, Artificial Sequence
  ENSG00000184350_23 (sequence is synthesized)
ctccaggacgtgattagcaacttcagttcctcagctggagaaacaagaacagaaagggaagtggcctgtccacaaattccactttcagccccaggacataaacttcccccagaacaagga

SEQ ID NO: 661006 - DNA, 120 bp, Artificial Sequence
  ENSG00000184350_24 (sequence is synthesized)
agaaccaggaggaaaagcacagattcatctcacggacatgacctcaccgtggacgtgttcccggggaatcctcgtaataatgtaggaaggtgctcccactctgcagatgagccaccaagg

SEQ ID NO: 661007 - DNA, 120 bp, Artificial Sequence
  ENSG00000184350_25 (sequence is synthesized)
ctccgaggggctatgtggccgttcaggaccacaggaaagctgcaaagccagaaggtgactcccagcaccaccctcccacgccacacgctccgcctcactggaccagggctggctcaggtg

SEQ ID NO: 661008 - DNA, 120 bp, Artificial Sequence
  ENSG00000184350_26 (sequence is synthesized)
tcctcagccccacactggctcccccaaccctggccccatccccacgcagacccctttgctgcataagggttcagagagattgcggacccttagaatgctcacttcttcccagagagcctg

SEQ ID NO: 661009 - DNA, 120 bp, Artificial Sequence
  ENSG00000184350_27 (sequence is synthesized)
ctctcagcatccaggggattggagtggctctagattcctccttattagccccttctcgaggagtccgggaaatgtggcctcatctgaggtctccatggaaactgggcccagctcgtcccc

SEQ ID NO: 661010 - DNA, 120 bp, Artificial Sequence
  ENSG00000184350_28 (sequence is synthesized)
actctagtagctgctgtggcagcaggtatatggcctgatggcccaggatgctggtggggtatccccttggccccagatgtgccagcttggcctccagttctgtggtccttgagccctcag

SEQ ID NO: 661011 - DNA, 120 bp, Artificial Sequence
  ENSG00000184350_29 (sequence is synthesized)
gacattaggaccatgtgggctggcctccaaactggaggctgagcttccgtccaggctcccacctgcccctgcccagcctgcgcctcctctgacctcccccgctgcacctcctcttctgcc

SEQ ID NO: 661012 - DNA, 120 bp, Artificial Sequence
  ENSG00000184350_30 (sequence is synthesized)
cccagagccacaaggccccaccagggacccctggctgccctagaccccaccctgcaggaccctggggcctcactgctcaaaggccacctccacctgggtcgcaggcaaagctcctcggtc

SEQ ID NO: 661013 - DNA, 120 bp, Artificial Sequence
  ENSG00000184350_31 (sequence is synthesized)
agtgcccagcccaccccatccacccgcaaccccgggcccctgcggggctgccgcggtcagcacagaattcccaagaacaggcggctactcctgggggcagccaacattccagggagcctg

SEQ ID NO: 661014 - DNA, 120 bp, Artificial Sequence
  ENSG00000184350_32 (sequence is synthesized)
tgtaacccgctccgtcctcagggcccagggaggctgtgggtgaggactgtgtgtgtgaggacaggagcggagacaggcctgcggccagcttccctatcccctccccagcgcccgggtacg

SEQ ID NO: 661015 - DNA, 120 bp, Artificial Sequence
  ENSG00000184350_33 (sequence is synthesized)
agtctgtaaatcagcctgcgctgcatggcgtcttcacggggagaggcaggctcactcctcagctagttcattagctcacacgctggaaaaataaaaccaaacatcacacttaaaacatga

SEQ ID NO: 661016 - DNA, 120 bp, Artificial Sequence
  ENSG00000184351_0 (sequence is synthesized)
acactcaggatcttgcctgaacaacaaaccaactcaccactcctgacaccatgagtcactacggcagctactacggaggcctgggctacagctgtggaggcttcggtggcctgggctatg

SEQ ID NO: 661017 - DNA, 120 bp, Artificial Sequence
  ENSG00000184351_1 (sequence is synthesized)
gctatggctgtggatgtggcagcttctgcagacggggttctggctgtggctatggaggctacggatatggctctggctttggaagctacggatatggctctggctttggaggctacggat

SEQ ID NO: 661018 - DNA, 120 bp, Artificial Sequence
  ENSG00000184351_2 (sequence is synthesized)
ggattctctggcttttattaaatgaattgctgaaattggaagcagaggagaaacctccaaatgtgtttggtcctgtcccgtgctttcattccaaaaatccattctattgccttcagcatc

SEQ ID NO: 661019 - DNA, 120 bp, Artificial Sequence
  ENSG00000184351_3 (sequence is synthesized)
aatggagagatatttagctatgttaaatctttaaaatagatttaagctgcttctgtgaatatttgttgtctttttactttcggagtccgtcacctgaaatcatattcatgtataactact

SEQ ID NO: 661020 - DNA, 120 bp, Artificial Sequence
  ENSG00000184351_4 (sequence is synthesized)
ctaggttgttcttctaaatttgctttatttttcttaccaccattaccttgatgttatctatcaagatcctagcaaaaacttgtattttgcttttatctaataaatgaagtaaagtataaa

SEQ ID NO: 661021 - DNA, 120 bp, Artificial Sequence
  ENSG00000184357_0 (sequence is synthesized)
atgtcggaaaccgctcctgccgagacagccaccccagcgccggtggagaaatccccggctaagaagaaggcaactaagaaggctgccggcgccggcgctgctaagcgcaaagcgacgggg

SEQ ID NO: 661022 - DNA, 120 bp, Artificial Sequence
  ENSG00000184357_1 (sequence is synthesized)
cccccagtctcagagctgatcaccaaggctgtggctgcttctaaggagcgcaatggcctttctttggcagcccttaagaaggccttagcggccggtggctacgacgtggagaagaataac

SEQ ID NO: 661023 - DNA, 120 bp, Artificial Sequence
  ENSG00000184357_2 (sequence is synthesized)
tttaaactcaacaagaaggcggcctccggggaagccaagcccaaagccaagaaggcaggcgccgctaaagctaagaagcccgcgggggccacgcctaagaaggccaagaaggctgcaggg

SEQ ID NO: 661024 - DNA, 120 bp, Artificial Sequence
  ENSG00000184357_3 (sequence is synthesized)
gcgaaaaaggcagtgaagaagactccgaagaaggcgaagaagcccgcggcggctggcgtcaaaaaggtggcgaagagccctaagaaggccaaggccgctgccaaaccgaaaaaggcaacc

SEQ ID NO: 661025 - DNA, 120 bp, Artificial Sequence
  ENSG00000184357_4 (sequence is synthesized)
aagagtcctgccaagcccaaggcagttaagccgaaggcggcaaagcccaaagccgctaagcccaaagcagcaaaacctaaagctgcaaaggccaagaaggcggctgccaaaaagaagtag

SEQ ID NO: 661026 - DNA, 120 bp, Artificial Sequence
  ENSG00000184361_0 (sequence is synthesized)
agccaaagagcacactggaggcggagaggcagcatccaccagcccgctccccgcctccaggacagagcctcggtctgcatgggggtgacaggtgcccatggatttccatgctgcggcaaa

SEQ ID NO: 661027 - DNA, 120 bp, Artificial Sequence
  ENSG00000184361_1 (sequence is synthesized)
gggtcagtggaggttgcagagatgcgagatgacttaagtcaacaccagatacaagaggaacaggagctggaggcagacatgctagagcagaagccccaactccaagtggacctggacctg

SEQ ID NO: 661028 - DNA, 120 bp, Artificial Sequence
  ENSG00000184361_2 (sequence is synthesized)
gacccagacccagacccagacccagaactggagatcggacaggtgccggctttactggagtcagagctatacccagccctcaagcttgaagctgagctggacacggaagccaactcgaac

SEQ ID NO: 661029 - DNA, 120 bp, Artificial Sequence
  ENSG00000184361_3 (sequence is synthesized)
gaggagtctgactttgaagaacccatgcagctggtatgcaagatagagtccgtccactccaacatggggctgcccacgccacagaccttcagaccgtggagtctgaattcaaactgccgg

SEQ ID NO: 661030 - DNA, 120 bp, Artificial Sequence
  ENSG00000184361_4 (sequence is synthesized)
agtttcacggaggagaaccacgtgtctgcctgccatcactccatcagtgcgcagacctccaagcacctcttctgggcaaacaagctcatccaggcctcagagcacagcctgcagcgggcc

SEQ ID NO: 661031 - DNA, 120 bp, Artificial Sequence
  ENSG00000184361_5 (sequence is synthesized)
cccaccaacgccctgtgctccgaggagcagctccagatccctgatgcccactcagctcctccaaccacaagctcccaggcaccaagccccctcctgtcctcagatctcccgccacccatt

SEQ ID NO: 661032 - DNA, 120 bp, Artificial Sequence
  ENSG00000184361_6 (sequence is synthesized)
gacctgacagagctaatcacctttgcatcttccctggccatggcctcctccagcaggatggacctgcccagtttggaacacatgatgaaagctccaccccaggaggctctggagccttcc

SEQ ID NO: 661033 - DNA, 120 bp, Artificial Sequence
  ENSG00000184361_7 (sequence is synthesized)
acagagcccctcctgaccactgtggaggagcgagagccagaaaatcacgcagagaccctgccagagaaaccacgcgaagccagagcaccactgaaatcttggagtcaggaagacaagaac

SEQ ID NO: 661034 - DNA, 120 bp, Artificial Sequence
  ENSG00000184361_8 (sequence is synthesized)
ttcgctcaatcttactttgacttcagcaagccggggatcaagagggccaccatcaaagggcaaatccagcttctccagccaccagccacgtcccctctgctgcagggaagcaaggaagac

SEQ ID NO: 661035 - DNA, 120 bp, Artificial Sequence
  ENSG00000184361_9 (sequence is synthesized)
tcagtgccgccaggaaaagagaaagagaatccattattggtgaaaatccattttaagctgtcagcccccacaatcccagagaaatgactagacagaaccaataaagcctccagtgctggc

SEQ ID NO: 661036 - DNA, 120 bp, Artificial Sequence
  ENSG00000184361_10 (sequence is synthesized)
agccaaagagcacactggaggcggagaggcagcatccaccagcccgctccccgcctccaggacagagcctcggtctgcatgggggtgacaggcatgagtaggactttgccagaagaaggc

SEQ ID NO: 661037 - DNA, 120 bp, Artificial Sequence
  ENSG00000184361_11 (sequence is synthesized)
tttccaggtataagaaatagcatttgcaaaggcactgggtgcagaaaggcctgcggtactctgggggtagcttcggcttagggtgagggacaggaagctggatgccaagagatgaaaaat

SEQ ID NO: 661038 - DNA, 120 bp, Artificial Sequence
  ENSG00000184361_12 (sequence is synthesized)
gaaggtagagatcagaccaagaggccacatggagtctgggggtaaccggagacaagtgagatgtagcaggctcactctgaggtcattgaaaatccaggttggagggggacatagttgcag

SEQ ID NO: 661039 - DNA, 120 bp, Artificial Sequence
  ENSG00000184361_13 (sequence is synthesized)
tggtcccactggaagactaaagagatttaagacagtgcagtgagtagcatcccagagtttggagccagccagacctgcctttgggtcgtgtgctgctcttaatagctgcatgacctcata

SEQ ID NO: 661040 - DNA, 85 bp, Artificial Sequence
  ENSG00000184361_14 (sequence is synthesized)
ttgggtcgtgtgctgctcttaatagctgcatgacctcatacacgtttcctcatctgtgagaggagagccgtggccaactgggcat

SEQ ID NO: 661041 - DNA, 120 bp, Artificial Sequence
  ENSG00000184361_15 (sequence is synthesized)
cgaagccatcctccctatcaaaacctaacaaagacattacaagaaaagaaaattatacaccgatatccctcatgaatatgcatgtgaaaattctgaaaaaaagccaatcagattcaacaa

SEQ ID NO: 661042 - DNA, 120 bp, Artificial Sequence
  ENSG00000184363_0 (sequence is synthesized)
agggagagggcctcgagggacaggacgtgaagatagttgggtttggaggcggccgccaggcccaggcccggtggacctgccgccatgcaggacggtaacttcctgctgtcggccctgcag

SEQ ID NO: 661043 - DNA, 120 bp, Artificial Sequence
  ENSG00000184363_1 (sequence is synthesized)
aacttcctgctgtcggccctgcagcctgaggccggcgtgtgctccctggcgctgccctctgacctgcagctggaccgccggggcgccgaggggccggaggccgagcggctgcgggcagcc

SEQ ID NO: 661044 - DNA, 120 bp, Artificial Sequence
  ENSG00000184363_2 (sequence is synthesized)
cgcctcttgcagctgggacagcagccgcggcacaacggggccgctgagcccgagcctgaggccgagactgccagaggcacatccagggggcagtaccacaccctgcaggctggcttcagc

SEQ ID NO: 661045 - DNA, 120 bp, Artificial Sequence
  ENSG00000184363_3 (sequence is synthesized)
tctcgctctcagggcctgagtggggacaagacctcgggcttccggcccatcgccaagccggcctacagcccagcctcctggtcctcccgctccgccgtggatctgagctgcagtcggagg

SEQ ID NO: 661046 - DNA, 120 bp, Artificial Sequence
  ENSG00000184363_4 (sequence is synthesized)
ctgagttcagcccacaacgggggcagcgcctttggggccgctgggtacgggggtgcccagcccacccctcccatgcccaccaggcccgtgtccttccatgagcgcggtggggttgggagc

SEQ ID NO: 661047 - DNA, 120 bp, Artificial Sequence
  ENSG00000184363_5 (sequence is synthesized)
cgggccgactatgacacactctccctgcgctcgctgcggctggggcccgggggcctggacgaccgctacagcctggtgtctgagcagctggagcccgcggccacctccacctacagggcc

SEQ ID NO: 661048 - DNA, 120 bp, Artificial Sequence
  ENSG00000184363_6 (sequence is synthesized)
tttgcgtacgagcgccaggccagctccagctccagccgggcaggggggctggactggcccgaggccactgaggtttccccgagccggaccatccgtgcccctgccgtgcggaccctgcag

SEQ ID NO: 661049 - DNA, 120 bp, Artificial Sequence
  ENSG00000184363_7 (sequence is synthesized)
cgattccagagcagccaccggagccgcggggtaggcggggcagtgccgggggccgtcctggagccagtggctcgagcgccatctgtgcgcagcctcagcctcagcctggctgactcgggc

SEQ ID NO: 661050 - DNA, 120 bp, Artificial Sequence
  ENSG00000184363_8 (sequence is synthesized)
cacctgccggacgtgcatgggttcaacagctacggtagccaccgaaccctgcagagactcagcagcggttttgatgacattgacctgccctcagcagtcaagtacctcatggcttcagac

SEQ ID NO: 661051 - DNA, 120 bp, Artificial Sequence
  ENSG00000184363_9 (sequence is synthesized)
cccaacctgcaggtgctgggagcggcctacatccagcacaagtgctacagcgatgcagccgccaagaagcaggcccgcagccttcaggccgtgcctaggctggtgaagctcttcaaccac

SEQ ID NO: 661052 - DNA, 120 bp, Artificial Sequence
  ENSG00000184363_10 (sequence is synthesized)
gccaaccaggaagtgcagcgccatgccacaggtgccatgcgcaacctcatctacgacaacgctgacaacaagctggccctggtggaggagaacgggatcttcgagctgctgcggacactg

SEQ ID NO: 661053 - DNA, 120 bp, Artificial Sequence
  ENSG00000184363_11 (sequence is synthesized)
tccagcgaccacctgaaggaccgcctggccagagacacgctggagcagctcacagacctggtgttgagccccctgtcgggggctgggggtccccccctcatccagcagaacgcctcggag

SEQ ID NO: 661054 - DNA, 120 bp, Artificial Sequence
  ENSG00000184363_12 (sequence is synthesized)
gcagagatcttctacaacgccaccggcttcctcaggaacctcagctcagcctctcaggccactcgccagaagatgcgggagtgccacgggctggtggacgccctggtcacctctatcaac

SEQ ID NO: 661055 - DNA, 120 bp, Artificial Sequence
  ENSG00000184363_13 (sequence is synthesized)
cacgccctggacgcgggcaaatgcgaggacaagagcgtggagaacgcggtgtgcgtcctgcggaacctgtcctaccgcctctacgacgagatgccgccgtccgcgctgcagcggctggag

SEQ ID NO: 661056 - DNA, 120 bp, Artificial Sequence
  ENSG00000184363_14 (sequence is synthesized)
ccgcagggacctggcgggggcgccgccgggagaggtcgtgggctgcttcacgccgcagagccggcggctgcgcgagctgcccctcgccgccgatgcgctcaccttcgcggaggtgtccaa

SEQ ID NO: 661057 - DNA, 120 bp, Artificial Sequence
  ENSG00000184363_15 (sequence is synthesized)
gtgtccaaggaccccaagggcctcgagtggctgtggagcccccagatcgtggggctgtacaaccggctgctgcagcgctgcgagctcaaccggcacacgacggaggcggccgccggggcg

SEQ ID NO: 661058 - DNA, 120 bp, Artificial Sequence
  ENSG00000184363_16 (sequence is synthesized)
ctgcagaacatcacggcaggcgaccgcaggtgggcgggggtgctgagccgcctggccctggagcaggagcgtattctgaaccccctgctagaccgtgtcaggaccgccgaccaccaccag

SEQ ID NO: 661059 - DNA, 120 bp, Artificial Sequence
  ENSG00000184363_17 (sequence is synthesized)
ctgcgctcactgactggcctcatccgaaacctgtctcggaacgctaggaacaaggacgagatgtccacgaaggtggtgagccacctgatcgagaagctgccgggcagcgtgggtgagaag

SEQ ID NO: 661060 - DNA, 120 bp, Artificial Sequence
  ENSG00000184363_18 (sequence is synthesized)
tcgcccccagccgaggtgctggtcaacatcatagctgtgctcaacaacctggtggtggccagccccatcgctgcccgagacctgctgtattttgacggactccgaaagctcatcttcatc

SEQ ID NO: 661061 - DNA, 120 bp, Artificial Sequence
  ENSG00000184363_19 (sequence is synthesized)
aagaagaagcgggacagccccgacagtgagaagtcctcccgggcagcatccagcctcctggccaacctgtggcagtacaacaagctccaccgtgacttccgggcgaagggctatcggaag

SEQ ID NO: 661062 - DNA, 120 bp, Artificial Sequence
  ENSG00000184363_20 (sequence is synthesized)
gaggacttcctgggcccataggtgaagccttctggaggagaaggtgacgtggcccagcgtccaagggacagactcagctccaggctgcttggcagcccagcctggaggagaaggctaatg

SEQ ID NO: 661063 - DNA, 120 bp, Artificial Sequence
  ENSG00000184363_21 (sequence is synthesized)
acggaggggcccctcgctggggcccctgtgtgcatctttgagggtcctgggccaccaggaggggcagggtcttatagctggggacttggcttccgcagggcagggggtggggcagggctc

SEQ ID NO: 661064 - DNA, 120 bp, Artificial Sequence
  ENSG00000184363_22 (sequence is synthesized)
aaggctgctctggtgtatggggtggtgacccagtcacattggcagaggtgggggttggctgtggcctggcagtatcttgggatagccagcactgggaataaagatggccatgaacagtca

SEQ ID NO: 661065 - DNA, 120 bp, Artificial Sequence
  ENSG00000184363_23 (sequence is synthesized)
ggtgcgccagcctcgggcagcggggtggggattgcaggcgcgggtcactgtggggactccgcctggcctggcgttcgcagcccacacaccgcacgcctcgcgctggggatgggcgtgcga

SEQ ID NO: 661066 - DNA, 120 bp, Artificial Sequence
  ENSG00000184363_24 (sequence is synthesized)
gacaagacctcggtgagcgatgggcccagcccgagggggacgatctgagctctgcagtctggagagtgggaggctctgcagcgggcccggacacaggtgagcccaggcacgccctcaccg

SEQ ID NO: 661067 - DNA, 120 bp, Artificial Sequence
  ENSG00000184363_25 (sequence is synthesized)
ccccctctcgacccacagggcttccggcccatcgccaagccggcctacagcccagcctcctggtcctcccgctccgccgtggatctgagctgcagtcggaggctgagttcagcccacaac

SEQ ID NO: 661068 - DNA, 120 bp, Artificial Sequence
  ENSG00000184363_26 (sequence is synthesized)
cagggagacagtgtcactctcctgtgaccgggcacagatgaggtttgggcacaggaggggctcaaaaggagtcagtgtgggccggggcaggccaggctggcttcctggaggaggctgggc

SEQ ID NO: 661069 - DNA, 120 bp, Artificial Sequence
  ENSG00000184363_27 (sequence is synthesized)
aagcaggtgaccaccccgaccacccactcgctgccccctggtgacctccttcgtgggccccaccacctcccactgtcctctgctcactgagcacccctcatgatccccaagctgactggg

SEQ ID NO: 661070 - DNA, 120 bp, Artificial Sequence
  ENSG00000184363_28 (sequence is synthesized)
agttgggtttggaggcggccgccaggcccaggcccggtggacctgccgccatgcaggacggtaacttcctgctgtcggccctgcagcctgaggccgagactgccagaggcacatccaggg

SEQ ID NO: 661071 - DNA, 120 bp, Artificial Sequence
  ENSG00000184368_0 (sequence is synthesized)
gtgcggccggcgcatcccgatggagcgcggcggcggcggctccgggacgggatcccggcctgaggggactgcgcggggaacctctctcccagggaagatcgcagaaccgggcgcggtgcg

SEQ ID NO: 661072 - DNA, 120 bp, Artificial Sequence
  ENSG00000184368_1 (sequence is synthesized)
gacctctcagcccaactaccggcctcaaggcatggagggatttttgaaatcagatgagaggcagagattggccaaagaaagacgagaagaaagagaaaaatgtctggctgctcgggagca

SEQ ID NO: 661073 - DNA, 120 bp, Artificial Sequence
  ENSG00000184368_2 (sequence is synthesized)
acagatcctggagaaacagaaaagagccaggctgcagtacgaaaagcaaatggaggagcgatggcgaaaactggaagagcagcggcagcgggaggaccaaaagagagctgctgtggaaga

SEQ ID NO: 661074 - DNA, 120 bp, Artificial Sequence
  ENSG00000184368_3 (sequence is synthesized)
gaaaaggaaacagaagctccgggaggaggaggaacggctggaggcgatgatgcgccggtccctggagcgcacacagcagctggagctgaaaaagaagtattcgtggggagcaccactggc

SEQ ID NO: 661075 - DNA, 120 bp, Artificial Sequence
  ENSG00000184368_4 (sequence is synthesized)
cattggacccggaggacatgatgcatgtgacaaactttcaacatcaactatgagtttgccaaagccaacggagcctcccatgaataaacgcctgtcttcatccaccgtggcaatatccta

SEQ ID NO: 661076 - DNA, 120 bp, Artificial Sequence
  ENSG00000184368_5 (sequence is synthesized)
ttccccagaccgagtattccatgtctgtcctcgtttagctcctcttggccctcttaacccttcttacaagtcttcacccactcgaaacattgagaagaagaaagctacatctacgtctac

SEQ ID NO: 661077 - DNA, 120 bp, Artificial Sequence
  ENSG00000184368_6 (sequence is synthesized)
atctggtgcaggagatgttgggaaagaagccctttcaggaggagaggcctctctggtggagaaggtgaagcgggggcaacgaacagcaacttctcttcctgttgtgaacttcgggtcccc

SEQ ID NO: 661078 - DNA, 120 bp, Artificial Sequence
  ENSG00000184368_7 (sequence is synthesized)
tctgagaagatgtgagttttctggaggcattcctaagagaccatcttctcctgtgatatccaagacagctactaaagcttatccacagtctccaaagacaacgaaacctccctacccagg

SEQ ID NO: 661079 - DNA, 120 bp, Artificial Sequence
  ENSG00000184368_8 (sequence is synthesized)
gtctcctgtgaagtaccgcttacctgccctttctggccaagacatgcccaagaggaaagcggagaaagagaagagcaacaaggaaagggaaggtaccttggctcagcaggctgctggccc

SEQ ID NO: 661080 - DNA, 120 bp, Artificial Sequence
  ENSG00000184368_9 (sequence is synthesized)
gcaaggagaggaagccctagagaagcatgtagtggacaagcatgccagcgagaagcatgctgctgccgcaggagggaaagccgaaaacagcgcagccttggggaagcccacagcaggcac

SEQ ID NO: 661081 - DNA, 120 bp, Artificial Sequence
  ENSG00000184368_10 (sequence is synthesized)
cactgatgcaggagaggctgcgaagatcttggctgaaaagagaagacaggcccggctgcagaaggaacaggaggagcaagaacgactggagaaggaagaacaagataggctggagagaga

SEQ ID NO: 661082 - DNA, 120 bp, Artificial Sequence
  ENSG00000184368_11 (sequence is synthesized)
ggaattgaaaagaaaggcagaggaggaaaggcttcgcctagaagaggaagcccgaaagcaggaagaagaaaggaagcggcaggaagaggaaaagaaaaaacaggaaggggaagagaaaag

SEQ ID NO: 661083 - DNA, 120 bp, Artificial Sequence
  ENSG00000184368_12 (sequence is synthesized)
aaaggcaggcgaggaggccaagcggaaggctgaggaggagctgttgttgaaagaaaagcaagaacaagaaaaacaagagaaagccatgattgaaaagcagaaagaagcagcagaaacaaa

SEQ ID NO: 661084 - DNA, 120 bp, Artificial Sequence
  ENSG00000184368_13 (sequence is synthesized)
ggcccgggaggtagctgaacagatgcgtctcgagagagaacagattatgctgcagattgagcaggagagactggagagaaagaagagaatagatgaaatcatgaagagaacaaggaaaag

SEQ ID NO: 661085 - DNA, 120 bp, Artificial Sequence
  ENSG00000184368_14 (sequence is synthesized)
tgatgtgtctccacaagtgaagaaagaagaccccaaagtgggggtccagcctgctgtgtgtgtggaaaagaagacaaaactggttgtccccaacaaaatggaaatcaatggattgaacac

SEQ ID NO: 661086 - DNA, 120 bp, Artificial Sequence
  ENSG00000184368_15 (sequence is synthesized)
ctgccaggaagttaatggtgtggatcacgctgccccagaaacttatccccaagacattttctctaatgggcttaagccagctgggggactcattcatctggatgcccttgatgggaaatc

SEQ ID NO: 661087 - DNA, 120 bp, Artificial Sequence
  ENSG00000184368_16 (sequence is synthesized)
accagtgagtgaaatgattcctggggtgtctctggaccaaaatggaactggtaatgcccgagcacttcaagatctcttagatttcactggtcccccgacattccccaagagatccagtga

SEQ ID NO: 661088 - DNA, 120 bp, Artificial Sequence
  ENSG00000184368_17 (sequence is synthesized)
aaatctcagcctggacgactgtaacaaaaaccttatcgaaggatttaacagtcctggccaagaaactcctctcaacaccttctgttgacaaatacagcatccctttaataaaaggtgttt

SEQ ID NO: 661089 - DNA, 120 bp, Artificial Sequence
  ENSG00000184368_18 (sequence is synthesized)
ggagaacccgtaaagctgctgatagtcaaatccgagctactagctgcttgaagaagcttctgtcacccttaccgctggatcccaaattattagctcggaatgtaactgtattcctaggta

SEQ ID NO: 661090 - DNA, 120 bp, Artificial Sequence
  ENSG00000184368_19 (sequence is synthesized)
gtatgtcaaacactggccactcttggtagaaaccttgaaactttcaccttgctgggctttagcaaagtttccttttacagttctgtttatgagcttcagctactgataaagcacttcctg

SEQ ID NO: 661091 - DNA, 120 bp, Artificial Sequence
  ENSG00000184368_20 (sequence is synthesized)
aacttctctattatcatagtgaccctctgaataacctgagtgactggctcggcaattcgctttataaccattcttattcccaaagttggagcacataaacatttagatgtcttttcctgt

SEQ ID NO: 661092 - DNA, 120 bp, Artificial Sequence
  ENSG00000184368_21 (sequence is synthesized)
aaaatattctagacatttacccaaactctagttcaacatatactcaacttgcactgtatatctccctgtcttttttgagacagagaagaaattcaggaggttccccatctccagagtttc

SEQ ID NO: 661093 - DNA, 120 bp, Artificial Sequence
  ENSG00000184368_22 (sequence is synthesized)
tctgttggaaagcagtatcaagaagcctttaaaaaattgttgttaagctttgccacctgcagaaatgcattgccccacattattcttctggggttaaagtagtaagtttggttgaggaag

SEQ ID NO: 661094 - DNA, 120 bp, Artificial Sequence
  ENSG00000184368_23 (sequence is synthesized)
gaagtcaaaacagtcagtaatgatttctgttctcttatgcatattcgtgtatacatgggcaactgaatctagcaaggactctttcgtgtcacaccttaaaatcttcatgctgtagtcact

SEQ ID NO: 661095 - DNA, 120 bp, Artificial Sequence
  ENSG00000184368_24 (sequence is synthesized)
ccagaccatggagtggctttccagctgaatgaatcctatgtctcgcgtgcaggtggttggttttcaatgttcttgctaattttttttctattggatcttgggagttttctttgtttgctc

SEQ ID NO: 661096 - DNA, 120 bp, Artificial Sequence
  ENSG00000184368_25 (sequence is synthesized)
ctgtgtttgcccagctttaataaaaccaggcgcaaacaaaaaccatagcattctgaaacaatagggggcccacattggacccagtatgtcactttaatggacttcaagaaaaaatctgaa

SEQ ID NO: 661097 - DNA, 120 bp, Artificial Sequence
  ENSG00000184368_26 (sequence is synthesized)
tgggaaaaatgacactagaatgtatactccacacattttatgccatataatggtgtgttttcttaattttgtttcttgtggcgaaatgtggctttcaaattaaaatgaccttttcttctt

SEQ ID NO: 661098 - DNA, 120 bp, Artificial Sequence
  ENSG00000184368_27 (sequence is synthesized)
tgaaactttttgttttgacttgtataattaagggtttggaaagattcataattctgagagaggtttgcaaccaggagatacaaagaagtctcagtagtaatcttgttcatgtgcttttac

SEQ ID NO: 661099 - DNA, 120 bp, Artificial Sequence
  ENSG00000184368_28 (sequence is synthesized)
agccagctacatttaagaatgtattagttacagaaattatatgtctgtgtatgtgtctctactcaataaagtacatgcctccacataatgcggtgctgtccatctcggcaaatactggcc

SEQ ID NO: 661100 - DNA, 120 bp, Artificial Sequence
  ENSG00000184368_29 (sequence is synthesized)
aagtccctttatgacaggcacacagaaaccatagcatggtctggctttcagaaaatgcctctcatctttcctggaaccttattttgctaaatgtctgttttcttgtgatttgttgtacct

SEQ ID NO: 661101 - DNA, 120 bp, Artificial Sequence
  ENSG00000184368_30 (sequence is synthesized)
cacagcaccattgtgaccatggtgatgcctcatttgcatgatatgtaccttgtgtttaatgtgaaatacattttcattgaagagtctgatgacttgctagcgttttattttttctgtaag

SEQ ID NO: 661102 - DNA, 120 bp, Artificial Sequence
  ENSG00000184368_31 (sequence is synthesized)
ctcaatgtgctgaaaccaaaccaggcttttaaaaacctgtgtagaagaaaaccaaaaaatcctgtgtgggtgtcctttccctgtcaaactcattaaaaattcctttgttgccagtgccaa

SEQ ID NO: 661103 - DNA, 120 bp, Artificial Sequence
  ENSG00000184368_32 (sequence is synthesized)
gagataaacgccctttccctggcccaggatcgtccggacgtgcatccaagggccgcacccctctctgtgcgagtggcggggttctttcttggggcgacctgggcatggagggatttttga

SEQ ID NO: 661104 - DNA, 120 bp, Artificial Sequence
  ENSG00000184368_33 (sequence is synthesized)
ggccacctcttggaataagatcatcctcacatctgttttatgtttacagttaatagttaaagccacagaaatgttgccagataaaataatttagagaaaaataaagttacttgagtcaaa

SEQ ID NO: 661105 - DNA, 120 bp, Artificial Sequence
  ENSG00000184371_0 (sequence is synthesized)
gaggctcggcccggggaaagtgaaagtttgcctgggtcctctcggcgccagagccgctctccgcatcccaggacagcggtgcggccctcggccggggcgcccactccgcagcagccagcg

SEQ ID NO: 661106 - DNA, 120 bp, Artificial Sequence
  ENSG00000184371_1 (sequence is synthesized)
agcgagcgagggcggccgacgcgcccggccgggacccagctgcccgtatgaccgcgccgggcgccgccgggcgctgccctcccacgacatggctgggctccctgctgttgttggtctgtc

SEQ ID NO: 661107 - DNA, 120 bp, Artificial Sequence
  ENSG00000184371_2 (sequence is synthesized)
ggtctgtctcctggcgagcaggagtatcaccgaggaggtgtcggagtactgtagccacatgattgggagtggacacctgcagtctctgcagcggctgattgacagtcagatggagacctc

SEQ ID NO: 661108 - DNA, 120 bp, Artificial Sequence
  ENSG00000184371_3 (sequence is synthesized)
gtgccaaattacatttgagtttgtagaccaggaacagttgaaagatccagtgtgctaccttaagaaggcatttctcctggtacaagacataatggaggacaccatgcgcttcagagataa

SEQ ID NO: 661109 - DNA, 120 bp, Artificial Sequence
  ENSG00000184371_4 (sequence is synthesized)
cacccccaatgccatcgccattgtgcagctgcaggaactctctttgaggctgaagagctgcttcaccaaggattatgaagagcatgacaaggcctgcgtccgaactttctatgagacacc

SEQ ID NO: 661110 - DNA, 120 bp, Artificial Sequence
  ENSG00000184371_5 (sequence is synthesized)
tctccagttgctggagaaggtcaagaatgtctttaatgaaacaaagaatctccttgacaaggactggaatattttcagcaagaactgcaacaacagctttgctgaatgctccagccaaga

SEQ ID NO: 661111 - DNA, 120 bp, Artificial Sequence
  ENSG00000184371_6 (sequence is synthesized)
tgtggtgaccaagcctgattgcaactgcctgtaccccaaagccatccctagcagtgacccggcctctgtctcccctcatcagcccctcgccccctccatggcccctgtggctggcttgac

SEQ ID NO: 661112 - DNA, 120 bp, Artificial Sequence
  ENSG00000184371_7 (sequence is synthesized)
ctgggaggactctgagggaactgagggcagctccctcttgcctggtgagcagcccctgcacacagtggatccaggcagtgccaagcagcggccacccaggagcacctgccagagctttga

SEQ ID NO: 661113 - DNA, 120 bp, Artificial Sequence
  ENSG00000184371_8 (sequence is synthesized)
gccgccagagaccccagttgtcaaggacagcaccatcggtggctcaccacagcctcgcccctctgtcggggccttcaaccccgggatggaggatattcttgactctgcaatgggcactaa

SEQ ID NO: 661114 - DNA, 120 bp, Artificial Sequence
  ENSG00000184371_9 (sequence is synthesized)
ttgggtcccagaagaagcctctggagaggccagtgagattcccgtaccccaagggacagagctttccccctccaggccaggagggggcagcatgcagacagagcccgccagacccagcaa

SEQ ID NO: 661115 - DNA, 120 bp, Artificial Sequence
  ENSG00000184371_10 (sequence is synthesized)
cttcctctcagcatcttctccactccctgcatcagcaaagggccaacagccggcagatgtaactggtaccgccttgcccagggtgggccccgtgaggcccactggccaggactggaatca

SEQ ID NO: 661116 - DNA, 120 bp, Artificial Sequence
  ENSG00000184371_11 (sequence is synthesized)
caccccccagaagacagaccatccatctgccctgctcagagaccccccggagccaggctctcccaggatctcatcactgcgcccccagggcctcagcaacccctccaccctctctgctca

SEQ ID NO: 661117 - DNA, 120 bp, Artificial Sequence
  ENSG00000184371_12 (sequence is synthesized)
gccacagctttccagaagccactcctcgggcagcgtgctgccccttggggagctggagggcaggaggagcaccagggatcggaggagccccgcagagccagaaggaggaccagcaagtga

SEQ ID NO: 661118 - DNA, 120 bp, Artificial Sequence
  ENSG00000184371_13 (sequence is synthesized)
aggggcagccaggcccctgccccgttttaactccgttcctttgactgacacaggccatgagaggcagtccgagggatccttcagcccgcagctccaggagtctgtcttccacctgctggt

SEQ ID NO: 661119 - DNA, 120 bp, Artificial Sequence
  ENSG00000184371_14 (sequence is synthesized)
gcccagtgtcatcctggtcttgctggccgtcggaggcctcttgttctacaggtggaggcggcggagccatcaagagcctcagagagcggattctcccttggagcaaccagagggcagccc

SEQ ID NO: 661120 - DNA, 120 bp, Artificial Sequence
  ENSG00000184371_15 (sequence is synthesized)
cctgactcaggatgacagacaggtggaactgccagtgtagagggaattctaagctggacgcacagaacagtctctccgtgggaggagacattatggggcgtccaccaccacccctccctg

SEQ ID NO: 661121 - DNA, 120 bp, Artificial Sequence
  ENSG00000184371_16 (sequence is synthesized)
gagctcctgcctgccaggactggaccagagcagccaggctggggcccctctgtctcaacccgcagacccttgactgaatgagagaggccagaggatgctccccatgctgccactatttat

SEQ ID NO: 661122 - DNA, 120 bp, Artificial Sequence
  ENSG00000184371_17 (sequence is synthesized)
tgtgagccctggaggctcccatgtgcttgaggaaggctggtgagcccggctcaggaccctcttccctcaggggctgcaccctcctctcactcccttccatgccggaacccaggccaggga

SEQ ID NO: 661123 - DNA, 120 bp, Artificial Sequence
  ENSG00000184371_18 (sequence is synthesized)
cccaccggcctgtggtttgtgggaaagcagggtggacgctgaggagtgaaagaaccctgcacccagagggcctgcctggtgccaaggtatcccagcctggacaggcatggacctgtctcc

SEQ ID NO: 661124 - DNA, 120 bp, Artificial Sequence
  ENSG00000184371_19 (sequence is synthesized)
agagagaggagcctgaagttcgtggggcgggacagcgtcggcctgatttcccgtaaaggtgtgcagcctgagagacgggaagaggaggcctctggacctgctggtctgcactgacagcct

SEQ ID NO: 661125 - DNA, 120 bp, Artificial Sequence
  ENSG00000184371_20 (sequence is synthesized)
gaagggtctacaccctcggctcacctaagtgccctgtgctggttgccaggcgcagaggggaggccagccctgccctcaggacctgcctgacctgccagtgatgccaagagggggatcaag

SEQ ID NO: 661126 - DNA, 120 bp, Artificial Sequence
  ENSG00000184371_21 (sequence is synthesized)
cactggcctctgcccctcctccttccagcacctgccagagcttctccaggaggccaagcagaggctcccctcatgaaggaagccattgcactgtgaacactgtacctgcctgctgaacag

SEQ ID NO: 661127 - DNA, 120 bp, Artificial Sequence
  ENSG00000184371_22 (sequence is synthesized)
cctgcccccgtccatccatgagccagcatccgtccgtcctccactctccagcctctccccagcctcctgcactgagctggcctcaccagtcgactgagggagcccctcagccctgacctt

SEQ ID NO: 661128 - DNA, 120 bp, Artificial Sequence
  ENSG00000184371_23 (sequence is synthesized)
ctcctgacctggcctttgactccccggagtggagtggggtgggagaacctcctgggccgccagccagagccggtctttaggctgtgttgttcgcccaggtttctgcatcttgcactttga

SEQ ID NO: 661129 - DNA, 120 bp, Artificial Sequence
  ENSG00000184371_24 (sequence is synthesized)
cattcccaagagggaagggactagtgggagagagcaagggaggggagggcacagacagagaggctacagggcgagctctgactgaagatgggcctttgaaatataggtatgcacctgagg

SEQ ID NO: 661130 - DNA, 120 bp, Artificial Sequence
  ENSG00000184371_25 (sequence is synthesized)
ttgggggagggtctgcactcccaaaccccagcgcagtgtcctttccctgctgccgacaggaacctggggctgaacaggttatccctgtcaggagccctggactgggctgcatctcagccc

SEQ ID NO: 661131 - DNA, 120 bp, Artificial Sequence
  ENSG00000184371_26 (sequence is synthesized)
cacctgcatggtatccagctcccatccacttctcacccttctttcctcctgaccttggtcagcagtgatgacctccaactctcacccaccccctctaccatcacctctaaccaggcaagc

SEQ ID NO: 661132 - DNA, 120 bp, Artificial Sequence
  ENSG00000184371_27 (sequence is synthesized)
cagggtgggagagcaatcaggagagccaggcctcagcttccaatgcctggagggcctccactttgtggccagcctgtggtggtggctctgaggcctaggcaacgagcgacagggctgcca

SEQ ID NO: 661133 - DNA, 120 bp, Artificial Sequence
  ENSG00000184371_28 (sequence is synthesized)
gttgcccctgggttcctttgtgctgctgtgtgcctcctctcctgccgccctttgtcctccgctaagagaccctgccctacctggccgctgggccccgtgactttcccttcctgcccagga

SEQ ID NO: 661134 - DNA, 120 bp, Artificial Sequence
  ENSG00000184371_29 (sequence is synthesized)
aagtgagggtcggctggccccaccttccctgtcctgatgccgacagcttagggaagggcagtgaacttgcatatggggcttagccttctagtcacagcctctatatttgatgctagaaaa

SEQ ID NO: 661135 - DNA, 120 bp, Artificial Sequence
  ENSG00000184371_30 (sequence is synthesized)
cacatatttttaaatggaagaaaaataaaaaggcattcccccttcatccccctaccttaaacatataatattttaaaggtcaaaaaagcaatccaacccactgcagaagctctttttgag

SEQ ID NO: 661136 - DNA, 120 bp, Artificial Sequence
  ENSG00000184371_31 (sequence is synthesized)
cacttggtggcatcagagcaggaggagccccagagccacctctggtgtccccccaggctacctgctcaggaaccccttctgttctctgagaagtcaagagaggacattggctcacgcact

SEQ ID NO: 661137 - DNA, 120 bp, Artificial Sequence
  ENSG00000184371_32 (sequence is synthesized)
gtgagattttgtttttatacttggaagtggtgaattattttatataaagtcatttaaatatctatttaaaagataggaagctgcttatatatttaataataaaagaagtgcacaagctgc

SEQ ID NO: 661138 - DNA, 120 bp, Artificial Sequence
  ENSG00000184371_33 (sequence is synthesized)
acagacaggtggaactgccagtgtagagggaattctaagacccctcaccatcctggacacactcgtttgtcaatgtccctctgaaaatgtgacgcccagccccggacacagtactccaga

SEQ ID NO: 661139 - DNA, 120 bp, Artificial Sequence
  ENSG00000184371_34 (sequence is synthesized)
tgttgtctgaccagctcagagagagtacagtgggactgttaccttccttgatatggacagtattcttctatttgtgcagattaagattgcattagtttttttcttaacaactgcatcata

SEQ ID NO: 661140 - DNA, 120 bp, Artificial Sequence
  ENSG00000184371_35 (sequence is synthesized)
ctgttgtcatatgttgagcctgtggtctattaaaacccctagttccatttcccataaacttctgtcaagccagaccatctctaccctgtacttggacaacttaacttttttaaccaaagt

SEQ ID NO: 661141 - DNA, 120 bp, Artificial Sequence
  ENSG00000184371_36 (sequence is synthesized)
gcagtttatgttcacctttgttaaagccaccttgttggtttctgcccatcacctgaacctactgaagttgtgtgaaatcctaattctgtcatctccgtagccctcccagttgtgcctcct

SEQ ID NO: 661142 - DNA, 120 bp, Artificial Sequence
  ENSG00000184371_37 (sequence is synthesized)
gcacattgatgagtgcctgctgttgtctttgcccatgttgttgatgtagctgtgaccctattgttcctcacccctgccccccgccaaccccagctggcccacctcttccccctcccaccc

SEQ ID NO: 661143 - DNA, 120 bp, Artificial Sequence
  ENSG00000184371_38 (sequence is synthesized)
aagcccacagccagcccatcaggaagccttcctggcttctccacaaccttctgactgctcttttcagtcatgctcctcctgctcttttgtatttggctaatagtatatcaatttgcactt

SEQ ID NO: 661144 - DNA, 120 bp, Artificial Sequence
  ENSG00000184371_39 (sequence is synthesized)
gaatgggacttgaagctggccgggctgcttgggggctgcagaggaagaagggggctgccggcaaacctgctgactcaggctccacgagggagcaagtaacactggactcctttcggcact

SEQ ID NO: 661145 - DNA, 120 bp, Artificial Sequence
  ENSG00000184371_40 (sequence is synthesized)
ataccctggctccagaagtccccaggatgccttgggtgtttcctcaagggacaaggctggatttgaagtctgagcatcattggaactcccagggctggctcagctgcatacatgtgtaca

SEQ ID NO: 661146 - DNA, 120 bp, Artificial Sequence
  ENSG00000184371_41 (sequence is synthesized)
gaatcagcctggagagcgcggaaggaaagggtcggtccgcagagggcgcggggaaggcagggtggggacgcggtggagcccgcgctcgtttgctgaaggcttggaagtgcagcgcagaag

SEQ ID NO: 661147 - DNA, 120 bp, Artificial Sequence
  ENSG00000184374_0 (sequence is synthesized)
atttctgggagacccttttctgaggaaccacagcaatgaatggctttgcatccttgcttcgaagaaaccaatttatcctcctggtactatttcttttgcaaattcagagtctgggtctgg

SEQ ID NO: 661148 - DNA, 120 bp, Artificial Sequence
  ENSG00000184374_1 (sequence is synthesized)
atattgatagccgtcctaccgctgaagtctgtgccacacacacaatttcaccaggacccaaaggagatgatggtgaaaaaggagatccaggagaagagggaaagcatggcaaagtgggac

SEQ ID NO: 661149 - DNA, 120 bp, Artificial Sequence
  ENSG00000184374_2 (sequence is synthesized)
gcatggggccgaaaggaattaaaggagaactgggtgatatgggagatcagggcaatattggcaagactgggcccattgggaagaagggtgacaaaggggaaaaaggtttgcttggaatac

SEQ ID NO: 661150 - DNA, 120 bp, Artificial Sequence
  ENSG00000184374_3 (sequence is synthesized)
ctggagaaaaaggcaaagcaggtactgtctgtgattgtggaagataccggaaatttgttggacaactggatattagtattgctcggctcaagacatctatgaagtttgtcaagaatgtga

SEQ ID NO: 661151 - DNA, 120 bp, Artificial Sequence
  ENSG00000184374_4 (sequence is synthesized)
tagcagggattagggaaactgaagagaaattctactacatcgtgcaggaagagaagaactacagggaatccctaacccactgcaggattcggggtggaatgctagccatgcccaaggatg

SEQ ID NO: 661152 - DNA, 120 bp, Artificial Sequence
  ENSG00000184374_5 (sequence is synthesized)
aagctgccaacacactcatcgctgactatgttgccaagagtggcttctttcgggtgttcattggcgtgaatgaccttgaaagggagggacagtacatgttcacagacaacactccactgc

SEQ ID NO: 661153 - DNA, 120 bp, Artificial Sequence
  ENSG00000184374_6 (sequence is synthesized)
agaactatagcaactggaatgagggggaacccagcgacccctatggtcatgaggactgtgtggagatgctgagctctggcagatggaatgacacagagtgccatcttaccatgtactttg

SEQ ID NO: 661154 - DNA, 120 bp, Artificial Sequence
  ENSG00000184374_7 (sequence is synthesized)
tctgtgagttcatcaagaagaaaaagtaacttccctcatcctacgtatttgctattttcctgtgaccgtcattacagttattgttatccatcctttttttcctgattgtactacatttga

SEQ ID NO: 661155 - DNA, 120 bp, Artificial Sequence
  ENSG00000184374_8 (sequence is synthesized)
tctgagtcaacatagctagaaaatgctaaactgaggtatggagcctccatcatcatgctcttttgtgatgattttcatattttcacacatggtatattattgacccaataactcgccagg

SEQ ID NO: 661156 - DNA, 120 bp, Artificial Sequence
  ENSG00000184374_9 (sequence is synthesized)
ttacatgggtcttgagagagaattttaattactaattgtgcacgagatagttggttgtctatatgtcaaatgagttgttctcttggtatttgctctaccatctctccctagagcactctg

SEQ ID NO: 661157 - DNA, 120 bp, Artificial Sequence
  ENSG00000184374_10 (sequence is synthesized)
tgtctatcccagtggataatttcccagtttactggtgatgattaggaaggttgttgatggttaggctaacctgccctggcccaaagccagacatgtacaagggctttctgtgagcaatga

SEQ ID NO: 661158 - DNA, 120 bp, Artificial Sequence
  ENSG00000184374_11 (sequence is synthesized)
taagatctttgaatccaagatgcccagatcttttaccagtcacaccctatggccatggctatacttggaagttctccttgttggcacagacatagaaatgctttaaccccaaacctttat

SEQ ID NO: 661159 - DNA, 120 bp, Artificial Sequence
  ENSG00000184374_12 (sequence is synthesized)
atgggggacttctagctttgtgtcttgtttcagaccatgtggaatgataaatactctttttgtgcttctgatctatcgatttcactaacatataccaagtaggtgctttgaacccctttc

SEQ ID NO: 661160 - DNA, 120 bp, Artificial Sequence
  ENSG00000184374_13 (sequence is synthesized)
cttaatctcaggcccctatatagtcacactttgatttaagaaaaatggagctcttgaaatcaaaagaaaaaaatggggaattgttcacaaacaatactggttatagttctcttgctaaat

SEQ ID NO: 661161 - DNA, 120 bp, Artificial Sequence
  ENSG00000184374_14 (sequence is synthesized)
tgcccactgctattaacttaacttcatttttatttatcttaggtttacctgcatcaattttattcaccttaggcatagggaatgagggaaggagtttgtgaagccttaagaaaattctgg

SEQ ID NO: 661162 - DNA, 120 bp, Artificial Sequence
  ENSG00000184374_15 (sequence is synthesized)
aagcttcaaagtgctaccaacatcatctccaggccccctcatccttgcctctaacatatcactaatggtgacatttcatgggaggccttttactcttcataaatatatgtcatagaaatc

SEQ ID NO: 661163 - DNA, 120 bp, Artificial Sequence
  ENSG00000184374_16 (sequence is synthesized)
ctactggagatgtcccttctaatactctggcatcacagaaatgtgtgaggcacagaattcggaacatgcttagaactcacatttactgagctggtaaaattctaccttgaactgtagatc

SEQ ID NO: 661164 - DNA, 120 bp, Artificial Sequence
  ENSG00000184374_17 (sequence is synthesized)
aaacctcaaagcagctttcacttggaatttaaaaataaacagttcaaagatactctagattatcaccctataaacttctactccagttatggtttctgacatatgattagactgtttcaa

SEQ ID NO: 661165 - DNA, 120 bp, Artificial Sequence
  ENSG00000184374_18 (sequence is synthesized)
atgctggcaaaatggttaatgaagtaagagaaacagatcaacaacatatgttcaccttaaaccatctgttcatgatttcacccgtgactaactggttatgagataggacttaattaggtt

SEQ ID NO: 661166 - DNA, 120 bp, Artificial Sequence
  ENSG00000184374_19 (sequence is synthesized)
atttctgtgggttcaacaagggccataaactcagatcctacaggggccaggcagatgacttacctaaatgaagtggaacacgtggggaccctagtgcactgagcacagcttgcccttcca

SEQ ID NO: 661167 - DNA, 120 bp, Artificial Sequence
  ENSG00000184374_20 (sequence is synthesized)
aaggagccagctgctcctcagtggctgctgctggtgctagggaggacccaatcttgctaaatgtgctgatatttcaagagaagtcagaaagctgggactttgtaacataagctcatattt

SEQ ID NO: 661168 - DNA, 120 bp, Artificial Sequence
  ENSG00000184374_21 (sequence is synthesized)
taatatgttggcaactaattaatttttaacccaaattttaagtgggttaaaaattaattaaaattaaagatttgaggtcaaaagtcttctagctaaagttgtgatcatttcatttcttac

SEQ ID NO: 661169 - DNA, 120 bp, Artificial Sequence
  ENSG00000184374_22 (sequence is synthesized)
ttctggaggaaggttcagaaggttctaaccaaatagaatgtcattaggatatgatgacatgaaagtcaagatatcccattaataccatattcaattcagcttaataataggaatttgtta

SEQ ID NO: 661170 - DNA, 120 bp, Artificial Sequence
  ENSG00000184374_23 (sequence is synthesized)
tatgtttgacatttatcaggttactagttaaactcttttgagatgatagtacatgacactttaaaggcagaaaagcttaataaaaattacaaagtaggacatcaaacgccagtatccttg

SEQ ID NO: 661171 - DNA, 120 bp, Artificial Sequence
  ENSG00000184374_24 (sequence is synthesized)
gatagaaagccatcccagatcatgaggaatgaaaacctagaaacacctgtaggaaaataaagctcatatgtaagaagagaggaaggagagacatgcagcaaatgttgcctacgggcaact

SEQ ID NO: 661172 - DNA, 120 bp, Artificial Sequence
  ENSG00000184374_25 (sequence is synthesized)
tcatgttaaggatccatgttctgatttgttctaagcccccaaagtatgagtatttattgtgtgcactgttagtgctattattatttactgtgaatgttataataatagttctctcaatga

SEQ ID NO: 661173 - DNA, 120 bp, Artificial Sequence
  ENSG00000184374_26 (sequence is synthesized)
tgaatcagagaatattgcggcaggaacagtctggcagattatttagcccagcctcatagacttatagataacaaaagaaaataccagagatgttaaatgacccacacaagaccacattgc

SEQ ID NO: 661174 - DNA, 120 bp, Artificial Sequence
  ENSG00000184374_27 (sequence is synthesized)
tggtgcttgcttccttttctgcttctctgccacgtaatgacacagcacaaggccctcaccagaagccaagcagatgccagtgccatgctttttggacttcccagcctccagagctgagat

SEQ ID NO: 661175 - DNA, 120 bp, Artificial Sequence
  ENSG00000184374_28 (sequence is synthesized)
caggctagaagaaagggaagaaggggactttcctgtctccctgctggtgactttccaagccttggggacagggatgatgacacgtttcatccctgccatgcttactatgagaagaaagcc

SEQ ID NO: 661176 - DNA, 120 bp, Artificial Sequence
  ENSG00000184374_29 (sequence is synthesized)
cagcccatcaggaagcagcctaattcttctgggccaagagaaaactctggcagtactgtctgtgattgtggaagataccggaaatttgttggacaactggatattagtattgctcggctc

SEQ ID NO: 661177 - DNA, 120 bp, Artificial Sequence
  ENSG00000184378_0 (sequence is synthesized)
agagcggctcagagacaggaggcggcggcagcagcggcggcatgaaccactgccagctaccggtggtgatcgacaacggctcgggaatgatcaaggcgggcgtggctgggtgccgggagc

SEQ ID NO: 661178 - DNA, 120 bp, Artificial Sequence
  ENSG00000184378_1 (sequence is synthesized)
cccagtttatctacccgaacattatcggccgcgccaagggccagagccgcgcggcccagggcgggctagaactctgcgtgggcgaccaagctcaggactggaggagctcgctgttcatca

SEQ ID NO: 661179 - DNA, 120 bp, Artificial Sequence
  ENSG00000184378_2 (sequence is synthesized)
gttacccagtggagcgtggtctcattacttcatgggaggacatggagatcatgtggaagcatatctatgactataacctaaagctgaagccgtgtgatggcccagtcttgattactgagc

SEQ ID NO: 661180 - DNA, 120 bp, Artificial Sequence
  ENSG00000184378_3 (sequence is synthesized)
cagcgctgaacccactggccaaccggcaacagatcacggaaatgttttttgagcatctgggtgttcctgccttctatatgtccatccaggctgtgctggctctctttgctgctggcttca

SEQ ID NO: 661181 - DNA, 120 bp, Artificial Sequence
  ENSG00000184378_4 (sequence is synthesized)
ctactggccttgtgctgaattcaggtgctggggttacccagagtgtgcccatctttgagggttactgtctgcctcatggtgtgcagcaactggatctggcaggccttgacctcaccaact

SEQ ID NO: 661182 - DNA, 120 bp, Artificial Sequence
  ENSG00000184378_5 (sequence is synthesized)
acctcatggtgctaatgaagaaccatggtatcatgttgctcagtgcttcagacagaaagattgttgaagacatcaaggagagcttttgttatgtggcaatgaactacgaagaggaaatgg

SEQ ID NO: 661183 - DNA, 120 bp, Artificial Sequence
  ENSG00000184378_6 (sequence is synthesized)
tgaaccttgaggcccctggcattgataagatatgcttcagcagcataatgaaatgtgatacaggcctgaggaattccttcttttccaatattatccttgccgggggatcaacctctttcc

SEQ ID NO: 661184 - DNA, 120 bp, Artificial Sequence
  ENSG00000184378_7 (sequence is synthesized)
ctggtttagacaagcggttagttaaggatatagcaaaggtggctcctgccaacaccgctgtgcaagttatagctcctccagaaaggaaaatatcagtgtggatgggaggttctattcttg

SEQ ID NO: 661185 - DNA, 120 bp, Artificial Sequence
  ENSG00000184378_8 (sequence is synthesized)
catccttgtctgccttccaggacatgtggatcactgctgcagaatttaaagaagttggacccaacatagtacaccaaagatgcttctgaaatacagataaaatggttggaagaaaatgtt

SEQ ID NO: 661186 - DNA, 120 bp, Artificial Sequence
  ENSG00000184378_9 (sequence is synthesized)
ttgagtatatgtgacagaaaactttggatattatatgtttctgggagaagagaaaatacttcacctattgggatgccaatatttctgttgtatttctataatgggtttgggggataataa

SEQ ID NO: 661187 - DNA, 120 bp, Artificial Sequence
  ENSG00000184378_10 (sequence is synthesized)
tggtgaagctcaagaacagatgtctattgagtagaaccaagttaaaataatgtttcccatagtgtttcttctataacttgacgttggtgagcttatatttcccttggaagagagcatttg

SEQ ID NO: 661188 - DNA, 120 bp, Artificial Sequence
  ENSG00000184378_11 (sequence is synthesized)
tggtacaatatgctatgtgccaaatgagtgataagatttaagcttattgaagtttagggaaagaaggttgctgtggtgaggaacgagactccatagcagaggtatgccatcatggaaggg

SEQ ID NO: 661189 - DNA, 120 bp, Artificial Sequence
  ENSG00000184378_12 (sequence is synthesized)
gtggcattgggatggagcgcagatatccaggcaagcatactaaaatgaacaagttgctaaagatgagaatgaacaaagcatattcagggcatgtttaatagactgattttgtttttaaaa

SEQ ID NO: 661190 - DNA, 120 bp, Artificial Sequence
  ENSG00000184381_0 (sequence is synthesized)
gtttgtttgcggaagtaggaggaagtagaagtgctgagtaagccgaggtgagtgacctcgcgggtgggcggggcctgggggtccgttccccaacttcctcggcgctccggactcccaagt

SEQ ID NO: 661191 - DNA, 120 bp, Artificial Sequence
  ENSG00000184381_1 (sequence is synthesized)
ctccgccggaccctcctttggatattcctcgtgtctccgattctgagacagagggggaagacggtggggcctccccacctgccccgcagaagatgcagttctttggccgcctggtcaata

SEQ ID NO: 661192 - DNA, 120 bp, Artificial Sequence
  ENSG00000184381_2 (sequence is synthesized)
ccttcagtggcgtcaccaacttgttctctaacccattccgggtgaaggaggtggctgtggccgactacacctcgagtgaccgagttcgggaggaagggcagctgattctgttccagaaca

SEQ ID NO: 661193 - DNA, 120 bp, Artificial Sequence
  ENSG00000184381_3 (sequence is synthesized)
ctcccaaccgcacctgggactgcgtcctggtcaaccccaggaactcacagagtggattccgactcttccagctggagttggaggctgacgccctagtgaatttccatcagtattcttccc

SEQ ID NO: 661194 - DNA, 120 bp, Artificial Sequence
  ENSG00000184381_4 (sequence is synthesized)
agctgctacccttctatgagagctcccctcaggtcctgcacactgaggtcctgcagcacctgaccgacctcatccgtaaccaccccagctggtcagtggcccacctggctgtggagctag

SEQ ID NO: 661195 - DNA, 120 bp, Artificial Sequence
  ENSG00000184381_5 (sequence is synthesized)
ggatccgcgagtgcttccatcacagccgtatcatcagctgtgccaattgcgcggagaacgaggagggctgcacacccctgcacctggcctgccgcaagggtgatggggagatcctggtgg

SEQ ID NO: 661196 - DNA, 120 bp, Artificial Sequence
  ENSG00000184381_6 (sequence is synthesized)
agctggtgcagtactgccacactcagatggatgtcaccgactacaagggagagaccgtcttccattatgctgtccagggtgacaattctcaggtgctgcagctccttggaaggaacgcag

SEQ ID NO: 661197 - DNA, 120 bp, Artificial Sequence
  ENSG00000184381_7 (sequence is synthesized)
tggctggcctgaaccaggtgaataaccaagggctgaccccgctgcacctggcctgccagctggggaagcaggagatggtccgcgtgctgctgctgtgcaatgctcggtgcaacatcatgg

SEQ ID NO: 661198 - DNA, 120 bp, Artificial Sequence
  ENSG00000184381_8 (sequence is synthesized)
gccccaacggctaccccatccactcggccatgaagttctctcagaaggggtgtgcggagatgatcatcagcatggacagcagccagatccacagcaaagacccccgttacggagccagcc

SEQ ID NO: 661199 - DNA, 120 bp, Artificial Sequence
  ENSG00000184381_9 (sequence is synthesized)
ccctccactgggccaagaacgcagagatggcccgcatgctgctgaaacggggctgcaacgtgaacagcaccagctccgcggggaacacggccctgcacgtggcggtgatgcgcaaccgct

SEQ ID NO: 661200 - DNA, 120 bp, Artificial Sequence
  ENSG00000184381_10 (sequence is synthesized)
tcgactgtgccatagtgctgctgacccacggggccaacgcggatgcccgcggagagcacggcaacaccccgctgcacctggccatgtcgaaagacaacgtggagatgatcaaggccctca

SEQ ID NO: 661201 - DNA, 120 bp, Artificial Sequence
  ENSG00000184381_11 (sequence is synthesized)
tcgtgttcggagcagaagtggacaccccgaatgactttggggagactcctacattcctagcctccaaaatcggcagacttgtcaccaggaaggcgatcttgactctgctgagaaccgtgg

SEQ ID NO: 661202 - DNA, 120 bp, Artificial Sequence
  ENSG00000184381_12 (sequence is synthesized)
gggccgaatactgcttcccacccatccacggggtccccgcggagcagggctctgcagcgccacatcatcccttctccctggaaagagctcagcccccaccgatcagcctaaacaacctag

SEQ ID NO: 661203 - DNA, 120 bp, Artificial Sequence
  ENSG00000184381_13 (sequence is synthesized)
atgagggacgagaagcggacccacgaccacctgctgtgcctggatggaggaggagtgaaaggcctcatcatcatccagctcctcatcgccatcgagaaggcctcgggtgtggccaccaag

SEQ ID NO: 661204 - DNA, 120 bp, Artificial Sequence
  ENSG00000184381_14 (sequence is synthesized)
gacctgtttgactgggtggcgggcaccagcactggaggcatcctggccctggccattctgcacagtaagtccatggcctacatgcgcggcatgtactttcgcatgaaggatgaggtgttc

SEQ ID NO: 661205 - DNA, 120 bp, Artificial Sequence
  ENSG00000184381_15 (sequence is synthesized)
cggggctccaggccctacgagtcggggcccctggaggagttcctgaagcgggagtttggggagcacaccaagatgacggacgtcaggaaacccaaggtgatgctgacagggacactgtct

SEQ ID NO: 661206 - DNA, 120 bp, Artificial Sequence
  ENSG00000184381_16 (sequence is synthesized)
gaccggcagccggctgaactccacctcttccggaactacgatgctccagaaactgtccgggagcctcgtttcaaccagaacgttaacctcaggcctccagctcagccctcagaccagctg

SEQ ID NO: 661207 - DNA, 120 bp, Artificial Sequence
  ENSG00000184381_17 (sequence is synthesized)
gtgtggcgggcggcccgaagcagcggggcagctcctacttacttccgacccaatgggcgcttcctggacggtgggctgctggccaacaaccccacgctggatgccatgaccgagatccat

SEQ ID NO: 661208 - DNA, 120 bp, Artificial Sequence
  ENSG00000184381_18 (sequence is synthesized)
gagtacaatcaggacctgatccgcaagggtcaggccaacaaggtgaagaaactctccatcgttgtctccctggggacagggaggtccccacaagtgcctgtgacctgtgtggatgtcttc

SEQ ID NO: 661209 - DNA, 120 bp, Artificial Sequence
  ENSG00000184381_19 (sequence is synthesized)
cgtcccagcaacccctgggagctggccaagactgtttttggggccaaggaactgggcaagatggtggtggactgttgcacggatccagacgggcgggctgtggaccgggcacgggcctgg

SEQ ID NO: 661210 - DNA, 120 bp, Artificial Sequence
  ENSG00000184381_20 (sequence is synthesized)
tgcgagatggtcggcatccagtacttcagattgaacccccagctggggacggacatcatgctggatgaggtcagtgacacagtgctggtcaacgccctctgggagaccgaggtctacatc

SEQ ID NO: 661211 - DNA, 120 bp, Artificial Sequence
  ENSG00000184381_21 (sequence is synthesized)
tatgagcaccgcgaggagttccagaagctcatccagctgctgctctcaccctgagggtccccagcctctcaccggccccagctgacctcgtccattcagcccctgccaggccaagcccag

SEQ ID NO: 661212 - DNA, 120 bp, Artificial Sequence
  ENSG00000184381_22 (sequence is synthesized)
ccactgccctcccgggcagatctgggcccaggcacctctgagtccatagaccaggcctgggagaatgccaagctgcctgcccgaggctggtcctgaaggcctgtctcccactaaccccgc

SEQ ID NO: 661213 - DNA, 120 bp, Artificial Sequence
  ENSG00000184381_23 (sequence is synthesized)
cttccagcactttctgtcattccaggctgggaaagtctagagccccctttggcccctttccctgactgtcaaggacaactgactcccccatcagctcaaacattaagggtacccgggcac

SEQ ID NO: 661214 - DNA, 120 bp, Artificial Sequence
  ENSG00000184381_24 (sequence is synthesized)
aaccgtacccctgcccccagccccagcctccctgagggcctgccgggctgcctctgccccagcccccagcaagggcactcccaggcttcctggtgggtgcagcccactccctctgccctc

SEQ ID NO: 661215 - DNA, 120 bp, Artificial Sequence
  ENSG00000184381_25 (sequence is synthesized)
tgctccgttccctgggggctgggactaaagaaatgggtgtcccccaccccatcagctgggaaagcccaggccgcaggagtgggatgcccgttggactttgcccctcacactggcccagcc

SEQ ID NO: 661216 - DNA, 120 bp, Artificial Sequence
  ENSG00000184381_26 (sequence is synthesized)
cctcacactgccccaccccgagaaccctcagctctcaaaggtcactcctgggagtttcttcttcccaatggaagtggcttaagagccaaaactgaaataaatcatttggattcaagttca

SEQ ID NO: 661217 - DNA, 120 bp, Artificial Sequence
  ENSG00000184381_27 (sequence is synthesized)
cacctgggactgcgtcctggtcaaccccaggaactcacagagtggattccgacgcctgggctccagtccctgtgtcctgagccccatgaggctgttactggtgctgctcgtctgcccatc

SEQ ID NO: 661218 - DNA, 120 bp, Artificial Sequence
  ENSG00000184381_28 (sequence is synthesized)
ctctccagtaacagccacctgaacactgcaattcctgggtttccatcattccttccagcctgactcttccagctggagttggaggctgacgccctagtgaatttccatcagtattcttcc

SEQ ID NO: 661219 - DNA, 120 bp, Artificial Sequence
  ENSG00000184381_29 (sequence is synthesized)
aggaactcacagagtggattccgatcacatgcccagtagttaactgttaatcaacgcactctctgtggaacaacaggctggtcccgttgagccaacactctctgggcactgccttcacta

SEQ ID NO: 661220 - DNA, 120 bp, Artificial Sequence
  ENSG00000184381_30 (sequence is synthesized)
gcgggcggcggccacggagcgcgcgaagccctgcagcgcctcgcacttgccgcgcagcgcgtcgagctccaggcgcatggcggcgttctcgcgcgccagcttgtccacctcgcgctccag

SEQ ID NO: 661221 - DNA, 120 bp, Artificial Sequence
  ENSG00000184381_31 (sequence is synthesized)
ttgtccacctcgcgctccagctccgacttctgcttctgcagctcctccttctggcacacgcgcttcacgcggcagctggcggcgtagccacggtttttgagtgtgcggcgccgctgcttg

SEQ ID NO: 661222 - DNA, 120 bp, Artificial Sequence
  ENSG00000184381_32 (sequence is synthesized)
agccgtgtcacctcctcggcggagagcccgcgcagatgccggttcagctcgcgcaccgacagccccatcagcgcctcgtccgacagagggggaagacggtggggcctccccacctgcccc

SEQ ID NO: 661223 - DNA, 120 bp, Artificial Sequence
  ENSG00000184381_33 (sequence is synthesized)
agtgacctcgcgggtgggcggggcctgggggtccgttccccaacttcctcggcgctccggactcccaagtctccgccggaccctcctttggatattcctcgtgtctccgattctgagagg

SEQ ID NO: 661224 - DNA, 120 bp, Artificial Sequence
  ENSG00000184381_34 (sequence is synthesized)
atgccttggggtttcaagaggaagagattgaggggaacctgggagctggctgggcagggtggggagcccttcccagagcagtgggcccccctttccactccagcccatttctctcctgtg

SEQ ID NO: 661225 - DNA, 120 bp, Artificial Sequence
  ENSG00000184381_35 (sequence is synthesized)
gcctgtggctcagctttctcctgggacagagtccttcctgtggggaagggacagatgacagggggagtggggggatgagggcgtggccgtgggcgaggcacagcccaggtttgatctagg

SEQ ID NO: 661226 - DNA, 120 bp, Artificial Sequence
  ENSG00000184381_36 (sequence is synthesized)
gacctctggggtagcagggcttggggacccacctgaccacagcatgccctgctctgtgcctcacagaactacaggatctcatgcacatctcacgggcccggaagccagcgttcatcctgg

SEQ ID NO: 661227 - DNA, 120 bp, Artificial Sequence
  ENSG00000184381_37 (sequence is synthesized)
aaactgaacagaaacctgatacaggtcacatcagatataattacattcaaatcagcccaactagctgagtggcgggaatgctcttgagctcaaataaaccagaaagtccgagtttccgag

SEQ ID NO: 661228 - DNA, 120 bp, Artificial Sequence
  ENSG00000184381_38 (sequence is synthesized)
ggagagcggtggtcaggccatcacgtggcccgaggcccgtttgtttgcggaagtaggaggaagtagaagtgctgagtaagccgagacagagggggaagacggtggggcctccccacctgc

SEQ ID NO: 661229 - DNA, 90 bp, Artificial Sequence
  ENSG00000184381_39 (sequence is synthesized)
cacggcttgtcctcccatctcagccgcctgagtgcctgggactactagcatgtgccaacacatgtattttttgtagagatggggtttcac

SEQ ID NO: 661230 - DNA, 120 bp, Artificial Sequence
  ENSG00000184381_40 (sequence is synthesized)
tgagctgaggcgatcctcccgccttggtttcccattacaggcatcagccaccatgcccagcctagtttgtgctttttatttctcgttcataaacccctttgctgcccccaagcagcacac

SEQ ID NO: 661231 - DNA, 120 bp, Artificial Sequence
  ENSG00000184381_41 (sequence is synthesized)
gattctcctgtgtcgagctggaaagctctctagatctgccttttacattgaggtcttttatcaacctggaattgatttttgtatgagggtgaaatccaagatccaatttaatgttttcca

SEQ ID NO: 661232 - DNA, 120 bp, Artificial Sequence
  ENSG00000184381_42 (sequence is synthesized)
cgtgattggccaatttttcccagccccatctgtgaagtctgtccttccctccgcttcctcagcagtgggtcaagcatccctctgctcttggatctgctccaggctgtgttttgttccact

SEQ ID NO: 661233 - DNA, 120 bp, Artificial Sequence
  ENSG00000184381_43 (sequence is synthesized)
ggttggaaagctgtctctgtgcccggaccacagagcataaaaaactaccgctgtgtggtgagtcctggtgtctgggtggcagatcctccaccttggccttcttcaaaaacatcatggcta

SEQ ID NO: 661234 - DNA, 120 bp, Artificial Sequence
  ENSG00000184381_44 (sequence is synthesized)
aaaaacatcatggctattcttgggggcagtagagagaagtggatacaagcatagaccctgaagtttctacctcttctcaaaaataggaatatgccaggcatggtggctcaagcctgtaat

SEQ ID NO: 661235 - DNA, 120 bp, Artificial Sequence
  ENSG00000184381_45 (sequence is synthesized)
tctagctctcactccctaatccgtccttcttagctgcgcacacaccacacgccccctcccctgcaccctgtccccggcctctctcagccactcttctgcttcccttgttcactgtggagc

SEQ ID NO: 661236 - DNA, 120 bp, Artificial Sequence
  ENSG00000184381_46 (sequence is synthesized)
cgtgtgccctggggagggggagacaccgcttcgcagccctcggttctgctttgctgcttctagactctgcacagtggtggggggctgtcagagttggggtcacgcgggctgctgcaccag

SEQ ID NO: 661237 - DNA, 120 bp, Artificial Sequence
  ENSG00000184381_47 (sequence is synthesized)
gcacctggggactgggctgcttgtcaggaggggcagctagtcagttgggtggacgtcaggcaggccttggacacaaaggaagacatggacagagtggatggtgggcctgatcccggaggc

SEQ ID NO: 661238 - DNA, 120 bp, Artificial Sequence
  ENSG00000184381_48 (sequence is synthesized)
atgagttgcttgaggtcacaccgatgaggttgaagctggaatctgacaccagagcctgtgtgattgtcctgatgtgtaagacagagggggaagacggtggggcctccccacctgccccgc

SEQ ID NO: 661239 - DNA, 120 bp, Artificial Sequence
  ENSG00000184381_49 (sequence is synthesized)
aggaaacagtgtggatcacaaggaggtgattgagagctactctgcgtctggaagagtgaggaggagcctgtgtggcagaacaaaatggataaggtcgttccagccgtgcagaagtgtgga

SEQ ID NO: 661240 - DNA, 120 bp, Artificial Sequence
  ENSG00000184381_50 (sequence is synthesized)
tgggtttgcttaggcctcggtaaacccgcttcctcctgccacctcctgcgttcaggcgctctgcaggctgttctacgggagccctgcgtgtggccgctgcatctccccgcctctgacccc

SEQ ID NO: 661241 - DNA, 120 bp, Artificial Sequence
  ENSG00000184381_51 (sequence is synthesized)
tagccagtctaactctcctattgcgtgcggatggggagcctgggacccagagtgggaggcatcacccaagatcatccagcaaatcggcagcagagcttgttcggaagcaaataagagagg

SEQ ID NO: 661242 - DNA, 120 bp, Artificial Sequence
  ENSG00000184381_52 (sequence is synthesized)
accaccacctctccctggcttcttcccttggaagccagcagagctgacctccagggtctgcaggttcatgacgtcttctggaggcataaggagagaggtgactcttgagggactgacaac

SEQ ID NO: 661243 - DNA, 120 bp, Artificial Sequence
  ENSG00000184381_53 (sequence is synthesized)
tgccttgtccagtcagcagccacaaccctccaacgtccccctccctggccccaccagtccactccagagacatcctgtagaaggcccacccgctggcatgggctcctttctggctgctga

SEQ ID NO: 661244 - DNA, 120 bp, Artificial Sequence
  ENSG00000184381_54 (sequence is synthesized)
tttccagacctgggatcaggacgagggatgtctcctttcatccatggacttaaaccccgaggaacgtcctgactcagccttttgactaaatgaccttgggtgaattatggaccctcttag

SEQ ID NO: 661245 - DNA, 120 bp, Artificial Sequence
  ENSG00000184381_55 (sequence is synthesized)
agcctcacctgtcaatagggaataagaattcttaggccccaggtggttattgcagcatcggctccgatgcaagaagaagcactttgtctgaagaggacacgcaaggaactacaggatctc

SEQ ID NO: 661246 - DNA, 120 bp, Artificial Sequence
  ENSG00000184381_56 (sequence is synthesized)
ggaaacagtgtggatcacaaggaggtgattgagagctactctgcgtctggaagagtgaggaggagcctgtgtggcagaacaaaatggataagactcttccagctggagttggaggctgac

SEQ ID NO: 661247 - DNA, 120 bp, Artificial Sequence
  ENSG00000184381_57 (sequence is synthesized)
tcctggtggagctggtgcagtactgccacactcagatggatgtcaccgactacaagggagagaccgtcttccattatgctgtccagggtgacaattctcagctccttggaaggaacgcag

SEQ ID NO: 661248 - DNA, 120 bp, Artificial Sequence
  ENSG00000184381_58 (sequence is synthesized)
ttctgctaagaatgctccttcccaactccttggctggacacacggctcctgctctgtgggcctgtcctgttcccactcagagcctcagcaccccccatgtggccaagacacagcccctct

SEQ ID NO: 661249 - DNA, 120 bp, Artificial Sequence
  ENSG00000184381_59 (sequence is synthesized)
tgccttaggttgccgtgggtctgtttccacatctgtttcccctccagactgcagggctcctgagggacagggcctggggccaagtctcctctgcgttcctgatgcctggtggtgtgccac

SEQ ID NO: 661250 - DNA, 120 bp, Artificial Sequence
  ENSG00000184381_60 (sequence is synthesized)
atggaggcctgtcgactcagccgctaccctttcccccactcatcatccctgaaagggcactgctgagacctctgcccctctgattgcacagctgggacagtccctgcagtcccaggaagg

SEQ ID NO: 661251 - DNA, 120 bp, Artificial Sequence
  ENSG00000184381_61 (sequence is synthesized)
ggttttgcccgagccgctctgctgctgtgtggctcagcctgactcgaaagagcctggggctccccaggctggggctccgagagtgcagggcagggccgggcggggtgcgggccgggcggg

SEQ ID NO: 661252 - DNA, 120 bp, Artificial Sequence
  ENSG00000184381_62 (sequence is synthesized)
acccaagttggaccaatctgacactcctccagcactgccggagagagcctgttttgcggggatggtgcggggagaagcccacctatcccgaacagagggtgatgctgacagggacactgt

SEQ ID NO: 661253 - DNA, 120 bp, Artificial Sequence
  ENSG00000184381_63 (sequence is synthesized)
ccttccagcctgatcacatgcccagtagttaactgttaatcaacgcactctctgtggaacaacaggctggtcccgttgagccaacactctctgggcactgccttcactagactctggctg

SEQ ID NO: 661254 - DNA, 120 bp, Artificial Sequence
  ENSG00000184381_64 (sequence is synthesized)
ccaggtgccaggtctgtgggagctgatttctacccaccatgaaattgaattttcccaacccccacaagctgtgccaattgcgcggagaacgaggagggctgcacacccctgcacctggcc

SEQ ID NO: 661255 - DNA, 120 bp, Artificial Sequence
  ENSG00000184384_0 (sequence is synthesized)
actctctctctttctctccctctcctatcggagcacaatgaaagcctgtgtatcgccgtgactccgggcgcgagccagtgtcagcaaagcggctaacaacagacgagaaagagaaaggaa

SEQ ID NO: 661256 - DNA, 120 bp, Artificial Sequence
  ENSG00000184384_1 (sequence is synthesized)
aatacaagctactttttttttccatctataaagcggagcaaatacaggagatagaaccagattgcttattgcgagtccagaccctcagatccactggccggggatggaatgtacaaaagt

SEQ ID NO: 661257 - DNA, 120 bp, Artificial Sequence
  ENSG00000184384_2 (sequence is synthesized)
ggacagaaaagtggctggacatgactcggtgcaatttgctggaagtttgtaagtttgaccatcgtttgtaaattactctcggaagagtttgtctctcttgatactgtattagaatagagc

SEQ ID NO: 661258 - DNA, 120 bp, Artificial Sequence
  ENSG00000184384_3 (sequence is synthesized)
cgggggtgaggaatagaaacgtaagcgggaaagaaaaaaatgtgttgaaggatctctctcagtggctagcgacttaagattgcttttcatttaaggctaggaaaccttagagggagtgag

SEQ ID NO: 661259 - DNA, 120 bp, Artificial Sequence
  ENSG00000184384_4 (sequence is synthesized)
gattttaccggtgattggattagctgaagaaaaaagcatggtccaaaagtccaattactgacattgttaacagttgaaaagctgtctccctcttttgggagaagacaacatcctacagta

SEQ ID NO: 661260 - DNA, 120 bp, Artificial Sequence
  ENSG00000184384_5 (sequence is synthesized)
ccccaaagaggagaaaacaccggagcgaaaggaaagggaggaaaaattaaaagccaaaagacagtctcccttgatttttgcacattttgaacagtgacttaaacatcttctgaaacagca

SEQ ID NO: 661261 - DNA, 120 bp, Artificial Sequence
  ENSG00000184384_6 (sequence is synthesized)
ctgttttgttttgttttggttttttatttaacctgaggaaaagtcaaggctgctggttacatagacatggtagaaatgtgtttctctgcagaaacatccccataaagaattgtcggaaac

SEQ ID NO: 661262 - DNA, 120 bp, Artificial Sequence
  ENSG00000184384_7 (sequence is synthesized)
aactaggtgagggggagtcctctctattaatacctctctcaataccttttgctgtgtgtttctgtctcttgctggacaatccctgaattcttgatctaacccccagatcgtgtgtttaca

SEQ ID NO: 661263 - DNA, 120 bp, Artificial Sequence
  ENSG00000184384_8 (sequence is synthesized)
aagtacctagtggctcttgtcagcttggtggaggaaaaaaaatccaccaactctgtccaacttctccagagctgtcaaatgcaattagagtaagttaatcagggtttgtttccaacttat

SEQ ID NO: 661264 - DNA, 120 bp, Artificial Sequence
  ENSG00000184384_9 (sequence is synthesized)
cctccccccagttggtttctattctttctccccaccctctttttactaactcccctcccccacaacttctccacggctcccccacaacctctgaagacctctattcatgtggccctgaac

SEQ ID NO: 661265 - DNA, 120 bp, Artificial Sequence
  ENSG00000184384_10 (sequence is synthesized)
actgagctcacattgtcaaaaacagacttgcctgcaatagccagcagtagcctctttccacctcaccatcccagaggcagcaatcattgtgtccggtaagatgggggacacagcgccccc

SEQ ID NO: 661266 - DNA, 120 bp, Artificial Sequence
  ENSG00000184384_11 (sequence is synthesized)
gcaggcccccgcaggagggctagggggggcctctggggcggggctccttggagggggctcagtcaccccgagagtgcacagtgctatcgtggagcgcctccgggctcggatcgctgtctg

SEQ ID NO: 661267 - DNA, 120 bp, Artificial Sequence
  ENSG00000184384_12 (sequence is synthesized)
ccgccaacaccacctgagctgtgaaggacgatatgaacgaggtagggccgagagctcagaccgggaaagagaaagcaccttgcagctcctgagccttgtacagcatggccagggggcaag

SEQ ID NO: 661268 - DNA, 120 bp, Artificial Sequence
  ENSG00000184384_13 (sequence is synthesized)
gaaagctggcaaacacaccaaggccaccgccactgctgccaccactacagcccctccaccgccccctgctgcccctcctgcggcctcccaagcagcagcaacagcagccccaccgccccc

SEQ ID NO: 661269 - DNA, 120 bp, Artificial Sequence
  ENSG00000184384_14 (sequence is synthesized)
accagactatcaccatcaccaccagcagcacctgctgaacagtagcaataatggtggcagtggtgggataaacggagagcagcagccgcccgcttcaaccccaggggaccagaggaactc

SEQ ID NO: 661270 - DNA, 120 bp, Artificial Sequence
  ENSG00000184384_15 (sequence is synthesized)
agccctgattgcgctccagggttccttgaaaagaaaacaggtagttaacctatctcctgccaacagcaagcgacccaatggctttgtggacaactcatttcttgatatcaaaagaattcg

SEQ ID NO: 661271 - DNA, 120 bp, Artificial Sequence
  ENSG00000184384_16 (sequence is synthesized)
tgttggggagaatctctctgcaggacaaggtggcctccaaataaacaatggacaaagtcagattatgtcagggaccttgcctatgagccaagcacccctgcgaaagactaacactctgcc

SEQ ID NO: 661272 - DNA, 120 bp, Artificial Sequence
  ENSG00000184384_17 (sequence is synthesized)
atcccatacacattctcctggcaatggcctgtttaacatgggcttaaaggaggtaaagaaggagccaggagagactctgtcttgcagtaagcacatggatggccaaatgacccaagagaa

SEQ ID NO: 661273 - DNA, 120 bp, Artificial Sequence
  ENSG00000184384_18 (sequence is synthesized)
tatttttcctaataggtacggagacgaccctggagaacaactgatggatcctgagctgcaggaactgttcaatgaactgaccaacatatctgtgcctcccatgagtgaccttgaactgga

SEQ ID NO: 661274 - DNA, 120 bp, Artificial Sequence
  ENSG00000184384_19 (sequence is synthesized)
gaacatgatcaatgccaccataaagcaggatgacccatttaacattgacttgggtcagcaaagccagaggagcacacctaggccctccttacccatggagaaaatagtgatcaaaagtga

SEQ ID NO: 661275 - DNA, 120 bp, Artificial Sequence
  ENSG00000184384_20 (sequence is synthesized)
atactcaccgggcttgactcagggcccctcaggctctcctcagctgaggcccccatcagctggccccgcattctccatggccaactctgccctctccacttcgtctccaatcccttcagt

SEQ ID NO: 661276 - DNA, 120 bp, Artificial Sequence
  ENSG00000184384_21 (sequence is synthesized)
ccctcagagccaggctcagcctcagacaggctccggagcaagccgggccttgccaagctggcaggaagtatcccatgcccagcagctcaaacagatagctgctaatcgtcagcagcatgc

SEQ ID NO: 661277 - DNA, 120 bp, Artificial Sequence
  ENSG00000184384_22 (sequence is synthesized)
ccggatgcagcagcaccagcagcagcaccagcctaccaactggtcagccttgccctcttctgctggaccatcaccaggtccatttgggcaggagaaaatccccagcccttcttttggtca

SEQ ID NO: 661278 - DNA, 120 bp, Artificial Sequence
  ENSG00000184384_23 (sequence is synthesized)
gcagacattcagcccacagagctcccccatgcctggggtagctggcggcagcggccagtcgaaagtaatggctaactacatgtacaaggccggcccctcagcccagggtgggcacctaga

SEQ ID NO: 661279 - DNA, 120 bp, Artificial Sequence
  ENSG00000184384_24 (sequence is synthesized)
tgtcctcatgcagcaaaagcctcaggatctcagtcgaagttttattaacaacccgcacccagccatggagccccgtcagggcaacaccaagcctttgtttcattttaactcagatcaagc

SEQ ID NO: 661280 - DNA, 120 bp, Artificial Sequence
  ENSG00000184384_25 (sequence is synthesized)
ttaactcagatcaagcgaaccagcagatgccttctgttttgccttcccagaacaagccttctctcctacactacacccaacagcaacagcagcaacagcagcagcagcagcagcagcagc

SEQ ID NO: 661281 - DNA, 120 bp, Artificial Sequence
  ENSG00000184384_26 (sequence is synthesized)
acagcagcagcagcagcaacagcaacagcaacagcaacagcagagttcaatttcagctcaacaacagcaacagcagcagagctcaatttcagcccaacagcagcagcagcagcaacaaca

SEQ ID NO: 661282 - DNA, 120 bp, Artificial Sequence
  ENSG00000184384_27 (sequence is synthesized)
gcagcagcagcagcaacaacaacagcaacaacagcagcagcagcagcagcaacaaccatcttctcagcctgcccaatctctaccaagccagcctttgctaaggtcacctttgccacttca

SEQ ID NO: 661283 - DNA, 120 bp, Artificial Sequence
  ENSG00000184384_28 (sequence is synthesized)
gcaaaagctcctacttcagcaaatgcagaatcagcccattgcaggaatgggataccaagtctcccaacaacagagacaggatcaacactctgtggtaggccagaacacaggccccagtcc

SEQ ID NO: 661284 - DNA, 120 bp, Artificial Sequence
  ENSG00000184384_29 (sequence is synthesized)
acatgaactcccagcaatcactgttgaatcagcaattgatgggaaagaagcagactctacagaggcagatcatggagcagaaacagcaacttcttctccagcagcagatgctggctgacg

SEQ ID NO: 661285 - DNA, 120 bp, Artificial Sequence
  ENSG00000184384_30 (sequence is synthesized)
cggagaaaattgctccacaagatcagataaaccgacatttgtcaaggccacctccagattataaagaccaaagaagaaatgtgggcaatatgcaaccaactgctcagtattctggtggct

SEQ ID NO: 661286 - DNA, 120 bp, Artificial Sequence
  ENSG00000184384_31 (sequence is synthesized)
catccacaataagcttaaactctaaccaggctttggcaaacccagtttcaacacacaccattttaactcccaattccagcctcctgtctacttctcacgggacaagaatgccatcattat

SEQ ID NO: 661287 - DNA, 120 bp, Artificial Sequence
  ENSG00000184384_32 (sequence is synthesized)
ctacagcagttcagaatatggggatgtatggaaatctgccttgtaatcaacctaacacatacagtgtcacttcaggaatgaatcaattgacccaacagagaaacccaaagcaattgttag

SEQ ID NO: 661288 - DNA, 120 bp, Artificial Sequence
  ENSG00000184384_33 (sequence is synthesized)
caaatcaaaacaaccctatgatgccacggccacctaccttagggccaagtaataataacaatgtagccacttttggagctggatctgttggtaattcacaacaattgagaccaaatttaa

SEQ ID NO: 661289 - DNA, 120 bp, Artificial Sequence
  ENSG00000184384_34 (sequence is synthesized)
cccatagtatggcaagcatgccaccacagagaacatcaaacgtaatgatcacatccaacacaactgcaccaaactgggcctctcaagaaggaacaagcaaacagcaagaagccctgacgt

SEQ ID NO: 661290 - DNA, 120 bp, Artificial Sequence
  ENSG00000184384_35 (sequence is synthesized)
ctgcaggagtccgcttccccacaggtacacctgcagcctataccccaaatcagtcactgcaacaggcagtaggtagccagcaattttcccagagggcagtggctcctcctaaccagttaa

SEQ ID NO: 661291 - DNA, 120 bp, Artificial Sequence
  ENSG00000184384_36 (sequence is synthesized)
caccagcagtgcaaatgagacccatgaaccaaatgagccaaacactaaatgggcaaaccatgggtcccctcaggggtctgaatctcagacccaatcagctaagcacacagattttgccta

SEQ ID NO: 661292 - DNA, 120 bp, Artificial Sequence
  ENSG00000184384_37 (sequence is synthesized)
atttgaatcagtcaggaacagggttgaatcagtcgaggacgggcatcaaccagccaccatccctgacgcccagcaattttccttcacccaaccaaagttccagggcttttcaaggaactg

SEQ ID NO: 661293 - DNA, 120 bp, Artificial Sequence
  ENSG00000184384_38 (sequence is synthesized)
accacagcagtgacttagcttttgacttcctcagccaacaaaatgataacatgggccctgccctaaacagtgatgctgatttcattgattctttattgaagacagagcctggtaatgatg

SEQ ID NO: 661294 - DNA, 120 bp, Artificial Sequence
  ENSG00000184384_39 (sequence is synthesized)
actggatgaaagacatcaatcttgatgaaatcttggggaacaattcctaaagaagaaagggaagacaatttacaaactccaagcactaaaaggcagtatattacagaaactctgtagagg

SEQ ID NO: 661295 - DNA, 120 bp, Artificial Sequence
  ENSG00000184384_40 (sequence is synthesized)
ctgaactgttgatgttcaggtggactacatgaagataacatgcttaaaaatggaaagcagaaagtaactgcagtgatgaacattttggtccaaattcttgttttaaatcttacacctgaa

SEQ ID NO: 661296 - DNA, 120 bp, Artificial Sequence
  ENSG00000184384_41 (sequence is synthesized)
agtaaaatattgggatcacttttccctgtctaaactccaggatacagtatccaatttatccaaacagaactgtggtgtcaatgtgtaattaattgtgtaaaatagccttcccaagtttct

SEQ ID NO: 661297 - DNA, 120 bp, Artificial Sequence
  ENSG00000184384_42 (sequence is synthesized)
ttttccctggaaaataaaaaaggtaatagaacttgtagtttatttaaaccccatgtcatgaggaggtactagttccaagcaacaaactccttaatttgctctaatagataggtatggttt

SEQ ID NO: 661298 - DNA, 120 bp, Artificial Sequence
  ENSG00000184384_43 (sequence is synthesized)
aatctttccattgtgtcttttcatttaattttcctgaagcttgcaggatagattgaaatgttataggtttgtttggagtaaccaaacagtatgcaaattaagaaaaagccagagaaccta

SEQ ID NO: 661299 - DNA, 120 bp, Artificial Sequence
  ENSG00000184384_44 (sequence is synthesized)
gaaaacatccagtggattacagaatttcttccccatattcactcctcacttttacaattttcccacaatcctctacttcagtgggatgctgtgtctagtgattaaacaaaaatatagagc

SEQ ID NO: 661300 - DNA, 120 bp, Artificial Sequence
  ENSG00000184384_45 (sequence is synthesized)
tgtgcaatttgattttggcttccacaacgaatatctgaatccattccaaatgaaattttagatataacaaagacttgtcctaatcatactgaaatattggtgcacacctctctgcattag

SEQ ID NO: 661301 - DNA, 120 bp, Artificial Sequence
  ENSG00000184384_46 (sequence is synthesized)
atttcacttttttaaaaaacccagtggacattgctataaataagatttatttggctacaaataacctgggatgttgcttattatgattgatgcctgctggtttgttcccaagctgagtga

SEQ ID NO: 661302 - DNA, 120 bp, Artificial Sequence
  ENSG00000184384_47 (sequence is synthesized)
aattgaacctcgtcctccctactcattttgatgactgaggctggtttataagaaaaggaagtttggagaagaaaaccgagattagaaaatatcatgttttggttggagataagaaccagg

SEQ ID NO: 661303 - DNA, 120 bp, Artificial Sequence
  ENSG00000184384_48 (sequence is synthesized)
gatggcaagtaccagtgtgtacaaatgtatttcacggagtttgaaggaacgcataatcaagagggaaaacaatttgtccttcattggacgtattatttggatttgggtgagcaacaaaat

SEQ ID NO: 661304 - DNA, 120 bp, Artificial Sequence
  ENSG00000184384_49 (sequence is synthesized)
ggaatgtggtctgttaggagcattctgtttgttcttttgtccctgatgtgatgaatcattgccacatgctagatggactcttcatatccaggttttgtccctcagggctgagcactgtat

SEQ ID NO: 661305 - DNA, 120 bp, Artificial Sequence
  ENSG00000184384_50 (sequence is synthesized)
taaagagtttttgttgagtcatttaaccttagtgtccacatccagatcagctgtaaaatggggaagacgtgtgctgatttggaatgaatgcaaaatatcactatcattttcctaattaca

SEQ ID NO: 661306 - DNA, 120 bp, Artificial Sequence
  ENSG00000184384_51 (sequence is synthesized)
gaggagcaaaggttatcttcagccctttcagttctatgctcacatattcaaatatcaaatgtaatttagctgaagttatttaataatcaagtctttcaatatctgttcaaagaaaaagaa

SEQ ID NO: 661307 - DNA, 120 bp, Artificial Sequence
  ENSG00000184384_52 (sequence is synthesized)
cacactttgaaaattctgcaaagctgtctcccagtctttaaaatgtctggaagcactctccttctttacaataccaacatcactggcccagaatcttccctgtgctagtttgtaaatata

SEQ ID NO: 661308 - DNA, 120 bp, Artificial Sequence
  ENSG00000184384_53 (sequence is synthesized)
tccctgtgctagtttgtaaatataaataaattacttgttttgtaaacttttgtaaagaatattttggtagaaatacttcaaacatattctttgggttatatttatacatatgtgaaataa

SEQ ID NO: 661309 - DNA, 120 bp, Artificial Sequence
  ENSG00000184384_54 (sequence is synthesized)
tatacaaaaagtaaattgctaccttttgtatgctaatatgcaaagttttgtataatatgatggtttatttttagctctacacttaaaccataggtggttgagtgggaacttttgaaaact

SEQ ID NO: 661310 - DNA, 120 bp, Artificial Sequence
  ENSG00000184384_55 (sequence is synthesized)
atcaagaggcttgttagacaaatttatattctgaaacctcaataagaaagcattccaggtttcaatccttgttttttgtcctgctcccaaattcttttttaaacccatagttcttgtgtc

SEQ ID NO: 661311 - DNA, 120 bp, Artificial Sequence
  ENSG00000184384_56 (sequence is synthesized)
ttatttgattcttctgctgtgcacattgtattggtccttgttgcatgtagtctactgtgtgttttccgattttataaggcagcatttctccatacaaaaagaaaaaaaatgatgtacata

SEQ ID NO: 661312 - DNA, 120 bp, Artificial Sequence
  ENSG00000184384_57 (sequence is synthesized)
taaacgcttttgttgtatggctcctccatgttactgtatatatctgccagcacttcccagttacactcctgtgagtcagcttatttttaccctaacataaatagtatgttttgtagtagt

SEQ ID NO: 661313 - DNA, 120 bp, Artificial Sequence
  ENSG00000184384_58 (sequence is synthesized)
tatcaaatttaagagataaagcaatcagaatgtttggattttcttctatcttaatgtgaatttcataattaatgtctatttattcagctattcattaaaatacaggattctttgggaaaa

SEQ ID NO: 661314 - DNA, 120 bp, Artificial Sequence
  ENSG00000184388_0 (sequence is synthesized)
gcggatgcggatgcgaatgcgaaggtggcggccgaggtggcggccgaggtggcggctgcggcggccgccgcggatgcagatgcggatgagaccctcggtgactgtgaggggaacccagat

SEQ ID NO: 661315 - DNA, 120 bp, Artificial Sequence
  ENSG00000184388_1 (sequence is synthesized)
tttcagatggcctccctgtacgtgggcgacctgcaccctgaggtgaccgaggcaatgctgtacgagaagttcagtccagctgggcccatcctctccatccgcatctgcagggacaagatc

SEQ ID NO: 661316 - DNA, 120 bp, Artificial Sequence
  ENSG00000184388_2 (sequence is synthesized)
acccgccgctcattgggctacgcgtatgtcaactaccagcaaccggtggacgccaagcgggccctggagaccctgaactttgatgtcataaagggcaggccagtgcgcatcatgtggtcc

SEQ ID NO: 661317 - DNA, 120 bp, Artificial Sequence
  ENSG00000184388_3 (sequence is synthesized)
cagagggacccgtcgctccgcaagagcggggtgggcaacgtcttcatcaagaacctgggcaagaccatcgacaacaaggcgctgtacaacatcttctcggcgttcggcaacatcctctcc

SEQ ID NO: 661318 - DNA, 120 bp, Artificial Sequence
  ENSG00000184388_4 (sequence is synthesized)
tgcaaagtggcctgtgacgaaaaggggcccaagggctacgggttcgtgcacttccaaaagcaggaatctgcggagcgggccatcgatgtgatgaatggcatgttcctgaactaccgcaaa

SEQ ID NO: 661319 - DNA, 120 bp, Artificial Sequence
  ENSG00000184388_5 (sequence is synthesized)
attttcgtcgggagattcaagtcgcataaagaacgagaggccgaaaggggagcctgggccaggcagtccactagtgctgacgtcaaggatttcgaggaagacaccgacgaggaggccacc

SEQ ID NO: 661320 - DNA, 120 bp, Artificial Sequence
  ENSG00000184388_6 (sequence is synthesized)
ttgcgatgaagacatcccaggagctagccagccagcagagccaaaccttggctcacacccggtttacaaccccccacccccagccctcccccgccaacccaccagcagtgtatttattgt

SEQ ID NO: 661321 - DNA, 120 bp, Artificial Sequence
  ENSG00000184388_7 (sequence is synthesized)
attgagagtgcaggtctctctctctctctctctccccttctctctccccgcttcctattttctccctccacctctcctctccttcccttcctctcccccgcccacccccaccaagggcgt

SEQ ID NO: 661322 - DNA, 120 bp, Artificial Sequence
  ENSG00000184388_8 (sequence is synthesized)
tgtgaataatcttactaatctgtgccatttgtaggttaaaggctgcctcttctccctgtggtttggtttaaaaagcattttcattctctctttgtttactgcacaggtggtacaatttca

SEQ ID NO: 661323 - DNA, 120 bp, Artificial Sequence
  ENSG00000184388_9 (sequence is synthesized)
gggaagaaacaagagagtaattgctcccctggtcctactccccagagagaaccacttttacctttttggtgtgctgcttttccaggctctcttctctccctctctctcctttgctcaccc

SEQ ID NO: 661324 - DNA, 120 bp, Artificial Sequence
  ENSG00000184388_10 (sequence is synthesized)
ccaccccgccttcccttttaacacaccgttatagaatggttcatgtatgtggtgtttcttaacctgctttttcagcaactaaaaccaaacaaaaatcaacccattgaacttctttccatg

SEQ ID NO: 661325 - DNA, 120 bp, Artificial Sequence
  ENSG00000184388_11 (sequence is synthesized)
ttatcaacaggcttatgaaatgtcatcttcagtgcctgcagagtgctccagtgtatccgtggaccttaacatttctgtaatcattcccgcattgttggacattcaggtggtgcctagttc

SEQ ID NO: 661326 - DNA, 120 bp, Artificial Sequence
  ENSG00000184388_12 (sequence is synthesized)
tttccctgtgtttaagaccaacattgcgtgctctgtgctttgatgagtgaatccttccttgtcaagccaaatctttgctagcatcccggtggtctccttaactgcggacttgcaagatcc

SEQ ID NO: 661327 - DNA, 120 bp, Artificial Sequence
  ENSG00000184388_13 (sequence is synthesized)
acatatagacattttaaagacttttcctgtgtgttgccaaaaggcccccttcataagcattgtaccgatttgcactcgtgccggccagcgcagctagtaaagagtatgcccgtttcccct

SEQ ID NO: 661328 - DNA, 120 bp, Artificial Sequence
  ENSG00000184388_14 (sequence is synthesized)
gcatagcctcctggtcactgtaattgatcgtgtgtgtgcgtgcgtgcgtgtgtgcatgcgtgtgtgtgtctttgtgtgtgtgtcttggccagcttggcgggctgcaaagggtgtttccct

SEQ ID NO: 661329 - DNA, 120 bp, Artificial Sequence
  ENSG00000184388_15 (sequence is synthesized)
gtcctcagtggttttgctgcaatcaaacactgtttattacccccttcccctgtgcccacttcctgtccttttccctgttgtcagaaaaataattcagcgtcattgcaggaaaaaaataat

SEQ ID NO: 661330 - DNA, 120 bp, Artificial Sequence
  ENSG00000184388_16 (sequence is synthesized)
cacgaagcagacaagttaacagaagaaaattaatgtcaccagtaatcatttctgatgattacttatacattcctgaaacattttcatctgtatctgccctgtatttttcatgtgatatat

SEQ ID NO: 661331 - DNA, 120 bp, Artificial Sequence
  ENSG00000184388_17 (sequence is synthesized)
ccctgtatttttcatgtgatatatatgtgaaattattgtatatactgtttcaatatctgctttttcacacagaaatatatattatagacatagatttatagatattcttgaactttcatg

SEQ ID NO: 661332 - DNA, 120 bp, Artificial Sequence
  ENSG00000184389_0 (sequence is synthesized)
atggctctcaaggagggactcagggcctggaagagaatcttctggcggcagatcctacttacacttggcctcttaggcctgtttctgtatggcctccctaaattcaggcatctggaagcc

SEQ ID NO: 661333 - DNA, 120 bp, Artificial Sequence
  ENSG00000184389_1 (sequence is synthesized)
ctcatccccatgggcgtctgcccttcggccacaatgtcccagctgagagacaacttcacaggtgccctgcgtccctgggcccggcctgaagttctgacctgtaccccctggggggctccc

SEQ ID NO: 661334 - DNA, 120 bp, Artificial Sequence
  ENSG00000184389_2 (sequence is synthesized)
attatttgggatggctctttcgacccagatgtggccaagcaagaggctagacagcagaacctcaccattgggctgactatctttgctgtaggcagatacctggagaagtacctggagcgc

SEQ ID NO: 661335 - DNA, 120 bp, Artificial Sequence
  ENSG00000184389_3 (sequence is synthesized)
ttcctggagacggcggagcagcacttcatggcgggccagagcgtgatgtactacgtgttcaccgagcttccgggagcggtgccccgcgtggcgctgggcccgggacgccggctgcccgtg

SEQ ID NO: 661336 - DNA, 120 bp, Artificial Sequence
  ENSG00000184389_4 (sequence is synthesized)
gcggcgctgggcgggctgccgggccgcgaggcgcacttcatgttctgcatggacgtggaccagcacttcagcggcacttttgggcccgaggcgctggccgagtcggtggcgcagctgcac

SEQ ID NO: 661337 - DNA, 120 bp, Artificial Sequence
  ENSG00000184389_5 (sequence is synthesized)
tcctggcactaccactggccgtcgtggctgctgcccttcgaacgcgacgcgcattcggccgccgcgatggcgtggggccagggcgacttctataaccacgcggcggtgttcgggggcagc

SEQ ID NO: 661338 - DNA, 120 bp, Artificial Sequence
  ENSG00000184389_6 (sequence is synthesized)
gtggcggcgctgcgcgggctgacggcgcactgtgcggggggcctggactgggaccgcgcgcgcggcctggaggcgcgctggcacgacgagagccacctcaacaagttcttctggctgcac

SEQ ID NO: 661339 - DNA, 120 bp, Artificial Sequence
  ENSG00000184389_7 (sequence is synthesized)
aagcccgccaaggtgctgtcgcccgagttctgctggagcccggacatcggcccgcgggccgagatccgccgcccgcgactgctgtgggcgcccaaggggtaccggctgctgcggaactag

SEQ ID NO: 661340 - DNA, 120 bp, Artificial Sequence
  ENSG00000184394_0 (sequence is synthesized)
atggaaacacagaacctcacagtggtgacagaattcattcttcttggtctgacccagtctcaagatgctcaacttctggtctttgtgctagtcttaattttctaccttatcatcctccct

SEQ ID NO: 661341 - DNA, 120 bp, Artificial Sequence
  ENSG00000184394_1 (sequence is synthesized)
ggaaatttcctcatcattttcaccataaagtcagaccctgggctcacagcccccctctatttctttctgggcaacttggccttactggatgcatcctactccttcattgtggttcccagg

SEQ ID NO: 661342 - DNA, 120 bp, Artificial Sequence
  ENSG00000184394_2 (sequence is synthesized)
atgttggtggacttcctctctgagaagaaggtaatctcctatagaagctgcatcactcagctctttttcttgcattttcttggagcgggagagatgttcctcctcgttgtgatggccttt

SEQ ID NO: 661343 - DNA, 120 bp, Artificial Sequence
  ENSG00000184394_3 (sequence is synthesized)
cttgggggctttatccattccattgtacaagtagcccttatcctgcacttgcctttctgtggcccaaaccagctcgataacttcttctgtgatgttccacaggtcatcaagctggcctgc

SEQ ID NO: 661344 - DNA, 120 bp, Artificial Sequence
  ENSG00000184394_4 (sequence is synthesized)
accaatacctttgtggtggagcttctgatggtctccaacagtggcctgctcagcctcctgtgcttcctgggccttctggcctcctatgcagtcatcctctgtcgtataagggagcactcc

SEQ ID NO: 661345 - DNA, 120 bp, Artificial Sequence
  ENSG00000184394_5 (sequence is synthesized)
tctgaaggaaagagcaaggctatttccacatgcaccacccatattatcattatatttctcatgtttggacctgctattttcatctacacttgccccttccaggctttcccagctgacaag

SEQ ID NO: 661346 - DNA, 120 bp, Artificial Sequence
  ENSG00000184394_6 (sequence is synthesized)
gtagtttctcttttccatactgtcatctttcctttgatgaaccctgttatttatacgcttcgcaaccaggaggtgaaagcttccatgaggaagttgttaagtcaacatatgttttgctga

SEQ ID NO: 661347 - DNA, 120 bp, Artificial Sequence
  ENSG00000184394_7 (sequence is synthesized)
agctaatctcccttttatcagacagaaaagaatagccacttgtttgagagtagcatttggctcccggcaagaacaagaagtttgcccctgtgagatccattgtttggtgctttttttttt

SEQ ID NO: 661348 - DNA, 120 bp, Artificial Sequence
  ENSG00000184394_8 (sequence is synthesized)
tcgggaactcattttgtacagaggaatgcccatctaatgcatatgtgtcctccatctctgtgacaaatacaatttgagaatcaacagaacaaaaggtacataaatgaggacaaaggaaag

SEQ ID NO: 661349 - DNA, 120 bp, Artificial Sequence
  ENSG00000184394_9 (sequence is synthesized)
aagaaaagtggattaaagatgttgagtaacatggaatttcatctgttagttaacagaaaatagacggaaatagtagaaaataaaagcaaaggaagagtgagagaggctgaaactctcagg

SEQ ID NO: 661350 - DNA, 120 bp, Artificial Sequence
  ENSG00000184394_10 (sequence is synthesized)
ttagcaagtattataattattaagtacttcccattttcaggcactattccaggcatatgaatgagacaggtaagattccaggtctcctagatttatattcaaggggataaatacaggtta

SEQ ID NO: 661351 - DNA, 120 bp, Artificial Sequence
  ENSG00000184394_11 (sequence is synthesized)
ttagatttattcaaggggataaatacagtttattaaatttgaaaaacaactatagtttcagaaagaaacagtgttctgtagcaagcagaaagtggtattatgctagagattagctgggga

SEQ ID NO: 661352 - DNA, 120 bp, Artificial Sequence
  ENSG00000184394_12 (sequence is synthesized)
ggtggtaattaccttacttttggttgttaagtgaggcctcaagtggtgtttagctgaaaccaatatgattcgaaagaaacaaccatgcaaatatctggggacagaaattctaggcaaaaa

SEQ ID NO: 661353 - DNA, 120 bp, Artificial Sequence
  ENSG00000184394_13 (sequence is synthesized)
ggctgactagtacaagaatccaaagatcttatgagcttgttatatttgatgaccataaaaaggaagagaacagctgtactatatttagtgaatgtgaaaatggcaaaaattgaagtcaaa

SEQ ID NO: 661354 - DNA, 120 bp, Artificial Sequence
  ENSG00000184394_14 (sequence is synthesized)
gaatttggtaggggcaaaattatgtagagcattttagtcaataagaagttcaatttattcagatttcaaaaggagattcttgaaagacaataagcaggagagtaactctttaatgtttcc

SEQ ID NO: 661355 - DNA, 120 bp, Artificial Sequence
  ENSG00000184394_15 (sequence is synthesized)
tatttgacttaagggaagatcctcaagattctgattacagaactatgagtagtaaaatatcattaagtggaaagtgcgtgctgctaagtattttttatttatgtcaacacttaaaaggtc

SEQ ID NO: 661356 - DNA, 120 bp, Artificial Sequence
  ENSG00000184402_0 (sequence is synthesized)
gcagccggagtatccacctcgatgaccacgggctgagccccgcgccgccaccatgtccgtggccttcgcgtctgcccggccaagaggcaaaggggaggttacgcagcaaaccatccagaa

SEQ ID NO: 661357 - DNA, 120 bp, Artificial Sequence
  ENSG00000184402_1 (sequence is synthesized)
gatgctggacgagaaccaccacctgatccagtgcatcctggagtaccagagcaagggcaagacggccgagtgcacgcagtaccagcagatcctgcaccggaacctggtatacctggccac

SEQ ID NO: 661358 - DNA, 120 bp, Artificial Sequence
  ENSG00000184402_2 (sequence is synthesized)
gatcgcagactccaaccagaacatgcagtccctgcttcctgccccgcccacgcagaacatgaacctgggccctggagccctgactcagagcggctccagccagggcctgcactctcaggg

SEQ ID NO: 661359 - DNA, 120 bp, Artificial Sequence
  ENSG00000184402_3 (sequence is synthesized)
cagcctgagtgacgccatcagcacgggcctgccaccctcctccctcctgcagggccagattggcaacgggccgagccacgtgtccatgcagcagacggcgcctaacacgctgcccaccac

SEQ ID NO: 661360 - DNA, 120 bp, Artificial Sequence
  ENSG00000184402_4 (sequence is synthesized)
ctccatgagcatctctgggcccggctacagccacgcgggacccgcctcgcagggcgtccccatgcaggggcaaggcaccatcggcaactacgtgtctcggaccaacatcaacatgcagtc

SEQ ID NO: 661361 - DNA, 120 bp, Artificial Sequence
  ENSG00000184402_5 (sequence is synthesized)
caacccagtctccatgatgcagcagcaggcggccacgtcgcactacagctcggcgcagggcggcagccagcactaccagggccagtcgtccatcgccatgatggggcagggcagccaggg

SEQ ID NO: 661362 - DNA, 120 bp, Artificial Sequence
  ENSG00000184402_6 (sequence is synthesized)
gagcagcatgatggggcagcggcccatggcgccctaccggccctcccagcaaggctcttcccagcagtacctgggccaggaggagtactatggcgagcagtacagccacagccagggcgc

SEQ ID NO: 661363 - DNA, 120 bp, Artificial Sequence
  ENSG00000184402_7 (sequence is synthesized)
cgcggagcccatgggccagcagtactaccccgacggccatggcgattacgcctaccagcagtcatcctacacggagcagagctacgaccggtccttcgaggagtccacgcagcactacta

SEQ ID NO: 661364 - DNA, 120 bp, Artificial Sequence
  ENSG00000184402_8 (sequence is synthesized)
tgaggggggaaactcccagtacagccagcagcaggccgggtaccagcagggtgccgcgcagcagcagacgtactcccagcagcagtaccccagccagcagagctaccccgggcagcagca

SEQ ID NO: 661365 - DNA, 120 bp, Artificial Sequence
  ENSG00000184402_9 (sequence is synthesized)
gggctacgggtctgcccagggagccccgtcacagtaccccggctaccagcaaggccaaggccagcagtacggaagctaccgagcaccgcagacagcgccgtctgcccagcagcagcggcc

SEQ ID NO: 661366 - DNA, 120 bp, Artificial Sequence
  ENSG00000184402_10 (sequence is synthesized)
ctacggctatgaacagggccagtatggaaattaccagcagtaagggacacacattctggctggagcccttgtggtagcgtgttcatccaggggccggatgggctggcggcagctctggtg

SEQ ID NO: 661367 - DNA, 120 bp, Artificial Sequence
  ENSG00000184402_11 (sequence is synthesized)
aattgtgacatgttggttacctgttcgcccagtgccacgtctgcatgtgaagcgtgctcatttcatgctgggtatgacgccgagcgcacaccactggcgtgagacagcgcttggtggtgt

SEQ ID NO: 661368 - DNA, 120 bp, Artificial Sequence
  ENSG00000184402_12 (sequence is synthesized)
gatacttttggtgctgtgtatagtattgtatgtcggtacacggagaggtatcctttttttgtcccccgcccccttctcaatgtttctagctagctttgggggtcattttgtcatcagagc

SEQ ID NO: 661369 - DNA, 120 bp, Artificial Sequence
  ENSG00000184402_13 (sequence is synthesized)
attctgtgcccagggacaggacagatctcgaggacaccacagtccacctgttcccgtcaacagacgttaggtctcattttcctcctcatgcagtgttgtagtgtgggttgtcaacttttc

SEQ ID NO: 661370 - DNA, 120 bp, Artificial Sequence
  ENSG00000184402_14 (sequence is synthesized)
tttaactggctacgccacagctggacacacatgcagcccctggagggcagcctcttcctgtgcctcgatggggtgggtgggagggcatcttctgtgcgttgggtcagtttctgttacgta

SEQ ID NO: 661371 - DNA, 120 bp, Artificial Sequence
  ENSG00000184402_15 (sequence is synthesized)
acgaaaaggataaacatctcccacgggagaggccacagatggccacttccagagcttgcccattgcctgtctctcgccaattccgtttatccaaaaaggtacatgtttttgtattaaaaa

SEQ ID NO: 661372 - DNA, 120 bp, Artificial Sequence
  ENSG00000184402_16 (sequence is synthesized)
gtaaacagggatcagtgactgtattccaaataaatatgaatccctaagggccgtggacaaattgcctaacccagggccagcggtattgctgaaggaaaggggcagctctctgggaagtgg

SEQ ID NO: 661373 - DNA, 120 bp, Artificial Sequence
  ENSG00000184402_17 (sequence is synthesized)
gccctcagagattactctggctttgacccttgtttagctgatggtcatttctgggattggaatatttaataagcccaattctaagttgataggtaattttaaatattcaaaccaaatctt

SEQ ID NO: 661374 - DNA, 120 bp, Artificial Sequence
  ENSG00000184402_18 (sequence is synthesized)
agttacattactgtgttctttctaatgaaaagtaaaggttttatatagagaaacttgagtaatttttacatttctaagacattaaatcccatttaaattctgtgtgaacattaaagacag

SEQ ID NO: 661375 - DNA, 120 bp, Artificial Sequence
  ENSG00000184402_19 (sequence is synthesized)
cacacttgcaaaagtatggtcaaaggaaaaaaatcccacatttcaattaacaagtagcatggacatttgatcaacctttagttggaataataatattcatatttgctatgaatcctttta

SEQ ID NO: 661376 - DNA, 120 bp, Artificial Sequence
  ENSG00000184402_20 (sequence is synthesized)
aaaaaatctttggataaatgctgacagatttccaagaactaccaagaaaatacaagagatatccaatgcttgatatatgaggcctagtaataacgatatttctctttaattgatgttttg

SEQ ID NO: 661377 - DNA, 82 bp, Artificial Sequence
  ENSG00000184402_21 (sequence is synthesized)
acaagagtgaaatgttaaaattaattctttatccagagtcgggtgctttagaatttataagtcacttatgtgttttgcttga

SEQ ID NO: 661378 - DNA, 120 bp, Artificial Sequence
  ENSG00000184402_22 (sequence is synthesized)
gtgctttagaatttataagtcacttatgtgttttgcttgaattaattctgacagcccctatgaggaaatctggaggcaggtaacagttcccattttagagatgaagaactgaggcacaga

SEQ ID NO: 661379 - DNA, 120 bp, Artificial Sequence
  ENSG00000184402_23 (sequence is synthesized)
ttaaaggacttgcctgtgttgaataccagtcctgttctaggacattctcccctctcctaggagacggatgtcacgcacaaatggggagagaagtgtttattttgtaggcactaagggttt

SEQ ID NO: 661380 - DNA, 120 bp, Artificial Sequence
  ENSG00000184402_24 (sequence is synthesized)
ctaaaacccttaacactggtaagggctcaaaaataaacgtatgtgttcatattcgatcaccgaaatgagagttcttaattgctaattgacaaacgcgttagcaatttcagttagggagtc

SEQ ID NO: 661381 - DNA, 120 bp, Artificial Sequence
  ENSG00000184402_25 (sequence is synthesized)
atctcccttgattgtgttcttttcctgtcaattttcatagacctaatttgcaaactcaatcggggactaaaatttcccactgaaaatgttaaacattttagataactgtgaagatagttt

SEQ ID NO: 661382 - DNA, 120 bp, Artificial Sequence
  ENSG00000184402_26 (sequence is synthesized)
atttttattccttgccaatctgggaatatgccttttttgtgtgtttgtgtgtttttttaagtgctgtattaataatactttctgaaagaaaaggacacttaccccaaaacttcaatctga

SEQ ID NO: 661383 - DNA, 120 bp, Artificial Sequence
  ENSG00000184402_27 (sequence is synthesized)
ctgaaatgtcttacattaagaatatcttgaatgttgtgtatatattttaaaaagcactttgcaaaatagtttgtacatttatttcctaatttatacatgatttttggtgttaatatattt

SEQ ID NO: 661384 - DNA, 120 bp, Artificial Sequence
  ENSG00000184402_28 (sequence is synthesized)
attaataacagaatgtttatttaatgtgctgtccatttttatgtaatattatggggaaagtgatgccagcagttccttttcattattctatcttctgtcatatgaatgttgagcaaagct

SEQ ID NO: 661385 - DNA, 120 bp, Artificial Sequence
  ENSG00000184402_29 (sequence is synthesized)
taggccaacatgaattgtttgtgaagtgtggttgatggtgctttgtttttttctgactacttctatggaaggccagtgaagaagcaaaggaagacatgaaaattgacgctcattcttctt

SEQ ID NO: 661386 - DNA, 120 bp, Artificial Sequence
  ENSG00000184402_30 (sequence is synthesized)
cctattgttccctgacatccagcaaattgtgaatttgaaaaatgatggccagttttcagaagtgctgacaaattcatattggtatgcaaaagctcatcacccattaaggtttgttgttga

SEQ ID NO: 661387 - DNA, 120 bp, Artificial Sequence
  ENSG00000184402_31 (sequence is synthesized)
atcaacagtactcagcatattaaaacagtacatcagaactcatgccaacagtctttatgatgggattaaggtggacaagatctcctaagatctgtgaatgggattaaggtggacaagatc

SEQ ID NO: 661388 - DNA, 120 bp, Artificial Sequence
  ENSG00000184402_32 (sequence is synthesized)
tcctaagatctgaaaagaaaccttaatacgctcatatggttggagtgttaagtgaacctctgattttgtcagggtttttctacgtgtaggcgtgaatagggggcaccccttcaaaactgt

SEQ ID NO: 661389 - DNA, 120 bp, Artificial Sequence
  ENSG00000184402_33 (sequence is synthesized)
acaaagaagacgactgttttccatttccatttaaacatttttagccacttcatttctatttattgaacaggtcaaatttgtcttgttatttgtgagtacagtacatttaaaaaacatcct

SEQ ID NO: 661390 - DNA, 120 bp, Artificial Sequence
  ENSG00000184402_34 (sequence is synthesized)
tatcggttatttttttttcagtcggagtttgacgtataaattgtttatgcttttggtgtaatctcttaataaactggttcttcaaaaatcatcctataaagtgagttttcatgaagttaa

SEQ ID NO: 661391 - DNA, 120 bp, Artificial Sequence
  ENSG00000184402_35 (sequence is synthesized)
ctgggacctacttgctcagatctccaagcaagcatttcttttcttttagggatgtctgaaagtcacatccagttacattactgtgttctttctaatgaaaagtaaaggttttatatagag

SEQ ID NO: 661392 - DNA, 120 bp, Artificial Sequence
  ENSG00000184402_36 (sequence is synthesized)
cacgggctgagccccgcgccgccaccatgtccgtggccttcgcgtctgcccggccaagaggcaaaggggaggttacgcagcaaaccatccagaagtttttgaagaatgccggccagtcat

SEQ ID NO: 661393 - DNA, 120 bp, Artificial Sequence
  ENSG00000184402_37 (sequence is synthesized)
cgagtgcccttggtttgggtacaaggtgcgttttcctaacttgcgggtctgaaagtgcgtccattcccccttcacgcctggttgcggtttcggcggactagaatttctacgcagaagtct

SEQ ID NO: 661394 - DNA, 120 bp, Artificial Sequence
  ENSG00000184402_38 (sequence is synthesized)
ccctcaggatcagaccgtagcccttccggaaacctccatgatgctggacgagaaccaccacctgatccagtgcatcctggagtaccagagcaagggcaagacggccgagtgcacgcagtg

SEQ ID NO: 661395 - DNA, 120 bp, Artificial Sequence
  ENSG00000184402_39 (sequence is synthesized)
gatacgtcccaagagtcccccagcacagagatcagataagtcccaggagtccccagcacggaggccagatatgtcccaggagtcccctgcacagaggccagatatgtcccaggagtcccc

SEQ ID NO: 661396 - DNA, 120 bp, Artificial Sequence
  ENSG00000184402_40 (sequence is synthesized)
ttacaggcatgagccactgctcccggccacttatttattagtcacttaatcattaatagtgctgttgatagcaactcttcccaaagtcacttgaagggaaattggggtgtcttcaccttc

SEQ ID NO: 661397 - DNA, 120 bp, Artificial Sequence
  ENSG00000184408_0 (sequence is synthesized)
ctaacctgcgtggcggggcgtgcgcgcggttatttatttattttctccttatttattgatcgcactagcagagcagcgcggggagcccggggagatgcaggaccacccactggcggggaa

SEQ ID NO: 661398 - DNA, 120 bp, Artificial Sequence
  ENSG00000184408_1 (sequence is synthesized)
gggagcccggggagatgcaggaccacccactggcggggaagcagctagcagccctcccgcgcccccgcgctgccgagcgccttctgcctccgcgctcggacgagagcccgtgccggcccc

SEQ ID NO: 661399 - DNA, 120 bp, Artificial Sequence
  ENSG00000184408_2 (sequence is synthesized)
cccgcagccccgccgccccgcagccccgcaccgcgctggccaggctcccgcgacagtggccccgcagtaagttggcaggagcgagtcccctccgttctcgcctcccccgcaccttttgaa

SEQ ID NO: 661400 - DNA, 120 bp, Artificial Sequence
  ENSG00000184408_3 (sequence is synthesized)
cttgttgctgctgctctgctcgcctgcgcctggcttttggaaggtgaaaaggaggagggaggcacggagggatgggggaagggaaagaagagctcgcttgagctttatttatgctctctc

SEQ ID NO: 661401 - DNA, 120 bp, Artificial Sequence
  ENSG00000184408_4 (sequence is synthesized)
ggcgcatcggattcggctgctcgcgagctgctttctctcctcttccctttccgggtgcacggcgaggagaaagtctctatgcaactaagccccggcgcgcacttggccaggtatgtaccg

SEQ ID NO: 661402 - DNA, 120 bp, Artificial Sequence
  ENSG00000184408_5 (sequence is synthesized)
cgggagcggcgcgttctgcgcggaagcagatgctgctgccgccacggcggcggcggctgccagctcctgagctctgtaactgtcacactgcacctgagctgaacttgaaaagagagtgaa

SEQ ID NO: 661403 - DNA, 120 bp, Artificial Sequence
  ENSG00000184408_6 (sequence is synthesized)
ggggcgattgggcgaacgcttttggcagacacagagggtgtttgtagacgtgggggaggagaatctctattaacgccccccaccgtaaccactgcacatcacctccatctctgcaaatac

SEQ ID NO: 661404 - DNA, 120 bp, Artificial Sequence
  ENSG00000184408_7 (sequence is synthesized)
agcccgaggagtagaggcagcagcagctggacccccaaagagagacgtggggcagcggctgtgaccgcatctcctgagctacaacaacaggtcgcctttttgagactcctttggcgggaa

SEQ ID NO: 661405 - DNA, 120 bp, Artificial Sequence
  ENSG00000184408_8 (sequence is synthesized)
gggctacttggaaaggaaggtttgaaagagtgagaagggtaggtgtaagggttccctaattcgtcgaaagaattctattgggtgactctcgttcgtcttctctatcctacactccacata

SEQ ID NO: 661406 - DNA, 120 bp, Artificial Sequence
  ENSG00000184408_9 (sequence is synthesized)
ctgaccctatattatccagactgtgccggggagaaatcaaaaacacctgtttgaagaaacggctgcacctgtgtgcttatttgtgccagagggtggcctagcccacctgcaggaagagat

SEQ ID NO: 661407 - DNA, 120 bp, Artificial Sequence
  ENSG00000184408_10 (sequence is synthesized)
ttggctgggttctgttgagggtgattgttaggacgttgtattttgttgccattattccaaatacctgtcttggagggaaagttgcccttctgagaactgtgactttaccaggagccctat

SEQ ID NO: 661408 - DNA, 120 bp, Artificial Sequence
  ENSG00000184408_11 (sequence is synthesized)
cttggaataagagttacacctctggaccacgtttctcactagtactttgcttgactggaggaagtgggtgacttttggctgcttcggtgacccattgtagacgcctcgttacccttcttc

SEQ ID NO: 661409 - DNA, 120 bp, Artificial Sequence
  ENSG00000184408_12 (sequence is synthesized)
cttccgcttcaagtaatcatggcggcgggggtggcagcgtggctgccttttgcaagggcagcggctatcgggtggatgcctgtggcctcggggcctatgccggctcccccgaggcaggag

SEQ ID NO: 661410 - DNA, 120 bp, Artificial Sequence
  ENSG00000184408_13 (sequence is synthesized)
aggaaaaggacccaagatgctctcattgtgctgaatgtgagtggcacccgcttccagacgtggcaggacaccctggaacgttacccagacactctactgggcagttctgagagggacttt

SEQ ID NO: 661411 - DNA, 120 bp, Artificial Sequence
  ENSG00000184408_14 (sequence is synthesized)
ttctaccacccagaaactcagcagtatttctttgaccgtgacccagacatcttccgccacatcctgaatttctaccgcactgggaagctccactatcctcgccacgagtgcatctctgct

SEQ ID NO: 661412 - DNA, 120 bp, Artificial Sequence
  ENSG00000184408_15 (sequence is synthesized)
tacgatgaagaactggccttctttggcctcatcccggaaatcatcggcgactgctgttatgaggagtacaaggatcgcaggcgagagaacgccgagcgcctgcaggacgacgcggatacc

SEQ ID NO: 661413 - DNA, 120 bp, Artificial Sequence
  ENSG00000184408_16 (sequence is synthesized)
gacaccgctggggagagcgccttgcccaccatgactgcaaggcagagggtctggagggccttcgagaacccccacaccagcacgatggccctggtgttctactatgtcacggggtttttc

SEQ ID NO: 661414 - DNA, 120 bp, Artificial Sequence
  ENSG00000184408_17 (sequence is synthesized)
attgccgtctctgtcatcgcgaatgtggtggaaacagtgccgtgcggatcaagcccaggtcacattaaagaactgccctgtggagagcggtatgctgtggccttcttctgcttggacacg

SEQ ID NO: 661415 - DNA, 120 bp, Artificial Sequence
  ENSG00000184408_18 (sequence is synthesized)
gcctgcgtcatgatcttcacagttgagtatttgcttcgcctggctgcagcgcctagtcgttaccgttttgtgcgtagtgtcatgagtatcatcgacgtggtggccatcctgccttattac

SEQ ID NO: 661416 - DNA, 120 bp, Artificial Sequence
  ENSG00000184408_19 (sequence is synthesized)
attgggctggtgatgacagacaatgaggacgtcagcggagcctttgtcacactccgagtcttccgggtcttcaggatctttaagttttcccgccactctcaaggcctgcgcatcctgggg

SEQ ID NO: 661417 - DNA, 120 bp, Artificial Sequence
  ENSG00000184408_20 (sequence is synthesized)
tacacactgaagagttgtgcctcagaattgggcttcttgcttttctcgctcaccatggctatcatcatcttcgctacagttatgttctacgcagagaaggggtcttcggctagcaagttc

SEQ ID NO: 661418 - DNA, 120 bp, Artificial Sequence
  ENSG00000184408_21 (sequence is synthesized)
accagcatccctgcagccttctggtataccatcgtcaccatgacaacactagggtatggtgacatggtgccaaaaaccatagcagggaagatttttggttctatctgttcgctgagtggg

SEQ ID NO: 661419 - DNA, 120 bp, Artificial Sequence
  ENSG00000184408_22 (sequence is synthesized)
gtcttggtcattgctctacctgttccggtgattgtatccaacttcagtcgcatctaccaccagaatcaacgagcagacaaacgaagggcacaaaagaaagctagactggccaggatccgg

SEQ ID NO: 661420 - DNA, 120 bp, Artificial Sequence
  ENSG00000184408_23 (sequence is synthesized)
gcagccaaaagcggaagcgcaaatgcttacatgcagagcaaacggaatggtttactcagtaatcagctgcagtcctcagaggatgagcaggcttttgttagcaaatccggctccagcttt

SEQ ID NO: 661421 - DNA, 120 bp, Artificial Sequence
  ENSG00000184408_24 (sequence is synthesized)
tctttgaagaaagctgcatggaagttgcaactgttaatcgtccttcaagtcacagtccttcactgtcttcacaacaaggagtcaccagcacctgctgttcacgacgacacaaaaaaactt

SEQ ID NO: 661422 - DNA, 120 bp, Artificial Sequence
  ENSG00000184408_25 (sequence is synthesized)
ttcgcatcccaaatgccaatgtatcaggaagccatcaaggtagtatacaagaactcagcacgattcagatcagatgtgtggagagaacacctctgtctaacagccgatccagtttaaatg

SEQ ID NO: 661423 - DNA, 120 bp, Artificial Sequence
  ENSG00000184408_26 (sequence is synthesized)
ccaaaatggaagagtgtgttaaactaaactgtgaacaaccttatgtgactacagcaataataagcatcccaacacctccagtaaccacaccagaaggagacgataggccagaatcccctg

SEQ ID NO: 661424 - DNA, 120 bp, Artificial Sequence
  ENSG00000184408_27 (sequence is synthesized)
agtactcaggaggaaatattgtcagagtttctgctttgtaagacaattggaataaggtctaagagaattcgagccctggctgtgaaaagaatctcaacatagaagaaagaagaaacaata

SEQ ID NO: 661425 - DNA, 120 bp, Artificial Sequence
  ENSG00000184408_28 (sequence is synthesized)
aatattctgcagattaatgcagcaaagaaagaaggttggtagtgaaacacaaagcttccaatcttaaggatgtgaataaaaccaccaaatggcatttctagacagtttgacctgttatac

SEQ ID NO: 661426 - DNA, 120 bp, Artificial Sequence
  ENSG00000184408_29 (sequence is synthesized)
agagtaatattctgtggccctttgactttgtgaatgagcacaatgaaatgccgcctactgatgcttcttatgatcagaactcttttttaataaaataaataacataaatcgttgaacata

SEQ ID NO: 661427 - DNA, 120 bp, Artificial Sequence
  ENSG00000184408_30 (sequence is synthesized)
atgttccagttgaatgcaaaacaaaaaaaatatggaaaacattttgataaaattttttcctgttaaaaccatgaacattggctatgatgaagattattacatatgaaaaaaaaactcaca

SEQ ID NO: 661428 - DNA, 120 bp, Artificial Sequence
  ENSG00000184408_31 (sequence is synthesized)
caacatatttgtattgactgaaggaaaccatcataatgcatgctagaattctttgaagcagtgatctcagtttccttatgttgtcttcagaataggcatgataaactataattgtagaaa

SEQ ID NO: 661429 - DNA, 120 bp, Artificial Sequence
  ENSG00000184408_32 (sequence is synthesized)
ggggtaatttctgtgcacttacaacaagctgagtgttcatgttccatggtgggctgtgcaaataaactccttttagacctgcagtatttctcatggggatgctcattagtaaatctaaag

SEQ ID NO: 661430 - DNA, 120 bp, Artificial Sequence
  ENSG00000184408_33 (sequence is synthesized)
tgttcagatagttcagtattcattatcgtttaactttgcacctagatactgttacaactgcaataatttgttgtacaactgttgtatcaggaatcaggatttttttgttgttgtactttc

SEQ ID NO: 661431 - DNA, 120 bp, Artificial Sequence
  ENSG00000184408_34 (sequence is synthesized)
cagatccttatagatacggtaagagccacattcgtagaaaaacttctggtgtggccaggttttaggtaactttttaatccaaaactattgtgccataaatgtttttcagtaatatttttt

SEQ ID NO: 661432 - DNA, 120 bp, Artificial Sequence
  ENSG00000184408_35 (sequence is synthesized)
ggtccactgtattcctgtgacacagtgcattatctgttcttgtatttctatagcacctctctattgggtttatcatcatcaacaagactactgtttactgtagttcaagtgactttccta

SEQ ID NO: 661433 - DNA, 120 bp, Artificial Sequence
  ENSG00000184408_36 (sequence is synthesized)
cttttgtatttccaaaaaaaattatcttgtaagtagcttgtcatcaatccccttgtcgaaaactagaaaaaaaggagttgacccatataaattatctctaacgtctttgttgtttatgga

SEQ ID NO: 661434 - DNA, 120 bp, Artificial Sequence
  ENSG00000184408_37 (sequence is synthesized)
aaagcccagatactggatatatcactatgtattttatgaacagaattgactgggactaatatcacaggatcaatcatctcagaatcttacttgatgcattatttattttgctttagatct

SEQ ID NO: 661435 - DNA, 120 bp, Artificial Sequence
  ENSG00000184408_38 (sequence is synthesized)
tgaatacattttgagaataactaatgtggattgaaatgtagagatacactggagtgctttatttagcaatatttgatgaaagcatgctttctacgccattcaggaaggcagcacaaattt

SEQ ID NO: 661436 - DNA, 120 bp, Artificial Sequence
  ENSG00000184408_39 (sequence is synthesized)
atctcagaaaggttcctgtgtattgcaaggtacaattttctccaataaatcaggagaacaggagtttgatgatgcaaagttgatctctgtacatttaagtgaaaagtctttataactttt

SEQ ID NO: 661437 - DNA, 120 bp, Artificial Sequence
  ENSG00000184408_40 (sequence is synthesized)
cacccttaaaatatttcagcagacatgtctgcacatgacagtgtaaaaaagtttaatgtcaaatgcaaagtttttattcattccaagccaccactgtaaggaataaagcttagcttctgt

SEQ ID NO: 661438 - DNA, 120 bp, Artificial Sequence
  ENSG00000184408_41 (sequence is synthesized)
acatggaaagagctaataattatccctctgtcagagatgagatttttaaatgcttatgatatttaatcataaaaagggattaatccaaccattttctagtaaagccagaaattcttgctt

SEQ ID NO: 661439 - DNA, 120 bp, Artificial Sequence
  ENSG00000184408_42 (sequence is synthesized)
cccatttctagaatagtttctagaacagtgctatgcacatattagatcttaataaacatttgctgagtgaaagtaagataaactcaactatctcttgggaagaactggcttcattcctag

SEQ ID NO: 661440 - DNA, 120 bp, Artificial Sequence
  ENSG00000184408_43 (sequence is synthesized)
tacatcttttaaaaagttactaattttccagcagtacaaatattaacaattatattaacacctgcctcatgtcagtttatgcttctagagcaatgtctagtgaaacttatctgatggcat

SEQ ID NO: 661441 - DNA, 120 bp, Artificial Sequence
  ENSG00000184408_44 (sequence is synthesized)
ttattgaaaaccttctaaaaagtagactaaggaaaccataatcagaattactatgtcttttgattcccaatgagaagttctattttcatgttcttaatattacatacaagaaaatgcagt

SEQ ID NO: 661442 - DNA, 120 bp, Artificial Sequence
  ENSG00000184408_45 (sequence is synthesized)
taggttatttcaattgacaattctgcctcctcttttgatttatcacttacccaaaattattaattttattaggcttttggaaaagaaaaaaaactttttgatgttttaggtgatttaaaa

SEQ ID NO: 661443 - DNA, 120 bp, Artificial Sequence
  ENSG00000184408_46 (sequence is synthesized)
atataccgtgttggtggtgaatgactattgatgactgtgttaagtgcatctgtattgtaagtgaaatgtaattatttctgtgtaccatatggagtaactaaggtcattgtttttgacaat

SEQ ID NO: 661444 - DNA, 120 bp, Artificial Sequence
  ENSG00000184408_47 (sequence is synthesized)
tttgtttgaaattcatatatcttatttcaaaggatagcataatatctgcattatgctggaaaaaaatagacctttggagaatacttaaataaaacatgtgcatgcttgaacaggacaaaa

SEQ ID NO: 661445 - DNA, 120 bp, Artificial Sequence
  ENSG00000184408_48 (sequence is synthesized)
attcatttgatgaaattgtaaatgccgatcatccaacttaacaggaactgcacatttgttcctttctagttagaaaaaaataaaatgttgccagttaatagagcagatctctctgtggaa

SEQ ID NO: 661446 - DNA, 120 bp, Artificial Sequence
  ENSG00000184408_49 (sequence is synthesized)
atatgtagccgaggttcgagttgtttgcaaataaaatagaaagctcttctgtcttctctttgttaacagtcctcagaggatgagcaggcttttgttagcaaatccggctccagctttgaa

SEQ ID NO: 661447 - DNA, 120 bp, Artificial Sequence
  ENSG00000184428_0 (sequence is synthesized)
gaggctggcagatgcgcgtggtgcggctgctgcggctccgggcggctctgacgctgctcggggaggtcccccgccgcccggcctcccggggtgtcccgggctcgcgcaggacgcagaagg

SEQ ID NO: 661448 - DNA, 120 bp, Artificial Sequence
  ENSG00000184428_1 (sequence is synthesized)
gcagaagggcagtggagccaggtgggagaaggagaagcacgaagacggggtgaagtggagacagctggagcacaagggcccgtacttcgcacccccatacgagccccttcccgacggagt

SEQ ID NO: 661449 - DNA, 120 bp, Artificial Sequence
  ENSG00000184428_2 (sequence is synthesized)
gcgtttcttctatgaaggaaggcctgtgagattgagcgtggcagcggaggaggtcgccactttttatgggaggatgttagatcatgaatacacaacaaaggaggttttccggaagaactt

SEQ ID NO: 661450 - DNA, 120 bp, Artificial Sequence
  ENSG00000184428_3 (sequence is synthesized)
cttcaatgactggcgaaaggaaatggcggtggaagagagggaagtcatcaagagcctggacaagtgtgacttcacggagatccacagatactttgtggacaaggccgcagcccggaaagt

SEQ ID NO: 661451 - DNA, 120 bp, Artificial Sequence
  ENSG00000184428_4 (sequence is synthesized)
cctgagcagggaggagaagcagaagctaaaagaagaggcagaaaaacttcagcaagagttcggctactgtattttagatggtcaccaagaaaaaataggcaacttcaagattgagccgcc

SEQ ID NO: 661452 - DNA, 120 bp, Artificial Sequence
  ENSG00000184428_5 (sequence is synthesized)
tggcttgttccgtggccgtggcgaccatcccaagatggggatgctgaagagaaggatcacgccagaggatgtggttatcaactgcagcagggactcgaagatccccgagccgccggcggg

SEQ ID NO: 661453 - DNA, 120 bp, Artificial Sequence
  ENSG00000184428_6 (sequence is synthesized)
gcaccagtggaaggaggtgcgctccgataacaccgtcacgtggctggcagcttggaccgagagcgttcagaactccatcaagtacatcatgctgaacccttgctcgaagctgaaggggga

SEQ ID NO: 661454 - DNA, 120 bp, Artificial Sequence
  ENSG00000184428_7 (sequence is synthesized)
gacagcttggcagaagtttgaaacagctcgacgcctgcggggatttgtggacgagatccgctcccagtaccgggctgactggaagtctcgggaaatgaagacgagacagcgggcggtggc

SEQ ID NO: 661455 - DNA, 120 bp, Artificial Sequence
  ENSG00000184428_8 (sequence is synthesized)
gcactgagagcaggaaatgagaaggaggacggtgaggcggccgacaccgtgggctgctgttccctccgcgtggagcacgtccagctgcacccggaggccgatggctgccaacacgtggtg

SEQ ID NO: 661456 - DNA, 120 bp, Artificial Sequence
  ENSG00000184428_9 (sequence is synthesized)
gaatttgacttcctggggaaggactgcatccgctactacaacagagtgccggtggagaagccggtgtacaagaacttacagctctttatggagaacaaggacccccgggacgacctcttc

SEQ ID NO: 661457 - DNA, 120 bp, Artificial Sequence
  ENSG00000184428_10 (sequence is synthesized)
gacaggctgaccacgaccagcctgaacaagcacctccaggagctgatggacgggctgacggccaaggtgttccggacctacaacgcctccatcactctgcaggagcagctgcgggccctg

SEQ ID NO: 661458 - DNA, 120 bp, Artificial Sequence
  ENSG00000184428_11 (sequence is synthesized)
acgcgcgccgaggacagcatagcagctaagatcttatcctacaaccgagccaaccgagtcgtggccattctctgcaaccatcagcgagcaacccccagtacgttcgagaagtcgatgcag

SEQ ID NO: 661459 - DNA, 120 bp, Artificial Sequence
  ENSG00000184428_12 (sequence is synthesized)
aatctccagacgaagatccaggcaaagaaggagcaggtggctgaggccagggcagagctgaggagggcgagggctgagcacaaagcccaaggggatggcaagtccaggagtgtcctggag

SEQ ID NO: 661460 - DNA, 120 bp, Artificial Sequence
  ENSG00000184428_13 (sequence is synthesized)
aagaagaggcggctcctggagaagctgcaggagcagctggcgcagctgagtgtgcaggccacggacaaggaggagaacaagcaggtggccctgggcacgtccaagctcaactacctggac

SEQ ID NO: 661461 - DNA, 120 bp, Artificial Sequence
  ENSG00000184428_14 (sequence is synthesized)
cccaggatcagcattgcctggtgcaagcggttcagggtgccagtggagaagatctacagcaaaacacagcgggagaggttcgcctgggctctcgccatggcaggagaagactttgaattc

SEQ ID NO: 661462 - DNA, 120 bp, Artificial Sequence
  ENSG00000184428_15 (sequence is synthesized)
taacgacgagccgtgttgaaacttcttttgtatgtgtgtgtgtttttttcactattaaagcagtactggggaattttgtacaataaaatgtgtgcaagtgcttgtacatcactagaaaaa

SEQ ID NO: 661463 - DNA, 120 bp, Artificial Sequence
  ENSG00000184428_16 (sequence is synthesized)
gagccagaaacagccagaaaggccctttcagaaatgtctgttgcacatgctttcccctctcagacccttcagagacttcctgttgctctgaggacactcatcccagccgaccaggcccac

SEQ ID NO: 661464 - DNA, 120 bp, Artificial Sequence
  ENSG00000184428_17 (sequence is synthesized)
cagactgcagcccgtgctgatgactgtggctgtgatgaattcgtgcctgtgaccacagctgctctccagatttgcacagatcaccacgccagtgaagactaatcaccatgaaaagccacc

SEQ ID NO: 661465 - DNA, 120 bp, Artificial Sequence
  ENSG00000184428_18 (sequence is synthesized)
attcacttagtgcttccagcgtggcatgtctctgtgacctggtggtgcgctatcagcatacccattcacagctgagggcctgcacagctgcctaaggccatgctgcagaaatgtcctgtc

SEQ ID NO: 661466 - DNA, 120 bp, Artificial Sequence
  ENSG00000184428_19 (sequence is synthesized)
tgcctgcaggagcttgggacccaaagagagccccagatggggcagggtgtcttgggaggagggagttctggcctgcgcttggagctggggctggctgtgggccctgcattgaggcacatc

SEQ ID NO: 661467 - DNA, 120 bp, Artificial Sequence
  ENSG00000184428_20 (sequence is synthesized)
ccggcctcccggggtgtcccgggctcgcgcaggacgcagaagggcagtggagccaggcacaagccgcatggatccagtggccctggtggccgttggtggtcccaggcgctttcctggagg

SEQ ID NO: 661468 - DNA, 120 bp, Artificial Sequence
  ENSG00000184428_21 (sequence is synthesized)
acatgtgagaagccctgccggcgcatactgggcctggggtagccgcatggggatgggtctctgcgcatgaaatgctggagtttccgaagagctggagagttgacagcctcactggtggga

SEQ ID NO: 661469 - DNA, 120 bp, Artificial Sequence
  ENSG00000184428_22 (sequence is synthesized)
gggctcgggccttcccggcgtctccgcgcaggcctcggggaagcggggtccgggggagccgtggtgcggtgggaccgcgtgggtcctggaagagctgcagaggagagtgacggctttgga

SEQ ID NO: 661470 - DNA, 120 bp, Artificial Sequence
  ENSG00000184428_23 (sequence is synthesized)
tgcgctttgccccagggcctttcttcccggagttggccttttccctgcccttctcttctcctggcgtggtgacctgcctcccttctcctggatcgctttgctggcagccaccttgtaaca

SEQ ID NO: 661471 - DNA, 120 bp, Artificial Sequence
  ENSG00000184428_24 (sequence is synthesized)
cctcagactgcagcccgtgctgatgactgtggctgtgatgaattcgtgcctgtgaccacagctgctctccaggtgctgggtggctcctcccttgacgcccatccattctgtctcctgcct

SEQ ID NO: 661472 - DNA, 120 bp, Artificial Sequence
  ENSG00000184428_25 (sequence is synthesized)
ggccttgttcactgtcgctcatctcgctcagctgaggtccctcctcctccgctgtttggtgtccttgccagttaatcacccttaggtgctgggccctggacttacggacaacatggagcc

SEQ ID NO: 661473 - DNA, 120 bp, Artificial Sequence
  ENSG00000184428_26 (sequence is synthesized)
tggcttgttgacaggacagtgtctgcgcctctccgtctacacccccacaacaggggttactggggagggggcgtctgggagtgacagagatcgctgtggggtctgtgtgaccatcagctg

SEQ ID NO: 661474 - DNA, 120 bp, Artificial Sequence
  ENSG00000184428_27 (sequence is synthesized)
tccctgtagctggggaatggtgctgcgcggcgggcgggtggcacagtgagcagccctgggtcctcactgagtaagggagtggctggggagtggggaggcttgcctttgtatcctgggtgg

SEQ ID NO: 661475 - DNA, 120 bp, Artificial Sequence
  ENSG00000184428_28 (sequence is synthesized)
gcatggggctgggggagtcacggagacctggaggaccagctgctgctggccagtgggtggtggtgtctcagggccagcccaaagcctcctgagctcctgccactgctactgagtgcttcc

SEQ ID NO: 661476 - DNA, 120 bp, Artificial Sequence
  ENSG00000184428_29 (sequence is synthesized)
tagcctgtccctctggtgtcccgccactccttcttcctcaagcaggagggctgagctgggctggggcagagggggcctcccacggcttccctgtgggactctaggcctctgcagtcagca

SEQ ID NO: 661477 - DNA, 120 bp, Artificial Sequence
  ENSG00000184428_30 (sequence is synthesized)
gggccccatccttgagggcctagattccacatgaaatccatctatgaatcctgctttccagctgtgttacaacagggcctcctctcacctttctcggctggcccaggcctctgcctcagt

SEQ ID NO: 661478 - DNA, 120 bp, Artificial Sequence
  ENSG00000184428_31 (sequence is synthesized)
agggctctaacatgattttcagaaatctcacaggtttttccttgcaagacgcgtgtttcactgtgtctccagtctgcatggatgtgggcgtgtgttgtgatggtcagatggtggagtgag

SEQ ID NO: 661479 - DNA, 120 bp, Artificial Sequence
  ENSG00000184428_32 (sequence is synthesized)
agcagccatagtgtgaggtgtgggtgagggtggccagtcagccgatgagtgggagcgttcagaccggggtgcctggtgcccccataacctcctcggggttcccagggatggcgcctctga

SEQ ID NO: 661480 - DNA, 120 bp, Artificial Sequence
  ENSG00000184428_33 (sequence is synthesized)
cccagcgtgcagcccgaggtgggccccgtgccattcccacttaagcgaagtgtctgttcctctctctgttcaatgtgggttttgtttctgaatatattttctcacacttcttcttcaaaa

SEQ ID NO: 661481 - DNA, 120 bp, Artificial Sequence
  ENSG00000184428_34 (sequence is synthesized)
gttactttggaaagactgtttttccaaattgatgatctctgaactgctgtggtgttggtggggacagagatggtcccagaggggacctgggagctgccttttactgcctgcccactcttc

SEQ ID NO: 661482 - DNA, 120 bp, Artificial Sequence
  ENSG00000184428_35 (sequence is synthesized)
ccgaggccgggaggggcctgagatgtgttcgcagcttctggcctcgggcgggacttcccaccgccagctggtgctgtgctcagagtcagaggttccttgatgcccagcacgtgggtcacc

SEQ ID NO: 661483 - DNA, 120 bp, Artificial Sequence
  ENSG00000184428_36 (sequence is synthesized)
agcagctttgccaggtgtacttttgaaaaatgagaaaagggtcatgaagagcttgggaggcttccatgaggttgttctgactctctgttgttagaatggcaaccctaaatgagccgcaga

SEQ ID NO: 661484 - DNA, 120 bp, Artificial Sequence
  ENSG00000184428_37 (sequence is synthesized)
gctgcatgtttatgtatacatttgaattctagatttgcacagatcaccacgccagtgaagactaatcaccatgaaaagccacccaagaaaaaaggccaagtcggcatcttaaataggaaa

SEQ ID NO: 661485 - DNA, 120 bp, Artificial Sequence
  ENSG00000184428_38 (sequence is synthesized)
tggggacactcagttgcagataggtgatgggagacagtcggggcccaatttgaagcagttgccagtggatgataaagttgctctcaagagcagtgcttgagggaagaaaataaattctcc

SEQ ID NO: 661486 - DNA, 120 bp, Artificial Sequence
  ENSG00000184428_39 (sequence is synthesized)
gtttcaaaagaaaatccagggcgggacaatcttactgttggaacaaagaaaagagcccgatggaaaaacggttagcttttgcttttgagaaatgtggtacctccgtggcttgatggcagg

SEQ ID NO: 661487 - DNA, 120 bp, Artificial Sequence
  ENSG00000184428_40 (sequence is synthesized)
gcggctgctgcggctccgggcggctctgacgctgctcggggaggtcccccgccgcccggcctcccggggtgtcccgggctcgcgcaggacgcagaagggcagtggagccagacccttcag

SEQ ID NO: 661488 - DNA, 120 bp, Artificial Sequence
  ENSG00000184428_41 (sequence is synthesized)
gccactttttatgggaggatgttagatcatgaatacacaacaaaggaggttttccggaagaacttcttcaatgactggcgaaaggctccgcttctggaccctcttctttggcctgatgcc

SEQ ID NO: 661489 - DNA, 120 bp, Artificial Sequence
  ENSG00000184428_42 (sequence is synthesized)
acccctctgcctttcacgacagctttgtgaggtggcaccagctgcccggcatcctcattctccctctggtcagcacttcttccagtcactagcagagctaggaagggaggcagtgtcaca

SEQ ID NO: 661490 - DNA, 120 bp, Artificial Sequence
  ENSG00000184428_43 (sequence is synthesized)
aagcagcagaacaggagtgggtggcacatccggcggccccgggagacacagggacggaccctgagcccgtggttgtggccgagcagggctccatcctggcacagatggtgtcgtacctga

SEQ ID NO: 661491 - DNA, 120 bp, Artificial Sequence
  ENSG00000184428_44 (sequence is synthesized)
agcgagacacgtttgacagcagctcctgaggtctcacaggcctaagtggccgagcctggactgggaccgtgagctggtgcccgcaagcctgggcttttgtccatgggctgtgcagagttt

SEQ ID NO: 661492 - DNA, 120 bp, Artificial Sequence
  ENSG00000184428_45 (sequence is synthesized)
ccggcctcagtctgttgtgtcgagcatctcaccctcctgcgagtcaggtcctgacgggctgctcaccctccgcccacggccctcctctgtatctgacttggcagctggggtggggctgag

SEQ ID NO: 661493 - DNA, 120 bp, Artificial Sequence
  ENSG00000184428_46 (sequence is synthesized)
cttccacctttgatcccggctggtcttttgctgtgatggatgactgatgacaatgacagggacagggctgcactgggagggaaggcggcagggccagagaagtgcaggtctcctcaggtg

SEQ ID NO: 661494 - DNA, 120 bp, Artificial Sequence
  ENSG00000184428_47 (sequence is synthesized)
atcggacgggcttccttctgcacctgtgacctcacaagggctctccttggggaggcaggaccagagcagccctgagtaaccgggcacagccgaggaacaggccccagggaggccaggacc

SEQ ID NO: 661495 - DNA, 120 bp, Artificial Sequence
  ENSG00000184428_48 (sequence is synthesized)
cgggtcctcacgcctgcggccacagaagcaccgtgtccctgcagctgtgagccaccaggcgtctgggtgggtggttactcagcaagtgccagtagagaaactgggtcccagagttggggt

SEQ ID NO: 661496 - DNA, 120 bp, Artificial Sequence
  ENSG00000184428_49 (sequence is synthesized)
tgctgtggactggatacttgtccctcacctccagttcacatgttaaagtcctcacccccagcaagacagtgttggaggtggggcctttgggaggggagcaggtttagagaagatcctggg

SEQ ID NO: 661497 - DNA, 120 bp, Artificial Sequence
  ENSG00000184428_50 (sequence is synthesized)
ggaccctcacgatgagatgagtgccctcatgggaagagacaccggagcctcctctccaggagcacacacgggacggtcacatgagcaagaggctgctgtccgtaagctgggggtggtccc

SEQ ID NO: 661498 - DNA, 120 bp, Artificial Sequence
  ENSG00000184428_51 (sequence is synthesized)
tctccgagggtgcacaggcagacccttcagagacttcctgttgctctgaggacactcatcccagccgaccaggcccaccaggcccccaacagcactacctggctggggtcacgtgcaggt

SEQ ID NO: 661499 - DNA, 120 bp, Artificial Sequence
  ENSG00000184428_52 (sequence is synthesized)
gtgacttatagcagtgcttgagggaagaaaataaattctccgtttcaaaagaaaatccagggcgggacaatcttactgttggatttgcacagatcaccacgccagtgaagactaatcacc

SEQ ID NO: 661500 - DNA, 120 bp, Artificial Sequence
  ENSG00000184428_53 (sequence is synthesized)
gctcgggccttcccggcgtctccgcgcaggcctcggggaagcggggtccgggggagccgtggtgcggtgggaccgcgtgggtcctggaagagctgcagaggaggtgggagaaggagaagc

SEQ ID NO: 661501 - DNA, 120 bp, Artificial Sequence
  ENSG00000184428_54 (sequence is synthesized)
gaaaggttctttgccagacgcacatgctgtgaatgtcatctcccagactttgccttttcacttctcagtgaggtctccaaacagaaaactgtaacttagttatgccgtttatcaatctgt

SEQ ID NO: 661502 - DNA, 120 bp, Artificial Sequence
  ENSG00000184432_0 (sequence is synthesized)
cgtcagtcagtctgacggtcagtggatcggtgggtttatctcaaggcctgagtagccggtaacaaacgagggttcccgggattggaccgacgcagccatgcctctgcgacttgatatcaa

SEQ ID NO: 661503 - DNA, 120 bp, Artificial Sequence
  ENSG00000184432_1 (sequence is synthesized)
aagaaagctaactgctagatctgatcgagttaagagtgtggatctgcatcctacagagccatggatgttggcaagtctttacaatggcagtgtgtgtgtttggaatcatgaaacacagac

SEQ ID NO: 661504 - DNA, 120 bp, Artificial Sequence
  ENSG00000184432_2 (sequence is synthesized)
actggtgaagacatttgaagtatgtgatcttcctgttcgagctgcaaagtttgttgcaaggaagaattgggttgtgacaggagcggatgacatgcagattagagtgttcaattacaatac

SEQ ID NO: 661505 - DNA, 120 bp, Artificial Sequence
  ENSG00000184432_3 (sequence is synthesized)
tctggagagagttcatatgtttgaagcacactcagactacattcgctgtattgctgttcatccaacccagcctttcattctaactagcagtgatgacatgcttattaagctctgggactg

SEQ ID NO: 661506 - DNA, 120 bp, Artificial Sequence
  ENSG00000184432_4 (sequence is synthesized)
ggataaaaaatggtcttgctcacaagtgtttgaaggacacacccattatgttatgcagattgtgatcaaccccaaagataacaatcagtttgccagtgcctctttggacaggactatcaa

SEQ ID NO: 661507 - DNA, 120 bp, Artificial Sequence
  ENSG00000184432_5 (sequence is synthesized)
ggtgtggcagttgggctcttcgtcaccaaacttcactttggaaggacatgagaaaggcgtgaattgcattgattactacagtggtggggacaagccatacctcatttcaggtgcagatga

SEQ ID NO: 661508 - DNA, 120 bp, Artificial Sequence
  ENSG00000184432_6 (sequence is synthesized)
ccgtcttgttaaaatatgggattatcagaataaaacatgtgtgcagacactggaaggacatgcccaaaatgtgtcttgtgccagctttcatcctgagttgccaatcattatcacaggttc

SEQ ID NO: 661509 - DNA, 120 bp, Artificial Sequence
  ENSG00000184432_7 (sequence is synthesized)
agaagatggaacagtacgtatttggcattcaagcacctaccggcttgagagcacactgaattatggaatggagagggtatggtgcgtggccagtctaagagggtcaaacaatgtcgcttt

SEQ ID NO: 661510 - DNA, 120 bp, Artificial Sequence
  ENSG00000184432_8 (sequence is synthesized)
gggctatgatgaagggagcatcattgttaagcttggtcgggaggaacctgccatgtccatggatgccaatggaaagataatttgggccaagcattcagaagtccagcaggccaacctaaa

SEQ ID NO: 661511 - DNA, 120 bp, Artificial Sequence
  ENSG00000184432_9 (sequence is synthesized)
agcaatgggagatgctgaaattaaagatggtgaaagattgccactggcagtaaaggatatgggcagttgtgaaatataccctcagactattcagcacaatcctaatgggcggtttgtggt

SEQ ID NO: 661512 - DNA, 120 bp, Artificial Sequence
  ENSG00000184432_10 (sequence is synthesized)
ggtgtgtggtgatggggagtatatcatctacacagcaatggcattgagaaacaagagctttggatctgctcaggagtttgcatgggcccacgattcttcagagtatgcaataagagagag

SEQ ID NO: 661513 - DNA, 120 bp, Artificial Sequence
  ENSG00000184432_11 (sequence is synthesized)
caacagcattgtaaagatatttaagaactttaaggaaaaaaaatcatttaaaccagattttggagcagaaagtatctacggcggcttcttattgggagtcagatctgtaaatggcttagc

SEQ ID NO: 661514 - DNA, 120 bp, Artificial Sequence
  ENSG00000184432_12 (sequence is synthesized)
cttctatgactgggacaatacagaactcatacgaagaattgaaattcagcccaaacatattttctggtctgactctggagagctagtctgtattgctactgaggaatcattttttatcct

SEQ ID NO: 661515 - DNA, 120 bp, Artificial Sequence
  ENSG00000184432_13 (sequence is synthesized)
aaacacatgagggagttactgaagatggcattgaagatgcctttgaggttcttggtgagattcaggaaattgtgaaaacagggctttgggtaggcgattgcttcatttacacaagttctg

SEQ ID NO: 661516 - DNA, 120 bp, Artificial Sequence
  ENSG00000184432_14 (sequence is synthesized)
tgaacagattaaattattatgttggaggagaaatagtcaccattgcccacttggacaggacgatgtatctcctaggctacattcctaaagacaacaggctttatctgggggataaagaat

SEQ ID NO: 661517 - DNA, 120 bp, Artificial Sequence
  ENSG00000184432_15 (sequence is synthesized)
tgaacatcattagctattccctgctggtttcagtcctggaataccagacagctgtcatgcggagggactttagcatggctgataaggtccttcctaccattccaaaagaacagaggacca

SEQ ID NO: 661518 - DNA, 120 bp, Artificial Sequence
  ENSG00000184432_16 (sequence is synthesized)
gagttgcacactttttggaaaagcagggcttcaagcagcaagctcttacagtatccacagatcctgagcatcgttttgagcttgctcttcagcttggagagttaaaaattgcataccagt

SEQ ID NO: 661519 - DNA, 120 bp, Artificial Sequence
  ENSG00000184432_17 (sequence is synthesized)
tagcagtggaagcagagtcagaacagaagtggaaacaacttgctgaacttgccattagtaaatgtcagtttggcctagcccaggagtgcctgcatcatgcacaggattatgggggcctgc

SEQ ID NO: 661520 - DNA, 120 bp, Artificial Sequence
  ENSG00000184432_18 (sequence is synthesized)
tgcttttggccactgcctctggaaatgctaatatggtgaacaagctagcagagggtgcggagagagatggcaaaaataatgtggcattcatgagctactttttacagggcaaggttgatg

SEQ ID NO: 661521 - DNA, 120 bp, Artificial Sequence
  ENSG00000184432_19 (sequence is synthesized)
cctgcctagagctcttaattagaactggacggctgccagaagctgccttcttggcccgaacttacttacccagtcaggtttcaagggtagtgaaactctggagagagaatctctcaaaag

SEQ ID NO: 661522 - DNA, 120 bp, Artificial Sequence
  ENSG00000184432_20 (sequence is synthesized)
tcaatcagaaagcagcagaatcccttgctgacccaacagagtatgaaaacctgttccctggattaaaagaagcctttgttgttgaagaatgggtgaaggaaacacatgctgatctgtggc

SEQ ID NO: 661523 - DNA, 120 bp, Artificial Sequence
  ENSG00000184432_21 (sequence is synthesized)
cagccaaacaatacccacttgtcacgccaaatgaagagagaaatgtcatggaagagggaaaagactttcagccctcaagatctacagctcaacaggaacttgatgggaaacctgcttctc

SEQ ID NO: 661524 - DNA, 120 bp, Artificial Sequence
  ENSG00000184432_22 (sequence is synthesized)
ctactccggttattgtggcctcccacacagccaacaaagaagaaaagagtttactcgaactagaagtagatttggataatttggaattagaagatattgacacaacagatatcaatctgg

SEQ ID NO: 661525 - DNA, 120 bp, Artificial Sequence
  ENSG00000184432_23 (sequence is synthesized)
atgaagatattttggatgattgactgtaatgctttccatttacctgactaaacagatcattattatatataggtattgattgctaccctgaccacagtgctttggactatgagaaacttc

SEQ ID NO: 661526 - DNA, 120 bp, Artificial Sequence
  ENSG00000184432_24 (sequence is synthesized)
ttagatttttatatgtaaatgctgtggaccactgggagcacaatgcccacatcatcttaagaagagtttatgtgcagcatttaaatcactgtgttttccttgttaactaaaacagacatg

SEQ ID NO: 661527 - DNA, 120 bp, Artificial Sequence
  ENSG00000184432_25 (sequence is synthesized)
ggctttgatttttttcatactattagaccatatctcataaaaccttttgaattaatgaaggtacttgtttcctttctcaataatgaaaataggcttctagttttagaaggctgagccgaa

SEQ ID NO: 661528 - DNA, 120 bp, Artificial Sequence
  ENSG00000184432_26 (sequence is synthesized)
actacaccttgcctagggatcagccccactgtcttttctttgtataactaaatctgcattttcaaatgttgtcaatcacatttttcttagagctgaatatccaggctgtaattctctaaa

SEQ ID NO: 661529 - DNA, 120 bp, Artificial Sequence
  ENSG00000184432_27 (sequence is synthesized)
cgtgatacagctggaccaagttggttgcatcatcgattctgagaatgaaagggtttaatgttatctaggggttttcttcatttgattcacagtcctataaaagtgtgtgccaacttcaaa

SEQ ID NO: 661530 - DNA, 120 bp, Artificial Sequence
  ENSG00000184432_28 (sequence is synthesized)
cattctaactagcagtggacacacccattatgttatgcagattgtgatcaaccccaaagataacaatcagtttgccagtgcctctttggacaggactatcaaggtgtggcagttgggctc

SEQ ID NO: 661531 - DNA, 120 bp, Artificial Sequence
  ENSG00000184432_29 (sequence is synthesized)
ggaatttttcaggactgtattagaaataaaatactatgtgagactgtgtttataatgaaagagaagaaatattataacagaatccagaatctatatgcaaactgctttctcaagttggta

SEQ ID NO: 661532 - DNA, 120 bp, Artificial Sequence
  ENSG00000184432_30 (sequence is synthesized)
caaagtattttaaatatgaaggaactaacatttatgaggggatagtttgtaggagaaactgtcctgggtatgttatatacaatatttaaatataacaactctgacttaggtagtattagc

SEQ ID NO: 661533 - DNA, 120 bp, Artificial Sequence
  ENSG00000184432_31 (sequence is synthesized)
tcttttttgaaattgagaaaactgatggtattatagaatcacttgctaaagtatttaatcgttagttttccattcagtgaatactctatcttaagaatgatatcgttaaatttatttttc

SEQ ID NO: 661534 - DNA, 120 bp, Artificial Sequence
  ENSG00000184432_32 (sequence is synthesized)
tcccagatgcccaatataatgatacacagataaatctttcactcagccatatagattatatcagggaaatatttatagtcagcttttgattatacacacatcttacagattgtctgcctg

SEQ ID NO: 661535 - DNA, 120 bp, Artificial Sequence
  ENSG00000184432_33 (sequence is synthesized)
aatgcttgactcattctctttcacctgagtaaataacatatccttcaaattagtttgtctcatattttccagtcttcctagactgtatttaagagtacaaagcatatagttagcactata

SEQ ID NO: 661536 - DNA, 120 bp, Artificial Sequence
  ENSG00000184432_34 (sequence is synthesized)
ctatacagttgtgtctacttatatagtaattatccttaacgtccaaagttaagttcttgaaatccaggtaaaattcgcatttgaggaatttaaaatggcaaaatgacatcaaggaaccaa

SEQ ID NO: 661537 - DNA, 120 bp, Artificial Sequence
  ENSG00000184432_35 (sequence is synthesized)
agccagaagtaaacctaaaaacacctttatacttttatactcactgtaatgaaacagaaatgactgtacactaaactcataccctgtattagtctgttctcacactgctgtaaagaacta

SEQ ID NO: 661538 - DNA, 64 bp, Artificial Sequence
  ENSG00000184432_36 (sequence is synthesized)
aaattttggcagcaggtgaaggggaagcaagcaccttcttcacatgatggcaggagagagagag

SEQ ID NO: 661539 - DNA, 85 bp, Artificial Sequence
  ENSG00000184432_37 (sequence is synthesized)
ggcctcaggaaacttaaaattttggcagcaggtgaaggggaagcaagcaccttcttcacatgatggcaggagagagagagcaaag

SEQ ID NO: 661540 - DNA, 120 bp, Artificial Sequence
  ENSG00000184432_38 (sequence is synthesized)
cccatgatccaatcacctcccaccagggtcctcctccaatttgacatgagatttgggtggggatacaaatccaaaccatatcatagtccatcagtgacattttatataaattaacatttt

SEQ ID NO: 661541 - DNA, 120 bp, Artificial Sequence
  ENSG00000184432_39 (sequence is synthesized)
ttttgttttctgctgtatctcagtacctataacattacctggcacatagtaaatgctcaataattatttgttcaaccaatgaataatatgcatttcacttatcactagttcagtatttgt

SEQ ID NO: 661542 - DNA, 120 bp, Artificial Sequence
  ENSG00000184432_40 (sequence is synthesized)
gttctctacaatttcagatctttatcttgtgaattgtttttgctttgatgcaaataactttttttttttgctttttgtttagttcttgagatgtttaaaatatttctgattttatgttta

SEQ ID NO: 661543 - DNA, 120 bp, Artificial Sequence
  ENSG00000184432_41 (sequence is synthesized)
ccctcttatcagctacatttacctatctcagctctatcacttgatcatcgtatgttctaaagcccaggcgtacttttcttatctttctctaggctttattgtaatatatctctgctttat

SEQ ID NO: 661544 - DNA, 120 bp, Artificial Sequence
  ENSG00000184432_42 (sequence is synthesized)
ctgcatttccactttgcctcctttttctcttctatacctttttctgccctatgacaggaccatctgcttcccctttcataattcatctcagtggtaatttcatgtttaatttccttcttt

SEQ ID NO: 661545 - DNA, 120 bp, Artificial Sequence
  ENSG00000184432_43 (sequence is synthesized)
cctctaagaatggaggttctgtgaggacaaggattaccctcatcttatttcccactgttggtccagtgcatgaggcactacctgatacactgtcaggctcctggtagatagtaagtcttt

SEQ ID NO: 661546 - DNA, 120 bp, Artificial Sequence
  ENSG00000184432_44 (sequence is synthesized)
gttgaatgattaatctgtctttgattctccctgttttttccctgtgtttatatcaccaacagcatttaccactcctatattgagagcaaattcttgagagagccaaaaaggtttttggaa

SEQ ID NO: 661547 - DNA, 120 bp, Artificial Sequence
  ENSG00000184432_45 (sequence is synthesized)
gtaaaaaggtttttagatgtacttgaatttcaaataaggagatgctatatattctttgaggtggtacatgcagtggtttaaaaaacatagtattttaggatttgaagccaacttgctgat

SEQ ID NO: 661548 - DNA, 120 bp, Artificial Sequence
  ENSG00000184432_46 (sequence is synthesized)
taaattatataggcaagccttttaaccatgctgagcctctttatttatctgaagtgaagatgatattattgccttgcctacatcacaggattgtcaaaaagataaaataaaattagataa

SEQ ID NO: 661549 - DNA, 120 bp, Artificial Sequence
  ENSG00000184432_47 (sequence is synthesized)
aattgtgtatgaaacctataaagtaccatataagtattagtcattagttatactttcctaatctacgttgagtatttgtatgtattgtgtgtgtagcttttcttactctttatttgcatc

SEQ ID NO: 661550 - DNA, 120 bp, Artificial Sequence
  ENSG00000184432_48 (sequence is synthesized)
agtcatagcccctaacatggcgttgaaccttggctatttcttctgcagctgctttatttttactgctcagcagatccctggatttgttggctcctcatgagcttttgtggatttttctgc

SEQ ID NO: 661551 - DNA, 120 bp, Artificial Sequence
  ENSG00000184432_49 (sequence is synthesized)
cgtgttatagatcgcatgttgtgtctactctcagtttctgtatcatagtcagctggtagtgattctacaggttagagttgaagtgcctactcattcagcctttgtctaaagaatctttga

SEQ ID NO: 661552 - DNA, 120 bp, Artificial Sequence
  ENSG00000184432_50 (sequence is synthesized)
actctggcttgaaaagtcagagtaggacagttcttatgaaccggtccctattacttttttagtgcacatggttaatcaatcagtaagattatattgtgtttcttagttatttcatttttg

SEQ ID NO: 661553 - DNA, 120 bp, Artificial Sequence
  ENSG00000184432_51 (sequence is synthesized)
ctctctgatacaaaaaaggattagaaaatgatagtttgactttcagacttttaagaacaggcatcaaagaaggagaacaaagaggtaccatgatctctgctctttctaggagggtctcta

SEQ ID NO: 661554 - DNA, 120 bp, Artificial Sequence
  ENSG00000184432_52 (sequence is synthesized)
cctttatcctatgtgtataattccattctgagcagctcggaggaacatataagtcacggtgttttcatattttattaaaaagaaataataacatttgtatggaatcatattgctaaagca

SEQ ID NO: 661555 - DNA, 120 bp, Artificial Sequence
  ENSG00000184432_53 (sequence is synthesized)
atttgtatggaatcatattgctaaagcatgcaaaagaattgtaccttattcatgagtcacttttatgggtttcaatttcaaaaagactgactaggtgcagtggctcacgcctgtaatccc

SEQ ID NO: 661556 - DNA, 82 bp, Artificial Sequence
  ENSG00000184432_54 (sequence is synthesized)
ccaacatggtgaaaccccgtctgtacgaaaaatacaaaaatttgctttaactgaagcatgagaatcacttgaacctgggagg

SEQ ID NO: 661557 - DNA, 70 bp, Artificial Sequence
  ENSG00000184432_55 (sequence is synthesized)
acacctgtaatcccagctacttgggtaactgaatgtgccactgtactgcacttcagcctgggtgacagag

SEQ ID NO: 661558 - DNA, 88 bp, Artificial Sequence
  ENSG00000184432_56 (sequence is synthesized)
gtcagtagagcacttcatgtgataaatttggctgagatggttcactttttttttttttcttttgagacagagtttcgctccattgccc

SEQ ID NO: 661559 - DNA, 120 bp, Artificial Sequence
  ENSG00000184432_57 (sequence is synthesized)
ggcgtgagccactgtgcctggctgagatggttcacttttaaacatcatctcccacttcctaattctgatcatccttttcttgggggaaaactttaaattcccgagtaaattcccttgtct

SEQ ID NO: 661560 - DNA, 120 bp, Artificial Sequence
  ENSG00000184432_58 (sequence is synthesized)
agaatcggctcccggaagttccacgtcagtcagtctgacggtcagtggatcggtgggtttatctcaaggcctgagtagccggtaacaaacgagggttcccgggattggaccgacgcagcc

SEQ ID NO: 661561 - DNA, 120 bp, Artificial Sequence
  ENSG00000184432_59 (sequence is synthesized)
aagggtatgtttattcctgtgctagtaactactcagtgggcatttaaagcaagtaatgtctctgcattataattgtaggtttccaaggattttgatatttttattaaagtaccagactta

SEQ ID NO: 661562 - DNA, 83 bp, Artificial Sequence
  ENSG00000184432_60 (sequence is synthesized)
ttccaaggattttgatatttttattaaagtaccagacttaagctataaaagagtaaaggggcattatatcattctcatgtatt

SEQ ID NO: 661563 - DNA, 120 bp, Artificial Sequence
  ENSG00000184432_61 (sequence is synthesized)
cagggctttgggtagatttggataatttggaattagaagatattgacacaacagatatcaatctggatgaagatattttggatgattgactgtaatgctttccatttacctgactaaaca

SEQ ID NO: 661564 - DNA, 120 bp, Artificial Sequence
  ENSG00000184432_62 (sequence is synthesized)
gtggatcggtgggtttatctcaaggcctgagtagccggtaacaaacgagggttcccgggattggaccgacgcagccatggacttcatgaataacacttcttcagaatatttcctgatatg

SEQ ID NO: 661565 - DNA, 120 bp, Artificial Sequence
  ENSG00000184432_63 (sequence is synthesized)
acacttcttcagaatatttcctgatatgacactattgacctgggcacaaaattgtgatttgtgaatatttaaaattcattggccgggtgcgggggttcacgcctgtaatcctagcacttt

SEQ ID NO: 661566 - DNA, 120 bp, Artificial Sequence
  ENSG00000184432_64 (sequence is synthesized)
ccatggtaggtccagatcccgtagaagggagcggggtcccataggttacggccgattcctggagcttctggactgagggccgcgctgggcatggtagcatgcgcctgtagtcccagctac

SEQ ID NO: 661567 - DNA, 120 bp, Artificial Sequence
  ENSG00000184434_0 (sequence is synthesized)
atacgatgtactttttttaatgccgttgaaacagagttaatttcctttagcacacaagtcttagagacaaaagaaaaaaaggtctgcaacatgaaagtcacaggcatcacaatcctcttt

SEQ ID NO: 661568 - DNA, 120 bp, Artificial Sequence
  ENSG00000184434_1 (sequence is synthesized)
tggcccctctccatgatattattatcagacaaaatccagtcttctaaaagagaagtccaatgtaattttactgaaaaaaattataccttgattccagcagatatcaagaaagatgttact

SEQ ID NO: 661569 - DNA, 120 bp, Artificial Sequence
  ENSG00000184434_2 (sequence is synthesized)
atacttgatctcagttataaccaaattactcttaatggtacagacacaagagttctacagacatactttttactcacagagctctatttgattgagaacaaggttactatcttacataat

SEQ ID NO: 661570 - DNA, 120 bp, Artificial Sequence
  ENSG00000184434_3 (sequence is synthesized)
aacggttttggtaacctctccagtctagaaattttaaatatctgtagaaactccatctatgtaattcaacagggtgcatttttaggcttaaataaactaaaacagttatatctctgccaa

SEQ ID NO: 661571 - DNA, 120 bp, Artificial Sequence
  ENSG00000184434_4 (sequence is synthesized)
aacaaaatagaacaactgaatgctgatgtatttgtgcctctaagaagcctaaaacttctgaatctgcaaggcaatttgattagctatttggatgtaccaccactatttcatctggaatta

SEQ ID NO: 661572 - DNA, 120 bp, Artificial Sequence
  ENSG00000184434_5 (sequence is synthesized)
ataactttatatggaaacctatggaactgctcttgcagtctatttaatttgcagaactggttgaacacatcaaatgtgacattagaaaatgagaacatcaccatgtgtagctaccccaac

SEQ ID NO: 661573 - DNA, 120 bp, Artificial Sequence
  ENSG00000184434_6 (sequence is synthesized)
agcctgcagagctacaatatcaaaacagtacctcataaggctgaatgccactcaaaatttccttcatcagtaactgaagatctttatattcattttcagcccatcagcaattcaatattt

SEQ ID NO: 661574 - DNA, 120 bp, Artificial Sequence
  ENSG00000184434_7 (sequence is synthesized)
aatagctcttcgaacaacttaacaagaaattcagaacatgaacctcttggaaaaagttgggcttttcttgttggtgttgttgtcactgtactgacgacttcacttctcatttttattgct

SEQ ID NO: 661575 - DNA, 120 bp, Artificial Sequence
  ENSG00000184434_8 (sequence is synthesized)
atcaaatgcccaatatggtacaatattctgcttagttataatcatcatcgcctggaagagcatgaagcagaaacctatgaagatggttttactggaaatccaagctctctttcacagata

SEQ ID NO: 661576 - DNA, 120 bp, Artificial Sequence
  ENSG00000184434_9 (sequence is synthesized)
ccagaaacaaactctgaagaaactacagtaatatttgaacaattacattcatttgtggtagatgatgatggatttattgaagacaaatatatagatatccatgaattatgtgaagaaaat

SEQ ID NO: 661577 - DNA, 120 bp, Artificial Sequence
  ENSG00000184434_10 (sequence is synthesized)
taatttctttcaaagtttgctttttaaagcaaagttatcagctcactcagtttagatatggagattttgctatgtgacataacaaaatacagctggcaggcattcatattaatgacaaca

SEQ ID NO: 661578 - DNA, 120 bp, Artificial Sequence
  ENSG00000184434_11 (sequence is synthesized)
tacatgaatatcataaaattatgttctttgcattatattgagcaagcaggttcaaatacagtaactgacactcctcggtagttgacagttacatagtctacaatactagcactactattc

SEQ ID NO: 661579 - DNA, 120 bp, Artificial Sequence
  ENSG00000184434_12 (sequence is synthesized)
ttagcagtgcttgggtgaccatacgaactagtaaaaaggtctaaattattcatgaattaaaatgaatggattctcatattaacacaggtatttgacataatatgtattaagttatactaa

SEQ ID NO: 661580 - DNA, 120 bp, Artificial Sequence
  ENSG00000184434_13 (sequence is synthesized)
tgtttcaatcagtaaagaaataaaagtttaggatttattaatatatggaagtcaaagtgaggaacagagatagcttaaataatacactaagattgattttatgctcccagaataaaatca

SEQ ID NO: 661581 - DNA, 120 bp, Artificial Sequence
  ENSG00000184434_14 (sequence is synthesized)
aataagtcactattgattctggttataaagaaaggctgtcaccataatgcaggatcactacagtttaatgtcatactggcttccaaagtgggcatcacaattatctataaatcttgtttt

SEQ ID NO: 661582 - DNA, 120 bp, Artificial Sequence
  ENSG00000184434_15 (sequence is synthesized)
aaaaatacatatttccacctctctctgggagatttttattcaaattggtctgtgctgacactaaggaatcttcatgtggtccatggacagctatttctatctattcagtagatagagcaa

SEQ ID NO: 661583 - DNA, 120 bp, Artificial Sequence
  ENSG00000184434_16 (sequence is synthesized)
tgtttcccaaattgtttttctagaatactaatttccagagagacattcacaagtatttacagaagaagaaggaggtacatggtcaaattactacaggaaaaactagtagtttaaacaagg

SEQ ID NO: 661584 - DNA, 77 bp, Artificial Sequence
  ENSG00000184434_17 (sequence is synthesized)
tttttttttttgagacaaagtctcgcactgtctcccaggctggactgcagcagcgcagtctcaactcagcctcccga

SEQ ID NO: 661585 - DNA, 120 bp, Artificial Sequence
  ENSG00000184434_18 (sequence is synthesized)
cccaaagtgctgggattacaggcatggagcaccgtgcctggccaagattctttacaataggatttatgtaaaactttactaagctaaactgctctctgattattcaagagcaaagtatta

SEQ ID NO: 661586 - DNA, 120 bp, Artificial Sequence
  ENSG00000184434_19 (sequence is synthesized)
taaactgctctctgattattcaagagcaaagtattaaaaatttctcaaacttacttgacaacaaaacccattctttcagttacatctactaagagctcgtagttcaataacattccaaag

SEQ ID NO: 661587 - DNA, 120 bp, Artificial Sequence
  ENSG00000184434_20 (sequence is synthesized)
aacgtagtttggaaaacactggcctatcggctgtaataggaagggtctaaagaaaattatttgctgagtcctcataatcaattggctataatcacaatttaataatttatcaatgcaaac

SEQ ID NO: 661588 - DNA, 120 bp, Artificial Sequence
  ENSG00000184434_21 (sequence is synthesized)
agtacattaaaaactgtagcacaatctataatttttaccttcatatgcagagaaattaagaatttacatcttttacaaatatgtatatctctgaaataatgaaatatattgatgggtgaa

SEQ ID NO: 661589 - DNA, 120 bp, Artificial Sequence
  ENSG00000184434_22 (sequence is synthesized)
ataatatttctggtattttcttcattataacacgtggaatggaacagtggctagaggtatggatggagcaaggtcaaatatgagctgatggagctgggagctaaataagggtataatatg

SEQ ID NO: 661590 - DNA, 120 bp, Artificial Sequence
  ENSG00000184434_23 (sequence is synthesized)
ctacttctgtgtatgttgtgtatggtatagtatgctatttctgtgtatgttcaaattgtttatgtatataataaagttttaaaaatttgtatgtacttgacaattccttagaaaaaagag

SEQ ID NO: 661591 - DNA, 120 bp, Artificial Sequence
  ENSG00000184434_24 (sequence is synthesized)
ttgacaattccttagaaaaaagaggctaaaataaaatagatctatgtcataatctatagaatagtcattttaaaagttacataattagtaaattcaatacaaatgtctactgagagaaaa

SEQ ID NO: 661592 - DNA, 120 bp, Artificial Sequence
  ENSG00000184434_25 (sequence is synthesized)
aaaatagaagaacttactaatttataatacatatttgcttgtgtttacagacacatgttttcaacaaaggatataagtatattatggctaatgtttctttatatatcaattatactttgt

SEQ ID NO: 661593 - DNA, 120 bp, Artificial Sequence
  ENSG00000184434_26 (sequence is synthesized)
aagaatgagatgattataggaacataaaatatctttttctaaacaatgtatcattctgctaaattatttcctaattataagatgcaaatattaatatttgagaaatgtagcaaaatgaaa

SEQ ID NO: 661594 - DNA, 120 bp, Artificial Sequence
  ENSG00000184434_27 (sequence is synthesized)
atgtagcaaaatgaaatataattgcaaatgagcaaagactacacttaagcttttatattcaagggcctctgttgaatatggggtattcaataaatatctgactacacaaagaaaaataaa

SEQ ID NO: 661595 - DNA, 120 bp, Artificial Sequence
  ENSG00000184436_0 (sequence is synthesized)
gcgagacttcggcggcgcagcaatggccagagcgtgagtgccgctgacagaagtcaagagaatcggctgggacggggttggggcgacaacgggccgggggggacccgacaggccagagcc

SEQ ID NO: 661596 - DNA, 120 bp, Artificial Sequence
  ENSG00000184436_1 (sequence is synthesized)
ccttggggaggagcggcggctggaggcgcgaggctcctccggatgcccggagagccgcttgcgacttaactcccgcctctttcccagatgccgcgtcactgctccgccgccggctgctgc

SEQ ID NO: 661597 - DNA, 120 bp, Artificial Sequence
  ENSG00000184436_2 (sequence is synthesized)
acacgggacacgcgcgagacgcgcaaccgcggcatctccttccacagacttcccaagaaggacaacccgaggcgaggcttgtggctggccaactgccagcggctggaccccagcggccag

SEQ ID NO: 661598 - DNA, 120 bp, Artificial Sequence
  ENSG00000184436_3 (sequence is synthesized)
ggcctgtgggacccggcatccgagtacatctacttctgctccaaacactttgaggaggactgctttgagctggtgggaatcagtggatatcacaggctaaaggagggggcagtccccacc

SEQ ID NO: 661599 - DNA, 120 bp, Artificial Sequence
  ENSG00000184436_4 (sequence is synthesized)
atatttgagtctttctccaagttgcgccggacaaccaagaccaaaggacacagttacccacctggccccgctgaagtcagccggctcagacgatgcaggaagcgctgctccgagggccga

SEQ ID NO: 661600 - DNA, 120 bp, Artificial Sequence
  ENSG00000184436_5 (sequence is synthesized)
gggcccacaactccattttctccacctccacctgctgatgtcacctgctttcctgtggaagaggcctcagcacctgccactttgccggcctccccagctgggaggctggagcctggcctt

SEQ ID NO: 661601 - DNA, 120 bp, Artificial Sequence
  ENSG00000184436_6 (sequence is synthesized)
agcagccccttttcagacctactgggccccttgggtgcccaggcagatgaagcaggctgcagcgcccagccttcaccagagcggcagccctcccctctcgaaccacggccagtctccccc

SEQ ID NO: 661602 - DNA, 120 bp, Artificial Sequence
  ENSG00000184436_7 (sequence is synthesized)
tgcccttgacaaggcccagcgccagctgcaggcctgcaagcggcgggagcagcggctgcggttgagactgaccaagctgcagcaggagcgggcacgggagaagcgggcacaggcagatgc

SEQ ID NO: 661603 - DNA, 120 bp, Artificial Sequence
  ENSG00000184436_8 (sequence is synthesized)
ccgccagactctgaaggagcatgtgcaggactttgccatgcagctgagcagcagcatggcctgaggggctgctggactgaccgaggggctgcccagcaagactgcagcctcttcctccct

SEQ ID NO: 661604 - DNA, 120 bp, Artificial Sequence
  ENSG00000184436_9 (sequence is synthesized)
cagatcccaccagacccaccaggtgccataataaagcggattctagacggagggcctgctgtctggctcagctgggggctggagcccctctgagtactaagcttgctgccccagacagtg

SEQ ID NO: 661605 - DNA, 120 bp, Artificial Sequence
  ENSG00000184436_10 (sequence is synthesized)
gctgcagctcctagagggctcagtccaagctctttgccaaggagaacagggagcctggctctcacccctcagagctactggtagacaggtggcagtcagccctgctagcgcagctccgtg

SEQ ID NO: 661606 - DNA, 120 bp, Artificial Sequence
  ENSG00000184436_11 (sequence is synthesized)
ccccacagggttctctgaaggggcaggatggtgtgagtaggggccaggaagacagctccaggcgccctttccataggatctgaaacagccctgacttaaaccagccagcccctttgagaa

SEQ ID NO: 661607 - DNA, 120 bp, Artificial Sequence
  ENSG00000184436_12 (sequence is synthesized)
cacttctaaaacccagtctagatccggttctcaagcaggagcatgacaggcttctgtccacaggccccatcagcctggtgggtaagctggacaaccctctccccgcccccttcactacca

SEQ ID NO: 661608 - DNA, 120 bp, Artificial Sequence
  ENSG00000184436_13 (sequence is synthesized)
tctctatttgaaaaacggggatgatgatgacaatcatcaacctcctgggtcatgtcagcaggtagtaaagccccaacaagctagtccctggaaatctaggaagaggtggccagaacatgg

SEQ ID NO: 661609 - DNA, 120 bp, Artificial Sequence
  ENSG00000184436_14 (sequence is synthesized)
agacaagcactcaggtcctggcctcagcatccttttccttcaactcccaggaacctggaaggccttgctgcagctgcagttctcaaacagctccgtcttggggtgactcactgcaagtat

SEQ ID NO: 661610 - DNA, 120 bp, Artificial Sequence
  ENSG00000184436_15 (sequence is synthesized)
cccgccccgccccggtggcgggggcacctccggctctccagtctctatggtaccaacttccggcgcgcgctacccctcgcgagacttcggcggcgcagcaatggccagagcatgccgcgt

SEQ ID NO: 661611 - DNA, 120 bp, Artificial Sequence
  ENSG00000184436_16 (sequence is synthesized)
aggactgctttgagctggtgggaatcaggtgggcctccctgccggccgacgctggggtaggatgtggggctcccggcggactgggacagctgcaggtcatggaagtcccttgagcagcct

SEQ ID NO: 661612 - DNA, 120 bp, Artificial Sequence
  ENSG00000184436_17 (sequence is synthesized)
gcgtccaagggggctgtttcctgttcccagctctgcacagtgaaacccacccccaggatcactgtgcctgtgacacaaggggaaaacaggagcctttccagagagtatctttcagagccc

SEQ ID NO: 661613 - DNA, 120 bp, Artificial Sequence
  ENSG00000184436_18 (sequence is synthesized)
cagtcttgccagcaagtccacaaatcaaagaattctttctggctggtcagcccagctcggcttatgcaggctttccacacacctggactgtgaggagtcctgcggggaagcgattggtgt

SEQ ID NO: 661614 - DNA, 120 bp, Artificial Sequence
  ENSG00000184436_19 (sequence is synthesized)
agctgtaacttggcgttccccagacgtattgtttgcacgatgccttccagcatcccacggcgctgctgctgggggcagattggcctggggaggcagcacttgctctccagctcatctggg

SEQ ID NO: 661615 - DNA, 120 bp, Artificial Sequence
  ENSG00000184436_20 (sequence is synthesized)
cgctagttgttgctcgcctcgggtcgcaactgcgtagaggcttcgcgcctttctcagatactgaggaggcttgaacctgtgggtgggaggtgaagcggaacggtcccggcgggactgaat

SEQ ID NO: 661616 - DNA, 120 bp, Artificial Sequence
  ENSG00000184436_21 (sequence is synthesized)
gcagtcgggaaggggaggacgggaagtctagccggcttggacccgccccactctgttacctgccagatgacgctgaggaaactgcttttcttctcgaggcctccgttgcctcgtctgtgc

SEQ ID NO: 661617 - DNA, 120 bp, Artificial Sequence
  ENSG00000184436_22 (sequence is synthesized)
ccgggcggtggtgcttacccggcggggtcgcagggaggtctcgtggcggcgcgtgttgggtctgcgtttcccctctggggtgcttgggcagcatgagcccagggctgtggacagcctggt

SEQ ID NO: 661618 - DNA, 120 bp, Artificial Sequence
  ENSG00000184436_23 (sequence is synthesized)
gcgagacttcggcggcgcagcaatggccagagcatgccgcgtcactgctccgccgccggctgctgcacacgggacacgcgcgagacgcgcaaccgcggcatctccttccacaggtcagcg

SEQ ID NO: 661619 - DNA, 120 bp, Artificial Sequence
  ENSG00000184445_0 (sequence is synthesized)
aatttaagcctgtggcatggaacctaaagactagaggcggttgtgtgagtcaggaagaggggccagatatctgagtgttcctctttagtttcttcaattgcagataatatggtgtctaat

SEQ ID NO: 661620 - DNA, 120 bp, Artificial Sequence
  ENSG00000184445_1 (sequence is synthesized)
tttatgttgttcaggaaagacagtggttcctgactcaggaagacagtctcagaaacatgtggaatgatattgagctgctaacaaatgatgataccggaagtgggtacctgagtgtcggtt

SEQ ID NO: 661621 - DNA, 120 bp, Artificial Sequence
  ENSG00000184445_2 (sequence is synthesized)
caagaaaagaacatggaactgctttatatcaagtagatttgctagtgaagatctcttctgaaaaggcctcattaaatccaaagatacaggcatgcagcttaagtgatgggtttattattg

SEQ ID NO: 661622 - DNA, 120 bp, Artificial Sequence
  ENSG00000184445_3 (sequence is synthesized)
tagccgaccaatcagtgatattgcttgacagtatttgtagatcacttcaattgcatcttgtctttgatactgaagtggatgtagttggcctttgtcaagaaggaaagtttcttttggttg

SEQ ID NO: 661623 - DNA, 120 bp, Artificial Sequence
  ENSG00000184445_4 (sequence is synthesized)
gcgagagaagtggcaacctacatcttattcatgtaacatcaaaacaaacactactcactaatgcatttgttcagaaagctaacgatgaaaatcggcggacttaccagaatcttgtcattg

SEQ ID NO: 661624 - DNA, 120 bp, Artificial Sequence
  ENSG00000184445_5 (sequence is synthesized)
agaaggatggttcaaatgaaggtacctattatatgctacttcttacatacagtggatttttttgtattacaaaccttcagcttttaaaaattcaacaagcaattgagaatgtagacttca

SEQ ID NO: 661625 - DNA, 120 bp, Artificial Sequence
  ENSG00000184445_6 (sequence is synthesized)
gtacagcaaaaaagttacaaggacaaatcaagtccagttttatttctactgaaaattatcatactcttggttgtctcagtcttgtggctggagatttagcaagtgaagttcctgtgataa

SEQ ID NO: 661626 - DNA, 120 bp, Artificial Sequence
  ENSG00000184445_7 (sequence is synthesized)
ttgggggaaccggtaattgtgcattctcaaaatgggaaccagattcttccaagaaaggaatgacagttaagaaccttattgatgcagagattattaaaggtgcaaagaagttccagctga

SEQ ID NO: 661627 - DNA, 120 bp, Artificial Sequence
  ENSG00000184445_8 (sequence is synthesized)
tagacaatctactttttgttcttgatactgataacgtgctgagtttatgggatatttacactctaactcctgtatggaactggccctctcttcacgtagaagagtttcttcttactacag

SEQ ID NO: 661628 - DNA, 120 bp, Artificial Sequence
  ENSG00000184445_9 (sequence is synthesized)
aagcagactctccttcatcagtcacgtggcaaggaattacaaatctcaaattaatagctctgacagcttcagctaataagaagatgaaaaacctcatggtttattcattacctacaatgg

SEQ ID NO: 661629 - DNA, 120 bp, Artificial Sequence
  ENSG00000184445_10 (sequence is synthesized)
aaatactatattctttggaagtatctagtgtttcttctctggtccaaacaggaattagcacagataccatataccttttagaaggagtttgcaaaaatgatccaaaattgtctgaagact

SEQ ID NO: 661630 - DNA, 120 bp, Artificial Sequence
  ENSG00000184445_11 (sequence is synthesized)
cagtctctgtgttagtactcagatgtcttacggaagctttaccagaaaacagattgagtcggttacttcacaaacacagatttgctgaagctgagagttttgccattcagtttggactag

SEQ ID NO: 661631 - DNA, 120 bp, Artificial Sequence
  ENSG00000184445_12 (sequence is synthesized)
atgttgagcttgtttacaaggtcaagtcaaatcatatattggagaaactggcattgagttctgtggatgccagtgaacagaccgaatggcaacaacttgtagacgacgctaaggaaaatc

SEQ ID NO: 661632 - DNA, 120 bp, Artificial Sequence
  ENSG00000184445_13 (sequence is synthesized)
tacataagatccaggatgatgaatttgtggtgaattactgcctgaaagctcagtggataacctatgaaaccactcaagagatgctgaattatgccaaaaccaggcttttgaagaaagaag

SEQ ID NO: 661633 - DNA, 120 bp, Artificial Sequence
  ENSG00000184445_14 (sequence is synthesized)
ataaaactgctctcatttattctgatggcttgaaagaggtgctaagagctcatgcaaaattgactactttttatggagcatttggaccagaaaaattcagtggcagttcttggattgaat

SEQ ID NO: 661634 - DNA, 120 bp, Artificial Sequence
  ENSG00000184445_15 (sequence is synthesized)
ttctaaataatgaagatgatcttaaagatatttttttacagctaaaagaaggaaaccttgtttgtgcacagtatctttggcttcgacatcgggcaaactttgaaagcagatttgatgtga

SEQ ID NO: 661635 - DNA, 120 bp, Artificial Sequence
  ENSG00000184445_16 (sequence is synthesized)
aaatgctggagagcttgctcaactcaatgtctgcatcagtctctttgcaaaagctgtgtccatggtttaaaaatgatgtgattccatttgtaagaaggactgtgcctgaaggacagataa

SEQ ID NO: 661636 - DNA, 120 bp, Artificial Sequence
  ENSG00000184445_17 (sequence is synthesized)
ttcttgcaaaatggttggaacaagcagccaggaaccttgaattaactgataaggcaaattggccagaaaatggacttcaattggcagagatattttttacagcagaaaaaacagacgagt

SEQ ID NO: 661637 - DNA, 120 bp, Artificial Sequence
  ENSG00000184445_18 (sequence is synthesized)
tgggattggcatcttcctggcattggatttccttgaaagattatcagaacacagaggaagtatgtcagctaaggactttggtaaataacttgcgagagttgatcacgttgcataggaagt

SEQ ID NO: 661638 - DNA, 120 bp, Artificial Sequence
  ENSG00000184445_19 (sequence is synthesized)
acaactgcaaattagccctctctgattttgagaaggaaaatacaaccaccatagtgttccgaatgtttgataaagtgctggccccagagcttattccctccatcttagagaagtttataa

SEQ ID NO: 661639 - DNA, 120 bp, Artificial Sequence
  ENSG00000184445_20 (sequence is synthesized)
gagtttacatgagagaacatgacttgcaagaggaggaacttctcttgctgtacatagaggatttactgaatagatgcagctcaaagtccacatcactctttgaaacagcatgggaagcaa

SEQ ID NO: 661640 - DNA, 120 bp, Artificial Sequence
  ENSG00000184445_21 (sequence is synthesized)
aggccatggcagtaatagcgtgtttatctgacacggacctcatatttgatgccgtgctcaagatcatgtatgcggcagtggttccttggagtgcagctgtggagcaactggtgaaacagc

SEQ ID NO: 661641 - DNA, 120 bp, Artificial Sequence
  ENSG00000184445_22 (sequence is synthesized)
acctggaaatggaccatcccaaagtcaagttattacaggaaagttacaaactaatggagatgaaaaaacttttacgaggctatggaataagagaggtaaatctcttaaacaaggaaataa

SEQ ID NO: 661642 - DNA, 120 bp, Artificial Sequence
  ENSG00000184445_23 (sequence is synthesized)
tgagagtggttagatacattctcaaacaagatgtcccatcttctttagaagatgctttaaaggtagcccaagcgtttatgttatctgatgatgagatctacagtctaagaattattgacc

SEQ ID NO: 661643 - DNA, 120 bp, Artificial Sequence
  ENSG00000184445_24 (sequence is synthesized)
tgattgatagagaacagggtgaagactgtctccttctgttgaagtctttgcctcctgctgaagctgagaaaactgcagaaagagtcatcatatgggcacgactggcattacaagaagagc

SEQ ID NO: 661644 - DNA, 120 bp, Artificial Sequence
  ENSG00000184445_25 (sequence is synthesized)
cagatcattctaaagagggcaaggcctggagaatgtctgtagcgaagacatccgtggacattcttaagatactatgtgacattcagaaagacaatctgcagaagaaggacgaatgtgaag

SEQ ID NO: 661645 - DNA, 120 bp, Artificial Sequence
  ENSG00000184445_26 (sequence is synthesized)
aaatgttgaaactatttaaagaggttgctagcttacaggagaactttgaggtctttctttcatttgaagattatagcaatagttccctggtagcagatctccgtgagcagcacattaaag

SEQ ID NO: 661646 - DNA, 120 bp, Artificial Sequence
  ENSG00000184445_27 (sequence is synthesized)
ctcacgaagttgcacaggcgaaacacaaacctgggagcaccccagagcccatagctgctgaggtgaggagcccaagcatggaatcaaagctgcacagacaggcactggccctgcagatgt

SEQ ID NO: 661647 - DNA, 120 bp, Artificial Sequence
  ENSG00000184445_28 (sequence is synthesized)
ccaaacaagagctggaggcagagctgaccttgagagccttaaaagatgggaacatcaaaacagcactgaaaaaatgcagcgacttgtttaagtatcactgcaatgctgacactgggaaat

SEQ ID NO: 661648 - DNA, 120 bp, Artificial Sequence
  ENSG00000184445_29 (sequence is synthesized)
tgtcagaagctttgtcagatgttggctgataatgtcccagtgacagtgcctgtgggactgaatcttccttccatgatacatgatctagcaagccaagctgccaccatttgcagtccagat

SEQ ID NO: 661649 - DNA, 120 bp, Artificial Sequence
  ENSG00000184445_30 (sequence is synthesized)
tttttactagatgctttagaactatgtaaacatactttaatggctgtagagctttccagacaatgccaaatggatgactgtggaatcctcatgaaagcttcttttgggacacataaagat

SEQ ID NO: 661650 - DNA, 120 bp, Artificial Sequence
  ENSG00000184445_31 (sequence is synthesized)
ccatatgaagagtggtcttacagtgacttcttcagtgaagatggaattgttcttgagtcacagatggtgcttccagtgatttatgaactgatttcatctcttgtgcctctagctgaaagc

SEQ ID NO: 661651 - DNA, 120 bp, Artificial Sequence
  ENSG00000184445_32 (sequence is synthesized)
aagagatatcccttggagtctaccagtttgccatactgctcccttaatgaaggagatggccttgttttacctgttataaattccatctctgccctgcttcagaatcttcaggaatctagc

SEQ ID NO: 661652 - DNA, 120 bp, Artificial Sequence
  ENSG00000184445_33 (sequence is synthesized)
cagtgggagctagccctaagatttgtggttggttcatttggtacctgtcttcagcactctgtgtcaaacttcatgaatgccactttgagtgaaaagttatttggagagactacattagtt

SEQ ID NO: 661653 - DNA, 120 bp, Artificial Sequence
  ENSG00000184445_34 (sequence is synthesized)
aaatcaaggcatgttgttatggaattgaaagaaaaagctgttatatttatcagggaaaatgctacaacactactgcacaaagtatttaattgtcgcttggtagatcttgacctggcgttg

SEQ ID NO: 661654 - DNA, 120 bp, Artificial Sequence
  ENSG00000184445_35 (sequence is synthesized)
ggttactgcactctcttacctcaaaaagatgtgtttgaaaatctctggaagctcatagataaagcatggcagaattacgacaaaatcttggcaatatctctggtgggctctgagctggca

SEQ ID NO: 661655 - DNA, 120 bp, Artificial Sequence
  ENSG00000184445_36 (sequence is synthesized)
agtctctatcaggaaatagaaatggggcttaagttccgtgaactcagtactgatgcccagtggggcattcgtcttggtaaacttggtatttcttttcaaccagttttcaggcaacatttt

SEQ ID NO: 661656 - DNA, 120 bp, Artificial Sequence
  ENSG00000184445_37 (sequence is synthesized)
ctcaccaagaaagacctcattaaagctcttgtggagaatatagatatggacacaagcctcattttggaatattgcagcacatttcagttggactgcgatgcagttcttcagctcttcatt

SEQ ID NO: 661657 - DNA, 120 bp, Artificial Sequence
  ENSG00000184445_38 (sequence is synthesized)
gaaacgctgctccacaacacaaatgccggccaaggccagggagatgcaagcatggactctgcaaagcggcggcatcccaaactcctggccaaagcccttgagatggttcctttactgacg

SEQ ID NO: 661658 - DNA, 120 bp, Artificial Sequence
  ENSG00000184445_39 (sequence is synthesized)
agcacaaaagatttggtcatcagtcttagtggaatactacataagttggatccttatgactatgaaatgattgaagttgtcttgaaagttatagaacgagctgatgaaaagataaccaat

SEQ ID NO: 661659 - DNA, 120 bp, Artificial Sequence
  ENSG00000184445_40 (sequence is synthesized)
attaatattaatcaggcattgagtattctgaaacatttgaagtcatacagaagaatttctcctcccgtggatctagaatatcagtatatgttggaacatgtcataactttgccatcagct

SEQ ID NO: 661660 - DNA, 120 bp, Artificial Sequence
  ENSG00000184445_41 (sequence is synthesized)
gcccaaactagactgccttttcacctgatattctttggcacagcacagaacttctggaaaattctctctacagaactcagtgaagaatctttcccaacattgctcttaatttcgaaatta

SEQ ID NO: 661661 - DNA, 120 bp, Artificial Sequence
  ENSG00000184445_42 (sequence is synthesized)
atgaagttctctctggacactctgtacgtgtctacagcaaaacacgttttcgaaaaaaaactgaagccaaagctcctgaagttaacacaagctaaatcctcaacactgattaacaaggaa

SEQ ID NO: 661662 - DNA, 120 bp, Artificial Sequence
  ENSG00000184445_43 (sequence is synthesized)
ataactaagatcacgcagaccatcgaatcctgcttactctctatagtcaacccagagtgggctgtagctattgccatcagccttgcccaggatatccctgaaggttccttcaagatatct

SEQ ID NO: 661663 - DNA, 120 bp, Artificial Sequence
  ENSG00000184445_44 (sequence is synthesized)
gctttgaaattctgcctttatttagctgagagatggctacagaatatcccatcgcaggacgaaaaacgtgaaaaagccgaggctttgttgaagaagcttcatatccagtaccggcgatcg

SEQ ID NO: 661664 - DNA, 120 bp, Artificial Sequence
  ENSG00000184445_45 (sequence is synthesized)
ggcacagaagctgtgctcatagcccacaagctgaacactgaggaatatttaagagtgatcggaaagccagcacatcttattgtcagtctctacgaacatcctagcatcaatcaaagaatt

SEQ ID NO: 661665 - DNA, 120 bp, Artificial Sequence
  ENSG00000184445_46 (sequence is synthesized)
cagaattcatctggcacagattatcctgatattcatgcagcagctaaagaaatagccgaagtcaatgaaattaatttggaaaaagtctgggacatgttgttggaaaaatggctatgccct

SEQ ID NO: 661666 - DNA, 120 bp, Artificial Sequence
  ENSG00000184445_47 (sequence is synthesized)
tcaacaaaacctggtgaaaaaccatcagaattatttgaacttcaagaagatgaagccctacgaagagtgcagtatctcctcctgtctcgtccaattgattatagttcaagaatgctgttt

SEQ ID NO: 661667 - DNA, 120 bp, Artificial Sequence
  ENSG00000184445_48 (sequence is synthesized)
gtatttgcaacatcaactacaaccacattaggtatgcatcagttaacttttgcccatagaactcgagctcttcagtgtctcttctatttggctgacaaggaaactatagaatctctcttt

SEQ ID NO: 661668 - DNA, 120 bp, Artificial Sequence
  ENSG00000184445_49 (sequence is synthesized)
aaaaaacccattgaagaagtgaaatcttatttgagatgtataacttttctggcatcatttgagactttgaatatccccatcacatatgaattattttgcagcagtcctaaagaaggaatg

SEQ ID NO: 661669 - DNA, 120 bp, Artificial Sequence
  ENSG00000184445_50 (sequence is synthesized)
attaagggtctgtggaaaaaccacagccacgagtccatggcagtaagattggtgactgagctgtgtttagaatacaaaatctatgacctgcagctttggaatggactcttgcaaaagctt

SEQ ID NO: 661670 - DNA, 120 bp, Artificial Sequence
  ENSG00000184445_51 (sequence is synthesized)
ctgggcttcaatatgattccttatctaaggaaagttttaaaagccatctccagtatccattctttatggcaggttccctacttcagcaaagcgtggcagcgtgtgatacagataccactg

SEQ ID NO: 661671 - DNA, 120 bp, Artificial Sequence
  ENSG00000184445_52 (sequence is synthesized)
ctttcagcctcttgtcctttaagtcctgatcagctgtcagattgttctgagagtctcatcgctgtcctcgaatgtccagtctcaggtgatcttgacctgatcggagtcgccaggcagtat

SEQ ID NO: 661672 - DNA, 120 bp, Artificial Sequence
  ENSG00000184445_53 (sequence is synthesized)
atccagttagaacttccggcttttgcattagcttgtctgatgctcatgccccactcagagaaaagacaccagcaaattaagaattttctgggttcctgtgaccctcaggttattttaaag

SEQ ID NO: 661673 - DNA, 120 bp, Artificial Sequence
  ENSG00000184445_54 (sequence is synthesized)
caattggaagagcatatgaacacgggccagctagcaggattttcacatcaaattagaagtctgattttgaataatatcatcaataagaaggagtttgggattttggcaaagaccaaatac

SEQ ID NO: 661674 - DNA, 120 bp, Artificial Sequence
  ENSG00000184445_55 (sequence is synthesized)
tttcaaatgttgaagatgcatgcgatgaataccaacaatatcactgagctagtgaactatttggcaaatgacttaagtttagatgaagcttcagtcttgataactgaatattcaaagcac

SEQ ID NO: 661675 - DNA, 120 bp, Artificial Sequence
  ENSG00000184445_56 (sequence is synthesized)
tgcgggaaacctgtgcctccagacactgctccctgtgaaattctgaagatgtttcttagtggattatcgtaaatcactgaacctttttttcaagaaggacaagaattttggagtctgcta

SEQ ID NO: 661676 - DNA, 120 bp, Artificial Sequence
  ENSG00000184445_57 (sequence is synthesized)
ttaatggaccatatttattacagtttttaaattgtacaatctctgtattatagctatttgtctaacattaccccacatgtaataaataaaacaatatgagcataattgccccataaagaa

SEQ ID NO: 661677 - DNA, 120 bp, Artificial Sequence
  ENSG00000184445_58 (sequence is synthesized)
aggtgtgagccactgcacccggcctaatatctgatttttaaaaggcaataattagctttgatgacaggtagtttgtctgattttgagactggacaatgacaaggttaaatttcaacaatg

SEQ ID NO: 661678 - DNA, 120 bp, Artificial Sequence
  ENSG00000184445_59 (sequence is synthesized)
ttttgagactggacaatgacaaggttaaatttcaacaatggaagcatgtacccaagtgttttgtcagatactttgcatggaaatgcctgcagtttgggagactggtgtgtattgaatgct

SEQ ID NO: 661679 - DNA, 120 bp, Artificial Sequence
  ENSG00000184445_60 (sequence is synthesized)
tgagtaaacaaatatgagtagacccatcagttaagcaaaaatcttttcataatttatgttataatttttcaatgtaaacataatatcgtatattaggttttttatctaatagattttcag

SEQ ID NO: 661680 - DNA, 120 bp, Artificial Sequence
  ENSG00000184445_61 (sequence is synthesized)
acatttttttcctgtttatttaccatgcttgattgcattaacagatgattcagataatgctcacgtacatatgtattcaaagtctgtctcatctcctaagcaagcattgtcttgcaccat

SEQ ID NO: 661681 - DNA, 120 bp, Artificial Sequence
  ENSG00000184445_62 (sequence is synthesized)
tccctggtcagtccacattcctgaagccaggagccaaacaaactgtccacaaacaagtctccaccaaggcctaatctggctgcatgctctggtcagaccaccccttctgcccactaaatt

SEQ ID NO: 661682 - DNA, 120 bp, Artificial Sequence
  ENSG00000184445_63 (sequence is synthesized)
ctagctagattgaacttgcaatttcccctaacggcaatatgacctttagcttcaggttcttgcctatagaaatgtcctctgaggcagttggagcagagagaggagaaggggatggagcca

SEQ ID NO: 661683 - DNA, 120 bp, Artificial Sequence
  ENSG00000184445_64 (sequence is synthesized)
gtaggcaaatgattctcagagaaaaggaagaaaaggaagtctgaggtgctgattttaaagtccgtgacaaaaaggaaaaagcctccccttatattctctacatataaagacttacgacct

SEQ ID NO: 661684 - DNA, 120 bp, Artificial Sequence
  ENSG00000184445_65 (sequence is synthesized)
aaaaatggtattccatgaaaggtggctagtgcagctcacagctcagctgtgtacatgcttttctttgcagtctgccttatgtgtacttcccattaattagtattagcatgtattcaaatg

SEQ ID NO: 661685 - DNA, 120 bp, Artificial Sequence
  ENSG00000184445_66 (sequence is synthesized)
ggaattcacattagtatgatatacagtaatctttccgtatctgtgggaggactggttccaggacccccaaggataccaaaatctgaggacgctcaagtctttcatataaaacggtgtcat

SEQ ID NO: 661686 - DNA, 120 bp, Artificial Sequence
  ENSG00000184445_67 (sequence is synthesized)
atttatcttgttcaaattgatttctatctaatgttattatatattcagtgaatatatttggaagtccaaaatggacatttaaaacaaactggcctaatatttccatatggtagtttttat

SEQ ID NO: 661687 - DNA, 120 bp, Artificial Sequence
  ENSG00000184445_68 (sequence is synthesized)
ggattacagacatgagctaccgcgcccagccttgagctttatttttgacattgtaaaagaacagacaagcaggcagggcgcaatcttgtctttgacaggatctcattctgtcacccaggc

SEQ ID NO: 661688 - DNA, 74 bp, Artificial Sequence
  ENSG00000184445_69 (sequence is synthesized)
acccaggctggagtgcagtggcattatcatggctcactgcagccttgacctctagggcctaagtgatcctccca

SEQ ID NO: 661689 - DNA, 120 bp, Artificial Sequence
  ENSG00000184445_70 (sequence is synthesized)
accctgttttctttaccaaaaatataagacattttatttgccaacagttgacttatcagaaaggtaatcagtacagaaatgctatatgttttgaagcttaattcttctgcagtaatggaa

SEQ ID NO: 661690 - DNA, 120 bp, Artificial Sequence
  ENSG00000184445_71 (sequence is synthesized)
ggttaggatgactaagaggagtttcggacccatgtacacctcaaatctcagaatgatggctgggttgggtagtgtgaggttggaggagctatagacaaatgtttctttttgaaaaaggat

SEQ ID NO: 661691 - DNA, 120 bp, Artificial Sequence
  ENSG00000184445_72 (sequence is synthesized)
ggagctatagacaaatgtttctttttgaaaaaggatactaagaaggcaagtcatgatgttgcccttactctgatacatttcagtgtagagggtttttttgctttgtttttttctttttat

SEQ ID NO: 661692 - DNA, 120 bp, Artificial Sequence
  ENSG00000184445_73 (sequence is synthesized)
atgaaaacagctttgaccctttccctcttgaaggagtctcaggaatgccccttcaggggtccatggaccacatgttaagaaccactgttacacacagtgcgttccgtaactgtagagatt

SEQ ID NO: 661693 - DNA, 120 bp, Artificial Sequence
  ENSG00000184445_74 (sequence is synthesized)
gactttacattttaaaataatgacgttgtttatgttgcctatgttgaaactcatttacccaactacaatgtgcaggtgttcaactctccaaacctcttttggtttttcagacattaggta

SEQ ID NO: 661694 - DNA, 120 bp, Artificial Sequence
  ENSG00000184445_75 (sequence is synthesized)
tatagtttagatgaataatgttaaagagaatactagaaaaggttttgatcctctttctgaaaacaagatggtctcaggaatggaaacttttgatggtatactattagatgattttatgac

SEQ ID NO: 661695 - DNA, 86 bp, Artificial Sequence
  ENSG00000184445_76 (sequence is synthesized)
tccctacttcagcaaagcgtggcagcgtgtgatacagataccactgctttcagcctcttgtcctttaagtcctgatcagctgtcag

SEQ ID NO: 661696 - DNA, 120 bp, Artificial Sequence
  ENSG00000184445_77 (sequence is synthesized)
gtaatcccagctactcaggaagctgaggagggagaatcacttgaacccgggaggtgttggttgcagtgagctaagatcatgccatcgtactccagcctgggtgacagagctagactgttt

SEQ ID NO: 661697 - DNA, 120 bp, Artificial Sequence
  ENSG00000184445_78 (sequence is synthesized)
gtttctcaaaaaaaaaaaaaaaaaaggttttgagtcttctgagaatttagaagcctatctttaggcatctgtaggctttcagacataatcatgatagcaaacagtagtccgtgttcccat

SEQ ID NO: 661698 - DNA, 120 bp, Artificial Sequence
  ENSG00000184445_79 (sequence is synthesized)
gggtaaattcttttattctgtgtagagtgctgtcaaagacttgtgttactcattcctaagcatatgtcatgcaccagcactttagtgtttaaaattattgaaaacttggacaggcagatg

SEQ ID NO: 661699 - DNA, 120 bp, Artificial Sequence
  ENSG00000184445_80 (sequence is synthesized)
actatggaaagctagaaaggccaatataatctagtgaatctgccagattattaactaattaatgttctctctcgaagatgtccagtctcaggtgatcttgacctgatcggagtcgccagg

SEQ ID NO: 661700 - DNA, 120 bp, Artificial Sequence
  ENSG00000184445_81 (sequence is synthesized)
ttctagctacagaactcagtgaagaatctttcccaacattgctcttaatttcgaaattaatgaaggtaatggattaaaacattgtaagacatttctgtatcctgcaattaattctgaccc

SEQ ID NO: 661701 - DNA, 120 bp, Artificial Sequence
  ENSG00000184445_82 (sequence is synthesized)
tagtggaatactacataaggtgatttaaataacctctcctgctgtcgaagagtatgaagtcactacagaactaattgtgaagaattaaggaaacatttgccatgtaggaagtgaaaaagg

SEQ ID NO: 661702 - DNA, 85 bp, Artificial Sequence
  ENSG00000184445_83 (sequence is synthesized)
agctgtttgcaattttttatgagctgtgagactcacatgaagatctgcagcttctttcctgagtggagaccacgagcccaccgag

SEQ ID NO: 661703 - DNA, 86 bp, Artificial Sequence
  ENSG00000184445_84 (sequence is synthesized)
ccacgctgtttttatgagctgtgagactcacatgaagatctgcagcttctttcctgagtggagaccacgagcccaccgagaggaag

SEQ ID NO: 661704 - DNA, 120 bp, Artificial Sequence
  ENSG00000184445_85 (sequence is synthesized)
gccaccttaagagctgtaacactcacctcgggggtccgcggcttcattcttgaaatttcttttcaaccagttttcaggcaacattttctcaccaagaaagacctcattaaagctcttgtg

SEQ ID NO: 661705 - DNA, 120 bp, Artificial Sequence
  ENSG00000184445_86 (sequence is synthesized)
gagaatatagatatggacacaagcctcattttggaatattgcaggcattgagtattctgaaacatttgaagtcatacagaagaatttctcctcccgtggatctagaatatcagtatatgt

SEQ ID NO: 661706 - DNA, 120 bp, Artificial Sequence
  ENSG00000184445_87 (sequence is synthesized)
gccaatttaagcctgtggcatggaacctaaagactagaggcggttgtgtgagtcaggaagaggggccagatatctgagtgttcctctttagtttcttcaattgcaggagagaggttggag

SEQ ID NO: 661707 - DNA, 120 bp, Artificial Sequence
  ENSG00000184445_88 (sequence is synthesized)
cgcgaatctgttctgcattccgccgccagagtgatctcaaaattataaaatcagaccactcgtttgctgagttccccttctaccccttgtactgagaataaaattcaatcttgaggtcga

SEQ ID NO: 661708 - DNA, 120 bp, Artificial Sequence
  ENSG00000184451_0 (sequence is synthesized)
agaaacctgtgtagccagagatggggacggaggccacagagcaggtttcctggggccattactctggggatgaagaggacgcatactcggctgagccactgccggagctttgctacaagg

SEQ ID NO: 661709 - DNA, 120 bp, Artificial Sequence
  ENSG00000184451_1 (sequence is synthesized)
ccgatgtccaggccttcagccgggccttccaacccagtgtctccctgaccgtggctgcgctgggtctggccggcaatggcctggtcctggccacccacctggcagcccgacgcgcagcgc

SEQ ID NO: 661710 - DNA, 120 bp, Artificial Sequence
  ENSG00000184451_2 (sequence is synthesized)
gctcgcccacctctgcccacctgctccagctggccctggccgacctcttgctggccctgactctgcccttcgcggcagcaggggctcttcagggctggagtctgggaagtgccacctgcc

SEQ ID NO: 661711 - DNA, 120 bp, Artificial Sequence
  ENSG00000184451_3 (sequence is synthesized)
gcaccatctctggcctctactcggcctccttccacgccggcttcctcttcctggcctgtatcagcgccgaccgctacgtggccatcgcgcgagcgctcccagccgggccgcggccctcca

SEQ ID NO: 661712 - DNA, 120 bp, Artificial Sequence
  ENSG00000184451_4 (sequence is synthesized)
ctcccggccgcgcacacttggtctccgtcatcgtgtggctgctgtcactgctcctggcgctgcctgcgctgctcttcagccaggatgggcagcgggaaggccaacgacgctgtcgcctca

SEQ ID NO: 661713 - DNA, 120 bp, Artificial Sequence
  ENSG00000184451_5 (sequence is synthesized)
tcttccccgagggcctcacgcagacggtgaagggggcgagcgccgtggcgcaggtggccctgggcttcgcgctgccgctgggcgtcatggtagcctgctacgcgcttctgggccgcacgc

SEQ ID NO: 661714 - DNA, 120 bp, Artificial Sequence
  ENSG00000184451_6 (sequence is synthesized)
tgctggccgccagggggcccgagcgccggcgtgcgctgcgcgtcgtggtggctctggtggcggccttcgtggtgctgcagctgccctacagcctcgccctgctgctggatactgccgatc

SEQ ID NO: 661715 - DNA, 120 bp, Artificial Sequence
  ENSG00000184451_7 (sequence is synthesized)
tcaatcccgttctctacgccttcctgggcctgcgcttccgccaggacctgcggaggctgctacggggtgggagctgcccctcagggcctcaaccccgccgcggctgcccccgccggcccc

SEQ ID NO: 661716 - DNA, 120 bp, Artificial Sequence
  ENSG00000184451_8 (sequence is synthesized)
gcctttcttcctgctcagctcccacggagacccacagtctctcctgggacaactagggctgcgaatctagaggagggggcaggctgagggtcgtgggaaaggggagtaggtgggggaaca

SEQ ID NO: 661717 - DNA, 120 bp, Artificial Sequence
  ENSG00000184451_9 (sequence is synthesized)
ctgagaaagaggcagggacctaaagggactacctctgtgccttgccacattaaattgataacatggaaatgagatgcaacccaacaactgttactatttttgagtcaccgacttggaagt

SEQ ID NO: 661718 - DNA, 120 bp, Artificial Sequence
  ENSG00000184451_10 (sequence is synthesized)
gatttgtggcggggcagaaccggtgggttaacaccccgcccccgccccaccccccgccctgccccgcgcttggctctctgagtggaagacgctgagggcctgggtgggggtggggggctg

SEQ ID NO: 661719 - DNA, 120 bp, Artificial Sequence
  ENSG00000184451_11 (sequence is synthesized)
ctgagtctgctaaagctctagccactgacaccccctccaccgtcacctggcctcagccaacagaggtgaggtgggaaagctgccaggcaaggaggggcggtggttcctcttgcaatactg

SEQ ID NO: 661720 - DNA, 120 bp, Artificial Sequence
  ENSG00000184451_12 (sequence is synthesized)
taaggaagagctttctaacaaccagagcgctctccagtaatggctgccttagcaaatactgagttcccgctattggaatgttcagactgtcggggacgctgtgggcctttgcgtggtgtg

SEQ ID NO: 661721 - DNA, 120 bp, Artificial Sequence
  ENSG00000184451_13 (sequence is synthesized)
gggggagggggaggggcaggggattcccgtttttggtgggcgtttggatttcataaccactttacaatcccttcctagtgtctgtgatggaaagaaaaaatgaaaaaatgaattgtaaaa

SEQ ID NO: 661722 - DNA, 120 bp, Artificial Sequence
  ENSG00000184451_14 (sequence is synthesized)
agagctgcaatgcggagcgcgggggagaggcaggaaaagatgagagccagcgggcgcgcgccggccgggaaggacccgcgaccacccagccgcaatgcggttcggggccgccctgcaggc

SEQ ID NO: 661723 - DNA, 120 bp, Artificial Sequence
  ENSG00000184451_15 (sequence is synthesized)
tctggactcctgggcccaaccccacctgcctccaagcccaacactcacagtagccccagccctcggctcctgagaccgcggcgagcaggatgcagaagagccggagatgcatcatgcagg

SEQ ID NO: 661724 - DNA, 120 bp, Artificial Sequence
  ENSG00000184451_16 (sequence is synthesized)
gctgacggtcccggcagccgcctccctgtgaacggctccggctagggctcgagttctggcttgggctccaagctctcctcctggggtttgcagcagaccgctctctcctccttacccacc

SEQ ID NO: 661725 - DNA, 120 bp, Artificial Sequence
  ENSG00000184451_17 (sequence is synthesized)
cttccctccctctctcctttcgcccccaagcgctctgtctctcctctctcttttctctctctctctctctggttcctggtcctccgctcttctctctctatcctctcctttccaccctct

SEQ ID NO: 661726 - DNA, 120 bp, Artificial Sequence
  ENSG00000184451_18 (sequence is synthesized)
ttcctctcacctccccccttccccagcctctgtctcctggcacgcgccggtttcccggaccccgcgcaagcgcgtgcctcagccctgctgcgaaagggcgggggtagagagcctctcgcc

SEQ ID NO: 661727 - DNA, 120 bp, Artificial Sequence
  ENSG00000184451_19 (sequence is synthesized)
accgggaaaaccccaagtaacccgaggctgcccgggactagggccacaggagtgaggacagggaacctagggccagaagcatcctgaaaatttcaagaaaagggaggtggtttgggggag

SEQ ID NO: 661728 - DNA, 120 bp, Artificial Sequence
  ENSG00000184451_20 (sequence is synthesized)
agcctggcgaatctcggcgcagtaaggagactgtagtaggaggaggcgcccagggagcgtgcatacaggggacccaccagctcctcgtcgcagccgtctagggtttcctggggccattac

SEQ ID NO: 661729 - DNA, 120 bp, Artificial Sequence
  ENSG00000184454_0 (sequence is synthesized)
gtggcagcgccgggcggcggcggggaccctggctgggagcgcggcggtgccggcgggaggccgagcggggctcgacagagcaggatcgagatgaccacagccacccctctgggggatacc

SEQ ID NO: 661730 - DNA, 120 bp, Artificial Sequence
  ENSG00000184454_1 (sequence is synthesized)
accttcttctcactgaacatgaccaccaggggagaagacttcctgtataagagttctggagccattgttgctgccgttgtggtggttgtcatcatcatcttcaccgtggttctgatcctg

SEQ ID NO: 661731 - DNA, 120 bp, Artificial Sequence
  ENSG00000184454_2 (sequence is synthesized)
ctgaagatgtacaacaggaaaatgaggacgaggcgggaactagagcccaagggccccaagccaaccgccccttctgccgtgggcccaaacagcaacggcagccaacacccagcaactgtg

SEQ ID NO: 661732 - DNA, 120 bp, Artificial Sequence
  ENSG00000184454_3 (sequence is synthesized)
accttcagtcctgttgacgtccaggtggagacgcgatgacctctaccctggcgctatctccaccactgtccaaagagcctctccagagtcaagacccagaggcacactctctggcagctt

SEQ ID NO: 661733 - DNA, 120 bp, Artificial Sequence
  ENSG00000184454_4 (sequence is synthesized)
cacaatgagcttcttctggtcaggtcgacagagacatctttgacgcaatctctgatgcttccagcaatcctcaaccttgtctgccctgccctaccccaactgtgtccacatccctgccgc

SEQ ID NO: 661734 - DNA, 120 bp, Artificial Sequence
  ENSG00000184454_5 (sequence is synthesized)
caccccaccaaaaagctgcagaacattcttttgtcatctgatgaggtagagctatgttgggaatccaccaatgtgggcttggctttcccccacactgtagttagacagatagacagatag

SEQ ID NO: 661735 - DNA, 120 bp, Artificial Sequence
  ENSG00000184454_6 (sequence is synthesized)
cccaggagccaggtgtcagggagcactgctgagagtatcacaataggatctgtcacggggttcatatcagatgaagcgccgtatccactgcttcacagagcaaaacattcaatcccataa

SEQ ID NO: 661736 - DNA, 120 bp, Artificial Sequence
  ENSG00000184454_7 (sequence is synthesized)
ccaggcacaggggaactaacttggactaactaaccagaaaaccttgttaacgtataacttgttccagtactacatctctgcctgctggctcatgacaattgctcagcacattttcccctc

SEQ ID NO: 661737 - DNA, 120 bp, Artificial Sequence
  ENSG00000184454_8 (sequence is synthesized)
ttgaagaaaggttgcaagaagaactaaattatcctcaaaagatttctgcttcattagtaaagagtcagtgatggaatagggtgactctgcagaatagtggcctctagggtaggagcttgt

SEQ ID NO: 661738 - DNA, 120 bp, Artificial Sequence
  ENSG00000184454_9 (sequence is synthesized)
tgtgttgtccgtgggcctggaatgatcctggtggctgatcagggtccttctcccactctgggctgtatcaaccctgacggtcttggtctttggctcccctttatctggattctgagcacg

SEQ ID NO: 661739 - DNA, 120 bp, Artificial Sequence
  ENSG00000184454_10 (sequence is synthesized)
ctgactgtcctgttaatgccttccctccaaggaccagtatttggagattaattagattacaactctatctatgttacctttgtccttcctggtcaccttgcagattcaagacatgttcaa

SEQ ID NO: 661740 - DNA, 120 bp, Artificial Sequence
  ENSG00000184454_11 (sequence is synthesized)
agcaacacattcacaacccatttctattctatagcaacctcgtctgtgactccttagcctggagaacaatctaccaagaagagaaagtatctggaattaagaagtcctaccatccaagcc

SEQ ID NO: 661741 - DNA, 120 bp, Artificial Sequence
  ENSG00000184454_12 (sequence is synthesized)
ctacttcctggttgtgtggccttggaaaagtgactcaacctctttatattcagtttcctaaccatgaagtggaaatgataacacctgcctcattggggcactataacaagtgaaggactt

SEQ ID NO: 661742 - DNA, 120 bp, Artificial Sequence
  ENSG00000184454_13 (sequence is synthesized)
ctcattggggcactataacaagtgaaggacttaggaaaacatctggagtatagcgcctggcacccaggagatgcttaataaatgggaaccaggattctttttcttttcttttttcttttc

SEQ ID NO: 661743 - DNA, 72 bp, Artificial Sequence
  ENSG00000184454_14 (sequence is synthesized)
gcctccagagtagctgggactacaggtatgtgtcacctcaccaggctaatttttttattttttatttttgta

SEQ ID NO: 661744 - DNA, 120 bp, Artificial Sequence
  ENSG00000184454_15 (sequence is synthesized)
tggtgcccagcctaggagccaacattattattattataggcttttttttcaattgcaagatagacatttcttcacattttaatgattctgaaatcagaacatatcttgcaattgatgggt

SEQ ID NO: 661745 - DNA, 120 bp, Artificial Sequence
  ENSG00000184454_16 (sequence is synthesized)
tcattaatataattgtagttctttacttcctctcaaaaacttgtgatcttataattgatggcatcttggaaacaaggtaataaatctctattctgttaaagaaagtgacacactttgaca

SEQ ID NO: 661746 - DNA, 120 bp, Artificial Sequence
  ENSG00000184454_17 (sequence is synthesized)
tctctattctgttaaagaaagtgacacactttgacatttaacctcaaattttaggagtctctccctcttggggtcagaaatcccttctgaggccaggtgtcgtggctcatgcctgtaatc

SEQ ID NO: 661747 - DNA, 71 bp, Artificial Sequence
  ENSG00000184454_18 (sequence is synthesized)
catctcaaaaaaagaaaaatccattatgaggggaaatcaagagtcagggaggtaagaggtcttacccaggg

SEQ ID NO: 661748 - DNA, 120 bp, Artificial Sequence
  ENSG00000184454_19 (sequence is synthesized)
ggaaatcaagagtcagggaggtaagaggtcttacccagggtcacacagctcatgatatcccactgtaaaaatactctgtggaatagctctggagaaatactggcacattcttcctctctg

SEQ ID NO: 661749 - DNA, 120 bp, Artificial Sequence
  ENSG00000184454_20 (sequence is synthesized)
gtcattatttcttcctactgtgtttaaatatccaccaagtgtcaaggactttgtaagatgctttcacataaattatctcataggattaaattttcccaaaaacctggggaggaattattt

SEQ ID NO: 661750 - DNA, 120 bp, Artificial Sequence
  ENSG00000184454_21 (sequence is synthesized)
tttccaaaacagatgataatttctgattcaaagagaaagaaaacaaagtacttttccaaagtcacacagctagtaagtcacaaagacaagactcaaaaccaggtctcttgactccaaagt

SEQ ID NO: 661751 - DNA, 120 bp, Artificial Sequence
  ENSG00000184454_22 (sequence is synthesized)
ctgtcttttttgtgaagtcacactcctctgctggcccagctcaaagcagcacagattctttatgggctgaacaaggggagtacgggtttgtccatgtgtttgagtagagatcagggttct

SEQ ID NO: 661752 - DNA, 120 bp, Artificial Sequence
  ENSG00000184454_23 (sequence is synthesized)
ggcttccaggctgaaggtgagggaaaagccacttctaactcctttgggcatccatgctcacggccaaaagagccccttctcaacacatccaagtgctaaggattcctgcttcattcaagc

SEQ ID NO: 661753 - DNA, 120 bp, Artificial Sequence
  ENSG00000184454_24 (sequence is synthesized)
tactacttaggcccaaggagcaaggggtagaatggcatctaaccagagcaaagccatttctttgagggctcaagccataaacaaatatgctcccctaaacatattcggcttgaaaaagtt

SEQ ID NO: 661754 - DNA, 120 bp, Artificial Sequence
  ENSG00000184454_25 (sequence is synthesized)
ccctaaacatattcggcttgaaaaagttgttttggggcagctgtggtggtgcacccctgtaatcccagccctttgggagtcagaggcagtcagtcacttgagcccaggagttcaagacta

SEQ ID NO: 661755 - DNA, 120 bp, Artificial Sequence
  ENSG00000184454_26 (sequence is synthesized)
tcgcgccactgcactccagccggggtgacagagccagaccctgtctcaaagcatatttcaaccctaaaactagactcttctgcccacagtgcagtcttctaagggttaccctctggtata

SEQ ID NO: 661756 - DNA, 120 bp, Artificial Sequence
  ENSG00000184454_27 (sequence is synthesized)
tgttcttttgctaaatgaaggcttggagttggagggaagaaggggagatggagtggtgagggcgagtcaaataaaaggatttgagtgtctcgtttttgactaatgaagatgattcaataa

SEQ ID NO: 661757 - DNA, 120 bp, Artificial Sequence
  ENSG00000184454_28 (sequence is synthesized)
acatcctgtaagaagggttcctatgtgcaagttgaggtgctactaagtacattaagacacaattgctgctctcaaggagttagcagctggtctcatgcagggatctcaccacgtggttat

SEQ ID NO: 661758 - DNA, 120 bp, Artificial Sequence
  ENSG00000184454_29 (sequence is synthesized)
gtattttgtttctgatgaggtgcctttcttagcagatgctgccttatttggccactgaaacaatcaaagctaataaatgcttaaagaaaaatatctgacaataaaaaggtttaaatcaaa

SEQ ID NO: 661759 - DNA, 120 bp, Artificial Sequence
  ENSG00000184454_30 (sequence is synthesized)
gcaagatatgctctgagattcctcactgttctctgagagagaagagctactgggcccatccaaaagacagtctgcacctggaactcggcacccaggaggtcacccctgcaggacctgtag

SEQ ID NO: 661760 - DNA, 120 bp, Artificial Sequence
  ENSG00000184454_31 (sequence is synthesized)
aggagcctgtgtcctggtggccttaggtggctgcattactggatcgagatgaccacagccacccctctgggggataccaccttcttctcactgaacatgaccaccaggggagaagacttc

SEQ ID NO: 661761 - DNA, 120 bp, Artificial Sequence
  ENSG00000184459_0 (sequence is synthesized)
atgtgtacaaagacaatcccagtcctctggggatgtttcctcctgtggaatctctatgtctcatcctctcagaccatttaccctggaatcaaggcaaggattactcagagggcacttgac

SEQ ID NO: 661762 - DNA, 120 bp, Artificial Sequence
  ENSG00000184459_1 (sequence is synthesized)
tatggtgttcaagctggaatgaagatgattgagcaaatgctaaaagaaaagaaactcccagatttaagcggttctgagtctcttgaatttctaaaagttgattatgtaaactacaatttt

SEQ ID NO: 661763 - DNA, 120 bp, Artificial Sequence
  ENSG00000184459_2 (sequence is synthesized)
tcaaatataaaaatcagtgccttttcatttccaaatacctcattggcttttgtgcctggagtgggaatcaaagcgctaaccaaccatggcactgccaacatcagcacagactgggggttc

SEQ ID NO: 661764 - DNA, 120 bp, Artificial Sequence
  ENSG00000184459_3 (sequence is synthesized)
gagtctccacttttccaagacacaggaggggctgatctgtttctctccggagtctactttaccggtatcattatcctaacccgaaatgactttggtcatcctaccctgaagctccaagat

SEQ ID NO: 661765 - DNA, 120 bp, Artificial Sequence
  ENSG00000184459_4 (sequence is synthesized)
tgctacgcccaactgagccatgcccacgtctcattttccggagaactcagtgttctgtataactcctttgctgagcccatggagaaacccattttaaagaacttaaatgaaatgctctgt

SEQ ID NO: 661766 - DNA, 120 bp, Artificial Sequence
  ENSG00000184459_5 (sequence is synthesized)
cccattattgcaagtgaagtcaaagcgctaaatgccaacctcagcacactggaggttttaaccaagattgacaactacactctgctggattactccctaatcagttctccagaaattact

SEQ ID NO: 661767 - DNA, 120 bp, Artificial Sequence
  ENSG00000184459_6 (sequence is synthesized)
gagaactaccttgacctgaacttgaagggtgtattctacccactggaaaacctcaccgacccccccttctcaccagttccttttgtgctcccagaacgcagcaactccatgctctacatt

SEQ ID NO: 661768 - DNA, 120 bp, Artificial Sequence
  ENSG00000184459_7 (sequence is synthesized)
ggaatcgccgagtatttctttaaatctgcgtcctttgctcatttcacagctggggttttcaatgtcactctctccaccgaagagatttccaaccattttgttcaaaactctcaaggcctt

SEQ ID NO: 661769 - DNA, 120 bp, Artificial Sequence
  ENSG00000184459_8 (sequence is synthesized)
atcatggccacagagcctcccataatcaatctacaaccaggcaatttcaccctggacatccctgcctccatcatgatgctcacccaacccaagaactccacagttgaaaccatcgtttcc

SEQ ID NO: 661770 - DNA, 120 bp, Artificial Sequence
  ENSG00000184459_9 (sequence is synthesized)
atggacttcgttgctagtaccagtgttggcctggttattttgggacaaagactggtctgctccttgtctctgaacagattccgccttgctttgccagagtccaatcgcagcaacattgag

SEQ ID NO: 661771 - DNA, 120 bp, Artificial Sequence
  ENSG00000184459_10 (sequence is synthesized)
gtcttgaggtttgaaaatattctatcgtccattcttcactttggagtcctcccactggccaatgcaaaattgcagcaaggatttcctctgtccaatccacacaaattcttattcgtcaat

SEQ ID NO: 661772 - DNA, 120 bp, Artificial Sequence
  ENSG00000184459_11 (sequence is synthesized)
tcagatattgaagttcttgagggtttccttttgatttccaccgacctgaagtatgaaacatcctcaaagcagcagccaagtttccacgtatgggaaggtctgaacctgataagcagacag

SEQ ID NO: 661773 - DNA, 120 bp, Artificial Sequence
  ENSG00000184459_12 (sequence is synthesized)
tggagggggaagtcagccccttgattgccggtttgcaattcaccccaggaagtaaatggtccttaatcctacaactactgtaaacccagaagggaaagacagtacacactggaattgtaa

SEQ ID NO: 661774 - DNA, 120 bp, Artificial Sequence
  ENSG00000184459_13 (sequence is synthesized)
agcccttgtgaattgcttaggcagaaagttttctttcttaagccttcaggaacccagaataaggcagactctgttaaagggataaatagaggtgtctgaatgtgagtgtatgcatgctgc

SEQ ID NO: 661775 - DNA, 120 bp, Artificial Sequence
  ENSG00000184459_14 (sequence is synthesized)
gtgtgtctgtgtttatgtttgtttgtttgtttggggcaagaaagattctaggacaagagctaggcatgtacttctgaccaggtgggtaagcaactctaagtctgtatttgtattggtcat

SEQ ID NO: 661776 - DNA, 120 bp, Artificial Sequence
  ENSG00000184459_15 (sequence is synthesized)
tctcagtggaaatcccttaggccctctagtggttttcccctacctgcatattggttttcatgttttatattcactgttactatcttctgtgtttaattaaaattgttttctatcaacttc

SEQ ID NO: 661777 - DNA, 120 bp, Artificial Sequence
  ENSG00000184459_16 (sequence is synthesized)
ggtggagaacacatcagcttcaaaggcagagagaatcgaaggtgctctccagctttggacacttcctctgcttgaggacaccttgactaacctccaagggcaactaaaggatcaagaaag

SEQ ID NO: 661778 - DNA, 120 bp, Artificial Sequence
  ENSG00000184465_0 (sequence is synthesized)
aaccatagcggctcgcgtgggtcggctggcaagtaaccatagcggcgagcgtggggcggagtgtggctcggtagtcctctgcgtgccctcctgggagctgggtgctgtgagtcctcccct

SEQ ID NO: 661779 - DNA, 120 bp, Artificial Sequence
  ENSG00000184465_1 (sequence is synthesized)
agcgggctggtctcggcgcggagtcggcgccgaacccgagctgctgctctggggcgtgtgcctagggcgcagggctggagcgcgggggctgcgcggttgctcgcggctccgctgaggtct

SEQ ID NO: 661780 - DNA, 120 bp, Artificial Sequence
  ENSG00000184465_2 (sequence is synthesized)
ctaggaaagggggcgatttgagggttccgccgtgaccgcttccaacggcggacacgcgcgctctggaccagagccgttgcccgctgtctcgtcacccgaagcctcctcctgacgccgtgc

SEQ ID NO: 661781 - DNA, 120 bp, Artificial Sequence
  ENSG00000184465_3 (sequence is synthesized)
tagtgcgagggtctccaggggaattcggggcacaagtcgggccggagcatccgggcggccgcttgagatcggcgctttgagaactgagcgcatgtggagttcggaggaaaagggctcaga

SEQ ID NO: 661782 - DNA, 120 bp, Artificial Sequence
  ENSG00000184465_4 (sequence is synthesized)
ttgaagatggaaaatccccaagacattttctcaagtaatggtggctgtctaagtgatatagttatagaaaaatacctggttgaatccaaggagtctgtgtctcatgttcagcttgcttgc

SEQ ID NO: 661783 - DNA, 120 bp, Artificial Sequence
  ENSG00000184465_5 (sequence is synthesized)
agcatgcaggactgtgctttccctttggatggaactgaactttgtatatggaacactaaggatccttctcatcagcttctaatcctacgaggacaccatcagccaattactgctatggct

SEQ ID NO: 661784 - DNA, 120 bp, Artificial Sequence
  ENSG00000184465_6 (sequence is synthesized)
tttggaaataaagtgaacccacttctaatctgctcagcatcactggattatgttataatgtggaacctggatgaatgtagagagaaagtacttcaagggctggtccctcgagggactgtc

SEQ ID NO: 661785 - DNA, 120 bp, Artificial Sequence
  ENSG00000184465_7 (sequence is synthesized)
atgggctcgcttttgggaaaggtgctgtgtttacagttgagcctggatgatcatgttgttgccgtgtgtgctggaaacaaaatattcatgctggatattgagcagcgattttctgtgaca

SEQ ID NO: 661786 - DNA, 120 bp, Artificial Sequence
  ENSG00000184465_8 (sequence is synthesized)
tacatagaacgtcctgatgttaataaccgccacaaagtcccaccaccgaccttcctgcacacattctctcagactcaggctgttcgggccgagctgcagggccacctgggcccggtgact

SEQ ID NO: 661787 - DNA, 120 bp, Artificial Sequence
  ENSG00000184465_9 (sequence is synthesized)
gcggtggagttctgtccctggcgagcaggcaccctcatctcggcgtctgaggacagaggctttaaggtctgggaccattgtacaggatcattaatatacagttcatctgtgttatcagca

SEQ ID NO: 661788 - DNA, 120 bp, Artificial Sequence
  ENSG00000184465_10 (sequence is synthesized)
tatcctcttctcagtttattcattgatgcagaaagcaggcagctggtcaccgggtgtgctgacggccagctttggatcttcagtttgatggatggacaccattatcgtcgtgtggcacgg

SEQ ID NO: 661789 - DNA, 120 bp, Artificial Sequence
  ENSG00000184465_11 (sequence is synthesized)
gttgacctaaggaagaagacagagactttctccacaagaagggttaagtctgggctgtgcagccagccagaagaaagccagcttccctctacaagtgctctgggaaaaggagagcaggtt

SEQ ID NO: 661790 - DNA, 120 bp, Artificial Sequence
  ENSG00000184465_12 (sequence is synthesized)
gaagtaacatttcctgtactgagacttgcaccctgtgatctctcactcatcccaaattctgcatgtggatgtctttcttctgagaacacccgatgtgtgtggatcggaagctcagtgggc

SEQ ID NO: 661791 - DNA, 120 bp, Artificial Sequence
  ENSG00000184465_13 (sequence is synthesized)
ttattcgtatttaacctggcaaacctggaagtggaagctgctttgtattacaaggatttccagagcctcagcatcctgctggccggatcgtgtgccctgaggaaccgcactgcggatcaa

SEQ ID NO: 661792 - DNA, 120 bp, Artificial Sequence
  ENSG00000184465_14 (sequence is synthesized)
cagggctcagcagtgccccagcatggggcagagcctctcggtgccagccagctcctgtgtcctaccgacctctccactgtatctgggaattgccaaggagaagagtaccaaggctgctag

SEQ ID NO: 661793 - DNA, 120 bp, Artificial Sequence
  ENSG00000184465_15 (sequence is synthesized)
tgaacagcgacgtgctgcacggaacgtcatgaaggaccaacgcctggttttccatagtaaagttaggtcatctggttatgcgtcagcaccacatgtaactatgttttcaccaaagaccaa

SEQ ID NO: 661794 - DNA, 120 bp, Artificial Sequence
  ENSG00000184465_16 (sequence is synthesized)
catcaagagtgaggggaaaggatcttcaaggagcaggagcagctgcgcacgggaggcataccccgtggagtgcgctgtgcccaccaagcccggcccccaggtcgctgccgcccccacctg

SEQ ID NO: 661795 - DNA, 120 bp, Artificial Sequence
  ENSG00000184465_17 (sequence is synthesized)
cacacgtgtatgctgcatccagtactcaggagatgggcagtggctggcctgtgggttggccaaccatctgttactcgtttttgatgccagcctgactgggacacctgctgtgttttcagg

SEQ ID NO: 661796 - DNA, 120 bp, Artificial Sequence
  ENSG00000184465_18 (sequence is synthesized)
tcacgacggggcagtgaatgccgtgtgctggagccaggaccggaggtggctgctctctgcggcccgggacgggaccctgcgaatgtggtcggctcgtggggcagagctcgcactgcttct

SEQ ID NO: 661797 - DNA, 120 bp, Artificial Sequence
  ENSG00000184465_19 (sequence is synthesized)
gggcaaagacatgttttctaaacctatacagtctgcacagttctattatatagatgcctttatattgttatcttctggccctgaatttcagctactgaggtatcacattgacacttgcaa

SEQ ID NO: 661798 - DNA, 120 bp, Artificial Sequence
  ENSG00000184465_20 (sequence is synthesized)
agatgagattaagagatataaacagaagagcaagtccaagctgatttgcaggctctccacgacgggtgcagtagacatgaccagtttatcggcagtcaacgacttttattcccacatcgt

SEQ ID NO: 661799 - DNA, 120 bp, Artificial Sequence
  ENSG00000184465_21 (sequence is synthesized)
actcgcagctggccggaacaggaccgtggaagtgtttgacctcaacgccggctgcagtgcagcggtgatagcggaagcccactcacggcctgtccatcaaatctgccaaaataaaggttc

SEQ ID NO: 661800 - DNA, 120 bp, Artificial Sequence
  ENSG00000184465_22 (sequence is synthesized)
atcatttacaacccaacagcctcaggcttataaccttttcctgaccacggccattggcgatgggatgagactgtgggacctgagaaccctgaggtgtgagcgccactttgaagggcatcc

SEQ ID NO: 661801 - DNA, 120 bp, Artificial Sequence
  ENSG00000184465_23 (sequence is synthesized)
aacccgcggctatccatgtggaatcgctttcagtccttgtggacgattcgcggcttgtggggccgaggacagacacgcttacgtgtatgaaatgggctcaagcacgttttctcaccggct

SEQ ID NO: 661802 - DNA, 120 bp, Artificial Sequence
  ENSG00000184465_24 (sequence is synthesized)
acgtgtatgaaatgggctcaagcacgttttctcaccggctggctgggcacacagacactgtcactggagtggccttcaacccatcagcgccccagatggagtctcgctctgtcgcccacg

SEQ ID NO: 661803 - DNA, 120 bp, Artificial Sequence
  ENSG00000184465_25 (sequence is synthesized)
gcctcccgagtagctgggattacagcttgccacagctaccttggatggtaaactccagctctttctagctgagtaaccactgacctgtgagctgggtccaggaatgctgtgaggaacaac

SEQ ID NO: 661804 - DNA, 120 bp, Artificial Sequence
  ENSG00000184465_26 (sequence is synthesized)
gagctgggtccaggaatgctgtgaggaacaacttaaaagtaagaagtagtggttcatccatcagggggccagaagcagcaactgtttttcatattttgagacttgcctcagatttccccc

SEQ ID NO: 661805 - DNA, 120 bp, Artificial Sequence
  ENSG00000184465_27 (sequence is synthesized)
gtttgcaagctcctcccctctgtgtgtgccatgtcagagttttatgtctttctgctcctcaaaagggatccccttcattgggaaaatggaaatggcgtccagtacttctgcacagaattt

SEQ ID NO: 661806 - DNA, 120 bp, Artificial Sequence
  ENSG00000184465_28 (sequence is synthesized)
ggtaaagttaaaacaaaatatctttcaataaaacataatatagtatttgtttgataattagagttggaagaaaaaagagagaatttcttttgggcagtgaaaataaagcagttaacagtc

SEQ ID NO: 661807 - DNA, 120 bp, Artificial Sequence
  ENSG00000184465_29 (sequence is synthesized)
aggtgagacagccacagagttaagttccagttcccagacatgcctgaacgtgagcttgtacacaaaggtctttgtcttcatgctactttgtattttcctgcgatttgaaaaaacctgtcc

SEQ ID NO: 661808 - DNA, 120 bp, Artificial Sequence
  ENSG00000184465_30 (sequence is synthesized)
acctcagtgctgagaacgtgaccttctgtgggtctcagcgtcactgtgggttcaatatggtcctgggccccctggtctgcggaggagctgggtctgcatgtcccagagctccatgcgtgg

SEQ ID NO: 661809 - DNA, 120 bp, Artificial Sequence
  ENSG00000184465_31 (sequence is synthesized)
ttctggagtgcagcaaaagtgagggccactcacgtgaccctgaaaacctgctgagaagagggctgtgagcagacgtcccccgctcccacgggtgctgcccgcgccccggagaggcgccct

SEQ ID NO: 661810 - DNA, 80 bp, Artificial Sequence
  ENSG00000184465_32 (sequence is synthesized)
acggctcctgtgtggcatcccccgtgcccgcacgctgcccgcgccccggagaggcgccctggacggctcctgtgtggcat

SEQ ID NO: 661811 - DNA, 120 bp, Artificial Sequence
  ENSG00000184465_33 (sequence is synthesized)
gcccgcgccccggagaggcgccctggacggctcctgtgtggcatcccccgtgcccgcacgctgcccgcgccccggagaggcgccctggacggctcctgtgtggcatcccccgtgcttctt

SEQ ID NO: 661812 - DNA, 120 bp, Artificial Sequence
  ENSG00000184465_34 (sequence is synthesized)
cgccctggacggctcctgtgtggcatcccccgtgcttcttgtgctcccctttcctgtcatctttacacactgttgaaaaacctgaagatgttggcctttttcaaaacattttttaggtga

SEQ ID NO: 661813 - DNA, 120 bp, Artificial Sequence
  ENSG00000184465_35 (sequence is synthesized)
gccttttaagttcatttcacaaagcctggataaagttgctgtttttataatttgaaaaagataattttgaaaacttagattttttttttccttttgacaaagttgaccgctgttgccttg

SEQ ID NO: 661814 - DNA, 120 bp, Artificial Sequence
  ENSG00000184465_36 (sequence is synthesized)
tcttctcacccagggcatgtgggacgtgctcttggctgtgaagctgtggggtgtgtgcagagagcctggggcctggggttcccagaggagcatcttggggaggcctgcacagtaggatcc

SEQ ID NO: 661815 - DNA, 120 bp, Artificial Sequence
  ENSG00000184465_37 (sequence is synthesized)
tgcccatgtgccctgagctgatgtgccagccgtgtgaaagtgctctgacaccgtgggccgtacggagggcctccagaggggatgttgaaggcaggagacagctgtgccgggagcctctgc

SEQ ID NO: 661816 - DNA, 120 bp, Artificial Sequence
  ENSG00000184465_38 (sequence is synthesized)
aggccgtggagggcccgtcctgtgacgtgtctgccctccctgctccacctctggtgttgctgcttctgcgtcaggacccttgctgcagcgccatgtctgcatcttctttgcttttgtagc

SEQ ID NO: 661817 - DNA, 120 bp, Artificial Sequence
  ENSG00000184465_39 (sequence is synthesized)
aaggaataactcatccttcagtatacttggtaccacccaaggggtgtttcccttgggtaacagcagtccctcggggggtttgggataattttgtactctctttaccttgaacccaggcat

SEQ ID NO: 661818 - DNA, 120 bp, Artificial Sequence
  ENSG00000184465_40 (sequence is synthesized)
gcaagcaggcgctttatatgggaagggccccaggccattcagacttacggacctttgctgtctgttatgctgatcttataggctcattggttttgatcttatgtccctttttattttaag

SEQ ID NO: 661819 - DNA, 120 bp, Artificial Sequence
  ENSG00000184465_41 (sequence is synthesized)
aactgtccattttgtatcaacctgaaaacatgtaggaaagttgaaatattctttccttgcacagcaaggggtcttgagcacctgtaatatttcaggctggagacacagtggtgaatagga

SEQ ID NO: 661820 - DNA, 120 bp, Artificial Sequence
  ENSG00000184465_42 (sequence is synthesized)
agggcttggtcccaaatcctgtggaagtcacagctcagagtttgagagagacactgtgtaagccagcgactgagtggctgtgaattgtgagtgtgcagaggagaaggcagatgaggccag

SEQ ID NO: 661821 - DNA, 120 bp, Artificial Sequence
  ENSG00000184465_43 (sequence is synthesized)
ggcagcgtgcacatgcatgggagcctttgagaagcaggatctcggaggggcatgtgcgctgagggtgagggtgagaagggatgaaggtgccaaggccctgggaagagtgagaacctgcct

SEQ ID NO: 661822 - DNA, 120 bp, Artificial Sequence
  ENSG00000184465_44 (sequence is synthesized)
gtgtgcttggagcatgctgatgttaggagagtctcatctgaggaagtcgaaaagttaggtggggaccacgttaaggaatttgagttttgtgcaattatatagagaagttagaggattaca

SEQ ID NO: 661823 - DNA, 120 bp, Artificial Sequence
  ENSG00000184465_45 (sequence is synthesized)
ttaaaacataaatgcaaagagactataaatctatgtattctatgtagggacatgagtacgtgtccctctctagactgggtggctgtgggacatgaacatgtgtgtctctctaggctccgg

SEQ ID NO: 661824 - DNA, 120 bp, Artificial Sequence
  ENSG00000184465_46 (sequence is synthesized)
gtgcctgtgggacatgagcacgtgtctctgtctagacttggtggctgtgggacatgagcacatgtgtctctcacaggctctgggtggagtatatctgcattttgctggtgataggtccat

SEQ ID NO: 661825 - DNA, 120 bp, Artificial Sequence
  ENSG00000184465_47 (sequence is synthesized)
ggtacacactaggaccagatgaccttgcctgccattttttctttcacctgtgtggatttgcatgacgggctctgcatcaggctgcagctgctgcacatgtccgggtcttgggaacctcct

SEQ ID NO: 661826 - DNA, 120 bp, Artificial Sequence
  ENSG00000184465_48 (sequence is synthesized)
gctcctactcctttccttccaatcaatgttagctgaacctatacatgagggtggacatggggttggatgtgggtgagaagcatcgaaacatgcagtttgatgtgcatgattctcactgca

SEQ ID NO: 661827 - DNA, 120 bp, Artificial Sequence
  ENSG00000184465_49 (sequence is synthesized)
caggtactgcagcctccagagaaaggcatcttcgtgtttcgatgctgagagagtctctgcagggaagtgctgcattccccaggttttcagaagacttctgtatatccagtatttttgata

SEQ ID NO: 661828 - DNA, 120 bp, Artificial Sequence
  ENSG00000184465_50 (sequence is synthesized)
ttcttaaagaatcaaaatcacatcaaagctcattgtcattctctcagtaattttagaatagagggttacattctcagtacttttctcagattaatgtaatgctgaatgcatttggtaaac

SEQ ID NO: 661829 - DNA, 120 bp, Artificial Sequence
  ENSG00000184465_51 (sequence is synthesized)
ttttcctgtactcctttttttttaagctatatcttcaatttagtttacttttataaaatcatatctttatcttgcaattggaaaaccactggtatcagatagcaatatttatataaatat

SEQ ID NO: 661830 - DNA, 120 bp, Artificial Sequence
  ENSG00000184465_52 (sequence is synthesized)
taaaactctttatggaatctgggtgtcaggtatgactttagagaaacatgttctgcaaaactattatttctcagatattccctgattgtaggcatccttcctagcatagcgcttttgttt

SEQ ID NO: 661831 - DNA, 120 bp, Artificial Sequence
  ENSG00000184465_53 (sequence is synthesized)
atatcttttatcaaaatgttcttttcatcaagaatcagacttttcccaccagggttagttaaaggaaatgtgtcacctcttcctgcctgtgtgatttcgacctcgtgtgtgactagaaca

SEQ ID NO: 661832 - DNA, 120 bp, Artificial Sequence
  ENSG00000184465_54 (sequence is synthesized)
gtcagctgccccattgcaatgttagaaagcagtgttagaaatcaggaagtgggaatctaagggaacacgaaggaggacttttgtttcctctgaattgttgctctgcccaagcctgatttt

SEQ ID NO: 661833 - DNA, 120 bp, Artificial Sequence
  ENSG00000184465_55 (sequence is synthesized)
gtaggtgaccccaggcctggggtcgttttgtcaacatggctcacaaagctgttggcctgaatagcttttcttttgatagccacttaataaacgtaggcgaggaaggatgttcggcatgga

SEQ ID NO: 661834 - DNA, 120 bp, Artificial Sequence
  ENSG00000184465_56 (sequence is synthesized)
atgtgaattggttctcatgggcctcatgtgtaataggcgttttgggagagaagacatttatgtcttcagactatttttggactaattatgaaattaaggctcataaatttaaaaagttca

SEQ ID NO: 661835 - DNA, 120 bp, Artificial Sequence
  ENSG00000184465_57 (sequence is synthesized)
catcatgagttaagccacagagagatgatgggaagtatctaggagttaggtaaagggcttcacactatttctagtctgtctgtgaaagctttctggatatgttggtgtttgagctgtatt

SEQ ID NO: 661836 - DNA, 120 bp, Artificial Sequence
  ENSG00000184465_58 (sequence is synthesized)
tcatgttttgttgtaaacatcctgtgatagattaacattaggccaccccaccatttataacaaaactaccattaatgtgcaaagaattaacattgttgtgtcaggaaaaggaaaaccaaa

SEQ ID NO: 661837 - DNA, 120 bp, Artificial Sequence
  ENSG00000184465_59 (sequence is synthesized)
ggtaaatgaagctggcacacggccacacagctacagcattgatggtgcaggcgtccgtccgcggagcacggcataaggagcggtctgtgacgccccagcacctctcccgtgcagcccctg

SEQ ID NO: 661838 - DNA, 120 bp, Artificial Sequence
  ENSG00000184465_60 (sequence is synthesized)
tgcttgtcctcctggcatcttagggcactggtttcctgcattcgctttgctccccttgtgcacgttctgtcttcccagaagaagagagttagggaattaaaaggagagcgttcttccatg

SEQ ID NO: 661839 - DNA, 120 bp, Artificial Sequence
  ENSG00000184465_61 (sequence is synthesized)
tctcctgcgcatcacagatgccacctgcacccgcccagcaccctcgtactcacctggtctcctgcgcattgcagatgccacatgcacccacccagcaaccttgtcctcacctggtctctg

SEQ ID NO: 661840 - DNA, 120 bp, Artificial Sequence
  ENSG00000184465_62 (sequence is synthesized)
gggtgcagagtggaccttcagcaattactgattgtgagaacatttttttccccttttttctctgctgaggaatttgaaagcagatcccgagcgtgtgattgtactcctgcacacttgagt

SEQ ID NO: 661841 - DNA, 120 bp, Artificial Sequence
  ENSG00000184465_63 (sequence is synthesized)
gtgcatttctggaacatgtatgtttttacctagccaccatgacgttatatcaaaaccagtcattttttggaaccttgtattagcaaggccataataaattattcttgattgccttgacaa

SEQ ID NO: 661842 - DNA, 120 bp, Artificial Sequence
  ENSG00000184465_64 (sequence is synthesized)
gggtgaccaaggagggcaggtcatgctgatcagaaaggtacactgcatgactcagatgccacctgcacctacccagcaccctccacgtccccacctggcctgtgaatcttagacgccacc

SEQ ID NO: 661843 - DNA, 120 bp, Artificial Sequence
  ENSG00000184465_65 (sequence is synthesized)
ctctgcagggaagtgctgcattccccagatggagtgctgtaaaattcaagaacagtgcccagcacttcgtgcctggagttccctggggatattctcagggcgatgactgaccattaggaa

SEQ ID NO: 661844 - DNA, 120 bp, Artificial Sequence
  ENSG00000184465_66 (sequence is synthesized)
cccccgatgctctcactactccattcctcagtcatgctgttcaagcctgatttccatataaacgggaagccctgtgtgtctccagcttgtgacgctgacttctggggtgctgtcttggct

SEQ ID NO: 661845 - DNA, 120 bp, Artificial Sequence
  ENSG00000184465_67 (sequence is synthesized)
gtcggaggttttagggacttgaggaggaaagggtaactcatgagcgcctattgccgcaccgtcttgtcttgtaggaagccctaggtggagaacagatgctgagggattgggaaggcagag

SEQ ID NO: 661846 - DNA, 120 bp, Artificial Sequence
  ENSG00000184465_68 (sequence is synthesized)
cagtacattctgagttacaggcggggagcctcagggcagatgcatggggcagccggtggggagacaggattcctgaggagacgccagcttcctaattcgctcagggttagctccagtcag

SEQ ID NO: 661847 - DNA, 120 bp, Artificial Sequence
  ENSG00000184465_69 (sequence is synthesized)
tgtcggcttttaacactgctgagactgtgcctgtcgcctgagctttcctcttagctcagacacctgacttttcacccttggtttatatacagagaattccagcttgaacagaggaataat

SEQ ID NO: 661848 - DNA, 120 bp, Artificial Sequence
  ENSG00000184465_70 (sequence is synthesized)
gatggcgttcccgcgtggcacgtgctgtggaaagaactgtggtgacgggagctgtgcggttgcttcacggccacggccgcctgagtgatgttgtttctacctcacttctgcaaggcgccc

SEQ ID NO: 661849 - DNA, 120 bp, Artificial Sequence
  ENSG00000184465_71 (sequence is synthesized)
gctatcctgatttccacagaaacgccaagcccggatgttttgccggggccgctggctgggcttggattcctgacaggacggttctgcggccccggatttcccacaactgcattcagggcc

SEQ ID NO: 661850 - DNA, 120 bp, Artificial Sequence
  ENSG00000184465_72 (sequence is synthesized)
tgggagcgcccaggcacgaattcttctccacggcattcccaggcccagagcagaagagccagtcccagggtgtggagggttcagtcggcacaaaatgaggctctagaagaaaatggaatg

SEQ ID NO: 661851 - DNA, 120 bp, Artificial Sequence
  ENSG00000184465_73 (sequence is synthesized)
cgaattcagtttttatccagctgacatcagtgtgcgcctgacagtgtagacctgaccagcgagtgtgcacctgacctgacagggtgtagactgctacagtttccgcttggtgcctctatc

SEQ ID NO: 661852 - DNA, 120 bp, Artificial Sequence
  ENSG00000184465_74 (sequence is synthesized)
gtgatgttatttttttctttttgattctgacatattttatggtgttactacatttttattatttttgtgctcattttattgttttctgttttagataaccatttgtgttgactaatctga

SEQ ID NO: 661853 - DNA, 120 bp, Artificial Sequence
  ENSG00000184465_75 (sequence is synthesized)
tagtgaatagtactgttagcttcacctgttgcaataatggcaacgttgttacctcttctaaagaatcctgtgtttatccaaaggtctgggaccattgtacaggatcattaatatacagtt

SEQ ID NO: 661854 - DNA, 120 bp, Artificial Sequence
  ENSG00000184465_76 (sequence is synthesized)
tccctctgctggccgggactcagtggagaggtctctgtcccaggcctgacttcttggcatcatttcatccttctgattacgtgattaattcaaacatggaaagtgtctcagactggccca

SEQ ID NO: 661855 - DNA, 120 bp, Artificial Sequence
  ENSG00000184465_77 (sequence is synthesized)
gactcatgagaaatgttcaaggatcaatggaaagagatgctttcttccgcagcgccctgcaacggtgggaggccacactcaggtgctgccgcccatctttttgccactgcataggaacag

SEQ ID NO: 661856 - DNA, 120 bp, Artificial Sequence
  ENSG00000184465_78 (sequence is synthesized)
acaatgagcagcacctagacaggtggagctgagggttggggagaccagggggccgtcctgacggtgtcggtgaagctgctgtagccagtcatgtgctataactgtttaattacatattaa

SEQ ID NO: 661857 - DNA, 120 bp, Artificial Sequence
  ENSG00000184465_79 (sequence is synthesized)
actccttttctctccattggattaggttgagcttgctttctcttctgagacatgaagtaaacttatttttcaatgttattttttaaaacatctgcattgtattccactcaatgtaagaac

SEQ ID NO: 661858 - DNA, 120 bp, Artificial Sequence
  ENSG00000184465_80 (sequence is synthesized)
cgttgctacatttcatattataatcaatgttatgatggacagccttgaagaaatacatttgggaaagttgtggaagctgatcgaggaagcctaagcaggctctgtgaagtgggaatagtg

SEQ ID NO: 661859 - DNA, 120 bp, Artificial Sequence
  ENSG00000184465_81 (sequence is synthesized)
ccacgtcctgcgggagctgggtagcatttcattgtaagagtctttgattctgcccactgtaaacatttttctattgtatcataattgtaaatatatttttaaaaaccttggttacttgaa

SEQ ID NO: 661860 - DNA, 120 bp, Artificial Sequence
  ENSG00000184465_82 (sequence is synthesized)
cacagtgggtaagtggacacgcaaggcttcgcacctcattgatctgacttcagattccatcttcttggcatggtgcccacctacgcaccacagagctgtataagggcagaagagaggagt

SEQ ID NO: 661861 - DNA, 120 bp, Artificial Sequence
  ENSG00000184465_83 (sequence is synthesized)
gtgttctgctgccaccagcaagcactgggaatcatcttgaagaaaagcggggtgagctgtacggagcctttcggggcagattcaagagcagaaagccgtgtctttcttactatggacact

SEQ ID NO: 661862 - DNA, 120 bp, Artificial Sequence
  ENSG00000184465_84 (sequence is synthesized)
cgggaactggagaaaggtttccttctcaaatttattgactagaactcagttccaaatcaacatttcaaaaaagtttcttatttctgtgagaggcaacatatattatatttctactaatgt

SEQ ID NO: 661863 - DNA, 120 bp, Artificial Sequence
  ENSG00000184465_85 (sequence is synthesized)
ggcattaatgcttgtttttttcttttttagtccctgagtggtttcaaatgtgtgttttcatgtacaatttatagttctgaagagtgtgtcatttccagatatttcctgactgtctcatca

SEQ ID NO: 661864 - DNA, 120 bp, Artificial Sequence
  ENSG00000184465_86 (sequence is synthesized)
atgcccacatcattaaagttaatttcatgcctaaggaatctacactaccttccatttggaaaatgttctgcagattctagcaaagtcaacagccaaaccgtgaatgtaaaggctgccgta

SEQ ID NO: 661865 - DNA, 120 bp, Artificial Sequence
  ENSG00000184465_87 (sequence is synthesized)
cagactacagaagtaggcagcttgccattgccacgctacctactttacattcaagtgatttatataagagccaaaaaaatgtgctccacatagtattgatctttcactgccatgcaggga

SEQ ID NO: 661866 - DNA, 120 bp, Artificial Sequence
  ENSG00000184465_88 (sequence is synthesized)
tgagctgtccagatgataaattaagacaatgagaacataagggattggcttcaagatttgtggttgccgacggaatttcttcagcagaaagagaaggaaactgaactacggaactggtag

SEQ ID NO: 661867 - DNA, 120 bp, Artificial Sequence
  ENSG00000184465_89 (sequence is synthesized)
gatattattatttttactgtaaacgatccaagcctgtcaggcctgtaacttccaagtgcaatgtattatgatctacagtgtaaaacaaaagattctgaatttgagtcagtaatagctggt

SEQ ID NO: 661868 - DNA, 120 bp, Artificial Sequence
  ENSG00000184465_90 (sequence is synthesized)
ttattccaggattcaaatgtaagtaacttactctcaccaacagtagtcaaaatgagaagcctgctatgctgtggatttatggctcatggactctggatgagttctgcatttatcttcgtg

SEQ ID NO: 661869 - DNA, 120 bp, Artificial Sequence
  ENSG00000184465_91 (sequence is synthesized)
gagtgacgaataattgaattggaaaatcatggcatccagaatggaactgcataaaaatctgctggagtgtttccgaaaaaatgaagacctctgggcccttatcccagactttctatttca

SEQ ID NO: 661870 - DNA, 120 bp, Artificial Sequence
  ENSG00000184465_92 (sequence is synthesized)
gtggtccatggaagagcctgcaagcttggcttttccatctcaggacttagctgcagggtctcagggcacactgcagagactcgtcatcctgttgcctggaggtgtgcactggctatttgc

SEQ ID NO: 661871 - DNA, 120 bp, Artificial Sequence
  ENSG00000184465_93 (sequence is synthesized)
agatgagccgccatcccgatgactgcccaatcctcggctgcctgtgctccgggtctccattcatttgaccagcaagacccacatccagcagcaaggactccaccgggatgggagcctggt

SEQ ID NO: 661872 - DNA, 120 bp, Artificial Sequence
  ENSG00000184465_94 (sequence is synthesized)
gcttattctcgaactcagcaatccagcagtgcacctggctctgtttccagcctggccaatgatattctaagcatgaattattacatattactaattattaaaaattaaatgtaatatctt

SEQ ID NO: 661873 - DNA, 120 bp, Artificial Sequence
  ENSG00000184465_95 (sequence is synthesized)
gcctcccgagtagctgggattacagggggaagagaaaattgaaggagggtcaagggcgctgactccttcaatgccctggaagttgcttctcctggaggaaaggggcttgtagccatgtgg

SEQ ID NO: 661874 - DNA, 120 bp, Artificial Sequence
  ENSG00000184465_96 (sequence is synthesized)
ctcctggaggaaaggggcttgtagccatgtgggaacagtaacaatggctgctcgcctatttgcaccctctgtaagaagaagcatccatcgctgatcagagaacaggtccctgacatttgg

SEQ ID NO: 661875 - DNA, 120 bp, Artificial Sequence
  ENSG00000184465_97 (sequence is synthesized)
gtggatctgaatgaggcaatctcagacttacagcccttcactcccgtccacacagggagaggattcacttaacagtgaatgtccttgatgtttttcacttaaaattaaatggatgcttgg

SEQ ID NO: 661876 - DNA, 120 bp, Artificial Sequence
  ENSG00000184470_0 (sequence is synthesized)
ggcaatggcggtggcgctgcggggattaggagggcgcttccggtggcggacgcaggccgtggcgggcggggtgcggggcgcggcgcggggcgcagcagcaggtcagcgggactatgatct

SEQ ID NO: 661877 - DNA, 120 bp, Artificial Sequence
  ENSG00000184470_1 (sequence is synthesized)
ggtcagcgggactatgatctcctggtggtcggcgggggatctggtggcctggcttgtgccaaggaggccgcccagctgggaaggaaggtggccgtggtggactacgtggaaccttctccc

SEQ ID NO: 661878 - DNA, 120 bp, Artificial Sequence
  ENSG00000184470_2 (sequence is synthesized)
caaggcacccggtggggcctcggcggcacctgcgtcaacgtgggctgcatccccaagaagctgatgcaccaggcggcactgctgggaggcctgatccaagatgcccccaactatggctgg

SEQ ID NO: 661879 - DNA, 120 bp, Artificial Sequence
  ENSG00000184470_3 (sequence is synthesized)
gaggtggcccagcccgtgccgcatgactggaggaagatggcagaagctgttcaaaatcacgtgaaatccttgaactggggccaccgtgtccagcttcaggacagaaaagtcaagtacttt

SEQ ID NO: 661880 - DNA, 120 bp, Artificial Sequence
  ENSG00000184470_4 (sequence is synthesized)
aacatcaaagccagctttgttgacgagcacacggtttgcggcgttgccaaaggtgggaaagagattctgctgtcagccgatcacatcatcattgctactggagggcggccgagatacccc

SEQ ID NO: 661881 - DNA, 120 bp, Artificial Sequence
  ENSG00000184470_5 (sequence is synthesized)
acgcacatcgaaggtgccttggaatatggaatcacaagtgatgacatcttctggctgaaggaatcccctggaaaaacgttggtggtcggggccagctatgtggccctggagtgtgctggc

SEQ ID NO: 661882 - DNA, 120 bp, Artificial Sequence
  ENSG00000184470_6 (sequence is synthesized)
ttcctcaccgggattgggctggacaccaccatcatgatgcgcagcatccccctccgcggcttcgaccagcaaatgtcctccatggtcatagagcacatggcatctcatggcacccggttc

SEQ ID NO: 661883 - DNA, 120 bp, Artificial Sequence
  ENSG00000184470_7 (sequence is synthesized)
ctgaggggctgtgccccctcgcgggtcaggaggctccctgatggccagctgcaggtcacctgggaggacagcaccaccggcaaggaggacacgggcacctttgacaccgtcctgtgggcc

SEQ ID NO: 661884 - DNA, 120 bp, Artificial Sequence
  ENSG00000184470_8 (sequence is synthesized)
agaagtctgaatttggagaaggctggggtagatactagccccgacactcagaagatcctggtggactcccgggaagccacctctgtgccccacatctacgccattggtgacgtggtggag

SEQ ID NO: 661885 - DNA, 120 bp, Artificial Sequence
  ENSG00000184470_9 (sequence is synthesized)
gggcggcctgagctgacacccatagcgatcatggccgggaggctcctggtgcagcggctcttcggcgggtcctcagatctgatggactacgacaatgttcccacgaccgtcttcaccccg

SEQ ID NO: 661886 - DNA, 120 bp, Artificial Sequence
  ENSG00000184470_10 (sequence is synthesized)
ctggagtatggctgtgtggggctgtccgaggaggaggcagtggctcgccacgggcaggagcatgttgaggtctatcacgcccattataaaccactggagttcacggtggctggacgagat

SEQ ID NO: 661887 - DNA, 120 bp, Artificial Sequence
  ENSG00000184470_11 (sequence is synthesized)
gcatcccagtgttatgtaaagatggtgtgcctgagggagcccccacagctggtgctgggcctgcatttccttggccccaacgcaggcgaagttactcaaggatttgctctggggatcaag

SEQ ID NO: 661888 - DNA, 120 bp, Artificial Sequence
  ENSG00000184470_12 (sequence is synthesized)
tgtggggcttcctatgcgcaggtgatgcggaccgtgggtatccatcccacatgctctgaggaggtagtcaagctgcgcatctccaagcgctcaggcctggaccccacggtgacaggctgc

SEQ ID NO: 661889 - DNA, 120 bp, Artificial Sequence
  ENSG00000184470_13 (sequence is synthesized)
tgagggtaagcgccatccctgcaggccagggcacacggtgcgcccgccgccagctcctcggaggccagacccaggatggctgcaggccaggtttggggggcctcaaccctctcctggagc

SEQ ID NO: 661890 - DNA, 120 bp, Artificial Sequence
  ENSG00000184470_14 (sequence is synthesized)
gcctgtgagatggtcagcgtggagcgcaagtgctggacaggtggcccgtgtgccccacagggatggctcaggggactgtccacctcacccctgcacctctcagcctctgccgccgggcac

SEQ ID NO: 661891 - DNA, 120 bp, Artificial Sequence
  ENSG00000184470_15 (sequence is synthesized)
ccccccccaggctcctggtgccagatgatgacgacctgggtggaaacctaccctgtgggcacccatgtccgagccccctggcatttctgcaatgcaaataaagagggtactttttctgaa

SEQ ID NO: 661892 - DNA, 120 bp, Artificial Sequence
  ENSG00000184470_16 (sequence is synthesized)
ccggacctcaggcccagttcagtgtacttcccctctctacttcctccctccagtcccttctccatccctcccttttttggctgccccttgcctgccttcctcgccagtagcttgcagagt

SEQ ID NO: 661893 - DNA, 120 bp, Artificial Sequence
  ENSG00000184470_17 (sequence is synthesized)
acacggtgcgcccgccgccagctcctcggaggccagacccaggtatgcaggtggggctggctctgtttgaggacagggcatgtggcaggggtgcaggagccctggccatgggctccctcc

SEQ ID NO: 661894 - DNA, 120 bp, Artificial Sequence
  ENSG00000184470_18 (sequence is synthesized)
aggtgtacagcaaggctacacctgccacgccacccagaatgggtgctccatcctgtaaccaggccacagcggtgacaggcagaaggggaagttcccaggggcccaaacctccccggggga

SEQ ID NO: 661895 - DNA, 120 bp, Artificial Sequence
  ENSG00000184470_19 (sequence is synthesized)
ccccagaccccggcctggccacagctgctccccacacacaggaggtatcaagaaacggggctcatccttagcagcctatcccaggtggatgttggcgtggaaggtgtcccgggtgggcta

SEQ ID NO: 661896 - DNA, 120 bp, Artificial Sequence
  ENSG00000184470_20 (sequence is synthesized)
aagtcgggcatctcaagttgctgccccacagggggctgcagtcgggaagctggcctcccaccgaggcctcccaccaaggcctggctcctgcagagttcagcgcccgctcatttccctatc

SEQ ID NO: 661897 - DNA, 120 bp, Artificial Sequence
  ENSG00000184470_21 (sequence is synthesized)
tcccagaaggtggagacgctgccctgtgatggccggccctgcccagcctgccctgcacatctggttctgttccagctctgcagagccaggctgaccggggggcatgttgttcatcgtgac

SEQ ID NO: 661898 - DNA, 120 bp, Artificial Sequence
  ENSG00000184470_22 (sequence is synthesized)
ctcttctggggaggaagaaactggcaagggctcctggcctctgccccagggatgcctgtgccagagccccctcgcctcgtggtctaatagtgcatcctccggcctgggctgcagggcagg

SEQ ID NO: 661899 - DNA, 120 bp, Artificial Sequence
  ENSG00000184470_23 (sequence is synthesized)
ggccggggcagggtgggccctcagcccgtgccatccagcccacctggggcacccccatggctgtcagcccctcccagggttggggtgtttgggctccatctctcccccggggctgaggtg

SEQ ID NO: 661900 - DNA, 120 bp, Artificial Sequence
  ENSG00000184470_24 (sequence is synthesized)
gagaccaggcagagcagtgggctccccccaagatgcctgtggacaggctctagggtctgcatggcgccgaggggctctggggaggcctctctgggggtactcagggccccctgcttcacc

SEQ ID NO: 661901 - DNA, 120 bp, Artificial Sequence
  ENSG00000184470_25 (sequence is synthesized)
gtggccgcctccccccggcggggccgcgctcgatagggataaacaaagggcatcctgaggaaactcttatcagaacattacacctcccagagctgttttgttaggagcctgctataaatt

SEQ ID NO: 661902 - DNA, 120 bp, Artificial Sequence
  ENSG00000184470_26 (sequence is synthesized)
tttatcatttcaaaatatttttgtagcaccgcgtcgctccctgtgacgcatcgccctggggtggggccattctctgctgggtttatttctcacccatctcccttgggggtccctgggtgt

SEQ ID NO: 661903 - DNA, 120 bp, Artificial Sequence
  ENSG00000184470_27 (sequence is synthesized)
ggcagtgggagacatagctaggctgatgtgaggggtgggtggctgacctgtgctgaccttcctgttgttggcaggatggctgcaggccaggtttggggggcctcaaccctctcctggagc

SEQ ID NO: 661904 - DNA, 120 bp, Artificial Sequence
  ENSG00000184470_28 (sequence is synthesized)
cacgtgcttcccacagcagcagcttgcacaccctttccccctatactcactatcatcactttctgctttccaattctcttgaatccacactgctgaaatgtggggtccccagtggcctcc

SEQ ID NO: 661905 - DNA, 120 bp, Artificial Sequence
  ENSG00000184470_29 (sequence is synthesized)
acgctgccagatcctcaggacagctctcgttctgctctccccctgccccgctggatctgtccccttccacaccaggatcctgcttcctaagtctccattgctgattcccccttttccctt

SEQ ID NO: 661906 - DNA, 120 bp, Artificial Sequence
  ENSG00000184470_30 (sequence is synthesized)
ctgcacccggtctctaagtggacattctgagaaacagtttaaacacaaccgctctaggtcaaagccactgaagataacctttcagccccctctctgtttccttcaggtcgagtcccagac

SEQ ID NO: 661907 - DNA, 120 bp, Artificial Sequence
  ENSG00000184470_31 (sequence is synthesized)
agtttatctccacggatctctatgcatttctggaatgccaaacaacatctgcatttcctgctgccatggtgattggcagcccatcccagaggacggtgctggaacccccaaggctgggca

SEQ ID NO: 661908 - DNA, 120 bp, Artificial Sequence
  ENSG00000184470_32 (sequence is synthesized)
caccctgggacggagggatctccagcacagcgacattctgatttggaatttgttatggactgtgacgtgcagatcaagctgcacgtcaggagcacatggaacgctttggggtcccttttt

SEQ ID NO: 661909 - DNA, 120 bp, Artificial Sequence
  ENSG00000184470_33 (sequence is synthesized)
agccggggattccagtgaatgaaaacggtagcaggggctcttttgagcttggtcatggggcagccctccgaggtcagcaatgtgcagaaggggtttggagagaaggcttgagcatgtgag

SEQ ID NO: 661910 - DNA, 120 bp, Artificial Sequence
  ENSG00000184470_34 (sequence is synthesized)
ggtggcacggccagcctcatcagcagcggactcctttcccagggcagagtggagggcagcaaacaggagaatgagcaacctacctaggtccttgggatgcccctcaggaggacgagctct

SEQ ID NO: 661911 - DNA, 120 bp, Artificial Sequence
  ENSG00000184470_35 (sequence is synthesized)
agggggaatgctgtacgtcaccatgctcggtgccagtgttggggattttctaaagggagatgcccactcggagggcaaagggtgatggcataggggctgcatataaccccggacatggtg

SEQ ID NO: 661912 - DNA, 120 bp, Artificial Sequence
  ENSG00000184470_36 (sequence is synthesized)
gccctgcctaacaccaggcccaccgaaccttgaggtaaagggccagtgacccccatggggacaattaaaggcaaagaattaggtagtaaatttagaggaatggtactacagagatcgacc

SEQ ID NO: 661913 - DNA, 120 bp, Artificial Sequence
  ENSG00000184470_37 (sequence is synthesized)
gctggtttctccggatgaagtcagtaccagagccactggcactgtgctggtggccctgcagcagggcctgaggcctgggcatgcggaagattctggagtcccgcgcttagcactctttga

SEQ ID NO: 661914 - DNA, 120 bp, Artificial Sequence
  ENSG00000184470_38 (sequence is synthesized)
tgtcagggagccccagcattggcaagtgcctcttcctttcccgcgtgccaggaaccagtctaaggccgactccagtttccaccggtggcacccctgccttgtctcctgtgccggctgtca

SEQ ID NO: 661915 - DNA, 120 bp, Artificial Sequence
  ENSG00000184470_39 (sequence is synthesized)
tctgaccagtgtccgtttcagacctgcctgccacctcctgcagaggccaggagcccctctacgctgctggtgcttcacatttggccagttctaagtggacattcttttttcttgagacag

SEQ ID NO: 661916 - DNA, 64 bp, Artificial Sequence
  ENSG00000184470_40 (sequence is synthesized)
ttggctcactgcaaccgagggtgcatgccaccacacccagctatttttgtatttttaatagaga

SEQ ID NO: 661917 - DNA, 61 bp, Artificial Sequence
  ENSG00000184470_41 (sequence is synthesized)
caggggcaggctggagcgcaatggtgcaatcttagctcactgcagcctccacctcctgggt

SEQ ID NO: 661918 - DNA, 80 bp, Artificial Sequence
  ENSG00000184470_42 (sequence is synthesized)
gagacagagttttgctcttgttgcgcaggctggagcgcaatggtgcaatctaacctcccgagtagctgggactataggtg

SEQ ID NO: 661919 - DNA, 60 bp, Artificial Sequence
  ENSG00000184470_43 (sequence is synthesized)
ccaggctggttttgaactccatcacgcctggctgagacagggtttcatcatgttggccag

SEQ ID NO: 661920 - DNA, 120 bp, Artificial Sequence
  ENSG00000184470_44 (sequence is synthesized)
cgtaaggcctgcgcgtgcttggtggggtcctctttttgttcaccagagtgagcactggacccttagagcctgtgctggtgctgggctcctggggctttctttccggtttacccaaaagaa

SEQ ID NO: 661921 - DNA, 84 bp, Artificial Sequence
  ENSG00000184470_45 (sequence is synthesized)
ctgaaggaatcccctggaaaaacgtgaattctcactctgtcccccaaactgaattgcaatggcccaatcttggctcactgcaat

SEQ ID NO: 661922 - DNA, 120 bp, Artificial Sequence
  ENSG00000184470_46 (sequence is synthesized)
cagagtgagactttgactcagaaaaaaaaaaaagaaaagaaagcgtgggtcatttgtttctgtgcactatgctcccagccactgttttgccagccttgtcatgcccgttctcttggtgtt

SEQ ID NO: 661923 - DNA, 120 bp, Artificial Sequence
  ENSG00000184470_47 (sequence is synthesized)
accacacccctgaaatcagaaggtgacaccatctggtgggcaccacagctccctgctggaacatgtccgggtgatgaggactgtccccaagagaggtccagccacctcttgctgcacacc

SEQ ID NO: 661924 - DNA, 120 bp, Artificial Sequence
  ENSG00000184470_48 (sequence is synthesized)
agggctgtacgtggcctcttaggaccgtgctgagctggcttccgtccctgctttgacacctgtggttaacatgtccctgggatccctgggggacaggcgaggtgcccccacatcccctcc

SEQ ID NO: 661925 - DNA, 120 bp, Artificial Sequence
  ENSG00000184470_49 (sequence is synthesized)
atgcttctcagcatggttgccgcttacctcttggtccatctgagccacagcaccaggccctgctgggggctggagctcccttttaccagtgttccctattgatccagttggtgaggttta

SEQ ID NO: 661926 - DNA, 120 bp, Artificial Sequence
  ENSG00000184470_50 (sequence is synthesized)
gtcagccagcactgctgcgggctcgaattcgcccgctgagttaaccagttgtggcctgaatccctggctgtctaggggagcagggccaggctggggcatcctgagcaaacgcctcccagt

SEQ ID NO: 661927 - DNA, 120 bp, Artificial Sequence
  ENSG00000184470_51 (sequence is synthesized)
gcaggggcttctaagtgcagttaagtttagatttggttttaaagaagggacagactgcctctggactgcagccctgaaaaactggaagttgagatcttcatgtgcccctttggcgtcccc

SEQ ID NO: 661928 - DNA, 120 bp, Artificial Sequence
  ENSG00000184470_52 (sequence is synthesized)
ctaggcaatcatcctcgccttccctggcccttgagcaattgcttattaaggtttcagcacataaatcctacttgtcaccttccaggtttaagtcttggtatgtttcttttcttttttttt

SEQ ID NO: 661929 - DNA, 62 bp, Artificial Sequence
  ENSG00000184470_53 (sequence is synthesized)
tcctgcctcagcctcctgggtagctggggctacaggcgcccaccacatggtctcaatctcct

SEQ ID NO: 661930 - DNA, 120 bp, Artificial Sequence
  ENSG00000184470_54 (sequence is synthesized)
acaggtgtgagccaccgcacctggccagtatgtattttttctttagcatattaaatgttttgctgcttcaggctttccagctaggtttttttctttttttgcgtgtgaaacagggtctct

SEQ ID NO: 661931 - DNA, 88 bp, Artificial Sequence
  ENSG00000184470_55 (sequence is synthesized)
tcaatcttcccatctcagccttctaagtgctgggattacaggtttgagctactgtgcccagccaagctagtttgttgtttttaacata

SEQ ID NO: 661932 - DNA, 120 bp, Artificial Sequence
  ENSG00000184470_56 (sequence is synthesized)
ctactgtgcccagccaagctagtttgttgtttttaacataaaaatgatatggatttgaaagttttaaaaattatggtgacatacacataacatcaaattcatcatcttaagcattttaaa

SEQ ID NO: 661933 - DNA, 120 bp, Artificial Sequence
  ENSG00000184470_57 (sequence is synthesized)
gtatatagttcagtggtgttaagtacgttcatattgtacaagcagcatgaccatccatctctagaacttttccattatctccaaactgagctctgtccccattaaacactcactccctgc

SEQ ID NO: 661934 - DNA, 120 bp, Artificial Sequence
  ENSG00000184470_58 (sequence is synthesized)
caatgttttcagggtgcatccatgttgcagcatttgttagagttagcatttgtgtagcatgtgccagcatttccttcctgttgaaggctgagttgtatgtgtgtccattatctgtcagtg

SEQ ID NO: 661935 - DNA, 120 bp, Artificial Sequence
  ENSG00000184470_59 (sequence is synthesized)
gacacttaggttgcttccgtcttttggctgttgtggatcatgctgctgtgaacatgggtgtgcacaagccgcctgttttcagcacataaaaatgacacagagtttttaaagttctgtcca

SEQ ID NO: 661936 - DNA, 120 bp, Artificial Sequence
  ENSG00000184470_60 (sequence is synthesized)
tgaaggcctgtggggcggcactcacactaggctgtgcccatcttgccatccccagcaccttgcatctctgcgtgtctccccaccaccgtgggacatgctggaaaaaaccagagaagagac

SEQ ID NO: 661937 - DNA, 80 bp, Artificial Sequence
  ENSG00000184470_61 (sequence is synthesized)
ccagaagccccacgacgatggcggcaatggcggtggcgctgcggggattaggagggcgcttccggtggcggacgcaggcc

SEQ ID NO: 661938 - DNA, 120 bp, Artificial Sequence
  ENSG00000184471_0 (sequence is synthesized)
gcccagaggaagccacgggcgcccaggcgggcatgaaagggctctttgacggctgggttgctgggacagtaacacagacggccggccaggaggaaggaccttgccctgtgctacaatccc

SEQ ID NO: 661939 - DNA, 120 bp, Artificial Sequence
  ENSG00000184471_1 (sequence is synthesized)
agagggcttcctgaaggaggcagcctagatctttgtccagcagagcccatcttcagggaatattgaggatcccgacccgtgcacctgccctagcggaagacactcctggccaagcctcca

SEQ ID NO: 661940 - DNA, 120 bp, Artificial Sequence
  ENSG00000184471_2 (sequence is synthesized)
gatgtggctgtgaggggagtgggccctggccaagatggcagcccccgccctgctgctcctagcactgctgctgcccgtgggggcctggcccgggctgcccaggaggccctgtgtgcactg

SEQ ID NO: 661941 - DNA, 120 bp, Artificial Sequence
  ENSG00000184471_3 (sequence is synthesized)
ctgccgcccggcctggccccctggaccctatgcccgggtgagtgacagggacctgtggaggggggacctgtggagggggctgcctcgagtacggcccactatagacatcgaaatcctcaa

SEQ ID NO: 661942 - DNA, 120 bp, Artificial Sequence
  ENSG00000184471_4 (sequence is synthesized)
tcaaaggtgagaagggtgaggccggcgtccgaggtcgggccggcaggagcgggaaagaggggccgccaggcgcccggggcctgcagggccgcagaggccagaaggggcaggtggggccgc

SEQ ID NO: 661943 - DNA, 120 bp, Artificial Sequence
  ENSG00000184471_5 (sequence is synthesized)
cgccgcgtgccgacgtgcctacgccgccttctccgtgggccggcgcgagggcctgcacagctccgaccacttccaggcggtgcccttcgacacggagctggtgaacctggacggcgcctt

SEQ ID NO: 661944 - DNA, 120 bp, Artificial Sequence
  ENSG00000184471_6 (sequence is synthesized)
cgacctggccgcgggccgcttcctctgcacggtgcccggcgtctacttcctcagcctcaacgtgcacacctggaactacaaggagacctacctgcacatcatgctgaaccggcggcccgc

SEQ ID NO: 661945 - DNA, 120 bp, Artificial Sequence
  ENSG00000184471_7 (sequence is synthesized)
ggccgtgctctacgcgcagcccagcgagcgcagcgtcatgcaggcccagagcctgatgctgctgctggcggcgggcgacgccgtctgggtgcgcatgttccagcgcgaccgggacaacgc

SEQ ID NO: 661946 - DNA, 120 bp, Artificial Sequence
  ENSG00000184471_8 (sequence is synthesized)
catctacggcgagcacggagacctctacatcaccttcagcggccacctggtcaagccggccgccgagctgtagccggacagacgtccgcctgtggggactctgggagccccggctggcgc

SEQ ID NO: 661947 - DNA, 120 bp, Artificial Sequence
  ENSG00000184471_9 (sequence is synthesized)
gcccgcctctccacttcgcctcactcctgtcctgggacagagggtgccctgcccttgggagatggtgctctgaggcccggccagagtctgcagaacccgcgtgtgtgtgctggagccact

SEQ ID NO: 661948 - DNA, 120 bp, Artificial Sequence
  ENSG00000184471_10 (sequence is synthesized)
ccccaggcaggcgggggaacaagcgtggcccccaacagcgcaggacaggaggaggggcggctacaggggcccgccatttgctgtgcacacatggcccctctgcagggagaggggctctgt

SEQ ID NO: 661949 - DNA, 120 bp, Artificial Sequence
  ENSG00000184471_11 (sequence is synthesized)
cccggctgcgccacccccacccactgcccaagcctgctgcctcccaagtcgcccggcatccacctctttccctgaggctgtccctggggccaggctgcccctcagcacccccaagtggcc

SEQ ID NO: 661950 - DNA, 120 bp, Artificial Sequence
  ENSG00000184471_12 (sequence is synthesized)
ccgtactcaagtcccaccttgtgtgtctgtgggggggcggtagcagggcttctggaagtgtggtgacaaccaaggacaggaggggctggggccggtggccgtggctggtgaaccctggcc

SEQ ID NO: 661951 - DNA, 120 bp, Artificial Sequence
  ENSG00000184471_13 (sequence is synthesized)
ctgctagagacaggaggggcactggcgctggggctggacccggaaccttccctctccttcgccccacactgaggtgggcggggcctcaggctgcactttggcccagggcctgagtctgct

SEQ ID NO: 661952 - DNA, 120 bp, Artificial Sequence
  ENSG00000184471_14 (sequence is synthesized)
ggggtcggagccatctccgggcactcacggggccttggcacagaggcttccgccttagagagaaaggcgcccgaacaggaaggggtgggccgaggggagattggcagaccccaggcctcc

SEQ ID NO: 661953 - DNA, 120 bp, Artificial Sequence
  ENSG00000184471_15 (sequence is synthesized)
caccccgaccgggacacccccagccctaccccgtgtgctgacggccggtggcgctaagaggtgccaggagagaagcccacagcctggtcctggctgcagcagcagggcgcctggtcagca

SEQ ID NO: 661954 - DNA, 120 bp, Artificial Sequence
  ENSG00000184471_16 (sequence is synthesized)
ctctggggagccttgtgctcactcagcccgttcccaagtgaggacacccagtgccacgcaggcagagccaggctgcagccacgtcccgcccaccccacacagagcccgtgtccctgccag

SEQ ID NO: 661955 - DNA, 120 bp, Artificial Sequence
  ENSG00000184471_17 (sequence is synthesized)
ctctgcctgtcgcctcagcttcccgtgcagcagggggtgcgcaaaggcctctgtcggggaccccagagcagctgtgaggggccctgggcttgcaggtcccaagtgggcactgcccagagc

SEQ ID NO: 661956 - DNA, 120 bp, Artificial Sequence
  ENSG00000184471_18 (sequence is synthesized)
cgagcccttggtgtccaggccccggaggacagctgcacggctccaggggttcctgcttggggggatccccaggaggagcctgttggggtcaagtgtggcaggtgcttgaagaaccagagg

SEQ ID NO: 661957 - DNA, 120 bp, Artificial Sequence
  ENSG00000184471_19 (sequence is synthesized)
tggggggtatgggctgctgggggtgggggtcccggctggccatgcagaggttcttggccccggtgagagagcagggctggatgggagatgggagccaggggtccggaccaccccagggcc

SEQ ID NO: 661958 - DNA, 120 bp, Artificial Sequence
  ENSG00000184471_20 (sequence is synthesized)
agggaggacatctcctctcgcaggctgcctgttctgtgctggggaagcaccccagaatcccagacaaccgttcctttccctggccctggccctggcccggctgccctggggtctccagcc

SEQ ID NO: 661959 - DNA, 120 bp, Artificial Sequence
  ENSG00000184471_21 (sequence is synthesized)
tctgtgattccagtgagcctgtgctgccagggtggcaggtggtcctgaggaagagagtcccgggaagacgccagcccctgcaccagggagctcagaaagtgcccgtcaccaggcccagcc

SEQ ID NO: 661960 - DNA, 120 bp, Artificial Sequence
  ENSG00000184471_22 (sequence is synthesized)
aaggacccagacgtgaccacagcagccccgaagccaggcgcttattccgagggacaggctggacctccccgcacagacgtcgccgtggcctataggtagttgcagctgcggatactaaga

SEQ ID NO: 661961 - DNA, 120 bp, Artificial Sequence
  ENSG00000184471_23 (sequence is synthesized)
agcagcaggggtcaggcgggcaggggtcgggctgcagcaggggtcaggcgggcaggggtgcaaggtctcttggaagctggcgggggtgtctaatgaatgccagtggcgaccctggttctc

SEQ ID NO: 661962 - DNA, 120 bp, Artificial Sequence
  ENSG00000184471_24 (sequence is synthesized)
agagaaccggggtggggagatgcctgtgagagcctcagacagcaggacctgcatcccgccaaccttccaggtttatttgtttaaaaaacaatgactgagaactgaaagtgagataagata

SEQ ID NO: 661963 - DNA, 120 bp, Artificial Sequence
  ENSG00000184471_25 (sequence is synthesized)
cggtcacgattctctgccaagtgataaaagcctgagggacgctgccagtgccaggtgggagcggaaagagggatgcttggtagaggccagagacacgaaaagcagcgacagcctcgtgct

SEQ ID NO: 661964 - DNA, 120 bp, Artificial Sequence
  ENSG00000184471_26 (sequence is synthesized)
gccctggccacttaggagacaagggggagccaccccatcagaaccgcaccgggcacccccgtggtcggcccgtgctggctttaatcatgagtcaaccgcacaggaagggactggggaacg

SEQ ID NO: 661965 - DNA, 120 bp, Artificial Sequence
  ENSG00000184471_27 (sequence is synthesized)
cggcttcccgcggggacatccctgtgacattccaggcaagcatcgggctggggaggcagcttatcccatgtaactttatccgtttagtggaattccagtaaaaatccaattttaaatgtt

SEQ ID NO: 661966 - DNA, 120 bp, Artificial Sequence
  ENSG00000184478_0 (sequence is synthesized)
atgacaacacaccgaaatgacaccctctccactgaagcttcagacttcctcttgaattgttttgtcagatcccccagctggcagcactggctgtccctgcccctcagcctccttttcctc

SEQ ID NO: 661967 - DNA, 120 bp, Artificial Sequence
  ENSG00000184478_1 (sequence is synthesized)
ttggccgtaggggccaacaccaccctcctgatgaccatctggctggaggcctctctgcaccagcccctgtactacctgctcagcctcctctccctgctggacatcgtgctctgcctcact

SEQ ID NO: 661968 - DNA, 120 bp, Artificial Sequence
  ENSG00000184478_2 (sequence is synthesized)
gtcatccccaaggtcctgaccatcttctggtttgacctcaggcccatcagcttccctgcctgcttcctccagatgtacatcatgaattgtttcctagccatggagtcttgcacattcatg

SEQ ID NO: 661969 - DNA, 120 bp, Artificial Sequence
  ENSG00000184478_3 (sequence is synthesized)
gtgcttatgactctgcccatccccatcctttcagcacaactccgttattgtggaagaaatgtcattgagaactgcatctgtgccaatatgtctgtttccagactctcctgcgatgatgtc

SEQ ID NO: 661970 - DNA, 120 bp, Artificial Sequence
  ENSG00000184478_4 (sequence is synthesized)
accatcaatcacctttaccaatttgctggaggctggactctgctaggatctgacctcatccttatcttcctctcctacaccttcattctgcgagctgtgctgagactcaaggcagagggt

SEQ ID NO: 661971 - DNA, 120 bp, Artificial Sequence
  ENSG00000184478_5 (sequence is synthesized)
gccgtggcaaaggccctaagcacatgtggctcccacttcatgctcatcctcttcttcagcaccatccttctggtttttgtcctcacacatgtggctaagaagaaagtctcccctgatgtg

SEQ ID NO: 661972 - DNA, 120 bp, Artificial Sequence
  ENSG00000184478_6 (sequence is synthesized)
ccagtcttgctcaatgttctccaccatgtcattcctgcagcccttaaccccatcatttacggggtgagaacccaagaaattaagcagggaatgcagaggttgttgaagaaagggtgctaa

SEQ ID NO: 661973 - DNA, 120 bp, Artificial Sequence
  ENSG00000184478_7 (sequence is synthesized)
agattagccagaagactagagagatctctgtcttcagtccctatctgtgctcttttccattcctgcgtcaatactgctgaagtagtctgagaaggaaataaataaagactgcaccctgtc

SEQ ID NO: 661974 - DNA, 120 bp, Artificial Sequence
  ENSG00000184478_8 (sequence is synthesized)
tcaggagaaaagaattgggagaatatctaaatctcttctatatatgaggtgaagggccatgcctggcagactacatggggaatcagaggatcaagaggagtgaagagaggatccctggag

SEQ ID NO: 661975 - DNA, 120 bp, Artificial Sequence
  ENSG00000184478_9 (sequence is synthesized)
gaatgcccgtcctccctccactgacagcagccacagttactaacagggtctttctgatgaggagaatctgacaggacccagttgagcaaggactggaactgcttttggggaataggaaag

SEQ ID NO: 661976 - DNA, 120 bp, Artificial Sequence
  ENSG00000184478_10 (sequence is synthesized)
tgagtgagtgggctgaaattcatatctgtgacttataacctcaaactgggtacactagatattgtgtgtgcttttcaaaaacatcggttttaatttaagtctatcttccttttcaccctt

SEQ ID NO: 661977 - DNA, 120 bp, Artificial Sequence
  ENSG00000184478_11 (sequence is synthesized)
ttctcagaaatattcttggccctctctcgttttattccatgcttataatcatattttgtccaaaacactgacattccttaaagcagattttaaagtgaaaaatgtatgtttctgaacaca

SEQ ID NO: 661978 - DNA, 120 bp, Artificial Sequence
  ENSG00000184478_12 (sequence is synthesized)
caactcaatatgtcatgaattttgtatcattaaaaatacaactgcggttattttgttgtgtctgttatgtgtaatgtccttttattcttattttcagaaaagggaatacattggagaaaa

SEQ ID NO: 661979 - DNA, 120 bp, Artificial Sequence
  ENSG00000184478_13 (sequence is synthesized)
aaacacagtagttgaaatttcagtcctcagtggtggaaagttgctactggtctgtaagtaggtctttttctctcacccttcaaccacatcattgcctttctctagttctctttctcccct

SEQ ID NO: 661980 - DNA, 120 bp, Artificial Sequence
  ENSG00000184478_14 (sequence is synthesized)
cacctcctctctctccctctccttctctttctctggaagacaagtaaatttttgtaatgtgcattgcaagagggcaagggttttgccttgattcctcatgagtaacaattatcaatgagt

SEQ ID NO: 661981 - DNA, 120 bp, Artificial Sequence
  ENSG00000184478_15 (sequence is synthesized)
tttactggatatatgagattcttgaatcctcttccccaatgtgtctgtgcttagaacatttatctttcagatccaatatatcacaggttttgatatgcaaacaaatctttattaatgagt

SEQ ID NO: 661982 - DNA, 120 bp, Artificial Sequence
  ENSG00000184478_16 (sequence is synthesized)
gaattatgttagctattaagaaacaaaaataaaaagaatattgttgttgatttgaggacctcaaagtttgggtaggaaaaatacaaatatgcactccagaacacattcttctaaactgta

SEQ ID NO: 661983 - DNA, 120 bp, Artificial Sequence
  ENSG00000184478_17 (sequence is synthesized)
gagcagtgaggaatgggataaaagatatgtatgggcagtaagatacttggtcctgtaaggaaacattagataaagagaaggtctgggcagtaggccttgcacagccacacacccacatgc

SEQ ID NO: 661984 - DNA, 120 bp, Artificial Sequence
  ENSG00000184478_18 (sequence is synthesized)
acacacatacatacccacagcataaaagttgtgtcccgcctgggaagaaatcaaataagagaattcactgtgtttcccattattcatccaatacctgataatagtgagcgatttgtttta

SEQ ID NO: 661985 - DNA, 120 bp, Artificial Sequence
  ENSG00000184478_19 (sequence is synthesized)
gaatattcttctaaatacaagattctgtgcttcagtaacaacttacaagtatgtgttactttgttttgaccatacaaggaaaatttctcaagtatcaaataccaagactgtcccaaatgt

SEQ ID NO: 661986 - DNA, 120 bp, Artificial Sequence
  ENSG00000184478_20 (sequence is synthesized)
ccgaatgttttaaatttaactgaaagcatctgagattaagccctgtcctactcaagcagaattccgcagagctctctccgttcatttctcttctccatcttgcaaaaaaaatgataaatt

SEQ ID NO: 661987 - DNA, 120 bp, Artificial Sequence
  ENSG00000184478_21 (sequence is synthesized)
agtatttaattcctggatatcctggaattgaaacctactgattgaaaaataagcatgtaccacatataagaagcaatagttaaaagcatataatcaataatttaattagaaatttctcaa

SEQ ID NO: 661988 - DNA, 120 bp, Artificial Sequence
  ENSG00000184478_22 (sequence is synthesized)
aagtgaaaagccatctgttaagatccgagtagatacacctttttctttattactcaaagaagaaggactctctaaaatctcattctctcatacatttcaacataagaaaaatggcttgac

SEQ ID NO: 661989 - DNA, 120 bp, Artificial Sequence
  ENSG00000184478_23 (sequence is synthesized)
ttgaaatgtgaataaccgtataccatggaagaatcttacaattataaagatataacatgcttgtaaggtaaatttaagccaccacctcttaggaaatattaaaaatctgaaagttttaac

SEQ ID NO: 661990 - DNA, 120 bp, Artificial Sequence
  ENSG00000184478_24 (sequence is synthesized)
aatatgctatattaacatatacttatcaaaacaccaaaactttgaggactagttattttcaagatcacatcgtttgtatgacaaatccagatgtctacagtaagctgttagaagataacc

SEQ ID NO: 661991 - DNA, 120 bp, Artificial Sequence
  ENSG00000184478_25 (sequence is synthesized)
ttgggtgccaggaaaaggacatattgagggatttagagtacatacctccctgagattaagaaaattttccataagtcttgtcttcccaaagaacatggtaaaaagttcatattttaaaag

SEQ ID NO: 661992 - DNA, 120 bp, Artificial Sequence
  ENSG00000184478_26 (sequence is synthesized)
tatttgcctgaaaaatctgttttgcttcacttatatgtaatttttagacatttataaacaatgtcaaaacaatatcggcatatatttatttgaaaaacaaggtgaacaagttaactatgg

SEQ ID NO: 661993 - DNA, 120 bp, Artificial Sequence
  ENSG00000184478_27 (sequence is synthesized)
ttttatctcaccaaaataggtaatattagtgaggatttcctctagaactgtgctgtgcaatatgaaccacatacttaattttaaactttttagtacacatgttgaaaaagtagaaacaga

SEQ ID NO: 661994 - DNA, 120 bp, Artificial Sequence
  ENSG00000184478_28 (sequence is synthesized)
caaaattagttctaataagatattttatttagtccaacatatccaaaatattatcatttcaacacataacaaatacaagataatcattaatgtgatattgcacattccttttctgtacta

SEQ ID NO: 661995 - DNA, 120 bp, Artificial Sequence
  ENSG00000184478_29 (sequence is synthesized)
agtctttgaaacaccctgagtattttacacttaacatacattttaattcagactacccagattccaagcattcaatagccacgtgaggctagtgactatggtattaatcagtactactct

SEQ ID NO: 661996 - DNA, 120 bp, Artificial Sequence
  ENSG00000184478_30 (sequence is synthesized)
tgactatggtattaatcagtactactctagaaattttgctttgaaagtcagatatggatagaaaataaagttaattagaaaatatgtattcttcttgaaatacatcttataatacagtta

SEQ ID NO: 661997 - DNA, 120 bp, Artificial Sequence
  ENSG00000184478_31 (sequence is synthesized)
tttttcttttttatatgttttgccaaggaagtcagggttttagaggagagtaaagttttttttgttaatgctgcaataacatgagtgctaaatcttggaaaccaaggtgagaagatttat

SEQ ID NO: 661998 - DNA, 120 bp, Artificial Sequence
  ENSG00000184478_32 (sequence is synthesized)
ttttaaaagaagttttagttactgggtttttaagacatatggtcctgaaatcccacagtgacagacttgaagaagagttaaacttaagatcctaaggaagaatgtaaatgggtatttact

SEQ ID NO: 661999 - DNA, 120 bp, Artificial Sequence
  ENSG00000184478_33 (sequence is synthesized)
cataacaagtaaggaatattagcattagagtaatcgacagacattaatacgttaaaggtttatcagaaggtaaatgataaacattatttgtaattcattaaatttttctttacatcattt

SEQ ID NO: 662000 - DNA, 120 bp, Artificial Sequence
  ENSG00000184478_34 (sequence is synthesized)
tcaggcttctctatggatactcatgcctaagtcactagatcttccatttggctctaccctgcaaaggtcatttcaagattttctctacttccaagcacaaaacatttaattccttctagg

SEQ ID NO: 662001 - DNA, 120 bp, Artificial Sequence
  ENSG00000184478_35 (sequence is synthesized)
ctaccggaagctaaggagaacagcccgcagcctacgccgcggggccctggtgaccggtttggttagtctcgggctctcgagtctgccaggagtctaacaacgcagttctcctcttcggcg

SEQ ID NO: 662002 - DNA, 120 bp, Artificial Sequence
  ENSG00000184481_0 (sequence is synthesized)
gcagatggctgccccggcgagtggtaaacagagacgtcaggagggggctgctgcttggagcaaaacaaaagggaaacccggggggcggggggtggggggggttgataggggaatcggtgc

SEQ ID NO: 662003 - DNA, 120 bp, Artificial Sequence
  ENSG00000184481_1 (sequence is synthesized)
gggaataagggaggccgcagccgcggggacccggaccctagtaagagtggcgagaagggaagaggcgggggaagggggagtcaggggaggggcaagtgacgcgggggagcggggcgtggg

SEQ ID NO: 662004 - DNA, 120 bp, Artificial Sequence
  ENSG00000184481_2 (sequence is synthesized)
ggagggcagcaatccgggtggaggaaatttgggaggagtgtccggggggcagcaacttaaaagggggagggaactgcggctaaggagacgttcggtgatgggagcgcaatatatgagggg

SEQ ID NO: 662005 - DNA, 120 bp, Artificial Sequence
  ENSG00000184481_3 (sequence is synthesized)
atacagtgcctcaggtttaaaagagcaggaagctgagtgagaggttgcagaaaaagtgtcttcgctcggcagaggttacaggtggcatctcagaaagagctttgaggctacaggctgtag

SEQ ID NO: 662006 - DNA, 120 bp, Artificial Sequence
  ENSG00000184481_4 (sequence is synthesized)
tcgggaaggggatcggagaactgtgtgaagggacagcttagggactagcgtcctgggactagggggaagttcgcgactttctgaagactggcaggaatgtgcctcctggccctcgatgct

SEQ ID NO: 662007 - DNA, 120 bp, Artificial Sequence
  ENSG00000184481_5 (sequence is synthesized)
tcccccctgaggggaggcatcgtgagggactgtggcaggcttcactgaacgctgagccggggaggtccaactccacgtatggatccggggaatgagaattcagccacagaggctgccgcg

SEQ ID NO: 662008 - DNA, 120 bp, Artificial Sequence
  ENSG00000184481_6 (sequence is synthesized)
atcatagacctagatcccgacttcgaaccccagagccgtccccgctcctgcacctggccccttccccgaccagagatcgctaaccagccgtccgagccgcccgaggtggagccagatctg

SEQ ID NO: 662009 - DNA, 120 bp, Artificial Sequence
  ENSG00000184481_7 (sequence is synthesized)
ggggaaaaggtacacacggaggggcgctcagagccgatcctgttgccctctcggctcccagagccggccgggggcccccagcccggaatcctgggggctgtaacaggtcctcggaaggga

SEQ ID NO: 662010 - DNA, 120 bp, Artificial Sequence
  ENSG00000184481_8 (sequence is synthesized)
ggctcccgccggaatgcctggggaaatcagtcatatgcagaactcatcagccaggccattgaaagcgccccggagaagcgactgacacttgcccagatctacgagtggatggtccgtact

SEQ ID NO: 662011 - DNA, 120 bp, Artificial Sequence
  ENSG00000184481_9 (sequence is synthesized)
gtaccctacttcaaggacaagggtgacagcaacagctcagcaggatggaagaactcgatccgccacaacctgtccctgcacagcaagttcatcaaggttcacaacgaggccaccggcaaa

SEQ ID NO: 662012 - DNA, 120 bp, Artificial Sequence
  ENSG00000184481_10 (sequence is synthesized)
agctcttggtggatgctgaaccctgagggaggcaagagcggcaaagccccccgccgccgggccgcctccatggatagcagcagcaagctgctccggggccgcagtaaagcccccaagaag

SEQ ID NO: 662013 - DNA, 120 bp, Artificial Sequence
  ENSG00000184481_11 (sequence is synthesized)
aaaccatctgtgctgccagctccacccgaaggtgccactccaacgagccctgtcggccactttgccaagtggtcaggcagcccttgctctcgaaaccgtgaagaagccgatatgtggacc

SEQ ID NO: 662014 - DNA, 120 bp, Artificial Sequence
  ENSG00000184481_12 (sequence is synthesized)
accttccgtccacgaagcagttcaaatgccagcagtgtcagcacccggctgtcccccttgaggccagagtctgaggtgctggcggaggaaataccagcttcagtcagcagttatgcaggg

SEQ ID NO: 662015 - DNA, 120 bp, Artificial Sequence
  ENSG00000184481_13 (sequence is synthesized)
ggtgtccctcccaccctcaatgaaggtctagagctgttagatgggctcaatctcacctcttcccattccctgctatctcggagtggtctctctggcttctctttgcagcatcctggggtt

SEQ ID NO: 662016 - DNA, 120 bp, Artificial Sequence
  ENSG00000184481_14 (sequence is synthesized)
accggccccttacacacctacagcagctcccttttcagcccagcagaggggcccctgtcagcaggagaagggtgcttctccagctcccaggctctggaggccctgctcacctctgatacg

SEQ ID NO: 662017 - DNA, 120 bp, Artificial Sequence
  ENSG00000184481_15 (sequence is synthesized)
tctgtcccaggctccgactcttctgttgctgggggggcttccttcctccagtaagctggccacgggcgtcggcctgtgtcccaagcccctagaggctccaggccccagcagtctggttcc

SEQ ID NO: 662018 - DNA, 120 bp, Artificial Sequence
  ENSG00000184481_16 (sequence is synthesized)
caccctttctatgatagcaccacctccagtcatggcaagtgcccccatccccaaggctctggggactcctgtgctcacaccccctactgaagctgcaagccaagacagaatgcctcagga

SEQ ID NO: 662019 - DNA, 120 bp, Artificial Sequence
  ENSG00000184481_17 (sequence is synthesized)
tctagatcttgatatgtatatggagaacctggagtgtgacatggataacatcatcagtgacctcatggatgagggcgagggactggacttcaactttgagccagatccctgagtcatgcc

SEQ ID NO: 662020 - DNA, 120 bp, Artificial Sequence
  ENSG00000184481_18 (sequence is synthesized)
tggaagctttgtcccctgcttcagatgtggagccaggcgtgttcatatctactctttacccttgagccctccccaggaatttgggaccctgctttagagctagggtggggtctggtcaca

SEQ ID NO: 662021 - DNA, 120 bp, Artificial Sequence
  ENSG00000184481_19 (sequence is synthesized)
cacaggtgttgaagaaattataaagataaagctgccccatctggggacgatatggggagggagatgggaggggaaaggggagagggtttttctcactgtgccaattagggggtaaggccc

SEQ ID NO: 662022 - DNA, 120 bp, Artificial Sequence
  ENSG00000184481_20 (sequence is synthesized)
cctctcaggagccatcatcggctttccccattcctacccacttaggctttgtagcaagatgagcaatgctgttggaaatgtgaagtcaccagtggccttacccctgcctttgggagcagg

SEQ ID NO: 662023 - DNA, 120 bp, Artificial Sequence
  ENSG00000184481_21 (sequence is synthesized)
atttttttgtagagagtcttatctgagctgagccaggctagctggagcctgggatttctatgcagtggccccttaggccagtgatgtgcggtgggtgggctgtttaggggatctggaagg

SEQ ID NO: 662024 - DNA, 120 bp, Artificial Sequence
  ENSG00000184481_22 (sequence is synthesized)
gccaaggtctgagcactggagtggctcgccaggccaaatcacccttagaaggctgcagataacagaaaggctttttataaacttttaaagaaatataaacacaaatatagagatttttta

SEQ ID NO: 662025 - DNA, 120 bp, Artificial Sequence
  ENSG00000184481_23 (sequence is synthesized)
accatggcagggtgctagtggtgggcagaatgcttttttttctttctgaaggctttgtgatagtgacatgatacaaacactacagacaataaatattaggagacacagggaagtggggag

SEQ ID NO: 662026 - DNA, 120 bp, Artificial Sequence
  ENSG00000184481_24 (sequence is synthesized)
aggtggggagtaatagtaaacacagggaagagctcccctacggaccaggtatagagaaaggtctatgcagaaataggttagagtttccctaacaaaaaagctaacccaggtcccctcatt

SEQ ID NO: 662027 - DNA, 120 bp, Artificial Sequence
  ENSG00000184481_25 (sequence is synthesized)
ccttcaacttgtgcctgggagtgtgtggtgttagggtgcagccacactcttctatgacccagcatgggttagtgctatggtgggagagtacattgaaggcctggaattagcttggggcca

SEQ ID NO: 662028 - DNA, 120 bp, Artificial Sequence
  ENSG00000184481_26 (sequence is synthesized)
gggaagggactgggaggggagagaagagaaggagggaaggatttaggatggtaaagttaggtacagagacctccctgttcaaggcccctgacagctgtccctgcccttcttccccttccc

SEQ ID NO: 662029 - DNA, 120 bp, Artificial Sequence
  ENSG00000184481_27 (sequence is synthesized)
tgactgcaggggttatgtggaagtgtgtgtggcagcaggcagcggggaggggaggaacagggaagggggagctggggagcttggctgagggtctgggaaatgagcagggatgggggggga

SEQ ID NO: 662030 - DNA, 120 bp, Artificial Sequence
  ENSG00000184481_28 (sequence is synthesized)
tgtggatcaggtttactagcacctgccagggaggccatctggggctccttctccaccccagcccccaaagcagcccttcccccagtgccctttgcatcgtcccctcccccacccctgctg

SEQ ID NO: 662031 - DNA, 120 bp, Artificial Sequence
  ENSG00000184481_29 (sequence is synthesized)
tgggttcccatcatttcctgtgtcagcgcctggcctacccagattgtatcatgtgctagattggagtggggaagtgtgtcaaatcaataaatgaataaattcaataaatgcctataacca

SEQ ID NO: 662032 - DNA, 120 bp, Artificial Sequence
  ENSG00000184481_30 (sequence is synthesized)
ctggaaagcatcgtttccctagtagaatgtcaccagtgagggaggaagggaaaacatacagcttccaatacccaaggcactgaagagctggcagagcctcaaggggagcctcaccattgt

SEQ ID NO: 662033 - DNA, 120 bp, Artificial Sequence
  ENSG00000184486_0 (sequence is synthesized)
agagagctggagagagcagggagaggggggagcgccgagctagtcagagagtgagcgagagcgagaaggagggagaggaggagaaagagagcgagggcgggcgggaggcggcggcggcgg

SEQ ID NO: 662034 - DNA, 120 bp, Artificial Sequence
  ENSG00000184486_1 (sequence is synthesized)
cagcagcagcagtaatagcaggagcagcaacagaaggcgtcggagcgggcgtcggagctgcccgctgtgggagagagaggagacagaaagagcgagcgaggagagggagcccgaggcgaa

SEQ ID NO: 662035 - DNA, 120 bp, Artificial Sequence
  ENSG00000184486_2 (sequence is synthesized)
aaagtaactgtcaaatgcgcggctcctttaaccggagcgctcagtccggctccgagagtcatggcgaccgcagcgtctaaccactacagcctgctcacctccagcgcctccatcgtgcac

SEQ ID NO: 662036 - DNA, 120 bp, Artificial Sequence
  ENSG00000184486_3 (sequence is synthesized)
gccgagccgcccggcggcatgcagcagggcgcggggggctaccgcgaagcgcagagcctggtgcagggcgactacggcgctctgcagagcaacggacacccgctcagccacgctcaccag

SEQ ID NO: 662037 - DNA, 80 bp, Artificial Sequence
  ENSG00000184486_4 (sequence is synthesized)
cacccgctcagccacgctcaccagtggatcaccgcgctgtcccacggcggcggcggcgggggcggtggcggcggcggggg

SEQ ID NO: 662038 - DNA, 120 bp, Artificial Sequence
  ENSG00000184486_5 (sequence is synthesized)
ccggacatcaagccctcggtggtggtgcagcagggcggccgcggagacgagctgcacgggccaggcgccctgcagcagcagcatcagcagcagcaacagcaacagcagcagcaacagcag

SEQ ID NO: 662039 - DNA, 120 bp, Artificial Sequence
  ENSG00000184486_6 (sequence is synthesized)
caacagcagcagcagcagcagcaacagcggccgccgcatctggtgcaccacgccgctaaccaccacccgggacccggggcatggcggagcgcggcggctgcagcgcacctcccaccctcc

SEQ ID NO: 662040 - DNA, 120 bp, Artificial Sequence
  ENSG00000184486_7 (sequence is synthesized)
atgggagcgtccaacggcggcttgctctactcgcagcccagcttcacggtgaacggcatgctgggcgccggcgggcagccggccggtctgcaccaccacggcctgcgggacgcgcacgac

SEQ ID NO: 662041 - DNA, 120 bp, Artificial Sequence
  ENSG00000184486_8 (sequence is synthesized)
gcactcgcacccacaccagcagccgccgcccccgccgcccccgcagggtccgcctggccacccaggcgcgcaccacgacccgcactcggacgaggacacgccgacctcggacgacctgga

SEQ ID NO: 662042 - DNA, 120 bp, Artificial Sequence
  ENSG00000184486_9 (sequence is synthesized)
gacgaggacacgccgacctcggacgacctggagcagttcgccaagcagttcaagcagcggcggatcaaactgggatttacccaagcggacgtggggctggctctgggcaccctgtatggc

SEQ ID NO: 662043 - DNA, 120 bp, Artificial Sequence
  ENSG00000184486_10 (sequence is synthesized)
aacgtgttctcgcagaccaccatctgcaggtttgaggccctgcagctgagcttcaagaacatgtgcaagctgaagcctttgttgaacaagtggttggaggaggcggactcgtcctcgggc

SEQ ID NO: 662044 - DNA, 120 bp, Artificial Sequence
  ENSG00000184486_11 (sequence is synthesized)
agccccacgagcatagacaagatcgcagcgcaagggcgcaagcggaaaaagcggacctccatcgaggtgagcgtcaagggggctctggagagccatttcctcaaatgccccaagccctcg

SEQ ID NO: 662045 - DNA, 120 bp, Artificial Sequence
  ENSG00000184486_12 (sequence is synthesized)
gcccaggagatcacctccctcgcggacagcttacagctggagaaggaggtggtgagagtttggttttgtaacaggagacagaaagagaaaaggatgacccctcccggagggactctgccg

SEQ ID NO: 662046 - DNA, 120 bp, Artificial Sequence
  ENSG00000184486_13 (sequence is synthesized)
ggcgccgaggatgtgtacggggggagtagggacactccaccacaccacggggtgcagacgcccgtccagtgaactcgagctgggggaggggcagagcgcggggctccccctccccttcgg

SEQ ID NO: 662047 - DNA, 120 bp, Artificial Sequence
  ENSG00000184486_14 (sequence is synthesized)
tccttggccctttcccggccctcttgttccctctctaacttctgattgttcttttatttttaattattatttccccgtcccttaaaaagacaaaaaaaataaggcaaaaggaaagcaact

SEQ ID NO: 662048 - DNA, 120 bp, Artificial Sequence
  ENSG00000184486_15 (sequence is synthesized)
aagacactggactatcctttaaaggtagcaggtgtaatgatgtgttttgacctttgcaggcgagtaaccaggcaatggagtggagtgtctcctggagagagtgaggagagtgtgtgatag

SEQ ID NO: 662049 - DNA, 120 bp, Artificial Sequence
  ENSG00000184486_16 (sequence is synthesized)
ctagaaagagagagagacagagagatggcaagcactgagataaatacctggcaaaactaaataaattaccaaaaaggaaaaaaaatccaccaaaccatgataaacacaaaatgcagcttc

SEQ ID NO: 662050 - DNA, 120 bp, Artificial Sequence
  ENSG00000184486_17 (sequence is synthesized)
ctgatgcttagagttggcacatgctgctgtgtttatttattgtggattcccatcaggaaagaggaaaaaatacacatgttctttcatataggcaaaatttaaccacataaatttgcactg

SEQ ID NO: 662051 - DNA, 120 bp, Artificial Sequence
  ENSG00000184486_18 (sequence is synthesized)
caagaaaattgaagtttacgtgaacaaattcatgagcatattttctctttctccccaccgttaatttgggagttgccgttttgggggattttgttttgctttgctttattcatcggagag

SEQ ID NO: 662052 - DNA, 120 bp, Artificial Sequence
  ENSG00000184486_19 (sequence is synthesized)
agttgaagccagctcttggccactctccatttctaatgttcttgtgttgccccttcttcgtactgtttgtgaactttggttaccttcacattccccttacgagggtgtaacatctatttg

SEQ ID NO: 662053 - DNA, 120 bp, Artificial Sequence
  ENSG00000184486_20 (sequence is synthesized)
atcgaaggcaagaatccggtttggaatataaaaataagcattggttgttcttaccagccacaaagtaaacttcattttcaggcagtgtttctgggggaggttatggagggaagaaaaaag

SEQ ID NO: 662054 - DNA, 120 bp, Artificial Sequence
  ENSG00000184486_21 (sequence is synthesized)
aaaaatcgatagtgagtgactgattgcttcattttatcaggcgggcccattgtgaaagagctcaggggaaatgtggaggttaaatatatttccagagttgtccagcagaaagaaagtggc

SEQ ID NO: 662055 - DNA, 120 bp, Artificial Sequence
  ENSG00000184486_22 (sequence is synthesized)
actttgaagagaactagggaagtacatatcttcagatatccctatatagttctctaccttcagttttagtaacaattatgaagaattatttgtgctgacagcagcagttaaactttgttt

SEQ ID NO: 662056 - DNA, 120 bp, Artificial Sequence
  ENSG00000184486_23 (sequence is synthesized)
ctctaatagctttttttttacataaaaaaagacccaggaacttaatagtgtatgcataagactgtgttttttagcacacagatacccacagcatacactgacgatctccacgcagtagac

SEQ ID NO: 662057 - DNA, 120 bp, Artificial Sequence
  ENSG00000184486_24 (sequence is synthesized)
aggttttgtcttcactagctcatttgtttatcaagtcatatttagggtcccacaccctcttttcctgtaatttattgcagaatacaccactttgacttggacagctttctgccccctctt

SEQ ID NO: 662058 - DNA, 120 bp, Artificial Sequence
  ENSG00000184486_25 (sequence is synthesized)
tcactaaggaaggcaaatgaagtgaaaaaaaaaaatgccattttcaatccttcctttctcccctttgttaatagttttaagtgaatttttgaccttatcttaatggaaaacggttaactc

SEQ ID NO: 662059 - DNA, 120 bp, Artificial Sequence
  ENSG00000184486_26 (sequence is synthesized)
caaacacaaaagactctactggaaagtgtaggtgaaaaaacttgtaactgtattgaaaataaataccattaaactgtgatcagttaaaatttaaaagaaaaatcagcacaaaagggcgct

SEQ ID NO: 662060 - DNA, 120 bp, Artificial Sequence
  ENSG00000184486_27 (sequence is synthesized)
aaaagggaaaacactttttattaatcttaaaagtttgggggtttttttccagttaggtattagataaatttttattttaaaaaatgaaagtctcactaccataaaattatggttcagcat

SEQ ID NO: 662061 - DNA, 120 bp, Artificial Sequence
  ENSG00000184486_28 (sequence is synthesized)
cagattagcattgcactcagtagtctttaaggttttaggaaatatgctttatattgtcttttcaaacacctgtgattgtttcattttccatgtttttgcaagataaatggtgacttataa

SEQ ID NO: 662062 - DNA, 120 bp, Artificial Sequence
  ENSG00000184486_29 (sequence is synthesized)
tgggcatatttatttgcctgtatttcatttcccccaatgaatgtcacaaggagatgggcacggagctgcttcgggtgcatcacgctgctcgttcctgaggtatgggaactggcctttagt

SEQ ID NO: 662063 - DNA, 120 bp, Artificial Sequence
  ENSG00000184486_30 (sequence is synthesized)
gaagctatccagagcagggcaaatagccactggtaaagggaggaaatgaatttccagatacttattaccaagtaggtaaggtcagaagctggagttcagagaatgtgtctacagcttctc

SEQ ID NO: 662064 - DNA, 120 bp, Artificial Sequence
  ENSG00000184486_31 (sequence is synthesized)
tgactcttataggtttactaagatgaaagttaccactgaaccttaccactatgtatatatgtttaatatctgtcttttgaaatgcagaaatagtttaaatgtttctttgtctatttttct

SEQ ID NO: 662065 - DNA, 120 bp, Artificial Sequence
  ENSG00000184486_32 (sequence is synthesized)
ttttttttaatgctacccagggaaatattttcatatcatttttaagtggcctgcctcaatgtatatttatttcttttgaaacaaaaaggttctggaaactgtttttctgtagctttaaat

SEQ ID NO: 662066 - DNA, 120 bp, Artificial Sequence
  ENSG00000184486_33 (sequence is synthesized)
gaataggtgagcaaaatctatatgggatgtaatttttttgttcagtctcttaaaaaatactttgttttggtacatttggttgtgcttgtggggaaaataaaaacgcagagatccttatat

SEQ ID NO: 662067 - DNA, 120 bp, Artificial Sequence
  ENSG00000184486_34 (sequence is synthesized)
atgttaaagtaatattttattatctacataaaacagaaatgcacaataccttcatagtttgttctaattattgaaatatctttattttatttttaaagatagtgccaagttttaaggggg

SEQ ID NO: 662068 - DNA, 120 bp, Artificial Sequence
  ENSG00000184486_35 (sequence is synthesized)
gggggaaaaccctagaccttaaattgactgagttgagttgtgtgtaaaacacttcccttcctttatacttcataaagttttggaataaattttatgcatatactgccagatttgatgttc

SEQ ID NO: 662069 - DNA, 120 bp, Artificial Sequence
  ENSG00000184486_36 (sequence is synthesized)
ataactttcagaggctttttttttttttaatggagactactggtctaattcactttactttgcaaaaactatcagtcccaaatctttcagtcactatgcctgtagcattaaattgaaatg

SEQ ID NO: 662070 - DNA, 120 bp, Artificial Sequence
  ENSG00000184486_37 (sequence is synthesized)
gtcattgggtttgagcttcaatttgcttgccatttcatggtcctacaaagagatgtttgtcccctttaaacatatgcagatatgcctgcatcttctttccaggttaactataccttattc

SEQ ID NO: 662071 - DNA, 120 bp, Artificial Sequence
  ENSG00000184486_38 (sequence is synthesized)
gattgtgctgttttggagaacatcagtggaactaggtggactttgatctctacccataggtcctcaaataatttgggatctacagaaaagcaggatttagtagattattatttttaataa

SEQ ID NO: 662072 - DNA, 120 bp, Artificial Sequence
  ENSG00000184486_39 (sequence is synthesized)
tttacaaatatctcttaacaaagaataaccctgatagtatactattgtgagtttactaaatgattagaagtagatcctatacattattcctgtttggtttgcataaaaagatgaatttta

SEQ ID NO: 662073 - DNA, 120 bp, Artificial Sequence
  ENSG00000184489_0 (sequence is synthesized)
atgctgtgtgctgtggacccacctggggttcatggagtgggccacggggcccagccctaagcactgctgcgcccagggtcgccgcgcctcctgctgaggggtccccgtgccactggctct

SEQ ID NO: 662074 - DNA, 120 bp, Artificial Sequence
  ENSG00000184489_1 (sequence is synthesized)
caccattgccctcgcctgccgatggcctctgctgcccagcctggggccagctctaccgcctgagccccctgccccactccaggactcaccgtaccccgatggggtaacgtgacacaggcc

SEQ ID NO: 662075 - DNA, 120 bp, Artificial Sequence
  ENSG00000184489_2 (sequence is synthesized)
ccacacgtcagaggccgctgtccccacggccactgcccgtgacccctggcccaaggcagctggagttggttcagttcaagttcattcttcctctggcccttgggggcttggggcccacct

SEQ ID NO: 662076 - DNA, 120 bp, Artificial Sequence
  ENSG00000184489_3 (sequence is synthesized)
ctgagtgaagggggctgtctgcccatccaccaatgtggagagggcgcccccggtgtggggtccagctctggacactgcttggcggccgggttcactttgagtttttaagttttctttgct

SEQ ID NO: 662077 - DNA, 120 bp, Artificial Sequence
  ENSG00000184489_4 (sequence is synthesized)
gagcttttttggttgttctttttattttttgcctctttatgactatccagctctgagagacgggagtttggagttgcccgctttactttggttgggttggggggggcggcgggctgtttt

SEQ ID NO: 662078 - DNA, 120 bp, Artificial Sequence
  ENSG00000184489_5 (sequence is synthesized)
gttccttttcttttttaagagttgggttttcttttttaattatccaaacagtgggcagcttcctcccccacacccaagtatttgcacaatatttgtgcggggtatgggggtgggttttta

SEQ ID NO: 662079 - DNA, 120 bp, Artificial Sequence
  ENSG00000184489_6 (sequence is synthesized)
aatctcgtttctcttggacaagcacagggatctcgttctcctcattttttgggggtgtgtggggacttctcaggtcgtgtccccagccttctctgcagtcccttctgccctgccgggccc

SEQ ID NO: 662080 - DNA, 120 bp, Artificial Sequence
  ENSG00000184489_7 (sequence is synthesized)
gtcgggaggcgccatggctcggatgaaccgcccggccccggtggaggtgagctacaaacacatgcgcttcctcatcacccacaaccccaccaacgccacgctcagcaccttcattgagga

SEQ ID NO: 662081 - DNA, 120 bp, Artificial Sequence
  ENSG00000184489_8 (sequence is synthesized)
cctgaagaagtacggggctaccactgtggtgcgtgtgtgtgaagtgacctatgacaaaacgccgctggagaaggatggcatcaccgttgtggactggccgtttgacgatggggcgccccc

SEQ ID NO: 662082 - DNA, 120 bp, Artificial Sequence
  ENSG00000184489_9 (sequence is synthesized)
gcccggcaaggtagtggaagactggctgagcctggtgaaggccaagttctgtgaggcccccggcagctgcgtggctgtgcactgcgtggcgggcctgggccgggctccagtccttgtggc

SEQ ID NO: 662083 - DNA, 120 bp, Artificial Sequence
  ENSG00000184489_10 (sequence is synthesized)
gctggcccttattgagagcgggatgaagtacgaggacgccatccagttcatccgccagaagcgccgcggagccatcaacagcaagcagctcacctacctggagaaataccggcccaaaca

SEQ ID NO: 662084 - DNA, 120 bp, Artificial Sequence
  ENSG00000184489_11 (sequence is synthesized)
acgcacaagacccggtgctgcgttatgtagctcaggaccttggctgggcctggtcgtcatgtaggtcaggaccttggctggacctggaggccctgcccagccctgctctgcccagcccag

SEQ ID NO: 662085 - DNA, 120 bp, Artificial Sequence
  ENSG00000184489_12 (sequence is synthesized)
caggggctccaggccttggctggccccacatcgccttttcctccccgacacctccgtgcacttgtgtccgaggagcgaggagcccctcgggccctgggtggcctctgggccctttctcct

SEQ ID NO: 662086 - DNA, 120 bp, Artificial Sequence
  ENSG00000184489_13 (sequence is synthesized)
gtctccgccactccctctggcggcgctggccgtggctctgtctctctgaggtgggtcgggcgccctctgcccgccccctcccacaccagccaggctggtctcctctagcctgtttgttgt

SEQ ID NO: 662087 - DNA, 120 bp, Artificial Sequence
  ENSG00000184489_14 (sequence is synthesized)
ggggtgggggtatattttgtaaccactgggcccccagcccctcttttgcgaccccttgtcctgacctgttctcggcaccttaaattattagaccccggggcagtcaggtgctccggacac

SEQ ID NO: 662088 - DNA, 120 bp, Artificial Sequence
  ENSG00000184489_15 (sequence is synthesized)
ccgaaggcaataaaacaggagccgtggccgtgtgtgtggagtgggctacagcgtcaggcggggcgggctggtggcctgggggccccagaggctgctgtctggatcctgggctggtgccca

SEQ ID NO: 662089 - DNA, 120 bp, Artificial Sequence
  ENSG00000184489_16 (sequence is synthesized)
ggatggggctcccgcgtgctcttgcgctgccctctggtggccgctctgggtccttgcaccccgacccaggggccagcctgccctgtcctgtcctgataccgaggtgggagccctgccttg

SEQ ID NO: 662090 - DNA, 120 bp, Artificial Sequence
  ENSG00000184489_17 (sequence is synthesized)
gccagggtggccgtgttgacggttcttgggactgtgacattggaaggcgaggcaggtcaccagcactgtcctctgcaggatgggctgggattcatttggcagcttctcagggcctgtgtc

SEQ ID NO: 662091 - DNA, 120 bp, Artificial Sequence
  ENSG00000184489_18 (sequence is synthesized)
cggctggttggtccctgtgctgcccaaaccaggtgtccacatttccggctccgaggcgcagagaagggggcaggtggtggcttgggtggaggaagtcaccatccatcagcccagggaggg

SEQ ID NO: 662092 - DNA, 120 bp, Artificial Sequence
  ENSG00000184489_19 (sequence is synthesized)
agggtgccacctgggcacctggggctggatgtgagaggcctggaccagggcccgccggagggcgtggaccagatgctcatgtgttcctgggtgcagtgtctgtgttgggggctggcccca

SEQ ID NO: 662093 - DNA, 120 bp, Artificial Sequence
  ENSG00000184489_20 (sequence is synthesized)
ccctgggccggggtgcatggagggcatggccccagcggggaggaaggtgggcctagggctggctccagggtgtggagagcctgggagtggtctccgtcctggggccccaggaggttcccg

SEQ ID NO: 662094 - DNA, 120 bp, Artificial Sequence
  ENSG00000184489_21 (sequence is synthesized)
caaggagcgactggggcaggtgctggaggaggtcagtggacaagatggggagatgtggaaaccccaaaagccccttctcaggcagccctgcccccaagaccgacagatggctaagggggc

SEQ ID NO: 662095 - DNA, 120 bp, Artificial Sequence
  ENSG00000184489_22 (sequence is synthesized)
cgcagacctggctcccccagctcctgtgtggagaaagggcaacagctgtcccggatggttattctctcctttcctcaaacacatttggaactcaagtaaatccaatgcatgttgggtgaa

SEQ ID NO: 662096 - DNA, 120 bp, Artificial Sequence
  ENSG00000184492_0 (sequence is synthesized)
acatacttttacggttacacattcctttacaaacaaccgtgtacatttcagcctcctgccccaccatttcttttctccaggagggaaggctgcatgtcgagatggtcgtagaatgttgag

SEQ ID NO: 662097 - DNA, 120 bp, Artificial Sequence
  ENSG00000184492_1 (sequence is synthesized)
tatcctactttcctacctcgcttttatttgcgcgggtttaaatgcgccttaacagaacccgtgcaaaggcttgcctacttgtctggctgcaccggatgagtagagcatcttccttggtgg

SEQ ID NO: 662098 - DNA, 120 bp, Artificial Sequence
  ENSG00000184492_2 (sequence is synthesized)
caggtgggtgcgaggaggagggggctgggcttttctccggacggtgtttgcccagaagaccatcatccctggactacgttaggaggaagtggcaccgctccgaggtaggggaagaagggt

SEQ ID NO: 662099 - DNA, 120 bp, Artificial Sequence
  ENSG00000184492_3 (sequence is synthesized)
tataaaggggggagtccaccacacatggtcttgaagaagcttttataaaaggcaaaggcatctttgccggacgttgttgcaaaggagtagaaacaagcagaggaaaacatcccaaagggt

SEQ ID NO: 662100 - DNA, 120 bp, Artificial Sequence
  ENSG00000184492_4 (sequence is synthesized)
aaccactagcgttcctgcttcttgcaacattcatcccaggcttccagctcagcccgccccgggccaggtgatcggccgccacatcccctgcgactgaagcacctgctccgccatgaacct

SEQ ID NO: 662101 - DNA, 120 bp, Artificial Sequence
  ENSG00000184492_5 (sequence is synthesized)
gccaagagctgagcgccctcgctccacaccgcagcgcagcctccgggactccgatggggaagacggtaaaatcgatgtcctgggagaggaggaagatgaagacgaggtggaagacgagga

SEQ ID NO: 662102 - DNA, 120 bp, Artificial Sequence
  ENSG00000184492_6 (sequence is synthesized)
ggaggaggcgagccagaagttcctagagcagtcgctccagccggggctgcaggtggcccggtggggcggggttgcgcttccccgagagcacatcgagggcggcggcccgagcgacccctc

SEQ ID NO: 662103 - DNA, 120 bp, Artificial Sequence
  ENSG00000184492_7 (sequence is synthesized)
agagtttggcaccgagttcagggcaccgccaaggtctgcggcggcctctgaagatgcccggcagccggcaaagcccccctactcgtacatcgcgctcatcaccatggccatcctgcaaag

SEQ ID NO: 662104 - DNA, 120 bp, Artificial Sequence
  ENSG00000184492_8 (sequence is synthesized)
cccgcacaagcgcctcacgctcagcggcatctgcgccttcattagtggccgcttcccctactaccgccgcaagttccccgcctggcagaacagcatccgccacaacctctcgctgaacga

SEQ ID NO: 662105 - DNA, 120 bp, Artificial Sequence
  ENSG00000184492_9 (sequence is synthesized)
ctgcttcgtcaagatcccccgcgagccgggccacccaggcaagggcacctactggagcctggaccccgcctcccaggacatgttcgacaatggcagctttctccggcgtaggaagcgttt

SEQ ID NO: 662106 - DNA, 120 bp, Artificial Sequence
  ENSG00000184492_10 (sequence is synthesized)
cctctgcttggggcccctgccctgccgcagccagtcccgggggcctaccccaacaccgcccccgggagacgcccttacgctctgctgcacccgcatcctcctcgctacctactgctctcg

SEQ ID NO: 662107 - DNA, 120 bp, Artificial Sequence
  ENSG00000184492_11 (sequence is synthesized)
gcccccgcctatgccggggcaccgaagaaagcagaaggcgcggacctggcgacccccggcacccttcccgtgctgcagccctcacttggtcctcagccttgggaggagggcaagggtctg

SEQ ID NO: 662108 - DNA, 120 bp, Artificial Sequence; identical to SEQ ID NO: 565819
  ENSG00000184492_12 (sequence is synthesized)

SEQ ID NO: 662109 - DNA, 120 bp, Artificial Sequence
  ENSG00000184492_13 (sequence is synthesized)
ctgctccagcgaccgtcaagcctgtcggacaattttgcagcaacagcagcagcatcaggaggaggactgcgccaacggctgcgctcccaccaagggcgcggtgctgggcgggcacctgtc

SEQ ID NO: 662110 - DNA, 120 bp, Artificial Sequence
  ENSG00000184492_14 (sequence is synthesized)
ggccgcgtcggcgctgctgcggtatcaggcggtggcagagggctctaggctgacatcgctggctgcccctttgggcggagaggggacctcaccagtttttttagtatcgcccacgcccag

SEQ ID NO: 662111 - DNA, 120 bp, Artificial Sequence
  ENSG00000184492_15 (sequence is synthesized)
ttccctggccaagtccgcagggccctcctagagccaggtgggagtggggagcgatccgcagctgctcactccaccttgcgcggcccatactgggcgtgtgcatctgaatcctgctggaga

SEQ ID NO: 662112 - DNA, 120 bp, Artificial Sequence; identical to SEQ ID NO: 565823
  ENSG00000184492_16 (sequence is synthesized)

SEQ ID NO: 662113 - DNA, 120 bp, Artificial Sequence
  ENSG00000184492_17 (sequence is synthesized)
ctgtggcttctgtggctttccggatttgcacatttcctggggtactatgaacgtgagtggggtattttgttctggcattagaagaaaaacaagcaagcaaacaaaaacacagcctccgat

SEQ ID NO: 662114 - DNA, 120 bp, Artificial Sequence
  ENSG00000184492_18 (sequence is synthesized)
gccaaacatgttcccccttcttcacttccttggaactggaagtgttattcctaagtctagtgcaaaatgcttctactctctgtgtcttcctgatagggatgtttaatgtaagtaggatat

SEQ ID NO: 662115 - DNA, 120 bp, Artificial Sequence; identical to SEQ ID NO: 565826
  ENSG00000184492_19 (sequence is synthesized)

SEQ ID NO: 662116 - DNA, 120 bp, Artificial Sequence
  ENSG00000184497_0 (sequence is synthesized)
gggactgtggctgtggccccgggagagccgggtggggcctcgggatgcagccgccggtgcccgggcccctgggcctgctggaccccgcagaagggctttcgaggaggaagaagacgtcgc

SEQ ID NO: 662117 - DNA, 120 bp, Artificial Sequence
  ENSG00000184497_1 (sequence is synthesized)
tctggtttgtggggtctctgctgctggtgtccgtcctcatagtcaccgtcgggctggctgccaccaccaggacggagaatgtgaccgttgggggctactacccagggatcattctcggct

SEQ ID NO: 662118 - DNA, 120 bp, Artificial Sequence
  ENSG00000184497_2 (sequence is synthesized)
ttggatctttcttaggaattattggcatcaacttggtggagaatagaaggcaaatgctggtggcagcgatcgtgtttatcagttttggcgtggtggccgccttctgctgcgccatcgtgg

SEQ ID NO: 662119 - DNA, 120 bp, Artificial Sequence
  ENSG00000184497_3 (sequence is synthesized)
acggcgtatttgcagcacagcacattgaaccgaggcccctcaccacgggaagatgccagttttactccagtggggtggggtacttgtacgatgtctaccagacagaggtcacctgtcact

SEQ ID NO: 662120 - DNA, 120 bp, Artificial Sequence
  ENSG00000184497_4 (sequence is synthesized)
ccctggacggcaagtgccagctgaaggtgagaagcaacacctgttactgctgtgacctctatgcctgcgggagcgcagagccctcgcccgcctactatgagttcatcggcgtcagcggct

SEQ ID NO: 662121 - DNA, 120 bp, Artificial Sequence
  ENSG00000184497_5 (sequence is synthesized)
gccaggacgtgctgcacctgtaccgcctgctctgggcctctgcagttctgaacgtcctgggcctgttcctgggcatcatcaccgccgccgtcctgggggccttcaaggacatggtgcctc

SEQ ID NO: 662122 - DNA, 120 bp, Artificial Sequence
  ENSG00000184497_6 (sequence is synthesized)
tgtcccagctggcctatggcccagccgtcccaccacagaccctctacaaccccgcccagcagatcctggcctacgcaggcttccgcctgacgcccgagcccgtcccgacctgctcgtcct

SEQ ID NO: 662123 - DNA, 120 bp, Artificial Sequence
  ENSG00000184497_7 (sequence is synthesized)
accctctgccccttcagccctgcagccgcttcccagttgcgccctcctctgccctggcttcgtctgaggacctgcagcccccttctccaagcagctctggctctgggcttcccggccagg

SEQ ID NO: 662124 - DNA, 120 bp, Artificial Sequence
  ENSG00000184497_8 (sequence is synthesized)
ctccaccgtgctacgcacccacctactttcccccgggggagaagccacccccctacgcaccctgatagaggcgtggagtaaaagataacttgtttgtttttttttttaaaaaaaaggcag

SEQ ID NO: 662125 - DNA, 120 bp, Artificial Sequence
  ENSG00000184497_9 (sequence is synthesized)
cctctagaaatcccgcttctgtggccaacctcctagagaacccgggagaatgttccagaagtctgtcccctcctttcctccctgggcacactggtgagggaggctggaaccaggcaggga

SEQ ID NO: 662126 - DNA, 120 bp, Artificial Sequence
  ENSG00000184497_10 (sequence is synthesized)
gtggggccctccagacccaggctggtgacaccttggcttgggctctgctcacatcaaatggcgctgaaagttcccacccggcctcctcctctgagagcaattgttctggtgttttcacat

SEQ ID NO: 662127 - DNA, 120 bp, Artificial Sequence
  ENSG00000184497_11 (sequence is synthesized)
cccttaattaattagctattattatgattttgcaaagacagtgcagccccggcctccctgcctgtgtgttcttgtttgtggacatgtgttgtgcgttacacgttcgtgtgtgcatctgtg

SEQ ID NO: 662128 - DNA, 120 bp, Artificial Sequence
  ENSG00000184497_12 (sequence is synthesized)
tcctggagaagcgcagggcagaagccacccgcccctcgtgctgtgctcctgacgtatgccaggaagggaaggacgcttcggctccaacgcccagcgctgtgtctaaccgcctgtgagttg

SEQ ID NO: 662129 - DNA, 120 bp, Artificial Sequence
  ENSG00000184497_13 (sequence is synthesized)
ttagaatccaggggcccggttgtctttcccagccccggatgcaaatctgcctgggccactggcacgagggtcttcccctgagctgtctcccagctacggcgcctgggcttccgctgtcct

SEQ ID NO: 662130 - DNA, 120 bp, Artificial Sequence
  ENSG00000184497_14 (sequence is synthesized)
tccgcggcttctccctcaccgcaccttgtctcaggacccctggccgctgggatggtgggggacggtgtttcggggtcctttggctcagggtctggggccgcagcactccctgtggaaacc

SEQ ID NO: 662131 - DNA, 120 bp, Artificial Sequence
  ENSG00000184497_15 (sequence is synthesized)
agcttagctccccgcgggcccagcatgcacctgccgggcacacctggggagacgggtgagcacgcctgggaagcagcaggtcccgggtgggtcacaggccccgggtgggtcacaggacag

SEQ ID NO: 662132 - DNA, 120 bp, Artificial Sequence
  ENSG00000184497_16 (sequence is synthesized)
gtctcaggtgggtcacaggtcctgagtgggtcacaggtcccgggtgggtcacaggcatcccgggtgggtcacaggtcccgagtgggtcacaggccccgggtgagtcacaggccccgggtg

SEQ ID NO: 662133 - DNA, 120 bp, Artificial Sequence
  ENSG00000184497_17 (sequence is synthesized)
agtcacgggtcccgggtgggtcacgggtcccgggtgggtcacgggccccgggtgggtcacgggtcccgggtgggtcacgggtcccgagtgggtcacgggtcccgggtgggtcacaggcgc

SEQ ID NO: 662134 - DNA, 120 bp, Artificial Sequence
  ENSG00000184497_18 (sequence is synthesized)
cccagtgacaggagttcaggatgcgccaccccaaagtagccgaagtctcttgaaaagtgttggatgtggggagaggctttctctgaactcctgaagtcagatcctcagggaaccagggac

SEQ ID NO: 662135 - DNA, 120 bp, Artificial Sequence
  ENSG00000184497_19 (sequence is synthesized)
tcccagggcgggagggcgggcgagaggtgatcccattgctccccagacgtgccacaagacaccaagtcgccgtctctgctctgtgggccgctcacggttccccagtcactccctctcccc

SEQ ID NO: 662136 - DNA, 120 bp, Artificial Sequence
  ENSG00000184497_20 (sequence is synthesized)
tcggaagctggcgcctccaggcctcaccgctctcagggcctcacgtccctccctgcaaagccccccgtgcctacgataaacaagtaccgctcttctcccgtgtgggtctgaggtctccag

SEQ ID NO: 662137 - DNA, 120 bp, Artificial Sequence
  ENSG00000184497_21 (sequence is synthesized)
cttacttcacggaacagtgcccacctgggaggtggagcggggactttctcccctgcccagtcctggatctgggagaaaaaagataaggtggaggggagccacactcgtgcagacacagcc

SEQ ID NO: 662138 - DNA, 120 bp, Artificial Sequence
  ENSG00000184497_22 (sequence is synthesized)
tcctgccccctctgctgcccgggagcctccctctgtccgatggagggtctcacacagcctctgccccctccgctgcccgggagcctccctctgcccgacggagggtctcatcctgtgtcc

SEQ ID NO: 662139 - DNA, 120 bp, Artificial Sequence
  ENSG00000184497_23 (sequence is synthesized)
agcgctcctgggcagaaggcccacagcgcacatccacacatgaacggtggctggctgggcccaggggccctaacgggcctctgaaaggcctgcagccagctctggtctgtgaacccgcca

SEQ ID NO: 662140 - DNA, 120 bp, Artificial Sequence
  ENSG00000184497_24 (sequence is synthesized)
ctgcttgtcatttttatcttataaaatccagcctcacaagcttgctgtccaggagaatgtggtcttggcctctcagggctgactggccttgaaccagtccgggaggtcgggcacgagccg

SEQ ID NO: 662141 - DNA, 120 bp, Artificial Sequence
  ENSG00000184497_25 (sequence is synthesized)
gatgcactcacgagcgcctgtgggggaagaaaagtgtgccacggatttcccgagtccccagggctctcactttacctcagggaaggctctatgggcgccgatggtgccgtggtcttgtgt

SEQ ID NO: 662142 - DNA, 120 bp, Artificial Sequence
  ENSG00000184497_26 (sequence is synthesized)
gggcggttcctgggcaccctggagctcgggctgtgcccccgaagctgcctggtgcaggcaccagcacctcttggtgtcctaggggtgcgaacagcagagaagctgaactgcaggtctggg

SEQ ID NO: 662143 - DNA, 120 bp, Artificial Sequence
  ENSG00000184497_27 (sequence is synthesized)
cagggagtctatgccccctggagctctggccagcaaagtcacaggaataaccctccttcccctcatgtcagccctcggtcgcagggtgcggtgtgggggcatcagagtgcttccccgagg

SEQ ID NO: 662144 - DNA, 120 bp, Artificial Sequence
  ENSG00000184497_28 (sequence is synthesized)
ctgcactcaccagcttcccccaaacacaacatcgatctttcccgacttttaatcttgtctagagtcaaaagctgttcaaaaatattcaactccaaggtcaacagttttgttcttgccaca

SEQ ID NO: 662145 - DNA, 120 bp, Artificial Sequence
  ENSG00000184497_29 (sequence is synthesized)
aaaatgtccttatcctttatcccagccacaaagaatgtgaacaatttgactcaaggttcgtggtggctggagggtcccccaggtcccagggcagctcccacctggcgcagggctccggcc

SEQ ID NO: 662146 - DNA, 120 bp, Artificial Sequence
  ENSG00000184497_30 (sequence is synthesized)
aatgcctggcctgcagtgtgggcggcggctgctctcgaggtgcacctgtctcatgtggacggatcctgtctggggccaccaagctctgccagcctgagtcacggtctgatgaaccccctc

SEQ ID NO: 662147 - DNA, 120 bp, Artificial Sequence
  ENSG00000184497_31 (sequence is synthesized)
tctgggctccgctggggccttctgatcccagcctcctctgcagggatgggctcccaatcccgccctcacttggttcccatgcacagccgaggtcagtgagaccctggaggccgcgggaga

SEQ ID NO: 662148 - DNA, 120 bp, Artificial Sequence
  ENSG00000184497_32 (sequence is synthesized)
tggggtggaggggatggtggggcagggggtgctggggggtttgggggtgctgtggccccggggcagggggtgctggggggtttggggtgctgtggccccacctgcactccctgcctcact

SEQ ID NO: 662149 - DNA, 120 bp, Artificial Sequence
  ENSG00000184497_33 (sequence is synthesized)
gggacagcacaggagacaggcttctcctgcagctcagaggtgggggcctagtgtagctgcaggttgtgactgaggagggcagggtcagagcattgccctgggcaggggtccgttgagact

SEQ ID NO: 662150 - DNA, 120 bp, Artificial Sequence
  ENSG00000184497_34 (sequence is synthesized)
ggccccaccttattagcttgggaccttgggttacagggagtctcctcctgcctcagtttctacatttcacacagcagcactgctcacaagagctcccaagcagaggcaactactgagtgg

SEQ ID NO: 662151 - DNA, 120 bp, Artificial Sequence
  ENSG00000184497_35 (sequence is synthesized)
gggagggacacagtccgtccacatggggccaacggccacaaagagaggaagggacatgggtgacggtccgtccacgtggggtcaccggccacggagagaggaagggacatgggtgacggt

SEQ ID NO: 662152 - DNA, 120 bp, Artificial Sequence
  ENSG00000184497_36 (sequence is synthesized)
ccgtccacgtggggtcaccggccacggagagaggaagggacatgggtgacggtccgtccacatggggtcaccggccacggagagaggaagggacatgggtgatatggttttgctgtgtcc

SEQ ID NO: 662153 - DNA, 120 bp, Artificial Sequence
  ENSG00000184497_37 (sequence is synthesized)
ccaaatctcaacttgaattgtatttcccagaattcctgcgcgttgtgggagggacccagcgggaggtaattgaatcatggtggctggtctttcccgtgctattctcgtgatagtgagtaa

SEQ ID NO: 662154 - DNA, 120 bp, Artificial Sequence
  ENSG00000184497_38 (sequence is synthesized)
cttttgcttcttcctcattttctcttgctcctgccgtgtaagaagtgccttttgcctcccaccgtgattctgaggcctccccaaccatgtgcaattgtaagtcccgttaaacctcttttt

SEQ ID NO: 662155 - DNA, 120 bp, Artificial Sequence
  ENSG00000184497_39 (sequence is synthesized)
ccaaccatgtgcaattgtaagtcccgttaaacctctttttttcccagtctcgggtatgtccttattagcagtgtgaaaacagaatactacagtggtccatccacacgcgggtctcaccca

SEQ ID NO: 662156 - DNA, 120 bp, Artificial Sequence
  ENSG00000184497_40 (sequence is synthesized)
gccacagagagggagaggacgtggcccatccacacgcgggtcacccggccacggagaggaaggaagctctaacgggtgctgaggctgtaacacacagtgctcagggaaggacaccagaca

SEQ ID NO: 662157 - DNA, 120 bp, Artificial Sequence
  ENSG00000184497_41 (sequence is synthesized)
tgaagactgtgttctgtttatatgcagtgtccagagaaggcgtgtccacagacagaagccgactgggaaaggaggtgcagtcactgctcagggacacgggttcttttcggggaggcaagc

SEQ ID NO: 662158 - DNA, 120 bp, Artificial Sequence
  ENSG00000184497_42 (sequence is synthesized)
gtgttcgcagcgtgttctgtatggggagagatgcagtcactgctcagggacacgggttcttttcggggaggcaagcgtgtttgcagcgtgttctggatggggagaggtgcagttactggt

SEQ ID NO: 662159 - DNA, 120 bp, Artificial Sequence
  ENSG00000184497_43 (sequence is synthesized)
cagggacacgagttcttttcggggaggcaagcgtgtttgcagcgtgttctggatggggagaggtgcagtcactggtcagggatacgagttcttttcggggaggcaagtgtgttctaagcg

SEQ ID NO: 662160 - DNA, 120 bp, Artificial Sequence
  ENSG00000184497_44 (sequence is synthesized)
tgttctggatggggagaggtgcagtcactggtcagggacacgagttcttgtgggaagaggagtgtccgggagccagatggcagtgatgggtggacggccccgtggatggactgaccaccg

SEQ ID NO: 662161 - DNA, 120 bp, Artificial Sequence
  ENSG00000184497_45 (sequence is synthesized)
acccatgctctgcactcatgaggcgtggctattgctgtgtgaatcacatctccatggaaacgggagtgggagaaacgggccccaaggatgttgtgaagatggccttatggggctgcactg

SEQ ID NO: 662162 - DNA, 120 bp, Artificial Sequence
  ENSG00000184497_46 (sequence is synthesized)
gtgacttggacagtgctggccaccggccctgctcagtgaacaagagccatggtcatcaccctcgccacacagagcagctcctcctgcagacttggggaccccgtggccaccagaccccgc

SEQ ID NO: 662163 - DNA, 120 bp, Artificial Sequence
  ENSG00000184497_47 (sequence is synthesized)
ggtgggagcagagatgcctccgaaactctggagacccacagaggcagaagaggattccacgaggccggggcccgtcagcagatcctcagacggcgacacgcgccacttccttttctgttt

SEQ ID NO: 662164 - DNA, 120 bp, Artificial Sequence
  ENSG00000184497_48 (sequence is synthesized)
cctagaccttttaactgatggaattcagtaagcagaaaacgtgcttgaaacaagggcaccatggagcggaccctccccctctcccctcgtggagtccttgaccctggggcaggtgaccct

SEQ ID NO: 662165 - DNA, 120 bp, Artificial Sequence
  ENSG00000184497_49 (sequence is synthesized)
tcttgctttgcaggcaggggctgtggctggagcttctcctacaaatgggctgtgctgggattagcccggctgtacatttgctttatgcttccgttggcatttaaaaatctgatgttcata

SEQ ID NO: 662166 - DNA, 120 bp, Artificial Sequence
  ENSG00000184497_50 (sequence is synthesized)
tgagcaggagcactgagattcatgtgggttttgctcagctaaccccgccgaccccacgcggttttccctgcacataggcgtggtctgaatattttgattctaatagttcctgggggtcac

SEQ ID NO: 662167 - DNA, 120 bp, Artificial Sequence
  ENSG00000184497_51 (sequence is synthesized)
ccctgcagctggtgaaccgttgatgccccctgtgtttgggaccttgacatttcgatgtgctgtatttcactctggagtcagagttctggacttgcttcattaaatcacaacagtctcaga

SEQ ID NO: 662168 - DNA, 120 bp, Artificial Sequence
  ENSG00000184497_52 (sequence is synthesized)
ctctgtgacggcgctctctgtgtgtctcgcacctgccctgtgtggattcctggctttaactaaacgcagcctctcatcctcagcacgcgtgtcagaggaggaggagctggaggccctctc

SEQ ID NO: 662169 - DNA, 120 bp, Artificial Sequence
  ENSG00000184497_53 (sequence is synthesized)
actctccagcagctgccgggaggcatcgtgtgtgtgtcacctgtcactccctggacggcaagtgccagctgaagcgcagagccctcgcccgcctactatgagttcatcggcgtcagcggc

SEQ ID NO: 662170 - DNA, 120 bp, Artificial Sequence
  ENSG00000184497_54 (sequence is synthesized)
gcagccggattgtagacaggacacagaaacgcttgtctggtgcaggcgccatgctcgccacacaggcccggggtgtccagggttttccggaaggggctcgtgtgttcattaaagcccgtg

SEQ ID NO: 662171 - DNA, 120 bp, Artificial Sequence
  ENSG00000184497_55 (sequence is synthesized)
ataaaatgctggagtgcaggatcaggaacaggtgatacctccagggccagcccgcaatgcagagccacaccggctccaggaagtcttcctcgaacccaaagctcagggctgcagagcaag

SEQ ID NO: 662172 - DNA, 120 bp, Artificial Sequence
  ENSG00000184497_56 (sequence is synthesized)
ccaccccttccaacagacactcactgggaagtgcgaccggcccggcgcacctgcgtgggagcaagagccgtcttaggcctcggcacggtcgttggcaggtccatgttggctgctctgagc

SEQ ID NO: 662173 - DNA, 120 bp, Artificial Sequence
  ENSG00000184497_57 (sequence is synthesized)
agaatagaaggcaaatgactaagaggagaggtaaagacataaaaccaggagggagcccccggttcacatggcagcaatgcagagtgaaatccagacactgcctgtccatgatgttcgtgg

SEQ ID NO: 662174 - DNA, 120 bp, Artificial Sequence
  ENSG00000184497_58 (sequence is synthesized)
ctgtatgcgcggcaacagcgatcaggttcagctggaagtctgttttgttgatgcactgttttggggactataactttaaaaacaaaaactggctaattttgtcagttcacggtggcagcc

SEQ ID NO: 662175 - DNA, 120 bp, Artificial Sequence
  ENSG00000184500_0 (sequence is synthesized)
ccgcggcgcctagcgctccggtccccgccgcgacgcgccaccgtccctgccggcgcctccgcgcgcttcgaaatgagggtcctgggtgggcgctgcggggcgctgctggcgtgtctcctc

SEQ ID NO: 662176 - DNA, 120 bp, Artificial Sequence
  ENSG00000184500_1 (sequence is synthesized)
gcgtgtctcctcctagtgcttcccgtctcagaggcaaactttttgtcaaagcaacaggcttcacaagtcctggttaggaagcgtcgtgcaaattctttacttgaagaaaccaaacagggt

SEQ ID NO: 662177 - DNA, 120 bp, Artificial Sequence
  ENSG00000184500_2 (sequence is synthesized)
aatcttgaaagagaatgcatcgaagaactgtgcaataaagaagaagccagggaggtctttgaaaatgacccggaaacggattatttttatccaaaatacttagtttgtcttcgctctttt

SEQ ID NO: 662178 - DNA, 120 bp, Artificial Sequence
  ENSG00000184500_3 (sequence is synthesized)
caaactgggttattcactgctgcacgtcagtcaactaatgcttatcctgacctaagaagctgtgtcaatgccattccagaccagtgtagtcctctgccatgcaatgaagatggatatatg

SEQ ID NO: 662179 - DNA, 120 bp, Artificial Sequence
  ENSG00000184500_4 (sequence is synthesized)
agctgcaaagatggaaaagcttcttttacttgcacttgtaaaccaggttggcaaggagaaaagtgtgaatttgacataaatgaatgcaaagatccctcaaatataaatggaggttgcagt

SEQ ID NO: 662180 - DNA, 120 bp, Artificial Sequence
  ENSG00000184500_5 (sequence is synthesized)
caaatttgtgataatacacctggaagttaccactgttcctgtaaaaatggttttgttatgctttcaaataagaaagattgtaaagatgtggatgaatgctctttgaagccaagcatttgt

SEQ ID NO: 662181 - DNA, 120 bp, Artificial Sequence
  ENSG00000184500_6 (sequence is synthesized)
ggcacagctgtgtgcaagaacatcccaggagattttgaatgtgaatgccccgaaggctacagatataatctcaaatcaaagtcttgtgaagatatagatgaatgctctgagaacatgtgt

SEQ ID NO: 662182 - DNA, 120 bp, Artificial Sequence
  ENSG00000184500_7 (sequence is synthesized)
gctcagctttgtgtcaattaccctggaggttacacttgctattgtgatgggaagaaaggattcaaacttgcccaagatcagaagagttgtgaggttgtttcagtgtgccttcccttgaac

SEQ ID NO: 662183 - DNA, 120 bp, Artificial Sequence
  ENSG00000184500_8 (sequence is synthesized)
cttgacacaaagtatgaattactttacttggcggagcagtttgcaggggttgttttatatttaaaatttcgtttgccagaaatcagcagattttcagcagaatttgatttccggacatat

SEQ ID NO: 662184 - DNA, 120 bp, Artificial Sequence
  ENSG00000184500_9 (sequence is synthesized)
caactggaggtgatgttattaataatggtctatggaatatggtgtctgtggaagaattagaacatagtattagcattaaaatagctaaagaagctgtgatggatataaataaacctggac

SEQ ID NO: 662185 - DNA, 120 bp, Artificial Sequence
  ENSG00000184500_10 (sequence is synthesized)
ccctttttaagccggaaaatggattgctggaaaccaaagtatactttgcaggattccctcggaaagtggaaagtgaactcattaaaccgattaaccctcgtctagatggatgtatacgaa

SEQ ID NO: 662186 - DNA, 120 bp, Artificial Sequence
  ENSG00000184500_11 (sequence is synthesized)
gctggaatttgatgaagcaaggagcttctggaataaaggaaattattcaagaaaaacaaaataagcattgcctggttactgtggagaagggctcctactatcctggttctggaattgctc

SEQ ID NO: 662187 - DNA, 120 bp, Artificial Sequence
  ENSG00000184500_12 (sequence is synthesized)
aatttcacatagattataataatgtatccagtgctgagggttggcatgtaaatgtgaccttgaatattcgtccatccacgggcactggtgttatgcttgccttggtttctggtaacaaca

SEQ ID NO: 662188 - DNA, 120 bp, Artificial Sequence
  ENSG00000184500_13 (sequence is synthesized)
cagtgccctttgctgtgtccttggtggactccacctctgaaaaatcacaggatattctgttatctgttgaaaatactgtaatatatcggatacaggccctaagtctatgttccgatcaac

SEQ ID NO: 662189 - DNA, 120 bp, Artificial Sequence
  ENSG00000184500_14 (sequence is synthesized)
aatctcatctggaatttagagtcaacagaaacaatctggagttgtcgacaccacttaaaatagaaaccatctcccatgaagaccttcaaagacaacttgccgtcttggacaaagcaatga

SEQ ID NO: 662190 - DNA, 120 bp, Artificial Sequence
  ENSG00000184500_15 (sequence is synthesized)
aagcaaaagtggccacatacctgggtggccttccagatgttccattcagtgccacaccagtgaatgccttttataatggctgcatggaagtgaatattaatggtgtacagttggatctgg

SEQ ID NO: 662191 - DNA, 120 bp, Artificial Sequence
  ENSG00000184500_16 (sequence is synthesized)
atgaagccatttctaaacataatgatattagagctcactcatgtccatcagtttggaaaaagacaaagaattcttaagagtaagttgccaaaatgtgattgttgaagtacaaaaggaact

SEQ ID NO: 662192 - DNA, 120 bp, Artificial Sequence
  ENSG00000184500_17 (sequence is synthesized)
atgaaaaccagaacaaattttaacaaaaggacaaccacagagggatatagtgaatatcgtatcattgtaatcaaagaagtaaggaggtaagattgccacgtgcctgctggtactgtgatg

SEQ ID NO: 662193 - DNA, 120 bp, Artificial Sequence
  ENSG00000184500_18 (sequence is synthesized)
catttcaagtggcagttttatcacgtttgaatctaccattcatagccagatgtgtatcagatgtttcactgacagtttttaacaataaattcttttcactgtattttatatcacttataa

SEQ ID NO: 662194 - DNA, 120 bp, Artificial Sequence
  ENSG00000184500_19 (sequence is synthesized)
ttggaaacgtcacactgtggaggaaaagcagcaactagggagctggtgaagaaggatgtctcagcagtgtttactaggcctccaacactagagcccatcccccagctccgaaaagcttcc

SEQ ID NO: 662195 - DNA, 120 bp, Artificial Sequence
  ENSG00000184500_20 (sequence is synthesized)
tggaaatgtccttgttatcacttcccctctcgggctgggcgctgggagcgggcggtctcctccgcccccggctgttccgccgaggctcgctgggtcgctggcgccgccgcgcagcacggc

SEQ ID NO: 662196 - DNA, 120 bp, Artificial Sequence
  ENSG00000184500_21 (sequence is synthesized)
ctgcttataataccttttccttgtgtgtaattatacttatgtttcaataacagctgaagggttttatttacaatgtgcagtctttgattattttgtggtcctttcctgggatttttaaaa

SEQ ID NO: 662197 - DNA, 120 bp, Artificial Sequence
  ENSG00000184500_22 (sequence is synthesized)
ggtcctttgtcaaggaaaaaaattctgttgtgatataaatcacagtaaagaaattcttacttctcttgctatctaagaatagtgaaaaataacaattttaaatttgaatttttttcctac

SEQ ID NO: 662198 - DNA, 120 bp, Artificial Sequence
  ENSG00000184500_23 (sequence is synthesized)
aaatgacagtttcaatttttgtttgtaaaactaaattttaattttatcatcatgaactagtgtctaaatacctatgtttttttcagaaagcaaggaagtaaactcaaacaaaagtgcgtg

SEQ ID NO: 662199 - DNA, 120 bp, Artificial Sequence
  ENSG00000184500_24 (sequence is synthesized)
taattaaatactattaatcataggcagatactattttgtttatgtttttgtttttttcctgatgaaggcagaagagatggtggtctattaaatatgaattgaatggagggtcctaatgcc

SEQ ID NO: 662200 - DNA, 120 bp, Artificial Sequence
  ENSG00000184500_25 (sequence is synthesized)
ttatttcaaaacaattcctcagggggaacagctttggcttcatctttctcttgtgtggcttcacatttaaaccagtatctttattgaattagaaaacaagtgggacatattttcctgaga

SEQ ID NO: 662201 - DNA, 120 bp, Artificial Sequence
  ENSG00000184500_26 (sequence is synthesized)
gcagcacaggaatcttcttcttggcagctgcagtctgtcaggatgagatatcagattaggttggataggtggggaaatctgaagtgggtacattttttaaattttgctgtgtgggtcaca

SEQ ID NO: 662202 - DNA, 120 bp, Artificial Sequence
  ENSG00000184500_27 (sequence is synthesized)
caaggtctacattacaaaagacagaattcagggatggaaaggagaatgaacaaatgtgggagttcatagttttccttgaatccaacttttaattaccagagtaagttgccaaaatgtgat

SEQ ID NO: 662203 - DNA, 120 bp, Artificial Sequence
  ENSG00000184500_28 (sequence is synthesized)
ggaaaagagaaaggggagtactctataagaaggaggcggagctcgaggtagctcgttctcgtaactaggcaaccggagcgtccggagataagctggaggatccgggacaaatctccagca

SEQ ID NO: 662204 - DNA, 120 bp, Artificial Sequence
  ENSG00000184500_29 (sequence is synthesized)
aggcctatctttatacctacataaaatgtgttgccaatccacggtgctgttcctttcctttctccagtgtccccaactgagattcagagatctcaggtcttgtgcatgggtttttctttt

SEQ ID NO: 662205 - DNA, 120 bp, Artificial Sequence
  ENSG00000184500_30 (sequence is synthesized)
ttttcttgttttttgtttgtttgttttttgctcagggatggggaccctctagaattctggccgacttaggcagcatgactacaggaacaatacactggggcaattcttttttgtcaaagc

SEQ ID NO: 662206 - DNA, 120 bp, Artificial Sequence
  ENSG00000184500_31 (sequence is synthesized)
tcccgtctcagaggcaaacttttgtttatattttagaaatgattttatatacaaccgtgcatgcatttctgtattggtcggcttatctggatgcaattttttctattctatatgcttttt

SEQ ID NO: 662207 - DNA, 120 bp, Artificial Sequence
  ENSG00000184500_32 (sequence is synthesized)
aacatgagaagaattggaagtagcctatagcaagtagaaacacgaactgattctattgacttaattacatatactttataaatcagactctggtcagtagatttgagggcaacatcttgt

SEQ ID NO: 662208 - DNA, 120 bp, Artificial Sequence
  ENSG00000184500_33 (sequence is synthesized)
ttctgctgtggaattaaaaacatagacttatatgacaataaatttctatgctaaatcaaggtttttttcacttctgactttaaggttcttctccagagagaagaagctgtcacagactta

SEQ ID NO: 662209 - DNA, 120 bp, Artificial Sequence
  ENSG00000184500_34 (sequence is synthesized)
ttaatttttcagaaaggtagatggaaacatttagtgttgcattttgaagactgaatcttgtgaatctacaggagcataaatgtcctacctcttgggacagttcctaccatgaattcagat

SEQ ID NO: 662210 - DNA, 89 bp, Artificial Sequence
  ENSG00000184500_35 (sequence is synthesized)
atcagacttcatgagacttattcaccagtgattcaattttctcccaccagttgcctcccacaacatgtggcaattatgggagttcaatt

SEQ ID NO: 662211 - DNA, 80 bp, Artificial Sequence
  ENSG00000184500_36 (sequence is synthesized)
atgggggaaaccaccccagtgattcaattttctcccaccagttgcctcccacaacatgtggcaattatgggagttcaatt

SEQ ID NO: 662212 - DNA, 72 bp, Artificial Sequence
  ENSG00000184500_37 (sequence is synthesized)
ctcctactatcctggttctggaattgctcaatttcacatagattataacagggtctctacctagaccttctg

SEQ ID NO: 662213 - DNA, 120 bp, Artificial Sequence
  ENSG00000184500_38 (sequence is synthesized)
acttagcgccttgctgtgtcacccaggctggagtgctgtggcctgctctcagctcactgcaacttctgtctccctggttcaagtgattctcaagtgcctcagcctcccgagtagctggga

SEQ ID NO: 662214 - DNA, 120 bp, Artificial Sequence
  ENSG00000184500_39 (sequence is synthesized)
agatgaagattgttatctcttgactgttttgtaatagtttattttttaaagagcattgtcgactgaactgcgtgccctggttggtaggattttcttctctagagctgcagcctcctagaa

SEQ ID NO: 662215 - DNA, 120 bp, Artificial Sequence
  ENSG00000184500_40 (sequence is synthesized)
agtttccacaggtaaagagcttcaaatggcaacacagcagtctgagcttataattcagtggaaaatatgttagatcccctagtgaatgcattccttggaaaccattcttggtttccaaat

SEQ ID NO: 662216 - DNA, 120 bp, Artificial Sequence
  ENSG00000184500_41 (sequence is synthesized)
ttgtaggtgagccgaatgcagttgtgaggacggaatgtaaaaaatttgagattaggtaactgtattagtcccctaggactgccataataaagtaccacaaagtaggtggtttaaacaaca

SEQ ID NO: 662217 - DNA, 120 bp, Artificial Sequence
  ENSG00000184502_0 (sequence is synthesized)
agagacctgagaggcaccaggcccagccgtggcaccacacacctcccagctctgcagacgagatgcagcgactgtgtgtgtatgtgctgatctttgcactggctctggccgccttctctg

SEQ ID NO: 662218 - DNA, 120 bp, Artificial Sequence
  ENSG00000184502_1 (sequence is synthesized)
atcatcgaaggcagctgggaccccagggtcccccacacctcgtggcagacccgtccaagaagcagggaccatggctggaggaagaagaagaagcctatggatggatggacttcggccgcc

SEQ ID NO: 662219 - DNA, 120 bp, Artificial Sequence
  ENSG00000184502_2 (sequence is synthesized)
gcagtgctgaggatgagaactaacaatcctagaaccaagcttcagagcctagccacctcccaccccactccagccctgtcccctgaaaaactgatcaaaaataaactagtttccagtgga

SEQ ID NO: 662220 - DNA, 120 bp, Artificial Sequence
  ENSG00000184507_0 (sequence is synthesized)
gagttccgtattctagttctgtgtgatctgatctttaccttcccttccttggatccctgtgcacctactggagccaggttactctgggtcctggacctgactgcctcattctggaggctt

SEQ ID NO: 662221 - DNA, 120 bp, Artificial Sequence
  ENSG00000184507_1 (sequence is synthesized)
ccagacagccacagttagtgcccaaacctgagaggatggcttcagatggagcatctgcattgccgggaccggatatgagcatgaaacctagtgccgccccgtctccatcccctgcacttc

SEQ ID NO: 662222 - DNA, 120 bp, Artificial Sequence
  ENSG00000184507_2 (sequence is synthesized)
cctttctcccaccaacttctgacccaccagaccacccacccagggagccacctccacagcccatcatgccttcagtattctctccagacaaccctctgatgctctctgctttccccagct

SEQ ID NO: 662223 - DNA, 120 bp, Artificial Sequence
  ENSG00000184507_3 (sequence is synthesized)
cactgttggtgacaggggatgggggcccttgcctcagtggggctggggctggcaaggtcattgtcaaagtcaagacagaaggggggtcagctgagccctctcaaactcagaactttatcc

SEQ ID NO: 662224 - DNA, 120 bp, Artificial Sequence
  ENSG00000184507_4 (sequence is synthesized)
ttactcagactgccctcaattcgactgccccgggcactccctgtggaggccttgagggtcctgcacctccatttgtgacagcatctaatgtgaagaccattctgccctctaaggctgttg

SEQ ID NO: 662225 - DNA, 120 bp, Artificial Sequence
  ENSG00000184507_5 (sequence is synthesized)
gtgtcagccaggagggtcctccaggccttccgcctcagcctccaccaccagttgctcaactggtccccattgtgcccctggaaaaagcttggccagggccacatgggacaaccggggaag

SEQ ID NO: 662226 - DNA, 120 bp, Artificial Sequence
  ENSG00000184507_6 (sequence is synthesized)
gaggtcctgtggccactctatccaagccttccctaggtgaccgctccaaaatttccaaggacgtttatgagaacttccgtcagtggcagcgttacaaagccttggcccggaggcacctat

SEQ ID NO: 662227 - DNA, 120 bp, Artificial Sequence
  ENSG00000184507_7 (sequence is synthesized)
cccagagtcctgacacagaagctctttcctgttttcttatcccagtgcttcgttccctggcccggctgaagcccactatgaccctggaggagggactgccattggctgtgcaggagtggg

SEQ ID NO: 662228 - DNA, 120 bp, Artificial Sequence
  ENSG00000184507_8 (sequence is synthesized)
agcacaccagcaactttgaccggatgatcttttatgagatggcagaaaggttcatggagtttgaggctgaggagatgcagattcagaacacacagctgatgaatgggtctcagggcctgt

SEQ ID NO: 662229 - DNA, 120 bp, Artificial Sequence
  ENSG00000184507_9 (sequence is synthesized)
ctcctgcaacccctttgaaacttgatcctctagggcccctggcctctgaggtttgccagcagccagtgtacattccgaagaaggcagcctccaagacacgggccccccgccggcgtcagc

SEQ ID NO: 662230 - DNA, 120 bp, Artificial Sequence
  ENSG00000184507_10 (sequence is synthesized)
gtaaagcccagagacctcctgctcctgaggcacccaaggagatcccaccagaagctgtgaaggagtatgttgacatcatggaatggctggtggggactcacttggccactggggagtcag

SEQ ID NO: 662231 - DNA, 120 bp, Artificial Sequence
  ENSG00000184507_11 (sequence is synthesized)
atggaaaacaagaggaagaagggcagcagcaggaggaggaagggatgtatccagatccaggtctcctgagctacatcaatgagctgtgttctcagaaggtctttgtctccaaggtggagg

SEQ ID NO: 662232 - DNA, 120 bp, Artificial Sequence
  ENSG00000184507_12 (sequence is synthesized)
ctgtcattcaccctcaatttctggcagatctgctgtccccagaaaaacagagagatcccttggccttaattgaggagctagagcaagaagaaggactcactcttgcccagctggtccaga

SEQ ID NO: 662233 - DNA, 120 bp, Artificial Sequence
  ENSG00000184507_13 (sequence is synthesized)
agcgactcatggccttggaagaggaggaagatgcagaggcgcctccaagtttcagtggcgctcagttggactcaagtccttctggttctgttgaggatgaagatggggatgggcggcttc

SEQ ID NO: 662234 - DNA, 120 bp, Artificial Sequence
  ENSG00000184507_14 (sequence is synthesized)
ggccctcacctgggcttcagggggctgggggcgccgcttgccttggaaaggtttcttcttcaggaaaacgggcaagagaagtgcatggtgggcaggagcaagccctagatagccccagag

SEQ ID NO: 662235 - DNA, 120 bp, Artificial Sequence
  ENSG00000184507_15 (sequence is synthesized)
gaactccgggacccttgggtgtggagaggagagggtctgggaaggttataaaccaggtatctctacatcaggatggccatctaggaggcgctgggcctcctgggcactgcctggtggctg

SEQ ID NO: 662236 - DNA, 120 bp, Artificial Sequence
  ENSG00000184507_16 (sequence is synthesized)
ataggacttcagaggctctgcccctttgttggcagggaggcttccagcctgagagcactcccagtttggatgctggacttgcagagctggctcctctgcaaggacaagggttagaaaagc

SEQ ID NO: 662237 - DNA, 120 bp, Artificial Sequence
  ENSG00000184507_17 (sequence is synthesized)
aagtcctgggattgcagaaaggacaacaaacagggggtcgtggagtgcttcctcaagggaaggagcctttagcagtgccctgggaaggctcttcaggagccatgtggggagatgacagag

SEQ ID NO: 662238 - DNA, 120 bp, Artificial Sequence
  ENSG00000184507_18 (sequence is synthesized)
gtacccccatggctcagagttatgatcagaatccttcccctagagcagctggggagagggacgatgtctgtctcagcccaggagtttggctgagcagtgagatggatgctgtaggcttgg

SEQ ID NO: 662239 - DNA, 120 bp, Artificial Sequence
  ENSG00000184507_19 (sequence is synthesized)
agctgcctgtacaaatagaggaggtcatagagagcttccaagttgagaagtgtgtaactgagtatcaggaaggctgccagggactgggctccaggggcaacatttccctgggtcctggag

SEQ ID NO: 662240 - DNA, 120 bp, Artificial Sequence
  ENSG00000184507_20 (sequence is synthesized)
aaaccctagtacctggggatacggagagcagtgtgattccctgtggaggcacagttgcggcagctgccctagaaaagagaaactattgcagcttgccaggacctttgagggccaacagcc

SEQ ID NO: 662241 - DNA, 120 bp, Artificial Sequence
  ENSG00000184507_21 (sequence is synthesized)
cacccttgaggtccaaagaaaatcaagaacagagctgtgaaaccgtagggcatcccagtgatctgtgggcagaaggttgcttcccattgctagaaagtggtgattccacactggggtctt

SEQ ID NO: 662242 - DNA, 120 bp, Artificial Sequence
  ENSG00000184507_22 (sequence is synthesized)
ccaaagaaacccttccacccacatgccaaggcaatctccttatcatggggactgaggatgcctcctccttgcctgaagccagtcaagaggcagggagcagaggcaattccttttctcctc

SEQ ID NO: 662243 - DNA, 120 bp, Artificial Sequence
  ENSG00000184507_23 (sequence is synthesized)
tgttggaaaccatagaacctgtcaacatactagatgttaaagatgactgtggcctccaactaagggtcagcgaggacacctgcccactgaatgttcattcttatgacccccaaggagaag

SEQ ID NO: 662244 - DNA, 120 bp, Artificial Sequence
  ENSG00000184507_24 (sequence is synthesized)
gcagggtggatcctgatctgtccaagcctaaaaaccttgctcctttacaagagagtcaggagtcttacacaactgggactcccaaagcaacatcttctcaccagggccttggaagcactt

SEQ ID NO: 662245 - DNA, 120 bp, Artificial Sequence
  ENSG00000184507_25 (sequence is synthesized)
tgcctagaaggggaaccaggaatgccatagttccgagagaaacttctgttagtaaaacacacaggtcagcagacagggccaaaggaaaggagaaaaagaaaaaggaagcagaggaagagg

SEQ ID NO: 662246 - DNA, 120 bp, Artificial Sequence
  ENSG00000184507_26 (sequence is synthesized)
atgaggaactctccaactttgcttacctcttggcctctaaacttagcctctcaccaagggagcatcccctcagtcctcaccatgcctcaggaggtcagggcagccagagagcatcccacc

SEQ ID NO: 662247 - DNA, 120 bp, Artificial Sequence
  ENSG00000184507_27 (sequence is synthesized)
tgctccctgctggagcaaaaggccccagcaaacttccatatcctgttgccaagtctgggaagcgagctctagctggaggtccagcccctactgaaaagacaccccactcaggagctcaac

SEQ ID NO: 662248 - DNA, 120 bp, Artificial Sequence
  ENSG00000184507_28 (sequence is synthesized)
ttggggtccccagggagaaacccctagctctgggagtagttcgaccctcacagcctcgtaaaaggcggtgtgacagttttgtcacgggcagaaggaagaaacgacgtcgtagccagtagg

SEQ ID NO: 662249 - DNA, 120 bp, Artificial Sequence
  ENSG00000184507_29 (sequence is synthesized)
gagcagcgggaccatctgaccccacttgccagtccctaaaggtgggtgccccagagtagattccacccctgctgcccaccaatggagaatcccaatgttgaatctcatcccaatgttgtt

SEQ ID NO: 662250 - DNA, 120 bp, Artificial Sequence
  ENSG00000184507_30 (sequence is synthesized)
ttgttgttctgcaaaagtggcaagcatggagagagaggtcagactggctaggctgcagggggaattacctttggaaggagctatatagaaaaaaaatgaataaagtgttttgttggaaaa

SEQ ID NO: 662251 - DNA, 120 bp, Artificial Sequence
  ENSG00000184507_31 (sequence is synthesized)
ctactgtgtgctaggtacacggcgttagaggggggtagggatggatgtggatagaatattgacgtatagaagcctgtctttgtctcaagatacacacccatttcaggagcagtgagtttt

SEQ ID NO: 662252 - DNA, 120 bp, Artificial Sequence
  ENSG00000184507_32 (sequence is synthesized)
caatgcctgaagaaacaagggctccaggattcagagcccctttaccctagggaagaaagaagaggttttcttccctcccctcttttacatccagttcccctgctccatttcaaagcgttg

SEQ ID NO: 662253 - DNA, 120 bp, Artificial Sequence
  ENSG00000184507_33 (sequence is synthesized)
gcggtaaagaatgcatgttgagtatcaatattccgtaaagcgaaagagcgtaaagttattttatgaaactggtgaagcatgtttcagcggtcgaaccaagatttaaagttaggtccctac

SEQ ID NO: 662254 - DNA, 120 bp, Artificial Sequence
  ENSG00000184508_0 (sequence is synthesized)
cggccgcagtcgtcggccccatccgcgcgatgggctctgaggcggcgcagctgctggaggctgccgacttcgcggctcgcaagcaccggcagcagcggcggaaggaccccgaggggaccc

SEQ ID NO: 662255 - DNA, 120 bp, Artificial Sequence
  ENSG00000184508_1 (sequence is synthesized)
cctacatcaaccaccccatcggtgtggcacggatcctgacccacgaggcgggaatcactgacattgtggtgttacaggcggccctgctccatgacacggtggaggacacagacaccaccc

SEQ ID NO: 662256 - DNA, 120 bp, Artificial Sequence
  ENSG00000184508_2 (sequence is synthesized)
tggatgaggtggagctacactttggggcacaagtgcggcgcctggtggaggaggtaacagatgacaagactctgcccaagctggagagaaagaggctgcaggtggagcaagcgccccaca

SEQ ID NO: 662257 - DNA, 120 bp, Artificial Sequence
  ENSG00000184508_3 (sequence is synthesized)
gtagccccggggccaaactggtgaagctggcagacaagctgtacaatctgagggacctgaatcgctgcaccccagagggatggtcagaacatcgagtccaggaatacttcgagtgggcag

SEQ ID NO: 662258 - DNA, 120 bp, Artificial Sequence
  ENSG00000184508_4 (sequence is synthesized)
cgcaggtggtgaaggggcttcagggaacaaaccggcaactggaagaggctctaaagcatctgttcaagcagcgggggctgacaatctgatcagtgcttgaagctatccagaggcacaact

SEQ ID NO: 662259 - DNA, 120 bp, Artificial Sequence
  ENSG00000184508_5 (sequence is synthesized)
ccagcctcgttcaggccggacaggattcatacgccatcttttctgtgtctcctgagctccctccatccttcccagatattagaggccaaaaaaagacttgcattttttctcagtctgaag

SEQ ID NO: 662260 - DNA, 120 bp, Artificial Sequence
  ENSG00000184508_6 (sequence is synthesized)
gtctcctgctaactaagctgagccccgcgtggtgggaatcagatgtacccatccatttctgatgcactcaccgcctctccccaagtcttgggtctgtttgctattttgcatggtgggatc

SEQ ID NO: 662261 - DNA, 120 bp, Artificial Sequence
  ENSG00000184508_7 (sequence is synthesized)
gtttaagctgctgctgctccttctccagcctccgactggtgggctgcatatctttccttcagcaaagcaggactaattgtgtgtcccggagtcacctccctcaggttgcgggcctcaacc

SEQ ID NO: 662262 - DNA, 120 bp, Artificial Sequence
  ENSG00000184508_8 (sequence is synthesized)
cctccgaacctggcttccttgtcagtgacatgggttgtgtaattatcaggttagactgtgacgtgcctgatggagcctgacacataggtgctcaagaaatggtagcagcctttcccgtta

SEQ ID NO: 662263 - DNA, 120 bp, Artificial Sequence
  ENSG00000184508_9 (sequence is synthesized)
tgctcaagaaatggtagcagcctttcccgttaagaaagttggaagggggccaggcgcggtgtctctcgcctgtaatcccagcactctgggagaccgaggcgggcggatcacttgaggtca

SEQ ID NO: 662264 - DNA, 120 bp, Artificial Sequence
  ENSG00000184508_10 (sequence is synthesized)
gacacagcgagactccgtctcaaaaatgaaaaaagaaaagacgtatcggaagggagtgccgcccgcttactgacaaccactgctgggcaccggagagaccccagcagcaacatgattggg

SEQ ID NO: 662265 - DNA, 120 bp, Artificial Sequence
  ENSG00000184508_11 (sequence is synthesized)
tgctgggcaccggagagaccccagcagcaacatgattgggccggtgggggattccggttccccagtacctcaagccgcgcgggaaactcggtgactcgcaatcccctcgcccttccgcat

SEQ ID NO: 662266 - DNA, 120 bp, Artificial Sequence
  ENSG00000184508_12 (sequence is synthesized)
tgcgggttacttcggttgttaagtgacagggacttccgggaaggcccggaagtggcccggggctgtccgaccccgggagcccggcggtcggcgtaggggaggcggtggaactttgctcgg

SEQ ID NO: 662267 - DNA, 120 bp, Artificial Sequence
  ENSG00000184508_13 (sequence is synthesized)
tggccatggggagggattgcccggtggtggtttttcagtcgttgctgagcagctgaggtttatttttatgtattttattctgcatccagtcatccattaaagccaaagtttattaagttg

SEQ ID NO: 662268 - DNA, 120 bp, Artificial Sequence
  ENSG00000184508_14 (sequence is synthesized)
cgggcgcacctaagctgtccccgcagagacctgcagggagctcgcggcggaggacccagagggaggcctgcggtggctccagcccagactccggccccgaccgcagcagaagtgcacgag

SEQ ID NO: 662269 - DNA, 120 bp, Artificial Sequence
  ENSG00000184508_15 (sequence is synthesized)
gtctacggtcatcagggtcacaaccaactgtgggctcccaaagagccaggcttatgttcttcttgcacccccaacagagcacactgagctgggggctgcgatgctgaaggcagctgtcca

SEQ ID NO: 662270 - DNA, 120 bp, Artificial Sequence
  ENSG00000184508_16 (sequence is synthesized)
catcacttgctctctgcgcgggccggtcagctccagaggaattcatctggggcaggcccaactcggcccgctgaattagcctccacgatccccgggcctccccggcgccagggggcgctg

SEQ ID NO: 662271 - DNA, 120 bp, Artificial Sequence
  ENSG00000184508_17 (sequence is synthesized)
cggctgcggcacctgggtggtggggactgggaaggaaacgtggggggcgtgcacctcattgagcacctgttttgtcccaagcttagtgcgatataccgtttaagcctcataacaattgga

SEQ ID NO: 662272 - DNA, 120 bp, Artificial Sequence
  ENSG00000184508_18 (sequence is synthesized)
acggtaggcatgatcgttccctttgtcggttggctcccagagggtaaggtacttgaccaaggtcacccagctagtcagagtccacaaggggccacatctggctctccaaaacccacaaca

SEQ ID NO: 662273 - DNA, 120 bp, Artificial Sequence
  ENSG00000184508_19 (sequence is synthesized)
tctttgatcttctttcatacagtaaaaatacaatagctgggccaaggggaagttttcaggacagctcattccatcaggaactcatggccttgaaccaagcttgccaggaagtggggaaaa

SEQ ID NO: 662274 - DNA, 120 bp, Artificial Sequence
  ENSG00000184508_20 (sequence is synthesized)
cgggcctgggcccctgcgggagagaaaaagtatctggatcccggccccgaccgcgctctcgctgctgcgctctgtggggggtacagaatccctgggagtccggagaaagctcaggactcc

SEQ ID NO: 662275 - DNA, 120 bp, Artificial Sequence
  ENSG00000184508_21 (sequence is synthesized)
ctccccaaataagtgtcgtcttacatacacacatttgcatacgaatttaggagctcatcctagagccacccatgggcagattcaggatggctccccattaccagcttgcacagccccctg

SEQ ID NO: 662276 - DNA, 120 bp, Artificial Sequence
  ENSG00000184508_22 (sequence is synthesized)
aacttctcctttgtaattgtaatcatgatctacatgattttctgttgcggtctgtcccttcactagtctgtaagttacaagcctaccaccccataatttaggaacagagccccagatact

SEQ ID NO: 662277 - DNA, 120 bp, Artificial Sequence
  ENSG00000184508_23 (sequence is synthesized)
ggaacaccctgtcgatgttccagtggctctggggttggagatctcacctgaggatgggcgggggcggaagagcggacagattgacttggtacagggcctcaaattcagcccgggtgcagc

SEQ ID NO: 662278 - DNA, 120 bp, Artificial Sequence
  ENSG00000184508_24 (sequence is synthesized)
aggagccccctgcagcctgcaggtggcagcagtaggcttcctctggagaatcagacagacgagggcaaaagaaaccagggtagtgacggccatggacatcccgggtggtctggcacaagt

SEQ ID NO: 662279 - DNA, 120 bp, Artificial Sequence
  ENSG00000184508_25 (sequence is synthesized)
gagggtggtggaccagagctgaagagagaggtgggggtgctagagacaagcaggaggggcctttccacagctcactccacccctactggagagtaaaagagatcagcccctaccagaaga

SEQ ID NO: 662280 - DNA, 120 bp, Artificial Sequence
  ENSG00000184508_26 (sequence is synthesized)
aaagatgcccttccacccatccccatcagttccagttcccaggaatagcccatagcaccagaggcaggtgggccacaggggtaagtgctgtacctgagagagaggttggctggacaaggg

SEQ ID NO: 662281 - DNA, 120 bp, Artificial Sequence
  ENSG00000184508_27 (sequence is synthesized)
tcacccagctgaagagcagcagtagccccacagataggcctgtcagcaaggggcctgaccttctctggatgcccatgagagttcactaccacctctgtcctggtcctgggaaccccaaca

SEQ ID NO: 662282 - DNA, 120 bp, Artificial Sequence
  ENSG00000184508_28 (sequence is synthesized)
tctctctttctaggccgtgactgcagacaataaggaaataaaagtcaaagccccaaggcccttgggcaccattaatacgagcctgaagcttctctatcacaggcttttagagagagatga

SEQ ID NO: 662283 - DNA, 120 bp, Artificial Sequence
  ENSG00000184508_29 (sequence is synthesized)
cagggactgggtttctgtctcctgttggaaaacgtggggcctgcattgccaaactgctgaaggagagaaggctcaaaggactagaggacagaatgagggatgagagagcagctgagccat

SEQ ID NO: 662284 - DNA, 120 bp, Artificial Sequence
  ENSG00000184508_30 (sequence is synthesized)
tagtatgaagaacaaacaagcatttacagccaaatatgtttctacccattctccaacttccaggctgccatggaagctctgggaattctgaccctcctatttcaggtcccagagacctca

SEQ ID NO: 662285 - DNA, 120 bp, Artificial Sequence
  ENSG00000184508_31 (sequence is synthesized)
gttccagcatgtggggcttccctccctaacctctgctacgtggcaaccaccaagactagctgaaaaccaagggtgactcctttcattagcctttcccctgagccttatctgccccagcta

SEQ ID NO: 662286 - DNA, 120 bp, Artificial Sequence
  ENSG00000184508_32 (sequence is synthesized)
ccagccagaacacaaaagctacatgtctgattagagtatacttagctaatagggaaccccctctcacagagaagttctatggggatcaccaggtctctcttacccctcagctgcccctaa

SEQ ID NO: 662287 - DNA, 120 bp, Artificial Sequence
  ENSG00000184508_33 (sequence is synthesized)
ggcagggaatttctccagaaggccaccagccagcagaattaagtgttattccagtgcctacccaggcctgacaacatcatgctcccaggacagcagtgacaacactcatcaccccagggg

SEQ ID NO: 662288 - DNA, 120 bp, Artificial Sequence
  ENSG00000184508_34 (sequence is synthesized)
cccacagaagatgcctagagactgaaataggagctctcatagcataagaagacaaggcaaatttcatctgcaacactgaggacaaacaaaggcagttcctgcagaaacgtcacagctacc

SEQ ID NO: 662289 - DNA, 120 bp, Artificial Sequence
  ENSG00000184508_35 (sequence is synthesized)
tgggagcctaagtctgaagcaattaggcagggctcccagggaaggctctgatttttcaggtcaggccctagggtctcctggagggtccaaaggtagactcccctgcccacagaacctggc

SEQ ID NO: 662290 - DNA, 120 bp, Artificial Sequence
  ENSG00000184508_36 (sequence is synthesized)
agaattttcagagcttttacaggttgaagatggttcttggggggagcttctgggagaagctgtctctgactctgagggtgtggggattgttctttcttcccgctcccatagtcccctgag

SEQ ID NO: 662291 - DNA, 120 bp, Artificial Sequence
  ENSG00000184515_0 (sequence is synthesized)
agttgcagtctggtagttgtcgctggccgtgtgacggctcgctgttgccctgaaggcaggcgagccagctgcccaggaaaggtggaaagtggtagaagctgacccctgagccctggcagg

SEQ ID NO: 662292 - DNA, 120 bp, Artificial Sequence
  ENSG00000184515_1 (sequence is synthesized)
tagaagctgacccctgagccctggcaggtctttaagtgcgtttgtgcagccgatttcaaggctaagagagaaagactgcctctgatccctgaaggaagaaaaaaaaaaaaaaaacaggaa

SEQ ID NO: 662293 - DNA, 120 bp, Artificial Sequence
  ENSG00000184515_2 (sequence is synthesized)
ggaaaacaaagttgtggagaaggccccagtgcagaatgaagcccccgctttaggaggtggtgaataccaggagcctggaggaaatgttaaaggggtttgggctccacctgccccgggttt

SEQ ID NO: 662294 - DNA, 120 bp, Artificial Sequence
  ENSG00000184515_3 (sequence is synthesized)
agatgatatggaacggttcatggaggagatgagagagctaaggaggaaaattagggaacttcagttgaggtacagtctgcgcattcttataggggaccctcctcaccatgatcatcatga

SEQ ID NO: 662295 - DNA, 120 bp, Artificial Sequence
  ENSG00000184515_4 (sequence is synthesized)
tgagttttgccttatgccttgaatcttgaggttaataatcataaaatccctgctttctaaattcgcatttttcctggtgtacctttaatgtgaaccttttggcattcttctgcaattttc

SEQ ID NO: 662296 - DNA, 120 bp, Artificial Sequence
  ENSG00000184515_5 (sequence is synthesized)
tgattggagattgcattttgacctagtctgtaagtttttctgtcagaagaggactttcatcaactttcatggaaagatgtttattgcatactgtaaagttaataaagcaatttaaaagca

SEQ ID NO: 662297 - DNA, 120 bp, Artificial Sequence
  ENSG00000184515_6 (sequence is synthesized)
caccctttccagatacacacccgtttagtgcgagaaatggagcggttggggagaggatctcccgagggggctggattgagaatgggtaccatttgagatctcctaggaggccggccatcg

SEQ ID NO: 662298 - DNA, 120 bp, Artificial Sequence
  ENSG00000184517_0 (sequence is synthesized)
cgccgccctgcgccgtgacccgctgtggcactgggccacgagtggaggctgcgcccctccaggtacgagaggggcttccagttctgccttcatagttctctgcctttgcccaaaactgca

SEQ ID NO: 662299 - DNA, 120 bp, Artificial Sequence
  ENSG00000184517_1 (sequence is synthesized)
gaaaatgaacaaatcccagggatcagtttcattcacggatgtgactgtggactttacccaggaggaatgggaacaactggacccctctcagaggatcctatacatggatgtgatgctgga

SEQ ID NO: 662300 - DNA, 120 bp, Artificial Sequence
  ENSG00000184517_2 (sequence is synthesized)
gaattatagcaacttactttcagtggaagtgtggaaggctgatgaccagatggagagagaccacagaaacccagacgagcaggcgaggcaatttttaattcttaagaaccaaaccccaat

SEQ ID NO: 662301 - DNA, 120 bp, Artificial Sequence
  ENSG00000184517_3 (sequence is synthesized)
tgaggaaagaggcgatctctttggaaaagcacttaatctgaacacagactttgtttctttaagacaagtaccttataaatatgacttatatgaaaaaactttgaaatataattcagactt

SEQ ID NO: 662302 - DNA, 120 bp, Artificial Sequence
  ENSG00000184517_4 (sequence is synthesized)
gcttaatagtaatagaagctatgcaggaaagcagactgatgagtgtaatgaatttggaaaagcacttctctacctgaagcaagagaaaacccacagtggagtagaatattctgaatacaa

SEQ ID NO: 662303 - DNA, 120 bp, Artificial Sequence
  ENSG00000184517_5 (sequence is synthesized)
taaaagtggaaaagccctcagccataaagcagccatttttaaacatcagaaaataaaaaacttggttcaacctttcatttgtacttactgtgacaaggctttctcctttaagtcactcct

SEQ ID NO: 662304 - DNA, 120 bp, Artificial Sequence
  ENSG00000184517_6 (sequence is synthesized)
cattagtcataagagaatacatactggagaaaagccatatgaatgcaatgtatgtaagaaaaccttctcccataaggccaacctcatcaaacatcagagaattcacactggggagaaacc

SEQ ID NO: 662305 - DNA, 120 bp, Artificial Sequence
  ENSG00000184517_7 (sequence is synthesized)
tttcgagtgtccggaatgtggaaaagctttcacccaccagtcaaacctcattgtacaccagagagcacatatggagaagaagccctatgagtgcagtgaatgtggaaagacatttgccca

SEQ ID NO: 662306 - DNA, 120 bp, Artificial Sequence
  ENSG00000184517_8 (sequence is synthesized)
aaagtttgaactcaccacacaccagagaattcatacaggagagcgaccctatgagtgtaacgaatgtgcaaaaaccttctttaagaagtcaaaccttatcatacatcagaagattcacac

SEQ ID NO: 662307 - DNA, 120 bp, Artificial Sequence
  ENSG00000184517_9 (sequence is synthesized)
gggggagaaacgctatgagtgcagtgaatgtggaaaatcctttatccagaactcacagctcatcatacacatgagaactcatacaggagagaaaccctatgaatgtactgagtgcggcaa

SEQ ID NO: 662308 - DNA, 120 bp, Artificial Sequence
  ENSG00000184517_10 (sequence is synthesized)
aactttcagccagaggtcaactcttagattacacttgcgaatccacacaggagagaaaccatatgagtgttccgaatgtgggaaggcctttagcaggaagtcccgactcagtgtccatca

SEQ ID NO: 662309 - DNA, 120 bp, Artificial Sequence
  ENSG00000184517_11 (sequence is synthesized)
gagagttcacatcggggagaaaccctgaaactccagccaggtcttactgtggaaaactcctgccagaactcttcaagcgggtgaaaaacctcatgacagtattgagggaacatgggaatt

SEQ ID NO: 662310 - DNA, 120 bp, Artificial Sequence
  ENSG00000184517_12 (sequence is synthesized)
catactgagatgcaatctctcaactcaaaaatgtattaaaaataggatcccatgagaacattatactggaagttacatgtgatacccagctaaagaatacatatcagaatatatccagtt

SEQ ID NO: 662311 - DNA, 120 bp, Artificial Sequence
  ENSG00000184517_13 (sequence is synthesized)
atacccagttgtactacaatgagctttttaaaatcttgaatgaattgagtattctagacagcagcataagaaatatacaaacagtatcctatgaatttagtggttttatgtggatatgcc

SEQ ID NO: 662312 - DNA, 120 bp, Artificial Sequence
  ENSG00000184517_14 (sequence is synthesized)
acaaaacacaagtggtatgctttagatctgcacatgtgaatttagcataatcactgggaatttgaaattcttgtcctctgtgataattaggacataacaagattttccatactaaacatc

SEQ ID NO: 662313 - DNA, 120 bp, Artificial Sequence
  ENSG00000184517_15 (sequence is synthesized)
acatgtgtttttcagtatctctgcaatccagtatgcattccaaatgaaatgtgtaacatttaaagtagcatggaacctacgtctttccctactgcttgctggcatatatcagttggtatg

SEQ ID NO: 662314 - DNA, 120 bp, Artificial Sequence
  ENSG00000184517_16 (sequence is synthesized)
aacattgttcttgagctgcctcttaggaaacagaagacagtgttgaagttttccctgcttctggtttgctgaagattttctagaagcactatttacacaaatatgcaaatgtgaaataac

SEQ ID NO: 662315 - DNA, 120 bp, Artificial Sequence
  ENSG00000184517_17 (sequence is synthesized)
cgatctataacgtgaaggaggcagacatgagctgtactactcagtatgcaccacagaataagagtttgccgtgtaaagacaatatccccattcgtcatgctcttattttcccgtgggata

SEQ ID NO: 662316 - DNA, 120 bp, Artificial Sequence
  ENSG00000184517_18 (sequence is synthesized)
tttgcatacaaatgcatgtctgttaccaaaatattgtgtaacacagacagaaaccacctgtttttgtctttccttgtttcccttaatatttcatgaattgtctagcaaaaatggtaggat

SEQ ID NO: 662317 - DNA, 120 bp, Artificial Sequence
  ENSG00000184517_19 (sequence is synthesized)
gcttctgtagttcacaaatgttacatttcagagactttagaggaaaaattattttaaataactgtcaactgtttcattgctttttaaatttttcacgtgcataaccccctttagaagtaa

SEQ ID NO: 662318 - DNA, 120 bp, Artificial Sequence
  ENSG00000184517_20 (sequence is synthesized)
atttttacactattttgttgtttaaaggaggcatttctacttccttgagttttgctgttgccaacctaaaacatttccctttggaacatgagttataagttattacttttcctttacatg

SEQ ID NO: 662319 - DNA, 120 bp, Artificial Sequence
  ENSG00000184517_21 (sequence is synthesized)
tttacacttttataaaaatcagatttttcagtggtctctccagatattaacaagaattgttgtgtaactcaaagatttgcttttatagacttgatttcaaattcttaagttcagcctttc

SEQ ID NO: 662320 - DNA, 120 bp, Artificial Sequence
  ENSG00000184517_22 (sequence is synthesized)
cctatcaatcacaaatcatgtattggaaattataaatggcaaccaaaaactggcttttaaaaaatatttttggatatcattgatgtgctgtcacactatatattgagtgactttctgaac

SEQ ID NO: 662321 - DNA, 120 bp, Artificial Sequence
  ENSG00000184517_23 (sequence is synthesized)
aaatttatccagaacatccatagcccaataagcttttgtctaagttgtcatcttacttactcacaaaggaggggaaaacgttattttcatagctgcttttagaaatgtaaattgtaacag

SEQ ID NO: 662322 - DNA, 120 bp, Artificial Sequence
  ENSG00000184517_24 (sequence is synthesized)
cctccttggacaacattgtgagtctgttttaacattaatatactcttacaacctaggaatctcctgggaatctatccctaaggaataaaaagcgccagcacttaagattatatgtttact

SEQ ID NO: 662323 - DNA, 120 bp, Artificial Sequence
  ENSG00000184517_25 (sequence is synthesized)
aatgtatattgtattttttggtaaggaccaaaaaaacaaacaaaaaaaagaccatcagtaagggaatggatgaataaattgtggtaaaaacataccatggctgaatggtatttccttgaa

SEQ ID NO: 662324 - DNA, 120 bp, Artificial Sequence
  ENSG00000184517_26 (sequence is synthesized)
aagaatgtgtgggaacaaactccaaacttctctaggtcaaatgaggaaagcaagaggggagagagagagtgtatgtgtgtgtgtagcagtttttataaaataaagataaacccttatata

SEQ ID NO: 662325 - DNA, 120 bp, Artificial Sequence
  ENSG00000184517_27 (sequence is synthesized)
gcccttcccccaccaccagcggcgagtgggtgacagagcccccgtctccgcgcgtcttcgccgccctgcgccgtgacccgctgtggcactgggccacgagtggaggctgcgcccctccag

SEQ ID NO: 662326 - DNA, 120 bp, Artificial Sequence
  ENSG00000184517_28 (sequence is synthesized)
caccaccagcggcgagtgggtgacagagcccccgtctccgcgcgtcttcgccgccctgcgccgtgacccgctgtggcactgggccacgagtggaggctgcgcccctccagggatcagttt

SEQ ID NO: 662327 - DNA, 120 bp, Artificial Sequence
  ENSG00000184517_29 (sequence is synthesized)
tccaggtacgagaggggcttccaggagatgcgcctcagacgggcggcgaagggctcgggccgcgcgggagcgagttctggagccccggcgggcgcgcgcgcgcgggacgaggccccgccg

SEQ ID NO: 662328 - DNA, 120 bp, Artificial Sequence
  ENSG00000184517_30 (sequence is synthesized)
ctcgtgggtggaggaaggactggagcctggtcagttgccggtggtgaaggagaaccgtgatccctttgtcagagggtcttcagtgaggtgttcccctgatcctcgcatccaccccgtgac

SEQ ID NO: 662329 - DNA, 120 bp, Artificial Sequence
  ENSG00000184517_31 (sequence is synthesized)
ttccagcgttatcatctccgtcgctatcccaggaacacgggaggttcagaaggggaaagtgatttccctaaggtctcacaacccggtggtactttatttctgccttcatagttctctgcc

SEQ ID NO: 662330 - DNA, 120 bp, Artificial Sequence
  ENSG00000184524_0 (sequence is synthesized)
gcgttcgcagccgccgtcatcccgcggaggagcgcgcagccccggggaggccggaggacgcgcccatagaatgcccaggggcgacaaactgtcctgagcccctctggtgcagccacctgc

SEQ ID NO: 662331 - DNA, 120 bp, Artificial Sequence
  ENSG00000184524_1 (sequence is synthesized)
ctgtcccatacgccccgcccaccatggagtccagagggaagtcagccagcagccccaagcccgacaccaaggtgccccaggtcaccaccgaggccaaggtacccccggcagccgatggga

SEQ ID NO: 662332 - DNA, 120 bp, Artificial Sequence
  ENSG00000184524_2 (sequence is synthesized)
aagcccccttgaccaagccctcgaagaaggaggccccggccgagaagcagcagccgccagcagcccccaccacggcacctgccaagaagacctcggccaaggccgaccctgcccttctca

SEQ ID NO: 662333 - DNA, 120 bp, Artificial Sequence
  ENSG00000184524_3 (sequence is synthesized)
acaaccacagcaacctgaagccagcccccacggtccccagcagtcccgatgcaaccccggagcccaagggtcctggggacggggcggaggaagatgaggctgccagtggggggcctgggg

SEQ ID NO: 662334 - DNA, 120 bp, Artificial Sequence
  ENSG00000184524_4 (sequence is synthesized)
gccgaggtccctggtcctgtgagaacttcaaccccctgctggtggctgggggtgtggccgtggcagccatagccctgattctcggtgtggccttcctggtccggaaaaaataatacctgg

SEQ ID NO: 662335 - DNA, 120 bp, Artificial Sequence
  ENSG00000184524_5 (sequence is synthesized)
gggccaggcggggggcacggagccacttcctgtacagacccgaggaagccagtgcatgcagagttcacccttacctattcgtacacacgcacattcattacacacctacatacgccccca

SEQ ID NO: 662336 - DNA, 120 bp, Artificial Sequence
  ENSG00000184524_6 (sequence is synthesized)
cccaggacttccccaacctccagggcagaaagagcccaggctccggggtccacagcacaggatgtggggcgagggcacagctggggaacggcaagaaaggaatggaccctgtgtgtggcc

SEQ ID NO: 662337 - DNA, 120 bp, Artificial Sequence
  ENSG00000184524_7 (sequence is synthesized)
ccccccacccctggcggctgggtgatcctgggcccccagggctggtctgagtgcaggtgggggtgccgggatgggttgggcctgggcccggccctcgtggggacattaaagggcgcggtg

SEQ ID NO: 662338 - DNA, 120 bp, Artificial Sequence
  ENSG00000184524_8 (sequence is synthesized)
gctccactcgccccatttctgctctttgcgtaccccccgggggtctgcctgggcgaatgcagtgggacggacctggggtgggcactcacctcagcagagcctcaatgccacctccccaca

SEQ ID NO: 662339 - DNA, 120 bp, Artificial Sequence
  ENSG00000184524_9 (sequence is synthesized)
ccacccaagcctagctgggtgggaagacggagccctgaagcctgcgtgtggagggggtgctgcccaagggtcgccttccccagcttgtgctccaggggagccccgacgccggcggggagg

SEQ ID NO: 662340 - DNA, 120 bp, Artificial Sequence
  ENSG00000184524_10 (sequence is synthesized)
cagggatgtcgagggcccctcacagctgtgcccgccctgccccgctagactgcccctccagcttgcacccagcaccacctgagtctaaccagcgtataatgcaataacaggtagagtaga

SEQ ID NO: 662341 - DNA, 120 bp, Artificial Sequence
  ENSG00000184524_11 (sequence is synthesized)
actgcttttggcggcgaccgtcacacactgtcctcagcccactgcacctggggaagcccctcgtgcagcccctccttagcacatccagtcccagcgtggcccttggcgcgcagcagcagg

SEQ ID NO: 662342 - DNA, 120 bp, Artificial Sequence
  ENSG00000184524_12 (sequence is synthesized)
cgaactcccagaaggtggtggtgggcactgtgagaacgtggcctgccctcactggccagtggccacaggaaccccgggcctgagtggaggctgagtctgaaataaactctgtcgtctgaa

SEQ ID NO: 662343 - DNA, 120 bp, Artificial Sequence
  ENSG00000184530_0 (sequence is synthesized)
agctctggcacaatggcttttcttccttcctgggtttgtgtactagttggttccttttctgcttccttagcagggacttccaatctctcagagacagagccccctctgtggaaggagagt

SEQ ID NO: 662344 - DNA, 120 bp, Artificial Sequence
  ENSG00000184530_1 (sequence is synthesized)
cctggtcagctcagtgactacagggtggagaacagcatgtacattattaatccctgggtataccttgagagaatggggatgtataaaatcatattgaatcagacagccaggtattttgca

SEQ ID NO: 662345 - DNA, 120 bp, Artificial Sequence
  ENSG00000184530_2 (sequence is synthesized)
aaatttgcaccagataatgaacagaatattttatgggggttgcctctgcagtatggctggcaatataggacaggcagattagctgatccaacccgaaggacaaactgtggctatgaatct

SEQ ID NO: 662346 - DNA, 120 bp, Artificial Sequence
  ENSG00000184530_3 (sequence is synthesized)
ggagatcatatgtgcatctctgtggacagttggtgggctgatttgaattattttctgtcttcattaccctttcttgctgcggttgattctggtgtaatggggatatcatcagaccaagtc

SEQ ID NO: 662347 - DNA, 120 bp, Artificial Sequence
  ENSG00000184530_4 (sequence is synthesized)
aggcttttgcccccacccaagaatgagaggaagttttgttatgatgtttctagctgtcgttcatccttccctgagacaatgaacaagtggaacaccttttaccagtatttgcagtcacct

SEQ ID NO: 662348 - DNA, 120 bp, Artificial Sequence
  ENSG00000184530_5 (sequence is synthesized)
agtaagtttgatgatctgttgaagtacttatgggctgcacacacttcaaccttggcagataatatcaaaagttttgaagacagatatgattattattctaaagcagaagcgcattttgag

SEQ ID NO: 662349 - DNA, 120 bp, Artificial Sequence
  ENSG00000184530_6 (sequence is synthesized)
agaagttgggtactggctgtggatcatttagctgcagtcctctttcctacaaccttgattagatcatataagttccagaagggcatgccaccacgaattcttcttaatactgatgtagcc

SEQ ID NO: 662350 - DNA, 120 bp, Artificial Sequence
  ENSG00000184530_7 (sequence is synthesized)
cctttcatcagtgactttactgcttttcagaatgtagtcctggttcttctaaatatgcttgacaatgtggataaatctataggttatctttgtacagaaaaatctaatgtatatagagat

SEQ ID NO: 662351 - DNA, 120 bp, Artificial Sequence
  ENSG00000184530_8 (sequence is synthesized)
cattcggaatctagctctagaagttatggaaataactcctgaaacatttaacttcaaacttcaggaaatgattaatgaattaaaaatgaaaaactcgaacttgacaatcagtaatttcaa

SEQ ID NO: 662352 - DNA, 120 bp, Artificial Sequence
  ENSG00000184530_9 (sequence is synthesized)
aaaattaatgtcatcatgaccatgtagtttattctttctgatatttttgatttatgcttatttgttaagatcttgtacatgtattaaaaacttaaattaaatgcattcaagttaaaataa

SEQ ID NO: 662353 - DNA, 120 bp, Artificial Sequence
  ENSG00000184530_10 (sequence is synthesized)
ccatgatgggacccaccgtcccacagacaaagggttcttgcgaagccacgactaatttagtgcaaaccgaaataaatatcggcccacagagatcctttacagaacggtttgccttcattt

SEQ ID NO: 662354 - DNA, 120 bp, Artificial Sequence
  ENSG00000184530_11 (sequence is synthesized)
gactcttcttcctagaccgcaattttctctgtactgaacacaaatcactaacttttatagagctctaaaactttttccagtatcgtcaaagtcatcaggcagattagctgatccaacccg

SEQ ID NO: 662355 - DNA, 120 bp, Artificial Sequence
  ENSG00000184544_0 (sequence is synthesized)
cccccagaacaagatgggagtcatggccatgctgatgctccccctgctgctgctgggaatcagcggcctcctcttcatttaccaagaggtgtccaggctgtggtcaaagtcagctgtgca

SEQ ID NO: 662356 - DNA, 120 bp, Artificial Sequence
  ENSG00000184544_1 (sequence is synthesized)
gaacaaagtggtggtgatcaccgatgccatctcaggactgggcaaggagtgtgctcgggtgttccacacaggtggggcaaggctggtgctgtgtggaaagaactgggagaggctagagaa

SEQ ID NO: 662357 - DNA, 120 bp, Artificial Sequence
  ENSG00000184544_2 (sequence is synthesized)
cctatatgatgccttgatcagcgtggctgaccccagcaagcagacattcaccccaaagctggtcctgttggacctctcagacatcagctgtgtcccagatgtggcaaaagaagtcctgga

SEQ ID NO: 662358 - DNA, 120 bp, Artificial Sequence
  ENSG00000184544_3 (sequence is synthesized)
ttgctatggctgtgtggacatcctcatcaacaatgccagtgtgaaggtgaaggggcctgcccataagatttctctggagctcgacaaaaagatcatggatgccaattactttggccccat

SEQ ID NO: 662359 - DNA, 120 bp, Artificial Sequence
  ENSG00000184544_4 (sequence is synthesized)
ggccaaatcgtgttagtgaataatatccaagggaagtttggaatcccgttccgtacgacttacgctgcctccaagcacgcagccctgggcttctttgactgcctccgagccgaagtggag

SEQ ID NO: 662360 - DNA, 120 bp, Artificial Sequence
  ENSG00000184544_5 (sequence is synthesized)
gaatacgatgttgtcatcagcaccgtgagcccgactttcatccggtcgtaccacgtgtatccagagcaaggaaactgggaagcttccatttggaaattctttttcaggaagctgacctac

SEQ ID NO: 662361 - DNA, 120 bp, Artificial Sequence
  ENSG00000184544_6 (sequence is synthesized)
ggcgtgcacccagtagaggtggcggaggaggtgatgcgcaccgtgcggaggaagaagcaagaggtgtttatggccaaccccatccccaaggccgccgtgtacgtccgcaccttcttcccg

SEQ ID NO: 662362 - DNA, 120 bp, Artificial Sequence
  ENSG00000184544_7 (sequence is synthesized)
gagttctttttcgccgtggtggcctgtggggtgaaggagaagctcaatgtcccggaggaggggtaactgcaggaggccaaatgggccaccccttggaaataaaggtttttctggcaggtg

SEQ ID NO: 662363 - DNA, 120 bp, Artificial Sequence
  ENSG00000184545_0 (sequence is synthesized)
aggtccagcaccatgtgctaggtcactcccagcgcgaggccacacctgggccgtcggagcagcccctcctcacttcaggggtcaccctccccagcacccattgccccaccatggctgggg

SEQ ID NO: 662364 - DNA, 120 bp, Artificial Sequence
  ENSG00000184545_1 (sequence is synthesized)
accggctcccgaggaaggtgatggatgccaagaagctggccagcctgctgcggggcgggcctggggggccgctggtcatcgacagccgctccttcgtggagtacaacagctggcatgtgc

SEQ ID NO: 662365 - DNA, 120 bp, Artificial Sequence
  ENSG00000184545_2 (sequence is synthesized)
tcagctccgtcaacatctgctgctccaagctggtgaagcggcggctgcagcagggcaaggtgaccattgcggagctcatccagccggctgcacgcagccaggtggaggctacggagccac

SEQ ID NO: 662366 - DNA, 120 bp, Artificial Sequence
  ENSG00000184545_3 (sequence is synthesized)
aggacgtggtggtctatgaccagagcacgcgggacgccagcgtgctggccgcagacagcttcctctccatcctgctgagcaagctggacggctgcttcgacagcgtggccatcctcactg

SEQ ID NO: 662367 - DNA, 120 bp, Artificial Sequence
  ENSG00000184545_4 (sequence is synthesized)
ggggcttcgccaccttctcctcctgcttccccggcctctgcgagggcaagcctgctgccctgctacccatgagcctctcccagccctgcctgcctgtgcccagcgtgggcctgacccgca

SEQ ID NO: 662368 - DNA, 120 bp, Artificial Sequence
  ENSG00000184545_5 (sequence is synthesized)
tcctgcctcacctctacctgggctcgcagaaggacgtcctaaacaaggatctgatgacgcaaaatggaataagctacgtcctcaacgccagcaactcctgccccaagcctgacttcatct

SEQ ID NO: 662369 - DNA, 120 bp, Artificial Sequence
  ENSG00000184545_6 (sequence is synthesized)
gcgagagccgcttcatgcgggtccccatcaacgacaactactgtgaaaaactgctgccctggctggacaagtccatcgagttcatcgataaagccaagctctccagctgccaagtcatcg

SEQ ID NO: 662370 - DNA, 120 bp, Artificial Sequence
  ENSG00000184545_7 (sequence is synthesized)
tccactgtctggctggcatctcccgctctgccaccatcgccatcgcctacatcatgaagaccatgggcatgtcctccgacgacgcctacaggttcgtgaaggacaggcgcccgtccatct

SEQ ID NO: 662371 - DNA, 120 bp, Artificial Sequence
  ENSG00000184545_8 (sequence is synthesized)
cgcccaacttcaacttcctgggccagctgctggagtacgagcgcagcctgaagctgctggccgccctgcagggcgacccgggcaccccctcagggacgccggagcctccgcccagtcctg

SEQ ID NO: 662372 - DNA, 120 bp, Artificial Sequence
  ENSG00000184545_9 (sequence is synthesized)
cctccgcccagtcctgccgccggggccccgctgccacggctgccaccacctacctcagagagcgctgccacagggaatgcggctgccagggagggcggcctgagcgcgggcggggagccc

SEQ ID NO: 662373 - DNA, 120 bp, Artificial Sequence
  ENSG00000184545_10 (sequence is synthesized)
ccccggcgaccagcgcactgcagcagggcctgcgcggcctgcacctctcctcggaccgcctgcaggacactaaccgcctcaagcgctccttctccctggacatcaagtctgcctacgccc

SEQ ID NO: 662374 - DNA, 120 bp, Artificial Sequence
  ENSG00000184545_11 (sequence is synthesized)
catcaagtctgcctacgcccctagcaggcggcccgacggccccgggccccccgaccccggcgaggccccgaagctctgcaagctggacagcccgtcgggggccgcgctgggcctgtcctc

SEQ ID NO: 662375 - DNA, 80 bp, Artificial Sequence
  ENSG00000184545_12 (sequence is synthesized)
ccggccccccgccggctcccccgcgcgctcccccgcgcacagcctcggcctgaacttcggcgatgcggcccggcagactc

SEQ ID NO: 662376 - DNA, 80 bp, Artificial Sequence
  ENSG00000184545_13 (sequence is synthesized)
gccccggggcctgggcaccgccgctcgactccccaggcacgccgtcgcccgacgggccctggtgcttcagccccgagggc

SEQ ID NO: 662377 - DNA, 80 bp, Artificial Sequence
  ENSG00000184545_14 (sequence is synthesized)
ccgacgggccctggtgcttcagccccgagggcgcacagggggcgggcggggtgctgtttgcgcccttcggccgggcgggc

SEQ ID NO: 662378 - DNA, 120 bp, Artificial Sequence
  ENSG00000184545_15 (sequence is synthesized)
ctgagccccgggacgcgcggaccggctggcccgaggagccggccccggagacgcagttcaagcgccgcagctgccagatggagttcgaggagggcatggtggaggggcgcgcgcgcggcg

SEQ ID NO: 662379 - DNA, 120 bp, Artificial Sequence
  ENSG00000184545_16 (sequence is synthesized)
aggagctggccgccctgggcaagcaggcgagcttctcgggcagcgtggaggtcatcgaggtgtcctgacccctccgctgccctcggccccgccgcccgcagccaggcccgttataaatgt

SEQ ID NO: 662380 - DNA, 120 bp, Artificial Sequence
  ENSG00000184545_17 (sequence is synthesized)
atattatatataatgcaaagaaaggtaaatggttttactgggatttttatcgagaagtaaatatttcgattttttatttatttaagctgttcattctggcaatgatttggcaacagtgcg

SEQ ID NO: 662381 - DNA, 120 bp, Artificial Sequence
  ENSG00000184545_18 (sequence is synthesized)
ctatttttactgtctggtatttaaactgaaacatacgtttctaagcaatacgaggccaccttcagtcgcaagctgggtgccaggcctggggcccctcccagttcccccgccccaggaaac

SEQ ID NO: 662382 - DNA, 120 bp, Artificial Sequence
  ENSG00000184545_19 (sequence is synthesized)
actgctgacctttgcaaaggctgccgagctttcgtgcactttttacataacaaaaaggtgaaaaaaaggaaaaaaaaacttctttgccacaaactgagccgcagaaccccccttctcccc

SEQ ID NO: 662383 - DNA, 120 bp, Artificial Sequence
  ENSG00000184545_20 (sequence is synthesized)
ccacccacctcccctgctccctcccttctctgcgccggcctagggctctgcaccaaagccataggatggaggagcaggagctggtgtgccccggagaggtgcggccagccctccatcagc

SEQ ID NO: 662384 - DNA, 120 bp, Artificial Sequence
  ENSG00000184545_21 (sequence is synthesized)
tccaggcaccaaatcttggtggcaaggagggcaccccgctgcccgttgccccagagctgttctctggcaggggaggacaggcattgggcttcatggtgccagggtgttcagaggggctga

SEQ ID NO: 662385 - DNA, 120 bp, Artificial Sequence
  ENSG00000184545_22 (sequence is synthesized)
gaaatagaacagtgtgtgtaggggcttcgggcagggggttctggaacgtcagatgaggtgcagcccaggggaggacagaggtgttagtgcccccaactcctgccagagccccagtccagc

SEQ ID NO: 662386 - DNA, 120 bp, Artificial Sequence
  ENSG00000184545_23 (sequence is synthesized)
cacagagtggctcagaaaggccattcctagagggctgcggccctcccttctcccttgcccatgcccccagagctgcctgccgggcagggtggcaccattgcaggagaggagcttggcctc

SEQ ID NO: 662387 - DNA, 120 bp, Artificial Sequence
  ENSG00000184545_24 (sequence is synthesized)
cgggggtcaggcaggaggcgcctggctagccagtgctggctccactgggcaggaagccctggacccccaggtatgaggagggggtggtcttagggttctgttccaggtctgccccgcccc

SEQ ID NO: 662388 - DNA, 120 bp, Artificial Sequence
  ENSG00000184545_25 (sequence is synthesized)
cctcccagccatgccccaggcagaacttggaattcaggtgtgcacctgcaggctgaggggctctgtgagcaggtgctgctcacacagggagttcaggcgccagccaagcccctgtgctgc

SEQ ID NO: 662389 - DNA, 120 bp, Artificial Sequence
  ENSG00000184545_26 (sequence is synthesized)
tgggataggcctgcttcacttagggagcactgcctcaagacaggtaaagccccctcgtttgcccccacccccatggggccgctcaggagagaaactcccattcacccctttcccagggtg

SEQ ID NO: 662390 - DNA, 120 bp, Artificial Sequence
  ENSG00000184545_27 (sequence is synthesized)
ctctctctctaggtggcatgccagcccccaaacacaagtggcttttgggcccaggtgggtcagcctgctgcccctgccccataccccctcgggccattgggacccctgcccttcagatgt

SEQ ID NO: 662391 - DNA, 120 bp, Artificial Sequence
  ENSG00000184545_28 (sequence is synthesized)
cctagggtctaggagtggggccagtcactgtgggaagaggccaggggcttggccggagaggcagcccagggcaggacccagtcctgagtcctggagcagggccagggaggcgcccatccc

SEQ ID NO: 662392 - DNA, 120 bp, Artificial Sequence
  ENSG00000184545_29 (sequence is synthesized)
gccccagccagccgccctctctgctgtttcttctatttgttcttcttttcacccacagctctgtgttcctgtcatccctcctttcagcaaaagtcctgttcccgttccctctgtccccac

SEQ ID NO: 662393 - DNA, 120 bp, Artificial Sequence
  ENSG00000184545_30 (sequence is synthesized)
ccactcctgttcccccaagaaaataagctatcgttgtatttgcaatctatggattagaggtttaagtatttattattattggttaattattattaattatgtaaatttgcctcccatatg

SEQ ID NO: 662394 - DNA, 120 bp, Artificial Sequence
  ENSG00000184545_31 (sequence is synthesized)
tctgttgcgttgggtttctgaggagaccctgggtgaggaggatgcactggcttcccgcttctcgccccccacccctgtgctgtccgggagacagtggtctggggccactggttgggcccc

SEQ ID NO: 662395 - DNA, 120 bp, Artificial Sequence
  ENSG00000184545_32 (sequence is synthesized)
cttctcccttcccccttccccttgtcccttctgcaggccgttgaggggggctgtctgtctcagtctgtctctgctcccactcttgaggcactggttaccgcaaagtgagcagccagcagg

SEQ ID NO: 662396 - DNA, 120 bp, Artificial Sequence
  ENSG00000184545_33 (sequence is synthesized)
ggggcgaaggtcctgtgttggccactgcctcctccagtgctgcaggaggcgggctgaggccccacctggtggctttcacctgacccagccctgagtcctctccaagcctctctccggccc

SEQ ID NO: 662397 - DNA, 120 bp, Artificial Sequence
  ENSG00000184545_34 (sequence is synthesized)
ctcccacctggccactgcctcctccagtgctgcgggaggcgggccagggccccacctggtggctttcacctgacccagccctgagtcctctccaagcctctctccggcccctcccacctg

SEQ ID NO: 662398 - DNA, 120 bp, Artificial Sequence
  ENSG00000184545_35 (sequence is synthesized)
gccactgcctggcattgggatcgccccaaaatggacccggcccctcctgttatttgctgggaagtccagcggaggagagggtgcaggtcccccgctgagcctccagtctctgtagactgg

SEQ ID NO: 662399 - DNA, 120 bp, Artificial Sequence
  ENSG00000184545_36 (sequence is synthesized)
gctgccggcccttcagccccccttggagcccctcccgccacagccgcaccttctgctcccggcccctccctttgtatttggagacaatgtgttgtaataaagcttaaagtggatgttttc

SEQ ID NO: 662400 - DNA, 80 bp, Artificial Sequence
  ENSG00000184545_37 (sequence is synthesized)
gcggccgagcgggcgccctgagcgcggcgcgggtccccggagcgcccccgaggcgagcgcgagcgaggtccagcaccatg

SEQ ID NO: 662401 - DNA, 120 bp, Artificial Sequence
  ENSG00000184545_38 (sequence is synthesized)
gctgtgtgacacacaccctcagcaggagacccctgtggcctctgagcccacccctgcctgggcccagcgcgtgccgtgatggccagccacctcaacgccacctttacgggcatcctagcg

SEQ ID NO: 662402 - DNA, 80 bp, Artificial Sequence
  ENSG00000184557_0 (sequence is synthesized)
ggctccgacttggactccctgctccgctgctgccgcttcggccccgcacgcagccagccgccagccgcccgcccggccca

SEQ ID NO: 662403 - DNA, 120 bp, Artificial Sequence
  ENSG00000184557_1 (sequence is synthesized)
ccctcccggttggtccgggggtgcgcagggggcagggcgggcgcccaggggaagctcgagggacgcgcgcgcgaaggctcctttgtggacttcacggccgccaacatctgggcgcagcgc

SEQ ID NO: 662404 - DNA, 120 bp, Artificial Sequence
  ENSG00000184557_2 (sequence is synthesized)
gggccaccgctggccgtctcgccgccgcgtcgccttggggacccgagggggctcagccccaaggacggagacttcgattcgggaccagccccccgggatgcggtagcggccgctgtgcgg

SEQ ID NO: 662405 - DNA, 120 bp, Artificial Sequence
  ENSG00000184557_3 (sequence is synthesized)
aggccgcgaagcagctgcagccgccgccgcgcagatccacgctggctccgtgcgccatggtcacccacagcaagtttcccgccgccgggatgagccgccccctggacaccagcctgcgcc

SEQ ID NO: 662406 - DNA, 120 bp, Artificial Sequence
  ENSG00000184557_4 (sequence is synthesized)
tcaagaccttcagctccaagagcgagtaccagctggtggtgaacgcagtgcgcaagctgcaggagagcggcttctactggagcgcagtgaccggcggcgaggcgaacctgctgctcagtg

SEQ ID NO: 662407 - DNA, 120 bp, Artificial Sequence
  ENSG00000184557_5 (sequence is synthesized)
ccgagcccgccggcacctttctgatccgcgacagctcggaccagcgccacttcttcacgctcagcgtcaagacccagtctgggaccaagaacctgcgcatccagtgtgaggggggcagct

SEQ ID NO: 662408 - DNA, 120 bp, Artificial Sequence
  ENSG00000184557_6 (sequence is synthesized)
tctctctgcagagcgatccccggagcacgcagcccgtgccccgcttcgactgcgtgctcaagctggtgcaccactacatgccgccccctggagccccctccttcccctcgccacctactg

SEQ ID NO: 662409 - DNA, 120 bp, Artificial Sequence
  ENSG00000184557_7 (sequence is synthesized)
aaccctcctccgaggtgcccgagcagccgtctgcccagccactccctgggagtccccccagaagagcctattacatctactccgggggcgagaagatccccctggtgttgagccggcccc

SEQ ID NO: 662410 - DNA, 120 bp, Artificial Sequence
  ENSG00000184557_8 (sequence is synthesized)
tctcctccaacgtggccactcttcagcatctctgtcggaagaccgtcaacggccacctggactcctatgagaaagtcacccagctgccggggcccattcgggagttcctggaccagtacg

SEQ ID NO: 662411 - DNA, 120 bp, Artificial Sequence
  ENSG00000184557_9 (sequence is synthesized)
atgccccgctttaaggggtaaagggcgcaaagggcatgggtcgggagaggggacgcaggcccctctcctccgtggcacatggcacaagcacaagaagccaaccaggagagagtcctgtag

SEQ ID NO: 662412 - DNA, 120 bp, Artificial Sequence
  ENSG00000184557_10 (sequence is synthesized)
ctctggggggaaagagggcggacaggcccctccctctgccctctccctgcagaatgtggcaggcggacctggaatgtgttggagggaagggggagtaccacctgagtctccagcttctcc

SEQ ID NO: 662413 - DNA, 120 bp, Artificial Sequence
  ENSG00000184557_11 (sequence is synthesized)
tcgggaatgctgaactaatgagaactgccagggaatcttcaaactttccaacggaacttgtttgctctttgatttggtttaaacctgagctggttgtggagcctgggaaaggtggaagag

SEQ ID NO: 662414 - DNA, 120 bp, Artificial Sequence
  ENSG00000184557_12 (sequence is synthesized)
agagaggtcctgagggccccagggctgcgggctggcgaaggaaatggtcacaccccccgcccaccccaggcgaggatcctggtgacatgctcctctccctggctccggggagaagggctt

SEQ ID NO: 662415 - DNA, 120 bp, Artificial Sequence
  ENSG00000184557_13 (sequence is synthesized)
ggggtgacctgaagggaaccatcctggtaccccacatcctctcctccgggacagtcaccgaaaacacaggttccaaagtctacctggtgcctgagagcccagggcccttcctccgtttta

SEQ ID NO: 662416 - DNA, 120 bp, Artificial Sequence
  ENSG00000184557_14 (sequence is synthesized)
agggggaagcaacatttggaggggatggatgggctggtcagctggtctccttttcctactcatactataccttcctgtacctgggtggatggagcgggaggatggaggagacgggacatc

SEQ ID NO: 662417 - DNA, 120 bp, Artificial Sequence
  ENSG00000184557_15 (sequence is synthesized)
tttcacctcaggctcctggtagagaagacaggggattctactctgtgcctcctgactatgtctggctaagagattcgccttaaatgctccctgtcccatggagagggacccagcatagga

SEQ ID NO: 662418 - DNA, 120 bp, Artificial Sequence
  ENSG00000184557_16 (sequence is synthesized)
aagccacatactcagcctggatgggtggagaggctgagggactcactggagggcaccaagccagcccacagccagggaagtggggagggggggcggaaacccatgcctcccagctgagca

SEQ ID NO: 662419 - DNA, 120 bp, Artificial Sequence
  ENSG00000184557_17 (sequence is synthesized)
ctgggaatgtcagcccagtaagtattggccagtcaggcgcctcgtggtcagagcagagccaccaggtcccactgccccgagccctgcacagccctccctcctgcctgggtgggggaggct

SEQ ID NO: 662420 - DNA, 120 bp, Artificial Sequence
  ENSG00000184557_18 (sequence is synthesized)
ggaggtcattggagaggctggactgctgccaccccgggtgctcccgctctgccatagcactgatcagtgacaatttacaggaatgtagcagcgatggaattacctggaacagttttttgt

SEQ ID NO: 662421 - DNA, 120 bp, Artificial Sequence
  ENSG00000184557_19 (sequence is synthesized)
ttttgtttttgtttttgtttttgtgggggggggcaactaaacaaacacaaagtattctgtgtcaggtattgggctggacagggcagttgtgtgttggggtggtttttttctctatttttt

SEQ ID NO: 662422 - DNA, 120 bp, Artificial Sequence
  ENSG00000184557_20 (sequence is synthesized)
tgtttgtttcttgttttttaataatgtttacaatctgcctcaatcactctgtcttttataaagattccacctccagtcctctctcctcccccctactcaggcccttgaggctattaggag

SEQ ID NO: 662423 - DNA, 120 bp, Artificial Sequence
  ENSG00000184557_21 (sequence is synthesized)
atgcttgaagaactcaacaaaatcccaatccaagtcaaactttgcacatatttatatttatattcagaaaagaaacatttcagtaatttataataaagagcactattttttaatgaaaaa

SEQ ID NO: 662424 - DNA, 120 bp, Artificial Sequence
  ENSG00000184557_22 (sequence is synthesized)
caccgctggccgtctcgccgccgcgaagcagctgcagccgccgccgcgcagatccacgctggctccgtgcgccatggtcacccacagcaagtttcccgccgccgggatgagccgccccct

SEQ ID NO: 662425 - DNA, 120 bp, Artificial Sequence
  ENSG00000184560_0 (sequence is synthesized)
agtgcagtgtgggttggggccgggggtggggggcagaggggggtggcccaggtggccctaggaccccccctccatggaaaaccagctatggcataacaccgtgagatgttgcaatcaata

SEQ ID NO: 662426 - DNA, 120 bp, Artificial Sequence
  ENSG00000184560_1 (sequence is synthesized)
ccaagaaagcccccacgatgccgaggacatcttactcctgctgctgggcctcatcgttcttgtcaacattggcatcaacgtggcaactatgatgtggcatggactccagaacgccttaga

SEQ ID NO: 662427 - DNA, 120 bp, Artificial Sequence
  ENSG00000184560_2 (sequence is synthesized)
caagatgattgattgggctactcagaaaaatgaaattcaggccagtgaaagtcccccaagtggtcccccagacaaggctcaggatgtccacatccactgcatcctggaccctgtgcaggt

SEQ ID NO: 662428 - DNA, 120 bp, Artificial Sequence
  ENSG00000184560_3 (sequence is synthesized)
gaagatgtcccgacccacgcagtactcctctttctcctgccaccatttctccaaccatcacagtagcagtcttcttcgctgtgttcgtcgccgccgccgccgccaccgccgttgtcgccg

SEQ ID NO: 662429 - DNA, 120 bp, Artificial Sequence
  ENSG00000184560_4 (sequence is synthesized)
tcgctgctgcaaccaccagcagcggccgcagaactacagacaaatcccccatagccactcagtcttccgtaacccacatcgcagccaaaagatgtcacaactacaccgagtgcctttctt

SEQ ID NO: 662430 - DNA, 120 bp, Artificial Sequence
  ENSG00000184560_5 (sequence is synthesized)
tgatcaggaggacccggattcctacctggaggaggaggacaacctgcccttcccgtatcccaagtacccacgtcgcggctggggcgggttttatcagagagcgggcctgccctccaatgt

SEQ ID NO: 662431 - DNA, 120 bp, Artificial Sequence
  ENSG00000184560_6 (sequence is synthesized)
tgtagaggccaggtctgagctgaggctgcagtcctatgggcgccacggttcccaatcccgactgtggggcaatgtggaggctgagcagtgggcctcgtctccaccacctccccaccggct

SEQ ID NO: 662432 - DNA, 120 bp, Artificial Sequence
  ENSG00000184560_7 (sequence is synthesized)
gccccctaacccctcttgggtccccgtggggcacagcccttacccctcagtgggctggatgctgtatgactcctgggatcagcggcgtcgtggcacggagggctttgagcgcccccctgc

SEQ ID NO: 662433 - DNA, 120 bp, Artificial Sequence
  ENSG00000184560_8 (sequence is synthesized)
ctcggtgtcccggaacgcccggcctgaggcccagggctgccgggagcaccactccccacagtcccaccagcagagcctgcttggtcacgcctatggccagtcccaccgcagtccccaccc

SEQ ID NO: 662434 - DNA, 120 bp, Artificial Sequence
  ENSG00000184560_9 (sequence is synthesized)
atccacggaacccttgggctacagctcccaggacccccgtgaggtgcggcgtcgggcagctgactgggctgaggctctgcccgcctggcgtcctctgactacctctgcctccctcacggt

SEQ ID NO: 662435 - DNA, 120 bp, Artificial Sequence
  ENSG00000184560_10 (sequence is synthesized)
gttggacgaggcctcccatcaacggaccccagctccaagctcagtgctggtcccccattcctcccagccctggcccaaagtccaggctgcggaccctgcccctcccccgaccatgtttgt

SEQ ID NO: 662436 - DNA, 120 bp, Artificial Sequence
  ENSG00000184560_11 (sequence is synthesized)
cccactcagccggaatccagggggcaatgccaactaccaggtgtacgacagcctggagctgaagcggcaggtgcagaagagcagagccaggtccagctcactgccaccggcttccacctc

SEQ ID NO: 662437 - DNA, 120 bp, Artificial Sequence
  ENSG00000184560_12 (sequence is synthesized)
caccttgaggccctctctgcacaggagccagaccgagaaactcaactgaccagcaggcggatgtggggtgtggggcagggcatggagggagaggaataaagagaaacagagtccaggaaa

SEQ ID NO: 662438 - DNA, 120 bp, Artificial Sequence
  ENSG00000184564_0 (sequence is synthesized)
aaattttcaaggttggttttaggttgaaaaccctgttttcattccttccttcttcccccaaatctaggattcttaaaaagtaatttctactaacatcaaagattagtcatattttgtgga

SEQ ID NO: 662439 - DNA, 120 bp, Artificial Sequence
  ENSG00000184564_1 (sequence is synthesized)
agacgtgtctctagataaaggaaagaagagcaggaattgaattactttgaacacctcttccagctgtgcattacagataacgtcaggaagagtctctgctttacagaatcggatttcatc

SEQ ID NO: 662440 - DNA, 120 bp, Artificial Sequence
  ENSG00000184564_2 (sequence is synthesized)
acatgacaacatgaagctgtggattcatctcttttattcatctctccttgcctgtatatctttacactcccaaactccagtgctctcatccagaggctcttgtgattctctttgcaattg

SEQ ID NO: 662441 - DNA, 120 bp, Artificial Sequence
  ENSG00000184564_3 (sequence is synthesized)
tgaggaaaaagatggcacaatgctaataaattgtgaagcaaaaggtatcaagatggtatctgaaataagtgtgccaccatcacgacctttccaactaagcttattaaataacggcttgac

SEQ ID NO: 662442 - DNA, 120 bp, Artificial Sequence
  ENSG00000184564_4 (sequence is synthesized)
gatgcttcacacaaatgacttttctgggcttaccaatgctatttcaatacaccttggatttaacaatattgcagatattgagataggtgcatttaatggccttggcctcctgaaacaact

SEQ ID NO: 662443 - DNA, 120 bp, Artificial Sequence
  ENSG00000184564_5 (sequence is synthesized)
tcatatcaatcacaattctttagaaattcttaaagaggatactttccatggactggaaaacctggaattcctgcaagcagataacaattttatcacagtgattgaaccaagtgcctttag

SEQ ID NO: 662444 - DNA, 120 bp, Artificial Sequence
  ENSG00000184564_6 (sequence is synthesized)
caagctcaacagactcaaagtgttaattttaaatgacaatgctattgagagtcttcctccaaacatcttccgatttgttcctttaacccatctagatcttcgtggaaatcaattacaaac

SEQ ID NO: 662445 - DNA, 120 bp, Artificial Sequence
  ENSG00000184564_7 (sequence is synthesized)
attgccttatgttggttttctcgaacacattggccgaatattggatcttcagttggaggacaacaaatgggcctgcaattgtgacttattgcagttaaaaacttggttggagaacatgcc

SEQ ID NO: 662446 - DNA, 120 bp, Artificial Sequence
  ENSG00000184564_8 (sequence is synthesized)
tccacagtctataattggtgatgttgtctgcaacagccctccattttttaaaggaagtatactcagtagactaaagaaggaatctatttgccctactccaccagtgtatgaagaacatga

SEQ ID NO: 662447 - DNA, 120 bp, Artificial Sequence
  ENSG00000184564_9 (sequence is synthesized)
ggatccttcaggatcattacatctggcagcaacatcttcaataaatgatagtcgcatgtcaactaagaccacgtccattctaaaactacccaccaaagcaccaggtttgataccttatat

SEQ ID NO: 662448 - DNA, 120 bp, Artificial Sequence
  ENSG00000184564_10 (sequence is synthesized)
tacaaagccatccactcaacttccaggaccttactgccctattccttgtaactgcaaagtcctatccccatcaggacttctaatacattgtcaggagcgcaacattgaaagcttatcaga

SEQ ID NO: 662449 - DNA, 120 bp, Artificial Sequence
  ENSG00000184564_11 (sequence is synthesized)
tctgagacctcctccgcaaaatcctagaaagctcattctagcgggaaatattattcacagtttaatgaagtctgatctagtggaatatttcactttggaaatgcttcacttgggaaacaa

SEQ ID NO: 662450 - DNA, 120 bp, Artificial Sequence
  ENSG00000184564_12 (sequence is synthesized)
ttgaagttcttgaagaaggatcgtttatgaacctaacgagattacaaaaactctatctaaatggtaaccacctgaccaaattaagtaaaggcatgttccttggtctccataatcttgaat

SEQ ID NO: 662451 - DNA, 120 bp, Artificial Sequence
  ENSG00000184564_13 (sequence is synthesized)
acttatatcttgaatacaatgccattaaggaaatactgccaggaacctttaatccaatgcctaaacttaaagtcctgtatttaaataacaacctcctccaagttttaccaccacatattt

SEQ ID NO: 662452 - DNA, 120 bp, Artificial Sequence
  ENSG00000184564_14 (sequence is synthesized)
tttcaggggttcctctaactaaggtaaatcttaaaacaaaccagtttacccatctacctgtaagtaatattttggatgatcttgatttgctaacccagattgaccttgaggataacccct

SEQ ID NO: 662453 - DNA, 120 bp, Artificial Sequence
  ENSG00000184564_15 (sequence is synthesized)
gggactgctcctgtgacctggttggactgcagcaatggatacaaaagttaagcaagaacacagtgacagatgacatcctctgcacttcccccgggcatctcgacaaaaaggaattgaaag

SEQ ID NO: 662454 - DNA, 120 bp, Artificial Sequence
  ENSG00000184564_16 (sequence is synthesized)
ccctaaatagtgaaattctctgtccaggtttagtaaataacccatccatgccaacacagactagttaccttatggtcaccactcctgcaacaacaacaaatacggctgatactattttac

SEQ ID NO: 662455 - DNA, 120 bp, Artificial Sequence
  ENSG00000184564_17 (sequence is synthesized)
gatctcttacggacgctgtgccactgtctgttctaatattgggacttctgattatgttcatcactattgttttctgtgctgcagggatagtggttcttgttcttcaccgcaggagaagat

SEQ ID NO: 662456 - DNA, 120 bp, Artificial Sequence
  ENSG00000184564_18 (sequence is synthesized)
acaaaaagaaacaagtagatgagcaaatgagagacaacagtcctgtgcatcttcagtacagcatgtatggccataaaaccactcatcacactactgaaagaccctctgcctcactctatg

SEQ ID NO: 662457 - DNA, 120 bp, Artificial Sequence
  ENSG00000184564_19 (sequence is synthesized)
aacagcacatggtgagccccatggttcatgtctatagaagtccatcctttggtccaaagcatctggaagaggaagaagagaggaatgagaaagaaggaagtgatgcaaaacatctccaaa

SEQ ID NO: 662458 - DNA, 120 bp, Artificial Sequence
  ENSG00000184564_20 (sequence is synthesized)
gaagtcttttggaacaggaaaatcattcaccactcacagggtcaaatatgaaatacaaaaccacgaaccaatcaacagaatttttatccttccaagatgccagctcattgtacagaaaca

SEQ ID NO: 662459 - DNA, 120 bp, Artificial Sequence
  ENSG00000184564_21 (sequence is synthesized)
ttttagaaaaagaaagggaacttcagcaactgggaatcacagaatacctaaggaaaaacattgctcagctccagcctgatatggaggcacattatcctggagcccacgaagagctgaagt

SEQ ID NO: 662460 - DNA, 120 bp, Artificial Sequence
  ENSG00000184564_22 (sequence is synthesized)
taatggaaacattaatgtactcacgtccaaggaaggtattagtggaacagacaaaaaatgagtattttgaacttaaagctaatttacatgctgaacctgactatttagaagtcctggagc

SEQ ID NO: 662461 - DNA, 120 bp, Artificial Sequence
  ENSG00000184564_23 (sequence is synthesized)
agcaaacatagatggagagtttgagggctttcgcagaaatgctgtgattctgttttaagtccataccttgtaaataagtgccttacgtgagtgtgtcatcaatcagaacctaagcacagc

SEQ ID NO: 662462 - DNA, 120 bp, Artificial Sequence
  ENSG00000184564_24 (sequence is synthesized)
ctctttatttacgcctacctcccagcccttggcaatctgactaataacaaactgagctaacaagaaatactagaaaaggaggaaggagaacattgctgtagcttggatctacaacctaag

SEQ ID NO: 662463 - DNA, 120 bp, Artificial Sequence
  ENSG00000184564_25 (sequence is synthesized)
aaagcaagagtgatcaatctcagctctgttaaacatcttgtttacttactgcattcagcagcttgcaaatggttaactatatgcaaaaaagtcagcatagctgtgaagtatgccgtgaat

SEQ ID NO: 662464 - DNA, 120 bp, Artificial Sequence
  ENSG00000184564_26 (sequence is synthesized)
tttaattgagggaaaaagggacaattgcttcaggatgctctagtatgcactctgcttgaaatattttcaatgaaatgctcagtattctatctttgaccagaggttttaactttatgaagc

SEQ ID NO: 662465 - DNA, 120 bp, Artificial Sequence
  ENSG00000184564_27 (sequence is synthesized)
aactatggggaaaaaaaaagaagaagaaaaagaaactcagggatcactgggagaagccatggcattatcttcaggcaatttagtctgtcccaaataaaataaatccttgcatgtaaatca

SEQ ID NO: 662466 - DNA, 120 bp, Artificial Sequence
  ENSG00000184564_28 (sequence is synthesized)
ttcaaggattatagtaatatttcatatactgaaaagtgtctcataggagtcctcttgcacatctaaaaaggctgaacatttaagtatcccgaattttcttgaattgctttccctatagat

SEQ ID NO: 662467 - DNA, 120 bp, Artificial Sequence
  ENSG00000184564_29 (sequence is synthesized)
taattacaattggatttcatcatttaaaaaccatacttgtatatgtagttataatatgtaaggaatacattgtttataaccagtatgtacttcaaaaatgtgtattgtcaaacataccta

SEQ ID NO: 662468 - DNA, 120 bp, Artificial Sequence
  ENSG00000184564_30 (sequence is synthesized)
actttcttgcaataaatgcaaaagaaactggaacttgacaattataaatagtaatagtgaagaaaaaatagaaaggttgcaattatataggccatgggtggctcaaaactttgaacattt

SEQ ID NO: 662469 - DNA, 120 bp, Artificial Sequence
  ENSG00000184564_31 (sequence is synthesized)
gagcttaaacaaatgccactctcatgcattctaaattaaaaagttaaaatgattaatagttcaggtggaagaaataagcatactttttgggttttctacacattttgtgtagacaatttt

SEQ ID NO: 662470 - DNA, 120 bp, Artificial Sequence
  ENSG00000184564_32 (sequence is synthesized)
aatgtcagtgctgctgtgaactaaagtatgtcatttatgctcaaagtttaattcttcttcttgggatattttaaaaatgctactgagattctgctgtaaatatgactagagaatatattg

SEQ ID NO: 662471 - DNA, 120 bp, Artificial Sequence
  ENSG00000184564_33 (sequence is synthesized)
ggtttgctttatttcataggcttaattctttgtaaatctgaatgaccataatagaaatacatttcttgtggcaagtaattcacagttgtaaagtaaataggaaaaattattttattttta

SEQ ID NO: 662472 - DNA, 120 bp, Artificial Sequence
  ENSG00000184564_34 (sequence is synthesized)
ttgatgtacattgatagatgccataaatcagtagcaaaaggcacttctaaaggtaagtggtttaagttgcctcaagagagggacaatgtagctttattttacaagaaggcatagttagat

SEQ ID NO: 662473 - DNA, 120 bp, Artificial Sequence
  ENSG00000184564_35 (sequence is synthesized)
ttctatgaaatatttattctgtacagttttatatagttttggttcacaaaagtaattattcttgggtgcctttcaagaaaattaaaaatactactcactacaataaaactaaaatgaaaa

SEQ ID NO: 662474 - DNA, 84 bp, Artificial Sequence
  ENSG00000184571_0 (sequence is synthesized)
ggtttttaaagggaggatttggaaggcaaaagaggcagggggactgggaggtgtcaggtggtgtgaccccctccagtggcttgt

SEQ ID NO: 662475 - DNA, 120 bp, Artificial Sequence
  ENSG00000184571_1 (sequence is synthesized)
tgggaggtgtcaggtggtgtgaccccctccagtggcttgtcctgaattatttttccatctgtggaagtggccggcgtcatcatggctggaggaggtgcatggttcgtatcaggatctgac

SEQ ID NO: 662476 - DNA, 120 bp, Artificial Sequence
  ENSG00000184571_2 (sequence is synthesized)
tactgaagcttctaaggaaatatgtgaccagataaggtcatcaccttcaggaccacaatgcctggtagggcaaggactcgcgcccgaggcagagcccgccgcagggagagctaccaacaa

SEQ ID NO: 662477 - DNA, 120 bp, Artificial Sequence
  ENSG00000184571_3 (sequence is synthesized)
gaggcacctgggggacccagagcacctggatcagctacaacccaggagccccctcagttgcagtcgacaccccggccgctgcaggaggaagtcccagtggttagacctctgcagccaaga

SEQ ID NO: 662478 - DNA, 120 bp, Artificial Sequence
  ENSG00000184571_4 (sequence is synthesized)
gcagcaagaggaggagcaggaggaggagcacagtctcaaggggtgaaggaacctggacctgaggctgggttgcatacagcgcccttgcaggagagaaggattggtggagtttttcaagac

SEQ ID NO: 662479 - DNA, 120 bp, Artificial Sequence
  ENSG00000184571_5 (sequence is synthesized)
ctggtggtgaacaccaggcaagatatgaagcatgttaaagactcaaaaacaggttcagagggtacagtggtacagctactcgccaaccacttccgagtgatatctcgtcctcagtgggtt

SEQ ID NO: 662480 - DNA, 120 bp, Artificial Sequence
  ENSG00000184571_6 (sequence is synthesized)
gcatataaatacaacgttgactacaaaccagacatagaagatggaaatctccgtacaattttacttgatcaacatagaaggaaatttggagagcgccatatatttgatggaaactcttta

SEQ ID NO: 662481 - DNA, 120 bp, Artificial Sequence
  ENSG00000184571_7 (sequence is synthesized)
ttattatctcggccactaaaagagcggagagtggaatggttgagcacaaccaaagacaaaaacatcgtgaagattacagttgagttttccaaagaactcacgcccacgtcgccagattgc

SEQ ID NO: 662482 - DNA, 120 bp, Artificial Sequence
  ENSG00000184571_8 (sequence is synthesized)
ctacgctattacaacattctctttagaagaactttcaagctgctggattttgaacaagttggtcgcaactattataccaaaaagaaggccattcagttataccgtcatggtaccagtttg

SEQ ID NO: 662483 - DNA, 120 bp, Artificial Sequence
  ENSG00000184571_9 (sequence is synthesized)
gaaatctggcttggttatgttacttctgttcttcaatacgaaaacagcattaccctctgtgccgatgtgagccacaaactgctccgaatagaaactgcttatgatttcataaagagaaca

SEQ ID NO: 662484 - DNA, 120 bp, Artificial Sequence
  ENSG00000184571_10 (sequence is synthesized)
tctgcccaggcccagacaggaaacatccgagaggaagtaactaataaattaattggatcaattgttctgacaaaatacaacaacaaaacctacagagtagatgatattgattggaagcag

SEQ ID NO: 662485 - DNA, 120 bp, Artificial Sequence
  ENSG00000184571_11 (sequence is synthesized)
aatcctgaagacacatttaacaaatcagatggcagcaaaatcacctatatagactactacaggcagcaacataaagaaattgtcacagtgaagaaacagccacttttggtcagccagggc

SEQ ID NO: 662486 - DNA, 120 bp, Artificial Sequence
  ENSG00000184571_12 (sequence is synthesized)
agatggaaaaagggcctaacgggtacacaacgtgaacctatcctgctgattcctcagctgtgccacatgacaggtctaacagatgaaatatgtaaagattatagcattgtgaaagaattg

SEQ ID NO: 662487 - DNA, 120 bp, Artificial Sequence
  ENSG00000184571_13 (sequence is synthesized)
agaagaaggcatcatacattaaaagaattcatcaatactctacaagataataaaaaagtacgagagttacttcaactctgggatttgaaatttgataccaattttttgtccgtcccggga

SEQ ID NO: 662488 - DNA, 120 bp, Artificial Sequence
  ENSG00000184571_14 (sequence is synthesized)
agagttttgaaaaacgcaaacatcgtgcaaggcagaagaatggttaaagccaattcacaaggagactggtcaagagaaataagagaattacccttacttaatgcaatgccactacatagt

SEQ ID NO: 662489 - DNA, 120 bp, Artificial Sequence
  ENSG00000184571_15 (sequence is synthesized)
tggctcatactctatagcaggagcagtcacagagaagccatgtccttaaagggtcatctacagagtgtcacagcccccatgggcataactatgaaaccagcagaaatgattgaagtagat

SEQ ID NO: 662490 - DNA, 120 bp, Artificial Sequence
  ENSG00000184571_16 (sequence is synthesized)
ggtgatgctaactcctatatagacacattacggaaatatactagaccaacactgcagatgggaatgtcatgtttgctggttttcaaggtgatttgtatcctgcccaatgatgacaaacgt

SEQ ID NO: 662491 - DNA, 120 bp, Artificial Sequence
  ENSG00000184571_17 (sequence is synthesized)
agatatgacagcataaaaagatacctatgtaccaaatgcccaattccaagccagtgtgtggtgaaaaagaccttagaaaaagtccaggcaaggaccatcgtcaccaagattgcccagcag

SEQ ID NO: 662492 - DNA, 120 bp, Artificial Sequence
  ENSG00000184571_18 (sequence is synthesized)
atgaattgcaagatgggaggagccctctggaaggtggagacagacgtacaaagaacaatgttcgttggcattgattgtttccacgatatcgtaaatcgacagaaatcaatagcaggattt

SEQ ID NO: 662493 - DNA, 120 bp, Artificial Sequence
  ENSG00000184571_19 (sequence is synthesized)
gttgcaagtaccaatgctgaattaacaaagtggtactctcaatgtgtcatccagaaaacaggagaagagcttgtgaaagagctggagatctgcttgaaagctgccctggatgtctggtgt

SEQ ID NO: 662494 - DNA, 120 bp, Artificial Sequence
  ENSG00000184571_20 (sequence is synthesized)
aaaaacgaatcatcgatgccacattctgttattgtgtatcgggatggagtgggagatggtcagcttcaagcattgcttgaccatgaagcgaaaaagatgtcgacctacttaaaaaccatc

SEQ ID NO: 662495 - DNA, 120 bp, Artificial Sequence
  ENSG00000184571_21 (sequence is synthesized)
tctcctaacaatttcactctagctttcattgtggtgaagaaacgaataaacactagattttttcttaaacatggaagcaattttcaaaatccacctccaggaacagttattgatgtagag

SEQ ID NO: 662496 - DNA, 120 bp, Artificial Sequence
  ENSG00000184571_22 (sequence is synthesized)
ttgactaggaatgaatggtatgacttttttattgtgagtcagtctgtgcaagatgggactgttacccccactcattataacgtcatctatgacacgattggcttgagcccagatacagta

SEQ ID NO: 662497 - DNA, 120 bp, Artificial Sequence
  ENSG00000184571_23 (sequence is synthesized)
cagcgtttaacatattgtctatgccacatgtattataatttgccaggcatcatccgagttccagcgccttgccactatgcccacaagctggcttacctcgtggggcagtccattcaccag

SEQ ID NO: 662498 - DNA, 120 bp, Artificial Sequence
  ENSG00000184571_24 (sequence is synthesized)
gaaccgaatcgttccttgtcaactcgtctcttttacctttgacctgcagaagaagacctgatgtgctaatgaaaccacaacgtgtaagcctgtcttccttttgaagcaggatgtctgaaa

SEQ ID NO: 662499 - DNA, 120 bp, Artificial Sequence
  ENSG00000184571_25 (sequence is synthesized)
tattttcctaggtccatagcattaaattctcatcgtttttgattggacacaggagagattcagagtgatatgttctactctcaatactaccacagactgatttttccagagaggagaact

SEQ ID NO: 662500 - DNA, 120 bp, Artificial Sequence
  ENSG00000184571_26 (sequence is synthesized)
gacagggtttggcttgcagtttccctttcaaatatgtgacagagatctcacagctgaacgtgactgaacattttccaccccaagcagggccactctaagaattgaaaagatggggcattc

SEQ ID NO: 662501 - DNA, 120 bp, Artificial Sequence
  ENSG00000184571_27 (sequence is synthesized)
gtcacagagagagtacatctgtgaacaagtaaactctacttggaaaactacgtttactttatttttgaaacttttttttgttaaaggacaggaaaggaagacataaaagtaacaacactg

SEQ ID NO: 662502 - DNA, 120 bp, Artificial Sequence
  ENSG00000184571_28 (sequence is synthesized)
gaggcacctgggggacccagagcacctggatcagctacagtgagccctgtaacgttgtttcctttctgcaagagatatgtgcctgtactgaaaagaacatagagttggttgttgagcgaa

SEQ ID NO: 662503 - DNA, 120 bp, Artificial Sequence
  ENSG00000184574_0 (sequence is synthesized)
agagcaggcagcggaagccagcttggggcagcgcagagcaacacggagcacaggtctctgctgctgatgaagctgtgaccaaacgcacccaacccttggcagccatctgtccctgcagcc

SEQ ID NO: 662504 - DNA, 120 bp, Artificial Sequence
  ENSG00000184574_1 (sequence is synthesized)
atagcccacattcccatgacctccctctgcttgttttgggaccatgtctgtacagcctctaggccccagccccggaggtgaatgccatgccatgattctggtgtgctccatggcatcccc

SEQ ID NO: 662505 - DNA, 120 bp, Artificial Sequence
  ENSG00000184574_2 (sequence is synthesized)
agcctagctcccaatcccactttggcacgatgttagccaacagctcctcaaccaacagttctgttctcccgtgtcctgactaccgacctacccaccgcctgcacttggtggtctacagct

SEQ ID NO: 662506 - DNA, 120 bp, Artificial Sequence
  ENSG00000184574_3 (sequence is synthesized)
tggtgctggctgccgggctccccctcaacgcgctagccctctgggtcttcctgcgcgcgctgcgcgtgcactcggtggtgagcgtgtacatgtgtaacctggcggccagcgacctgctct

SEQ ID NO: 662507 - DNA, 120 bp, Artificial Sequence
  ENSG00000184574_4 (sequence is synthesized)
tcaccctctcgctgcccgttcgtctctcctactacgcactgcaccactggcccttccccgacctcctgtgccagacgacgggcgccatcttccagatgaacatgtacggcagctgcatct

SEQ ID NO: 662508 - DNA, 120 bp, Artificial Sequence
  ENSG00000184574_5 (sequence is synthesized)
tcctgatgctcatcaacgtggaccgctacgccgccatcgtgcacccgctgcgactgcgccacctgcggcggccccgcgtggcgcggctgctctgcctgggcgtgtgggcgctcatcctgg

SEQ ID NO: 662509 - DNA, 120 bp, Artificial Sequence
  ENSG00000184574_6 (sequence is synthesized)
tgtttgccgtgcccgccgcccgcgtgcacaggccctcgcgttgccgctaccgggacctcgaggtgcgcctatgcttcgagagcttcagcgacgagctgtggaaaggcaggctgctgcccc

SEQ ID NO: 662510 - DNA, 120 bp, Artificial Sequence
  ENSG00000184574_7 (sequence is synthesized)
tcgtgctgctggccgaggcgctgggcttcctgctgcccctggcggcggtggtctactcgtcgggccgagtcttctggacgctggcgcgccccgacgccacgcagagccagcggcggcgga

SEQ ID NO: 662511 - DNA, 120 bp, Artificial Sequence
  ENSG00000184574_8 (sequence is synthesized)
agaccgtgcgcctcctgctggctaacctcgtcatcttcctgctgtgcttcgtgccctacaacagcacgctggcggtctacgggctgctgcggagcaagctggtggcggccagcgtgcctg

SEQ ID NO: 662512 - DNA, 120 bp, Artificial Sequence
  ENSG00000184574_9 (sequence is synthesized)
cccgcgatcgcgtgcgcggggtgctgatggtgatggtgctgctggccggcgccaactgcgtgctggacccgctggtgtactactttagcgccgagggcttccgcaacaccctgcgcggcc

SEQ ID NO: 662513 - DNA, 120 bp, Artificial Sequence
  ENSG00000184574_10 (sequence is synthesized)
tgggcactccgcaccgggccaggacctcggccaccaacgggacgcgggcggcgctcgcgcaatccgaaaggtccgccgtcaccaccgacgccaccaggccggatgccgccagtcaggggc

SEQ ID NO: 662514 - DNA, 120 bp, Artificial Sequence
  ENSG00000184574_11 (sequence is synthesized)
gtgtccccaggattccgccctctgaacacacatgccattgcgctgtccgtgcccgactcccaacgcctctcgttctgggaggcttacagggtgtacacacaagaaggtgggctgggcact

SEQ ID NO: 662515 - DNA, 120 bp, Artificial Sequence
  ENSG00000184574_12 (sequence is synthesized)
tggacctttgggtggcaattccagcttagcaacgcagaagagtacaaagtgtggaagccagggcccagggaaggcagtgctgctggaaatggcttctttaaactgtgagcacgcagagca

SEQ ID NO: 662516 - DNA, 120 bp, Artificial Sequence
  ENSG00000184574_13 (sequence is synthesized)
ccccttctccagcggtgggaagtgatgcagagagcccacccgtgcagagggcagaagaggacgaaatgcctttgggtgggcagggcattaaactgctaaaagctggttagatggaacaga

SEQ ID NO: 662517 - DNA, 120 bp, Artificial Sequence
  ENSG00000184574_14 (sequence is synthesized)
aaatgggcattctggatctaaaccgccacaggggcctgagagctgaagagcaccaggtttggtggacaaagctactgagatgcctgttcatctgctgacttctgtctaggctcatggatg

SEQ ID NO: 662518 - DNA, 120 bp, Artificial Sequence
  ENSG00000184574_15 (sequence is synthesized)
ccaccccctttcatttcggcctaggcttcccctgctcaccactgaggcctaatacaagagttcctatggacagaactacattctttctcgcatagtgacttgtgacaatttagacttggc

SEQ ID NO: 662519 - DNA, 120 bp, Artificial Sequence
  ENSG00000184574_16 (sequence is synthesized)
atccagcatgggatagttggggcaaggcaaaactaacttagagtttccccctcaacaacatccaagtccaaaccctttttaggttatcctttcttccatcacatccccttttccaggcct

SEQ ID NO: 662520 - DNA, 120 bp, Artificial Sequence
  ENSG00000184574_17 (sequence is synthesized)
cctccattttaggtccttaatattctttctttttctctctctctcgtttctctcttctctctcctctcctctcctctctcttctcctcttctctctctctccctctctctcctttgtcca

SEQ ID NO: 662521 - DNA, 120 bp, Artificial Sequence
  ENSG00000184574_18 (sequence is synthesized)
gagtaaggataaaattctttctactaaagcactggttctcaaactttttggtctcagaccccactcttagaaattgaggatctcaaagagctttgcttatattttgttcttttgatactt

SEQ ID NO: 662522 - DNA, 120 bp, Artificial Sequence
  ENSG00000184574_19 (sequence is synthesized)
accatactagaaattaaagcgaatacatttttaaaataaatacacatgcacacattacattagccatgggagcaataatgtcaccacacacacttcatgaagcctctggaaaactctaca

SEQ ID NO: 662523 - DNA, 120 bp, Artificial Sequence
  ENSG00000184574_20 (sequence is synthesized)
gtatacttgtgagagaatgagagtgaaagggacaaataacatctgtgtagcagtattatgaaaatagcttgacctcgtggacttcctcagagggttggtccctggatcacactttgagaa

SEQ ID NO: 662524 - DNA, 120 bp, Artificial Sequence
  ENSG00000184574_21 (sequence is synthesized)
ccatacttgtcctgaagtattggagttcatgtctaacttcttcccagggcattatgtacagtgctttttattactgtggggagagggcagtgctaaataaattaatcactactgatagtc

SEQ ID NO: 662525 - DNA, 120 bp, Artificial Sequence
  ENSG00000184574_22 (sequence is synthesized)
cagagcaggcagcggaagccagcttggggcagcgcagagcaacacggagcacagccctgcccctctggcttatctcagcaaagagcagtgcccagcccagctcagagggcaaatgggaca

SEQ ID NO: 662526 - DNA, 80 bp, Artificial Sequence
  ENSG00000184575_0 (sequence is synthesized)
actctccaagagactgctggcgccggcgcccgcccgcgcggcaccgacgcggggagcgcgcttcgcgctgactcagcggc

SEQ ID NO: 662527 - DNA, 120 bp, Artificial Sequence
  ENSG00000184575_1 (sequence is synthesized)
cgcgctctttcccttcctggggcgccgaccccgcccgcttgcttgcttgcttgcttgcctgcctgcctgcctgcccggcgccacgcaagagaaggtgccaggggacgcagagcgactaga

SEQ ID NO: 662528 - DNA, 120 bp, Artificial Sequence
  ENSG00000184575_2 (sequence is synthesized)
ggcgcgcggtcccggccagcaccgtctctggcgttgtagctgcggccgtggcggaggactacggcgacaaggacgagggccgctctcccagctctctgcgtgccgcgccgctccgctccg

SEQ ID NO: 662529 - DNA, 120 bp, Artificial Sequence
  ENSG00000184575_3 (sequence is synthesized)
ctggctgaccatctggagtgcaggctgggaggcgggatggagtgatagggaagatgtttataaattcttctgtgggatcagagggcacgcctattacaaccagaaaactacaagtataac

SEQ ID NO: 662530 - DNA, 120 bp, Artificial Sequence
  ENSG00000184575_4 (sequence is synthesized)
agcgaggatggatgaacaggctctattagggctaaatccaaatgctgattcagactttagacaaagggccctggcctattttgagcagttaaaaatttccccagatgcctggcaggtgtg

SEQ ID NO: 662531 - DNA, 120 bp, Artificial Sequence
  ENSG00000184575_5 (sequence is synthesized)
tgcagaagctctagcccagaggacatacagtgatgatcatgtgaagtttttctgctttcaagtactggaacatcaagttaaatacaaatactcagaactaaccactgttcaacaacagct

SEQ ID NO: 662532 - DNA, 120 bp, Artificial Sequence
  ENSG00000184575_6 (sequence is synthesized)
aattagggagacgctcatatcatggctgcaagctcagatgctgaatccccaaccagagaagacctttatacgaaataaagccgcccaagtcttcgccttgctttttgttacagagtatct

SEQ ID NO: 662533 - DNA, 120 bp, Artificial Sequence
  ENSG00000184575_7 (sequence is synthesized)
cactaagtggcccaagtttttttttgacattctctcagtagtggacctaaatccaaggggagtagatctctacctgcgaatcctcatggctattgattcagagttggtggatcgtgatgt

SEQ ID NO: 662534 - DNA, 120 bp, Artificial Sequence
  ENSG00000184575_8 (sequence is synthesized)
ggtgcatacatcagaggaggctcgtaggaatactctcataaaagataccatgagggaacagtgcattccaaatctggtggaatcatggtaccaaatattacaaaattatcagtttactaa

SEQ ID NO: 662535 - DNA, 120 bp, Artificial Sequence
  ENSG00000184575_9 (sequence is synthesized)
ttctgaagtgacgtgtcagtgccttgaagtagttggggcttatgtctcttggatagacttatcccttatagccaatgataggtttataaatatgctgctaggtcatatgtcaatagaagt

SEQ ID NO: 662536 - DNA, 120 bp, Artificial Sequence
  ENSG00000184575_10 (sequence is synthesized)
tctacgggaagaagcatgtgactgtttatttgaagttgtaaataaaggaatggaccctgttgataaaatgaaactagtggaatctttgtgtcaagtattacagtctgctgggtttttcag

SEQ ID NO: 662537 - DNA, 120 bp, Artificial Sequence
  ENSG00000184575_11 (sequence is synthesized)
cattgaccaggaagaagatgttgacttcctggccagattttctaagttggtaaatggaatgggacagtcattgatagttagttggagtaaattaattaagaatggggatattaagaatgc

SEQ ID NO: 662538 - DNA, 120 bp, Artificial Sequence
  ENSG00000184575_12 (sequence is synthesized)
tcaagaggcactacaagctattgaaacaaaagtggcactgatgttgcagctactaattcatgaggatgatgatatttcttctaatattattggattttgttacgattatcttcatatttt

SEQ ID NO: 662539 - DNA, 120 bp, Artificial Sequence
  ENSG00000184575_13 (sequence is synthesized)
gaaacagcttacagtgctctcggatcagcaaaaagctaatgtagaggcaatcatgttggccgttatgaaaaaattgacttacgatgaagaatataactttgaaaatgagggtgaagatga

SEQ ID NO: 662540 - DNA, 120 bp, Artificial Sequence
  ENSG00000184575_14 (sequence is synthesized)
agccatgtttgtagaatatagaaaacaactgaagttactgttggacaggcttgctcaagtttcaccagagttactactggcctctgttcgcagagtttttagttctacactgcagaattg

SEQ ID NO: 662541 - DNA, 120 bp, Artificial Sequence
  ENSG00000184575_15 (sequence is synthesized)
gcagactacacggtttatggaagttgaagtagcaataagattgctgtatatgttggcagaagctcttccagtatctcatggtgctcacttctcaggtgatgtttcaaaagctagtgcttt

SEQ ID NO: 662542 - DNA, 120 bp, Artificial Sequence
  ENSG00000184575_16 (sequence is synthesized)
gcaggatatgatgcgaactctggtaacatcaggagtcagttcctatcagcatacatctgtgacattggagttcttcgaaactgttgttagatatgaaaagtttttcacagttgaacctca

SEQ ID NO: 662543 - DNA, 120 bp, Artificial Sequence
  ENSG00000184575_17 (sequence is synthesized)
gcacattccatgtgtactaatggctttcttagatcacagaggtctgcggcattccagtgcaaaagttcggagcaggacggcttacctgttttctagatttgtcaaatctctcaataagca

SEQ ID NO: 662544 - DNA, 120 bp, Artificial Sequence
  ENSG00000184575_18 (sequence is synthesized)
aatgaatcctttcattgaggatattttgaatagaatacaagatttattagagctttctccacctgagaatggccaccagtccttactgagcagcgatgatcaactttttatttatgagac

SEQ ID NO: 662545 - DNA, 120 bp, Artificial Sequence
  ENSG00000184575_19 (sequence is synthesized)
agctggagtgctgattgttaatagtgaatatccggcagaaaggaaacaagccttaatgaggaatctgttgactccactaatggagaagtttaaaattctgttagaaaagttgatgctggc

SEQ ID NO: 662546 - DNA, 120 bp, Artificial Sequence
  ENSG00000184575_20 (sequence is synthesized)
acaagatgaagaaaggcaagcctctctagcagactgtcttaaccatgctgttggatttgcaagtcgaaccagtaaagctttcagcaacaaacagactgtgaaacaatgtggctgttccga

SEQ ID NO: 662547 - DNA, 120 bp, Artificial Sequence
  ENSG00000184575_21 (sequence is synthesized)
agtttatctggactgtttacagacattcttgccagccctcagttgtcccttacaaaaggatattctcagaagtggagtccgtactttccttcatcgaatgattatttgcctggaggaaga

SEQ ID NO: 662548 - DNA, 120 bp, Artificial Sequence
  ENSG00000184575_22 (sequence is synthesized)
agttcttccgttcattccatctgcttcagaacatatgctcaaagattgtgaagcaaaagatctccaggagttcattcctcttatcaaccagattacggccaaattcaagatacaggtatc

SEQ ID NO: 662549 - DNA, 120 bp, Artificial Sequence
  ENSG00000184575_23 (sequence is synthesized)
cccgtttttacaacagatgttcatgcccctgcttcatgcaatttttgaagtgctgctccggccagcagaagaaaatgaccagtctgctgctttagagaagcagatgttgcggaggagtta

SEQ ID NO: 662550 - DNA, 120 bp, Artificial Sequence
  ENSG00000184575_24 (sequence is synthesized)
ctttgctttcctgcaaacagtcacaggcagtgggatgagcgaagttatagcaaatcaaggtgcagagaatgtagaaagagtgttggttactgttatccaaggagcagttgaatatccaga

SEQ ID NO: 662551 - DNA, 120 bp, Artificial Sequence
  ENSG00000184575_25 (sequence is synthesized)
tccaattgcacagaaaacatgttttatcatcctctcaaagttggtagaactctggggaggtaaagatggaccagtgggatttgctgattttgtttataagcacattgtccccgcatgttt

SEQ ID NO: 662552 - DNA, 120 bp, Artificial Sequence
  ENSG00000184575_26 (sequence is synthesized)
ttaaaacaaacctttgacctggcagatgcacaaacagtattggctttatctgagtgtgcagtgacactgaaaacaattcatctcaaacggggcccagaatgtgttcagtatcttcaacaa

SEQ ID NO: 662553 - DNA, 120 bp, Artificial Sequence
  ENSG00000184575_27 (sequence is synthesized)
gaatacctgccctccttgcaagtagctccagaaataattcaggagttttgtcaagcgcttcagcagcctgatgctaaagtttttaaaaattacttaaaggtgttcttccagagagcaaag

SEQ ID NO: 662554 - DNA, 120 bp, Artificial Sequence
  ENSG00000184575_28 (sequence is synthesized)
ccctgaggactggatttccctgtgcctacttcatgatcatgaattccagttaatttataaagaggcgatttttgtgtgccattcacactggtctttttcacattgttttgagcttattgc

SEQ ID NO: 662555 - DNA, 120 bp, Artificial Sequence
  ENSG00000184575_29 (sequence is synthesized)
agtatatgttttgggatttttctgtaaaatgggtgtaattttcctaatacaggtatgtaacaacaaaagaagttgcctgcatgccggtccaaattgttctgtataaagatgctcttaaaa

SEQ ID NO: 662556 - DNA, 120 bp, Artificial Sequence
  ENSG00000184575_30 (sequence is synthesized)
gacacaagagttatcctagaaccttaattcttttttatttgaaattttaagtcaagtcctttataaagaccatagcagtggaaaacagtgtactttttaaaaaattgctgaatataaaat

SEQ ID NO: 662557 - DNA, 120 bp, Artificial Sequence
  ENSG00000184575_31 (sequence is synthesized)
ctttgaaaattttctttatgtgtgaagacacaaagtatgggggaagacagcaatcaaaactaactttttgtagatagccatttcatttctttaaactgtttcaacgccaatatgtattct

SEQ ID NO: 662558 - DNA, 120 bp, Artificial Sequence
  ENSG00000184575_32 (sequence is synthesized)
acaaaagagaatggttttaggctccagtgttatacttttttttatatatatatataaaaataaactttacgtagtgaaatcttccaagtcttttctggaattattataaatactttagtt

SEQ ID NO: 662559 - DNA, 120 bp, Artificial Sequence
  ENSG00000184575_33 (sequence is synthesized)
ttattttctcatcttaatctctccataatttcccatttaaaggtttacaaatatgagtgtgtggatgctttaattcatttaacctcactcctcaaaggtaacatgcaacttagttctgtt

SEQ ID NO: 662560 - DNA, 120 bp, Artificial Sequence
  ENSG00000184575_34 (sequence is synthesized)
atatgagagtctttttctttaatgtactggaaaaagcctatgtgaatctgttgatagaatttaaaattccaggccgggcgtggtggctcacgactgtaatcccagaactttgggaggcca

SEQ ID NO: 662561 - DNA, 120 bp, Artificial Sequence
  ENSG00000184575_35 (sequence is synthesized)
aaaagaatttaaaatcccaatttattttctaactcttttattggatgtatttagaacacagtatacctatagtatacctatgtgtttattatgtttgtaaatggtaactgacatttaatt

SEQ ID NO: 662562 - DNA, 120 bp, Artificial Sequence
  ENSG00000184575_36 (sequence is synthesized)
attagaagtacttacccctgccttcctccatttttattcatggctacttgagaaagcaaaaggaaaaaataatagttatcagtagtgtcactggaaagaagagaggagggacaaaactga

SEQ ID NO: 662563 - DNA, 120 bp, Artificial Sequence
  ENSG00000184575_37 (sequence is synthesized)
gcagcagaattcgtatagacatttacgtttaaattctaaaagcccaattgagatgttcagggagggtttgttttgccctttggcctcatgaatgggtttcatgaatgggcttcagtggct

SEQ ID NO: 662564 - DNA, 120 bp, Artificial Sequence
  ENSG00000184575_38 (sequence is synthesized)
tataaactctgtaaaattctattctaaattttgtacatttattttgttccggttaattccagaagacatttcaaacatttttcttacaccatataataaaaatacttaactaaattgaca

SEQ ID NO: 662565 - DNA, 120 bp, Artificial Sequence
  ENSG00000184575_39 (sequence is synthesized)
gttataaaaataaatcagtgaaatgtaccttatactttaataaaaaatgttttcagaaatagataagtgaaagctgagtgtttctttgataggttcccctgtactataggagtgataatt

SEQ ID NO: 662566 - DNA, 120 bp, Artificial Sequence
  ENSG00000184575_40 (sequence is synthesized)
gcagctattgcaatagtagtaattgttaaatggatactaatgaatagcatagcatagtgggtaagagtttatatagcacaggctctagaatcagattaagtaggttcaaataccagttct

SEQ ID NO: 662567 - DNA, 120 bp, Artificial Sequence
  ENSG00000184575_41 (sequence is synthesized)
gccagtaactggttttagaaccttgggcaagttaaagaatgtctcccagcctcagtttccctatttgtaaaatggaaataatggtagctacctcaaacctcattacgaattcaatgagtt

SEQ ID NO: 662568 - DNA, 120 bp, Artificial Sequence
  ENSG00000184575_42 (sequence is synthesized)
aaacttgaaaagacttattacagtagctggcacataaagacttgatagtagtttatatggatgctatctcatattagcatatatggaattaatagtgtatcactatactttttttttctt

SEQ ID NO: 662569 - DNA, 120 bp, Artificial Sequence
  ENSG00000184575_43 (sequence is synthesized)
ttttttttttgaatagagatcagtctatcacccaggctggagtgcagtggtgacatcatagctcactgtaacttctcccatactctaccaatcctcctgcctcagcatccagactagctg

SEQ ID NO: 662570 - DNA, 90 bp, Artificial Sequence
  ENSG00000184575_44 (sequence is synthesized)
tttgtctggtctcaaactcccggcctcaagcaatcctcccactggcctcacaatgttgggattacaggtataagccactgcacacggcct

SEQ ID NO: 662571 - DNA, 120 bp, Artificial Sequence
  ENSG00000184575_45 (sequence is synthesized)
caatgttgggattacaggtataagccactgcacacggccttactatgctatcaattccatatatggaaaggtgttttccctttcagagctctttaaagctctgcagaagatttacatgtg

SEQ ID NO: 662572 - DNA, 120 bp, Artificial Sequence
  ENSG00000184575_46 (sequence is synthesized)
tttatagagctaagagaaatcagggcatggaaattgagtgtgtaataaaaattaaactcttcatgttatataatcatgcataacttctatcttcattctctgaagttgcctagagcacca

SEQ ID NO: 662573 - DNA, 120 bp, Artificial Sequence
  ENSG00000184575_47 (sequence is synthesized)
tcacagctaggaagcttccatcatgaattaccttatttccaaaagcaagtactcaaataattgtctcaagagaggaaggacaaaactgttacaagctgaaatatttggggatttgtttga

SEQ ID NO: 662574 - DNA, 120 bp, Artificial Sequence
  ENSG00000184575_48 (sequence is synthesized)
cttgactagggaaccacaagttttcatataatgcctgatttagccctgtgcctaacagtttaaatcttaatgctaatgttaattgcttcccagttggttgaccttataagaaaacactgt

SEQ ID NO: 662575 - DNA, 120 bp, Artificial Sequence
  ENSG00000184575_49 (sequence is synthesized)
gtggtattttaatgtggtaaacatgtgaatgaaggcctgtggctcagttaatcactcccacaactttgagctgtgagttttactggtggaaggaactttaacaggtcttcgctcttgtca

SEQ ID NO: 662576 - DNA, 120 bp, Artificial Sequence
  ENSG00000184575_50 (sequence is synthesized)
ttagatatcaaagaactgaaattagttggaattgtaagcagtgaatagatgtgttgttagaatgattccatcacttatacattgtttaaaatgctaataaagtaacttgctttgtaagaa

SEQ ID NO: 662577 - DNA, 70 bp, Artificial Sequence
  ENSG00000184575_51 (sequence is synthesized)
cagatttttaggaattacacattagtggagtagttagcagagcccatttttctgagaattaggctctaac

SEQ ID NO: 662578 - DNA, 120 bp, Artificial Sequence
  ENSG00000184575_52 (sequence is synthesized)
tagttagcagagcccatttttctgagaattaggctctaacttttagttgtaatttagataagttccaaaataagtttttaaacatttaagcttctttgcatgattttatccatttacgtt

SEQ ID NO: 662579 - DNA, 120 bp, Artificial Sequence
  ENSG00000184575_53 (sequence is synthesized)
ccataaatttctgttttcagtataagctaatgggagttccttaattgttagagcttagtatatgttaataccggggcattttgatgttgcaataaataagaagaggtttcctaacttttt

SEQ ID NO: 662580 - DNA, 120 bp, Artificial Sequence
  ENSG00000184575_54 (sequence is synthesized)
agtttgtgcccaattagtcaactaaaacaagttctcaagggactgtttgtgtgtagtttagaattactcgtatattcctagtccctgccttttaggagctaagaagtaaaatttggtgtg

SEQ ID NO: 662581 - DNA, 120 bp, Artificial Sequence
  ENSG00000184575_55 (sequence is synthesized)
acccgaattgccacgaggcttcctttaggggagggatcgggggagggatgggagcaaggctagcagaggagggtcggcatcgcctgtggttccgaagcccgttagtcatcgttgtagcgt

SEQ ID NO: 662582 - DNA, 120 bp, Artificial Sequence
  ENSG00000184575_56 (sequence is synthesized)
tatcaactgtggagacctcaaacttgattcttcccccacccctggacaaaaaggaaaagtgttatttctgtgcagtaattggccagcacggacgctccatttcttctcaaaccttcctca

SEQ ID NO: 662583 - DNA, 120 bp, Artificial Sequence
  ENSG00000184584_0 (sequence is synthesized)
gttcatttttcactcctccctcctaggtcacacttttcagaaaaagaatctgcatcctggaaaccagaagaaaaatatgagacggggaatcatcgtgtgatgtgtgtgctgcctttggct

SEQ ID NO: 662584 - DNA, 120 bp, Artificial Sequence
  ENSG00000184584_1 (sequence is synthesized)
gagtgtgtggagtcctgctcaggtgttaggtacagtgtgtttgatcgtggtggcttgaggggaacccgctgttcagagctgtgactgcggctgcactcagagaagctgcccttggctgct

SEQ ID NO: 662585 - DNA, 120 bp, Artificial Sequence
  ENSG00000184584_2 (sequence is synthesized)
cgtagcgccgggccttctctcctcgtcatcatccagagcagccagtgtccgggaggcagaagatgccccactccagcctgcatccatccatcccgtgtcccaggggtcacggggcccaga

SEQ ID NO: 662586 - DNA, 120 bp, Artificial Sequence
  ENSG00000184584_3 (sequence is synthesized)
aggcagccttggttctgctgagtgcctgcctggtgaccctttgggggctaggagagccaccagagcacactctccggtacctggtgctccacctagcctccctgcagctgggactgctgt

SEQ ID NO: 662587 - DNA, 120 bp, Artificial Sequence
  ENSG00000184584_4 (sequence is synthesized)
taaacggggtctgcagcctggctgaggagctgcgccacatccactccaggtaccggggcagctactggaggactgtgcgggcctgcctgggctgccccctccgccgtggggccctgttgc

SEQ ID NO: 662588 - DNA, 120 bp, Artificial Sequence
  ENSG00000184584_5 (sequence is synthesized)
tgctgtccatctatttctactactccctcccaaatgcggtcggcccgcccttcacttggatgcttgccctcctgggcctctcgcaggcactgaacatcctcctgggcctcaagggcctgg

SEQ ID NO: 662589 - DNA, 120 bp, Artificial Sequence
  ENSG00000184584_6 (sequence is synthesized)
ccccagctgagatctctgcagtgtgtgaaaaagggaatttcaacgtggcccatgggctggcatggtcatattacatcggatatctgcggctgatcctgccagagctccaggcccggattc

SEQ ID NO: 662590 - DNA, 120 bp, Artificial Sequence
  ENSG00000184584_7 (sequence is synthesized)
gaacttacaatcagcattacaacaacctgctacggggtgcagtgagccagcggctgtatattctcctcccattggactgtggggtgcctgataacctgagtatggctgaccccaacattc

SEQ ID NO: 662591 - DNA, 120 bp, Artificial Sequence
  ENSG00000184584_8 (sequence is synthesized)
gcttcctggataaactgccccagcagaccggtgaccatgctggcatcaaggatcgggtttacagcaacagcatctatgagcttctggagaacgggcagcgggcgggcacctgtgtcctgg

SEQ ID NO: 662592 - DNA, 120 bp, Artificial Sequence
  ENSG00000184584_9 (sequence is synthesized)
ccccttgcagactttgtttgccatgtcacaatacagtcaagctggctttagccgggaggataggcttgagcaggccaaactcttctgccggacacttgaggacatcctggcagatgcccc

SEQ ID NO: 662593 - DNA, 120 bp, Artificial Sequence
  ENSG00000184584_10 (sequence is synthesized)
tgagtctcagaacaactgccgcctcattgcctaccaggaacctgcagatgacagcagcttctcgctgtcccaggaggttctccggcacctgcggcaggaggaaaaggaagaggttactgt

SEQ ID NO: 662594 - DNA, 120 bp, Artificial Sequence
  ENSG00000184584_11 (sequence is synthesized)
gggcagcttgaagacctcagcggtgcccagtacctccacgatgtcccaagagcctgagctcctcatcagtggaatggaaaagcccctccctctccgcacggatttctcttgagacccagg

SEQ ID NO: 662595 - DNA, 120 bp, Artificial Sequence
  ENSG00000184584_12 (sequence is synthesized)
gtcaccaggccagagcctccagtggtctccaagcctctggactgggggctctcttcagtggctgaatgtccagcagagctatttccttccacagggggccttgcagggaagggtccagga

SEQ ID NO: 662596 - DNA, 120 bp, Artificial Sequence
  ENSG00000184584_13 (sequence is synthesized)
cttgacatcttaagatgcgtcttgtccccttgggccagtcatttcccctctctgagcctcggtgtcttcaacctgtgaaatgggatcataatcactgccttacctccctcacggttgttg

SEQ ID NO: 662597 - DNA, 120 bp, Artificial Sequence
  ENSG00000184584_14 (sequence is synthesized)
tgaggactgagtgtgtggaagtttttcataaactttggatgctagtgtacttagggggtgtgccaggtgtctttcatggggccttccagacccactccccacccttctccccttcctttg

SEQ ID NO: 662598 - DNA, 120 bp, Artificial Sequence
  ENSG00000184584_15 (sequence is synthesized)
cccggggacgccgaactctctcaatggtatcaacaggctccttcgccctctggctcctggtcatgttccattattggggagccccagcagaagaatggagaggaggaggaggctgagttt

SEQ ID NO: 662599 - DNA, 120 bp, Artificial Sequence
  ENSG00000184584_16 (sequence is synthesized)
ggggtattgaatcccccggctcccaccctgcagcatcaaggttgctatggactctcctgccgggcaactcttgcgtaatcatgactatctctaggattctggcaccacttccttccctgg

SEQ ID NO: 662600 - DNA, 120 bp, Artificial Sequence
  ENSG00000184584_17 (sequence is synthesized)
ccccttaagcctagctgtgtatcggcacccccaccccactagagtactccctctcacttgcggtttccttatactccacccctttctcaacggtccttttttaaagcacatctcagatta

SEQ ID NO: 662601 - DNA, 120 bp, Artificial Sequence
  ENSG00000184584_18 (sequence is synthesized)
agggcccctggcacccagaggcgagggggtgcctgctggctgccctgtccccactccctgagctctgttttccactttgttgactaaggtcctccctggggtgggttccggggacagggg

SEQ ID NO: 662602 - DNA, 120 bp, Artificial Sequence
  ENSG00000184584_19 (sequence is synthesized)
aacccaggtccccaagggttcttggttgggtacggctgcacaggacagcttcaagtctgggtctgggatagttgctgccttctttcttcaccacacctgtggtctccctgggtcttggtg

SEQ ID NO: 662603 - DNA, 120 bp, Artificial Sequence
  ENSG00000184584_20 (sequence is synthesized)
gggcgtgtatgtgcaggccctgctctgttttcagcaaacctcgctgagacaggagctttggggtgacttattcccagcctgcctcctagaggtgtctctaagagcagcctctgggagtgg

SEQ ID NO: 662604 - DNA, 120 bp, Artificial Sequence
  ENSG00000184584_21 (sequence is synthesized)
ctgggcaccagggaaaggggaactgggaggaagtgcccagccagagcctcagtcccagaagggcaggagggcaaggggagaatggtcatggatttcttggtgcccacagatgccccactc

SEQ ID NO: 662605 - DNA, 88 bp, Artificial Sequence
  ENSG00000184584_22 (sequence is synthesized)
aagtgcagttctgagaggtaaagtgatttatccgatatcacatagcttagagagaggaagagaaaggatttgaacccaggtttgtcca

SEQ ID NO: 662606 - DNA, 120 bp, Artificial Sequence
  ENSG00000184584_23 (sequence is synthesized)
cgatatcacatagcttagagagaggaagagaaaggatttgaacccaggtttgtccagagcctggaccctagaccactgcaccgtggagcctgtgtttgttgttgttgttgttgttgttgt

SEQ ID NO: 662607 - DNA, 67 bp, Artificial Sequence
  ENSG00000184584_24 (sequence is synthesized)
gttgttgttgttgttgttgttttgagatgaagtctctttctgttacccagcctggagtacagtggtg

SEQ ID NO: 662608 - DNA, 63 bp, Artificial Sequence
  ENSG00000184584_25 (sequence is synthesized)
ttcaagtgattctcctgcctgagcctcttgaatagctatgtttcaccatgttgcccaggctag

SEQ ID NO: 662609 - DNA, 120 bp, Artificial Sequence
  ENSG00000184584_26 (sequence is synthesized)
ggattacaggcgtgagccactgtgcctgccctaagcctgtgtgttttattcttctgacttgcaggctaaagcggcagctcttccatatctcattgctatctcctagggcttccgctagga

SEQ ID NO: 662610 - DNA, 120 bp, Artificial Sequence
  ENSG00000184584_27 (sequence is synthesized)
tatctcctagggcttccgctaggagactgatctggggctagaggcctccctctgtgcacacgagaatgctggaaatgtcacctctcagggctctgcctgcctctcagccctgaaagccat

SEQ ID NO: 662611 - DNA, 120 bp, Artificial Sequence
  ENSG00000184584_28 (sequence is synthesized)
ggtggaaaggggtggcgctgacatagacatctgaggaaagaagtgagggagggtaaagggtggtgcagtaagaggaggggtggggagggcttttggaggcgctgcccctcctggcctcct

SEQ ID NO: 662612 - DNA, 120 bp, Artificial Sequence
  ENSG00000184584_29 (sequence is synthesized)
gtacaatgagagtgcactggactctccattctctggcacccacacactgcgggggccaatgacctgggtctcactcctgaatcaggtgggagatagggttagcaggaataacttcttggg

SEQ ID NO: 662613 - DNA, 120 bp, Artificial Sequence
  ENSG00000184584_30 (sequence is synthesized)
cttttgctcctacctaatatcatccccacaaccgccttctgggcagaaaccggcaggctctcttggagaagtcacaggcgtggccatttcctgcaaagagccaaacccccattcctctgt

SEQ ID NO: 662614 - DNA, 120 bp, Artificial Sequence
  ENSG00000184584_31 (sequence is synthesized)
tcaagtcaggagcaggttgggaagccttggaggaggaggaggagttctctgggtgtccttgatggaggccccccagccacatcctgctgtccacagggcctggccccagctgagatctct

SEQ ID NO: 662615 - DNA, 120 bp, Artificial Sequence
  ENSG00000184584_32 (sequence is synthesized)
tttttttttttaagatggagtttcactttttcacccgggctgaagtagagtggcacaatctgggctcactgcaacttctgcttcccaggttccagtgattctcctgccttagcctcccaa

SEQ ID NO: 662616 - DNA, 120 bp, Artificial Sequence
  ENSG00000184584_33 (sequence is synthesized)
tgaggagctgcgccacatccactccaggtgactcactgcagtacccagggacggggtatccaacgtgtgtcactcccttgatgcctagccctgcccctccttgaacctctctggctgagc

SEQ ID NO: 662617 - DNA, 120 bp, Artificial Sequence
  ENSG00000184584_34 (sequence is synthesized)
ctgtgagaacatctgaaggattcatgtgggtgcaggggaacccagaccagagttgaacccagagcctagccccagacctgattcccagctggagcagttgacagcctcgggtcttgccct

SEQ ID NO: 662618 - DNA, 120 bp, Artificial Sequence
  ENSG00000184588_0 (sequence is synthesized)
gtaatccttcagctctggtggtaagggagatgcagtgagctcccggctgggagagagggttattttgcaaaactcccctggtaccgtgcccgcggaatattgcaggaggtctgtgaggta

SEQ ID NO: 662619 - DNA, 120 bp, Artificial Sequence
  ENSG00000184588_1 (sequence is synthesized)
ttaaaaagtgtcagcaaactgcattgaataacagacatcctaagaggggatattttccacctctataatgaagaaaagcaggagtgtgatgacggtgatggctgatgataatgttaaaga

SEQ ID NO: 662620 - DNA, 120 bp, Artificial Sequence
  ENSG00000184588_2 (sequence is synthesized)
ttattttgaatgtagcttgagtaaatcctacagttcttccagtaacacacttgggatcgacctctggagagggagaaggtgttgctcaggaaacttacagttaccaccactgtctcaaag

SEQ ID NO: 662621 - DNA, 120 bp, Artificial Sequence
  ENSG00000184588_3 (sequence is synthesized)
acagagtgaaagggcaaggactcctgagggagatggtatttccaggccgaccacactgcctttgacaacgcttccaagcattgctattacaactgtaagccaggagtgctttgatgtgga

SEQ ID NO: 662622 - DNA, 120 bp, Artificial Sequence
  ENSG00000184588_4 (sequence is synthesized)
aaatggcccttccccaggtcggagtccactggatccccaggccagctcttccgctgggctggtacttcacgccacctttcctgggcacagccagcgcagagagtcatttctctacagatc

SEQ ID NO: 662623 - DNA, 120 bp, Artificial Sequence
  ENSG00000184588_5 (sequence is synthesized)
agacagcgactatgacttgtcaccaaaggcgatgtcgagaaactcttctcttccaagcgagcaacacggcgatgacttgattgtaactccttttgcccaggtccttgccagcttgcgaag

SEQ ID NO: 662624 - DNA, 120 bp, Artificial Sequence
  ENSG00000184588_6 (sequence is synthesized)
tgtgagaaacaacttcactatactgacaaaccttcatggtacatctaacaagaggtccccagctgctagtcagcctcctgtctccagagtcaacccacaagaagaatcttatcaaaaatt

SEQ ID NO: 662625 - DNA, 120 bp, Artificial Sequence
  ENSG00000184588_7 (sequence is synthesized)
agcaatggaaacgctggaggaattagactggtgtttagaccagctagagaccatacagacctaccggtctgtcagtgagatggcttctaacaagttcaaaagaatgctgaaccgggagct

SEQ ID NO: 662626 - DNA, 120 bp, Artificial Sequence
  ENSG00000184588_8 (sequence is synthesized)
gacacacctctcagagatgagccgatcagggaaccaggtgtctgaatacatttcaaatactttcttagacaagcagaatgatgtggagatcccatctcctacccagaaagacagggagaa

SEQ ID NO: 662627 - DNA, 120 bp, Artificial Sequence
  ENSG00000184588_9 (sequence is synthesized)
aaagaaaaagcagcagctcatgacccagataagtggagtgaagaaattaatgcatagttcaagcctaaacaatacaagcatctcacgctttggagtcaacactgaaaatgaagatcacct

SEQ ID NO: 662628 - DNA, 120 bp, Artificial Sequence
  ENSG00000184588_10 (sequence is synthesized)
ggccaaggagctggaagacctgaacaaatggggtcttaacatctttaatgtggctggatattctcacaatagacccctaacatgcatcatgtatgctatattccaggaaagagacctcct

SEQ ID NO: 662629 - DNA, 120 bp, Artificial Sequence
  ENSG00000184588_11 (sequence is synthesized)
aaagacattcagaatctcatctgacacatttataacctacatgatgactttagaagaccattaccattctgacgtggcatatcacaacagcctgcacgctgctgatgtagcccagtcgac

SEQ ID NO: 662630 - DNA, 120 bp, Artificial Sequence
  ENSG00000184588_12 (sequence is synthesized)
ccatgttctcctttctacaccagcattagacgctgtcttcacagatttggagatcctggctgccatttttgcagctgccatccatgacgttgatcatcctggagtctccaatcagtttct

SEQ ID NO: 662631 - DNA, 120 bp, Artificial Sequence
  ENSG00000184588_13 (sequence is synthesized)
catcaacacaaattcagaacttgctttgatgtataatgatgaatctgtgttggaaaatcatcaccttgctgtgggtttcaaactgctgcaagaagaacactgtgacatcttcatgaatct

SEQ ID NO: 662632 - DNA, 120 bp, Artificial Sequence
  ENSG00000184588_14 (sequence is synthesized)
caccaagaagcagcgtcagacactcaggaagatggttattgacatggtgttagcaactgatatgtctaaacatatgagcctgctggcagacctgaagacaatggtagaaacgaagaaagt

SEQ ID NO: 662633 - DNA, 120 bp, Artificial Sequence
  ENSG00000184588_15 (sequence is synthesized)
tacaagttcaggcgttcttctcctagacaactataccgatcgcattcaggtccttcgcaacatggtacactgtgcagacctgagcaaccccaccaagtccttggaattgtatcggcaatg

SEQ ID NO: 662634 - DNA, 120 bp, Artificial Sequence
  ENSG00000184588_16 (sequence is synthesized)
acaaagagcgggagaggggaatggaaattagcccaatgtgtgataaacacacagcttctgtggaaaaatcccaggttggtttcatcgactacattgtccatccattgtgggagacatggg

SEQ ID NO: 662635 - DNA, 120 bp, Artificial Sequence
  ENSG00000184588_17 (sequence is synthesized)
cagatttggtacagcctgatgctcaggacattctcgataccttagaagataacaggaactggtatcagagcatgatacctcaaagtccctcaccaccactggacgagcagaacagggact

SEQ ID NO: 662636 - DNA, 120 bp, Artificial Sequence
  ENSG00000184588_18 (sequence is synthesized)
gccagggtctgatggagaagtttcagtttgaactgactctcgatgaggaagattctgaaggacctgagaaggagggagagggacacagctatttcagcagcacaaagacgctttgtgtga

SEQ ID NO: 662637 - DNA, 120 bp, Artificial Sequence
  ENSG00000184588_19 (sequence is synthesized)
ttgatccagaaaacagagattccctgggagagactgacatagacattgcaacagaagacaagtcccccgtggatacataatccccctctccctgtggagatgaacattctatccttgatg

SEQ ID NO: 662638 - DNA, 120 bp, Artificial Sequence
  ENSG00000184588_20 (sequence is synthesized)
agcatgccagctatgtggtagggccagcccaccatgggggccaagacctgcacaggacaagggccacctggcctttcagttacttgagtttggagtcagaaagcaagaccaggaagcaaa

SEQ ID NO: 662639 - DNA, 120 bp, Artificial Sequence
  ENSG00000184588_21 (sequence is synthesized)
tagcagctcaggaaatcccacggttgacttgccttgatggcaagcttggtggagagggctgaagctgttgctgggggccgattctgatcaagacacatggcttgaaaatggaagacacaa

SEQ ID NO: 662640 - DNA, 120 bp, Artificial Sequence
  ENSG00000184588_22 (sequence is synthesized)
aactgagagatcattctgcactaagtttcgggaacttatccccgacagtgactgaactcactgactaataacttcatttatgaatcttctcacttgtccctttgtctgccaacctgtgtg

SEQ ID NO: 662641 - DNA, 120 bp, Artificial Sequence
  ENSG00000184588_23 (sequence is synthesized)
ccttttttgtaaaacattttcatgtctttaaaatgcctgttgaatacctggagtttagtatcaacttctacacagataagctttcaaagttgacaaacttttttgactctttctggaaaa

SEQ ID NO: 662642 - DNA, 120 bp, Artificial Sequence
  ENSG00000184588_24 (sequence is synthesized)
gggaaagaaaatagtcttccttctttcttgggcaatatccttcactttactacagttacttttgcaaacagacagaaaggatacacttctaaccacattttacttccttcccctgttgtc

SEQ ID NO: 662643 - DNA, 120 bp, Artificial Sequence
  ENSG00000184588_25 (sequence is synthesized)
cagtccaactccacagtcactcttaaaacttctctctgtttgcctgcctccaacagtacttttaactttttgctgtaaacagaataaaattgaacaaattagggggtagaaaggagcagt

SEQ ID NO: 662644 - DNA, 120 bp, Artificial Sequence
  ENSG00000184588_26 (sequence is synthesized)
ggtgtcgttcaccgtgagagtctgcatagaactcagcagtgtgccctgctgtgtcttggaccctgccccccacaggagttgtacagtccctggccctgttccctacctcctctcttcacc

SEQ ID NO: 662645 - DNA, 120 bp, Artificial Sequence
  ENSG00000184588_27 (sequence is synthesized)
ccgttaggctgttttcaatgtaatgctgccgtccttctcttgcactgccttctgcgctaacacctccattcctgtttataaccgtgtatttattacttaatgtatataatgtaatgtttt

SEQ ID NO: 662646 - DNA, 120 bp, Artificial Sequence
  ENSG00000184588_28 (sequence is synthesized)
gtaagttattaatttatatatctaacattgcctgccaatggtggtgttaaatttgtgtagaaaactctgcctaagagttacgactttttcttgtaatgttttgtattgtgtattatataa

SEQ ID NO: 662647 - DNA, 120 bp, Artificial Sequence
  ENSG00000184588_29 (sequence is synthesized)
cccaaacgtcacttagtagagacatatggcccccttggcagagaggacaggggtgggcttttgttcaaagggtctgccctttccctgcctgagttgctacttctgcacaacccctttatg

SEQ ID NO: 662648 - DNA, 120 bp, Artificial Sequence
  ENSG00000184588_30 (sequence is synthesized)
aaccagttttggaaacaatattctcacattagatactaaatggtttatactgagcttttacttttgtatagcttgataggggcagggggcaatgggatgtagtttttacccaggttctat

SEQ ID NO: 662649 - DNA, 120 bp, Artificial Sequence
  ENSG00000184588_31 (sequence is synthesized)
ccaaatctatgtgggcatgagttgggttataactggatcctactatcattgtggctttggttcaaaaggaaacactacatttgctcacagatgattcttctgaatgctcccgaactactg

SEQ ID NO: 662650 - DNA, 120 bp, Artificial Sequence
  ENSG00000184588_32 (sequence is synthesized)
actttgaagaggtagcctcctgcctgccattaagcaggaatgtcatgttccagttcattacaaaagaaaacaataaaacaatgtgaatttttataataaaatgtgaactgatgtagcaaa

SEQ ID NO: 662651 - DNA, 80 bp, Artificial Sequence
  ENSG00000184588_33 (sequence is synthesized)
agaggacgagagaagagctgaggggcgcgtcgccagcgcctgtgtctccctggcgcgggttccccaggctagcccgctgg

SEQ ID NO: 662652 - DNA, 120 bp, Artificial Sequence
  ENSG00000184588_34 (sequence is synthesized)
ggggctcctggcctcgcctcagcggctgcaggctcttcgtcgcgggccgggctgcacgcgagcgccctccgggcagactttcgtcccccacccccgggagcgcggaaggctcactcgcag

SEQ ID NO: 662653 - DNA, 120 bp, Artificial Sequence
  ENSG00000184588_35 (sequence is synthesized)
gtttcagtttgtaaaatatgtttcatgctttcagttcagcattgtgactcagtaattacagaaaatggcacaaatgtgcatgaccaatgtatgtctatgaacactgcattgtttcaggtg

SEQ ID NO: 662654 - DNA, 120 bp, Artificial Sequence
  ENSG00000184588_36 (sequence is synthesized)
gacattttatcattttcaaatgtttctcacaatgtatgttatagtattattattatatattgtgttcaaatgcattctaaagagacttttatatgaggtgaataaagaaaagcatgatta

SEQ ID NO: 662655 - DNA, 120 bp, Artificial Sequence
  ENSG00000184588_37 (sequence is synthesized)
cacatgctggacggattctgggtctgctctttgtgcaaacaaaacaagtgactaggttttgcttactatccattagtgaatgcagcttgtttaataagattttttttaaaaaaatgcatg

SEQ ID NO: 662656 - DNA, 120 bp, Artificial Sequence
  ENSG00000184588_38 (sequence is synthesized)
taaaggatttatcaaaagcctttatgaatatttcatgagttgatatattcagctgaatgaattcagtgagtgtcagtgtgtagcttgcagacaaacctcatccacaaggaggctactgac

SEQ ID NO: 662657 - DNA, 120 bp, Artificial Sequence
  ENSG00000184588_39 (sequence is synthesized)
attggaagcactttggcgcattttcagaggcaaagccagcctgataaagctccttgtgacagcctgacttgctattcttcgagtatgctgctcttgctctaagacgctcatacattggag

SEQ ID NO: 662658 - DNA, 120 bp, Artificial Sequence
  ENSG00000184588_40 (sequence is synthesized)
tcacagcttcgtaaattaaactggaaatagtttgcagacttatcagtcttctgacctgcagcagtgtctctgctatgtttgagatttttgttttggatggtgaaagctagcactccttac

SEQ ID NO: 662659 - DNA, 120 bp, Artificial Sequence
  ENSG00000184588_41 (sequence is synthesized)
aagacatgacagcaaaagattcttcaaaggaacttactgcttctgaacctgaggtttgcataaagactttcaaggagcaaatgcatttagaacttgagcttccgagattaccaggaaaca

SEQ ID NO: 662660 - DNA, 120 bp, Artificial Sequence
  ENSG00000184588_42 (sequence is synthesized)
gacctacatctcctaaaatttctccacgcagttcaccaaggaactcaccatgctttttcagaaagttgctggtgaataaaagcattcggcagcgtcgtcgcttcactgtggctcatacat

SEQ ID NO: 662661 - DNA, 120 bp, Artificial Sequence
  ENSG00000184588_43 (sequence is synthesized)
attatctgcaagagtcaaaacaaatcgtctagatcccagaatgccatctgggagcatgtcattttcaaatggcaaagttgtcttcctactaattttcactgtaaccagcggaggtaaatg

SEQ ID NO: 662662 - DNA, 120 bp, Artificial Sequence
  ENSG00000184588_44 (sequence is synthesized)
taggtacttttgaaagctgcattaactctttcagccacagggtgtcatttagttcaataaagtagtttttatgcaatttaataattgcctctgtgcacccaccagcatccctgtggcctg

SEQ ID NO: 662663 - DNA, 120 bp, Artificial Sequence
  ENSG00000184588_45 (sequence is synthesized)
ttttttcagaagtactgaagatacatctccctgtgaagtgaaatggaatatttgatggctgatatttttaatagcacaatgtaaaggaaagagcttctataagcagacaagcagaatgat

SEQ ID NO: 662664 - DNA, 120 bp, Artificial Sequence
  ENSG00000184588_46 (sequence is synthesized)
gagtctgagaaaactctttggtgcttctgcctttagttttaggacacatttatgcagatgagcttataagagaccgttccctccgccttcttcctcagaggaagtttcttgaatcttatc

SEQ ID NO: 662665 - DNA, 120 bp, Artificial Sequence
  ENSG00000184588_47 (sequence is synthesized)
ctttttttttctttttcccttgaacttttcacatataatctcctctcaccaaataggttattaaattatattttagaggtaatttcagacaaatgtatttttaaaagtaggtacagtttc

SEQ ID NO: 662666 - DNA, 120 bp, Artificial Sequence
  ENSG00000184588_48 (sequence is synthesized)
aagtggaattatcttgacctctattaaaattccttttcctatgtttgcatcttcaaaagtaatcagatgttaattctaagaaatcttaagaaaacctcttttccaaaagtgacgttggaa

SEQ ID NO: 662667 - DNA, 120 bp, Artificial Sequence
  ENSG00000184588_49 (sequence is synthesized)
taatttcaaattgaagagatatattttgtagaaacagtattatttatctaatggtatctgctcatccaacctcttgattcctggacagtaaagttggaaacatttaaaatgaacatttgc

SEQ ID NO: 662668 - DNA, 120 bp, Artificial Sequence
  ENSG00000184588_50 (sequence is synthesized)
attttaatcttctcctttttaaaagatggctgtgtttcctagtctggcaactcctcaggaaagaagaatttcttcttccttgcagagttcagctgagtaggactaatgtagaagagtgga

SEQ ID NO: 662669 - DNA, 120 bp, Artificial Sequence
  ENSG00000184588_51 (sequence is synthesized)
aaccccttcggccaccagggctattcataattcataagtgcttcaaaccagccagctgaatacatttggacaggctcttgctccttcgtgcaattcctgatttcattactctcttctgcc

SEQ ID NO: 662670 - DNA, 120 bp, Artificial Sequence
  ENSG00000184588_52 (sequence is synthesized)
aggaaataagcagggagcataggcttcttgcaagaatggagtgcgaagatgggctttgtttggcttaggaaatgccatacattttggaggtttttgtcttttctaagttttgattatttt

SEQ ID NO: 662671 - DNA, 120 bp, Artificial Sequence
  ENSG00000184588_53 (sequence is synthesized)
atcactgaatctgcagggctttcctgatcctttcgggattgctctctcagaactgtgaattctttcaaagggatttgtggattgtggcaaggagagcattccaaaatgcctgaggcaaat

SEQ ID NO: 662672 - DNA, 120 bp, Artificial Sequence
  ENSG00000184588_54 (sequence is synthesized)
acaagatgaagatgagcaggcagggtggcagcactggctgtggcagcagcagcacaccaccacctatgcaaggtctgtactttttaacacagcattggaagccagtatcagtcatggttc

SEQ ID NO: 662673 - DNA, 120 bp, Artificial Sequence
  ENSG00000184588_55 (sequence is synthesized)
catatcagtaagtgagtgatggatgaagtgaagagctttgatgtggaaaatggcccttccccaggtcggagtccactggatccccaggccagctcttccgctgggctggtacttcacgcc

SEQ ID NO: 662674 - DNA, 120 bp, Artificial Sequence
  ENSG00000184588_56 (sequence is synthesized)
ctggaagcaaacagaggaggcaaggggttgtttcggacacactagagagtaagtcagagaatcttcgtgttgaggcagcattgcaaaattgaagatgaagaaaggaaggaagaagaatct

SEQ ID NO: 662675 - DNA, 120 bp, Artificial Sequence
  ENSG00000184588_57 (sequence is synthesized)
gttatttaatgggaatatatcctgaggatatatgcttacttgcaaatgcttttatgtgtagtcactgtaaattcaggagtcatgaatctagtactaattttttcctttcaagctcttgga

SEQ ID NO: 662676 - DNA, 120 bp, Artificial Sequence
  ENSG00000184588_58 (sequence is synthesized)
aacaccatggagttctgttggaactgaaattcttcttcacacaaaatgcaaccagttctatgatatttgttaaagtccaaataatgttttctcctaaatctgttccctactaatgtagca

SEQ ID NO: 662677 - DNA, 120 bp, Artificial Sequence
  ENSG00000184588_59 (sequence is synthesized)
cctaatgcctgacacctaacgatgcctcacatgcttttctatttccagcagcgcttcatacttaaaatctttctctcttggttgttgtgttttctttctggtatcctgatcataagtata

SEQ ID NO: 662678 - DNA, 120 bp, Artificial Sequence
  ENSG00000184588_60 (sequence is synthesized)
acggaagtattacaaaagcttagcttctaaaagaagggaacaaaagcagcagattctattggctcattggcttctgaagtatttgtggtgcatgctttttaaaatatttttataaaagaa

SEQ ID NO: 662679 - DNA, 120 bp, Artificial Sequence
  ENSG00000184588_61 (sequence is synthesized)
agattgagaacgagaaaaaaaagtgaaagaaagatactaagtaaaggtgagtttactctagagcctcgtaatatgaaatataaagaagtaaacagtactctatggacttcaaaaacctgg

SEQ ID NO: 662680 - DNA, 120 bp, Artificial Sequence
  ENSG00000184588_62 (sequence is synthesized)
tgtgctgcatgtactatttcttttagaacttttataaaaagaaacaaaataggatgttttaacatataactcgtgttacatacttggagatcgaaggaggtagttttgaaactccaatca

SEQ ID NO: 662681 - DNA, 120 bp, Artificial Sequence
  ENSG00000184588_63 (sequence is synthesized)
tttcatcatattggcctaccagtgaggcaatgttgctcacatttctgttagccaaatttacatcaatttgattatttagactatgttttctttttcttgtaataaatactgacaaacatt

SEQ ID NO: 662682 - DNA, 120 bp, Artificial Sequence
  ENSG00000184588_64 (sequence is synthesized)
aaccagttttcacccgaattttgactgtttcatttagaagaaaagcaaaatgagaaaaagctttcctcatttctccttgagatggcaaagcactcagaaatgacatcacataccctaaag

SEQ ID NO: 662683 - DNA, 120 bp, Artificial Sequence
  ENSG00000184588_65 (sequence is synthesized)
aaccctgggatgactaaggcagagagagtctgagaaaactctttggtgcttctgcctttagttttaggacacatttatgcagatgagcttataagagaccgttccctccgccttcttcct

SEQ ID NO: 662684 - DNA, 120 bp, Artificial Sequence
  ENSG00000184588_66 (sequence is synthesized)
cagaggaagtttcttggtagatcaccgacacctcatccaggcggggggttggggggaaacttggcaccagccatcccaggcagagcaccactgtgatttgttctcctggtggagagagct

SEQ ID NO: 662685 - DNA, 120 bp, Artificial Sequence
  ENSG00000184588_67 (sequence is synthesized)
ggaaggaaggagccagcgtgcaaataatgaaggagcacgggggcaccttcagtagcaccggaatcagcggtggtagcggtgactctgctatggacagcctgcagccgctccagcctaact

SEQ ID NO: 662686 - DNA, 120 bp, Artificial Sequence
  ENSG00000184588_68 (sequence is synthesized)
tacaccagtagaagcattttttgcttagaaactgatgacttctgtttgtagagggccactgcttctctaagaggaaatgacatgtagctggtggttcttgaaataatttggagagaacta

SEQ ID NO: 662687 - DNA, 120 bp, Artificial Sequence
  ENSG00000184588_69 (sequence is synthesized)
cctagacaactataccgatcgcattcaggtatttgaggaaagtctttgatttaacacaaaaccaaaccaaactaagctgaacaacaattagaaaaagaaaacaaagataaattcagttat

SEQ ID NO: 662688 - DNA, 120 bp, Artificial Sequence
  ENSG00000184588_70 (sequence is synthesized)
agaagagtcctttttctgagtgctttgatgtggaaaatggcccttccccaggtcggagtccactggatccccaggccagctcttccgctgggctggtacttcacgccacctttcctgggc

SEQ ID NO: 662689 - DNA, 120 bp, Artificial Sequence
  ENSG00000184588_71 (sequence is synthesized)
gtcactgtaaattcaggagtcatgaatctagtactaattttttcctttcaagctcttggaataccctttcgtgccaaattgtgagtcctgtcttatatccagacacggcgatgacttgat

SEQ ID NO: 662690 - DNA, 120 bp, Artificial Sequence
  ENSG00000184599_0 (sequence is synthesized)
gtggagtgagtctgaggacagcagatgaacagacagaaactgaaagatccccaaaaaggatgagtgagagggtcgagcggaactggagcacgggcggctggctgctggcactgtgcctgg

SEQ ID NO: 662691 - DNA, 120 bp, Artificial Sequence
  ENSG00000184599_1 (sequence is synthesized)
cctggctgtggacccacctgaccttggctgccttgcagcctcccactgccacagtgcttgtgcagcagggcacctgcgaggtgattgcggctcaccgctgctgcaaccggaaccgcatcg

SEQ ID NO: 662692 - DNA, 120 bp, Artificial Sequence
  ENSG00000184599_2 (sequence is synthesized)
aggagcgctcccagacggtgaaatgctcctgtttttctggccaggtggccggcaccacgcgggcaaagccctcctgcgtggacgcctccatcgtcctgcagagatggtggtgtcagatgg

SEQ ID NO: 662693 - DNA, 120 bp, Artificial Sequence
  ENSG00000184599_3 (sequence is synthesized)
agccctgcctgccgggggaggagtgtaaggtgctcccggacctgtcgggatggagctgcagcagtggacacaaagtcaaaaccaccaaggtcacacgatagctcttgggggtcacggcct

SEQ ID NO: 662694 - DNA, 120 bp, Artificial Sequence
  ENSG00000184599_4 (sequence is synthesized)
cagcatcagtctttccggggcatttcagttaagctgctcagcagatatggatggatctgcaatcacatacctaatgtggagctgggcttttctggagacacgaaggtcaacacacaattc

SEQ ID NO: 662695 - DNA, 120 bp, Artificial Sequence
  ENSG00000184599_5 (sequence is synthesized)
ctgcccttaaggaatgtccagttgaattggagagttgatgacagacaatttagataatttaggttaaagtacttgataccagactgcggcttctgggccacatgctatggcatgatgggg

SEQ ID NO: 662696 - DNA, 120 bp, Artificial Sequence
  ENSG00000184599_6 (sequence is synthesized)
gtttgggaatgagattcccacagttcttcagataccctgtggccacagggcatagaaacaagaggtcacattcagcacccaccacctccctctttcgcatcagttctgaatccccagcaa

SEQ ID NO: 662697 - DNA, 120 bp, Artificial Sequence
  ENSG00000184599_7 (sequence is synthesized)
gctgttaacatgttgcaggaaaacactctccccttatgccagaccagcagtatctcatttggatgggattggattgacttgcggaaggaaagtaaaaataaagccaaataacttcccaaa

SEQ ID NO: 662698 - DNA, 120 bp, Artificial Sequence
  ENSG00000184599_8 (sequence is synthesized)
gtccctgccctggcacctgagaacagcttcagaattgggctgaacttcagtgcccagcccacccccttgccctctcccaggttctccttcaccccctgcagagccatcggctccctctat

SEQ ID NO: 662699 - DNA, 120 bp, Artificial Sequence
  ENSG00000184601_0 (sequence is synthesized)
gttccagtggtgagcgttgggctgggagccaaggcttttcccaggagcccagccaccccgcctggctgtgttctgcctccgccctgcagaggaaaggccagcgaggcagtgtccatggtc

SEQ ID NO: 662700 - DNA, 120 bp, Artificial Sequence
  ENSG00000184601_1 (sequence is synthesized)
ccagtcttcttccaccggaagaaggcacaacctgcatctgcagccccagggccattgggttaggcctgtggccaaactactaaggtgctgggagactgaggaggcccagctcctcctggg

SEQ ID NO: 662701 - DNA, 120 bp, Artificial Sequence
  ENSG00000184601_2 (sequence is synthesized)
gccaccaagcccgtggttgacggcctccccatggaccgggctgtcccgagagcagcaagtcagccggggccctcagggccgctgaggccactgctcagtgtcgccgtaatggaaacttct

SEQ ID NO: 662702 - DNA, 120 bp, Artificial Sequence
  ENSG00000184601_3 (sequence is synthesized)
cagctggttgtgagccgcaacagctctggttcacaccctgcgacagcgaggctgtgaccgccagtggatctcggggctgatcaggcctgagccaccccggaggtacagcaccagcaggag

SEQ ID NO: 662703 - DNA, 120 bp, Artificial Sequence
  ENSG00000184601_4 (sequence is synthesized)
cccaggaccatgttccagtaaatgaggactgcagcaggagccgtgagccctgactcccggccagagacacgacgtcagaccagaaagaatgaggaggccgcgtggggcccgcgggtgtgc

SEQ ID NO: 662704 - DNA, 120 bp, Artificial Sequence
  ENSG00000184601_5 (sequence is synthesized)
agggcagagagggaggacaacaggaagtgccccccctccatcctgaaacggagccggccggagcaccaccgcccagaggccaagccccagaggacctcgaggcgcgtgtggttccgagaa

SEQ ID NO: 662705 - DNA, 120 bp, Artificial Sequence
  ENSG00000184601_6 (sequence is synthesized)
cccccagcggtgaccgtccactacattgctgacaagaacgccacagccactgtcagggtgcccggccggcccaggccacacggcggctccctgctcctgcagctgtgtgtgtgcgtcctg

SEQ ID NO: 662706 - DNA, 120 bp, Artificial Sequence
  ENSG00000184601_7 (sequence is synthesized)
ctcgtgctggccctgggcctatactgcggccgggccaagcccgtggcaacggcactggaggacctgcgggcccggctcctcggccttgtcctgcacctgcggcacgtggccctcacctgc

SEQ ID NO: 662707 - DNA, 120 bp, Artificial Sequence
  ENSG00000184601_8 (sequence is synthesized)
agcctgagccctggccctgctgcttggtgaatcatgggggccaaaaggggctgctgcctgagggctaactaggaaaagggggaccccgtggcgtgagatcggacatggggggcacagcag

SEQ ID NO: 662708 - DNA, 120 bp, Artificial Sequence
  ENSG00000184601_9 (sequence is synthesized)
gcggccccgccacactagtcagcacagccctcctgtctcctgtgttgggtccatgtgagattttattagaaagaggattcgactgctaacagttgaggctccccaggctcacccaaagac

SEQ ID NO: 662709 - DNA, 120 bp, Artificial Sequence
  ENSG00000184601_10 (sequence is synthesized)
ccctccctcgtcccagcaggaactcctgctgctgctagggcctggcccggccatcaccgtgtgcaccctcttgaggagggggacacactgcccgtgttcaaggggctgctcggaggaggc

SEQ ID NO: 662710 - DNA, 120 bp, Artificial Sequence
  ENSG00000184601_11 (sequence is synthesized)
aaacccagccttttgcgattatggcttgtggggaatccagacctcgaaaccccacggggagggaagggtctggttgtcaaggtgggtccctttgatgtgaggtgccatcctctgagccca

SEQ ID NO: 662711 - DNA, 120 bp, Artificial Sequence
  ENSG00000184601_12 (sequence is synthesized)
ggtctgacccccctacccagccccgtgagtctggagaggccccagggaaggacccctcatcaggggcggcttcaggtgtagaagccgaggggacagcaaggggcccagacacccccgacc

SEQ ID NO: 662712 - DNA, 120 bp, Artificial Sequence
  ENSG00000184601_13 (sequence is synthesized)
ttcagaacagccatctgtgcccagctctgcaggccaggcacacccagctgagcccggggccagccagcaccacccaccagctggggcctgtgggtcccggagaccgtctgtggttgtggc

SEQ ID NO: 662713 - DNA, 120 bp, Artificial Sequence
  ENSG00000184601_14 (sequence is synthesized)
tttgtcgccggattgcagagctgaagggagccctgtggatgacaaacaccaggggcctctccagaccctacgtggggggagggctgaacaaagcagggaggcccacggttagacaccagg

SEQ ID NO: 662714 - DNA, 120 bp, Artificial Sequence
  ENSG00000184601_15 (sequence is synthesized)
cagaactgcccaggagagacacagggacaatcagaccagcgtcctcgaggttagcctgaggcgggtgggcacggccgaccatccacccggtggttcctgtttgtcccaccacttaactgg

SEQ ID NO: 662715 - DNA, 120 bp, Artificial Sequence
  ENSG00000184601_16 (sequence is synthesized)
agaggtaattatagcctggccgctgccagctggcccagctttgcgatccagcagagagggctggagacgggacgaaggccacaacagacccggccctgccagcgggcggtggcgcctcca

SEQ ID NO: 662716 - DNA, 120 bp, Artificial Sequence
  ENSG00000184601_17 (sequence is synthesized)
gatcagagccctcgggaaggaggcctgggcgggcctggcccgttcacctgtgtgccctgcagttctgcccgaggctcaactctcaagggcctgggaggggtgctgccggccaagagggtc

SEQ ID NO: 662717 - DNA, 120 bp, Artificial Sequence
  ENSG00000184601_18 (sequence is synthesized)
aagcggatgtcctgggcgcctggaacctccccatctcctgcaggcctgggagtggatgtgtccactcgggcaggggctgaccaagcccctgggtcttgagggatgcccggccggctccct

SEQ ID NO: 662718 - DNA, 120 bp, Artificial Sequence
  ENSG00000184601_19 (sequence is synthesized)
ttgccctgcagtcagggtgtgtccctgcaactccaggtgccagggaacaggtgaagtggtctccagggtcacttccagctttggaatccagggagcccagagttgcgggtggaggtaaca

SEQ ID NO: 662719 - DNA, 120 bp, Artificial Sequence
  ENSG00000184601_20 (sequence is synthesized)
aaaggggctgtttccagaagtggcccagaagggaccatggtgggggctcccccggggaccctccagcatctctccccaggcccagcccatcccaccccaccccaggaaggaggatgggca

SEQ ID NO: 662720 - DNA, 120 bp, Artificial Sequence
  ENSG00000184601_21 (sequence is synthesized)
ggttcctgccccatattctggatgcagaagcagcggctcccagaggttgggtctctcagagcagtcacaggcccaggctcagccctgtgtgcttgggacacccctccagccccggttctg

SEQ ID NO: 662721 - DNA, 120 bp, Artificial Sequence
  ENSG00000184601_22 (sequence is synthesized)
acgggggacaccgcacaggccgatctcccccagccgctgctgtctgtccactgcaaaggcaacgcaaggacgtgcctggctttgcggggtcccacgctacgacctcaggtgttttcgaat

SEQ ID NO: 662722 - DNA, 120 bp, Artificial Sequence
  ENSG00000184602_0 (sequence is synthesized)
gggcgggcggagccgggcccgcggggctgctgcggggcgatcgggccgggccgctgccgcgccatggactcccgtgtccagcctgagttccagcctcactgagtggccacccccaaagtg

SEQ ID NO: 662723 - DNA, 120 bp, Artificial Sequence
  ENSG00000184602_1 (sequence is synthesized)
gagtggccacccccaaagtgctgccagccgaggaagcccccagcactgaccatgtctattatggaccacagccccaccacgggcgtggtcacagtcatcgtcatcctcattgccatcgcg

SEQ ID NO: 662724 - DNA, 120 bp, Artificial Sequence
  ENSG00000184602_2 (sequence is synthesized)
gccctgggggccttgatcctgggctgctggtgctacctgcggctgcagcgcatcagccagtcagaggacgaggagagcatcgtgggggatggggagaccaaggaacccttcctgctggtg

SEQ ID NO: 662725 - DNA, 120 bp, Artificial Sequence
  ENSG00000184602_3 (sequence is synthesized)
cagtattcggccaagggaccgtgcgtggagagaaaggccaagctgatgactcccaacggcccggaagtccacggctgagccaggatgcaaggctcctggtcctgtttgcagccggccaag

SEQ ID NO: 662726 - DNA, 120 bp, Artificial Sequence
  ENSG00000184602_4 (sequence is synthesized)
aggcgctgggaggggcaaaaccatacggatgcgctgctgtctgagaggaagggctgacacttgctggcatggcctctgcgggcttcgtcatcgcatgcactgatgcccggggacctggct

SEQ ID NO: 662727 - DNA, 120 bp, Artificial Sequence
  ENSG00000184602_5 (sequence is synthesized)
gtcctgggcttcccctcggcctccaggtgaggctgcccattgcaggcactgggcaggcctgaccttgctggggctcatggccctgtagcgcttttgttacttgaatgtctagctgagcct

SEQ ID NO: 662728 - DNA, 120 bp, Artificial Sequence
  ENSG00000184602_6 (sequence is synthesized)
gtttttgatggagctactactgtaatgcgtgaactaacaaacctgtgaactgtaaataggcccctggaagcacgtgcttaagcccttttgctgatttttaaaaatatcatctagcgcaca

SEQ ID NO: 662729 - DNA, 120 bp, Artificial Sequence
  ENSG00000184602_7 (sequence is synthesized)
cgggactggtattctggctgtactaatgacaagctgagtcaagaccctggagggtcataggcttgtaaaggcccacgccacactcggcaggggtctctcatgtgtgtccatctgcgtgta

SEQ ID NO: 662730 - DNA, 120 bp, Artificial Sequence
  ENSG00000184602_8 (sequence is synthesized)
tgtcaaggaagtgagatgccaatttggggtcttgaggctgaccagttggggtgcttgggtgatctctgcttcattagtcatgggtggaagaaaaaccacaccccccgcacccctccgttc

SEQ ID NO: 662731 - DNA, 120 bp, Artificial Sequence
  ENSG00000184602_9 (sequence is synthesized)
tttctgcatagactcacttgttaaatagcagttctgttgagagtggagttactgcagggaagctaccggacctgcctgggagccagtgaagggcgagtcagggcacgcgtcctggaggct

SEQ ID NO: 662732 - DNA, 120 bp, Artificial Sequence
  ENSG00000184602_10 (sequence is synthesized)
gccagcgtccttgtagcagagcagtttcttgccgcttgggtcttcagcacgccaagccccccaccaaccctccaccccgagtgaaggcttcgctgaaattgctttggtcctcatagagcc

SEQ ID NO: 662733 - DNA, 120 bp, Artificial Sequence
  ENSG00000184602_11 (sequence is synthesized)
tgtggtggctacttttggtctgaaacccacttggcccaggaaagagaaaaggttgtatgttttgtgttggtgtttcctattttctgcactggaggggaggggactgttgaggttctgtct

SEQ ID NO: 662734 - DNA, 120 bp, Artificial Sequence
  ENSG00000184602_12 (sequence is synthesized)
tttttcttcttttcctcttccctcttcacatcacttggcttcctttcctctctgatgaccgtccgcctatggggttctgacttcactttcctcagcgggtctccagtcccctgacccagc

SEQ ID NO: 662735 - DNA, 120 bp, Artificial Sequence
  ENSG00000184602_13 (sequence is synthesized)
aacatttctcacgtgcacattcccctaagagccaccagactgcttcctgccagcctgtgcttgcggcagggagccggggcagggcagaggtgaacttgaagttcaggacttgactctccc

SEQ ID NO: 662736 - DNA, 120 bp, Artificial Sequence
  ENSG00000184602_14 (sequence is synthesized)
acaggtggtgagctggtggctctctggtgagctagtgtctccacagcctgtctccaaggcctcccctatgtacatttcagtgagctcactttgatttttaatcccaccacaagcacatac

SEQ ID NO: 662737 - DNA, 120 bp, Artificial Sequence
  ENSG00000184602_15 (sequence is synthesized)
taattttatttatgattcaaatgtgactcgtgcctgcccatccctgtaatagatggaaggtcagccccggcttaaccacagagcactggcccttcatggctgagctcagagctctggcct

SEQ ID NO: 662738 - DNA, 120 bp, Artificial Sequence
  ENSG00000184602_16 (sequence is synthesized)
cctgctcagactaaaggcacctcctctggcctcacccaagcctcttctaaaaaccatgttgaatgaatccacgttctggaaccccgaggcgggagaagtagggagctgttcgtttaagca

SEQ ID NO: 662739 - DNA, 120 bp, Artificial Sequence
  ENSG00000184602_17 (sequence is synthesized)
gcatacacctaaattgggggtttaaacattaagtaggagcttggggtggaagagggacagccggctgggccacctgagcagaaggtggtaatgaaacacctcagctgggctcttgggaga

SEQ ID NO: 662740 - DNA, 120 bp, Artificial Sequence
  ENSG00000184602_18 (sequence is synthesized)
ccttaggaagcaggagaggcaacacctctggctactgatggtgtggcaagttcagaagaggtggtggtggggtaggcgtgatgtcagcagaagccctgcaggctgggtgggcaggacacg

SEQ ID NO: 662741 - DNA, 120 bp, Artificial Sequence
  ENSG00000184602_19 (sequence is synthesized)
tggtgggggccactgaaaccaggcctaggagggagaacaagttccaaaggtgccgactggaagaagggggtaaaagtttgctttggtgagtgagaaaaggctggggcgtgtgatccatcc

SEQ ID NO: 662742 - DNA, 120 bp, Artificial Sequence
  ENSG00000184602_20 (sequence is synthesized)
cctcacgtttcagaacttccaggctttctacctcgactctcaccacagccagcacatacacctaggctgtttttccttcctccacacctgagggacgcagcaacagctaggatctgcatt

SEQ ID NO: 662743 - DNA, 120 bp, Artificial Sequence
  ENSG00000184602_21 (sequence is synthesized)
ttcaggttccgagcctgacccctggaactgaccagcgctcgattgtcagccttggcctggggttttgaccttgccagtgaagtttcggttttgaagtgattaaatgtcacttcctcatca

SEQ ID NO: 662744 - DNA, 120 bp, Artificial Sequence
  ENSG00000184602_22 (sequence is synthesized)
gtttcacttctggaggttttcttatcctactccctggtgccagggacgtacctgggagtttgaatcaggcccatttgagcgtggcagccgtgttgggtgaaggtccggggctcggtgagg

SEQ ID NO: 662745 - DNA, 120 bp, Artificial Sequence
  ENSG00000184602_23 (sequence is synthesized)
cactgggggggttttcgggaggaaaatgaaaatgcttctagaatgagtgaaccacatcatagctctcactgttttttcaatagctactttttttagcagacaccagagccacactcaaat

SEQ ID NO: 662746 - DNA, 120 bp, Artificial Sequence
  ENSG00000184602_24 (sequence is synthesized)
ggctaagtaggttatgacctctctggattatttttgaatgcccaactgttgcattcaagttttctgactaataagaaattaagcattcatccttcgtatcactgcagaagcaacagtggg

SEQ ID NO: 662747 - DNA, 120 bp, Artificial Sequence
  ENSG00000184602_25 (sequence is synthesized)
ggcacagggagggaactcttgacactgagccactaaaatatggactaattttttggacaaatcttcaaacggactgtgctactgtatttgtctcaaagctaccaagtttgtgcaataagt

SEQ ID NO: 662748 - DNA, 120 bp, Artificial Sequence
  ENSG00000184602_26 (sequence is synthesized)
ggaagggatgtcatccttcttcaataaatgctgaatgacattcaagctgattttctagaccactgagaaaatctttatttacaataaatttcaataaaatttgcataaatatattcccaa

SEQ ID NO: 662749 - DNA, 120 bp, Artificial Sequence
  ENSG00000184611_0 (sequence is synthesized)
acccccaaaccctctcacccgcggcagtccggtgcgaggccccctccggaaggtgaggggaatggattggactccggtggggaaagcgggtgtctagaagtggtgctaatgggaagagaa

SEQ ID NO: 662750 - DNA, 120 bp, Artificial Sequence
  ENSG00000184611_1 (sequence is synthesized)
ttctggtttcaaaagaggatgctctgccacaaagagcggctcgcgcgctggcctgggctctagccgaggagagatcccgggagaactccagagctccgggggagcgctcctcggaagacc

SEQ ID NO: 662751 - DNA, 120 bp, Artificial Sequence
  ENSG00000184611_2 (sequence is synthesized)
ggggccaacatgcctgtgcgcagggggcatgtggcaccacaaaatacatttctggggaccatcattcggaaatttgaagggcaaaataaaaaatttatcattgcaaatgccagagtgcag

SEQ ID NO: 662752 - DNA, 120 bp, Artificial Sequence
  ENSG00000184611_3 (sequence is synthesized)
aactgtgccatcatttattgcaacgatgggttctgtgagatgactggtttctccaggccagatgtcatgcaaaagccatgcacctgcgactttctccatggacccgagaccaagaggcat

SEQ ID NO: 662753 - DNA, 120 bp, Artificial Sequence
  ENSG00000184611_4 (sequence is synthesized)
gatattgcccaaattgcccaggcattgctggggtcagaagagaggaaagtggaggtcacctactatcacaaaaatgggtccacttttatttgtaacactcacataattccagtgaaaaac

SEQ ID NO: 662754 - DNA, 120 bp, Artificial Sequence
  ENSG00000184611_5 (sequence is synthesized)
caagagggcgtggctatgatgttcatcattaattttgaatatgtgacggataatgaaaacgctgccaccccagagagggtaaacccaatattaccaatcaaaactgtaaaccggaaattt

SEQ ID NO: 662755 - DNA, 120 bp, Artificial Sequence
  ENSG00000184611_6 (sequence is synthesized)
tttgggttcaaattccctggtctgagagttctcacttacagaaagcagtccttaccacaagaagaccccgatgtggtggtcatcgattcatctaaacacagtgatgattcagtagccatg

SEQ ID NO: 662756 - DNA, 120 bp, Artificial Sequence
  ENSG00000184611_7 (sequence is synthesized)
aagcattttaagtctcctacaaaagaaagctgcagcccctctgaagcagatgacacaaaagctttgatacagcccagcaaatgttctcccttggtgaatatatccggacctcttgaccat

SEQ ID NO: 662757 - DNA, 120 bp, Artificial Sequence
  ENSG00000184611_8 (sequence is synthesized)
tcctctcccaaaaggcaatgggaccgactctaccctgacatgctgcagtcaagttcccagctgtcccattccagatcaagggaaagcttatgtagtatacggagagcatcttcggtccat

SEQ ID NO: 662758 - DNA, 120 bp, Artificial Sequence
  ENSG00000184611_9 (sequence is synthesized)
gatatagaaggattcggcgtccaccccaagaacatatttagagaccgacatgccagcgaagacaatggtcgcaatgtcaaagggccttttaatcatatcaagtcaagcctcctgggatcc

SEQ ID NO: 662759 - DNA, 120 bp, Artificial Sequence
  ENSG00000184611_10 (sequence is synthesized)
acatcagattcaaacctcaacaaatacagcaccattaacaagattccacagctcactctgaatttttcagaggtcaaaactgagaaaaagaattcatcacctccttcttcagataaaacc

SEQ ID NO: 662760 - DNA, 120 bp, Artificial Sequence
  ENSG00000184611_11 (sequence is synthesized)
attattgcacccaaggttaaagatcgaacacacaatgtgactgagaaagtgacccaggttctctctttaggagcagatgtcctacctgaatacaaactgcagacaccacgcatcaacaag

SEQ ID NO: 662761 - DNA, 120 bp, Artificial Sequence
  ENSG00000184611_12 (sequence is synthesized)
tttacgatattgcactacagccctttcaaggcagtctgggactggcttatcctgctgttggtcatatacactgctatatttactccctactctgcagccttcctcctcaatgacagagaa

SEQ ID NO: 662762 - DNA, 120 bp, Artificial Sequence
  ENSG00000184611_13 (sequence is synthesized)
gaacagaaaagacgagaatgtggctattcttgtagccctttgaatgtggtagacttgattgtggatattatgtttatcatagatattttaataaacttcagaacaacatatgtaaatcag

SEQ ID NO: 662763 - DNA, 120 bp, Artificial Sequence
  ENSG00000184611_14 (sequence is synthesized)
aatgaagaagtggtaagtgatcccgccaaaatagcaatacactacttcaaaggctggttcctgattgacatggttgcagcaattccttttgacttgctgatttttggatcaggttctgat

SEQ ID NO: 662764 - DNA, 120 bp, Artificial Sequence
  ENSG00000184611_15 (sequence is synthesized)
gagacaacaacattaattggtcttttgaagactgcccgactcctccgtcttgtgcgcgtggccaggaaactggatcgatattcagaatatggcgctgctgttctaatgctcttaatgtgc

SEQ ID NO: 662765 - DNA, 120 bp, Artificial Sequence
  ENSG00000184611_16 (sequence is synthesized)
atctttgccctgattgctcactggctggcttgcatttggtatgcgattgggaatgtagaaaggccttacctgactgacaaaatcggatggttggattccttaggacagcaaattgggaaa

SEQ ID NO: 662766 - DNA, 120 bp, Artificial Sequence
  ENSG00000184611_17 (sequence is synthesized)
ttattttaccttcagcagtttaaccagtgtaggattcgggaatgtgtctcctaacacgaattcggagaaaatcttttcaatttgtgtcatgttgattggctcactaatgtatgcaagcat

SEQ ID NO: 662767 - DNA, 120 bp, Artificial Sequence
  ENSG00000184611_18 (sequence is synthesized)
ttttgggaatgtatctgcaattatccaaagactatactcgggaactgccaggtaccacatgcagatgctgcgagtaaaagagttcattcgctttcaccaaatccccaaccctctgaggca

SEQ ID NO: 662768 - DNA, 120 bp, Artificial Sequence
  ENSG00000184611_19 (sequence is synthesized)
acgtcttgaagaatatttccagcacgcatggacttacaccaatggcattgacatgaacatggtcctaaagggtttcccagaatgcttacaagcagacatttgtctacatctcaaccagac

SEQ ID NO: 662769 - DNA, 120 bp, Artificial Sequence
  ENSG00000184611_20 (sequence is synthesized)
attgctgcaaaactgcaaagcctttcggggggcaagtaaaggttgccttagagctttggcaatgaagttcaaaaccacccatgcacctccaggagacaccctcgttcactgtggggatgt

SEQ ID NO: 662770 - DNA, 120 bp, Artificial Sequence
  ENSG00000184611_21 (sequence is synthesized)
cctcactgcactttatttcttatccagaggctccattgaaattctcaaagatgacattgtggtggctattctgggaaaaaatgatatatttggagaaatggttcatctttatgccaaacc

SEQ ID NO: 662771 - DNA, 120 bp, Artificial Sequence
  ENSG00000184611_22 (sequence is synthesized)
tggaaagtctaatgcagatgtaagagccctcacatactgtgacttgcataagattcagcgagaagacttgttagaggttttggatatgtatcctgagttttctgatcactttctaacaaa

SEQ ID NO: 662772 - DNA, 120 bp, Artificial Sequence
  ENSG00000184611_23 (sequence is synthesized)
cctagagttgactttcaacctaaggcatgagagcgcaaaggctgatctcctacgatcacaatccatgaatgattcagaaggagacaactgtaaactaagaagaaggaaattgtcatttga

SEQ ID NO: 662773 - DNA, 120 bp, Artificial Sequence
  ENSG00000184611_24 (sequence is synthesized)
aagtgaaggagagaaagaaaacagtacaaatgatcctgaagactctgcagataccataagacattatcagagttccaagagacactttgaagagaaaaaaagcagatcctcatctttcat

SEQ ID NO: 662774 - DNA, 120 bp, Artificial Sequence
  ENSG00000184611_25 (sequence is synthesized)
ctcctccattgatgatgaacaaaagccgctcttctcaggaatagtagactcttctccaggaatagggaaagcatctgggctcgattttgaagaaacagtgcccacctcaggaagaatgca

SEQ ID NO: 662775 - DNA, 120 bp, Artificial Sequence
  ENSG00000184611_26 (sequence is synthesized)
catagataaaagaagtcactcttgcaaagatatcactgacatgcgaagctgggaacgagaaaatgcacatccccagcctgaagactccagtccatctgcacttcagcgagctgcctgggg

SEQ ID NO: 662776 - DNA, 120 bp, Artificial Sequence
  ENSG00000184611_27 (sequence is synthesized)
tatctctgaaaccgaaagcgacctcacctacggggaagtggaacaaagattagatctgctccaggagcaacttaacaggcttgaatcccaaatgaccactgacatccagaccatcttaca

SEQ ID NO: 662777 - DNA, 120 bp, Artificial Sequence
  ENSG00000184611_28 (sequence is synthesized)
gttgctgcagaaacaaaccactgtggtccccccagcctacagtatggtaacagcaggatcagaatatcagagacccatcatccagctgatgagaaccagtcaaccggaagcatccatcaa

SEQ ID NO: 662778 - DNA, 120 bp, Artificial Sequence
  ENSG00000184611_29 (sequence is synthesized)
aactgaccgaagtttcagcccttcctcacaatgtcctgaatttctagaccttgaaaaatctaaacttaaatccaaagaatccctttcaagtggggtgcatctgaacacagcttcagaaga

SEQ ID NO: 662779 - DNA, 120 bp, Artificial Sequence
  ENSG00000184611_30 (sequence is synthesized)
caacttgacttcacttttaaaacaagacagtgatctctctttagagcttcacctgcggcaaagaaaaacttacgttcatccaattaggcatccttctttgccagattcatccctaagcac

SEQ ID NO: 662780 - DNA, 120 bp, Artificial Sequence
  ENSG00000184611_31 (sequence is synthesized)
tgtaggaatcgtgggtcttcataggcatgtttctgatcctggtcttccagggaaataatcattttgtactatttactccacatacaatgtaagtgcttttaatggctgttttcctttttc

SEQ ID NO: 662781 - DNA, 120 bp, Artificial Sequence
  ENSG00000184611_32 (sequence is synthesized)
tatttaaatcctctctacttgactcaggggctcacaaggtaccattatatgcaaaagtactgtatattttcctaaattgaagcttgtaaggtaaaactgagcagttaggatgtaaatata

SEQ ID NO: 662782 - DNA, 120 bp, Artificial Sequence
  ENSG00000184611_33 (sequence is synthesized)
cataagaacttttggttccaaatgttaaaactgccagcatctcacggcaccttattttttatttttattttttaaatcacatgcatgttaggaaactccaatttctcttgcatggagact

SEQ ID NO: 662783 - DNA, 120 bp, Artificial Sequence
  ENSG00000184611_34 (sequence is synthesized)
cctatttactgcttttactaaaccagtacttcgttatgaaaatgccttccacgcaaataagaaaccaagggataaaactgttcatggatgcaactcaaattcagatgatcctcaactcat

SEQ ID NO: 662784 - DNA, 120 bp, Artificial Sequence
  ENSG00000184611_35 (sequence is synthesized)
gacttacaccaatggcattgacatgaacatggtatgtatgtctgttttccaaaatgaaagtgccgcaggcattatagtgatagccaaaatggaataaaagccggaatcaccagctttgaa

SEQ ID NO: 662785 - DNA, 120 bp, Artificial Sequence
  ENSG00000184611_36 (sequence is synthesized)
gcttagtaaacaagtaacatgaatgaagaaggccaggagtaaaaatatagagagaagtgaagactggaaaactggagaacatctttatcttatttgaagtggcccataacccttcagctc

SEQ ID NO: 662786 - DNA, 120 bp, Artificial Sequence
  ENSG00000184611_37 (sequence is synthesized)
tacttcatggcagggacattttattttcttccatatagacctaatattttgcaaataattgcctgccaatggttcttcaagtgtgagaccatcagcatcaccttgcaatgtgtttgaagt

SEQ ID NO: 662787 - DNA, 120 bp, Artificial Sequence
  ENSG00000184611_38 (sequence is synthesized)
cacccaaggttaaagatcgaacacacaatgtgactgagaaagtgacccaggatctctttatccctacatcacgagggccttagtagaacacctggcagaatggagttcatcaaatgtttg

SEQ ID NO: 662788 - DNA, 120 bp, Artificial Sequence
  ENSG00000184611_39 (sequence is synthesized)
ctgaataaatgagtgcataaatggatggaagagttagccaagggaagggataagaattccaggtagaaaaaaacacaagaacaaagttatgaaagcagtaaagtccatatgactttttag

SEQ ID NO: 662789 - DNA, 120 bp, Artificial Sequence
  ENSG00000184611_40 (sequence is synthesized)
aacaagtggttttctgagctggcgagaggctagtctggaaaatttaccttcaaaataacacttttctaccttttcacataagtgccatgggggtttgagtaaaatgcaacagtttccatc

SEQ ID NO: 662790 - DNA, 120 bp, Artificial Sequence
  ENSG00000184613_0 (sequence is synthesized)
ggcccgcccctccctccccggaggagcagtctctccgcgcgtctcccggagctttctccattgtctctgcctttacaacaggttcgggcggcggggaagacgggggggtgcggggccgcc

SEQ ID NO: 662791 - DNA, 120 bp, Artificial Sequence
  ENSG00000184613_1 (sequence is synthesized)
ccagcccgggctttcttggggccgccccccttctaccgggtgtgcgagtctttggctgcttttattcggctcgggagctaattccccgacggagccgcgccggggcgagtccgacccctc

SEQ ID NO: 662792 - DNA, 120 bp, Artificial Sequence
  ENSG00000184613_2 (sequence is synthesized)
cctccgggccccctccgggccgcgctgccgcctcggccctgcgtgtgggaatgatgtgcgcattggagggtctaagttcttcacgcgcctggggaggcctcccttttctttcttaggcaa

SEQ ID NO: 662793 - DNA, 120 bp, Artificial Sequence
  ENSG00000184613_3 (sequence is synthesized)
ccaaagcgtattaatcctactgatcagtaaatccgaggcagcagcaggagagacaaacgttattttcccgcttgattccaagaacctcttcgatttttatttttatttttaaagagggag

SEQ ID NO: 662794 - DNA, 120 bp, Artificial Sequence
  ENSG00000184613_4 (sequence is synthesized)
acgatggactgagctgatccgcaccatggagtctcgggtcttactgagaacattctgtttgatcttcggtctcggagcagtttgggggcttggtgtggacccttccctacagattgacgt

SEQ ID NO: 662795 - DNA, 120 bp, Artificial Sequence
  ENSG00000184613_5 (sequence is synthesized)
cttaacagagttagaacttggggagtccacgaccggagtgcgtcaggtcccggggctgcataatgggacgaaagcctttctctttcaagatactcccagaagcataaaagcatccactgc

SEQ ID NO: 662796 - DNA, 120 bp, Artificial Sequence
  ENSG00000184613_6 (sequence is synthesized)
tacagctgaacagttttttcagaagctgagaaataaacatgaatttactattttggtgaccctaaaacagacccacttaaattcaggagttattctctcaattcaccacttggatcacag

SEQ ID NO: 662797 - DNA, 120 bp, Artificial Sequence
  ENSG00000184613_7 (sequence is synthesized)
gtacctggaactggaaagtagtggccatcggaatgaagtcagactgcattaccgctcaggcagtcaccgccctcacacagaagtgtttccttacattttggctgatgacaagtggcacaa

SEQ ID NO: 662798 - DNA, 120 bp, Artificial Sequence
  ENSG00000184613_8 (sequence is synthesized)
gctctccttagccatcagtgcttcccatttgattttacacattgactgcaataaaatttatgaaagggtagtagaaaagccctccacagacttgcctctaggcacaacattttggctagg

SEQ ID NO: 662799 - DNA, 120 bp, Artificial Sequence
  ENSG00000184613_9 (sequence is synthesized)
acagagaaataatgcgcatggatattttaagggtataatgcaagatgtccaattacttgtcatgccccagggatttattgctcagtgcccagatcttaatcgcacctgtccaacttgcaa

SEQ ID NO: 662800 - DNA, 120 bp, Artificial Sequence
  ENSG00000184613_10 (sequence is synthesized)
tgacttccatggacttgtgcagaaaatcatggagctacaggatattttagccaaaacatcagccaagctgtctcgagctgaacagcgaatgaatagattggatcagtgctattgtgaaag

SEQ ID NO: 662801 - DNA, 120 bp, Artificial Sequence
  ENSG00000184613_11 (sequence is synthesized)
gacttgcaccatgaagggaaccacctaccgagaatttgagtcctggatagacggctgtaagaactgcacatgcctgaatggaaccatccagtgtgaaactctaatctgcccaaatcctga

SEQ ID NO: 662802 - DNA, 120 bp, Artificial Sequence
  ENSG00000184613_12 (sequence is synthesized)
ctgcccacttaagtcggctcttgcgtatgtggatggcaaatgctgtaaggaatgcaaatcgatatgccaatttcaaggacgaacctactttgaaggagaaagaaatacagtctattcctc

SEQ ID NO: 662803 - DNA, 120 bp, Artificial Sequence
  ENSG00000184613_13 (sequence is synthesized)
ttctggagtatgtgttctctatgagtgcaaggaccagaccatgaaacttgttgagagttcaggctgtccagctttggattgtccagagtctcatcagataaccttgtctcacagctgttg

SEQ ID NO: 662804 - DNA, 120 bp, Artificial Sequence
  ENSG00000184613_14 (sequence is synthesized)
caaagtttgtaaaggttatgacttttgttctgaaaggcataactgcatggagaattccatctgcagaaatctgaatgacagggctgtttgtagctgtcgagatggttttagggctcttcg

SEQ ID NO: 662805 - DNA, 120 bp, Artificial Sequence
  ENSG00000184613_15 (sequence is synthesized)
ctactgtgaagacatcgatgagtgtgctgaagggcgccattactgtcgtgaaaatacaatgtgtgtcaacaccccgggttcttttatgtgcatctgcaaaactggatacatcagaattga

SEQ ID NO: 662806 - DNA, 120 bp, Artificial Sequence
  ENSG00000184613_16 (sequence is synthesized)
tgattattcatgtacagaacatgatgagtgtatcacaaatcagcacaactgtgatgaaaatgctttatgcttcaacactgttggaggacacaactgtgtttgcaagccgggctatacagg

SEQ ID NO: 662807 - DNA, 120 bp, Artificial Sequence
  ENSG00000184613_17 (sequence is synthesized)
gaatggaacgacatgcaaagcattttgcaaagatggctgtaggaatggaggagcctgtattgccgctaatgtgtgtgcctgcccacaaggcttcactggacccagctgtgaaacggacat

SEQ ID NO: 662808 - DNA, 120 bp, Artificial Sequence
  ENSG00000184613_18 (sequence is synthesized)
tgatgaatgctctgatggttttgttcaatgtgacagtcgtgctaattgcattaacctgcctggatggtaccactgtgagtgcagagatggctaccatgacaatgggatgttttcaccaag

SEQ ID NO: 662809 - DNA, 120 bp, Artificial Sequence
  ENSG00000184613_19 (sequence is synthesized)
tggagaatcgtgtgaagatattgatgagtgtgggaccgggaggcacagctgtgccaatgataccatttgcttcaatttggatggcggatatgattgtcgatgtcctcatggaaagaattg

SEQ ID NO: 662810 - DNA, 120 bp, Artificial Sequence
  ENSG00000184613_20 (sequence is synthesized)
cacaggggactgcatccatgatggaaaagttaagcacaatggtcagatttgggtgttggaaaatgacaggtgctctgtgtgctcatgtcagaatggattcgttatgtgtcgacggatggt

SEQ ID NO: 662811 - DNA, 120 bp, Artificial Sequence
  ENSG00000184613_21 (sequence is synthesized)
ctgtgactgtgagaatcccacagttgatcttttttgctgccctgaatgtgacccaaggcttagtagtcagtgcctccatcaaaatggggaaactttgtataacagtggtgacacctgggt

SEQ ID NO: 662812 - DNA, 120 bp, Artificial Sequence
  ENSG00000184613_22 (sequence is synthesized)
ccagaattgtcaacagtgccgctgcttgcaaggggaagttgattgttggcccctgccttgcccagatgtggagtgtgaattcagcattctcccagagaatgagtgctgcccgcgctgtgt

SEQ ID NO: 662813 - DNA, 120 bp, Artificial Sequence
  ENSG00000184613_23 (sequence is synthesized)
cacagacccttgccaggctgacaccatccgcaatgacatcaccaagacttgcctggacgaaatgaatgtggttcgcttcaccgggtcctcttggatcaaacatggcactgagtgtactct

SEQ ID NO: 662814 - DNA, 120 bp, Artificial Sequence
  ENSG00000184613_24 (sequence is synthesized)
ctgccagtgcaagaatggccacatctgttgctcagtggatccacagtgccttcaggaactgtgaagttaactgtctcatgggagatttctgttaaaagaatgttctttcattaaaagacc

SEQ ID NO: 662815 - DNA, 120 bp, Artificial Sequence
  ENSG00000184613_25 (sequence is synthesized)
aaaaagaagttaaaacttaaattgggtgatttgtgggcagctaaatgcagctttgttaatagctgagtgaactttcaattatgaaatttgtggagcttgacaaaatcacaaaaggaaaat

SEQ ID NO: 662816 - DNA, 120 bp, Artificial Sequence
  ENSG00000184613_26 (sequence is synthesized)
tactggggcaaaattagacctcaagtctgcctctactgtgtctcacatcaccatgtagaagaatgggcgtacagtatataccgtgacatcctgaaccctggatagaaagcctgagcccat

SEQ ID NO: 662817 - DNA, 120 bp, Artificial Sequence
  ENSG00000184613_27 (sequence is synthesized)
tggatctgtgaaagcctctagcttcactggtgcagaaaattttcctctagatcagaatcttcaagaatcagttaggttcctcactgcaagaaataaaatgtcaggcagtgaatgaattat

SEQ ID NO: 662818 - DNA, 120 bp, Artificial Sequence
  ENSG00000184613_28 (sequence is synthesized)
attttcagaagtaaagcaaagaagctataacatgttatgtacagtacactctgaaaagaaatctgaaacaagttattgtaatgataaaaataatgcacaggcatggttacttaatatttt

SEQ ID NO: 662819 - DNA, 120 bp, Artificial Sequence
  ENSG00000184613_29 (sequence is synthesized)
ctaacaggaaaagtcatccctatttccttgttttactgcacttaatattatttggttgaatttgttcagtataagctcgttcttgtgcaaaattaaataaatatttctcttaccttataa

SEQ ID NO: 662820 - DNA, 120 bp, Artificial Sequence
  ENSG00000184613_30 (sequence is synthesized)
ttagtcaacatttaatcacaaatgcaagccagtaagatgaaaattaatttacagttgaataccttatgtcaggagacaactggcctgattgcagttgtttgaaactgcacatattctaag

SEQ ID NO: 662821 - DNA, 120 bp, Artificial Sequence
  ENSG00000184613_31 (sequence is synthesized)
gagtggccgcagagctggggctggggaaagggatggctcccgcctcggggcagcatgggctggctggggaagcctcgcttttcccggacccaaagtaggtctggagtgggaagcttggag

SEQ ID NO: 662822 - DNA, 120 bp, Artificial Sequence
  ENSG00000184613_32 (sequence is synthesized)
taagggggcgggtttggatatggattttttttttttctgtgcttgccttggagaccgcgaggcggatcacgcccctagtccagggtcggagggctgagggggaactttgcagagagaagg

SEQ ID NO: 662823 - DNA, 120 bp, Artificial Sequence
  ENSG00000184613_33 (sequence is synthesized)
attgtctctgcctttacaacagagggagacgatggactgagctgatccgcaccatggagtctcgggtcttactgagaacattctgtttgatcttcggtctcggagcagaccgcgaggcgg

SEQ ID NO: 662824 - DNA, 120 bp, Artificial Sequence
  ENSG00000184613_34 (sequence is synthesized)
tcttcagttcccaatattgtcgcgaaaacgcggttctttgctgccctggaggaagagacttgcattttgatggagcttttcctttttctctctcccacctcatacccctcaccagtttgg

SEQ ID NO: 662825 - DNA, 120 bp, Artificial Sequence
  ENSG00000184613_35 (sequence is synthesized)
acttctttggatgctattttgaggatagactgaagggaatgatgatagcagggagaccagttaggatgatgacttagaccatggcagttgtgggtggagatggtaactgccagattctgt

SEQ ID NO: 662826 - DNA, 120 bp, Artificial Sequence
  ENSG00000184613_36 (sequence is synthesized)
ctatatattgagaagtagcaggcaggatgtactgagcaattggatgtgggatgtgagagaaatgactccaaggtttttggcctgagcaatcagaaggatccatctaacatttactgaaat

SEQ ID NO: 662827 - DNA, 120 bp, Artificial Sequence
  ENSG00000184613_37 (sequence is synthesized)
tctaaaagtgaaaaaagaaccttttagacattattattataaaatgtctataagaagacttctcattttaatcctcaaaatcactctggttatggattcctataagtgtatcctgttgaa

SEQ ID NO: 662828 - DNA, 120 bp, Artificial Sequence
  ENSG00000184613_38 (sequence is synthesized)
gtttgctgagctccttgaatctagggagacgatggactgagctgatccgcaccatggagtctcgggtcttactgagaacattctgtttgatcttcggtctcggagcagtttgggggcttg

SEQ ID NO: 662829 - DNA, 120 bp, Artificial Sequence
  ENSG00000184613_39 (sequence is synthesized)
gctcagttccccttgccttctgctgtatgctggtcccagagagcccgagtccgggtctccacgctttatttggcagggggcgcgcgggttccggagctgtccagcacctcctggccaagt

SEQ ID NO: 662830 - DNA, 120 bp, Artificial Sequence
  ENSG00000184613_40 (sequence is synthesized)
tctctgcgctctccgcgcccgggaagctctccgcgccggggaagctctccagcgccccgcccccggcagggaacctctccaccaggacacccggggcttcccaggctcgccatccgtccc

SEQ ID NO: 662831 - DNA, 120 bp, Artificial Sequence
  ENSG00000184613_41 (sequence is synthesized)
caccagtctctacctactttgcccagctccacctcggcagtgcagcgtgttttggtggccttcctccgcacgccctggagggggagtgccctgcaccccggggctgctccggagcccagt

SEQ ID NO: 662832 - DNA, 120 bp, Artificial Sequence
  ENSG00000184613_42 (sequence is synthesized)
gcacgagtgcacatgggcttccctcctttgcttaaagggcaggcgagcgctactcgctccagccttgcctcctgcagctgggtggtcttttttctctcctgtctttcaagacacgcgccc

SEQ ID NO: 662833 - DNA, 120 bp, Artificial Sequence
  ENSG00000184613_43 (sequence is synthesized)
atgaatactttctttggaaaaataaagcactgtattaataagtattcacccatcattggtttaatctgggcaagctaaatagctttcagaagtgatggaataaaggaagaatactttctc

SEQ ID NO: 662834 - DNA, 120 bp, Artificial Sequence
  ENSG00000184613_44 (sequence is synthesized)
ctttctctttcaaggtatgcccggcgtgctgcatccccactgtgatttcagttccgataaccccggcaggagttgctcttgccgcttgtcctaactttgtattgcctcatggatgacagt

SEQ ID NO: 662835 - DNA, 120 bp, Artificial Sequence
  ENSG00000184613_45 (sequence is synthesized)
actttagctgaggtgtagaagggccagtgtgagacacatatccctatctcttttaagtggttttttctcccctgcctcacccttctccttcgtactttgtactcttgccagttctaatgg

SEQ ID NO: 662836 - DNA, 120 bp, Artificial Sequence
  ENSG00000184613_46 (sequence is synthesized)
tataaatgaaaaactttaattaattttattcagttgtaatttgcatatgttttaagtgtgtatatggcttgatgagttttgacaatgtgtacatccacttacctaccatcacaattaata

SEQ ID NO: 662837 - DNA, 120 bp, Artificial Sequence
  ENSG00000184613_47 (sequence is synthesized)
tgcctatgttctttcctagttagtcccacaaccttagatccaggcaaaaactgcatccagtccctattgattaaatttgtattttctagagcctcatataaatggagttttatagtatat

SEQ ID NO: 662838 - DNA, 120 bp, Artificial Sequence
  ENSG00000184613_48 (sequence is synthesized)
actatattgtgtctgacttcattctctcaacattatgtttttgagattcaatcctattgtacctatatctctaatccatttctttttaataccgaataatatttcattgtatggatatac

SEQ ID NO: 662839 - DNA, 120 bp, Artificial Sequence
  ENSG00000184613_49 (sequence is synthesized)
caatgtatttatctatccacatgttgataaaattttattactaaccatgctaattttttcctagtcacagtatcatgtttgaatgactgcataaataaagtcagaatgaacatgctgtga

SEQ ID NO: 662840 - DNA, 120 bp, Artificial Sequence
  ENSG00000184613_50 (sequence is synthesized)
tgtgatgcgtgaaaagacctgggcactgctggctctggaacttggtctcgctggtacagattgttgccaaccttggaaactgaaataggccatttcgcacatggcacatcatccctctgt

SEQ ID NO: 662841 - DNA, 120 bp, Artificial Sequence
  ENSG00000184619_0 (sequence is synthesized)
tgctgcatgccttcattcctggtgccctctcttgtctcttccccagtcctgctgaagctgctctttagcccaggccccaagactatatggtccctgtggcagcagccaatgttgtttcag

SEQ ID NO: 662842 - DNA, 120 bp, Artificial Sequence
  ENSG00000184619_1 (sequence is synthesized)
gaagcaacagcatttgaaaatatgaccaaagattggaattatttagaaggctctcaaaaggattgctacagagacacaatgctggacagttatgagaacacggtcccacagggatccttc

SEQ ID NO: 662843 - DNA, 120 bp, Artificial Sequence
  ENSG00000184619_2 (sequence is synthesized)
ttacagctctccatgatgcctcagagagctggaaatgatccacctggggtttcaaatgcaagtgaaatggaaatggagataagtaacatgagagaaaagtttcttatgagtgtaacaaag

SEQ ID NO: 662844 - DNA, 120 bp, Artificial Sequence
  ENSG00000184619_3 (sequence is synthesized)
ttagtagaaagcaaaagttacaacagcaaggtattttccaaagaaaagtactttcaaacaataaaggaagttaaagaagctaaagaaaaagggaagaagtcatcacgtgattatcgccgt

SEQ ID NO: 662845 - DNA, 120 bp, Artificial Sequence
  ENSG00000184619_4 (sequence is synthesized)
gcagcaaaatatgatgtgatctctgtacagggcacagagaaactgatagaggctactcatggagaacgtgatcgaatacggtattatgtacataaggaagagttgtttgatattcttcat

SEQ ID NO: 662846 - DNA, 120 bp, Artificial Sequence
  ENSG00000184619_5 (sequence is synthesized)
gatacacatctcagtattggacatggtgggcggacacgcatgctcaaggagctgcaaggaaaatatgggaatgtcaccaaagaagttattgtcttatatctgactctgtgtaaacagtgc

SEQ ID NO: 662847 - DNA, 120 bp, Artificial Sequence
  ENSG00000184619_6 (sequence is synthesized)
caccagaagaacccagtacccaagagaggccttgcaccaaagcccatgacttttaaggacatagactccacatgccaagttgaaatacttgacatgcagtccagtgccgatggtgagttc

SEQ ID NO: 662848 - DNA, 120 bp, Artificial Sequence
  ENSG00000184619_7 (sequence is synthesized)
aagttcattttatactaccaggatcactcaaccaagtttattattttacggccattaagaaccaaacaggcccatgaggtggtcagtgtcttgttagatattttcacaattcttggtaca

SEQ ID NO: 662849 - DNA, 120 bp, Artificial Sequence
  ENSG00000184619_8 (sequence is synthesized)
ggttgttcatgagctcaatgagttgtggccagacctaaagattgtatctggtaagtaccaccctggccaaagccagggctccctggaaggagcaagccgtgatgtaaagaacatgataag

SEQ ID NO: 662850 - DNA, 120 bp, Artificial Sequence
  ENSG00000184619_9 (sequence is synthesized)
tacctggatgcagagtaaccactcatgtcactgggccaaaggcctccgattcatgcagatggtgaggaatcaggctttcgacgtttccttgcagcaaagtccatttgaggcaatgtttgg

SEQ ID NO: 662851 - DNA, 120 bp, Artificial Sequence
  ENSG00000184619_10 (sequence is synthesized)
ctataaagccaaatttgggctatattcctcaaacttgccccgggaaactgtggctactttacaaacggaagaagagctagaaattgctgaagaacagctagaaaatagcctttggatcag

SEQ ID NO: 662852 - DNA, 120 bp, Artificial Sequence
  ENSG00000184619_11 (sequence is synthesized)
gcaggaagaaagggctgagattggagcagacagatctgatatggacgatgacatggatcccactcctgaagcttcagaacccagcacctcacaagggacttccggtctcctctgctggtg

SEQ ID NO: 662853 - DNA, 120 bp, Artificial Sequence
  ENSG00000184619_12 (sequence is synthesized)
aacagatggctgctgggtggacagtcacaggtgtctctctgagcatagtcatctgagaactgttgccagaggccccagaggaaaagattgaaggctgcactctcaggtcaagttgtacat

SEQ ID NO: 662854 - DNA, 120 bp, Artificial Sequence
  ENSG00000184619_13 (sequence is synthesized)
ggcagtccttgctcaaaaagacaaaagttcaggtctgtgtatttattcttagggctgccataaaaaattaccacaacctggccgggcgcagcgctcatgcccgtaatcccagcactttgg

SEQ ID NO: 662855 - DNA, 71 bp, Artificial Sequence
  ENSG00000184619_14 (sequence is synthesized)
tagaaattagccaggcttggagctgtgtgcctgtaatcccagctaaccaggaggctgaggcaggagaatca

SEQ ID NO: 662856 - DNA, 120 bp, Artificial Sequence
  ENSG00000184619_15 (sequence is synthesized)
gcgtctggtgtgtccctttctccttcctgaccttcctcagtctgcagctcttttctccaccgcgcgcccgcctcagccgttcagccctgagctggcgggtggacgggcatggatccaggc

SEQ ID NO: 662857 - DNA, 120 bp, Artificial Sequence
  ENSG00000184619_16 (sequence is synthesized)
ggtgggagcagtctgcgaagtcagggtaggaaggctacacaaaggaggcgacatcccagcccggtcctcaggaataagcgggcgtgcccgtgtggtgtggacggtgaggggacactgtat

SEQ ID NO: 662858 - DNA, 120 bp, Artificial Sequence
  ENSG00000184619_17 (sequence is synthesized)
taagtgccttatctgcattatcattgaatcttcatagcaatcgattgtgatgggtactggtcatctccccgggttgtagatgaggaaactgaggcctcagtaactttgctttagtcagta

SEQ ID NO: 662859 - DNA, 120 bp, Artificial Sequence
  ENSG00000184619_18 (sequence is synthesized)
aatgataagagtcagcaaatgaattcccaagcgtagactcggccgtaccgctgctctaccttgctaataacgacctacctgtaagcgacatttttgacaaaatgtcctttaaacatcttt

SEQ ID NO: 662860 - DNA, 120 bp, Artificial Sequence
  ENSG00000184619_19 (sequence is synthesized)
tgtgctcagctctgtattcgtgggccctccaaagggggtacaggcaggtagaagcctccgtccctaccttataggttgtatatatctgaactggtcgactaaagatgcaaagcgaagtgc

SEQ ID NO: 662861 - DNA, 120 bp, Artificial Sequence
  ENSG00000184619_20 (sequence is synthesized)
tccagtgagtgtggtacaggttgttgagatgaaggagagatggcaatcagctaaagttactgaatacgtcaggaaggaggctggtttcagctggctgtgattgggaggatcaatgcgagg

SEQ ID NO: 662862 - DNA, 120 bp, Artificial Sequence
  ENSG00000184619_21 (sequence is synthesized)
acattccgagtcggaaacagccaaggcgaagactcacaggattctgccctgcccctccgctctgcatctgacagctgggatctcgggatcctgttttcctaagcttgctggaattcctgc

SEQ ID NO: 662863 - DNA, 120 bp, Artificial Sequence
  ENSG00000184619_22 (sequence is synthesized)
agtcctcatgtgaactcccctggcctcatcaccatcctgtcttacggctgttctgactaaggaatcccagtttagacaactgagtatcaagttctctccctaaggaattatctgatcaca

SEQ ID NO: 662864 - DNA, 120 bp, Artificial Sequence
  ENSG00000184619_23 (sequence is synthesized)
gtggcaggtagactccatttggggtatctcttttctgcaggataatctcctgacatatctttatgtacacagatataatatttccattggaaacagatcctgccacccctgttaggagtc

SEQ ID NO: 662865 - DNA, 120 bp, Artificial Sequence
  ENSG00000184619_24 (sequence is synthesized)
atcaagcctgcgcccaagttcacttggactctgctttattctggaaagattaataaatgggctacagctctggcagcgtcaaaactggccagaccaacagacctcccaggaaagcaaaac

SEQ ID NO: 662866 - DNA, 120 bp, Artificial Sequence
  ENSG00000184619_25 (sequence is synthesized)
aggctggagtgcagtggcgcagtcatggtctacttcagcctcaagctcctgagcctaagtgatccttccacctcagcctgccaagtagctgagactacagcatgtgccaccatgcctggc

SEQ ID NO: 662867 - DNA, 120 bp, Artificial Sequence
  ENSG00000184619_26 (sequence is synthesized)
tgccaccatgcctggctcattctatgggttttgacaaatgtaaaattacatgtagctaccattaaagtatcatacagaatagttgcactatcccaaaaatcccctgtactctagctagct

SEQ ID NO: 662868 - DNA, 120 bp, Artificial Sequence
  ENSG00000184619_27 (sequence is synthesized)
attcatccctcccttcctactccccaaactcctggaaaccactgatctttttactctctatagttctgccttttccaaaatgttatatatagtatgttcctttttcagactgccttctta

SEQ ID NO: 662869 - DNA, 120 bp, Artificial Sequence
  ENSG00000184634_0 (sequence is synthesized)
agtttccggcaatggtcgagagtttctaacgtgcccccttgttgtctctcggccgccgtcctctcaaccaccgccccccttttcggctccctctcccccttcccgttcccccagtcagcc

SEQ ID NO: 662870 - DNA, 120 bp, Artificial Sequence
  ENSG00000184634_1 (sequence is synthesized)
tggccctgctggtgcctccggcgctacgggctgggcaagatggcggccttcgggatcttgagctacgaacaccggcccctgaagcggccgcggctggggcctcccgatgtttaccctcag

SEQ ID NO: 662871 - DNA, 120 bp, Artificial Sequence
  ENSG00000184634_2 (sequence is synthesized)
gaccccaaacagaaggaggatgaactgacggccttgaatgtaaaacaaggtttcaataaccagcctgctgtctctggggatgagcatggcagtgccaagaacgtcagcttcaatcctgcc

SEQ ID NO: 662872 - DNA, 120 bp, Artificial Sequence
  ENSG00000184634_3 (sequence is synthesized)
aagatcagttccaacttcagcagcattattgcagagaaattacgttgtaatacccttcctgacactggtcgcaggaagccccaagtgaaccagaaggataacttctggctggtgactgca

SEQ ID NO: 662873 - DNA, 120 bp, Artificial Sequence
  ENSG00000184634_4 (sequence is synthesized)
cgatcccagagtgccattaacacttggttcactgacttggctggcaccaagccactcacgcaactagccaaaaaggtccccattttcagtaagaaggaagaggtgtttgggtacttagcc

SEQ ID NO: 662874 - DNA, 120 bp, Artificial Sequence
  ENSG00000184634_5 (sequence is synthesized)
aaatacacagtgcctgtgatgcgggctgcctggctcattaagatgacctgtgcctactatgcagcaatctctgagaccaaggttaagaagagacatgttgaccctttcatggaatggact

SEQ ID NO: 662875 - DNA, 120 bp, Artificial Sequence
  ENSG00000184634_6 (sequence is synthesized)
cagatcatcaccaagtacttatgggagcagttacagaagatggctgaatactaccggccagggcctgcaggaagtgggggctgtggttccacgatagggcccttgccccatgatgtagag

SEQ ID NO: 662876 - DNA, 120 bp, Artificial Sequence
  ENSG00000184634_7 (sequence is synthesized)
gtggcaatccggcagtgggattacaccgagaagctggccatgttcatgtttcaggatggaatgctggacagacatgagttcctgacctgggtgcttgagtgttttgagaagatccgccct

SEQ ID NO: 662877 - DNA, 120 bp, Artificial Sequence
  ENSG00000184634_8 (sequence is synthesized)
ggagaggatgaattgcttaaactgctgctgcctctgcttctccgatactctggggaatttgttcagtctgcatacctgtcccgccggcttgcctacttctgtacacggagactggccctg

SEQ ID NO: 662878 - DNA, 120 bp, Artificial Sequence
  ENSG00000184634_9 (sequence is synthesized)
cagctggatggtgtgagcagtcactcatctcatgttatatctgctcagtcaacaagcacgctacccaccacccctgctcctcagcccccaactagcagcacaccctcgactccctttagt

SEQ ID NO: 662879 - DNA, 120 bp, Artificial Sequence
  ENSG00000184634_10 (sequence is synthesized)
gacctgcttatgtgccctcagcaccggcccctggtttttggcctcagctgtatcctacagaccatcctcctgtgctgtcctagtgccttggtttggcactactcactgactgatagcaga

SEQ ID NO: 662880 - DNA, 120 bp, Artificial Sequence
  ENSG00000184634_11 (sequence is synthesized)
attaagaccggctcaccacttgaccacttgcctattgccccgtccaacctgcccatgccagagggtaacagtgccttcactcagcaggtccgtgcaaagttgcgggagatcgagcagcag

SEQ ID NO: 662881 - DNA, 120 bp, Artificial Sequence
  ENSG00000184634_12 (sequence is synthesized)
atcaaggagcggggacaggcagttgaagttcgctggtctttcgataaatgccaggaagctactgcaggcttcaccattggacgggtacttcatactttggaagtgctggacagccatagt

SEQ ID NO: 662882 - DNA, 120 bp, Artificial Sequence
  ENSG00000184634_13 (sequence is synthesized)
tttgaacgctctgacttcagcaactctcttgactccctttgtaaccgaatctttggattgggacctagcaaggatgggcatgagatctcctcagatgatgatgctgtggtgtcattgcta

SEQ ID NO: 662883 - DNA, 120 bp, Artificial Sequence
  ENSG00000184634_14 (sequence is synthesized)
tgtgaatgggctgtcagctgcaagcgttctggtcggcatcgtgctatggtggtagccaagctcctggagaagagacaggcggagattgaggctgagcgttgtggagaatcagaagccgca

SEQ ID NO: 662884 - DNA, 120 bp, Artificial Sequence
  ENSG00000184634_15 (sequence is synthesized)
gatgagaagggttccatcgcctctggctccctttctgctcccagtgctcccattttccaggatgtcctcctgcagtttctggatacacaggctcccatgctgacggaccctcgaagtgag

SEQ ID NO: 662885 - DNA, 120 bp, Artificial Sequence
  ENSG00000184634_16 (sequence is synthesized)
agtgagcgggtggaattctttaacttagtactgctgttctgtgaactgattcgacatgatgttttctcccacaacatgtatacttgcactctcatctcccgaggggaccttgcctttgga

SEQ ID NO: 662886 - DNA, 120 bp, Artificial Sequence
  ENSG00000184634_17 (sequence is synthesized)
gcccctggtccccggcctccctctccctttgatgatcctgccgatgacccagagcacaaggaggctgaaggcagcagcagcagcaagctggaagatccagggctctcagaatctatggac

SEQ ID NO: 662887 - DNA, 120 bp, Artificial Sequence
  ENSG00000184634_18 (sequence is synthesized)
attgaccctagttccagtgttctctttgaggacatggagaagcctgatttctcattgttctcccctactatgccctgtgaggggaagggcagtccatcccctgagaagccagatgtcgag

SEQ ID NO: 662888 - DNA, 120 bp, Artificial Sequence
  ENSG00000184634_19 (sequence is synthesized)
aaggaggtgaagcccccacccaaggagaagattgaagggacccttggggttctttacgaccagccacgacacgtgcagtacgccacccattttcccatcccccaggaggagtcatgcagc

SEQ ID NO: 662889 - DNA, 120 bp, Artificial Sequence
  ENSG00000184634_20 (sequence is synthesized)
catgagtgcaaccagcggttggtcgtactgtttggggtgggaaagcagcgagatgatgcccgccatgccatcaagaaaatcaccaaggatatcttgaaggttctgaaccgcaaagggaca

SEQ ID NO: 662890 - DNA, 120 bp, Artificial Sequence
  ENSG00000184634_21 (sequence is synthesized)
gcagaaactgaccagcttgctcctattgtgcctctgaatcctggagacctgacattcttaggtggggaggatgggcagaagcggcgacgcaaccggcctgaagccttccccactgctgaa

SEQ ID NO: 662891 - DNA, 120 bp, Artificial Sequence
  ENSG00000184634_22 (sequence is synthesized)
gatatctttgctaagttccagcacctttcacattatgaccaacaccaggtcacggctcaggtctcccggaatgttctggagcagatcacgagctttgcccttggcatgtcataccacttg

SEQ ID NO: 662892 - DNA, 120 bp, Artificial Sequence
  ENSG00000184634_23 (sequence is synthesized)
cctctggtgcagcatgtgcagttcatcttcgacctcatggaatattcactcagcatcagtggcctcatcgactttgccattcagctgctgaatgaactgagtgtagttgaggctgagctg

SEQ ID NO: 662893 - DNA, 120 bp, Artificial Sequence
  ENSG00000184634_24 (sequence is synthesized)
cttctcaaatcctcggatctggtgggcagctacactactagcctgtgcctgtgcatcgtggctgtcctgcggcactatcatgcctgcctcatcctcaaccaggaccagatggcacaggtc

SEQ ID NO: 662894 - DNA, 120 bp, Artificial Sequence
  ENSG00000184634_25 (sequence is synthesized)
tttgaggggctgtgtggcgtcgtgaagcatgggatgaaccggtccgatggctcctctgcagagcgctgtatccttgcttatctctatgatctgtacacctcctgtagccatttaaagaac

SEQ ID NO: 662895 - DNA, 120 bp, Artificial Sequence
  ENSG00000184634_26 (sequence is synthesized)
aaatttggggagctcttcagcgacttttgctcaaaggtgaagaacaccatctactgcaacgtggagccatcggaatcaaatatgcgctgggcacctgagttcatgatcgacactctagag

SEQ ID NO: 662896 - DNA, 120 bp, Artificial Sequence
  ENSG00000184634_27 (sequence is synthesized)
aaccctgcagctcacaccttcacctacacggggctaggcaagagtcttagtgagaaccctgctaaccgctacagctttgtctgcaatgcccttatgcacgtctgtgtggggcaccatgat

SEQ ID NO: 662897 - DNA, 120 bp, Artificial Sequence
  ENSG00000184634_28 (sequence is synthesized)
ttaaggccttgtgctgctcctctaacaatggcacttgtggtttcaacgatctcctctgcaatgttgatgtcagtgacctatcttttcatgactcgctggctacttttgttgccatcctca

SEQ ID NO: 662898 - DNA, 120 bp, Artificial Sequence
  ENSG00000184634_29 (sequence is synthesized)
tcgctcggcagtgtttgctcctggaagatctgattcgctgtgctgccatcccttcactccttaatgctgcttgtagtgaacaggactctgagccaggggcccggcttacctgccgcatcc

SEQ ID NO: 662899 - DNA, 120 bp, Artificial Sequence
  ENSG00000184634_30 (sequence is synthesized)
tccttcaccttttcaagacaccgcagctcaatccttgccagtctgatggaaacaagcctacagtaggaatccgctcctcctgcgaccgccacctgctggctgcctcccagaaccgcatcg

SEQ ID NO: 662900 - DNA, 120 bp, Artificial Sequence
  ENSG00000184634_31 (sequence is synthesized)
tggatggagccgtgtttgctgttctcaaggctgtgtttgtacttggggatgcggaactgaaaggttcaggcttcactgtgacaggaggaacagaagaacttccagaggaggagggaggag

SEQ ID NO: 662901 - DNA, 120 bp, Artificial Sequence
  ENSG00000184634_32 (sequence is synthesized)
gtggcagtggtggtcggaggcagggtggccgcaacatctctgtggagacagccagtctggatgtctatgccaagtacgtgctgcgcagcatctgccaacaggaatgggtaggagaacgtt

SEQ ID NO: 662902 - DNA, 120 bp, Artificial Sequence
  ENSG00000184634_33 (sequence is synthesized)
gccttaagtctctgtgtgaggacagcaatgacctgcaagacccagtgttgagtagtgcccaggcgcagcgcctcatgcagctcatttgctatccacatcgactgctggacaatgaggatg

SEQ ID NO: 662903 - DNA, 120 bp, Artificial Sequence
  ENSG00000184634_34 (sequence is synthesized)
gggaaaacccccagcggcagcgcataaagcgcattctccagaacttggaccagtggaccatgcgccagtcttccttggagctgcagctcatgatcaagcagacccctaacaatgagatga

SEQ ID NO: 662904 - DNA, 120 bp, Artificial Sequence
  ENSG00000184634_35 (sequence is synthesized)
actccctcttggagaacatcgccaaggccacaatcgaggttttccaacagtcagcagagacagggtcatcttctggaagtactgcaagcaacatgcccagcagcagcaagaccaagcctg

SEQ ID NO: 662905 - DNA, 120 bp, Artificial Sequence
  ENSG00000184634_36 (sequence is synthesized)
tgctcagctctctagagcgctctggtgtatggctggtggcccccctcattgctaaactgcccacctcagtccagggacatgtgttaaaggctgctggggaagaattggagaagggtcagc

SEQ ID NO: 662906 - DNA, 120 bp, Artificial Sequence
  ENSG00000184634_37 (sequence is synthesized)
acctgggttcctcttcacgcaaagaacgtgatcgacaaaagcagaagagcatgtccctattgagccagcagcccttcttatcgctggtgctaacatgtctgaaagggcaggatgaacaac

SEQ ID NO: 662907 - DNA, 120 bp, Artificial Sequence
  ENSG00000184634_38 (sequence is synthesized)
gcgagggactccttacctccctctacagccaggtgcaccagattgtgaataattggcgagatgaccagtacttagatgattgcaaaccaaagcagcttatgcatgaggcactcaaactgc

SEQ ID NO: 662908 - DNA, 120 bp, Artificial Sequence
  ENSG00000184634_39 (sequence is synthesized)
ggctcaacctggtggggggcatgtttgacacggtgcagcgcagcacccagcagaccacggagtgggccatgctcctcctggagatcatcatcagcggcactgtcgacatgcagtccaaca

SEQ ID NO: 662909 - DNA, 120 bp, Artificial Sequence
  ENSG00000184634_40 (sequence is synthesized)
atgagctcttcactactgtgttggacatgctgagcgtgctcatcaatgggacattggctgcagacatgtctagcatctcgcaaggtagcatggaggaaaacaagcgtgcatacatgaacc

SEQ ID NO: 662910 - DNA, 120 bp, Artificial Sequence
  ENSG00000184634_41 (sequence is synthesized)
tggcgaagaagttgcagaaggagttgggggagcgccagtcagacagtctggaaaaggttcgccagctgctgccactgcccaagcagacccgagatgtcatcacgtgtgagccacagggct

SEQ ID NO: 662911 - DNA, 120 bp, Artificial Sequence
  ENSG00000184634_42 (sequence is synthesized)
cccttatcgataccaagggcaacaagattgctggcttcgattccatcttcaagaaggagggtctacaggtttccaccaaacagaagatctcgccctgggatctttttgaggggttgaagc

SEQ ID NO: 662912 - DNA, 120 bp, Artificial Sequence
  ENSG00000184634_43 (sequence is synthesized)
cgtcagcaccactctcttggggctggtttggaacagtccgagtggaccggcgagtggctcgaggagaggagcagcagcggttgctgctctaccacacacacctgaggccccggccccgcg

SEQ ID NO: 662913 - DNA, 120 bp, Artificial Sequence
  ENSG00000184634_44 (sequence is synthesized)
cctattacctggagccactgccactgcccccagaagatgaggagccgcctgctcctaccctgctagagcctgagaaaaaggctccagagccccccaaaactgacaaaccgggggctgctc

SEQ ID NO: 662914 - DNA, 120 bp, Artificial Sequence
  ENSG00000184634_45 (sequence is synthesized)
cacccagtactgaggaacgcaagaagaagtccaccaagggcaagaaacgcagccagccagctaccaagacagaggactatggaatgggcccgggtcggagcggcccttatggtgtgacag

SEQ ID NO: 662915 - DNA, 120 bp, Artificial Sequence
  ENSG00000184634_46 (sequence is synthesized)
tgcctccggacctcctgcaccacccaaaccctggttctataacacaccttaactacaggcaaggctccataggcctgtacacccagaaccagccactacctgcaggtggccctcgtgtgg

SEQ ID NO: 662916 - DNA, 120 bp, Artificial Sequence
  ENSG00000184634_47 (sequence is synthesized)
acccataccgtcctgtgcgcttaccaatgcagaagctgcccacccgaccaacttaccctggagtgctgcccacaaccatgactggcgtcatgggtttagaaccctcctcttataagacct

SEQ ID NO: 662917 - DNA, 120 bp, Artificial Sequence
  ENSG00000184634_48 (sequence is synthesized)
ctgtgtaccggcagcagcaacctgcggtgccccaaggacagcgccttcgccaacagctccagcagagtcagggcatgttgggacagtcatctgtccatcagatgactcccagctcttcct

SEQ ID NO: 662918 - DNA, 120 bp, Artificial Sequence
  ENSG00000184634_49 (sequence is synthesized)
acggtttgcagacttcccagggctatactccttatgtttctcatgtgggattgcagcaacacacaggccctgcaggtaccatggtgccccccagctactccagccagccttaccagagca

SEQ ID NO: 662919 - DNA, 120 bp, Artificial Sequence
  ENSG00000184634_50 (sequence is synthesized)
cccacccttctaccaatcctactcttgtagatcctacccgccacctgcaacagcggcccagtggctatgtgcaccagcaggcccccacctatggacatggactgacctccactcaaaggt

SEQ ID NO: 662920 - DNA, 120 bp, Artificial Sequence
  ENSG00000184634_51 (sequence is synthesized)
tttcacaccagacactgcagcagacacccatgataagtaccatgactccaatgagtgcccagggcgtccaggcaggcgtccgttcaacagccatcctacctgagcagcagcagcagcagc

SEQ ID NO: 662921 - DNA, 120 bp, Artificial Sequence
  ENSG00000184634_52 (sequence is synthesized)
aacagcagcaacagcaacagcagcagcagcagcaacagcaacagcagcagcagcagcagcagtaccacatccggcagcagcagcagcagcagatcctgcggcagcagcagcaacagcaac

SEQ ID NO: 662922 - DNA, 120 bp, Artificial Sequence
  ENSG00000184634_53 (sequence is synthesized)
agcagcagcagcagcagcagcaacagcaacagcagcagcagcaacagcaacaacagcaacaccagcagcaacagcagcaacaggcggctcctccccaaccccagccccagtcccagcccc

SEQ ID NO: 662923 - DNA, 120 bp, Artificial Sequence
  ENSG00000184634_54 (sequence is synthesized)
agttccagcgccaggggcttcagcagacccagcagcagcaacagacagcagctttggtccggcaacttcaacaacagctctctaatacccagccacagcccagtaccaacatatttggac

SEQ ID NO: 662924 - DNA, 120 bp, Artificial Sequence
  ENSG00000184634_55 (sequence is synthesized)
gctactgagccacctggaggaactgcttgtgcactggatgtggccccaccctttcctcttaattcccaatcccattcctgggctagcaccagtagtggttggggccctcccctcaggctc

SEQ ID NO: 662925 - DNA, 120 bp, Artificial Sequence
  ENSG00000184634_56 (sequence is synthesized)
catttttaataagtttttagtatttttgttaatgtgaggcattgagctgttgggttttgtatattatttatatagagaccccagagctgttgcacccaatacacagagcttctttgcaaa

SEQ ID NO: 662926 - DNA, 120 bp, Artificial Sequence
  ENSG00000184634_57 (sequence is synthesized)
ccccttccagtgtcatcctttcctccttccctggttctttcctctctccactcccatctcactcccactgcccttatcaggtctcccggaatgttctggagcagatcacgagctttgccc

SEQ ID NO: 662927 - DNA, 120 bp, Artificial Sequence
  ENSG00000184634_58 (sequence is synthesized)
cttcactccttaatgctggtgaactaccaatctgtaacccctagcatttctagacctcaaatttcaatacacactggacggccatcctctcattgttcactgtgggagaccttgctgcgg

SEQ ID NO: 662928 - DNA, 120 bp, Artificial Sequence
  ENSG00000184634_59 (sequence is synthesized)
ttggggagctcttcaggtaagagaggtggaaggtaaggggtagcgagtgggacctactcccttcttcccatgaccacccaactcaggaggagaggatggcccgggaccctgctgcctgtc

SEQ ID NO: 662929 - DNA, 120 bp, Artificial Sequence
  ENSG00000184634_60 (sequence is synthesized)
tagggtcatttgtggactgtgtcctccacatactgttgtgttaccaagagtgggccctcttcctcagcaggcttgctccccgcctatatctgtggggcccaccctcttcccccttttcct

SEQ ID NO: 662930 - DNA, 120 bp, Artificial Sequence
  ENSG00000184635_0 (sequence is synthesized)
gtctctcggtgcagccggagctccaggtctcctcttcactactctgtgtcctgtgctcctacaggcccagcctctgtggccctgtgacctgcaggtattgggagatccacagctaagaca

SEQ ID NO: 662931 - DNA, 84 bp, Artificial Sequence
  ENSG00000184635_1 (sequence is synthesized)
cctgtgacctgcaggtattgggagatccacagctaagacaccaggacccctggaagcctagaaatgggaccattgcaatttaga

SEQ ID NO: 662932 - DNA, 120 bp, Artificial Sequence
  ENSG00000184635_2 (sequence is synthesized)
tgttagagaactacagtaacctggtcttccttggtattgttgtctctaagccagacctgatcgcccatctggagcaaggaaaaaaacctttgactatgaagagacatgagatggtagcca

SEQ ID NO: 662933 - DNA, 120 bp, Artificial Sequence
  ENSG00000184635_3 (sequence is synthesized)
acccctcagttatatgttctcattttgcccaagatctttggccagagcagaacataaaagattctttccaaaaagtgatactgagaagatatgaaaaacgtggacatggaaatttacagt

SEQ ID NO: 662934 - DNA, 120 bp, Artificial Sequence
  ENSG00000184635_4 (sequence is synthesized)
taataaaaaggtgtgaaagtgtagatgagtgtaaggtgcacacaggaggttataatggacttaaccagtgtagtacaactacccagagcaaagtatttcaatgtgataaatatgggaaag

SEQ ID NO: 662935 - DNA, 120 bp, Artificial Sequence
  ENSG00000184635_5 (sequence is synthesized)
tctttcataaattttcaaattcaaatagacataatataagacatactgaaaaaaaacctttcaaatgcatagaatgtggcaaagcttttaaccagttctcaacccttataacacataaga

SEQ ID NO: 662936 - DNA, 86 bp, Artificial Sequence
  ENSG00000184635_6 (sequence is synthesized)
aaattcatactggagagaaaccctacatttgtgaagaatgtggcaaagcctttaagtactcctctgcccttaatacaagtgtgata

SEQ ID NO: 662937 - DNA, 120 bp, Artificial Sequence
  ENSG00000184635_7 (sequence is synthesized)
actggagagaaaccatacaagtgtgataaatgtgacaaagcctttattgcatcctcaacccttagtaaacatgagatcattcatactggaaagaaaccctacaagtgtgaagaatgtggc

SEQ ID NO: 662938 - DNA, 89 bp, Artificial Sequence
  ENSG00000184635_8 (sequence is synthesized)
tcctcaacacttactaaacataagaaaattcatactggagagaagccctacgtttgtgaagaatgtggcaaagcctttaagtactcccg

SEQ ID NO: 662939 - DNA, 82 bp, Artificial Sequence
  ENSG00000184635_9 (sequence is synthesized)
cttactaaacataagaaaattcatactggagagaagccctacgtttgtgaagaatgtggcaaagcctttaagtactcccgta

SEQ ID NO: 662940 - DNA, 89 bp, Artificial Sequence
  ENSG00000184635_10 (sequence is synthesized)
ccatacaagtgtaataaatgtggcaaagcctttattgcatcctcaacccttagtagacatgagttcattcatatgggaaagaaacattt

SEQ ID NO: 662941 - DNA, 69 bp, Artificial Sequence
  ENSG00000184635_11 (sequence is synthesized)
aatgtgaagaatgtggcaaagcctttaagtactcctctacccttagttcacataagagaattgcatcct

SEQ ID NO: 662942 - DNA, 72 bp, Artificial Sequence
  ENSG00000184635_12 (sequence is synthesized)
aatgtgaagaatgtggcaaagcctttgttgcatcctcaacccttagtaaacatgagatcattcatactggaa

SEQ ID NO: 662943 - DNA, 77 bp, Artificial Sequence
  ENSG00000184635_13 (sequence is synthesized)
taagaaaattcatactacctatccacacaccttactacacataagatacttcatactggagagaaaccttatagatg

SEQ ID NO: 662944 - DNA, 120 bp, Artificial Sequence
  ENSG00000184635_14 (sequence is synthesized)
cacataagatacttcatactggagagaaaccttatagatgtagagaatgtggcaaagcttttaaccattctgcaaccctttcttcacataagaaaatccattctggagagaaaccatacg

SEQ ID NO: 662945 - DNA, 120 bp, Artificial Sequence
  ENSG00000184635_15 (sequence is synthesized)
agtgtgataaatgtggcaaagcctttatttcaccctcaagccttagtagacatgagataattcatactggggagaaaccctagaagtgtgaagaatgtggcaaagccttcaagtggtcct

SEQ ID NO: 662946 - DNA, 120 bp, Artificial Sequence
  ENSG00000184635_16 (sequence is synthesized)
cacaccttactatacactgagagttctgaacttactctgtaaccatcccaaactcctcccaggcacagtctggcagaggtcctgccatttcggagacctggaggaagtggcccatttaca

SEQ ID NO: 662947 - DNA, 120 bp, Artificial Sequence
  ENSG00000184635_17 (sequence is synthesized)
gccatgtaggcaggcctgcagaccttggcctttactacggtacctgaagtggttcaatgactcagtttcagttacctgagccacagcttaaggtcagttctgcctatatagaaacccaca

SEQ ID NO: 662948 - DNA, 120 bp, Artificial Sequence
  ENSG00000184635_18 (sequence is synthesized)
cagttaacctgaggaaatgctctctggtactcactgaaagccacactcatccacatcctgatacaaggcccaccatatgcagacctgactgccaaaacatgccctagtgtctgccgtaca

SEQ ID NO: 662949 - DNA, 120 bp, Artificial Sequence
  ENSG00000184635_19 (sequence is synthesized)
gagtgaagtcctgaaggatatttagtctgtccaaaactaaaatgaagatttcaactccccaaccccctctaacaagccagctaaaggtggactatagtgcagacccagcaaccttgtgac

SEQ ID NO: 662950 - DNA, 120 bp, Artificial Sequence
  ENSG00000184635_20 (sequence is synthesized)
caggctaaaacccctcatcactacaaattcagagggcatctcatcaccctaagggcccaacgaaagatctttaccttctaacatcagtttatgaaaacttgaaaaggtgtttgctccatc

SEQ ID NO: 662951 - DNA, 120 bp, Artificial Sequence
  ENSG00000184635_21 (sequence is synthesized)
aaattcagacaccagtacaaaactatattatgcccattgtctggttctattttaatgtagcactggaagtgtgtggcagaagaattagtcaaagaaataaaaatagccattgaaattgaa

SEQ ID NO: 662952 - DNA, 120 bp, Artificial Sequence
  ENSG00000184635_22 (sequence is synthesized)
actactctgtgtcctgtgctcctacaggcccagcctctgtggccctgtgacctgcaggtattgggagatccacagctaagacaccaggacccctggaagcctagaaatggccacaaaaac

SEQ ID NO: 662953 - DNA, 120 bp, Artificial Sequence
  ENSG00000184635_23 (sequence is synthesized)
tgggaggtcaagccaagaggatccctggagcccaaaagtttgagaacagcctgggcaacatatggagacccctctctatgaaaaaaatttaataatagccaggcatggtggtgtgcagct

SEQ ID NO: 662954 - DNA, 120 bp, Artificial Sequence
  ENSG00000184635_24 (sequence is synthesized)
ccaggtctcctcttcactactctgtgtcctgtgctcctacaggcccagcctctgtggccctgtgacctgcaggtcagagggacacagagcctgggcctctaggagcagacgacacagagt

SEQ ID NO: 662955 - DNA, 120 bp, Artificial Sequence
  ENSG00000184635_25 (sequence is synthesized)
agtgaagaccagacctggagctcccgctgcagcgagagacaaaggccccaccaaacccagaagtcgtcctgttcgcttcagcttcatgcctgatttgaggatttcctgcccagcgtccct

SEQ ID NO: 662956 - DNA, 120 bp, Artificial Sequence
  ENSG00000184635_26 (sequence is synthesized)
gactggataatgcttaaggctccgccccttcaggccctgagtgacagaagatgtcatcagatgctgggctgagtgaagaaagactgacaacctaagctgcagccttttcagatgagtggc

SEQ ID NO: 662957 - DNA, 120 bp, Artificial Sequence
  ENSG00000184635_27 (sequence is synthesized)
tcctccatagcctgggaataacctatctactaatggtcagcacctgtgtctttgtgtctgaagccaagaataaattcatcacctgggtagccaccgctgcaactgaagccatccacagtc

SEQ ID NO: 662958 - DNA, 120 bp, Artificial Sequence
  ENSG00000184635_28 (sequence is synthesized)
aatgttggctatatgttgagttgccggaggctgcctgggatgggctatcttgaagaatcgtccctgacaacatttctgaatggctatattgttaccagtagggccacaacaacaacaaca

SEQ ID NO: 662959 - DNA, 120 bp, Artificial Sequence
  ENSG00000184635_29 (sequence is synthesized)
cttgcaatccaacctgggcttcctttcaccacactaagcaatctatctttgccaggtcagacaaaagatgaactccaccctcaccttgcatcaaaagtcttgatatcttgcccaataatc

SEQ ID NO: 662960 - DNA, 120 bp, Artificial Sequence
  ENSG00000184635_30 (sequence is synthesized)
cagtctcccaagtagatgggattacagttatatgttctcattttgcccaagatctttggccagagcagaacataaaagattctttccaaaaagtgatactgagaagatatgaaaaacgtg

SEQ ID NO: 662961 - DNA, 79 bp, Artificial Sequence
  ENSG00000184635_31 (sequence is synthesized)
ttagccaggcatggtggcccatgcctgtagtacgagctactcaggaggttgaggcaggggaatcactagaacccaggag

SEQ ID NO: 662962 - DNA, 120 bp, Artificial Sequence
  ENSG00000184635_32 (sequence is synthesized)
attatattgacattgttatgcaacatatcactagagtgttttttatcttgcaaagctaaatctcagtacacagtaaataactaccaatcctttgtattttgtggttcttttcaaacacca

SEQ ID NO: 662963 - DNA, 120 bp, Artificial Sequence
  ENSG00000184635_33 (sequence is synthesized)
ctctgttttctgtttctaagagtataactgctttatatatctcatccaatctctgtctttttgcggctgggtcactttattttgcataatgtcatcaatatttatcttaatagttgttac

SEQ ID NO: 662964 - DNA, 120 bp, Artificial Sequence
  ENSG00000184635_34 (sequence is synthesized)
agtattttctgctttttgaaaactgagtgataattcctgtacttttgtgtctactgaatgatttggtgacacaaatttcgattacttttacctagtggcttgcagtaacaatgctacaat

SEQ ID NO: 662965 - DNA, 120 bp, Artificial Sequence
  ENSG00000184635_35 (sequence is synthesized)
aattatgtgaaagttaatgtaatatatttgctgcattctgttttattagtctactttttcacctttatactcataccaaattattttaattctgtagctttttgatgtgttttgaaatca

SEQ ID NO: 662966 - DNA, 120 bp, Artificial Sequence
  ENSG00000184635_36 (sequence is synthesized)
gaaatggtattgcctgtaacattgttcctgtttttgaagattgctgggtactttattgtctgtttggattccatatacttttaaatttgttgtttttatttctttgaaaatgctgtgagt

SEQ ID NO: 662967 - DNA, 120 bp, Artificial Sequence
  ENSG00000184635_37 (sequence is synthesized)
catttgaaagacattgcattaaatctgtagattaaattgagcagtaaagacatcttcaaaatattgtttttcaattgtttgtttttgagatggagttaaatttacctgccttaccagtta

SEQ ID NO: 662968 - DNA, 120 bp, Artificial Sequence
  ENSG00000184635_38 (sequence is synthesized)
caccacagcctcccaaagtgctggaattacagaaatcctattagtatcccgtggtgtctgaatgaggtgggctgtcacagtgagaacttttgaagatatgtctatctggactcatgctga

SEQ ID NO: 662969 - DNA, 120 bp, Artificial Sequence
  ENSG00000184635_39 (sequence is synthesized)
cattataagtagaaactgaggctgaaacactgctcacattctgattattgtgaaggtgaaattctatccatgacgcctgcaggctctcctcctgcagctcagacgtcactctctgatgtg

SEQ ID NO: 662970 - DNA, 120 bp, Artificial Sequence
  ENSG00000184635_40 (sequence is synthesized)
acactagagtgctgctgtggcaaatggggttcacataaaatgtaagctgtgctctgggctgtgcctcagtggcagatggtagcggtaaagagaggacactagcaactaggagaaagtaaa

SEQ ID NO: 662971 - DNA, 120 bp, Artificial Sequence
  ENSG00000184635_41 (sequence is synthesized)
caggagtgctgtagcccagtgccagggagtacagagccactgctctaaaatgtaaatagccaaaaagaacactattcagccatttttgtagcagagtgaaagcctagcttcagcagacac

SEQ ID NO: 662972 - DNA, 120 bp, Artificial Sequence
  ENSG00000184635_42 (sequence is synthesized)
ctggcttcaagctgctaaaccaactcctgttatgaagatgtgaaaagtttatttgtcattgaatataagcaattagtatacacagatggcctcttcagtatccaggtgaatttaggatga

SEQ ID NO: 662973 - DNA, 120 bp, Artificial Sequence
  ENSG00000184640_0 (sequence is synthesized)
gccacactttcctgggagcggcggccacggaggcaccatgaagaagtcttactcaggaggcacgcggacctccagtggccggctccggaggcttggtgactccagtggcccagccttgaa

SEQ ID NO: 662974 - DNA, 120 bp, Artificial Sequence
  ENSG00000184640_1 (sequence is synthesized)
aagatcttttgaggtcgaggaggtcgagacacccaactccaccccaccccggagggtccagactcccctactccgagccactgtggccagctccacccagaaattccaggacctgggcgt

SEQ ID NO: 662975 - DNA, 120 bp, Artificial Sequence
  ENSG00000184640_2 (sequence is synthesized)
gaagaactcagaaccctcggcccgccatgtggactccctaagccaacgctcccccaaggcgtccctgcggagggtggagctctcgggccccaaggcggccgagccggtgtcccggcgcac

SEQ ID NO: 662976 - DNA, 120 bp, Artificial Sequence
  ENSG00000184640_3 (sequence is synthesized)
tgagctgtccattgacatctcgtccaagcaggtggagaacgccggggccatcggcccgtcccggttcgggctcaagagggccgaggtgttgggccacaagacgccagaaccggcccctcg

SEQ ID NO: 662977 - DNA, 120 bp, Artificial Sequence
  ENSG00000184640_4 (sequence is synthesized)
gaggacggagatcaccatcgtcaaaccccaggagtcagcccaccggaggatggagccccctgcctccaaggtccccgaggtgcccactgcccctgccaccgacgcagcccccaagagggt

SEQ ID NO: 662978 - DNA, 120 bp, Artificial Sequence
  ENSG00000184640_5 (sequence is synthesized)
ggagatccagatgcccaagcctgctgaggcgcccaccgcccccagcccagcccagaccttggagaattcagagcctgcccctgtgtctcagctgcagagcaggctggagcccaagcccca

SEQ ID NO: 662979 - DNA, 120 bp, Artificial Sequence
  ENSG00000184640_6 (sequence is synthesized)
gccccctgtggctgaggctacaccccggagccaggaggccactgaggcggctcccagctgcgttggcgacatggccgacacccccagagatgccgggctcaagcaggcgcctgcatcacg

SEQ ID NO: 662980 - DNA, 120 bp, Artificial Sequence
  ENSG00000184640_7 (sequence is synthesized)
gaacgagaaggccccggtggacttcggctacgtggggattgactccatcctggagcagatgcgccggaaggccatgaagcagggcttcgagttcaacatcatggtggtcgggcagagcgg

SEQ ID NO: 662981 - DNA, 120 bp, Artificial Sequence
  ENSG00000184640_8 (sequence is synthesized)
cttgggtaaatccaccttaatcaacaccctcttcaaatccaaaatcagccggaagtcggtgcagcccacctcagaggagcgcatccccaagaccatcgagatcaagtccatcacgcacga

SEQ ID NO: 662982 - DNA, 120 bp, Artificial Sequence
  ENSG00000184640_9 (sequence is synthesized)
tattgaggagaaaggcgtccggatgaagctgacagtgattgacacaccagggttcggggaccacatcaacaacgagaactgctggcagcccatcatgaagttcatcaatgaccagtacga

SEQ ID NO: 662983 - DNA, 120 bp, Artificial Sequence
  ENSG00000184640_10 (sequence is synthesized)
gaaatacctgcaggaggaggtcaacatcaaccgcaagaagcgcatcccggacacccgcgtccactgctgcctctacttcatccccgccaccggccactccctcaggcccctggacatcga

SEQ ID NO: 662984 - DNA, 120 bp, Artificial Sequence
  ENSG00000184640_11 (sequence is synthesized)
gtttatgaaacgcctgagcaaggtggtcaacatcgtccctgtcatcgccaaggcggacacactcaccctggaggagagggtccacttcaaacagcggatcaccgcagacctgctgtccaa

SEQ ID NO: 662985 - DNA, 120 bp, Artificial Sequence
  ENSG00000184640_12 (sequence is synthesized)
cggcatcgacgtgtacccccagaaggaatttgatgaggactcggaggaccggctggtgaacgagaagttccgggagatgatcccatttgctgtggtgggcagtgaccacgagtaccaggt

SEQ ID NO: 662986 - DNA, 120 bp, Artificial Sequence
  ENSG00000184640_13 (sequence is synthesized)
caacggcaagaggatccttgggaggaagaccaagtggggtaccatcgaagttgaaaacaccacacactgtgagtttgcctacctgcgggaccttctcatcaggacgcacatgcagaacat

SEQ ID NO: 662987 - DNA, 120 bp, Artificial Sequence
  ENSG00000184640_14 (sequence is synthesized)
caaggacatcaccagcagcatccacttcgaggcgtaccgtgtgaagcgcctcaacgagggcagcagcgccatggccaacggcatggaggagaaggagccagaagccccggagatgtagac

SEQ ID NO: 662988 - DNA, 120 bp, Artificial Sequence
  ENSG00000184640_15 (sequence is synthesized)
cccccgggatcctgcccccaagtcatttccgtccccccccaggccctcccaccaccccattttattttatatgattttctccatttgtcatcgttccccaccccttcgacatgctgccag

SEQ ID NO: 662989 - DNA, 120 bp, Artificial Sequence
  ENSG00000184640_16 (sequence is synthesized)
gaaacaagggaaggggcctccctccgagtgagtcagtgatgaggccgcggcctccccgaggttgtggggaggctgcactggagccacaggcaggggtgagagcacccactgaattgacat

SEQ ID NO: 662990 - DNA, 120 bp, Artificial Sequence
  ENSG00000184640_17 (sequence is synthesized)
gaccctctgtccccaggcctggctccccgagggctcagaagagcagcttcggtgtgcagatcatccgtctgtgtggggttctcagtgccggaggccttggggtgggggccaggcctcgca

SEQ ID NO: 662991 - DNA, 120 bp, Artificial Sequence
  ENSG00000184640_18 (sequence is synthesized)
cttgcagaggagcccagtgggctgcacgctcccctccatccccatcggccctgtcccctggagtgtgtcagagcccaggggagaatgcagcccaccaggagcacctggaccccctgcccg

SEQ ID NO: 662992 - DNA, 120 bp, Artificial Sequence
  ENSG00000184640_19 (sequence is synthesized)
ccacatggtgtggccatcactcagcccctacccctgccctgctcctaagggtagaaaactccagggtcccctgccaccgactgcccagccactccaagccccctggcagctgcccctcct

SEQ ID NO: 662993 - DNA, 120 bp, Artificial Sequence
  ENSG00000184640_20 (sequence is synthesized)
ggagcagaaagtgcctttatctcagccatccgcagactgcttggccagatgcggggacaggctggaatgagggaggcgtcttcatctccctgccatccccctctcacgccacccccgccc

SEQ ID NO: 662994 - DNA, 120 bp, Artificial Sequence
  ENSG00000184640_21 (sequence is synthesized)
ccaccgggctgcaggtgctgctgatgcgctgggatctgattgaggataaaaaggaaggagagatgacccctaccccctcatcccccagttttgaaaaggtctaagcaagtgagtctggtg

SEQ ID NO: 662995 - DNA, 120 bp, Artificial Sequence
  ENSG00000184640_22 (sequence is synthesized)
gaggagctgagggagggagccatggaaggtgccagaaggaaggttggcgggggcacgtgtgggccgtggcttgggctggtcagagtggcgtgagctgcccggcgcctgccctgcccaagt

SEQ ID NO: 662996 - DNA, 120 bp, Artificial Sequence
  ENSG00000184640_23 (sequence is synthesized)
gaccagggaagtgtgtgtgtgtccatgtgtatgcgtgtccgtctgtctgtctagtgtctgggtttggcccaagactgggctgtagttacattaatgcccagccagccacccctgccactc

SEQ ID NO: 662997 - DNA, 120 bp, Artificial Sequence
  ENSG00000184640_24 (sequence is synthesized)
acccttcctggcccaggccttgctgactctctgagctggggaggtgggaggccaggcgagcctgactctgttgatctacccgtgcctgggcccctcccctcagagcccatggtaacgaac

SEQ ID NO: 662998 - DNA, 120 bp, Artificial Sequence
  ENSG00000184640_25 (sequence is synthesized)
ccctagaaaggagagaacgggcgtcaggggtgcacagtccacagctgaagagcaaggtttcgtggcagcacggcccggcccctcaccctctgtccccacgaggggacccatgggggctgt

SEQ ID NO: 662999 - DNA, 120 bp, Artificial Sequence
  ENSG00000184640_26 (sequence is synthesized)
ctttgcagggcacagatgaccaaagtcccttcctgcttcctgttacctgtcttgctcctggggagaaagaggggcctgatgagactccactcaggtgcacacatcaccaggtgcatctgc

SEQ ID NO: 663000 - DNA, 120 bp, Artificial Sequence
  ENSG00000184640_27 (sequence is synthesized)
aggcaccgggctggctgcttgcagccaggagaaggtcagcgagaaggagtgtatgagtgtgagtgtgtgtgcatggaagttggggcactgggcgtctgactccctccccacccaagagag

SEQ ID NO: 663001 - DNA, 120 bp, Artificial Sequence
  ENSG00000184640_28 (sequence is synthesized)
gaaggacccctcaccacccccactggtgagacagtttactttgccaacttgccatgtttttgccaaaaccaagattttgaaggaaatgagtggccagcgccagggcccaggccatgtggc

SEQ ID NO: 663002 - DNA, 120 bp, Artificial Sequence
  ENSG00000184640_29 (sequence is synthesized)
ctgcccagcctcaatgtcacttggtggcggggtggggtgggggtgggcagcagcatcccagccttgagatgcttcactttccttctctgtaaccagactttgaaaaattgttcgtttcat

SEQ ID NO: 663003 - DNA, 120 bp, Artificial Sequence
  ENSG00000184640_30 (sequence is synthesized)
caggctctgttcctcaatggccttttgctacgtgcctcccgagaaatttgtctttttgtataaatgacaaagtgttgaaaatgtatttcctgaaataaatgtttcaaatgcagaaaccca

SEQ ID NO: 663004 - DNA, 120 bp, Artificial Sequence
  ENSG00000184640_31 (sequence is synthesized)
tgcctctgtcactgcagactaatgggacggaggggggtgacttctcagggttcctcctgggcaggtgctccggaaccttttctcagcacgctggcctggggcacggccgttcctcctgcc

SEQ ID NO: 663005 - DNA, 120 bp, Artificial Sequence
  ENSG00000184640_32 (sequence is synthesized)
cagccacgttggggtacagggtgaagaagggctggggccagcccaggacagaggaaggcgaggcaggcacgcaggaactgggctttttaaacccttaagcccaaggaaatcgtagcatcg

SEQ ID NO: 663006 - DNA, 120 bp, Artificial Sequence
  ENSG00000184640_33 (sequence is synthesized)
cgggacagggaaaatgaaagactttggaagtcgtcaggaatttgactctgtgagttggtttccaagagtctaagttaagcatctccaagtggatattaaaaaggagcagcaagcctcggg

SEQ ID NO: 663007 - DNA, 120 bp, Artificial Sequence
  ENSG00000184640_34 (sequence is synthesized)
gcggcgggggctggaggaggtggagagaggaggctgccggaagccgcactcgggacctctgcagccaccgaccagaccgggcggccgggactctgggactctcgcaggcagacccggtgg

SEQ ID NO: 663008 - DNA, 120 bp, Artificial Sequence
  ENSG00000184640_35 (sequence is synthesized)
tctgccggactcctcggggcccacttcgggccctctctcctgcctcctatttttggatttctctcctttgctccctttttcctcccgttttgaagagacaatgctacttcagtttggagc

SEQ ID NO: 663009 - DNA, 120 bp, Artificial Sequence
  ENSG00000184640_36 (sequence is synthesized)
acaaacatatgatcagcacatggaaatgtggtaattcggatgcattcgtgattgcaacagattgaagaaattagaccagacaaagagtgtttttagaggaggaggaggaggaggaggagg

SEQ ID NO: 663010 - DNA, 120 bp, Artificial Sequence
  ENSG00000184640_37 (sequence is synthesized)
ctgagagagggagggcgacgggggtgagaaaggggaggccgcctctgagcgggacgccgggactcccgccgctgctaaatatatccgtaggaatggagagggaccggatctcagccttga

SEQ ID NO: 663011 - DNA, 80 bp, Artificial Sequence
  ENSG00000184640_38 (sequence is synthesized)
ccccaggcctggccttgacaggcgggcggagcagccagtgcgagacagggaggccggtgcgggtgcgggaacctgatccg

SEQ ID NO: 663012 - DNA, 120 bp, Artificial Sequence
  ENSG00000184640_39 (sequence is synthesized)
aggggccggcgcccgccttcctcccccattcattcagctgagccagggggcctaggggctcctccggcggctagctctgcactgcaggagcgcgggcgcggcgccccagccagcgcgcag

SEQ ID NO: 663013 - DNA, 120 bp, Artificial Sequence
  ENSG00000184640_40 (sequence is synthesized)
ggcccgggccccgccgggggcgcttcctcgccgctgccctccgcgcgacccgctgcccaccagccatcatgtcggaccccgcggtcaacgcgcagctggatgggatcatttcggacttcg

SEQ ID NO: 663014 - DNA, 120 bp, Artificial Sequence
  ENSG00000184640_41 (sequence is synthesized)
gtcagtatggaggaggcggaccttgagggagagtaggaattggattgcaagaggaaggagagccttctggccagcagcagccagcagcagtgggggaggctggaatgagctggctggaga

SEQ ID NO: 663015 - DNA, 120 bp, Artificial Sequence
  ENSG00000184640_42 (sequence is synthesized)
gggggctggggcataaggaggggcctgcctgtgaagatcatatgggccaggctgcggagggccaggcatgcccgccgggagtgcagctggtccacgggaagcatctggagtggctgggaa

SEQ ID NO: 663016 - DNA, 120 bp, Artificial Sequence
  ENSG00000184640_43 (sequence is synthesized)
actgggcggcccttagacccaggctgcctgctgtctctggcaggaactcaagtcgctggtcatcctcagagcggtgttggcccggggccttcagtggcctttgtgtctgggtgagaggaa

SEQ ID NO: 663017 - DNA, 120 bp, Artificial Sequence
  ENSG00000184640_44 (sequence is synthesized)
ccctggatggccactctgccctgagtgtgtgggtccccagaagtgctgggttagggggcacggagggccagaaagtcccctttggagcgctggactctctcgctgactcctaccccaccc

SEQ ID NO: 663018 - DNA, 120 bp, Artificial Sequence
  ENSG00000184640_45 (sequence is synthesized)
cggcctggggtttcagagaaggggtccaggcaggagtgtcatcttttctcaatggggatgtggcttcagtctctgtccaggtgggaggcacgcggacctccagtggccggctccggaggc

SEQ ID NO: 663019 - DNA, 120 bp, Artificial Sequence
  ENSG00000184640_46 (sequence is synthesized)
gtgccttcaggttgcttctgcgccgggcctgccgctgggcgcccctatctctgcctgccccctcctcctgctcccctcgccctgcccccttggagcaattccccaccgagcctcccttcc

SEQ ID NO: 663020 - DNA, 120 bp, Artificial Sequence
  ENSG00000184640_47 (sequence is synthesized)
caggcagtcgaggtccctccctacctctgccccgcgctctgggaggctccttgttccgcgaccacaaagcccctttgatcctctgctcggctctgagccatgtgacccggtgggcgggcc

SEQ ID NO: 663021 - DNA, 120 bp, Artificial Sequence
  ENSG00000184640_48 (sequence is synthesized)
acatgtaagcctttcccatacaccccggatgtttagggcttccgccctctctccctggccgggagtgtgggaagagggctttatttcaatgcttgagagtagggtcaatggccagggtaa

SEQ ID NO: 663022 - DNA, 120 bp, Artificial Sequence
  ENSG00000184640_49 (sequence is synthesized)
gctgtgggggctcctccccgccggcccctctctgcagccctcaccttaacacagagcatcgataccacctgggctttgggaagacctggaggctgaccaccctggaggctcccagcgtcc

SEQ ID NO: 663023 - DNA, 120 bp, Artificial Sequence
  ENSG00000184640_50 (sequence is synthesized)
cacagccactctttggggaagaggcttcctgagggacttgtggcccttggctgggactctagtcccagagttctgccttccggcgccgagctttgatttgtttattgagtgccagcccgg

SEQ ID NO: 663024 - DNA, 120 bp, Artificial Sequence
  ENSG00000184640_51 (sequence is synthesized)
ggagctgagctgtccaggagcaggagctggtgctggtcactccagtatcccccagactgagggcagtgccaggtgtcctatactcagctgcagagcaggtggttcccctgccctcctgcc

SEQ ID NO: 663025 - DNA, 120 bp, Artificial Sequence
  ENSG00000184640_52 (sequence is synthesized)
catggggctgccctcagactctgcttttggcaccagcatttctgggcagggggagagaggtggggtccgggcagagtttctccactgggacattaaagcccctcctgtctcctctcctag

SEQ ID NO: 663026 - DNA, 120 bp, Artificial Sequence
  ENSG00000184640_53 (sequence is synthesized)
cagcgtccaggcccagcccctatagtgtcagctccctcctctggggacccccttgcttgtgcccctctgggtcccagcacatcccaggcctgcagggagggggagaggaagagactgact

SEQ ID NO: 663027 - DNA, 120 bp, Artificial Sequence
  ENSG00000184640_54 (sequence is synthesized)
aatgcgaggcacttccacaggaggggacaaccccgtccttaggagccccttctccctgcccccaggcctggtgcagtgtgtggcttccctgccggtgtcaaaggtctcaaggccccttta

SEQ ID NO: 663028 - DNA, 120 bp, Artificial Sequence
  ENSG00000184640_55 (sequence is synthesized)
gccagcaagcacctggggtagaggggacaaacccaggtggctgtgttccagccctggctgcaggtctgaatggctttctggggtggctggccatgctccctgagagcccagctgtggcga

SEQ ID NO: 663029 - DNA, 120 bp, Artificial Sequence
  ENSG00000184640_56 (sequence is synthesized)
aattagtcacttcttcctctgtacgttggaaacaccgctttatcgtggagactttaaggatatccaagtagagagaattcttccgtgcaagttttgcatcctctcaccactgcctgcgtt

SEQ ID NO: 663030 - DNA, 120 bp, Artificial Sequence
  ENSG00000184640_57 (sequence is synthesized)
acccgagttgtaaagggcggctccctgtgtctgccccgctgcaccgatacaccgagctgcgcacggtgcccagcgcagggagaacaaatgatcatctgtccaacgcgcccatttacagcc

SEQ ID NO: 663031 - DNA, 120 bp, Artificial Sequence
  ENSG00000184640_58 (sequence is synthesized)
agttaccatcgtggggagactgtctggacgcagagagcaggctctgtgtgggagcggggagggcaagccctggttgcgaggcagggcttccccaggattcagcagggatctgaaggactt

SEQ ID NO: 663032 - DNA, 120 bp, Artificial Sequence
  ENSG00000184640_59 (sequence is synthesized)
tgcaggcacccagggagataggagaggaggagggagcagccctggccggacactgtcctcctagcattgcctgcatcagggactcactcagctttaagaagcccctttgtgggggacagg

SEQ ID NO: 663033 - DNA, 120 bp, Artificial Sequence
  ENSG00000184640_60 (sequence is synthesized)
gagcatctgttagtttataggacctgaagtgcccccatgggctcaagtttctgggaaggcctgcaggtggccgtagggctgccgcaggggtgctggccccagggtctggattcaggggag

SEQ ID NO: 663034 - DNA, 120 bp, Artificial Sequence
  ENSG00000184640_61 (sequence is synthesized)
cctgcagagggagggcagctggaggctgctccagtgtgcattgttacgaggcaaagtaaggagactgctgggcccacgctgggccggggtggatggaggcaaggaagtcttcgccggggc

SEQ ID NO: 663035 - DNA, 120 bp, Artificial Sequence
  ENSG00000184640_62 (sequence is synthesized)
aagggcaccagctgtagatgccggcagctttctcctggacacgggcctggaaggctgacagggtgtggtgagtgccaccggctcccctgccgtggcctggtcagtggcttcacaggcctc

SEQ ID NO: 663036 - DNA, 120 bp, Artificial Sequence
  ENSG00000184640_63 (sequence is synthesized)
gggaagacagtctcttctgctgacccagagcctgtgggccacgcctgagccagggactcgtggaacctcatccactgccttgccccacccagagggaggggtctccttgtccccattcaa

SEQ ID NO: 663037 - DNA, 120 bp, Artificial Sequence
  ENSG00000184640_64 (sequence is synthesized)
gagacgggtgaggggaaggcactgaaattggtcctggagcgctattattgggggctggggaccagctgtcatcccttttcctgtgggcaggggaggcagtggtgggatcccatgagaccc

SEQ ID NO: 663038 - DNA, 120 bp, Artificial Sequence
  ENSG00000184640_65 (sequence is synthesized)
gagctttgctggggaggcagcgtggctgcaggatggcagctttttagaggacaccacggccagggacatccacccgggggaattctcaggggtcgcctggccactgaggcggctcccagc

SEQ ID NO: 663039 - DNA, 120 bp, Artificial Sequence
  ENSG00000184640_66 (sequence is synthesized)
atatatccgtaggaatggagagggaccggatctcagggcatggctcacgccgcgttgtcaggctgcaagccactgcgagagctgctctgatccccaagcatgctctggcctgaggaggag

SEQ ID NO: 663040 - DNA, 120 bp, Artificial Sequence
  ENSG00000184640_67 (sequence is synthesized)
tggaagggcctgggaggggacaggctcccaccccaggagcttccaggttccggctgctgcctgtgttagctgcgtgagcgtgagcgagccaggggtcactactgggtggaaggaagaagc

SEQ ID NO: 663041 - DNA, 120 bp, Artificial Sequence
  ENSG00000184640_68 (sequence is synthesized)
atcggtcccctccctttggctctccccggcggctctcgggccccgcttggacccggcaacgggatagggaggtcgttcctcacctccgactgagtggacagccgcgtcctgctcgggtgg

SEQ ID NO: 663042 - DNA, 120 bp, Artificial Sequence
  ENSG00000184640_69 (sequence is synthesized)
cagggtgcttgggtggggctgacggcttcacccctaagagggccctacagcgggtgggggcagtgggtgtggggccgaagccctgggcagagtgggtgccccctgccacctgcctgccct

SEQ ID NO: 663043 - DNA, 120 bp, Artificial Sequence
  ENSG00000184640_70 (sequence is synthesized)
gccctcgggaagatcttggaagcccatcttctgaaaaagaaaacccactgggaaatgaagcaggcagtgaagatccttttcaacccctgcgaagttggctggatgggaaggctgagcttt

SEQ ID NO: 663044 - DNA, 120 bp, Artificial Sequence
  ENSG00000184640_71 (sequence is synthesized)
atccaggcctggggatatcctcatccgcctcccagaatcgggccgtgggggacagaaggggcctgcgtgcgggcagggagagtattttggctctctcctgtcttcggggtttacaaagtg

SEQ ID NO: 663045 - DNA, 120 bp, Artificial Sequence
  ENSG00000184640_72 (sequence is synthesized)
cccgccttcctactaccggcccaggattagcgccctgggagcgcgcgccccgctgcctcgccgccacactttcctgggagcggcggccacggaggcaccatgaagaagtcttactcagat

SEQ ID NO: 663046 - DNA, 120 bp, Artificial Sequence
  ENSG00000184640_73 (sequence is synthesized)
ttgcttctggacccgtgcatttcaaatcttgcttctctccactgcgcacgtttttccggcgccaggcaccgcaggatatgttcgtgtcttgtgatttttgattctgcgcggtaggtggaa

SEQ ID NO: 663047 - DNA, 120 bp, Artificial Sequence
  ENSG00000184640_74 (sequence is synthesized)
gtatatgggagttggacaaccttgggtggacagacagacgtggggaagggatgattgaaggaggtggaggagagagtgtgattcagcccagccaggggtgatgtggacaggcagcttccg

SEQ ID NO: 663048 - DNA, 120 bp, Artificial Sequence
  ENSG00000184640_75 (sequence is synthesized)
cctcagcccccagggcggcccacaagcctttgggcttggtcttcccttctgtaaaatggggcagcaaccctgacctcaaggacggattgccagtgacattgcgtgtgcatgcatgcgcct

SEQ ID NO: 663049 - DNA, 120 bp, Artificial Sequence
  ENSG00000184640_76 (sequence is synthesized)
gggaggagcccacagcctccagcggctcctcagaggggcctgtcctgcacatccagggcccctgagatgactttggggagcccaggccggcctggagcaggtcctgatgagtggtcgctg

SEQ ID NO: 663050 - DNA, 120 bp, Artificial Sequence
  ENSG00000184640_77 (sequence is synthesized)
cctctgagcaatgacgtcagcttgtgcagagggttctgtggcagctgtcccctcactgttgctccagcctggccctccaggctccccaccgcaccccaccgcaccccggccagaggcttc

SEQ ID NO: 663051 - DNA, 120 bp, Artificial Sequence
  ENSG00000184640_78 (sequence is synthesized)
ggagagctggaggtcaccacgggaggtcgtcgatcagcacgacctgggcagggtgagggggccaggctggagtctacagtgggccgcctgttgtttccaaagccccccaggtcccattca

SEQ ID NO: 663052 - DNA, 120 bp, Artificial Sequence
  ENSG00000184640_79 (sequence is synthesized)
aacctcacagggaccctgtgaagggggcgtcccgttttccaggcagaagcgaggctcagggaaggctgccaaggttccttagctcacagggcagagaaccgcagccaccgttttgactcc

SEQ ID NO: 663053 - DNA, 120 bp, Artificial Sequence
  ENSG00000184640_80 (sequence is synthesized)
cagaactgtgttctgcccactccacggggtccagggaggggtctggggaagtgcccccgccaggtcacaccctaaacaaaggtgagcttgcggggtttctgcaaggtgtctgggcacctc

SEQ ID NO: 663054 - DNA, 120 bp, Artificial Sequence
  ENSG00000184640_81 (sequence is synthesized)
tcaggccgggcctgtttctctgacctttgccagccgtgcacgtccttcctgcccagctctgtggacgcaaacccacacctgccagcccgacacctttctttcctcttctgcactgatctg

SEQ ID NO: 663055 - DNA, 120 bp, Artificial Sequence
  ENSG00000184640_82 (sequence is synthesized)
ggccctggctcccctggggtcttggtgtcctctctgcttcctgtagcctcatgggacccggctgctcatggccctgctgtgctcacagctgcctggaagctggcagcctgcttcaaggga

SEQ ID NO: 663056 - DNA, 120 bp, Artificial Sequence
  ENSG00000184640_83 (sequence is synthesized)
gggcggaggtgtggggtcccctcctacggcccccaccctgttctgcctgttgtgggggacgtgcttgtaccctgaggattcagggctgcctcccgggaagatggctggagagaaagagag

SEQ ID NO: 663057 - DNA, 120 bp, Artificial Sequence
  ENSG00000184640_84 (sequence is synthesized)
gggagaggcccaaaggcagtggccaggctgggactcatctctgtgggctacggaggggctgccctgctccctagccagggacagggtgagaaggacctgggaacctctgcgtcccagcca

SEQ ID NO: 663058 - DNA, 120 bp, Artificial Sequence
  ENSG00000184640_85 (sequence is synthesized)
tggcacaggccttcttccggagctttggccccaaggagagggagaggcagcccagcagccctcgccttccgtggctgccactgtgacagccttgccctctgggaatggtgcgcaggaggc

SEQ ID NO: 663059 - DNA, 120 bp, Artificial Sequence
  ENSG00000184640_86 (sequence is synthesized)
cacttcacctgtctgggcctcttcgccctttcaaccctgagaagaacagtggtcctgattccccacaaaatcactccctcccagggatgccgagtgaggaacaagacgtggggcagctct

SEQ ID NO: 663060 - DNA, 120 bp, Artificial Sequence
  ENSG00000184640_87 (sequence is synthesized)
gctctcctccctcctccctcccatggcagctgtgcccacctgcagaggtgcaggcaaggtggaggggcacctgtttggaggtccacagaccccggggagaatcccagctttgtcctaact

SEQ ID NO: 663061 - DNA, 120 bp, Artificial Sequence
  ENSG00000184640_88 (sequence is synthesized)
cagcggggtgaggcttgtgtgtcttcccctgggctcctcctctgtgagccttagcttcctcgtccataaaatgggatcatcccataaagtgagatcaagcgagctaggccccgggcaggg

SEQ ID NO: 663062 - DNA, 120 bp, Artificial Sequence
  ENSG00000184640_89 (sequence is synthesized)
atggagctttgctggggaggcagcgtggctgcaggatggcagctttttagaggacaccacggccagggacatccacccgggggaattctcaggggtcgcctgggcaagtcgcttagcctt

SEQ ID NO: 663063 - DNA, 120 bp, Artificial Sequence
  ENSG00000184640_90 (sequence is synthesized)
tctgagcctcagtgcctcagtttccccatccaaggatgggtgtgacaaccacctggcaggcgcctgtgtgtgagcccctgttccgctctaactcctctgctgttccttccccagccactg

SEQ ID NO: 663064 - DNA, 120 bp, Artificial Sequence
  ENSG00000184640_91 (sequence is synthesized)
agaatgtggcgatttgtctgtatgcagacattagattagagggcaaaggccattatcataacttagcagacagctacaagcagctaaggaattgctatgacatggactgctcgtgattgg

SEQ ID NO: 663065 - DNA, 120 bp, Artificial Sequence
  ENSG00000184640_92 (sequence is synthesized)
agctaagaaggagtcagagacagaggtccctgtgctctggcgtgagtccttgggggaggctgagctcccagaatgtggggccgcctgtgcagaggccggaggtgggagacacacctgtga

SEQ ID NO: 663066 - DNA, 120 bp, Artificial Sequence
  ENSG00000184640_93 (sequence is synthesized)
cgtttagactgggccagcagacagttctagagacttcaagtttgttgtcgtttttaaaagtcctgccaatgcccagaaacttagagggacaagaagatgacctcgatgtcagccgggacc

SEQ ID NO: 663067 - DNA, 120 bp, Artificial Sequence
  ENSG00000184640_94 (sequence is synthesized)
agatctccccggcctgcccagagggattctgatagccgagggcaatgcacctggcagcggagcattgcgtttgcgacagtccaccttcttcctggaaccaccccccacaagtgtgaccag

SEQ ID NO: 663068 - DNA, 120 bp, Artificial Sequence
  ENSG00000184640_95 (sequence is synthesized)
aggctttgtggtgagagggcacagagtggaggaaggtgccgtggctagggcaggccacacgctgtgctaatggattgctgttacctgtcgcctctgtggttttgctgtcaggatcctcca

SEQ ID NO: 663069 - DNA, 120 bp, Artificial Sequence
  ENSG00000184647_0 (sequence is synthesized)
actgcctcagccctggcctctgtcacccccgggcccacagcacagcccagggccatgctcctgttctcagtgttgctgctcctgtccctggtcacgggaactcagctcggtccacggact

SEQ ID NO: 663070 - DNA, 120 bp, Artificial Sequence
  ENSG00000184647_1 (sequence is synthesized)
cctctcccagaggctggagtggctatcctaggcagggctaggggagcccaccgccctcagccccctcatccccccagcccagtcagtgaatgtggtgacagatctattttcgagggaaga

SEQ ID NO: 663071 - DNA, 120 bp, Artificial Sequence
  ENSG00000184647_2 (sequence is synthesized)
actcggtattccagaatcacaggggggatggaggcggaggtgggtgagtttccgtggcaggtgagtattcaggcaagaagtgaacctttctgtggcggctccatcctcaacaagtggtgg

SEQ ID NO: 663072 - DNA, 120 bp, Artificial Sequence
  ENSG00000184647_3 (sequence is synthesized)
attctcactgcggctcactgcttatattccgaggagctgtttccagaagaactgagtgtcgtgctggggaccaacgacttaactagcccatccatggaaataaaggaggtcgccagcatc

SEQ ID NO: 663073 - DNA, 120 bp, Artificial Sequence
  ENSG00000184647_4 (sequence is synthesized)
ggcttcgcccatcaagctcgatgacctgaaggtgcccatctgcctccccacgcagcccggccctgccacatggcgcgaatgctgggtggcaggttggggccagaccaatgctgctgacaa

SEQ ID NO: 663074 - DNA, 120 bp, Artificial Sequence
  ENSG00000184647_5 (sequence is synthesized)
aaactctgtgaaaacggatctgatgaaagcgccaatggtcatcatggactgggaggagtgttcaaagatgtttccaaaacttaccaaaaatatgctgtgtgccggatacaagaatgagag

SEQ ID NO: 663075 - DNA, 120 bp, Artificial Sequence
  ENSG00000184647_6 (sequence is synthesized)
ctatgatgcctgcaagggtgacagtggggggcctctggtctgcaccccagagcctggtgagaagtggtaccaggtgggcatcataagctggggaaagagctgtggagagaagaacacccc

SEQ ID NO: 663076 - DNA, 120 bp, Artificial Sequence
  ENSG00000184647_7 (sequence is synthesized)
agggatatacacctcgttggtgaactacaacctctggatcgagaaagtgacccagctagagggcaggcccttcaatgcagagaaaaggaggacttctgtcaaacagaaacctatgggctc

SEQ ID NO: 663077 - DNA, 120 bp, Artificial Sequence
  ENSG00000184647_8 (sequence is synthesized)
cccagtctcgggagtcccagagccaggcagccccagatcctggctcctgctctgtcccctgtcccatgtgttgttcagagctattttgtactgataataaaatagaggctattctttcaa

SEQ ID NO: 663078 - DNA, 120 bp, Artificial Sequence
  ENSG00000184647_9 (sequence is synthesized)
ctatgatgcctgcaagcaaagctattttcccactttacaaagaatgaacaccggaagctctcaaacaaagccgcctgggtctcacacctttcatctgcaaaactgatgctttgctctttc

SEQ ID NO: 663079 - DNA, 120 bp, Artificial Sequence
  ENSG00000184647_10 (sequence is synthesized)
ttctacatggagccatttttggggcagaaaacatacccttgggcatagccttgagttgaaaatctttgagggtgttttctgtccaaatgactgaaaaaatgaataaaagcctccccattt

SEQ ID NO: 663080 - DNA, 120 bp, Artificial Sequence
  ENSG00000184647_11 (sequence is synthesized)
ttggaagcctgctcctcccagcccggtccccagctcacactggatgctgactaagtgtttccccttttcctttccactctctttctttccaccagaatgtggtgacagatctattttcga

SEQ ID NO: 663081 - DNA, 120 bp, Artificial Sequence
  ENSG00000184647_12 (sequence is synthesized)
gcctgcaagacccagcgctgccgcgtgcttctttcctctggattcgaatttcctgggccaccaccgaagatgcaaaggcaaattcaggaaatgcaaatccttaaatggaagcttgggctt

SEQ ID NO: 663082 - DNA, 120 bp, Artificial Sequence
  ENSG00000184647_13 (sequence is synthesized)
gcaaatccttaaatggaagcttgggcttttcctggggacctacagcctggctgagtgttctccagaaagagactgaagaaaagcttcctggttgggcgaggtggctcatgcctgtaatcc

SEQ ID NO: 663083 - DNA, 120 bp, Artificial Sequence
  ENSG00000184647_14 (sequence is synthesized)
gaactctatctccaaaaaaaaagaaaaaagaaaaaaagcttcctagttatcctttttcccactctaaccctactcctccagaggtcctacagctacaatgtctagaagccattttttcag

SEQ ID NO: 663084 - DNA, 120 bp, Artificial Sequence
  ENSG00000184647_15 (sequence is synthesized)
aagctcctaagaacctgggactcaggcaggcccagtggagggtggccagctggagtgttcaccatctcaggacatcaccactgtccactccactttcctgctcaccgccctctgacttct

SEQ ID NO: 663085 - DNA, 120 bp, Artificial Sequence
  ENSG00000184647_16 (sequence is synthesized)
gtgtgggggccctcccttttcacccactctccaatttgcatagttctggatggctggccctttgctgggggctggggtgggcatagaactcgagcctggcctagaaggacattgattttg

SEQ ID NO: 663086 - DNA, 120 bp, Artificial Sequence
  ENSG00000184647_17 (sequence is synthesized)
gccacagggatgggagcagcaatgggctgtgggctttataggtcacaagagcaagaccaagacttctgctggagttatcaggaacaagactgactgactctcctgggactcccaacatgg

SEQ ID NO: 663087 - DNA, 120 bp, Artificial Sequence
  ENSG00000184647_18 (sequence is synthesized)
tagggtgcatgttgaaggtactgctcatgtgaaggctgctggggagtgtggtggttccttttgtctgtcaacttggaggggatctgtggatgagattgatgtttaaattggtaaactgtg

SEQ ID NO: 663088 - DNA, 120 bp, Artificial Sequence
  ENSG00000184647_19 (sequence is synthesized)
acgaagcagattgccctccataatggggtgagcctcatccaatccgttgaaggcctgagtaggacaaaaatgattggcctccccacacaagagggaattcctcagccgcccaccttcaga

SEQ ID NO: 663089 - DNA, 120 bp, Artificial Sequence
  ENSG00000184647_20 (sequence is synthesized)
cttcatctgcattgtcagctcttctggggctctgcctgccagtctctaaaccagagcagcaccaccagctctcctgcatctcgagcctgccagtccacaccccaggtttgagcttgccag

SEQ ID NO: 663090 - DNA, 120 bp, Artificial Sequence
  ENSG00000184647_21 (sequence is synthesized)
tctctgtaatcagggacagaaaactgactgtgtgctctgttgacccagcctcaacaaacaggacatggtggcctgcacctgtgcttctcagaccatctgtgaggaaaaagaccagggctt

SEQ ID NO: 663091 - DNA, 120 bp, Artificial Sequence
  ENSG00000184647_22 (sequence is synthesized)
ttggtttttggttttgcttcgaaatttccaacttatttcaaaccaatactttcataaaacataaaattgaactactcgaaaaatgaaatcgaaaatgaacaaataaaatgcaagcccaca

SEQ ID NO: 663092 - DNA, 120 bp, Artificial Sequence
  ENSG00000184650_0 (sequence is synthesized)
gtggcagttaggggacctggcctgctgaatgggttggggccttctcttggatcaagagtctcttatttgatcgaggtctgttattagacttcctcattctttctcagacctcaggctgca

SEQ ID NO: 663093 - DNA, 120 bp, Artificial Sequence
  ENSG00000184650_1 (sequence is synthesized)
tggtggcagctgatgaaaatatccaaaagatgagaagagacaattgagtctggtgagggaaaggggagacagagggtgaagtggtgctcaagatggatgcagagtactctgggaatgagt

SEQ ID NO: 663094 - DNA, 120 bp, Artificial Sequence
  ENSG00000184650_2 (sequence is synthesized)
tccccaggtcagaaggagaaagagaccaacatcagagacctggaaaggaaaggaagagtggggaggcaggatggggcacaggtgagctgggacaagatgggagactgctgtcctccaccc

SEQ ID NO: 663095 - DNA, 120 bp, Artificial Sequence
  ENSG00000184650_3 (sequence is synthesized)
tctccctcagtagtaacaggtccttgggccagcgccagaactctccgctgccctttcaatggagaatcacacacagcttccgctggatggcccaggtgttggcctctgagctcagcctgg

SEQ ID NO: 663096 - DNA, 120 bp, Artificial Sequence
  ENSG00000184650_4 (sequence is synthesized)
aatccacacatcagcccacgttatgtccatggggctcctgcacttttacaaatccaggagctgttctgacttagagaatgggaaagtcaccttcatcttctccaccctcatgctattccc

SEQ ID NO: 663097 - DNA, 120 bp, Artificial Sequence
  ENSG00000184650_5 (sequence is synthesized)
cattaacatctggatcttcgagttggaaaggaatgtatccatccccataggctggagctatttcattggttggctggtgcttatcctatacttcacctgcgcgatcctttgctacttcaa

SEQ ID NO: 663098 - DNA, 120 bp, Artificial Sequence
  ENSG00000184650_6 (sequence is synthesized)
ccataaaagtttctggagtctgattctgagccaccccagtggtgccgtgtcctgcagcagcagtttcggctcagtagaagaatctccaagggcacagacgatcacagacacccccatcac

SEQ ID NO: 663099 - DNA, 120 bp, Artificial Sequence
  ENSG00000184650_7 (sequence is synthesized)
ccaggagggagtcctggatcctgagcagaaggatacacatgtgtaatcttttctgaactcctggcaccaagttctgtccattcatctgaccccatctcctcatcctcccccagcccttga

SEQ ID NO: 663100 - DNA, 120 bp, Artificial Sequence
  ENSG00000184650_8 (sequence is synthesized)
ataggttggtcctcatcattgcaaggaatgagaaagggaggattttgcactcctctgctttctccctgccttgattgagcttgagtgatgtggaataaattgtccgtctcttctttctca

SEQ ID NO: 663101 - DNA, 120 bp, Artificial Sequence
  ENSG00000184650_9 (sequence is synthesized)
aagagtggggaggcaggatggggcacaggcagttttaagctgtggacaatcagcccatgtttaaggtggctaagttaagcttcaacctgaccctggggctgggcctcgtcctcaccatct

SEQ ID NO: 663102 - DNA, 120 bp, Artificial Sequence
  ENSG00000184659_0 (sequence is synthesized)
acatacttttacggttacacattcctttacaaacaaccgtgtacatttcagcctcctgccccaccatttcttttctccaggagggaaggctgcatgtcgaggtggtcatagaatgttgag

SEQ ID NO: 663103 - DNA, 120 bp, Artificial Sequence
  ENSG00000184659_1 (sequence is synthesized)
tatcatactttcctacctcgcttttatttgcgcgggtttaaatgcgccttaacagaacccgtgcaaaggcttgccaactgtctggctgcaccggatgagtagagcatcttccttggtggc

SEQ ID NO: 663104 - DNA, 120 bp, Artificial Sequence
  ENSG00000184659_2 (sequence is synthesized)
aggtgggtgcgaggaggaggggcctgggcttttctccggacagtgtttgcccagaagaccatcatccctggactacgttaggaggaagtggcaccgctccgaggtaggggaagaagggtt

SEQ ID NO: 663105 - DNA, 120 bp, Artificial Sequence
  ENSG00000184659_3 (sequence is synthesized)
ataaaggggggagtccaccacacatggtcttgaagaagcttttataaaaggcaaaggcatctttgccggacgttgttgcaaaggagtagaaacaagcagacgaaaacatcccaaagggta

SEQ ID NO: 663106 - DNA, 120 bp, Artificial Sequence
  ENSG00000184659_4 (sequence is synthesized)
accactagcgttcctgcttcttgcaacattcatcccaggcttccagctcagcccgccccaggccaggtgatcggccgccacatcccctgcgactgaagcacctgctcctccatgaacctg

SEQ ID NO: 663107 - DNA, 120 bp, Artificial Sequence
  ENSG00000184659_5 (sequence is synthesized)
ccaagagctgagcgccctcgctccacaccgcagcgcagcctccgggactccgatggggaagacggtaaaatcgatgtcctgggagaggaggaagatgaagacgaggtggaagacgaggag

SEQ ID NO: 663108 - DNA, 120 bp, Artificial Sequence
  ENSG00000184659_6 (sequence is synthesized)
gaggaggcgagacagcagttcctagagcagtcgctccagccggggctgcaggtggcccggtggggcggggttgcgcttccccgagagcacatcgagggcggcggcggcccgagtgaccct

SEQ ID NO: 663109 - DNA, 120 bp, Artificial Sequence
  ENSG00000184659_7 (sequence is synthesized)
tcagagtttggcaccaagttcagggcaccgccaaggtctgcggcggcctctgaagatgcccggcagccggcaaagcccccctactcgtacatcgcgctcatcaccatggccatcctgcaa

SEQ ID NO: 663110 - DNA, 120 bp, Artificial Sequence
  ENSG00000184659_8 (sequence is synthesized)
aacccgcacaagcgcctcacgctcagcggcatctgcgccttcattagtggccgcttcccatactaccgccgcaagttccccgcctggcagaacagcatccgccacaacctctcgctgaac

SEQ ID NO: 663111 - DNA, 120 bp, Artificial Sequence
  ENSG00000184659_9 (sequence is synthesized)
cctcccaggacatgttcgacaatggcagctttctccggcgtaggaagcgtttcaagcgccaccaactgaccccgggagcccacctgccccaccccttccctctacctgctgcacacgccg

SEQ ID NO: 663112 - DNA, 120 bp, Artificial Sequence
  ENSG00000184659_10 (sequence is synthesized)
ccctgcacaacccccacccaggccctctgcttggggcccctgccccgccgcagccagtcccgggggcctaccccaacaccgcccccgggagacgcccttacgctctgctgcacccgcatc

SEQ ID NO: 663113 - DNA, 120 bp, Artificial Sequence
  ENSG00000184659_11 (sequence is synthesized)
ctcttcgctacctactgctctcggcccgcgtctatgccggggcaccgaagaaagcagaaggcgcggacctggcgaccccggcacccttcccgtgctgcagccctcacttggtcctcagcc

SEQ ID NO: 663114 - DNA, 120 bp, Artificial Sequence
  ENSG00000184659_12 (sequence is synthesized)
ttgggaggagggcaagggtctggcgtcgccaccgggaggcggatgcttctctttcagcattgagagtattatgcaaggggtcaggggagcgggtacaggggctgcgcagagtttgtcccc

SEQ ID NO: 663115 - DNA, 120 bp, Artificial Sequence
  ENSG00000184659_13 (sequence is synthesized)
gaccgcgtggagctactgccacctgctccagcgaccatcaagcctgttgcatccccaaaccgctgcccctttgctgcaagtgtccgccgccgctgctgctcggacaattttgcagcaata

SEQ ID NO: 663116 - DNA, 120 bp, Artificial Sequence
  ENSG00000184659_14 (sequence is synthesized)
gcagcagcatcaggaggactgcgccaacggctgcgctcccaccaagggcgcggtgctgggcgggcacctgtcggcctcgtcggcgctgctgaggtatcaggcagtggcggagggctctag

SEQ ID NO: 663117 - DNA, 120 bp, Artificial Sequence
  ENSG00000184659_15 (sequence is synthesized)
gctgacatcgctggctgcccctttgggcggagaggggacctcaccagtttttttagtatcgcccacgcccagttccctggccaactccgcagggccctcctagagccaggtgggagtggg

SEQ ID NO: 663118 - DNA, 120 bp, Artificial Sequence
  ENSG00000184659_16 (sequence is synthesized)
gagcgacccgcagctgctcactccaccttgcgcggcccatactgggcgtgtgcatctgaatcccgctggagagcaaacacgaacttctgttcgttcgctgcaaaatggttagaaagatta

SEQ ID NO: 663119 - DNA, 120 bp, Artificial Sequence
  ENSG00000184659_17 (sequence is synthesized)
cattcctctaagctggattacgttcctctaaaaaccacctgaacgtaaccttcgcagggcgtcaagtcatcttttcttgccttcggttgtggcttctatggctgtcccgatttgcacatt

SEQ ID NO: 663120 - DNA, 120 bp, Artificial Sequence
  ENSG00000184661_0 (sequence is synthesized)
ggaggaggctgccgggcagagcgcaggccaggatcagcgcaggctgtgagtccaggtcagccgtcgggacctcgggctccgggttcgaagagcggctcccggctgcgggtgctttgccag

SEQ ID NO: 663121 - DNA, 120 bp, Artificial Sequence
  ENSG00000184661_1 (sequence is synthesized)
gagagcccttccggacagaggagccggggtctggaaggagcggccgacgcgacgctcgcctgccacggggctctgggagtaagcctgtctgcctggcgggccttcaggtgcggcgtgaga

SEQ ID NO: 663122 - DNA, 120 bp, Artificial Sequence
  ENSG00000184661_2 (sequence is synthesized)
gatggatgccaattcaaaagacaagccccctgaaaccaaggagtctgcaatgaataatgctggaaatgcctctttcattttgggaactgggaagattgtgactcctcagaagcatgccga

SEQ ID NO: 663123 - DNA, 120 bp, Artificial Sequence
  ENSG00000184661_3 (sequence is synthesized)
attacctcctaatccttgcacaccagatacttttaaatcacctttgaacttttccacagtaaccgtagagcaattgggaattacacctgaaagctttgttaggaactctgcaggaaagtc

SEQ ID NO: 663124 - DNA, 120 bp, Artificial Sequence
  ENSG00000184661_4 (sequence is synthesized)
atcatcctaccttaaaaaatgtagacgacgttctgcagtcggtgctcggggctctcctgaaacaaaccatctgattcgtttcattgctcggcagcaaaatataaagaatgctaggaaatc

SEQ ID NO: 663125 - DNA, 120 bp, Artificial Sequence
  ENSG00000184661_5 (sequence is synthesized)
tcctttggcacaagattctccttcccagggcagccctgcactgtatcgaaatgttaacactttaagagaacgaatatcagccttccagtcagcttttcactccataaaggaaaacgagaa

SEQ ID NO: 663126 - DNA, 120 bp, Artificial Sequence
  ENSG00000184661_6 (sequence is synthesized)
aatgaccggctgtctggaattctcagaggcaggaaaagagtccgagatgacagacttgaccagaaaggaaggtctcagcgcttgccagcagtctgggttccctgcagtgttgtcctccaa

SEQ ID NO: 663127 - DNA, 120 bp, Artificial Sequence
  ENSG00000184661_7 (sequence is synthesized)
acgtcggagaatatcctatcagagagactctgatgaaaatctgacggatgctgaaggaaaagtaattggtctccagatattcaatattgatacagacagagcatgtgcagttgaaacttc

SEQ ID NO: 663128 - DNA, 120 bp, Artificial Sequence
  ENSG00000184661_8 (sequence is synthesized)
tgtagatctttctgagatatcatctaaacttggttcaacacagtctggatttttagttgaagagtctcttcccctttcagagctcacagagacttcaaatgcactaaaggttgctgactg

SEQ ID NO: 663129 - DNA, 120 bp, Artificial Sequence
  ENSG00000184661_9 (sequence is synthesized)
tgtagtgggcaaaggatcaagtgatgccgtttcgcctgacacgttcacagcagaagtgagctcagacgcagtccctgatgtcaggtcaccagctactccagcctgcaggagggaccttcc

SEQ ID NO: 663130 - DNA, 120 bp, Artificial Sequence
  ENSG00000184661_10 (sequence is synthesized)
cacccccaagacctttgtacttcgttctgtactgaagaaaccctctgttaagatgtgtctagagagcttacaggaacactgtaacaacctctatgatgatgatgggactcatccgagctt

SEQ ID NO: 663131 - DNA, 120 bp, Artificial Sequence
  ENSG00000184661_11 (sequence is synthesized)
aatctcaaatctcccaaactgttgcaaagagaaagaagcagaagatgaagaaaattttgaagcacctgcctttctaaatatgaggaagaggaagagagttacttttggagaggacttaag

SEQ ID NO: 663132 - DNA, 120 bp, Artificial Sequence
  ENSG00000184661_12 (sequence is synthesized)
cccggaagtgtttgatgaatctttgccagcaaatactccattgcgtaaaggaggaacacctgtttgtaaaaaagacttcagtggtctcagttccctgctgcttgagcagtcacctgttcc

SEQ ID NO: 663133 - DNA, 120 bp, Artificial Sequence
  ENSG00000184661_13 (sequence is synthesized)
tgagccattacctcaaccagattttgatgacaagggggagaatcttgaaaacatagaaccacttcaagtatcatttgccgttctcagttctcctaataaatcatcaatctctgagaccct

SEQ ID NO: 663134 - DNA, 120 bp, Artificial Sequence
  ENSG00000184661_14 (sequence is synthesized)
cactgatacctttagttcttcaaataaccatgagaaaatatcctctcctaaagttggtagaataacaaggacttctaacagaagaaatcaattggtcagtgttgtagaagagagtgtttg

SEQ ID NO: 663135 - DNA, 120 bp, Artificial Sequence
  ENSG00000184661_15 (sequence is synthesized)
caacttattgaatacagaagttcagccttgtaaagaaaagaaaattaataggaggaagtctcaagaaacaaagtgtacaaagagagcacttcctaagaagagtcaggttttaaaaagttg

SEQ ID NO: 663136 - DNA, 120 bp, Artificial Sequence
  ENSG00000184661_16 (sequence is synthesized)
cagaaagaagaaaggaaagggaaagaaaagtgttcagaaatctttatatggggaaagagacattgcttctaagaagcccctcctcagtcctattcccgagctgcctgaagtccctgagat

SEQ ID NO: 663137 - DNA, 120 bp, Artificial Sequence
  ENSG00000184661_17 (sequence is synthesized)
gacaccttccattccgagcatccgaagactgggttcaggttatttcagttcaaatggcaaactggaagaagtgaagactcctaaaaatccagtgaaaagaaaggatcttttgcgtcatga

SEQ ID NO: 663138 - DNA, 120 bp, Artificial Sequence
  ENSG00000184661_18 (sequence is synthesized)
cccagatttgcatatgcatcaaggctatgataaatatgatgtctctgaattctgctcttatataaaaagttcctcatcgcttggcaatgctacttctgatgaagatccaaatacaaatat

SEQ ID NO: 663139 - DNA, 120 bp, Artificial Sequence
  ENSG00000184661_19 (sequence is synthesized)
aatgaacattaatgaaaataaaaatattccaaaagcaaaaaataagtcagaaagtgaaaatgaaccaaaagctggaactgacagtcctgtttcttgtgcttctgtaactgaagaacgtgt

SEQ ID NO: 663140 - DNA, 120 bp, Artificial Sequence
  ENSG00000184661_20 (sequence is synthesized)
ggcatcagatagtcccaaacctgctctgaccctgcagcagggtcaagaattttctgctggtggtcaaaatgcagaaaacctttgtcagttctttaaaatttcaccagatttaaacataaa

SEQ ID NO: 663141 - DNA, 120 bp, Artificial Sequence
  ENSG00000184661_21 (sequence is synthesized)
gtgtgaaagaaaggatgacttcttaggagctgcagaaggaaaactgcaatgcaatcgtttaatgcctaattcacaaaaagactgtcattgtttaggagatgtcttaattgaaaatacgaa

SEQ ID NO: 663142 - DNA, 120 bp, Artificial Sequence
  ENSG00000184661_22 (sequence is synthesized)
agaatctaaaagccagagtgaggatttgggaagaaaacccatggaaagtagcagtgttgtgagttgcagagacaggaaagatagaagacgttccatgtgttattctgatggtcgaagttt

SEQ ID NO: 663143 - DNA, 120 bp, Artificial Sequence
  ENSG00000184661_23 (sequence is synthesized)
acatttggaaaaaaatggaaatcacacaccatcctccagtgtgggcagctctgtagaaattagtttagaaaattctgaactgtttaaagatttgtctgatgccattgagcaaacctttca

SEQ ID NO: 663144 - DNA, 120 bp, Artificial Sequence
  ENSG00000184661_24 (sequence is synthesized)
gaggagaaatagtgaaaccaaagtgcgacgtagcacgaggctacagaaggatttagaaaacgaaggtcttgtatggatttcacttccacttccttccacttcccaaaaagccaaaagaag

SEQ ID NO: 663145 - DNA, 120 bp, Artificial Sequence
  ENSG00000184661_25 (sequence is synthesized)
aacaatatgtacatttgacagcagtggatttgaaagtatgtctcccataaaagaaactgtgtcctccagacaaaaaccgcagatggcacctcccgtctcagatccagaaaacagccaggg

SEQ ID NO: 663146 - DNA, 120 bp, Artificial Sequence
  ENSG00000184661_26 (sequence is synthesized)
ccctgctgctggttcttccgatgaacctggtaagaggaggaagagcttttgtatatctacacttgcaaatactaaagccacttcccagttcaaaggctaccggagaagatcctctcttaa

SEQ ID NO: 663147 - DNA, 120 bp, Artificial Sequence
  ENSG00000184661_27 (sequence is synthesized)
tgggaagggagagagctctctgactgccttggaaaggattgaacataatggagaaagaaagcagtaattgacatttcctgcagagtctgtggcaagagggaaagtaaccatctatgctga

SEQ ID NO: 663148 - DNA, 120 bp, Artificial Sequence
  ENSG00000184661_28 (sequence is synthesized)
aatgatctgtctagttcccattctctgttcaacctcagtgtttcaaaagttcctaataaataaactcatttgagttgaacctacttttatgtagaaataaataagtttcttcatcattca

SEQ ID NO: 663149 - DNA, 120 bp, Artificial Sequence
  ENSG00000184672_0 (sequence is synthesized)
ggcagagaccgcatattccggaggggctggctccaggccacgcgagccggagctggagacatttccagagccttgaggatggcaccggccctcgcacgctcaactcctgctcctcctctt

SEQ ID NO: 663150 - DNA, 120 bp, Artificial Sequence
  ENSG00000184672_1 (sequence is synthesized)
cgcaatgagtaaacgacgcagattaaagcaaggagagccaatcatgactggcaaaacacagaccagcaacgtcaccaataagaatgaccccaagtccatcaactcccgtgttttcatcgg

SEQ ID NO: 663151 - DNA, 120 bp, Artificial Sequence
  ENSG00000184672_2 (sequence is synthesized)
caatctaaatacggcaattgtcaagaaagttgacattgaagccattttttcaaagtatggaaaaatagttggatgttccgttcacaaaggttatgcatttgtacagtacatgagtgagcg

SEQ ID NO: 663152 - DNA, 120 bp, Artificial Sequence
  ENSG00000184672_3 (sequence is synthesized)
acatgcaagagctgcagtggctggagaaaatgccagagtcatcgccggccaaccacttgatatcaacatggcaggagagcccaaaccatacagaccaaaacctggaaacaagaggcccct

SEQ ID NO: 663153 - DNA, 120 bp, Artificial Sequence
  ENSG00000184672_4 (sequence is synthesized)
ttctgcactttacagacttgaatcaaaggaacctttcctgtctgttggcggttatgtctttgactatgattactacagagatgatttctacaatcggttatttgattaccacgggcgtgt

SEQ ID NO: 663154 - DNA, 120 bp, Artificial Sequence
  ENSG00000184672_5 (sequence is synthesized)
gcctccacctccccgtgcagtaattccgctgaagcgtcccagagtggcagtcacaacgactcgcagggggaaaggagtcttttccatgaaaggtggatcgagatctactgccagtgggtc

SEQ ID NO: 663155 - DNA, 120 bp, Artificial Sequence
  ENSG00000184672_6 (sequence is synthesized)
aacaggttctaaattgaaatcagatgagttacagaccatcaagaaagaattaacccagatcaaaactaaaattgactccttgctagggcgcctggagaagattgagaaacagcagaaggc

SEQ ID NO: 663156 - DNA, 120 bp, Artificial Sequence
  ENSG00000184672_7 (sequence is synthesized)
ggaggcagaagctcagaagaagcaattggaagagagtctagtgctgatccaagaggaatgtgtgtcagagattgcagatcactctacagaggagcctgctgaaggagggccagatgccga

SEQ ID NO: 663157 - DNA, 120 bp, Artificial Sequence
  ENSG00000184672_8 (sequence is synthesized)
catgagctgtttctacagataaagtgatctgaaataacgcatgatgccacaaagcagaaaagagaaactgtgacaacccccagaaatgtgaaaggaggtttcttactggacagcagcatc

SEQ ID NO: 663158 - DNA, 120 bp, Artificial Sequence
  ENSG00000184672_9 (sequence is synthesized)
tttggttcaatttatataaaaacccaaataaataaaatggacagtattgctcagttttagaaattccatttcttctatgttttaagctgtacaattgtcaggtttttatggtttaaattg

SEQ ID NO: 663159 - DNA, 120 bp, Artificial Sequence
  ENSG00000184672_10 (sequence is synthesized)
taaatgtgttttcccctttgctaattatgttttttttttcagtcttaaaatgtgaaaggcatttatgaatggtaagggaaacactatatacaaatgtatatttgtaaaagctatttttat

SEQ ID NO: 663160 - DNA, 120 bp, Artificial Sequence
  ENSG00000184672_11 (sequence is synthesized)
gattagcatgtttcactgttgatcatatataaagtcaggtgatattgcaattctgtatttaaagcttatttccaacaatgtcatgtaagaaaagatgcatcttatgctagtttttataat

SEQ ID NO: 663161 - DNA, 120 bp, Artificial Sequence
  ENSG00000184672_12 (sequence is synthesized)
ttatttataatttatagtttaaagtacttcagatcataatgataaaatacttgaaaaagttatatttctgccctgtataagcaccctttttattaataaagaatgcagatatttcagatg

SEQ ID NO: 663162 - DNA, 120 bp, Artificial Sequence
  ENSG00000184672_13 (sequence is synthesized)
tgatataatagttaaagaactgttggtttgatctgtgattaagttgagcatgctccgctctactgaactaaatgatccaattattacttcagtctgggtatgagattccatggacaagta

SEQ ID NO: 663163 - DNA, 120 bp, Artificial Sequence
  ENSG00000184672_14 (sequence is synthesized)
aggactagattgccaaggaaaagactgtcttgcccttggatccaaaagtttaaattagtgcatacatcatgtcatttcacctcctgttcctaggaactctccattcccaagcattgccag

SEQ ID NO: 663164 - DNA, 120 bp, Artificial Sequence
  ENSG00000184672_15 (sequence is synthesized)
tgttttccagataatcttagctgttgtcttgtgctgtggaaatggaagaaaccatcttcacagaccgtaggagaattcaacatataatttcttaataaatactgtttcttttaaaacaaa

SEQ ID NO: 663165 - DNA, 120 bp, Artificial Sequence
  ENSG00000184672_16 (sequence is synthesized)
tttatactaaatctcatttttattccaacattttactcccgctcggtgagtaccttctcagtggcattcttgtcctattcttttttttgtccttttttttggttttttgttttttttgtt

SEQ ID NO: 663166 - DNA, 120 bp, Artificial Sequence
  ENSG00000184672_17 (sequence is synthesized)
tttgttttttttctttttttccacttctttgattattgtttatatttgggaaagctggaggagcatggttttgagccttttcctgaatccaagtttttctagcatgcgatcgttctgtag

SEQ ID NO: 663167 - DNA, 120 bp, Artificial Sequence
  ENSG00000184672_18 (sequence is synthesized)
acaaggcgctgtgtctcggagtccgcggcgaccgtgcccgctgggagcgtctcccaagtccagcaaaatgtgcaactggttttatggaaaaagcgatgtgaagtatggtgcctatttttt

SEQ ID NO: 663168 - DNA, 120 bp, Artificial Sequence
  ENSG00000184672_19 (sequence is synthesized)
tcctttgtaaaaataaaaagcatgtttctaactctttttttgcatactctttttctgataacatttttgtataggtgggattttacggcagtgtttacaagtttgtggtcttgcaatact

SEQ ID NO: 663169 - DNA, 120 bp, Artificial Sequence
  ENSG00000184672_20 (sequence is synthesized)
ggtgcaaaccactgagcaaagacattaattttatattttttgtgccctttttggaagccggtgaaaacaaattcgttttttttccctcctgtttttgatacccattgataacatgaaact

SEQ ID NO: 663170 - DNA, 120 bp, Artificial Sequence
  ENSG00000184672_21 (sequence is synthesized)
tttcttacagctggtgattgggatcatttttaagcaaaatacttttttcctcctttaaattaactatgacttttgcacatttgacttttttaaaaaaccgagataattttatgatagata

SEQ ID NO: 663171 - DNA, 120 bp, Artificial Sequence
  ENSG00000184672_22 (sequence is synthesized)
tcctgatatctatatctatattgtcccttatttctcccccttccctccccgtaaatcaattttcaaatgatggcagtggaaggtttttctggaaaaaaaaaaatgaagtgcggtttggtt

SEQ ID NO: 663172 - DNA, 120 bp, Artificial Sequence
  ENSG00000184672_23 (sequence is synthesized)
acagcgaaggcagcctcgccgcgagctgccgctgccgctgctgccgccactggtgttgccgctctcaggcgccaggctccccgtcgccgccgccgccgcctcgccagccagagttgggct

SEQ ID NO: 663173 - DNA, 120 bp, Artificial Sequence
  ENSG00000184672_24 (sequence is synthesized)
ccgtgggcttcccccctcgcagcctcggtccttccccgctgcctgcaagtcagcctggctccgagtcacgtgtcagtgcctgaggcagagactgcgagaaaaaaacgcgcttcattcctt

SEQ ID NO: 663174 - DNA, 120 bp, Artificial Sequence
  ENSG00000184672_25 (sequence is synthesized)
cagtcttactgcaaagcaggagcacaacccgtctctttgtctccgtggtcaaatcaattacttcttagaaagtctaatttttttcaaaatgaccatgtacaagagcaaacgcagacatca

SEQ ID NO: 663175 - DNA, 120 bp, Artificial Sequence
  ENSG00000184672_26 (sequence is synthesized)
tttttcccttataaaataattactgtagtcaatagtaggctatttattgttgtttttaacatccatacttggcaaaatgaaaaattgtcatcttatgttagtccccagttgttttctttg

SEQ ID NO: 663176 - DNA, 120 bp, Artificial Sequence
  ENSG00000184672_27 (sequence is synthesized)
aaactgtactaaactctaaaaatctagaatgggaactactactattgaaattatcagtgagaacttctgtgattttcctttccatcaagcccagggcttagagggaggcatgtacaactc

SEQ ID NO: 663177 - DNA, 120 bp, Artificial Sequence
  ENSG00000184672_28 (sequence is synthesized)
actgccttagttttatttaggaaaactgaagcttcatagcagctttgagtgagctggaaagagttttctcacatctaagacattttctttaaaggataaattgtatatcctggtttccat

SEQ ID NO: 663178 - DNA, 120 bp, Artificial Sequence
  ENSG00000184672_29 (sequence is synthesized)
caatcttcaaggagctggattaaaatatcattgactgctgaaatacatattacaacatagttcctcaaagtagtatctggcatgatttaattattgcttcatctgaatccctctcacatt

SEQ ID NO: 663179 - DNA, 120 bp, Artificial Sequence
  ENSG00000184672_30 (sequence is synthesized)
gaagatttactctattttgtaaaatttagcatcattgggttattttaaaaaatatttcttaattccgttatccatttccataaccttcagtcaaaagatttaggattaaacgctcatgtc

SEQ ID NO: 663180 - DNA, 120 bp, Artificial Sequence
  ENSG00000184672_31 (sequence is synthesized)
actgagaatccgtatttgtaattggcaaaatcatccagtattccaggatcactagaagtaatgtgaagttgataaaattgaaaaatgtcctatgtgatttgacacagacttgagaaaata

SEQ ID NO: 663181 - DNA, 120 bp, Artificial Sequence
  ENSG00000184672_32 (sequence is synthesized)
agatctagggaggagggaacagcagaggcaaaggcagcttgggagggatgggaaatggaaaatcagggaaacaaacaaacaaacaaacaaaatgaatgagtgaatgtgggcttgaatagt

SEQ ID NO: 663182 - DNA, 120 bp, Artificial Sequence
  ENSG00000184672_33 (sequence is synthesized)
aaaacttccagagagaagacgatgggatctctccccaggtaactacctgtagatgaaaaatagatgaaatacacaaggaagtggcaagcaacaactttgagtggaaggtttttctggaaa

SEQ ID NO: 663183 - DNA, 120 bp, Artificial Sequence
  ENSG00000184672_34 (sequence is synthesized)
agagccttgaggatggcaccggccctcgcacgctcaactcctgctcctcctcttcgcaatgagtaaacgacgcagtaggtcctacccagcctattttgctttaccaaagggctttgcttt

SEQ ID NO: 663184 - DNA, 120 bp, Artificial Sequence
  ENSG00000184675_0 (sequence is synthesized)
agtgctggaggtgactggagccgcggcgacggcggcagcagctgcggtggcggcgctctcagccgtggcagccgaggctgcagcccggcccagggcggctcagcggacaataaccgggct

SEQ ID NO: 663185 - DNA, 120 bp, Artificial Sequence
  ENSG00000184675_1 (sequence is synthesized)
aggaacctgaccgggctggaccccactgtgatgcttcctgactgataatgttataacagtgcctggaagcctgaggctgcatttccagctggacgtacctcagttgtccccatcatcatg

SEQ ID NO: 663186 - DNA, 120 bp, Artificial Sequence
  ENSG00000184675_2 (sequence is synthesized)
gagacccaaaaggatgaagctgctcaggccaagggagctgcagcctctgggagtacccgtgaacaaacagcagaaaaaggagccaagaacaaggcagctgaggcgacagaaggaccaacc

SEQ ID NO: 663187 - DNA, 120 bp, Artificial Sequence
  ENSG00000184675_3 (sequence is synthesized)
tcagagccatcctcatccggcccaggtaggctgaagaaaactgccatgaaactctttggtggcaagaagggtatctgtactctgcctagtttctttggagggggacggagcaaaggttct

SEQ ID NO: 663188 - DNA, 120 bp, Artificial Sequence
  ENSG00000184675_4 (sequence is synthesized)
gggaaaggcagctccaagaaaggtctcagcaagagcaagacccacgatggcctgagtgaagcagcccatggccctgaagatgttgtcagtgaaggaactggcttctccctgcctttgcct

SEQ ID NO: 663189 - DNA, 120 bp, Artificial Sequence
  ENSG00000184675_5 (sequence is synthesized)
gagttaccctgccaatttcccagctctcagagtgcccatggggctttggagacaggctccagatgtaagacatctgtggctggagccacagagaaagctgtggctgagaagtttccctct

SEQ ID NO: 663190 - DNA, 120 bp, Artificial Sequence
  ENSG00000184675_6 (sequence is synthesized)
atgcccaagccaaagaaaggcctaaaaggcttttttagcagtatccgccgtcaccggaagagcaaggtcactggggctgagcaaagtgagccaggggccaaggggcctgagagggtcaga

SEQ ID NO: 663191 - DNA, 120 bp, Artificial Sequence
  ENSG00000184675_7 (sequence is synthesized)
gccaggcctcatgagcacgtgagctcagcccctcaggtgccctgctttgaggagaccttccaagcccctagaaaggaaaatgctaacccccaagatgcccctgggccaaaagtttctcca

SEQ ID NO: 663192 - DNA, 120 bp, Artificial Sequence
  ENSG00000184675_8 (sequence is synthesized)
acaccagaaccttctccaccagctactgagaaaatggcctgtaaagatccagaaaaacccatggaggcctgtgcctcagcacatgtgcaacccaagcctgcccctgaagccagtagccta

SEQ ID NO: 663193 - DNA, 120 bp, Artificial Sequence
  ENSG00000184675_9 (sequence is synthesized)
gaggagccccatagcccagaaacaggggagaaggtagtagcaggagaggtaaacccacccaatggccctgtgggggacccactgagcctcttgtttggggatgtgacatccctgaaaagc

SEQ ID NO: 663194 - DNA, 120 bp, Artificial Sequence
  ENSG00000184675_10 (sequence is synthesized)
tttgattcattgacaggttgtggtgacataatagcagaacaggacatggacagtatgacagacagcatggcctctgggggccagagagcaaaccgagatgggaccaagcgaagttcctgc

SEQ ID NO: 663195 - DNA, 120 bp, Artificial Sequence
  ENSG00000184675_11 (sequence is synthesized)
ctggtgacctaccaaggaggtggggaggagatggccttgccagatgatgatgacgaggaggaagaagaggaagaagaggtggaattagaggaggaagaagaggaggttaaggaggaggaa

SEQ ID NO: 663196 - DNA, 120 bp, Artificial Sequence
  ENSG00000184675_12 (sequence is synthesized)
gaagatgatgacttagaatatctgtgggaaactgcccaaatgtatccacggcccaatatgaacctgggctaccatcccaccacatccccaggccaccacggctacatgctccttgaccca

SEQ ID NO: 663197 - DNA, 120 bp, Artificial Sequence
  ENSG00000184675_13 (sequence is synthesized)
gttaggtcttatcctggcctagcccctggggaacttttgactcctcagagtgaccagcaagaatccgcccccaatagtgatgaaggttattatgactccaccacacctggatttgaggat

SEQ ID NO: 663198 - DNA, 120 bp, Artificial Sequence
  ENSG00000184675_14 (sequence is synthesized)
gattcaggtgaggccctggggcttgtccgcagggattgtctaccccgagacagctacagtggagatgccctatatgagttctatgagccagatgacagccttgagaactctccacctgga

SEQ ID NO: 663199 - DNA, 120 bp, Artificial Sequence
  ENSG00000184675_15 (sequence is synthesized)
gatgactgcctttatgacctccatggtcgaagctctgagatgtttgaccccttcttaaactttgagccctttttgtcctcccggccacctggggcaatggagacagaggaagaacggcta

SEQ ID NO: 663200 - DNA, 120 bp, Artificial Sequence
  ENSG00000184675_16 (sequence is synthesized)
gtgaccatccagaaacagttgttgtattgggagcttcggcgggagcagcttgaggcccaggaggcacgtgcccgagaagctcatgccagggaggcccacgccagggaggcctatactcga

SEQ ID NO: 663201 - DNA, 120 bp, Artificial Sequence
  ENSG00000184675_17 (sequence is synthesized)
gaggcttatggcagggaagcctatgccagggaggcccacacttgggaagctcatggcagggaggccagaacccgagaagcccaggcccgagaggttcgttgtagagagactcaagtccga

SEQ ID NO: 663202 - DNA, 120 bp, Artificial Sequence
  ENSG00000184675_18 (sequence is synthesized)
gagacccaggcccggcaggagaagcccgtcttagagtatcagatgaggcccttaggcccatcagtgatgggcctggcagcaggggtatcagggacctctcagatttcccaccggggaatt

SEQ ID NO: 663203 - DNA, 120 bp, Artificial Sequence
  ENSG00000184675_19 (sequence is synthesized)
acctcagctttccccaccactgcaagcagcgagccagactggagggacttccgtcctctggagaagcgttatgaaggaacctgctccaagaaagatcaaagtacctgcctgatgcagctc

SEQ ID NO: 663204 - DNA, 120 bp, Artificial Sequence
  ENSG00000184675_20 (sequence is synthesized)
ttccagagtgatgccatgtttgagccagacatgcaagaagcaaattttggaggatctcccaggagggcctaccctacttattcaccccctgaagatccagaggaagaggaggttgagaag

SEQ ID NO: 663205 - DNA, 120 bp, Artificial Sequence
  ENSG00000184675_21 (sequence is synthesized)
gaagggaatgccactgtgagtttctcacaggccctggtagagttcaccagcaatgggaacctcttttccagcatgtcctgcagctctgactctgactcatctttcactcaaaacctccct

SEQ ID NO: 663206 - DNA, 120 bp, Artificial Sequence
  ENSG00000184675_22 (sequence is synthesized)
gagctgcctcccatggtgacctttgacatcgctgatgtggaacgggatggggaaggcaagtgtgaagagaatcctgagttccacaatgatgaagatcttgcagcctccttggaagccttt

SEQ ID NO: 663207 - DNA, 120 bp, Artificial Sequence
  ENSG00000184675_23 (sequence is synthesized)
gagctgggctactatcacaaacatgccttcaacaactaccatagtcgattctaccaaggcctgccctggggtgtgagcagcctccctcgatacttgggactgcctggcctgcaccctcga

SEQ ID NO: 663208 - DNA, 120 bp, Artificial Sequence
  ENSG00000184675_24 (sequence is synthesized)
cctccacctgctgctatggccctcaacaggagaagccgctctctcgacactgcagagaccctggagatggagctctccaattcccacttggtccagggctacctcgagtctgatgagctg

SEQ ID NO: 663209 - DNA, 120 bp, Artificial Sequence
  ENSG00000184675_25 (sequence is synthesized)
caggcccagcaggaagattcagatgaggaggacgaagaggaggaagaaggagaatggagccgagacagtcccctttccctctatactgaacccccaggggcctatgattggcctgcttgg

SEQ ID NO: 663210 - DNA, 120 bp, Artificial Sequence
  ENSG00000184675_26 (sequence is synthesized)
gctccctgtcctcttccagtggggccaggtcctgcctggataagccccaaccagttggacaggccttccagccagtctccatataggcaggcaacctgttgcatacctcctatgaccatg

SEQ ID NO: 663211 - DNA, 120 bp, Artificial Sequence
  ENSG00000184675_27 (sequence is synthesized)
tcaatatcactatcagtgccagagtcaagggcacctggggaatctgggcctcaactagctcgtccctcacacctacacctgcccatgggcccttgctataacctccagccacaggcctcc

SEQ ID NO: 663212 - DNA, 120 bp, Artificial Sequence
  ENSG00000184675_28 (sequence is synthesized)
cagagcatgagggccaggcctcgagatgtgctgctgcctgttgatgagcccagttgctcttccagttctggaggcttcagccccagccctctaccacaggccaagcctgtgggcatcacc

SEQ ID NO: 663213 - DNA, 120 bp, Artificial Sequence
  ENSG00000184675_29 (sequence is synthesized)
catggcattcctcagctgcccagggtccggcctgagcacccccagcctcagcccactcactatgggccttccagccttgacctgtcaaaggagagggctgagcaaggtgcctctcttgcc

SEQ ID NO: 663214 - DNA, 120 bp, Artificial Sequence
  ENSG00000184675_30 (sequence is synthesized)
accagctactcctccactgccatgaatggaaacctagccaagtagttattatcaattctggagtagggacacggggcctgagcatgtgaatggggatcaggggttgggcagaagggtggg

SEQ ID NO: 663215 - DNA, 120 bp, Artificial Sequence
  ENSG00000184675_31 (sequence is synthesized)
ggggtgggggttgttgtttaacttgaaaaccctttgggccaaggaaaactcctgtgagttttcaccttggttttcccacttgcctcttctgccatctatggccacgttcaactcaagtgc

SEQ ID NO: 663216 - DNA, 120 bp, Artificial Sequence
  ENSG00000184675_32 (sequence is synthesized)
atctgcccagggaggctgctgctgctactgcactccagtttttgctttcgaggtttcttcttgtgacccacgctgggtttgggatgctgtaattttgtgcctattccagttgccaagtta

SEQ ID NO: 663217 - DNA, 61 bp, Artificial Sequence
  ENSG00000184675_33 (sequence is synthesized)
aacacacatgcacacacatatatagcatgcatccttgacacaggctaaacctttagtgccc

SEQ ID NO: 663218 - DNA, 120 bp, Artificial Sequence
  ENSG00000184675_34 (sequence is synthesized)
atagcatgcatccttgacacaggctaaacctttagtgccccctgcccctttcccccaatgaatgatgaaccactgattagcagccaagtctgcattgcctcccgcttggggaagtggggc

SEQ ID NO: 663219 - DNA, 120 bp, Artificial Sequence
  ENSG00000184675_35 (sequence is synthesized)
ctattagcaatgtgaaattatggtacagatcctccccacccctattccttttggcctggcatagctgccatcattatatcagatgactataagctattcatcccagctagctgtccttag

SEQ ID NO: 663220 - DNA, 120 bp, Artificial Sequence
  ENSG00000184675_36 (sequence is synthesized)
agaggatcaagtagcgtgtgtctcacagcctatcgctgtggactttggcatcatgaccagatgggggccttttaactgtcctgccatagcttgggttaaagacaaaaatgctaatcccct

SEQ ID NO: 663221 - DNA, 120 bp, Artificial Sequence
  ENSG00000184675_37 (sequence is synthesized)
tgatggagtgataaaattcatccatttgcaaacagaagacaaaacaaggttctgttgtggacactgccatagagtgttgagctccggaatgataggattttttttccttcttttaagctt

SEQ ID NO: 663222 - DNA, 120 bp, Artificial Sequence
  ENSG00000184675_38 (sequence is synthesized)
gtgactacctgagttgcagatgcttttgaatttttgttcttttttcctctaaaggaaattttcataatctcatcacaaggaacacggtcttttaattgagataagggaagagaagcaacc

SEQ ID NO: 663223 - DNA, 120 bp, Artificial Sequence
  ENSG00000184675_39 (sequence is synthesized)
taaattaggcttgactataggggctggggtttttgtggagtgtaggggaaagatagaaaatgagggtccatttatcacagccagcaagaaaggggatttcagaccatgcagagcttaagg

SEQ ID NO: 663224 - DNA, 120 bp, Artificial Sequence
  ENSG00000184675_40 (sequence is synthesized)
tatctcagtttcttaaaagggaaaactcccttctcaagcctcccaacacaaaatgttccttaagccttgcccatcccatcatttggactctgtaataaggccccaggtttgcactcccaa

SEQ ID NO: 663225 - DNA, 120 bp, Artificial Sequence
  ENSG00000184675_41 (sequence is synthesized)
gacaggataccaaaggcatctcagctgctgttctgggccctttaaagagcttttatcttccaattagccgagtccttagcatcatcaaatgacagggcttcttggcagttgcagcccttt

SEQ ID NO: 663226 - DNA, 120 bp, Artificial Sequence
  ENSG00000184675_42 (sequence is synthesized)
atggaatgaatggcaccctcccttctcctgcatccatgcagttttcatgttaaactaggttggaaatactggtggggaagagcttgctgtcaggaagacattggaacaggctaatcttgc

SEQ ID NO: 663227 - DNA, 120 bp, Artificial Sequence
  ENSG00000184675_43 (sequence is synthesized)
caagctcaacctctcattaatcacctgtaggagagggttccttttacatgtctttattggaaatggcatatggaacattttttgcttggctgtgttcactcaaattatgattattgcacc

SEQ ID NO: 663228 - DNA, 120 bp, Artificial Sequence
  ENSG00000184675_44 (sequence is synthesized)
ctcgccctcacatcccaccatctccatgcctgttgagagaagaagtcaacagggttcttgccattcctgagatatggcaatttagcttgggaacagatgctgtttgccccctaagtcaag

SEQ ID NO: 663229 - DNA, 120 bp, Artificial Sequence
  ENSG00000184675_45 (sequence is synthesized)
gtgactttgtgggcaaactgtttcttggccaggggatgtgtccatgctggtctttgtcaccatttctcagattggggttggcccagtgcccttactcacaaatagcagacctggctggta

SEQ ID NO: 663230 - DNA, 120 bp, Artificial Sequence
  ENSG00000184675_46 (sequence is synthesized)
gaagctgcacccctggaagcaccacatgaatttgcatggcactaacaccaccactcaagggacccagaccagctcttcaggctgactttggctacagatacattgtgaagaaatgtatct

SEQ ID NO: 663231 - DNA, 120 bp, Artificial Sequence
  ENSG00000184675_47 (sequence is synthesized)
gttgtggagctggagaatgaaagagggtgaggaaggccctccttaccccaagcacagcattccaagagagaagtgcccaaattccaactttctggcctcttaccaaagctgctctgggat

SEQ ID NO: 663232 - DNA, 120 bp, Artificial Sequence
  ENSG00000184675_48 (sequence is synthesized)
ggtggggctgaaattggcctggctatttggcaggaagtaaacactcaccaaatgcctttacaacagggaagaacccacctcttgcctcttctttcagggcagcttgagctcctgtctaca

SEQ ID NO: 663233 - DNA, 120 bp, Artificial Sequence
  ENSG00000184675_49 (sequence is synthesized)
tgtggactgtgccagccacagcaggcggtagagccatcaccagcctccagaccctgctggagaagggccaccagcctatctgggaagagaaaaaggaggtggccaacctttggctaaggg

SEQ ID NO: 663234 - DNA, 120 bp, Artificial Sequence
  ENSG00000184675_50 (sequence is synthesized)
ctgagagctgccctcaggatcaggaaggcagcatgaggcattgtctctgaggggcactggcatagccctgacacactttgttgggctttggaaggtcacacaccacagagtagggcctgg

SEQ ID NO: 663235 - DNA, 120 bp, Artificial Sequence
  ENSG00000184675_51 (sequence is synthesized)
ggctgagtgagagttcatggtttggacagccttgctgcctgcaagtcccttcactgccctagccagcccaggaataggatccttaccacctgaagtggggcagccaggatatgtggctgc

SEQ ID NO: 663236 - DNA, 120 bp, Artificial Sequence
  ENSG00000184675_52 (sequence is synthesized)
agaagcaggttcctttgaatttctagagctaagcagtttgtggctgaaacccaatggcagcctaggggaggaaggaagacctgtctggggacccatggtgttgacagcacagggtgacat

SEQ ID NO: 663237 - DNA, 120 bp, Artificial Sequence
  ENSG00000184675_53 (sequence is synthesized)
tgggagagccagccaagcttcaggcctgtttccaaacacagactagtgctggcttgggtggcagcaaatacaccccagaccactaaaactgttgatatcatgtccacacctccaagagta

SEQ ID NO: 663238 - DNA, 120 bp, Artificial Sequence
  ENSG00000184675_54 (sequence is synthesized)
ctactagatgaacaacatgtctccattgcaaggtcctggaataatgcttttggatgtgattttaagggaaaatgggacttagtggaagtagctgccttcatcttattacccaataggcct

SEQ ID NO: 663239 - DNA, 120 bp, Artificial Sequence
  ENSG00000184675_55 (sequence is synthesized)
agtgccagacagctgtgatcctgagaattcccagatgagactggtccttggaggaccagtgaatgtggatagagaaggccacctagtaggcctctcccagggccaggatgccagtttctt

SEQ ID NO: 663240 - DNA, 120 bp, Artificial Sequence
  ENSG00000184675_56 (sequence is synthesized)
ggtgctttagagtctccaaggaagcactgccttggggcccagttcaagccagccctacctatctggcctcagcttgggtaccaggccacaagactgcccggataatgggttcagtaaaca

SEQ ID NO: 663241 - DNA, 120 bp, Artificial Sequence
  ENSG00000184675_57 (sequence is synthesized)
ccagtctctctccctccttagtcctatgccaagaagggaagtagcttcacacactcaggaggctgggtgtgtacccttcatcctgctgccagcagctttccttacctgtgccagtgccac

SEQ ID NO: 663242 - DNA, 120 bp, Artificial Sequence
  ENSG00000184675_58 (sequence is synthesized)
caccccacctgccctcagcccccaggcccagttgctagagggaggcatggggtttagcagggagacttcaagtttacccatgtgtatgttgcattcaagttgtttttaatatatatatat

SEQ ID NO: 663243 - DNA, 120 bp, Artificial Sequence
  ENSG00000184675_59 (sequence is synthesized)
atatatatcaaaagtcaattatctatttttatattgtttgcattttatattcatggaaaacaatgtttatcaattgttcttttctgatttatttttaagcggtgctgtttacagttttaa

SEQ ID NO: 663244 - DNA, 120 bp, Artificial Sequence
  ENSG00000184675_60 (sequence is synthesized)
acaaaacaaagatgacacaaaaattgctgctgcttgtgcagagggctggcatctcaactgcctagggccctccctctttcccctctccctaccttagctgtaccacactgtccgttccct

SEQ ID NO: 663245 - DNA, 120 bp, Artificial Sequence
  ENSG00000184675_61 (sequence is synthesized)
ccccccatgatagggacagcagaagatgcccaggtactgaagacaaacgccaagtgactcaggcgtgtgggacctggtagacagcttgtcattttctggctttattttatgtttttcttt

SEQ ID NO: 663246 - DNA, 120 bp, Artificial Sequence
  ENSG00000184675_62 (sequence is synthesized)
cttttgaacccttcttccccatgtctagaccctctgagagtactcatgtgtcttattttttttcctcgttatgttttgtgctttagttttgaaatcagagtgcccatgttgtgctatttg

SEQ ID NO: 663247 - DNA, 120 bp, Artificial Sequence
  ENSG00000184675_63 (sequence is synthesized)
tcttgttgagtttctccaaaggagcattttgggaacattctccacccaatggggaaggaagggggtttcaaccatgtcccctttccccaagaagctgtgggagacagatgacaatgatgc

SEQ ID NO: 663248 - DNA, 120 bp, Artificial Sequence
  ENSG00000184675_64 (sequence is synthesized)
ttgcactatcaggaatttaccatctcgttgaggaaacccttgcataggacttcctaggagctcagttgattgtgacattttcccagaagagaggctttggggaactccttcacccctctt

SEQ ID NO: 663249 - DNA, 120 bp, Artificial Sequence
  ENSG00000184675_65 (sequence is synthesized)
gctgctttgggggaatctcctcccctaccaccattccccctcccctgccctgctccagctcacacgtggatggtactttggggaacagtgactttcagggtgatggcttgctggcctgat

SEQ ID NO: 663250 - DNA, 120 bp, Artificial Sequence
  ENSG00000184675_66 (sequence is synthesized)
ccctgactttccaatcctatagtcactccaaagaagaaaatccacatggtatgtatatgtgtgagggttgggtctattgagaggtgggactttaattattgttattattattggtgctta

SEQ ID NO: 663251 - DNA, 120 bp, Artificial Sequence
  ENSG00000184675_67 (sequence is synthesized)
tttttcctgctgtatatgggggtgggggtgggggggaataaaacaggaatgtatatttaggtcatgttaaataaaatggctggaggaaggagggaagaaattaggaactgcagtacatca

SEQ ID NO: 663252 - DNA, 120 bp, Artificial Sequence
  ENSG00000184675_68 (sequence is synthesized)
tcaccccaggtgtaagagttatttctctcccagtgcagaaaggggagtgtggcccctggctgtacctgagcttcctcttctccatccctgagacatcacagaatcacccgggttctgacc

SEQ ID NO: 663253 - DNA, 120 bp, Artificial Sequence
  ENSG00000184675_69 (sequence is synthesized)
tctccacttctagctctcactgacatctggatatcttgatgcactgcctgtttgtaacaacatatacttctttgctgaatgctaataaacttctgggttcaagagggaacccctcagtca

SEQ ID NO: 663254 - DNA, 120 bp, Artificial Sequence
  ENSG00000184677_0 (sequence is synthesized)
gatacccattgcgcgccggcctcaagatggccgccttctggcgtctccggcgctgttgaatggcgaaagctttattgttcccttcgggcaggagtgttcgtgtcctctatggcgctgtca

SEQ ID NO: 663255 - DNA, 120 bp, Artificial Sequence
  ENSG00000184677_1 (sequence is synthesized)
ataaagaacggcagtttgaatcggtgctgaacagggcctgtcctcccaaagccaactctaaggagaggagaggaagagcagttcttggggcagagttgacgcaatggagctccccaacta

SEQ ID NO: 663256 - DNA, 120 bp, Artificial Sequence
  ENSG00000184677_2 (sequence is synthesized)
cagccggcagctgctgcagcagctgtacactctgtgcaaggagcagcagttctgtgattgcaccatctccattggtaccatttacttcagggctcacaagcttgtcctggctgctgccag

SEQ ID NO: 663257 - DNA, 120 bp, Artificial Sequence
  ENSG00000184677_3 (sequence is synthesized)
cctcctgttcaaaaccctgctggataacacagataccatctccatcgatgcatctgtggtgagccccgaggagtttgcgctcttgttggaaatgatgtacacgggcaaactacctgtggg

SEQ ID NO: 663258 - DNA, 120 bp, Artificial Sequence
  ENSG00000184677_4 (sequence is synthesized)
caagcacaacttctccaaaatcatctccttagcagacagtctacagatgtttgatgtagctgttagctgcaaaaatcttctgaccagccttgtaaactgctcggttcagggtcaggtggt

SEQ ID NO: 663259 - DNA, 120 bp, Artificial Sequence
  ENSG00000184677_5 (sequence is synthesized)
aagggatgtctctgcgccatcctcagagacattcagaaaggaaccagagaagcctcaagtagaaatcctttcatctgaaggtgctggagagcctcattcttccccagagcttgctgccac

SEQ ID NO: 663260 - DNA, 120 bp, Artificial Sequence
  ENSG00000184677_6 (sequence is synthesized)
tccagggggccctgtgaaagctgagactgaggaagcagcccattcagtttcacaagagatgagtgtgaattctcccacagcccaggagagccagaggaatgcagaaaccccagcggagac

SEQ ID NO: 663261 - DNA, 120 bp, Artificial Sequence
  ENSG00000184677_7 (sequence is synthesized)
tcctactacagctgaagcttgttccccctcccctgctgtgcaaacctttagtgaggcaaagaagacaagcacagaaccaggatgtgaaaggaaacactaccagctgaattttcttctaga

SEQ ID NO: 663262 - DNA, 120 bp, Artificial Sequence
  ENSG00000184677_8 (sequence is synthesized)
aaatgaaggtgtcttctcagatgcactcatggttacccaggatgttttaaaaaaactagaaatgtgttcagaaattaaaggtccacagaaggagatgatagtgaaatgtttcgagggtga

SEQ ID NO: 663263 - DNA, 120 bp, Artificial Sequence
  ENSG00000184677_9 (sequence is synthesized)
aggaggacattcagcattccagagaatcctgggtaaagtaagagaggaaagcctggatgttcaaactgttgtgtccctgttgaggctgtaccaatattctaatcctgcagtaaaaacagc

SEQ ID NO: 663264 - DNA, 120 bp, Artificial Sequence
  ENSG00000184677_10 (sequence is synthesized)
actattagacaggaagccagaagatgtagacacagtgcagccaaaagggagcacagaggagggaaagaccttgtctgttctgttactagaacacaaagaggacctgatacagtgtgtaac

SEQ ID NO: 663265 - DNA, 120 bp, Artificial Sequence
  ENSG00000184677_11 (sequence is synthesized)
acagctgagacctattatggagtccctggaaacagccaaggaggaattcctgactggcactgaaaaaagggtgattctgaattgctgtgagggcagaacacccaaggagacaatagaaaa

SEQ ID NO: 663266 - DNA, 120 bp, Artificial Sequence
  ENSG00000184677_12 (sequence is synthesized)
tttgttgcacagaatgactgaagagaagacgctgactgctgagggtttggtaaaactcctccaggctgtgaagacgactttcccaaacctgggccttctgctagagaagttgcagaaatc

SEQ ID NO: 663267 - DNA, 120 bp, Artificial Sequence
  ENSG00000184677_13 (sequence is synthesized)
agccactttgccaagcaccacagtccaaccaagccctgatgattatgggactgagctattgagacgctatcatgaaaacctctctgagattttcacagacaaccagattttattaaagat

SEQ ID NO: 663268 - DNA, 120 bp, Artificial Sequence
  ENSG00000184677_14 (sequence is synthesized)
gatctcacacatgacaagtttagcccctggagaaagagaggtcatggagaagcttgtgaaacgtgactctggttcaggtggtttcaattctctgatatcagcagttctagaaaagcagac

SEQ ID NO: 663269 - DNA, 120 bp, Artificial Sequence
  ENSG00000184677_15 (sequence is synthesized)
tctctctgccacagccatttggcaactgctgctggtggttcaggagacaaagacctgtccattggacctgctcatggaggaaatacgaagggagcctggtgccgatgctttcttccgggc

SEQ ID NO: 663270 - DNA, 120 bp, Artificial Sequence
  ENSG00000184677_16 (sequence is synthesized)
agtgaccaccccagaacatgccactttagaaacaatcctgaggcataaccagttgatcttggaggccatccaacagaagattgagtacaagctctttacctcggaggaggagcacctggc

SEQ ID NO: 663271 - DNA, 120 bp, Artificial Sequence
  ENSG00000184677_17 (sequence is synthesized)
agagactgtgaaagagattctgagcattccctctgagacagccagccctgaagcttccctgagagcagtgctgagcagagccatggaaaaatcagtcccggccattgaaatatgccacct

SEQ ID NO: 663272 - DNA, 120 bp, Artificial Sequence
  ENSG00000184677_18 (sequence is synthesized)
cctgtgcagtgtccacaaatcttttccaggcctgcagcctgtcatgcaggagttggcatacattggtgtccttactaaggaagatggagagaaggaaacgtggaaggtgagtaataaatt

SEQ ID NO: 663273 - DNA, 120 bp, Artificial Sequence
  ENSG00000184677_19 (sequence is synthesized)
tcaccttgaagccaacaacaaagaagatgaaaaggcagccaaagaagacagccagcctggggaacagaatgatcaaggagagactggttccttgccaggacagcaagagaaagaggcttc

SEQ ID NO: 663274 - DNA, 120 bp, Artificial Sequence
  ENSG00000184677_20 (sequence is synthesized)
agcctccccagaccctgccaagaagagcttcatctgtaaggcctgcgacaaaagcttccatttctactgccgcctaaaggtgcacatgaagcgctgccgggtggctaagagcaaacaggt

SEQ ID NO: 663275 - DNA, 120 bp, Artificial Sequence
  ENSG00000184677_21 (sequence is synthesized)
gcagtgtaaggagtgcagtgagaccaaggattcaaagaaagagctggacaaacatcagctggaggcccatggtgcaggtggagagcccgatgcccccaagaagaagaagaagaggcttcc

SEQ ID NO: 663276 - DNA, 120 bp, Artificial Sequence
  ENSG00000184677_22 (sequence is synthesized)
agtgacatgtgacctctgtggcagagaatttgcccatgcctcaggcatgcagtaccataagctgacagagcacttcgatgagaagcctttctcctgtgaagagtgtggggcgaagtttgc

SEQ ID NO: 663277 - DNA, 120 bp, Artificial Sequence
  ENSG00000184677_23 (sequence is synthesized)
agccaattccaccctgaagaaccaccttcgccttcacaccggggaccgcccgttcatgtgcaagcactgcctcatgaccttcacccaggcctccgccctggcctatcacaccaagaagaa

SEQ ID NO: 663278 - DNA, 120 bp, Artificial Sequence
  ENSG00000184677_24 (sequence is synthesized)
gcactcagaagggaaaatgtatgcatgccagtactgtgatgctgtgtttgcccagtctattgagctgtcccgccacgtgaggacccacaccggggacaagccctatgtctgcagagactg

SEQ ID NO: 663279 - DNA, 120 bp, Artificial Sequence
  ENSG00000184677_25 (sequence is synthesized)
tggcaagggcttccggcaagccaatggcctctccatccatctgcacacctttcacaacatagaagatccttatgactgcaagaagtgcaggatgagtttccccactcttcaggatcaccg

SEQ ID NO: 663280 - DNA, 120 bp, Artificial Sequence
  ENSG00000184677_26 (sequence is synthesized)
gaagcacatccatgaggtgcactccaaagagtaccacccctgccccacgtgtgggaagatcttcagtgccccgtccatgctggagcggcacgtggtgacccacgttggagggaagccctt

SEQ ID NO: 663281 - DNA, 120 bp, Artificial Sequence
  ENSG00000184677_27 (sequence is synthesized)
cagctgcgggatctgcaacaaggcctaccagcaattgtctggtttgtggtaccacaatcgaacccaccaccctgacgtatttgctgctcagaaccaccgatcttccaagttctcatcact

SEQ ID NO: 663282 - DNA, 120 bp, Artificial Sequence
  ENSG00000184677_28 (sequence is synthesized)
ccagtgcagctcctgtgacaaaaccttccccaacaccattgagcacaagaagcacatcaaagcagaacatgcagatatgaagttccatgaatgtgaccagtgtaaggagctcttccccac

SEQ ID NO: 663283 - DNA, 120 bp, Artificial Sequence
  ENSG00000184677_29 (sequence is synthesized)
gccagccttgctgcaggttcatgtcaagtgccagcattcagggtcccagccattccggtgcttgtactgtgctgctactttccgttttcctggagcattgcagcaccatgtcaccacgga

SEQ ID NO: 663284 - DNA, 120 bp, Artificial Sequence
  ENSG00000184677_30 (sequence is synthesized)
gcacttcaagcagtcagagaccaccttcccctgtgagctctgtggggaactcttcacctcccaggcccagcttgacagtcacctggaatctgagcacccaaaggtgatgagcacggaaac

SEQ ID NO: 663285 - DNA, 120 bp, Artificial Sequence
  ENSG00000184677_31 (sequence is synthesized)
ccaggccgcagcctcacagatggcgcaggtgatccaaaccccagagccggtggccccgacagagcaggtgatcactttggaggagacccagcttgccgggtcgcaggtgtttgtgacgtt

SEQ ID NO: 663286 - DNA, 120 bp, Artificial Sequence
  ENSG00000184677_32 (sequence is synthesized)
gccagattctcaggcatctcaggccagctctgagctcgtggcggtgactgtggaggacttgctggatggcacagtgacgctgatctgtggtgaggccaaatgagcagcctttcatccggc

SEQ ID NO: 663287 - DNA, 120 bp, Artificial Sequence
  ENSG00000184677_33 (sequence is synthesized)
agagccttcctgcgtttgcagcagagaggaggccccacagcttgccctttgccctccatccctggctgtcctgagtggtgagcatcttagcttagcaccaaccaacacagtctcacctag

SEQ ID NO: 663288 - DNA, 120 bp, Artificial Sequence
  ENSG00000184677_34 (sequence is synthesized)
aaaacagatggaagcttcgttgttctcatagaaccaacagcatctgagccctcaacaccaacagcaccatcctctgtagcagacaggcctccctccccacaggcccgctgctgcggcctc

SEQ ID NO: 663289 - DNA, 120 bp, Artificial Sequence
  ENSG00000184677_35 (sequence is synthesized)
tatgacactgtccatccccaagtgacatgtggcttcagaagtagagtctgaaagagcagtgggatgggagctggtgaccagggtaccccaggaggcatgatgtgccgacagcgctcagtg

SEQ ID NO: 663290 - DNA, 120 bp, Artificial Sequence
  ENSG00000184677_36 (sequence is synthesized)
cctctggccatttaaagtgagaggggcaccaacagacaattcggggaccttaggccccttcctgaggcacacttggccccttcctcggtcctatcatcctaccctctgctggggttcccc

SEQ ID NO: 663291 - DNA, 120 bp, Artificial Sequence
  ENSG00000184677_37 (sequence is synthesized)
ctccacccagtggccacgcccagcaccctattgatggctataggacaggtagccctcatttccatgcctgataaccccttgtcagttgtcagctcttcccaaaacaaagctctggagttt

SEQ ID NO: 663292 - DNA, 120 bp, Artificial Sequence
  ENSG00000184677_38 (sequence is synthesized)
ctgctggaagtgtttaatgtgaggcatcagctgctagacagtgtctgcctttccaggacattcttcttggtattccttacctgaagcctggttcccacagctcttccgtgtcatcttcat

SEQ ID NO: 663293 - DNA, 120 bp, Artificial Sequence
  ENSG00000184677_39 (sequence is synthesized)
ccccttcctttaatcaaaggctgaaatctctgcctgacctggcagcctggctccctctgggtcatatggtgcagactgtgaccagcaccaggcaggcagtcctgtctgcgtgtggaggag

SEQ ID NO: 663294 - DNA, 120 bp, Artificial Sequence
  ENSG00000184677_40 (sequence is synthesized)
cagccgtgactgcccgtggctctgctgccgcccactccctgccttgtgagtggcctgctgcctcacctcccgcaggccgccacacttattgcaggtcagtgatcctttggagtttgaatt

SEQ ID NO: 663295 - DNA, 120 bp, Artificial Sequence
  ENSG00000184677_41 (sequence is synthesized)
tcacaaagctttttttatcttcagttcctaaaatataatctgataattaatggtttgtggaatccattatgaagtgcaattagatagatgtaggttcctgccgtttggagagaatgacta

SEQ ID NO: 663296 - DNA, 120 bp, Artificial Sequence
  ENSG00000184677_42 (sequence is synthesized)
gcatttatcttcttttccttccatgccaaaggttggagtctgctggtgcggtgtttacacaccaggcagggctgtctgccaccttgtgtggcttgaccccctgtggaggggagtgcctgg

SEQ ID NO: 663297 - DNA, 120 bp, Artificial Sequence
  ENSG00000184677_43 (sequence is synthesized)
ttggatcccacactggcagagatggggccaccccttccttccaggcacatctcacattgccatgtacagaggcaggagtcacgtttggtcaccatggaagcttttattgctcccacatgg

SEQ ID NO: 663298 - DNA, 120 bp, Artificial Sequence
  ENSG00000184677_44 (sequence is synthesized)
tcaggtctcaccctgcttgaagcgcagaaggcacagccttactgaccagcacgcccactgactggcatctgccggctttgtgcaggcagccccgacggtttccacagcgagcgccagctc

SEQ ID NO: 663299 - DNA, 120 bp, Artificial Sequence
  ENSG00000184677_45 (sequence is synthesized)
cggccagcctgggacagctcatcccagccgactacacctgcttctggtcctgtccacattttgatacgcagatcacttgagcttgtcaattagggttctgccattctgaaataaatgaag

SEQ ID NO: 663300 - DNA, 120 bp, Artificial Sequence
  ENSG00000184677_46 (sequence is synthesized)
tttctaaagcagagtcggcctcagaagccaaaaactgaccagaagatggtgctcaaacctttaagacttcatctccatgtgaagggctcactgtttctaccaaggctgtgcctgtattaa

SEQ ID NO: 663301 - DNA, 120 bp, Artificial Sequence
  ENSG00000184677_47 (sequence is synthesized)
ggcttttccgtcctgggaactgtcagtctgggagagctcttgatctgcaggtggcaaaatggcactgaatatccccttggcagcagagaaaacccactgaaagatcgtagagtggcacat

SEQ ID NO: 663302 - DNA, 120 bp, Artificial Sequence
  ENSG00000184677_48 (sequence is synthesized)
gcttacagggcattggtgccaagtccagtggatgagaatccagcccctcacaagctgtgggatggggcttgggagttgcagtgaatgtcattaaaatttcttccaaaacaaaactagaaa

SEQ ID NO: 663303 - DNA, 120 bp, Artificial Sequence
  ENSG00000184677_49 (sequence is synthesized)
gaaaaaacaaacaacaacaaaaaaaactcttcggaataaagagggctgtaaattttgaattccagtgtcagatcctttcaagcactgagaaattctttctcaggtttctttttttggggg

SEQ ID NO: 663304 - DNA, 87 bp, Artificial Sequence
  ENSG00000184677_50 (sequence is synthesized)
gctgtaaattttgaattccagtgtcagatcctttcaagcactgagaaattctttctcaggtttctttttttggggacacagtggcac

SEQ ID NO: 663305 - DNA, 120 bp, Artificial Sequence
  ENSG00000184677_51 (sequence is synthesized)
aacctctgcgggctcacgcaatcctcctgccacagcttcccaagtagctgggaccacaggcgtgagccaccactgctggccagtttttgtatttttttttttttttgtagagacagggtc

SEQ ID NO: 663306 - DNA, 90 bp, Artificial Sequence
  ENSG00000184677_52 (sequence is synthesized)
tacgcctggccaggtttctgttggagacccagattgtgacaagacatttgttttcttcggaatcaccagatttgcagcttactgtgccga

SEQ ID NO: 663307 - DNA, 120 bp, Artificial Sequence
  ENSG00000184677_53 (sequence is synthesized)
ttttcttcggaatcaccagatttgcagcttactgtgccgagagtggactggctgccggggcccatcagatgccctctggcccatggcacactcagcagaaggcacaaacccagtgctggt

SEQ ID NO: 663308 - DNA, 120 bp, Artificial Sequence
  ENSG00000184677_54 (sequence is synthesized)
tctcatcaagaaagaggggaaggcccttcccgagtttactgtctgctctgagtgggctccgcactggctgactgattttatagtcttgctctctagagaagcccaggcatggatcttata

SEQ ID NO: 663309 - DNA, 120 bp, Artificial Sequence
  ENSG00000184677_55 (sequence is synthesized)
ggaaaactttctgactctgcttggccattttatccttttctcctacttctgcccaagagacctgaattgctgccatagaggacagtgtttgtgtggtctcctgagtccacatcgctcgct

SEQ ID NO: 663310 - DNA, 120 bp, Artificial Sequence
  ENSG00000184677_56 (sequence is synthesized)
tccatggggtcccggtgttgtttttgcctcgttccccataggctgctgcccttatggcctctggactgaactctggggcctttggggtggtgtgaaggagtctgtgggcttcttggaaca

SEQ ID NO: 663311 - DNA, 120 bp, Artificial Sequence
  ENSG00000184677_57 (sequence is synthesized)
catggatctgttcggtgggtccccagacctctgctcccagagctcatggcccaggtggtgaggagggaaaggcagtcagattccaggctggagtgtgattctgtgggaatactggggtca

SEQ ID NO: 663312 - DNA, 120 bp, Artificial Sequence
  ENSG00000184677_58 (sequence is synthesized)
gttatggaacaggacttgcccatcataggtaagtgagacagcaaatagatgattcaagagcaaggattactgcgggaaggtgagactcctactgtccacgcgcatgagcagaacctggaa

SEQ ID NO: 663313 - DNA, 120 bp, Artificial Sequence
  ENSG00000184677_59 (sequence is synthesized)
ccagaggggcagggaccaggggtctttactcatttattttatgggtaaagagacatgaagagacagcctctctcttctgtctcagaagctctgtgtttgggaaactttgagcccagtgag

SEQ ID NO: 663314 - DNA, 120 bp, Artificial Sequence
  ENSG00000184677_60 (sequence is synthesized)
tagcagggtctgcagtgtgagtaccaggtttccctggcaatccaggtctcctctgaggaagcattctgacttcccactgaccacggaaggcatgtcagcttcatgcctcgggctagagtt

SEQ ID NO: 663315 - DNA, 120 bp, Artificial Sequence
  ENSG00000184677_61 (sequence is synthesized)
ctgataatcggggctgaggggtgaaaagaaatccagtcagacagacagtggggagacaggtccctgccctttatttgcgggatcaatcagggactcccagaaaggaaggagaatggtgag

SEQ ID NO: 663316 - DNA, 120 bp, Artificial Sequence
  ENSG00000184677_62 (sequence is synthesized)
aagggccctaagagttcgtctctcacctgggggctggtgacgtggtcaccacaagctgaagacaggctaatggggtggcgggtgtgtgtttaaacctcacgtgcctggaagctgcacatt

SEQ ID NO: 663317 - DNA, 120 bp, Artificial Sequence
  ENSG00000184677_63 (sequence is synthesized)
gaccaaaggagggagggaagtgctaaccatgtatagagtgggcaggcggttccagggagacaagcagcatgttattaaattgggcctaggcagttggacgataatggagaaaaagcaggg

SEQ ID NO: 663318 - DNA, 120 bp, Artificial Sequence
  ENSG00000184677_64 (sequence is synthesized)
atgctataatgagtcctccccaagggtgagttcagcaccccagccctgttctgcttgtatcccagtgatacttgggaggtaggaagaaaatgggagtaagagaacaatttggggctgaag

SEQ ID NO: 663319 - DNA, 120 bp, Artificial Sequence
  ENSG00000184677_65 (sequence is synthesized)
ggagtgtcagaggcacgttgatccttgttttgttgtcatggaaacttcggggctggtgggacttaggccaaaagctcagaggcacagccaaaatttagaagcttgctactcctacgactc

SEQ ID NO: 663320 - DNA, 120 bp, Artificial Sequence
  ENSG00000184677_66 (sequence is synthesized)
ggcctataaggaagagagaagctgtctgtactttggggactacattgctgaaggaaaaaaatcactccctggctaattaagattgcttccaaattgggggaatgtgtgtcatttccttta

SEQ ID NO: 663321 - DNA, 120 bp, Artificial Sequence
  ENSG00000184677_67 (sequence is synthesized)
ccaaggccagtcatccctgcttccacccatggtcaggacagtcagccactacgtgatgctgtataaattggattacaaaccatattcttgttcagcttgcactaatctatataaataaaa

SEQ ID NO: 663322 - DNA, 120 bp, Artificial Sequence
  ENSG00000184677_68 (sequence is synthesized)
tatgtactttgaaaaaaattaggctacatgagtttcaaatggactgtgatgttatagacctgctttctctttggttctgggccagtgtcagacggggacaggggtgataggcctggtgtc

SEQ ID NO: 663323 - DNA, 120 bp, Artificial Sequence
  ENSG00000184677_69 (sequence is synthesized)
ctaggggccatttgtgtaccttgaggccgtgttaacatggcctgggggaaagaaagctctcctgtcacttggagtctcattcctaaaccctccttcccagggagcaagtgtggggcaggg

SEQ ID NO: 663324 - DNA, 120 bp, Artificial Sequence
  ENSG00000184677_70 (sequence is synthesized)
tttcagagcacaggctttggtgtccagcctgggtacatccagctgtcccgctgtctaactgacattgtgtgagatgcttactctctctgagctccctcctcctggctcccaactttatta

SEQ ID NO: 663325 - DNA, 120 bp, Artificial Sequence
  ENSG00000184677_71 (sequence is synthesized)
taaaatggggaaaatgattgtgcttgccctacagaattgtagtatgaattaaaagtctggatttaatgtatttaatatagaaaattttagcttttattaataaaagtttttggcatacaa

SEQ ID NO: 663326 - DNA, 120 bp, Artificial Sequence
  ENSG00000184677_72 (sequence is synthesized)
ataaagaacggcagtttgaatcggtgctgaacagcaaaagtttactgacccctgccctaaacacaaggagattggatcagtgttgtcattcagctattcctctcgtcggttcttctggag

SEQ ID NO: 663327 - DNA, 120 bp, Artificial Sequence
  ENSG00000184677_73 (sequence is synthesized)
tgggaaaagagttaaaactgcgcgatgcaccgagagcactttagttgacagaacactctggcttcccttctggtcttactgactattcagagtttctcctgctttgaatagcgttggtac

SEQ ID NO: 663328 - DNA, 120 bp, Artificial Sequence
  ENSG00000184677_74 (sequence is synthesized)
aataggatataagagaaaatatgtgggaaatttgtcggcaatattcttgaaaagaaagagttcctttctttcttctttccagttacctccttcttgccggttggaatattggattgaaag

SEQ ID NO: 663329 - DNA, 120 bp, Artificial Sequence
  ENSG00000184678_0 (sequence is synthesized)
ctgtgtcttaccatgcctgaaccggcaaaatccgctccggcccctaaaaagggctccaagaaagccgtcaccaaagcccagaagaaagacggcaagaagcgcaagcgcagccgcaaagag

SEQ ID NO: 663330 - DNA, 120 bp, Artificial Sequence
  ENSG00000184678_1 (sequence is synthesized)
agctactccatctacgtgtacaaggtgctgaagcaggtccaccccgacaccggcatctcgtccaaggccatgggcatcatgaactccttcgtcaacgacatcttcgagcgcatcgcggga

SEQ ID NO: 663331 - DNA, 120 bp, Artificial Sequence
  ENSG00000184678_2 (sequence is synthesized)
gaggcttcccgcctggcgcactacaacaagcgctccaccatcacatcccgcgagatccagacggccgtgcgcctgctgctgcccggcgagctggccaagcacgccgtgtccgagggcacc

SEQ ID NO: 663332 - DNA, 120 bp, Artificial Sequence
  ENSG00000184678_3 (sequence is synthesized)
aaggcggtcaccaagtacaccagctccaagtgagtccctgccgggacctggcgctcgctcgctcgagtcgccggctgcttgactccaaaggctcttttcagagccacccacctaatcact

SEQ ID NO: 663333 - DNA, 120 bp, Artificial Sequence
  ENSG00000184678_4 (sequence is synthesized)
agaaaagagcttgttcacttattcccttagtttcttttcataaagtaagttattttagtgtgaaggtcatgggaaatggcatacgtagctttttaactatttggaactcgaggtccccag

SEQ ID NO: 663334 - DNA, 120 bp, Artificial Sequence
  ENSG00000184678_5 (sequence is synthesized)
tgcgtcattggatttgcttttgaatctagagcgtgtctttactcattgtgctgcttagccttcccaggagtcggttctcaattaggctgttgggaatccgcctctttacccgcccccact

SEQ ID NO: 663335 - DNA, 120 bp, Artificial Sequence
  ENSG00000184678_6 (sequence is synthesized)
cccgccccacacgcgccctggtggctccttgggtctgtttcattctaaaacgaagtggctgagttcggctgtcatttaagagaactccaggacacaattcagcccgggttccgcaaacac

SEQ ID NO: 663336 - DNA, 120 bp, Artificial Sequence
  ENSG00000184678_7 (sequence is synthesized)
tgcgtgacagctctgtatgactgacgcttggcagcagcttttgtgtccggtcaccagttctgccgtgcgatggggcctcctgtggataccagccgttctgtgtattttggacgaaggccg

SEQ ID NO: 663337 - DNA, 120 bp, Artificial Sequence
  ENSG00000184678_8 (sequence is synthesized)
cgcagccgggtcccagccttgtcctgattgggcgacaagaatattcaaaattctgcgcctttttctaatttgtagatttcagtttccgtcgttcactttgagactttgaaattcctattt

SEQ ID NO: 663338 - DNA, 120 bp, Artificial Sequence
  ENSG00000184678_9 (sequence is synthesized)
tgtgctttaaatggtaacgctacggccccaggtcactgcgaggcacttaccatgtagatacgggctcaaaagtcacctctcagagacctacgtcatccactcaggaattcgcgcctctca

SEQ ID NO: 663339 - DNA, 120 bp, Artificial Sequence
  ENSG00000184678_10 (sequence is synthesized)
tacttgcctgtctcattttatcttccttctagcagctgtctgaaattggttcgtctgttttcttgtttatggtattctcaagcccttgacagaccggctagtgtggttttcccgtgcatc

SEQ ID NO: 663340 - DNA, 120 bp, Artificial Sequence
  ENSG00000184678_11 (sequence is synthesized)
ttcagcctggcacattatggacacttaaatactacgtattgatctaatattgttgggttaatttttccatcccacccttttcttaatcgcttccgtggatggatgaagggtgctgttcat

SEQ ID NO: 663341 - DNA, 120 bp, Artificial Sequence
  ENSG00000184678_12 (sequence is synthesized)
ttccattagatgtatgtgaaggcacagtgaaaatggaaatgttcttggagctacttcctcaaaatgtatccttagtcacctcagtgcaacagctgggagggggccgtgttaagatttttt

SEQ ID NO: 663342 - DNA, 120 bp, Artificial Sequence
  ENSG00000184678_13 (sequence is synthesized)
ttgctacaaagaggaggtggcaatggtagatccacccttatgcttctcagtttagcataacctcttatggattttcatcaaattcagcgtgttggtcactggaaagagccttttccttct

SEQ ID NO: 663343 - DNA, 120 bp, Artificial Sequence
  ENSG00000184678_14 (sequence is synthesized)
ccttttcttactctcccctcatggtgttcccctcttaaaggagaggagcttttaatttacacttaccacctcatttgcttttctggaggccatgcaatataggcgggactacagagttaa

SEQ ID NO: 663344 - DNA, 120 bp, Artificial Sequence
  ENSG00000184678_15 (sequence is synthesized)
tctcctttttacaaatgaggccaagagaagcctcattggttcacagtcatgcagctcatactgtccacccttgtattctcagatgcaggacaattgcattttagttttattttgtggagg

SEQ ID NO: 663345 - DNA, 120 bp, Artificial Sequence
  ENSG00000184678_16 (sequence is synthesized)
tgcagaatatttactctttctgtccaacccttgattctgccgaggaagacactgatggtttgatgagtgattcagctgtttttggctaagggcttttggagctgatggcaggggtttgat

SEQ ID NO: 663346 - DNA, 120 bp, Artificial Sequence
  ENSG00000184678_17 (sequence is synthesized)
gaatccaaatgagctctagacattatcacagactgaatagatcttaactgtctcctacatgtgtgttttcaaatgtgtatagatgctattgttattaataaagttaccaattaatttaaa

SEQ ID NO: 663347 - DNA, 120 bp, Artificial Sequence
  ENSG00000184697_0 (sequence is synthesized)
actcggcctaggaatttcccttatctccttcgcagtgcagctccttcaacctcgccatggcctctgccggaatgcagatcctgggagtcgtcctgacactgctgggctgggtgaatggcc

SEQ ID NO: 663348 - DNA, 120 bp, Artificial Sequence
  ENSG00000184697_1 (sequence is synthesized)
tggtctcctgtgccctgcccatgtggaaggtgaccgctttcatcggcaacagcatcgtggtggcccaggtggtgtgggagggcctgtggatgtcctgcgtggtgcagagcaccggccaga

SEQ ID NO: 663349 - DNA, 120 bp, Artificial Sequence
  ENSG00000184697_2 (sequence is synthesized)
tgcagtgcaaggtgtacgactcactgctggcgctgccacaggacctgcaggctgcacgtgccctctgtgtcatcgccctccttgtggccctgttcggcttgctggtctaccttgctgggg

SEQ ID NO: 663350 - DNA, 120 bp, Artificial Sequence
  ENSG00000184697_3 (sequence is synthesized)
ccaagtgtaccacctgtgtggaggagaaggattccaaggcccgcctggtgctcacctctgggattgtctttgtcatctcaggggtcctgacgctaatccccgtgtgctggacggcgcatg

SEQ ID NO: 663351 - DNA, 120 bp, Artificial Sequence
  ENSG00000184697_4 (sequence is synthesized)
ccatcatccgggacttctataaccccctggtggctgaggcccaaaagcgggagctgggggcctccctctacttgggctgggcggcctcaggccttttgttgctgggtggggggttgctgt

SEQ ID NO: 663352 - DNA, 120 bp, Artificial Sequence
  ENSG00000184697_5 (sequence is synthesized)
ggcccgctactcaacatctgcccctgccatctctcgggggccctctgagtaccctaccaagaattacgtctgacgtggaggggaatgggggctccgctggcgctagagccatccagaagt

SEQ ID NO: 663353 - DNA, 120 bp, Artificial Sequence
  ENSG00000184697_6 (sequence is synthesized)
ggcagtgcccaacagctttgggatgggttcgtaccttttgtttctgcctcctgctatttttcttttgactgaggatatttaaaattcatttgaaaactgagccaaggtgttgactcagac

SEQ ID NO: 663354 - DNA, 120 bp, Artificial Sequence
  ENSG00000184697_7 (sequence is synthesized)
tctcacttaggctctgctgtttctcacccttggatgatggagccaaagaggggatgctttgagattctggatcttgacatgcccatcttagaagccagtcaagctatggaactaatgcgg

SEQ ID NO: 663355 - DNA, 120 bp, Artificial Sequence
  ENSG00000184697_8 (sequence is synthesized)
aggctgcttgctgtgctggctttgcaacaagacagactgtccccaagagttcctgctgctgctgggggctgggcttccctagatgtcactggacagctgccccccatcctactcaggtct

SEQ ID NO: 663356 - DNA, 120 bp, Artificial Sequence
  ENSG00000184697_9 (sequence is synthesized)
ctggagctcctctcttcacccctggaaaaacaaatgatctgttaacaaaggactgcccacctccggaacttctgacctctgtttcctccgtcctgataagacgtccaccccccagggcca

SEQ ID NO: 663357 - DNA, 120 bp, Artificial Sequence
  ENSG00000184697_10 (sequence is synthesized)
ggtcccagctatgtagacccccgcccccacctccaacactgcacccttctgccctgcccccctcgtctcaccccctttacactcacatttttatcaaataaagcatgttttgttagtgca

SEQ ID NO: 663358 - DNA, 120 bp, Artificial Sequence
  ENSG00000184697_11 (sequence is synthesized)
cgaacggccggacgcggtggctcacgcctttaatcccatcagtttgggagtctgaggcaggcggattacgagagtaggaaacgaaggctcgggaaggttaggtgagttccccatgtcacc

SEQ ID NO: 663359 - DNA, 120 bp, Artificial Sequence
  ENSG00000184697_12 (sequence is synthesized)
gcgctgcttaagtggtgaagcggagtctcaagctctgttctaccctaagcctggcgccctcaccctgggtgagtctggacgtctgccagcccgaggcgggcccagcgaccccagcctcca

SEQ ID NO: 663360 - DNA, 120 bp, Artificial Sequence
  ENSG00000184697_13 (sequence is synthesized)
gcgcccccctctgacaagcctgggattcgcacgcccgctgccgtcagggacagggtctctgcccctcctccggggcggtggtccagtgacgtcaccgcttctttaagacccccgcctccg

SEQ ID NO: 663361 - DNA, 120 bp, Artificial Sequence
  ENSG00000184698_0 (sequence is synthesized)
ttttcagctcaatccccgaggaatgtcagtccaatattcgctcagtcctcaattcatgctgctatccaacattactcagtttagccccatattctatctcaccagctttcctggattgga

SEQ ID NO: 663362 - DNA, 120 bp, Artificial Sequence
  ENSG00000184698_1 (sequence is synthesized)
aggcatcaaacactggattttcatcccctttttctttatgtacatggttgccatctcaggcaattgtttcattctgatcattattaagaccaaccctcgtctgcacacacccatgtacta

SEQ ID NO: 663363 - DNA, 120 bp, Artificial Sequence
  ENSG00000184698_2 (sequence is synthesized)
tctactatccttgctggccctcactgacctggggctgtgtgtgtccacgttgcccaccactatggggatcttctggtttaactcccatagtatctactttggagcgtgtcaaatccagat

SEQ ID NO: 663364 - DNA, 120 bp, Artificial Sequence
  ENSG00000184698_3 (sequence is synthesized)
gttctgcatccactctttttccttcatggagtcctcagtgctcctcatgatgtcctttgaccgccttgtggccatctgccaccctctgaggtattcggtcattatcactggccagcaagt

SEQ ID NO: 663365 - DNA, 120 bp, Artificial Sequence
  ENSG00000184698_4 (sequence is synthesized)
tctcccactcattttgcctgcaccaggaagtgatacagctggcctgcacagatatcaccttcaataatctgtatggactgatggtggtagttttcactgtgatgctggacctggtgctca

SEQ ID NO: 663366 - DNA, 120 bp, Artificial Sequence
  ENSG00000184698_5 (sequence is synthesized)
tcgcactgtcctatggactcatcctgcacacagtagcaggcctggcctcccaagaggagcagcgccgtgcctttcagacatgcaccgctcctctctgtgctgtgctagtattctttgtgc

SEQ ID NO: 663367 - DNA, 120 bp, Artificial Sequence
  ENSG00000184698_6 (sequence is synthesized)
ccatgatggggctgtccctggtgcaccgttttgggaagcatgccccacctgctattcatcttcttatggccaatgtctacctttttgtgcctcccatgcttaacccaatcatatacagca

SEQ ID NO: 663368 - DNA, 120 bp, Artificial Sequence
  ENSG00000184698_7 (sequence is synthesized)
ttaagaccaaggagatccaccgtgccattatcaagttcctaggtcttaaaaaggccagtaaatgagtcctggggctaaaactccccctagaggcctataagaaggccccaaattggactg

SEQ ID NO: 663369 - DNA, 120 bp, Artificial Sequence
  ENSG00000184698_8 (sequence is synthesized)
ccacagccttgtgcctctcagtgacccttgtgtcatccttatctatactcttctttcttcctttggaacctactcattggcttcacatttttgttattacctgctgacatcttgtttcta

SEQ ID NO: 663370 - DNA, 120 bp, Artificial Sequence
  ENSG00000184698_9 (sequence is synthesized)
aataaaatatgggcaaatttatgtctggagttgtggctttaaaaaactgaacttctcttgcttagattttaatggctcctcctacagctgagaactggcatttttggtagcatcaaagct

SEQ ID NO: 663371 - DNA, 120 bp, Artificial Sequence
  ENSG00000184698_10 (sequence is synthesized)
atccagaaggcaactttattgaaggtcatcatcaatgtaactaaaactaaaatgaaactaaataaaaactaaaaagaacaataaataccagagcacccagaggagagcctggcagagacc

SEQ ID NO: 663372 - DNA, 120 bp, Artificial Sequence
  ENSG00000184698_11 (sequence is synthesized)
aggtaaatgccatttgctctaactcacctccggaaatacacctccttccatggttccttgggactgcttccatcttatctacctggccaagtttcttctcatctttttctatcctggtca

SEQ ID NO: 663373 - DNA, 120 bp, Artificial Sequence
  ENSG00000184698_12 (sequence is synthesized)
gcagtaactttcagacccccaagtcacatcagaaacctcagaactcctgcattcttcctcaacacctgtttcaagcaacacccccccaaatttctaaggttgtgctctctcctgaccata

SEQ ID NO: 663374 - DNA, 120 bp, Artificial Sequence
  ENSG00000184698_13 (sequence is synthesized)
ttcctctagaagaagagactttgatcctatccttgactcctctcatctctgattttaccttacaacctcaagtctgacattaagctacagtcagtatttacttgtaggtgttttagttgt

SEQ ID NO: 663375 - DNA, 120 bp, Artificial Sequence
  ENSG00000184698_14 (sequence is synthesized)
gtgatattgaacaatgacatgtaacgtgagaaagcttcagccaaggaaactcacacaaacatattgaagtcacaatcccattgctcaggaggaaataaactttacattggctgatcagcc

SEQ ID NO: 663376 - DNA, 120 bp, Artificial Sequence
  ENSG00000184698_15 (sequence is synthesized)
tgactaaatgcaatccttgcaggggtctcagctttgaaattgcttcctcaaggacattttcacagatagctcctccctttccaatggtaaagcaccaaatgctccatcggtttccttcca

SEQ ID NO: 663377 - DNA, 120 bp, Artificial Sequence
  ENSG00000184698_16 (sequence is synthesized)
cagtgccctgcatttcccgttgtaacatttgtcacacagtaatgtcctgtttatgaaggtgtgtgcatgtgtccattagaatgactaaatcaagatccctggaggaattaggcatgtctt

SEQ ID NO: 663378 - DNA, 120 bp, Artificial Sequence
  ENSG00000184698_17 (sequence is synthesized)
gctcgccagtaaatgtatataaatacaatgcctagcacatgccatatactcaataaatattaaatgtatgcgtggacatatagatacataaagagggatccagagctaacagaagttctc

SEQ ID NO: 663379 - DNA, 120 bp, Artificial Sequence
  ENSG00000184698_18 (sequence is synthesized)
ttcttgtctcgaggaactcctcctcttcacattcagaagcccaagaagacacctttctgctggcatccatcaaggtggtatatcttcattgtcccagttctactttactcaggccctctg

SEQ ID NO: 663380 - DNA, 120 bp, Artificial Sequence
  ENSG00000184698_19 (sequence is synthesized)
ttgtcccagttctactttactcaggccctctggatcctcccacccattctcctacaggttaaaattaccatgaggccaggcacggtggcttatgctataatcccagcactttgggagacc

SEQ ID NO: 663381 - DNA, 120 bp, Artificial Sequence
  ENSG00000184698_20 (sequence is synthesized)
tgagtccaggagtttgagaccagcctgaacaatacagcaagaccctatctctacaaaaaaaattaaaattagccatgtgtggcggtgcacgtctgtagtctcagctacctgggaggctga

SEQ ID NO: 663382 - DNA, 79 bp, Artificial Sequence
  ENSG00000184698_21 (sequence is synthesized)
cactactgcctgggtgaccaagtgagaccccgattcaaaaataaaaaggaaaacaaacaaaattacaaagcgaaattta

SEQ ID NO: 663383 - DNA, 120 bp, Artificial Sequence
  ENSG00000184698_22 (sequence is synthesized)
aataaaaaggaaaacaaacaaaattacaaagcgaaatttaaaaaagaaccaaactctaaaaatatgtatgtatgtttgtgcggtttcttgtgtatgtttgtgtggtatctcatgtttgta

SEQ ID NO: 663384 - DNA, 120 bp, Artificial Sequence
  ENSG00000184698_23 (sequence is synthesized)
tgtgtgggtgttatcagactctcaggcttgggagcccctctggaacccagcagtttctgcagccttacaggctggcactccttaaacataggttccattctaaactttaatttacatcca

SEQ ID NO: 663385 - DNA, 120 bp, Artificial Sequence
  ENSG00000184698_24 (sequence is synthesized)
catagtaggccacattactcaatagcagttccgagacttagaatattcttctccatgttgagaggaaattcctattctatagatctcatttggtagaatggggtacaaaaaatttaggat

SEQ ID NO: 663386 - DNA, 120 bp, Artificial Sequence
  ENSG00000184698_25 (sequence is synthesized)
ttggatttagattagcactgaagtcccattttgcctcttattaacaaatagaccactgacatctaaatttcattttcaaattaggaaatacgtacaggtaataacatatttgaaaacttc

SEQ ID NO: 663387 - DNA, 120 bp, Artificial Sequence
  ENSG00000184698_26 (sequence is synthesized)
tttgaaaacttctaccttactcaaatttaaaatgcaaattaacatatcttaatttgttactaaacgaatattgaagaatagagttaacaatcaatatctggctgggcgcggtggctcacg

SEQ ID NO: 663388 - DNA, 120 bp, Artificial Sequence
  ENSG00000184698_27 (sequence is synthesized)
acaaaaaaaaagaaaaataaataaatatctgtgctgttaagtatgtggtaaaagaggtattttcacataccagaatgaaaacataatttaatttgccttttataaaaaacaaaatacatc

SEQ ID NO: 663389 - DNA, 120 bp, Artificial Sequence
  ENSG00000184698_28 (sequence is synthesized)
acaaaatacatcaaaagacttgaaaatattcatgctctgtgtctcagaaatgccacttctaaaaatctgtcctaaataaatgataaattaaaaatttaggatgtaagctgtttgtggcaa

SEQ ID NO: 663390 - DNA, 120 bp, Artificial Sequence
  ENSG00000184698_29 (sequence is synthesized)
aatttttttcctgtttgctcacagttctaaatccatctcctaggtcagtgatcaataaatatgtgttgaactatttaataagtgaatattataatttgtgttattgttcataattttaag

SEQ ID NO: 663391 - DNA, 120 bp, Artificial Sequence
  ENSG00000184702_0 (sequence is synthesized)
ggcctcggcctccgccgcttgtcgtcgcgccccgcccgcgagcccgccccgcacgtcccccgccggcggccaccatgagcacaggcctgcggtacaagagcaagctggcgaccccagagg

SEQ ID NO: 663392 - DNA, 120 bp, Artificial Sequence
  ENSG00000184702_1 (sequence is synthesized)
cgaccccagaggacaagcaggacattgacaagcagtacgtgggcttcgccacactgcccaaccaggtgcaccgcaagtcggtgaagaaaggctttgacttcacactcatggtggctggtg

SEQ ID NO: 663393 - DNA, 120 bp, Artificial Sequence
  ENSG00000184702_2 (sequence is synthesized)
agtcaggcctggggaagtccacactggtccacagcctcttcctgacagacttgtacaaggaccggaagctgctcagtgctgaggagcgcatcagccagacggtagagattctaaaacaca

SEQ ID NO: 663394 - DNA, 120 bp, Artificial Sequence
  ENSG00000184702_3 (sequence is synthesized)
cggtggacattgaggagaagggagtcaagctgaagctcaccatcgtggacacgccgggattcggggacgctgtcaacaacaccgagtgctggaagcccatcaccgactatgtggaccagc

SEQ ID NO: 663395 - DNA, 120 bp, Artificial Sequence
  ENSG00000184702_4 (sequence is synthesized)
agtttgagcagtacttccgtgatgagagcggcctcaaccgaaagaacatccaagacaaccgagtgcactgctgcctatacttcatctcccccttcgggcatgggctgcggccagtggatg

SEQ ID NO: 663396 - DNA, 120 bp, Artificial Sequence
  ENSG00000184702_5 (sequence is synthesized)
tgggtttcatgaaggcattgcatgagaaggtcaacatcgtgcctctcatcgccaaagctgactgtcttgtccccagtgagatccggaagctgaaggagcggatccgggaggagattgaca

SEQ ID NO: 663397 - DNA, 120 bp, Artificial Sequence
  ENSG00000184702_6 (sequence is synthesized)
agtttgggatccatgtataccagttccctgagtgtgactcggacgaggatgaggacttcaagcagcaggaccgggaactgaaggagagcgcgcccttcgccgttataggcagcaacacgg

SEQ ID NO: 663398 - DNA, 120 bp, Artificial Sequence
  ENSG00000184702_7 (sequence is synthesized)
tggtggaggccaaggggcagcgggtccggggccgactgtacccctgggggatcgtggaggtggagaaccaggcgcattgcgacttcgtgaagctgcgcaacatgctcatccgcacgcata

SEQ ID NO: 663399 - DNA, 120 bp, Artificial Sequence
  ENSG00000184702_8 (sequence is synthesized)
tcccgatcctgccgctgcccaccccggacgccgagactgagaagcttatcaggatgaaggatgaggaactgaggcgcatgcaggagatgctgcagaggatgaagcagcagatgcaggacc

SEQ ID NO: 663400 - DNA, 120 bp, Artificial Sequence
  ENSG00000184702_9 (sequence is synthesized)
agtgacgctcgccgcggacacaccgtccgtctccgggacgccctcgcacccctggacaccagaccggactgttcccgacccggagacgcggggccacagcccccagctgaccctaattta

SEQ ID NO: 663401 - DNA, 120 bp, Artificial Sequence
  ENSG00000184702_10 (sequence is synthesized)
ttctcagcaccaccccctcccaggtcattgtgtctgtttccgaggggcctggaccgtagcccccgcccagctggccctctctgaccttgggggatcaggagcgaagttgggcgggacttc

SEQ ID NO: 663402 - DNA, 120 bp, Artificial Sequence
  ENSG00000184702_11 (sequence is synthesized)
agagatccgcctcccttgcccttcccccgcccccggacggtcacagcacccaaaccgcaggccctgctctggcaggcaggcaaagctaggcagaagaggattcccaggatcctgggtctg

SEQ ID NO: 663403 - DNA, 120 bp, Artificial Sequence
  ENSG00000184702_12 (sequence is synthesized)
ttccctgccccagtgctgcagaacggacttgggagccctcctttgcctgctcccgcgggtcacccagcgagtgctgagaccccattttctgtcgaggcgggccgagtcttcccttatccc

SEQ ID NO: 663404 - DNA, 120 bp, Artificial Sequence
  ENSG00000184702_13 (sequence is synthesized)
cagacgcctagcgggcagggttgggctgaatcaaatgggagccctccagacataaggaggccagaggctgcaaggagcggggtcgtgaccgcttacaccccttctccacagcccggcccg

SEQ ID NO: 663405 - DNA, 120 bp, Artificial Sequence
  ENSG00000184702_14 (sequence is synthesized)
acctggagggcccccggggcactgggcggtgagccacctcctggcaactctcggtgccgtcccctgccctcgctcgaggcctcttctccccagcaccgctgtggtgtgccgggatcctga

SEQ ID NO: 663406 - DNA, 120 bp, Artificial Sequence
  ENSG00000184702_15 (sequence is synthesized)
gcctaggcctcccgatgttcccacccgcatgatcccttcccgccacacgatgctccgttttcttccgttgtgaatgccgcgtcctgtcctggtgacaggagaacaatgttggtgaacgtc

SEQ ID NO: 663407 - DNA, 120 bp, Artificial Sequence
  ENSG00000184702_16 (sequence is synthesized)
cctgcgacgccccgcctctggctcgggtgcgggagcggggcctgcccggactgcgacgccgccacagcttggggccagttcgcccagtcagggggatggctcggtcggcctcgggggtcg

SEQ ID NO: 663408 - DNA, 120 bp, Artificial Sequence
  ENSG00000184702_17 (sequence is synthesized)
gggggtcgacgatcccccgggtaggcgacgtgccctgtccaggcctcacttcccgcgtccgcaaaacggggtggacaacgcagcctaaggcagagccgcgccaaggtccctcgctgtcgc

SEQ ID NO: 663409 - DNA, 120 bp, Artificial Sequence
  ENSG00000184702_18 (sequence is synthesized)
ggtccgagcgtgcccccgggcctgggggggtcgccgcgatggactcgctggcagcgccccaggaccgcctggtggagcagctgctgtcgccgcggacccaggcccagaggcggctcaagg

SEQ ID NO: 663410 - DNA, 120 bp, Artificial Sequence
  ENSG00000184702_19 (sequence is synthesized)
caggccccatgtcctgctccgctgggcttgcctgttgggattctactggggtcatggaggtgggtggcccacagagcggagctcgggagacccccgcagtccctggagtagccacatggg

SEQ ID NO: 663411 - DNA, 120 bp, Artificial Sequence
  ENSG00000184702_20 (sequence is synthesized)
ggcggaggcgggcgtcagggatgctcctccgcggtgctgctcacccgccgggttgtctccgcccgcagctgaggcgcatgcaggagatgctgcagaggatgaagcagcagatgcaggacc

SEQ ID NO: 663412 - DNA, 120 bp, Artificial Sequence
  ENSG00000184702_21 (sequence is synthesized)
gctcccactgttctgttctcgcggtgtgggtcccctgggggtagggccaaggcaccaagatggatgaggacgagggtcctggctgccaagggtgaggggctgagggttggagaggccctt

SEQ ID NO: 663413 - DNA, 120 bp, Artificial Sequence
  ENSG00000184702_22 (sequence is synthesized)
ccagtggccccttccccgtagagcgcatcagccagacggtagagattctaaaacacacggtggacattgaggagaagggagtcaagctgaagctcaccatcgtggacacgccgggattcg

SEQ ID NO: 663414 - DNA, 120 bp, Artificial Sequence
  ENSG00000184702_23 (sequence is synthesized)
tggggtaccaggtctggtgggggaaggctgtcctgggccggcgccagcccactacccacccccaccccgcagtggagaaccaggcgcattgcgacttcgtgaagctgcgcaacatgctca

SEQ ID NO: 663415 - DNA, 80 bp, Artificial Sequence
  ENSG00000184702_24 (sequence is synthesized)
gggggcgggacgcgcggtggctaccgactcccggcccgccccggcccgcgtgcaggacccggtcgtcccctcctgctgtc

SEQ ID NO: 663416 - DNA, 120 bp, Artificial Sequence
  ENSG00000184702_25 (sequence is synthesized)
ccggtccacgcgagccatggcccgaccgcgcctcggctcagccctgccctccgcagccgctttcgggtggctccgcccgcggcccaatttccaggcgaccgtttcccggcgacggcgggc

SEQ ID NO: 663417 - DNA, 120 bp, Artificial Sequence
  ENSG00000184702_26 (sequence is synthesized)
ctcaagcggcctcgcaggtccgcggccccacggtggggcgacgtgccctgtccaggcctcacctcacgcgactccaaaacgcggcggagaatgcggccgtgggacccctccaggggcccc

SEQ ID NO: 663418 - DNA, 120 bp, Artificial Sequence
  ENSG00000184702_27 (sequence is synthesized)
ggtggaggccaaggggcagcgggtccggggccgactgtacccctgggggatcgtggagggcgcattgcgacttcgtgaagctgcgcaacatgctcatccgcacgcatatgcacgacctca

SEQ ID NO: 663419 - DNA, 120 bp, Artificial Sequence
  ENSG00000184702_28 (sequence is synthesized)
cctctggccccgcccacgtctccataactgagggccggtcctgtcagcccacccagacttgaactttgcaccattccctaagccccccccctcccccagagcctggtctccctagaacca

SEQ ID NO: 663420 - DNA, 120 bp, Artificial Sequence
  ENSG00000184702_29 (sequence is synthesized)
accaagtccagggctgtgagggctccggagggcagggcctcagcagtggcggggatgggccaggcatcgccagcccacgctgagcctcccggtggcgccgccccgcccatcctccccccc

SEQ ID NO: 663421 - DNA, 120 bp, Artificial Sequence
  ENSG00000184702_30 (sequence is synthesized)
tgagagcgggtgggagcggaagcctgagcggcctgcggcctccggcgatagtgtgctatctgccgctgcagcgcgcgtccgcgcggcctctgggctatttctggccaggccgcagcactg

SEQ ID NO: 663422 - DNA, 120 bp, Artificial Sequence
  ENSG00000184702_31 (sequence is synthesized)
tggtcggtgcgggcgtggcaggggcggggcggccttatcgctcggctctcccgcctacgcctcccgctgcagagtaagccgggctgccgtcttctcgccatgggctccgggccgcgcggg

SEQ ID NO: 663423 - DNA, 120 bp, Artificial Sequence
  ENSG00000184702_32 (sequence is synthesized)
gcgctgagcttactgctcctgctgctggccccgccgagccgcccggccgcaggttgcccggcgccctgtagctgcgcggggacgctcgtggactgcgggcgccgcgggctgacttgggcc

SEQ ID NO: 663424 - DNA, 120 bp, Artificial Sequence
  ENSG00000184702_33 (sequence is synthesized)
tcgctgccgaccgccttccctgtcgacacaaccgagctggtgctgaccggcaacaacctgacggcgctgccgccggggctgctggacgcgctgcccgcgctgcgcaccgcacacctgggc

SEQ ID NO: 663425 - DNA, 80 bp, Artificial Sequence
  ENSG00000184702_34 (sequence is synthesized)
gccaacccctggcgctgcgactgccgccttgtgccgctgcgcgcctggctggccggccgccccgagcgtgcgccctaccg

SEQ ID NO: 663426 - DNA, 120 bp, Artificial Sequence
  ENSG00000184702_35 (sequence is synthesized)
atctccaggcttttgcccacgggccctccccttatttttgccaacgaaatgccccaccctgggaaccgtaccctctgctgtctcctcataccgcatttggtaagagacagggtattgggc

SEQ ID NO: 663427 - DNA, 120 bp, Artificial Sequence
  ENSG00000184708_0 (sequence is synthesized)
agttacggcggctgaagagagacagcccaagccggtcggggtgggggcgcgagagcgaaggctgcggggagcggcgctgggaccggtgcgggcagcggggaggggagcggcggccgaggc

SEQ ID NO: 663428 - DNA, 120 bp, Artificial Sequence
  ENSG00000184708_1 (sequence is synthesized)
aaagggccgccgagcggcggaggcaccgagtgcagagcattgtagaccaaggagccatggataggagaagtatgggtgaaacagaaagtggagatgctttccttgacctgaagaagcctc

SEQ ID NO: 663429 - DNA, 120 bp, Artificial Sequence
  ENSG00000184708_2 (sequence is synthesized)
ctgcctccaaatgcccccatcgctatacaaaagaagaactcttggatataaaagaactcccccattccaaacagaggccttcatgcctttctgaaaaatatgacagtgatggtgtctggg

SEQ ID NO: 663430 - DNA, 120 bp, Artificial Sequence
  ENSG00000184708_3 (sequence is synthesized)
accctgagaagtggcatgcctctctctacccagcttcagggcggagctcaccagtggaaagtctgaagaaagagttggatacagaccggccttccctggtgcgcaggatagtagatccac

SEQ ID NO: 663431 - DNA, 120 bp, Artificial Sequence
  ENSG00000184708_4 (sequence is synthesized)
gagagcgtgtgaaagaagatgacttagatgttgttctcagccctcagagacggagctttggagggggctgccacgtgacagccgctgttagctcccggcgctcaggaagtccattagaga

SEQ ID NO: 663432 - DNA, 120 bp, Artificial Sequence
  ENSG00000184708_5 (sequence is synthesized)
aagatagtgatgggcttcgtctgcttggtggacgtaggattggcagtgggaggataatctctgcccggacctttgagaaggatcaccgtcttagcgataaggacctgcgggacttgagag

SEQ ID NO: 663433 - DNA, 120 bp, Artificial Sequence
  ENSG00000184708_6 (sequence is synthesized)
acagagaccgagagagggacttcaaggacaagcgtttcaggagagagtttggagatagtaagcgtgtctttggtgagcgtagaagaaatgattcttacacagaagaagaaccagagtggt

SEQ ID NO: 663434 - DNA, 120 bp, Artificial Sequence
  ENSG00000184708_7 (sequence is synthesized)
tctctgctggacccacaagtcagtctgaaaccatcgaactgactggctttgatgataagatactagaagaagatcacaaagggagaaaaagaacaaggcgacggacagcctctgtgaagg

SEQ ID NO: 663435 - DNA, 120 bp, Artificial Sequence
  ENSG00000184708_8 (sequence is synthesized)
aaggtatagtagagtgcaatggaggagtggccgaagaggatgaagtggaggtcatccttgcacaggagcctgcggctgatcaggaagtgccaagggatgctgtcttgcctgagcagtccc

SEQ ID NO: 663436 - DNA, 120 bp, Artificial Sequence
  ENSG00000184708_9 (sequence is synthesized)
caggagactttgactttaatgagttctttaaccttgataaggtgccatgcttggcttcgatgatagaagatgttttgggagaagggtcagtctctgccagtcggttcagtaggtggttct

SEQ ID NO: 663437 - DNA, 120 bp, Artificial Sequence
  ENSG00000184708_10 (sequence is synthesized)
ctaacccgagcagatcaggaagccgatccagcagtcttgggtcaacaccacatgaagagctagagagacttgcaggtctggagcaagccatcctctctcctggacagaactcggggaatt

SEQ ID NO: 663438 - DNA, 120 bp, Artificial Sequence
  ENSG00000184708_11 (sequence is synthesized)
actttgctcctataccattggaagaccatgctgaaaataaagtggatattttagaaatgctacagaaagccaaagtggatttgaaacctcttctttccagcctttctgcaaataaagaaa

SEQ ID NO: 663439 - DNA, 120 bp, Artificial Sequence
  ENSG00000184708_12 (sequence is synthesized)
aacttaaagaaagctcacattcaggggttgtgctttcagtggaggaggtagaagcaggtctgaagggcttgaaggttgaccagcaagtgaagaattcaactcccttcatggcagaacacc

SEQ ID NO: 663440 - DNA, 120 bp, Artificial Sequence
  ENSG00000184708_13 (sequence is synthesized)
tagaagagaccttgagtgccgtaaccaacaatcgacaactgaagaaagacggagacatgactgcgttcaacaagctagtgagcacaatgaaggcaagtgggactttgccttctcagccca

SEQ ID NO: 663441 - DNA, 120 bp, Artificial Sequence
  ENSG00000184708_14 (sequence is synthesized)
aagtcagccgaaaccttgaaagccatttgatgtcccctgctgagattccaggccagcctgtccctaagaacatcctgcaggaacttctgggtcaaccagttcagagacctgcttcttcca

SEQ ID NO: 663442 - DNA, 120 bp, Artificial Sequence
  ENSG00000184708_15 (sequence is synthesized)
ctgggccaaagagcaccctctcctcccttgtcacaggtgtttcaaactcgagcagcctcagctgactaccttcgcccaagaataccatcaccaattggtttcacaccaggaccacagcag

SEQ ID NO: 663443 - DNA, 120 bp, Artificial Sequence
  ENSG00000184708_16 (sequence is synthesized)
ctactcggagatccattccaaggcatgcgcaaacccatgagccccatcacagcccagatgagccagctggagttgcaacaggcagctttagaagggctggccttgccacatgaccttgct

SEQ ID NO: 663444 - DNA, 120 bp, Artificial Sequence
  ENSG00000184708_17 (sequence is synthesized)
gtacaggcagcaaacttctaccagcctggttttggcaaaccacaggtggacagaaccagagatggattcagaaacaggcaacagcgagtgaccaagtcaccagcacccgtgcatcgaggg

SEQ ID NO: 663445 - DNA, 120 bp, Artificial Sequence
  ENSG00000184708_18 (sequence is synthesized)
aattcctcttcccctgcccctgctgcctccatcacaagcatgctttctccttcctttacccctacctcagtgattcgtaagatgtacgagagcaaagagaaaagcaaggaggagccagca

SEQ ID NO: 663446 - DNA, 120 bp, Artificial Sequence
  ENSG00000184708_19 (sequence is synthesized)
tctggaaaagcagctcttggtgacagtaaagaggatactcagaaggccagtgaagaaaacctcctgtcatccagctctgtacccagtgccgatcgagactcttctcccactacaaattcc

SEQ ID NO: 663447 - DNA, 120 bp, Artificial Sequence
  ENSG00000184708_20 (sequence is synthesized)
aaactgtcagcattacagaggtcttcgtgttccaccccactgtcccaggccaaccgttacaccaaagaacaagattatcgacctaaagcaactgggagaaaaacacccaccttggcatcc

SEQ ID NO: 663448 - DNA, 120 bp, Artificial Sequence
  ENSG00000184708_21 (sequence is synthesized)
ccagttcctacaacaccttttctccgccctgtccaccaagttccccttgtcccccatgtccctatggttaggcctgctcaccagcttcacccagggttggtacagaggatgctggcccag

SEQ ID NO: 663449 - DNA, 120 bp, Artificial Sequence
  ENSG00000184708_22 (sequence is synthesized)
ggagtacatccacagcatcttccaagtttgctccaaactggtgtgcttcctcctgggatggacttgagtcatttacagggaatatctggccccatcctgggtcagcccttttacccttta

SEQ ID NO: 663450 - DNA, 120 bp, Artificial Sequence
  ENSG00000184708_23 (sequence is synthesized)
cctgctgctagtcaccctctcttaaaccctcgtcctggaacacctctgcatctggcaatggtgcaacagcagctacagcgctcagttctgcatcctccaggctctggttcccatgcagca

SEQ ID NO: 663451 - DNA, 120 bp, Artificial Sequence
  ENSG00000184708_24 (sequence is synthesized)
gctgtcagcgttcagacaacccctcagaacgtgcccagccggtcaggcctgccccacatgcactcccagctggagcatcgccccagccagaggagcagctcccctgtgggccttgccaaa

SEQ ID NO: 663452 - DNA, 120 bp, Artificial Sequence
  ENSG00000184708_25 (sequence is synthesized)
tggtttggctcagatgtgctacagcaacccctgccctccatgcccgccaaagttatcagtgtagatgaattggaataccgacagtgagcagggcaggcagactcaactaagcccggacct

SEQ ID NO: 663453 - DNA, 120 bp, Artificial Sequence
  ENSG00000184708_26 (sequence is synthesized)
gtggtggcacactgggcaggaccctgcttcatctcgggttggtttatgggcttttactttggagcactctgtgtgaagctgtttggtggaacccatgcatctggtgtggtccgcattatg

SEQ ID NO: 663454 - DNA, 120 bp, Artificial Sequence
  ENSG00000184708_27 (sequence is synthesized)
atggaaggatcttaaccagtcgagtggagtgtacattgtctgaatacaggatgcacaatgttgtcaatcctggaaatggtctttcttttttgtaagatatgtgaatgaagtgttggtgtc

SEQ ID NO: 663455 - DNA, 120 bp, Artificial Sequence
  ENSG00000184708_28 (sequence is synthesized)
ctcaccaagaggtggcacctaagggttctgaggaaataaatgtatagacccttatgtacagacctgtgtataaacaacttttgtatatacatataggatagcttttttgaactatacagc

SEQ ID NO: 663456 - DNA, 120 bp, Artificial Sequence
  ENSG00000184708_29 (sequence is synthesized)
tgtacataaaagtagctgatattagttaggcctgtgtcaacagtttggatttttttcacttgtacatttgggattttcttttggttgattaaaattgcatatgctaagtgtgtgaatgaa

SEQ ID NO: 663457 - DNA, 80 bp, Artificial Sequence
  ENSG00000184708_30 (sequence is synthesized)
gggtagccggcgggctggctggcggggaccgagccgccgggccggggaggacggctgcgggcctgcgctagctccagctt

SEQ ID NO: 663458 - DNA, 120 bp, Artificial Sequence
  ENSG00000184708_31 (sequence is synthesized)
tgtagatgaattggaataccgacagtgagcagggcaggcagactcaactaagcccggacctgtggtggcacactgggcaggaccctgcttcatctcgggtggaagctggaacgcagtccc

SEQ ID NO: 663459 - DNA, 120 bp, Artificial Sequence
  ENSG00000184708_32 (sequence is synthesized)
aagtgtcaatggcagaacacagacacctgaatccagttccacctttcctgtgtatcctcttccacttatcttacttccccttcatgttgaaccaacgttaataggtgcaaggcacgagat

SEQ ID NO: 663460 - DNA, 120 bp, Artificial Sequence
  ENSG00000184708_33 (sequence is synthesized)
atctgttaagcaggggaggtcaggtaggagaggaaagaatagtccctcccaaaggaagcagttaaataagtctgtgggaggtcagtggtaaaaggaagtgggaatgaagtgaacagagag

SEQ ID NO: 663461 - DNA, 120 bp, Artificial Sequence
  ENSG00000184708_34 (sequence is synthesized)
tgcagctaggccttcccctaggagatagctactgagtgtcttttaagccagactctattaacagggaagggaagtgggaggtccattggcctttgtgaactatgagcataaacacaaacc

SEQ ID NO: 663462 - DNA, 120 bp, Artificial Sequence
  ENSG00000184708_35 (sequence is synthesized)
aaggaaggtctgttgctccaagttatatttctggccatgttctttctcttgccagcctaatcccaggctgggaaatctgtgacgcagaggctgcataggcatgtccccattatcacacag

SEQ ID NO: 663463 - DNA, 120 bp, Artificial Sequence
  ENSG00000184708_36 (sequence is synthesized)
ttgtaagcaagggataatgtacttgggacactgcctatttgccccattctgtttttcctccagcagctacagaacagaatactacagttggcctatgctaccaatgtggggactctttgt

SEQ ID NO: 663464 - DNA, 120 bp, Artificial Sequence
  ENSG00000184708_37 (sequence is synthesized)
atggattcagaaacagattcaatgttcttatcaaactcccttgatgcaggtttgctacatcagcagttttttggccagagctgacaggcaacagcgagtgaccaagtcaccagcacccgt

SEQ ID NO: 663465 - DNA, 120 bp, Artificial Sequence
  ENSG00000184708_38 (sequence is synthesized)
aaatatgaaactctgaaatataacaattttggccaaacctgcatgttgtttactaggattttaaaaccatatgtgtaggcagggtgtggtgggtcacgtctataatttagccagcacttt

SEQ ID NO: 663466 - DNA, 86 bp, Artificial Sequence
  ENSG00000184708_39 (sequence is synthesized)
gctactcaggaggctgagatgagaggatcgcttgtgtctgagaggtcaaggctgcagcaagccatacaagaccctgtctcttttgt

SEQ ID NO: 663467 - DNA, 120 bp, Artificial Sequence
  ENSG00000184708_40 (sequence is synthesized)
gtgtgtgtgtgtgtgtgtgtagtatatatatatgtgtgtatgtatgtgtgtatatgtatgtgtatgtatatgtgtatatgtgtgtgtatatatgtatgtatatatgtatgtgtgtatata

SEQ ID NO: 663468 - DNA, 120 bp, Artificial Sequence
  ENSG00000184708_41 (sequence is synthesized)
tgtatatatgtatgtatatatgtatgtgtgtatatatgagtgtgtgtgtgtgtgtgtgtgtctccaataaatcttgttaaaggtaatgggtagcaagagttatctcaagtaagtgttccc

SEQ ID NO: 663469 - DNA, 120 bp, Artificial Sequence
  ENSG00000184708_42 (sequence is synthesized)
cggtttcaccatttttcccccttttggtcacagtgttagaaacagggaaatggacttaggattagcatagtgaggatctctgaggggactttgcatgtacatgtgaacggtctttccatc

SEQ ID NO: 663470 - DNA, 120 bp, Artificial Sequence
  ENSG00000184708_43 (sequence is synthesized)
cccagatctttgagacctgtgtgatgagagcggaacacgttggtctaagttttctgtgacttgagtatcattctgctattaactccctaggagtattttatgctttcttgtggtccccaa

SEQ ID NO: 663471 - DNA, 120 bp, Artificial Sequence
  ENSG00000184708_44 (sequence is synthesized)
tggccacaggtgcggctggcctggcgaggggcgctcgggccccgtccccagtccctgatcgccggataacaaggggcagctggcgccgtccattggtgcagagcattgtagaccaaggag

SEQ ID NO: 663472 - DNA, 120 bp, Artificial Sequence
  ENSG00000184708_45 (sequence is synthesized)
tggttgtgcatggattgtaccactgtgtgccctaaatgtccttgagttccttccacggaaataactgacctagtagtttttcataactgtctattaggtctttcccttttaggacacagt

SEQ ID NO: 663473 - DNA, 120 bp, Artificial Sequence
  ENSG00000184708_46 (sequence is synthesized)
gttcacagggagtggaaaccggaacccgtggagtatgacccgcccatgcgtggacccggcaggttgctacaacttgcacttggaggggagaggtcccaaggcccccgaattagaaatgcc

SEQ ID NO: 663474 - DNA, 80 bp, Artificial Sequence
  ENSG00000184709_0 (sequence is synthesized)
aatatttgtgcaggcgccgcaggaacgggctccgcggacgacgggctccagggacgcacaggcagcgggcctcccaccgc

SEQ ID NO: 663475 - DNA, 120 bp, Artificial Sequence
  ENSG00000184709_1 (sequence is synthesized)
tcctggtcgcggcctcggccgctgctgctgctgttgctgctgctgtcgccttggcctgtctgggcccaggtgtcggccacggcctcgccctcggggtccctgggcgccccggactgcccc

SEQ ID NO: 663476 - DNA, 120 bp, Artificial Sequence
  ENSG00000184709_2 (sequence is synthesized)
gaggtgtgcacgtgcgtgccgggaggcctggccagctgctcggcactctcgctgcccgccgtgcccccgggcctgagcctgcgcctgcgcgcgctgctgctggaccacaaccgcgtccgt

SEQ ID NO: 663477 - DNA, 120 bp, Artificial Sequence
  ENSG00000184709_3 (sequence is synthesized)
gcgctgccgccaggtgccttcgcgggagcgggcgcgctacagcgcctggacctgcgcgagaacgggctgcactcggtgcatgtgcgagccttctggggcctgggcgcgctgcagctgctg

SEQ ID NO: 663478 - DNA, 120 bp, Artificial Sequence
  ENSG00000184709_4 (sequence is synthesized)
gacctgagcgccaaccagctggaagcactggcaccagggactttcgcgccgctgcgcgcgctgcgcaacctctcattggccggcaaccggctggcgcgcctggagcccgcggcgctaggc

SEQ ID NO: 663479 - DNA, 120 bp, Artificial Sequence
  ENSG00000184709_5 (sequence is synthesized)
ctgctgcgctcactcagcctgcaggacaacgagctggcggcactcgcgccggggctgctgggccgcctgcccgctctagacgcgctgcacctgcgcggcaacccttggggctgcgggtgc

SEQ ID NO: 663480 - DNA, 120 bp, Artificial Sequence
  ENSG00000184709_6 (sequence is synthesized)
gcgctgcgcccgctctgcgcctggctgcgccggcacccgctgcccgcgtcagaggccgagacggtgctctgcgtgtggccgggacgcctgacgctcagccccctgactgccttttccgac

SEQ ID NO: 663481 - DNA, 120 bp, Artificial Sequence
  ENSG00000184709_7 (sequence is synthesized)
gccgcctttagccattgcgcgcagccgctcgccctgcgggacctggccgtggtttacacgctcgggccggcctccttcctcgtcagcctggcttcctgcctggcgctgggctctgggctc

SEQ ID NO: 663482 - DNA, 80 bp, Artificial Sequence
  ENSG00000184709_8 (sequence is synthesized)
ccctccgcccgccgagaccgccagacccgaaccccgatcccgacccccacggctgtgcctcgcccgcggacccggggagc

SEQ ID NO: 663483 - DNA, 120 bp, Artificial Sequence
  ENSG00000184709_9 (sequence is synthesized)
cccgccgctgccgcccaagcctgagcggccgcggccgcctggagcgctcgaagcttcccccatgcctttgccctccctttacactgtctgccggcgtcaacaagcgacacagaccgaaaa

SEQ ID NO: 663484 - DNA, 120 bp, Artificial Sequence
  ENSG00000184716_0 (sequence is synthesized)
gagagaacagcctgagtggccgcagtgttgaggccctaaggacaaagctccttcacagggcatttgcatttaccgcaacctggaggtcagtgttctcttccggacgtctccattctgccc

SEQ ID NO: 663485 - DNA, 120 bp, Artificial Sequence
  ENSG00000184716_1 (sequence is synthesized)
gggaccgggtgctcagccccaacacagtggcagtccaatgggctgaggacagaagcaactgctgctctcatctgccttccatctggtggacctaagcctaatccctgggacaaggatggt

SEQ ID NO: 663486 - DNA, 120 bp, Artificial Sequence
  ENSG00000184716_2 (sequence is synthesized)
gggtgccaaggccggccccagccccggcacctccctgggcctggcacagcagcacagcggaggcagcagtgtcctagtgaaaagtcccttctgtcaggtgtgctgctgtgggcctgctcc

SEQ ID NO: 663487 - DNA, 120 bp, Artificial Sequence
  ENSG00000184716_3 (sequence is synthesized)
ttgtgccagctgctgccactctaggtggccctctctcaccgcatccacttgcagccgcctgttctacatcctcctccatgtgggggcctcagcaatctgctgcctcctgctgtcaaggac

SEQ ID NO: 663488 - DNA, 120 bp, Artificial Sequence
  ENSG00000184716_4 (sequence is synthesized)
agtagtggaaagggtgtggggcaagacacacaggatccagatgccctcggggttgtgtgcccacctgtttggcctctctgactgtccagtgctcagtggctctggggctgtgtaccgagt

SEQ ID NO: 663489 - DNA, 120 bp, Artificial Sequence
  ENSG00000184716_5 (sequence is synthesized)
atgtgcaggaaccgccaccttccacctgctgcaggctgtgttgctggtccacctccactcccccaccagcccgcgggcacagctgcataatagcttctggctcctcaagctgctgttcct

SEQ ID NO: 663490 - DNA, 120 bp, Artificial Sequence
  ENSG00000184716_6 (sequence is synthesized)
gttaggtctctgtgctattgccttctgcattcctgatgagcatctcttcccagcatggcattacattggcatctgtggaggctttgcattcatcctactgcagttggtgcttattacagc

SEQ ID NO: 663491 - DNA, 120 bp, Artificial Sequence
  ENSG00000184716_7 (sequence is synthesized)
ttttgcccattcctggaacaagaactggcagacaggtgcagctcaagactgtagctggttcctggctgtcctgctggccaccctaggattctacagcatggcaggtgtgggagctgtgct

SEQ ID NO: 663492 - DNA, 120 bp, Artificial Sequence
  ENSG00000184716_8 (sequence is synthesized)
cctattccactattatacacacccagctggctgcctgcttaacaagatgctcctcagtctgcacctttgcttctgtggcctcatctccttcctctccatcgctccttgcatccgcctcaa

SEQ ID NO: 663493 - DNA, 120 bp, Artificial Sequence
  ENSG00000184716_9 (sequence is synthesized)
gcaaccccgctctggcctcctacaagcttctgtcatcagctgctatatcatgtatctgactttctctgcactgtccagccgtcctccagagagagtaatccttcaaggacagaatcacac

SEQ ID NO: 663494 - DNA, 120 bp, Artificial Sequence
  ENSG00000184716_10 (sequence is synthesized)
cctcctacctggctgaggtatttggacccctgtggattgtcaaggtttacagctatgagtttcagaagccctcactgtgtttctgctgccctgaaacagtggaggcagacaaagggcaaa

SEQ ID NO: 663495 - DNA, 120 bp, Artificial Sequence
  ENSG00000184716_11 (sequence is synthesized)
ggggtggggctgcgaggccagctgaccaagaaacccctccagctcctccagtccaagtccagcatctttcctacaactattctgccttccacttcgtcttcttccttgcctcactctatg

SEQ ID NO: 663496 - DNA, 120 bp, Artificial Sequence
  ENSG00000184716_12 (sequence is synthesized)
tcatggttacccttaccaactggttcagctatgagggagcagaactggaaaagaccttcatcaagggtagctgggccaccttctgggtcaaggttgcctcatgctgggcctgcgtactcc

SEQ ID NO: 663497 - DNA, 120 bp, Artificial Sequence
  ENSG00000184716_13 (sequence is synthesized)
tctatctggggctgttactggcaccactctgttggccccccacccagaaaccccagccccttatcttgaggcgccgccgccaccgcatcatatccccagataacaaatatcctccagtct

SEQ ID NO: 663498 - DNA, 120 bp, Artificial Sequence
  ENSG00000184716_14 (sequence is synthesized)
aagtccttttcacaaactggggttcccctgacattgtactcctagagttggctcaaggggagctgtccagcccagctcaatacctcaaggacacacagggagttatctccgtttgggctg

SEQ ID NO: 663499 - DNA, 120 bp, Artificial Sequence
  ENSG00000184716_15 (sequence is synthesized)
aagtcaatactatgaactggaagaagtggtcaaacacagtctaatgtgctgggcagagtgtctgactcactggagctactgttacatctgcatcccagctcaagagcctaacacccaaat

SEQ ID NO: 663500 - DNA, 120 bp, Artificial Sequence
  ENSG00000184716_16 (sequence is synthesized)
cagcagctcaaagaaccaccgctgatcccagcagacagtgtggcaccagccctttcctggctcttgggctggaagtgggggtggggaaagaccaacagggactgaagactcggctctgcc

SEQ ID NO: 663501 - DNA, 120 bp, Artificial Sequence
  ENSG00000184716_17 (sequence is synthesized)
cttggagaaaggaaaataaggagttcagccctgggcacacggatataagaagcccagaaccacagaacaaaccagggcatagaagaaaggagcacagaggctaccccaggttttaatcct

SEQ ID NO: 663502 - DNA, 120 bp, Artificial Sequence
  ENSG00000184716_18 (sequence is synthesized)
gattttgaggtcaagggaagcgggaagacaaaaccaccctcattccatgaggaatgacagaagagaaagtgaacgcttgacagcagctgaccacgggaagtcggtgagcagcaggatttt

SEQ ID NO: 663503 - DNA, 120 bp, Artificial Sequence
  ENSG00000184716_19 (sequence is synthesized)
ttggccaactttcaagcagacgaacaaactgaggaagaatgaggaaaagaggcataaacacagatcttgcagcattcactcttaggccaactccatcctagagatggtgttcaagggtgg

SEQ ID NO: 663504 - DNA, 120 bp, Artificial Sequence
  ENSG00000184716_20 (sequence is synthesized)
ggaacaaaaatcacagaaaagaagtctctatggttcttagaggattcctctactgcatatccggagtacttgtttggttgtcattgtataataaaggcttcttctgtgatgtttcactta

SEQ ID NO: 663505 - DNA, 120 bp, Artificial Sequence
  ENSG00000184716_21 (sequence is synthesized)
tttcattacctccctaatctcaattatttgataaaagaatctctgcttccctatccccaccaaaggatggggagacagaagtacaagtgggggtagaaatggaggaaattaccagcctgt

SEQ ID NO: 663506 - DNA, 120 bp, Artificial Sequence
  ENSG00000184716_22 (sequence is synthesized)
agactaaagcaattatacttactccccagagcaaccccgctctggcctcctacaagcttctgtcatcagctgctatatcatgtatctgactttctctgcactgtccagccgtcctccaga

SEQ ID NO: 663507 - DNA, 120 bp, Artificial Sequence
  ENSG00000184716_23 (sequence is synthesized)
gagaggtaagggacaggacctggattctccatgctaagacctttttttgcccctgccaaatacctagctcattgttaatacccatctcttctgttgtcccttcccagtaatccttcaagg

SEQ ID NO: 663508 - DNA, 120 bp, Artificial Sequence
  ENSG00000184719_0 (sequence is synthesized)
agggcccaggtcggcccagggagcacggaaccaaagagcgctagcgccggttcggccgcctttccagaaagcccgggccgaacggccccgccgcagagactcagcgcggatcgctgctcc

SEQ ID NO: 663509 - DNA, 120 bp, Artificial Sequence
  ENSG00000184719_1 (sequence is synthesized)
ctctcgccatggcgcaggtgctgatcgtgggcgccgggatgacaggaagcttgtgcgctgcgctgctgaggaggcagacgtccggtcccttgtaccttgctgtgtgggacaaggctgagg

SEQ ID NO: 663510 - DNA, 120 bp, Artificial Sequence
  ENSG00000184719_2 (sequence is synthesized)
actcagggggaagaatgactacagcctgcagtcctcataatcctcagtgcacagctgacttgggtgctcagtacatcacctgcactcctcattatgccaaaaaacaccaacgtttttatg

SEQ ID NO: 663511 - DNA, 120 bp, Artificial Sequence
  ENSG00000184719_3 (sequence is synthesized)
atgaactgttagcctatggcgttttgaggcctctaagctcgcctattgaaggaatggtgatgaaagaaggagactgtaactttgtggcacctcaaggaatttcttcaattattaagcatt

SEQ ID NO: 663512 - DNA, 120 bp, Artificial Sequence
  ENSG00000184719_4 (sequence is synthesized)
acttgaaagaatcaggtgcagaagtctacttcagacatcgtgtgacacagatcaacctaagagatgacaaatgggaagtatccaaacaaacaggctcccctgagcagtttgatcttattg

SEQ ID NO: 663513 - DNA, 120 bp, Artificial Sequence
  ENSG00000184719_5 (sequence is synthesized)
ttctcacaatgccagttcctgagattctgcagcttcaaggtgacatcaccaccttaattagtgaatgccaaaggcagcaactggaggctgtgagctactcctctcgatatgctctgggcc

SEQ ID NO: 663514 - DNA, 120 bp, Artificial Sequence
  ENSG00000184719_6 (sequence is synthesized)
tcttttatgaagctggtacgaagattgatgtcccttgggctgggcagtacatcaccagtaatccctgcatacgcttcgtctccattgataataagaagcgcaatatagagtcatcagaaa

SEQ ID NO: 663515 - DNA, 120 bp, Artificial Sequence
  ENSG00000184719_7 (sequence is synthesized)
ttgggccttccctcgtgattcacaccactgtcccatttggagttacatacttggaacacagcattgaggatgtgcaagagttagtcttccagcagctggaaaacattttgccgggtttgc

SEQ ID NO: 663516 - DNA, 120 bp, Artificial Sequence
  ENSG00000184719_8 (sequence is synthesized)
ctcagccaattgctaccaaatgccaaaaatggagacattcacaggttacaaatgctgctgccaactgtcctggccaaatgactctgcatcacaaacctttccttgcatgtggaggggatg

SEQ ID NO: 663517 - DNA, 120 bp, Artificial Sequence
  ENSG00000184719_9 (sequence is synthesized)
gatttactcagtccaactttgatggctgcatcacttctgccctatgtgttctggaagctttaaagaattatatttagtgcctatatccttattctctacatgtgtattgggtttttattt

SEQ ID NO: 663518 - DNA, 120 bp, Artificial Sequence
  ENSG00000184719_10 (sequence is synthesized)
tctgttattgattattttgttttctattttgctaagaaaaattactggaaaattgttcttcacttattatcatttttcatgtggagtataaaatcaattttgtaattttgatagttacaa

SEQ ID NO: 663519 - DNA, 120 bp, Artificial Sequence
  ENSG00000184719_11 (sequence is synthesized)
cccatgctagaatggaaattcctcacaccttgcaccttccctacttttctgaattgctatgactactccttgttggaggaaaagtggtacttaaaaaataacaaacgactctctcaaaaa

SEQ ID NO: 663520 - DNA, 120 bp, Artificial Sequence
  ENSG00000184719_12 (sequence is synthesized)
aattacattaaatcacaataacagtttgtgtgccaaaaacttgattatccttatgaaaatttcaattctgaataaagaataatcacattatcaaagccccatcttaagtcttcggatgtg

SEQ ID NO: 663521 - DNA, 120 bp, Artificial Sequence
  ENSG00000184719_13 (sequence is synthesized)
tccttgaatcaatatttttgcaaattatacaaaacaagatttttccaaaatgtaggtaacagagtgtaattcttatttctcatttatcccccaagttattaagtgatcctgaattgtagg

SEQ ID NO: 663522 - DNA, 120 bp, Artificial Sequence
  ENSG00000184719_14 (sequence is synthesized)
tcatatatgtcatcatcttagtgtggagggcaacttgactgataaagagaccttccttcagattttcagaaagtataagattccacatgattttcccagccacacagtactttttaactt

SEQ ID NO: 663523 - DNA, 120 bp, Artificial Sequence
  ENSG00000184719_15 (sequence is synthesized)
tcaaacaaattccagtcctaatatgaaagataaaaattaaatagaaacagagagaaagtatatcgatccttaccttttgctatattttatagctgttgctgttactttatgggttctcca

SEQ ID NO: 663524 - DNA, 120 bp, Artificial Sequence
  ENSG00000184719_16 (sequence is synthesized)
gtatgtgctgtggcatttagactgtgtcgagtttaatgaatttaacacaacaaaaaatttactgaaccagaaaatagatgcacttaaaatagttcaatatttgccaagttggtggttcag

SEQ ID NO: 663525 - DNA, 120 bp, Artificial Sequence
  ENSG00000184719_17 (sequence is synthesized)
catatcacccacatgcttcagtgacctgaccccacgacttgctagctggagagaaatcaatctccagccttccaaaccagctacctgttgctaatttgaaaagcaaaatgatgagttcta

SEQ ID NO: 663526 - DNA, 120 bp, Artificial Sequence
  ENSG00000184719_18 (sequence is synthesized)
tttcagcattttgaaaggagaaaaatcattgcagcctctcaaactaacaaaagttcaacaaaagacttcttactgtaatagtgtttaaagtttcacacttacatgtccactgtcatacat

SEQ ID NO: 663527 - DNA, 120 bp, Artificial Sequence
  ENSG00000184719_19 (sequence is synthesized)
acacatacacaggcacaggcagaacttgcttctatagctgcaaagtgggttttatgaccctatagcatattattatatgtttcctcttagcaataaattggtgaaaaacttaaatgccaa

SEQ ID NO: 663528 - DNA, 120 bp, Artificial Sequence
  ENSG00000184719_20 (sequence is synthesized)
ttggacttacgtatttctttttattcaagaactctatccaatatatacacattttccttttggcttttgtcatttgtgtctttaagactttgaataatgtttttaaataatattaacttt

SEQ ID NO: 663529 - DNA, 120 bp, Artificial Sequence
  ENSG00000184719_21 (sequence is synthesized)
aatctttcatacacctttcagaaatttactatttgtattttgttttgtgtattttgtaacacacaagttgtaaatgattatgtattttctgttcaattccatctttcatttttatgctta

SEQ ID NO: 663530 - DNA, 120 bp, Artificial Sequence
  ENSG00000184719_22 (sequence is synthesized)
aaaatgtcttcttagtcatatatgcccgtctacattttcttctagttcttttattagatatatctagtattaattcgtcacccatttgatacatggtaatttttttcatgatgtggacat

SEQ ID NO: 663531 - DNA, 120 bp, Artificial Sequence
  ENSG00000184719_23 (sequence is synthesized)
gaagtaaatattctgatttttaaatgtttccattataattggctaccattgtcaattttcttattggttctgatacttattcggtttcttagttttccaggtaataatttatctgcaagt

SEQ ID NO: 663532 - DNA, 120 bp, Artificial Sequence
  ENSG00000184719_24 (sequence is synthesized)
cagcgtaacttaattatttgttttttaatagttcagtattaccattgcctttgttgtttcattgagaacttccagtacaatgtcaggagggggaaaaaaacaacggcaatggcaccaatc

SEQ ID NO: 663533 - DNA, 120 bp, Artificial Sequence
  ENSG00000184719_25 (sequence is synthesized)
cttctcttgttgttcatctttatattccttagaacatacggaatgcgttctgacatagaacttattgaagagtaatttggaattttctgatgaatcaactgtctttaatctttacaagtt

SEQ ID NO: 663534 - DNA, 120 bp, Artificial Sequence
  ENSG00000184719_26 (sequence is synthesized)
tgaaaggtatacgttattgtttccatttcccagatggagaaattgaggttcaggaaggttacacaaagtcccaggtctaagaaaaatgtctcccagattccaaaagatgtttctattatg

SEQ ID NO: 663535 - DNA, 120 bp, Artificial Sequence
  ENSG00000184719_27 (sequence is synthesized)
ctaatagtggccgttcaagcattagaggaaaggttgcccgtggtatcgctggtaaattcttcttcccactttcaaatctagaatagtaaaacagcaaaaatcccaacaggcatgagagtt

SEQ ID NO: 663536 - DNA, 120 bp, Artificial Sequence
  ENSG00000184719_28 (sequence is synthesized)
atcgcagtagataggttaagctgcttctctgctgtggtcaacgtcagctctgttgcgaggcgggttctcccaacaatagcccacaccatttccaggcttttctgggcgaggggcagggcg

SEQ ID NO: 663537 - DNA, 120 bp, Artificial Sequence
  ENSG00000184719_29 (sequence is synthesized)
cccggcccccaaagcgagaagacagacagccccggttctccgcagccccaggtttgctcctcaaggacggaggggcctctcagctccggccgcctcctttccgccccctgcaggccggcc

SEQ ID NO: 663538 - DNA, 120 bp, Artificial Sequence
  ENSG00000184719_30 (sequence is synthesized)
taccaaatgccaaaaatggagacattcacaggtaccaagtgctggtgtgattctaggatgtgcgaagagcccctggatgatggcgattggatttcccatctgacttcctggaaattggag

SEQ ID NO: 663539 - DNA, 120 bp, Artificial Sequence
  ENSG00000184719_31 (sequence is synthesized)
cacacagtcaggttttatttgatttttttttttaaggataccacttcacagcctttaggatagctattatttagaagcaaaacagaagataaatgttggcaaggatgtggagatattgga

SEQ ID NO: 663540 - DNA, 120 bp, Artificial Sequence
  ENSG00000184719_32 (sequence is synthesized)
ttcccttgtgcagtgccggtgggaatgtaaaatgatgtagctactatggaaaatgatacggcaatttctttagaaatgaaatatagaattgctgtatgatctgcagttccacatctggat

SEQ ID NO: 663541 - DNA, 120 bp, Artificial Sequence
  ENSG00000184719_33 (sequence is synthesized)
atctatccaaaagaagtgaaagtagggacttgaacgaacatttgtacaccaatgttcacagcggctttattcacaacagccaaaaggtggaagcaacccagtgtccatggatagatgaat

SEQ ID NO: 663542 - DNA, 120 bp, Artificial Sequence
  ENSG00000184719_34 (sequence is synthesized)
agataaataaaatgtggtataaacatacaatgggctattgtttagccttaaaagggaaggaaattctgacatgctgcaatatggatgaagcttaaagtcattatgcaaagtggaataagc

SEQ ID NO: 663543 - DNA, 120 bp, Artificial Sequence
  ENSG00000184719_35 (sequence is synthesized)
ctatcacaaaaaataatattacataattctacttatatgaggaatctagagcagtcagtttcacagagacagaaaatagaatggtggttgccaagggctgggagaagagggcaatggaga

SEQ ID NO: 663544 - DNA, 120 bp, Artificial Sequence
  ENSG00000184719_36 (sequence is synthesized)
gtgagtgtttagtgggtcagagttttagtttgggaaggtaaaaagttctggagatggatgatggttatgggtgctcaacagtgtgaatgtacttaatgccacagaactgcacatttaaat

SEQ ID NO: 663545 - DNA, 120 bp, Artificial Sequence
  ENSG00000184719_37 (sequence is synthesized)
gtggttaaaatcatcacttttatgttatgtatatttaccacaataaataaagaagttgatatttcttatacttacaaagaggagaagggcatttgcaaatcaacaagaagtgtgaggccc

SEQ ID NO: 663546 - DNA, 120 bp, Artificial Sequence
  ENSG00000184719_38 (sequence is synthesized)
ctctctctagcagaaaaatagactaaatctatttctttatcttttaacatcctgtttaagggaaatgccaaaacaaatgggaaaaaatacacacacacaaatatatatgaacatgttttg

SEQ ID NO: 663547 - DNA, 120 bp, Artificial Sequence
  ENSG00000184719_39 (sequence is synthesized)
cctcatgagtaatcaaaatgtgtacatatgtatgtttatgtatgtgtgtttatatttaaaatcgtgttctgccttatgagtaaacaaaaagtatacaaattaaaaactataatgaaacgt

SEQ ID NO: 663548 - DNA, 120 bp, Artificial Sequence
  ENSG00000184724_0 (sequence is synthesized)
caaggacaacctccacaaccaacaccatgtgtggcagctactacggaaactactatggcacccctggctatgggttctgtggctatggaggcctgggctatggctatggaggcctgggct

SEQ ID NO: 663549 - DNA, 120 bp, Artificial Sequence
  ENSG00000184724_1 (sequence is synthesized)
gtggctatggctcctgctgtggctgtggcttccgcagactgggctgtggctatggctatggctcccgctccctctgtggctatggctatggatgcggctctggctctggctactattatt

SEQ ID NO: 663550 - DNA, 120 bp, Artificial Sequence
  ENSG00000184724_2 (sequence is synthesized)
tcaccctctatcctgtgatactgagattcactaattctgaagcccacatgttctgagattttcccttgagtgatgatatcctgcaatggaagtctaatatggtctgttgttgagctacca

SEQ ID NO: 663551 - DNA, 120 bp, Artificial Sequence
  ENSG00000184724_3 (sequence is synthesized)
tctaacctacaaatatcttgaatttccatcatgaaacgggataaggtaaaattcacctgtcagttctcctttcatcagaatgatggtgtcacatcatctgccttgatgacttttatgatg

SEQ ID NO: 663552 - DNA, 120 bp, Artificial Sequence
  ENSG00000184730_0 (sequence is synthesized)
attatcagctttctggacacacagacagagacagacaggatggacttcctccggctatacctccctgggctgcaccaggccttgaggggggcactggattccctcggcacctttgtctcc

SEQ ID NO: 663553 - DNA, 120 bp, Artificial Sequence
  ENSG00000184730_1 (sequence is synthesized)
tacctcctgggagatgcagtccccactgtagagcgggaggcgcaggcggctgaggaactgggggtggtggcggtgggaaagacagggaagattgtagaggaggaagcccaggaggacctg

SEQ ID NO: 663554 - DNA, 120 bp, Artificial Sequence
  ENSG00000184730_2 (sequence is synthesized)
gagggccttagaggcagccaaaacgagggggctggaaggctgagagggcctggagatgacagaagacatgaagtggggagctcagctgtagaacagacctggggctggggagatggcagc

SEQ ID NO: 663555 - DNA, 120 bp, Artificial Sequence
  ENSG00000184730_3 (sequence is synthesized)
tcccatgggtcccaagcagagaggcaggacagtggggctggggagacagccaaggctgccaggtgccaggagccaagcgcccacttggaggccagaaagaaatccaaggcagggtctggg

SEQ ID NO: 663556 - DNA, 120 bp, Artificial Sequence
  ENSG00000184730_4 (sequence is synthesized)
gcttgccaagacaggagcggccaagcccaggagaggcaggagtcccatgagcaggaagtgaacagagaagagaggctgagaagctgggaacaggaggaggaggaggaagaggtcagggca

SEQ ID NO: 663557 - DNA, 120 bp, Artificial Sequence
  ENSG00000184730_5 (sequence is synthesized)
agagagccagggatggccagaggggcggagtcagagtggacctggcatggggagacggaggggaaggctggtgctgttgggccaaaggcggcaggggacaaccgggagatggagcagggg

SEQ ID NO: 663558 - DNA, 120 bp, Artificial Sequence
  ENSG00000184730_6 (sequence is synthesized)
gtcagggaggcagatgcaggggaaactgaggagcctggggccgaaggggctgggaaaggagaagaggtggtagtggtggagaaggcctgtgaaagcactagggcatgggggacgtggggc

SEQ ID NO: 663559 - DNA, 120 bp, Artificial Sequence
  ENSG00000184730_7 (sequence is synthesized)
ccaggggcagagcctgaggactggggaatcttaggcagagaggaggccaggacaaccccaggtagggaagaggccagggcaattttagatggggaggaagccaggacaatctcaggcggg

SEQ ID NO: 663560 - DNA, 120 bp, Artificial Sequence
  ENSG00000184730_8 (sequence is synthesized)
gaggaggctgagacagcctcaggcggggaggaggctgaaacagcctcaggcggggaggaggccgggacagcctcgggaggggaggaggccgggatagcctcaggcggggaggctgggaca

SEQ ID NO: 663561 - DNA, 120 bp, Artificial Sequence
  ENSG00000184730_9 (sequence is synthesized)
gcctcaggaggggaggaggccgggacagcctcaggaggggaggaggccgggacagcctcaggaggggacgaggcctggacaacctcaggcaaagaggaggctgacctgctgggagtcaga

SEQ ID NO: 663562 - DNA, 120 bp, Artificial Sequence
  ENSG00000184730_10 (sequence is synthesized)
cagacagaatatggagcagtcccaggagaaaggctcctagaggctactggaaaagtctgggtcctagaggaggagggggatgaggagagagaggctgaggtgagccctttccccaaacag

SEQ ID NO: 663563 - DNA, 120 bp, Artificial Sequence
  ENSG00000184730_11 (sequence is synthesized)
ccccaggtcctgggcactgaaagaacagaagaggctgctgagagccagaccgcagggagggaagctgtgggaggccaggaggcaggggagagctttgagggccaggtagacctgcgtggt

SEQ ID NO: 663564 - DNA, 120 bp, Artificial Sequence
  ENSG00000184730_12 (sequence is synthesized)
aaggaggctgagatgaggcaggacttggggatcagggccgaccgggccaggatggaagagctggtacaggcagaggaggcccaggaggagagagggagcagcagggatccagtggctgag

SEQ ID NO: 663565 - DNA, 120 bp, Artificial Sequence
  ENSG00000184730_13 (sequence is synthesized)
ctgccctcagatggagaggctgaaggcactgccgacttggaggcaactccagaggccaggcctgaggaggagctcacaggggaggagagtgaggcggcccagactagctgtggcctactg

SEQ ID NO: 663566 - DNA, 120 bp, Artificial Sequence
  ENSG00000184730_14 (sequence is synthesized)
ggcgtggaatggggtggcctcacacacagcgtcaccaaaggccaaggacctgagctgatggggggcgcccagaccccaactaagcaacccgaggaaagggaggcaggggaggtggagctc

SEQ ID NO: 663567 - DNA, 120 bp, Artificial Sequence
  ENSG00000184730_15 (sequence is synthesized)
gtaaagcctgaggcctccgaggccttcccaggagcctgggaaaaccgcacgagaaaggacatggagagaggaaatactcaggaggatgcggccgatggcgagcagcgggaggaggaggag

SEQ ID NO: 663568 - DNA, 120 bp, Artificial Sequence
  ENSG00000184730_16 (sequence is synthesized)
actgcgggaggccagaccctggcggctgaggctgaaggagaccgagagtctgaactatcagaagtcccagaggcaggcggggaggggctgacaacccaggacgcgggatgtggaactgag

SEQ ID NO: 663569 - DNA, 120 bp, Artificial Sequence
  ENSG00000184730_17 (sequence is synthesized)
gagggagaggcatctgtctcagagaaccaggagctggacggaagcacaggggcagacgcagggccttgcccgtcactgggagaggcctatgccagagaaactgaggatgaggaggcggag

SEQ ID NO: 663570 - DNA, 120 bp, Artificial Sequence
  ENSG00000184730_18 (sequence is synthesized)
gctgacagaacatccagaagaggctggaggctgcaagcggtggctgtgggcctcccggaccgtgaggatgcacagactggctctgtggctgctgggattatggggggtgatgtggtccca

SEQ ID NO: 663571 - DNA, 120 bp, Artificial Sequence
  ENSG00000184730_19 (sequence is synthesized)
cacatcagcgctgctggcgctggtgaagctttggaaggggtgcttgggcaaggctgggactcgaaagaaaaggaagaggcagcagcaggagagcatgcaggtgggcaagaatttggtctg

SEQ ID NO: 663572 - DNA, 120 bp, Artificial Sequence
  ENSG00000184730_20 (sequence is synthesized)
gagggctcagcagaggaagaggtgactggcagaggcagccaagtagaggcttttgagtccagggagggaggaccttggggagggcgggtagaggccgaggaatctgcaggcgcagaggac

SEQ ID NO: 663573 - DNA, 120 bp, Artificial Sequence
  ENSG00000184730_21 (sequence is synthesized)
agctgtgggctggatcccgcgggctcccagacagcgagggcagaggggatgggagccatggtggaggctggggggcttctagaaaagtggacgctgttggaagaagaggctgttggatgg

SEQ ID NO: 663574 - DNA, 120 bp, Artificial Sequence
  ENSG00000184730_22 (sequence is synthesized)
caggagagagaacagagggaagacagtgaggggcggtgtggggactaccaccctgagggagaggcaccaaggctccttgatgcagagggtctcatggtgaccgggggccggagggcagag

SEQ ID NO: 663575 - DNA, 120 bp, Artificial Sequence
  ENSG00000184730_23 (sequence is synthesized)
gccaaggagactgagccagaaagcctggaacatgtcaggggccaggaggagcagccaacacaccaggcccctgcagaagctgcgccggagtcagtcggggaagccgagacggctgaggcc

SEQ ID NO: 663576 - DNA, 120 bp, Artificial Sequence
  ENSG00000184730_24 (sequence is synthesized)
atgggcagtgccagaggaggtgctgccaacagctggagcgaggccccgctccccgggtccctcctagacgtctctgtcccaaggagtcgcgtgcacctctcgagaagctcctcacagcgt

SEQ ID NO: 663577 - DNA, 120 bp, Artificial Sequence
  ENSG00000184730_25 (sequence is synthesized)
cgctcccggccctcttttcgtcggactccggcctgggagcagcaggaggagcccccagcccccaaccctcctgaggaggagctgtcagctcctgagcagagacccctccagctggaggaa

SEQ ID NO: 663578 - DNA, 120 bp, Artificial Sequence
  ENSG00000184730_26 (sequence is synthesized)
cccctggagccaagccctctgaggcatgatgggaccccggtgccagccaggagaaggcccctgggacacgggtttggcctcgcgcaccctggcatgatgcaggagctgcaagcccgtctg

SEQ ID NO: 663579 - DNA, 120 bp, Artificial Sequence
  ENSG00000184730_27 (sequence is synthesized)
ggccggcctaagccccagtgactgagacccggtgctctgggagccaggccctgagtgggtgccagaaggcttgctccaatgccactgagccctgctccctctgccactgtggacacatcc

SEQ ID NO: 663580 - DNA, 120 bp, Artificial Sequence
  ENSG00000184730_28 (sequence is synthesized)
tctccaccctctgggcctcagtgtcttgatgtatcattcatggagcaggcaaaaccagacgtctgggaagaccgtgaacttaaggagtctgattctccgacacaggctggtggaccacct

SEQ ID NO: 663581 - DNA, 120 bp, Artificial Sequence
  ENSG00000184730_29 (sequence is synthesized)
accccactgagaccacctctcagggtgcctgccctggttcctccccagcctgagtcagctgtctggactgcaaggaggctgggcacgggggctcacgcctgtcaccccagagctttggga

SEQ ID NO: 663582 - DNA, 90 bp, Artificial Sequence
  ENSG00000184730_30 (sequence is synthesized)
ggccaaggtgggaggatcggcagcatagcaagatccccatcttttaaaaacaaaataaaacaataaagactgcaaggaagactgagggaa

SEQ ID NO: 663583 - DNA, 120 bp, Artificial Sequence
  ENSG00000184731_0 (sequence is synthesized)
actggggcgccgttccccacccggcgcggacttcggaaccggccctgggactgactggctctaccactcgagcgcgtctccgctggacccggaaccccggtcggtccattccccgcgaag

SEQ ID NO: 663584 - DNA, 120 bp, Artificial Sequence
  ENSG00000184731_1 (sequence is synthesized)
gcgcccccgaacgagcggctccttccccgggaccccgcggctacccgggaccccgacgccgcgcggccggcgcgcaggagcgcagtggagaggctggcggcggatcgcgccaagtatgtg

SEQ ID NO: 663585 - DNA, 120 bp, Artificial Sequence
  ENSG00000184731_2 (sequence is synthesized)
agaggctggcggcggatcgcgccaagtatgtgcggggtcggccggggactggccggggcgtcgcttccgagggcagcggcccgggggcgatcaagtgcccggggaacgaccctgggcccc

SEQ ID NO: 663586 - DNA, 120 bp, Artificial Sequence
  ENSG00000184731_3 (sequence is synthesized)
gccccggccccggtggcgcgcagggctattgcgcggaagccgttgagaccggactcgctgatcatctaccggcagaaatgcgaattcgtgcgaggatcgggcgccgacggccccagggca

SEQ ID NO: 663587 - DNA, 120 bp, Artificial Sequence
  ENSG00000184731_4 (sequence is synthesized)
agcctggtgaagaagctcttccaggggccgggtaaggacaaggcgccggtgccccggacgggagacgagggcaaggccgggaacccggagacggtcccgaccactcctggccccgcggcg

SEQ ID NO: 663588 - DNA, 120 bp, Artificial Sequence
  ENSG00000184731_5 (sequence is synthesized)
cagccgcgcggtccgcggcgccctccagtgtcccggccgcgccccctgggccagagccgcgggtggtgaggcgtcgggggctgcagcgctcacagtcggacctcagctcccgctattccg

SEQ ID NO: 663589 - DNA, 120 bp, Artificial Sequence
  ENSG00000184731_6 (sequence is synthesized)
cagtcggacctcagctcccgctattccgctgccttggccgagtctgacaccttcttccagtactgcggcctggaccccgaggtggtggaggccctggggagggagaacttcaccgcgggg

SEQ ID NO: 663590 - DNA, 120 bp, Artificial Sequence
  ENSG00000184731_7 (sequence is synthesized)
tcggactgtgtgaccctcaaggtgcgcagcgtgagcgtcgccacctccggcagcggcttctcccggcacagcggcggcgacgacgaggggctgcaggaggaggagctgatagagcaggtg

SEQ ID NO: 663591 - DNA, 120 bp, Artificial Sequence
  ENSG00000184731_8 (sequence is synthesized)
cccagcaccacttcggtcatcgagaggaacgcccgcatcatcaagtggctgtacacctgtaagaaggccaaggagacccccagccaggagcagagccggacccgaggaagcaaaccttcc

SEQ ID NO: 663592 - DNA, 120 bp, Artificial Sequence
  ENSG00000184731_9 (sequence is synthesized)
cgatgatgaagacttcttgaaggatttcatgggtgatttgggatcccaggaccatttggctagtgtgcctaggtgaccacatgattgctgttttaccaggaatgcagcatcccattgaca

SEQ ID NO: 663593 - DNA, 120 bp, Artificial Sequence
  ENSG00000184731_10 (sequence is synthesized)
aaacaagtgctctgagaaggtttaaaatactacagagaatatgggaacacagaccttgaaatttagctgagttgtaacagctgaaactccaagaggtgtcttccttgtttgaggtgaaac

SEQ ID NO: 663594 - DNA, 120 bp, Artificial Sequence
  ENSG00000184731_11 (sequence is synthesized)
tagtgttgcttccagagggcagctggaaaccgtaaagctgtttggaaatctttttgactgacttgctgacaaagaggtactgtgatgcattttaacaatatctaagttgattttttttta

SEQ ID NO: 663595 - DNA, 120 bp, Artificial Sequence
  ENSG00000184731_12 (sequence is synthesized)
aatcaaggaaaataaaaaccaagcatgaatgctatggtatgtgccccttttgaccatcctgggctgattaacatcatttaaatcaaagtaatcataaaaaggcatattctacttcaatta

SEQ ID NO: 663596 - DNA, 120 bp, Artificial Sequence
  ENSG00000184731_13 (sequence is synthesized)
tgtggtcaaataagagtaaacacacacactcacacatgctgaccccaattgccagagcattactgcactataaattacggttaattcccaaattatactactgtttatcttatttaacaa

SEQ ID NO: 663597 - DNA, 120 bp, Artificial Sequence
  ENSG00000184731_14 (sequence is synthesized)
gtcagaaagcacttttaaaataacttgagggctacaaggtcattctattaatgtcattctccattcgggttgtaggcatgtggaagtacccattaaaagataagttagagtttaaatact

SEQ ID NO: 663598 - DNA, 120 bp, Artificial Sequence
  ENSG00000184731_15 (sequence is synthesized)
gataaacaaaaccttttattgcaactggacagtttctggagagttagcggaagaatcttggagtttcctttggtcagatgaatacaacatttcacttttgcagcactatttagaatgtac

SEQ ID NO: 663599 - DNA, 120 bp, Artificial Sequence
  ENSG00000184731_16 (sequence is synthesized)
aactttggtttacacagaacacgggcatctgaggcaggacctcttccctgccctttgatctgactcacacctccacatatgacgtaatcaacccaaatttgacaccaattcactcttttc

SEQ ID NO: 663600 - DNA, 120 bp, Artificial Sequence
  ENSG00000184731_17 (sequence is synthesized)
tgcaaagggcatattttgaaacaagggacagcctgagggcggctataatgagaatgttcatgggggttactgggtccctaattctgaacttgcttatgacacccagagtgaatagattca

SEQ ID NO: 663601 - DNA, 120 bp, Artificial Sequence
  ENSG00000184731_18 (sequence is synthesized)
gattcagaaccttctgagaaataacccaaagaaaatttgttacccagccaattcttcgaaagcttaatatcaaaatatatcttttcaagaagaaaatcgttagagagaagaatgtggagg

SEQ ID NO: 663602 - DNA, 120 bp, Artificial Sequence
  ENSG00000184731_19 (sequence is synthesized)
ggagagaaatgggtttctcattgatatgatattttgttaaccatttcattttgaattattcaagttttggttaatattgtattcttttttcgtaactattttaccgtgagagtaggtcat

SEQ ID NO: 663603 - DNA, 120 bp, Artificial Sequence
  ENSG00000184731_20 (sequence is synthesized)
tgggttacttagatatttatttttacacagttattagtcttcagatagttttattttacttcatatgattttagtttttgtcagtataattttaaatcatgtttttcttggtcatctctt

SEQ ID NO: 663604 - DNA, 120 bp, Artificial Sequence
  ENSG00000184731_21 (sequence is synthesized)
tgtgtatattgtgtaattggattttcattgactgcaagtggagtgtttgccactcaattcagtactcagtactatggtgacttgttttcaaataagtctcagatacacatttagggagcc

SEQ ID NO: 663605 - DNA, 120 bp, Artificial Sequence
  ENSG00000184731_22 (sequence is synthesized)
tttgctggccgaatatagactctgtcaggacagcaggtcccctgatctaagaattttccccaatggttgctctaaaaatgctgctattttgctgttcactgtattgcacttagttaaaaa

SEQ ID NO: 663606 - DNA, 120 bp, Artificial Sequence
  ENSG00000184731_23 (sequence is synthesized)
gaagataatgtgaaagatgagagcagttttttaaaggatcttttcatatacccaattcccttattttcagatgtcccatcaattttagatatgaaagctttaagtaaaagtgtgtatgcc

SEQ ID NO: 663607 - DNA, 120 bp, Artificial Sequence
  ENSG00000184731_24 (sequence is synthesized)
tttctactgtcagaacaggatggatgcagcctgggtcagatttatttaagataaaaatcatgcagactcatcattcatatcataggtgaaaaatgtaaaaaccaaatggtttccactaaa

SEQ ID NO: 663608 - DNA, 120 bp, Artificial Sequence
  ENSG00000184731_25 (sequence is synthesized)
gccaccaagatcttttagaaatgtttgcacctttggtggtggcacaggaaaagagaagaattcagctggagtgaattctagaagtagatatcagaaacggggcatgaagaacaggggaac

SEQ ID NO: 663609 - DNA, 120 bp, Artificial Sequence
  ENSG00000184731_26 (sequence is synthesized)
tgggtggcatcagactcctaaagaagtgagttaattttccttcccttccattcagattcatgccacagctccatatcttgagtatgtgtaagaggtgagttccttcttcagccaggggcg

SEQ ID NO: 663610 - DNA, 89 bp, Artificial Sequence
  ENSG00000184731_27 (sequence is synthesized)
agtatgtgtaagaggtgagttccttcttcagccaggggcggtggctcatgcctttaatcccaatgtgccttggggttcaaggttgcagt

SEQ ID NO: 663611 - DNA, 120 bp, Artificial Sequence
  ENSG00000184731_28 (sequence is synthesized)
agcaagaccctgtctctaaaaatatatataaaaagtaaaactaaagaacttcttgcctaaacctgaattaccgcaatttgctgagtgactttgagaaaaatcagactgtttagttcagtc

SEQ ID NO: 663612 - DNA, 120 bp, Artificial Sequence
  ENSG00000184731_29 (sequence is synthesized)
gggatgaaaagcttgcgattgcttcccacaagaatgggcaatagtgacggctgcaaggtacttttatttgttcatgaaagaacgacaatttttcaaaatgtaattaaacataatagaatg

SEQ ID NO: 663613 - DNA, 120 bp, Artificial Sequence
  ENSG00000184731_30 (sequence is synthesized)
ttttaaactactgggcactgaaactggaagaaaaaggaggctttattgaacattcccctttttcagttggttcaaagttcagcactgtggttatcattggtgatgccagaaaacattagt

SEQ ID NO: 663614 - DNA, 120 bp, Artificial Sequence
  ENSG00000184731_31 (sequence is synthesized)
agacttagacaattgctatggcagtttctaaacagagctttttctatacactatttgcaactggagtgcaatattgtatattctgtgttaaagaaataaagtatttttatcatttattaa

SEQ ID NO: 663615 - DNA, 120 bp, Artificial Sequence
  ENSG00000184731_32 (sequence is synthesized)
gcagaagtcccttgttctgagaccagttctgcaacttctggaagatgtggaagcaggaatttaagctgtgctttttctgctgaaatttataaggattcattttaggatttcttgaaagat

SEQ ID NO: 663616 - DNA, 120 bp, Artificial Sequence
  ENSG00000184735_0 (sequence is synthesized)
atcttttggtgcagaaggtgacgggaaacaggccgcagacctgaacttccaaccgtatgtaggcgagaagccggtgccgatactcccactatcccacaatgtcccactgggccccagagt

SEQ ID NO: 663617 - DNA, 120 bp, Artificial Sequence
  ENSG00000184735_1 (sequence is synthesized)
ggaagagggcggaggctaatccaagagaccttggggccagctgggatgtcaggggcagcagaggcagtggctggagtggccccttcggccatcagggaccgagagcagcaggctcccgtg

SEQ ID NO: 663618 - DNA, 120 bp, Artificial Sequence
  ENSG00000184735_2 (sequence is synthesized)
aaccaccactctgctttaaaataaagaacaatatggttggtgtggtcattggttacagtggatcaaaaataaaagatctacaacattcgacaaacactaaaatacagatcataaacgggg

SEQ ID NO: 663619 - DNA, 120 bp, Artificial Sequence
  ENSG00000184735_3 (sequence is synthesized)
aatctgaagcaaaagtcagaatttttggcaatagggaaatgaaagcaaaggccaaagcggctatagaaacacttattagaaaacaagaaagctacaactcagaatccagtgtggataatg

SEQ ID NO: 663620 - DNA, 120 bp, Artificial Sequence
  ENSG00000184735_4 (sequence is synthesized)
ctgcatcccaaacccctattggaagaaatctaggcagaaatgacattgttggagaagctgagccattgtcaaattgggatcgcattagggcagcagtcgtggagtgcgaaaagagaaaat

SEQ ID NO: 663621 - DNA, 120 bp, Artificial Sequence
  ENSG00000184735_5 (sequence is synthesized)
gggcagatctaccaccagttaagaaaaacttttacatagaatccaaagcaacaagctgcatgtctgaaatgcaggtgattaactggagaaaggaaaatttcaacataacgtgtgatgact

SEQ ID NO: 663622 - DNA, 120 bp, Artificial Sequence
  ENSG00000184735_6 (sequence is synthesized)
tgaaaagtggtgaaaagcgtctcattccaaaaccaacttgcaggtttaaagacgcttttcagcaataccctgatcttctgaaaagcataataagggtagggattgtaaagccaacgccaa

SEQ ID NO: 663623 - DNA, 120 bp, Artificial Sequence
  ENSG00000184735_7 (sequence is synthesized)
ttcagtcacaggcatggccaattattctacaaggaatagatcttatagtagttgcacaaaccggaacagggaaaacattgtcctatctaatgcctgggtttattcatcttgattctcaac

SEQ ID NO: 663624 - DNA, 120 bp, Artificial Sequence
  ENSG00000184735_8 (sequence is synthesized)
caatatctagagagcaaaggaatgggcctgggatgctagtccttacacccactagagagttggctcttcacgtggaagctgaatgttcaaagtattcatataaaggtctcaaaagcattt

SEQ ID NO: 663625 - DNA, 120 bp, Artificial Sequence
  ENSG00000184735_9 (sequence is synthesized)
gcatatatggtggtagaaacagaaatggacaaatagaagacattagcaaaggtgtagatatcattattgcaactcctgggaggctgaatgacctacaaatgaataactctgtcaacctaa

SEQ ID NO: 663626 - DNA, 120 bp, Artificial Sequence
  ENSG00000184735_10 (sequence is synthesized)
gaagcataacctacttggttatagatgaggcagataaaatgctggatatggaatttgaaccccagataaggaagattttattagatgtgcgcccagaccgacagactgttatgacaagtg

SEQ ID NO: 663627 - DNA, 120 bp, Artificial Sequence
  ENSG00000184735_11 (sequence is synthesized)
caacttggccagatactgtacgtcaactagcactttcttatttgaaagatcctatgattgtttatgttggtaatctgaatctagtggctgtaaatacagtgaagcaaaatataattgtta

SEQ ID NO: 663628 - DNA, 120 bp, Artificial Sequence
  ENSG00000184735_12 (sequence is synthesized)
ccacagaaaaagaaaaacgagctctcacccaagaattcgtagagaacatgtcacccaacgacaaagtcatcatgtttgtcagccaaaaacatattgctgatgacttgtcaagcgacttca

SEQ ID NO: 663629 - DNA, 120 bp, Artificial Sequence
  ENSG00000184735_13 (sequence is synthesized)
atatccaaggcatatctgcagaatcattacatggcaacagtgaacagagtgatcaagagcgagcagtagaggactttaaaagcggaaacataaagatactgattacaactgatatagtat

SEQ ID NO: 663630 - DNA, 120 bp, Artificial Sequence
  ENSG00000184735_14 (sequence is synthesized)
cccgaggtcttgatcttaatgatgtcacacatgtatataattatgatttcccaaggaatattgacgtatatgtacacagagtagggtacattggacggacaggaaagactggcacatcag

SEQ ID NO: 663631 - DNA, 120 bp, Artificial Sequence
  ENSG00000184735_15 (sequence is synthesized)
tggccggtgaattgattaaaattctggacagagcaaatcagagtgttccggaagatcttgtagtaatggctgagcaatacaagttaaatcaacaaaagaggcacagagaaacacgatcaa

SEQ ID NO: 663632 - DNA, 120 bp, Artificial Sequence
  ENSG00000184735_16 (sequence is synthesized)
gaaaacctggacaaagacgcaaggagttttattttttaagttgaaaagttgtaccaggctactggaagattccaggcatgttaaagatatgcagtattgaatatatgtaaggaagtattg

SEQ ID NO: 663633 - DNA, 120 bp, Artificial Sequence
  ENSG00000184735_17 (sequence is synthesized)
gaaacatactagccatttgaagacataactaattcttaaataatactgctaaactttcaatattgtgtatgctccttaattttaaaaaagtctcaaaaatgagagagtgagagactgtgt

SEQ ID NO: 663634 - DNA, 120 bp, Artificial Sequence
  ENSG00000184735_18 (sequence is synthesized)
gaagagaaagtgaatgttacgtgttggttaaagtttaatttctcttaaaaatacttttattttaggtttgggggtatatgtgaaggtttgttaaagaaacacgtgccatgggggtttatc

SEQ ID NO: 663635 - DNA, 120 bp, Artificial Sequence
  ENSG00000184735_19 (sequence is synthesized)
aactttcaatattgtgtatgttccttaattttagaaaaagtctcaaaaatgagagagagactatgtgaagagaaggtaaatgttatgtgttggttaaagtttaatttctcctaaaaatac

SEQ ID NO: 663636 - DNA, 120 bp, Artificial Sequence
  ENSG00000184735_20 (sequence is synthesized)
ttttattttaggtttgggggtatttgtgaaggtttgttaaagaaacacgtgtcatgggggtttatcaactttcaatattgtgtatgctccttaattttaaaaaagtctcaaaaatgagag

SEQ ID NO: 663637 - DNA, 120 bp, Artificial Sequence
  ENSG00000184735_21 (sequence is synthesized)
agtgagagactatgtgaagagaaagtaaatgttacgtgttggttaaagtttaatttctcttaaaaatacttttattttaggtttgggggtatatgtgaaggtttgttaaagaaacacgtg

SEQ ID NO: 663638 - DNA, 120 bp, Artificial Sequence
  ENSG00000184735_22 (sequence is synthesized)
tcatgggggtttatcaactttcaatattgtgtatgttccttaattttaaaaaagtctcaaaaatgagagagtgagagactatgtgaagagaaagtaaatgttatgtgttggttaaagttt

SEQ ID NO: 663639 - DNA, 120 bp, Artificial Sequence
  ENSG00000184735_23 (sequence is synthesized)
aatttctcttaaaaatacttttattttaggtttgggggtatatgtgaaggtttgttaaagaaacacgtgtcatgggggtttactgtacatattatttcgtcacccaggtattaagaccag

SEQ ID NO: 663640 - DNA, 120 bp, Artificial Sequence
  ENSG00000184735_24 (sequence is synthesized)
tgcccaataattatcttttctgctcttctgcctccttccaccctcccccatcagctagaccccagtgtctgctgtttccttctttgcgttcataagttctcatcgtttgcttcccactta

SEQ ID NO: 663641 - DNA, 120 bp, Artificial Sequence
  ENSG00000184735_25 (sequence is synthesized)
taagtgagaacatgtggtatttgagtttctgttcttgtgttaattttatagtctaccatgtccatttgtcttctctaaaacacttggtagaagacaacaatggtgcttttctggctttaa

SEQ ID NO: 663642 - DNA, 120 bp, Artificial Sequence
  ENSG00000184735_26 (sequence is synthesized)
aatagttgtactaaattgaagcatagcttcaagcttatccagtcaaagtattctcttttcccccgagcagttggtgccacaacagttcttaaagttatttccactatcattctctacttg

SEQ ID NO: 663643 - DNA, 120 bp, Artificial Sequence
  ENSG00000184735_27 (sequence is synthesized)
ttttagttcattagaaaataagtgctaaattttttagaagattccacaattctatttttatcagaatgatgtcaccagcagagcaggatgtctgactcactgggattcaggtccttgtat

SEQ ID NO: 663644 - DNA, 120 bp, Artificial Sequence
  ENSG00000184735_28 (sequence is synthesized)
gcattttgtcactaacccttggttaaaactctgaggaaatcacttgccttctctaggcctcaatttctctactcataaaatgggacagttttattaatttagaggtctcttttacctcta

SEQ ID NO: 663645 - DNA, 120 bp, Artificial Sequence
  ENSG00000184735_29 (sequence is synthesized)
aaattcggtgacattataactaaaactgtataccccagccttgtattaacacttttttgtctaatctaggggaaattgcatccttgtataattgaataaaacaatccttttcaatgacaa

SEQ ID NO: 663646 - DNA, 120 bp, Artificial Sequence
  ENSG00000184743_0 (sequence is synthesized)
ctctgcacccctgctgcttctgctttgaaggcggaggctccatgttgtcccctcagcgagtggcagcagctgcctcaagaggagcagatgatgccatggagagcagcaagcctggtccag

SEQ ID NO: 663647 - DNA, 120 bp, Artificial Sequence
  ENSG00000184743_1 (sequence is synthesized)
tgcaggttgttttggttcagaaagatcaacattcctttgagctagatgagaaagccttggccagcatcctcttgcaggaccacatccgagatcttgatgtggtggtggtttcagtggctg

SEQ ID NO: 663648 - DNA, 120 bp, Artificial Sequence
  ENSG00000184743_2 (sequence is synthesized)
gtgccttccgaaagggcaagtccttcattctggattttatgctacgatacttatattctcagaaggaaagtggccattcaaattggttgggtgacccagaagaaccgttaacaggatttt

SEQ ID NO: 663649 - DNA, 120 bp, Artificial Sequence
  ENSG00000184743_3 (sequence is synthesized)
cctggagagggggatctgatccagaaaccactgggattcaaatctggagtgaagttttcactgtggagaagccaggtgggaagaaggttgcagttgttctgatggatacccagggggcat

SEQ ID NO: 663650 - DNA, 120 bp, Artificial Sequence
  ENSG00000184743_4 (sequence is synthesized)
ttgacagccagtcaactgtgaaagactgtgctaccatctttgctctaagcactatgactagttctgttcagatttataatttatctcagaacattcaagaagatgatcttcaacagctgc

SEQ ID NO: 663651 - DNA, 120 bp, Artificial Sequence
  ENSG00000184743_5 (sequence is synthesized)
agctcttcacagaatacggtcgtctggcaatggatgaaattttccaaaagcctttccagacactgatgtttttggttagagattggagtttcccttatgaatatagctatggactccaag

SEQ ID NO: 663652 - DNA, 120 bp, Artificial Sequence
  ENSG00000184743_6 (sequence is synthesized)
gaggaatggcatttttggataagcgtttacaggtgaaggaacatcaacatgaagaaattcagaatgttcgaaatcacattcactcatgtttctccgatgtcacctgctttctcttaccac

SEQ ID NO: 663653 - DNA, 120 bp, Artificial Sequence
  ENSG00000184743_7 (sequence is synthesized)
atccaggactccaggtggccacaagccctgactttgatgggaaattaaaagatattgctggtgaattcaaagagcagttacaggcactgataccgtatgtattaaacccatctaagttaa

SEQ ID NO: 663654 - DNA, 120 bp, Artificial Sequence
  ENSG00000184743_8 (sequence is synthesized)
tggaaaaggagatcaatggctcaaaggtcacctgtcggggactactggagtattttaaggcatatattaaaatttatcaaggagaagatctgcctcaccccaagtccatgcttcaggcca

SEQ ID NO: 663655 - DNA, 120 bp, Artificial Sequence
  ENSG00000184743_9 (sequence is synthesized)
ctgctgaagccaacaacttagcagctgcagcctctgccaaggacatttattataacaacatggaagaggtttgtgggggagagaaaccttatttgtctccagacattctagaggagaagc

SEQ ID NO: 663656 - DNA, 120 bp, Artificial Sequence
  ENSG00000184743_10 (sequence is synthesized)
actgtgaattcaaacaacttgctctggaccattttaagaagaccaagaagatgggtgggaaggatttcagctttcgttaccagcaggagctggaggaggaaatcaaggaattatatgaga

SEQ ID NO: 663657 - DNA, 120 bp, Artificial Sequence
  ENSG00000184743_11 (sequence is synthesized)
acttctgcaagcacaatggtagcaagaacgtcttcagcaccttccgaacccctgcagtgctgttcacgggcattgtagctttgtacatagcctcaggcctcactggcttcataggtcttg

SEQ ID NO: 663658 - DNA, 120 bp, Artificial Sequence
  ENSG00000184743_12 (sequence is synthesized)
aggttgtagcccagttgttcaactgtatggttggactactgttaatagcactcctcacctggggctacatcaggtattctggtcaatatcgtgagctgggcggagctattgattttggtg

SEQ ID NO: 663659 - DNA, 120 bp, Artificial Sequence
  ENSG00000184743_13 (sequence is synthesized)
ccgcatatgtgttggagcaggcttcttctcatatcggtaattccactcaggccactgtgagggatgcagttgttggaagaccatccatggataaaaaagctcaatagcatcttaacgtga

SEQ ID NO: 663660 - DNA, 120 bp, Artificial Sequence
  ENSG00000184743_14 (sequence is synthesized)
agatcaaacaagaacacaacaagcccctactgatttctgggtttctgccacggccacaggttcatatccagaggaatggcagatctgagacgatccaggaagagctaaaacatggccctg

SEQ ID NO: 663661 - DNA, 120 bp, Artificial Sequence
  ENSG00000184743_15 (sequence is synthesized)
taataaatgagcagacctctcctgtggtttcaaattattaaacacacttccatttctcttggaagcatttcttttccttgctgttatagatgcaagcctgtgtctattttcatattactc

SEQ ID NO: 663662 - DNA, 120 bp, Artificial Sequence
  ENSG00000184743_16 (sequence is synthesized)
tgctttgtgcactttatggaggaggaagctagaggaaaaatggaaatgcagcttttaagttctttatgtgccacttagtgccttttaagattgattccatggttttgcacacacgatggg

SEQ ID NO: 663663 - DNA, 120 bp, Artificial Sequence
  ENSG00000184743_17 (sequence is synthesized)
acacacgatggggaggggatggaggataacctcatgaaaggtgccgttttcgggtgaaacttgacatttcttttatactttactcttttgagaaggattctttttttttttttttttttt

SEQ ID NO: 663664 - DNA, 120 bp, Artificial Sequence
  ENSG00000184743_18 (sequence is synthesized)
aggcgtgagccaccgtgcccggccaagaaggattccttttttaaaagtttacagaacttggagaaacttcagaactaaagactaactgaaaatgatgtcattacactcaaaaaaaattta

SEQ ID NO: 663665 - DNA, 120 bp, Artificial Sequence
  ENSG00000184743_19 (sequence is synthesized)
aaaaaaaatttacaatagggaatcctgttgccacatagtgtggaaaaatcatgtcatatttaaatataccatactctgaaatgtgaggtttttacccagtaggctgacagttttgttgca

SEQ ID NO: 663666 - DNA, 120 bp, Artificial Sequence
  ENSG00000184743_20 (sequence is synthesized)
acttgctctattttttttttttttttggtccctatagcttctttctagaaaaagaggcaaacgtgccttgaaaagccagagtggctcataataaaaggaatgcgctagatacttcaagaa

SEQ ID NO: 663667 - DNA, 120 bp, Artificial Sequence
  ENSG00000184743_21 (sequence is synthesized)
aaaagctaagtttaaatgaaccatgtgacctctgataagtcacttgaacttgtgccttggtcaggttcactgtaggtttacatatgtatgtatgttttacacaactcttgtaattgtcat

SEQ ID NO: 663668 - DNA, 120 bp, Artificial Sequence
  ENSG00000184743_22 (sequence is synthesized)
ttgaggggttttgtttttgagagttctgcataagaacagaactttattaaggattagagggaagatacaaatattactgcgtttaattgatgtctaatttcatgtggcttagcagcaatt

SEQ ID NO: 663669 - DNA, 120 bp, Artificial Sequence
  ENSG00000184743_23 (sequence is synthesized)
aataacctgatttaaggtctttattcagaatgttaatttgcattctctgccgtgtctaatgttcttaataatgaagctaaaattaacccattttatttagtgaattatctatttaatttt

SEQ ID NO: 663670 - DNA, 120 bp, Artificial Sequence
  ENSG00000184743_24 (sequence is synthesized)
actttggctagtctggtagctttaagatagctttgccttagcaaggatcaaagtcctacccaaatataaaaaatatctagaagtatctaagagttctttttttctatttaccttgattag

SEQ ID NO: 663671 - DNA, 120 bp, Artificial Sequence
  ENSG00000184743_25 (sequence is synthesized)
gagataaaagttttatctgttagttgcttttccttttggaattattgtggattttaaaacttaaaacttgcctgcaagtatttatataaacattcaggtatataagccttaatttctaag

SEQ ID NO: 663672 - DNA, 120 bp, Artificial Sequence
  ENSG00000184743_26 (sequence is synthesized)
aagatctgagtgtaaactttacatacatgaagtatgaatggaaggtagaaaaaaagtcccttttcgcatgtaatctctttatcaaagaattttcttttgacactttaccactgaagtatt

SEQ ID NO: 663673 - DNA, 120 bp, Artificial Sequence
  ENSG00000184743_27 (sequence is synthesized)
tttgtaagtcctaaattcgcagcatattgtttcatatttatatgccatcttgcaaatagttcttgctattttattcactgctgttacactttagaaaaattccagcttgtttacttgcat

SEQ ID NO: 663674 - DNA, 120 bp, Artificial Sequence
  ENSG00000184743_28 (sequence is synthesized)
ttatcagtgatgccaaccaagctttgactgttaacttgaaagcttgcttctgaaatgttggtgcattttcaggtgacctcttatctctctgaaagttcatacctattagcaggctctgta

SEQ ID NO: 663675 - DNA, 120 bp, Artificial Sequence
  ENSG00000184743_29 (sequence is synthesized)
aatattgacatacttagcttttaatacattctataagtaaatttatagatttcagaataacttaaaaaatttaatggtaagaaggggtgatgtgtcgaaaactcatactaaagtattagg

SEQ ID NO: 663676 - DNA, 120 bp, Artificial Sequence
  ENSG00000184743_30 (sequence is synthesized)
tcactttaaaaaaagtgataatgtatgatttaatgaaatcttaagattcagttactatttaaattcaccatttctgttttggtcttataaagagaccttggtttaattatccagaggaag

SEQ ID NO: 663677 - DNA, 120 bp, Artificial Sequence
  ENSG00000184743_31 (sequence is synthesized)
tcctcttcaccattttttttttttcttagttctgcttctggaaagtgttttataaagttttctcagtgagggttcttaagagttttctttggcctcttttctctcaacagtaaattgatg

SEQ ID NO: 663678 - DNA, 120 bp, Artificial Sequence
  ENSG00000184743_32 (sequence is synthesized)
attttatatcagctttttcaataaaagatgcattatcattactggctataaatcatcctggggagatttataaccaggttaaaaataatatcttttacttctctcaccttttacttgtgg

SEQ ID NO: 663679 - DNA, 120 bp, Artificial Sequence
  ENSG00000184743_33 (sequence is synthesized)
ttcagatgctcagactgtgcctgtttgcgtcgtgtctgttgctctgccgctttccatgcaggcatttttaattttacacaatcctaacaatatatggaactcattcctatgaatatataa

SEQ ID NO: 663680 - DNA, 120 bp, Artificial Sequence
  ENSG00000184743_34 (sequence is synthesized)
aaggaggcttccaaaattttctattaaaatatttcaggataaattaagtgttgataatttgaaaaaataatttcaatgagctgcttatagtaaaaatggtagaatcagagttttcattct

SEQ ID NO: 663681 - DNA, 120 bp, Artificial Sequence
  ENSG00000184743_35 (sequence is synthesized)
ttcattctttgagaaatctttctgtaagattggctcatagataaaatgagacaaactactatgtatgataaaacaccttcagagtcatgccttgttttattttattttattttttgagac

SEQ ID NO: 663682 - DNA, 120 bp, Artificial Sequence
  ENSG00000184743_36 (sequence is synthesized)
attacaggcatgagccaccccgcccagctgagtcatgccttattttcgtagtataccaagaaatgttctatggaagtttacgttttaacacctcttttatacttggtaaaattgcctgtg

SEQ ID NO: 663683 - DNA, 81 bp, Artificial Sequence
  ENSG00000184743_37 (sequence is synthesized)
cgttttaacacctcttttatacttggtaaaattgcctgtgtttcgctttattcctttttttttttgagacggactcttgta

SEQ ID NO: 663684 - DNA, 67 bp, Artificial Sequence
  ENSG00000184743_38 (sequence is synthesized)
accaggctggtctcaactcctctgggaatccgcctgtcttggccttccagggtgctgggattacagg

SEQ ID NO: 663685 - DNA, 120 bp, Artificial Sequence
  ENSG00000184743_39 (sequence is synthesized)
tgggattacaggcgtgagccactggaacctggccttgttttgctttattttttctcttacatgaagtaaagcgctttggtcaaacacacaaaaatactgccttgtactggtggttggttt

SEQ ID NO: 663686 - DNA, 120 bp, Artificial Sequence
  ENSG00000184743_40 (sequence is synthesized)
aatactgccttgtactggtggttggtttcattagtggatcacacacagtgttctacttggcttgtaaaatggtgccttggatagggtgagtttggataagtatgtatgtatgtatgagtt

SEQ ID NO: 663687 - DNA, 120 bp, Artificial Sequence
  ENSG00000184743_41 (sequence is synthesized)
atagcaaaattaagtagattgaatcaagtccatgcaaaagcaataaaacagttttaattttttaattttttaaaaattaaaactttaataaaacagtttttaattttttgctaggttctt

SEQ ID NO: 663688 - DNA, 120 bp, Artificial Sequence
  ENSG00000184743_42 (sequence is synthesized)
ttaaaaaatgatgtaacttacatggaagtcttcacaggacttttttctttcctggaactattgaaatgtaatttaggatgatttgatcttccatctcaagttgtcaacatggctgtgtca

SEQ ID NO: 663689 - DNA, 120 bp, Artificial Sequence
  ENSG00000184743_43 (sequence is synthesized)
ttctggcttacatatgttttatttaacaaaattctagtcaagggataagggcataatgaagacaagcttcagttatgaaagtacaaactatttgtgtgattaatttttaaaaatgacatt

SEQ ID NO: 663690 - DNA, 120 bp, Artificial Sequence
  ENSG00000184743_44 (sequence is synthesized)
aagaagcccattgtaaaataatatttgcagtcaaatggtttttcttgctgtaagtcctgttgtagctatgtttagggtagtggttctcatctaccttggagtgcataagacttacctagc

SEQ ID NO: 663691 - DNA, 120 bp, Artificial Sequence
  ENSG00000184743_45 (sequence is synthesized)
aggcttgtttaaaaagttcagattcctagctttgtacccagggattgcctcaggtggtatgggctgtggtcctggagtcatcacttttataaatagtggttcagagaccacagagagaga

SEQ ID NO: 663692 - DNA, 120 bp, Artificial Sequence
  ENSG00000184743_46 (sequence is synthesized)
ctgcttcatcgaatgggaagtaccaaggagaaagtacaattcagtattgtctggaggcaagtggacactttgtacctgaggtttagaataggtggtctcttgccagtacaatccccaggc

SEQ ID NO: 663693 - DNA, 120 bp, Artificial Sequence
  ENSG00000184743_47 (sequence is synthesized)
gttttctgtgttcagaagtagtaagaatgcctttaattcagaggattatctaagctctttaaagctgtttttctccattgtcatagtgccttctctgaaaaatgaatgtacaggtatcct

SEQ ID NO: 663694 - DNA, 120 bp, Artificial Sequence
  ENSG00000184743_48 (sequence is synthesized)
attttctaatgtaattaggattttttaaaagcaatttttgatagtttttcttttaaaaagtaaaattcagcactgtgacttgaacccccaaatctttcacatacaggtgaaacattaagc

SEQ ID NO: 663695 - DNA, 120 bp, Artificial Sequence
  ENSG00000184743_49 (sequence is synthesized)
cacaaataaaaataatgaacaagaaagaagacaagatcctaattcctgtcattagtgacctaagtaccccatatcagaaactttgcaaaacagatctagggacagaagggctttgaaaga

SEQ ID NO: 663696 - DNA, 120 bp, Artificial Sequence
  ENSG00000184743_50 (sequence is synthesized)
catttttctttggggcaaatttcgtgtgccagaactacagtttaaatgtttttatgagcaagggaaggtagcattgattcccatagctttctaattagatacatgctgtcatggatgtaa

SEQ ID NO: 663697 - DNA, 120 bp, Artificial Sequence
  ENSG00000184743_51 (sequence is synthesized)
gccttaaaggagttaatactaatcttgtacatacacaaattttcctcaggtttttttattttaaaaaatgatttgttaaaagtactgtctgctagacccttgcctttgagtggctttgaa

SEQ ID NO: 663698 - DNA, 120 bp, Artificial Sequence
  ENSG00000184743_52 (sequence is synthesized)
acttaatatagtttttaaaaagtgcaatgggatgagattatgctattagtatattaaaagcatgtttctgttttactccaatttgtaagatcatttaatggaataaagatcacaacacca

SEQ ID NO: 663699 - DNA, 120 bp, Artificial Sequence
  ENSG00000184743_53 (sequence is synthesized)
ccaggcctagttaaacaccaaagctgtctctcacactggtggttccaggataaagcctcggcctggggcctggtctgcacgttaggcgccggccgcagctcgcaggaggacccgagccag

SEQ ID NO: 663700 - DNA, 120 bp, Artificial Sequence
  ENSG00000184743_54 (sequence is synthesized)
cccgccccttcccgcacagcctgctgggagttgtagttcagtcgtcggagaaccacgccaagccccgccccagatgagtgcgcagtatgaggaccgctggccgggacccagtgagcgcgg

SEQ ID NO: 663701 - DNA, 120 bp, Artificial Sequence
  ENSG00000184743_55 (sequence is synthesized)
cgccaagccccgccccagatgagtgcgcagtatgaggaccgctggccgggacccagtgagcgcgggactacaattcccaaaggacggtagcactcagcgccccgccaacaggtacccggc

SEQ ID NO: 663702 - DNA, 120 bp, Artificial Sequence
  ENSG00000184743_56 (sequence is synthesized)
ggctcgcttcgcgcacacgcggcaggcggtggcgggattctgccgcgtgcgctttcccgccccgcctcgcctagcctcgtcctgcgctcgccacgcctcgggctgtccgttgggccacgc

SEQ ID NO: 663703 - DNA, 120 bp, Artificial Sequence
  ENSG00000184743_57 (sequence is synthesized)
agaccgcgctgcgctcgctccgtcgcggctccgcgtgccccaccttctggctagttttttctagagcccaggctccgcccgtttcccgcttccagggcccggttcgttcccgcccgcacc

SEQ ID NO: 663704 - DNA, 120 bp, Artificial Sequence
  ENSG00000184743_58 (sequence is synthesized)
tgctgttgaaatgaccgtttcacttgcgaaatcgaagagcaaaaaggaaaagaacagtgaagaatttttaaatgagtctcagttctcaaattcaaatacgaagcaatggaacgttttgtc

SEQ ID NO: 663705 - DNA, 120 bp, Artificial Sequence
  ENSG00000184752_0 (sequence is synthesized)
ggggccagcgaggcaagatggagttagtgcaggtcctgaaacgcgggctgcagcagatcaccggccacggcggtctccgaggctatctacgggtttttttcaggacaaatgatgcgaagg

SEQ ID NO: 663706 - DNA, 120 bp, Artificial Sequence
  ENSG00000184752_1 (sequence is synthesized)
ttggtacattagtgggggaagacaaatatggaaacaaatactatgaagacaacaagcaattttttggccgtcaccgatgggttgtatatactactgaaatgaatggcaaaaacacattct

SEQ ID NO: 663707 - DNA, 120 bp, Artificial Sequence
  ENSG00000184752_2 (sequence is synthesized)
acttactgctcgtaaattcatttggacgaaccataaattcaacgtgactggcaccccagaacaatatgtaccttattctaccactagaaagaagattcaggagtggatcccaccttcaac

SEQ ID NO: 663708 - DNA, 120 bp, Artificial Sequence
  ENSG00000184752_3 (sequence is synthesized)
accttacaagtaaagacaatgaagaacagttgaaacatgcaaaatatggagcttttcatgtaattactcttttactgtttaccattcactataattcacaattaaaattgtgtgactaaa

SEQ ID NO: 663709 - DNA, 120 bp, Artificial Sequence
  ENSG00000184752_4 (sequence is synthesized)
tggagcctcatgggttttaaactaaaccttcatgagccagagtaacctgagcatactgaaaatccagaatcggcctctagcacctaatagtaatactgcatcgttggcttcacagtatga

SEQ ID NO: 663710 - DNA, 120 bp, Artificial Sequence
  ENSG00000184752_5 (sequence is synthesized)
gaatcaggacgtgcttgcccctgaaggttaaagctgatgtttgccccccaaggaaacctctttccatcaaagcatctctcaccatcatccctggcctacagagggcatccgcttttcaag

SEQ ID NO: 663711 - DNA, 120 bp, Artificial Sequence
  ENSG00000184752_6 (sequence is synthesized)
aatgccaactcctctctcaccaatgtgtgttttttctgaagggttccagaagcaacactttgttaggagatgctgcagaagccagaggattgcctgatgcctcccagctgaatcagcaaa

SEQ ID NO: 663712 - DNA, 120 bp, Artificial Sequence
  ENSG00000184752_7 (sequence is synthesized)
atagcgttgcttgattaaggggttttgcttcccaaggaatggccttactgttcaaattcagatgcactaggcaagttcagaagacaagagtgaagatgagacgccaacagcctcacactg

SEQ ID NO: 663713 - DNA, 120 bp, Artificial Sequence
  ENSG00000184752_8 (sequence is synthesized)
aggacgattctttctccagctccccactgcacaagcaagcttggtattcatcaatatgacatggtctggaagttttcctgtatattcatcagcttgggttactaaacaaagtacaaaata

SEQ ID NO: 663714 - DNA, 120 bp, Artificial Sequence
  ENSG00000184752_9 (sequence is synthesized)
atactatgaagacaacaagcaattttttggtgccctgctctgagctgctctatggagtggcctatgtggcaggaactgaagataatcttcaatgccagccagcaaaaaacggaggtcctc

SEQ ID NO: 663715 - DNA, 120 bp, Artificial Sequence
  ENSG00000184752_10 (sequence is synthesized)
agtccaacatcccacaaggaaatgaattctgccaacaaccgtgtgaatgagactgcagtcttggtcagaaatgcgattgcagctttcagaagagactctggaatagaggacccaacaaac

SEQ ID NO: 663716 - DNA, 120 bp, Artificial Sequence
  ENSG00000184752_11 (sequence is synthesized)
cgggtttttttcaggacaaatgatgcgaaggttggtacattagtgggggaagacaaatatggaaacaaatactatgaagacaacaagcaattttttgatgaagaaactgaggcccaagga

SEQ ID NO: 663717 - DNA, 120 bp, Artificial Sequence
  ENSG00000184752_12 (sequence is synthesized)
gtcttttcttaataaaaaggttgtcttctttgatattatgcatctatgctttaaaaaaaaaagtttttctttttaaatgttcatcttcccacccaggccgtcaccgatgggttgtatata

SEQ ID NO: 663718 - DNA, 120 bp, Artificial Sequence
  ENSG00000184752_13 (sequence is synthesized)
attgcctggcatttattgagtgattaccatgtgctaggtgctgtgctaaacaaaaacatacgttatctaccttaatcttcaacatctccttgagataagcacttctgtgctcctccgccc

SEQ ID NO: 663719 - DNA, 120 bp, Artificial Sequence
  ENSG00000184785_0 (sequence is synthesized)
ccgccttgcagcgcagctcggatcagcagcagcccaggaggcctcccgcccgtactttcccgcgtccatccctctgtcccacggtcggtgagtcagcggagcctgatggaggccttgggc

SEQ ID NO: 663720 - DNA, 120 bp, Artificial Sequence
  ENSG00000184785_1 (sequence is synthesized)
tctgggcactatgtgggaggcagcatcaggtccatggcggcggcggccctgtctggcctggcggtgcggctgtcgcgcccgcaggggacccgcggctcttacggcgccttctgcaagacg

SEQ ID NO: 663721 - DNA, 120 bp, Artificial Sequence
  ENSG00000184785_2 (sequence is synthesized)
ctcacgcgcacgctgctcaccttcttcgacctggcctggcggctgcgcaagaacttcttttacttctatattctggcctcggtgattctcaacgtccacctgcaggtatatatttagagc

SEQ ID NO: 663722 - DNA, 120 bp, Artificial Sequence
  ENSG00000184785_3 (sequence is synthesized)
cactaactttgtggcatttgggggctcctcgtcaggatggctgacttccacccacctgctcacccaccctagagcaaagcgaccaactccgctcctgcatgcagacttgccactcattct

SEQ ID NO: 663723 - DNA, 120 bp, Artificial Sequence
  ENSG00000184785_4 (sequence is synthesized)
ttccattgcctcatcttttagtataaatgggtggcaaaaaaagaaaaaaacagcatttgtggaaagcctgaaatataacccaaatcgtctaagatagaatgaaaaattgactctcaagga

SEQ ID NO: 663724 - DNA, 120 bp, Artificial Sequence
  ENSG00000184785_5 (sequence is synthesized)
aatatttgaaggaacagaatacagcttaaaaatttgaaaatccttaaaaatatctgagaagtttttgcatccgtaaaacagaaaacagcacgaactttaggaaatgacaatgggcacaga

SEQ ID NO: 663725 - DNA, 120 bp, Artificial Sequence
  ENSG00000184785_6 (sequence is synthesized)
aggaaagataaactgaacaagaatggctcagacagcaggcaaatctccccaattagaaacgaagtgaatagacccaattgaatgagatgaattctaagcaatagatggattgaataataa

SEQ ID NO: 663726 - DNA, 120 bp, Artificial Sequence
  ENSG00000184785_7 (sequence is synthesized)
gctggaggacattaataacatgttctggaaggcatacatttcttcaacccaaaggaaaaaaaatgacagaaagaaactacagggaagaacattaaaaactgtgcaagaaacttatgtttc

SEQ ID NO: 663727 - DNA, 120 bp, Artificial Sequence
  ENSG00000184785_8 (sequence is synthesized)
acatatgaagcaacctcagatgtggcatggttttgaacagttgccgaaagtgtgagaaagggaatctgtttgaatattggcacatggatcaagactctggagtcggtgatgagaaaatcc

SEQ ID NO: 663728 - DNA, 120 bp, Artificial Sequence
  ENSG00000184785_9 (sequence is synthesized)
aatcagagcattccactttgctattcattgaaccaggtagccaacagaagagttaaaaattagtgatatgactatattcagggggaaggagagctgaggggggcggcaggaagtcagcag

SEQ ID NO: 663729 - DNA, 120 bp, Artificial Sequence
  ENSG00000184785_10 (sequence is synthesized)
aaaatgcctcatgtcattaagtcaagaaatagtaataaaggcatgttattgaaaaagggggtgtaatctctaaacaagcacgtgtagaagtttgtgtttctgatttggggaagcaagagt

SEQ ID NO: 663730 - DNA, 120 bp, Artificial Sequence
  ENSG00000184785_11 (sequence is synthesized)
tgagaaggagggacagttctattacttttcattatatgtcctttttctactgtttgatttttaaaaactatacacatgtattgcttttgcttcgattaaaaatcaagacattaaaatgaa

SEQ ID NO: 663731 - DNA, 120 bp, Artificial Sequence
  ENSG00000184786_0 (sequence is synthesized)
acttcctaccgtacgaggcgcaggtgggagacttccgccctcgcgggactggctagggcgtttgaccgccggcggtgaaggggaggcggtgggcgtcttggagaacagagcgagatggag

SEQ ID NO: 663732 - DNA, 120 bp, Artificial Sequence
  ENSG00000184786_1 (sequence is synthesized)
aagcgaggccgaggcgtgaagtcgagccccatccagaccccgaaccagacccctcagcaggctccggtgacgcctaggaaagaaaggaggcctagcatgttcgagaaggaggcatataca

SEQ ID NO: 663733 - DNA, 120 bp, Artificial Sequence
  ENSG00000184786_2 (sequence is synthesized)
cagattttaagagaaagactgagagagtcaattcacaatgttcagtatgtggagcctccttttgatgactcaattgctgatataggtaaagaatggaagagtgccctggcaaaattaaag

SEQ ID NO: 663734 - DNA, 120 bp, Artificial Sequence
  ENSG00000184786_3 (sequence is synthesized)
agcagatactaacagaaagtcttaaagatgtcaaatatgatgataaagtattctctcacttgtcacttgaattggcagaccgcatactgttagcagtcaaagaatttgggtaccaccgtt

SEQ ID NO: 663735 - DNA, 120 bp, Artificial Sequence
  ENSG00000184786_4 (sequence is synthesized)
ataagttcattataaaagtattatttattcaaaagactggccaagcaataaatattgccagcagatggatctgggacattgcatgggacagctgggtcgcagctaaacacgaagcagaat

SEQ ID NO: 663736 - DNA, 120 bp, Artificial Sequence
  ENSG00000184786_5 (sequence is synthesized)
cctacgtggcactggtcttggtgtttgccctttattatgaatagctcattacaggtactaaggattgtttacttccgaacttttcaaaaataaatgaaatttacatatttgtaaacctca

SEQ ID NO: 663737 - DNA, 120 bp, Artificial Sequence
  ENSG00000184786_6 (sequence is synthesized)
atctcccttttgtgtttcttttttccccagatgcgaaattgaagcctgagactgagttgggcagtcccctttggacttgagtgctaaagttttcttgttttttaattagggccatagaac

SEQ ID NO: 663738 - DNA, 120 bp, Artificial Sequence
  ENSG00000184786_7 (sequence is synthesized)
cctacataagtcgattggaagggtggttacaagatcttcttttcaaatttactcagcttgcggatttcctgagagtactctgagtattattgctttgtactaaaacacagtatgttagtg

SEQ ID NO: 663739 - DNA, 120 bp, Artificial Sequence
  ENSG00000184786_8 (sequence is synthesized)
tatttagtgccattataagcagttttgctagcgaaaaatgagtgtgttgtattaaaaaaataatttgataaaccaggcagaatagtgccatgttttgggtttttaaaacatcagcagtct

SEQ ID NO: 663740 - DNA, 120 bp, Artificial Sequence
  ENSG00000184786_9 (sequence is synthesized)
ggatatttgaagaatgtacaggagaaaaaaacttaagttgaaaataccctgtccaaaacttactgatattgatggaaagggtcattattcagttttattggtggtataacaggtatttct

SEQ ID NO: 663741 - DNA, 120 bp, Artificial Sequence
  ENSG00000184786_10 (sequence is synthesized)
atatgattaggctttgaaaaccgttaatgtattaaagactctatattttattgatactttaacagaaaattagtttgcccaaggatacaaagctgtaatgatagagctgggaccagaacc

SEQ ID NO: 663742 - DNA, 120 bp, Artificial Sequence
  ENSG00000184786_11 (sequence is synthesized)
tctcttcgtacttacttcgtggacctataataggatgaagatagagatgacaggcaaaacaattttttgaagaccctaaaacattttaagattactcttaaaaagagaattctcaaaata

SEQ ID NO: 663743 - DNA, 120 bp, Artificial Sequence
  ENSG00000184786_12 (sequence is synthesized)
atggcgaaatttcaggttcttgtttccctggtgtctacattttacagaggaaagaacgaactaaataaaggaggaaaagcaaacaggccaagtttacacagctaagaaaaagagcagagc

SEQ ID NO: 663744 - DNA, 120 bp, Artificial Sequence
  ENSG00000184786_13 (sequence is synthesized)
agggctagaaacctaaatcagttggacttaaaacttcacactcccaaacactatgctgtatttcttggcaatgagtctgagtaacaggtcaccaacagtaaagaaaaatttctatatatt

SEQ ID NO: 663745 - DNA, 120 bp, Artificial Sequence
  ENSG00000184786_14 (sequence is synthesized)
gaggcagacaagggtggcttttataaacttactgcctatctgaggtctgaagtggtctttaaaattcaatgagcctgaactcaaaatgaggagacacataggtgcacctggtatataggt

SEQ ID NO: 663746 - DNA, 120 bp, Artificial Sequence
  ENSG00000184786_15 (sequence is synthesized)
taaaatctgggagtgaggggacatggaccaaagtaattattagtatttgatatggatgtgatcaattatagctatctttaaagttgattcttttagaggtgagaaatttgaatagaacaa

SEQ ID NO: 663747 - DNA, 120 bp, Artificial Sequence
  ENSG00000184786_16 (sequence is synthesized)
taattgggaagaaattgagaaaggactctacaaatgctcactaaatgtacctgaggaaactgttcacttagttatttctaatttaaggtagctgttaatttccctattttggagcatagg

SEQ ID NO: 663748 - DNA, 120 bp, Artificial Sequence
  ENSG00000184786_17 (sequence is synthesized)
aaaatttaagacatactgtttcatcaatatgaccatctcttgattttatctgtcttgcctccatttctttttttctagtggtagcacctcagttaacttttagagaattaactcatctgc

SEQ ID NO: 663749 - DNA, 120 bp, Artificial Sequence
  ENSG00000184786_18 (sequence is synthesized)
aattgtatagagctttggtgagattgtcagctacttcccttaactttttaataaggatgagacccaaactaagctaattagatgaattctttgaaataatgcaaagaaaatgattgaggt

SEQ ID NO: 663750 - DNA, 120 bp, Artificial Sequence
  ENSG00000184786_19 (sequence is synthesized)
ttattcacattgaagatgagaagctaaagtgttccctgtgtctttctgaatctggttcatcagccttctctgctgttatgtaaactgtatctttccaataaattatactttggcttaaca

SEQ ID NO: 663751 - DNA, 120 bp, Artificial Sequence
  ENSG00000184787_0 (sequence is synthesized)
agtccccggtgtcggggcaggaggcacgcgcgcggctgaggcgaggtcgctcggcgcagctgttgcggggccatggcggggaccgcgctcaagaggctgatggccgagtacaaacaatta

SEQ ID NO: 663752 - DNA, 120 bp, Artificial Sequence
  ENSG00000184787_1 (sequence is synthesized)
acactgaatcctccggaaggaattgtagcaggccccatgaatgaagagaacttttttgaatgggaggcattgatcatgggcccagaagacacctgctttgagtttggtgtttttcctgcc

SEQ ID NO: 663753 - DNA, 120 bp, Artificial Sequence
  ENSG00000184787_2 (sequence is synthesized)
atcctgagtttcccacttgattacccgttaagtcccccaaagatgagatttacctgtgagatgtttcatcccaacatctaccctgatgggagagtctgcatttccatcctccacgcgcca

SEQ ID NO: 663754 - DNA, 120 bp, Artificial Sequence
  ENSG00000184787_3 (sequence is synthesized)
ggcgatgaccccatgggctacgagagcagcgcggagcggtggagtcctgtgcagagtgtggagaagatcctgctgtcggtggtgagcatgctggcagagcccaatgacgaaagtggagct

SEQ ID NO: 663755 - DNA, 120 bp, Artificial Sequence
  ENSG00000184787_4 (sequence is synthesized)
aacgtggatgcgtccaaaatgtggcgcgatgaccgggagcagttctataagattgccaagcagatcgtccagaagtctctgggactgtgagacctggcctcgcacaggcgcgcacacacc

SEQ ID NO: 663756 - DNA, 120 bp, Artificial Sequence
  ENSG00000184787_5 (sequence is synthesized)
gccaagcagctcagcattctcccccggcacacttagtgacagtgatgctctgtgctggtaccaaacaaggcagacttgcaagaaccatggcatcttttttttttttcaaacctttcctac

SEQ ID NO: 663757 - DNA, 120 bp, Artificial Sequence
  ENSG00000184787_6 (sequence is synthesized)
ttcaaacaggcttctcttctgaaatgatgacttaatgtcgaatattgacagcttactgcagttttacagtattcctcacaaagggcttcaggtagattatcagagctgtcagcactacct

SEQ ID NO: 663758 - DNA, 120 bp, Artificial Sequence
  ENSG00000184787_7 (sequence is synthesized)
ctccccgctgaaaccagcagttcatggcttcctgtggattccctccctccctggagtgttgagggggttgtacctgccagacttccaggggacgatggaatacccagaacgctccttctg

SEQ ID NO: 663759 - DNA, 120 bp, Artificial Sequence
  ENSG00000184787_8 (sequence is synthesized)
aagaaatggggccctgtagctgcagcacaggggaagggcccggcaccctttctgggtccttcctggttccctgtgggccccatgaggagtccattacttcctttcttccttcatatttta

SEQ ID NO: 663760 - DNA, 120 bp, Artificial Sequence
  ENSG00000184787_9 (sequence is synthesized)
caggcagatgcttttcttataatctaattacatcttttcatttgttatatattacaaaccatcacacttagaaatacttccaggaaatgcttttttgaagtgtgaattaataagaaatgg

SEQ ID NO: 663761 - DNA, 89 bp, Artificial Sequence
  ENSG00000184787_10 (sequence is synthesized)
caggaaatgcttttttgaagtgtgaattaataagaaatggggtaaatagaaaagaaatttattgctgattggccaggtgcggtggttcg

SEQ ID NO: 663762 - DNA, 84 bp, Artificial Sequence
  ENSG00000184787_11 (sequence is synthesized)
gaaaaaagaaatttattgctgatcacaaggacagacagttttttcccgaccatactcatcaaagatttacgtttgtatattagt

SEQ ID NO: 663763 - DNA, 120 bp, Artificial Sequence
  ENSG00000184787_12 (sequence is synthesized)
cccgaccatactcatcaaagatttacgtttgtatattagtaactagtgcattactagagcaggtgcaggtgaggtctttaaagtttcaatgaaagtttcttctggatctacagaaaaaat

SEQ ID NO: 663764 - DNA, 120 bp, Artificial Sequence
  ENSG00000184787_13 (sequence is synthesized)
tttcaatctaaaaactggaaattctagggtttttgtacattttggatgcactgggaatttattagcacaaaatcattctttgcaactcaaaattcagaagggactctaccatatcttagc

SEQ ID NO: 663765 - DNA, 120 bp, Artificial Sequence
  ENSG00000184787_14 (sequence is synthesized)
tcagagcacagaggagtgccttatccccacacttgactgggctgtggaggtgggcatgtgggcccctgggcccaggctggggacagagcccttgttttgtgacttaggattttgatgtgg

SEQ ID NO: 663766 - DNA, 120 bp, Artificial Sequence
  ENSG00000184787_15 (sequence is synthesized)
ttcccatgttctctaacagggccagctgagcagcacaggccaggaggccacagtgtaagcaataacagatctgccacatgcagaagcaaatatcaggcctgtcgcacacgggcggcattt

SEQ ID NO: 663767 - DNA, 120 bp, Artificial Sequence
  ENSG00000184787_16 (sequence is synthesized)
aaataggaatttctatttttgaaataagggatggtctatgaggcatacagtagatttgatgtgatccttttctccctcccttccataatggatcgtggtctgtgtgactgaacccacaca

SEQ ID NO: 663768 - DNA, 120 bp, Artificial Sequence
  ENSG00000184787_17 (sequence is synthesized)
gagtgtcatgggtgacagtttctggttgaagtagctccacgcctggcttctgtggacagcagattcttttccttctcacaaggggctcatttaaaatttggaggctgggtgctgtggctc

SEQ ID NO: 663769 - DNA, 120 bp, Artificial Sequence
  ENSG00000184787_18 (sequence is synthesized)
gtctcaaaaaaaaaaaaaaaaaaaatggaacgcagggcaagaactcgtatttggaaggagatgggggaaaggagcggtattatacctatgttgtatttgcaggcaaatgagatggagccc

SEQ ID NO: 663770 - DNA, 120 bp, Artificial Sequence
  ENSG00000184787_19 (sequence is synthesized)
aaatgagatggagccctctctgtaaagaagagtcatttgtgcaagtagacggggtctgtgggtgcaggccctggaggggcacacaattgcctggaggcttctgtgagatcgggagaggga

SEQ ID NO: 663771 - DNA, 120 bp, Artificial Sequence
  ENSG00000184787_20 (sequence is synthesized)
ggagaggcagtctcttgacaaaataaagtatttttattcatttgtatttattaaatgaaaaaacaatcccatggtgtccctgttgtgtggtggaacctaatgactgttgaaataaagttc

SEQ ID NO: 663772 - DNA, 120 bp, Artificial Sequence
  ENSG00000184787_21 (sequence is synthesized)
tgtgttttccctgccctgcagtgtgtgtccctttgtcgtattgtcagaggagcctgtggccactgcccccagggagcacaccagatcatcccagctgggattcctcacggtgggggcttt

SEQ ID NO: 663773 - DNA, 120 bp, Artificial Sequence
  ENSG00000184787_22 (sequence is synthesized)
tctgcagacttgggttagctctggcatgttttcttctgtttctgatctcccttctgtcattctgtggtcttcctctggaattctcaggttagttggggtctgtgagacggatgtgttcac

SEQ ID NO: 663774 - DNA, 120 bp, Artificial Sequence
  ENSG00000184787_23 (sequence is synthesized)
taacctataaatgacattttgcagctttttcagcagatgccattgtgtgagtggcacatttgaccactagaagccagcaggctgttccgactgcgcttccctcctgcagttgcttagaag

SEQ ID NO: 663775 - DNA, 120 bp, Artificial Sequence
  ENSG00000184787_24 (sequence is synthesized)
cacagctccctgtcatcactcctctgtggtcctctgtggtcacggttggttgcgatgagacctgcctctgcgtcttgttacttagcatgtcaataaagaggcagattcctgtgtcagtga

SEQ ID NO: 663776 - DNA, 120 bp, Artificial Sequence
  ENSG00000184787_25 (sequence is synthesized)
gtccccggtgtcggggcaggaggcacgcgcgcggctgaggcgaggtcgctcggcgcagctgttgcggggccatggcggggaccgcgctcaagaggctgatggccgagtacaaacgggccc

SEQ ID NO: 663777 - DNA, 120 bp, Artificial Sequence
  ENSG00000184787_26 (sequence is synthesized)
ttcctggatagtagagcgttcaccactgaacgttcaccactgaaacaatggatgagtggaaacacataggaccaggtatgaaagacaagactgtttgaagtctaccctgatgggagagtc

SEQ ID NO: 663778 - DNA, 120 bp, Artificial Sequence
  ENSG00000184787_27 (sequence is synthesized)
ttagggaattaactgtcctcccatcgatttgtctcaccctgctattttggcagacatctggccaagtctttgctccttggggcccagaagacacctgctttgagtttggtgtttttcctg

SEQ ID NO: 663779 - DNA, 120 bp, Artificial Sequence
  ENSG00000184787_28 (sequence is synthesized)
tcgctcggcgcagctgttgcggggccatggcggggaccgcgctcaagaggctgatggccgagtacaaacccttgagaacgtgcagtgagagcttgaggaagaaggcctgacttgctgctg

SEQ ID NO: 663780 - DNA, 120 bp, Artificial Sequence
  ENSG00000184787_29 (sequence is synthesized)
gatgagatttacctgtgagatgtttcatcccaacatgtcaccctatgggaccaactcctggagaaggcaacacagaagtgggaaacttcctgattttgtggatgtggatcttaggtggac

SEQ ID NO: 663781 - DNA, 120 bp, Artificial Sequence
  ENSG00000184787_30 (sequence is synthesized)
aatgaaggaaaagggtttttgaacagtgccacctgtcactcctcctaggtagtgttgaggaaacctcttgagtgctttcctacccggtaaattagatatttctaatgtctgaggagagcg

SEQ ID NO: 663782 - DNA, 120 bp, Artificial Sequence
  ENSG00000184787_31 (sequence is synthesized)
aagggagaaatgagaacctaggaacactcggcattccatcgttttacaccgaatgcccgcttggaagaactgctgcgagaagtcttggaataccattgtgttgaaagcgccaggagcctg

SEQ ID NO: 663783 - DNA, 120 bp, Artificial Sequence
  ENSG00000184787_32 (sequence is synthesized)
agtcgccgatggagacgagatagtagccggctaagagcagggcctgagttcagacccggcctctctgcttgttagctctttgaccttgttcctctctctgtctctgcagtttccttgtct

SEQ ID NO: 663784 - DNA, 120 bp, Artificial Sequence
  ENSG00000184787_33 (sequence is synthesized)
taaaaggttaaacttgatactgcaggtgaagtgcttagcaaaatacctgatgtgtaacccttaataaagttagctgctgcttttgtaattagattgaggataattttggaagaaagttaa

SEQ ID NO: 663785 - DNA, 120 bp, Artificial Sequence
  ENSG00000184787_34 (sequence is synthesized)
tgacaccgcccagtaagagttgatgtttggcttaagcagaccaaaacgttgcaaatacaggctcactcacgtatggtcattcttcccttggtatctggaggggattggttccaggccccg

SEQ ID NO: 663786 - DNA, 120 bp, Artificial Sequence
  ENSG00000184787_35 (sequence is synthesized)
ctgcagataccagaatcctcggatgctcaagtccctactataaggtggcgtggtatttgcatttaatgtatgcatagcctctcataacttttaaatcatctcaaggttacttatagtacc

SEQ ID NO: 663787 - DNA, 120 bp, Artificial Sequence
  ENSG00000184787_36 (sequence is synthesized)
taatgcaatgtaagtgctgcacaaatagttacactgattttttttacttgtatttttaaatcgtcattttttattgttatttttttcaaatattttgtattcctggttggtcgaatccat

SEQ ID NO: 663788 - DNA, 120 bp, Artificial Sequence
  ENSG00000184787_37 (sequence is synthesized)
ggatatgcagccgcagatacacagggcctcctgtaaacgttcaaataacgctcgccacctagtgtctgctaaagcagaacataaaggcacacctcagtttcccgcgcgctttgctttatt

SEQ ID NO: 663789 - DNA, 120 bp, Artificial Sequence
  ENSG00000184787_38 (sequence is synthesized)
gagcttcacttcgcagatcttgcattttttacaagtttacaagttttttacaagcaaccctgcatggaagcaagtctgttggcaccatttttgctcgcttcgtgtctctctcttacattt

SEQ ID NO: 663790 - DNA, 120 bp, Artificial Sequence
  ENSG00000184787_39 (sequence is synthesized)
taatctattactgtgatctatgatcagtaatctttgatgttactattgtaattattttggggcatcacaaactatgcccataaaagatggtagtcctaataaatgttgtgtgtgcttcac

SEQ ID NO: 663791 - DNA, 120 bp, Artificial Sequence
  ENSG00000184787_40 (sequence is synthesized)
gtactgaaagttgctggtatacagtggtgagcaaataatagcagaccttcaggagcttatattccaaggacagggatggacattgataggagaatcacacaaacaaaatgcaaagtcaca

SEQ ID NO: 663792 - DNA, 120 bp, Artificial Sequence
  ENSG00000184787_41 (sequence is synthesized)
tcaggaagttctgggcagcaccttgcagaggtggtggttggatggaccatctgtagggagtgaagcaggagttacctgagtgattcggggaggaggggcccttcacatgtgcaaaggccc

SEQ ID NO: 663793 - DNA, 120 bp, Artificial Sequence
  ENSG00000184787_42 (sequence is synthesized)
agcgcaggaagtgacgggagaggaaggccggggccaaactacctcaggccttttggtcaatactgaaggttttgatgttttctcctgggagtggcggaactccattgaaagactccaagg

SEQ ID NO: 663794 - DNA, 120 bp, Artificial Sequence
  ENSG00000184787_43 (sequence is synthesized)
gagtggcatgaccagaatgatctctgacggctcgctctgggtacagtgcaaaggacaggtgggaggaagccaggcaggccctcggctgtagtggtctagggtagagacaccggcaacttg

SEQ ID NO: 663795 - DNA, 120 bp, Artificial Sequence
  ENSG00000184787_44 (sequence is synthesized)
ggaactaaatgtgggcactaaagataaagagatgtgtgtggatccacgagaggtttaggacatggcactgctgggacttggtgaaggaggggctgtggcagggacacaggtgcttttgat

SEQ ID NO: 663796 - DNA, 120 bp, Artificial Sequence
  ENSG00000184787_45 (sequence is synthesized)
atttctattattataactttaatggctttataattttacagttgagtctatctagatggattactgcatatctgagtatatatggagccatctgagaattcctcccaattttatgtaaaa

SEQ ID NO: 663797 - DNA, 120 bp, Artificial Sequence
  ENSG00000184787_46 (sequence is synthesized)
gaggactgattaaatgctgtgaattgaaaatttatttctctttatcagaccttgtgtatctttttaatgatgatatttggtggaaagggatttgatttagacacattgacctacattcca

SEQ ID NO: 663798 - DNA, 120 bp, Artificial Sequence
  ENSG00000184787_47 (sequence is synthesized)
ggttgtactgatgataatttacttattattagagtaagctaccaagagaaatcctggtgcctttctttttgtagatatttacataattccagttgcctttatcatagccatgtgaacata

SEQ ID NO: 663799 - DNA, 120 bp, Artificial Sequence
  ENSG00000184787_48 (sequence is synthesized)
tattttacacagaccggttcagggatttaatgatagaattagaaatagctaaggaactagctctgaaaagtattgtaaataatcctaatcacattagatattttgataaaatatttgcca

SEQ ID NO: 663800 - DNA, 120 bp, Artificial Sequence
  ENSG00000184787_49 (sequence is synthesized)
gataacctttcatttagtctttttgtatatattgcttgaaaaaaattcatatgaaagtggattagactacgacagctgattagaactggctgggtcagcctggagcctgtcagtgagtga

SEQ ID NO: 663801 - DNA, 120 bp, Artificial Sequence
  ENSG00000184787_50 (sequence is synthesized)
gcaggccccaccgggattcctgcagacatgaagcgtgacactcagggccccaggctatgccccagctgtgcaaacagcttggttgctgtgtctgcagtctttgttctcattatctgtgga

SEQ ID NO: 663802 - DNA, 120 bp, Artificial Sequence
  ENSG00000184787_51 (sequence is synthesized)
ttagaaaacacttcttatgttttgaaattcagccaagtaagcatggtggtattaagcacatgatttcaattttgaaggtcagtttaatatagataaaagacaacaggcacctaaaaccgg

SEQ ID NO: 663803 - DNA, 120 bp, Artificial Sequence
  ENSG00000184787_52 (sequence is synthesized)
atgccatttgacccagccaccctacttcactggggaggaagttttacacatgggtgtgtgctcagaaggggttatgctaatctttgtcatagtgttatttgtaatggtgaaaattttgac

SEQ ID NO: 663804 - DNA, 120 bp, Artificial Sequence
  ENSG00000184787_53 (sequence is synthesized)
attttgacttaacctgggtttttaacacaagaataaattaagttatatattgtattagtctgttgtcacgctgctaataaagacatattcaagtctgggtaatttataaaggaaagagat

SEQ ID NO: 663805 - DNA, 120 bp, Artificial Sequence
  ENSG00000184788_0 (sequence is synthesized)
attgctgctgacatgctgaggttgcattacgtcacgctacccttgctgcagggtagggggccaaaggggggtctcgcgcacgcgcgcgcgcgggagatcgaggcgcccgcgctaggttag

SEQ ID NO: 663806 - DNA, 120 bp, Artificial Sequence
  ENSG00000184788_1 (sequence is synthesized)
tgcgagaccccgccggcttgaggcgggggctgagcgccggccaagtccaagtgcgcaagcccagatctcggcgcgcccctgaggagtttctgtgggaagattttctgttttccaggtttc

SEQ ID NO: 663807 - DNA, 120 bp, Artificial Sequence
  ENSG00000184788_2 (sequence is synthesized)
ccaagggaaacgaagaaagggaggaggataatcaatgactgaacctctaatagatgttggacgacgttaaaaaaaaaatgtatcggccctaccctcgaggatttgacaaattagactgac

SEQ ID NO: 663808 - DNA, 120 bp, Artificial Sequence
  ENSG00000184788_3 (sequence is synthesized)
cagagtaataagagatacaggcagaagaggagacatagacacacacagaggagaagatgatgtgaaaagggaggcagagatcacagtggtgtggctacaagccaagaaataccgaagcca

SEQ ID NO: 663809 - DNA, 120 bp, Artificial Sequence
  ENSG00000184788_4 (sequence is synthesized)
tcagaagttggaagagggaaaggccagatgacaacctgaaactcagccaagcttgcagctgtggtcgctggtgaagtcaactccagcaaaccggaggcattaataatcttcctgaggtgc

SEQ ID NO: 663810 - DNA, 120 bp, Artificial Sequence
  ENSG00000184788_5 (sequence is synthesized)
tcctctctttttccaattcccaccttgatagaggggtatctcaaagtgggcgaatcaaattgagaagaactgggaacagccaacaacctcccaccacagcacagttaagggattctgttc

SEQ ID NO: 663811 - DNA, 120 bp, Artificial Sequence
  ENSG00000184788_6 (sequence is synthesized)
catcaagacagccatcagccaatcagttgtctgccaacccatcatctgccaccccatccttagtcaacaaagcaggaatcaactgggcatgaaccaatcaggcacgaaccaatcaagttt

SEQ ID NO: 663812 - DNA, 120 bp, Artificial Sequence
  ENSG00000184788_7 (sequence is synthesized)
atcagactcgaaccaagcaggcataaaccagccaagcacaaactcacttggtatgaaccaaatggacatgaaccaagggagtgcaagcctatatgaaatgaaccaagtggacatgaaaca

SEQ ID NO: 663813 - DNA, 120 bp, Artificial Sequence
  ENSG00000184788_8 (sequence is synthesized)
accaagcatgagccaagctggcatgaggcaatcaggtacaaacctaccagacataaaccaacccgacatgaaacaaccagacacatggcaattaggtaggagccaaccaggcatgctgca

SEQ ID NO: 663814 - DNA, 120 bp, Artificial Sequence
  ENSG00000184788_9 (sequence is synthesized)
acaagaactgagccaactagtcctgagcaaagcaggcataagccaaccagacccatcgcaaccaggcccaagccaatcaggccccagccaatcacgcatgaggcaaataggcacgaacca

SEQ ID NO: 663815 - DNA, 120 bp, Artificial Sequence
  ENSG00000184788_10 (sequence is synthesized)
atcaggtatgagccaaccagtgatgcagcaactagacagccagtcaggtgggagccaaccaagcatgagacaagtaggcaccagccaattaggcacaagccaaataggcatgagccaacc

SEQ ID NO: 663816 - DNA, 120 bp, Artificial Sequence
  ENSG00000184788_11 (sequence is synthesized)
aggcacatggcaaacaggactgagccaaccagtcctgaggcaaccaaacatgagtccaccaggcatgtggcaaccaggcgtgcaacaaccaggcatcagccagcaagtcccaagccaccc

SEQ ID NO: 663817 - DNA, 120 bp, Artificial Sequence
  ENSG00000184788_12 (sequence is synthesized)
aaccagacgcaaaccaatcaagtttatcagattccaaccaaacaggtataatccagccaagcccaagcttacttggtatgaaccaaatggacatgaaccaatggagtgcaagcctatatg

SEQ ID NO: 663818 - DNA, 120 bp, Artificial Sequence
  ENSG00000184788_13 (sequence is synthesized)
aaatgaaccaagtggacatgaaacaaccaagcatgagccaagctggcatgaggcaatcaggtacaaacctaccagacataaaccaacctggcatgaaacaaccaggcacatggcaattag

SEQ ID NO: 663819 - DNA, 120 bp, Artificial Sequence
  ENSG00000184788_14 (sequence is synthesized)
gtaggagccaaccaggcatgtggccacaaagcctgagcgaactagtcctgagtgaagcaagcataagccaaccaggtccaccgcaacgagccccaagccaatcaggccccagacaatcaa

SEQ ID NO: 663820 - DNA, 120 bp, Artificial Sequence
  ENSG00000184788_15 (sequence is synthesized)
gcacgagccaagcaggcacaaaccaatcaggtataagccaaccagtgatgtggcaactagacatgagacagtcaggtgggagccaaccaagcatgagacaagtaggcaccagccaatcag

SEQ ID NO: 663821 - DNA, 120 bp, Artificial Sequence
  ENSG00000184788_16 (sequence is synthesized)
gcacaagccaaataggcatgagccaaccaggcacatggcaaacaggcctgagccaaccagtcccgaggcaaccaaacaagagtccaccaggcatgtggcaacgaggcatgtggcaaccag

SEQ ID NO: 663822 - DNA, 120 bp, Artificial Sequence
  ENSG00000184788_17 (sequence is synthesized)
gcatgagccagcaagtccccagccaactaggcatgagacaaccaggcactagccaatcaagtaagaaccaaacaggcatgagccatccaggcaggggccaaccaggcatatgggaaccgg

SEQ ID NO: 663823 - DNA, 120 bp, Artificial Sequence
  ENSG00000184788_18 (sequence is synthesized)
ggccgagtcagccaggcctgagccaacaagacctgaaccaattagtgctgagccaaccaggcctgagtcaaccaggcaggagccaaccaagtgtgagccaaatgggcatgaggcaaacaa

SEQ ID NO: 663824 - DNA, 120 bp, Artificial Sequence
  ENSG00000184788_19 (sequence is synthesized)
gcatggattactttcaaataagacatgcagaggctggagactgcccagaaattttgcgactgattaaagaattggctgcctgtgaaaacatgctagatgcaatggagttaacagcagctg

SEQ ID NO: 663825 - DNA, 120 bp, Artificial Sequence
  ENSG00000184788_20 (sequence is synthesized)
atttactcagagatggctttggggacaatccccttttctactgcctgattgcagaagtaaacgatcaacaaaaaccatcaggcaaactgactgttggatttgccatgtactactttacat

SEQ ID NO: 663826 - DNA, 120 bp, Artificial Sequence
  ENSG00000184788_21 (sequence is synthesized)
acgactcatggactggcaaggtactttacctagaggacttttatgtcacacaagcttaccaaggcctaggtattggagctgaaatgctgaagaggctaagtcagatagccatcacaactc

SEQ ID NO: 663827 - DNA, 120 bp, Artificial Sequence
  ENSG00000184788_22 (sequence is synthesized)
aatgtaactgcatgcactttcttgtcgtcatttggaaccaggcttctatcaactactatactagtcgaggggctttagacctttcctctgaggagggctggcatctcttcaggtttaaca

SEQ ID NO: 663828 - DNA, 120 bp, Artificial Sequence
  ENSG00000184788_23 (sequence is synthesized)
gagaagaactcctggacatggcatgggaagaatgaaagaggctttgtaacaactcatcccaacacagcctccaacatttgactgtcacctgagtctaacagcagtttgactttgttgtac

SEQ ID NO: 663829 - DNA, 120 bp, Artificial Sequence
  ENSG00000184788_24 (sequence is synthesized)
ctggcaaagagaagagatgaagaaaagataagagaaagaaatgaaagtggaagagggcagaaaaagataaacaaaagttaggagagttttcaggaggagaaaataaagagaagacagaga

SEQ ID NO: 663830 - DNA, 120 bp, Artificial Sequence
  ENSG00000184788_25 (sequence is synthesized)
aggaagtatctgatccacatttgtcaggacgccaattcacctaatcatatctgccatatattttccatctaagtcaccttgacaagctatcattaaccttgtagcccatgtgtgtctcag

SEQ ID NO: 663831 - DNA, 120 bp, Artificial Sequence
  ENSG00000184788_26 (sequence is synthesized)
aatccactcttctccccacctactggcatgtgtatttatttttatgggtaccaaaaaagcctatgaacttaaaagggagagaaaaaacaatattggctctgagatgaaaccaagccggag

SEQ ID NO: 663832 - DNA, 120 bp, Artificial Sequence
  ENSG00000184788_27 (sequence is synthesized)
acctcaattcttgcctcctcagaagaaataatttgactgagggaaataaggcagaaggagagactgagacccacatggattcaccaccagtagcatacgttgatgccatgcgactgggat

SEQ ID NO: 663833 - DNA, 120 bp, Artificial Sequence
  ENSG00000184788_28 (sequence is synthesized)
gcaaatacaagactggtgtgtggggtaccaaaaaagcctatgaacttaaaagggagagaaaaaacaatattggctctgagacccacatggattcaccaccagtagcatacgttgatgcca

SEQ ID NO: 663834 - DNA, 120 bp, Artificial Sequence
  ENSG00000184788_29 (sequence is synthesized)
tgattttttgagggaagagaagaaatggttagccatgattttagggaagtttgaaatataatatataatagctcacattaattctacattctaatctttaaatatcaagatagctccagg

SEQ ID NO: 663835 - DNA, 120 bp, Artificial Sequence
  ENSG00000184788_30 (sequence is synthesized)
actaatctttggaaatgacaaataaaggtaattgctaaagggaaaatgtttatatattatattgaccacatagcaagtctctttctatttctatctatctgtctattgtttgcctatcta

SEQ ID NO: 663836 - DNA, 120 bp, Artificial Sequence
  ENSG00000184788_31 (sequence is synthesized)
tctatctgtcgtcttcatcaccatcatcatctatctatatagggatatcgaatggcccactgaagagtaagtgcaaattgaagatacgtttcagtcaccactctaagcagtaagtgacct

SEQ ID NO: 663837 - DNA, 120 bp, Artificial Sequence
  ENSG00000184788_32 (sequence is synthesized)
ttccatccaaaagggttaaacttaaatcccccttcccattgtcatagtttgaaaaacacgtatctctagaggaaacacagaagacaaaaataactcaggcagcaaatacttaggttgaat

SEQ ID NO: 663838 - DNA, 120 bp, Artificial Sequence
  ENSG00000184788_33 (sequence is synthesized)
acagagacctgcaacatcaaatagccacaacatattctagagggttttggagggaaactaatccatacaaatcaactgataaagacttggtacttaaagaccatactctgagtcaataca

SEQ ID NO: 663839 - DNA, 120 bp, Artificial Sequence
  ENSG00000184788_34 (sequence is synthesized)
taagtaaagactaaattgcaagaatatgggcattgaagcaagaatttggcatttaaaacagacattaggcatataatattggatccaaacaagatctacacagaacctattcttgtagcc

SEQ ID NO: 663840 - DNA, 120 bp, Artificial Sequence
  ENSG00000184788_35 (sequence is synthesized)
acaccagttaagagtatgtacatatacaatatgtattgtatgtatgtctatgtatatacatattatgacatgatcattttgattgattgattttgaaatcaaatgtatttttacgtagcc

SEQ ID NO: 663841 - DNA, 120 bp, Artificial Sequence
  ENSG00000184788_36 (sequence is synthesized)
actttgataacagttatttttccatgaggaaatttgatgcagtctataaaataattcattgccctttgatttaaaaagattaaatagtttgtgaaattatataccatgaactactcctaa

SEQ ID NO: 663842 - DNA, 120 bp, Artificial Sequence
  ENSG00000184788_37 (sequence is synthesized)
gtttcatctaatgcccacaaccacccttgaggggtagagattcttagattggtaatgatatcaagggtaagatagaggttaagtattatatgaaaagacaaaccgatacaaacaggaaaa

SEQ ID NO: 663843 - DNA, 120 bp, Artificial Sequence
  ENSG00000184788_38 (sequence is synthesized)
aaaagacagacccagtatgtgtcctctgttgtttagatactctttttttgtctttcagctctcctattctgcctcttttctgcaatcttctttataataaaacagaaaattacaataaaa

SEQ ID NO: 663844 - DNA, 120 bp, Artificial Sequence
  ENSG00000184788_39 (sequence is synthesized)
caaagagaaaaccatgacttttgaagtgtgagttcaatgaagattggcaagaaagcttcacatgtgcctacggccagtccctctgacctttgcttcctgttgtcatagtgggcagaatca

SEQ ID NO: 663845 - DNA, 120 bp, Artificial Sequence
  ENSG00000184788_40 (sequence is synthesized)
atatctgttgggatgaaacaaggcctatataaaatttggatttgggggacctaaacacagactctttagcttcagcagtgtggatgtgttagggaggattcctttggaagcagtaagggt

SEQ ID NO: 663846 - DNA, 120 bp, Artificial Sequence
  ENSG00000184788_41 (sequence is synthesized)
ttttttttttttttttttaccagtttggaccgaatttaaacttattaatccaaacccagtccttgatccaactaggtagatatagaaaattgttctaagcaaaacttaaagagtagaaaa

SEQ ID NO: 663847 - DNA, 120 bp, Artificial Sequence
  ENSG00000184788_42 (sequence is synthesized)
tatagaaaattgttctaagcaaaacttaaagagtagaaaattataaagtagatggcagggccaaagagtaacggcaatggtgagattatttttgagatccggtctcagaaagagtggcga

SEQ ID NO: 663848 - DNA, 120 bp, Artificial Sequence
  ENSG00000184788_43 (sequence is synthesized)
tggtagtggctataagagtgtggcactccactcatatgtgcacatgagggtacagaaaaaaaaaaccagcagctagttagtgaaggcaggtttctctggaagtagtgaccatctcaaact

SEQ ID NO: 663849 - DNA, 120 bp, Artificial Sequence
  ENSG00000184788_44 (sequence is synthesized)
cgggaggtagggcgaccatataatttcttgtccaaaccagaacacttatgagagtggcagtggcagcagttaacgtttacattaaaataacaggcagaagtgtgtaaagggacatttata

SEQ ID NO: 663850 - DNA, 63 bp, Artificial Sequence
  ENSG00000184788_45 (sequence is synthesized)
ttgacaccctacggcaagaaataactaagatcaagcagaactgaaggagatggagacacaaaa

SEQ ID NO: 663851 - DNA, 120 bp, Artificial Sequence
  ENSG00000184788_46 (sequence is synthesized)
agagcaaacacattcaaaagctagcacacggcaagaaataactaagatcaagcagaactgaaggagatggagacacaaaaaaaccttcaaaacaccagtgaatccaggagctggtttttt

SEQ ID NO: 663852 - DNA, 72 bp, Artificial Sequence
  ENSG00000184788_47 (sequence is synthesized)
gaaaagatcaacaaaattggtagaccgctaacaagactagaagaacagacaaacagagagccaaatcatgag

SEQ ID NO: 663853 - DNA, 120 bp, Artificial Sequence
  ENSG00000184792_0 (sequence is synthesized)
actggccgctcggccgcgcgcgggtcggccggctctatggggaaagcggcggctccgagccgaggcggcggctgtggcggccgctcccgcgggctctcgtcgctgttcacggttgtcccc

SEQ ID NO: 663854 - DNA, 120 bp, Artificial Sequence
  ENSG00000184792_1 (sequence is synthesized)
tgcctgtcgtgccacacggcggcgccgggcatgagcgcttccacgtccggctccgggccggagcccaagccccagccccagcccgtgcccgaaccggagcggggaccgctgtcagaacag

SEQ ID NO: 663855 - DNA, 120 bp, Artificial Sequence
  ENSG00000184792_2 (sequence is synthesized)
gtgtcggaggcagtttcggaggcagtgccaagatcggaacctgtgtccgagacgacgtctgagccggagccaggggctgggcagccatcggaactgctgcaggggtcgcggccggggtca

SEQ ID NO: 663856 - DNA, 120 bp, Artificial Sequence
  ENSG00000184792_3 (sequence is synthesized)
gagtcaagctcaggtgtaggggctgggcccttcactaaggccgcatcggagccgctctcccgggcggtggggagcgcgacctttctcagacccgagtcaggatcgctgccagcgttaaag

SEQ ID NO: 663857 - DNA, 120 bp, Artificial Sequence
  ENSG00000184792_4 (sequence is synthesized)
cccctgcctcttctgcgaccaggacaggcgaagactcctcttggggttccaatgtcggggactggcacgacctccagtgccccactggccttactgcctctggacagcttcgagggctgg

SEQ ID NO: 663858 - DNA, 120 bp, Artificial Sequence
  ENSG00000184792_5 (sequence is synthesized)
cttctcaagtggaccaactatctgaagggctaccagcgccgctggttcgtgctgggcaatggtttgctctcttactacagaaatcagggtgaaatggcccacacgtgccgtggaaccatc

SEQ ID NO: 663859 - DNA, 120 bp, Artificial Sequence
  ENSG00000184792_6 (sequence is synthesized)
aacctgtccaccgcgcacattgacacggaggactcttgtggtatcttgctgaccagtggggccaggagctaccacctcaaggccagctcagaggtggaccggcagcagtggatcaccgcc

SEQ ID NO: 663860 - DNA, 120 bp, Artificial Sequence
  ENSG00000184792_7 (sequence is synthesized)
ctggagctggccaaggccaaggctgtccgcgtgatgaacactcattcagatgactctggggacgacgacgaggctaccaccccagccgacaagagcgagctgcaccacaccctgaagaat

SEQ ID NO: 663861 - DNA, 120 bp, Artificial Sequence
  ENSG00000184792_8 (sequence is synthesized)
ctttccctgaagttagatgacctcagcacgtgcaatgacctcatcgccaagcacggcgctgcactccagcgctccctgacagagctggacggcctcaagatcccatctgagagtggggag

SEQ ID NO: 663862 - DNA, 120 bp, Artificial Sequence
  ENSG00000184792_9 (sequence is synthesized)
aagctgaaggtggtgaatgagcgggccaccctcttccgcatcacatccaatgctatgatcaacgcctgcagggacttcttggaactagcagagatacacagtcggaaatggcagcgggca

SEQ ID NO: 663863 - DNA, 120 bp, Artificial Sequence
  ENSG00000184792_10 (sequence is synthesized)
ctgcagtatgagcaggagcagcgcgtgcacttggaggaaaccattgagcagctggcgaagcagcacaacagcctcgagcgggccttccacagtgcccctggccggccggccaacccctcc

SEQ ID NO: 663864 - DNA, 120 bp, Artificial Sequence
  ENSG00000184792_11 (sequence is synthesized)
aagagcttcattgagggaagcctcttgactcccaaaggagaggacagtgaggaagatgaagataccgagtactttgatgccatggaagactccacatccttcatcaccgtgatcaccgag

SEQ ID NO: 663865 - DNA, 120 bp, Artificial Sequence
  ENSG00000184792_12 (sequence is synthesized)
gccaaggaagacagcagaaaagctgaaggtagcaccgggacaagttccgtggactggagctcagcagacaatgtactagatggtgcctcgctcgtgcccaagggttcatccaaagtcaag

SEQ ID NO: 663866 - DNA, 120 bp, Artificial Sequence
  ENSG00000184792_13 (sequence is synthesized)
aggcgagtccgcattcccaacaagcccaactacagccttaacctctggagcatcatgaagaactgcatcggccgggagctctccaggatccccatgccggtgaacttcaatgagcccctg

SEQ ID NO: 663867 - DNA, 120 bp, Artificial Sequence
  ENSG00000184792_14 (sequence is synthesized)
tccatgctccagcggctgacagaggacctggagtaccaccacctgctggacaaggcagtgcactgcaccagctcagtggagcagatgtgcctggtggccgccttctctgtgtcctcctac

SEQ ID NO: 663868 - DNA, 120 bp, Artificial Sequence
  ENSG00000184792_15 (sequence is synthesized)
tccaccacagtgcaccgcatcgccaagcccttcaaccccatgctgggggagaccttcgagctggaccgcctcgacgacatgggcctgcgctccctctgtgagcaggtgagccaccacccc

SEQ ID NO: 663869 - DNA, 120 bp, Artificial Sequence
  ENSG00000184792_16 (sequence is synthesized)
ccctcagctgcgcactacgtgttctccaagcatggctggagcctctggcaggagatcaccatctccagcaagttccggggaaaatacatctccatcatgccgctaggtgccatccactta

SEQ ID NO: 663870 - DNA, 120 bp, Artificial Sequence
  ENSG00000184792_17 (sequence is synthesized)
tcatcgtgggcaagctctggatcgaccagtcaggggacatcgagattgtgaaccataagaccaatgaccggtgccagctgaagttcctgccctacagctacttctccaaagaggcagccc

SEQ ID NO: 663871 - DNA, 120 bp, Artificial Sequence
  ENSG00000184792_18 (sequence is synthesized)
ggaaggtgacaggagtggtgagtgacagccagggcaaggcccattacgtgctgtccggctcgtgggatgaacaaatggagtgctccaaggtcatgcatagcagtcccagcagccccagct

SEQ ID NO: 663872 - DNA, 120 bp, Artificial Sequence
  ENSG00000184792_19 (sequence is synthesized)
ctgacgggaagcagaagacagtgtaccagaccctgtcagccaagctgctgtggaagaagtacccgctgccggagaacgcggagaacatgtactacttctcagagctggccctgaccctca

SEQ ID NO: 663873 - DNA, 120 bp, Artificial Sequence
  ENSG00000184792_20 (sequence is synthesized)
acgagcacgaggagggcgtagcgccaaccgacagccgcctgcggcccgaccagcggctgatggagaagggccgttgggacgaggccaataccgagaagcagcggctggaggagaagcagc

SEQ ID NO: 663874 - DNA, 120 bp, Artificial Sequence
  ENSG00000184792_21 (sequence is synthesized)
gcctgtcgcggcgccggcggctggaggcctgcgggccgggcagcagctgcagctcggaggaagagaaggaggcggatgcctacacgccactgtggtttgagaagaggctggatccgctga

SEQ ID NO: 663875 - DNA, 120 bp, Artificial Sequence
  ENSG00000184792_22 (sequence is synthesized)
ccggggagatggcctgtgtgtacaagggcggctactgggaggccaaggagaagcaagactggcatatgtgccccaacatcttctgagcgccacccttgcaacaaatacaggcgcctgcac

SEQ ID NO: 663876 - DNA, 120 bp, Artificial Sequence
  ENSG00000184792_23 (sequence is synthesized)
agcctggcccacctgttcattaatgcactcaatttagtactgaatggtctttctcccagcccattcccagcccttcctatttcctttcctattttttttttctccccacactttcttggg

SEQ ID NO: 663877 - DNA, 120 bp, Artificial Sequence
  ENSG00000184792_24 (sequence is synthesized)
actcccaccttggaaggaggaagggctgacctgggttctctccagcccccaggtgcgccgggtcacccgtgccccttcattatggacctgggccctaccggaacccctgccccagttacc

SEQ ID NO: 663878 - DNA, 120 bp, Artificial Sequence
  ENSG00000184792_25 (sequence is synthesized)
acaactcaggccggctggcccgggccatgggctgcgcaaatcaccagcccccaacccagggaggaactggcccctcctagggagcctcttcgacttttttagaaaaatgatctccatttc

SEQ ID NO: 663879 - DNA, 120 bp, Artificial Sequence
  ENSG00000184792_26 (sequence is synthesized)
tttccagccatgatgtttagtaaatatttttagtaccgcacttagcagacagctttccaagtgtgctttcttgccacaaaagtgtcctggcaagagccccttatttttaagacatcagga

SEQ ID NO: 663880 - DNA, 120 bp, Artificial Sequence
  ENSG00000184792_27 (sequence is synthesized)
agccagaccgctttgagttgggagaattttgtagctcaacatatcaagtcctcgatggtatctgagctgcccacacccccacctgccaaggccccacagagcccaaaacagaagggggct

SEQ ID NO: 663881 - DNA, 120 bp, Artificial Sequence
  ENSG00000184792_28 (sequence is synthesized)
gccccagcccagcagagcacagagtttctggagctcccatccacagatgcaggagggggtactgatggtaacccccatgtggatttgagggcagcagtccctggcctcaccctagccagc

SEQ ID NO: 663882 - DNA, 120 bp, Artificial Sequence
  ENSG00000184792_29 (sequence is synthesized)
ctgggtggctccctagccccaagaggccaggaagggctggaaggcagggcctgcaggtgctccccgccctgagacccaggccccaaatcagcaataatgaacaaacccttggcccagcct

SEQ ID NO: 663883 - DNA, 120 bp, Artificial Sequence
  ENSG00000184792_30 (sequence is synthesized)
gggctggtgacctgggcaccagagaccttgcatccctcctcatcctaggaggcccctaggggtgccccatctcagtgtcccctgaactctttatttgcctaatttatatatatatatatg

SEQ ID NO: 663884 - DNA, 120 bp, Artificial Sequence
  ENSG00000184792_31 (sequence is synthesized)
agatatataaatatatataaaatagctattttgcttaaatttctacagtatgtaaaagtgaaaaaatgatgaagacgggtgcacctgtctgagtttggccctcatgtgagctgtgccctt

SEQ ID NO: 663885 - DNA, 120 bp, Artificial Sequence
  ENSG00000184792_32 (sequence is synthesized)
ccctctcctcatgcccccttccagcggcttctgccaaccatggggggctggaccaccatggccactgacccagcccctcagaatcccacactccaatcctttccatttcagtttagtcct

SEQ ID NO: 663886 - DNA, 120 bp, Artificial Sequence
  ENSG00000184792_33 (sequence is synthesized)
aaaagttcatcacagggtctttctttctactccaggactggttttgtttttatatatataaaaaaaaaaagtgaaaacaccaatgtgtgaaatgccttacaatgcccactggagaggcgg

SEQ ID NO: 663887 - DNA, 120 bp, Artificial Sequence
  ENSG00000184792_34 (sequence is synthesized)
ggcggggtggggcaggatggccccactggggctcctacagagctgtggaatgtacctctccccaacactgttttgttagcgagcaccttttgaccagtaataaaaaaccttggctttgga

SEQ ID NO: 663888 - DNA, 120 bp, Artificial Sequence
  ENSG00000184792_35 (sequence is synthesized)
agcattctgagaacagcagggccacgccaggcgcctgcctctccccacagcacagccaggatggggcctggagaaggccggcagcagcagaggagaccctgggagtcagggatggacacc

SEQ ID NO: 663889 - DNA, 120 bp, Artificial Sequence
  ENSG00000184792_36 (sequence is synthesized)
gaagaagtacccgctgccgtgagtagggctggcaggggccccgccacaggcaaaggagagggaaggaggacagtggacagaaagcaactgacaggcacaggaggtcgggagggttcagtc

SEQ ID NO: 663890 - DNA, 120 bp, Artificial Sequence
  ENSG00000184792_37 (sequence is synthesized)
cacacatgggcagagaacagtattatgcagccgacatcccagtgtgaaggcagacaccgaacagtaaataaatgtgaaactatcaaacactatgcacagactttaagcgaggtgatagga

SEQ ID NO: 663891 - DNA, 120 bp, Artificial Sequence
  ENSG00000184792_38 (sequence is synthesized)
cagagcccctccctgttcctccctacaagaaataaaaaacatacttgaaaataaccacaggaaatagaaaactataaaatgtggcataggaaagtccaaagagaacaaatagaaattcga

SEQ ID NO: 663892 - DNA, 120 bp, Artificial Sequence
  ENSG00000184792_39 (sequence is synthesized)
caaagggaaaaaaaaatgactgacattgagaaccctgtggaatggtttagtagctagaatctatcacctgaacacaggtcagaagaagtgacagaactgcatttaaagagacaaaaccca

SEQ ID NO: 663893 - DNA, 120 bp, Artificial Sequence
  ENSG00000184792_40 (sequence is synthesized)
ggactggagctcagcagacaatggttcatccaaagtcaagaggcgagtccgcattcccaacaagcccaactacagccttaacctctggagcatcatgaagaactgcatcggccgggagct

SEQ ID NO: 663894 - DNA, 120 bp, Artificial Sequence
  ENSG00000184792_41 (sequence is synthesized)
agagcaactagagcaggcagtagagtggggtgggcggggatgaggagggggttgggtggctggtggccctagaggctggccctaaagaatacctggacagcctgccaccctattgctcca

SEQ ID NO: 663895 - DNA, 120 bp, Artificial Sequence
  ENSG00000184792_42 (sequence is synthesized)
aaatgaaaatcctctaacagggtcaactggtggcagggaacaaaaccccgctgagactggctgaaacacaagtggggcctgtgctcagggtgcaggaagtggagcatccaaggggagaga

SEQ ID NO: 663896 - DNA, 120 bp, Artificial Sequence
  ENSG00000184792_43 (sequence is synthesized)
ttagatttcatctcaagaaaccactctgctcatccgtcatggagatggcttatttccttaaacctcatgaaccaacctctactagcttcagatttttcttctgcagtttcctcacctctg

SEQ ID NO: 663897 - DNA, 120 bp, Artificial Sequence
  ENSG00000184792_44 (sequence is synthesized)
tcagcctccatacaactgaagagagttaagggcttgctctggattaggtattggcttaagggaatgtcatggctggtttgatcctctatccagaccactaaaactttctatcagcaataa

SEQ ID NO: 663898 - DNA, 120 bp, Artificial Sequence
  ENSG00000184792_45 (sequence is synthesized)
gagtgtccgccgcctccgccgggcggcccaccgagctgtgcacgcgtccgtgcaagcccccgggacccggcgccatgtagcgccccgccgattggaggctgccccgccgcgggaaatgaa

SEQ ID NO: 663899 - DNA, 120 bp, Artificial Sequence
  ENSG00000184792_46 (sequence is synthesized)
gggacgcggctgctgggacacggcctccgtgcgctccttctgcagctccggctgcctgaataaatttaagaaggatgactctggggacgacgacgaggctaccaccccagccgacaagag

SEQ ID NO: 663900 - DNA, 120 bp, Artificial Sequence
  ENSG00000184792_47 (sequence is synthesized)
ggcggcggcggcggcggcagcagcagcagctgcaagagccctcgcagcctcggggcaggacccacgtccacacccgagagcccctccctgggatgactctggggacgacgacgaggctac

SEQ ID NO: 663901 - DNA, 120 bp, Artificial Sequence
  ENSG00000184792_48 (sequence is synthesized)
aacctctgcggaagcctcacagactgccagcctacccagggatcccgggaggtccaagttcagaatcccactttgagatgtttcttgtactaaaacgcttggtttacaaaaagtcttccc

SEQ ID NO: 663902 - DNA, 120 bp, Artificial Sequence
  ENSG00000184792_49 (sequence is synthesized)
ctatttgtttagagaacccgaacgatgtcgtcactggcagcgaagcgccttggcatgaaccgtaggccagctggctcaggaggtggaggcggtgaggcggccacttggggccaccgcttc

SEQ ID NO: 663903 - DNA, 120 bp, Artificial Sequence
  ENSG00000184792_50 (sequence is synthesized)
catcacatccaatgctatgatcaacaagccactgccggaggcttcccaggcactgcctccctacccgagaccaaaactgctttgtcttgaataagcagttttggcttttccgagataatg

SEQ ID NO: 663904 - DNA, 120 bp, Artificial Sequence
  ENSG00000184792_51 (sequence is synthesized)
agcgtctcagctggctgccgtcttgcacagtcttttatcagacatcagaggctcatctgtgtttacgaagccatcagaacagctccaagtttaagtgcctaatgaattgttttatgagaa

SEQ ID NO: 663905 - DNA, 76 bp, Artificial Sequence
  ENSG00000184792_52 (sequence is synthesized)
aaaatacaaaatttagctgggcatggtgcgggccgtggaattccagctactactgcagtgaaccaagatcacgcca

SEQ ID NO: 663906 - DNA, 120 bp, Artificial Sequence
  ENSG00000184792_53 (sequence is synthesized)
tcacgccactgcattccagcctgggctaccgagtgagactcagtctcaaaaaggaaaaaaaaaaaaagcggaaaaaaaaattcgctgatgttttaaccattctggggtcacagcctcctt

SEQ ID NO: 663907 - DNA, 120 bp, Artificial Sequence
  ENSG00000184811_0 (sequence is synthesized)
gcattcttctctctgctctctgagctttccgttgcttccctgcccatctgtgctctcagcagcaccagcaaagttggcctcaaacttgaacaaagctgcaggctccagcgtctttctggg

SEQ ID NO: 663908 - DNA, 120 bp, Artificial Sequence
  ENSG00000184811_1 (sequence is synthesized)
agctccgcgggggcagcaggcaggccccagcctctgaactcagctggcttgagaagctcagcccaacccttccagcacccagccggccctccgtctcctgagggacgcccctgcccccga

SEQ ID NO: 663909 - DNA, 120 bp, Artificial Sequence
  ENSG00000184811_2 (sequence is synthesized)
cctggaggccctcagtctgggctggggaatggcgcgctgaggtccctccagagccccttgtcccagcctggagctgcagccgcgcaaggcccaggcccccatggcccacccggtgcagtc

SEQ ID NO: 663910 - DNA, 120 bp, Artificial Sequence
  ENSG00000184811_3 (sequence is synthesized)
cgagtttccttcagcacaggagccaggctccgccgcattcctggacctgccggagatggagatactcctcaccaaggcagagaacaaggatgacaagaccctgaatctgtccaagaccct

SEQ ID NO: 663911 - DNA, 120 bp, Artificial Sequence
  ENSG00000184811_4 (sequence is synthesized)
ctcggggcctctggatctggagcagaacagccagggcctacccttcaaggccatctccgaggggcacctggaggccccactgcctcggtccccctcccgggccagctcaaggagggcgtc

SEQ ID NO: 663912 - DNA, 120 bp, Artificial Sequence
  ENSG00000184811_5 (sequence is synthesized)
ctccatcgccaccacctcctatgcccaagaccaagaagcccccagagattacctcatcctggccgtcgtcgcctgcttctgccccgtctggcccctcaacctcatccccctcatcatttc

SEQ ID NO: 663913 - DNA, 120 bp, Artificial Sequence
  ENSG00000184811_6 (sequence is synthesized)
catcatgtctcgaagcagcatgcaacagggcaacgtggacggcgcccggaggctgggccgcctggctcggctgctcagcattaccctcatcatcatgggcatcgtcattatcatggtggc

SEQ ID NO: 663914 - DNA, 120 bp, Artificial Sequence
  ENSG00000184811_7 (sequence is synthesized)
cgtgaccgtcaacttcacagttcagaagaaataaacttaagcagggagctgggctagcagaggccggccctggccatcgggagagctctgacctgcacaccgcgggaggccagggtgctg

SEQ ID NO: 663915 - DNA, 120 bp, Artificial Sequence
  ENSG00000184811_8 (sequence is synthesized)
actgtcaagcatcccctgtccccaagttccaaaagcacagactcaaagggaaaccccccagtcacccactgtcagcccccatctgacaagaaagcctggagcgaggaaggaaagcacagc

SEQ ID NO: 663916 - DNA, 120 bp, Artificial Sequence
  ENSG00000184811_9 (sequence is synthesized)
gaacccaatgggtaacgtggtttactctcccggacgcgtcctgggatctcaaccccagcagtctggcttgtttctcattcccacaatttcctgggttccaccaagcagcgaaaactgcca

SEQ ID NO: 663917 - DNA, 120 bp, Artificial Sequence
  ENSG00000184811_10 (sequence is synthesized)
ggatgaatgaggaaaaaacccagccccacaaacgagacacacgctggcggggagagacgcagcagagctccttcctgtctgtggactcggagcaaagacgtggggccccatcttttgtgt

SEQ ID NO: 663918 - DNA, 120 bp, Artificial Sequence
  ENSG00000184811_11 (sequence is synthesized)
tttcctcaagcggggaaagaatggactgtttgcatgcttcgtgccacacgcccgcggtgatcccagccagggccccgagcgcagaggcggagctgtgctcagcacaggcctgggacctcc

SEQ ID NO: 663919 - DNA, 120 bp, Artificial Sequence
  ENSG00000184811_12 (sequence is synthesized)
cccggcaggcacctgtggggggtgcagctcccgggaaggaggcaactgcctcacttaacatcctccgctgcaaggtggtggcgccgagaggcgtgtctgtgaagacaggtaccaggatgg

SEQ ID NO: 663920 - DNA, 120 bp, Artificial Sequence
  ENSG00000184811_13 (sequence is synthesized)
caggacccgcacgcctcttcccacacctgtcagcttcggaagcatctctcgaggactctggtcccaggatgtctcccaggacaagccagtctgcctcttcctcctacttctgctgtagcc

SEQ ID NO: 663921 - DNA, 120 bp, Artificial Sequence
  ENSG00000184811_14 (sequence is synthesized)
gtgctgcttaggtagtttcaggcttccagcccagccctatgctctgtgcttggccctgggcccctggccatccacaaacagcagaggccttccctggaggaggctttgggaccacccctg

SEQ ID NO: 663922 - DNA, 120 bp, Artificial Sequence
  ENSG00000184811_15 (sequence is synthesized)
gggggacttcccaaagggtcccaggctgtcaggggcgtttgcgccacctgcaagggcgtgggtcagagagtttttatgggggtctgttgtttgaccgtcctgagaccgagggaagggctc

SEQ ID NO: 663923 - DNA, 120 bp, Artificial Sequence
  ENSG00000184811_16 (sequence is synthesized)
agctgaaggaccccgtctgcaggagagtcgggggaccaggtttgggaatacacttgcatgtacagagcctggggcctggacgccacggcctctcatcttaggacctaatgggacccccga

SEQ ID NO: 663924 - DNA, 120 bp, Artificial Sequence
  ENSG00000184811_17 (sequence is synthesized)
aaggagccaagtggggccctcggcctcttccttcgttccaggcccatgattttccctacacttctccctggcccaggctccagccacaggcacctctcctgcccccgcccaccctcctga

SEQ ID NO: 663925 - DNA, 120 bp, Artificial Sequence
  ENSG00000184811_18 (sequence is synthesized)
ccgcagctcccaggccctggagacctccaggctttcctgccctgggcagccccacctcacagccagagtcaatgccttcatgggaagggctcccagccacacccagagtggcccaaagct

SEQ ID NO: 663926 - DNA, 120 bp, Artificial Sequence
  ENSG00000184811_19 (sequence is synthesized)
gttgaagtcagcatcctttgtcccatcaggaccctcctgcctcctctccaggcccttgttcgcctccccaccctcctcagaggcccggggaagggaagagcaggtcagtacagaggttct

SEQ ID NO: 663927 - DNA, 120 bp, Artificial Sequence
  ENSG00000184811_20 (sequence is synthesized)
gtctacagggaggggccctgggtctatgcacagctggagctctgagccttccacagcccgtgtgactgctagagggcaggggtgcagggctcagggggcccgggctggtcctttggggct

SEQ ID NO: 663928 - DNA, 120 bp, Artificial Sequence
  ENSG00000184811_21 (sequence is synthesized)
ggtgttcctacgtcagtccccacctggggaataaactccagcctctcctgctcatacagaagggactggttgggtttgctttatgggatctttgagaccaaaacagatgctcctgtttgc

SEQ ID NO: 663929 - DNA, 120 bp, Artificial Sequence
  ENSG00000184811_22 (sequence is synthesized)
tgggggagggtgtgagcacggagtatttctgtccctcgtgaagtcacgtcacacaggggagaggcgaggtcgatggaactggccacgcacaggctctggctctggaaggagggatgatga

SEQ ID NO: 663930 - DNA, 120 bp, Artificial Sequence
  ENSG00000184811_23 (sequence is synthesized)
gtgggcgttttcccggcaggcccccggggtcctcagcctcagcaacccagggagaggacagaaacgaaccgatggttgagggattgtcacgggaggaacatgacacccgaagggactcta

SEQ ID NO: 663931 - DNA, 120 bp, Artificial Sequence
  ENSG00000184811_24 (sequence is synthesized)
ggtgccctcggagtgccacacatgcccagaccttctcacacccacacaaataggctctgccgtgcactcctacacacacacacacacacacacacgcttgttcacactcagaacccagga

SEQ ID NO: 663932 - DNA, 120 bp, Artificial Sequence
  ENSG00000184811_25 (sequence is synthesized)
cagccacagccaccgcttaggggaagccactgcagatgcccctggaatgggcacagcacagccagggcgctcttccaggcaggcgaggataacttgagagtttcctagggcaccagggac

SEQ ID NO: 663933 - DNA, 120 bp, Artificial Sequence
  ENSG00000184811_26 (sequence is synthesized)
agagctcagaggcccccgaggtgtgtgtaggaggcggaggcccgcagagcacagagcaggagaagggcttgggccctggaggagaaagccattctggacaccaggggacctggacggagg

SEQ ID NO: 663934 - DNA, 120 bp, Artificial Sequence
  ENSG00000184811_27 (sequence is synthesized)
gtccccacagcccgtgccccacgccgcctggaggccagaggggtcagtggccctgctgtcccggctccatcttggttctagccgccacctgcatgaacacagtggcccggcttaacgcac

SEQ ID NO: 663935 - DNA, 120 bp, Artificial Sequence
  ENSG00000184811_28 (sequence is synthesized)
taacccagcctctccctgtgtcccacagggagtagcaagacccaccccacactgccttcaccatctacaccagtgacgccgctgtgtgtcttagcatggaaataaataaacctgaatgta

SEQ ID NO: 663936 - DNA, 120 bp, Artificial Sequence
  ENSG00000184814_0 (sequence is synthesized)
gtctgcatcaggaaggcccaagggtccaacgagctaagctgagcccggtggccggcgaggcaccaccagcagcccagactacggtcccccaggaggcgccccgggagctccgaggactcg

SEQ ID NO: 663937 - DNA, 120 bp, Artificial Sequence
  ENSG00000184814_1 (sequence is synthesized)
ccccgcgtcgcgcggtcctgcgccccgctcgtcccaaccagcctcccctaccaccgacatctgttacttcaaagaggacttcaccgccgcgctccccacgtccgctgctaggcccaggag

SEQ ID NO: 663938 - DNA, 120 bp, Artificial Sequence
  ENSG00000184814_2 (sequence is synthesized)
cgccgtccacagcgccgtcgaggcgatggtcagccggccccgcagccccagcgccttccctgctccctggtggggacagcagccaggaggacccggccctgccaagcgcctccgattgga

SEQ ID NO: 663939 - DNA, 120 bp, Artificial Sequence
  ENSG00000184814_3 (sequence is synthesized)
cgattggaggagcccgcgggccccgaaccccgcgcggcacccagcctggaagacccggcgggggacccggccgtggacgcgctcacctccatagtggtcctggccgcgggctgtgccctg

SEQ ID NO: 663940 - DNA, 120 bp, Artificial Sequence
  ENSG00000184814_4 (sequence is synthesized)
cctggacgacgtcgacctggtgctggagcccgcaccaacgtcgatcctgcgagtgtctctcggtggacacaccctcatcctgatcccagaggtcctcctgagctccgtcgacgaacgctc

SEQ ID NO: 663941 - DNA, 120 bp, Artificial Sequence
  ENSG00000184814_5 (sequence is synthesized)
aggagcgcagcacgactcgtctgccgggctggaagtggacgttttcctgggcgctgtcagggaggacgtcgtcgtcgagctggaattctgcgcatctgtcccagagatcgccgcccagga

SEQ ID NO: 663942 - DNA, 120 bp, Artificial Sequence
  ENSG00000184814_6 (sequence is synthesized)
agaggcctacgaggaggacgcggaccccgagttcccggagctccggatggactccccaaccggctcagccgctgggctctacccctcctctagaagtatgttcatcccctaccgggaggg

SEQ ID NO: 663943 - DNA, 120 bp, Artificial Sequence
  ENSG00000184814_7 (sequence is synthesized)
tgtccccagctcacctctccaacctctacctccctctccgtgcgtggggagtccaggtccccacgcgcgctcgccgctcccggaacgccctccgtgcaaggcccggagacgcctgttcca

SEQ ID NO: 663944 - DNA, 120 bp, Artificial Sequence
  ENSG00000184814_8 (sequence is synthesized)
ggcatagacccccacccccacgtacacacaacaatcctggccgctctgctggaggccctctaggattgcgggaatctctcacattgagtatccaacaacctggaaattgggcaccgcgtg

SEQ ID NO: 663945 - DNA, 120 bp, Artificial Sequence
  ENSG00000184814_9 (sequence is synthesized)
ttcggacaattgctttttcgctgcacactaccgatagtaggagatgaagacgtcagcaagaaaaggtatattctagacctcatctttaaatagaaaatctgcgcaaggataccagaaaat

SEQ ID NO: 663946 - DNA, 120 bp, Artificial Sequence
  ENSG00000184814_10 (sequence is synthesized)
gtgtccagatttctgggcttctttacaaggtcatattcagatcccttcattctccctcgttttgcatcagttgtttctctcaaattccagtctttctccagcatcatactgccactcccg

SEQ ID NO: 663947 - DNA, 120 bp, Artificial Sequence
  ENSG00000184814_11 (sequence is synthesized)
tttctccccaaaccaagaaatcaccagatctcttacgttgttagttaccttgcatttttttcccatgaattttggaagacttagccatggcttttcttggggtttttccaactgctctcc

SEQ ID NO: 663948 - DNA, 120 bp, Artificial Sequence
  ENSG00000184814_12 (sequence is synthesized)
aaggaaactgccaaatagtatgcttactatacaagactgtatgttgcttcttcctaggaaccccttatcctgctgaagttttcttctagtcttctaattctaaatgaaaatttgtgttga

SEQ ID NO: 663949 - DNA, 120 bp, Artificial Sequence
  ENSG00000184814_13 (sequence is synthesized)
attttatcagatgttttcagcatgcattgtgttatgtatttttttttaatttgttaatctggtgatttcacccaatggaaagtgtttgcattcctgctattccacattattttatacctt

SEQ ID NO: 663950 - DNA, 120 bp, Artificial Sequence
  ENSG00000184814_14 (sequence is synthesized)
ttaaaatctaccctgagttttttctcatgtaaaccaaacttctaacttttaaaatgttagtttattactgtagttgcctcatatttttatataggagataaaagattactggtaaagctg

SEQ ID NO: 663951 - DNA, 120 bp, Artificial Sequence
  ENSG00000184828_0 (sequence is synthesized)
gctcctccaccgcccttgcctttatttctgctttaccttttccaaagatcttaatttggtgtcataaagtgaagcgtaacgcgcgagtggtgagatcgtcctgtcctgcgcttaacagta

SEQ ID NO: 663952 - DNA, 120 bp, Artificial Sequence
  ENSG00000184828_1 (sequence is synthesized)
caggtggaccaaaggggctcccggccaaatacttctggttggagggtggggagggagtgctctctcaaaaccactcctggaatggcttaactcgcccagcacgaatcaatgacaacctcc

SEQ ID NO: 663953 - DNA, 120 bp, Artificial Sequence
  ENSG00000184828_2 (sequence is synthesized)
atcaatgacaacctcccgccggctgcggcaggctcccgcgagcagcgcggccgcgtggattcccagcccgggaccctggcggcgctcaggacacggcccgggcacgagcgcggcgtcccc

SEQ ID NO: 663954 - DNA, 120 bp, Artificial Sequence
  ENSG00000184828_3 (sequence is synthesized)
tggctgagaacatggccaatgacattgatgagctcattggcattcccttccccaaccacagcagtgaggtcctgtgcagcctcaatgagcaacggcacgatggcctgctgtgtgacgtgc

SEQ ID NO: 663955 - DNA, 120 bp, Artificial Sequence
  ENSG00000184828_4 (sequence is synthesized)
tcctggtggtgcaggagcaggagtatcggacccaccgctccgtcctggctgcctgcagcaagtacttcaagaagcttttcacagccggcaccctagccagccagccctacgtctatgaga

SEQ ID NO: 663956 - DNA, 120 bp, Artificial Sequence
  ENSG00000184828_5 (sequence is synthesized)
tcgactttgtccagcctgaggctctggctgctatcctggagttcgcctacacctccacgctcaccatcaccgctggcaatgtcaagcacatcctcaacgcagccaggatgctggagatcc

SEQ ID NO: 663957 - DNA, 120 bp, Artificial Sequence
  ENSG00000184828_6 (sequence is synthesized)
agtgcatcgtgaacgtgtgcctggagatcatggagcctgggggggacgggggggaggaggatgacaaggaggacgatgacgacgacgaagatgatgatgatgaggaggacgaagaggagg

SEQ ID NO: 663958 - DNA, 120 bp, Artificial Sequence
  ENSG00000184828_7 (sequence is synthesized)
aggaggaagaggaggaggatgacgatgatgacacggaggactttgctgaccaagaaaacttgcctgacccccaggacatcagctgccaccaaagcccttccaagacagaccatctcacag

SEQ ID NO: 663959 - DNA, 120 bp, Artificial Sequence
  ENSG00000184828_8 (sequence is synthesized)
agaaggcctattcagacacccccagggacttccctgactccttccaggctggcagtcctggccatctgggggtgatccgggacttctccatcgaatctctgctaagggagaacctgtacc

SEQ ID NO: 663960 - DNA, 120 bp, Artificial Sequence
  ENSG00000184828_9 (sequence is synthesized)
ccaaggccaacatccccgacaggagaccctccttgtctccattcgccccggacttctttccacacctctggccaggggacttcggtgcctttgcccagctgcctgagcagcccatggaca

SEQ ID NO: 663961 - DNA, 120 bp, Artificial Sequence
  ENSG00000184828_10 (sequence is synthesized)
gtgggccactggatctggtcatcaagaatcggaagatcaaggaggaggagaaggaggagctgcccccacccccaccgccacccttccctaatgacttcttcaaggacatgttccctgacc

SEQ ID NO: 663962 - DNA, 120 bp, Artificial Sequence
  ENSG00000184828_11 (sequence is synthesized)
tgccgggggggcctctgggacccatcaaggcggagaacgactacggtgcctatctcaacttcctgagtgccacccacctgggaggcctcttcccaccctggcccctggtagaagagcgca

SEQ ID NO: 663963 - DNA, 120 bp, Artificial Sequence
  ENSG00000184828_12 (sequence is synthesized)
agctgaagcccaaggcctctcagcagtgccccatctgccacaaagtcatcatgggggccgggaagctgccgcggcacatgaggacccataccggggagaagccatacatgtgcaccatct

SEQ ID NO: 663964 - DNA, 120 bp, Artificial Sequence
  ENSG00000184828_13 (sequence is synthesized)
gcgaggtccgcttcaccaggcaggacaagctgaaaatccacatgcggaagcacacaggggagcggccctacctgtgcatccactgcaacgccaagttcgtgcacaactacgacctcaaga

SEQ ID NO: 663965 - DNA, 120 bp, Artificial Sequence
  ENSG00000184828_14 (sequence is synthesized)
accacatgcgcatccacacgggcgtgcggccctaccagtgcgagttctgctacaagagcttcacgcgctctgaccacctgcaccgccacatcaagcgccagagctgccgcatggcacggc

SEQ ID NO: 663966 - DNA, 80 bp, Artificial Sequence
  ENSG00000184828_15 (sequence is synthesized)
cccgacgcggccgcaagcctgctgcgtggagggccgccagcctgctcttcgggcccggcggcccggcccccgacaaggcg

SEQ ID NO: 663967 - DNA, 120 bp, Artificial Sequence
  ENSG00000184828_16 (sequence is synthesized)
acctgggcggcgcagctgtgtgcctcccgggccccagccccgccaagcacttcctggcagcgcccaagggcgccctgagcctgcaagagctggagcggcagttcgaggagacacagatga

SEQ ID NO: 663968 - DNA, 120 bp, Artificial Sequence
  ENSG00000184828_17 (sequence is synthesized)
agctgttcgggcgcgcgcagctggaggctgagaggaacgcggggggcctcctggccttcgcgctggccgagaacgtggcggcggcgcggccctacttcccgctgcccgacccttgggccg

SEQ ID NO: 663969 - DNA, 120 bp, Artificial Sequence
  ENSG00000184828_18 (sequence is synthesized)
ccggcctggccggcctccctgggctcgccggcctcaaccacgtggcctccatgtccgaagccaacaactaggctggtccctgtcggctccagcccaccagccctccagtccttctccctc

SEQ ID NO: 663970 - DNA, 120 bp, Artificial Sequence
  ENSG00000184828_19 (sequence is synthesized)
caggcccactctaccctaccccatggatctgaacttttcattttaaaaacacaaagggaaaatgggaaaataataataatactatcagtgatggcattttcccgggctcctaaagcagct

SEQ ID NO: 663971 - DNA, 120 bp, Artificial Sequence
  ENSG00000184828_20 (sequence is synthesized)
gagacgggcatcttttcccaaaaggccaggagcccgggcctccctccctgtctctctggctctcatatagaaacttgcaccggcccatgccacaaagaactgggtgcccaggggcactta

SEQ ID NO: 663972 - DNA, 120 bp, Artificial Sequence
  ENSG00000184828_21 (sequence is synthesized)
ggagctgggtgagtcatgaggggtcagggggtggttggcctggtgcccagccagccacagcaggaggaggtaggggctgggcatgcaccttggttaagccccaccccctatggcaaagtc

SEQ ID NO: 663973 - DNA, 120 bp, Artificial Sequence
  ENSG00000184828_22 (sequence is synthesized)
tctgccaacactcctctgagggctcattttccagtctccagtggccccggggtctttttgagaactacccacctgccacatagaaagaaatgctctgttggcagggaggcctcctggaac

SEQ ID NO: 663974 - DNA, 120 bp, Artificial Sequence
  ENSG00000184828_23 (sequence is synthesized)
cagtcaggaaccaggctctggaaggcccgggccatttcttccctgacctgtcctgtgaccttgacaggtcagccctctgtagctcagtgtcacctggctatggaaggggctggtaactga

SEQ ID NO: 663975 - DNA, 120 bp, Artificial Sequence
  ENSG00000184828_24 (sequence is synthesized)
ggtttccgccctccacctctaaacacatacacacctatccccccagagaatcacagagatggtagaagctttgtactccccaagtccatggggaaacagtttatctttctggacttagtt

SEQ ID NO: 663976 - DNA, 120 bp, Artificial Sequence
  ENSG00000184828_25 (sequence is synthesized)
ttatcacatccagctctatattagcatattagcataggtgagaaatatggccagactagacagagatcaggtcatcaggggagcttccgagcttcagcaaagcccacaggtagctctgcg

SEQ ID NO: 663977 - DNA, 120 bp, Artificial Sequence
  ENSG00000184828_26 (sequence is synthesized)
aactcagaatgctaccctaccttccctgcaggccgctgttcatgtctggactcctgggggcgctatttaatgtttacccccatctccagtgccccctccaaggctgtgcagtgtcttggg

SEQ ID NO: 663978 - DNA, 120 bp, Artificial Sequence
  ENSG00000184828_27 (sequence is synthesized)
gctctcagggccaacatcgaagagatgggggccacctcttaacacctggcaacagtctcccctcatcctgattcctgacaacagacaaaacaccggtttctagggtttatctgtttgttt

SEQ ID NO: 663979 - DNA, 120 bp, Artificial Sequence
  ENSG00000184828_28 (sequence is synthesized)
tttgagttgagggttcctcagggccttggcattgctagtgatggtcccctttgctgtgtgagaaccccctcaaccccttcctcctccctctggggatgaagtgggagtatttggctcccc

SEQ ID NO: 663980 - DNA, 120 bp, Artificial Sequence
  ENSG00000184828_29 (sequence is synthesized)
atttttgacaaaagggctcagtgcagggaggtggaggcctctgaggtttgaagggctctgtgagttagagttgtcacatgttctcctggttcttgaatttgcagcaggtcctgaaaagga

SEQ ID NO: 663981 - DNA, 120 bp, Artificial Sequence
  ENSG00000184828_30 (sequence is synthesized)
aggctctgctggccccgtgccttcctgaccttctctctccttccctcccctctcttttcttgccaagtttgctttggtttctgagcagcccagagaggaggagggttcgtccccagggag

SEQ ID NO: 663982 - DNA, 120 bp, Artificial Sequence
  ENSG00000184828_31 (sequence is synthesized)
agcccagggctggagtccccaatccctgtgctatgggcacaaagagacttcagctcttcctgttgccttggctttttcctgagcaaaaacacaacaaacaaaaaggccagagaagagcac

SEQ ID NO: 663983 - DNA, 120 bp, Artificial Sequence
  ENSG00000184828_32 (sequence is synthesized)
agactctgtccctctcacaactctccagaagagaccccctgattcttcacaccaccggatgccactccagccagcaggattgctacacacaccctctgttctcagaagtcatctgcctgg

SEQ ID NO: 663984 - DNA, 120 bp, Artificial Sequence
  ENSG00000184828_33 (sequence is synthesized)
gcagccgcctctcagattcctgtcttcgtttcagacacttttctctgaagcatgcccatgtccaccagccaacgtgcccccgtgttcccccccatcagccaagtgattggggctgaacca

SEQ ID NO: 663985 - DNA, 120 bp, Artificial Sequence
  ENSG00000184828_34 (sequence is synthesized)
gactttaaaagagaggaaaaaaaaaaaaaaaggaaacatgaataaattggaatccagtggtgttggggcttttgtttttattttgtaaaggtgatgacttcttataaactcaatttttca

SEQ ID NO: 663986 - DNA, 120 bp, Artificial Sequence
  ENSG00000184828_35 (sequence is synthesized)
gatgactggttagttctttctgttttttcttggctgcagtttggaattgtacattgtaaaatatccaaagatgttgagtactgtatgatcaagaacttgaagcaaatgggttgtgggggg

SEQ ID NO: 663987 - DNA, 120 bp, Artificial Sequence
  ENSG00000184828_36 (sequence is synthesized)
aggggtggttgtgtttttgttttgcttcaatttttttttttttttgatgtttcaatttccctgtctgtctgtgggagaactttggaattttttctatttataactctttttttatgtgat

SEQ ID NO: 663988 - DNA, 120 bp, Artificial Sequence
  ENSG00000184828_37 (sequence is synthesized)
tgctctacgtaaaatgacactcaacaaagtttgccttagtgattcaagggacaatcttccataacttcggtcgcacgccacatcccgccgagaaaaactctcagctaattttctggccta

SEQ ID NO: 663989 - DNA, 120 bp, Artificial Sequence
  ENSG00000184828_38 (sequence is synthesized)
tttattaaacagtattaattgacttgattaaattatattgagagttgcacttctgtgagatgtgacttctgaaagttcacaggacagcaacaagccagtcttaaggtttttaattgttgg

SEQ ID NO: 663990 - DNA, 120 bp, Artificial Sequence
  ENSG00000184828_39 (sequence is synthesized)
gtgtcataaacttaaaataatgtcaaagacaccttaacaaagaaaaaaaaaaaaacctttgacccttattttatactttaaaggacagtgttttgagtaaaagtgagctatgcttgctta

SEQ ID NO: 663991 - DNA, 120 bp, Artificial Sequence
  ENSG00000184828_40 (sequence is synthesized)
gcacaacaggaacagagggaaaggctttgtcttcaaaggtgtcccagcagttacaacaaggactagagcaggtgctgatgaggccgcagtttgggagtctgatccctaacaaggccaggt

SEQ ID NO: 663992 - DNA, 120 bp, Artificial Sequence
  ENSG00000184828_41 (sequence is synthesized)
cccctctctctgcccaagtttgctctctgaatacagaggaggacttgggccatagagtatgggcagctccgcagggcgattcttgctcatcactggacactcattgtctctgaaggacgg

SEQ ID NO: 663993 - DNA, 120 bp, Artificial Sequence
  ENSG00000184828_42 (sequence is synthesized)
gctacgtcggagtgttgtcttagattcgaatgcatgaggaactggaataatcagtaacatttctcccagacagagctgctctaagctgtgggccaacaggaggctgggagctctcctcta

SEQ ID NO: 663994 - DNA, 120 bp, Artificial Sequence
  ENSG00000184828_43 (sequence is synthesized)
aattgctttgtgaccttggacaagaaccctccccttcctggactgcaaatttcctcctctgtaaaatgaagggttgatgcaacaactgaggcatagagaagtcacttgcccaaggtcacc

SEQ ID NO: 663995 - DNA, 120 bp, Artificial Sequence
  ENSG00000184828_44 (sequence is synthesized)
atacccgccggcgcagccccgccacgagactctgacagcggcgcggccggcgaggctcgggcgcgcagggaccggcggacaccggcggcgaaggaggacgccaggactgcgtcccggagc

SEQ ID NO: 663996 - DNA, 120 bp, Artificial Sequence
  ENSG00000184828_45 (sequence is synthesized)
caagtgcgggaggcgcgcagggccggcggcgcgcggagatcccctctgagcagctgggagctcagaagctctgtccaaccctgaggagtgggtcagccacaagagcaagaagtgatggcg

SEQ ID NO: 663997 - DNA, 120 bp, Artificial Sequence
  ENSG00000184828_46 (sequence is synthesized)
tggagtccacccagggcctgaggcatgagcagaatccacgcccattagacctggagcctgggcgtttggggctgcactgctggggagatccaagaagaatcaatgctttggcccctggtg

SEQ ID NO: 663998 - DNA, 120 bp, Artificial Sequence
  ENSG00000184828_47 (sequence is synthesized)
gtgctgtcttggccaagttcagaaacatgtaggacattatggagaagtgttaaagccagggctctggctgagaacatggccaatgacattgatgagctcattggcattcccttccccaac

SEQ ID NO: 663999 - DNA, 120 bp, Artificial Sequence
  ENSG00000184828_48 (sequence is synthesized)
cacacagaaatgaagcaacctgaaggcagctccatggggccgctgtccctgttgttgatgtttctggaatatgggtctaggatcagaagcaaaagaggaagtccattcttttgcactgca

SEQ ID NO: 664000 - DNA, 120 bp, Artificial Sequence
  ENSG00000184828_49 (sequence is synthesized)
tccagaagctgcccagaaaggatgcagcaccccctgcaacctgcaatttggcaccttggaatcttttaataaataaccaaggagacaaatcccctctgagcagctgggagctcagaagct

SEQ ID NO: 664001 - DNA, 120 bp, Artificial Sequence
  ENSG00000184828_50 (sequence is synthesized)
tttgcagaaaaactggtgtcctgaaatttaaaactaaggcatcggtgcttagaaagggtctcgttctgttgcccaggtgagcctggagtgcagtagtacagtcacagctcactgcagcct

SEQ ID NO: 664002 - DNA, 120 bp, Artificial Sequence
  ENSG00000184828_51 (sequence is synthesized)
aactggtgtcctgaaatttaaaactaaggcatcggtgcttgcctgtttctttgacagcccagacttagagcaatgtgtccctcctttgagctcctgaagggccagctgaagactctgtca

SEQ ID NO: 664003 - DNA, 120 bp, Artificial Sequence
  ENSG00000184828_52 (sequence is synthesized)
agcagcaggcattggctctgttttggaggagctttcagtccagttcaggaagagaagacacctgcatatgagacaaagaactttatgaccagacagagctgctctaagctgtgggccaac

SEQ ID NO: 664004 - DNA, 120 bp, Artificial Sequence
  ENSG00000184828_53 (sequence is synthesized)
aggaggacgccaggactgcgtcccggagccaagtgcgggaggcgcgcagggccggcggcgcgcggaggaaatgagcagatttgcagaaaaactggtgtcctgaaatttaaaactaaggca

SEQ ID NO: 664005 - DNA, 120 bp, Artificial Sequence
  ENSG00000184828_54 (sequence is synthesized)
tgagcagatttgcagaaaaactggtgtcctgaaatttaaaactaaggcatcggtgcttgcatggcataggtgacatgaaagcttctgtctccagacccttgtcttcaagaggagtgctgg

SEQ ID NO: 664006 - DNA, 120 bp, Artificial Sequence
  ENSG00000184828_55 (sequence is synthesized)
cctgtcaatgagcgtgcctgattaccgtgggctctggctgagaacatggccaatgacattgatgagctcattggcattcccttccccaaccacagcagtgaggtcctgtgcagcctcaat

SEQ ID NO: 664007 - DNA, 120 bp, Artificial Sequence
  ENSG00000184828_56 (sequence is synthesized)
aggaggacgccaggactgcgtcccggagccaagtgcgggaggcgcgcagggccggcggcgcgcggagtctcacttcgcgctgtcttttcttgaaaattggaaaatgagctggaaaggctg

SEQ ID NO: 664008 - DNA, 120 bp, Artificial Sequence
  ENSG00000184828_57 (sequence is synthesized)
ggatccagcacctctcgatgagatctgagcagagtacagtccttgcccgaggtgtcgctcatgcaggactcaaagatccttgctgctgtcaagtcgggaagctgggggaaatgggcgcac

SEQ ID NO: 664009 - DNA, 120 bp, Artificial Sequence
  ENSG00000184828_58 (sequence is synthesized)
gcctggcccggtgcctgtcgccgcgcggggtagtgcgaggtctgttcccagcgacacgcacgggaactgcgtgcgtcttctctcaaggaaatgagcagatttgcagaaaaactggtgtcc

SEQ ID NO: 664010 - DNA, 120 bp, Artificial Sequence
  ENSG00000184828_59 (sequence is synthesized)
tccagaagctgcccagaaaggatgcagcaccccctgcaacctgcaatttggcaccttggaatcttttaataaataaccaaggagacaagaaatggcctctccaaaatgtccacactcaaa

SEQ ID NO: 664011 - DNA, 120 bp, Artificial Sequence
  ENSG00000184828_60 (sequence is synthesized)
tccccagaacctctcctctgatggtctgttagccccgctctggggaaaccagccattgagacagaaggaagcagcgcccagtgacactctgcttacccagagaccagcctgcaagcaacc

SEQ ID NO: 664012 - DNA, 120 bp, Artificial Sequence
  ENSG00000184828_61 (sequence is synthesized)
gtggataaactttcccaaaaccacacagctaaaaacatgtttcaacccctgggttgagtccaaagccagtagtgctttgtaacgcagtctcccagttcttctggctaatagaaatgagca

SEQ ID NO: 664013 - DNA, 120 bp, Artificial Sequence
  ENSG00000184828_62 (sequence is synthesized)
ggcatggcataggtgacatgaaagcttctgtctccagacccttgtcttcaagaggagtgctggcctgtcaatgagcgtgcctgattaccgtggtaatcaccagcgaatggtgtgatttta

SEQ ID NO: 664014 - DNA, 120 bp, Artificial Sequence
  ENSG00000184828_63 (sequence is synthesized)
taatacatttccatctgaaatatgaacagggctctggctgagaacatggccaatgacattgatgagctcattggcattcccttccccaaccacagcagtgaggtcctgtgcagcctcaat

SEQ ID NO: 664015 - DNA, 120 bp, Artificial Sequence
  ENSG00000184828_64 (sequence is synthesized)
tttgcttgtttgcttgttgcaagcgccccggggagacactgtgaagcttggcctcctgcccctgtgtctgtctgttgagtcgcaggaagctggcggccctccttcaggagtgggacatgg

SEQ ID NO: 664016 - DNA, 120 bp, Artificial Sequence
  ENSG00000184828_65 (sequence is synthesized)
gaaggaggctgcagatcgacctgggaaagggctctggctgagaacatggccaatgacattgatgagctcattggcattcccttccccaaccacagcagtgaggtcctgtgcagcctcaat

SEQ ID NO: 664017 - DNA, 120 bp, Artificial Sequence
  ENSG00000184828_66 (sequence is synthesized)
tccagaagctgcccagaaaggatgcagaagaggtggccttctccagaaagattttaaagtgggctctatttgtgtgttcgtaaacatcctctgatggcttctaggaactggacactgaga

SEQ ID NO: 664018 - DNA, 120 bp, Artificial Sequence
  ENSG00000184828_67 (sequence is synthesized)
tcctacctgcaattgctgtgtgtgtgtgtatgtgtacacacacagaacatgaagaactacatccagaagctgcccagaaaggatgcagatcccctctgagcagctgggagctcagaagct

SEQ ID NO: 664019 - DNA, 120 bp, Artificial Sequence
  ENSG00000184831_0 (sequence is synthesized)
gtttgcgttcacccgctgcccgggcgcgacgcgctgcggctcagcgacgcggcttctagaaccgggtgattgaactaaaccttcgccgcaccgagtttgcagtacggccgtcacccgcac

SEQ ID NO: 664020 - DNA, 120 bp, Artificial Sequence
  ENSG00000184831_1 (sequence is synthesized)
cgctgcctgcttgcggttggagaaatcaaggccctaccgggcctccgtagtcacctctctatagtgggcgtggccgaggccggggtgaccctgccggagcctccgctgccagcgacatgt

SEQ ID NO: 664021 - DNA, 120 bp, Artificial Sequence
  ENSG00000184831_2 (sequence is synthesized)
tcaaggtaattcagaggtccgtggggccagccagcctgagcttgctcaccttcaaagtctatgcagcaccaaaaaaggactcacctcccaaaaattccgtgaaggttgatgagctttcac

SEQ ID NO: 664022 - DNA, 120 bp, Artificial Sequence
  ENSG00000184831_3 (sequence is synthesized)
tctactcagttcctgagggtcaatcgaagtatgtggaggaggcaaggagccagcttgaagaaagcatctcacagctccgacactattgcgagccatacacaacctggtgtcaggaaacgt

SEQ ID NO: 664023 - DNA, 120 bp, Artificial Sequence
  ENSG00000184831_4 (sequence is synthesized)
ggttagacagctatgactatctccaaaatgcacctcctggattttttccgagacttggtgttattggttttgctggccttattggactccttttggctagaggttcaaaaataaagaagc

SEQ ID NO: 664024 - DNA, 120 bp, Artificial Sequence
  ENSG00000184831_5 (sequence is synthesized)
tagtgtatccgcctggtttcatgggattagctgcctccctctattatccacaacaagccatcgtgtttgcccaggtcagtggggagagattatatgactggggtttacgaggatatatag

SEQ ID NO: 664025 - DNA, 120 bp, Artificial Sequence
  ENSG00000184831_6 (sequence is synthesized)
tcatagaagatttgtggaaggagaactttcaaaagccaggaaatgtgaagaattcacctggaactaagtagaaaactccatgctctgccatcttaatcagttataggtaaacattggaaa

SEQ ID NO: 664026 - DNA, 120 bp, Artificial Sequence
  ENSG00000184831_7 (sequence is synthesized)
ctccatagaataaatcagtatttctacagaaaaatggcatagaagtcagtattgaatgtattaaattggctttcttcttcaggaaaaactagaccagacctctgttatcttctgtgaaat

SEQ ID NO: 664027 - DNA, 120 bp, Artificial Sequence
  ENSG00000184831_8 (sequence is synthesized)
catcctacaagcaaactaacctggaatcccttcacctagagataatgtacaagccttagaactcctcattctcatgttgctatttatgtacctaattaaaacccaagttaaaaaaaaaaa

SEQ ID NO: 664028 - DNA, 120 bp, Artificial Sequence
  ENSG00000184831_9 (sequence is synthesized)
ggtgaataatgcatggagtaaatacctacaggaagccttcccataggtgtaaaacctttatttcaggaaataaaaggaagatatattgattttttaattagaatcaactgtttggctgaa

SEQ ID NO: 664029 - DNA, 120 bp, Artificial Sequence
  ENSG00000184831_10 (sequence is synthesized)
cactctacagtagggccctcagagagccctagtaacttcttcaatttactgacagatggatcactttgcagtaaaataatatttaatgccaggaaatgtgaagaattcacctggaactaa

SEQ ID NO: 664030 - DNA, 120 bp, Artificial Sequence
  ENSG00000184831_11 (sequence is synthesized)
agcttcgtggcttcacacatgctgattcctctgtctataatgtcctatacttgttttgtctttctgtagaactgcctaagagccgggagaattcatgcttttgaaacaaggggaatttcc

SEQ ID NO: 664031 - DNA, 120 bp, Artificial Sequence
  ENSG00000184831_12 (sequence is synthesized)
cttgtccctcttacagggcatgtgatgggagtgtggcccacttcttaggtgccccactgctcaaaacccctagggaaagcaggcagatgggcaggtcgtggggagtgtgggctccaaccc

SEQ ID NO: 664032 - DNA, 120 bp, Artificial Sequence
  ENSG00000184831_13 (sequence is synthesized)
catggcagcgtctaggggtggatgtttacagcttctgcagccccagtgggcgtgtgttacgtgtgctcttttagttttgctgtcagtaggcagcttgtgttcatcagctcagttagaccc

SEQ ID NO: 664033 - DNA, 120 bp, Artificial Sequence
  ENSG00000184831_14 (sequence is synthesized)
tctgccttattgcaaggacagagggctttctgtatcctagggttcttgcctgagtataccagaaaaaccggatcacacgtgggcttggaggatgagtgcaaggttttattgaatggtgga

SEQ ID NO: 664034 - DNA, 120 bp, Artificial Sequence
  ENSG00000184831_15 (sequence is synthesized)
agctgaaatgacttgtttttaattaatttaatttaattaattataacagtttcaatttgatgtgaaaatattttattccatcttttagtttctgggcttaaatgctgtgacttacttatt

SEQ ID NO: 664035 - DNA, 120 bp, Artificial Sequence
  ENSG00000184831_16 (sequence is synthesized)
tgtgtttgttccactaatgttacctgggttttttagacaagctagaaccagacagttgggatttgtctacaaatgtatttcaaacaattgaaaagtgtcattattccttaggtttttttc

SEQ ID NO: 664036 - DNA, 120 bp, Artificial Sequence
  ENSG00000184831_17 (sequence is synthesized)
tggactccttttggctagaggttcaaaaataaagaagctagtgtatccgcctggtttcatgggattagctgcctccctctattatccacaacaagccatcgtgtttgcccagccaggaaa

SEQ ID NO: 664037 - DNA, 120 bp, Artificial Sequence
  ENSG00000184838_0 (sequence is synthesized)
agttgatggcagcaccactgtgcggccgcccggccgagcgcggagcgcagccactcgccgctgcccagggagcgcccaagatgtggggggaccggggcggcagcggccgtagcagcgcca

SEQ ID NO: 664038 - DNA, 120 bp, Artificial Sequence
  ENSG00000184838_1 (sequence is synthesized)
gggacgggggcacgcagcagcctccgctcgcccgcctgtcctgacctgcctcgcttgcccccaaagaatgtcagccaagtccaaggggaacccctcctcgtcctgtccagccgagggacc

SEQ ID NO: 664039 - DNA, 120 bp, Artificial Sequence
  ENSG00000184838_2 (sequence is synthesized)
gccggcagcctccaaaaccaaggtgaaggaacagatcaagatcatcgtggaggatttggaattagtcctgggcgacctgaaggacgtggccaaggaacttaaggaggtggttgaccagat

SEQ ID NO: 664040 - DNA, 120 bp, Artificial Sequence
  ENSG00000184838_3 (sequence is synthesized)
tgacaccctgacctctgacctacagctggaggatgagatgactgacagctccaaaacggacacgctgaatagtagctcaagtggcacaacagcctccagcctagagaagatcaaagtgca

SEQ ID NO: 664041 - DNA, 120 bp, Artificial Sequence
  ENSG00000184838_4 (sequence is synthesized)
ggctaatgcaccgcttattaaacccccagcacacccgtctgctatcctcacggtcctgagaaagccaaaccctccaccacctcctccaaggttgacacctgtgaagtgtgaagaccccaa

SEQ ID NO: 664042 - DNA, 120 bp, Artificial Sequence
  ENSG00000184838_5 (sequence is synthesized)
aagggtggttccaactgccaatcctgtaaaaaccaatggcacccttctacgaaatggaggcttaccaggtggacctaacaaaattccaaatggagatatctgctgcatacccaacagtaa

SEQ ID NO: 664043 - DNA, 120 bp, Artificial Sequence
  ENSG00000184838_6 (sequence is synthesized)
cttggacaaggctccagtccagcttctgatgcatagacctgaaaaagacagatgtccccaggcagggcctcgagaacgagttcggtttaatgaaaaagtacagtaccatggctattgtcc

SEQ ID NO: 664044 - DNA, 120 bp, Artificial Sequence
  ENSG00000184838_7 (sequence is synthesized)
aaacagggaggtccacttacacagtgaacctgtccacccaccgggaaagattcctcaccaaggccctcccctccctcctacaccccatctccctcctttcccactagaaaatgggggaat

SEQ ID NO: 664045 - DNA, 120 bp, Artificial Sequence
  ENSG00000184838_8 (sequence is synthesized)
gggaataagccacagtaacagcttcccccctatcagacctgcaactgtgcctcctcccactgcaccaaaaccacagaagacgatcttgaggaagtcaaccactacaaccgtgtgatgtat

SEQ ID NO: 664046 - DNA, 120 bp, Artificial Sequence
  ENSG00000184838_9 (sequence is synthesized)
gccattaaaaaaattgtttttttaattttctatattataaacataaaataagtaatgagcactttctactcaagcaataaaaagcccaaatatattaatcctgcattcagcaaagtggca

SEQ ID NO: 664047 - DNA, 120 bp, Artificial Sequence
  ENSG00000184838_10 (sequence is synthesized)
taaaaatcacctggtaagtatgcagcacattgcttatatcctgggtatgcattattttaaatgttgtatcattaaaaacctcagaatgatgaaaaatatgaatgatgcattgtttttgca

SEQ ID NO: 664048 - DNA, 120 bp, Artificial Sequence
  ENSG00000184838_11 (sequence is synthesized)
attgacctatgacaaactgtgaacctgcagatttcacctattttgatttactataagagctgggatttgattcattttatttatgcctaagtcatctatgcattaacatgtcatattctt

SEQ ID NO: 664049 - DNA, 120 bp, Artificial Sequence
  ENSG00000184838_12 (sequence is synthesized)
aactttgatctaatgctttttactaggaaattttaatactgaaggactattttattatttttttctaaagatgtttgtcactagtttttcattattaaatgctgaggccaataccaagaa

SEQ ID NO: 664050 - DNA, 120 bp, Artificial Sequence
  ENSG00000184838_13 (sequence is synthesized)
accaagaagtttattttctatattatacaattatgaattacatgctcagctatatatgtaataaaatactttggtctgtggaaatattgttaaatcaataaacaatagtaaataatgaca

SEQ ID NO: 664051 - DNA, 120 bp, Artificial Sequence
  ENSG00000184838_14 (sequence is synthesized)
ggaaacagtgctgcaggcatacagtgacaacaggacatcaggaaatgcccaagaagtttgttaggtgctgtgtcatgaatcaagtcttcattttaatgtgttctaattgttgtaaaacaa

SEQ ID NO: 664052 - DNA, 120 bp, Artificial Sequence
  ENSG00000184838_15 (sequence is synthesized)
agcatgtctggtatccagcttttaatccgtaatgccaggcactcccaaataaaaggaaccaatcaactgatgcatgcattctctagcaggtcattccagaagctccattacctactccca

SEQ ID NO: 664053 - DNA, 120 bp, Artificial Sequence
  ENSG00000184840_0 (sequence is synthesized)
aggtggagcaagatggctgtggagctgggcgtgctgctcgtccggccccggcccggaaccgggctgggtagagtgatgcggaccctcctgctggtgctgtggctggcgacgcgcggaagc

SEQ ID NO: 664054 - DNA, 120 bp, Artificial Sequence
  ENSG00000184840_1 (sequence is synthesized)
gcgctctactttcacatcggagagacggagaagaagtgctttattgaggagatcccggacgagaccatggtcataggaaactaccggacgcagctgtatgacaagcagcgggaggagtac

SEQ ID NO: 664055 - DNA, 120 bp, Artificial Sequence
  ENSG00000184840_2 (sequence is synthesized)
cagccggccaccccggggcttggcatgtttgtggaggtgaaggacccagaggacaaggtcatcctggcccggcagtatggctccgagggcaggttcactttcacttcccatacccctggt

SEQ ID NO: 664056 - DNA, 120 bp, Artificial Sequence
  ENSG00000184840_3 (sequence is synthesized)
gagcaccagatctgtcttcactccaattccaccaagttctccctctttgctggaggcatgctgagagttcacctggacatccaggtaggtgaacatgccaatgactatgcagaaattgct

SEQ ID NO: 664057 - DNA, 120 bp, Artificial Sequence
  ENSG00000184840_4 (sequence is synthesized)
gctaaagacaagttgagtgagttgcagctacgagtgcgacagctggtggaacaagtggagcagatccagaaagagcagaactaccagcggtggcgagaggagcgcttccggcagaccagt

SEQ ID NO: 664058 - DNA, 120 bp, Artificial Sequence
  ENSG00000184840_5 (sequence is synthesized)
gagagcaccaaccagcgggtgctgtggtggtccattctgcagaccctcatcctcgtggccatcggtgtctggcagatgcggcacctcaagagcttctttgaagccaagaagcttgtgtag

SEQ ID NO: 664059 - DNA, 120 bp, Artificial Sequence
  ENSG00000184840_6 (sequence is synthesized)
ctgtcccaggcgtcacaacccatcctcccaggctgggggagaaaggacctcctggaactgacttcttctgtcaggaggactggtttccagccatacctgttctggaagggagaggggctg

SEQ ID NO: 664060 - DNA, 120 bp, Artificial Sequence
  ENSG00000184840_7 (sequence is synthesized)
gaggcacccacaggcacaagctgaaggcagcagcttggctaatactgagcaggtagtggggcaaattcctgccctctctctctggcctctgggccgtttggtagtaatcacccaagggct

SEQ ID NO: 664061 - DNA, 120 bp, Artificial Sequence
  ENSG00000184840_8 (sequence is synthesized)
ggtaaagcccctcctcttggcacctcagaatcacagtgttactgatcagggatgtgaggctgctgttgggggtggggggaggggaatgggcaggcaagccagtcttctgtcttcctttgc

SEQ ID NO: 664062 - DNA, 120 bp, Artificial Sequence
  ENSG00000184840_9 (sequence is synthesized)
taacttagggttttgagcaggttggggtatggtgcctgtcatacccacctgccaccctgggaacctcactgttctctctttcagcctagacctgctgatccagggtgtgtgtgagttgag

SEQ ID NO: 664063 - DNA, 120 bp, Artificial Sequence
  ENSG00000184840_10 (sequence is synthesized)
gaatgtggccctgcagttgacctgagctgcttcacatggttgtccattctggggcttaaagaactgggaccagaccaagtagaggccttggtgctggttggggtggggcctgcagagtct

SEQ ID NO: 664064 - DNA, 120 bp, Artificial Sequence
  ENSG00000184840_11 (sequence is synthesized)
tagttactgatttcattttcaataaatgtaggtttgttacatgagtttcccaataaaaaaaaaaatgacttcttgtccagtgcaagtgactcagtcatcagtgggcacacactgcagggt

SEQ ID NO: 664065 - DNA, 120 bp, Artificial Sequence
  ENSG00000184840_12 (sequence is synthesized)
gcctcagggaatgccagttcttccaaagagcaaagcacttcacattccaaagtgaattcccaccagtcagcttcattctttccttcttctccaggccttcctgtggcagggaatagtggg

SEQ ID NO: 664066 - DNA, 120 bp, Artificial Sequence
  ENSG00000184840_13 (sequence is synthesized)
tttgtccaagattatacaacaagtaaattgggctggggctcaaatttacaccctttcctctgtgccagctccctggtgaagttccctctttctagagtcagtaagcaggattgtcatgga

SEQ ID NO: 664067 - DNA, 120 bp, Artificial Sequence
  ENSG00000184840_14 (sequence is synthesized)
tgctgccaggaagtgcctggtaaggaggtgcattgagcaggggagtgctacaggacagccaccctgggctggcagggacaaggatgttgatgggctaaaccaacagcaagtgatttcaac

SEQ ID NO: 664068 - DNA, 120 bp, Artificial Sequence
  ENSG00000184840_15 (sequence is synthesized)
caggaccatgaaggagaggaaggattctgctggaaggagatggcaggacaggggtggttggagaagtggaggcaaacagctggaatggaggtgggtgggtgtttaatttcagctgcagag

SEQ ID NO: 664069 - DNA, 120 bp, Artificial Sequence
  ENSG00000184840_16 (sequence is synthesized)
ggtgttgtgaggaagctggaaaggaaggttggattagagaagcctcgagctccaggtaagcgatttggacatgcccacctttcaagaggggctgcaggcacccacaggcacaagctgaag

SEQ ID NO: 664070 - DNA, 120 bp, Artificial Sequence
  ENSG00000184840_17 (sequence is synthesized)
gcagcagcttggctggcttaatactgagcaggtggtggggtaaatgcctgcccccctccctctggcctctgggccctttgcagtaatcacccagggtctggtaaagccactgagagccct

SEQ ID NO: 664071 - DNA, 120 bp, Artificial Sequence
  ENSG00000184840_18 (sequence is synthesized)
actggcacctcagaatcacagtgttattgatcagggatgtgaggctgctgttgggggttgggggaggcaaatgggcaggcagttttgagaagaaccttctaataagaaatgtgagggagg

SEQ ID NO: 664072 - DNA, 120 bp, Artificial Sequence
  ENSG00000184840_19 (sequence is synthesized)
ttacagcagtgtgtgagaaagaccaggaagaaggagacaagtttgggggctgcttcccctaatgggatgatgcaatctgggctcatgctgccaactaattcttccacatgaaaaaaaaaa

SEQ ID NO: 664073 - DNA, 61 bp, Artificial Sequence
  ENSG00000184840_20 (sequence is synthesized)
gctcatgctgccaactaattcttccacatgaaaaaaaaaagttttttgggcctgaggccag

SEQ ID NO: 664074 - DNA, 120 bp, Artificial Sequence
  ENSG00000184840_21 (sequence is synthesized)
aggagacggcctcgccgtgcccaggcggtcgcggaacccatgccacctcgcgctcctctgacctgggctcgccctgcttccctcaaggaaactaccggacgcagctgtatgacaagcagc

SEQ ID NO: 664075 - DNA, 120 bp, Artificial Sequence
  ENSG00000184840_22 (sequence is synthesized)
aggtcatcctggcccggcagtatggctccgagggcaggttcactttcacttcccatacccctgagagttcacctggacatccaggtaggtgaacatgccaatgactatgcagaaattgct

SEQ ID NO: 664076 - DNA, 120 bp, Artificial Sequence
  ENSG00000184840_23 (sequence is synthesized)
gggcccatgtgagacttgcaggtttcagccttcatcctttggtgaggactgggggactggtggtgctgtgggtgtgagaggattatgtcagattttgtgtctcctaagaacactgggttt

SEQ ID NO: 664077 - DNA, 120 bp, Artificial Sequence
  ENSG00000184840_24 (sequence is synthesized)
cagcccaggcttaatacttgcttgtgtgcccagagcctcatggggctaagacactgaagagggcccagtctgttggctaaatgaacagatgaaggaaagtcggggatgagctgtcagtct

SEQ ID NO: 664078 - DNA, 81 bp, Artificial Sequence
  ENSG00000184840_25 (sequence is synthesized)
aggctaaggcacgataattgcttgaacctgggaagctgaggctgcagtgagctgagatagcatcactgcactccagccagg

SEQ ID NO: 664079 - DNA, 120 bp, Artificial Sequence
  ENSG00000184840_26 (sequence is synthesized)
aagaaccccccaaaaaacaactcacaccaaaaaagttgaaagggcataagctataaaggaaagcccttcccaagagcagtcagtcacttgccaccctaatgtcagactctcagagtctaa

SEQ ID NO: 664080 - DNA, 120 bp, Artificial Sequence
  ENSG00000184840_27 (sequence is synthesized)
acacctgccccagagagttctcacacaagcatatggcaacagctgctgagcagctttgaatctttcagtgttgtgaggtgcgaaaggctgtgcctgtcaacttttgcagtacttagagcc

SEQ ID NO: 664081 - DNA, 120 bp, Artificial Sequence
  ENSG00000184845_0 (sequence is synthesized)
gtgcgcttgctggtgccagctcggctcgctgcctcgcattgccacaggctcctgagaggtcgcgggcagtgcctgcggggaggcgcggggccctgctctgtagggctgaaggccgcccga

SEQ ID NO: 664082 - DNA, 120 bp, Artificial Sequence
  ENSG00000184845_1 (sequence is synthesized)
ggttcgccaaggctctgggctctcgaaaggaagccaagaaaagaagctgcccaggtgaccagtcctgggagtgctctctcccaaggaagctccgagcgcccaggagcccttagccggggt

SEQ ID NO: 664083 - DNA, 120 bp, Artificial Sequence
  ENSG00000184845_2 (sequence is synthesized)
ctagtgccctttgaacaatctccagctcttcaaggaagtgggctgccgccgcctctcttgggacctggcctgggatcctttccccaaacgcaccccggcgatttttgcgcaccgggagcc

SEQ ID NO: 664084 - DNA, 120 bp, Artificial Sequence
  ENSG00000184845_3 (sequence is synthesized)
gaacccctgctgcgcgcagctggctgggctcaggcgcgcttcctcaacgtttcggagccgctgcccccagcgaagtccacattccaagctccaggggctttgagagagacgaccccaagg

SEQ ID NO: 664085 - DNA, 120 bp, Artificial Sequence
  ENSG00000184845_4 (sequence is synthesized)
caaggcgtttggagagctgctgaggagccaggggcttggaggagcgagaagacatgtattttcagctgagtctcagaaggggagaatctcctgtcaccaccagaaaagcaacagccccga

SEQ ID NO: 664086 - DNA, 120 bp, Artificial Sequence
  ENSG00000184845_5 (sequence is synthesized)
aatgtgattgcaactgactagcagagcagaggcccaggagtcactggattgatgatttagaatatgctaaaaagccagtgctttatttggggaattcaggggctttctggtgcccaagac

SEQ ID NO: 664087 - DNA, 120 bp, Artificial Sequence
  ENSG00000184845_6 (sequence is synthesized)
agtgacctgcagcaagggagtcagaagacagatgtagaaatcaagagtgaccatccacgggattgacttggattgccactcaagcggtcctctcatggaatgttggtgaggccctctgcc

SEQ ID NO: 664088 - DNA, 120 bp, Artificial Sequence
  ENSG00000184845_7 (sequence is synthesized)
agggaagcaatctggctgtgcaaagtgctgcctggtggggaggactcctggaaatctgactgacccctattccctgcttgggaacttgaggggtgtcagagcccctgatgtgctttctct

SEQ ID NO: 664089 - DNA, 120 bp, Artificial Sequence
  ENSG00000184845_8 (sequence is synthesized)
taggaagatgaggactctgaacacctctgccatggacgggactgggctggtggtggagagggacttctctgttcgtatcctcactgcctgtttcctgtcgctgctcatcctgtccacgct

SEQ ID NO: 664090 - DNA, 120 bp, Artificial Sequence
  ENSG00000184845_9 (sequence is synthesized)
cctggggaacacgctggtctgtgctgccgttatcaggttccgacacctgcggtccaaggtgaccaacttctttgtcatctccttggctgtgtcagatctcttggtggccgtcctggtcat

SEQ ID NO: 664091 - DNA, 120 bp, Artificial Sequence
  ENSG00000184845_10 (sequence is synthesized)
gccctggaaggcagtggctgagattgctggcttctggccctttgggtccttctgtaacatctgggtggcctttgacatcatgtgctccactgcatccatcctcaacctctgtgtgatcag

SEQ ID NO: 664092 - DNA, 120 bp, Artificial Sequence
  ENSG00000184845_11 (sequence is synthesized)
cgtggacaggtattgggctatctccagccctttccggtatgagagaaagatgacccccaaggcagccttcatcctgatcagtgtggcatggaccttgtctgtactcatctccttcatccc

SEQ ID NO: 664093 - DNA, 120 bp, Artificial Sequence
  ENSG00000184845_12 (sequence is synthesized)
agtgcagctcagctggcacaaggcaaaacccacaagcccctctgatggaaatgccacttccctggctgagaccatagacaactgtgactccagcctcagcaggacatatgccatctcatc

SEQ ID NO: 664094 - DNA, 120 bp, Artificial Sequence
  ENSG00000184845_13 (sequence is synthesized)
ctctgtaataagcttttacatccctgtggccatcatgattgtcacctacaccaggatctacaggattgctcagaaacaaatacggcgcattgcggccttggagagggcagcagtccacgc

SEQ ID NO: 664095 - DNA, 120 bp, Artificial Sequence
  ENSG00000184845_14 (sequence is synthesized)
caagaattgccagaccaccacaggtaatggaaagcctgtcgaatgttctcaaccggaaagttcttttaagatgtccttcaaaagagaaactaaagtcctgaagactctgtcggtgatcat

SEQ ID NO: 664096 - DNA, 120 bp, Artificial Sequence
  ENSG00000184845_15 (sequence is synthesized)
gggtgtgtttgtgtgctgttggctacctttcttcatcttgaactgcattttgcccttctgtgggtctggggagacgcagcccttctgcattgattccaacacctttgacgtgtttgtgtg

SEQ ID NO: 664097 - DNA, 120 bp, Artificial Sequence
  ENSG00000184845_16 (sequence is synthesized)
caaccctcttaggatgctacagactttgccctgcgacgaataatgccatagagacggtgagtatcaataacaatggggccgcgatgttttccagccatcatgagccacgaggctccatct

SEQ ID NO: 664098 - DNA, 120 bp, Artificial Sequence
  ENSG00000184845_17 (sequence is synthesized)
ccaaggagtgcaatctggtttacctgatcccacatgctgtgggctcctctgaggacctgaaaaaggaggaggcagctggcatcgccagacccttggagaagctgtccccagccctatcag

SEQ ID NO: 664099 - DNA, 120 bp, Artificial Sequence
  ENSG00000184845_18 (sequence is synthesized)
tcatattggactatgacactgacgtctctctggagaagatccaacccatcacacaaaacggtcagcacccaacctgaactcgcagatgaatcctgccacacatgctcatcccaaaagcta

SEQ ID NO: 664100 - DNA, 120 bp, Artificial Sequence
  ENSG00000184845_19 (sequence is synthesized)
gaggagattgctctggggcttgctattaagaaactaaggtacggtgagactctgaggtgtcaggagagccctctgctgctttccaacacacaattaactccgtttccaaatacattccag

SEQ ID NO: 664101 - DNA, 120 bp, Artificial Sequence
  ENSG00000184845_20 (sequence is synthesized)
tgtattttctgtgttgttcatagtcaatcaaacagggacactacaaacatggggagccataagggacatgtctttggcttcagaattgtttttagaaatttattcttatcttaggattta

SEQ ID NO: 664102 - DNA, 120 bp, Artificial Sequence
  ENSG00000184845_21 (sequence is synthesized)
ccaaatagggcaaagaatcaacagtgaacagcttcacttaaaatcaaatttttctgggaagaaaatgagatgggttgagtttgctgtatacaaacaggtgctaacactgttcccagcaaa

SEQ ID NO: 664103 - DNA, 120 bp, Artificial Sequence
  ENSG00000184845_22 (sequence is synthesized)
gttttcagattgtaaaggtaggtgcatgccttcataaattatttctaaaacattaattgaggcttacagtaggagtgagaaatttttttccagaattgagagatgttttgttgatattgg

SEQ ID NO: 664104 - DNA, 120 bp, Artificial Sequence
  ENSG00000184845_23 (sequence is synthesized)
tttttaatttatgatataataaatatatatttatcatatttaataggataaattaatgagttttatccaagaccttacaaccacatttctggccatttaactagcactttataagccaat

SEQ ID NO: 664105 - DNA, 120 bp, Artificial Sequence
  ENSG00000184845_24 (sequence is synthesized)
ccatttaactagcactttataagccaatgaagcaaacacacagactctgtgagattctaaatgttcatgtgtaacttctagaaacacagcagaaactgatagataagggaataaagttga

SEQ ID NO: 664106 - DNA, 120 bp, Artificial Sequence
  ENSG00000184845_25 (sequence is synthesized)
aatgattccttaaaattcatggacacagataaatgcaaggtgagaattgacaaatgctataaatgctttctttttctgaaaagattttgaaaaatttaaaaaagtatagctactactgtg

SEQ ID NO: 664107 - DNA, 120 bp, Artificial Sequence
  ENSG00000184845_26 (sequence is synthesized)
ttcaaaacgttttaaatgacaaatgactttcccaggggaatttgcagttctgtaaatatcttaaataaaagccaacttaagaagagcccagcattaaatttacgatcttaggtggtaatg

SEQ ID NO: 664108 - DNA, 120 bp, Artificial Sequence
  ENSG00000184845_27 (sequence is synthesized)
aaaagtatatgctgctttgtatttatgtaaaataattggccctctccatcttttctcatttcatgtgtcaggtagtttttctgaaccacacaaatggctttcctggagagagatctgtag

SEQ ID NO: 664109 - DNA, 120 bp, Artificial Sequence
  ENSG00000184845_28 (sequence is synthesized)
cacagacagtgggttacagcagccccactgagggaccaaactcaaaccctgcatttccatcttaccaggtcaaaccaaaccagtcagtggggctactttttatagtgctttaatctgaat

SEQ ID NO: 664110 - DNA, 120 bp, Artificial Sequence
  ENSG00000184845_29 (sequence is synthesized)
ttagagctgatttttaaaggagtctttaaatgttaatggtatactaactaacgaatagtgcctcattatcattcttgagtcagatacttctgttgatgggagaaacagaagaatccttcc

SEQ ID NO: 664111 - DNA, 120 bp, Artificial Sequence
  ENSG00000184845_30 (sequence is synthesized)
ctttgggtgtgttgagctcccccaaagccatcagcatctcttttgacaaatgctagtcctttctctgtgctttggaatcaggttcctgcatcatcacccggactgtaaaaagtatcataa

SEQ ID NO: 664112 - DNA, 120 bp, Artificial Sequence
  ENSG00000184845_31 (sequence is synthesized)
gcctcccttgccagatgccaactcgtggggcatttcaacagagtttctttgaaatgtttacaacgtattcttcttgataagcaatgaacttaacatttagatgcaatccgtgaaaagaaa

SEQ ID NO: 664113 - DNA, 120 bp, Artificial Sequence
  ENSG00000184845_32 (sequence is synthesized)
aaaaaatctgaaaaatatctcctgcatcaggtctgtgttatttatgtattgtgaatgttttcttaattttattggctgtatgctttcttacacataataaaaatattttgtgaactcaaa

SEQ ID NO: 664114 - DNA, 120 bp, Artificial Sequence
  ENSG00000184857_0 (sequence is synthesized)
acttccggcagcaggtggtggggccatggctgcccttctccgagctgtgcgtaggtttcggggaaaagctgtgtgggaaaggcctctccatgggctgtggtgctgcagtgggcaggagga

SEQ ID NO: 664115 - DNA, 120 bp, Artificial Sequence
  ENSG00000184857_1 (sequence is synthesized)
tcctaagaggtgggtgggcagcagttcacccatctcgaaggagaaactaccaaacgcagagactgagaaattctggatgttttaccgttttgatgccatcagaaccttcgggttcctgtc

SEQ ID NO: 664116 - DNA, 120 bp, Artificial Sequence
  ENSG00000184857_2 (sequence is synthesized)
acgactgaagttggcacagactgccctgacagtggtagctttgccaccaggctattacttgtactcccagggcctcctcactctcaacaccgtgtgcctcatgagtgggatatcgggctt

SEQ ID NO: 664117 - DNA, 120 bp, Artificial Sequence
  ENSG00000184857_3 (sequence is synthesized)
tgccctgaccatgctgtgctggatgagctatttcttacggagactggttggtatcctgtatctgaatgagtctggcaccatgctgcgggtggcccatctgaacttctggggctggcggca

SEQ ID NO: 664118 - DNA, 120 bp, Artificial Sequence
  ENSG00000184857_4 (sequence is synthesized)
ggacacatactgtcccatggcagatgtgattcccctgacagaaaccaaggaccggcctcaggagatgtttgtgcgtatccagcggtacagtgggaaacagaccttctacgtcaccctgcg

SEQ ID NO: 664119 - DNA, 120 bp, Artificial Sequence
  ENSG00000184857_5 (sequence is synthesized)
aggctgagggtgtgggcaaggctgaagaaaggggactgggtacttggagactttgcctgggcccctgggaacatgtgttttgtggtgaataaattcacaaggcaagagctggtgtacagg

SEQ ID NO: 664120 - DNA, 120 bp, Artificial Sequence
  ENSG00000184857_6 (sequence is synthesized)
tttaggaaaaaggctctaagcaagttcttacagcacttgtttgtgacattcagtcagataatggccagaagtttttgttaagagccagttcttagaagaacctatgccaaggtcacccat

SEQ ID NO: 664121 - DNA, 120 bp, Artificial Sequence
  ENSG00000184857_7 (sequence is synthesized)
agagtccattggtgtgaaagagaaaggcaaagaggtgtggcgggggagcgtaagatttggagtcagaagtctcagttctgtcatttgtcctggagcaggttattgagtctctttgaatct

SEQ ID NO: 664122 - DNA, 120 bp, Artificial Sequence
  ENSG00000184857_8 (sequence is synthesized)
tggttttcacatctgtaaaatggaaagtcctgcttgtttcatgggatgggtgtgggaataaacaataaatgtcaaacgtgtggcagactcaacagcctacagcagatattattaagcatt

SEQ ID NO: 664123 - DNA, 120 bp, Artificial Sequence
  ENSG00000184857_9 (sequence is synthesized)
tggtcagaggttttagcagggagaaaggcttcgagcagtcagcagggacttccagagccctgtgctgtgcccctcacatatccagcggcagaagggtctgtcaggatgttaactacacat

SEQ ID NO: 664124 - DNA, 120 bp, Artificial Sequence
  ENSG00000184857_10 (sequence is synthesized)
tgacgagcagatgtcgtccaggtaggcacgaaaccccagttgagatttgttcaccacccagaggtctagaggctcttgctttggatggccctgcagtgtaataaagccaaatgcaccgga

SEQ ID NO: 664125 - DNA, 120 bp, Artificial Sequence
  ENSG00000184857_11 (sequence is synthesized)
tttacttccggcagcaggtggtggggccatgtggaaatggcttctttacttgaagtctgctaagatgtcactgaaaatattgaggaacaggtgagcgtggtgatccctgaagaccagcgt

SEQ ID NO: 664126 - DNA, 120 bp, Artificial Sequence
  ENSG00000184857_12 (sequence is synthesized)
gggacggaaacgaatggatttgtcaccacagccacccaacaccacacctgaaagaggcaggagagatggagtctcgcgctgtcacccaggctggggtgcagtggcaacccagtctcactc

SEQ ID NO: 664127 - DNA, 120 bp, Artificial Sequence
  ENSG00000184857_13 (sequence is synthesized)
aggcgtgagctactgcacccggcctgtttatgcctttgagaccacgttttctcatttttaaaatggaggttgattatccctgcccttctgaggctgctgcaaggattctgtaagatggca

SEQ ID NO: 664128 - DNA, 120 bp, Artificial Sequence
  ENSG00000184860_0 (sequence is synthesized)
gccccagctgtggtgatgggtagctaggaggcctgggcctctctgcctgctgtagccgtctgccgcgcccttgttcctgcagctgtccagttatcttttgactgccacatatggacccca

SEQ ID NO: 664129 - DNA, 120 bp, Artificial Sequence
  ENSG00000184860_1 (sequence is synthesized)
aaagatctcaaaaggaaagtgtcctcattacaggaggaagtggctattttggttttcgcctgggctgtgccctgaaccaaaatggagtccatgtgattctgtttgacatcagcagccctg

SEQ ID NO: 664130 - DNA, 120 bp, Artificial Sequence
  ENSG00000184860_2 (sequence is synthesized)
ctcaaaccattccagaaggaatcaagtttatacaaggagacatccgccacctgtctgacgtagagaaagccttccaggatgcagacgtcacttgtgtgttccatattgcctcttatggta

SEQ ID NO: 664131 - DNA, 120 bp, Artificial Sequence
  ENSG00000184860_3 (sequence is synthesized)
tgtcagggcgggagcaactcaatcgaaacctgatcaaagaagtcaacgtcaggggcacagacaacatcctccaggtttgccaaaggagaagggtgcccaggttagtttacaccagcactt

SEQ ID NO: 664132 - DNA, 120 bp, Artificial Sequence
  ENSG00000184860_4 (sequence is synthesized)
tcaatgtcatctttggaggtcaagttatcagaaatggggatgaatctctgccctacctgcctcttcacctccaccctgatcactactctcggacaaagtcaattgcagagcagaaggtgc

SEQ ID NO: 664133 - DNA, 120 bp, Artificial Sequence
  ENSG00000184860_5 (sequence is synthesized)
tggaggcgaatgctacacccctggacagaggcgacggtgtcttaagaacctgcgctctgaggccagctggcatctatgggcctggagaacaaagacaccttcccaggatagtcagctaca

SEQ ID NO: 664134 - DNA, 120 bp, Artificial Sequence
  ENSG00000184860_6 (sequence is synthesized)
tcgagaagggtctgttcaagtttgtctacggggaccccaggagcctggttgagtttgtccacgtggataacttggtgcaggctcacattctggcctcagaagccctgagagctgacaagg

SEQ ID NO: 664135 - DNA, 120 bp, Artificial Sequence
  ENSG00000184860_7 (sequence is synthesized)
gccatattgcctctgggcagccctacttcatctcagatggcagacccgtgaacaactttgagttcttccggcctctggttgagggcctgggctacacattcccgtctacccgcctgccat

SEQ ID NO: 664136 - DNA, 120 bp, Artificial Sequence
  ENSG00000184860_8 (sequence is synthesized)
tgaccttggtctactgctttgcttttctaacagagatggttcacttcattttgggtcgactctacaacttccagcccttcctcactcgcactgaagtttacaaaactggtgtcacacatt

SEQ ID NO: 664137 - DNA, 120 bp, Artificial Sequence
  ENSG00000184860_9 (sequence is synthesized)
attttagcttagagaaagccaagaaagagctaggttataaggctcagccatttgacctccaggaagcagtggaatggtttaaagcccatggtcatggcagaagttctggaagtcgtgact

SEQ ID NO: 664138 - DNA, 120 bp, Artificial Sequence
  ENSG00000184860_10 (sequence is synthesized)
cggagtgttttgtttgggatgggctattggtcttcctcctgattatagcagttctcatgtggctgccttcttctgtgattctgtcactgtgaaggaggggccagaaataaggtgatcaca

SEQ ID NO: 664139 - DNA, 120 bp, Artificial Sequence
  ENSG00000184860_11 (sequence is synthesized)
gttggctgagatggttctcaagaaacatgggttttaaaatgtgtacagtgatatctggtgccaaacattggctcttcaaattgctacttaagaataggttcttggattgaatctttatgt

SEQ ID NO: 664140 - DNA, 120 bp, Artificial Sequence
  ENSG00000184860_12 (sequence is synthesized)
cttatttccttgcactaatccagatgggaatgaaaaagcagaagcagagattagtttgaaatttgatttgttatgtgcttctgttttaggtgggtacaatagaagtcagtttggagccat

SEQ ID NO: 664141 - DNA, 120 bp, Artificial Sequence
  ENSG00000184860_13 (sequence is synthesized)
agaagtaggcttagttgagttggagatgcccatcttgaatttctgagagggcaagatatacttatttccattttatgcagtctgcatctacctaaaacctctgactgatgtgggaatggc

SEQ ID NO: 664142 - DNA, 120 bp, Artificial Sequence
  ENSG00000184860_14 (sequence is synthesized)
gaaacactatcaggcttgaatgcgtgtgaaaaacaccaaattggcccagatccctaacagagcaatcctcgaggggatggtggctattgctggagaggcattagctattcacagggtacg

SEQ ID NO: 664143 - DNA, 120 bp, Artificial Sequence
  ENSG00000184860_15 (sequence is synthesized)
ttttaggtgttaacttttgccctttatgatatcagggcattatgcctatgtgaacacatggtaatgtttgatgtttaggcctttattctacctcataggattcttttgaggattaaattc

SEQ ID NO: 664144 - DNA, 120 bp, Artificial Sequence
  ENSG00000184860_16 (sequence is synthesized)
aagcatacaaagcgctcctcaacacacatagccattctttttatcagaattgtcatggtacattccttatgagggctttcttcctcagtgttctctttagagggctattgctactggact

SEQ ID NO: 664145 - DNA, 120 bp, Artificial Sequence
  ENSG00000184860_17 (sequence is synthesized)
ttctgcaatgtctttgggtgtgccctcagagcctgcaacaagtgtatttggatatactctatttgtaaagtttaggcctctaagaaggccacaatgaagcaactaaaaatctgatgatta

SEQ ID NO: 664146 - DNA, 120 bp, Artificial Sequence
  ENSG00000184860_18 (sequence is synthesized)
agggagtcaatcaagctgatgccatttttagtttaaaaatgaagcagagctctaaactcatagatgggttttcttactgggaagaagattggctctctgaagacagcttccaatgaggaa

SEQ ID NO: 664147 - DNA, 120 bp, Artificial Sequence
  ENSG00000184860_19 (sequence is synthesized)
tgtattgaacaatggcagcactgtctggccacccacaaactgttacagatgatccagttacactgttgcataggaacccaagtggaaagaagacagagtccatgtctgtccatggctcca

SEQ ID NO: 664148 - DNA, 120 bp, Artificial Sequence
  ENSG00000184860_20 (sequence is synthesized)
gctacagaaaggatagtatgggaacattacaagggggatacattactgtggaaagttctgctagagttagtcttgagagtatctgtaaaatacaaatagatgagcaatccctgtggaatg

SEQ ID NO: 664149 - DNA, 120 bp, Artificial Sequence
  ENSG00000184860_21 (sequence is synthesized)
ctgcctggatattttcagaaaagctctgaacttgatgtcataataccaacaccgtgaatatcgtgtgtggccttaaccaaggaacagaagccctttagaacttagcttcctcacttggga

SEQ ID NO: 664150 - DNA, 120 bp, Artificial Sequence
  ENSG00000184860_22 (sequence is synthesized)
gctgggactgactgcatttgccctttgtataaacccacccaccccatagggttcactgggagcataaagcaagatgtggtgaaagtacttctaatataaattgcaacatcagtatgaggt

SEQ ID NO: 664151 - DNA, 120 bp, Artificial Sequence
  ENSG00000184860_23 (sequence is synthesized)
gatggtagtgattgtttttaggaaaacgtgtttggagtcttttctgtcataaagaagcttttgcattagcctggggttaacgcatatgagcacctgccatgtattgttctagaactgctt

SEQ ID NO: 664152 - DNA, 120 bp, Artificial Sequence
  ENSG00000184860_24 (sequence is synthesized)
gaatatcctcatccccagagcaggtcatccaagacagcagggtggaagctgcattgtcctttatgacttggcctcaaatgtcacagtgtcattccacagtatattggttatgcaggtcaa

SEQ ID NO: 664153 - DNA, 120 bp, Artificial Sequence
  ENSG00000184860_25 (sequence is synthesized)
tcctattcagtaggggaaggaaatacacaaaggtatttccgtattataccagaagagggagatggtcaaaggcgatcttggaggctgagctcttggcccgatgtgagtcatccttccttt

SEQ ID NO: 664154 - DNA, 120 bp, Artificial Sequence
  ENSG00000184860_26 (sequence is synthesized)
tccatgaaacgttgcccacatttccagctacaaagctttttctgcctgcttcttgccagaaggattttaggggcccaacggctgtgttaacattttgcactatatccctttccattcaag

SEQ ID NO: 664155 - DNA, 120 bp, Artificial Sequence
  ENSG00000184860_27 (sequence is synthesized)
ctggcagtggtactgggaacattattttgaatgcgtcacctgagtcttattgcagttcactcacaaaagccacacccacaaatctctgaggtaagttctccactgtgagcttctgctcag

SEQ ID NO: 664156 - DNA, 120 bp, Artificial Sequence
  ENSG00000184860_28 (sequence is synthesized)
actgccaagggacaatacgctgtgcttcttagaagccttactgtctgaacagctctctggggtgccacatcaggcctttctgagatcttaaaaagattttatactcacagccacagccat

SEQ ID NO: 664157 - DNA, 120 bp, Artificial Sequence
  ENSG00000184860_29 (sequence is synthesized)
gcactgtcgtttccacagtctcgggtgtttacacaggttagccgtattcagtgtgggaggagactacacaaggatatgaataccaggaggtggtgtcattggaggccaacgtggaacctg

SEQ ID NO: 664158 - DNA, 120 bp, Artificial Sequence
  ENSG00000184860_30 (sequence is synthesized)
gctaccacattcctgcttccatatctccccaattctgttactgtctcccactccagcttgaaatggtagattttctcagtgctcattccttggccctgttctaataccatactttctccc

SEQ ID NO: 664159 - DNA, 120 bp, Artificial Sequence
  ENSG00000184860_31 (sequence is synthesized)
taggtgagctcacctaagcccatggcctccattttcatctcccagcccaaatatgtactactagatgtacagttccagaccactcctgggctccagactcatatctaagtacttctgcaa

SEQ ID NO: 664160 - DNA, 120 bp, Artificial Sequence
  ENSG00000184860_32 (sequence is synthesized)
ctccacatggatgtcccacatgcacctgtcagccagtgtagccaaagtggaattcataatcctctcccaccccaaattcttacagggctcccttccttagtaaatatctccactacctgc

SEQ ID NO: 664161 - DNA, 120 bp, Artificial Sequence
  ENSG00000184860_33 (sequence is synthesized)
tgaatttcccatcccagagatctgggataatccctgacccctgccctctcccagacttgacacacctaacccatgtttaagccagttgatttttacttgtaatcatgccttaaaactgcc

SEQ ID NO: 664162 - DNA, 120 bp, Artificial Sequence
  ENSG00000184860_34 (sequence is synthesized)
caaggtataggtgtaccttctctcccatagattccactagtagcccatttgctcttccacccatatccacaccctccttccttcagtccattctccacatgcctagccaagagactctat

SEQ ID NO: 664163 - DNA, 120 bp, Artificial Sequence
  ENSG00000184860_35 (sequence is synthesized)
aaaggtgcaaatcttttgtcacttctctgctgaaaactttccttaggttgagaatctttaacgtgatcaagaggctttgtctgaactggccccttgcctgtctctctaacttcatctcac

SEQ ID NO: 664164 - DNA, 120 bp, Artificial Sequence
  ENSG00000184860_36 (sequence is synthesized)
attattctgccttctctgccccaattacactgaccttttttaggttcctgggctccaagcttctcaggctccctgctcctccttttggcctgaataatgtttatttcgtgtctcttgtta

SEQ ID NO: 664165 - DNA, 120 bp, Artificial Sequence
  ENSG00000184860_37 (sequence is synthesized)
agtctctttctagaggccttcactgatcccagcaatttaagattggtgctcctgctacaaatgatgctacaggcctgtcatagcttcctgcctttcttttatagcattgctcataactgt

SEQ ID NO: 664166 - DNA, 120 bp, Artificial Sequence
  ENSG00000184860_38 (sequence is synthesized)
aaacatttgtacggttatttgtttaatgcctgttagctctatgagggtgggaactttgtcttgcttacagctgtactcctaatgcccggcacagtgcaggagttcaataagtatttgtcc

SEQ ID NO: 664167 - DNA, 120 bp, Artificial Sequence
  ENSG00000184860_39 (sequence is synthesized)
aatgaatgctgttttcccatctgctatggatgaacactcttttctagcacacagataactcactgtttctaatcttttggagactggggaaaatagccaacctacactagaactgtcgta

SEQ ID NO: 664168 - DNA, 120 bp, Artificial Sequence
  ENSG00000184860_40 (sequence is synthesized)
actaagtcaagattagatgaggtctagtgagtaagggaagtcattgtctatatgatctggtggagtattaatgctataaggaggtcagggaatggggaaggaatgtgggccaagtgattt

SEQ ID NO: 664169 - DNA, 120 bp, Artificial Sequence
  ENSG00000184860_41 (sequence is synthesized)
gtgctccctccacatctcagctgaaaactcaccactttaaaagacttagtctatttcctgaaagggagctccccttcctttctatggtcaggagacgctgcagttaagaaattctattag

SEQ ID NO: 664170 - DNA, 120 bp, Artificial Sequence
  ENSG00000184860_42 (sequence is synthesized)
ttctagggttcccagctgccctcaccttgcctcaaccttagattgaatcactcaaccctgcctaacaataaaattatgctcacacttgtgcacttggggatgctctcagaggtctgggca

SEQ ID NO: 664171 - DNA, 120 bp, Artificial Sequence
  ENSG00000184860_43 (sequence is synthesized)
gaagccacccagcactgctacctcacccatggcttctgaggagtgtgtgggaggttatccatatgattgatggagggtcgcaatgaaggaaggatgtgtgagcaacaaggagccctgtat

SEQ ID NO: 664172 - DNA, 120 bp, Artificial Sequence
  ENSG00000184860_44 (sequence is synthesized)
tggaacctaaaggtaatgcccaaactgctcccacctgcaaaaagggaagagcggtctggaaagcctgttggaaatacttcttggatgtcctcagtgccgtttctggtgacaggggcagac

SEQ ID NO: 664173 - DNA, 120 bp, Artificial Sequence
  ENSG00000184860_45 (sequence is synthesized)
agtgccacattacaagcagtaacagttagtggagggtcaaataactcattctggcaccaaattacctatgctgtggtgtttctcaaacctagggaataggcctagggattcttttcaaga

SEQ ID NO: 664174 - DNA, 120 bp, Artificial Sequence
  ENSG00000184860_46 (sequence is synthesized)
aaatgttttattttcctcaaccatctaacatggtgtataaaagaggcaagtgttgctttgtcgtagattgttggggctgcttctaccttgtattgctttccaaatctccggttcgcccag

SEQ ID NO: 664175 - DNA, 120 bp, Artificial Sequence
  ENSG00000184860_47 (sequence is synthesized)
ccttacaaagggtagaagttgcctgcagaatgccacgccccagctctgacccaattagacatcattatagggccactggtgcccctgctggctggccttggaagccagcaccagcaatgt

SEQ ID NO: 664176 - DNA, 120 bp, Artificial Sequence
  ENSG00000184860_48 (sequence is synthesized)
ttagagatggcacaccaggttgtgtgctgttcaccagcatatctcactttagagaatgataccccatgctcctttttggtgacaaaaagtccctcccagccctttcgtggggctgacctc

SEQ ID NO: 664177 - DNA, 120 bp, Artificial Sequence
  ENSG00000184860_49 (sequence is synthesized)
cacatgcaggcctgaccgctcacaggacttccatccttcggccgcagtcattgggccacgatgggccagtcagcgtcatcctttcagcctttctcccagagcaggtttagagaaaccctt

SEQ ID NO: 664178 - DNA, 120 bp, Artificial Sequence
  ENSG00000184860_50 (sequence is synthesized)
tcagctaggattgcttctctggggaggacaggcgcttggtgcagctcctcttcagggtcctcctacctgaaggagaggaccgagtgctgatgatgtttgggctgctgggtccagctatgt

SEQ ID NO: 664179 - DNA, 120 bp, Artificial Sequence
  ENSG00000184860_51 (sequence is synthesized)
gttaagaagagccaaaaaatggagagggaggaggtcctggtgactacactggggttccgtaacgctgcctgcgggacgctcatcattccagatcgtcctctcacgtgagtcttcagttca

SEQ ID NO: 664180 - DNA, 120 bp, Artificial Sequence
  ENSG00000184860_52 (sequence is synthesized)
ctttcttttctgcttaaggtcctttaagttcgatttttctccaggaatcgcagcatgtcctggtgtgccatgtccacagtccactcctgggtacaggtgatcctaccccgtggtttccaa

SEQ ID NO: 664181 - DNA, 120 bp, Artificial Sequence
  ENSG00000184860_53 (sequence is synthesized)
aggcagcctctccactcacctctgtgccctctttctttcaaacgggggtcgtcttttggtccctgggtaatttaacatttgctggagtttttcttaaaaaatgagattgatttccttttc

SEQ ID NO: 664182 - DNA, 120 bp, Artificial Sequence
  ENSG00000184860_54 (sequence is synthesized)
tagaatcatgtttatttgaattacgtttattcaaatcatgtatatttggcaccaacatacctttaagcagagtagttcaaactcttgttttatatggaaattgtttgatgaagtgatttg

SEQ ID NO: 664183 - DNA, 120 bp, Artificial Sequence
  ENSG00000184860_55 (sequence is synthesized)
ctccccagaacataaacgccccatgagagcaggaaccatgtctgttttttctacttctgtacccttcatatgcccaataaatgcttgttgacggggtgaatgcacttatcagccaggtgg

SEQ ID NO: 664184 - DNA, 120 bp, Artificial Sequence
  ENSG00000184860_56 (sequence is synthesized)
tcccttatctgaaattacagctgattccccagttattgcttcttttacacctgagactcccagcctgaggcaataagaacattcaaggcctaaattaaaaatgcagactccagaagggtg

SEQ ID NO: 664185 - DNA, 120 bp, Artificial Sequence
  ENSG00000184860_57 (sequence is synthesized)
acatcatgtaaaacggcagagtaggaagctctggaatcggtcctttcactgtaacaaccagaaaagcacgggggcaggggaatgatcagaaccaatgatttcaggaactccttacatcta

SEQ ID NO: 664186 - DNA, 120 bp, Artificial Sequence
  ENSG00000184860_58 (sequence is synthesized)
ttttacctcgatatacagactccagactcttccctgatgcttctgattgagaaagtctgtgttggttggtaatctgcactctaggtgtttcttatctttcaacaaggaggtgagcactgg

SEQ ID NO: 664187 - DNA, 120 bp, Artificial Sequence
  ENSG00000184860_59 (sequence is synthesized)
tgccagatactaaacactggctcccttgcaagatgctgagaggctcctgacttctgcttggctcttccctttgcagtgctttgctacagcaggtgctcagtacaactttgctgaatgaat

SEQ ID NO: 664188 - DNA, 120 bp, Artificial Sequence
  ENSG00000184860_60 (sequence is synthesized)
gaagggggagatgggactcgccaaagggccttggattcgagtgaccccccacctgctcctttatgcagggcccagttctttgttgacacagacaagcactgctacgtcccagtgctgact

SEQ ID NO: 664189 - DNA, 120 bp, Artificial Sequence
  ENSG00000184860_61 (sequence is synthesized)
tttccagccaacctagagcctctttttcttgagccaaagggattctttggcaacacatcttgttgtgcctggttacctgatcttttagtgtaaaacagccttttgctattgaaaatcaaa

SEQ ID NO: 664190 - DNA, 120 bp, Artificial Sequence
  ENSG00000184860_62 (sequence is synthesized)
ccagaaatagagtcaaccagtccctggtatctctaagttgtgcaaattcataccatgttacccttctgtattttagaacctgggcacaccaggaactcattgaactcaagttgcgttcat

SEQ ID NO: 664191 - DNA, 120 bp, Artificial Sequence
  ENSG00000184860_63 (sequence is synthesized)
aattacttgagttcattgaactcaagtaattatgaccgaggccaaatctagttcactacaaagaaattgcatgtagcaaagtgatccaggcaagtgtctttcaaccaacaggggatttat

SEQ ID NO: 664192 - DNA, 120 bp, Artificial Sequence
  ENSG00000184860_64 (sequence is synthesized)
cagcagtaattcgcaatgtttatttttaacagctggttaaagcatgcaagtaattaaaaaattcttcattactaatatgcaagattttaatcttggcaagtattctacatatcttttgct

SEQ ID NO: 664193 - DNA, 120 bp, Artificial Sequence
  ENSG00000184860_65 (sequence is synthesized)
ctagcctcccagtggagccatatttcagatccaagagtaaaatactgtcttacccatatatatattttaacatatgtatatatgttataagaatgagtcgtcttttgctcttaacagtca

SEQ ID NO: 664194 - DNA, 120 bp, Artificial Sequence
  ENSG00000184860_66 (sequence is synthesized)
ctaggagttagtgtcctgaatagataataataagtctgaaatgttgcccaggttttaaggggaattatttgcacattgctgggcaattacaacacccccactccactgatttatagtcct

SEQ ID NO: 664195 - DNA, 120 bp, Artificial Sequence
  ENSG00000184860_67 (sequence is synthesized)
gtgcctttcataggggatttagcttctgggaatgttcaacatgaagctaatgatcaatattaacctgtcaccctagttaactaaattactcaaagatgaacattgttaatagttaattgc

SEQ ID NO: 664196 - DNA, 83 bp, Artificial Sequence
  ENSG00000184860_68 (sequence is synthesized)
ctaaattactcaaagatgaacattgttaatagttaattgctactatttgttgagagtttactcaggataaggctttctaattt

SEQ ID NO: 664197 - DNA, 86 bp, Artificial Sequence
  ENSG00000184860_69 (sequence is synthesized)
caataggattacaggcgcccaccaccacaaccggctaatttttgtttaattagcggtgatttggggtttcgccatgttggccaggc

SEQ ID NO: 664198 - DNA, 120 bp, Artificial Sequence
  ENSG00000184860_70 (sequence is synthesized)
aactcctgacttcaggtgatccacctgaggctttctttatttcttaggcttatttagctttcttaatgtctttaagaaacagatcaatttattatctccagtttacatgggaggaaactg

SEQ ID NO: 664199 - DNA, 120 bp, Artificial Sequence
  ENSG00000184860_71 (sequence is synthesized)
tccagtttacatgggaggaaactgaggcttagggagatgcagtaccttgcccaagggtacccagcgtcaccagctaggaagtggcaaaacttaaatttgagccaggtttacttgaatcca

SEQ ID NO: 664200 - DNA, 89 bp, Artificial Sequence
  ENSG00000184860_72 (sequence is synthesized)
gtggcaaaacttaaatttgagccaggtttacttgaatccaagaccaaatttttttttttttttttttgatagagtctcggtcatggctc

SEQ ID NO: 664201 - DNA, 120 bp, Artificial Sequence
  ENSG00000184860_73 (sequence is synthesized)
actgggactacaggtgcatgccaccacatccagcttttattttctgtagagacggtgtttcactatgttacctgggctggtcttgaattccttgccccaagcaatcctcttgcctcggcc

SEQ ID NO: 664202 - DNA, 120 bp, Artificial Sequence
  ENSG00000184860_74 (sequence is synthesized)
tgctgggattacaggtatgagccaccgagcctggcccaaactcttaccttgttggaggtggttttatcacgttagcatgacattattcaaggctaagtgttactcgaacttcatttgcaa

SEQ ID NO: 664203 - DNA, 120 bp, Artificial Sequence
  ENSG00000184860_75 (sequence is synthesized)
gtgttactcgaacttcatttgcaattaaagtaaactatttgttacaaaaaatgagtaactgtaaatagtgacttctgctacacaaactaagttacagaagcaaaccattattttgtcatg

SEQ ID NO: 664204 - DNA, 120 bp, Artificial Sequence
  ENSG00000184860_76 (sequence is synthesized)
tgagtatgtattacgtagagctgaggtgtgtgggcggggggtgctgttaatctactggaattccatgtattttgtgaggagcatggatgttagagccatacttaatagcccagaggacat

SEQ ID NO: 664205 - DNA, 120 bp, Artificial Sequence
  ENSG00000184860_77 (sequence is synthesized)
cctccaggaagacttgtttgtgtacctaatcaaatactgatattggtcacattgcacatgtcctagtctctcctctaaatcagtatcttgagagcagagcccaagtattattcgctgctg

SEQ ID NO: 664206 - DNA, 120 bp, Artificial Sequence
  ENSG00000184860_78 (sequence is synthesized)
atggctctttgcctcccctgcagtcttacactattctgggcgtggagcacagacctaataaaaatctttcgaagtaatgaaaatgcaaagtccagcctgtagaggtgcccttagatgttt

SEQ ID NO: 664207 - DNA, 120 bp, Artificial Sequence
  ENSG00000184860_79 (sequence is synthesized)
aaattctcccaaagaagggtgaactttttacaaagcacttcacagtggaagtgtctctgagcacagcaaataccttaagtttgggcccaagtggaaaagaaatatttggtagtgggtgat

SEQ ID NO: 664208 - DNA, 120 bp, Artificial Sequence
  ENSG00000184860_80 (sequence is synthesized)
tatagcccttcagtgctcaagggactcatgcatttgcttgcacttccttatgcctgtcctggagccatctcttatttgcaatgtgactttgagcaaatgcctctcatctgtaaagtggag

SEQ ID NO: 664209 - DNA, 120 bp, Artificial Sequence
  ENSG00000184860_81 (sequence is synthesized)
ataaaacattccctgcttatctcttgggggaacttgtatggatttaatggcacagaggccttttgtaacctgtacaagaactatgcacatggatccttaattaatagtgtttctgctggg

SEQ ID NO: 664210 - DNA, 120 bp, Artificial Sequence
  ENSG00000184860_82 (sequence is synthesized)
aaagatggaagggtttggaggggaagctggtgtctacaggaagagatgcaagacatgctagtggagtttgagacgttcaaatggaatgttcagtaactaattagcaacataagactgtag

SEQ ID NO: 664211 - DNA, 120 bp, Artificial Sequence
  ENSG00000184860_83 (sequence is synthesized)
tttgaaaaaaacaactgcatatgcgggtagagatggttcagtgaaaatgtttcattgatttcctgccatataacaggtattagtttatttaccgtggcttttctttttttcttttgagac

SEQ ID NO: 664212 - DNA, 120 bp, Artificial Sequence
  ENSG00000184860_84 (sequence is synthesized)
atggtgtcactctgtcgaccaggctgaagtgtagcactgtggacacagctcactgctgcagtgccctcctgggctcaggtgatcctcctaagtagctagaaccacaggtgcaccagcaca

SEQ ID NO: 664213 - DNA, 86 bp, Artificial Sequence
  ENSG00000184860_85 (sequence is synthesized)
gatcctcctaagtagctagaaccacaggtgcaccagcacacctagctaatttttctgtcgtcttttgtagagacagggtctcaccg

SEQ ID NO: 664214 - DNA, 120 bp, Artificial Sequence
  ENSG00000184860_86 (sequence is synthesized)
ctcccaaagtggtgagattacaggaatgagccaccgtgcccagcctaccatgttttttttgtttgtttgtctgtttcagacggagttttggtcttgtggcccaggctggagtgcagtggc

SEQ ID NO: 664215 - DNA, 77 bp, Artificial Sequence
  ENSG00000184860_87 (sequence is synthesized)
taccatggttttcaattactcaattcagtcacgttttgagctctaaactgaaaatgagtttttcttttcttgagatt

SEQ ID NO: 664216 - DNA, 120 bp, Artificial Sequence
  ENSG00000184860_88 (sequence is synthesized)
gagctctaaactgaaaatgagtttttcttttcttgagattgcagagtcaattacaccatgctagagaacaagtaggcatctatgcctctctgctctaaattttgatgtctataaacaccc

SEQ ID NO: 664217 - DNA, 120 bp, Artificial Sequence
  ENSG00000184860_89 (sequence is synthesized)
atagcggtgtgtgttggttttaaattgtggggctagaaagccaacccaaaatcatcaagcttttatttctacacattcagagtgcttctgtgtaacttagatttaaaagtaactatacaa

SEQ ID NO: 664218 - DNA, 120 bp, Artificial Sequence
  ENSG00000184860_90 (sequence is synthesized)
ataatgcatagatgtatttttcttatataatgttaaaatattacggataaggccaaagaccccttttactaatgtccccaaatttcatatatgtatatatttgtatagaaaacagggctg

SEQ ID NO: 664219 - DNA, 120 bp, Artificial Sequence
  ENSG00000184860_91 (sequence is synthesized)
tggtgttcatgtctttccccatactactgtctcccacctcacagttccttctgctactacggtttctcactcaatagtacagcatggtgatctattgatattagtatatattctttattt

SEQ ID NO: 664220 - DNA, 120 bp, Artificial Sequence
  ENSG00000184860_92 (sequence is synthesized)
gctgacataggaggtcaccgggtatataaagatgataagcatatgtcctagttggcctaagacagttctggtttcatgcctgtagtcccaccttaatttttaatagtgcttcctttcact

SEQ ID NO: 664221 - DNA, 120 bp, Artificial Sequence
  ENSG00000184860_93 (sequence is synthesized)
ctcaggtatgtcccattttgtataataaattgtacgatcaccctatatataagacacatagttatatgaagaattaagcatttttcataacagatgtattagaagttattgtgaactgat

SEQ ID NO: 664222 - DNA, 120 bp, Artificial Sequence
  ENSG00000184860_94 (sequence is synthesized)
tttgaggggaaaaaatctcattttgtactagaatagaatatagtagaaaatcctgaattctgggtatgtagcagtattctaccaacattgaaatattaataaaaaattacctaaagaaaa

SEQ ID NO: 664223 - DNA, 120 bp, Artificial Sequence
  ENSG00000184860_95 (sequence is synthesized)
agctgtggtgatgggtagctaggaggcctgggcctctctgcctgctgtagccgtctgccgcgcccttgttcctgcagctggcggaggaaacagaggttcagtgaattgcctagggtaaca

SEQ ID NO: 664224 - DNA, 120 bp, Artificial Sequence
  ENSG00000184860_96 (sequence is synthesized)
cagggaattggtggaagagccaagtctaatgcccagatttccaaactgggagtcttaacccttcatcagtgctacctgtgccacatgggagaagatgggccacctccaattcattttctc

SEQ ID NO: 664225 - DNA, 120 bp, Artificial Sequence
  ENSG00000184860_97 (sequence is synthesized)
aaggaacatgcatagtgaggggctcaggatgagccaagaagacttggatcagccccaccttgattgcctgggctgtgccctgaaccaaaatggagtccatgtgattctgtttgacatcag

SEQ ID NO: 664226 - DNA, 120 bp, Artificial Sequence
  ENSG00000184863_0 (sequence is synthesized)
gggcgcgggcgcgcggccatgttgcggtagtttgttgttttcttcctgcggaggcgaagggccagctgtggaccgcgaagcgcccggcttcgcctctgcctcctgcagccccctcccttc

SEQ ID NO: 664227 - DNA, 120 bp, Artificial Sequence
  ENSG00000184863_1 (sequence is synthesized)
tctgtcctccgtcacccgtacccgggcccggaccaggcacgtcggcccaccagctggcttggtgggggaggctgaaggccgggccccgcgagtgccatggcggccgccctgggagcgagc

SEQ ID NO: 664228 - DNA, 120 bp, Artificial Sequence
  ENSG00000184863_2 (sequence is synthesized)
ggaggagcaggcgccggagatgatgactttgaccagtttgataagcctggcgcggaacggtcgtggagaagaagagctgctgatgaggactgggacagtgaacttgaagatgatttactt

SEQ ID NO: 664229 - DNA, 120 bp, Artificial Sequence
  ENSG00000184863_3 (sequence is synthesized)
ggagaagatttgctatctggcaaaaagaatcagtcggatttgtcagatgaagagctaaatgatgatcttttgcagagtgataatgaagatgaagaaaatttcagttctcagggtgttaca

SEQ ID NO: 664230 - DNA, 120 bp, Artificial Sequence
  ENSG00000184863_4 (sequence is synthesized)
attagtctgaatgctacatctggcatggttacatcatttgaactctctgacaacactaacgaccaatctggagaacaggaatctgagtatgaacaagaacaaggagaggatgaactggtt

SEQ ID NO: 664231 - DNA, 120 bp, Artificial Sequence
  ENSG00000184863_5 (sequence is synthesized)
tatcacaaatctgatggatcagaattgtatactcaagagtacccagaagaaggacagtatgaaggccacgaagctgagttgacagaagaccaaatagaatatgtggaagagccagaggag

SEQ ID NO: 664232 - DNA, 120 bp, Artificial Sequence
  ENSG00000184863_6 (sequence is synthesized)
gagcagctttacactgatgaagtgttagacatcgagatcaatgaacctttagatgaatttacaggaggtatggaaacattggaacttcaaaaggacatcaaagaagaatcagatgaagaa

SEQ ID NO: 664233 - DNA, 120 bp, Artificial Sequence
  ENSG00000184863_7 (sequence is synthesized)
gaagaagatgatgaagaatctggacgattacgtttcaaaactgaaaggaaagaaggaacaattattaggctctcagatgtaactagagagagaaggaacattccagaaactttggagctt

SEQ ID NO: 664234 - DNA, 120 bp, Artificial Sequence
  ENSG00000184863_8 (sequence is synthesized)
tcagcagaggccaaggcagcattgcttgaatttgaagaaagggagcgacagcataaacaaggacgctacagctccaggcggggaggacggcgaggaggtccgctgatgtgtcgtggtgtg

SEQ ID NO: 664235 - DNA, 120 bp, Artificial Sequence
  ENSG00000184863_9 (sequence is synthesized)
ggggaccagaggagagagagcaccgagaggggcaggatgaaggaccacagacctgcgctgcttcctacacagcctcctgtcgtgccccaggctccccctccaccgccaccgccgcctcag

SEQ ID NO: 664236 - DNA, 120 bp, Artificial Sequence
  ENSG00000184863_10 (sequence is synthesized)
cagcagccgatcagaagcctgttccagccgcagccgctgcagccgctgcttccggtgcagcacccgcaccacccatccccgcctcagggaatgcacatgcctccccagctagagacccca

SEQ ID NO: 664237 - DNA, 120 bp, Artificial Sequence
  ENSG00000184863_11 (sequence is synthesized)
aggatgatgatgaccccgccacccgtgactccacagcagcccaagaacatacacatcaacccgcacttcaaagggacggtggtcacgcctgttcaagtgcccttgctaccagttccgagc

SEQ ID NO: 664238 - DNA, 120 bp, Artificial Sequence
  ENSG00000184863_12 (sequence is synthesized)
cagccgagacctgccgtgggaccccagagattcccaggccctccagaatttccacagcatacacctggacctgttcccaacagtttcagccagcccccacgactccctctccaggaccag

SEQ ID NO: 664239 - DNA, 120 bp, Artificial Sequence
  ENSG00000184863_13 (sequence is synthesized)
tggagagccccacccccgcctcaggatcgagaccctttcttcttaggagtttcaggtgaaccaagattcccgagccatctttttctggaacagcgaagtccccctccaccaccaccgcct

SEQ ID NO: 664240 - DNA, 120 bp, Artificial Sequence
  ENSG00000184863_14 (sequence is synthesized)
cctacccttcttaacagtagccatcctgttcctactcagagtcctctaccattcactcagccaggaccagcatttaatcagcaaggacagcagccagtgttcccaagagagcggcccgta

SEQ ID NO: 664241 - DNA, 120 bp, Artificial Sequence
  ENSG00000184863_15 (sequence is synthesized)
cgaccagccttgcagcctccaggtccggtggggattctgcactttagccagcctgggtcggcaaccacacggcccttcattcctcctagacagccgttcctgccaggcccaggacagccg

SEQ ID NO: 664242 - DNA, 120 bp, Artificial Sequence
  ENSG00000184863_16 (sequence is synthesized)
tttctgcccacacacacacagcccaacctgcaggggccgttgcatcctccattgccccctccgcatcagcctcagcctcagcaacctcagcaacagcccccgccacagcaccagcctccg

SEQ ID NO: 664243 - DNA, 120 bp, Artificial Sequence
  ENSG00000184863_17 (sequence is synthesized)
agcccccgcaccagcccccgccccagcaccagcccccaccccagcacccaccacagcacccgccgcagcaccagcaccaccaccaccaccaccacctgtccgtcccgccccctcctttga

SEQ ID NO: 664244 - DNA, 120 bp, Artificial Sequence
  ENSG00000184863_18 (sequence is synthesized)
ttgatgccgatgtctcagccacagttccggcctcacgtacagaccgctcagcctcaggccagcagcagccggatgcagtgcccccagcgccaggggctccggcataatacaacttctcag

SEQ ID NO: 664245 - DNA, 120 bp, Artificial Sequence
  ENSG00000184863_19 (sequence is synthesized)
aatgtaagcaagcggcccatgcagcaaatgcagcccactgcgccaaggaacagcaatttgcgtgaattacccatagcgccgtcacacgtgatagaaatgagcagcagccgctgctctgcc

SEQ ID NO: 664246 - DNA, 120 bp, Artificial Sequence
  ENSG00000184863_20 (sequence is synthesized)
acgccctcagcacaagtgaaacctatcgtcagcgcgtcaccaccctcgcgggccgtggcgggttccagaagctcacagggaaagacggaagtgaaagtcaagccagctagccctgtggct

SEQ ID NO: 664247 - DNA, 120 bp, Artificial Sequence
  ENSG00000184863_21 (sequence is synthesized)
caacctaaagaagaggcaaaaacagaaacagagtttcctgatgaagatgaggaaacaaggttatatcgcttaaagatagaagaacagaaacgcctaagagaagaaatcctgaaacagaag

SEQ ID NO: 664248 - DNA, 120 bp, Artificial Sequence
  ENSG00000184863_22 (sequence is synthesized)
gagttacggcggcagcagcaggctggtgccaggaagaaggagctgctggagagactcgcgcagcaacagcagcagctgtacgctcccccacccccagcagagcaggaagagcaggcactg

SEQ ID NO: 664249 - DNA, 120 bp, Artificial Sequence
  ENSG00000184863_23 (sequence is synthesized)
tcaccatcacccaccaacggtaacccactgttgccctttccaggtgcacaggtcagacaaaatgtgaagaacagacttcttgttaaaaaccaggatgtcagtatttcaaacgttcagccc

SEQ ID NO: 664250 - DNA, 120 bp, Artificial Sequence
  ENSG00000184863_24 (sequence is synthesized)
aaaacatccaattttgtaccatccagtgccaacatgcagtatcaaggacaacagatgaaagcactgaaacatttgagacagaccagaacagttcctcaaagtcagactcagccgctgcat

SEQ ID NO: 664251 - DNA, 120 bp, Artificial Sequence
  ENSG00000184863_25 (sequence is synthesized)
aaagtgctcccgatcaaacctgcagatgtggaggagccagctgtcccccagactcctcgagtggcgtccatccagggccggccccaggacacaaagcctggcgtgaaaaggactgtcacg

SEQ ID NO: 664252 - DNA, 120 bp, Artificial Sequence
  ENSG00000184863_26 (sequence is synthesized)
cacaggacaaacagtggtggtggagacgggccccacatcagctccaaggtcagggtgattaagctgtcaggtgggggaggagagagcgatggcttttttcacccagaaggccagccccag

SEQ ID NO: 664253 - DNA, 120 bp, Artificial Sequence
  ENSG00000184863_27 (sequence is synthesized)
cggcttccccagcctccggaagtgggaccacagcctgcccgcaaggtgacgctgaccagggggggcctccagcagcccccacatctgccagcggggccccacgcacactcgcctgtccct

SEQ ID NO: 664254 - DNA, 120 bp, Artificial Sequence
  ENSG00000184863_28 (sequence is synthesized)
ccagggatcaaaagcatccaaggaattcacccggcgaagaaggccatcatgcacggacgaggcagaggagtggccggtcccatgggccgggggcgcctgatgccaaacaagcagaacctg

SEQ ID NO: 664255 - DNA, 120 bp, Artificial Sequence
  ENSG00000184863_29 (sequence is synthesized)
cgggtggtggagtgcaagccccagccctgcgtggtgtctgtggaggggctgtcctcgtccaccacggatgcccagctgaagagcctgctgatgtcagtgggacccattcagagtttacag

SEQ ID NO: 664256 - DNA, 120 bp, Artificial Sequence
  ENSG00000184863_30 (sequence is synthesized)
atgcttcctcagcaacggaaagccatagctaagttcaaggagccagcccacgcattagcatttcagcagaaattccacaggcatatgatagatttgtcccacataaatgtggccctgatc

SEQ ID NO: 664257 - DNA, 120 bp, Artificial Sequence
  ENSG00000184863_31 (sequence is synthesized)
gtggagtgagtcctaacaagagagcctgaccttaggctgtacacacactgtggaatttcttcaagggagctgccggccggcgcagaacccccaggagcacaggtctctccgggccgctgt

SEQ ID NO: 664258 - DNA, 120 bp, Artificial Sequence
  ENSG00000184863_32 (sequence is synthesized)
cctgcgtaactgttctccagagcgccagccagccacgggcctgattccagaggagccgaactgacaggacacagcaggctggagttggtgttagattgcttcacattctcttgtcaccac

SEQ ID NO: 664259 - DNA, 120 bp, Artificial Sequence
  ENSG00000184863_33 (sequence is synthesized)
caagaactccaagtttttcgttttgttttgttttcaaagtgcttacaatgcatgtagacattgttctttgtggtctgactctatgatcgatcacagtgacttagattcaggaaagaacat

SEQ ID NO: 664260 - DNA, 120 bp, Artificial Sequence
  ENSG00000184863_34 (sequence is synthesized)
taacgtcacaagttctaagtagttttcacagcaaagaatatttgataatggttgcacttatcttcagtgcaggttagaagagtcttctcaaccaagcttaactcgagttgtcttctcagc

SEQ ID NO: 664261 - DNA, 120 bp, Artificial Sequence
  ENSG00000184863_35 (sequence is synthesized)
cctcaaaaggctcttgtacaaaatgtagattaaaatttgggtgattgttgattgacctttgcataccctggaaagccagggtgtgagtggggtggttgggagtggtgccagttgaacagc

SEQ ID NO: 664262 - DNA, 120 bp, Artificial Sequence
  ENSG00000184863_36 (sequence is synthesized)
agattctgcttcttgtcactgtttcaaaagcgtcaactctgtgttcctagtttcgatgaactccccattcatttttaacacacttcccagataaggcaatgtgctggacaggcacacggc

SEQ ID NO: 664263 - DNA, 120 bp, Artificial Sequence
  ENSG00000184863_37 (sequence is synthesized)
atggccctcggctagagcagggtctgtgatggcctcacctggcagccctctggcctagttcccaccacacatgaggtggtggaatggcctgaaggtggaacagacctgtttttttccttt

SEQ ID NO: 664264 - DNA, 120 bp, Artificial Sequence
  ENSG00000184863_38 (sequence is synthesized)
ttaaatgcagtaaggtggcctgtttatcactggctctgtgatacatgacattctttgggaatttggtggccactgcttcagtcacctctgtttttctgaaggctgttccagcagggctgc

SEQ ID NO: 664265 - DNA, 120 bp, Artificial Sequence
  ENSG00000184863_39 (sequence is synthesized)
cctgttcatcagcggatgttcactctggcctgccgttccccgtggcatgcggggtgagggtggctttcttccagccccaaatgagacgagtctgtgtcatcattgaaactgcttttcgta

SEQ ID NO: 664266 - DNA, 120 bp, Artificial Sequence
  ENSG00000184863_40 (sequence is synthesized)
attgcgggtaggttcctgtaggtgagacatattctccataaagctactgtagtagaattcattctgggcaaacactgaaaaaagtgccttacagtatttctgctcatgaaagagtttcac

SEQ ID NO: 664267 - DNA, 120 bp, Artificial Sequence
  ENSG00000184863_41 (sequence is synthesized)
tattttggatatattctaaagtggacctgagctatttgagcaaataatgatagggcatactcagacattttagctaccttttatacctacgatttcatgtcacatttactaatagaatta

SEQ ID NO: 664268 - DNA, 120 bp, Artificial Sequence
  ENSG00000184863_42 (sequence is synthesized)
gacgggcacagacttgcgtcatctcgtttccacagttgacgttttatattactttctcaaattaagttaccaaaacaaactgaagagctgaagcaggtcttccagaccctgcgatccttt

SEQ ID NO: 664269 - DNA, 120 bp, Artificial Sequence
  ENSG00000184863_43 (sequence is synthesized)
ctgtagcagtgattctaaagtggcgtttgctgtgtgcttgagagtaacactgcacgctgcaggggctgttgcagcagtcagtcccaggaagccacagcgcttgtaggatctgctaggacc

SEQ ID NO: 664270 - DNA, 120 bp, Artificial Sequence
  ENSG00000184863_44 (sequence is synthesized)
ctgcagctgtgctgccgccacctctgctccagagtgtcccagccaaccctcggaagatgggattgccagtcagccctgcctcaccatgcctgcaggaggctgtccagggagcaggtctgt

SEQ ID NO: 664271 - DNA, 120 bp, Artificial Sequence
  ENSG00000184863_45 (sequence is synthesized)
gtgcccatcagcaggttcccatggctgtcactgcccactcatttccacagttagatacggatgtgttgatgtatttcgtctagtttatttggctcagtccacagctgcgttggagtggtg

SEQ ID NO: 664272 - DNA, 120 bp, Artificial Sequence
  ENSG00000184863_46 (sequence is synthesized)
actttggtagcccttgagctctaattaagagagatccaaaccactcagtacccactgggcagtgggaaggcctaccgacttactttatcattgagggcttactgatacaatgaaatgagt

SEQ ID NO: 664273 - DNA, 120 bp, Artificial Sequence
  ENSG00000184863_47 (sequence is synthesized)
ttcatgactttttttttttttaaacactttttgaaatagagtgtgctgtgtttaaaaccaaaaatatgcatgttgtctctgaaaagtaggcattgaaacagacttttttgtagtcagtgt

SEQ ID NO: 664274 - DNA, 120 bp, Artificial Sequence
  ENSG00000184863_48 (sequence is synthesized)
taataaaacggatcctgtttgggccttcattgttaaggtggacttcatggccactggaaggtctgttttggtgttacctgagtgtgacacaggccctggggtgtgcgtgtttctctaact

SEQ ID NO: 664275 - DNA, 120 bp, Artificial Sequence
  ENSG00000184863_49 (sequence is synthesized)
gtctacacgtgcacataggcagactttctcatagaatgttcttgaaaggtgattggcaaagtcatgcaggcccgccttaaagcgctgattagaacagtccaacacagtccgacctcactc

SEQ ID NO: 664276 - DNA, 120 bp, Artificial Sequence
  ENSG00000184863_50 (sequence is synthesized)
aatacccacaaccatcgaaaatggattcttagtaccagacaatcccagtaatgaaggtttagtttccttgaaggaaactacagaaaaggaaagaagcagaatgagaaaggaatggtactt

SEQ ID NO: 664277 - DNA, 120 bp, Artificial Sequence
  ENSG00000184863_51 (sequence is synthesized)
aggtgtttggtatgctgctcacgtgaagtcagcccacaccagccaaaccctcgtggaagatctgctgcaaccattatctttgttcttgagttcatcatgcatttaaaatgagatgcaaga

SEQ ID NO: 664278 - DNA, 120 bp, Artificial Sequence
  ENSG00000184863_52 (sequence is synthesized)
gcatttagcataccatgtaaatatggaccttttaaaattaaaatactattggaagtgctttcaactcagccacatcttagctattagttctttgtgttgtcttatcaaagtttaatggat

SEQ ID NO: 664279 - DNA, 120 bp, Artificial Sequence
  ENSG00000184863_53 (sequence is synthesized)
acagttccacagttgttgatgtgtttgtgtgtatattcgatttttataaagatggtagtaagtcaatacatttatcctgatctgtgtattatttgttcacaaattcaagaagcttaaagg

SEQ ID NO: 664280 - DNA, 120 bp, Artificial Sequence
  ENSG00000184863_54 (sequence is synthesized)
tcgtaaatatcagtatctcataaggtaaaccaatagctgattatgtggagccaagttacttcttttctttttgcattatcttgttttggttttgtgctgtaatagaagttcacttagcta

SEQ ID NO: 664281 - DNA, 120 bp, Artificial Sequence
  ENSG00000184863_55 (sequence is synthesized)
ctttagataaccttgcattaccactggtctggccacgtttgttaaatccttatactgatattcttctaaagagtaaatctcatcatttttccagacaaattttgaggggtttctctgttt

SEQ ID NO: 664282 - DNA, 120 bp, Artificial Sequence
  ENSG00000184863_56 (sequence is synthesized)
tgtggacaggcagcagcctccgtaggcacccgcaccctgccttgctggaggagatgggatggggcgggaggtggcttcaccataactatttttaatatgggtcattcttagcatgatttg

SEQ ID NO: 664283 - DNA, 120 bp, Artificial Sequence
  ENSG00000184863_57 (sequence is synthesized)
taaaggtctcaggcaaacagttgttgaagcttgcttctgtggcatttctgaattgtggcagagcttagatcctgcacccaggggtctttttttcaaacagcatcttgctcagttctgtga

SEQ ID NO: 664284 - DNA, 120 bp, Artificial Sequence
  ENSG00000184863_58 (sequence is synthesized)
acagaaggctttgttactgaaggaggtggaagaggagtttagggtgaaaaggaggaagggatggacagacccaggtgaggagaggcctggggattggggaagctgtcatctcagtgttaa

SEQ ID NO: 664285 - DNA, 120 bp, Artificial Sequence
  ENSG00000184863_59 (sequence is synthesized)
taatcaacttgcttctaacacactggcttatcaggggaggtcatccagtccggtcggtggagttgagagcccttgggccagggtgtttggcggcacaggggcatccgctggatggcctgg

SEQ ID NO: 664286 - DNA, 120 bp, Artificial Sequence
  ENSG00000184863_60 (sequence is synthesized)
aggagtgggggaggggaacgtcttcactgggtggtgatcagctgggacagttcaggtagggcaggtgagggacccccgaggccctggagccttgtcctgggatgggtttgaagaactcat

SEQ ID NO: 664287 - DNA, 120 bp, Artificial Sequence
  ENSG00000184863_61 (sequence is synthesized)
cactcatcacttgttttcttttggcttttgttgtttttgttttgttctgtttgttttgttttgtatttctttgttattttattgggaaggtaagcggaatgtgctcatagaccatcagac

SEQ ID NO: 664288 - DNA, 120 bp, Artificial Sequence
  ENSG00000184863_62 (sequence is synthesized)
gcttgtcgaaggcaggtcctagtcatgtaattgcacaggacaaggaggtcagcgtgtgtgatggcagcatgctgtgccggcacatcgtggagtcctagaaactctctagtccctgcggct

SEQ ID NO: 664289 - DNA, 120 bp, Artificial Sequence
  ENSG00000184863_63 (sequence is synthesized)
gttcccctcctctgctctctccctggagaggactgccagctcttaagaaacattcctggtgcggtgtctgcagtgccctttgtgggtgacttcaggcttcccgctttcgtggtgctcttc

SEQ ID NO: 664290 - DNA, 120 bp, Artificial Sequence
  ENSG00000184863_64 (sequence is synthesized)
ctgggattcgtttttttattaccctccctccctacttgtaggcctcagctatggcttgacgtaatcgcttttagacccaggttggcttcccttcattaagctatgatcctccaccccatt

SEQ ID NO: 664291 - DNA, 120 bp, Artificial Sequence
  ENSG00000184863_65 (sequence is synthesized)
ttttttttttttaatttggagtgggagggaggggggtgggcgagagaaagctcgaaaggtattattggtttttcaaaaaattagaggtgacgattctaccagggagttgactgataggag

SEQ ID NO: 664292 - DNA, 120 bp, Artificial Sequence
  ENSG00000184863_66 (sequence is synthesized)
tgtgtgcagggcaggaaaggttcggaggcacccgactaccaccactcggaaagccgctagtccagatcgactagggagaggcttagatactttagtgtatttaaagagcatttcagttaa

SEQ ID NO: 664293 - DNA, 120 bp, Artificial Sequence
  ENSG00000184863_67 (sequence is synthesized)
ctttttcagctatttttaaagtttgtgaatggagtgttattttggacattcttaaatatgaattctccaaaggcatttagccttgacttaatattaaatcctaaggattttatgtaaggt

SEQ ID NO: 664294 - DNA, 120 bp, Artificial Sequence
  ENSG00000184863_68 (sequence is synthesized)
ttttttgcaacctatttaattttttttaaatgcctaacttctgaggtgcataagcccgtggtttgtgtactggaactaaagcggaactcactgattcatattggatccccaggtatacct

SEQ ID NO: 664295 - DNA, 120 bp, Artificial Sequence
  ENSG00000184863_69 (sequence is synthesized)
tctgctggtagcatatggctggaaaaggccgtttgcctcacacattgtaacctgccttggctagaaaatgcttttaatgtctcaactctctcttttctgtgtcatgttttggtaggaaat

SEQ ID NO: 664296 - DNA, 120 bp, Artificial Sequence
  ENSG00000184863_70 (sequence is synthesized)
ctttaagattggcggacggaacaggtattttagtgagacacttctgagtacttgctttttcctttgacttctaaccaactaaaagagaaggaggtcttcatgttgatattttgcttggtt

SEQ ID NO: 664297 - DNA, 120 bp, Artificial Sequence
  ENSG00000184863_71 (sequence is synthesized)
ttattttactgattttaaaaggtatatagaaaaatgtaggcctttaaaaagaaacagcatgtagttttttattttaatatgttccatagagtggataggcagacaggtactattgtaatg

SEQ ID NO: 664298 - DNA, 120 bp, Artificial Sequence
  ENSG00000184863_72 (sequence is synthesized)
tattctgtatttaataatttaatatactctagaaagtagacctcatgcattcttttagcatgattttcttttaaactgcttttcattttaagggcacccgtggcggaagctggttttgca

SEQ ID NO: 664299 - DNA, 120 bp, Artificial Sequence
  ENSG00000184863_73 (sequence is synthesized)
aggactgtgtaagctgtatgcgttctagctgtatgcgttctgtagtcttttcttaggtgggtaacattttcaataacgcgcgcacagcacacaggggtgccctgagccgaaggagcaaaa

SEQ ID NO: 664300 - DNA, 120 bp, Artificial Sequence
  ENSG00000184863_74 (sequence is synthesized)
aaagccaccgctcgtttctataatccagctttgcttttcacaggcgtgggatccaggatggtgtcctctgtgaggacttgaactctggggctttaattccactgtttaattttcaggtac

SEQ ID NO: 664301 - DNA, 120 bp, Artificial Sequence
  ENSG00000184863_75 (sequence is synthesized)
cacagcagcaaagcacagagtgtgacctttttcatgtctgagctgattctgtttgctccacgtgcctgcttcttgctactgttcatttagtaatgggatcacctcaccatgccatgctct

SEQ ID NO: 664302 - DNA, 120 bp, Artificial Sequence
  ENSG00000184863_76 (sequence is synthesized)
gggctctccctctctgtccatttctgttttgctttcctggctaaacccatctaccattcttaacactggtagctcctgtcccattccaagactcactctctcagaccttcccatctccct

SEQ ID NO: 664303 - DNA, 120 bp, Artificial Sequence
  ENSG00000184863_77 (sequence is synthesized)
ggctttccatgctcctctccctccacctcctggcttcaactgggtgagggccgtattcctgccactctgctccgcctcagccttgagaactccacgtgggctgggtgggaaggtgctgac

SEQ ID NO: 664304 - DNA, 120 bp, Artificial Sequence
  ENSG00000184863_78 (sequence is synthesized)
gattttcacactgtgtttaccactccatcacctctcaacctttgcttcgacaggtcttcactcacgatttattcctccaggtctttgattggagagagtaactttttaattctgttgttt

SEQ ID NO: 664305 - DNA, 120 bp, Artificial Sequence
  ENSG00000184863_79 (sequence is synthesized)
tgcagtttggctctgtaggagtgagtggcgattcaaagatgccggcgtcccgcagtgtgcggttcgtgcccttaaccacccgcttctttgtttcccgcccctctgctttcgcaggagctc

SEQ ID NO: 664306 - DNA, 120 bp, Artificial Sequence
  ENSG00000184863_80 (sequence is synthesized)
ttgtgcttgagttcagtgttagtggtagcgtggctcactccacttggaggtggcggccgtctgaccgtgtgttactgctttgccgacggggcctcccggccctgatgcgtgtacactctg

SEQ ID NO: 664307 - DNA, 120 bp, Artificial Sequence
  ENSG00000184863_81 (sequence is synthesized)
cgggctgcaccgggtggctctggttgggggcgaagctgtgttgactgggagagcgttggaaattgagacatggagagatgacgggagtgcgtttctctgggtttgatctccatcctgttt

SEQ ID NO: 664308 - DNA, 120 bp, Artificial Sequence
  ENSG00000184863_82 (sequence is synthesized)
tctcccagacacaccacacctaccttgggggaatgccgttgcctgttccacccctttgttcacttcgcgttaactgctgtggtaactttttcaggatctgtgtgaagaatggtaatgacg

SEQ ID NO: 664309 - DNA, 120 bp, Artificial Sequence
  ENSG00000184863_83 (sequence is synthesized)
tagttgaaaggaaaatgtactgttgtgtgtttcatttgtgtgatttcgtaccaaaaaaatgtgtttgaactatattgtatgtaatttggaagtcgtgttaataaaaccctgcagtttcca

SEQ ID NO: 664310 - DNA, 120 bp, Artificial Sequence
  ENSG00000184863_84 (sequence is synthesized)
attgcagaagattcttccataaagaagtgatctgtagaacacttgcttctttatcccaccatatagtcttattagttgtgggaggagagagcgatggcttttttcacccagaaggccagc

SEQ ID NO: 664311 - DNA, 120 bp, Artificial Sequence
  ENSG00000184863_85 (sequence is synthesized)
tagccgcctgggggtggcatctgtgccacgggtagttgtgtcccaagacaaaatcatttcttgatttaaaacacagtgccctttgtgttggctacttcatattaaaataatacttgggaa

SEQ ID NO: 664312 - DNA, 120 bp, Artificial Sequence
  ENSG00000184863_86 (sequence is synthesized)
gtaagacaaataacctgttgtgcatacttagtatcagaacatttgcctcaaacgtttattttgaaattttcagattcttagttataaattttaagaaataaataccccagctgaacagat

SEQ ID NO: 664313 - DNA, 120 bp, Artificial Sequence
  ENSG00000184863_87 (sequence is synthesized)
cagatgaagaatacttgcaggcttatggtgggcaacaagggctgcaagagcaggaagactgtgtggctgaagatgaattagatgagattactgatgcccaggttgctcctgcaactgaag

SEQ ID NO: 664314 - DNA, 120 bp, Artificial Sequence
  ENSG00000184863_88 (sequence is synthesized)
aattaatcaaagtaggcaaagaaggttgactaggtaattgcggctgccgtccggagagtggccggactttggagtgagtgctgtttatggtactgtaaaactcattctttaaaatcattg

SEQ ID NO: 664315 - DNA, 120 bp, Artificial Sequence
  ENSG00000184863_89 (sequence is synthesized)
ctgtttatggatttaaaatgcttgaataaaatgtttaagataattaaaaaaaatttttttttgagtctgtggcctacagctgctcttgtacatgctgtggttcctggctggtcttgaaaa

SEQ ID NO: 664316 - DNA, 120 bp, Artificial Sequence
  ENSG00000184863_90 (sequence is synthesized)
ggtggcatggggatggtagctatggggccaggttgacccttcccaagaccctgaggttgtcagggcgaattctggacaagaccggtttatattttgtaccttttagtgtcttcatagcta

SEQ ID NO: 664317 - DNA, 120 bp, Artificial Sequence
  ENSG00000184863_91 (sequence is synthesized)
tatctttttttgtgttttctgcagttcctctgactttaatgagacaagttgactcgtttatagaaataatcactctgagcaaagcttgctgtgtgaaaggtctactacagactgctgctg

SEQ ID NO: 664318 - DNA, 120 bp, Artificial Sequence
  ENSG00000184863_92 (sequence is synthesized)
aacctgcaggtaatgcatcctgagtgaacctccagggaaaaaatgtgtagcttcaaggctttgtgttccataaagtttcagatttttatttgagcctactaatttgtggttatttaaaga

SEQ ID NO: 664319 - DNA, 120 bp, Artificial Sequence
  ENSG00000184863_93 (sequence is synthesized)
atagagtattagtctcaaatgtactgtttgttaaagacaacttttttcaacaatgttacttatctcaatacaagaaaaaaatgggaaaatgtcattttttgggaattgaaaaatgctact

SEQ ID NO: 664320 - DNA, 120 bp, Artificial Sequence
  ENSG00000184863_94 (sequence is synthesized)
tattataattgtttaaagggtatactactaataaaattaggacatgttttgataatacatttgctcatctgtataaaatttcatgagaggtttaccagtggaaatactttgtcaaattat

SEQ ID NO: 664321 - DNA, 120 bp, Artificial Sequence
  ENSG00000184863_95 (sequence is synthesized)
attcctgcagtagacagttttgaaaagagtctttgcatggagggaagaagatgttgctgttcactggttatttgaaggccttgagtgccctctgccgaccggcttctgcttcatgggttt

SEQ ID NO: 664322 - DNA, 120 bp, Artificial Sequence
  ENSG00000184863_96 (sequence is synthesized)
ggcttctgcttcatgggttgacatgcgtctgtaacatctttcttaccaagtgtatatttcttcttgtattgtagggttactattaaaatacatagcgatggtaaacttgaatcaactatt

SEQ ID NO: 664323 - DNA, 120 bp, Artificial Sequence
  ENSG00000184863_97 (sequence is synthesized)
taaaaatacgtggaatacgtatctaagccaaaaacggaaaatgaatattatctagggtgttaaaggaagataaaatgtttttaagaatttttctttttattaaaaaaatgcaattaatac

SEQ ID NO: 664324 - DNA, 120 bp, Artificial Sequence
  ENSG00000184863_98 (sequence is synthesized)
atccccattgcagaaattttcaagtatatataagaaaggaaattaaatactctcgttacctagaaacaattcaggagcttttttttttgtctttttttaaatgcacatcttctcgccacc

SEQ ID NO: 664325 - DNA, 120 bp, Artificial Sequence
  ENSG00000184863_99 (sequence is synthesized)
tgctttttccctccagtgtcacatatcatttgatcttttcatgtcagcgagttggttttgatgccatcgtttgagagtgctgtatgcggttccctttcatgctgtctgtgtggttgcatg

SEQ ID NO: 664326 - DNA, 120 bp, Artificial Sequence
  ENSG00000184863_100 (sequence is synthesized)
tgtgtatactggtttcagtactttagtatcatagtgctacagggaacatgctttagagttatgagtttgtctgcatacctagttttccttaggacaattcaatcctagaattactggatt

SEQ ID NO: 664327 - DNA, 120 bp, Artificial Sequence
  ENSG00000184863_101 (sequence is synthesized)
aaatataaaatttaaggtaatagcttctggcttattactgcattttagatagtattaccttcatcagcaagtctaaaatgaagttttggtatcgctgaaagttcctttcttgtgttgagg

SEQ ID NO: 664328 - DNA, 120 bp, Artificial Sequence
  ENSG00000184863_102 (sequence is synthesized)
gggtaagttgacaagttttatgagagcctctttgagtctgtgtatcacatagaatgtcctcatttgcagagaatgtttttgaagaaagaattaaaagttacctctgttatagtcttgtaa

SEQ ID NO: 664329 - DNA, 120 bp, Artificial Sequence
  ENSG00000184863_103 (sequence is synthesized)
cttcccacatgctttcagaagtggagcatgcctcatttctttctcttgcttttcatcattgtccatatcaggtcattttcagtcaggcacaggaagtgcagttttccactgtagtttgga

SEQ ID NO: 664330 - DNA, 120 bp, Artificial Sequence
  ENSG00000184863_104 (sequence is synthesized)
taggttcagtactctaaaataaaaccagtcactgcagatagatttccattgcagaagattcttccataaagaagtgatctgtagaacacttgcttctttatcccaccatatagtcttatt

SEQ ID NO: 664331 - DNA, 120 bp, Artificial Sequence
  ENSG00000184863_105 (sequence is synthesized)
cccggaatcgacctatggccagcagtcgtccccgccctgcttcaaacatttgggtttcaggagccgggcggaggtgactgccgcgtgtttgcgttgcacgcccaccgcccgaaacacggc

SEQ ID NO: 664332 - DNA, 120 bp, Artificial Sequence
  ENSG00000184867_0 (sequence is synthesized)
tgggtaccaactctattgcgcagctcgctgccgtgcgtttaacccaggcgaggaggaggaggagaaaattcccccagattcgggcagacacctccggcccacacagccgttcaccccccg

SEQ ID NO: 664333 - DNA, 120 bp, Artificial Sequence
  ENSG00000184867_1 (sequence is synthesized)
tcttttcagtcctggaaaaggaattcgggctttcattgtctaacgtcgacagtctatatttctgctcttcagtctgtccttaggatgaagctctaactgaactgaagtaaggagaaacag

SEQ ID NO: 664334 - DNA, 120 bp, Artificial Sequence
  ENSG00000184867_2 (sequence is synthesized)
ccttgaatctttggagggtctgtcttccttttgggctctgtgcaactgcagctacagtggaaaaaagcaaactgctcttgatcccaggccctgcctaagcctcagcagaacttgtaagcc

SEQ ID NO: 664335 - DNA, 120 bp, Artificial Sequence
  ENSG00000184867_3 (sequence is synthesized)
taaactgaagagcctcacccggacgagcaggcatcccttaaccttaagcaatccagttccacgccctggatcagtgaataaccccagctgcaccatgagccgcgttcgggatgctggctg

SEQ ID NO: 664336 - DNA, 120 bp, Artificial Sequence
  ENSG00000184867_4 (sequence is synthesized)
tgtagcggcggggatagtgataggggctggtgcctggtactgtgtctacaaatacaccagggggagagaccagaccaagaagagaatggccaagcccaaaaaccgggctgtggctgggac

SEQ ID NO: 664337 - DNA, 120 bp, Artificial Sequence
  ENSG00000184867_5 (sequence is synthesized)
tggagccagggctagagctgggctaagagccggattcacaatcgaccttgggtcaggattcagtcccccaaccccagtccgtgctgaagcagaggacagggcccaggatgaagcctctgc

SEQ ID NO: 664338 - DNA, 120 bp, Artificial Sequence
  ENSG00000184867_6 (sequence is synthesized)
tctggacacagttggagctgaggcagtggccccagctgcatccagcgctgaggctcagagtggggcaggcagtcaggcccaagaggcagatggagccggggttgggcctaaggccgaatc

SEQ ID NO: 664339 - DNA, 120 bp, Artificial Sequence
  ENSG00000184867_7 (sequence is synthesized)
agtagttggggctgcaatggcttctgcaatagcaccacctcccggggtgacagaggcccttggggctgcagaagcccctgcaatggcaggggctcccaaagtggcagaagctcccagaga

SEQ ID NO: 664340 - DNA, 120 bp, Artificial Sequence
  ENSG00000184867_8 (sequence is synthesized)
agcggagacttccagggcagcggtgcctcctgggacagtggtgcctaccgaagcggcagcacccactgaggtgaccgagggtcctggggtagcagcacctaccaaggtagctgaagctcc

SEQ ID NO: 664341 - DNA, 120 bp, Artificial Sequence
  ENSG00000184867_9 (sequence is synthesized)
cggggtggcatcgcctaccgaggcagctgaggctcctgtgccggcaacgcctactggggctgcagcacctactggggctgcagagtctcctggaacttctggttcccctagaacagcggt

SEQ ID NO: 664342 - DNA, 120 bp, Artificial Sequence
  ENSG00000184867_10 (sequence is synthesized)
ggttcctggaacatcagctgccaagaaagcaacccctggggctcacactggggctataccgaaagccacatcagcgactggagcggtacccaaaggtggaggcaagggtgtaaccaggtc

SEQ ID NO: 664343 - DNA, 120 bp, Artificial Sequence
  ENSG00000184867_11 (sequence is synthesized)
ggaatgggggcaagggcaagggcaagaaaagcaaagttgaagtagacgaactggggatgggcttccgtcctggagatggggctgcagcagctgctgcagcctctgctaatggcggacagg

SEQ ID NO: 664344 - DNA, 120 bp, Artificial Sequence
  ENSG00000184867_12 (sequence is synthesized)
ctttcctggcagaggtccctgattctgaggaaggggagtccgggtggactgacacagagtcagattcagactctgagcccgagacccagcgcagagggaggggaagaagacccgttgcca

SEQ ID NO: 664345 - DNA, 120 bp, Artificial Sequence
  ENSG00000184867_13 (sequence is synthesized)
tgcagaagcgcccctttccttatgaaattgatgagattctgggtgtccgcgatctcaggaaggtccttgccttgcttcagaaatctgatgatcctttcatccaacaggtagctttgctca

SEQ ID NO: 664346 - DNA, 120 bp, Artificial Sequence
  ENSG00000184867_14 (sequence is synthesized)
ctctgagcaacaatgccaattattcatgcaatcaagagacaatccgcaaattgggaggcctcccaattattgcaaacatgatcaacaaaactgatccacacattaaggaaaaagccttaa

SEQ ID NO: 664347 - DNA, 120 bp, Artificial Sequence
  ENSG00000184867_15 (sequence is synthesized)
tggccatgaataacctgagtgagaattatgaaaatcagggccggcttcaggtgtacatgaataaagtgatggatgatatcatggcctctaacctgaactcagcagttcaagtagttggac

SEQ ID NO: 664348 - DNA, 120 bp, Artificial Sequence
  ENSG00000184867_16 (sequence is synthesized)
taaaatttctaacaaacatgactattactaatgactaccaacacctgcttgtcaattccattgcaaactttttccgtttgctatctcagggaggtggaaaaatcaaggttgagattttga

SEQ ID NO: 664349 - DNA, 120 bp, Artificial Sequence
  ENSG00000184867_17 (sequence is synthesized)
aaatcctttcgaattttgctgaaaatccagatatgttgaagaaacttctcagtacccaagtgccagcatcatttagttccctctataattcttacgtggaatcagaaatccttattaatg

SEQ ID NO: 664350 - DNA, 120 bp, Artificial Sequence
  ENSG00000184867_18 (sequence is synthesized)
cccttactctatttgagattatctatgacaatctcagagcagaagtgtttaactatagagaattcaataaaggttcccttttttacttatgcactacatctggagtgtgtgttaagaaaa

SEQ ID NO: 664351 - DNA, 120 bp, Artificial Sequence
  ENSG00000184867_19 (sequence is synthesized)
ttagagccttagcaaatcaccatgacctcttagtgaaagtgaaagttataaaactagtgaacaaattctgattggttatgtaccgtcaaaagacttgaagaaatttcatgattttgcagt

SEQ ID NO: 664352 - DNA, 120 bp, Artificial Sequence
  ENSG00000184867_20 (sequence is synthesized)
gtggaagcgttgaaaattgaaagttactgcttttccacttgctcatatagtaaagggatcctttcagctgccagtgttgaataatgtatcatccagagtgatgttatctgtgacagtcac

SEQ ID NO: 664353 - DNA, 120 bp, Artificial Sequence
  ENSG00000184867_21 (sequence is synthesized)
cagctttaagctgaaccattttatgaataccaaataaatagacctcttgtactgaaaacatatttgtgactttaatcgtgctgcttggatagaaatatttttactggttcttctgaattg

SEQ ID NO: 664354 - DNA, 120 bp, Artificial Sequence
  ENSG00000184867_22 (sequence is synthesized)
acagtaaacctgtccattatgaatggcctactgttctattatttgttttgacttgaatttatccaccaaagacttcatttgtgtatcatcaataaagttgtatgtttcaactgacaaaaa

SEQ ID NO: 664355 - DNA, 120 bp, Artificial Sequence
  ENSG00000184867_23 (sequence is synthesized)
ctcctctgggtaccaactctattgcgcagctcgctgccgtgcgtttaacccaggcgaggaggaggaggagaaaattcccccagattcgggcaggcccgcaccccacattccgtcctgttt

SEQ ID NO: 664356 - DNA, 120 bp, Artificial Sequence
  ENSG00000184867_24 (sequence is synthesized)
gctctgtgcaactgcagctacagtggaaaaaagcaaactgctcttgatcccaggttggtatgtgcatgagcaccatgtaggggccttgggggtagggggtggggcatcatagcagaatct

SEQ ID NO: 664357 - DNA, 120 bp, Artificial Sequence
  ENSG00000184867_25 (sequence is synthesized)
gagatctctactgtttttccagctctctaccagctttacccatgtctgtactgcctctcgtccttccatttagatgctggaagttgtaggcattggcagagcaggctaaggttgaagatg

SEQ ID NO: 664358 - DNA, 120 bp, Artificial Sequence
  ENSG00000184867_26 (sequence is synthesized)
cctgtgtctgggtgctagcccgccaacgaagcattgtgtccctaaactcttctctaagtagaactggttagacacgaagtgagccagagccctaagcctcatttttatcctttaccccta

SEQ ID NO: 664359 - DNA, 120 bp, Artificial Sequence
  ENSG00000184867_27 (sequence is synthesized)
aaataaacgtggcagcgcatagaaggccagcagggagacacctccggcccacacagccgttcaccccccgtcttttcagtcctggaaaaggaattcggtctgtccttaggatgaagctct

SEQ ID NO: 664360 - DNA, 120 bp, Artificial Sequence
  ENSG00000184867_28 (sequence is synthesized)
ctctattgcgcagctcgctgccgtgcgtttaacccaggcgaggaggaggaggagaaaattcccccagattcgggcagactgctttccagacacctccggcccacacagccgttcaccccc

SEQ ID NO: 664361 - DNA, 120 bp, Artificial Sequence
  ENSG00000184867_29 (sequence is synthesized)
gcatagaaggccagcagggaggttgggaaagggtaaccaggaggcgggggtggggcatgcaatttggtaacaatctgggcggcacactcccaccctgactttccccaccaccgccccggc

SEQ ID NO: 664362 - DNA, 120 bp, Artificial Sequence
  ENSG00000184867_30 (sequence is synthesized)
accctcccatcccccagccgaccctctgtgatttgggagtgctgggaaatgggtgtaccagctgctgttggagaggtggcgggtttggcgctgtctgggcttcacgggaggtggggggga

SEQ ID NO: 664363 - DNA, 80 bp, Artificial Sequence
  ENSG00000184887_0 (sequence is synthesized)
gggctgcgctaggctgggctcgggcagggtcgcaggggcgggggtggcaggggagcgggtggcagccccgcgggtcacag

SEQ ID NO: 664364 - DNA, 120 bp, Artificial Sequence
  ENSG00000184887_1 (sequence is synthesized)
acagcgccgccgccgcccatgctgctgcccctagcctgcctgcacggccgcgtcgctcagtgcctgacctccttgcttttgcttgcagagccgctcccgaggccccggcgcggcgcgagg

SEQ ID NO: 664365 - DNA, 80 bp, Artificial Sequence
  ENSG00000184887_2 (sequence is synthesized)
gcgcggggcgcggcgtccacaggcgccgaggctgcccccgccgccccgcccgcgaagatggcggcggaactctacgctcc

SEQ ID NO: 664366 - DNA, 80 bp, Artificial Sequence
  ENSG00000184887_3 (sequence is synthesized)
cgccgcccgcgcccgcgccgcccacactcggcaacaaccaccaggagagccccggctggcggtgctgccgccccacgctg

SEQ ID NO: 664367 - DNA, 120 bp, Artificial Sequence
  ENSG00000184887_4 (sequence is synthesized)
tggcggtgctgccgccccacgctgcgcgagaggaacgcgctcatgttcaacaacgagctcatggccgacgtgcacttcgtcgtggggcccccgggggcgaccaggacggtgcccgcccac

SEQ ID NO: 664368 - DNA, 120 bp, Artificial Sequence
  ENSG00000184887_5 (sequence is synthesized)
aagtacgtcttggctgtcggcagctccgtcttctatgccatgttctacggagacctggcggaagtcaaatctgaaattcacattccagacgtggagcccgcagcctttctgatcctctta

SEQ ID NO: 664369 - DNA, 120 bp, Artificial Sequence
  ENSG00000184887_6 (sequence is synthesized)
aagtacatgtacagtgatgagatcgatctggaagccgacacggtgctggccactctgtacgctgctaagaagtacatcgtcccagcattggcaaaagcctgtgtcaactttctggagaca

SEQ ID NO: 664370 - DNA, 120 bp, Artificial Sequence
  ENSG00000184887_7 (sequence is synthesized)
agtttggaagccaagaacgcctgcgtcctgctgtcccagagccggctgtttgaggagcccgagctgacgcagcgctgctgggaggtcattgacgcacaggccgagatggccctacggtcc

SEQ ID NO: 664371 - DNA, 120 bp, Artificial Sequence
  ENSG00000184887_8 (sequence is synthesized)
gaaggcttctgtgagatagaccggcagacgctggagatcattgtcactcgggaggccctcaacaccaaagaggcggtggtcttcgaggccgtcctgaactgggccgaggcggagtgcaag

SEQ ID NO: 664372 - DNA, 120 bp, Artificial Sequence
  ENSG00000184887_9 (sequence is synthesized)
tcaccccacgaaacaagaggcatgttctggggcgagccctctatctggtccgaattccaaccatgaccctagaggagtttgccaacggcgctgcccagtcagacatcctgactctggagg

SEQ ID NO: 664373 - DNA, 120 bp, Artificial Sequence
  ENSG00000184887_10 (sequence is synthesized)
agacccacagcatcttcctgtggtacacggccaccaacaagccccgcctggactttcccctgaccaagaggaagggcctcgccccgcagaggtgccaccgattccagtcttctgcctacc

SEQ ID NO: 664374 - DNA, 120 bp, Artificial Sequence
  ENSG00000184887_11 (sequence is synthesized)
gcagcaaccagtggcggtaccgcgggcgctgcgacagcatccagtttgcagtggacagaagggtatttattgcagggctgggcctgtatggctccagctctgggaaggctgagtacagcg

SEQ ID NO: 664375 - DNA, 120 bp, Artificial Sequence
  ENSG00000184887_12 (sequence is synthesized)
tgaagattgagctcaagcggctcggggtggttctggctcagaacttgaccaagttcatgtcagacggatccagtaacaccttcccggtctggtttgaacacccggtccaggttgaacaag

SEQ ID NO: 664376 - DNA, 120 bp, Artificial Sequence
  ENSG00000184887_13 (sequence is synthesized)
acaccttctacacggccagtgccgtcctggacggcagcgaactcagctactttgggcaggaggggatgacggaagtgcagtgtggaaaggtggccttccagttccagtgctcctcggaca

SEQ ID NO: 664377 - DNA, 120 bp, Artificial Sequence
  ENSG00000184887_14 (sequence is synthesized)
gcaccaacgggactggggtccagggtgggcagatccctgagctcattttctatgcctgaggtgcccggggaggctgcagcaggtcagcgagtgagtggaggggaagtcaagatgctaact

SEQ ID NO: 664378 - DNA, 120 bp, Artificial Sequence
  ENSG00000184887_15 (sequence is synthesized)
gcttcttgacaccatgaaaggctgctcttaactttgtctctctttgacatgtagtcagctgaagcttgactgtgtagagacattttccacacagccagaacccagggattggagtcttag

SEQ ID NO: 664379 - DNA, 120 bp, Artificial Sequence
  ENSG00000184887_16 (sequence is synthesized)
gcatctctggtacagtggggtgcacgtctcaggtggaggaagatttacggctcaagacaggccccagatcccctcccagtggcacccatgccacctgctttgaggggttggatcttcctg

SEQ ID NO: 664380 - DNA, 120 bp, Artificial Sequence
  ENSG00000184887_17 (sequence is synthesized)
ctaccctcttggattctaagtggttccaagcttaacttgagaccttcccttcaaatctaaaattggcaaaaagtcacttaaaatagtggacttctgtaataaaggttgcctaaaataaca

SEQ ID NO: 664381 - DNA, 120 bp, Artificial Sequence
  ENSG00000184887_18 (sequence is synthesized)
gccgacgtgcacttcgtcgtggggcccccgggggcgaccaggacggtgcccgcccacaaggtgggtagcggcggcccctctcggaacgcgtgccccgtccgccccgtccgccgtgtggct

SEQ ID NO: 664382 - DNA, 120 bp, Artificial Sequence
  ENSG00000184895_0 (sequence is synthesized)
agaagtgagttttggatagtaaaataagtttcgaactctggcacctttcaattttgtcgcactctccttgtttttgacaatgcaatcatatgcttctgctatgttaagcgtattcaacag

SEQ ID NO: 664383 - DNA, 120 bp, Artificial Sequence
  ENSG00000184895_1 (sequence is synthesized)
cgatgattacagtccagctgtgcaagagaatattcccgctctccggagaagctcttccttcctttgcactgaaagctgtaactctaagtatcagtgtgaaacgggagaaaacagtaaagg

SEQ ID NO: 664384 - DNA, 120 bp, Artificial Sequence
  ENSG00000184895_2 (sequence is synthesized)
caacgtccaggatagagtgaagcgacccatgaacgcattcatcgtgtggtctcgcgatcagaggcgcaagatggctctagagaatcccagaatgcgaaactcagagatcagcaagcagct

SEQ ID NO: 664385 - DNA, 120 bp, Artificial Sequence
  ENSG00000184895_3 (sequence is synthesized)
acctcgtcggaaggcgaagatgctgccgaagaattgcagtttgcttcccgcagatcccgcttcggtactctgcagcgaagtgcaactggacaacaggttgtacagggatgactgtacgaa

SEQ ID NO: 664386 - DNA, 120 bp, Artificial Sequence
  ENSG00000184895_4 (sequence is synthesized)
agccacacactcaagaatggagcaccagctaggccacttaccgcccatcaacgcagccagctcaccgcagcaacgggaccgctacagccactggacaaagctgtaggacaatcgggtaac

SEQ ID NO: 664387 - DNA, 120 bp, Artificial Sequence
  ENSG00000184895_5 (sequence is synthesized)
attggctacaaagacctacctagatgctcctttttacgataacttacagccctcactttcttatgtttagtttcaatattgttttcttttctctggctaataaaggccttattcatttca

SEQ ID NO: 664388 - DNA, 120 bp, Artificial Sequence
  ENSG00000184897_0 (sequence is synthesized)
agagcgcagcgcgcacgcccagcgagttccagaggcgccagtggaagctgcggcggcggtgtctcgcgttcggcgggatttctcttcgctccggctcggcctaggtctacgtccccagct

SEQ ID NO: 664389 - DNA, 120 bp, Artificial Sequence
  ENSG00000184897_1 (sequence is synthesized)
gtctacgtccccagctccagccgccggctcggactcggtctctgacccccaactcggtcccctagtccggccccggctccgggccccccaaccctcgctccggcccggcccggcccccac

SEQ ID NO: 664390 - DNA, 120 bp, Artificial Sequence
  ENSG00000184897_2 (sequence is synthesized)
cgcgcgcccccagcccccctgcaccccctcggcccctcgccttcctcttcccggcgcggccccccggcttccgcgcgccgcccgccaccaatcctcttgctaccatgtccgtggagctcg

SEQ ID NO: 664391 - DNA, 120 bp, Artificial Sequence
  ENSG00000184897_3 (sequence is synthesized)
cccgccaccaatcctcttgctaccatgtccgtggagctcgaggaggccctgccagtgacgaccgccgagggaatggccaagaaggtgaccaaggctggcggctcggcggcgttgtcccca

SEQ ID NO: 664392 - DNA, 120 bp, Artificial Sequence
  ENSG00000184897_4 (sequence is synthesized)
tctaagaagaggaagaatagcaagaagaagaaccagccgggcaagtacagccagctggtggtggagaccatccgtaggctgggcgagcgcaacggctcgtcgctggccaagatctacacc

SEQ ID NO: 664393 - DNA, 120 bp, Artificial Sequence
  ENSG00000184897_5 (sequence is synthesized)
gaggccaagaaggttccgtggttcgaccagcagaatgggcgcacctacctcaagtactcgatcaaggcgctggtgcagaacgacacgcttctgcaggtgaagggcaccggcgccaacggt

SEQ ID NO: 664394 - DNA, 120 bp, Artificial Sequence
  ENSG00000184897_6 (sequence is synthesized)
cccccaccgcgcacaaagcgaagaaggcagccccgggcgcggccggctcccggcgcgcggacaagaagcccgccaggggccagaagccggagcagcgctcgcacaagaagggcgctggcg

SEQ ID NO: 664395 - DNA, 120 bp, Artificial Sequence
  ENSG00000184897_7 (sequence is synthesized)
ccaagaaggacaaaggcggcaaggccaagaagacggcggccgccgggggcaagaaggtgaagaaggcggccaagcccagcgtccccaaagtgcccaagggccgcaagtgagcgtgtcggc

SEQ ID NO: 664396 - DNA, 120 bp, Artificial Sequence
  ENSG00000184897_8 (sequence is synthesized)
cggtcagagcggccggcgtgggcttttcggtgtttttgtttttctaccccaagtgacgtagattttgtacggctcacgccggccggggccgcgaggcctggtctgagcctcagggagggg

SEQ ID NO: 664397 - DNA, 120 bp, Artificial Sequence
  ENSG00000184897_9 (sequence is synthesized)
ccccgggtcctctcagtctttcccctcccccaacgatgtagcgtttttcgttgtttgctttaggtttttgaaacagccccggcgacgcctctattggctctcggccttggcaacggccgt

SEQ ID NO: 664398 - DNA, 120 bp, Artificial Sequence
  ENSG00000184897_10 (sequence is synthesized)
cgtcatggttactggcccctaggcgccgatggccgaggccgcgcctgcccaccgggcggggtcgctggttggccgggcccaggcgcgcggggacgcggaggccgcgcatcctttcccagc

SEQ ID NO: 664399 - DNA, 120 bp, Artificial Sequence
  ENSG00000184897_11 (sequence is synthesized)
tccccaccctccttgcctttgggtgcgcgacaaacaatcgctccgggctcagggctgcgcggctcttcccttcattccatgggcctttttttgggcacaataaagcgtttaaacctttca

SEQ ID NO: 664400 - DNA, 120 bp, Artificial Sequence
  ENSG00000184898_0 (sequence is synthesized)
ccttttcttcgtagcctccaagggagctggaacaaaaaacgaaaccaaaacctgcctgctcgctcctctccccatcgcctgcgttccgctggttgtgggctttctgcggccgctgagggc

SEQ ID NO: 664401 - DNA, 120 bp, Artificial Sequence
  ENSG00000184898_1 (sequence is synthesized)
gcgtctcccctccgccatggcatcagttttgaatgtcaaggaatccaaagctcctgaaagaacggttgtagttgctggtcttccagttgacctttttagtgatcaattattggccgtatt

SEQ ID NO: 664402 - DNA, 120 bp, Artificial Sequence
  ENSG00000184898_2 (sequence is synthesized)
agtgaagagccacttccaagacattaagaatgagggcggagatgttgaagatgtgatatatccgacaagaaccaagggagttgcatatgtaatattcaaagaaaaaaaagttgcagagaa

SEQ ID NO: 664403 - DNA, 120 bp, Artificial Sequence
  ENSG00000184898_3 (sequence is synthesized)
tgtcatcagacaaaagaaacactggctagcaaggaagactagacatgctgaactcacagtctctctcagagtctctcattttggtgacaagatcttcagctctgtaaatgccatccttga

SEQ ID NO: 664404 - DNA, 120 bp, Artificial Sequence
  ENSG00000184898_4 (sequence is synthesized)
tctttctgtttttggaaaagaagttactctagaaactctggtaaaagacctgaaaaaaaaaatcccgagtttaagcttcagtcctttgaaacccaatggaagaatctccgtggaaggatc

SEQ ID NO: 664405 - DNA, 120 bp, Artificial Sequence
  ENSG00000184898_5 (sequence is synthesized)
atttctggctgtcaagaggctcagagaatctttgctagcaagagcatgttctctcttagaaaaagacagaaattttaccagtgaggagagaaagtggaatagacaaaatccccagaggaa

SEQ ID NO: 664406 - DNA, 120 bp, Artificial Sequence
  ENSG00000184898_6 (sequence is synthesized)
tctacagagaagtaataactctttggcatcagtcaggaccttagtacctgagactgctagaagtggagaaatgcttgtgcttgacacagatgtttttctttacctgaaacacaagtgtgg

SEQ ID NO: 664407 - DNA, 120 bp, Artificial Sequence
  ENSG00000184898_7 (sequence is synthesized)
atcttatgaaagcacactgaaaaaattccacattctgagtcaggagaaagtggatggtgaaatcaccacaatttgtctaaaaagcattcaagttggttctcagccaaacaatgcaaaaca

SEQ ID NO: 664408 - DNA, 120 bp, Artificial Sequence
  ENSG00000184898_8 (sequence is synthesized)
tgtaaaagagctcattgaggaatggtcacatgctctttacttaaagcttagaaaagagacatttattttggaaggaaaggaaaatagagagaaaagaatgatcaaaagggcatgtgaaca

SEQ ID NO: 664409 - DNA, 120 bp, Artificial Sequence
  ENSG00000184898_9 (sequence is synthesized)
attaagttcgagataccttgaagtcctgattaacctttataggacacacattgacattataggatcttcttctgacacttacctgtttaaaaaaggggtcatgaaattaatagggcaaaa

SEQ ID NO: 664410 - DNA, 120 bp, Artificial Sequence
  ENSG00000184898_10 (sequence is synthesized)
ggttagttaataaaatctcagcaatatagtcataagggctgctttctcttgctgagcagtgaccattgccatgaatgaggctagctttacacaccgtatctcatgaatccttatagtcat

SEQ ID NO: 664411 - DNA, 120 bp, Artificial Sequence
  ENSG00000184898_11 (sequence is synthesized)
ccttctttgtcagtgttgactatcctcatgttacagcggaagaaactaggatttggagaagttaaaacacttttctgaagttatccagttgacaaagaatgaggctgtggcttagcccag

SEQ ID NO: 664412 - DNA, 120 bp, Artificial Sequence
  ENSG00000184898_12 (sequence is synthesized)
ccagttgacaaagaatgaggctgtggcttagcccagtctatctgattacacagataatatctaaggaataaaactttgaaaaaaactcaccaaacttttttttttttttttttgagatgg

SEQ ID NO: 664413 - DNA, 120 bp, Artificial Sequence
  ENSG00000184898_13 (sequence is synthesized)
aaactcaccaaactttgaaggaatcttactttctctgtaactccaaattattagagaataataattattaagaagtagccttaacatatgagaaatttgaaaggtgattattatgccatg

SEQ ID NO: 664414 - DNA, 120 bp, Artificial Sequence
  ENSG00000184898_14 (sequence is synthesized)
ggcaatttcttaacatttacagtttgtgtttactccgtgtagaattagaatactggcaaaaatcactggggaaactacttagatggaaagcatatcttatgcaggtaatcattatttgac

SEQ ID NO: 664415 - DNA, 120 bp, Artificial Sequence
  ENSG00000184898_15 (sequence is synthesized)
tgcaagttgataatattaattgagtcattcttgtcacatccaactaaaacagactcaagaagctagggggaaaaagtacttgggacacataatattgctccaagaatgtaattctctgtg

SEQ ID NO: 664416 - DNA, 120 bp, Artificial Sequence
  ENSG00000184898_16 (sequence is synthesized)
agcctggctactgaaactgcttgctgtaacctgagaccagttttgtctatagctgctgagataacttgctgtaactctaggactaattttacctatggccattgcccaccagttggagct

SEQ ID NO: 664417 - DNA, 120 bp, Artificial Sequence
  ENSG00000184898_17 (sequence is synthesized)
ctatggccattgcccaccagttggagcttgccagctccccagggctttactaataccaatgaactttctcttaagatcacaagttggccgggcgtggtgactcatacctgtaatcccagc

SEQ ID NO: 664418 - DNA, 120 bp, Artificial Sequence
  ENSG00000184898_18 (sequence is synthesized)
aaaaaagaaagaccacaagtaacattcttagttttaaataaaaccctcaaccttctctttgtttgttggacatactaaagatcacctagaattgaaattctttcttctcaaaacattaaa

SEQ ID NO: 664419 - DNA, 120 bp, Artificial Sequence
  ENSG00000184898_19 (sequence is synthesized)
tttagttttgtgtctacattttcattttgactttgacatgcatggtgtcagaagtgggatacaaagctgactcacctcatggagaatcattggcctttggagttatggcatgaggtaccc

SEQ ID NO: 664420 - DNA, 120 bp, Artificial Sequence
  ENSG00000184898_20 (sequence is synthesized)
atgttggggccctttgaaccccctacacccccaccactttcacaggtaatcctttctccctccagtaagtatctcttggacagaactctcagatatggttcgagttctgttttatttggg

SEQ ID NO: 664421 - DNA, 120 bp, Artificial Sequence
  ENSG00000184898_21 (sequence is synthesized)
atatgattagggagaggtctttccccctcttgtttggtagatctgttgggtagaattattttccccctgttgacctcagctgcgaggtttggaccttgaggcttggatgagggaattttt

SEQ ID NO: 664422 - DNA, 120 bp, Artificial Sequence
  ENSG00000184898_22 (sequence is synthesized)
ccctttctttggagaaggcttatcattcttactggtaagcatgtattttattttctgtcctgtcttgtatttatttggcctttgtgtattcagtgcttgcatttacttggcttttgcata

SEQ ID NO: 664423 - DNA, 120 bp, Artificial Sequence
  ENSG00000184898_23 (sequence is synthesized)
gttgacattaaatcagagcacccacgaaatgagctctcaaagttcaaaggcatgccagaatattttctggaactccagctagtaacatattcaaacattacagggatcatttagtctgtt

SEQ ID NO: 664424 - DNA, 120 bp, Artificial Sequence
  ENSG00000184898_24 (sequence is synthesized)
agtctgtttttcttaaaactgaactaaaagatggaggctataaaatcatacactccaaataagatatgcatatttcattgatatcttgaggctaaaaaaaaataaaaacaaaaacaaaac

SEQ ID NO: 664425 - DNA, 120 bp, Artificial Sequence
  ENSG00000184898_25 (sequence is synthesized)
gatacaaatattgccttgttaaaaaatactgtctcaaaggtggctgaaactttcttttctagacctttcccctccccttcttacagtatcccctctttatccttctctaaacagctattc

SEQ ID NO: 664426 - DNA, 120 bp, Artificial Sequence
  ENSG00000184898_26 (sequence is synthesized)
taacatactacttaaataaaaacacttgaaaaccagcagatataaaacaaagtcattttgaccttcctactgttttttttttaaagcaaagattaaattcccatgtaaaaccttcctccc

SEQ ID NO: 664427 - DNA, 120 bp, Artificial Sequence
  ENSG00000184898_27 (sequence is synthesized)
tatacaaaaaagaatagcagcatttttatcttcaatgacaaagaattgagtccaagaaaatactgtataaaccttgttaaaaatcactcttgtcttttggtcctactcacataattcagc

SEQ ID NO: 664428 - DNA, 120 bp, Artificial Sequence
  ENSG00000184898_28 (sequence is synthesized)
acactttcacagttaactattttttgttcaatttagtgcactggtgagtgactcaaactgctttatcccaaatttgatttacagcctttataagattgcctattaaaaaagcttaaagct

SEQ ID NO: 664429 - DNA, 120 bp, Artificial Sequence
  ENSG00000184898_29 (sequence is synthesized)
tatccttagcccattttgtcagaaaaataatttgcatctaatcatttttataaactggtgaatttacgtgttttactatatcatgactaaaattctaaaataaaagttttaatatcttta

SEQ ID NO: 664430 - DNA, 120 bp, Artificial Sequence
  ENSG00000184898_30 (sequence is synthesized)
ccgctggttgtgggctttctgcggccgctgagggcgcgtctcccctccgccatggtggcggcattgcgcgctcctgaaattcacgtacggcggtgcagtataggcccgctccagaggctc

SEQ ID NO: 664431 - DNA, 120 bp, Artificial Sequence
  ENSG00000184898_31 (sequence is synthesized)
aggactaggctgtcacctcccacacccactgcccaggcgacggggacgccgccgttcgtcgaggagctgcttcgcaggctgttagggcttaactgttgtcctcccacgcctcggggggaa

SEQ ID NO: 664432 - DNA, 120 bp, Artificial Sequence
  ENSG00000184898_32 (sequence is synthesized)
ctcatgtcttatgtctgccttggtgcgaattcttgtcttagcaaattcaaaatttatccttctgtgttttgttttgtttccatcaatcgcttaaaagccttggcaaggcctttaattcct

SEQ ID NO: 664433 - DNA, 120 bp, Artificial Sequence
  ENSG00000184898_33 (sequence is synthesized)
gctctgaaatgctagagtcccggaaatgcaaaagcaagtacgtttttgttgacctggtggcggtagaggcgtcgtcattgaaaataaacaactgattttgagaaaatcaatataaacaaa

SEQ ID NO: 664434 - DNA, 120 bp, Artificial Sequence
  ENSG00000184900_0 (sequence is synthesized)
agccacgtgacccccgtgccggccaacgggtgcgccgggatttgggggataaagcgcggccccgcgcacagttgcggcgggagagcggcggggccgagagcgtgactcgcccgctccgcg

SEQ ID NO: 664435 - DNA, 120 bp, Artificial Sequence
  ENSG00000184900_1 (sequence is synthesized)
ctgcttcccccgcgccgcctccccgcgccgctcgcgcagccatgtccgaggagaagcccaaggagggtgtgaagacagagaatgaccacatcaacctgaaggtggccgggcaggacggct

SEQ ID NO: 664436 - DNA, 120 bp, Artificial Sequence
  ENSG00000184900_2 (sequence is synthesized)
ccgtggtgcagttcaagatcaagaggcacacgccgctgagcaagctgatgaaggcctactgcgagaggcagggcttgtcaatgaggcagatcagattcaggttcgacgggcagccaatca

SEQ ID NO: 664437 - DNA, 120 bp, Artificial Sequence
  ENSG00000184900_3 (sequence is synthesized)
atgaaactgacactccagcacagctggagatggaggacgaggacaccatcgacgtgttccagcagcagacgggaggtgtgccggagagcagcctggcagggcacagtttctagagggccc

SEQ ID NO: 664438 - DNA, 120 bp, Artificial Sequence
  ENSG00000184900_4 (sequence is synthesized)
gtccccagcccgggccgtccatcctcgcattgctgttgaatggtgagcacgtgaccatgccgaccacaaaggtgtctgcggaaactcgaggacattcaccacgatgattttcctctcttt

SEQ ID NO: 664439 - DNA, 120 bp, Artificial Sequence
  ENSG00000184900_5 (sequence is synthesized)
gatgtacttcaagtgcaactcaaaactatatctgcagggatgaatctgtaacttaaattgggccaatcagaattgttatctttgttcaggtaaaatgagttgcaagatattgtgggtact

SEQ ID NO: 664440 - DNA, 120 bp, Artificial Sequence
  ENSG00000184900_6 (sequence is synthesized)
tttgtgtgctcatttgtgttttccccccctcctacaacatttttttaaccccaaaattatagcctgaatgttcgcttttagtctggccagggatctgactcctgagttggttgcctctcc

SEQ ID NO: 664441 - DNA, 120 bp, Artificial Sequence
  ENSG00000184900_7 (sequence is synthesized)
actccagtcacatagagaattggtgtttcccgcagtggggatgcagctgttggacaggtattgggggcaaggttggtagggaggacagactgtcacttgctgttacaggcacaggtgatt

SEQ ID NO: 664442 - DNA, 120 bp, Artificial Sequence
  ENSG00000184900_8 (sequence is synthesized)
aaaatgctaaatattgcaaatttaagctttgtcagtatatggaaaagttgaagggaaaatactggaatgcttcttcaaaggttaaaaaataaccgagtcttttggtaatttgaccccacg

SEQ ID NO: 664443 - DNA, 120 bp, Artificial Sequence
  ENSG00000184900_9 (sequence is synthesized)
tgctctctggccctcaagcatgtaacctcggggtctgaggcccaggacccacccccctgccacccctcccaccccactccctgctcagtacctggcgttggtacacaggcaaggattggc

SEQ ID NO: 664444 - DNA, 120 bp, Artificial Sequence
  ENSG00000184900_10 (sequence is synthesized)
acaaccaaaattggcctttttctccctcttaatattgaagaaattcccacatttctcatttggtaatggtgttgtggcctcagatttcttctagtatttgcttctgatgaatgattatgg

SEQ ID NO: 664445 - DNA, 120 bp, Artificial Sequence
  ENSG00000184900_11 (sequence is synthesized)
tctatacataaaaaagtaagactaagtattgctgaatttgcagttatgttgtcgtgtataagagctacttccaagtgtggttacaaatgaacccatggaatgatgacttcatgttcttct

SEQ ID NO: 664446 - DNA, 120 bp, Artificial Sequence
  ENSG00000184900_12 (sequence is synthesized)
cgtgggtttgtgccgtgctgctttccaaataggtattgaatttatgcattagtctggtgatttcagttctgtgaaatattttgggatctataccaattaaacattttcatagttctgcct

SEQ ID NO: 664447 - DNA, 120 bp, Artificial Sequence
  ENSG00000184900_13 (sequence is synthesized)
attgtccttccctgaggctccattgctgcttggtggccattctctgcctttttacagtcacctgaacaatgacccatcatctcttgcttgcttgaaatcttgctgaaatgttctcatttc

SEQ ID NO: 664448 - DNA, 120 bp, Artificial Sequence
  ENSG00000184900_14 (sequence is synthesized)
ctgtttgctgtatgggctcgggtgggatgtttgttggctctgttgtgtttattcaccaatttgtacattatttgttgtcctttactactgtaaacagtaaatatagtttggtattctgtc

SEQ ID NO: 664449 - DNA, 120 bp, Artificial Sequence
  ENSG00000184900_15 (sequence is synthesized)
agcctgggtttgcccgcgctcgccgacgtggcggcctggccaagctcggcgccgctcaccagcgctgacctgggggtggtttgacctcccagtgcctcagtttcttcacaggagggtgtg

SEQ ID NO: 664450 - DNA, 120 bp, Artificial Sequence
  ENSG00000184900_16 (sequence is synthesized)
ggcacacgccgctgagcaagctgatgaaggcctactgcgagaggcaggtgcggcaccttgctcccccgcagagcctccccgtgtgcgcactggtcctgtgcgttccaggcatccccagag

SEQ ID NO: 664451 - DNA, 120 bp, Artificial Sequence
  ENSG00000184900_17 (sequence is synthesized)
tgcccgaggtgccctcttcgtggatgggcaggcgggggcttgtgctgtaaaattagtccaggctgggcttgtcccccatggccttttataaggtggagggacctagaggctcggagaagt

SEQ ID NO: 664452 - DNA, 120 bp, Artificial Sequence
  ENSG00000184900_18 (sequence is synthesized)
gtggtgggtttttcttcctgacagggcggctgcccggggtgctgtgttctccatggggtactaacatctgtgaagtctgtgatgctgaaggctcttgggggccctgctcaggtctggcca

SEQ ID NO: 664453 - DNA, 120 bp, Artificial Sequence
  ENSG00000184900_19 (sequence is synthesized)
ttctggggctgcaggtggcgtgtgccccacgccgctgtcaccctgtcctcgcgtatgagctggcctgaccctggagagacactgccctcatgtgcggtgtggttttccattttgttagga

SEQ ID NO: 664454 - DNA, 79 bp, Artificial Sequence
  ENSG00000184900_20 (sequence is synthesized)
agctttggacctggaaacagaagaatgcagtggcgcagtctcagctcactgtgcaagctctgcctcctgagttcacgcc

SEQ ID NO: 664455 - DNA, 120 bp, Artificial Sequence
  ENSG00000184903_0 (sequence is synthesized)
cggcggagggcggggtctgcgcggggacttcccccgggctgagctgcgcagcggggttttggccaaattgggcgagggcacaaaataaccacttaccccttctcaccgaggaagagcggg

SEQ ID NO: 664456 - DNA, 120 bp, Artificial Sequence
  ENSG00000184903_1 (sequence is synthesized)
agaaagggtatggcacagtcacaagggtgggtgaaaagatacatcaaggccttttgtaaaggcttctttgtggcggtgcctgtggcagtgactttcttggatcgggtcgcctgtgtggca

SEQ ID NO: 664457 - DNA, 120 bp, Artificial Sequence
  ENSG00000184903_2 (sequence is synthesized)
agagtagaaggagcatcgatgcagccttctttgaatcctggggggagccagtcatctgatgtggtgcttttgaaccactggaaagtgaggaattttgaagtacaccgtggtgacattgta

SEQ ID NO: 664458 - DNA, 120 bp, Artificial Sequence
  ENSG00000184903_3 (sequence is synthesized)
tcattggtgtctcctaaaaacccagaacagaagatcattaagagagtgattgctcttgaaggagatattgtcagaaccataggacacaaaaaccggtatgtcaaagtcccccgtggtcac

SEQ ID NO: 664459 - DNA, 120 bp, Artificial Sequence
  ENSG00000184903_4 (sequence is synthesized)
atctgggttgaaggtgatcatcatggacacagttttgacagtaattcttttgggccggtttccctaggacttctgcatgcccatgccacacatatcctgtggcccccagagcgctggcag

SEQ ID NO: 664460 - DNA, 120 bp, Artificial Sequence
  ENSG00000184903_5 (sequence is synthesized)
ggaatctgttcttcctccagagcgcttaccagtacagagagaagaggaatgactgcatgaatctacctgagttgctggcattgggaggccagttactggaaaggaatggaaaaaagaagc

SEQ ID NO: 664461 - DNA, 120 bp, Artificial Sequence
  ENSG00000184903_6 (sequence is synthesized)
ctccaaaagggaaaaacttctgacaatatgatgctgtgcgagaaatatttacagcacattaaaacgatctgtattattaaataaataattttcaaatgttaaacagtattaaatggcacc

SEQ ID NO: 664462 - DNA, 120 bp, Artificial Sequence
  ENSG00000184903_7 (sequence is synthesized)
tgattttgtgttaaattttagttccctgttgtttaatgcccccaaaatatgcagacctttgggaatataaaaatattgcacccacatgtcttaatggggctgaatttcagattatttgtt

SEQ ID NO: 664463 - DNA, 120 bp, Artificial Sequence
  ENSG00000184903_8 (sequence is synthesized)
acatatacttattatattgattgttgggttttgattttggtgcttgctgctgaaataaattgaaaattaatattcaataaaaatgatgtatttgtcacttgctgttaaggtagaacaaga

SEQ ID NO: 664464 - DNA, 120 bp, Artificial Sequence
  ENSG00000184903_9 (sequence is synthesized)
aggaacacatattatacacataatgatgggaattacattgtgatttgtactatctacaaaggagtaactgccagttaggaagaacagtaaacagtgatgttaaaataaaacaatgatttg

SEQ ID NO: 664465 - DNA, 120 bp, Artificial Sequence
  ENSG00000184903_10 (sequence is synthesized)
cggccgcgagtcctgcgtgatcgcgagcatgtgtgcgtgcgcgtgtttatctgaggcgcgtgcggcggccaccccagcctagtcctcttcttggtgccactggctaactaggttgagaaa

SEQ ID NO: 664466 - DNA, 120 bp, Artificial Sequence
  ENSG00000184903_11 (sequence is synthesized)
ccggcgccacaggcggcacacctggcccggagctggcccgctcctccccgccgagccggcgccccaacaacgcgccctctcccagtcctcacaaaggggcctagtccggcccccggctct

SEQ ID NO: 664467 - DNA, 120 bp, Artificial Sequence
  ENSG00000184903_12 (sequence is synthesized)
ggccgtgagggagcgctgtgggggcgcgctgccttctgcctggaagtgttgggcaggtggtgggagagcgtcaggcttgaacaacatgattttaaagcacgtgtctgtctgtcgtttttt

SEQ ID NO: 664468 - DNA, 120 bp, Artificial Sequence
  ENSG00000184903_13 (sequence is synthesized)
accccccagctccatggggacaaaagctactatgctctggacccttccagacctcactagatttacctcctcatctggctcttcatttgtggtacttttaatgcaccagtaatggtagga

SEQ ID NO: 664469 - DNA, 120 bp, Artificial Sequence
  ENSG00000184903_14 (sequence is synthesized)
gaggacattgaagcaaggagacactttctgaacctctgttgccaaccgagaagagttagcctaagattgaagaagtgcatatctgaggtcaaggacaaggcgggcagtgctcaatgtcat

SEQ ID NO: 664470 - DNA, 120 bp, Artificial Sequence
  ENSG00000184903_15 (sequence is synthesized)
tcttgaaggagatattgtcagagatgggagaaaactgaaaaggatatgaaacagaaacttccgaatcagtgacaagaatgaaagctttagatgataagattgtaacaatcaggtgtttaa

SEQ ID NO: 664471 - DNA, 120 bp, Artificial Sequence
  ENSG00000184903_16 (sequence is synthesized)
catgatgtgtctcattgtgatcgctttctttaaacaagttgtagccaggcctatacaatgtggtagccaaaatgctttgactactacattgaggaagttttctgaccctgttttctaaaa

SEQ ID NO: 664472 - DNA, 120 bp, Artificial Sequence
  ENSG00000184903_17 (sequence is synthesized)
aaacttgatcctaaagtatttgtattaatgatagtacacatattaactaatctcactgaaatgaacctcagtcagttttagagcagattctaggctagcagttctcacagcatggccaga

SEQ ID NO: 664473 - DNA, 120 bp, Artificial Sequence
  ENSG00000184903_18 (sequence is synthesized)
ggatcccaggggatccccactgggggcctatgagattaaaactactttcctaataatactaaagtgttacttgccgtttttcactctcattctcttgtgagtgtacagtggaattttcca

SEQ ID NO: 664474 - DNA, 120 bp, Artificial Sequence
  ENSG00000184903_19 (sequence is synthesized)
gatatgtaatattggagttgattgaatgcaggagcagatatgagaatccagctgttttctattaagccagaaactaaaaagatttgcaaaaatgtaaaaaaaaaaaatcattatttttac

SEQ ID NO: 664475 - DNA, 120 bp, Artificial Sequence
  ENSG00000184903_20 (sequence is synthesized)
ctagattattacctattgccatggaaatcgtttgttgtatttctatttcactacaggaacaagcagcaggagctaatggaccataagagggaaatttgttgtttaaacaatgattatctt

SEQ ID NO: 664476 - DNA, 120 bp, Artificial Sequence
  ENSG00000184903_21 (sequence is synthesized)
ttatatttggctaacatgaaaaggggaaagtacactttttctgtcacaccgcatgagaaggtctcctaaaaacccagaacagaagatcattaagagagtgattgctcttgaaggagatat

SEQ ID NO: 664477 - DNA, 120 bp, Artificial Sequence
  ENSG00000184903_22 (sequence is synthesized)
tgtcagccttccctgacatccagttccgtcttcgagtccctagacaatgtgatttttttgaatacatacgatagcaaatagaagagatttcctgaattcatgtgatagcaaatagaagag

SEQ ID NO: 664478 - DNA, 120 bp, Artificial Sequence
  ENSG00000184903_23 (sequence is synthesized)
ggtctgcgcggggacttcccccgggctgagctgcgcagcggggttttggccaaattgggcgagggcacaaaataaccacttaccccttctcaccgaggaagagcgggagaaaggtggcct

SEQ ID NO: 664479 - DNA, 120 bp, Artificial Sequence
  ENSG00000184903_24 (sequence is synthesized)
agttggttgaccagtgttgtttcctaaagcatgggagatctggcagagggaggtgggtgcatattatttttttgcatatctttcttatttttcactgtctctttctttctgtaaaaagtt

SEQ ID NO: 664480 - DNA, 120 bp, Artificial Sequence
  ENSG00000184903_25 (sequence is synthesized)
ggtcacagtggagttattgtttaagtatgttattcagtagctacatttatttaataacattattggttgcacaaaatatgatttgctgtcatcaagtcctcactatagtatatgtaggtg

SEQ ID NO: 664481 - DNA, 120 bp, Artificial Sequence
  ENSG00000184903_26 (sequence is synthesized)
gtctcctaaaaacccagaacagaagatcattaagagagtgattgctcttgaaggagatattgtcaggtttccctaggacttctgcatgcccatgccacacatatcctgtggcccccagag

SEQ ID NO: 664482 - DNA, 120 bp, Artificial Sequence
  ENSG00000184905_0 (sequence is synthesized)
gcgcccgcgcagaatcagctgtctgagctgcccaggcggcgggggagcagcgagcgggcttcagcgagccgcaggaggcacaggcctgtcctgggtccccgcaggtctgcgcgtctgttg

SEQ ID NO: 664483 - DNA, 120 bp, Artificial Sequence
  ENSG00000184905_1 (sequence is synthesized)
ttcccagcgctctgagaggcctgaaaaggaagagcaacctgtccagaatccccgcaggaaaaggaggggaaatctcgacatggaaaaactcttcaatgaaaatgaaggaatgccttcgaa

SEQ ID NO: 664484 - DNA, 120 bp, Artificial Sequence
  ENSG00000184905_2 (sequence is synthesized)
tcaaggaaagatagacaatgaagaacagccaccgcacgagggaaagccagaagtagcttgtattctggaagacaagaagttagaaaacgagggaaacacagaaaacacgggcaagagagt

SEQ ID NO: 664485 - DNA, 120 bp, Artificial Sequence
  ENSG00000184905_3 (sequence is synthesized)
tgaggaaccgttaaaggataaagaaaagccagagagtgcgggaaaggcaaaaggagaaggaaagtcagagaggaagggaaagtcagagatgcagggaggatcaaagacagagggaaagcc

SEQ ID NO: 664486 - DNA, 120 bp, Artificial Sequence
  ENSG00000184905_4 (sequence is synthesized)
agagagagggggaagggcagagggtgaaggagagccagacagtgaaagagagccagagagtgagggagagccagaaagtgaaacaagggctgcaggaaagcgcccagctgaggatgatat

SEQ ID NO: 664487 - DNA, 120 bp, Artificial Sequence
  ENSG00000184905_5 (sequence is synthesized)
acccaggaaagccaaaagaaaaaccaacaaggggctggctcagtacctcaagcaatataaggaagccatacatgatatgaatttcagcaatgaggacatgataagagaatttgacaacat

SEQ ID NO: 664488 - DNA, 120 bp, Artificial Sequence
  ENSG00000184905_6 (sequence is synthesized)
ggctagggtggaggataaaaggagaaaaagcaaacagaaattgggggcgtttttgtggatgcaaagaaatttacaggaccccttctatcctaggggtccaagggaattcaggggtggctg

SEQ ID NO: 664489 - DNA, 120 bp, Artificial Sequence
  ENSG00000184905_7 (sequence is synthesized)
cagggccccacgaagggacactgaagacattccttatgtgtagtgtccctggcaggcatttgtcaggccatatgttttaaccttatggtaatactttgctttagtcgttcctcctgctac

SEQ ID NO: 664490 - DNA, 120 bp, Artificial Sequence
  ENSG00000184905_8 (sequence is synthesized)
cagtagcgttttgacccacctgccagtgtttgcttgctctatgtttcagtagcagattttcacacatgtgcattgcagagacgtcatgattcgtggaaaaataaagcagcttataatatc

SEQ ID NO: 664491 - DNA, 120 bp, Artificial Sequence
  ENSG00000184905_9 (sequence is synthesized)
aaaggaagagcaacctgtccagaatccccgcagatgccatgataactgtggcagctgaacagttccaccgctaaagaagactcttgggaccccaaatggtcatgattgcaaatctacagt

SEQ ID NO: 664492 - DNA, 120 bp, Artificial Sequence
  ENSG00000184905_10 (sequence is synthesized)
ttgttggagaaaaaaatggatgcaacatagcaacagcattaaggagaaacatcatagtcaaaagctgtctaatagtaagggatctggagtggccagttccccaggtgatgactatgcagc

SEQ ID NO: 664493 - DNA, 120 bp, Artificial Sequence
  ENSG00000184905_11 (sequence is synthesized)
tttttcatggaccacaacatgttcattacaaaggatttaaaactcaaatgtattgatgggtctgccgaactgctaaagtgttacctgacaagtttcctgagagtgaactcaacagagaaa

SEQ ID NO: 664494 - DNA, 120 bp, Artificial Sequence
  ENSG00000184905_12 (sequence is synthesized)
agagcatctgcagacaagatattaacccatgagaacagcacaaccactatcatgcaggtattttttcctggcctagcctgcaatatctcagttttgtgaggacaatatttatgtatgcaa

SEQ ID NO: 664495 - DNA, 120 bp, Artificial Sequence
  ENSG00000184905_13 (sequence is synthesized)
aacaaagaaataaggaatacacataaatgattattttggcaaaaagaatttggaagatattaatgagaggcccaagcagcaccaaggtgatatccatgtgtacctggttactgtaactat

SEQ ID NO: 664496 - DNA, 120 bp, Artificial Sequence
  ENSG00000184905_14 (sequence is synthesized)
gacagggctttgacaccataaatcctctatcagtaaagggtgcaggacccgggaaaaagggcatagtgcccagcagacatggaagtatccaggagagagtggcatctacttcttagctgc

SEQ ID NO: 664497 - DNA, 120 bp, Artificial Sequence
  ENSG00000184905_15 (sequence is synthesized)
ctggaaatattcctagacatggtgagaactccctcagtcctcctccaatgtgtctgattccatcgactttcctgccactgtatgggaatagtttaggagccattcctcccctgagtgcct

SEQ ID NO: 664498 - DNA, 120 bp, Artificial Sequence
  ENSG00000184905_16 (sequence is synthesized)
agtggggaccaggtcacaacacagctcacatacttagtatctcatctgatccaccaggcagtcctgtgaggcaagtattacccttattttacaaatgacaagattgactcttacagcaat

SEQ ID NO: 664499 - DNA, 120 bp, Artificial Sequence
  ENSG00000184905_17 (sequence is synthesized)
agatctgttagaatttccaggttgattcctttagcttttagtcccagagataatatgaattttacctgtcatcttatgttctgataacaggaattctgagtgtctttattgcctttgtaa

SEQ ID NO: 664500 - DNA, 120 bp, Artificial Sequence
  ENSG00000184905_18 (sequence is synthesized)
gcgcaccaaacagttcaatttcttagtatgtattgtattcagcttttatttatttttcagtatgacaaatatttagtattatattttagtatgggtctgagtatgcagacccagcactca

SEQ ID NO: 664501 - DNA, 120 bp, Artificial Sequence
  ENSG00000184905_19 (sequence is synthesized)
tgttagaagacccaggaacatgatagaggacctagcaacagtgcccactgacctggctcgacctagggaagacatagggatgtgcacagcagcagaggaatatcatggaggtacatacaa

SEQ ID NO: 664502 - DNA, 120 bp, Artificial Sequence
  ENSG00000184905_20 (sequence is synthesized)
gaggtggtaggactcatttttgaatacaggtgagacctattcttggctacccttcaggaataaccattgcctgctttttagtgtacatgctttcagggttttctttgcgcagaaatgcat

SEQ ID NO: 664503 - DNA, 120 bp, Artificial Sequence
  ENSG00000184905_21 (sequence is synthesized)
tcagtgtgaaggcgtgcgctgccggcggaccctgggacaggggtggagggggctggcagtaggattggggagggggcggagaagggatccggtagattggggaggagggggatgcggagt

SEQ ID NO: 664504 - DNA, 120 bp, Artificial Sequence
  ENSG00000184905_22 (sequence is synthesized)
cgcgggggcgggggcagtggagggagaacccccgaagcaagcctggctcgccttctcgacgcccccttgcactgagtcctccatccattttagtgctggaaatggggggtgggggtagcg

SEQ ID NO: 664505 - DNA, 120 bp, Artificial Sequence
  ENSG00000184905_23 (sequence is synthesized)
agtgaaacgtagacatattctggaaataaccccttctcacaatctacacccatggaaacacttgatctccgcaaaaatgaggtggcgctggggcaggttgcctccggggaagggggacac

SEQ ID NO: 664506 - DNA, 120 bp, Artificial Sequence
  ENSG00000184905_24 (sequence is synthesized)
agagacaaacgcagtttggaaagcatcctggtttggtgcccgaggcctggaaagaaatggcggctggggtgcgggggaggtaggggaggaaaacggtgggtaagcagggcctggactcag

SEQ ID NO: 664507 - DNA, 120 bp, Artificial Sequence
  ENSG00000184905_25 (sequence is synthesized)
gaaagggaaccgagtccctgtgagcccgctaagcgcgcagcccctgcccctgtctcctgtctgtccgcaggtctgcgcgtctgttgttcccagcgctctgagaggcctgaaaaggaagag

SEQ ID NO: 664508 - DNA, 120 bp, Artificial Sequence
  ENSG00000184908_0 (sequence is synthesized)
ggggggaggatgttgattgttggaacacacacctgtccaggtgcaggggagctggaggctctgtgagaggagggccagctcagccacagcaggaggactgacaggggcctgatggaggag

SEQ ID NO: 664509 - DNA, 120 bp, Artificial Sequence
  ENSG00000184908_1 (sequence is synthesized)
tttgtggggctgcgtgaaggctcctcagggaaccctgtgactctgcaggagctgtggggcccctgtccccgcatccgccgaggcatccgaggtggcctggagtggctgaagcagaagctc

SEQ ID NO: 664510 - DNA, 120 bp, Artificial Sequence
  ENSG00000184908_2 (sequence is synthesized)
ttccgcctgggcgaggactggtacttcctgatgaccctcggggtgctcatggccctggtcagctgtgccatggacttggctgttgagagtgtggtccgagcgcaccagtggctgtacagg

SEQ ID NO: 664511 - DNA, 120 bp, Artificial Sequence
  ENSG00000184908_3 (sequence is synthesized)
gagattggggacagccacctgctccggtatctctcctggactgtgtaccctgtggccctcgtctctttctcttcaggcttctctcagagcatcacaccctcctctggaggttctggaatc

SEQ ID NO: 664512 - DNA, 120 bp, Artificial Sequence
  ENSG00000184908_4 (sequence is synthesized)
ccggaggtgaagaccatgttggcgggtgtggtcttggaggactacctggatatcaagaactttggggccaaagtggtgggcctctcctgcaccctggcctgtggcagcaccctcttcctc

SEQ ID NO: 664513 - DNA, 120 bp, Artificial Sequence
  ENSG00000184908_5 (sequence is synthesized)
gggaaagtgggccctttcgtgcacctgtctgtgatgatggctgcctacctgggccgtgtgcgcaccacgaccatcggggagcctgagaacaagagcaagcaaaacgaaatgctggtggca

SEQ ID NO: 664514 - DNA, 120 bp, Artificial Sequence
  ENSG00000184908_6 (sequence is synthesized)
gcggcggcagtgggcgtggccacagtctttgcagctcccttcagcggcgtcctgttcagcatcgaggtcatgtcttcccacttctctgtctgggattactggaggggcttctttgcggcc

SEQ ID NO: 664515 - DNA, 120 bp, Artificial Sequence
  ENSG00000184908_7 (sequence is synthesized)
acctgcggggccttcatgttccggctcctggcggtcttcaacagcgagcaggagaccatcacctccctctacaagaccagtttccgggtggacgttcccttcgacctgcctgagatcttc

SEQ ID NO: 664516 - DNA, 120 bp, Artificial Sequence
  ENSG00000184908_8 (sequence is synthesized)
ttttttgtggcgctggggggtctctgtggcatcctgggcagcgcttacctcttctgtcagcgaatcttctttggcttcatcaggaacaataggttcagctccaaactgctggccaccagc

SEQ ID NO: 664517 - DNA, 120 bp, Artificial Sequence
  ENSG00000184908_9 (sequence is synthesized)
aagcctgtgtactccgctctggccaccttggttctcgcctccatcacctacccacccagcgccggccgcttcctagcttctcggctgtccatgaagcagcatctggactcgctgttcgac

SEQ ID NO: 664518 - DNA, 120 bp, Artificial Sequence
  ENSG00000184908_10 (sequence is synthesized)
cgaggagctcgacccccagcacctgtggtgggaatggtaccacccgcggttcaccatctttgggacccttgccttcttcctggttatgaagttctggatgctgattctggccaccaccat

SEQ ID NO: 664519 - DNA, 120 bp, Artificial Sequence
  ENSG00000184908_11 (sequence is synthesized)
ccccatgcctgccgggtacttcatgcccatctttgtctatggagctgctatcgggcgcctctttggggagactctctcttttatcttccctgagggcatcgtggctggagggatcaccaa

SEQ ID NO: 664520 - DNA, 120 bp, Artificial Sequence
  ENSG00000184908_12 (sequence is synthesized)
tcccatcatgccaggggggtatgctctggcaggggctgcagccttctcaggggctgtgacccacaccatctccacggcgctgctggccttcgaggtgaccggccagatagtgcatgcact

SEQ ID NO: 664521 - DNA, 120 bp, Artificial Sequence
  ENSG00000184908_13 (sequence is synthesized)
gcccgtgctgatggcggtgctggcagccaacgccattgcacagagctgccagccctccttctatgatggcaccgtcattgtcaagaagctgccatacctgccacggattctgggccgcaa

SEQ ID NO: 664522 - DNA, 120 bp, Artificial Sequence
  ENSG00000184908_14 (sequence is synthesized)
catcggttcccaccgcgtgagggtggagcacttcatgaaccacagcatcaccacactggccaaggacatgccactggaggaggtggtcaaggttgtgacctccacagacgtggccaagta

SEQ ID NO: 664523 - DNA, 120 bp, Artificial Sequence
  ENSG00000184908_15 (sequence is synthesized)
tcccctggtggagagcacagagtcccagatcctggtgggcatagtgcgaagggcccagctggtgcaggccctgaaggctgagcctccttcctgggctcctggacaccagcagtgtctcca

SEQ ID NO: 664524 - DNA, 120 bp, Artificial Sequence
  ENSG00000184908_16 (sequence is synthesized)
ggacatcttggctgcaggctgccccacagaaccagtgaccctgaagctgtccccagagacttccctgcatgaggcacacaacctctttgagctgttgaaccttcattccctctttgtgac

SEQ ID NO: 664525 - DNA, 120 bp, Artificial Sequence
  ENSG00000184908_17 (sequence is synthesized)
gtcgcggggcagagctgtgggctgcgtgtcctgggtggagatgaagaaagcaatttccaacctgacaaatccgccagccccaaagtgagccggcccagcaagatgaaacagggcacccca

SEQ ID NO: 664526 - DNA, 120 bp, Artificial Sequence
  ENSG00000184908_18 (sequence is synthesized)
gctgacctggtactgaggttgggctgagaccctgcttctcttcccccatcaccacctgcccctccctccagcccagctccattctttggcataacaggcaactttaacctagcccagaag

SEQ ID NO: 664527 - DNA, 120 bp, Artificial Sequence
  ENSG00000184908_19 (sequence is synthesized)
aggatggctcatcctgggtgggacgatggctcctgccttgaaagacaaaaatcccaccttgggcagagctgagtgtgagaagatggaaaaccagtatctgccagttgctcagtgactggc

SEQ ID NO: 664528 - DNA, 120 bp, Artificial Sequence
  ENSG00000184908_20 (sequence is synthesized)
catcacattaatgaatgatgagattggagtacactgtcaccaagggcaggcacagatgccttctggggttgtctggttcccagtgagaggctcctgagaaaaataaagctggttcccaga

SEQ ID NO: 664529 - DNA, 120 bp, Artificial Sequence
  ENSG00000184908_21 (sequence is synthesized)
aacattatacagacttgggtttgaaatccacgtatgaccctggcccgttggcctctctgagcccggcttcctcctctacaaaatggagatcgcaaccgtccccacccgatagcgagaggg

SEQ ID NO: 664530 - DNA, 120 bp, Artificial Sequence
  ENSG00000184908_22 (sequence is synthesized)
cgcacacccgcattccaggctggacgggtctctgggcagcgggctcctccccgcccagggcgcatgccctgccctcccctcctgtctgtccctgtccgggctgcaggagagcaggacaga

SEQ ID NO: 664531 - DNA, 120 bp, Artificial Sequence
  ENSG00000184908_23 (sequence is synthesized)
tgggtcagggaggaggtgacatggggagggggtcctacagtcacaggtgggtgggggtggagggcccacctgagatcagtgtcgcccccaggcgtcctgttcagcatcgaggtcatgtct

SEQ ID NO: 664532 - DNA, 120 bp, Artificial Sequence
  ENSG00000184908_24 (sequence is synthesized)
aaccacagcatcaccacactggccatcacattaatgaatgatgagattggagtacactgtcaccaagggcaggcacagatgccttctggggttgtctggttcccagtgagaggctcctga

SEQ ID NO: 664533 - DNA, 120 bp, Artificial Sequence
  ENSG00000184911_0 (sequence is synthesized)
actgtcctctcggcctggcacacagcgctccggccgccgaatgcccgtggacgcgcatctcttcccagagttcctgcttcctgggccagccaaagccgcagagaacgcctcagggtcttg

SEQ ID NO: 664534 - DNA, 120 bp, Artificial Sequence
  ENSG00000184911_1 (sequence is synthesized)
cctgctgtgagtgccttgaagagggagcagcgggcacgatcaaagagacacctggctcaaggaccaataaggagtatggctgcccctcccaaagctcccatccgtgtcaggaatttgacc

SEQ ID NO: 664535 - DNA, 120 bp, Artificial Sequence
  ENSG00000184911_2 (sequence is synthesized)
atcagagcaggagccctcactgggaaggagaacaacatgctgcagcccgagacccacatcttcacagcccccgaggaggggagctcccaaggggctctgctgcttggccaggccccagaa

SEQ ID NO: 664536 - DNA, 120 bp, Artificial Sequence
  ENSG00000184911_3 (sequence is synthesized)
cctttgtctctgccctgtactccagtgaccttggagcagcaactggtttctccttctggggatccccacagggcccctgccctgcccagcatatgctcaactctgatcctccagccctgt

SEQ ID NO: 664537 - DNA, 120 bp, Artificial Sequence
  ENSG00000184911_4 (sequence is synthesized)
ctgagaaactctgcccaggcccctcctgactccatctccctgcaccagccttgcaacccaccagctcctgctggagataaaggattccagcctcccagcccctctctccgccccaggcca

SEQ ID NO: 664538 - DNA, 120 bp, Artificial Sequence
  ENSG00000184911_5 (sequence is synthesized)
gccagctccatctcgctgcctattggacatctgggatgcatctccctcttgagctaggaacccagaggaggaggcctcaatagagcactgcctatttggtatccagtttctgaatgtgca

SEQ ID NO: 664539 - DNA, 120 bp, Artificial Sequence
  ENSG00000184911_6 (sequence is synthesized)
aaatggttaacgtccaaaacgcttaacgtctttttttaaagccttcaggtgttttataagctttttattatatggggcaactccttggctgagggtggatattcttgtacctctgtccct

SEQ ID NO: 664540 - DNA, 120 bp, Artificial Sequence
  ENSG00000184911_7 (sequence is synthesized)
tactcttttggatgctggggcctttttctgtctcataaagacaggattgtgcaatctaagttgatcagtctctcagtggggttctgtgtgagttcatatgccagagtttttattcgtctt

SEQ ID NO: 664541 - DNA, 120 bp, Artificial Sequence
  ENSG00000184911_8 (sequence is synthesized)
gtgattgctgacatacctgtgcactcatgtgtatacccctgcatgtggaaacatgaagatgttttcactttgtgtctaggtttatgtacgtgaacaaataataaaccgttgttgttataa

SEQ ID NO: 664542 - DNA, 120 bp, Artificial Sequence
  ENSG00000184911_9 (sequence is synthesized)
ctcctcctcctcctcctcctcctccttctcctcctcctcccggtctgagggcggcggtctccgactcaagaccctggggctccgggtcttcttagcagccgccgcagcagccgcggcgac

SEQ ID NO: 664543 - DNA, 120 bp, Artificial Sequence
  ENSG00000184911_10 (sequence is synthesized)
ctgtgaccgctgccacaaccatttgggtatcactgcccaaatcaggggccacaagcatttctgcctcttccaggcctgcgagtgtcacaattgtgccctcttctcatgagtatggtgtct

SEQ ID NO: 664544 - DNA, 120 bp, Artificial Sequence
  ENSG00000184911_11 (sequence is synthesized)
ctctcccggaatccctttcgggaggactccttgctccagccccctgagccctggcctttggccaatgaggcagggctcatgggattgcttttgattcggaggtccgggagggagtggatg

SEQ ID NO: 664545 - DNA, 80 bp, Artificial Sequence
  ENSG00000184916_0 (sequence is synthesized)
agtctcgttccgaacttgttggctgcggtgccgggagcgcgggcgcgcagagccgaggccgggacccgctgccttcaccg

SEQ ID NO: 664546 - DNA, 120 bp, Artificial Sequence
  ENSG00000184916_1 (sequence is synthesized)
gggcgcagggccgggggcgccttccccggcggctgctgctgctgctggcgctctgggtgcaggcggcgcggcccatgggctatttcgagctgcagctgagcgcgctgcggaacgtgaacg

SEQ ID NO: 664547 - DNA, 120 bp, Artificial Sequence
  ENSG00000184916_2 (sequence is synthesized)
gggagctgctgagcggcgcctgctgtgacggcgacggccggacaacgcgcgcggggggctgcggccacgacgagtgcgacacgtacgtgcgcgtgtgccttaaggagtaccaggccaagg

SEQ ID NO: 664548 - DNA, 120 bp, Artificial Sequence
  ENSG00000184916_3 (sequence is synthesized)
gagtaccaggccaaggtgacgcccacggggccctgcagctacggccacggcgccacgcccgtgctgggcggcaactccttctacctgccgccggcgggcgctgcgggggaccgagcgcgg

SEQ ID NO: 664549 - DNA, 120 bp, Artificial Sequence
  ENSG00000184916_4 (sequence is synthesized)
gcggcgaccaggacccgggcctcgtcgtcatccccttccagttcgcctggccgcgctcctttaccctcatcgtggaggcctgggactgggacaacgataccaccccgaatgaggagctgc

SEQ ID NO: 664550 - DNA, 120 bp, Artificial Sequence
  ENSG00000184916_5 (sequence is synthesized)
tgatcgagcgagtgtcgcatgccggcatgatcaacccggaggaccgctggaagagcctgcacttcagcggccacgtggcgcacctggagctgcagatccgcgtgcgctgcgacgagaact

SEQ ID NO: 664551 - DNA, 120 bp, Artificial Sequence
  ENSG00000184916_6 (sequence is synthesized)
actacagcgccacttgcaacaagttctgccggccccgcaacgactttttcggccactacacctgcgaccagtacggcaacaaggcctgcatggacggctggatgggcaaggagtgcaagg

SEQ ID NO: 664552 - DNA, 120 bp, Artificial Sequence
  ENSG00000184916_7 (sequence is synthesized)
aagctgtgtgtaaacaagggtgtaatttgctccacgggggatgcaccgtgcctggggagtgcaggtgcagctacggctggcaagggaggttctgcgatgagtgtgtcccctaccccggct

SEQ ID NO: 664553 - DNA, 120 bp, Artificial Sequence
  ENSG00000184916_8 (sequence is synthesized)
gcgtgcatggcagttgtgtggagccctggcagtgcaactgtgagaccaactggggcggcctgctctgtgacaaagacctgaactactgtggcagccaccacccctgcaccaacggaggca

SEQ ID NO: 664554 - DNA, 120 bp, Artificial Sequence
  ENSG00000184916_9 (sequence is synthesized)
cgtgcatcaacgccgagcctgaccagtaccgctgcacctgccctgacggctactcgggcaggaactgtgagaaggctgagcacgcctgcacctccaacccgtgtgccaacgggggctctt

SEQ ID NO: 664555 - DNA, 120 bp, Artificial Sequence
  ENSG00000184916_10 (sequence is synthesized)
gccatgaggtgccgtccggcttcgaatgccactgcccatcgggctggagcgggcccacctgtgcccttgacatcgatgagtgtgcttcgaacccgtgtgcggccggtggcacctgtgtgg

SEQ ID NO: 664556 - DNA, 120 bp, Artificial Sequence
  ENSG00000184916_11 (sequence is synthesized)
accaggtggacggctttgagtgcatctgccccgagcagtgggtgggggccacctgccagctggacgccaatgagtgtgaagggaagccatgccttaacgctttttcttgcaaaaacctga

SEQ ID NO: 664557 - DNA, 120 bp, Artificial Sequence
  ENSG00000184916_12 (sequence is synthesized)
ttggcggctattactgtgattgcatcccgggctggaagggcatcaactgccatatcaacgtcaacgactgtcgcgggcagtgtcagcatgggggcacctgcaaggacctggtgaacgggt

SEQ ID NO: 664558 - DNA, 120 bp, Artificial Sequence
  ENSG00000184916_13 (sequence is synthesized)
accagtgtgtgtgcccacggggcttcggaggccggcattgcgagctggaacgagacgagtgtgccagcagcccctgccacagcggcggcctctgcgaggacctggccgacggcttccact

SEQ ID NO: 664559 - DNA, 120 bp, Artificial Sequence
  ENSG00000184916_14 (sequence is synthesized)
gccactgcccccagggcttctccgggcctctctgtgaggtggatgtcgacctttgtgagccaagcccctgccggaacggcgctcgctgctataacctggagggtgactattactgcgcct

SEQ ID NO: 664560 - DNA, 120 bp, Artificial Sequence
  ENSG00000184916_15 (sequence is synthesized)
gccctgatgactttggtggcaagaactgctccgtgccccgcgagccgtgccctggcggggcctgcagagtgatcgatggctgcgggtcagacgcggggcctgggatgcctggcacagcag

SEQ ID NO: 664561 - DNA, 120 bp, Artificial Sequence
  ENSG00000184916_16 (sequence is synthesized)
cctccggcgtgtgtggcccccatggacgctgcgtcagccagccagggggcaacttttcctgcatctgtgacagtggctttactggcacctactgccatgagaacattgacgactgcctgg

SEQ ID NO: 664562 - DNA, 120 bp, Artificial Sequence
  ENSG00000184916_17 (sequence is synthesized)
gccagccctgccgcaatgggggcacatgcatcgatgaggtggacgccttccgctgcttctgccccagcggctgggagggcgagctctgcgacaccaatcccaacgactgccttcccgatc

SEQ ID NO: 664563 - DNA, 120 bp, Artificial Sequence
  ENSG00000184916_18 (sequence is synthesized)
cctgccacagccgcggccgctgctacgacctggtcaatgacttctactgtgcgtgcgacgacggctggaagggcaagacctgccactcacgcgagttccagtgcgatgcctacacctgca

SEQ ID NO: 664564 - DNA, 120 bp, Artificial Sequence
  ENSG00000184916_19 (sequence is synthesized)
gcaacggtggcacctgctacgacagcggcgacaccttccgctgcgcctgcccccccggctggaagggcagcacctgcgccgtcgccaagaacagcagctgcctgcccaacccctgtgtga

SEQ ID NO: 664565 - DNA, 120 bp, Artificial Sequence
  ENSG00000184916_20 (sequence is synthesized)
atggtggcacctgcgtgggcagcggggcctccttctcctgcatctgccgggacggctgggagggtcgtacttgcactcacaataccaacgactgcaaccctctgccttgctacaatggtg

SEQ ID NO: 664566 - DNA, 120 bp, Artificial Sequence
  ENSG00000184916_21 (sequence is synthesized)
gcatctgtgttgacggcgtcaactggttccgctgcgagtgtgcacctggcttcgcggggcctgactgccgcatcaacatcgacgagtgccagtcctcgccctgtgcctacggggccacgt

SEQ ID NO: 664567 - DNA, 120 bp, Artificial Sequence
  ENSG00000184916_22 (sequence is synthesized)
caacgggtatcgctgtagctgcccacccggccgagccggcccccggtgccaggaagtgatcgggttcgggagatcctgctggtcccggggcactccgttcccacacggaagctcctgggt

SEQ ID NO: 664568 - DNA, 120 bp, Artificial Sequence
  ENSG00000184916_23 (sequence is synthesized)
ggaagactgcaacagctgccgctgcctggatggccgccgtgactgcagcaaggtgtggtgcggatggaagccttgtctgctggccggccagcccgaggccctgagcgcccagtgcccact

SEQ ID NO: 664569 - DNA, 120 bp, Artificial Sequence
  ENSG00000184916_24 (sequence is synthesized)
ggggcaaaggtgcctggagaaggccccaggccagtgtctgcgaccaccctgtgaggcctggggggagtgcggcgcagaagagccaccgagcaccccctgcctgccacgctccggccacct

SEQ ID NO: 664570 - DNA, 120 bp, Artificial Sequence
  ENSG00000184916_25 (sequence is synthesized)
ggacaataactgtgcccgcctcaccttgcatttcaaccgtgaccacgtgccccagggcaccacggtgggcgccatttgctccgggatccgctccctgccagccacaagggctgtggcacg

SEQ ID NO: 664571 - DNA, 120 bp, Artificial Sequence
  ENSG00000184916_26 (sequence is synthesized)
ggaccgcctgctggtgttgctttgcgaccgggcgtcctcgggggccagtgctgtggaggtggccgtgtccttcagccctgccagggacctgcctgacagcagcctgatccagggcgcggc

SEQ ID NO: 664572 - DNA, 120 bp, Artificial Sequence
  ENSG00000184916_27 (sequence is synthesized)
ccacgccatcgtggccgccatcacccagcgggggaacagctcactgctcctggctgtcaccgaggtcaaggtggagacggttgttacgggcggctcttccacaggtctgctggtgcctgt

SEQ ID NO: 664573 - DNA, 120 bp, Artificial Sequence
  ENSG00000184916_28 (sequence is synthesized)
gctgtgtggtgccttcagcgtgctgtggctggcgtgcgtggtcctgtgcgtgtggtggacacgcaagcgcaggaaagagcgggagaggagccggctgccgcgggaggagagcgccaacaa

SEQ ID NO: 664574 - DNA, 120 bp, Artificial Sequence
  ENSG00000184916_29 (sequence is synthesized)
ccagtgggccccgctcaaccccatccgcaaccccattgagcggccggggggccacaaggacgtgctctaccagtgcaagaacttcacgccgccgccgcgcagggcggacgaggcgctgcc

SEQ ID NO: 664575 - DNA, 120 bp, Artificial Sequence
  ENSG00000184916_30 (sequence is synthesized)
cgggccggccggccacgcggccgtcagggaggatgaggaggacgaggatctgggccgcggtgaggaggactccctggaggcggagaagttcctctcacacaaattcaccaaagatcctgg

SEQ ID NO: 664576 - DNA, 120 bp, Artificial Sequence
  ENSG00000184916_31 (sequence is synthesized)
ccgctcgccggggaggccggcccactgggcctcaggccccaaagtggacaaccgcgcggtcaggagcatcaatgaggcccgctacgccggcaaggagtaggggcggctgccagctgggcc

SEQ ID NO: 664577 - DNA, 120 bp, Artificial Sequence
  ENSG00000184916_32 (sequence is synthesized)
gggacccagggccctcggtgggagccatgccgtctgccggacccggaggccgaggccatgtgcatagtttctttattttgtgtaaaaaaaccaccaaaaacaaaaaccaaatgtttattt

SEQ ID NO: 664578 - DNA, 120 bp, Artificial Sequence
  ENSG00000184916_33 (sequence is synthesized)
tctacgtttctttaaccttgtataaattattcagtaactgtcaggctgaaaacaatggagtattctcggatagttgctatttttgtaaagtttccgtgcgtggcactcgctgtatgaaag

SEQ ID NO: 664579 - DNA, 120 bp, Artificial Sequence
  ENSG00000184916_34 (sequence is synthesized)
gagagagcaaagggtgtctgcgtcgtcaccaaatcgtagcgtttgttaccagaggttgtgcactgtttacagaatcttccttttattcctcactcgggtttctctgtggctccaggccaa

SEQ ID NO: 664580 - DNA, 120 bp, Artificial Sequence
  ENSG00000184916_35 (sequence is synthesized)
agtgccggtgagacccatggctgtgttggtgtggcccatggctgttggtgggacccgtggctgatggtgtggcctgtggctgtcggtgggactcgtggctgtcaatgggacctgtggctg

SEQ ID NO: 664581 - DNA, 120 bp, Artificial Sequence
  ENSG00000184916_36 (sequence is synthesized)
tcggtgggacctacggtggtcggtgggaccctggttattgatgtggccctggctgccggcacggcccgtggctgttgacgcacctgtggttgttagtggggcctgaggtcatcggcgtgg

SEQ ID NO: 664582 - DNA, 120 bp, Artificial Sequence
  ENSG00000184916_37 (sequence is synthesized)
cccaaggctggcaggtcaacctcgcgcttgctggccagtccaccctgcctgccgtctgtgcttcctcctgcccagaacgcccgctccagcgatctctccactgtgctttcagaagtgccc

SEQ ID NO: 664583 - DNA, 120 bp, Artificial Sequence
  ENSG00000184916_38 (sequence is synthesized)
ttcctgctgcgcagttctcccatcctgggacggcggcagtattgaagctcgtgacaagtgccttcacacagacccctcgcaactgtccacgcgtgccgtggcaccaggcgctgcccacct

SEQ ID NO: 664584 - DNA, 120 bp, Artificial Sequence
  ENSG00000184916_39 (sequence is synthesized)
gccggccccggccgcccctcctcgtgaaagtgcatttttgtaaatgtgtacatattaaaggaagcactctgtatatttgattgaataatgccaccattccggcctcccttgttctttcgg

SEQ ID NO: 664585 - DNA, 120 bp, Artificial Sequence
  ENSG00000184916_40 (sequence is synthesized)
tgctgtcccttttgtattgagagtgaggttgggggagagccacgccggcagagaggcttggggcagtggggcgcgtgctgggtattggcccacgtggctgtggtggctgtagagggcgag

SEQ ID NO: 664586 - DNA, 120 bp, Artificial Sequence
  ENSG00000184916_41 (sequence is synthesized)
acggttctgttgagtcggggcctgccagggcctcgaatgcgttggcatgccaaggtggtggatgcaggtttggccaaaaccttcctgggaatggggaggggggtgtctaggtgcctggca

SEQ ID NO: 664587 - DNA, 120 bp, Artificial Sequence
  ENSG00000184916_42 (sequence is synthesized)
cccgaccctgactaaaacagctgaaaacagttttataaaatagtataaaattgcttacccacgaatacgtatcaaggtcttaaggaattaacaggtcaaaatttttattcattcatttat

SEQ ID NO: 664588 - DNA, 120 bp, Artificial Sequence
  ENSG00000184916_43 (sequence is synthesized)
tcctttgttttgcttggtcattcagaggcaaggtcagcatttgatggaggcaggagagaagcagcccttccacctggccctggagctggttttgcccctcactgcttgagccaactggaa

SEQ ID NO: 664589 - DNA, 120 bp, Artificial Sequence
  ENSG00000184916_44 (sequence is synthesized)
cgtggcatggtggcctcagggctgggcatggaaggccgactccaaggctgactccgagccgcctgtcagtgatgtgcaagtctttaccctgctgtgaggggtaggaggtcaactgagtca

SEQ ID NO: 664590 - DNA, 120 bp, Artificial Sequence
  ENSG00000184916_45 (sequence is synthesized)
aggagcaaagccaagaaccagatctgtacaaaagagaaaaaaaaagtcctgctgacagcctgggagtgaggctgccttgcacaggcagaacaaatgaataaatgaatgaacgaataaaaa

SEQ ID NO: 664591 - DNA, 120 bp, Artificial Sequence
  ENSG00000184916_46 (sequence is synthesized)
cacctggcttcgcggggcctgactgccgcatcagccatgccggtcctgcggtgggcgttggcctcactgcactgagcagcggtggctctccctgcagacatcgacgagtgccagtcctcg

SEQ ID NO: 664592 - DNA, 120 bp, Artificial Sequence
  ENSG00000184916_47 (sequence is synthesized)
gccacctgatgcccaccctctgctctgcagctacaatggtggcatctgtgttgacggcgtcaactggttccgctgcgagtgtgcacctggcttcgcggggcctgactgccgcatcagtga

SEQ ID NO: 664593 - DNA, 120 bp, Artificial Sequence
  ENSG00000184916_48 (sequence is synthesized)
gtggccagacagccccagccctgggagcccctcagcccagccgcggtgtcaggagtctggggacatcaacgtccacgtcccttgaagggcagtgtggccacaactacttcctgcctctct

SEQ ID NO: 664594 - DNA, 120 bp, Artificial Sequence
  ENSG00000184916_49 (sequence is synthesized)
tctgagcctcagtttccccacatgtctgtgccctgtggggttcctgctgtataccctgccaagtgattaagtggggagccccagcctgggggaccagtccggggcccagggagctgtggg

SEQ ID NO: 664595 - DNA, 120 bp, Artificial Sequence
  ENSG00000184916_50 (sequence is synthesized)
ggttggagcgtgcagcctgacgtgggctcctctgtggccgcagggctgttgtccctgggtgttggcccagctgtctgtccagcaccccttggctggtccgacgcagcagctggggctaat

SEQ ID NO: 664596 - DNA, 80 bp, Artificial Sequence
  ENSG00000184922_0 (sequence is synthesized)
gacttcctcccccaaccctgcagctcgccgcccggtcccacggacggggccgccccgatgggacgccgcgctccggcccc

SEQ ID NO: 664597 - DNA, 80 bp, Artificial Sequence
  ENSG00000184922_1 (sequence is synthesized)
ccgccgccaccgccagccgctgccccctcgcccccgcccgggccgggagcctcgtccccgtcccccggaaagctggattt

SEQ ID NO: 664598 - DNA, 120 bp, Artificial Sequence
  ENSG00000184922_2 (sequence is synthesized)
cgccgagcagcccgcgggccccgccgcgccgccccccaagcagcccgcgcctcccaagcagccgatgcccgcggccggagagctggaggagaggttcaaccgcgccctgaactgcatgaa

SEQ ID NO: 664599 - DNA, 120 bp, Artificial Sequence
  ENSG00000184922_3 (sequence is synthesized)
cgcgccctgaactgcatgaacttgcccccagacaaggtccagctgctgagccagtatgacaacgagaagaagtgggagctcatctgtgatcaggagcggtttcaagtcaagaatcccccc

SEQ ID NO: 664600 - DNA, 120 bp, Artificial Sequence
  ENSG00000184922_4 (sequence is synthesized)
gcagcctacatccagaagctgaagagctatgtggatactggtggggtcagccgaaaggtagcagctgattggatgtccaacctggggtttaagaggcgagttcaggagtccacgcaggtg

SEQ ID NO: 664601 - DNA, 120 bp, Artificial Sequence
  ENSG00000184922_5 (sequence is synthesized)
ctacgggagctggagacctccctgaggaccaaccacattgggtgggtgcaggagttcctcaatgaagagaaccgtggcctggatgtgctgctcgagtacctggcctttgcccagtgctct

SEQ ID NO: 664602 - DNA, 120 bp, Artificial Sequence
  ENSG00000184922_6 (sequence is synthesized)
gtcacgtatgacatggagagcacagacaacggggcttccaactcagagaaaaacaagcccctggagcagtctgtggaagacctcagcaagggtccaccctcctccgtgcccaaaagccgc

SEQ ID NO: 664603 - DNA, 120 bp, Artificial Sequence
  ENSG00000184922_7 (sequence is synthesized)
cacctgaccatcaagctgaccccagcccacagcaggaaggccctgcggaattcccgcatcgtcagccagaaggacgacgtccacgtctgtattatgtgcctacgcgccatcatgaactac

SEQ ID NO: 664604 - DNA, 120 bp, Artificial Sequence
  ENSG00000184922_8 (sequence is synthesized)
cagtctggcttcagccttgtcatgaaccacccagcctgtgtcaatgagattgctctgagcctcaacaacaagaaccccagaaccaaggctctggtgctggagctgctggcggccgtgtgc

SEQ ID NO: 664605 - DNA, 120 bp, Artificial Sequence
  ENSG00000184922_9 (sequence is synthesized)
ttggtgcggggaggacatgacatcatccttgcagcctttgacaacttcaaggaggtgtgtggggagcagcaccgctttgaaaagctgatggaatatttccggaatgaggacagcaacatc

SEQ ID NO: 664606 - DNA, 120 bp, Artificial Sequence
  ENSG00000184922_10 (sequence is synthesized)
gacttcatggtggcctgcatgcagttcatcaacattgtggtacattcggtggagaacatgaacttccgtgtcttcctgcaatatgagttcacccacttgggcctggacctgtacttggag

SEQ ID NO: 664607 - DNA, 120 bp, Artificial Sequence
  ENSG00000184922_11 (sequence is synthesized)
aggcttcggctcaccgagagtgacaagctgcaggtgcagatccaggcgtacctggacaatatttttgatgtgggggcgctgctggaggacacagagaccaagaacgctgtgctggagcac

SEQ ID NO: 664608 - DNA, 120 bp, Artificial Sequence
  ENSG00000184922_12 (sequence is synthesized)
atggaggaactgcaggagcaagtggcgctgctgacagagcggcttcgggacgcggagaacgaatccatggccaagattgcagaactggaaaaacagctaagccaggcgcgcaaggagttg

SEQ ID NO: 664609 - DNA, 120 bp, Artificial Sequence
  ENSG00000184922_13 (sequence is synthesized)
gagaccctgcgggagcgcttcagcgaatcgaccgccatggggccctccaggcgtcccccagagcctgagaaagcgcctcccgctgccccgacgcggccctcggccctggagctgaaggtg

SEQ ID NO: 664610 - DNA, 120 bp, Artificial Sequence
  ENSG00000184922_14 (sequence is synthesized)
gaggagctggaggagaaggggttaatccgtattctgcgggggccgggggatgctgtctccatcgagatcctccccgtcgctgtggcaactccgagcggcggtgatgctccgactccgggg

SEQ ID NO: 664611 - DNA, 120 bp, Artificial Sequence
  ENSG00000184922_15 (sequence is synthesized)
gtgatgctccgactccgggggtgccgaccggctcccccagcccagatctcgcacctgcagcagagccggctcccggagcagcgccaccgccgccgcccccactgcccggcctcccctccc

SEQ ID NO: 664612 - DNA, 120 bp, Artificial Sequence
  ENSG00000184922_16 (sequence is synthesized)
cccccacccccgccaccgccaccacctccgggcactgacgggccggtgcctccgccgccgccgccgccgccgccgcctcccggaggtcctcctgatgccctaggaagacgcgactcagaa

SEQ ID NO: 664613 - DNA, 120 bp, Artificial Sequence
  ENSG00000184922_17 (sequence is synthesized)
ctcctgatgccctaggaagacgcgactcagaattgggcccaggagtgaaggccaagaagcccatccagactaagttccgaatgccactcttgaactgggtggcactgaaacccagccaga

SEQ ID NO: 664614 - DNA, 120 bp, Artificial Sequence
  ENSG00000184922_18 (sequence is synthesized)
tcaccggcactgtcttcacagagctcaatgatgagaaggtgctgcaggagctagacatgagtgattttgaggaacagttcaagaccaagtcccaaggccccagcctggacctcagcgctc

SEQ ID NO: 664615 - DNA, 120 bp, Artificial Sequence
  ENSG00000184922_19 (sequence is synthesized)
tcaagagtaaggcagcccagaaggcccccagcaaggcgacactcattgaggccaaccgggccaagaacttggccatcaccctgcggaagggcaacctgggggccgagcgcatctgccaag

SEQ ID NO: 664616 - DNA, 120 bp, Artificial Sequence
  ENSG00000184922_20 (sequence is synthesized)
ccattgaggcgtacgacctgcaggctctgggcctggacttcctggagctgctgatgcgcttcctgcccacagagtatgagcgcagcctcatcacccgctttgagcgggagcagcggccaa

SEQ ID NO: 664617 - DNA, 120 bp, Artificial Sequence
  ENSG00000184922_21 (sequence is synthesized)
tggaggagctgtcagaggaggaccgcttcatgctatgcttcagccgcatcccgcgcctgccggagcgcatgaccacactcaccttcctgggcaacttcccggacacagcccagctgctca

SEQ ID NO: 664618 - DNA, 120 bp, Artificial Sequence
  ENSG00000184922_22 (sequence is synthesized)
tgccgcaactgaatgccatcattgcagcctcaatgtccatcaagtcctctgacaaactccgccagatcctggagattgtcctggcctttggcaactacatgaacagtagcaagcgtgggg

SEQ ID NO: 664619 - DNA, 120 bp, Artificial Sequence
  ENSG00000184922_23 (sequence is synthesized)
cagcctatggcttccggctccagagcctggatgcgctgttggagatgaagtcgactgatcgcaagcagacgctgctgcactacctggtgaaggtcattgctgagaagtacccgcaactca

SEQ ID NO: 664620 - DNA, 120 bp, Artificial Sequence
  ENSG00000184922_24 (sequence is synthesized)
caggcttccacagcgacctgcacttcctggacaaggcgggctcagtgtccctggacagtgtcctggcggacgtgcgctccctgcagcgaggcctagagttgacacagagagagtttgtgc

SEQ ID NO: 664621 - DNA, 120 bp, Artificial Sequence
  ENSG00000184922_25 (sequence is synthesized)
ggcaggatgactgcatggtgctcaaggagttcctgagggccaactcgcccaccatggacaagctgctggcagacagcaagacggctcaggaggcctttgagtctgtggtggagtacttcg

SEQ ID NO: 664622 - DNA, 120 bp, Artificial Sequence
  ENSG00000184922_26 (sequence is synthesized)
gagagaaccccaagaccacatccccaggcctgttcttctccctctttagccgcttcattaaggcctacaagaaagctgagcaggaggtggaacagtggaaaaaagaagccgctgcccagg

SEQ ID NO: 664623 - DNA, 120 bp, Artificial Sequence
  ENSG00000184922_27 (sequence is synthesized)
aggcaggcgctgataccccgggcaaaggggagcccccagcacccaagtcaccgccaaaggcccggcggccacagatggacctcatctctgagctgaaacggaggcagcagaaggagccac

SEQ ID NO: 664624 - DNA, 120 bp, Artificial Sequence
  ENSG00000184922_28 (sequence is synthesized)
tcatttatgagagcgaccgtgatggggccattgaagacatcatcacagtgatcaagacggtgcccttcacggcccgcaccggcaagcggacatcccggctcctctgtgaggccagcctgg

SEQ ID NO: 664625 - DNA, 120 bp, Artificial Sequence
  ENSG00000184922_29 (sequence is synthesized)
gagaagagatgcccctctagcccctcagatctgcggaaccagccctacatccgcgcagacacaggccgccgcagtgcccgtcggcgtcccccgggccccccactgcaggtcacctccgac

SEQ ID NO: 664626 - DNA, 120 bp, Artificial Sequence
  ENSG00000184922_30 (sequence is synthesized)
ctctcgctgtagccgctatttctgcaggtggattctgcaggggtgtggggccgtggacaggctgaggctcaaggaaggtggtcctcagctcggctggccgggcagcccctcctccgctgt

SEQ ID NO: 664627 - DNA, 120 bp, Artificial Sequence
  ENSG00000184922_31 (sequence is synthesized)
ggcccgcctcaaacgggctggtgcatcctcctcttggccacagagggcagcatcgcccgccccttcccccaaatgctgcttgcagcacccaccctaaagccccctccaaatagccatact

SEQ ID NO: 664628 - DNA, 120 bp, Artificial Sequence
  ENSG00000184922_32 (sequence is synthesized)
tagcctcagcaggagcctggcctgtaacttataaagtgcacctcgcccccgcaagccccagccccgaggaccgtccatggaccttatttttatatgagattaataaagatgtttgcaaaa

SEQ ID NO: 664629 - DNA, 120 bp, Artificial Sequence
  ENSG00000184922_33 (sequence is synthesized)
gtctgtccttctatgctttcttctgacccaatgcgctatcctctgggggactggctgccacactgcttcttgctaccttttctgtttttctttcctttttcctttctctactccccttca

SEQ ID NO: 664630 - DNA, 120 bp, Artificial Sequence
  ENSG00000184922_34 (sequence is synthesized)
cctgccccacccccactcagtgatcaagacggtgcccttcacggcccgcaccggcaagcggacatcccggctcctctgtgaggccagcctgggagaagagatgcccctctagcccctcag

SEQ ID NO: 664631 - DNA, 120 bp, Artificial Sequence
  ENSG00000184922_35 (sequence is synthesized)
ggagctcatctgtgatcaggagcggtttcaagtcaagaatccccccgcagcctacatccagaagctgaagagctatgtggatactggtggggtcagccgaaagtttaagaggcgagttca

SEQ ID NO: 664632 - DNA, 120 bp, Artificial Sequence
  ENSG00000184922_36 (sequence is synthesized)
ggccacaaagtggggtggtgggagaacagagaattcagcccccacactgctgcatctagccagcccaccccgggcccttggggttggcgagaggggtagccatgcattaggggtccgagt

SEQ ID NO: 664633 - DNA, 120 bp, Artificial Sequence
  ENSG00000184922_37 (sequence is synthesized)
gggttggcgagaggggtagccatgcattaggggtccgagtaagggactcatacagagtttgggacaccagtatgttaagaagccatcaggggtggggctgggtgctgtggctcatgcctg

SEQ ID NO: 664634 - DNA, 120 bp, Artificial Sequence
  ENSG00000184922_38 (sequence is synthesized)
gtgcggcaggatgactgcatggtgctcaaggagttcctgagggccaactcgcccaccatggacaagctgctggcagacagcaagacggctcagaaagctgagcaggaggtggaacagtgg

SEQ ID NO: 664635 - DNA, 120 bp, Artificial Sequence
  ENSG00000184922_39 (sequence is synthesized)
aaaaaagaagccgctgcccaggaggcaggcgctgataccccgggcaaaggggagcccccagcacccaaggtaggcaactgctcctgggcttggtactgggctgcagggatgcatggcatc

SEQ ID NO: 664636 - DNA, 120 bp, Artificial Sequence
  ENSG00000184922_40 (sequence is synthesized)
tcatcaccctctggtgccacccccacaccctcactgttacagactgaccctgccccaggagcctgggatgggaaagggttctttctgctcaagccagctgtccttgctgtgggggaccag

SEQ ID NO: 664637 - DNA, 120 bp, Artificial Sequence
  ENSG00000184922_41 (sequence is synthesized)
ctcggtgcggagaagatgtgcccctccaatccccaggccgtgatccccttcacccagacccggccaatccctcgcccgaggcgagcgggaggatgcggttctaggacccggaggcgccgc

SEQ ID NO: 664638 - DNA, 120 bp, Artificial Sequence
  ENSG00000184922_42 (sequence is synthesized)
catgtatggatgtgtggatattctatgtctgtatttagagtgcaggtatatggatgttcatgtgctgtgtgtgtgtgtgcgcacacacactctgcctctttgtgtgtgtgcatgtgtata

SEQ ID NO: 664639 - DNA, 120 bp, Artificial Sequence
  ENSG00000184922_43 (sequence is synthesized)
ccttgtgtgcccatgtatcgggggtgtgtgtaccctgcttgtctatgtatgggggagcacatgtagcctgtgagttcttattctgctgggcaggtgtgtggaggtggtgggggaggctga

SEQ ID NO: 664640 - DNA, 120 bp, Artificial Sequence
  ENSG00000184922_44 (sequence is synthesized)
gcatgaaaggccacttgtgccagttggaggagggtgggcgctgctgcctgctgcctcaggacttggtgggcctgtgggaggccgggctccacccaccagccttccctgttctcggtcccc

SEQ ID NO: 664641 - DNA, 120 bp, Artificial Sequence
  ENSG00000184922_45 (sequence is synthesized)
gagcctaccctggaaccctccacttggccttgagcgatgctccttccagaaggcctgcccccgacagggaggggtggcctctcttccaccactatgttcagcacagtgccaagaacacag

SEQ ID NO: 664642 - DNA, 120 bp, Artificial Sequence
  ENSG00000184922_46 (sequence is synthesized)
ggaggcgcctggccggctgggtggggaccaccatgggcaacgcggccggcagcgccgagcagcccgcgggccccgccgcgccgccccccaagcagcaccgctttgaaaagctgatggaat

SEQ ID NO: 664643 - DNA, 120 bp, Artificial Sequence
  ENSG00000184922_47 (sequence is synthesized)
ctggggaacttgcgcatctgggctgttggctcaggcttttaaggctgatgagtcttgaggggaagcccatgtttttgctgcctctgtcaggttctctgagtacccctgcccatggctggg

SEQ ID NO: 664644 - DNA, 120 bp, Artificial Sequence
  ENSG00000184922_48 (sequence is synthesized)
catgaaggagcctcacatagggactgggctcacctaccaagaagggctggccggagggccaggggagaacagcctcgggtcgattcatttggagggctgatgggtgaagctgggtcctcc

SEQ ID NO: 664645 - DNA, 120 bp, Artificial Sequence
  ENSG00000184922_49 (sequence is synthesized)
aggcctgcccccgacagggaggggtggcctctcttccaccactatgttcagcacagtgccaagaacacagcctcctcctcctgctccttagtctcacctgcaggtctgtctctccttgcg

SEQ ID NO: 664646 - DNA, 120 bp, Artificial Sequence
  ENSG00000184922_50 (sequence is synthesized)
gcacatcataggcccacagggcacacgggccacagggccacgcaagcatgggcactgggcagcagacagtgttataattgtgcattggaggtgctgcctgcctggccccagagcctggcc

SEQ ID NO: 664647 - DNA, 120 bp, Artificial Sequence
  ENSG00000184922_51 (sequence is synthesized)
tgaatccaaagcctgaatctgttgggtgtctttctcaatgagtgtgggtgagcaccctcactgacaggcccctcctctacccaggctcagaccccaggtgaactgaaatgggtgcctggg

SEQ ID NO: 664648 - DNA, 120 bp, Artificial Sequence
  ENSG00000184922_52 (sequence is synthesized)
gcccctcccagctcagtctcctcctctccctccacctcccgcatcactggtaccttggtttcctctccttatttgcttgggttcgagtgccaggctcggcccacccttggcacctgggct

SEQ ID NO: 664649 - DNA, 120 bp, Artificial Sequence
  ENSG00000184922_53 (sequence is synthesized)
gagcggatctgggagcctcccccagtcttccaggcaggcatgcctgatgccgccccctcaccggcggtgccagtgccgggctgcgggtcggggctcaccatgtgctggtgctacagctga

SEQ ID NO: 664650 - DNA, 120 bp, Artificial Sequence
  ENSG00000184922_54 (sequence is synthesized)
gccaggcgcccaagaacaggccagctgaggcttctaggcttgacatctccctccaccccgggaagaagatggaggcttggtgccaaggagcctgctggtgggcactgacccctcccgtgg

SEQ ID NO: 664651 - DNA, 120 bp, Artificial Sequence
  ENSG00000184922_55 (sequence is synthesized)
ccgaccggctcccccagcccaggtgcgcaggagcttcaggctggcggggatgcggggcagggtctggaggggagcccaggggcatctgtggcgggcagagttgggcgagggaggtttgga

SEQ ID NO: 664652 - DNA, 120 bp, Artificial Sequence
  ENSG00000184922_56 (sequence is synthesized)
ttgtaggctcggctcaggtaggagcgcatgcgtagagcggagaggcggagaggggcccacccaagtcaaggagctgactcgcgcctcccccacgccgcgccctcgctggctcagatctcg

SEQ ID NO: 664653 - DNA, 120 bp, Artificial Sequence
  ENSG00000184922_57 (sequence is synthesized)
gggtggaggggtctggcaaacataaacggtacccctgccatgtgcacacaatctgagtccttaggaggctaagctttgtgccctggagccatgctcccagctctgggcggactcctgaat

SEQ ID NO: 664654 - DNA, 120 bp, Artificial Sequence
  ENSG00000184923_0 (sequence is synthesized)
ggatttctggtctcggtgctgtaggtcacatagccactctttcctggattgaggctttccagcaaaggggctgggacgtaaggctggcctgctggtgtggacagagattccagcaacatg

SEQ ID NO: 664655 - DNA, 120 bp, Artificial Sequence
  ENSG00000184923_1 (sequence is synthesized)
catgacctgggggtacaaggattgcttcctaaacaatgataagcacacagccacctaatagtctggatcggctgagaccatcctgatttcaaacacccagtccccttgccttcctaagaa

SEQ ID NO: 664656 - DNA, 120 bp, Artificial Sequence
  ENSG00000184923_2 (sequence is synthesized)
cccctgtgtttctcagactgaaaatgtgttttgaactttgttcacgaagtgaggccgctgttgaaattcgtcaagactgggaaagagccaaagtgggaaggagcatgggttgattggcac

SEQ ID NO: 664657 - DNA, 120 bp, Artificial Sequence
  ENSG00000184923_3 (sequence is synthesized)
aaaagtaggtctgctgataaagaatggaagtaaaggggccatcaggtagaagcttttgctgtgagtcagaaggacaatttaaaagttgcctaaagaggcacacgccatctctgctgctgc

SEQ ID NO: 664658 - DNA, 120 bp, Artificial Sequence
  ENSG00000184923_4 (sequence is synthesized)
cttccagttggaagggaaactcaggttcttgcctaatggccaaagcccttcacagaatgtcccccacccctaacagctgcccactgcccctccccctctgcagaatgtctggggtcctat

SEQ ID NO: 664659 - DNA, 120 bp, Artificial Sequence
  ENSG00000184923_5 (sequence is synthesized)
gttccaggaacctgtttactttcaaattttccctgtttcagttggactcaggagcatctggtgagccaggtcactctctgggtcttacccttggcttttctcattgcggaaactgccaga

SEQ ID NO: 664660 - DNA, 120 bp, Artificial Sequence
  ENSG00000184923_6 (sequence is synthesized)
cagcggtggtcagtgcccagcctgaggggatggcttcaaatggagcatacccagcgctgggaccgggcgtgaccgcgaaccctggcacctccctgtctgtgttcacggctctgcccttca

SEQ ID NO: 664661 - DNA, 120 bp, Artificial Sequence
  ENSG00000184923_7 (sequence is synthesized)
ccacacccgctcccggcccagcacacgggccgctccttgtgactgcaggggctcctccaggcggccctctggtgctgtctaccctccccagcacacctctggtgacagaacaggatggct

SEQ ID NO: 664662 - DNA, 120 bp, Artificial Sequence
  ENSG00000184923_8 (sequence is synthesized)
gcggcccgagtggggccggggcttccaacgtctttgtccagatgaggacagaggtggggcctgtgaaggccgctcaggcgcagaccttggtcctaactcaggcccccctcgtctggcagg

SEQ ID NO: 664663 - DNA, 120 bp, Artificial Sequence
  ENSG00000184923_9 (sequence is synthesized)
ctccaggcgccctctgcggaggtgttgtgtgtccacctcccctactcctggcagctgctcctgtggtgcctgttatggctgcccaggtggttgggggcacccaggcctgtgagggaggct

SEQ ID NO: 664664 - DNA, 120 bp, Artificial Sequence
  ENSG00000184923_10 (sequence is synthesized)
ggtcccagggccttcctcttccaccaccaccaccaccggctgcccagctgccccccattgtgtcccaagggaatgctgggccatggccacaaggggctcacggagagggcagcctggctt

SEQ ID NO: 664665 - DNA, 120 bp, Artificial Sequence
  ENSG00000184923_11 (sequence is synthesized)
cctcccaggccaaggccccgccagatgactcctgtaaccccaggagtgtctatgagaacttccgactctggcagcactacaagcccctggcccggaggcaccttccccagagtcctgaca

SEQ ID NO: 664666 - DNA, 120 bp, Artificial Sequence
  ENSG00000184923_12 (sequence is synthesized)
ccgaagcgctttcgtgcttcctcatcccagttctccgatccctggcccggcggaagcccaccatgaccctggaggagggactgtggcgggccatgcgggaatggcagcacacgagcaact

SEQ ID NO: 664667 - DNA, 120 bp, Artificial Sequence
  ENSG00000184923_13 (sequence is synthesized)
gctgaggaggagatgcagattcagaaatcgcaatggatgaaggggccccagtgcctgcctcctccagccacaccgaggcttgaacctcgaggacccccggcccctgaggtggtcaagcag

SEQ ID NO: 664668 - DNA, 120 bp, Artificial Sequence
  ENSG00000184923_14 (sequence is synthesized)
ccagtgtaccttcccagcaaggccggccccaaggccccgactgcctgcctgccaccacccaggccccagaggccagtgaccaaggcccgccggccaccaccccggccccaccggcgagca

SEQ ID NO: 664669 - DNA, 120 bp, Artificial Sequence
  ENSG00000184923_15 (sequence is synthesized)
gagaccaaggcccgcctgccaccacccaggccccagagaccagcagagaccaaggtccctgaggagatccccccagaagtggtgcaggagtatgtggacatcatggaggagctgctgggg

SEQ ID NO: 664670 - DNA, 120 bp, Artificial Sequence
  ENSG00000184923_16 (sequence is synthesized)
ccttccctcggggccacgggggagcccgagaaacaacgggaagagggcgaagtgaagcagccacaggaagaggactggacgcccccagacccgggcctcctgagctacactgacaagctg

SEQ ID NO: 664671 - DNA, 120 bp, Artificial Sequence
  ENSG00000184923_17 (sequence is synthesized)
tgttcccagaaagacttcgtcaccaaggtggaggccgtcattcatccccaattcctggaagaattgctttccccagatccacagatggatttcttggccctaagccaggagctggagcag

SEQ ID NO: 664672 - DNA, 120 bp, Artificial Sequence
  ENSG00000184923_18 (sequence is synthesized)
gaggaaggactcacccttgcccagctagtggagaagcgcctcctacccttgaaggagaaacagcatgcgagggcagcccctagtcgtggcacagcccggttggactcaagttcttctaag

SEQ ID NO: 664673 - DNA, 120 bp, Artificial Sequence
  ENSG00000184923_19 (sequence is synthesized)
tttgcagctggccaaggagcagagagagacgtccctgtcccccaacaaggggttggcatggaaacctgcccaccccagacgactgcccgggactctcagggacgaggcagagcacacact

SEQ ID NO: 664674 - DNA, 120 bp, Artificial Sequence
  ENSG00000184923_20 (sequence is synthesized)
ggcatggccaggtccaaagactctgttgtgcttttgggatgtcaggattcccctgggctgagggctgcccggccaacctctcctccccaggaccacagacccacctgccctggcgtgggt

SEQ ID NO: 664675 - DNA, 120 bp, Artificial Sequence
  ENSG00000184923_21 (sequence is synthesized)
accaaggatgccttggatctccctggagggtctcctgtcagggagtcacatgggctggctcaggggtcaagtgaggaggaggaactccccagcctggccttcctcttgggttcccagcac

SEQ ID NO: 664676 - DNA, 120 bp, Artificial Sequence
  ENSG00000184923_22 (sequence is synthesized)
aagcttctgccctggtggctaccccagagccctgtccctgcctcgggccttctcagcccagaaaagtggggaccccagggaactcatcagttcccatctgctgagagaagaggcctcaac

SEQ ID NO: 664677 - DNA, 120 bp, Artificial Sequence
  ENSG00000184923_23 (sequence is synthesized)
ctagcaccttctcctgccaacaaggccaagaagcgacctctctttggaagcctgtcccctgctgaaaagacaccccacccagggcctgggctcagggtctctggggagcaatccctgact

SEQ ID NO: 664678 - DNA, 120 bp, Artificial Sequence
  ENSG00000184923_24 (sequence is synthesized)
tgggggctgggtggcccctcacagtctcaaaagagaaagggtgaccccttggtctccaggaaggagaagaagcagcgttgtagccagtaggggcttctgagcaggctctctggggccgat

SEQ ID NO: 664679 - DNA, 120 bp, Artificial Sequence
  ENSG00000184923_25 (sequence is synthesized)
ccccaaggatggggctctggcatccgatgccccaaagcggtcaaaagcttcttctcccccagtgctgatcttgctgggccttagctttggagggtaggggagggaggggagggagagggt

SEQ ID NO: 664680 - DNA, 120 bp, Artificial Sequence
  ENSG00000184923_26 (sequence is synthesized)
ggctgaatggggagggcaggaagggagggtctggggggaaggggctggggagtgggggtgggaagcagtgcgttgggggcctcgtgtgtaagtgtgaataaatgtagttgtcttggaaaa

SEQ ID NO: 664681 - DNA, 120 bp, Artificial Sequence
  ENSG00000184923_27 (sequence is synthesized)
ttgcccagggagccccttcagatgctccagggactgacagatgctgaggaagccctgatccctcccaccacccactcacaaggccctgcctgctttagggaggcttcttggggccccccc

SEQ ID NO: 664682 - DNA, 120 bp, Artificial Sequence
  ENSG00000184923_28 (sequence is synthesized)
atcgttatcagcatccctggaaaatcctgggattggagagagctggctggctcttgttctgctcggtgggagctgaggagaaggcagccgcctgcaacatggacatggggagaggaggct

SEQ ID NO: 664683 - DNA, 120 bp, Artificial Sequence
  ENSG00000184923_29 (sequence is synthesized)
gctcctgcttaaccctcatcaggaagagcgcgggcactgggctgaggggagacgttgaggtgaccatccacacaggtgtgtttgggatacgatgatgggtggggagcaggggaagtcctt

SEQ ID NO: 664684 - DNA, 120 bp, Artificial Sequence
  ENSG00000184923_30 (sequence is synthesized)
ctgcctgtttctgggcaggagagagtcttgtccaactagctaaagcagatgctccttgctgtggccacagggactggcctcggggccctcaaggtcctgcatggagccccccacagctat

SEQ ID NO: 664685 - DNA, 120 bp, Artificial Sequence
  ENSG00000184923_31 (sequence is synthesized)
gattcccttcccatatgatgactgaactcatgtggaattgatgtagacacagatttacattggtttctaaaacagttccctcccaacacaccatcaccaatgggaacaagcatgtccagt

SEQ ID NO: 664686 - DNA, 120 bp, Artificial Sequence
  ENSG00000184923_32 (sequence is synthesized)
ccatcaggcgcagggtgggtgtttctgctggttccagggcccggaggagctggggcccaggccaagaggggccgagggtctgccgcccttctgccaggcacagaccccaagggcagagca

SEQ ID NO: 664687 - DNA, 120 bp, Artificial Sequence
  ENSG00000184923_33 (sequence is synthesized)
ggggctgcctgggatgtggcattggctgtctgggaagtgccctgggagttgggggctaggtgttcgccaaagagagacttccagagtctatgagtgagatgaggactgcatcaggagagg

SEQ ID NO: 664688 - DNA, 120 bp, Artificial Sequence
  ENSG00000184923_34 (sequence is synthesized)
gaccgaggctggggaggatgctctgctctttcccaggttgtcctgtcttcccaatctctgctgaactgccctcaccccatgggccaactctgccccccttacccctaacccacctcttag

SEQ ID NO: 664689 - DNA, 120 bp, Artificial Sequence
  ENSG00000184923_35 (sequence is synthesized)
aatctcagatcccagcgtggacaggacccggcacccaccctggttccctcctggccaacaccttcttctccacggtctgagttctgattcctcccccagggcgcttattggctcaggacc

SEQ ID NO: 664690 - DNA, 120 bp, Artificial Sequence
  ENSG00000184923_36 (sequence is synthesized)
cctgtgactgccagggcactggtcccagcactgcctgcgtgcagagctgtggtcacggccctgggggctggcccagcagcagaggctggtggggcaaagctgtctggtacacggtggcct

SEQ ID NO: 664691 - DNA, 120 bp, Artificial Sequence
  ENSG00000184923_37 (sequence is synthesized)
ggcccctcggccaagtgacaaagggagccatgtttgggtcctctctggccccatctgcccacagaacacagcagtcagcctgacagatgcccctctgccccgtcccttctgctcgatgtg

SEQ ID NO: 664692 - DNA, 120 bp, Artificial Sequence
  ENSG00000184923_38 (sequence is synthesized)
ggcagtgtcggaggcctgctgtcttctgtggcctttgggaaggagagtttatcttggcagggcttccccagctcagtgcacgtcaggccctcggggaaaatgtggggagcgaagagtcac

SEQ ID NO: 664693 - DNA, 120 bp, Artificial Sequence
  ENSG00000184923_39 (sequence is synthesized)
tggtgggtgatgtgggcagctcccgtgactcctctacattcacggccatcctcaggagataaggtagcactgcccctttgcagggtttaggaatgttaagtgagccgtgtttgaagggaa

SEQ ID NO: 664694 - DNA, 120 bp, Artificial Sequence
  ENSG00000184923_40 (sequence is synthesized)
catggtccatactctggcgtgtgtgggtgcccagccaacttcctcacctaagggtgaaagtgacaccttggggctcctactggttaccccactggctgttgtctatcctactgtccctgt

SEQ ID NO: 664695 - DNA, 120 bp, Artificial Sequence
  ENSG00000184923_41 (sequence is synthesized)
ccttgtcttggctgagccattcctaggaagcagaacttgtgcttcctccacctctgtgtcccacctgagccctacaatctgcccctaaatgggcacagtggggctgactggggggctctg

SEQ ID NO: 664696 - DNA, 120 bp, Artificial Sequence
  ENSG00000184924_0 (sequence is synthesized)
ccaagatgcaccggggagtaggtccggcctttcgggtggtcaggaagatggcggcctctggggcggagccgcaggtcctggtacaatacttggtgttacgaaaggatctatcacaagctc

SEQ ID NO: 664697 - DNA, 120 bp, Artificial Sequence
  ENSG00000184924_1 (sequence is synthesized)
cgttctcctggccggcgggcgcactggtagcgcaggcttgtcacgcggccaccgcggccttgcacactcaccgcgaccacccgcacacagccgcttacctccaagagctggggcgcatgc

SEQ ID NO: 664698 - DNA, 120 bp, Artificial Sequence
  ENSG00000184924_2 (sequence is synthesized)
gcaaagtggtcctcgaggccccagatgagaccaccctaaaggagctggccgagaccctgcaacagaagaacattgaccacatgctgtggcttgagcaaccagagaatatcgccacttgta

SEQ ID NO: 664699 - DNA, 120 bp, Artificial Sequence
  ENSG00000184924_3 (sequence is synthesized)
ttgctctccggccctaccccaaggaagaagtgggccagtatttgaagaagttccgattgttcaagtaactgctgctttgatgtgtttgaatacgcaggccacccattccaaagcatcatg

SEQ ID NO: 664700 - DNA, 120 bp, Artificial Sequence
  ENSG00000184924_4 (sequence is synthesized)
ccgtctttcagttgtgacaatttcttgagggttaagcacatgttcatattaaagttgtcattaataactacttcctcttattaataagttcaagtggggaaggtgggagagcagtattgt

SEQ ID NO: 664701 - DNA, 120 bp, Artificial Sequence
  ENSG00000184924_5 (sequence is synthesized)
ctggggatcattgctcaaatagaagatttggttagactctcctgtggggctcaaggaaactcccttccagtcactcgggtttgaaactttgcttttgaattccttcttattcacatccag

SEQ ID NO: 664702 - DNA, 120 bp, Artificial Sequence
  ENSG00000184924_6 (sequence is synthesized)
ttatcatatttcattgaatctaagataacatcaactttaagatgcggtagtattttatgtattgttaaaaaatatgccggcaaattaaacacttgtatttcaataacaaagatgttaaaa

SEQ ID NO: 664703 - DNA, 120 bp, Artificial Sequence
  ENSG00000184924_7 (sequence is synthesized)
tttggccagtgtggtggctcacatctgttaattccagggttttgggaagccaaggcaggaggatcgcttgagcccatgagttcaaggttacagtcagttctaatcatgccaccgcactcc

SEQ ID NO: 664704 - DNA, 120 bp, Artificial Sequence
  ENSG00000184924_8 (sequence is synthesized)
agcctgggcaacagagtgagacactgtctctataaagattaataacaagttaaaatttgtgtgtgtctatatatatgtacatacatacagatttattagattcaatgaaatctgtcaagt

SEQ ID NO: 664705 - DNA, 120 bp, Artificial Sequence
  ENSG00000184924_9 (sequence is synthesized)
atcgagggcggaagtgggtgtggtcttcggtccgaaggcctggctgcggggagtgggtgcggcgggagttggggtgatcgttaacatttagactggagctgtttccctggaggtgcgccc

SEQ ID NO: 664706 - DNA, 120 bp, Artificial Sequence
  ENSG00000184924_10 (sequence is synthesized)
ttgggaagggcctgactgtgtgaagagtggacagcagtcctccgccccctgctgggctcgcggtaaagtggtggctcctgtgtccccgctgttccgcctgtgcactggccgactttttaa

SEQ ID NO: 664707 - DNA, 120 bp, Artificial Sequence
  ENSG00000184924_11 (sequence is synthesized)
agccatgccccaaagtgctgtcctcctgcaaaaccgagcccgaagggacagtgcaaagtgaagtcaaactgagtatttacctgggtaggacgccaaattatttgaaaataaatactaaaa

SEQ ID NO: 664708 - DNA, 120 bp, Artificial Sequence
  ENSG00000184924_12 (sequence is synthesized)
acgttagtataaattgaacctagcttcagctagaccaggcaccaggtgtgtaaatcggtacaccttttaaaatagcagtcaggttctgtttgcagatgaccaaacaaatctcacccttac

SEQ ID NO: 664709 - DNA, 120 bp, Artificial Sequence
  ENSG00000184924_13 (sequence is synthesized)
cacccaaagagctttgcacaaggatattcatgggagcccttatggttttgaagcatatttagtggtcgggaagagtgctcatgatgcgaagctaactgaactatatatacagaatgatcc

SEQ ID NO: 664710 - DNA, 120 bp, Artificial Sequence
  ENSG00000184925_0 (sequence is synthesized)
acctgcccatggccacttccttctctctgtccctgtgggcccagcagctgccaggatgaggctgctgtgtggcctgtggctgtggctctccttgctgaaagtcctgcaggcccagacccc

SEQ ID NO: 664711 - DNA, 120 bp, Artificial Sequence
  ENSG00000184925_1 (sequence is synthesized)
aacccccctgccactcccgcccccgatgcagagcttccaaggaaaccagttccagggggaatggttcgtcctgggcctggcgggcaacagcttcaggccggagcacagggcgctgctgaa

SEQ ID NO: 664712 - DNA, 120 bp, Artificial Sequence
  ENSG00000184925_2 (sequence is synthesized)
cgctttcaccgcaacttttgagctaagtgatgatggccgctttgaggtgtggaatgcgatgactcgaggccagcactgtgacacatggtcttatgtgctgataccggcagcccagcctgg

SEQ ID NO: 664713 - DNA, 120 bp, Artificial Sequence
  ENSG00000184925_3 (sequence is synthesized)
ggaccacggtgtggagcccggggcggacagagaggagacccgggtggtggacagcgactacacccagttcgccctgatgctgtcccgcagacacacgagcaggctggccgtcctcaggat

SEQ ID NO: 664714 - DNA, 120 bp, Artificial Sequence
  ENSG00000184925_4 (sequence is synthesized)
cagcctgctgggcaggagctggttgctgcctcccgggacgctggaccagttcatctgcctgggcagagctcagggcctctcggatgacaacatcgtcttcccagatgtgactggctggtc

SEQ ID NO: 664715 - DNA, 120 bp, Artificial Sequence
  ENSG00000184925_5 (sequence is synthesized)
accccaggccagcgtctgttgaaggatgaagcagctcctgtccggcccagccctgcctcacagctgtgcgagctctgccctcctcagctctcaaacctgaataaatgcaccaagcccaga

SEQ ID NO: 664716 - DNA, 120 bp, Artificial Sequence
  ENSG00000184925_6 (sequence is synthesized)
acggggcccgcaggaatgagtttggttgaccctagaggagctggacccagtgtctacccagggagctcagccccagcctgcgctcaggggtctccaggctcctgggtccctgtgctcaac

SEQ ID NO: 664717 - DNA, 120 bp, Artificial Sequence
  ENSG00000184925_7 (sequence is synthesized)
ccaggctctgagccacctcctgccgccccgggtcccctgtcctgggccacctcctcccaccccgggtctcctgtcccgggccacctcctcccgccccaggtcccctgtcccgggccacct

SEQ ID NO: 664718 - DNA, 120 bp, Artificial Sequence
  ENSG00000184925_8 (sequence is synthesized)
ctgcccctcccgccccaggtcccctgtcccggcccacctcctcccaccccgggtctcctgtcctgggctacctcctcccaccccaggtcccctgtcccgggccatctcctccctctgggt

SEQ ID NO: 664719 - DNA, 120 bp, Artificial Sequence
  ENSG00000184925_9 (sequence is synthesized)
cccctgtcctgggccacctcctcccctcacccatccctgctcacaaggagcttggactcatcccaggaggtgccctggacctcagcagcctgccctgggtggcagccccagcctgaccac

SEQ ID NO: 664720 - DNA, 120 bp, Artificial Sequence
  ENSG00000184925_10 (sequence is synthesized)
tcagacagccgcggcccccaaggcctgactcttcttgtgggagggcgaggtcagcctgagtccctcctcttcctggagggatgcccaccgtgcccttctgattcccgcctctggtccttt

SEQ ID NO: 664721 - DNA, 120 bp, Artificial Sequence
  ENSG00000184925_11 (sequence is synthesized)
acatgtgcataaccacatgcacacacactcacgcatgagcaaacgtgtacagactggcacatgcctccacatgcgaacacccacttacacacacgccactcacactggcacacatgctgt

SEQ ID NO: 664722 - DNA, 120 bp, Artificial Sequence
  ENSG00000184925_12 (sequence is synthesized)
ctacccgtgcacaggcacacgtgctggtctgcacacacctgcacacacctgcacactcgctatgccaggcctcctgggtctgcagtgagtctgggggcccatggggacagggacaggtga

SEQ ID NO: 664723 - DNA, 120 bp, Artificial Sequence
  ENSG00000184925_13 (sequence is synthesized)
ggggcttcctgaggacctggggctgttgggagccgctgtgggccacatcttctgccccttctcagcctccctcaccccagccccttcccctagacccactgctggtcccctttctccctc

SEQ ID NO: 664724 - DNA, 120 bp, Artificial Sequence
  ENSG00000184925_14 (sequence is synthesized)
ctgcttctcacctgaagccacctgcccctcctttgtgccctcccttgcttcctcctgggctctgtcccctgctccccctttgtcctccatcccgactccatctcccccaccaggctggtc

SEQ ID NO: 664725 - DNA, 120 bp, Artificial Sequence
  ENSG00000184925_15 (sequence is synthesized)
cgcaacttttgagctaagtgatgatggccgctttgaggtgtggaatgcgatgactcgtacttcaggaggcagaggcagaaggatcacttgaactcaggagtttgagaccagcctgagcaa

SEQ ID NO: 664726 - DNA, 120 bp, Artificial Sequence
  ENSG00000184925_16 (sequence is synthesized)
cccgccgtgggtccctctgaataagtggctgaaatctcctgaggggcccacctcagcatggacctgccagcttccggagccttccgcctccacctgtcccctcctacagaggccagcact

SEQ ID NO: 664727 - DNA, 120 bp, Artificial Sequence
  ENSG00000184925_17 (sequence is synthesized)
gggaaacaggctcgggaaggccgcacagccactggccagggtcaccatgtccctgccagacccagagtaggctctggttcttgccagtgtccctggcgccggcccagccaggagcactgc

SEQ ID NO: 664728 - DNA, 120 bp, Artificial Sequence
  ENSG00000184925_18 (sequence is synthesized)
gcagttcactgtggaccacggtgtgggtaagccagtcacaggagggagggacggggtgctggcccacagggatgtgacgtctgtgccgcctcagagcccggggcggacagagaggagacc

SEQ ID NO: 664729 - DNA, 120 bp, Artificial Sequence
  ENSG00000184925_19 (sequence is synthesized)
cgggtggtggacagcgactacacccagttcgccctgatgctgtcccgcagacacacgagcaggctggccgtcctcaggatcagcctgctgggtgagcctcccaccccgtcctgggcccgt

SEQ ID NO: 664730 - DNA, 120 bp, Artificial Sequence
  ENSG00000184925_20 (sequence is synthesized)
tggagtgacttgggggtacagatagttcaatctcccacctacccagcccccaaccccctgccaagtgcacagacccatgctgggctccctgggctgcaggcaggagctggttgctgcctc

SEQ ID NO: 664731 - DNA, 120 bp, Artificial Sequence
  ENSG00000184925_21 (sequence is synthesized)
ccagcgcccaggaccgtgtctgggaaaaggtctttgcccggagagtgggaagagagaggggagggtgagcagaggacaggccgggagttttccgggaacggaggaagagcagtggaggag

SEQ ID NO: 664732 - DNA, 120 bp, Artificial Sequence
  ENSG00000184925_22 (sequence is synthesized)
aagagcagtggaggagatgagatctcagtcttgcccaggctggagtccagtggcacaatcatagcttactgcaggctcaaactcctgggctaaagcaatcctcccacctcagcctctcaa

SEQ ID NO: 664733 - DNA, 120 bp, Artificial Sequence
  ENSG00000184933_0 (sequence is synthesized)
atgtttgccttagctcatttccagattaaagaagagagcagtggcctcagctcagtgattaattacatgaactccttacgtggtattcgaccaatataagcccattaagagaaaggctgg

SEQ ID NO: 664734 - DNA, 120 bp, Artificial Sequence
  ENSG00000184933_1 (sequence is synthesized)
gttcttgttgtggcctactgaagactctctactctcatctcctgaagagcagtaagagagaccaatgacatggagtggcggaaccatagtgggagagtgagtgagtttgtgttgctgggc

SEQ ID NO: 664735 - DNA, 120 bp, Artificial Sequence
  ENSG00000184933_2 (sequence is synthesized)
ttccctgctcctgcgccactacaggtactattgtttgcccttttgctgctggcctatgtgttggtgctgactgagaacacactcatcattatggcaattaggaaccattctaccctccac

SEQ ID NO: 664736 - DNA, 120 bp, Artificial Sequence
  ENSG00000184933_3 (sequence is synthesized)
aaacccatgtacttttttctagctaatatgtcctttctggagatctggtatgtcactgtcactattcccaagatgcttgctggctttgttggatccaaacaggatcatggacagctaatc

SEQ ID NO: 664737 - DNA, 120 bp, Artificial Sequence
  ENSG00000184933_4 (sequence is synthesized)
tcctttgagggatgcatgacacagctctactttttccttggcttgggctgcactgagtgtgtccttctcgctgttatggcctatgatcgctatatggccatctgctatcctctccactac

SEQ ID NO: 664738 - DNA, 120 bp, Artificial Sequence
  ENSG00000184933_5 (sequence is synthesized)
tggaggttttggcatctccatggtcaaagtttttcttatttctggcctctcttactgtggccccaacatcatcaaccactttttctgtgatgtctctccattgctcaacctctcatgcac

SEQ ID NO: 664739 - DNA, 120 bp, Artificial Sequence
  ENSG00000184933_6 (sequence is synthesized)
tgatatgtccacagcagagcttacagatttcatcctggccatttttattcttctagggccactctctgtcactggggcctcctatgtggccattactggtgctgtgatgcacattccttc

SEQ ID NO: 664740 - DNA, 120 bp, Artificial Sequence
  ENSG00000184933_7 (sequence is synthesized)
ggctgctggacgctataaggccttttccacctgtgcctctcatctcactgttgtgataatcttctatgcagccagtatcttcatctatgctcggccaaaggcactctcagcttttgacac

SEQ ID NO: 664741 - DNA, 120 bp, Artificial Sequence
  ENSG00000184933_8 (sequence is synthesized)
caacaagttggtctctgtactgtatgctgtcattgtaccattgctcaatcccatcatttactgcctgcgcaatcaagaggtcaagagagccctatgctgtactctgcacctgtaccagca

SEQ ID NO: 664742 - DNA, 120 bp, Artificial Sequence
  ENSG00000184933_9 (sequence is synthesized)
ccaggatcctgaccccaagaaagctagcagaaatgtatagaagggatgtgtgaaatctgataaaatgctattaaacttgggatcaatgtgttctatgaagtccagtggagttcttagggc

SEQ ID NO: 664743 - DNA, 120 bp, Artificial Sequence
  ENSG00000184933_10 (sequence is synthesized)
ctaaattgggggccagagtttcaaaggcatcactatggaactaggaatactttctttaactagtccaagaggagagagaggaataggttgcaagctagaaaatggatttctgcaggacag

SEQ ID NO: 664744 - DNA, 120 bp, Artificial Sequence
  ENSG00000184933_11 (sequence is synthesized)
atctatgggaggaagagaaagtggaatctctgtatcatctttcttagtcccgatgactcaactttttttgcatacattttaaatcctctcctaaccaacccagccatctcaggaggacct

SEQ ID NO: 664745 - DNA, 120 bp, Artificial Sequence
  ENSG00000184933_12 (sequence is synthesized)
tgcatagacaaggttccaatcaaggaagcacaggcttcattacggaaaagcaacacaagactttttgataagatctctattaggtagcagaggcccaggagatatcattctagcgtgtgt

SEQ ID NO: 664746 - DNA, 120 bp, Artificial Sequence
  ENSG00000184933_13 (sequence is synthesized)
tacaaggcaaggagataagaaactaggaatttttgttttgggaacatatcacctatcaaaacataatggtttctaggtttattttcaaatttactgtggtcagtgtccacattgaactag

SEQ ID NO: 664747 - DNA, 120 bp, Artificial Sequence
  ENSG00000184933_14 (sequence is synthesized)
tggctgagtgcagttgtttcatcaatactctgtctccctgattagactataagcaccatggtgacaggatcagattttcttttacatccttttattaccatgggcaggaacagtatctag

SEQ ID NO: 664748 - DNA, 120 bp, Artificial Sequence
  ENSG00000184933_15 (sequence is synthesized)
tgcatgatggctatgaatatgtataatgaatgaatatagtttggaaccatgtaggcaaggcatgtgtgtcatgcctatatgtggggttggcaggtgcaggaagtaaacccctcatacttt

SEQ ID NO: 664749 - DNA, 120 bp, Artificial Sequence
  ENSG00000184933_16 (sequence is synthesized)
attcggaaagatttgtgcagatagacacttttacttataaatacagaaacaaggaaaggaaataagcaaaatatgctcaactttcgcaaacagggcactggtcaaataaattgtagctca

SEQ ID NO: 664750 - DNA, 120 bp, Artificial Sequence
  ENSG00000184933_17 (sequence is synthesized)
actggtcaaataaattgtagctcatatgttacatggaaaactatgcagaaattgaaataaagtgatctaaatagagttaatgaaagaaaaaatatttctaacttaataaaaatattatgt

SEQ ID NO: 664751 - DNA, 120 bp, Artificial Sequence
  ENSG00000184933_18 (sequence is synthesized)
gccatatttgcttgtttaaacaagactagaaggaatatgactaaaatgctggctagataatgctggactgcttacacctgtaaattgcattctgtggctaagcattgccatcaatatatt

SEQ ID NO: 664752 - DNA, 120 bp, Artificial Sequence
  ENSG00000184933_19 (sequence is synthesized)
tatttaaatgctttttttcttagcccatattatatataactttatttatctggacagggagatggatacagggtatgtcagtatgattttcagaaatttagctccctactgtcacccgac

SEQ ID NO: 664753 - DNA, 120 bp, Artificial Sequence
  ENSG00000184933_20 (sequence is synthesized)
aaccagaactctgaagacagtgaagattctatctccagatatggatccaactgttgctcaagatgtgggatctaactttattgctgtatgttacttaataaaatttacaaaaggatatta

SEQ ID NO: 664754 - DNA, 120 bp, Artificial Sequence
  ENSG00000184933_21 (sequence is synthesized)
ccaaggatatcatgcattatttgctagcccatacttattaaaagttttaatataatgtgcatatctatttgtgcctaaacagtataagtatcttgttgtaataattttttaaatgactgg

SEQ ID NO: 664755 - DNA, 120 bp, Artificial Sequence
  ENSG00000184933_22 (sequence is synthesized)
atataaagttcatcaaaaatctactgtcgaagtgtccccgtagaagaagtttctgaaatggggttgtgatcagggatgggagagtcctcctctaggcattgttattacaactcttttata

SEQ ID NO: 664756 - DNA, 120 bp, Artificial Sequence
  ENSG00000184933_23 (sequence is synthesized)
aactcttttataagttaactcgagttaataggaagtaaaagcataatgttgaatttcttcattgtgcttttcttttattttccaatgctttaaaacacctctaattctgatttcaagtat

SEQ ID NO: 664757 - DNA, 120 bp, Artificial Sequence
  ENSG00000184933_24 (sequence is synthesized)
tggaatagggtttagcacagtattcctcacatactcacctttcaataaaccacgaatgagtttgagtcccatgtactatggtgagattgacacctctccagacggggactgaatttttag

SEQ ID NO: 664758 - DNA, 120 bp, Artificial Sequence
  ENSG00000184933_25 (sequence is synthesized)
tgaacatatgaccctcaggactcatattgaaattgaggtcacaaaactttgtaaactttttcatgtgaagtattgattatcagattaagtatcccccatcctccatttatgtaactgatt

SEQ ID NO: 664759 - DNA, 120 bp, Artificial Sequence
  ENSG00000184933_26 (sequence is synthesized)
tttcccataaacgtagatgtagaactttattttatccttgttccatttgatcctgtttgttttcgaccatctttgtaatctgccggtctttcaaagtattgcttagataatataagtctt

SEQ ID NO: 664760 - DNA, 120 bp, Artificial Sequence
  ENSG00000184933_27 (sequence is synthesized)
ttataattcccctttgctaatacagtatctggagaagcttctagtctcttgcatcagtacaagaggtgggagtactggatctacccgggttattcagagtggccagaggcaactaacaac

SEQ ID NO: 664761 - DNA, 120 bp, Artificial Sequence
  ENSG00000184933_28 (sequence is synthesized)
tacaggcaagtgaggattaatataaatgacttctgtgctccaggtgtctagtggtttccaatgttgagtaaactccagatttctcagtctgccttttaagtttcttcacagcacattctt

SEQ ID NO: 664762 - DNA, 120 bp, Artificial Sequence
  ENSG00000184933_29 (sequence is synthesized)
aattttcctttttgtccttattttaattttttgtccactacaaaccttgtacaggtgaattctagattgtgattaacaatttttatttgagactaataagccagtgtatttcactgtttg

SEQ ID NO: 664763 - DNA, 120 bp, Artificial Sequence
  ENSG00000184933_30 (sequence is synthesized)
ctaaaacatcacattgaccaggatcaggaaacaaaaatccttcttgataaacagcattttaaaaataacaattgttctgcagctctgtaaaccctatttcccttcattaaaaaaccctta

SEQ ID NO: 664764 - DNA, 120 bp, Artificial Sequence
  ENSG00000184933_31 (sequence is synthesized)
cagttatgaacaagtaaagactgagaaatatcagatcaaagcttgtcaaagagacaagatacctatatggagtacggtatattggattggaccctggaacataaagtaatactaacagaa

SEQ ID NO: 664765 - DNA, 120 bp, Artificial Sequence
  ENSG00000184933_32 (sequence is synthesized)
aagataataaaatctgaataaaatggcaaaatctgaatagtttaacagtgatgtatcaattttggtttcttattttgacaagtatgtatgctaatgaaggatgaatatattagaagaaac

SEQ ID NO: 664766 - DNA, 120 bp, Artificial Sequence
  ENSG00000184933_33 (sequence is synthesized)
aaactgagagatgggtgtgtgaaaaactctctttagcatctttgcaatttttctgtaagcctaatattgttccaaaatttagaagtttattttaaaaagaaacacgttgttagtttttcc

SEQ ID NO: 664767 - DNA, 120 bp, Artificial Sequence
  ENSG00000184937_0 (sequence is synthesized)
ggcgctttcaccactgcccctcccggggggacctgaaggagagggtttgaggccggtctttgcccgccgaggtctgcgtgtccggtctgggaggaggcctaggagggctcgcgggccacg

SEQ ID NO: 664768 - DNA, 120 bp, Artificial Sequence
  ENSG00000184937_1 (sequence is synthesized)
ggcatccttgggcccgagttctggggtgcggacggacgtctcgagagtgggtgccgcgactcgggacccacggccctcgccgggcacggacagttgcggagcagggctctgaggattgtg

SEQ ID NO: 664769 - DNA, 120 bp, Artificial Sequence
  ENSG00000184937_2 (sequence is synthesized)
cagtgccctgggtccctgcctactcctgggctcaggaatggagaagggttacagcacggtcaccttcgacgggacgcccagctacggtcacacgccctcgcaccatgcggcgcagttccc

SEQ ID NO: 664770 - DNA, 120 bp, Artificial Sequence
  ENSG00000184937_3 (sequence is synthesized)
caaccactcattcaagcatgaggatcccatgggccagcagggctcgctgggtgagcagcagtactcggtgccgcccccggtctatggctgccacacccccaccgacagctgcaccggcag

SEQ ID NO: 664771 - DNA, 120 bp, Artificial Sequence
  ENSG00000184937_4 (sequence is synthesized)
ccaggctttgctgctgaggacgccctacagcagtgacaatttataccaaatgacatcccagcttgaatgcatgacctggaatcagatgaacttaggagccaccttaaagggagttgctgc

SEQ ID NO: 664772 - DNA, 120 bp, Artificial Sequence
  ENSG00000184937_5 (sequence is synthesized)
tgggagctccagctcagtgaaatggacagaagggcagagcaaccacagcacagggtacgagagcgataaccacacaacgcccatcctctgcggagcccaatacagaatacacacgcacgg

SEQ ID NO: 664773 - DNA, 120 bp, Artificial Sequence
  ENSG00000184937_6 (sequence is synthesized)
tgtcttcagaggcattcaggatgtgcgacgtgtgcctggagtagccccgactcttgtacggtcggcatctgagaccagtgagaaacgccccttcatgtgtgcttacccaggctgcaataa

SEQ ID NO: 664774 - DNA, 120 bp, Artificial Sequence
  ENSG00000184937_7 (sequence is synthesized)
gagatattttaagctgtcccacttacagatgcacagcaggaagcacactggtgagaaaccataccagtgtgacttcaaggactgtgaacgaaggttttctcgttcagaccagctcaaaag

SEQ ID NO: 664775 - DNA, 120 bp, Artificial Sequence
  ENSG00000184937_8 (sequence is synthesized)
acaccaaaggagacatacaggtgtgaaaccattccagtgtaaaacttgtcagcgaaagttctcccggtccgaccacctgaagacccacaccaggactcatacaggtgaaaagcccttcag

SEQ ID NO: 664776 - DNA, 120 bp, Artificial Sequence
  ENSG00000184937_9 (sequence is synthesized)
ctgtcggtggccaagttgtcagaaaaagtttgcccggtcagatgaattagtccgccatcacaacatgcatcagagaaacatgaccaaactccagctggcgctttgaggggtctccctcgg

SEQ ID NO: 664777 - DNA, 120 bp, Artificial Sequence
  ENSG00000184937_10 (sequence is synthesized)
ctaaaaaggaaacttcagttgatcttcttcatccaacttccaagacaagataccggtgcttctggaaactaccaggtgtgcctggaagagttggtctctgccctgcctacttttagttga

SEQ ID NO: 664778 - DNA, 120 bp, Artificial Sequence
  ENSG00000184937_11 (sequence is synthesized)
ctcacaggccctggagaagcagctaacaatgtctggttagttaaaagcccattgccatttggtgtggattttctactgtaagaagagccatagctgatcatgtccccctgacccttccct

SEQ ID NO: 664779 - DNA, 120 bp, Artificial Sequence
  ENSG00000184937_12 (sequence is synthesized)
tctttttttatgctcgttttcgctggggatggaattattgtaccattttctatcatggaatatttataggccagggcatgtgtatgtgtctgctaatgtaaactttgtcatggtttccat

SEQ ID NO: 664780 - DNA, 120 bp, Artificial Sequence
  ENSG00000184937_13 (sequence is synthesized)
ttactaacagcaacagcaagaaataaatcagagagcaaggcatcgggggtgaatcttgtctaacattcccgaggtcagccaggctgctaacctggaaagcaggatgtagttctgccaggc

SEQ ID NO: 664781 - DNA, 120 bp, Artificial Sequence
  ENSG00000184937_14 (sequence is synthesized)
aacttttaaagctcatgcatttcaagcagctgaagaaaaaatcagaactaaccagtacctctgtatagaaatctaaaagaattttaccattcagttaattcaatgtgaacactggcacac

SEQ ID NO: 664782 - DNA, 120 bp, Artificial Sequence
  ENSG00000184937_15 (sequence is synthesized)
tgctcttaagaaactatgaagatctgagatttttttgtgtatgtttttgactcttttgagtggtaatcatatgtgtctttatagatgtacatacctccttgcacaaatggaggggaattc

SEQ ID NO: 664783 - DNA, 120 bp, Artificial Sequence
  ENSG00000184937_16 (sequence is synthesized)
attttcatcactgggagtgtccttagtgtataaaaaccatgctggtatatggcttcaagttgtaaaaatgaaagtgactttaaaagaaaataggggatggtccaggatctccactgataa

SEQ ID NO: 664784 - DNA, 120 bp, Artificial Sequence
  ENSG00000184937_17 (sequence is synthesized)
gactgtttttaagtaacttaaggacctttgggtctacaagtatatgtgaaaaaaatgagacttactgggtgaggaaatccattgtttaaagatggtcgtgtgtgtgtgtgtgtgtgtgtg

SEQ ID NO: 664785 - DNA, 120 bp, Artificial Sequence
  ENSG00000184937_18 (sequence is synthesized)
tgtgtgtgtgttgtgttgtgttttgttttttaagggagggaatttattatttaccgttgcttgaaattactgtgtaaatatatgtctgataatgatttgctctttgacaactaaaattag

SEQ ID NO: 664786 - DNA, 120 bp, Artificial Sequence
  ENSG00000184937_19 (sequence is synthesized)
gactgtataagtactagatgcatcactgggtgttgatcttacaagatattgatgataacacttaaaattgtaacctgcatttttcactttgctctcaattaaagtctattcaaaaggaaa

SEQ ID NO: 664787 - DNA, 120 bp, Artificial Sequence
  ENSG00000184937_20 (sequence is synthesized)
gagctttgggaagctgagggcagccaggcagctggggtaaggagttcaaggcagcgcccacacccgggggctctccgcaacccgaccgcctgtccgctcccccacttcccgccctccctc

SEQ ID NO: 664788 - DNA, 120 bp, Artificial Sequence
  ENSG00000184937_21 (sequence is synthesized)
ccacctactcattcacccacccacccacccagagccgggacggcagcccaggcgcccgggccccgccgtctcctcgccgcgatcctggacttcctcttgctgcaggacccggcttccacg

SEQ ID NO: 664789 - DNA, 120 bp, Artificial Sequence
  ENSG00000184937_22 (sequence is synthesized)
tgtgtcccggagccggcgtctcagcacacgctccgctccgggcctgggtgcctacagcagccagagcagcagggagtccgggacccgggcggcatctgggccaagttaggcgccgccgag

SEQ ID NO: 664790 - DNA, 120 bp, Artificial Sequence
  ENSG00000184937_23 (sequence is synthesized)
gccagcgctgaacgtctccagggccggaggagccgcggggcgtccgggtctgagccgcagcaaatgggctccgacgtgcgggacctgaacgcgctgctgcccgccgtcccctccctgggt

SEQ ID NO: 664791 - DNA, 80 bp, Artificial Sequence
  ENSG00000184937_24 (sequence is synthesized)
ggcggcggcggctgtgccctgcctgtgagcggcgcggcgcagtgggcgccggtgctggactttgcgcccccgggcgcttc

SEQ ID NO: 664792 - DNA, 120 bp, Artificial Sequence
  ENSG00000184937_25 (sequence is synthesized)
ccgccgccacccccgccgccgccgcctcactccttcatcaaacaggagccgagctggggcggcgcggagccgcacgaggagcagtgcctgagcgccttcactgtccacttttccggccag

SEQ ID NO: 664793 - DNA, 120 bp, Artificial Sequence
  ENSG00000184937_26 (sequence is synthesized)
ttcactggcacagccggagcctgtcgctacgggcccttcggtcctcctccgcccagccaggcgtcatccggccaggccaggatgtttcctaacgcgccctacctgcccagctgcctcgag

SEQ ID NO: 664794 - DNA, 120 bp, Artificial Sequence
  ENSG00000184937_27 (sequence is synthesized)
ctcccaccgcattcgaccctgcccggactcactgcttacctgaacggactctccagtgagacgaggctcccacactggcgaaggccaagaaggggaggtggggggagggttgtgccacac

SEQ ID NO: 664795 - DNA, 120 bp, Artificial Sequence
  ENSG00000184937_28 (sequence is synthesized)
cggccagctgagagcgcgtgttgggttgaagaggagggtgtctccgagagggacgctccctcggacccgccctcaccccagctgcgagggcgcccccaaggagcagcgcgcgctgcctgg

SEQ ID NO: 664796 - DNA, 120 bp, Artificial Sequence
  ENSG00000184937_29 (sequence is synthesized)
gaaccctgcatctaaagtggccccatggagggaggcaaaaaccaactatttttgttctgtgagctttaaaaaccatcattccctcctgattgcagataagcatttccaaatggcgactgt

SEQ ID NO: 664797 - DNA, 120 bp, Artificial Sequence
  ENSG00000184937_30 (sequence is synthesized)
cacctacagcacaggctggctaccaagagttaagctgatctggaaaactgacctgtcatttaagcagagtgaggccacagatatgtaatccccacttctgaggacatgacatctcttctt

SEQ ID NO: 664798 - DNA, 120 bp, Artificial Sequence
  ENSG00000184937_31 (sequence is synthesized)
gcgtcatcacttttttggtgctatctggtaaaaactgagtcatgaggtgccgacaaattcagtgcacttaacgtgaagcttgaggcattctgctcattcctgagatacctgcagctgtca

SEQ ID NO: 664799 - DNA, 120 bp, Artificial Sequence
  ENSG00000184937_32 (sequence is synthesized)
gccctgccgtctagatggtaaacaacttgccgaggatgaaaccctgccactgtggtcttcctcggcttgtctgagcgagacctagaccgtgacggtgcacgcctacgagaatcggaggat

SEQ ID NO: 664800 - DNA, 120 bp, Artificial Sequence
  ENSG00000184937_33 (sequence is synthesized)
gagggaggggctgcgaggtggcggccaggatccaggggcctcgccctccgcagaaccctgcatctaaagtggccccatggagggaggcaaaaaccaactatttttgttctccacagcaca

SEQ ID NO: 664801 - DNA, 120 bp, Artificial Sequence
  ENSG00000184937_34 (sequence is synthesized)
gtggtgaaaacaaagctgtgcgttttggtagggccaaggctgtcgaatctggagaaaatccccgctagacatggtctcatccctgagaacctgtgccaaaagagatagctgtcttctctg

SEQ ID NO: 664802 - DNA, 120 bp, Artificial Sequence
  ENSG00000184937_35 (sequence is synthesized)
agattcatttcgcttgcccgcgctgctcctgcggaagagctgcagtttatttttggggggtgaacaaccttctctgtcgatcaggttacagcacggtcaccttcgacgggacgcccagct

SEQ ID NO: 664803 - DNA, 120 bp, Artificial Sequence
  ENSG00000184937_36 (sequence is synthesized)
cggtttagggagacatcaagcctctcccctgacgaatacaatcagaatccttcaccgggacccttactgagattaacaactcctgttcccatgtgcactgcttctaggatgaattaaggg

SEQ ID NO: 664804 - DNA, 120 bp, Artificial Sequence
  ENSG00000184937_37 (sequence is synthesized)
aaatggaaaatgcttcctttgctttctttcccatcaagcccagtttgtcaggctcacttgccatggcctctaaaacactccagaccagacaggtattgagtattccaatccaacagctgg

SEQ ID NO: 664805 - DNA, 120 bp, Artificial Sequence
  ENSG00000184937_38 (sequence is synthesized)
ctcaccatttaattttatgccttcattatccctgagacactatggcctattaacatcaatgttgtgttgtatgtcactgcagcatttattcttccaaaaaagaaaatgacctttcagtgc

SEQ ID NO: 664806 - DNA, 120 bp, Artificial Sequence
  ENSG00000184937_39 (sequence is synthesized)
agggcaatgtgaaatagggactagaacataagcatggggtagagtggaaaatgcacagggcaaggagttggttatattcagaagtggttccaggtcttagcacaaaacatggatgcactt

SEQ ID NO: 664807 - DNA, 120 bp, Artificial Sequence
  ENSG00000184937_40 (sequence is synthesized)
gctcacacctgtaatcccagcactctaggaggccaaggtggaaggatcccttcagctcaagagtttgagaccagcctgagcaacatagggagaccctatctctaccaaaaaaaaaaaaaa

SEQ ID NO: 664808 - DNA, 120 bp, Artificial Sequence
  ENSG00000184937_41 (sequence is synthesized)
aaaaaaaaaaaaaaattagctgggcatgatgactctcacctgttgtcccagctgttcaggaggctgaagtgggaggattacttaagctggtgaggtcgaggctgcaggagccccgatcgt

SEQ ID NO: 664809 - DNA, 120 bp, Artificial Sequence
  ENSG00000184937_42 (sequence is synthesized)
gccactgcactccagcctggacaacagaataagatcctgtcttaagaacaaacaaaaccaaaacatggatgcactcttgtgtcagcatctcaccgcctttggggttgatttactcatcta

SEQ ID NO: 664810 - DNA, 120 bp, Artificial Sequence
  ENSG00000184937_43 (sequence is synthesized)
tctataaaggaatgaggagaatttagtggccactcaggcacttgctcagctcccatttatgactccctgaccccaagaagaggaaggggagcttgcctctttgttttcctccagttctta

SEQ ID NO: 664811 - DNA, 120 bp, Artificial Sequence
  ENSG00000184937_44 (sequence is synthesized)
ttcttggaagactgacaacacacacactgcacttccacaagataaaggggagcaacagatgccctgcaaaggacgtgtgcagagcacagaaggcagatggattccagtgctttctggcct

SEQ ID NO: 664812 - DNA, 120 bp, Artificial Sequence
  ENSG00000184937_45 (sequence is synthesized)
cactattaaaggttgtgctggcttcaccatggccttctggtgggttttgcttcctttcacagatgggatccccaaatccaggggcttcttcttccttgttatttacttatacttggacga

SEQ ID NO: 664813 - DNA, 120 bp, Artificial Sequence
  ENSG00000184937_46 (sequence is synthesized)
tctggtcagttaggggctcattcattatcccacttttttctaataaggatgtccccacccattgcagactggctctaggtcatgtggtcatgactccaagtgggagggagtagttagact

SEQ ID NO: 664814 - DNA, 120 bp, Artificial Sequence
  ENSG00000184937_47 (sequence is synthesized)
ttgggactttggacttgcagacatcactacctcaagaggagaagctgagagatagaatggattgggagctcttccaggtaccagcatttcttttgcagaggctctgggacagccatttca

SEQ ID NO: 664815 - DNA, 120 bp, Artificial Sequence
  ENSG00000184937_48 (sequence is synthesized)
atgtcctgatctagcatccattactgatgtctgccatggggatctggagtgtgaatgggagtggttttaggtctgcacctgccaccccttctttggatatactccagtgctcactctccc

SEQ ID NO: 664816 - DNA, 120 bp, Artificial Sequence
  ENSG00000184937_49 (sequence is synthesized)
gtgaaggtcataaatcctttaaagttgttggattattggacccattttacaataaagaaaccacacctcacccagggctttttttttttttttaatggcagagctagatgtgagccttgg

SEQ ID NO: 664817 - DNA, 120 bp, Artificial Sequence
  ENSG00000184937_50 (sequence is synthesized)
ggcagaatcctctggcccctgagctcccattcatttgtaacttgcaagttggggatcatcctaccctaacaagctccagcgaagtgccttaggcattttgggatctgttcagtcctagta

SEQ ID NO: 664818 - DNA, 120 bp, Artificial Sequence
  ENSG00000184937_51 (sequence is synthesized)
tccactatcttatcaagaagtgctttgggtgtgcaaagtccgggatccaaatttgtatttgtgtgatgctgatctgggcaattcacagtcagatacgcccatacctgattgcaccaacag

SEQ ID NO: 664819 - DNA, 120 bp, Artificial Sequence
  ENSG00000184937_52 (sequence is synthesized)
ggtttttctttccatacttgataatacaaccataatagggagaatacagccaggaaacatcagaaggagctactctttgcacctaaaaatgaaaaaataaaaaaaagaaggcaggtggga

SEQ ID NO: 664820 - DNA, 120 bp, Artificial Sequence
  ENSG00000184937_53 (sequence is synthesized)
cttgctttcaccattgaaagagctcacttttcattttctaccaagtgtgaagagatgggcagtagcatagaacactcatgaagtgcctgcagcgtgtcaggtgtccttccaggttacctc

SEQ ID NO: 664821 - DNA, 120 bp, Artificial Sequence
  ENSG00000184937_54 (sequence is synthesized)
atcttatcttcccaacactctcatgagagctaagtactgcttggtttacagataagtaaaccaagctcagagggttaagttacttcccaggttcacatcctactaagtgctagagctggg

SEQ ID NO: 664822 - DNA, 120 bp, Artificial Sequence
  ENSG00000184937_55 (sequence is synthesized)
atgccaagtccagatctgattccaaagcccaagctctttgcagcctccggtggtgccttccaccccaccattggccccagtgggactggggacttagttcagcactcttgatagctagct

SEQ ID NO: 664823 - DNA, 120 bp, Artificial Sequence
  ENSG00000184937_56 (sequence is synthesized)
atattttaagctgtcccacttacagatgcacagcaggaagcacactggtaagtgtgcccgctgtccagtcttgggcaaacatggttcaagagctccttttccaggctctcacactgctaa

SEQ ID NO: 664824 - DNA, 120 bp, Artificial Sequence
  ENSG00000184937_57 (sequence is synthesized)
gggccctaaaacataaaactcttatttcatgaggttgacctcaaggcacatgcatcccagaattctgcctcagattctgcctgggagttaaagattttgttttttatttgctaatagttt

SEQ ID NO: 664825 - DNA, 120 bp, Artificial Sequence
  ENSG00000184937_58 (sequence is synthesized)
cccttgggctagggttgatttcatgattctctttgttgttgaatatgaatgagagagtcagccatgtgtttagtttttccagtattttccccccataatctctggagatgttcctcctct

SEQ ID NO: 664826 - DNA, 120 bp, Artificial Sequence
  ENSG00000184937_59 (sequence is synthesized)
taaataaagaaaaagaaagaaaaggaaacaccccacatttcccctgcaaaccacagaacagtgagatcccactagcagtgggctgatgatacactgagcatcagcaaagaatgagggtga

SEQ ID NO: 664827 - DNA, 120 bp, Artificial Sequence
  ENSG00000184937_60 (sequence is synthesized)
tggagagcggaatccaatttgtagcgtgtgattcacttttcctgtctctgacacagctgagatcttccagctggtgagaagctggacctctgtggttaaggaatggttgttcccaagaca

SEQ ID NO: 664828 - DNA, 120 bp, Artificial Sequence
  ENSG00000184937_61 (sequence is synthesized)
gaagcaggtccttgaagattactgtgcagaatcagtgattcttgttgggcctgggggactggggaaatctaagggtgaggcagatgcagacattgcaggcatggcaggaaatgctgggct

SEQ ID NO: 664829 - DNA, 120 bp, Artificial Sequence
  ENSG00000184937_62 (sequence is synthesized)
gcacattaagtatcgtagagaactagaatgagcacatgcacctccagtaactaaatggctttctggaacagcgtcgtgtccgtggatagctcccgcgtatggtaatacagaagtggatct

SEQ ID NO: 664830 - DNA, 120 bp, Artificial Sequence
  ENSG00000184937_63 (sequence is synthesized)
tcactgggcttcgctcaggcggcggccacgcaggttctggggatggaagagaacttgacttatccgagtccaagctatgcgggaccaggttctaccgcaggcagtggaaggaggttacag

SEQ ID NO: 664831 - DNA, 120 bp, Artificial Sequence
  ENSG00000184939_0 (sequence is synthesized)
ctcctgccccggagccgggccctggcgaggcaggaatggccccgaggcctccgaccgccgcgccccaggaatcagtgacattcaaagatgtgtctgtggacttcacccaggaagaatggt

SEQ ID NO: 664832 - DNA, 120 bp, Artificial Sequence
  ENSG00000184939_1 (sequence is synthesized)
accatgtcgaccctgctcagaggagcttatacagggatgtgatgctggagaactatagccacctggtttctcttggatatcaagtttccaagccagaggtgatcttcaaattggagcaag

SEQ ID NO: 664833 - DNA, 120 bp, Artificial Sequence
  ENSG00000184939_2 (sequence is synthesized)
gagaagagccatggatatcagagggagaaatccaacgacctttctatccagactggaagaccaggcctgaagtcaaatcatcacatttgcagcaggatgtatcagaagtatcccactgca

SEQ ID NO: 664834 - DNA, 120 bp, Artificial Sequence
  ENSG00000184939_3 (sequence is synthesized)
cacatgatctcttacatgctacattagaagactcctgggatgttagcagccagttagacaggcaacaggaaaactggaagagacatctgggatcagaggcatccacccagaagaaaataa

SEQ ID NO: 664835 - DNA, 120 bp, Artificial Sequence
  ENSG00000184939_4 (sequence is synthesized)
ttacaccacaagaaaattttgagcaaaataaatttggtgaaaattctagattgaacaccaatttggttacacaactgaacattcctgcaagaataaggcctagtgaatgtgagacccttg

SEQ ID NO: 664836 - DNA, 120 bp, Artificial Sequence
  ENSG00000184939_5 (sequence is synthesized)
gaagcaatttgggacataatgcagacttacttaatgagaataatattcttgcaaaaaagaaaccctataagtgtgataaatgtagaaaagcctttattcatagatcatcgcttactaaac

SEQ ID NO: 664837 - DNA, 120 bp, Artificial Sequence
  ENSG00000184939_6 (sequence is synthesized)
atgagaaaacacataaaggagagggagctttccctaatggaacagatcaaggaatttatcctggaaagaaacaccatgaatgtaccgactgtgggaaaacctttctctggaagacacagc

SEQ ID NO: 664838 - DNA, 120 bp, Artificial Sequence
  ENSG00000184939_7 (sequence is synthesized)
ttactgagcatcagagaattcacactggggagaaaccctttgaatgcaatgtatgtggaaaggccttcaggcatagctcatctcttggtcagcatgagaatgctcataccggagagaaac

SEQ ID NO: 664839 - DNA, 120 bp, Artificial Sequence
  ENSG00000184939_8 (sequence is synthesized)
cctatcagtgtagtctctgtgggaaagccttccagcgcagctcctcccttgttcaacaccagcgaattcacactggagagaaaccctatcgatgtaatctatgtgggaggtcctttaggc

SEQ ID NO: 664840 - DNA, 120 bp, Artificial Sequence
  ENSG00000184939_9 (sequence is synthesized)
atggcacatccctcactcaacacgaggtcacacacagtggagagaagcccttccagtgtaaggaatgtgggaaagcctttagtcgatgttcttcccttgtccaacatgagaggactcata

SEQ ID NO: 664841 - DNA, 120 bp, Artificial Sequence
  ENSG00000184939_10 (sequence is synthesized)
ctggagagaaaccttttgaatgtagcatatgtgggagggcttttggtcagagcccatccctttataaacatatgaggattcataagagaggcaaaccttaccaaagcagtaactacagca

SEQ ID NO: 664842 - DNA, 120 bp, Artificial Sequence
  ENSG00000184939_11 (sequence is synthesized)
tagatttcaagcacagcacatctctcactcaagatgaaagcactcttaccgaagtgaaatcctaccattgtaatgactgtggggaagactttagtcacattacagactttactgaccatc

SEQ ID NO: 664843 - DNA, 120 bp, Artificial Sequence
  ENSG00000184939_12 (sequence is synthesized)
agaggatccatactgcagagaacccctatgattgtgagcaggcttttagtcagcaagctatttctcatcctggagagaaaccctatcaatgtaatgtatgtgggaaagctttcaaaagga

SEQ ID NO: 664844 - DNA, 120 bp, Artificial Sequence
  ENSG00000184939_13 (sequence is synthesized)
gtacaagtttcatagagcatcacagaattcatactggagagaaaccctatgaatgtaatgagtgtggagaagcctttagtcgacgctcatcgcttactcaacatgagagaacccacactg

SEQ ID NO: 664845 - DNA, 120 bp, Artificial Sequence
  ENSG00000184939_14 (sequence is synthesized)
gagagaaaccctatgaatgtattgactgtgggaaagcctttagtcaaagttcatctctcattcagcatgagagaactcatactggagagaagccctatgaatgtaatgaatgtgggagag

SEQ ID NO: 664846 - DNA, 120 bp, Artificial Sequence
  ENSG00000184939_15 (sequence is synthesized)
ccttccgaaaaaaaaccaacctgcatgatcatcagagaattcatactggagaaaaaccctattcttgtaaggaatgtgggaaaaacttcagccgaagttcagctcttactaaacaccaga

SEQ ID NO: 664847 - DNA, 120 bp, Artificial Sequence
  ENSG00000184939_16 (sequence is synthesized)
gaattcatactcgaaataaactctaggaaccgtgaaattaaggaatttgcagaatgctttagctaaaatgttctgattcaggatcagaggattcttagagagcttgggaatgtaatgaat

SEQ ID NO: 664848 - DNA, 120 bp, Artificial Sequence
  ENSG00000184939_17 (sequence is synthesized)
tacgtgtgtgtttatacgttgtgtgtggagaaaactgccagtagacagattttttttttttaacataaagacacattctcagatctgattacagactagtgtaaaaacagctacatgtat

SEQ ID NO: 664849 - DNA, 120 bp, Artificial Sequence
  ENSG00000184939_18 (sequence is synthesized)
atcatcaagtttcaacatcttgacttgtgacccccaatgtcaacagcttttttaaaaagcaaattcctgcagtaatgaccaaaacccattttaaaaattgcttgacaactgcactcaact

SEQ ID NO: 664850 - DNA, 120 bp, Artificial Sequence
  ENSG00000184939_19 (sequence is synthesized)
gcagctcttacattaacttcaccatggaaaccagttccaactccaggaagtcaccattcaaagaattagatcaactagcccaaccacttcattgtacagatgaagactgaaagccaaaga

SEQ ID NO: 664851 - DNA, 120 bp, Artificial Sequence
  ENSG00000184939_20 (sequence is synthesized)
tgtgaagtggtttccacagtatgatacagcctataagggtaaagctgggttaaaaatgcaggtttcctggatttggggccccatggccttgccagtgaaaaggttatttttggactcaga

SEQ ID NO: 664852 - DNA, 120 bp, Artificial Sequence
  ENSG00000184939_21 (sequence is synthesized)
gggctttaaaataaattttaagatgtatcagatacacaaacatttaatgggcacctatgggttggacactttgagaattcttaaaagtataagtgggagcaaaatgtatgcaaatttatc

SEQ ID NO: 664853 - DNA, 120 bp, Artificial Sequence
  ENSG00000184939_22 (sequence is synthesized)
acaaactatttaaagcaacttcttggaggcttacaaaccacaatttaacagaaactgtagatggttgaactactagtgacttttttccccttttcccagttacaattatactttcagcta

SEQ ID NO: 664854 - DNA, 120 bp, Artificial Sequence
  ENSG00000184939_23 (sequence is synthesized)
acatatgccagtttcacagaactattaagtccccttattgtactttttatggcatgcccatgaaaaagcactttcttaagcctacagtatcagatcaatgggaaaacaacagaaaactaa

SEQ ID NO: 664855 - DNA, 120 bp, Artificial Sequence
  ENSG00000184939_24 (sequence is synthesized)
gaggagaattttcccgttaattttcttgcagaaaagttaagtctaattgcccattgccataaattttgccttgtactcagagaagcaacatgcactggctcattttatgtgcaaagaaaa

SEQ ID NO: 664856 - DNA, 79 bp, Artificial Sequence
  ENSG00000184939_25 (sequence is synthesized)
agaagcaacatgcactggctcattttatgtgcaaagaaaagatttcaccattaaaaaaattaacttggctaggaaggca

SEQ ID NO: 664857 - DNA, 78 bp, Artificial Sequence
  ENSG00000184939_26 (sequence is synthesized)
tggacaacatggtgaaaccccatctctttaaaaaaaaaaaaaaatccaaaaattagctgggcatggtggcatgcagtg

SEQ ID NO: 664858 - DNA, 120 bp, Artificial Sequence
  ENSG00000184939_27 (sequence is synthesized)
ccgggagcagagactgcagtgagctgagatcacactactgcattccagcctgagcaacagagcaagacacacacacatcaatttattttagttgtataatgcttttctattagtaaagca

SEQ ID NO: 664859 - DNA, 120 bp, Artificial Sequence
  ENSG00000184939_28 (sequence is synthesized)
tcagctaagcttcagtggcctgctccatcccctaatgactcccatgggctatcctaaaggaacttccagaacctttgttggtgtgttgacattgaccatgcagaccaatttgggcacaac

SEQ ID NO: 664860 - DNA, 120 bp, Artificial Sequence
  ENSG00000184939_29 (sequence is synthesized)
tggacattgattccttttacacaagagctgcctcccaaagatagataaattttcccagccctaaatatgaatcatggggcaagatattggtcgtattgatggtgaacctttcctactgga

SEQ ID NO: 664861 - DNA, 120 bp, Artificial Sequence
  ENSG00000184939_30 (sequence is synthesized)
ttctttgcatgccacatagcaggattcattgcctttctctcatcatggatggcatgcagcagcacccaagtattcttcattctttgcagggaaaaaattgtgcatgggggctgaaatgta

SEQ ID NO: 664862 - DNA, 120 bp, Artificial Sequence
  ENSG00000184939_31 (sequence is synthesized)
atatgtgtagctcaattagtctctcctctgtgatgcaaaatggaatattcaatggcagatctgcccttctgagatgctgaccatccaaaacaccttgtttatggtgcaccatgattagct

SEQ ID NO: 664863 - DNA, 120 bp, Artificial Sequence
  ENSG00000184939_32 (sequence is synthesized)
cacacacaatgccaaggctgtgcttctattatctgatacatagtttgacaatgggtaattctactcagaccctccctactgattggctaggatgcctgtcaggaactcattatgctactg

SEQ ID NO: 664864 - DNA, 120 bp, Artificial Sequence
  ENSG00000184939_33 (sequence is synthesized)
gttgtttggggatccccatagtggactactttcaggaatggcatgaattgtaaccaactgagtgctgcccccactgttacggaagtttataaaaccttagttccagaagacccaaaggag

SEQ ID NO: 664865 - DNA, 120 bp, Artificial Sequence
  ENSG00000184939_34 (sequence is synthesized)
agtactggtttgtgtttggtgcttggcctagatccagccaccactctgaaactcagcacatcttcattgacagggagggagcccaggacatatgtgtggctcattgaccagaaggctttc

SEQ ID NO: 664866 - DNA, 120 bp, Artificial Sequence
  ENSG00000184939_35 (sequence is synthesized)
ttagtcccaacagccatgaaccatgcacttatggatacccagccttttagggctacgtgaaatgcatccttgtaacatcattgtattctttcaataaatagccttctgagttgaatggga

SEQ ID NO: 664867 - DNA, 120 bp, Artificial Sequence
  ENSG00000184939_36 (sequence is synthesized)
acttccagttctgccccaccgctgcggccattgtccgaccccggtgcggctgaggcccctttgggcagcccctccgcagatcagaattggagataaccgaggcttcggcgggggcgggag

SEQ ID NO: 664868 - DNA, 120 bp, Artificial Sequence
  ENSG00000184939_37 (sequence is synthesized)
cctcctgccgctgtcgctaccatctgggagtaagggcgaaagaagacagaaacttccaagaaagaatcctgagtgatgtcagcaagaatggctaagtaaggacctccagaagttctctgc

SEQ ID NO: 664869 - DNA, 120 bp, Artificial Sequence
  ENSG00000184939_38 (sequence is synthesized)
cccgtacaagccatgcaaatactgacaaaactgtgagaatcagatttttcacaactctggaacatttattccagcaagcagcaaatgttccccttgcagcaagctaggaaacatttattt

SEQ ID NO: 664870 - DNA, 120 bp, Artificial Sequence
  ENSG00000184939_39 (sequence is synthesized)
gccacctggtttctcttgagttcctgaggatcaaggactagtactgacttgtccttaggagggttctttgtccacttgcacaaacaaccaaatcttgtgtatttacccatgagcaggata

SEQ ID NO: 664871 - DNA, 120 bp, Artificial Sequence
  ENSG00000184939_40 (sequence is synthesized)
agggagaaatccaacgacctttctatccagcagtgtatttcaacaggaaggaataggggacttttgtactttggatttctttcagactggaagaccaggcctgaagtcaaatcatcacat

SEQ ID NO: 664872 - DNA, 120 bp, Artificial Sequence
  ENSG00000184939_41 (sequence is synthesized)
ggctgctggcttttagcacctggtgggtttcgcgccttgcaactcgacaactgccgggacggagtctggctgcgcgaccccctgcggcaggtgctgggcgaggcgcctcccctgcaacta

SEQ ID NO: 664873 - DNA, 120 bp, Artificial Sequence
  ENSG00000184939_42 (sequence is synthesized)
gcctgccgcttccctcccggcacccccgccgccagccccgagcgcggacctggagcggagaagagaggtcggtgcctccaacccggggccgcggtcgaggggcgcgcgtcgttgctctgg

SEQ ID NO: 664874 - DNA, 88 bp, Artificial Sequence
  ENSG00000184939_43 (sequence is synthesized)
gccccctgcccagcagcagtcagcggagctgcacgagtcagactccacttctggtgcacctggtaccttatggtgcaatgtcagctta

SEQ ID NO: 664875 - DNA, 120 bp, Artificial Sequence
  ENSG00000184939_44 (sequence is synthesized)
ctctccctctcccaatcttttgtgctttgagcgcctgcagcacctcaccttactgtgtattgtctcatattgtgctctaataaataacgcttttaaaataaactgaaccgtattcaagga

SEQ ID NO: 664876 - DNA, 120 bp, Artificial Sequence
  ENSG00000184939_45 (sequence is synthesized)
ttgatgcatttccaagtaagttgcaggcataattacatttcacccctacacttttagtatgtatgtcgttaactagaattcaatttttttcagtttttaaaagaaaatgttatatgcagt

SEQ ID NO: 664877 - DNA, 120 bp, Artificial Sequence
  ENSG00000184939_46 (sequence is synthesized)
gaaatgtacaagtcttatatgtaccatccagttggttttgacaaatgcattcacttgcctaacccaaattcctattgacatagaacatttccatcactccaaaaagctctctgcccttag

SEQ ID NO: 664878 - DNA, 120 bp, Artificial Sequence
  ENSG00000184939_47 (sequence is synthesized)
tttttaaaggttatcgttcttaaaccctaaaaatcaatttgcttgtatcagtgttctgaagtaaaaacagggacttaaagatcaatttattagccagattgaaataaattttttggtcaa

SEQ ID NO: 664879 - DNA, 120 bp, Artificial Sequence
  ENSG00000184939_48 (sequence is synthesized)
aggaggtaattagtgtagaaccggagctcaaatagatgaaaaccacagtaccagttgtaaagacaaagatgatttgcctcctgatcaaggacctccttgatctccaagggttatacttta

SEQ ID NO: 664880 - DNA, 120 bp, Artificial Sequence
  ENSG00000184939_49 (sequence is synthesized)
caaactgagaaaatgcagtatttcaaataatcttttcagttgtatcactgggtacagattttctctgcagcatttggagacctggaacctgagagttgacagtaaagaaattatgaaatg

SEQ ID NO: 664881 - DNA, 120 bp, Artificial Sequence
  ENSG00000184939_50 (sequence is synthesized)
gatatattaggaagacagattttgtggtggtttataaaaggataggaggcatggagagcatataggatcctaagatgggctgtgatcctgttccatttgtatctgtgcctaacacagtcc

SEQ ID NO: 664882 - DNA, 120 bp, Artificial Sequence
  ENSG00000184939_51 (sequence is synthesized)
tgctcacttatttccttattttctaaccaaccctcctagatgggctttcctcattctctggacttaccacatactctgaatctgcagtctttgctatcatttcttcacttttccttttct

SEQ ID NO: 664883 - DNA, 120 bp, Artificial Sequence
  ENSG00000184939_52 (sequence is synthesized)
ccattttgggtcgtcttctcaggatacaggagtaatttcaaaacagagtcatatgtaacttatatgtctttcttcattcctactctagcagtgtatttcaacaggaaggaataggggact

SEQ ID NO: 664884 - DNA, 120 bp, Artificial Sequence
  ENSG00000184945_0 (sequence is synthesized)
gccagctcctgctctgtcccctcaggtgtcctgcaggcacagctcctcggggggcccaggccgatggcaggtcttaacgtgtccctctccttcttctttgccaccttcgccctctgtgag

SEQ ID NO: 664885 - DNA, 120 bp, Artificial Sequence
  ENSG00000184945_1 (sequence is synthesized)
gcggccaggcgggcctccaaggccctgctcccagtgggcgcctatgaagtcttcgcccgggaggcggtgggtgcggtgcagctcgggccctgctgcctggagatgaggacgctggtcgag

SEQ ID NO: 664886 - DNA, 120 bp, Artificial Sequence
  ENSG00000184945_2 (sequence is synthesized)
ctcgggccctgggctggggactttgggcctgacctgctgctcaccctgctcttcctgctcttcctggcgcacggggtcaccttggacggggcctcggccaaccccactgtgtccctgcag

SEQ ID NO: 664887 - DNA, 120 bp, Artificial Sequence
  ENSG00000184945_3 (sequence is synthesized)
gagttcctcatggccgagcagtctctgcctggcacgctgttgaagctggcggcacaggggctgggcatgcaggccgcctgcaccctgatgcgcctctgctgggcctgggagctcagtgac

SEQ ID NO: 664888 - DNA, 120 bp, Artificial Sequence
  ENSG00000184945_4 (sequence is synthesized)
agctgcagctcggccctgcgcacatccgtgccccacggggcgcttgtggaggccgcctgcgccttttgtttccatctgaccctcctgcacctgcggcacagtcctcccgcctacagcggg

SEQ ID NO: 664889 - DNA, 120 bp, Artificial Sequence
  ENSG00000184945_5 (sequence is synthesized)
cccgctgtggctctgttggtcaccgtcacggcctacacggccgggcccttcacgtctgccttcttcaaccctgccctggccgcctctgtgacctttgcctgctcgggacacaccttactg

SEQ ID NO: 664890 - DNA, 120 bp, Artificial Sequence
  ENSG00000184945_6 (sequence is synthesized)
gagtacgtgcaggtgtactggctgggccctctgacagggatggtcctggctgtgctgctgcaccagggccgccttccccaccttttccagaggaacctgttctacggccagaagaacaag

SEQ ID NO: 664891 - DNA, 120 bp, Artificial Sequence
  ENSG00000184945_7 (sequence is synthesized)
taccgagcaccccgagggaagccggccccggcctcaggggacacccagacccctgcaaaggggtccagtgtccgggagcctgggcgcagtggtgttgaggggccacattccagctgagtg

SEQ ID NO: 664892 - DNA, 120 bp, Artificial Sequence
  ENSG00000184945_8 (sequence is synthesized)
gccttgctctgtgtgagccccgtgcgagggccctgcttgtagctggaccctggaaccttctgtagctaagagggaatcctggccccctccccagaagccatttgtcaataaaccatttct

SEQ ID NO: 664893 - DNA, 120 bp, Artificial Sequence
  ENSG00000184945_9 (sequence is synthesized)
cagcttctgaaagcatggggcatctgcggaagaactgggttgtttcccagctttcgtccctgcggaggggcgatccggcccctccatgtcagcagtgtttggtcgtccacatgcttgtca

SEQ ID NO: 664894 - DNA, 120 bp, Artificial Sequence
  ENSG00000184945_10 (sequence is synthesized)
gccccacgctgtgctcctgcgtctcttcccgtctcatccatctggatgcttgacacctctgacagcatccctttcctgtcatcttagggcagcttcaggaaaccgaaaaacaggcttgtg

SEQ ID NO: 664895 - DNA, 120 bp, Artificial Sequence
  ENSG00000184945_11 (sequence is synthesized)
cgaggcagcactgccctctgctaggaacagctccgtgttggcctctctgtccccacacactgggcctgcagggcttctccgagactcttcagttcaggcttctgggtgctttccttagtt

SEQ ID NO: 664896 - DNA, 120 bp, Artificial Sequence
  ENSG00000184945_12 (sequence is synthesized)
tcagacactcggctccacctcactgagtctctcaggcatgtgcagggtcctaggaagcatatgaagtgcatcaggaaccccctcctgcccccgttgccgaggcagcactgccctctgcta

SEQ ID NO: 664897 - DNA, 120 bp, Artificial Sequence
  ENSG00000184949_0 (sequence is synthesized)
agagtagcaaaatgggcctctccccaactcccctcctcatcccccagcacaaggcaaagggcaccccttgctgtgagtttgggggcaccggctgtcgggggccgacccagaactttgcgg

SEQ ID NO: 664898 - DNA, 120 bp, Artificial Sequence
  ENSG00000184949_1 (sequence is synthesized)
ggtcccctgagggacccgtggcgggaccggccccgggttcgtcaaattccgccgatgctttcaggaggctgattaaacaaacgacaagattggagtgggaaatgagaggctcttaaaagt

SEQ ID NO: 664899 - DNA, 120 bp, Artificial Sequence
  ENSG00000184949_2 (sequence is synthesized)
ggaagctttttgtttgtccatttacaagaaattggacaatgaatcacttcaggaagatggaggtcatcaacctcaccaccctacctatgataccagtggatgagcacctggctgtctcgc

SEQ ID NO: 664900 - DNA, 120 bp, Artificial Sequence
  ENSG00000184949_3 (sequence is synthesized)
ttgtcgcacggaatacaatggtgaagactgtgaggaaggagttagagaacaatccaccctcatgccttattggctccatgcaccaggtgaaccaaaagattgctgacataaatctgcgta

SEQ ID NO: 664901 - DNA, 120 bp, Artificial Sequence
  ENSG00000184949_4 (sequence is synthesized)
ccgagccgtcggccaacagcctggcaattgagagatttgagttggagaagaaggctttaagagagaaaactcgcagcagtccagaagacaaagtcaagagacaaaggaaatctcagtatt

SEQ ID NO: 664902 - DNA, 120 bp, Artificial Sequence
  ENSG00000184949_5 (sequence is synthesized)
cctgcaaaggctccgaactcagacatgccagatcttctgttataaaaaggaaaacagcagataaaaatctgctggcagagctgtaccagtattccaacttcaacagctccaagccaaaca

SEQ ID NO: 664903 - DNA, 120 bp, Artificial Sequence
  ENSG00000184949_6 (sequence is synthesized)
agcttccgaatggcgtggacttctgtgacatggtgggcaacgtggtccgggctgagagagactgccttagtggcaagcatttctgttcaggtagagaattagagaagtttctctcttctt

SEQ ID NO: 664904 - DNA, 120 bp, Artificial Sequence
  ENSG00000184949_7 (sequence is synthesized)
cttctccaagagccatctggctggatagcttttggtggatatttcatgagaggtaccagccaaacaaggagctccagaataatctgtttgaccggatagcccagcactatgccttacttt

SEQ ID NO: 664905 - DNA, 120 bp, Artificial Sequence
  ENSG00000184949_8 (sequence is synthesized)
tgtttcgtgtacccaagtcccactctgaagaggcgctcttaaaaaggctgccatcacttctcagcaaagccgtgtacaccagcttctgttgctgctttccacagtcctggttcgacacgc

SEQ ID NO: 664906 - DNA, 120 bp, Artificial Sequence
  ENSG00000184949_9 (sequence is synthesized)
acgaattcaagtctgacatctgtaacacaatgagcctgtggatttcaggcacctatcctagcccacagagctatgacagctgggactactcggaactagacccagagcgattccgcagag

SEQ ID NO: 664907 - DNA, 120 bp, Artificial Sequence
  ENSG00000184949_10 (sequence is synthesized)
tacagaagaagactgacaaaggggagagagttttctttgtttgctggtaagagagccttctcccagaagccagcccagagcaggaaattctaccaccctcagtcttctagtgcaaattca

SEQ ID NO: 664908 - DNA, 120 bp, Artificial Sequence
  ENSG00000184949_11 (sequence is synthesized)
cccagtgaaaaaacctcttcggccaagcagaactcagaaaaaagcttacgaatgcagaatactgcaaaagagcatcattgtcagaccctggtcttgaagaaacctacgcaagaagtcaag

SEQ ID NO: 664909 - DNA, 120 bp, Artificial Sequence
  ENSG00000184949_12 (sequence is synthesized)
aggatatcagaagcaagagaatgtgagaatatgtttcctaaaaagtcgtgtgctgcctgcaaaagccctgagctgacttcaaacctcttcaacatttatgggaagagccctctgattgtg

SEQ ID NO: 664910 - DNA, 120 bp, Artificial Sequence
  ENSG00000184949_13 (sequence is synthesized)
tactttctccagaactatgccagtctgcagcagcacggcaagaatgtgttgatagtcagaagggaaaagaccacgagcacccctgactgcaccccaacgtatactgatgtcatcagcgag

SEQ ID NO: 664911 - DNA, 120 bp, Artificial Sequence
  ENSG00000184949_14 (sequence is synthesized)
accctgtgcagcatgaagaagcggaaagacaacctcaatcagttgtaccagcatcattggactgaatggaattattttgacaagcatctaaaggagctgcaagacaacttctccagggaa

SEQ ID NO: 664912 - DNA, 120 bp, Artificial Sequence
  ENSG00000184949_15 (sequence is synthesized)
atgaagaatattgatccaaaagcagcagatacaaaaaaggcaaaccacatgttcatcccaccttcagccgtcaatgaggaatcacctgacaagaaaactaagggaagtctccaaagagaa

SEQ ID NO: 664913 - DNA, 120 bp, Artificial Sequence
  ENSG00000184949_16 (sequence is synthesized)
attgagtttaagggttgttcgaacaaaaaccatgggaaaggtagaagtgtgaacatgaggggaaaggaggagagggaaagagaagagaaacagaagttgaacatttctttccactcactt

SEQ ID NO: 664914 - DNA, 120 bp, Artificial Sequence
  ENSG00000184949_17 (sequence is synthesized)
ccaagccctgaggagctccacaacctagaaccaggaagcgcctacagaatccgtgatatttctgctacgaggaccccgcttagacgtccctcatcttgggagccttccctaatataccag

SEQ ID NO: 664915 - DNA, 120 bp, Artificial Sequence
  ENSG00000184949_18 (sequence is synthesized)
gagcaagtgttgctgaaaacccatactctcagcatggaagaagataaattcagatgttaaactagaagagatgaagttaaaatcctatagtcctgattttgaattgcttatgaattgatg

SEQ ID NO: 664916 - DNA, 120 bp, Artificial Sequence
  ENSG00000184949_19 (sequence is synthesized)
atgaaatgtatgttttagaacatacagtttcctgaagaacaggagggatagctggagaggggataggagggaagctggaaggggttacaaagaggcccaaataaacttttgggggtgaca

SEQ ID NO: 664917 - DNA, 120 bp, Artificial Sequence
  ENSG00000184949_20 (sequence is synthesized)
ccgcccggcctctaccaccgaggaaaggggtaaccggcgcgggggttcccagcgccagcctgcgccaatccccagaaactccgtgaatcacctcgggatagcaaacggattatacaaagg

SEQ ID NO: 664918 - DNA, 120 bp, Artificial Sequence
  ENSG00000184949_21 (sequence is synthesized)
cagtgtcttctggggtccttttcatgcctctaggaccaggacctgcattcaccctctccactgacacattggtctgggcccccggcccggctgtcaccatagaaacggcatctcgcggac

SEQ ID NO: 664919 - DNA, 120 bp, Artificial Sequence
  ENSG00000184949_22 (sequence is synthesized)
aaaattgtggccaaagacagaaataggaatcatgatttctccataggggaaggattccgttgtagtttttcctaggctgagtgaaaagcaggagtagagagttggtgcttgggtcactac

SEQ ID NO: 664920 - DNA, 120 bp, Artificial Sequence
  ENSG00000184949_23 (sequence is synthesized)
atttattcatagatttactctttcagtattttattacgtgcatgctggtaagtatgttacaaatatgacctcatacaaaggtaaaactttcataccagccgtatgaagtagggattatcc

SEQ ID NO: 664921 - DNA, 120 bp, Artificial Sequence
  ENSG00000184949_24 (sequence is synthesized)
actgcattttacgcagcagcaagcccaggtttagaaaggtttccgaagttctctgctgtagacactgggtaattaacagtagataagacacagtccctgttctcaagggagtcaccatct

SEQ ID NO: 664922 - DNA, 120 bp, Artificial Sequence
  ENSG00000184949_25 (sequence is synthesized)
ggtagagggaagacagatgtatcaacacattaaatgctgtaagtattggacagaggaaaaagagaaaagtgttgtgagggaaaaggaaaatgggcctagaggagtgcaattttttgtaac

SEQ ID NO: 664923 - DNA, 120 bp, Artificial Sequence
  ENSG00000184949_26 (sequence is synthesized)
aagctttgtggaactattaatttgataatttgataggcgcttctattatgctgcctctgaacctttgcctcctgctcctctaaccactgggattgccagcctatttccaatatgccctct

SEQ ID NO: 664924 - DNA, 120 bp, Artificial Sequence
  ENSG00000184949_27 (sequence is synthesized)
ttctgcctggcaaacatcttgtcttttctaaactcagcccagggacatgacatctgtaatgtgtttctgtgtgactcccaggcttctgccttcttaacctctcaccttccagctcatttg

SEQ ID NO: 664925 - DNA, 120 bp, Artificial Sequence
  ENSG00000184949_28 (sequence is synthesized)
agtgaatctttgtccaagaattgagagaaactttataggtaaagcatgcacatgttgtctgatttaatctaaaatagaaataagaaaacaaaaaataatactgcaactagggacacattt

SEQ ID NO: 664926 - DNA, 120 bp, Artificial Sequence
  ENSG00000184949_29 (sequence is synthesized)
agtcactcccagttcatgagacaaggaatagtaaagttcattcctaccatagcaaaagtcaggatttaaatgtaaattaatttttttaattaaaaaattttaaattaggccaggcgtggt

SEQ ID NO: 664927 - DNA, 65 bp, Artificial Sequence
  ENSG00000184949_30 (sequence is synthesized)
taaaaatacaaaaattagctggatgtggaacccaggtggcggaggttgcagtgagccaagaccat

SEQ ID NO: 664928 - DNA, 120 bp, Artificial Sequence
  ENSG00000184949_31 (sequence is synthesized)
agcgaaactctgtctcaaaaaaaaattttttttaattaattttaactaaattaaattttttagaggcagactctcagtctgttgtccaggctggaatgcagtggcgcagtcatagctcac

SEQ ID NO: 664929 - DNA, 69 bp, Artificial Sequence
  ENSG00000184949_32 (sequence is synthesized)
gactctcagtctgttgtccaggctggaatgcagtggcgcagtcatagctcactgcaacctcaaattcct

SEQ ID NO: 664930 - DNA, 120 bp, Artificial Sequence
  ENSG00000184949_33 (sequence is synthesized)
aggctggtctcgaactcctggcttcaagtaatcctcctgccttgtccttccaaagcactgggattctaagtgtgagccaccacacctggcctggagtatctaatattgtataacataata

SEQ ID NO: 664931 - DNA, 120 bp, Artificial Sequence
  ENSG00000184949_34 (sequence is synthesized)
ggagtatctaatattgtataacataataatagtaatcataggtgatgtcatttattgagtacttagtatgtgctgagtgctctgctaagtctggtttagacattatctcagttaaccttc

SEQ ID NO: 664932 - DNA, 120 bp, Artificial Sequence
  ENSG00000184949_35 (sequence is synthesized)
ctggtgtcccccaagatggatattgttacctccattttctcctaggaagaaacggacttgggggggatgattaggtatttgctagatgtctattctgtaccatccctgcactaggccctg

SEQ ID NO: 664933 - DNA, 120 bp, Artificial Sequence
  ENSG00000184949_36 (sequence is synthesized)
tgaatacagagataaataaagacacagtccctgaccttatggggctcacaatctggaaaaaagagaaggatgtgtaaaccaataaatgcattaatgctccgatagaaagctgcgtggaat

SEQ ID NO: 664934 - DNA, 120 bp, Artificial Sequence
  ENSG00000184949_37 (sequence is synthesized)
ctgagaaaaaccaaggcagatgaagccagtgtgccagcagccctttgggacagaagatatttcactgaggggcacaggcacaggggttggtttgccaaaggaccagcagctgggctgaag

SEQ ID NO: 664935 - DNA, 120 bp, Artificial Sequence
  ENSG00000184949_38 (sequence is synthesized)
ggcataggttttatcatttgagcttcaaggcacaaggcagtgacctggtctgtgctagaacagttcacctgtcacagccaagaggaaagaaatggtgcagatggctgtttgcccaaacca

SEQ ID NO: 664936 - DNA, 120 bp, Artificial Sequence
  ENSG00000184949_39 (sequence is synthesized)
agcagcagataagcagatcttgggaaatgtagctcatccctcagacacacatctttacttgaatcctgagtagaactctaggtgacccccttggaggctattactcatgtaaaaggggat

SEQ ID NO: 664937 - DNA, 120 bp, Artificial Sequence
  ENSG00000184949_40 (sequence is synthesized)
gaaggaaaggtaagagagaaggagcttaggctttggcatgagaaaatttgggcctttgaatccctgccctgcttcaccatatggatgtgtgactcagcatagtagctgtgcatcttgacc

SEQ ID NO: 664938 - DNA, 120 bp, Artificial Sequence
  ENSG00000184949_41 (sequence is synthesized)
tttctgaacgtgctttcttgactgcagaaagggaatgcctgcctaggagggttgttgtgaggattagatgagataatttgtgcaaagttcttggcacagtacttttcactttgtaattgc

SEQ ID NO: 664939 - DNA, 82 bp, Artificial Sequence
  ENSG00000184949_42 (sequence is synthesized)
tgcaaagttcttggcacagtacttttcactttgtaattgccacaagctgttattgttgttattgctgttataaagtgtactc

SEQ ID NO: 664940 - DNA, 120 bp, Artificial Sequence
  ENSG00000184949_43 (sequence is synthesized)
gaaaccagaacgtgtgagcacctgccgagtacaaggcaccatgtggggcagataagcagaacactctctcaccttccctttactaccccagccactgtcaactcttcatttgcagtttct

SEQ ID NO: 664941 - DNA, 120 bp, Artificial Sequence
  ENSG00000184949_44 (sequence is synthesized)
ctaggaaccacactttcctatttctggatcttttgtctgttgctgcttctggacctgaaaatgccttctcctccctcctctttgttaactgccaacatcactaattcctgctcttcctcc

SEQ ID NO: 664942 - DNA, 120 bp, Artificial Sequence
  ENSG00000184949_45 (sequence is synthesized)
aggaccccgcttagacgtccctcatcttgggagccttccctaatataccaggagcaaggtaggcacaagtgctccactgcattatgctccaacagcattctgtgccatcccattatggca

SEQ ID NO: 664943 - DNA, 120 bp, Artificial Sequence
  ENSG00000184949_46 (sequence is synthesized)
gcagttaccatagtagattggaattgcctgtctacctatccaccgctactattagcccccatacagcaagaaggtctccttattttctaagcccaggacaaactgcatttctgtctgtca

SEQ ID NO: 664944 - DNA, 120 bp, Artificial Sequence
  ENSG00000184949_47 (sequence is synthesized)
ggaccatttgttgcacagtccaagatcatccctgcatggaccctttccagaaatgactgaggactcagagttgtagcctctcaggatgttaaatatgaagaaacctgtctctgccctttg

SEQ ID NO: 664945 - DNA, 120 bp, Artificial Sequence
  ENSG00000184949_48 (sequence is synthesized)
taaacattagaagggaaaattatggggaagaattatttgccctttataagggaagcggggtagagcatcaaagggaactaacatttaaaaagcatttgctgtaatgtgggataaagcaaa

SEQ ID NO: 664946 - DNA, 72 bp, Artificial Sequence
  ENSG00000184949_49 (sequence is synthesized)
acctaaatacactttaaatgtgtgcagtttctcatatgtcaattatacttcgataaagctttgttaaaaaac

SEQ ID NO: 664947 - DNA, 120 bp, Artificial Sequence
  ENSG00000184949_50 (sequence is synthesized)
agtttgagaccaaacaggacaacatagtgagaccttgcctctacaaaaacataaaaaattagtccgatgtggtagtgcatacctatagtcctagctactagggaggctgaggtgggagga

SEQ ID NO: 664948 - DNA, 120 bp, Artificial Sequence
  ENSG00000184949_51 (sequence is synthesized)
gcctgggagcttaaggctgccatgagctgtgattgtgctactagactcagcctggatgatagagcaagactgtgtctgggaaaaaaaaaaaaaaaaacctgagccaggtgcggtggctaa

SEQ ID NO: 664949 - DNA, 88 bp, Artificial Sequence
  ENSG00000184949_52 (sequence is synthesized)
attgcctgagaccagttcctgtctctactcaaaatgcaaaattagccgggtgtggtggcagctgcctgtagtcccgggtactcgcaag

SEQ ID NO: 664950 - DNA, 77 bp, Artificial Sequence
  ENSG00000184949_53 (sequence is synthesized)
tggcgaaatcctgtctctactcaaaatgcaaaattagccgggtgtggtggcagctgcctgtagtcccgggtactcgc

SEQ ID NO: 664951 - DNA, 120 bp, Artificial Sequence
  ENSG00000184949_54 (sequence is synthesized)
caacacagtgagactctgtctcaaaaatatgtgtatatatttcctaaaactctgtccactgaaatgacctagaaataaagactgacccggcagcagtgacccagactgtggtcttgaaat

SEQ ID NO: 664952 - DNA, 120 bp, Artificial Sequence
  ENSG00000184949_55 (sequence is synthesized)
actatttgccctaaaaggatctagggatccttgaagaaatgatcagttccaggtctagggcaggaaaatcatgagacctgaaacatcttatcacacttaacaccaaggaagctatcaaag

SEQ ID NO: 664953 - DNA, 120 bp, Artificial Sequence
  ENSG00000184949_56 (sequence is synthesized)
acaaggatcctgtcagaaagacttgggagcaaacttagagacaatcccattagctaaaagagaggaccatttgggcattaataataattgccatatttgaagcacgtcaaacgtgttctc

SEQ ID NO: 664954 - DNA, 82 bp, Artificial Sequence
  ENSG00000184949_57 (sequence is synthesized)
ataataattgccatatttgaagcacgtcaaacgtgttctcacctgtaagttcatattgtgacttttaaaaaacggattggtg

SEQ ID NO: 664955 - DNA, 60 bp, Artificial Sequence
  ENSG00000184949_58 (sequence is synthesized)
agaatcctagctattcgggaggccgagacacaagaatcacttgaacttgggaggcggagg

SEQ ID NO: 664956 - DNA, 120 bp, Artificial Sequence
  ENSG00000184949_59 (sequence is synthesized)
tcgcaccactgcactccagcctaggtgatggagtgagactgtctcaaagataaaaaaggaaaggggaaaggaggaaactaattggatactaggaaacttcctcattattttgaaaattgg

SEQ ID NO: 664957 - DNA, 120 bp, Artificial Sequence
  ENSG00000184949_60 (sequence is synthesized)
gatactaggaaacttcctcattattttgaaaattggtaagtaaatgaataagcatttatcatgccattcccatatgaactgtattaccaggtaaccaaatagtagtggaacagaaacttg

SEQ ID NO: 664958 - DNA, 120 bp, Artificial Sequence
  ENSG00000184949_61 (sequence is synthesized)
tctttagaaacaatccacctaataaattcagaaataatgatagacttaaaatatcaccattttgaaacccctaatgaattaatggatctaggttgattatccatggctgcttacatcaca

SEQ ID NO: 664959 - DNA, 120 bp, Artificial Sequence
  ENSG00000184949_62 (sequence is synthesized)
aaagacaaacagctattaaatgccttttgatactagaccataagaccacctatcaaatagtcttacaaataagtaaacttgaatgtgatctgaactctagatccaaccaccataacagga

SEQ ID NO: 664960 - DNA, 120 bp, Artificial Sequence
  ENSG00000184949_63 (sequence is synthesized)
aatacagaggatggggacatcatggcaaatggtaaatgacacctaggggatgcaatcagcaaaatccaggccatggaaaactccagggcaaatgacttcatttttttcaacaaataagtt

SEQ ID NO: 664961 - DNA, 120 bp, Artificial Sequence
  ENSG00000184949_64 (sequence is synthesized)
ttcatttttttcaacaaataagtttcaagggaaaaagagagggggaatatatagattaaaagagacttaaaagaggacatcggttgccgagcatggtggcccatgcctgtaatcccagca

SEQ ID NO: 664962 - DNA, 89 bp, Artificial Sequence
  ENSG00000184949_65 (sequence is synthesized)
tcccagcactttaggaggccaaggtggaagaacccctagagcccaggaggtgagaccaaaccgggtgtaaaaattagcagagcaaggtg

SEQ ID NO: 664963 - DNA, 120 bp, Artificial Sequence
  ENSG00000184949_66 (sequence is synthesized)
ctgacgtgggagaattgcttaagcctgggagttggagggtgcagtgagctatgatcatgccactgcacactccagcctaggtgacagaatgagaccacatctctaaaaagaaaaaaaaaa

SEQ ID NO: 664964 - DNA, 120 bp, Artificial Sequence
  ENSG00000184949_67 (sequence is synthesized)
gacatcaatcaattacaacatgtggacattatttggatcccattgaaacaaaatgtggcatttatgagacaaatggatatctgaatcttaaatattttatatataaaattattctaggcg

SEQ ID NO: 664965 - DNA, 120 bp, Artificial Sequence
  ENSG00000184949_68 (sequence is synthesized)
tgataatagcattatggttatattttttaaagagttatcacattttagagatatatactgaaatattcacagatggaattacaagatttatggaatttgtactcaaataatatgggagag

SEQ ID NO: 664966 - DNA, 120 bp, Artificial Sequence
  ENSG00000184949_69 (sequence is synthesized)
agaaagtggatggaggtataggtgaaacaagattgaccatgtgttgaaaattgttgaagatgggtgatgggaatattatactgttttacttttgtgcatatttgattttagccataattt

SEQ ID NO: 664967 - DNA, 120 bp, Artificial Sequence
  ENSG00000184949_70 (sequence is synthesized)
ttaaaattaaaggcatctaccatggacacttctaagcatattttacacactttcattgtggtctcactaaagccctgtgaatgaggtacaatttcccccattttcaaattgaggctcttc

SEQ ID NO: 664968 - DNA, 120 bp, Artificial Sequence
  ENSG00000184949_71 (sequence is synthesized)
ttgtttaaagcaccattactcctggcttgggacttctgttatacaatattctcctagcattctctttgccctttctcttgcccctccaatcagttctccacacaggagcccacatacttc

SEQ ID NO: 664969 - DNA, 120 bp, Artificial Sequence
  ENSG00000184949_72 (sequence is synthesized)
atgtgtattaacccatttaattctcacaactcagcgccgatattattcttggttttcagataccgaaactcaggcacagagaggttaaataattttcccaagaccacacagctagtgaat

SEQ ID NO: 664970 - DNA, 120 bp, Artificial Sequence
  ENSG00000184949_73 (sequence is synthesized)
ggctgaagtgtgctctatgtctggcttagttgctgctcctatgtgtacttatgacaggaaaataaagtcaagatatgaatatacaagcctgccatatagtggtttagcatgtcagttaag

SEQ ID NO: 664971 - DNA, 120 bp, Artificial Sequence
  ENSG00000184949_74 (sequence is synthesized)
agcatggtcactggagccagactgtgagcctcaggcaagttacttaacctcctggtgccccagttccatcgtgtaaataggggtgataattgttgtgcctcatggtgtctgtgtgaggag

SEQ ID NO: 664972 - DNA, 120 bp, Artificial Sequence
  ENSG00000184949_75 (sequence is synthesized)
tggatgcatgaatctgtgggaggcacttagaacagtgcctgacacatggtaagtgcagcatgtactggctatcatgatcattattgggtgttcaacaaatactcgttccttttggcctct

SEQ ID NO: 664973 - DNA, 120 bp, Artificial Sequence
  ENSG00000184949_76 (sequence is synthesized)
ctcctttaattttgaaattaaaatcctccaccagaaccacttgcagttccccaaataagcctctgtgttccttctgcctttcccgccctgcccgattgacaaatcctcactgatccagcc

SEQ ID NO: 664974 - DNA, 120 bp, Artificial Sequence
  ENSG00000184949_77 (sequence is synthesized)
ccaagctaagggccaccatccccgcaaccccagagagagcctctgcttggttcccagctgcatgtctaatccctctcatcctgccttgtgtggtgattatctctttctgcattgtcttct

SEQ ID NO: 664975 - DNA, 120 bp, Artificial Sequence
  ENSG00000184949_78 (sequence is synthesized)
ctactagactcatggctccttgagggcaggtacctacctgtctttatatccagcagagacgtggaattgagcagtgttgaataaatgctagtaaaataaactgtcatagcaagcctctct

SEQ ID NO: 664976 - DNA, 120 bp, Artificial Sequence
  ENSG00000184949_79 (sequence is synthesized)
tggacacctatgtgctgaagttaaaaagtttttcaaatttggactgaaaaaatgagaaagcccaaaatgactattaaatatacatgtatgtgtgtgtatacatacacacagtcatgcacc

SEQ ID NO: 664977 - DNA, 120 bp, Artificial Sequence
  ENSG00000184949_80 (sequence is synthesized)
acgtaacgatgtttcagtcagcagctgactgaatatatgacggtggtcccataagattataatggaactaaacaattcctatcacctagcgactcttagccttcgtaatgtcatagcgta

SEQ ID NO: 664978 - DNA, 120 bp, Artificial Sequence
  ENSG00000184949_81 (sequence is synthesized)
acgcattagtcacgtgtttgtggtgatgttggtgtgaacaaatgtactgtgttgcctgccagtcatataaaatatagtacacaatactggggtaatggtaataaatgactgttactggtt

SEQ ID NO: 664979 - DNA, 120 bp, Artificial Sequence
  ENSG00000184949_82 (sequence is synthesized)
taggtctgatagttcacataccaccctaacaaagagcaattaattgtggagatgtgacaagacaaaggaaaagaggtttaggcttctggggatggtaaattgtgggaagtcttctagtgc

SEQ ID NO: 664980 - DNA, 120 bp, Artificial Sequence
  ENSG00000184949_83 (sequence is synthesized)
gaagactgtgaggaaggagttagagaacaatccaccctgtatccttctggtgatgtcacctacaatcagaccaaatacacctaacttgagtcatgccacagagatctaatcagtgctcag

SEQ ID NO: 664981 - DNA, 120 bp, Artificial Sequence
  ENSG00000184949_84 (sequence is synthesized)
tgtcaagagacaaaggaaatctcagtattcctgcaaaggctccgaactcagacatgccagatcttctgttataaaaaggaaaacagcagataaaaatctgctggcagagctgtaccagta

SEQ ID NO: 664982 - DNA, 120 bp, Artificial Sequence
  ENSG00000184954_0 (sequence is synthesized)
atgaagaatcatacaaggcagatagaatttattcttctgggactgacggataattctcagttacagattgtaattttcttatttctacttctaaattgtgtgttgagcatgatagggaac

SEQ ID NO: 664983 - DNA, 120 bp, Artificial Sequence
  ENSG00000184954_1 (sequence is synthesized)
ttcactatcattgccctcattctgctggattcccagctcaagactccaatgtatttcttcctccgtaatttctcttttctggaaatttcattcacaactgcttgcattcccagattccta

SEQ ID NO: 664984 - DNA, 120 bp, Artificial Sequence
  ENSG00000184954_2 (sequence is synthesized)
atcaccattgttaccagggaaaagaccatttcctgtaatggttgcatatctcagttgtttttttacatattcttgggggttacagaatttttccttctagctgctctgtcctatgatcgc

SEQ ID NO: 664985 - DNA, 120 bp, Artificial Sequence
  ENSG00000184954_3 (sequence is synthesized)
attttcactccactgattttaggtcttaacttggatttctgtgcttcaaatatcattgatcatttcatttgtgacatttctcttatcctacaactttcttgctcagacacacatttactg

SEQ ID NO: 664986 - DNA, 120 bp, Artificial Sequence
  ENSG00000184954_4 (sequence is synthesized)
gaactgattgcctttttattagctgtgatgacacttattgtcacattgtttttagtaatcctttcttactcttacatcatcaagacaattctgaaattcccttcagctcagcaaaagaag

SEQ ID NO: 664987 - DNA, 120 bp, Artificial Sequence
  ENSG00000184954_5 (sequence is synthesized)
aaagccttttccacctgctcttctcacatgattgttgtctccatcacttatggtagttgtatgtttatctacataaagccatcagcgaatgaaagagttgctttaagcaaaggagtaact

SEQ ID NO: 664988 - DNA, 120 bp, Artificial Sequence
  ENSG00000184954_6 (sequence is synthesized)
gtgctcaatacttcagttgccccgttgttaaacccatttatttatactctgaggaatcagcaagttaaacaagccttcaaagctgtatttagaaagatattttctgcttcagacaagtaa

SEQ ID NO: 664989 - DNA, 120 bp, Artificial Sequence
  ENSG00000184956_0 (sequence is synthesized)
agccgcatggatggcagcagcaggcctgccgggcccagcgcgagctcctctccactgtgcaccatggtccagcggtggctgctgctgtcctgctgcggagccctgctcagcgctggtctg

SEQ ID NO: 664990 - DNA, 120 bp, Artificial Sequence
  ENSG00000184956_1 (sequence is synthesized)
gctaacacctcctacaccagcccaggcctccagaggctgaaggactctccacagacagccccggacaaaggccagtgctccacgtggggggctggtcacttctccaccttcgaccaccac

SEQ ID NO: 664991 - DNA, 120 bp, Artificial Sequence
  ENSG00000184956_2 (sequence is synthesized)
gtgtacgacttctcggggacgtgcaactacatcttcgcggccacctgcaaggacgccttccccaccttcagtgtccagctgcggcgaggcccagacgggagcatctcgcggatcatcgtg

SEQ ID NO: 664992 - DNA, 120 bp, Artificial Sequence
  ENSG00000184956_3 (sequence is synthesized)
gagctgggggcctccgtcgtcactgtgagcgaagccatcatctcagtcaaggacatcggggtcatcagcctgccctataccagcaatggactccagatcacacccttcggccagagcgtg

SEQ ID NO: 664993 - DNA, 120 bp, Artificial Sequence
  ENSG00000184956_4 (sequence is synthesized)
cggctggtggccaagcagctggagctggagctggaagtcgtgtggggtcctgacagccacctcatggttctggtggagcggaagtacatgggtcagatgtgcgggctctgcgggaacttt

SEQ ID NO: 664994 - DNA, 120 bp, Artificial Sequence
  ENSG00000184956_5 (sequence is synthesized)
gacgggaaggtgaccaacgagtttgtcagtgaggagggcaagttcctggaaccccacaagtttgctgccctccagaagctggacgaccccggcgagatctgcaccttccaggacatcccc

SEQ ID NO: 664995 - DNA, 120 bp, Artificial Sequence
  ENSG00000184956_6 (sequence is synthesized)
agcacccacgtccggcaggcccagcacgcccggatctgcacccagctgctgaccctggtggcccctgagtgcagcgtgtccaaggagcccttcgtgctaagctgccaggcggacgtggcc

SEQ ID NO: 664996 - DNA, 120 bp, Artificial Sequence
  ENSG00000184956_7 (sequence is synthesized)
gcagccccccagccaggcccacagaacagcagttgtgccaccctgtcggagtactcccgccagtgcagcatggtgggccagccggtccgccgctggcggagccccggcctgtgctccgtg

SEQ ID NO: 664997 - DNA, 120 bp, Artificial Sequence
  ENSG00000184956_8 (sequence is synthesized)
ggtcagtgcccggccaaccaggtgtaccaggagtgcggctcggcctgcgtgaagacctgctccaacccgcagcacagctgctccagctcctgcaccttcgggtgcttctgcccggaaggt

SEQ ID NO: 664998 - DNA, 120 bp, Artificial Sequence
  ENSG00000184956_9 (sequence is synthesized)
acggtcctgaatgacctctccaataaccacacctgcgtgcccgtcacccagtgcccctgtgtgctccacggcgccatgtatgcccccggggaggtcacaatagctgcctgccaaacctgc

SEQ ID NO: 664999 - DNA, 120 bp, Artificial Sequence
  ENSG00000184956_10 (sequence is synthesized)
cggtgcaccctgggccgctgggtgtgcacggagcggccgtgccccggacactgctccctggaaggtggctcctttgttaccacatttgacgccaggccctaccgcttccacggcacctgc

SEQ ID NO: 665000 - DNA, 120 bp, Artificial Sequence
  ENSG00000184956_11 (sequence is synthesized)
acctacatcctcctccagagcccccagcttcccgaggacggtgccctcatggctgtgtacgacaagtccggcgtctcacactccgagacctccctggtggctgtggtctacctctccagg

SEQ ID NO: 665001 - DNA, 120 bp, Artificial Sequence
  ENSG00000184956_12 (sequence is synthesized)
caggacaaaattgtgatctctcaggacgaggtggtcaccaacaacggagaagccaagtggctgccatacaagactcgcaacatcacggtcttcaggcagacgtccacccacctccagatg

SEQ ID NO: 665002 - DNA, 120 bp, Artificial Sequence
  ENSG00000184956_13 (sequence is synthesized)
gccaccagcttcgggctggagctcgtggtccagctgcgccccatcttccaggcctatgtcactgttgggccccagttcagaggtcagaccagagggctctgcggcaacttcaacggggac

SEQ ID NO: 665003 - DNA, 120 bp, Artificial Sequence
  ENSG00000184956_14 (sequence is synthesized)
acaacggatgacttcaccactagcatgggtatcgccgagggcaccgcctcgctgtttgtggactcctggcgggcggggaactgtccggccgctctggagcgtgagactgacccctgctcc

SEQ ID NO: 665004 - DNA, 120 bp, Artificial Sequence
  ENSG00000184956_15 (sequence is synthesized)
atgagccagctcaacaaggtgtgtgcagagacccactgctccatgctgctgaggacaggcacggtgttcgagaggtgccacgccacagtgaaccctgcacccttctacaagaggtgcgtg

SEQ ID NO: 665005 - DNA, 120 bp, Artificial Sequence
  ENSG00000184956_16 (sequence is synthesized)
taccaggcctgcaactacgaggagacctttccccacatctgtgccgccctgggcgactacgtacacgcctgctccttgcggggcgtcctgctctggggctggagaagcagtgtggacaac

SEQ ID NO: 665006 - DNA, 120 bp, Artificial Sequence
  ENSG00000184956_17 (sequence is synthesized)
tgcaccatcccctgcacgggtaacaccaccttcagctacaacagccaagcctgtgagcgcacctgcctgtcgctgtcggaccgtgccaccgagtgccaccacagcgccgtgcccgtggac

SEQ ID NO: 665007 - DNA, 120 bp, Artificial Sequence
  ENSG00000184956_18 (sequence is synthesized)
ggttgcaactgccccgatggcacctacctgaaccaaaagggcgagtgtgtgcgcaaggcccagtgcccgtgcatactggagggttacaagttcatcctggccgagcagtccactgtcatc

SEQ ID NO: 665008 - DNA, 120 bp, Artificial Sequence
  ENSG00000184956_19 (sequence is synthesized)
aacggcatcacctgccactgcatcaacgggcggctgagttgcccgcagcggccacagatgttcctggcctcctgccaggcccctaagaccttcaagtcctgcagccagtcctccgagaac

SEQ ID NO: 665009 - DNA, 120 bp, Artificial Sequence
  ENSG00000184956_20 (sequence is synthesized)
aagtttggggcagcctgtgcccccacatgccagatgctggccaccggtgttgcctgcgtgcccaccaagtgtgagcctggctgtgtctgcgccgagggcctctacgagaatgccgacggg

SEQ ID NO: 665010 - DNA, 120 bp, Artificial Sequence
  ENSG00000184956_21 (sequence is synthesized)
cagtgtgtgccccccgaggagtgcccatgtgagttctcgggggtctcctaccctggaggagctgagctccacactgactgcaggacctgctcctgctcaagggggaggtgggcctgtcag

SEQ ID NO: 665011 - DNA, 120 bp, Artificial Sequence
  ENSG00000184956_22 (sequence is synthesized)
cagggcacccactgcccatccacctgcaccctctacggggagggccacgtcatcaccttcgacggccagcgcttcgtattcgacggcaactgcgagtacatcctggccacggacgtctgt

SEQ ID NO: 665012 - DNA, 120 bp, Artificial Sequence
  ENSG00000184956_23 (sequence is synthesized)
ggtgtcaacgactcacagcccaccttcaagatcctgacagagaacgtcatctgtgggaactccggggtcacatgctcacgggccatcaagatcttcctggggggcctgtccgtggtgctg

SEQ ID NO: 665013 - DNA, 120 bp, Artificial Sequence
  ENSG00000184956_24 (sequence is synthesized)
gcggacagaaactacacggtcaccggggaggagccccacgtgcagctcggggtgacgccgggtgcgctgagccttgtcgtggacatcagcatccccgggaggtacaacctgacgctcatc

SEQ ID NO: 665014 - DNA, 120 bp, Artificial Sequence
  ENSG00000184956_25 (sequence is synthesized)
tggaacaggcacatgaccatcctcatcaggatcgcccgtgcctcccaggatcccctctgcggcttgtgtggcaacttcaacgggaacatgaaggacgacttcgagacgcgcagcaggtac

SEQ ID NO: 665015 - DNA, 120 bp, Artificial Sequence
  ENSG00000184956_26 (sequence is synthesized)
gtggcatccagcgagctggagttggtgaactcgtggaaggagagcccgctgtgcggggacgtgagcttcgtgacagacccctgcagtctcaatgccttccggcgctcctgggccgagcgc

SEQ ID NO: 665016 - DNA, 120 bp, Artificial Sequence
  ENSG00000184956_27 (sequence is synthesized)
aagtgcagcgtcatcaacagccagacctttgccacctgccacagcaaggtataccacctgccctactacgaggcctgcgtgcgcgacgcatgtgggtgtgacagtggcggggactgtgag

SEQ ID NO: 665017 - DNA, 120 bp, Artificial Sequence
  ENSG00000184956_28 (sequence is synthesized)
tgtctgtgcgatgccgtggctgcctacgcccaagcctgtctggacaagggtgtgtgcgtggactggaggaccccggccttctgccccatctactgcggcttctacaacacgcacacgcag

SEQ ID NO: 665018 - DNA, 120 bp, Artificial Sequence
  ENSG00000184956_29 (sequence is synthesized)
gacggccatggcgagtaccagtacacacaggaggccaactgcacgtggcactaccagccctgcctctgccccagccagccacagagcgtcccaggcagcaacatcgaaggctgctacaac

SEQ ID NO: 665019 - DNA, 120 bp, Artificial Sequence
  ENSG00000184956_30 (sequence is synthesized)
tgctcccaggatgagtacttcgaccacgaggagggggtgtgcgtgccctgcatgccgcccaccacgccgcagccacccaccacgccgcagctgcccaccacaggctcacggcccacgcaa

SEQ ID NO: 665020 - DNA, 120 bp, Artificial Sequence
  ENSG00000184956_31 (sequence is synthesized)
gtctggcccatgacgggaacctccaccaccatcgggcttctcagctccaccggaccctcacccagctctaatcacacccctgccagccccacccagacacccctccttccagccacgctc

SEQ ID NO: 665021 - DNA, 120 bp, Artificial Sequence
  ENSG00000184956_32 (sequence is synthesized)
acatcctccaagcccacagcctcctcgggagaaccacctagaccaaccacggccgtcaccccacaagccacatcagggctgcctcccacagccacactgagatcgacagccacaaaaccc

SEQ ID NO: 665022 - DNA, 120 bp, Artificial Sequence
  ENSG00000184956_33 (sequence is synthesized)
ccaaccccagccacatcagggacaagccccacgctgccaaaatcgaccaatcaggaactgccaggaacaacggccacccagacgacaggcccacgtccaaccccagcaagcaccacaggc

SEQ ID NO: 665023 - DNA, 120 bp, Artificial Sequence
  ENSG00000184956_34 (sequence is synthesized)
ccaaccaccccacagccaggacaacccacgaggcccacagccacagagaccactcaaacaagaacgactactgaatacacaacgccccaaaccccacacaccacacactccccgcctacg

SEQ ID NO: 665024 - DNA, 120 bp, Artificial Sequence
  ENSG00000184956_35 (sequence is synthesized)
gcggggagtcccgtcccttccacaggtcctgtcactgcaacatctttccatgccaccactacctatccaaccccatcacaccctgagaccacacttcccactcacgttccacctttctcc

SEQ ID NO: 665025 - DNA, 120 bp, Artificial Sequence
  ENSG00000184956_36 (sequence is synthesized)
acctccttggtgactccaagtactcacacagtcatcacccctacccacgcacagatggccacatctgcctccaaccactcagcgccaacaggtaccattcctccaccaacaacgctcaag

SEQ ID NO: 665026 - DNA, 120 bp, Artificial Sequence
  ENSG00000184956_37 (sequence is synthesized)
gccacagggtccacccacacagccccaccaataacgccgaccaccagtgggaccagccaagcccacagctcattcagcacaaacaaaacacctacctcgctacattcacacacttcctcc

SEQ ID NO: 665027 - DNA, 120 bp, Artificial Sequence
  ENSG00000184956_38 (sequence is synthesized)
acacaccatcctgaagtcaccccaacttctactaccacgattactcccaaccccactagtacacgcaccagaacccctgtggcccacaccaactcagccaccagcagcaggccaccacca

SEQ ID NO: 665028 - DNA, 120 bp, Artificial Sequence
  ENSG00000184956_39 (sequence is synthesized)
cccttcaccacacactccccacctacagggagcagtcccttctcttccacaggtcccatgacggcaacatccttcaagaccaccactacctatccaaccccatcacaccctcagaccaca

SEQ ID NO: 665029 - DNA, 120 bp, Artificial Sequence
  ENSG00000184956_40 (sequence is synthesized)
cttcccactcacgttccacctttctccacctctttggtgactccaagtactcacacagtcatcacccctacccatgcacagatggccacttctgcctccatccactcaatgccaacaggc

SEQ ID NO: 665030 - DNA, 120 bp, Artificial Sequence
  ENSG00000184956_41 (sequence is synthesized)
acgattcctccaccgacaacgctcaaggccacagggtccacccacacagcgccaacaatgacgctgaccaccagcgggaccagccaagccctgagctcattaaacacagccaaaacctct

SEQ ID NO: 665031 - DNA, 120 bp, Artificial Sequence
  ENSG00000184956_42 (sequence is synthesized)
acatccctacattcacacacttcctccacacaccatgctgaagccacctcaacttctaccaccaacatcacccccaaccccaccagtacaggaaccccaccaatgacagtgaccaccagt

SEQ ID NO: 665032 - DNA, 120 bp, Artificial Sequence
  ENSG00000184956_43 (sequence is synthesized)
gggaccagccaatcccgaagctcatttagcacggccaaaacctctacatccctacattcacacacttcctccacacaccatcctgaagtcacctcaacttctaccaccagcatcaccccc

SEQ ID NO: 665033 - DNA, 120 bp, Artificial Sequence
  ENSG00000184956_44 (sequence is synthesized)
aaccacaccagtacaggcaccagaacccctgtggcccacaccacgtcggccaccagcagcaggctacccacacccttcaccacacactccccacctacagggaccactcccatctcttcc

SEQ ID NO: 665034 - DNA, 120 bp, Artificial Sequence
  ENSG00000184956_45 (sequence is synthesized)
acaggtcctgtcactgcaacatccttccagaccaccactacctatccaaccccatcacaccctcacaccacacttcccactcacgttccatctttctccacctccttggtgactccaagt

SEQ ID NO: 665035 - DNA, 120 bp, Artificial Sequence
  ENSG00000184956_46 (sequence is synthesized)
actcacacggtcatcatccctacccacacacagatggccacttctgcctccatccactcaatgccaacaggcaccattcctccaccgaccacgatcaaggccacagggtccacccacaca

SEQ ID NO: 665036 - DNA, 120 bp, Artificial Sequence
  ENSG00000184956_47 (sequence is synthesized)
gccccaccaatgacaccgaccaccagtgggaccagccaatccccaagctcatttagcacggccaaaacttctacatccctaccttaccacacttcctcaacacaccatcctgaagtcacc

SEQ ID NO: 665037 - DNA, 120 bp, Artificial Sequence
  ENSG00000184956_48 (sequence is synthesized)
ccaacttctaccaccaacatcacccccaaacacaccagtacaggcaccagaacccctgtggcccacaccacctcggccagcagcagcaggctacccacacccttcaccacacactcccca

SEQ ID NO: 665038 - DNA, 120 bp, Artificial Sequence
  ENSG00000184956_49 (sequence is synthesized)
cctacagggagcagtcccttctcttccacaggtcctatgactgcaacatccttccagaccaccactacctatccaaccccatcacaccctcagaccacacttcccactcacgttccacct

SEQ ID NO: 665039 - DNA, 120 bp, Artificial Sequence
  ENSG00000184956_50 (sequence is synthesized)
ttctccacctccttggtgactccaagtactcacacagtcatcatcactacccacacacagatggccacttctgcctccatccactcaacgccaacaggcaccgttcctccaccaacaacg

SEQ ID NO: 665040 - DNA, 120 bp, Artificial Sequence
  ENSG00000184956_51 (sequence is synthesized)
ctcaaggccacagggtccacccacacagccccaccaatgacagtgaccaccagtgggaccagccaaacccacagctcattcagcacagctacagcctcttcttccttcatatcctcctcg

SEQ ID NO: 665041 - DNA, 120 bp, Artificial Sequence
  ENSG00000184956_52 (sequence is synthesized)
tcttggctgcctcagaactctagctcaaggccaccgtcatcacctatcaccacacaactcccccacttgagttctgcaaccactcctgtttccacaactaatcagctgtcctcctcattt

SEQ ID NO: 665042 - DNA, 120 bp, Artificial Sequence
  ENSG00000184956_53 (sequence is synthesized)
tctcccagtccttctgccccctctactgtttcttcttatgtgccctcctcccactcctctccccagacttcatcgccttctgttggcacatcttcctctttcgtgtccgcccccgtgcac

SEQ ID NO: 665043 - DNA, 120 bp, Artificial Sequence
  ENSG00000184956_54 (sequence is synthesized)
tccacaaccctgagctcggggtcacactcctcattgtccactcatcccacgactgcatcagtgtctgcatctcctctttttccttcttctccagctgcctctactaccattagggccact

SEQ ID NO: 665044 - DNA, 120 bp, Artificial Sequence
  ENSG00000184956_55 (sequence is synthesized)
ctcccccacactatctcctctcctttcaccctctctgctctactccccatatccactgttaccgtgtctcccaccccatccagccacctagcctccagcaccattgcatttccgtccacg

SEQ ID NO: 665045 - DNA, 120 bp, Artificial Sequence
  ENSG00000184956_56 (sequence is synthesized)
cccaggaccacggccagcacccacaccgcccctgccttctcctctcagtccaccacctcgcggtccacttctctcaccacccgagttcccacatcaggctttgtgtcactcacctcgggg

SEQ ID NO: 665046 - DNA, 120 bp, Artificial Sequence
  ENSG00000184956_57 (sequence is synthesized)
gtgacgggtatccccacctctccagtcaccaaccttaccaccaggcaccctggtcccaccttgtcgcctaccacacggttcctgaccagctccctcactgcccatggaagcacccctgct

SEQ ID NO: 665047 - DNA, 120 bp, Artificial Sequence
  ENSG00000184956_58 (sequence is synthesized)
tctgccccggtatcttctctcgggacacctacgcccacctcacccggggtctgcagtgtgcgggagcagcaggaggagatcacgttcaaggggtgcatggcgaacgtgacggtaacccgc

SEQ ID NO: 665048 - DNA, 120 bp, Artificial Sequence
  ENSG00000184956_59 (sequence is synthesized)
tgtgagggcgcctgcatttccgctgccagcttcaacatcatcacccagcaggtggatgcccgctgcagctgctgccgccccctccactcctatgagcagcagctggagctgccctgcccc

SEQ ID NO: 665049 - DNA, 120 bp, Artificial Sequence
  ENSG00000184956_60 (sequence is synthesized)
gatcccagcacgcctggccggcggctcgtactcaccctgcaggtgttcagccactgcgtgtgcagctctgtggcctgtggagactagcagggtcgctgcctgctctcctggggctgaagg

SEQ ID NO: 665050 - DNA, 120 bp, Artificial Sequence
  ENSG00000184956_61 (sequence is synthesized)
actgcagatgacagacaggaaaacacccaccagcccccttcccgcttgtgccagcagctgctttcctggtcaccaggcctggcccccaagtgccctgggccgtggctccctggggcaccg

SEQ ID NO: 665051 - DNA, 120 bp, Artificial Sequence
  ENSG00000184956_62 (sequence is synthesized)
gttggagaggggctgccaagcaggggctcagactaccacactcctgcagaccctgagccagcagagagggactgaggcggacagtggtcacggacctcccaggcacacagggcactcccg

SEQ ID NO: 665052 - DNA, 120 bp, Artificial Sequence
  ENSG00000184956_63 (sequence is synthesized)
accacccctgcccaccgtccaacacctcccagcccctgaacttggccccagccctgctgggcccagaaccctgcagatgaagccacagagcaggcgctcgaccagacccatcaggggcga

SEQ ID NO: 665053 - DNA, 120 bp, Artificial Sequence
  ENSG00000184956_64 (sequence is synthesized)
ggagggcacggaaacctgtgccgagatgggggcaagaggcccaggcagccaccagcacagagaagaggagatccccagagtcagggagggcagagggtggcagcgagggcagggcagccg

SEQ ID NO: 665054 - DNA, 120 bp, Artificial Sequence
  ENSG00000184956_65 (sequence is synthesized)
cccccgctcccagccaggcagaaggcccccaccagcaccacacccatccccagcagcctgtccttgggagagggcgtcacccggtcagagactccaaataaaccggttcttgtcaaggca

SEQ ID NO: 665055 - DNA, 120 bp, Artificial Sequence
  ENSG00000184956_66 (sequence is synthesized)
cccacgggccatggacacttctcgcacgccgagtgtgtgcagggaaacgggcggagcagccctgagcagaggtgagcggcgccctcagggacgacggggtagccccacaccgactgcggg

SEQ ID NO: 665056 - DNA, 120 bp, Artificial Sequence
  ENSG00000184956_67 (sequence is synthesized)
gtgggcttagggatggccctgcttcctggctcacatctgccactaagcagattcccagcgtagaacttcctatgcttgggagccaaactggggatttttcggaaaaacttttaaagacaa

SEQ ID NO: 665057 - DNA, 120 bp, Artificial Sequence
  ENSG00000184967_0 (sequence is synthesized)
gagaatccgcgttgttccgtgttgggggcggcatggagcgggagccgggcgccgcgggagttcgccgggctctgggccgccggctggaggcggtgctggcgagccgcagtgaggccaacg

SEQ ID NO: 665058 - DNA, 120 bp, Artificial Sequence
  ENSG00000184967_1 (sequence is synthesized)
ccgtgttcgacatcctggccgtgctgcagtctgaggaccaggaggagatccaggaagcagtccgcacgtgcagccgtcttttcggggccttgctggagcggggagagctgtttgtgggcc

SEQ ID NO: 665059 - DNA, 120 bp, Artificial Sequence
  ENSG00000184967_2 (sequence is synthesized)
agctgccctctgaggagatggtcatgacagggtcccagggagccacacggaagtacaaggtgtggatgagacaccgctatcacagctgctgcaatcgcttgggagagctcctgggccacc

SEQ ID NO: 665060 - DNA, 120 bp, Artificial Sequence
  ENSG00000184967_3 (sequence is synthesized)
cctcctttcaggtcaaggagctggccctcagcgcactcctgaagttcgtgcagctggaaggagcgcaccccctggagaagtccaagtgggaaggcaactacctgttcccccgagagctct

SEQ ID NO: 665061 - DNA, 120 bp, Artificial Sequence
  ENSG00000184967_4 (sequence is synthesized)
tcaagttggtggtgggaggcctgctgtctcctgaggaggaccagagcctgctcctgtcccagttccgggagtacctggactacgacgacacccgctaccacaccatgcaggcagccgtgg

SEQ ID NO: 665062 - DNA, 120 bp, Artificial Sequence
  ENSG00000184967_5 (sequence is synthesized)
atgccgtggcccgggtcactggccagcaccccgaggtgccccccgccttttggaacaatgccttcacgctgctgtctgccgtgagcctgccccgccgggagcccaccgtctccagcttct

SEQ ID NO: 665063 - DNA, 120 bp, Artificial Sequence
  ENSG00000184967_6 (sequence is synthesized)
tcaagcacaagctgcccctcagcctctacaagaaggtgctgctgattgtgcatgacgccatcctgccgcagctggcgcagcccacgctcatgatcgacttcctcacccgcgcctgcgacc

SEQ ID NO: 665064 - DNA, 120 bp, Artificial Sequence
  ENSG00000184967_7 (sequence is synthesized)
tcgggggggccctcagcctcttggccttgaacgggctgttcatcttgattcacaaacacaacctggagtaccctgacttctaccggaagctctacggcctcttggacccctctgtctttc

SEQ ID NO: 665065 - DNA, 120 bp, Artificial Sequence
  ENSG00000184967_8 (sequence is synthesized)
acgtcaagtaccgcgcccgcttcttccacctggctgacctcttcctgtcctcctcccacctccccgcctacctggtggccgccttcgccaagcggctggcccgcctggccctgacggctc

SEQ ID NO: 665066 - DNA, 120 bp, Artificial Sequence
  ENSG00000184967_9 (sequence is synthesized)
cccctgaggccctgctcatggtcctgcctttcatctgtaacctgctgcgccggcaccctgcctgccgggtcctcgtgcaccgtccacacggccctgagttggacgccgacccctacgacc

SEQ ID NO: 665067 - DNA, 120 bp, Artificial Sequence
  ENSG00000184967_10 (sequence is synthesized)
ctggagaggaggacccagcccagagccgggccttggagagctccctgtgggagcttcaggccctccagcgccactaccaccctgaggtgtccaaagccgccagcgtcatcaaccaggccc

SEQ ID NO: 665068 - DNA, 120 bp, Artificial Sequence
  ENSG00000184967_11 (sequence is synthesized)
tgtccatgcctgaggtcagcatcgcgccactgctggagctcacggcctacgagatctttgagcgggacctgaagaagaaggggcccgagccggtgccactggagtttatcccagcccagg

SEQ ID NO: 665069 - DNA, 120 bp, Artificial Sequence
  ENSG00000184967_12 (sequence is synthesized)
gcctgctgggacggccgggtgaactctgtgcccagcacttcacgctcagctgaccctggcccacctgtgaataaatctcagctgaccccagcccacctgtgaataaatgtttttgcagga

SEQ ID NO: 665070 - DNA, 120 bp, Artificial Sequence
  ENSG00000184967_13 (sequence is synthesized)
tccagctttgtgtccgtgggggctgtgggaggggacagcaggggcagaggccacactccacagacttacactcagtgtgggcagggggtagggtgggagcgaggtcactgcagctccagc

SEQ ID NO: 665071 - DNA, 120 bp, Artificial Sequence
  ENSG00000184979_0 (sequence is synthesized)
agtcccgacgtggaactcagcagcggaggctggacgcttgcatggcgcttgagagattccatcgtgcctggctcacataagcgcttcctggaagtgaagtcgtgctgtcctgaacgcggg

SEQ ID NO: 665072 - DNA, 120 bp, Artificial Sequence
  ENSG00000184979_1 (sequence is synthesized)
ccaggcagctgcggcctgggggttttggagtgatcacgaatgagcaaggcgtttgggctcctgaggcaaatctgtcagtccatcctggctgagtcctcgcagtccccggcagatcttgaa

SEQ ID NO: 665073 - DNA, 120 bp, Artificial Sequence
  ENSG00000184979_2 (sequence is synthesized)
gaaaagaaggaagaagacagcaacatgaagagagagcagcccagagagcgtcccagggcctgggactaccctcatggcctggttggtttacacaacattggacagacctgctgccttaac

SEQ ID NO: 665074 - DNA, 120 bp, Artificial Sequence
  ENSG00000184979_3 (sequence is synthesized)
tccttgattcaggtgttcgtaatgaatgtggacttcaccaggatattgaagaggatcacggtgcccaggggagctgacgagcagaggagaagcgtccctttccagatgcttctgctgctg

SEQ ID NO: 665075 - DNA, 120 bp, Artificial Sequence
  ENSG00000184979_4 (sequence is synthesized)
gagaagatgcaggacagccggcagaaagcagtgcggcccctggagctggcctactgcctgcagaagtgcaacgtgcccttgtttgtccaacatgatgctgcccaactgtacctcaaactc

SEQ ID NO: 665076 - DNA, 120 bp, Artificial Sequence
  ENSG00000184979_5 (sequence is synthesized)
tggaacctgattaaggaccagatcactgatgtgcacttggtggagagactgcaggccctgtatacgatccgggtgaaggactccttgatttgcgttgactgtgccatggagagtagcaga

SEQ ID NO: 665077 - DNA, 120 bp, Artificial Sequence
  ENSG00000184979_6 (sequence is synthesized)
aacagcagcatgctcaccctcccactttctctttttgatgtggactcaaagcccctgaagacactggaggacgccctgcactgcttcttccagcccagggagttatcaagcaaaagcaag

SEQ ID NO: 665078 - DNA, 120 bp, Artificial Sequence
  ENSG00000184979_7 (sequence is synthesized)
atttgccccagaccctgacaatccacctcatgcgattctccatcaggaattcacagacgagaaagatctgccactccctgtacttcccccagagcttggatttcagccagatccttccaa

SEQ ID NO: 665079 - DNA, 120 bp, Artificial Sequence
  ENSG00000184979_8 (sequence is synthesized)
tgaagcgagagtcttgtgatgctgaggagcagtctggagggcagtatgagctttttgctgtgattgcgcacgtgggaatggcagactccggtcattactgtgtctacatccggaatgctg

SEQ ID NO: 665080 - DNA, 120 bp, Artificial Sequence
  ENSG00000184979_9 (sequence is synthesized)
tggatggaaaatggttctgcttcaatgactccaatatttgcttggtgtcctgggaagacatccagtgtacctacggaaatcctaactaccactggcaggaaactgcatatcttctggttt

SEQ ID NO: 665081 - DNA, 120 bp, Artificial Sequence
  ENSG00000184979_10 (sequence is synthesized)
acatgaagatggagtgctaatggaaatgcccaaaaccttcagagattgacacgctgtcattttccatttccgttcctggatctacggagtcttctaagagattttgcaatgaggagaagc

SEQ ID NO: 665082 - DNA, 120 bp, Artificial Sequence
  ENSG00000184979_11 (sequence is synthesized)
attgttttcaaactatataactgagccttatttataattagggatattatcaaaatatgtaaccatgaggcccctcaggtcctgatcagtcagaatggatgctttcaccagcagacccgg

SEQ ID NO: 665083 - DNA, 120 bp, Artificial Sequence
  ENSG00000184979_12 (sequence is synthesized)
ccatgtggctgctcggtcctgggtgctcgctgctgtgcaagacattagccctttagttatgagcctgtgggaacttcaggggttcccagtggggagagcagtggcagtgggaggcatctg

SEQ ID NO: 665084 - DNA, 120 bp, Artificial Sequence
  ENSG00000184979_13 (sequence is synthesized)
ggggccaaaggtcagtggcagggggtatttcagtattatacaactgctgtgaccagacttgtatactggctgaatatcagtgctgtttgtaatttttcactttgagaaccaacattaatt

SEQ ID NO: 665085 - DNA, 120 bp, Artificial Sequence
  ENSG00000184979_14 (sequence is synthesized)
ccatatgaatcaagtgttttgtaactgctattcatttattcagcaaatatttattgatcatctcttctccataagatagtgtgataaacacagtcatgaataaagttattttccacaaaa

SEQ ID NO: 665086 - DNA, 120 bp, Artificial Sequence
  ENSG00000184983_0 (sequence is synthesized)
ggggttgtggagtggatgctttggcaagatggcggggagcggcgtccgccaagctacttctaccgccagcaccttcgtgaagcccattttcagtcgggacatgaacgaggccaagcggag

SEQ ID NO: 665087 - DNA, 120 bp, Artificial Sequence
  ENSG00000184983_1 (sequence is synthesized)
ggtgcgcgagctctaccgcgcctggtatcgggaggtgccgaacactgtgcaccaattccagctggacatcactgtgaaaatgggacgggataaagtccgagaaatgtttatgaagaatgc

SEQ ID NO: 665088 - DNA, 120 bp, Artificial Sequence
  ENSG00000184983_2 (sequence is synthesized)
ccatgtcacagaccccagggtggttgatcttctggtcattaagggaaagatcgaactggaagaaacaattaaagtatggaagcagcggacacatgttatgcggttcttccatgaaacaga

SEQ ID NO: 665089 - DNA, 120 bp, Artificial Sequence
  ENSG00000184983_3 (sequence is synthesized)
agcgccaaggccaaaggatttcctatccaagttctatgttggccacgatccatgaagtcattcagtggaaagatgcacgttgatactattttagagcacaaataaactcactatacaatg

SEQ ID NO: 665090 - DNA, 120 bp, Artificial Sequence
  ENSG00000184983_4 (sequence is synthesized)
tggtgtttgctgtaaattggattgaattatttttctcagagccttgcatgtcagtaaacaggaaggaaggaggccatctgttcaaaaattgtgacattgggcatgaggctggacgacttg

SEQ ID NO: 665091 - DNA, 120 bp, Artificial Sequence
  ENSG00000184983_5 (sequence is synthesized)
ttaatgtagttgtttctatagcccctatgattagacacttcagtgtcagggcacagattatctaaaattagccagctcttcctgtcagggatcagggcagcactaacaggcgcaaaagta

SEQ ID NO: 665092 - DNA, 120 bp, Artificial Sequence
  ENSG00000184983_6 (sequence is synthesized)
gagctgtcaagatgggctagttttccttgggttctgaagaaaatggatgtgcaaaggcttggctccgctacttgtaacaagctccagcccttaaaatgaaattaacttcctactcaggca

SEQ ID NO: 665093 - DNA, 120 bp, Artificial Sequence
  ENSG00000184983_7 (sequence is synthesized)
ccctgcttaggtgcacagctgttcaatatacacagagaacagaaatattcctactgtctttggaaaccctggtgtacctctcagtggcagaataaacatcaacacaggttcaagaactga

SEQ ID NO: 665094 - DNA, 120 bp, Artificial Sequence
  ENSG00000184983_8 (sequence is synthesized)
atgaatcacatgtctcatcctcaagcacctagcctagggtcaggctaattttttggtgaagaaatgaatgggcgacctgtatgtgttcaatgagtatcatttgactctaggttttattta

SEQ ID NO: 665095 - DNA, 120 bp, Artificial Sequence
  ENSG00000184984_0 (sequence is synthesized)
atcagatcaactgctgttaccagataaaggcaaaactcacccttctggttctataatcctatccaaatggagtcttcatctaccgcatactatcctaactaatgctacaggattatcagg

SEQ ID NO: 665096 - DNA, 120 bp, Artificial Sequence
  ENSG00000184984_1 (sequence is synthesized)
aatacagatataaagacactgcaagaaataaaacactggcaaaataaaacatgaaaggaaagtagagaaggcattttgggtctcgaagcttactatttccagccagagttcaaattactg

SEQ ID NO: 665097 - DNA, 120 bp, Artificial Sequence
  ENSG00000184984_2 (sequence is synthesized)
agcttcaaacaaaccactgccaggaacctaggaaatcattctcagccttgcaacttaaaatatggtacatggatcagtagcatcaagaatactcaggagcttttcagaaatgtgcaattg

SEQ ID NO: 665098 - DNA, 120 bp, Artificial Sequence
  ENSG00000184984_3 (sequence is synthesized)
tgaaatatggccaagatggcggattagaagcagcggcagcccgcagctctcatgcaaaggaatgaaaggtgtgagtgaatacagcgccttcaactgaaatatccaggttctcgctttggg

SEQ ID NO: 665099 - DNA, 120 bp, Artificial Sequence
  ENSG00000184984_4 (sequence is synthesized)
actaattgggcaaacaacttgacccacagaaaacaaagaaaagcagggtggggtgacggcccacctgggagcagcacagagccaaaggaacccccacctccagccaagggaagcgatgct

SEQ ID NO: 665100 - DNA, 120 bp, Artificial Sequence
  ENSG00000184984_5 (sequence is synthesized)
ggccaagaagagctgaaatagaaaacagcctagaacctaacactatttactgtaaaatttttgcaccaggatggaaggggattcttaccacaatgcaaccaccgtcaatggcaccccagt

SEQ ID NO: 665101 - DNA, 120 bp, Artificial Sequence
  ENSG00000184984_6 (sequence is synthesized)
aaatcaccagcctttggaacgccacaggttgtgggaagtcatcaccattgcagctgtgactgctgtggtaagcctgatcaccattgtgggcaatgtcttggtcatgatctccttcaaagt

SEQ ID NO: 665102 - DNA, 120 bp, Artificial Sequence
  ENSG00000184984_7 (sequence is synthesized)
caacagccagctcaagacagttaacaactattacctgctcagcttagcctgtgcagatctcatcattggaatcttctccatgaacctctacaccacctacatcctcatgggacgctgggc

SEQ ID NO: 665103 - DNA, 120 bp, Artificial Sequence
  ENSG00000184984_8 (sequence is synthesized)
tctcgggagtctggcttgtgacctttggcttgcactggactacgtggccagcaacgcttctgtcatgaaccttctggtgatcagttttgaccgttacttttccatcacaagacccttgac

SEQ ID NO: 665104 - DNA, 120 bp, Artificial Sequence
  ENSG00000184984_9 (sequence is synthesized)
atatcgggccaagcgtactccgaaaagggctggcatcatgattggcttggcctggctgatctccttcatcctctgggccccagcaatcctctgctggcagtacttggttgggaagcggac

SEQ ID NO: 665105 - DNA, 120 bp, Artificial Sequence
  ENSG00000184984_10 (sequence is synthesized)
agttccactggatgagtgccagatccagtttctctctgagcccaccatcacttttggcactgccattgctgccttctacatccctgtttctgtcatgaccatcctctactgtcgaatcta

SEQ ID NO: 665106 - DNA, 120 bp, Artificial Sequence
  ENSG00000184984_11 (sequence is synthesized)
ccgggaaacagagaagcgaaccaaggacctggctgacctccagggttctgactctgtgaccaaagctgagaagagaaagccagctcatagggctctgttcagatcctgcttgcgctgtcc

SEQ ID NO: 665107 - DNA, 120 bp, Artificial Sequence
  ENSG00000184984_12 (sequence is synthesized)
tcgacccaccctggcccagcgggaaaggaaccaggcctcctggtcatcctcccgcaggagcacctccaccactgggaagccatcccaagccactggcccaagcgccaattgggccaaagc

SEQ ID NO: 665108 - DNA, 120 bp, Artificial Sequence
  ENSG00000184984_13 (sequence is synthesized)
tgagcagctcaccacctgtagcagctacccttcctcagaggatgaggacaagcccgccactgaccctgtcctccaagtggtctacaagagtcagggtaaggaaagcccaggggaagaatt

SEQ ID NO: 665109 - DNA, 120 bp, Artificial Sequence
  ENSG00000184984_14 (sequence is synthesized)
cagtgctgaagagactgaggaaacttttgtgaaagctgaaactgaaaaaagtgactatgacaccccaaactaccttctgtctccagcagctgctcatagacccaagagtcagaaatgtgt

SEQ ID NO: 665110 - DNA, 120 bp, Artificial Sequence
  ENSG00000184984_15 (sequence is synthesized)
ggcctataagttccgattggtggtaaaagctgacgggaaccaggagaccaacaatggctgtcacaaggtgaaaatcatgccctgccccttcccagtggccaaggaaccttcaacgaaagg

SEQ ID NO: 665111 - DNA, 120 bp, Artificial Sequence
  ENSG00000184984_16 (sequence is synthesized)
cctcaatcccaaccccagccatcaaatgaccaaacgaaagagagtggtcctagtcaaagagaggaaagcagcccagacactgagtgccattctcctggccttcatcatcacatggacccc

SEQ ID NO: 665112 - DNA, 120 bp, Artificial Sequence
  ENSG00000184984_17 (sequence is synthesized)
gtataacatcatggtcctggtttctaccttctgtgacaagtgtgtcccagtcaccctgtggcacttgggctattggttgtgctatgtcaatagcactgtcaaccccatctgctatgccct

SEQ ID NO: 665113 - DNA, 120 bp, Artificial Sequence
  ENSG00000184984_18 (sequence is synthesized)
ctgcaacagaaccttcaggaagacctttaagatgctgcttctctgccgatggaaaaagaaaaaagtggaagagaagttgtactggcaggggaacagcaagctaccctgaaaagtcaacaa

SEQ ID NO: 665114 - DNA, 120 bp, Artificial Sequence
  ENSG00000184984_19 (sequence is synthesized)
ctcctctcgaaagaacaatgaccacagtcaacatcctctgaggatgagcaagctgattctggtttgtatattttcaaaaagaagacatctcattttgagtccttgaagatttttgtaaag

SEQ ID NO: 665115 - DNA, 120 bp, Artificial Sequence
  ENSG00000184984_20 (sequence is synthesized)
gctcaagtttggttgccaaatggaaggggccatagctgcagcaattgctgacatattaaatgactcttgcctatgaccaaggccatttgatgccaggggagtttgccaatgaagtaaagg

SEQ ID NO: 665116 - DNA, 120 bp, Artificial Sequence
  ENSG00000184984_21 (sequence is synthesized)
gataggctcatggcccttcacaagaggaagcacactgggtaacaatgaacagtgactcagggaacttatgccccttctgtaggaaacagcagagaccaggtggaaaccttttcctgtgga

SEQ ID NO: 665117 - DNA, 120 bp, Artificial Sequence
  ENSG00000184984_22 (sequence is synthesized)
agaattttgtgcaatatgtatgtgtctatgaagctgtcttgtgccagtgagaaccagcaggagaatgtacaacagtgtcacttgttaacgagactgatattcaacaggcttctaagaata

SEQ ID NO: 665118 - DNA, 120 bp, Artificial Sequence
  ENSG00000184984_23 (sequence is synthesized)
tgtatcttcataaactgatcactatctattatgcagctattatgtggtctatactatactgtggtttgttttcctgtccccacatctgagtgaaggtcttgctcttccctttcatatcca

SEQ ID NO: 665119 - DNA, 120 bp, Artificial Sequence
  ENSG00000184984_24 (sequence is synthesized)
atgtcaattccttgtactcactgaacccatgctgatctccagggaaccatccttcctctcagaatccagagtctggaaggactgaaacctggtcatacccagtcctttcaaggggcctct

SEQ ID NO: 665120 - DNA, 120 bp, Artificial Sequence
  ENSG00000184984_25 (sequence is synthesized)
tttctactaataaagatggatcaagtctccacagtcagttattttagtttttgccagtggaaattttttcttttatctaaacagatattgtgcattctattttgtgcccatttgaaccca

SEQ ID NO: 665121 - DNA, 120 bp, Artificial Sequence
  ENSG00000184984_26 (sequence is synthesized)
tttatttatgctctgttcttaggaagactaattgtgtaagagcccttcactggctgaagattttctccaggctgttgaattaaggttcttatattgttttcagagatcttgctttctaat

SEQ ID NO: 665122 - DNA, 120 bp, Artificial Sequence
  ENSG00000184984_27 (sequence is synthesized)
ctcttcacagggcaaacctgagcaaaatgtggaaaacagatttgcttttgaatttcttccagagcccttttgcagcctccaatttcccttgttcagatccccagttcacaccaagacgca

SEQ ID NO: 665123 - DNA, 120 bp, Artificial Sequence
  ENSG00000184984_28 (sequence is synthesized)
agcaggtcagctgtgctgcctccaagcagggggttgtggggtgaggtgggggtagaaagtctttttttataggtccttcaaatcagggcctaaaaatgacttctttattcctctccaaat

SEQ ID NO: 665124 - DNA, 120 bp, Artificial Sequence
  ENSG00000184984_29 (sequence is synthesized)
tcggtcacaaatgagaaggccagaaaagcacacttgagggtgcgatgaagctgaaaatgatctgaaagcttcatttttaaaaacaaagtgtaggtcatagtaatacataaaaataaaaca

SEQ ID NO: 665125 - DNA, 120 bp, Artificial Sequence
  ENSG00000184984_30 (sequence is synthesized)
gttgacatgcatgacagcatgaggattattaaaaaccacacttaattgaaatctctaagtgcgtataaacaaacggaatcaaaggacctttgtggacaaaagtccacaaagaagcagtag

SEQ ID NO: 665126 - DNA, 120 bp, Artificial Sequence
  ENSG00000184984_31 (sequence is synthesized)
tgtggtacacagcaaggattttaaagatgaagcactcctgtcagacattatttaactcgttggttacatctgcagctggacttaaaaatcaccagacttcatgcgtcttagtgtaggccg

SEQ ID NO: 665127 - DNA, 120 bp, Artificial Sequence
  ENSG00000184984_32 (sequence is synthesized)
ggtccttttcagtctcatttgctaagaggatggaaaattagctggtttagttgtcctgggaattagatatgtacctgagtatgggagagcttcagcctaccactgaagagcatcatcagc

SEQ ID NO: 665128 - DNA, 120 bp, Artificial Sequence
  ENSG00000184984_33 (sequence is synthesized)
ctctcacaggatgtcccacggaggcttcagggtagtagaatctcaggcaggacgggactggtcccttataaagacttcacgttgacatgaaacatcttgtaagcagtgcatctgctgagc

SEQ ID NO: 665129 - DNA, 120 bp, Artificial Sequence
  ENSG00000184984_34 (sequence is synthesized)
ctttgtaaagggcaggttgacacctgcaaagaattcggtgggaacagtaattggctcagttctccagcacagaggctttcgggcctccgtgatgccaactgggtgtgacttcatgagcaa

SEQ ID NO: 665130 - DNA, 120 bp, Artificial Sequence
  ENSG00000184984_35 (sequence is synthesized)
acctgctctaccagcgccagataaacagttgagtcttcgtttaaggctttgattcctgataaagatgaaaaccccttcatgagaataggcttttaagcccatgttgggcattcaccattc

SEQ ID NO: 665131 - DNA, 120 bp, Artificial Sequence
  ENSG00000184984_36 (sequence is synthesized)
gcagttgagagtgaaacaagctaatttaaacaaaagaacacaaatcgggaaaggatgccatggagggcactcctcgcacactccgcacttgcttaggacttggccttttttgttcatctt

SEQ ID NO: 665132 - DNA, 66 bp, Artificial Sequence
  ENSG00000184984_37 (sequence is synthesized)
ctccgcacttgcttaggacttggccttttttgttcatcttttgtgaaattgattaagaagtgtatt

SEQ ID NO: 665133 - DNA, 120 bp, Artificial Sequence
  ENSG00000184984_38 (sequence is synthesized)
agggagaccctgtctctacaaaaaaaattttaaatacctgggcattagcagggcatcgtagtgtgtgcctgtagacccagctacttcagaggttgaagcaggaggatcgcatgagcccag

SEQ ID NO: 665134 - DNA, 120 bp, Artificial Sequence
  ENSG00000184984_39 (sequence is synthesized)
ctacttcagaggttgaagcaggaggatcgcatgagcccaggagttagaggttgcagtgagctatgatcacactactgcattccagtctaagtgacagagcaagaccctgcctcaaaaaaa

SEQ ID NO: 665135 - DNA, 120 bp, Artificial Sequence
  ENSG00000184984_40 (sequence is synthesized)
tcattggttttggaaagcagccagttttgcagactacctatgcctcttgacatagacaaaaaatatcccaaactactagggacaactagacttctatagaatagcggctttagtggggtc

SEQ ID NO: 665136 - DNA, 120 bp, Artificial Sequence
  ENSG00000184984_41 (sequence is synthesized)
ctcagaatgaatagacctaattgtaaactacagggacctgatgggtgggtgggaggcgcatggcctgacttgagatcttaggccttctatgcccccagtcttccaggctttgtctatagt

SEQ ID NO: 665137 - DNA, 120 bp, Artificial Sequence
  ENSG00000184984_42 (sequence is synthesized)
aaaccatgtatgactttggctagttacctactggatgctgttactttgctatcattgtaatttgtttccccttggctgtgaatttgatgacttgtcagggaatctgttttccattcaatt

SEQ ID NO: 665138 - DNA, 120 bp, Artificial Sequence
  ENSG00000184984_43 (sequence is synthesized)
tttggttgaacaaagcattttgtcaatattctcagcttttgcttcgctcctttggtgaatgtcctttgaagacaatactgatgccagctctttgtaattgtgaaatctgtacccaaacct

SEQ ID NO: 665139 - DNA, 120 bp, Artificial Sequence
  ENSG00000184984_44 (sequence is synthesized)
ctggattagaatctccagttgtctactgtaaatactggaattacagcaaaggatatggggactgggctgcttttctgtattgtataagcactattctagatattaaagaaatttaaccgc

SEQ ID NO: 665140 - DNA, 120 bp, Artificial Sequence
  ENSG00000184984_45 (sequence is synthesized)
agtggtacaagatgtggaggtggaagacagtgatattgtgtccggaatttattccttcttgtgggttctcggtctcactaacttcaagaatgaagccgcagaccgtcgcggtgtgttaca

SEQ ID NO: 665141 - DNA, 88 bp, Artificial Sequence
  ENSG00000184984_46 (sequence is synthesized)
gttcagatgtgtccctgacttcagaagtgaagccacataccttcgcaatgctggccaagaagagctgaaatagaaaacagcctagaac

SEQ ID NO: 665142 - DNA, 120 bp, Artificial Sequence
  ENSG00000184984_47 (sequence is synthesized)
cagataatgttttttaaagcagcttgatttggaagcgtgtgtaattctgaaatacgaacaagcagaacttttccagggggtcaaatgcatataggaacaaccaggatttctcattgctga

SEQ ID NO: 665143 - DNA, 80 bp, Artificial Sequence
  ENSG00000184985_0 (sequence is synthesized)
cctttctctgcgctctcgctcgcgctccccagcgccctcctgctctcccggccgcggtcccctcgtccgcgccgccccgc

SEQ ID NO: 665144 - DNA, 80 bp, Artificial Sequence
  ENSG00000184985_1 (sequence is synthesized)
ctgggtcctcacgcccaactgacccgggtgccgcggagccctcccgcggggcgcgcggagcccggtggcggcgaggaccg

SEQ ID NO: 665145 - DNA, 80 bp, Artificial Sequence
  ENSG00000184985_2 (sequence is synthesized)
gaggaccggcaggcgcgcggcacggagccaggcgccccgggtccgagtcccggtcccgctcctggtcccggcgaggacgg

SEQ ID NO: 665146 - DNA, 120 bp, Artificial Sequence
  ENSG00000184985_3 (sequence is synthesized)
cggagtggcttcgcgggcgcaggtctcgctcatcagcacgtcgttcgtgctcaagggggacgcgacgcacaaccaggcgatggtgcactggacgggcgagaacagcagcgtgatcttgat

SEQ ID NO: 665147 - DNA, 120 bp, Artificial Sequence
  ENSG00000184985_4 (sequence is synthesized)
cctgacgaagtactaccacgcagacatggggaaggttctggaaagttctctgtggcggtcatcagatttcgggacgtcctacaccaagctcaccctccagcctggtgtcaccaccgtcat

SEQ ID NO: 665148 - DNA, 120 bp, Artificial Sequence
  ENSG00000184985_5 (sequence is synthesized)
cgacaatttctacatctgcccgaccaacaagaggaaggtcatccttgtcagctcctcactcagtgaccgggaccagagcctattcctcagcgcagacgaaggcgccacctttcagaagca

SEQ ID NO: 665149 - DNA, 120 bp, Artificial Sequence
  ENSG00000184985_6 (sequence is synthesized)
gcccattcccttcttcgtggaaactctgattttccaccctaaggaggaggacaaggtcctcgcctacacaaaggagagcaagctctacgtgtcatctgacttggggaaaaagtggacact

SEQ ID NO: 665150 - DNA, 120 bp, Artificial Sequence
  ENSG00000184985_7 (sequence is synthesized)
tctgcaagagcgagtgaccaaagaccacgtgttctggtctgtgtctggggtggacgctgaccctgacttggtccacgtggaagcccaagacctcggtggagattttcggtacgtcacctg

SEQ ID NO: 665151 - DNA, 120 bp, Artificial Sequence
  ENSG00000184985_8 (sequence is synthesized)
cgcaatccacaattgctccgagaagatgctgacagccccattcgcaggccccattgaccacgggtctctgaccgtgcaggacgattacatcttctttaaggcaacatcagcaaaccagac

SEQ ID NO: 665152 - DNA, 120 bp, Artificial Sequence
  ENSG00000184985_9 (sequence is synthesized)
aaaatactacgtctcttatcgtcgaaatgaatttgtcctgatgaagctgccgaagtatgcattgccaaaggatctgcagatcatcagcacggacgagagtcaggtgttcgtggcggtgca

SEQ ID NO: 665153 - DNA, 120 bp, Artificial Sequence
  ENSG00000184985_10 (sequence is synthesized)
ggagtggtaccagatggacacctacaacctgtaccagtcggacccacggggcgtgcgctacgcgctggtgctgcaggacgtgcgcagctcacggcaggcggaggagagcgtgctcatcga

SEQ ID NO: 665154 - DNA, 120 bp, Artificial Sequence
  ENSG00000184985_11 (sequence is synthesized)
catcctggaggtcagaggggtgaaaggagtcttcctggcaaaccaaaaaattgatgggaaagtgatgacgcttataacctacaacaagggccgcgactgggattacctgaggccacccag

SEQ ID NO: 665155 - DNA, 120 bp, Artificial Sequence
  ENSG00000184985_12 (sequence is synthesized)
catggacatgaatggaaaaccaaccaactgcaagcctccagactgccacctgcacctgcacctgcgctgggcagacaacccctacgtatcaggcaccgtgcacaccaaggacaccgcccc

SEQ ID NO: 665156 - DNA, 120 bp, Artificial Sequence
  ENSG00000184985_13 (sequence is synthesized)
aggcctcatcatgggtgcaggtaacctgggctcacagctggtggaatataaagaagaaatgtacatcacgtcagactgtggtcacacctggcggcaggtgtttgaggaagagcatcacat

SEQ ID NO: 665157 - DNA, 120 bp, Artificial Sequence
  ENSG00000184985_14 (sequence is synthesized)
cctgtacctggaccacggcggcgtgatcgtggccatcaaagacacctccatccctttgaagatcctcaagttcagtgtggacgagggcctcacctggagcacgcacaacttcaccagcac

SEQ ID NO: 665158 - DNA, 120 bp, Artificial Sequence
  ENSG00000184985_15 (sequence is synthesized)
ctcggtgtttgtggacgggctgctgagtgagccaggggacgagacgctggtcatgacggtctttggccacatcagcttccgctccgattgggagctggtcaaggtggacttccggccctc

SEQ ID NO: 665159 - DNA, 120 bp, Artificial Sequence
  ENSG00000184985_16 (sequence is synthesized)
attctccaggcagtgcggcgaggaggactacagctcctgggagctctccaacctgcagggcgaccgctgtatcatgggccagcagagaagtttccggaaaagaaagtccacgtcctggtg

SEQ ID NO: 665160 - DNA, 120 bp, Artificial Sequence
  ENSG00000184985_17 (sequence is synthesized)
catcaaggggaggagcttcacgtcggcgctcacgtcccgcgtgtgcgagtgccgggactcggacttcctgtgcgactacggatttgagcgctcctcctcctcagagtccagcaccaacaa

SEQ ID NO: 665161 - DNA, 120 bp, Artificial Sequence
  ENSG00000184985_18 (sequence is synthesized)
gtgctctgccaacttctggtttaacccattgtccccgcctgacgactgtgccctgggccagacctacaccagcagccttgggtaccggaaagtggtgtccaacgtgtgtgagggtggggt

SEQ ID NO: 665162 - DNA, 120 bp, Artificial Sequence
  ENSG00000184985_19 (sequence is synthesized)
ggacatgcagcagagtcaggtgcagctgcagtgccccctcacgccgccccggggcctgcaggtcagcattcaaggcgaggcggtggccgtgcggcctggagaggacgtcctgtttgtggt

SEQ ID NO: 665163 - DNA, 120 bp, Artificial Sequence
  ENSG00000184985_20 (sequence is synthesized)
gcggcaggagcagggtgatgtcctgactaccaagtaccaggtagaccttggggacggcttcaaggccatgtacgtgaaccttacactgaccggggagcccatccggcaccgctacgagag

SEQ ID NO: 665164 - DNA, 120 bp, Artificial Sequence
  ENSG00000184985_21 (sequence is synthesized)
ccccggcatctaccgcgtgtccgtcagggcagagaacacggcaggccacgatgaggcggtgctctttgtccaggtcaactcccccctgcaggccctctacctggaggtggttcctgtcat

SEQ ID NO: 665165 - DNA, 120 bp, Artificial Sequence
  ENSG00000184985_22 (sequence is synthesized)
tggcctcaaccaggaggtgaacctcacagctgtgctgcttcccttgaaccctaacctcaccgtcttctactggtggatcggccacagcctgcagcccctcctttccctggataattctgt

SEQ ID NO: 665166 - DNA, 120 bp, Artificial Sequence
  ENSG00000184985_23 (sequence is synthesized)
gacaacgcggttttcggacacgggcgacgtgcgtgtgacggtgcaggccgcctgtgggaactcggtgctgcaggactccagggtcctccgtgtgctggatcaatttcaagtcatgcctct

SEQ ID NO: 665167 - DNA, 120 bp, Artificial Sequence
  ENSG00000184985_24 (sequence is synthesized)
ccaacacccctgagtggagggaagacgtgggcctggtggtcacccggctgctctccaaggagaccagcgtccctcaggagcttctggtgactgtggtgaagccggggctgcccactttgg

SEQ ID NO: 665168 - DNA, 120 bp, Artificial Sequence
  ENSG00000184985_25 (sequence is synthesized)
ccgatctgtacgtgctcctgccccctcccaggcccacaaggaagaggagcctctcgagtgataagaggctcgccgccatccagcaggtgctgaacgcacagaagatcagcttcctcctgc

SEQ ID NO: 665169 - DNA, 120 bp, Artificial Sequence
  ENSG00000184985_26 (sequence is synthesized)
gaggcggagtccgggtcctggtggccctgcgggacacaggcacaggtgctgagcagctgggcggcggtggcggctactgggcggtagtggtgctgtttgtcatcgggctcttcgcagcgg

SEQ ID NO: 665170 - DNA, 120 bp, Artificial Sequence
  ENSG00000184985_27 (sequence is synthesized)
gagccttcatcctctacaagttcaaaaggaaacggccaggcaggaccgtgtacgcccaaatgcacaacgagaaggagcaggagatgaccagccctgtgagtcacagtgaggacgtccagg

SEQ ID NO: 665171 - DNA, 120 bp, Artificial Sequence
  ENSG00000184985_28 (sequence is synthesized)
gcgctgtccagggcaaccactcaggcgtggtcctgagcatcaactcccgagagatgcacagctacctggtgagctgatgccaccccagcatctgtcttttcacccacggagggcacagaa

SEQ ID NO: 665172 - DNA, 120 bp, Artificial Sequence
  ENSG00000184985_29 (sequence is synthesized)
ccaccagcaaagccggcggctggactggcgcccctcagagacctgcggaaagccccctccctgagtcgtcgccacaccaggcgacaggcaccaccccctctgataaatccaagcccgccc

SEQ ID NO: 665173 - DNA, 120 bp, Artificial Sequence
  ENSG00000184985_30 (sequence is synthesized)
aggcccacggggggcccacgggaccccccgggactccccggacatggccctgcccctatgggacaccaggcctgactcaggcaggttctgccccccagaccccacacacggccgccccac

SEQ ID NO: 665174 - DNA, 120 bp, Artificial Sequence
  ENSG00000184985_31 (sequence is synthesized)
gtgctgtcgctcagcccgaggcctgacttctctgggctgaggctggtcgtcctggagccctcccagtacctcgggctgcaagagctgcagacccgttcagacactgcgttgcgggctcct

SEQ ID NO: 665175 - DNA, 120 bp, Artificial Sequence
  ENSG00000184985_32 (sequence is synthesized)
tccccgcagaggccggggcctccctgactttgcttcttcactcccacctgtgcggccacccagtccctctgtgggagcccgggtgccaggccctcccaacaccacaccaccctccaggcc

SEQ ID NO: 665176 - DNA, 120 bp, Artificial Sequence
  ENSG00000184985_33 (sequence is synthesized)
cccctgccctccggctggaaactgcagctctgtaaatgcctctctaggtagctgctggcggtggtgggggtgtctcactctctgtctttatagccggcggtagccaccggggtggctctg

SEQ ID NO: 665177 - DNA, 120 bp, Artificial Sequence
  ENSG00000184985_34 (sequence is synthesized)
tcagagttccgtactcgggagcccctttccctgagtgcccagggtgtctcctctgcccagaggggcagcagctctccctggttctccccagggcagacggggtagggcgggctcaggacc

SEQ ID NO: 665178 - DNA, 120 bp, Artificial Sequence
  ENSG00000184985_35 (sequence is synthesized)
cagtgcccatggttcctcactcctaccagcaagcagcaccatcccgcaggcttctcccacctgatggctgttctcccaccgggtctgggctctggaaggagccagatgcccccagaaagg

SEQ ID NO: 665179 - DNA, 120 bp, Artificial Sequence
  ENSG00000184985_36 (sequence is synthesized)
tgggtggtggagacggcaccagatgtaccagttttctgcagttccttataggcgaagggaaccgggtggaaaccaagctgggagaggctgaggatggcagggctggaagggccatcagcg

SEQ ID NO: 665180 - DNA, 120 bp, Artificial Sequence
  ENSG00000184985_37 (sequence is synthesized)
tgaccctcattttcaagaaggggaaactgaggcccagggaggagagtaactgaaggtcacagcacggtcacagcagaggtggccgaacccagccctctgcgcgccagtgctgtgcggtct

SEQ ID NO: 665181 - DNA, 120 bp, Artificial Sequence
  ENSG00000184985_38 (sequence is synthesized)
ccacacccttacggtttcctagaatcagggatgttagtgtaagtctataggaatataggggggtgggggggtcaccttttgccttgaaatgggaagtcagtagccccttcctcctcctcc

SEQ ID NO: 665182 - DNA, 120 bp, Artificial Sequence
  ENSG00000184985_39 (sequence is synthesized)
ctcctccccctcctctctggcagggatctcagatgaccgtggcctccctctcagagggggagaacgccagagccctggctggtgatgtgctggctgggggtgaatcccaatgagggtccc

SEQ ID NO: 665183 - DNA, 120 bp, Artificial Sequence
  ENSG00000184985_40 (sequence is synthesized)
tctcagagcgggagaacgccagagccctggatggtgatgcgctggctgggggtgaatcccaatgagggtccctctcagaaagggagaacgccagagccctggctggtgacatgctggctg

SEQ ID NO: 665184 - DNA, 120 bp, Artificial Sequence
  ENSG00000184985_41 (sequence is synthesized)
ggggtgaatccgaatgacagtgcagacgttctcccatccaccatgtctgagcttgggggaattgcctcatttcccctggaaaagaaacatggtccattagaggggaaagcccaggggtga

SEQ ID NO: 665185 - DNA, 120 bp, Artificial Sequence
  ENSG00000184985_42 (sequence is synthesized)
atcttcacgccccaaacagtgcccggtggggaggaggcacccgctccttgttgagtaaaaccacccatggagactggaacctcatctccctgggtcggggggtgttcaaggccacaggac

SEQ ID NO: 665186 - DNA, 120 bp, Artificial Sequence
  ENSG00000184985_43 (sequence is synthesized)
aaggggagcaccctgggccacacaggcgtggaggtgtccccaccccttccacctgtcccccagacccaaagctctctccccaccctacctgcccacctggggctcctgtgccccctcccc

SEQ ID NO: 665187 - DNA, 120 bp, Artificial Sequence
  ENSG00000184985_44 (sequence is synthesized)
actccagaggccaccctacaagttgtcctcaaggtcatcctggagatgggatccaggacgtggggccatgactctctgggaccttgccacagcccccattcccctgcttgcagtctgcaa

SEQ ID NO: 665188 - DNA, 120 bp, Artificial Sequence
  ENSG00000184985_45 (sequence is synthesized)
ggacacctttgcagggattcttgtcctgctggccaccccacccacacctgtccctggccagcaggccgcctgcaagcgtcaggcacacagggacagacatggcgagcacagtgcaggccc

SEQ ID NO: 665189 - DNA, 120 bp, Artificial Sequence
  ENSG00000184985_46 (sequence is synthesized)
ggggcccacgggcaacatggaaccctgggaactgccctcccccttagctcacagtgcctgcggtagccactctaggtcgttggccttccttgaccactccatttaattctctctgctgtt

SEQ ID NO: 665190 - DNA, 120 bp, Artificial Sequence
  ENSG00000184985_47 (sequence is synthesized)
tgggttgggtttttccccttagttatctgtgggtttcctgtattttatgttaatatttctattaagaacatgttgggcatgtggacccaagcacctgggaaggaggtggcatctgagaca

SEQ ID NO: 665191 - DNA, 120 bp, Artificial Sequence
  ENSG00000184985_48 (sequence is synthesized)
gcctgatacgttcccgtctgtgcacccatggagatccaggcgtgggcccgtgtctgtccctggttgtaaattcgagggtctgcatatctgatgttcaggtagacctgggcgcctgggaac

SEQ ID NO: 665192 - DNA, 120 bp, Artificial Sequence
  ENSG00000184985_49 (sequence is synthesized)
gaggccatcagctgccatgcacataacaaagagacaatgcattccttcttatttttcctttttaaaaatcgatgaatcatttgtgatgcttttaacaaagattaaatgaatttgatcagc

SEQ ID NO: 665193 - DNA, 80 bp, Artificial Sequence
  ENSG00000184986_0 (sequence is synthesized)
cgggagcggcgcagcatctgcgggcggcggggtttcgagctcgccgggccgtgtcgcgccatgcccgctggctgagcgcc

SEQ ID NO: 665194 - DNA, 120 bp, Artificial Sequence
  ENSG00000184986_1 (sequence is synthesized)
gccgcgcgcgcccaggccggggcccggcggccgaccatggtgctgccgcccccggaccggcgccacgtgtgcctgaccacgctggtgatcatgggcagcatggccgtcatggacgcgtac

SEQ ID NO: 665195 - DNA, 120 bp, Artificial Sequence
  ENSG00000184986_2 (sequence is synthesized)
gggcagcatggccgtcatggacgcgtacctggtggagcagaaccagggcccgcgcaagatcggcgtgtgcatcatcgtgctggtgggcgacgtgtgcttcctgctggtgctgcgctacgt

SEQ ID NO: 665196 - DNA, 120 bp, Artificial Sequence
  ENSG00000184986_3 (sequence is synthesized)
ggccgtgtgggtgggcgccgaggtgcgcacggccaagcgcggctacgccatgatcctgtggttcctttacatcttcgtgctggagatcaagctctacttcatcttccagaactacaaggc

SEQ ID NO: 665197 - DNA, 120 bp, Artificial Sequence
  ENSG00000184986_4 (sequence is synthesized)
ggcgcggcgcggcgcggcggaccccgtggcgcgcaaggcgctgacgctgctgctgtctgtgtgtgtgcccggcctgttcctgctgctcgtggcgctggaccgcatggagtacgtgcgcac

SEQ ID NO: 665198 - DNA, 120 bp, Artificial Sequence
  ENSG00000184986_5 (sequence is synthesized)
cttccgcaagcgcgaggacctgcgcggccgcctgttttgggtggcgctggacctgctggacctgctggacatgcaggccagcctgtgggagccgccgcgctccgggctgccgctgtgggc

SEQ ID NO: 665199 - DNA, 120 bp, Artificial Sequence
  ENSG00000184986_6 (sequence is synthesized)
gctgtacccggtgctcagcctcgccaccgtcaatgtggtggccgtgctggcgcgcgccgccaacatggcgctgttccgggacagccgtgtctcggccatcttcgtcggcaaaaacgtggt

SEQ ID NO: 665200 - DNA, 120 bp, Artificial Sequence
  ENSG00000184986_7 (sequence is synthesized)
ggcgctcgccaccaaggcctgcaccttcctggagtaccgccgccaggtgcgcgacttcccgccgcctgcgctatcactggagctgcagccgccacccccgcagcgcaactcggtgccgcc

SEQ ID NO: 665201 - DNA, 120 bp, Artificial Sequence
  ENSG00000184986_8 (sequence is synthesized)
gctgcacggcccgcctgggcgcccccacatgtcctcgcccacgcgtgaccccctggacacgtgacagggcccgcgcggcccccgacacgcccctggggcgcagagacaccgggttggctt

SEQ ID NO: 665202 - DNA, 120 bp, Artificial Sequence
  ENSG00000184986_9 (sequence is synthesized)
ccgggttggcttggggcgcgcggtttgcatgggatggggtgggggcgggctcccctagggacaggtgcctcgagtgcccgtgcctggggtcccgcggccgcttcttcatctcaggaatct

SEQ ID NO: 665203 - DNA, 120 bp, Artificial Sequence
  ENSG00000184986_10 (sequence is synthesized)
ctcggaccgcggatcctcagcccccgctccaccagcccgccccagcgcgtgggtctgtttgggaggcctgggccggagcagagcagaggtgatccggcccctgcctgctgggccgcccgg

SEQ ID NO: 665204 - DNA, 120 bp, Artificial Sequence
  ENSG00000184986_11 (sequence is synthesized)
gttggaagggagggcagtgtgggcggagatctgctccttcggtgggggcctctggctcagatttggggccaaggaggcctctgtcattttaaagactcgtgtttacagttttgtatccaa

SEQ ID NO: 665205 - DNA, 120 bp, Artificial Sequence
  ENSG00000184986_12 (sequence is synthesized)
ggagaggtggccgggccgggctctggcttgccggggtaggggctccgctaggggctggagtccgtcccttcgccagcgcagagcccctcggcccgcatctgccaagtgactgaggatcga

SEQ ID NO: 665206 - DNA, 120 bp, Artificial Sequence
  ENSG00000184986_13 (sequence is synthesized)
gcgtagtggggcggaggggctggaggcacggccggaaagggtgagcggcgccgtggctcccccgctatttatttggccccgccacgcgcggagagggaggaaattctcaggctgcggctg

SEQ ID NO: 665207 - DNA, 120 bp, Artificial Sequence
  ENSG00000184986_14 (sequence is synthesized)
cagctaggggaggcccaggtgggcctggaatgggcccagagagggcttcctgggtcagacgtgtagatccagtggacgtgaaaaccgggtttcgagctcgccgggccgtgtcgcgccatg

SEQ ID NO: 665208 - DNA, 120 bp, Artificial Sequence
  ENSG00000184988_0 (sequence is synthesized)
attttcgattccactctcttccgtttctgtcgctgcagtcgtccgcggtgcggcacattcgttcccctaggactccggccggttgccggccccaggcggtgcttctccccaccaccgccc

SEQ ID NO: 665209 - DNA, 120 bp, Artificial Sequence
  ENSG00000184988_1 (sequence is synthesized)
agctcagctcagcccagcccagcccactctgcccttagaggcccttctccccaaagacgcactccagaagtctcgccctcgtgcggctgaggagcctgggatcccagacctgaacaagtg

SEQ ID NO: 665210 - DNA, 120 bp, Artificial Sequence
  ENSG00000184988_2 (sequence is synthesized)
aaacccccgcccctgaagaatgggtaagacgttttcccagctgggctcttggcgggaggatgagaacaagtcaatcctgtcctccaaaccagccattggcagcaaggctgtcaactactc

SEQ ID NO: 665211 - DNA, 120 bp, Artificial Sequence
  ENSG00000184988_3 (sequence is synthesized)
cagcaccggtagcagcaagtctttttgttcctgtgtgccttgtgaaggaactgctgatgccagcttcgtgacttgtcccacctgccagggcagtggcaagattccccaagagctggagaa

SEQ ID NO: 665212 - DNA, 120 bp, Artificial Sequence
  ENSG00000184988_4 (sequence is synthesized)
gcagttggtggctctcattccctatggggaccagaggctgaagcccaagcacacgaagctctttgtgttcctggccgtgctcatctgcctggtgacctcctccttcatcgtctttttcct

SEQ ID NO: 665213 - DNA, 120 bp, Artificial Sequence
  ENSG00000184988_5 (sequence is synthesized)
ctaccccattatggtgacacagctgaccctcgaggttctgcacctgtccctcgtggtggggcaggtttccaacaaccttctcctacacattggccctttggccagtgaacagatgtttta

SEQ ID NO: 665214 - DNA, 120 bp, Artificial Sequence
  ENSG00000184988_6 (sequence is synthesized)
cgcagtagctaccaagatacgggatgaaaacacatacaaaatctgtacctggctggaaatcaaagtccaccatgtgcttttgcacatccagggcaccctgacctgttcatacctgagcca

SEQ ID NO: 665215 - DNA, 120 bp, Artificial Sequence
  ENSG00000184988_7 (sequence is synthesized)
ttcagagcagctggtctttcagagctatgaatatgtggactgccgaggaaacgcatctgtgccccaccagctgacccctcacccaccatgacctgtctgctgtccctgtactccaggcac

SEQ ID NO: 665216 - DNA, 120 bp, Artificial Sequence
  ENSG00000184988_8 (sequence is synthesized)
ctgcaaccctggtctatatctcccacaactccctggtgactaaggaaggactacagaggctttgccaaaggagaagccctgcctcatcacacccttacctcccaccccctcagcacagga

SEQ ID NO: 665217 - DNA, 120 bp, Artificial Sequence
  ENSG00000184988_9 (sequence is synthesized)
agcttgctttgaagttaacttcatacacacacactcatatcctccagtttcccccagattctttcaggggctgccatcagattctgcccttggttagttttttgttttttttttggtaga

SEQ ID NO: 665218 - DNA, 120 bp, Artificial Sequence
  ENSG00000184988_10 (sequence is synthesized)
gacagagtctcactgttggtccaggttggttttgaactcctgggctcaagcgatcctcccttcttggcctcccaaagcacttggattacagatgtgagcctgtgcctggctggtctttct

SEQ ID NO: 665219 - DNA, 120 bp, Artificial Sequence
  ENSG00000184988_11 (sequence is synthesized)
cttgaggcaccttagattccctggagtggcacctggcctttctgtactgagcacctggtcagtctgaagggggcatttcaccccagctccatcagggctggctgtcccgtctgaatgtgg

SEQ ID NO: 665220 - DNA, 69 bp, Artificial Sequence
  ENSG00000184988_12 (sequence is synthesized)
ccgtctgaatgtggagagagctgtagttttatctggcttttaaaacatggacctgccgtgggtggatca

SEQ ID NO: 665221 - DNA, 120 bp, Artificial Sequence
  ENSG00000184988_13 (sequence is synthesized)
agtgagccaagatcgtgcaactgcactccagcctgggcaaaagagcaaaactttgtctcaaaaaaagactcttttcaagttttctaccctctgataagaaaatttggggatatccagtgc

SEQ ID NO: 665222 - DNA, 120 bp, Artificial Sequence
  ENSG00000184988_14 (sequence is synthesized)
catctccaaggactttcaggggatcatagatgcttttctgtgcctatctgctttgaccatgtgaaaaagtgatagtctgcttctctctggtaacttgtctgccacccatctgatagtaag

SEQ ID NO: 665223 - DNA, 120 bp, Artificial Sequence
  ENSG00000184988_15 (sequence is synthesized)
attagccaaggccctttagccctctgtcctttctggttattgactgtccctggttcctaggaagacagagttgttctccagctaaagcgtctcctctctataaagtagttttactattct

SEQ ID NO: 665224 - DNA, 120 bp, Artificial Sequence
  ENSG00000184988_16 (sequence is synthesized)
tttcatagcaggagccaaaatagtagaggaggggagagaggcacctggcactctgcgggcctgcacaggaaaaacagagccaaagacagaatcattgtataagatatttattaaaggaga

SEQ ID NO: 665225 - DNA, 120 bp, Artificial Sequence
  ENSG00000184988_17 (sequence is synthesized)
gcctctaagtccacatcctgagcccatgtgagtggacacaggtaggtaaaacggtgggtccagctgctgtcatctgaaagccttcaggagatgaagctatcagtatccagctgaaggctg

SEQ ID NO: 665226 - DNA, 120 bp, Artificial Sequence
  ENSG00000184988_18 (sequence is synthesized)
ctgggttctgttccaccaccaccttagcaccagggccctctctggtcccagaggcctcatctctccttgggctttgacaatgtggagcagcacatcagcagggactggtctagaccctcc

SEQ ID NO: 665227 - DNA, 120 bp, Artificial Sequence
  ENSG00000184988_19 (sequence is synthesized)
ctttcctgtcacttagctggagctaagctccagataacccctaggttcccactggctcctagtagaaatagtttctgtactttagcagaacaggaaggatatttgttcattaaaggtggc

SEQ ID NO: 665228 - DNA, 88 bp, Artificial Sequence
  ENSG00000184988_20 (sequence is synthesized)
tctagagcccaggaattcaagtttaacatgagcagcaacattagcaagaccccgtttaaaaaaaaaaaaagagctgggcgtaatggcg

SEQ ID NO: 665229 - DNA, 78 bp, Artificial Sequence
  ENSG00000184988_21 (sequence is synthesized)
ccaggaattcaagtttaacatgagcagcaacattagcaagaccccgtttaaaaaaaaaaaaagagctgggcgtaatgg

SEQ ID NO: 665230 - DNA, 88 bp, Artificial Sequence
  ENSG00000184988_22 (sequence is synthesized)
tggctgtctctttatcattcagacagaacgatgaacacaggtgagcagggaaagctaattttgaagtaggatgcatggagagggagaa

SEQ ID NO: 665231 - DNA, 120 bp, Artificial Sequence
  ENSG00000184988_23 (sequence is synthesized)
ggaaagctaattttgaagtaggatgcatggagagggagaagtggtgacagaacttggtaactagctggctgggggaacgaggggaaggaaggagactgctgtctccaagctgaggtcagg

SEQ ID NO: 665232 - DNA, 120 bp, Artificial Sequence
  ENSG00000184988_24 (sequence is synthesized)
gtggtgttggcaagagcgcaaaagtccagggaagccaggctggagctgctgtgtatagactgccaaatgtgaagtatttatattgtattcaataaactatacttaagagtgttcaaaaaa

SEQ ID NO: 665233 - DNA, 120 bp, Artificial Sequence
  ENSG00000184988_25 (sequence is synthesized)
gaagcccaagcacacgtaagccccccttcctcccctagcttcacaagccattgcccctgggggctgctccctttgtctcccctgttttgatctcccttaatttcttcctattagttcttc

SEQ ID NO: 665234 - DNA, 120 bp, Artificial Sequence
  ENSG00000184988_26 (sequence is synthesized)
gggcactgagtcaaagcttgaggggagtgttcgctcccgcattttcgattccactctcttccgtttctgtcgctgcagtcgtccgcggaggcccttctccccaaagacgcactccagaag

SEQ ID NO: 665235 - DNA, 120 bp, Artificial Sequence
  ENSG00000184988_27 (sequence is synthesized)
accccccttcctagcaatacttcgctgtaacctttgtccagtgttatgaccctgggcatgggaagccagagatcttatggcacccagagggtgttgggagcctgaagagaagtaggagca

SEQ ID NO: 665236 - DNA, 120 bp, Artificial Sequence
  ENSG00000184990_0 (sequence is synthesized)
gtcgttggtaaggggctggcggccggggagctgcgtagctcccggccccgcggccatgcccaagcggagctgccccttcgcggacgtggccccgctacagctcaaggtccgcgtgagcca

SEQ ID NO: 665237 - DNA, 120 bp, Artificial Sequence
  ENSG00000184990_1 (sequence is synthesized)
gagggagttgagccgcggcgtgtgcgccgagcgctactcgcaggaggtcttcgagaagaccaagcgactcctgttcctcggggcccaggcctacctggaccacgtgtgggatgaaggctg

SEQ ID NO: 665238 - DNA, 120 bp, Artificial Sequence
  ENSG00000184990_2 (sequence is synthesized)
tgccgtcgttcacctgccagagtccccaaagcctggccctacaggggccccgagggctgcacgtgggcagatgctgattggaccagacggccgcctgatcaggagccttgggcaggcctc

SEQ ID NO: 665239 - DNA, 120 bp, Artificial Sequence
  ENSG00000184990_3 (sequence is synthesized)
cctgttcctcatgcgtgcgagccgtggatgggaaggcggtctgcggtcagtgtgagcgagccctgtgcgggcagtgtgtgcgcacctgctggggctgcggctccgtggcctgtaccctgt

SEQ ID NO: 665240 - DNA, 120 bp, Artificial Sequence
  ENSG00000184990_4 (sequence is synthesized)
gtggcctcgtggactgcagtgacatgtacgagaaagtgctgtgcaccagctgtgccatgttcgagacctgaggctggctcaagccggctgccttcaccgggagccacgccgtgcatggca

SEQ ID NO: 665241 - DNA, 120 bp, Artificial Sequence
  ENSG00000184990_5 (sequence is synthesized)
gccttccctggacgagcgctcggtgttcacactgaactgtggggtcgacgggaggggtgccttttacatgttctattttgtatcctaatgacagaatgaataaacctctttatatttgca

SEQ ID NO: 665242 - DNA, 120 bp, Artificial Sequence
  ENSG00000184990_6 (sequence is synthesized)
cccctcctgtcccaagaggtattcatggagcgcgcggccctgccaggcacggcggctttctcgggagaccaaaggcaggcaagacagatgtgccccgtctcccgggagctccccagccta

SEQ ID NO: 665243 - DNA, 120 bp, Artificial Sequence
  ENSG00000184990_7 (sequence is synthesized)
gtggagccggccttgtgctggaaagagcatgatgtgggcatgtgagaaacaaactcacccatccacacccgaagaatggactcagagacctcagagaccggagaacagcaaaaaactatc

SEQ ID NO: 665244 - DNA, 120 bp, Artificial Sequence
  ENSG00000184990_8 (sequence is synthesized)
cctaagaggccaggtgtggtggctcacaccttataatcccaacgttttgggaggacaaggcaggaggatcacttgaggcccggagttcaagaccggcctgaacaacatagcgagacccta

SEQ ID NO: 665245 - DNA, 120 bp, Artificial Sequence
  ENSG00000184990_9 (sequence is synthesized)
tctctaccataaaaaagacccagaacatcctcgccagcctgtgctccctatggggcaccccctccagtggaagtgagggcagccacgcacccctgggaatgccttagagaggggccaatt

SEQ ID NO: 665246 - DNA, 120 bp, Artificial Sequence
  ENSG00000184990_10 (sequence is synthesized)
caagccgtgatgggggacgggtgggtcacccatgtgggcccagaacacacacgtgtggcccctgatgcagtgccatctggcattgcctaacgggacatggtggcaatagatgcttggccc

SEQ ID NO: 665247 - DNA, 120 bp, Artificial Sequence
  ENSG00000184990_11 (sequence is synthesized)
tccctgtcttcagccacttcctgttctgatctttgagcacccccacctcctcctcctctggtctttgagccccccctccccccgtccgaggagcccctggttggtgacacaggtgcacac

SEQ ID NO: 665248 - DNA, 120 bp, Artificial Sequence
  ENSG00000184990_12 (sequence is synthesized)
cgcagcttcaccacagtcatgcgtgccgtttggttgtagaccctctcaggcaggaagtggagtgtttgtgtagtctcccatttgtgggtgggtttgctgcagctggctggatcccgtcct

SEQ ID NO: 665249 - DNA, 120 bp, Artificial Sequence
  ENSG00000184990_13 (sequence is synthesized)
tactcctaaggtggggaggggcgttctcaccctaggggctactcacctggtggatgggagtggacagtgtggagcctgtttgccctgccccgtgagaaagatgacttcatccagacacat

SEQ ID NO: 665250 - DNA, 120 bp, Artificial Sequence
  ENSG00000184990_14 (sequence is synthesized)
gtggaactggctccatagacccaaagcaagcttagtccaaacaatgtctgaaattgtccatctaaaatagaaaccacatgttacatctcgagtcctttctctcgagcctttcttcagtcg

SEQ ID NO: 665251 - DNA, 120 bp, Artificial Sequence
  ENSG00000184990_15 (sequence is synthesized)
ggtggcacgagcatttttcttgatttgcaaggtcaggcttttcctccctgggtaagcaggactctgacccagagcttggccttctggctcagaaggctcctgttatcaggaggtctcaca

SEQ ID NO: 665252 - DNA, 120 bp, Artificial Sequence
  ENSG00000184990_16 (sequence is synthesized)
ttcaagactggaagttgttaaacagcttctaagtactgggccaaaaaagcagcagagactccccgggtatcccgtctgctttccgcctgcagccccctcagatagtcccacaaggctgga

SEQ ID NO: 665253 - DNA, 120 bp, Artificial Sequence
  ENSG00000184990_17 (sequence is synthesized)
aacatgccagtcccatccctatgcagtgtggggtctcagagcatcacctgtgttgctggttagaaatgcaatccccgactctacctcaagtctggttggtgtgtctaggaggagcccagg

SEQ ID NO: 665254 - DNA, 120 bp, Artificial Sequence
  ENSG00000184990_18 (sequence is synthesized)
cacctctttgttaaccagtaaggcagtgggccacactgagacccagatgggacacatggagttctgacaagcaacaggggaagaatggtccttccagcactagcctccaggtagcagagg

SEQ ID NO: 665255 - DNA, 120 bp, Artificial Sequence
  ENSG00000184990_19 (sequence is synthesized)
gacctggtaagggaaagagcactgaacttggagtcaactacaggcatatctcaccttggatctctgtagtaaaacgggggtcctgtgcactgtaccaggctcacgggttgtcagaaggat

SEQ ID NO: 665256 - DNA, 120 bp, Artificial Sequence
  ENSG00000184990_20 (sequence is synthesized)
ccagtgtaggtggggatggggtaggcaggtcagagccctctgccctcaggtatgcatggaggcaggtagcccggcagtcccggaaactccagtctccttgcagcctgacggcttggcgtt

SEQ ID NO: 665257 - DNA, 120 bp, Artificial Sequence
  ENSG00000184990_21 (sequence is synthesized)
gttgggaatcatctgcagggctagctatgaatgtgggatactctgtctttgcttttcacccgctgagttcatcttctttcctagaagtaaactgaaaagggcagggttttctcattgtct

SEQ ID NO: 665258 - DNA, 120 bp, Artificial Sequence
  ENSG00000184990_22 (sequence is synthesized)
ggtggccctctcaccaaagcagaagtgaacatagccatgggcaggttcagcggagaggtgggtcccagagcgctgcgtggctggcctcccactcctgccctgcacaccatccttgaggga

SEQ ID NO: 665259 - DNA, 120 bp, Artificial Sequence
  ENSG00000184990_23 (sequence is synthesized)
ctcccttgcgcccatttcctcctggcctctacctactttctgctgctgcttcctcccatacccacagagttcacgttgagctgagtgggccactgtccccactgtggacacactctttta

SEQ ID NO: 665260 - DNA, 120 bp, Artificial Sequence
  ENSG00000184990_24 (sequence is synthesized)
tcgcagctacagcacaggaggtgggctctgccctctttcacaaataaatgacttgttccaggtcacaagccagaagtggcattcccaggccaggcagcccagctggtggcacccgcagtc

SEQ ID NO: 665261 - DNA, 120 bp, Artificial Sequence
  ENSG00000184990_25 (sequence is synthesized)
tcctaccccctcccctgccatttcctacttcaggaccaggcgtcgcaggagtgggggaaaacagggatctgtccacacggctctggtttaacacagatgcagcccagcagcctttggcgt

SEQ ID NO: 665262 - DNA, 120 bp, Artificial Sequence
  ENSG00000184990_26 (sequence is synthesized)
cctgctgatggcctgcactggcccacgcctggcccgtcctctgcagggctctccagctggctgccggtggcggtgaggggctgtcttcgcggctcacccacaatactactggcaaactct

SEQ ID NO: 665263 - DNA, 120 bp, Artificial Sequence
  ENSG00000184990_27 (sequence is synthesized)
gcaaaccaagtggcaagcagttctggctgccttgttgactccacggccctgtcgtgtttggggtagccattgccagtcccgtttcctcgcaacatctctcttaatcactttctccctgtg

SEQ ID NO: 665264 - DNA, 72 bp, Artificial Sequence
  ENSG00000184990_28 (sequence is synthesized)
gtttcctcgcaacatctctcttaatcactttctccctgtgttttgccgggttccctagcctttacctttaga

SEQ ID NO: 665265 - DNA, 120 bp, Artificial Sequence
  ENSG00000184990_29 (sequence is synthesized)
gaactcctgacctcaggtgatcctccggcctcagcctcccaaagtgctgaggtaagccacaccatacgcgtgagccaccatgcccggccctacccttagtcttgatatatcagaaaagca

SEQ ID NO: 665266 - DNA, 120 bp, Artificial Sequence
  ENSG00000184990_30 (sequence is synthesized)
atatatcagaaaagcactgtttgatgtgcttcagtgtaaaccattgtggttcggtgaattctggcaggtcatctggaggtttctttggagagcttctatcctactggaaacccaggttgg

SEQ ID NO: 665267 - DNA, 120 bp, Artificial Sequence
  ENSG00000184990_31 (sequence is synthesized)
gccccatgtggattgatcggcagtgggaatcagctagggctgctgtaactgagttcgcagacccagtggcatagacagcaaagaggtactgccacgtggctttggagaccagaagtctga

SEQ ID NO: 665268 - DNA, 120 bp, Artificial Sequence
  ENSG00000184990_32 (sequence is synthesized)
gaggaaggtgctggcagggctggttccttctgaggctgcaatggaaaacctgtcctggcctctctcctggcatctgctggttatctttggtgttccctgtagacagctgccccctccctg

SEQ ID NO: 665269 - DNA, 120 bp, Artificial Sequence
  ENSG00000184990_33 (sequence is synthesized)
tatcttcatgtcgtcttccttctctgtgtccttctcttcacgtagtctttttaggacgctggtcgtgttgccttagggcccccatgtcagtgccgtcatctagactgatgatgcccgcag

SEQ ID NO: 665270 - DNA, 120 bp, Artificial Sequence
  ENSG00000184990_34 (sequence is synthesized)
tgatcctgtctccagataaggtcatgtcctgaggtgttctgggttaggactttgacgtttgaatggtggggggtggtggacacaattcagcccctgacagcagcttttctctcccctccc

SEQ ID NO: 665271 - DNA, 80 bp, Artificial Sequence
  ENSG00000184992_0 (sequence is synthesized)
ggtggcgcagcagcggcggcggcggctgtgggtaaaggcgcggcgcgcggcccccgagcgcgccaaccttgccctagccg

SEQ ID NO: 665272 - DNA, 120 bp, Artificial Sequence
  ENSG00000184992_1 (sequence is synthesized)
cgcagggggcgcggggccgcggcggcgcggagaagaacagctaccgccgcacggtcaacaccttctcccagagcgtcagcagcctgttcggcgaggacaacgtgcgcgccgctcagaagt

SEQ ID NO: 665273 - DNA, 120 bp, Artificial Sequence
  ENSG00000184992_2 (sequence is synthesized)
tcttggccaggctgactgagagatttgtgctgggagtggatatgttcgtggagacactgtggaaagtctggaccgagctcttggatgttcttggacttgacgtctccaacctgtcccagt

SEQ ID NO: 665274 - DNA, 120 bp, Artificial Sequence
  ENSG00000184992_3 (sequence is synthesized)
atttcagcccagcctcggtgtccagcagcccggcccgcgcgctcctgctggtcggcgtcgtcctcctggcctactggttcttgtccctgaccctgggcttcactttcagcgtcctgcacg

SEQ ID NO: 665275 - DNA, 120 bp, Artificial Sequence
  ENSG00000184992_4 (sequence is synthesized)
tggtgttcggccgcttcttctggatcgtgcgggtcgtcctgttttccatgtcctgcgtgtacatcctgcacaagtacgagggcgagccggagaacgcggtgctgccgctgtgcttcgtgg

SEQ ID NO: 665276 - DNA, 120 bp, Artificial Sequence
  ENSG00000184992_5 (sequence is synthesized)
tggccgtctacttcatgaccgggcccatgggcttctactggcgaagcagtcccagcggccccagcaaccccagcaaccccagcgtggaggagaagctggagcacctggagaagcaggtca

SEQ ID NO: 665277 - DNA, 120 bp, Artificial Sequence
  ENSG00000184992_6 (sequence is synthesized)
gactgctcaacatccgtctcaaccgggtgctcgagagcctggaccgctccaaggacaagtgaaggtcagccggccgggcgggtccacagttaccagcacgctgtctcagaaaacgaaaac

SEQ ID NO: 665278 - DNA, 120 bp, Artificial Sequence
  ENSG00000184992_7 (sequence is synthesized)
ggaggaaaaaaaccccaaaccccaaacaatcttaataaacacgactgagcaagaaagtggcgctgtgtagggctatttccacccacccggcagctcttaggacacattcccagaagagcg

SEQ ID NO: 665279 - DNA, 120 bp, Artificial Sequence
  ENSG00000184992_8 (sequence is synthesized)
gaaagatcattgacgtggaactacacacgaagtgtaattagtgggggaaaaaatattttttaaacaaaggatataaccatatttagttgtacagtaagagaaatttatctgtgcatagag

SEQ ID NO: 665280 - DNA, 120 bp, Artificial Sequence
  ENSG00000184992_9 (sequence is synthesized)
cataaagttaattttttcaagcatttaaatacatcttttgtaaggttttttaataaaggcagattgagtcaagtttattaaaactttacatggaggggaagaatatgctaatttgacatt

SEQ ID NO: 665281 - DNA, 120 bp, Artificial Sequence
  ENSG00000184992_10 (sequence is synthesized)
tgagaaaagtttaaatgcgagcgtttgttttcacagcttagggattggtgggtgaggtctgtgtgcgttattttcatgttcccaaactgtgagctttatttcatgttatttttggtggat

SEQ ID NO: 665282 - DNA, 120 bp, Artificial Sequence
  ENSG00000184992_11 (sequence is synthesized)
gttgacttagttcatgaatgttgtcacttctaaatgtggacagttgggctgcaggatgcaactcaacctcttttggatcctagagacccctgccaagcccccatcagtcctatttttaaa

SEQ ID NO: 665283 - DNA, 120 bp, Artificial Sequence
  ENSG00000184992_12 (sequence is synthesized)
tgaagacatcgccatttctagaagacctgagattttcttccctctgtgcttcgatgtattttaacctcaacattttgaaacggaaaatgcaaggaggggccaagaaatgtcctggggatt

SEQ ID NO: 665284 - DNA, 120 bp, Artificial Sequence
  ENSG00000184992_13 (sequence is synthesized)
tgatgccaggaagtacctggtaaggattggagattgctccagaatctactgcatgtcccaatttgcagtttgctcactagggctatatacaaaagctatacccttgagggtttttttttt

SEQ ID NO: 665285 - DNA, 120 bp, Artificial Sequence
  ENSG00000184992_14 (sequence is synthesized)
tttcttttgatttcctcaggaccttagagggaaaacaaacagtagcagctaatattctcaagtatattgctgcttagaaagatcctcaggaacaattagcagcaataagcaagcctttga

SEQ ID NO: 665286 - DNA, 120 bp, Artificial Sequence
  ENSG00000184992_15 (sequence is synthesized)
aaagatctgaattctttttcctgaaatatttacgatacacaggtgctttttatctgaaatctgttgtgtcctccttttaggcagtctctgtgggcagagagtgggacttgcgaggtggac

SEQ ID NO: 665287 - DNA, 120 bp, Artificial Sequence
  ENSG00000184992_16 (sequence is synthesized)
agctgtggggatcctgggcaagggagtttcagaaggtgtggctcaggggctggtagaaacccccttttgttaggacttgttttttaaaaaagaaagccctaggccaggcgcagtggctga

SEQ ID NO: 665288 - DNA, 120 bp, Artificial Sequence
  ENSG00000184992_17 (sequence is synthesized)
gcaacagagcaagacttcatcttaaaaaaaaaaaaaaaagcccagcattttgcagctttgaagctgctggggatcacgactgtctctgtggcccttacctggccacagatgtaccctggc

SEQ ID NO: 665289 - DNA, 120 bp, Artificial Sequence
  ENSG00000184992_18 (sequence is synthesized)
aacccgctcacagtgccctgcgtgcaggtttatagataacccctgccagacctgctacaaccaagaccttatggtccaggtctcagtttggagaagatttagctgtctaccacttcttgt

SEQ ID NO: 665290 - DNA, 120 bp, Artificial Sequence
  ENSG00000184992_19 (sequence is synthesized)
gtagtgttcctgtgaagttttatttttggttgcaagtatctggaaaacagatgcagatgtttttgtggatgttgttgagacttttgagacttctgtttctaaggtacacatgatgggacc

SEQ ID NO: 665291 - DNA, 120 bp, Artificial Sequence
  ENSG00000184992_20 (sequence is synthesized)
caaactctcctggagagttccattcacttcctgaaacgtgcacctgtttcaggtgcatgtttattcagtgtgcatggatatttaagatttgctggagcaggctgggcagggtggctcacc

SEQ ID NO: 665292 - DNA, 120 bp, Artificial Sequence
  ENSG00000184992_21 (sequence is synthesized)
caaatctttatccatgcacattggaacacaggattactgggttgaaatcattctagttttgtcatttagatacttgtagatgaatctattttagcacaaggtataaataactcgggaggt

SEQ ID NO: 665293 - DNA, 120 bp, Artificial Sequence
  ENSG00000184992_22 (sequence is synthesized)
catctctatcttctttccttttgtgcatttggctataccacgtttaggtactaaaacagctttgcttatgttggccaggggaaaacatggcattctgtgcgcaaagctaatgatcgccag

SEQ ID NO: 665294 - DNA, 120 bp, Artificial Sequence
  ENSG00000184992_23 (sequence is synthesized)
ccctgccttggcccctcccttgtttatggtcattgtaagatgcccgcatgttaaggcttaagctgtcactgggctgggtgtaatacccgcttcattcctcctcccaccctcttacccgaa

SEQ ID NO: 665295 - DNA, 120 bp, Artificial Sequence
  ENSG00000184992_24 (sequence is synthesized)
acatgaagggcactgtgctctattgagatctcgataagatcatcattttaacttgtattcaactgagggaggtaacatgatatctgggtgctggtggattgagacctcaagcatcaattc

SEQ ID NO: 665296 - DNA, 120 bp, Artificial Sequence
  ENSG00000184992_25 (sequence is synthesized)
aaaattgctgtcgaaaatatgcactattttttttttccactctggctaagtgtaggctctgaagccagttttatagcttgatacattctggtgaaagatgtcttcatttttaatgaaaga

SEQ ID NO: 665297 - DNA, 120 bp, Artificial Sequence
  ENSG00000184992_26 (sequence is synthesized)
acctacagttagtaggtgtcacctcagggtagaaattctgatagaaattctgattatttgaaactctgatagaaatcctagatgctagatttgaagaaaacctgggttttattgcataga

SEQ ID NO: 665298 - DNA, 120 bp, Artificial Sequence
  ENSG00000184992_27 (sequence is synthesized)
tttcaccttttctggggcacatcttaccccaaaataattggggatttttttgttccttctccattccatggaaccttgtagggtgttgggattgggcctcccctcgccacccgccacatg

SEQ ID NO: 665299 - DNA, 120 bp, Artificial Sequence
  ENSG00000184992_28 (sequence is synthesized)
tctttgtttttttctctcttttgtatgtggaaaaatgtatttttgtaccatatctcatacctggagagaaaccttttttctatcttcagggctgtagaatatattagcgtaacacttcac

SEQ ID NO: 665300 - DNA, 120 bp, Artificial Sequence
  ENSG00000184992_29 (sequence is synthesized)
tgaatgtgacgtaaaagcattctgatgaaaactggttctgttataattaagactcagtgtttaaaatatcttaatcagtgttaatttcccagtgtttcagtatcacagtaaatacttgtt

SEQ ID NO: 665301 - DNA, 120 bp, Artificial Sequence
  ENSG00000184992_30 (sequence is synthesized)
ttactgagaacagaaaataatccagaaaaggaaaaggaccagccctctctagattgctggaattgtatggatgtgttggggttggtttagtgatctcttccttgacaccctagcaaagat

SEQ ID NO: 665302 - DNA, 87 bp, Artificial Sequence
  ENSG00000184992_31 (sequence is synthesized)
gttggtttagtgatctcttccttgacaccctagcaaagatgcttttgtggagtgcaaacctttcataaatatactttccaggctggg

SEQ ID NO: 665303 - DNA, 68 bp, Artificial Sequence
  ENSG00000184992_32 (sequence is synthesized)
ttgaggcgacagagtgagacccagtctcaaaaaaaaaaaaaagtgtgtgtgtgtgtatatatatgtat

SEQ ID NO: 665304 - DNA, 120 bp, Artificial Sequence
  ENSG00000184992_33 (sequence is synthesized)
gtatatatatatacacacacacacactttccaataccagtcggcattacccgccctttggtttcttttgctttggatttcagcccccatatcatttctggtaacagagcacagcaataga

SEQ ID NO: 665305 - DNA, 120 bp, Artificial Sequence
  ENSG00000184992_34 (sequence is synthesized)
agagcacagcaatagaatttctgggaagcagaccttgtgaatcgtgcctgtgtcttaattcacaaagggtaagtgaatgccgttgaaaggtgtttcatacacttaccccagaaatgagag

SEQ ID NO: 665306 - DNA, 120 bp, Artificial Sequence
  ENSG00000184992_35 (sequence is synthesized)
cctgtctcatgcaggagtcgggaggcagcgatgtcagggaactgggactatgtctttatgactgtgatggtggtaaccaagtggggtggtcccctctggggagctgagtaagaacgcaaa

SEQ ID NO: 665307 - DNA, 120 bp, Artificial Sequence
  ENSG00000184992_36 (sequence is synthesized)
ggtttgggtcagtgattaggaagactataatatgactttgtgcatgcccgggagggctgccttgtagagaggatgtgagcagcttagtcgctcatctggccctgtgattcaggcttatgg

SEQ ID NO: 665308 - DNA, 120 bp, Artificial Sequence
  ENSG00000184992_37 (sequence is synthesized)
agcgttaagaataacagctgtcaaatggcctagacatggttaatgcaatttgttgctagtggaaatcctgaattgcttcctttctgtgatcactgctacttcttaagatgcttttgatga

SEQ ID NO: 665309 - DNA, 120 bp, Artificial Sequence
  ENSG00000184992_38 (sequence is synthesized)
atgtcatctgccttacaagttgacacctgataacttctccctgatgggtttccgaactggctgacttaaccaaaaagccagctcttgccatctatcttgcattaaaaggaattcctgagg

SEQ ID NO: 665310 - DNA, 120 bp, Artificial Sequence
  ENSG00000184992_39 (sequence is synthesized)
ctcctaaggggtcagctgccccactcctgacttttttatttttaatggtctataccttctgcaacatttttgtttatggccatttgaatagttggactttgactcctcacttgtgaataa

SEQ ID NO: 665311 - DNA, 120 bp, Artificial Sequence
  ENSG00000184992_40 (sequence is synthesized)
taggaatatattttgcagaatctaacataatacccttaaaattcatactggacaaccatcagtgtgatgtatagtatctggtgtaaacaaattttattcagcatattaaattattctgtg

SEQ ID NO: 665312 - DNA, 120 bp, Artificial Sequence
  ENSG00000184992_41 (sequence is synthesized)
ttttgcttttccttgatatgtaggaggtgcaccagtaccagtttttctcttgtggtggcttaaaacgctgattgccatttgcattgtctactgaaaagctgtggcagcgagtggtattat

SEQ ID NO: 665313 - DNA, 120 bp, Artificial Sequence
  ENSG00000184992_42 (sequence is synthesized)
tgaccatgtgttctcatgtctttttgcagatttaaaggttttattgtagtgtccatttaatatctgcatgtgtgtttaatctctgaataccatgtaattaaactgattaacttgtgatgg

SEQ ID NO: 665314 - DNA, 120 bp, Artificial Sequence
  ENSG00000184992_43 (sequence is synthesized)
tgatggtgattagcacacactaaaaacccaatgaagcaattgtctccctcttcttaactggaaatcacacttgtgaggtatggtatccattatcaacagtggattcatgattgacttcat

SEQ ID NO: 665315 - DNA, 120 bp, Artificial Sequence
  ENSG00000184992_44 (sequence is synthesized)
attttgtgtatctggttataaattttgtatagcatttaatttggcacttaatataaatccatttgatttgaatagtgtgtgtgtgtacatggtgtgtgtgtgtgtgtgcactttagtttc

SEQ ID NO: 665316 - DNA, 120 bp, Artificial Sequence
  ENSG00000184992_45 (sequence is synthesized)
gtgagccttgggaaactgattctacaaatatcttatatagagataaatgtatcaggcatttttttgcaaagcgatatatacattcctcttatttattaaatcactggctttggtgttatg

SEQ ID NO: 665317 - DNA, 120 bp, Artificial Sequence
  ENSG00000184992_46 (sequence is synthesized)
tagagatatttgtagatctcagaacagaattaaaatattgtgaaaattacagcttaataaatgtttattgtaattttgttgtatggacttttaaaatatatctcatcacttctaaccaaa

SEQ ID NO: 665318 - DNA, 120 bp, Artificial Sequence
  ENSG00000184995_0 (sequence is synthesized)
actgataggataagatataaaataatttaagattgctgatatatgttttaaaattaattatttgctcaagcatttgtgacaatttacagttctaattgaggttttaaatttagtagtttg

SEQ ID NO: 665319 - DNA, 120 bp, Artificial Sequence
  ENSG00000184995_1 (sequence is synthesized)
tttagtagtttgtaggtattttaagttttgcccctgaattctttataggtgctgataagcctttggtaagttttactccatgaaagactattactgaaaaaaacgtaatctcaataaaag

SEQ ID NO: 665320 - DNA, 120 bp, Artificial Sequence
  ENSG00000184995_2 (sequence is synthesized)
aactttaataagcttgactaaatatttagaaagcacattgtgttcagtgaaactttgtatataatgaatagaataataaaagattatgttggatgactagtctgtaattgcctcaaggaa

SEQ ID NO: 665321 - DNA, 120 bp, Artificial Sequence
  ENSG00000184995_3 (sequence is synthesized)
agcatacaatgaataagttattttggtacttcctcaaaatagccaacacaatagggaaatggagaaaatgtactctgaacaccatgaaaagggaacctgaaaatctaatgtgtaaacttg

SEQ ID NO: 665322 - DNA, 120 bp, Artificial Sequence
  ENSG00000184995_4 (sequence is synthesized)
gagaaatgacattagaaaacgaaagcaacaaaagagaacactctccaaaataatctgagatgcatgaaaggcaaacattcactagagctggaatttccctaagtctatgcagggataagt

SEQ ID NO: 665323 - DNA, 120 bp, Artificial Sequence
  ENSG00000184995_5 (sequence is synthesized)
agcatatttgaccttcaccatgattatcaagcacttctttggaactgtgttggtgctgctggcctctaccactatcttctctctagatttgaaactgattatcttccagcaaagacaagt

SEQ ID NO: 665324 - DNA, 120 bp, Artificial Sequence
  ENSG00000184995_6 (sequence is synthesized)
aaaccttgtcaattcagcagtgtctaccacacaggaaaaactttctgcttcctcagaagtctttgagtcctcagcagtaccaaaaaggacacactctggccattctccatgagatgcttc

SEQ ID NO: 665325 - DNA, 120 bp, Artificial Sequence
  ENSG00000184995_7 (sequence is synthesized)
agcagatcttcagcctcttcagggcaaatatttctctggatggttgggaggaaaaccacacggagaaattcctcattcaacttcatcaacagctagaatacctagaagcactcatgggac

SEQ ID NO: 665326 - DNA, 120 bp, Artificial Sequence
  ENSG00000184995_8 (sequence is synthesized)
tggaagcagagaagctaagtggtactttgggtagtgataaccttagattacaagttaaaatgtacttccgaaggatccatgattacctggaaaaccaggactacagcacctgtgcctggg

SEQ ID NO: 665327 - DNA, 120 bp, Artificial Sequence
  ENSG00000184995_9 (sequence is synthesized)
ccattgtccaagtagaaatcagccgatgtctgttctttgtgttcagtctcacagaaaaactgagcaaacaaggaagacccttgaacgacatgaagcaagagcttactacagagtttagaa

SEQ ID NO: 665328 - DNA, 120 bp, Artificial Sequence
  ENSG00000184995_10 (sequence is synthesized)
gcccgaggtaggtggagggactagaggacttctccagacatgattcttcatagagtggtaatacaatttatagtacaatcacattgctttgattttgtgtatatatatatttatctgtgt

SEQ ID NO: 665329 - DNA, 120 bp, Artificial Sequence
  ENSG00000184995_11 (sequence is synthesized)
tttaagattgtgcatattgaccacaattgtttttattttgtaatgtggctttatatattctatccattttaaattgtttgtatgtcaaaataaattcattaatatggttgattcttcaaa

SEQ ID NO: 665330 - DNA, 120 bp, Artificial Sequence
  ENSG00000184999_0 (sequence is synthesized)
attgtcaacagctagaagtatctctatgaaataatgatctctatgactacaaaataacatctacctcctgatagcaaaagaactgaggaagctctttccactacggctgtattgcactgg

SEQ ID NO: 665331 - DNA, 120 bp, Artificial Sequence
  ENSG00000184999_1 (sequence is synthesized)
tgagtccgggcccatggatgagaaattgatgcgaggatcaatacaagcttaatttgaattaataaaaggaaatattttctccctttgaacttatctccgtaaagccattgtgcctcctct

SEQ ID NO: 665332 - DNA, 120 bp, Artificial Sequence
  ENSG00000184999_2 (sequence is synthesized)
tgggggtcacgtgttcacaatcaatggcctttgaggagctcttgagtcaagttggaggccttgggagatttcagatgcttcatctggtttttattcttccctctctcatgttattaatcc

SEQ ID NO: 665333 - DNA, 120 bp, Artificial Sequence
  ENSG00000184999_3 (sequence is synthesized)
ctcatatactgctagagaactttgctgcagccattcctggtcatcgttgctgggtccacatgctggacaataatactggatctggtaatgaaactggaatcctcagtgaagatgccctct

SEQ ID NO: 665334 - DNA, 120 bp, Artificial Sequence
  ENSG00000184999_4 (sequence is synthesized)
tgagaatctctatcccactagactcaaatctgaggccagagaagtgtcgtcgctttgtccatccccagtggcagcttcttcacctgaatgggactatccacagcacaagtgaggcagaca

SEQ ID NO: 665335 - DNA, 120 bp, Artificial Sequence
  ENSG00000184999_5 (sequence is synthesized)
cagaaccctgtgtggatggctgggtatatgatcaaagctacttcccttcgaccattgtgactaagtgggacctggtatgtgattatcagtcactgaaatcagtggttcaattcctacttc

SEQ ID NO: 665336 - DNA, 120 bp, Artificial Sequence
  ENSG00000184999_6 (sequence is synthesized)
tgactggaatgctggtgggaggcatcataggtggccatgtctcagacaggtttgggcgaagatttattctcagatggtgtttgctccagcttgccattactgacacctgcgctgccttcg

SEQ ID NO: 665337 - DNA, 120 bp, Artificial Sequence
  ENSG00000184999_7 (sequence is synthesized)
ctcccaccttccctgtttactgtgtactacgcttcttggcaggtttttcttccatgatcattatatcaaataattctttgcccattactgagtggataaggcccaactctaaagccctgg

SEQ ID NO: 665338 - DNA, 120 bp, Artificial Sequence
  ENSG00000184999_8 (sequence is synthesized)
tagtaatattgtcatctggtgcccttagtattggacagataatcctgggaggcttggcttatgtcttccgagactggcaaaccctgcacgtggtggcgtctgtacctttctttgtcttct

SEQ ID NO: 665339 - DNA, 120 bp, Artificial Sequence
  ENSG00000184999_9 (sequence is synthesized)
ttcttctttcaaggtggctggtggaatctgctcggtggttgataatcaccaataaactagatgagggcttaaaggcacttagaaaagttgcacgcacaaatggaataaagaatgctgaag

SEQ ID NO: 665340 - DNA, 120 bp, Artificial Sequence
  ENSG00000184999_10 (sequence is synthesized)
cctggtatttttgagatttgcaaacacaatacctttttatggtaccatggtcaatcttcagcatgtggggagcaacattttcctgttgcaggtactttatggagctgtcgctctcatagt

SEQ ID NO: 665341 - DNA, 120 bp, Artificial Sequence
  ENSG00000184999_11 (sequence is synthesized)
tcgatgtcttgctcttttgacactaaatcatatgggccgtcgaataagccagatattgttcatgttcctggtgggcctttccattttggccaacacgtttgtgcccaaagaaatgcagac

SEQ ID NO: 665342 - DNA, 120 bp, Artificial Sequence
  ENSG00000184999_12 (sequence is synthesized)
cctgcgtgtggctttggcatgtctgggaatcggctgttctgctgctactttttccagtgttgctgttcacttcattgaactcatccccactgttctcagggcaagagcttcaggaataga

SEQ ID NO: 665343 - DNA, 120 bp, Artificial Sequence
  ENSG00000184999_13 (sequence is synthesized)
tttaacggctagtaggattggagcagcactggctcccctcttgatgaccttaacggtattttttaccactttgccatggatcatttatggaatcttccccatcattggtggccttattgt

SEQ ID NO: 665344 - DNA, 120 bp, Artificial Sequence
  ENSG00000184999_14 (sequence is synthesized)
cttcctcctaccagaaaccaagaatctgcctttgcctgacaccatcaaggatgtggaaaatcaaaaaaaaaatctcaaggaaaaggcataaaaatgattgctacacaaaagtgaccaaat

SEQ ID NO: 665345 - DNA, 120 bp, Artificial Sequence
  ENSG00000184999_15 (sequence is synthesized)
tttaagaagccttcatgagctgattggtggggaaattcagaaaaaaaaatacaggaaaagaacacaccagaagggtttttttccctacaaccagcaagaacatatattagatacatgaat

SEQ ID NO: 665346 - DNA, 120 bp, Artificial Sequence
  ENSG00000184999_16 (sequence is synthesized)
ctcaattataattatggcattaatttgcattttatttcaaaattaacttgtggggacatgtaatctcttgagcaatctgatatttttgggaagtcctttaaaaagttacaaatttatcaa

SEQ ID NO: 665347 - DNA, 120 bp, Artificial Sequence
  ENSG00000184999_17 (sequence is synthesized)
taaattactagtagataagatgattcagaaacaaaagaaaatcacagaattaggatgtggctggctggtgtatgaagcaccatgtgatgaattcataaagttgcaaaagtcaaaacaata

SEQ ID NO: 665348 - DNA, 120 bp, Artificial Sequence
  ENSG00000184999_18 (sequence is synthesized)
ctgtacatgcaaccagaaatcaaaataaatccagaaatagagacctatataaatgcatttaatacatgatacttttgacataataagccattggaaaacggaaagattagatactaaata

SEQ ID NO: 665349 - DNA, 120 bp, Artificial Sequence
  ENSG00000184999_19 (sequence is synthesized)
acattgactatctctttgtaaatacagtcactaaatgatgttagttacttttccatggtggaattttaattactttttctttgtaatttttctctctgtatattttaaacaaatagctgg

SEQ ID NO: 665350 - DNA, 120 bp, Artificial Sequence
  ENSG00000184999_20 (sequence is synthesized)
tatagtttacaatattataaagatattgttcaaattgaagggcaaaggccaggttcagcaattttcaaactgtatgtacatttaataaaataactataaattaaaaaattatatttcaaa

SEQ ID NO: 665351 - DNA, 120 bp, Artificial Sequence
  ENSG00000184999_21 (sequence is synthesized)
ggatctgtatcctggtatttttgagaaaaaaaaatctcaaggaaaaggcataaaaatgattgctacacaaaagtgaccaaattttaagaagccttcatgagctgattggtggggaaattc

SEQ ID NO: 665352 - DNA, 120 bp, Artificial Sequence
  ENSG00000184999_22 (sequence is synthesized)
ccagcaaaaagggttgtctcttcattctgttgatgtgcagaagatttttagcttgaggtagtcgatagagacagctggcaagatggccgaataggaagagctctggtctgcagctcccag

SEQ ID NO: 665353 - DNA, 120 bp, Artificial Sequence
  ENSG00000184999_23 (sequence is synthesized)
cgagagcaatgcggaagccctgtggccatgggagacctggcatccaaggcataccatgagggagcttcacctggatggagactggctcttcccccatcctggcagcctgcctggcagtgc

SEQ ID NO: 665354 - DNA, 120 bp, Artificial Sequence
  ENSG00000184999_24 (sequence is synthesized)
aatggagccaggggtggggctgcagtatgataccagcacttcaggaaccatgggtttcaggagagataccagaagacgtgatgctggtggatggcaatgggcacctcaagtccctcgtca

SEQ ID NO: 665355 - DNA, 120 bp, Artificial Sequence
  ENSG00000184999_25 (sequence is synthesized)
tgtatcctggtatttttgaggtgactggaagcacctgctcaatgtctgctcatcaacaacaaaccagaggagggcttaaaagaactcagaaaagctgcatgctggaatagaatgaagaat

SEQ ID NO: 665356 - DNA, 120 bp, Artificial Sequence
  ENSG00000184999_26 (sequence is synthesized)
gctggagacaccctaaccatggagagaagtaaaaaaagcacctcacctttgagtcgccaaaattatgcttcctggaatgaccgcataccatgtagcaggtttattttagtttgtttacag

SEQ ID NO: 665357 - DNA, 120 bp, Artificial Sequence
  ENSG00000184999_27 (sequence is synthesized)
tttattgtcaacagctagaagtatctctatgaaataatgatctctatgactacaaaataacatctacctcctgatagcaaaagaactgaggaagctctttccactacggctgtattgcac

SEQ ID NO: 665358 - DNA, 120 bp, Artificial Sequence
  ENSG00000185000_0 (sequence is synthesized)
agttagcggctccggagcaacgcagccgttgtccttgaggccgacgggcccgacgcgggcgggttgaacgcgctggtgaggcggtcacccgggctacggcggccggcagggggcagtggc

SEQ ID NO: 665359 - DNA, 80 bp, Artificial Sequence
  ENSG00000185000_1 (sequence is synthesized)
ggccgttgtctagggcccggaggtggggccgcgcgcctcgggcgctacgaacccggcgggcccacgcttggctgcggccg

SEQ ID NO: 665360 - DNA, 80 bp, Artificial Sequence
  ENSG00000185000_2 (sequence is synthesized)
cgccggaggacagggtcgcggccctcgagccacggcggcggcgggcctgcggcggcggaagaggaggtgcgggacgccgc

SEQ ID NO: 665361 - DNA, 120 bp, Artificial Sequence
  ENSG00000185000_3 (sequence is synthesized)
ccggcccccaacaaggacggagacgccggcgtgggcagcggccactgggagctgaggtgccatcgcctgcaggattctttattcagctctgacagtggcttcagcaactaccgtggcatc

SEQ ID NO: 665362 - DNA, 120 bp, Artificial Sequence
  ENSG00000185000_4 (sequence is synthesized)
ctgaactggtgtgtggtgatgctgatcttgagcaatgcccggttatttctggagaacctcatcaagtatggcatcctggtggaccccatccaggtggtttctctgttcctgaaggatccc

SEQ ID NO: 665363 - DNA, 120 bp, Artificial Sequence
  ENSG00000185000_5 (sequence is synthesized)
tatagctggcccgccccatgcctggttattgcggccaatgtctttgctgtggctgcattccaggttgagaagcgcctggcggtgggtgccctgacggagcaggcgggactgctgctgcac

SEQ ID NO: 665364 - DNA, 120 bp, Artificial Sequence
  ENSG00000185000_6 (sequence is synthesized)
gtggccaacctggccaccattctgtgtttcccagcggctgtggtcttactggttgagtctatcactccagtgggctccctgctggcgctgatggcgcacaccatcctcttcctcaagctc

SEQ ID NO: 665365 - DNA, 120 bp, Artificial Sequence
  ENSG00000185000_7 (sequence is synthesized)
ttctcctaccgcgacgtcaactcatggtgccgcagggccagggccaaggctgcctctgcagggaagaaggccagcagtgctgctgccccgcacaccgtgagctacccggacaatctgacc

SEQ ID NO: 665366 - DNA, 120 bp, Artificial Sequence
  ENSG00000185000_8 (sequence is synthesized)
taccgcgatctctactacttcctcttcgcccccaccttgtgctacgagctcaactttccccgctctccccgcatccggaagcgctttctgctgcgacggatccttgagatgctgttcttc

SEQ ID NO: 665367 - DNA, 120 bp, Artificial Sequence
  ENSG00000185000_9 (sequence is synthesized)
acccagctccaggtggggctgatccagcagtggatggtccccaccatccagaactccatgaagcccttcaaggacatggactactcacgcatcatcgagcgcctcctgaagctggcggtc

SEQ ID NO: 665368 - DNA, 120 bp, Artificial Sequence
  ENSG00000185000_10 (sequence is synthesized)
cccaatcacctcatctggctcatcttcttctactggctcttccactcctgcctgaatgccgtggctgagctcatgcagtttggagaccgggagttctaccgggactggtggaactccgag

SEQ ID NO: 665369 - DNA, 120 bp, Artificial Sequence
  ENSG00000185000_11 (sequence is synthesized)
tctgtcacctacttctggcagaactggaacatccctgtgcacaagtggtgcatcagacacttctacaagcccatgcttcgacggggcagcagcaagtggatggccaggacaggggtgttc

SEQ ID NO: 665370 - DNA, 120 bp, Artificial Sequence
  ENSG00000185000_12 (sequence is synthesized)
ctggcctcggccttcttccacgagtacctggtgagcgtccctctgcgaatgttccgcctctgggcgttcacgggcatgatggctcagatcccactggcctggttcgtgggccgctttttc

SEQ ID NO: 665371 - DNA, 120 bp, Artificial Sequence
  ENSG00000185000_13 (sequence is synthesized)
cagggcaactatggcaacgcagctgtgtggctgtcgctcatcatcggacagccaatagccgtcctcatgtacgtccacgactactacgtgctcaactatgaggccccagcggcagaggcc

SEQ ID NO: 665372 - DNA, 120 bp, Artificial Sequence
  ENSG00000185000_14 (sequence is synthesized)
tgagctgcacctgagggcctggcttctcactgccacctcacacccgctgccagagcccacctctcctcctaggcctcgagtgctggggatgggcctggctgcacagcatcctcctctggt

SEQ ID NO: 665373 - DNA, 120 bp, Artificial Sequence
  ENSG00000185000_15 (sequence is synthesized)
ggcgacagcaggccagacacagtctgatgccagctgggagtcttgctgaccctgccccgggtccgagggtgtcaataaagtgctgtccagtgacctcttcagcctgccaggggcctgggg

SEQ ID NO: 665374 - DNA, 120 bp, Artificial Sequence
  ENSG00000185000_16 (sequence is synthesized)
cctggtggggggtatggccacacccacaagggcgagtgccagagctgtgtggacagctgtcccaggacctgccggggagcagcagctccactgcagcagggcgggcatggccggtagggg

SEQ ID NO: 665375 - DNA, 120 bp, Artificial Sequence
  ENSG00000185000_17 (sequence is synthesized)
gagtgcaaggccaggcagacgcccccattccccacactcccctacctagaaaagctcagctcaggcgtcctctcctggtgctactcctgctgggtgtgcgggaatcggcactctggccct

SEQ ID NO: 665376 - DNA, 120 bp, Artificial Sequence
  ENSG00000185000_18 (sequence is synthesized)
cagtgcaggatggtcaacttgcacccaccgtgctcagcttcagcttgggaagaggtcggccctgggtttgcgggaagtgggctccagccaggatggcccagggatgggcagtccacaggg

SEQ ID NO: 665377 - DNA, 120 bp, Artificial Sequence
  ENSG00000185000_19 (sequence is synthesized)
cctttctggtgtgggtctggtgagccgaggggctacggtacacaatggctatgtccatggctattcgccttggggcagggctcggtttggcagcctctttccttcacttggaacctgggc

SEQ ID NO: 665378 - DNA, 120 bp, Artificial Sequence
  ENSG00000185000_20 (sequence is synthesized)
agccaggtgggctggtggctctcagctgccctccacgaggttggggcacccctgatccccaggcctgccttgccctctgctcttctggcaccaggctgggcagtgcagacagcgcagccc

SEQ ID NO: 665379 - DNA, 120 bp, Artificial Sequence
  ENSG00000185000_21 (sequence is synthesized)
tgcagccttcaggacaccttgttcccaggccctgcaatccaccaagctggatagatggggccccccttgatggtagcgggaggtcaggggtaaccccagggccctgctgctgccttacct

SEQ ID NO: 665380 - DNA, 120 bp, Artificial Sequence
  ENSG00000185000_22 (sequence is synthesized)
tgctggggtgactgcttgattaaagaccccaagactggaccaggccctggtgtccccagacctgcagctatggcccaacaaggcaggtgtttgaggaggccctgcacagggtcccaggac

SEQ ID NO: 665381 - DNA, 120 bp, Artificial Sequence
  ENSG00000185000_23 (sequence is synthesized)
tgcaccaggggcctcatcagcaacctgctgaactggtggtgtgaggggagggtgggctcccttggtggtatcctccctctaccccagtgggggctggtgggccctgagatggaggcatct

SEQ ID NO: 665382 - DNA, 120 bp, Artificial Sequence
  ENSG00000185000_24 (sequence is synthesized)
ccttgggccctgctgaggatggcagtagtgggtgagctcctggtggggggatgggtgtggggccgactcctccatcccacatgggctcctgtgcctctccctatcagttggccagtggag

SEQ ID NO: 665383 - DNA, 120 bp, Artificial Sequence
  ENSG00000185000_25 (sequence is synthesized)
ctcgagaacaaactgttgctgccagataaagcagcaaagcctgctccactgcccagcgcaggcccccttcccttcctccaccaggctgagtggagaaccctaaagctacgggacaggctc

SEQ ID NO: 665384 - DNA, 120 bp, Artificial Sequence
  ENSG00000185000_26 (sequence is synthesized)
ccgttccccgtgcctacacagggtgctggctctggcagaaagacagtgtgcccgccccgcatcacctgtccgagtgcgaacaccttgggaagggggttcctggtggtcctgtgacaacca

SEQ ID NO: 665385 - DNA, 120 bp, Artificial Sequence
  ENSG00000185000_27 (sequence is synthesized)
gagacccccagggccaaggtgaggcgcccacccctggtccctcaataaagaactgcaagcacatgctggtcctggggagtcgggcaggcacggagctagctgcaagcatccgtcttcccc

SEQ ID NO: 665386 - DNA, 120 bp, Artificial Sequence
  ENSG00000185000_28 (sequence is synthesized)
caggaggccactgcagcccggcccttctgtgccctgggcccctcctcattgcagcaccacccaccgcaccaccctgggacagaggaaacacatggaggccatagcatagagcctgtctgt

SEQ ID NO: 665387 - DNA, 120 bp, Artificial Sequence
  ENSG00000185000_29 (sequence is synthesized)
ttatagatctctgcctgtcttgtccgtccatccactgtgtgtatatatctgtgtatctctgtggagcggggaacgggacagttgtgtaaaaatccaaaatacaattctgactatgaacaa

SEQ ID NO: 665388 - DNA, 120 bp, Artificial Sequence
  ENSG00000185000_30 (sequence is synthesized)
gggagtgaccaggagcatggctagctgaagggcttgtttctgcaggacatggactactcacgcatcatcgagcgcctcctgaagctggcggtgagtgcggacaggtggcgcatgcacagg

SEQ ID NO: 665389 - DNA, 120 bp, Artificial Sequence
  ENSG00000185000_31 (sequence is synthesized)
aggtaggtggggtgtgtgtgtgtgtgatgtggaacatggctgtgaacctgaaccgctttccatgccccctcctctgcagacacttctacaagcccatgcttcgacggggcagcagcaagt

SEQ ID NO: 665390 - DNA, 120 bp, Artificial Sequence
  ENSG00000185002_0 (sequence is synthesized)
gcggcgcgcgcggaggtgtccggcggccaggaggatggccaaggtcccggagctggaagacaccttcctgcaggcgcagcctgcgccccaactgtccccggggatccaggaagactgctg

SEQ ID NO: 665391 - DNA, 120 bp, Artificial Sequence
  ENSG00000185002_1 (sequence is synthesized)
tgtgcagctcctgggcaagggcttgctagtctatccggaagaaacagtgtacctggcggccgaagggcagcccgggggcgagcagggcggcggggagaaaggcgaagacccggagctgcc

SEQ ID NO: 665392 - DNA, 120 bp, Artificial Sequence
  ENSG00000185002_2 (sequence is synthesized)
gggggcagtgaaatcagaaatgcacttaaacaatggtaacttttcctctgaagaagaggacgccgacaaccacgacagcaaaaccaaagcagcggatcaatacctgtctcagaagaaaac

SEQ ID NO: 665393 - DNA, 120 bp, Artificial Sequence
  ENSG00000185002_3 (sequence is synthesized)
catcacgcagattgtgaaggataaaaagaagcagacacagctcacgctgcagtggcttgaagagaattacattgtatgtgaaggagtttgcttaccacggtgcattctttatgcacacta

SEQ ID NO: 665394 - DNA, 120 bp, Artificial Sequence
  ENSG00000185002_4 (sequence is synthesized)
cttagatttctgtaggaaagagaaattagagccagcctgtgcggccacctttggaaagacaattcgccagaagtttcccctcctaacaacaaggcggcttggaacaagaggccattcaaa

SEQ ID NO: 665395 - DNA, 120 bp, Artificial Sequence
  ENSG00000185002_5 (sequence is synthesized)
gtatcattactatgggattggcatcaaagagagcagtgcatattaccactccgtttattctggaaagggcttgacaaggttttctggaagcaagctaaagaatgagggtggcttcactcg

SEQ ID NO: 665396 - DNA, 120 bp, Artificial Sequence
  ENSG00000185002_6 (sequence is synthesized)
taaatattcgcttagctcaaaaactggaacacttcttccagaattccccagcgctcaacaccttgtataccaaggatgcatttctaaggacaaggttgatacgctcataatgatgtacaa

SEQ ID NO: 665397 - DNA, 120 bp, Artificial Sequence
  ENSG00000185002_7 (sequence is synthesized)
aactcactgccagtgtatcctggacaatgcaattaatggaaactttgaagagatccagcattttttattacacttttggcaaggaatgcctgaccatctccttcccctgctcgaaaatcc

SEQ ID NO: 665398 - DNA, 120 bp, Artificial Sequence
  ENSG00000185002_8 (sequence is synthesized)
tgttatcattgatattttctgtgtttgtgactcaattctttataaggttcttacagatgtactcattcctgcaacaatgcaagaaatgcctgaaagcttattagcagacataagaaattt

SEQ ID NO: 665399 - DNA, 120 bp, Artificial Sequence
  ENSG00000185002_9 (sequence is synthesized)
tgctaaaaattgggaacagtgggttgtttcatccttggaaaacttgccagaagctctaactgacaagaaaatacctattgtgcgaagatttgtatcttctctgaaacgacaaacatcttt

SEQ ID NO: 665400 - DNA, 120 bp, Artificial Sequence
  ENSG00000185002_10 (sequence is synthesized)
cttacatcttgcccagattgccagaccagctctctttgaccagcatgtcgttaattctatggtgtctgatattgaaagggttgatttgaacagcattggctctcaagcccttcttaccat

SEQ ID NO: 665401 - DNA, 120 bp, Artificial Sequence
  ENSG00000185002_11 (sequence is synthesized)
ttcaggcagcacagacactgaatctggtatctacactgaacatgactctatcactgtgttccaagaactgaaggatctccttaagaagaatgccactgtggaggcttttattgaatggtt

SEQ ID NO: 665402 - DNA, 120 bp, Artificial Sequence
  ENSG00000185002_12 (sequence is synthesized)
ggatactgtggtagaacagagagttattaagaccagcaaacaaaatggaaggtcattaaagaagagagctcaagactttctgttaaagtggagtttttttggtgctcgagtaatgcataa

SEQ ID NO: 665403 - DNA, 120 bp, Artificial Sequence
  ENSG00000185002_13 (sequence is synthesized)
tctcaccttgaacaatgcatccagttttggttcttttcatttgattcgaatgcttctcgatgaatacattctcctggccatggagacccagtttaataatgacaaagagcaggagttaca

SEQ ID NO: 665404 - DNA, 120 bp, Artificial Sequence
  ENSG00000185002_14 (sequence is synthesized)
ctgtgaagaatgaaagccacgtggagacaacctatctccctctgccatccagtcaacctggaggcctaggccctgctctgcaccagttccctgctgggaacacagacaacatgccgctca

SEQ ID NO: 665405 - DNA, 120 bp, Artificial Sequence
  ENSG00000185002_15 (sequence is synthesized)
caggtcaaatggagctttcacagattgctggtcatctgatgacaccacccatttctccagccatggcaagccgaggaagtgtcattaaccaaggaccaatggcagggaggcccccaagtg

SEQ ID NO: 665406 - DNA, 120 bp, Artificial Sequence
  ENSG00000185002_16 (sequence is synthesized)
tgggcccagtactgtcagctccatcacactgctccacatacccagagcccatttatcccactctccctcaagccaatcatgacttttatagcaccagctctaactaccagactgtgttta

SEQ ID NO: 665407 - DNA, 120 bp, Artificial Sequence
  ENSG00000185002_17 (sequence is synthesized)
gggcacagccccactccacatcaggactctatcctcatcacaccgagcatggtcgatgcatggcttggactgaacagcagctttcaagagacttcttcagtggcagctgtgcggggtctc

SEQ ID NO: 665408 - DNA, 120 bp, Artificial Sequence
  ENSG00000185002_18 (sequence is synthesized)
catataactcccggccaccgtctagctatggcccatccctgcaagcccaggattcacacaatatgcagtttttaaatacaggaagcttcaatttcttgagcaacacaggagctgccagct

SEQ ID NO: 665409 - DNA, 120 bp, Artificial Sequence
  ENSG00000185002_19 (sequence is synthesized)
gccaaggagcaacactgcctcctaattcaccaaatggatactatggaagcaacataaactacccagagtctcacaggctcggatcaatggtgaatcagcacgtttctgtcatcagcagca

SEQ ID NO: 665410 - DNA, 120 bp, Artificial Sequence
  ENSG00000185002_20 (sequence is synthesized)
ttcgttcactgcccccctacagtgacatccacgatccacttaacattttagatgacagtggtagaaaacagaccagctcgttttacacagacacatcatctccagttgcatgtcgaactc

SEQ ID NO: 665411 - DNA, 120 bp, Artificial Sequence
  ENSG00000185002_21 (sequence is synthesized)
cagtcctagcttccagtttgcaaaccccaattccttcttcctcatcccaatgtatgtatggaacttccaaccagtatccagctcaagaaaccctggactcccatggaacaagcagtagag

SEQ ID NO: 665412 - DNA, 120 bp, Artificial Sequence
  ENSG00000185002_22 (sequence is synthesized)
aaatggtgtcctctttaccacctatcaacactgtgttcatgggaacagcagctggaggcacttaaaccaccaatgtgggagggggtgctaaaactttaaaaaaaatctctactgtgcaaa

SEQ ID NO: 665413 - DNA, 120 bp, Artificial Sequence
  ENSG00000185002_23 (sequence is synthesized)
tatcattattcactcagacttccataagagtaaataaaaatgaatatgcagtggctgacattgttttaaagtcactggtactatggacaactccatagtgaatggagatacttgcagagc

SEQ ID NO: 665414 - DNA, 120 bp, Artificial Sequence
  ENSG00000185002_24 (sequence is synthesized)
ttgtcatgcacactaagagtttaaaatgtgagctcattattaatcatagtttcaaaattatcaaataaaaccagtgaagatctgaagatgcaaacatttcaactatgaagatttacattt

SEQ ID NO: 665415 - DNA, 120 bp, Artificial Sequence
  ENSG00000185002_25 (sequence is synthesized)
cactttctaatttattaaacatctgtgtgcctttttatctttggtttcttttaaaaagtatatttaatgcctttacaatacctttaatttattaggatctcagaatcattgtttactatc

SEQ ID NO: 665416 - DNA, 120 bp, Artificial Sequence
  ENSG00000185002_26 (sequence is synthesized)
ccttatttgacaaaaagtcaaatgtgtatgttctacctccaacggaaatgtttacaaggtcaagacttaattcaattcagacaagaccaaagttgcttgacttcaattcctgtgcattag

SEQ ID NO: 665417 - DNA, 120 bp, Artificial Sequence
  ENSG00000185002_27 (sequence is synthesized)
tgtgatgatttctgtcacatagcagcattccgattctatgtaactgaatggagatgataagtgctttcccctctttatttaaaaaagattaaaaggaataaaagaaataatgtatggaaa

SEQ ID NO: 665418 - DNA, 120 bp, Artificial Sequence
  ENSG00000185002_28 (sequence is synthesized)
aacatggggtgacttcgggcaatttatttgaatccaagagccatagatgtgcccaacagcaaggcattaacaatttgaatttttttctgctgtgctgatatgccatttgatatttgtgac

SEQ ID NO: 665419 - DNA, 120 bp, Artificial Sequence
  ENSG00000185002_29 (sequence is synthesized)
tgccatttgatatttgtgacgtgacttttttgatatgtttatatcatagagaaaaattaattttccatatttaaactacatatggtaaaaatatagcaaaatgtagtttgtatatcttgt

SEQ ID NO: 665420 - DNA, 120 bp, Artificial Sequence
  ENSG00000185002_30 (sequence is synthesized)
tcctgtcaatttttaaacatgttacatcatcacttcttaaactgtatctgaatatggagctatgagaaaatggtatttatgagcctgggttttggagtcagaccataagcaggattaaat

SEQ ID NO: 665421 - DNA, 120 bp, Artificial Sequence
  ENSG00000185002_31 (sequence is synthesized)
cctaacaatgattgtctctggctatgggccaatctgctcattgaagaaggggaagaatattctcttcgaagggttgtataggtactttggtgagatgatgtatataaaaacaaattgcct

SEQ ID NO: 665422 - DNA, 120 bp, Artificial Sequence
  ENSG00000185008_0 (sequence is synthesized)
ggcgaggggcctcagcgcgcctggcgctggactgagcgctccctttctccgccgcgcccgggctgggctctcacgcccgtctctgctcgcgcccgcagccgcctggtgcactatcctcag

SEQ ID NO: 665423 - DNA, 120 bp, Artificial Sequence
  ENSG00000185008_1 (sequence is synthesized)
aggcggcaccgcgggggtgtctgcagcctcggcctccgcccggcccctccctccctccctccctccctcgctccttccctgcctccctcaccacgtaggagttcggattctccacccgaa

SEQ ID NO: 665424 - DNA, 120 bp, Artificial Sequence
  ENSG00000185008_2 (sequence is synthesized)
tcgtcctgatttcccttctcctctcttttggaaaccggagaggtggagggagggcaacaccgctgcaaaggagaggcccgccaagtctgcccgcctgcaaagtgttgctttgacacattc

SEQ ID NO: 665425 - DNA, 120 bp, Artificial Sequence
  ENSG00000185008_3 (sequence is synthesized)
ttattatggaagttaagtaaaaatatagacatattaaaaaataactccggacgtggagctgctacggagaaggaaaccgggggaaagaaaaccagtaggcaggccaatggtttttcggca

SEQ ID NO: 665426 - DNA, 120 bp, Artificial Sequence
  ENSG00000185008_4 (sequence is synthesized)
gcgcgctggcaagtttgtggaacactttctaggaattaggtcttttcctcccccttcatcatcttgacttctgaaggaagaacttggctttggattgcagtggagcctaaggagagaggg

SEQ ID NO: 665427 - DNA, 120 bp, Artificial Sequence
  ENSG00000185008_5 (sequence is synthesized)
ttagacacactcgaataatccctctggctgggctgaatttgtgggaatttaggaagccagagtgctggaaatacagcagcctttgaagtaccctctgttaatttggatggatctcagtgt

SEQ ID NO: 665428 - DNA, 120 bp, Artificial Sequence
  ENSG00000185008_6 (sequence is synthesized)
gccccgttcgagacctctccaccaaccccttctgatcttgcgatttgctcttcttgactttaattagtatctaggaaagtctaaactttggacctacctctttttttgatactcattttt

SEQ ID NO: 665429 - DNA, 120 bp, Artificial Sequence
  ENSG00000185008_7 (sequence is synthesized)
gtacttttgctctctgggattggtttcttaaagaatctggatcctttttaatatgtcaaaatgagtctgctgatgtttacacaactactgctctgtggatttttatatgttcgggttgat

SEQ ID NO: 665430 - DNA, 120 bp, Artificial Sequence
  ENSG00000185008_8 (sequence is synthesized)
ggatcgcgtcttcgccaggaggactttcccccgcggattgtggagcatccttccgatgtcatcgtctctaagggcgagcccacgactctgaactgcaaggcggagggccggccaacgccc

SEQ ID NO: 665431 - DNA, 120 bp, Artificial Sequence
  ENSG00000185008_9 (sequence is synthesized)
accattgagtggtacaaagatggggagcgagtggagactgacaaggacgatccccggtcccacaggatgcttctgcccagcggatccttattcttcttgcgcatcgtgcacgggcgcagg

SEQ ID NO: 665432 - DNA, 120 bp, Artificial Sequence
  ENSG00000185008_10 (sequence is synthesized)
agtaaacctgatgaaggaagctacgtttgtgttgcgaggaactatcttggtgaagcagtgagtcgaaatgcgtctctggaagtggcattgttacgagatgacttccgacaaaaccccaca

SEQ ID NO: 665433 - DNA, 120 bp, Artificial Sequence
  ENSG00000185008_11 (sequence is synthesized)
gatgttgtagtggcagctggagagcctgcaatcctggagtgccagcctccccggggacacccagaacccaccatctactggaaaaaagacaaagttcgaattgatgacaaggaagaaaga

SEQ ID NO: 665434 - DNA, 120 bp, Artificial Sequence
  ENSG00000185008_12 (sequence is synthesized)
ataagtatccgtggtggaaaactgatgatctccaataccaggaaaagtgatgcagggatgtatacttgtgttggtaccaatatggtgggagaaagggacagtgacccagcagagctgact

SEQ ID NO: 665435 - DNA, 120 bp, Artificial Sequence
  ENSG00000185008_13 (sequence is synthesized)
gtctttgaacgacccacatttctcaggaggccaattaaccaggtggtactggaggaagaagctgtagaatttcgttgtcaagtccaaggagatcctcaaccaactgtgaggtggaaaaag

SEQ ID NO: 665436 - DNA, 120 bp, Artificial Sequence
  ENSG00000185008_14 (sequence is synthesized)
gatgatgcagacttgccaagaggaaggtatgacatcaaagacgattacacactaagaattaaaaagaccatgagtacagatgaaggcacctatatgtgtattgctgagaatcgggttgga

SEQ ID NO: 665437 - DNA, 120 bp, Artificial Sequence
  ENSG00000185008_15 (sequence is synthesized)
aaaatggaagcctctgctacactcaccgtccgagctcccccacagtttgtggttcggccaagagatcagattgttgctcaaggtcgaacagtgacatttccctgtgaaactaaaggaaac

SEQ ID NO: 665438 - DNA, 120 bp, Artificial Sequence
  ENSG00000185008_16 (sequence is synthesized)
ccacagccagctgttttttggcagaaagaaggcagccagaacctacttttcccaaaccaaccccagcagcccaacagtagatgctcagtgtcaccaactggagacctcacaatcaccaac

SEQ ID NO: 665439 - DNA, 120 bp, Artificial Sequence
  ENSG00000185008_17 (sequence is synthesized)
attcaacgttccgacgcgggttactacatctgccaggctttaactgtggcaggaagcattttagcaaaagctcaactggaggttactgatgttttgacagatagacctccacctataatt

SEQ ID NO: 665440 - DNA, 120 bp, Artificial Sequence
  ENSG00000185008_18 (sequence is synthesized)
ctacaaggcccagccaaccaaacgctggcagtggatggtacagcgttactgaaatgtaaagccactggtgatcctcttcctgtaattagctggttaaaggagggatttacttttccgggt

SEQ ID NO: 665441 - DNA, 120 bp, Artificial Sequence
  ENSG00000185008_19 (sequence is synthesized)
agagatccaagagcaacaattcaagagcaaggcacactgcagattaagaatttacggatttctgatactggcacttatacttgtgtggctacaagttcaagtggagagacttcctggagt

SEQ ID NO: 665442 - DNA, 120 bp, Artificial Sequence
  ENSG00000185008_20 (sequence is synthesized)
gcagtgctggatgtgacagagtctggagcaacaatcagtaaaaactatgatttaagtgacctgccagggccaccatccaaaccgcaggtcactgatgttactaagaacagtgtcaccttg

SEQ ID NO: 665443 - DNA, 120 bp, Artificial Sequence
  ENSG00000185008_21 (sequence is synthesized)
tcctggcagccaggtacccctggaacccttccagcaagtgcatatatcattgaggctttcagccaatcagtgagcaacagctggcagaccgtggcaaaccatgtaaagaccaccctctat

SEQ ID NO: 665444 - DNA, 120 bp, Artificial Sequence
  ENSG00000185008_22 (sequence is synthesized)
actgtaagaggactgcggcccaatacaatctacttattcatggtcagagcgatcaacccccaaggtctcagtgacccaagtcccatgtcagatcctgtgcgcacacaagatatcagccca

SEQ ID NO: 665445 - DNA, 120 bp, Artificial Sequence
  ENSG00000185008_23 (sequence is synthesized)
ccagcacaaggagtggaccacaggcaagtgcagaaagagctaggagatgtccttgtccgtcttcataatccagttgtgctgactcccaccacggttcaggtcacatggacggttgatcgc

SEQ ID NO: 665446 - DNA, 120 bp, Artificial Sequence
  ENSG00000185008_24 (sequence is synthesized)
caaccccagtttatccaaggctaccgagtgatgtatcgtcagacttcaggtctgcaggcgacatcttcgtggcagaatttagatgccaaagtcccgactgaacgaagtgctgtcttagtc

SEQ ID NO: 665447 - DNA, 120 bp, Artificial Sequence
  ENSG00000185008_25 (sequence is synthesized)
aacctgaaaaagggggtgacttatgaaattaaagtacggccatattttaatgagttccaaggaatggatagtgaatctaaaacggttcgtactactgaagaagccccaagtgccccacca

SEQ ID NO: 665448 - DNA, 120 bp, Artificial Sequence
  ENSG00000185008_26 (sequence is synthesized)
cagtctgtcactgtactgacagttggaagctacaatagcacaagtattagtgtttcctgggatcctcctcctccagatcaccagaatggaattatccaagaatacaagatctggtgtcta

SEQ ID NO: 665449 - DNA, 120 bp, Artificial Sequence
  ENSG00000185008_27 (sequence is synthesized)
ggaaatgaaacgcgattccatatcaacaaaactgtggatgcagccattcggtccgtaataattggtggattattcccaggtattcaataccgggtagaggttgcagctagtaccagtgca

SEQ ID NO: 665450 - DNA, 120 bp, Artificial Sequence
  ENSG00000185008_28 (sequence is synthesized)
ggggttggagtaaagagtgagccacagccaataataatcgggagacgcaatgaagttgtcattactgaaaacaataacagcataactgagcaaatcactgatgtggtgaagcaaccagcc

SEQ ID NO: 665451 - DNA, 120 bp, Artificial Sequence
  ENSG00000185008_29 (sequence is synthesized)
tttatagctggtattggtggtgcctgctgggtaattctgatgggttttagcatatggttgtattggcgaagaaagaagaggaagggactcagtaattatgctgttacgtttcaaagagga

SEQ ID NO: 665452 - DNA, 120 bp, Artificial Sequence
  ENSG00000185008_30 (sequence is synthesized)
gatggaggactaatgagcaatggaagccgtccaggtcttctcaatgctggtgatcccagctatccatggcttgctgattcttggccagccacgagcttgccagtaaataatagcaacagt

SEQ ID NO: 665453 - DNA, 120 bp, Artificial Sequence
  ENSG00000185008_31 (sequence is synthesized)
ggcccaaatgagattggaaattttggccgtggagatgtgctgccaccagttccaggccaaggggataaaacagcaacgatgctctcagatggagccatttatagtagcattgacttcact

SEQ ID NO: 665454 - DNA, 120 bp, Artificial Sequence
  ENSG00000185008_32 (sequence is synthesized)
accaaaaccagttacaacagttccagccaaataacacaggctaccccatatgccacgacacagatcttgcattccaacagcatacatgaattggctgtcgatctgcctgatccacaatgg

SEQ ID NO: 665455 - DNA, 120 bp, Artificial Sequence
  ENSG00000185008_33 (sequence is synthesized)
aaaagctcaattcagcaaaaaacagatctgatgggatttggttattctctacctgatcagaacaaaggtaacaatggtgggaaaggtggaaaaaagaagaaaaataaaaactcttctaaa

SEQ ID NO: 665456 - DNA, 120 bp, Artificial Sequence
  ENSG00000185008_34 (sequence is synthesized)
ccacagaaaaacaatggatccacttgggccaatgtccctctacctccccccccagtccagccccttcctggcacggagctggaacactatgcagtggaacaacaagaaaatggctatgac

SEQ ID NO: 665457 - DNA, 120 bp, Artificial Sequence
  ENSG00000185008_35 (sequence is synthesized)
agtgatagctggtgcccaccattgccagtacaaacttacttacaccaaggtctggaagatgaactggaagaagatgatgatagggtcccaacacctcctgttcgaggcgtggcttcttct

SEQ ID NO: 665458 - DNA, 120 bp, Artificial Sequence
  ENSG00000185008_36 (sequence is synthesized)
cctgctatctcctttggacagcagtccactgcaactcttactccatccccacgggaagagatgcaacccatgctgcaggctcacctggatgagttgacaagagcctatcagtttgatata

SEQ ID NO: 665459 - DNA, 120 bp, Artificial Sequence
  ENSG00000185008_37 (sequence is synthesized)
tatgtgtctggagccttgatttctgatttggaaacggatgttgcagatgatgatgccgacgacgaagaggaagctttagaaatccccaggcccctgagagcactggaccagactcctgga

SEQ ID NO: 665460 - DNA, 120 bp, Artificial Sequence
  ENSG00000185008_38 (sequence is synthesized)
tccagcatggacaatctagacagctctgtgacaggaaaagcctttacctcctctcaaagacctcgacctaccagcccattttctactgacagtaacaccagtgcagccctgagtcaaagt

SEQ ID NO: 665461 - DNA, 120 bp, Artificial Sequence
  ENSG00000185008_39 (sequence is synthesized)
cagaggcctcggcccactaaaaaacacaagggagggcggatggaccaacaaccagcattgcctcatcgaagggaaggaatgacagatgaggaggccttggtgccctatagcaagcccagt

SEQ ID NO: 665462 - DNA, 120 bp, Artificial Sequence
  ENSG00000185008_40 (sequence is synthesized)
ttcccatctccaggtggccacagctcatcaggaacagcttcttctaagggatccactggacctaggaaaaccgaggtgttgagagcaggccaccagcgcaatgccagcgaccttcttgac

SEQ ID NO: 665463 - DNA, 120 bp, Artificial Sequence
  ENSG00000185008_41 (sequence is synthesized)
ataggatatatgggctccaacagtcaaggacagtttacaggtgaattatagtaaatgagaggagacatacaaagctgctctgaaggaccatcaggtccggactcatggaagtgatgactc

SEQ ID NO: 665464 - DNA, 120 bp, Artificial Sequence
  ENSG00000185008_42 (sequence is synthesized)
taaacagtgcaatgaacaatttatttatgtactattaaaagaactgtaaatgcaatgtaaagacacacagccacacatatcccacagatattttcattgtgttcttctcttaagtacacc

SEQ ID NO: 665465 - DNA, 120 bp, Artificial Sequence
  ENSG00000185008_43 (sequence is synthesized)
acccaccttaactctttcttgtcaggagtatataaaaaagaaagaaaacaaaactcgccctacaggaagaaaaggattctcctctgtatataatttcttttgtgcattgctatgcaagct

SEQ ID NO: 665466 - DNA, 120 bp, Artificial Sequence
  ENSG00000185008_44 (sequence is synthesized)
cactctttttagctctgctcatattattgtctgttcttattggtctgttgtactatatgtgaattaataggctgtggtgccatatattaacttttaattgtgtaacttttatgtttaaat

SEQ ID NO: 665467 - DNA, 120 bp, Artificial Sequence
  ENSG00000185008_45 (sequence is synthesized)
tttgcactgcaattttatttggtgataagcacaaatctctactcctcatgacatgaagaaaaagactgaatgtgaagggagtttctgtactgtaagctagattggataatgatggctgta

SEQ ID NO: 665468 - DNA, 120 bp, Artificial Sequence
  ENSG00000185008_46 (sequence is synthesized)
acaaatcatgttagatggttttcagttggggtgtagaaataggaagatgcaaaggaacaatggtgttggcaaagtcttctttgaatatcagggactgagtcaataaaaaaaatagtagaa

SEQ ID NO: 665469 - DNA, 120 bp, Artificial Sequence
  ENSG00000185008_47 (sequence is synthesized)
aggtggcttttactattgacaaaagccggggtcaaaaaaagtagtttaagtcttaagactgaatatgcattaaagtatgcaggtagcaaagatgtaataaatttgcttaaaaaaagaaat

SEQ ID NO: 665470 - DNA, 120 bp, Artificial Sequence
  ENSG00000185008_48 (sequence is synthesized)
taaagttttatttagaatcaattttacctgtcattgtaattgacccatctgagaattacaataagcaagaggaaattaaggtgttttgcaagagctgtatttatattacagttttttaaa

SEQ ID NO: 665471 - DNA, 120 bp, Artificial Sequence
  ENSG00000185008_49 (sequence is synthesized)
aacattttctgaattatcgtaattaagctctccaactcgttaagtcagaatataatatgaagttccccaaggaaacgaacaaaatgaactctagaatatctagcaaatagttaaagaagc

SEQ ID NO: 665472 - DNA, 120 bp, Artificial Sequence
  ENSG00000185008_50 (sequence is synthesized)
aatttattattagggcatactcgggctgtttccaaatataaactctattgcaatatcttatttcatctttctaatacatgtacagtgcacactagaggatagagctgcatcacttaaatt

SEQ ID NO: 665473 - DNA, 120 bp, Artificial Sequence
  ENSG00000185008_51 (sequence is synthesized)
catgacttaaaaaataatacagtttatatacaacttgttttttatttgattaagaagtgaagtttacgccacccaatgtatagccaaattgtacgtgcttaaaaaacagtgccgagagta

SEQ ID NO: 665474 - DNA, 120 bp, Artificial Sequence
  ENSG00000185008_52 (sequence is synthesized)
tgttcagttcgcagtaagtagatttattggaataaatattctatggtacattctcagaaattggcttccaactaaaatacgtttgacccattttgaataaggaaattgaaaagaaaaatt

SEQ ID NO: 665475 - DNA, 120 bp, Artificial Sequence
  ENSG00000185008_53 (sequence is synthesized)
taaaaggagaaaaaaatgcatgtttataaactttttaaataaaaccagaccttgtaagtggacattaataattgtcctgcctcatttgttttcacgactttgacaacaagaagttcctga

SEQ ID NO: 665476 - DNA, 120 bp, Artificial Sequence
  ENSG00000185008_54 (sequence is synthesized)
acattagtcatgtatgctcagaataaatgtgactttgaaatatatgttagctactgtacatgtatagtcagtcaagtagaagaggaccttcctgaaattcccacttgtgacattttccca

SEQ ID NO: 665477 - DNA, 120 bp, Artificial Sequence
  ENSG00000185008_55 (sequence is synthesized)
tgggtttcctacacaatcttaaattttatttctgtctatactttctcaaatttttcctatgataagttcagttgttggtactcttctaaaaatattcaacgtgattaggatcagttctaa

SEQ ID NO: 665478 - DNA, 120 bp, Artificial Sequence
  ENSG00000185008_56 (sequence is synthesized)
aatacgggacccctttgagtgacaattcgcactccatgcattattggctcagtagccaatttttgtcacgtcgttataacaaggagatgacataattaaacatttccatcctttctattc

SEQ ID NO: 665479 - DNA, 120 bp, Artificial Sequence
  ENSG00000185008_57 (sequence is synthesized)
cctgagactgcatcagcacaggcaagtatagaatgtaatgttcttcatgggccccaccagctttttggtgccatgtaatttatttcttcgctgaagagaaaaagaattctgagacacagt

SEQ ID NO: 665480 - DNA, 120 bp, Artificial Sequence
  ENSG00000185008_58 (sequence is synthesized)
tattaaaccctttatcaactttctaccatcagtgcctgaattctaatgcagtgtgatttctctgggacaaagagactgaggaagatgaaaagtttcttcaaagagtgaatacatacttat

SEQ ID NO: 665481 - DNA, 120 bp, Artificial Sequence
  ENSG00000185008_59 (sequence is synthesized)
tcacaactctaggatgtgaggactttaaatatctctttatgaagttccctgcctaacctctttctatttaaaggcaaacaaatttcgaagaggttttgtgttccctctttatgtttctct

SEQ ID NO: 665482 - DNA, 120 bp, Artificial Sequence
  ENSG00000185008_60 (sequence is synthesized)
atgacccagtttagtctaaaaccttagttcattacatatacaacacatagcctttgatccctggtaactggcaggtgttggtgattaataaaccaaggcttcaaagtgaagtatgtgtgt

SEQ ID NO: 665483 - DNA, 120 bp, Artificial Sequence
  ENSG00000185008_61 (sequence is synthesized)
gcagatgacttttggaataacgtgggcatagcatcataccttcctgattgtcttcagcatataaaaattaactgttgtagttaaaattatgtcagtgcagagcttgtggttacttggaat

SEQ ID NO: 665484 - DNA, 120 bp, Artificial Sequence
  ENSG00000185008_62 (sequence is synthesized)
gttctttcagaatagtccatgttgcctattaaacctagttttaaacacattgggcagtcaatttatgcacccaaaatatcaccctcaggtagattgagggcaagataaaatgctgtatgt

SEQ ID NO: 665485 - DNA, 120 bp, Artificial Sequence
  ENSG00000185008_63 (sequence is synthesized)
agctatacaaaggaattcagaaacattactggaaagcaaagcctttgtcagcttgctactgacaaagtagtaaaaagctactaatcagtgttgagtcagatgtcaacagaaaaatacaaa

SEQ ID NO: 665486 - DNA, 120 bp, Artificial Sequence
  ENSG00000185008_64 (sequence is synthesized)
tacctatgagagccacagcagtttctcgtttcatagccgattcaatgaatatgattagaaattcactgagctcactcttgcaggtttaaatggaggcctgcataaggactgcaagaggaa

SEQ ID NO: 665487 - DNA, 120 bp, Artificial Sequence
  ENSG00000185008_65 (sequence is synthesized)
atctgggtgggagagaatgtaatctgatcttgcactcataggcaatgctgcaatgcaatcatgtccaatacaagcacagcttcattcataacaggaaacgtcttctttgggaaaatagct

SEQ ID NO: 665488 - DNA, 120 bp, Artificial Sequence
  ENSG00000185008_66 (sequence is synthesized)
ctattggtgcccaaactcaggtatgccagtgtatgcaggtggagtcgccctacccctcttccaaacatgtcctgtgagatttttaaaataagatgggatagtacaggggcatgaaaagaa

SEQ ID NO: 665489 - DNA, 120 bp, Artificial Sequence
  ENSG00000185008_67 (sequence is synthesized)
ttgattccttcacaggatttgaatccagttcaagggagaatgtagaaaattcaaaaccaacatataaggtatcacacaaccaagaaaagtaaaaccattgcaagtttacttgcgttgagt

SEQ ID NO: 665490 - DNA, 120 bp, Artificial Sequence
  ENSG00000185008_68 (sequence is synthesized)
acaaaacagatttaatggtgttctatgtcatagtttaatgctctgggtatttaaatatgttttcaacaggatttgagttgaaagtttgtaatgtgctttgatggaacacctctcaatttc

SEQ ID NO: 665491 - DNA, 120 bp, Artificial Sequence
  ENSG00000185008_69 (sequence is synthesized)
tattcaataaacttatgtaattgtccattgacaatataatgataacagtaccattgaactctaaactgtggtttatcttcactactgggaagcaactgtgcatcagtattaaagatatgc

SEQ ID NO: 665492 - DNA, 120 bp, Artificial Sequence
  ENSG00000185008_70 (sequence is synthesized)
agaaacataatattcactaatttgttcatctgcttctgtatattgtttatggaattacatggcaagaactgttctaaagcaacatgtctttccacattattttagaggtgaaattacttt

SEQ ID NO: 665493 - DNA, 120 bp, Artificial Sequence
  ENSG00000185008_71 (sequence is synthesized)
tgttttgcttctctataatgtgtacttcaaatgaaacaccatacttttttctaaaaaaagatgttcaatttactaatttttttaaatctcataatttaaaaagcatttgttgtgatttta

SEQ ID NO: 665494 - DNA, 120 bp, Artificial Sequence
  ENSG00000185008_72 (sequence is synthesized)
aagtgttgcaagaaaagggattttgtggccgtgggtagactttttatactttgttttatagatggattttttttaactgtagtttgtttaagtcaccaagcagcatccaaaatcttaatg

SEQ ID NO: 665495 - DNA, 120 bp, Artificial Sequence
  ENSG00000185008_73 (sequence is synthesized)
tgtttcatttgatgttgttagatcagagaagaaattggcataaaatcggttaatagtattgtcaaagaattgtgtattgtgtactcactgggaaaaaataaaatatattcacatttcaaa

SEQ ID NO: 665496 - DNA, 120 bp, Artificial Sequence
  ENSG00000185008_74 (sequence is synthesized)
atctagtgtaggtagctcctcagatggctctatctttgccagcggcagttttgcacaagcactggtggcagcagcagataaagctggttttaggctggatggaaccagccttacaagaac

SEQ ID NO: 665497 - DNA, 120 bp, Artificial Sequence
  ENSG00000185008_75 (sequence is synthesized)
cgctggaggagggaggcggaaggacagcgctgcgccaccacccggaggagggagcgcggtagctgcaggcaggggagggagaggaaagaaaaggaaggacggctcccagacagagagtgg

SEQ ID NO: 665498 - DNA, 120 bp, Artificial Sequence
  ENSG00000185008_76 (sequence is synthesized)
gagaaaccggggagcagcgggagcagcaggtccggggggagctgttccgctgcgctgccctcgttattcacacggacgctgcggagcttcccagggctgcttccctgtccccctgggtgg

SEQ ID NO: 665499 - DNA, 120 bp, Artificial Sequence
  ENSG00000185008_77 (sequence is synthesized)
aggctgccgtctaaacctgactccagagtttaagatgcaatggccagaagacatgaacgtgtcactagaaggatgtggacatgggctccgggactgttgatgatgactgtggtgttttgg

SEQ ID NO: 665500 - DNA, 120 bp, Artificial Sequence
  ENSG00000185008_78 (sequence is synthesized)
gactgcgtactgaggagaaggagccggatccgtgagaaatgtagcttggctcagggctacatcaggaagctgctacttcagctgttaaagatggcaaaacaacacctacctcaggttttt

SEQ ID NO: 665501 - DNA, 120 bp, Artificial Sequence
  ENSG00000185008_79 (sequence is synthesized)
caatgattaatgctattttcataaccaggagggaagaggatgtgagaaattttgtgaaattaacttgtggaaatgttatcatcagagaaagtggagaaaattactaggcttgaacttctc

SEQ ID NO: 665502 - DNA, 120 bp, Artificial Sequence
  ENSG00000185008_80 (sequence is synthesized)
ggcagccaggtacccctggaacccttccagcaagtgcatatatcattgaggctttcagatatgtagtttagaaggctcagttataatattgcatgtggaaatgatgcaaaagaaaacaca

SEQ ID NO: 665503 - DNA, 120 bp, Artificial Sequence
  ENSG00000185008_81 (sequence is synthesized)
ccttgtaacaggaaaatgtattggcataatttactctgtagtccatttattctttctacaggttaattcttttcaagccaatcagtgagcaacagctggcagaccgtggcaaaccatgta

SEQ ID NO: 665504 - DNA, 120 bp, Artificial Sequence
  ENSG00000185008_82 (sequence is synthesized)
tcttccaccaccaccagatcccccgccaggtcagggtttaaggcagcaaataggcccgagccagcaggctggtaacgtggaaaactcagcagagagaaaaggaagctctctagagagaca

SEQ ID NO: 665505 - DNA, 120 bp, Artificial Sequence
  ENSG00000185008_83 (sequence is synthesized)
acatgcatccagcttagaagacacaaagagctcattggattgtccagctagaacctccctagagtggcagcgacaaacccaggaatggataagctccacagaacgacaagaagatatacg

SEQ ID NO: 665506 - DNA, 120 bp, Artificial Sequence
  ENSG00000185008_84 (sequence is synthesized)
gctggaagtagtccatttgtttagagtatcacaagtgtgtgtgtggaaatgctcggatgaagaactgtcaagttaccacagggagataaacagggttatctgaggcggaaagttaggctg

SEQ ID NO: 665507 - DNA, 120 bp, Artificial Sequence
  ENSG00000185008_85 (sequence is synthesized)
attctctgctaggaggtctcacaggatatcatttctttagtgatgctaccgtggtgtaggatttactggtttcacctgtcaatagctacaccacagtcagttttataggttcagagacta

SEQ ID NO: 665508 - DNA, 120 bp, Artificial Sequence
  ENSG00000185008_86 (sequence is synthesized)
aatgtgtcactatgctagatcctcaggctggaattacacagcaagcagacatagacaggaaacgaaagaaactcaactatttttaggctggttatagtggaaaaagaaaaattttagaaa

SEQ ID NO: 665509 - DNA, 120 bp, Artificial Sequence
  ENSG00000185008_87 (sequence is synthesized)
acaaatcactgggccaagtgcattaagatggataaatgaggatggaaaagttacactccaaagaaacttagctgccacttaatgtaaattttttatcttaatttgaataagatattgcta

SEQ ID NO: 665510 - DNA, 120 bp, Artificial Sequence
  ENSG00000185008_88 (sequence is synthesized)
ataagaaaattctttctatagttaaaataaggacattgctaagaaattacacatcaaataatgtcatacacagaattatagaataatgaaaacgttgaatgcatttaattccatatgcct

SEQ ID NO: 665511 - DNA, 120 bp, Artificial Sequence
  ENSG00000185008_89 (sequence is synthesized)
actgtttattgaatttctaatgtacaatgtcactggacaataaatatgaaaataaacatgaaatagttcctaatctccagaattccattgtctaggagaggaaacacatgtgcagtagac

SEQ ID NO: 665512 - DNA, 120 bp, Artificial Sequence
  ENSG00000185008_90 (sequence is synthesized)
cataatatatagagagaactgatatgcgagtttatgtgtagtgtttggaaaccaaaggaggtagagagattgattctcgctgtaataggacagaatcatggtgataacagaaatggcatt

SEQ ID NO: 665513 - DNA, 120 bp, Artificial Sequence
  ENSG00000185008_91 (sequence is synthesized)
taatttagactttaaagtttgtcagtggttaatagtgttagtggcaatatctctgtctaaagaatgaaggatgatgttacataaatgagcaaggagacacacaggctgtaagagtgaatg

SEQ ID NO: 665514 - DNA, 120 bp, Artificial Sequence
  ENSG00000185008_92 (sequence is synthesized)
taagagtgaatgaggactaatacacagcaggtatattagtctgttttcacactactgtaaagatattaccggagactgggtaatctacaaacaaaagaggtttaactgactcacagttcc

SEQ ID NO: 665515 - DNA, 120 bp, Artificial Sequence
  ENSG00000185008_93 (sequence is synthesized)
acttacaatcatggcagaagacaaaggggcatgtcttacaaggtagcaggagagagagagcaggggaaatgccagagatttatcgaacaaccagttctcatgagaactccctcactatca

SEQ ID NO: 665516 - DNA, 120 bp, Artificial Sequence
  ENSG00000185008_94 (sequence is synthesized)
ccctcactatcatgagaacagcatgagggaaaccgcccccatgatccaatcaccccccacaaagtcccccccttgacacatggggattacaattcgagatgaaatttgggtggggatgca

SEQ ID NO: 665517 - DNA, 120 bp, Artificial Sequence
  ENSG00000185008_95 (sequence is synthesized)
gagccaaatcatatcagtaggctagcctagatatggaagggttgcaaatatttaattagaagtttagatatggcattggctagctgggtaaggctttaaacagaggaacacatgtatgta

SEQ ID NO: 665518 - DNA, 120 bp, Artificial Sequence
  ENSG00000185008_96 (sequence is synthesized)
agtgcttcacaaaaataatgtagaaagcaatgaggaagatagaagagactagagggaaatcaggtaggaggggtttaggagtaaaacaagatgaagattaaagagatgcttatttggaaa

SEQ ID NO: 665519 - DNA, 120 bp, Artificial Sequence
  ENSG00000185008_97 (sequence is synthesized)
gtaagagcaggtatttagaaatacaagagcaggcatttagaaatacagaaaacagcacagggaagggactgggagtgaactttcaaatgtttttaaactatcctccgttccagagtttca

SEQ ID NO: 665520 - DNA, 120 bp, Artificial Sequence
  ENSG00000185008_98 (sequence is synthesized)
tattcttttgtgaccccctcactgaatttctttgatttttttcttatctagtatagcattatattgcaaagcctactgcattatttcttctttcattttggatcgttggtccttgacttg

SEQ ID NO: 665521 - DNA, 120 bp, Artificial Sequence
  ENSG00000185008_99 (sequence is synthesized)
tggttattaacccagaaatgattctctcagaagaggctcagtttctggtgttatctcggcttccttgcagtggcctgtgtcaagggaatttgtttgaaaagtaaaaagtgtatctctgtg

SEQ ID NO: 665522 - DNA, 120 bp, Artificial Sequence
  ENSG00000185008_100 (sequence is synthesized)
cttttggcaaccagaatcaaaactctatctttctttgctacacttaacacccttttaacttctccgatcattctaaccagttcagcttctgttttctctgtattgaaagtgcatgaatcc

SEQ ID NO: 665523 - DNA, 120 bp, Artificial Sequence
  ENSG00000185008_101 (sequence is synthesized)
gtgtcattgtatcctggcctcttgactaaaattacaaatacagcatcaaggcaacactcctaactattctgttgttgcttaaatattacagaaaaaaattaaatggtctatagcatttga

SEQ ID NO: 665524 - DNA, 120 bp, Artificial Sequence
  ENSG00000185008_102 (sequence is synthesized)
ctttcatctcttttatgtaaatatgtatttggtttatttagaaatcttaaattagtttcttacaaatattttttgcccctcttctaacaaatttaggataagcaatacttggtagttttt

SEQ ID NO: 665525 - DNA, 120 bp, Artificial Sequence
  ENSG00000185008_103 (sequence is synthesized)
tgtgtcatgaattaatggtataccaacataaatcttgtaatattaattttattaagtaggaggttatgttctcagtctgtttttgtctaagaaaacatataaaattgtaaatgacttgct

SEQ ID NO: 665526 - DNA, 120 bp, Artificial Sequence
  ENSG00000185008_104 (sequence is synthesized)
agaaaattaagaaaaaatgtttctgagtatcctcacaacttacagctctttaaacgtaaaattaaaattattttcctctattctcatgttgcattttgcagaaaaaattcatattaatgc

SEQ ID NO: 665527 - DNA, 120 bp, Artificial Sequence
  ENSG00000185008_105 (sequence is synthesized)
tgatgatagtccttataagtgttactttttaatataaatatcagtattaaagagaaaactggagttcttaaataacttaaaaggcaaagtaagcagaaagagcatttaaattaatagaac

SEQ ID NO: 665528 - DNA, 120 bp, Artificial Sequence
  ENSG00000185008_106 (sequence is synthesized)
ttttcttatgttctaagttcatttgctttgatattgtttatacattttttgtttgtgaatttttgttgttatttgtaattaagtttaaattttaaaatcttgaaataatttttgcccttt

SEQ ID NO: 665529 - DNA, 120 bp, Artificial Sequence
  ENSG00000185008_107 (sequence is synthesized)
ataatttttgcccttttatgatatacagtgtagtttctatgcagattatcattggagtctgcgttaaattcaaaatatattcacactatttcttcaactgagtctttgataagtttaagt

SEQ ID NO: 665530 - DNA, 120 bp, Artificial Sequence
  ENSG00000185008_108 (sequence is synthesized)
acactaagtttgttttactaaaagtgttaatttctgaattatagtaacttaaaatacacatcgcagctctcttttggaaaacgattgtgtaataatttaaacaatgtaagagttgaacag

SEQ ID NO: 665531 - DNA, 120 bp, Artificial Sequence
  ENSG00000185008_109 (sequence is synthesized)
tgcagcacatgctttgcttatgtgctgcaaacagatacaggtttcaaatgagcttcattcttctgcacaaaaaatgtttaaaatgtacatgatacttgcatttggctaaagaaatcatga

SEQ ID NO: 665532 - DNA, 120 bp, Artificial Sequence
  ENSG00000185008_110 (sequence is synthesized)
tgaaacttcaaggaagaagcatggacaacttacttgctcattagtatagtgtgtacaagcagatgagattttcaatatatacaactcactagacaactacatttgtttttaggttcaatg

SEQ ID NO: 665533 - DNA, 120 bp, Artificial Sequence
  ENSG00000185008_111 (sequence is synthesized)
tctcctgttctttctccttagtgagtctgactgtagggctttctttaatacgcatgaatacagtttggatgctccattacccaaactctcttctgatgctagttttgcagagccaagaat

SEQ ID NO: 665534 - DNA, 120 bp, Artificial Sequence
  ENSG00000185008_112 (sequence is synthesized)
agactcctcctcaacactttctcttattttcctttctcttcacggctttactgattaattggaatatgcttcctttttatattacggcaaagcagcaactaagattgccattaaattttc

SEQ ID NO: 665535 - DNA, 120 bp, Artificial Sequence
  ENSG00000185008_113 (sequence is synthesized)
aataacacattttgcaaaatcctcatacaattaataatgtacccagtgattaaaattactcagcttttatctccattactttcctttgcctcatctctttctgcaaatgcattttctggg

SEQ ID NO: 665536 - DNA, 120 bp, Artificial Sequence
  ENSG00000185008_114 (sequence is synthesized)
aaggtttccttagcatggggtgaatgggtctaaggttgtcggtcttaccagttcaaatagcttatgatctttttaattgtttggctagtaagattttaatacaataatttattatttgtc

SEQ ID NO: 665537 - DNA, 120 bp, Artificial Sequence
  ENSG00000185008_115 (sequence is synthesized)
ttaaaggatgctaattaaagatacacccactgcatttgcaagttgaataaaataatgactacatgtgtatttctctttagaataatttaattttgatttctgagagtgataagtaatcat

SEQ ID NO: 665538 - DNA, 120 bp, Artificial Sequence
  ENSG00000185008_116 (sequence is synthesized)
ataaaagaacaattatataatttttcaagtgctgctcattccacaaaaaagaatgtgggattaataatagatcagtaatttgtaaacttttgcaacaaaataacttaggcatgatgcgtg

SEQ ID NO: 665539 - DNA, 120 bp, Artificial Sequence
  ENSG00000185008_117 (sequence is synthesized)
cgtgcttttacatttgtatgtataattcttaactatacatataagaatattctaatatatgaattaaactgaattaccttgcaaagcaaactaataaaacattaagtacatttgcaaaat

SEQ ID NO: 665540 - DNA, 120 bp, Artificial Sequence
  ENSG00000185008_118 (sequence is synthesized)
actgtaatcaaatagtaaagaaaaaagatttttacccttcactaaactctcaggttataaaaatgagtcttggaagttttcttggaattataccatcaatatttcttttaagcatacatt

SEQ ID NO: 665541 - DNA, 120 bp, Artificial Sequence
  ENSG00000185008_119 (sequence is synthesized)
agctatctttaagtgaaataaaaaagatcttctaagcattgcagaggtttatttttcaaatagcatccaaactaaaatacgttgtaatagaactgttatttgaattgtcttgcattataa

SEQ ID NO: 665542 - DNA, 120 bp, Artificial Sequence
  ENSG00000185008_120 (sequence is synthesized)
ttagaaggcacaagtgcatttcctgcatgtatgctaatagctaacacagcattaagtaatatcatatcacgtcgtcgtaagaaaatgtaactacatataataatgttgtatgaaatgaaa

SEQ ID NO: 665543 - DNA, 120 bp, Artificial Sequence
  ENSG00000185008_121 (sequence is synthesized)
acatacacaggagaataaatgcatgcacataaaccaggcctctgttactacaataaacatggtattgaaatcataagttgttgaaaatttattagctaaccttttcccagaataaatttc

SEQ ID NO: 665544 - DNA, 120 bp, Artificial Sequence
  ENSG00000185008_122 (sequence is synthesized)
cccgtatacctactctaaaccacaagaaaaggacacagcacatatcatttttcaatgagaatttggagcctgctcagatacaataatattaatcagaaaatacctattgcatgctggata

SEQ ID NO: 665545 - DNA, 120 bp, Artificial Sequence
  ENSG00000185008_123 (sequence is synthesized)
tacaaggtgattttaacctgctatcctctacacagatgttgttgagtttctgccaaaagagatagaattcattgtgtatgtggataagtggtaaggtcaatttaatatatgtgtctgagc

SEQ ID NO: 665546 - DNA, 120 bp, Artificial Sequence
  ENSG00000185008_124 (sequence is synthesized)
agacctttcatgtaaaatttcagatgtaattactatatgacatttttctgtgttcagagagattttgtaagtttccaaggatgaaattttattaaacaaatacaacagtatatacttcat

SEQ ID NO: 665547 - DNA, 120 bp, Artificial Sequence
  ENSG00000185008_125 (sequence is synthesized)
aaatagcttctttaattttaagaaataaaaactgcatgaatttgcatatatctttgacaatatcaataatattgtcaaggttaaataaaagtataatcatgcaatattgagttgtggatt

SEQ ID NO: 665548 - DNA, 120 bp, Artificial Sequence
  ENSG00000185008_126 (sequence is synthesized)
ggtggatctgttttatgttcatttgtttgattttgagggggccagtgggggtgttgttagcttattaaaaattgaacaaaatatgtgcagctgagaatgtagaaaatacatttttctaca

SEQ ID NO: 665549 - DNA, 120 bp, Artificial Sequence
  ENSG00000185008_127 (sequence is synthesized)
gagatgcaccaatatttggtatcttcatatgttatctctaggtagatttacaggttagtcatagtgcagaaatataggacagaatcagtgtgctataatgtcattctctagaacccattc

SEQ ID NO: 665550 - DNA, 120 bp, Artificial Sequence
  ENSG00000185008_128 (sequence is synthesized)
tgaaattttcctggcccaaagatccttacctgtaaaatgaggaggttgtagtagacacactctaactttcaaccatgacatatacattgtatggctgatgactttgtgcatttctaattt

SEQ ID NO: 665551 - DNA, 120 bp, Artificial Sequence
  ENSG00000185008_129 (sequence is synthesized)
attccatgaccccacttgtttaatttgtttggattaactatatgctatttgtttgtactgagattttgttttatttttttaattacaggttatttgtaaaagactatagtgtattatggc

SEQ ID NO: 665552 - DNA, 120 bp, Artificial Sequence
  ENSG00000185008_130 (sequence is synthesized)
aatttttttcagaataaattcacaagagattctgatagaactacacagctagggttaaaagtgattttgtatgactccttaatcatttagataaatgtatccactgagaaatgttaaata

SEQ ID NO: 665553 - DNA, 120 bp, Artificial Sequence
  ENSG00000185008_131 (sequence is synthesized)
atttggccaaaactagaactagaactagaactagaactggaactggagctgtaactgtaactgtaactagaactagaactaaaactagaactagagcaagaattcaaatctgctgtattt

SEQ ID NO: 665554 - DNA, 120 bp, Artificial Sequence
  ENSG00000185008_132 (sequence is synthesized)
caggctaaagtgctcttggctacaccagaatcttttctaatttatggtttatcttcaattagcttatcattgaactcacatcccatgatgtaataaaagactccttttagattcctcaaa

SEQ ID NO: 665555 - DNA, 120 bp, Artificial Sequence
  ENSG00000185008_133 (sequence is synthesized)
taatagaatgccacacaaccagtctcaggatttcagcaccaccagctctcacaacagctcagaaaggagtggcagtctctcaggtgggaaaggtggaaaaaagaagaaaaataaaaactc

SEQ ID NO: 665556 - DNA, 120 bp, Artificial Sequence
  ENSG00000185009_0 (sequence is synthesized)
gggaccccagactgcgttaggcagcagatgaccgcctgaatctagatggagagaaacccaccatttttctaggccctggattatgtagaagatttagatactaagcctcaagagacgtct

SEQ ID NO: 665557 - DNA, 120 bp, Artificial Sequence
  ENSG00000185009_1 (sequence is synthesized)
ttcctctcatttacggtcttcctgcatatttaaaatttctaatacggtagacagagtcggtgtctttgaagctgttaatcaggcaatttcctgggcactccagctgcgggtcctcgcggc

SEQ ID NO: 665558 - DNA, 120 bp, Artificial Sequence
  ENSG00000185009_2 (sequence is synthesized)
cttctcggcttctccagcttcggtaggagaggatccggcgccgaatcactgactggcacaggtgttgggaaaatgatccacagtctatttctcataaactgttccggtgacatatttcta

SEQ ID NO: 665559 - DNA, 120 bp, Artificial Sequence
  ENSG00000185009_3 (sequence is synthesized)
gagaagcactggaagagcgttgtgagccagtctgtctgtgattatttctttgaagctcaagagaaagctgctgatgttgaaaatgtaccacctgtcatttcaacacctcaccactacctc

SEQ ID NO: 665560 - DNA, 120 bp, Artificial Sequence
  ENSG00000185009_4 (sequence is synthesized)
atcagtatctaccgggataagctcttctttgtatctgtcatacagaccgaagtgccacctctctttgtaattgagttcctacatcgagttgctgacacttttcaggactactttggtgag

SEQ ID NO: 665561 - DNA, 120 bp, Artificial Sequence
  ENSG00000185009_5 (sequence is synthesized)
tgttcagaggctgcaattaaggataatgtggtcatagtatatgaactcttagaagaaatgttagacaatggatttccactggctaccgaatctaacattttgaaagaattgattaaacca

SEQ ID NO: 665562 - DNA, 120 bp, Artificial Sequence
  ENSG00000185009_6 (sequence is synthesized)
ccaacaattctacgctctgttgtcaactctattacaggcagtagtaatgttggggacacactccccaccgggcagctgtccaacataccatggcgtcgggcaggggtaaagtacacaaac

SEQ ID NO: 665563 - DNA, 120 bp, Artificial Sequence
  ENSG00000185009_7 (sequence is synthesized)
aatgaagcctattttgatgttgttgaagaaatagacgcaattatagataaatcaggatctacagtctttgcagaaattcagggggtcattgatgcttgcattaaactatctggaatgcct

SEQ ID NO: 665564 - DNA, 120 bp, Artificial Sequence
  ENSG00000185009_8 (sequence is synthesized)
gatctctccctttctttcatgaaccctaggcttctggatgatgtcagctttcacccctgcatccggttcaagcgttgggaatctgaaagagttttgtcatttattcctccagatggaaat

SEQ ID NO: 665565 - DNA, 120 bp, Artificial Sequence
  ENSG00000185009_9 (sequence is synthesized)
ttccgactcatatcataccgtgtcagctcacaaaatctagtggcaataccagtgtatgtgaaacatagtatcagctttaaggagaacagttcttgcggcagatttgatataacaattgga

SEQ ID NO: 665566 - DNA, 120 bp, Artificial Sequence
  ENSG00000185009_10 (sequence is synthesized)
ccaaagcagaatatggggaaaactattgaaggaattacagtgacagttcacatgccaaaagttgtgctgaacatgaacctgacacccacacaaggcagctatacatttgatccagtcacc

SEQ ID NO: 665567 - DNA, 120 bp, Artificial Sequence
  ENSG00000185009_11 (sequence is synthesized)
aaggtactaacatgggatgtgggaaaaattactccacaaaagctcccaagtcttaaaggactggtaaatttacagtctggagcccccaaaccagaagagaatccgagcctcaacatacag

SEQ ID NO: 665568 - DNA, 120 bp, Artificial Sequence
  ENSG00000185009_12 (sequence is synthesized)
tttaagatccagcagcttgctatttcaggcttaaaagtaaaccgtttggacatgtatggggagaaatataagccatttaaaggagtcaaatacgtcacgaaagctggaaagttccaagtg

SEQ ID NO: 665569 - DNA, 120 bp, Artificial Sequence
  ENSG00000185009_13 (sequence is synthesized)
aggacatgagaagaggccaaaattcctcaggaccagtttgttttccaagtgtcattacgatgtatcactattaggtaccaagtgagtgggaatacatattctagttaaagcatttgtgtc

SEQ ID NO: 665570 - DNA, 120 bp, Artificial Sequence
  ENSG00000185009_14 (sequence is synthesized)
tagctacacaccgctaacaaagttacttagttatcaatgtaggattcttaaggagctttaagctaaggaaaccttttagtgacttagcttattttgtatcttttcacttaggaagatttt

SEQ ID NO: 665571 - DNA, 120 bp, Artificial Sequence
  ENSG00000185009_15 (sequence is synthesized)
ggaggtgatttttttccataggaggataccatctggcggctgcacattgtaacagtaaaggcagaaagctgtagtgataacctctctcctaaaagagttaactggtctcatccagcagaa

SEQ ID NO: 665572 - DNA, 120 bp, Artificial Sequence
  ENSG00000185009_16 (sequence is synthesized)
gctatcttaaatctgtgatgtgtcaggtgcagccaaatatcacaccttctgatcttagccatcccaaaccagtatctgtcccgagaggaaattccccccacccccagaagtttacagaaa

SEQ ID NO: 665573 - DNA, 120 bp, Artificial Sequence
  ENSG00000185009_17 (sequence is synthesized)
actgcctcttcaagtgtttgccttattcagcttttcacttgtgccattaagcaagcactgtagcaaaagccacttccacatggccctggcagggagcactgctgctccatgctccattct

SEQ ID NO: 665574 - DNA, 120 bp, Artificial Sequence
  ENSG00000185009_18 (sequence is synthesized)
cactgtacttggtattgtattttttataaataagatttttatgtaaagcttagaatttgatttacagggaccttgctgcagtaaataccatctcaattttgtgccactggttcagctgtt

SEQ ID NO: 665575 - DNA, 120 bp, Artificial Sequence
  ENSG00000185009_19 (sequence is synthesized)
agcacagtaaaaaaatcatttgtatcaaaggggcaaatgctttattaaggtagtaaaagggaacattacttctgcttttaggaagttactgcaagcacaagcatttgtgcttttaagcaa

SEQ ID NO: 665576 - DNA, 120 bp, Artificial Sequence
  ENSG00000185009_20 (sequence is synthesized)
attaaagtagtaaaagaaaaacttaagtgaaacctttgccatcttcatgttttataatataaagcttacccaacaccagttaagccatggttaacctaaatgcctcatgccccagttcag

SEQ ID NO: 665577 - DNA, 120 bp, Artificial Sequence
  ENSG00000185009_21 (sequence is synthesized)
tgcattccttgtctttaggggaaattcccttttcatattgtgtgcttcccaaagctatagtcatagatttcttccagaaactattgtcataattgtcactggagtgcttaaatatacgta

SEQ ID NO: 665578 - DNA, 120 bp, Artificial Sequence
  ENSG00000185009_22 (sequence is synthesized)
ctatactgacaaaatacatggaagtgagttataatgaggcagaaacaaaatcctcggtaacattgatgatactctaccgatcaccgtggttttggaaagtcagtcaacagttgtattatt

SEQ ID NO: 665579 - DNA, 120 bp, Artificial Sequence
  ENSG00000185009_23 (sequence is synthesized)
gcactcaatttcattgtgacattttatttaacttcttcatcttggtggtccttgcccagttattttgcctcattagacatcaagaaatggagaaagactgaaagttaatatcttaagtgc

SEQ ID NO: 665580 - DNA, 120 bp, Artificial Sequence
  ENSG00000185009_24 (sequence is synthesized)
ttgttcttcatgtttccttcttgttatttatgctattctctttgtggctccattcttctttcaatcttctcagcttataaccgtctttcccttatgctaaggatagcccttacactcatc

SEQ ID NO: 665581 - DNA, 120 bp, Artificial Sequence
  ENSG00000185009_25 (sequence is synthesized)
ccatctatgctgtcaagggctgctggttggtgctggtacaaggagcccactcagcagttttcttacctttgcctgccctgcctttcatggaataagaaaggcaacgttttgcagcttcca

SEQ ID NO: 665582 - DNA, 120 bp, Artificial Sequence
  ENSG00000185009_26 (sequence is synthesized)
aatttctgaagaaactaatctcagattggcagttaaagtcaaaatgttgccaaatatttattccttttgcctaagtttggctacccggttcaattgctttttatttttaatgtcttgact

SEQ ID NO: 665583 - DNA, 120 bp, Artificial Sequence
  ENSG00000185009_27 (sequence is synthesized)
cttcagagttcgtacctcaaaagaacaatgagaacatttgctttgctttctgctgaatccctaatctcaacaatctatacctggactgtccagttctcctcctgtgctatcttctcttct

SEQ ID NO: 665584 - DNA, 120 bp, Artificial Sequence
  ENSG00000185009_28 (sequence is synthesized)
atccaagtagaatgtacgccaggagctccttccctctagcaatttctactaaaatgtccaagtagaatgtttccttttacaatcaaattactgtatttattaatttgctagaatccagta

SEQ ID NO: 665585 - DNA, 120 bp, Artificial Sequence
  ENSG00000185009_29 (sequence is synthesized)
aatcattttggtagctctggctgtgctatcaataaaaagatgaaagcaacaagttgattttttttaggtctactattgattgaacattctccaatgggcaaggctcattgtcaaagcagg

SEQ ID NO: 665586 - DNA, 120 bp, Artificial Sequence
  ENSG00000185009_30 (sequence is synthesized)
gtgaacatgatcagattttcttctgcatcatcacacaagctgcgagtgttgctgcaaagcacttctcagtactccttccctaacctcagtatgttaatagccattcatacttggcttaag

SEQ ID NO: 665587 - DNA, 120 bp, Artificial Sequence
  ENSG00000185009_31 (sequence is synthesized)
catcaccattctggccacagtctgagagattagtgatcaaagctcccttccctatcactaccaccacctactgataacaaagatttctgaatacttagtagtagtaaaatatttttcaag

SEQ ID NO: 665588 - DNA, 120 bp, Artificial Sequence
  ENSG00000185009_32 (sequence is synthesized)
cacagagttacagctaatcctggatcacttgttctaaattcataagggagtatatcaagagcaaatgaagtaaatgattctttcctgcgtgtgggagtcaccatcattttattcaaaggg

SEQ ID NO: 665589 - DNA, 120 bp, Artificial Sequence
  ENSG00000185009_33 (sequence is synthesized)
agttcctgtgataggttcattccttaagtggtgctacagaaggaccctaggaaaatgctgatcttgtcctgagaggcaactgatttgagaaaatgattatactacagcaggaaggcagca

SEQ ID NO: 665590 - DNA, 120 bp, Artificial Sequence
  ENSG00000185009_34 (sequence is synthesized)
ccagtgaacatatggtaaatggcaaaaacaagacagttttagaaactgctaattcagtagcagccttggcctttcccttaactcaagcaggctggaatctgtctttatagtcggcaactt

SEQ ID NO: 665591 - DNA, 120 bp, Artificial Sequence
  ENSG00000185009_35 (sequence is synthesized)
tccaagataaagcagtgataatagcagttggcaacactaaatatcaatatcatcaccctttaatgacatgttacccctttcagatctagaaaatcagggaaaaagtgatgtcccaactct

SEQ ID NO: 665592 - DNA, 120 bp, Artificial Sequence
  ENSG00000185009_36 (sequence is synthesized)
actctaaaaacctgctcctactattttagtcagtgtttctttaaggaagaagaggactatgtccccaaaagctaactctgttttatagccctggtggatccctgaaaaccctatttattc

SEQ ID NO: 665593 - DNA, 81 bp, Artificial Sequence
  ENSG00000185009_37 (sequence is synthesized)
ttttatagccctggtggatccctgaaaaccctatttattctatactgggctttggaatatgaaaaatggacctgtgtggcc

SEQ ID NO: 665594 - DNA, 90 bp, Artificial Sequence
  ENSG00000185009_38 (sequence is synthesized)
ctctgtcttgcagcagggggaaggacctgtggtactcctacaaacttaacaactttagcttttcggggaacagtggtggtctccacagat

SEQ ID NO: 665595 - DNA, 120 bp, Artificial Sequence
  ENSG00000185009_39 (sequence is synthesized)
aactttagcttttcggggaacagtggtggtctccacagatagctagaatcttctaagatgaaaataaactgtttcatccagctgctttctgcctgttaacctttgccacttccattcctt

SEQ ID NO: 665596 - DNA, 120 bp, Artificial Sequence
  ENSG00000185009_40 (sequence is synthesized)
caagtgtgtaatccccagggttgtcttgtattacacacatccttgttaagtaaatataccactgttgatttcttcttccagtgcaacatttggattaaataaaaatctttagtttccaga

SEQ ID NO: 665597 - DNA, 120 bp, Artificial Sequence
  ENSG00000185009_41 (sequence is synthesized)
agctgcgggtcctcgcggccttctcggcttctccagcttcggtaggagaggatccggcgccgaatcactgactggcacaggtgttgggatagtgtctcacttggtcacccaggctggagt

SEQ ID NO: 665598 - DNA, 120 bp, Artificial Sequence
  ENSG00000185009_42 (sequence is synthesized)
gcagtggcgcaatcttagctctctacagcgtcgatcttcctcctgggctcaagcaattctcctgcttcatcctcctgagtacctaggactacagaaaatgatccacagtctatttctcat

SEQ ID NO: 665599 - DNA, 120 bp, Artificial Sequence
  ENSG00000185009_43 (sequence is synthesized)
ggggtgagtgtgaggggcgggaaatctgtggactggggacagctccaaaacccgggagtaggctgaatagctggggcccccgactccgatctgggctctaggagcgtctttggtgctgtt

SEQ ID NO: 665600 - DNA, 120 bp, Artificial Sequence
  ENSG00000185009_44 (sequence is synthesized)
ggcccgggcctcgcttcccccccactcccggccttccgggctttctcgccagcaaggccagaagggagcggtccacctgcagcccagtgttctcaggcgcctgagccccggaggtcaagc

SEQ ID NO: 665601 - DNA, 120 bp, Artificial Sequence
  ENSG00000185009_45 (sequence is synthesized)
ggaggacaaaaccccaaacggacctgagcagacgtcctgttagcgggtggtgcctggaagagcctggggtgaggaatgcagtgagaagggtgttgcagttcttcaggagagagaaaatga

SEQ ID NO: 665602 - DNA, 120 bp, Artificial Sequence
  ENSG00000185009_46 (sequence is synthesized)
gctcacaaaagtatgttgatgcatcagccagaatctgccatcatacatatcaagtacaactcacctttccctgtttctttctgaaagttgagtacttgaggtcatcactgctcactttaa

SEQ ID NO: 665603 - DNA, 120 bp, Artificial Sequence
  ENSG00000185009_47 (sequence is synthesized)
ccatagctcaccaggagacccagtgagaacgggtgaaaatacgcacctaaaataatccgtatactttgaatgtatgagtgtagagtggtactaagtgagactagagtaaaatctatagcc

SEQ ID NO: 665604 - DNA, 120 bp, Artificial Sequence
  ENSG00000185010_0 (sequence is synthesized)
gcttagtgctgagcacatccagtgggtaaagttccttaaaatgctctgcaaagaaattgggacttttcattaaatcagaaattttacttttttcccctcctgggagctaaagatatttta

SEQ ID NO: 665605 - DNA, 120 bp, Artificial Sequence
  ENSG00000185010_1 (sequence is synthesized)
gagaagaattaaccttttgcttctccagttgaacatttgtagcaataagtcatgcaaatagagctctccacctgcttctttctgtgccttttgcgattctgctttagtgccaccagaaga

SEQ ID NO: 665606 - DNA, 120 bp, Artificial Sequence
  ENSG00000185010_2 (sequence is synthesized)
tactacctgggtgcagtggaactgtcatgggactatatgcaaagtgatctcggtgagctgcctgtggacgcaagatttcctcctagagtgccaaaatcttttccattcaacacctcagtc

SEQ ID NO: 665607 - DNA, 120 bp, Artificial Sequence
  ENSG00000185010_3 (sequence is synthesized)
gtgtacaaaaagactctgtttgtagaattcacggatcaccttttcaacatcgctaagccaaggccaccctggatgggtctgctaggtcctaccatccaggctgaggtttatgatacagtg

SEQ ID NO: 665608 - DNA, 120 bp, Artificial Sequence
  ENSG00000185010_4 (sequence is synthesized)
gtcattacacttaagaacatggcttcccatcctgtcagtcttcatgctgttggtgtatcctactggaaagcttctgagggagctgaatatgatgatcagaccagtcaaagggagaaagaa

SEQ ID NO: 665609 - DNA, 120 bp, Artificial Sequence
  ENSG00000185010_5 (sequence is synthesized)
gatgataaagtcttccctggtggaagccatacatatgtctggcaggtcctgaaagagaatggtccaatggcctctgacccactgtgccttacctactcatatctttctcatgtggacctg

SEQ ID NO: 665610 - DNA, 120 bp, Artificial Sequence
  ENSG00000185010_6 (sequence is synthesized)
gtaaaagacttgaattcaggcctcattggagccctactagtatgtagagaagggagtctggccaaggaaaagacacagaccttgcacaaatttatactactttttgctgtatttgatgaa

SEQ ID NO: 665611 - DNA, 120 bp, Artificial Sequence
  ENSG00000185010_7 (sequence is synthesized)
gggaaaagttggcactcagaaacaaagaactccttgatgcaggatagggatgctgcatctgctcgggcctggcctaaaatgcacacagtcaatggttatgtaaacaggtctctgccaggt

SEQ ID NO: 665612 - DNA, 120 bp, Artificial Sequence
  ENSG00000185010_8 (sequence is synthesized)
ctgattggatgccacaggaaatcagtctattggcatgtgattggaatgggcaccactcctgaagtgcactcaatattcctcgaaggtcacacatttcttgtgaggaaccatcgccaggcg

SEQ ID NO: 665613 - DNA, 120 bp, Artificial Sequence
  ENSG00000185010_9 (sequence is synthesized)
tccttggaaatctcgccaataactttccttactgctcaaacactcttgatggaccttggacagtttctactgttttgtcatatctcttcccaccaacatgatggcatggaagcttatgtc

SEQ ID NO: 665614 - DNA, 120 bp, Artificial Sequence
  ENSG00000185010_10 (sequence is synthesized)
aaagtagacagctgtccagaggaaccccaactacgaatgaaaaataatgaagaagcggaagactatgatgatgatcttactgattctgaaatggatgtggtcaggtttgatgatgacaac

SEQ ID NO: 665615 - DNA, 120 bp, Artificial Sequence
  ENSG00000185010_11 (sequence is synthesized)
tctccttcctttatccaaattcgctcagttgccaagaagcatcctaaaacttgggtacattacattgctgctgaagaggaggactgggactatgctcccttagtcctcgcccccgatgac

SEQ ID NO: 665616 - DNA, 120 bp, Artificial Sequence
  ENSG00000185010_12 (sequence is synthesized)
agaagttataaaagtcaatatttgaacaatggccctcagcggattggtaggaagtacaaaaaagtccgatttatggcatacacagatgaaacctttaagactcgtgaagctattcagcat

SEQ ID NO: 665617 - DNA, 120 bp, Artificial Sequence
  ENSG00000185010_13 (sequence is synthesized)
gaatcaggaatcttgggacctttactttatggggaagttggagacacactgttgattatatttaagaatcaagcaagcagaccatataacatctaccctcacggaatcactgatgtccgt

SEQ ID NO: 665618 - DNA, 120 bp, Artificial Sequence
  ENSG00000185010_14 (sequence is synthesized)
cctttgtattcaaggagattaccaaaaggtgtaaaacatttgaaggattttccaattctgccaggagaaatattcaaatataaatggacagtgactgtagaagatgggccaactaaatca

SEQ ID NO: 665619 - DNA, 120 bp, Artificial Sequence
  ENSG00000185010_15 (sequence is synthesized)
gatcctcggtgcctgacccgctattactctagtttcgttaatatggagagagatctagcttcaggactcattggccctctcctcatctgctacaaagaatctgtagatcaaagaggaaac

SEQ ID NO: 665620 - DNA, 120 bp, Artificial Sequence
  ENSG00000185010_16 (sequence is synthesized)
cagataatgtcagacaagaggaatgtcatcctgttttctgtatttgatgagaaccgaagctggtacctcacagagaatatacaacgctttctccccaatccagctggagtgcagcttgag

SEQ ID NO: 665621 - DNA, 120 bp, Artificial Sequence
  ENSG00000185010_17 (sequence is synthesized)
gatccagagttccaagcctccaacatcatgcacagcatcaatggctatgtttttgatagtttgcagttgtcagtttgtttgcatgaggtggcatactggtacattctaagcattggagca

SEQ ID NO: 665622 - DNA, 120 bp, Artificial Sequence
  ENSG00000185010_18 (sequence is synthesized)
cagactgacttcctttctgtcttcttctctggatataccttcaaacacaaaatggtctatgaagacacactcaccctattcccattctcaggagaaactgtcttcatgtcgatggaaaac

SEQ ID NO: 665623 - DNA, 120 bp, Artificial Sequence
  ENSG00000185010_19 (sequence is synthesized)
ccaggtctatggattctggggtgccacaactcagactttcggaacagaggcatgaccgccttactgaaggtttctagttgtgacaagaacactggtgattattacgaggacagttatgaa

SEQ ID NO: 665624 - DNA, 120 bp, Artificial Sequence
  ENSG00000185010_20 (sequence is synthesized)
gatatttcagcatacttgctgagtaaaaacaatgccattgaaccaagaagcttctcccagaattcaagacaccctagcactaggcaaaagcaatttaatgccaccacaattccagaaaat

SEQ ID NO: 665625 - DNA, 120 bp, Artificial Sequence
  ENSG00000185010_21 (sequence is synthesized)
gacatagagaagactgacccttggtttgcacacagaacacctatgcctaaaatacaaaatgtctcctctagtgatttgttgatgctcttgcgacagagtcctactccacatgggctatcc

SEQ ID NO: 665626 - DNA, 120 bp, Artificial Sequence
  ENSG00000185010_22 (sequence is synthesized)
ttatctgatctccaagaagccaaatatgagactttttctgatgatccatcacctggagcaatagacagtaataacagcctgtctgaaatgacacacttcaggccacagctccatcacagt

SEQ ID NO: 665627 - DNA, 120 bp, Artificial Sequence
  ENSG00000185010_23 (sequence is synthesized)
ggggacatggtatttacccctgagtcaggcctccaattaagattaaatgagaaactggggacaactgcagcaacagagttgaagaaacttgatttcaaagtttctagtacatcaaataat

SEQ ID NO: 665628 - DNA, 120 bp, Artificial Sequence
  ENSG00000185010_24 (sequence is synthesized)
ctgatttcaacaattccatcagacaatttggcagcaggtactgataatacaagttccttaggacccccaagtatgccagttcattatgatagtcaattagataccactctatttggcaaa

SEQ ID NO: 665629 - DNA, 120 bp, Artificial Sequence
  ENSG00000185010_25 (sequence is synthesized)
aagtcatctccccttactgagtctggtggacctctgagcttgagtgaagaaaataatgattcaaagttgttagaatcaggtttaatgaatagccaagaaagttcatggggaaaaaatgta

SEQ ID NO: 665630 - DNA, 120 bp, Artificial Sequence
  ENSG00000185010_26 (sequence is synthesized)
tcgtcaacagagagtggtaggttatttaaagggaaaagagctcatggacctgctttgttgactaaagataatgccttattcaaagttagcatctctttgttaaagacaaacaaaacttcc

SEQ ID NO: 665631 - DNA, 120 bp, Artificial Sequence
  ENSG00000185010_27 (sequence is synthesized)
aataattcagcaactaatagaaagactcacattgatggcccatcattattaattgagaatagtccatcagtctggcaaaatatattagaaagtgacactgagtttaaaaaagtgacacct

SEQ ID NO: 665632 - DNA, 120 bp, Artificial Sequence
  ENSG00000185010_28 (sequence is synthesized)
ttgattcatgacagaatgcttatggacaaaaatgctacagctttgaggctaaatcatatgtcaaataaaactacttcatcaaaaaacatggaaatggtccaacagaaaaaagagggcccc

SEQ ID NO: 665633 - DNA, 120 bp, Artificial Sequence
  ENSG00000185010_29 (sequence is synthesized)
attccaccagatgcacaaaatccagatatgtcgttctttaagatgctattcttgccagaatcagcaaggtggatacaaaggactcatggaaagaactctctgaactctgggcaaggcccc

SEQ ID NO: 665634 - DNA, 120 bp, Artificial Sequence
  ENSG00000185010_30 (sequence is synthesized)
agtccaaagcaattagtatccttaggaccagaaaaatctgtggaaggtcagaatttcttgtctgagaaaaacaaagtggtagtaggaaagggtgaatttacaaaggacgtaggactcaaa

SEQ ID NO: 665635 - DNA, 120 bp, Artificial Sequence
  ENSG00000185010_31 (sequence is synthesized)
gagatggtttttccaagcagcagaaacctatttcttactaacttggataatttacatgaaaataatacacacaatcaagaaaaaaaaattcaggaagaaatagaaaagaaggaaacatta

SEQ ID NO: 665636 - DNA, 120 bp, Artificial Sequence
  ENSG00000185010_32 (sequence is synthesized)
atccaagagaatgtagttttgcctcagatacatacagtgactggcactaagaatttcatgaagaaccttttcttactgagcactaggcaaaatgtagaaggttcatatgacggggcatat

SEQ ID NO: 665637 - DNA, 120 bp, Artificial Sequence
  ENSG00000185010_33 (sequence is synthesized)
gctccagtacttcaagattttaggtcattaaatgattcaacaaatagaacaaagaaacacacagctcatttctcaaaaaaaggggaggaagaaaacttggaaggcttgggaaatcaaacc

SEQ ID NO: 665638 - DNA, 120 bp, Artificial Sequence
  ENSG00000185010_34 (sequence is synthesized)
aagcaaattgtagagaaatatgcatgcaccacaaggatatctcctaatacaagccagcagaattttgtcacgcaacgtagtaagagagctttgaaacaattcagactcccactagaagaa

SEQ ID NO: 665639 - DNA, 120 bp, Artificial Sequence
  ENSG00000185010_35 (sequence is synthesized)
acagaacttgaaaaaaggataattgtggatgacacctcaacccagtggtccaaaaacatgaaacatttgaccccgagcaccctcacacagatagactacaatgagaaggagaaaggggcc

SEQ ID NO: 665640 - DNA, 120 bp, Artificial Sequence
  ENSG00000185010_36 (sequence is synthesized)
attactcagtctcccttatcagattgccttacgaggagtcatagcatccctcaagcaaatagatctccattacccattgcaaaggtatcatcatttccatctattagacctatatatctg

SEQ ID NO: 665641 - DNA, 120 bp, Artificial Sequence
  ENSG00000185010_37 (sequence is synthesized)
tcttccagcagcatcttatagaaagaaagattctggggtccaagaaagcagtcatttcttacaaggagccaaaaaaaataacctttctttagccattctaaccttggagatgactggtga

SEQ ID NO: 665642 - DNA, 120 bp, Artificial Sequence
  ENSG00000185010_38 (sequence is synthesized)
tcaaagagaggttggctccctggggacaagtgccacaaattcagtcacatacaagaaagttgagaacactgttctcccgaaaccagacttgcccaaaacatctggcaaagttgaattgct

SEQ ID NO: 665643 - DNA, 120 bp, Artificial Sequence
  ENSG00000185010_39 (sequence is synthesized)
tccaaaagttcacatttatcagaaggacctattccctacggaaactagcaatgggtctcctggccatctggatctcgtggaagggagccttcttcagggaacagagggagcgattaagtg

SEQ ID NO: 665644 - DNA, 120 bp, Artificial Sequence
  ENSG00000185010_40 (sequence is synthesized)
gaatgaagcaaacagacctggaaaagttccctttctgagagtagcaacagaaagctctgcaaagactccctccaagctattggatcctcttgcttgggataaccactatggtactcagat

SEQ ID NO: 665645 - DNA, 120 bp, Artificial Sequence
  ENSG00000185010_41 (sequence is synthesized)
accaaaagaagagtggaaatcccaagagaagtcaccagaaaaaacagcttttaagaaaaaggataccattttgtccctgaacgcttgtgaaagcaatcatgcaatagcagcaataaatga

SEQ ID NO: 665646 - DNA, 120 bp, Artificial Sequence
  ENSG00000185010_42 (sequence is synthesized)
gggacaaaataagcccgaaatagaagtcacctgggcaaagcaaggtaggactgaaaggctgtgctctcaaaacccaccagtcttgaaacgccatcaacgggaaataactcgtactactct

SEQ ID NO: 665647 - DNA, 120 bp, Artificial Sequence
  ENSG00000185010_43 (sequence is synthesized)
tcagtcagatcaagaggaaattgactatgatgataccatatcagttgaaatgaagaaggaagattttgacatttatgatgaggatgaaaatcagagcccccgcagctttcaaaagaaaac

SEQ ID NO: 665648 - DNA, 120 bp, Artificial Sequence
  ENSG00000185010_44 (sequence is synthesized)
acgacactattttattgctgcagtggagaggctctgggattatgggatgagtagctccccacatgttctaagaaacagggctcagagtggcagtgtccctcagttcaagaaagttgtttt

SEQ ID NO: 665649 - DNA, 120 bp, Artificial Sequence
  ENSG00000185010_45 (sequence is synthesized)
ccaggaatttactgatggctcctttactcagcccttataccgtggagaactaaatgaacatttgggactcctggggccatatataagagcagaagttgaagataatatcatggtaacttt

SEQ ID NO: 665650 - DNA, 120 bp, Artificial Sequence
  ENSG00000185010_46 (sequence is synthesized)
cagaaatcaggcctctcgtccctattccttctattctagccttatttcttatgaggaagatcagaggcaaggagcagaacctagaaaaaactttgtcaagcctaatgaaaccaaaactta

SEQ ID NO: 665651 - DNA, 120 bp, Artificial Sequence
  ENSG00000185010_47 (sequence is synthesized)
cttttggaaagtgcaacatcatatggcacccactaaagatgagtttgactgcaaagcctgggcttatttctctgatgttgacctggaaaaagatgtgcactcaggcctgattggacccct

SEQ ID NO: 665652 - DNA, 120 bp, Artificial Sequence
  ENSG00000185010_48 (sequence is synthesized)
tctggtctgccacactaacacactgaaccctgctcatgggagacaagtgacagtacaggaatttgctctgtttttcaccatctttgatgagaccaaaagctggtacttcactgaaaatat

SEQ ID NO: 665653 - DNA, 120 bp, Artificial Sequence
  ENSG00000185010_49 (sequence is synthesized)
ggaaagaaactgcagggctccctgcaatatccagatggaagatcccacttttaaagagaattatcgcttccatgcaatcaatggctacataatggatacactacctggcttagtaatggc

SEQ ID NO: 665654 - DNA, 120 bp, Artificial Sequence
  ENSG00000185010_50 (sequence is synthesized)
tcaggatcaaaggattcgatggtatctgctcagcatgggcagcaatgaaaacatccattctattcatttcagtggacatgtgttcactgtacgaaaaaaagaggagtataaaatggcact

SEQ ID NO: 665655 - DNA, 120 bp, Artificial Sequence
  ENSG00000185010_51 (sequence is synthesized)
gtacaatctctatccaggtgtttttgagacagtggaaatgttaccatccaaagctggaatttggcgggtggaatgccttattggcgagcatctacatgctgggatgagcacactttttct

SEQ ID NO: 665656 - DNA, 120 bp, Artificial Sequence
  ENSG00000185010_52 (sequence is synthesized)
ggtgtacagcaataagtgtcagactcccctgggaatggcttctggacacattagagattttcagattacagcttcaggacaatatggacagtgggccccaaagctggccagacttcatta

SEQ ID NO: 665657 - DNA, 120 bp, Artificial Sequence
  ENSG00000185010_53 (sequence is synthesized)
ttccggatcaatcaatgcctggagcaccaaggagcccttttcttggatcaaggtggatctgttggcaccaatgattattcacggcatcaagacccagggtgcccgtcagaagttctccag

SEQ ID NO: 665658 - DNA, 120 bp, Artificial Sequence
  ENSG00000185010_54 (sequence is synthesized)
cctctacatctctcagtttatcatcatgtatagtcttgatgggaagaagtggcagacttatcgaggaaattccactggaaccttaatggtcttctttggcaatgtggattcatctgggat

SEQ ID NO: 665659 - DNA, 120 bp, Artificial Sequence
  ENSG00000185010_55 (sequence is synthesized)
aaaacacaatatttttaaccctccaattattgctcgatacatccgtttgcacccaactcattatagcattcgcagcactcttcgcatggagttgatgggctgtgatttaaatagttgcag

SEQ ID NO: 665660 - DNA, 120 bp, Artificial Sequence
  ENSG00000185010_56 (sequence is synthesized)
catgccattgggaatggagagtaaagcaatatcagatgcacagattactgcttcatcctactttaccaatatgtttgccacctggtctccttcaaaagctcgacttcacctccaagggag

SEQ ID NO: 665661 - DNA, 120 bp, Artificial Sequence
  ENSG00000185010_57 (sequence is synthesized)
gagtaatgcctggagacctcaggtgaataatccaaaagagtggctgcaagtggacttccagaagacaatgaaagtcacaggagtaactactcagggagtaaaatctctgcttaccagcat

SEQ ID NO: 665662 - DNA, 120 bp, Artificial Sequence
  ENSG00000185010_58 (sequence is synthesized)
gtatgtgaaggagttcctcatctccagcagtcaagatggccatcagtggactctcttttttcagaatggcaaagtaaaggtttttcagggaaatcaagactccttcacacctgtggtgaa

SEQ ID NO: 665663 - DNA, 120 bp, Artificial Sequence
  ENSG00000185010_59 (sequence is synthesized)
ctctctagacccaccgttactgactcgctaccttcgaattcacccccagagttgggtgcaccagattgccctgaggatggaggttctgggctgcgaggcacaggacctctactgagggtg

SEQ ID NO: 665664 - DNA, 120 bp, Artificial Sequence
  ENSG00000185010_60 (sequence is synthesized)
gccactgcagcacctgccactgccgtcacctctccctcctcagctccagggcagtgtccctccctggcttgccttctacctttgtgctaaatcctagcagacactgccttgaagcctcct

SEQ ID NO: 665665 - DNA, 120 bp, Artificial Sequence
  ENSG00000185010_61 (sequence is synthesized)
gaattaactatcatcagtcctgcatttctttggtggggggccaggagggtgcatccaatttaacttaactcttacctattttctgcagctgctcccagattactccttccttccaatata

SEQ ID NO: 665666 - DNA, 120 bp, Artificial Sequence
  ENSG00000185010_62 (sequence is synthesized)
actaggcaaaaagaagtgaggagaaacctgcatgaaagcattcttccctgaaaagttaggcctctcagagtcaccacttcctctgttgtagaaaaactatgtgatgaaactttgaaaaag

SEQ ID NO: 665667 - DNA, 120 bp, Artificial Sequence
  ENSG00000185010_63 (sequence is synthesized)
atatttatgatgttaacatttcaggttaagcctcatacgtttaaaataaaactctcagttgtttattatcctgatcaagcatggaacaaagcatgtttcaggatcagatcaatacaatct

SEQ ID NO: 665668 - DNA, 120 bp, Artificial Sequence
  ENSG00000185010_64 (sequence is synthesized)
tggagtcaaaaggcaaatcatttggacaatctgcaaaatggagagaatacaataactactacagtaaagtctgtttctgcttccttacacatagatataattatgttatttagtcattat

SEQ ID NO: 665669 - DNA, 120 bp, Artificial Sequence
  ENSG00000185010_65 (sequence is synthesized)
gaggggcacattcttatctccaaaactagcattcttaaactgagaattatagatggggttcaagaatccctaagtcccctgaaattatataaggcattctgtataaatgcaaatgtgcat

SEQ ID NO: 665670 - DNA, 120 bp, Artificial Sequence
  ENSG00000185010_66 (sequence is synthesized)
ttttctgacgagtgtccatagatataaagccatttggtcttaattctgaccaataaaaaaataagtcaggaggatgcaattgttgaaagctttgaaataaaataacaatgtcttcttgaa

SEQ ID NO: 665671 - DNA, 120 bp, Artificial Sequence
  ENSG00000185010_67 (sequence is synthesized)
atttgtgatggccaagaaagaaaatgatgatgacattaggcttctaaaggacatacatttaatatttctgtggaaatatgaggaaaatccatggttatctgagataggagatacaaactt

SEQ ID NO: 665672 - DNA, 120 bp, Artificial Sequence
  ENSG00000185010_68 (sequence is synthesized)
tgtaattctaataatgcactcagtttactctctccctctactaatttcctgctgaaaataacacaacaaaaatgtaacaggggaaattatataccgtgactgaaaactagagtcctactt

SEQ ID NO: 665673 - DNA, 120 bp, Artificial Sequence
  ENSG00000185010_69 (sequence is synthesized)
acatagttgaaatatcaaggaggtcagaagaaaattggactggtgaaaacagaaaaaacactccagtctgccatatcaccacacaataggatcccccttcttgccctccacccccataag

SEQ ID NO: 665674 - DNA, 120 bp, Artificial Sequence
  ENSG00000185010_70 (sequence is synthesized)
attgtgaagggtttactgctccttccatctgcctgaccccttcactatgactacacagaatctcctgatagtaaagggggctggagacaaggataagttatagagcagttggaggaagca

SEQ ID NO: 665675 - DNA, 120 bp, Artificial Sequence
  ENSG00000185010_71 (sequence is synthesized)
tccaaagattgcaacccagggcaaatggaaaacaggagatcctaatatgaaagaaaaatggatcccaatctgagaaaaggcaaaagaatggctacttttttctatgctggagtattttct

SEQ ID NO: 665676 - DNA, 120 bp, Artificial Sequence
  ENSG00000185010_72 (sequence is synthesized)
aataatcctgcttgacccttatctgacctctttggaaactataacatagctgtcacagtatagtcacaatccacaaatgatgcaggtgcaaatggtttatagccctgtgaagttcttaaa

SEQ ID NO: 665677 - DNA, 120 bp, Artificial Sequence
  ENSG00000185010_73 (sequence is synthesized)
gtttagaggctaacttacagaaatgaataagttgttttgttttatagcccggtagaggagttaaccccaaaggtgatatggttttatttcctgttatgtttaacttgataatcttatttt

SEQ ID NO: 665678 - DNA, 120 bp, Artificial Sequence
  ENSG00000185010_74 (sequence is synthesized)
ggcattcttttcccattgactatatacatctctatttctcaaatgttcatggaactagctcttttattttcctgctggtttcttcagtaatgagttaaataaaacattgacacatacaaa

SEQ ID NO: 665679 - DNA, 120 bp, Artificial Sequence
  ENSG00000185010_75 (sequence is synthesized)
ttgggacctttactttatggggaagttggagacacactgttggtaagttgaagaaaagatttaaggtcaggtaagaagaaaaagtctggagagttttgagtttctaaaatacctcataat

SEQ ID NO: 665680 - DNA, 120 bp, Artificial Sequence
  ENSG00000185010_76 (sequence is synthesized)
tcagccttgtctccaatggacatgatcttttaaaagctataaatgttacacaaataatagctgattgtatgtatttaaagtttgagtatatagaataaaaatttaatgtcacccactaaa

SEQ ID NO: 665681 - DNA, 120 bp, Artificial Sequence
  ENSG00000185010_77 (sequence is synthesized)
agtccatctgctttctgtccatagaggttagcctgttctggagatttcctatagatggaattatacgaccaaatgtgaggccgtgtgtgtctggctgctttcacttagcgtaatggtttc

SEQ ID NO: 665682 - DNA, 120 bp, Artificial Sequence
  ENSG00000185010_78 (sequence is synthesized)
atcagggtgcatccatgtagaggcatgaatcactacttccttcctttgaatgactgagtacgattctgttgtatgaataggaggccacattttgtttacccactcgtcagttgatggaca

SEQ ID NO: 665683 - DNA, 120 bp, Artificial Sequence
  ENSG00000185010_79 (sequence is synthesized)
ggttatttcccccttctggctattgtgagtggcactgccatgaccatctctctacaggtttttctttgaatatctcttttcagttcttttgggtctatttctagcagtcaaactgctggc

SEQ ID NO: 665684 - DNA, 120 bp, Artificial Sequence
  ENSG00000185010_80 (sequence is synthesized)
tcgtgtggtaattctgtttaacttattgaggaaccaccaaactgatttccacagcagctgtaatctttcgcattcccaacagtagtgcatgagagtcccaatttcttcacagcctcatca

SEQ ID NO: 665685 - DNA, 120 bp, Artificial Sequence
  ENSG00000185010_81 (sequence is synthesized)
aaacctgttttctgtttgcctcattttgttttgtttacagtagccatcctactgggtgtcaagtgctatctcatggtggttttcattcgtatttcccaaatggctaatgatgttgctgtg

SEQ ID NO: 665686 - DNA, 120 bp, Artificial Sequence
  ENSG00000185010_82 (sequence is synthesized)
gtttgagtgcatcccccaaattgtgtgtcttggaaacttaatccccaaattcacatgttgattggaggcgcagcctctgagacggtaattaggattagataaggtcatcggggtgagacc

SEQ ID NO: 665687 - DNA, 120 bp, Artificial Sequence
  ENSG00000185010_83 (sequence is synthesized)
cccaggatgcgactggtggctttataagaataggaagagaggcctgaaacgacatacacgctcttgccctctcgccgtgtgataccctctgccgtccccagatgccgggtcacttcccag

SEQ ID NO: 665688 - DNA, 120 bp, Artificial Sequence
  ENSG00000185010_84 (sequence is synthesized)
tccccagaacgggtgtagaaatacaaccgactgttgcagattgatcttggatactgcaactttgctgagccgaatatgctttgctgagcatactcagacagggttggcatattagtccgt

SEQ ID NO: 665689 - DNA, 120 bp, Artificial Sequence
  ENSG00000185010_85 (sequence is synthesized)
tcctacactgctataaagaactgcctgagaatgggtaattcctaaagaaaagaggtttaattgcctcatggttctgcaggctgtacaaggcttctgcttctgggcaggcctcaggaaacg

SEQ ID NO: 665690 - DNA, 120 bp, Artificial Sequence
  ENSG00000185010_86 (sequence is synthesized)
tgcaatcatggcggaaggcgaaggggaagcaagcaccttcttcacatgttggagcaggaggaagagagagagaacgcacgcaaagggggaagcgctgcacattttcaaacaatcatcaga

SEQ ID NO: 665691 - DNA, 120 bp, Artificial Sequence
  ENSG00000185010_87 (sequence is synthesized)
attcccacggcggcagcggaagagggagggccgggcgcgccgcggctgcttgcagtctccgcaagcggctacatcacagagctcagcgtgcggtgtcacaggccccgcggtcccgcccaa

SEQ ID NO: 665692 - DNA, 120 bp, Artificial Sequence
  ENSG00000185010_88 (sequence is synthesized)
cccctcggcgggctgccgccgtgcccgcgccggctccccagcccgagcctgccccttgccctgatgaggtgcaaagagcgggatcggaggcggggcctggccgggctgtgagcggcgtat

SEQ ID NO: 665693 - DNA, 120 bp, Artificial Sequence
  ENSG00000185013_0 (sequence is synthesized)
agcaagggaagtgacaggaaatggagctggggagacaaaaatgtggataacaacaaaagaatttcaacaggtaaaaaaatgagtcaaacatctctcaaacagaaaaagaatgagcctgga

SEQ ID NO: 665694 - DNA, 120 bp, Artificial Sequence
  ENSG00000185013_1 (sequence is synthesized)
atgaggtcctcaaaagagagtctagaagcagaaaaaagaaaggaatctgacaaaacaggagttcgtctgagcaatcagatgaggcgtgcagtcaatccgaatcactcgctgagatgttgc

SEQ ID NO: 665695 - DNA, 120 bp, Artificial Sequence
  ENSG00000185013_2 (sequence is synthesized)
cccttccagggtcactcgtcgtgtagacgctgcctttgtgcagctgagggaacagcccttggcccctgccacacaatacgtatttatattcacatgtgcctgttgtgggagcagggccag

SEQ ID NO: 665696 - DNA, 120 bp, Artificial Sequence
  ENSG00000185013_3 (sequence is synthesized)
cagatcaccatgatgaggggatcacaagaatcatcactgcggaagacagactctcgagggtaccttgtgcgcagtcaatggtctagaatatcccggagcccatccaccaaggctccatcc

SEQ ID NO: 665697 - DNA, 120 bp, Artificial Sequence
  ENSG00000185013_4 (sequence is synthesized)
atagatgagcctagaagcaggaacaccagtgctaagctccccagcagctccacgagctcccggactccatccacctccccaagcctgcatgactcctcaccgccgccgctgtccgggcag

SEQ ID NO: 665698 - DNA, 120 bp, Artificial Sequence
  ENSG00000185013_5 (sequence is synthesized)
ccctcgctccagccacccgcgtcgccccagctgccccggtcgctggactcgcggcctcccacgcccccagagcccgatcctggctcccggcgcagcaccaaaatgcaagagaatccggag

SEQ ID NO: 665699 - DNA, 120 bp, Artificial Sequence
  ENSG00000185013_6 (sequence is synthesized)
gcctgggcccaaggcatcgtgcgggaaatccgccagacccgggactcgcagccgctggaatattcgcgcacgtcccccaccgagtggaagtcctccagccagcgcagggggatctacccc

SEQ ID NO: 665700 - DNA, 120 bp, Artificial Sequence
  ENSG00000185013_7 (sequence is synthesized)
gcctccacccagctggaccgcaactctctgtccgagcagcagcagcagcagcgggaggacgaggacgactacgaggctgcctactgggcatccatgaggtcgttctacgagaagaacccg

SEQ ID NO: 665701 - DNA, 120 bp, Artificial Sequence
  ENSG00000185013_8 (sequence is synthesized)
agctgctcgcgcccctggccgcccaaacccaagaacgccatcaccattgctctctcatcctgcgcgctcttcaacatggtggacggcaggaaaatctacgagcaagagggtctggaaaag

SEQ ID NO: 665702 - DNA, 120 bp, Artificial Sequence
  ENSG00000185013_9 (sequence is synthesized)
tacatggagtatcagctcaccaatgagaacgtcatcctgaccccgggcccggcgttccgcttcgtcaaggcactacagtatgtcaatgctagactccgtgatctatatcctgatgaacag

SEQ ID NO: 665703 - DNA, 120 bp, Artificial Sequence
  ENSG00000185013_10 (sequence is synthesized)
tacggcttactgattgaccgcttctgtctgaccgggggaaaagaccccattggctatttgaaggcatatcttaccaacttgtatattgctgcagattctgaaaaagtgcaagaggcaata

SEQ ID NO: 665704 - DNA, 120 bp, Artificial Sequence
  ENSG00000185013_11 (sequence is synthesized)
caagaaggtattgcctctgcgacaatgtttgatggagccaaagacatggcttactgtgacactcagctccgtgtagcctttgatggggatgctgtcctcttctctgatgagtctgaacat

SEQ ID NO: 665705 - DNA, 120 bp, Artificial Sequence
  ENSG00000185013_12 (sequence is synthesized)
tttaccaaggagcatgggctcgacaaattcttccagtatgatacattatgtgaaagtaagcctcttgctcagggtcccctaaaaggctttctggaagatttaggcagactgcaaaagaag

SEQ ID NO: 665706 - DNA, 120 bp, Artificial Sequence
  ENSG00000185013_13 (sequence is synthesized)
ttctatgccaaaaatgaacggttactttgtcctatcaggacctacctggttacagctaggagtgcagccagttcaggcgcccgtgtgctgaagacccttcgacgctggggtctagagata

SEQ ID NO: 665707 - DNA, 120 bp, Artificial Sequence
  ENSG00000185013_14 (sequence is synthesized)
gacgaagctcttttccttgctggagcccccaaaagtcccatcttggtgaagatccggccccacatcttctttgatgaccacatgttccacattgaaggggcacagaggttaggttccatc

SEQ ID NO: 665708 - DNA, 120 bp, Artificial Sequence
  ENSG00000185013_15 (sequence is synthesized)
gcagcttatggctttaataaaaaattcagtagttaggggcagggaggagaaataaagtggtgatagtctggtgttacagaagccacttcttttggctctctaggataattagataggtat

SEQ ID NO: 665709 - DNA, 120 bp, Artificial Sequence
  ENSG00000185013_16 (sequence is synthesized)
ttcagaaaattggaccttaaaactttgcttctttggaaaggttttctcctgattttttggaaaaccttttgaaccctcaagttaccatcaaactacttctctttgaactaccaatactgt

SEQ ID NO: 665710 - DNA, 120 bp, Artificial Sequence
  ENSG00000185013_17 (sequence is synthesized)
tgaatgccattacacctatctctgtgtaagtcataatgatgactctttaggataagtttagaacttgaatatttgcatgcttaaggcactgttttagaagcttacttagttttataaaca

SEQ ID NO: 665711 - DNA, 120 bp, Artificial Sequence
  ENSG00000185013_18 (sequence is synthesized)
ctgctcatttttggatgtttgtagataacaatgaattgttacccatcagcattgtagaatagtgtcttcaaaggtagaaggagtatggttaagcacactcttgaaaactggagctttgta

SEQ ID NO: 665712 - DNA, 120 bp, Artificial Sequence
  ENSG00000185013_19 (sequence is synthesized)
ttctgtgactgctatggctagctttgtaaccaaagcaaaatgagaatttcactctacctgcatgagtataacaattttgatactgctcatttagaaataaatcatctggttgttcctcca

SEQ ID NO: 665713 - DNA, 120 bp, Artificial Sequence
  ENSG00000185013_20 (sequence is synthesized)
gggtactttctaagataagccttaaacagaaacccctaagaaaggttctctgaaaattatttggtgggttaaatgcctctgatccacagagtttcatatttgaagtctccggctttgggc

SEQ ID NO: 665714 - DNA, 120 bp, Artificial Sequence
  ENSG00000185013_21 (sequence is synthesized)
ctggcaggctggcacatccatatttgtatggaaaaaaaaaaaaaagaccctacgctaccacttcaaaaagtgacatgaagtgtagtatcctggcccttcattgtcattctctcatgattt

SEQ ID NO: 665715 - DNA, 120 bp, Artificial Sequence
  ENSG00000185013_22 (sequence is synthesized)
ttgttttgttttcaacaaaaattggttggtcattaaatatatcatatgttaggcacagtgacctggttattttcacatgttacttcattttcttatcaaattaaatgtttgtgacatagt

SEQ ID NO: 665716 - DNA, 120 bp, Artificial Sequence
  ENSG00000185013_23 (sequence is synthesized)
gatgagcctagaagcaggaacaccagtgctaagaaatatcaaacagctgaggcctagaaatgtccgagtcccttaagccctacttaaggagctgagatgaaccagcacccatcaaaggtc

SEQ ID NO: 665717 - DNA, 120 bp, Artificial Sequence
  ENSG00000185013_24 (sequence is synthesized)
taggaatggaataggcagaagggacagatccttgaccggagatgggcaggcaggcctcgacttcagacgcccattgtcttgctgcagctccccagcagctccacgagctcccggactcca

SEQ ID NO: 665718 - DNA, 120 bp, Artificial Sequence
  ENSG00000185013_25 (sequence is synthesized)
atgtgcctgttgtgggagcagggccagcagatcaccatgatgagggtgagcagagatcacactaccgattctggaggggaaccacagacaacctgggtgaggggaagaatatggcaaata

SEQ ID NO: 665719 - DNA, 120 bp, Artificial Sequence
  ENSG00000185013_26 (sequence is synthesized)
gaaactcttttactttgctgttccggggggtccttcattcttgtttctcctaaaagaaaagcttgagggctccattccttttcagcagctgccttagagtccccctgcaacctcagtggg

SEQ ID NO: 665720 - DNA, 120 bp, Artificial Sequence
  ENSG00000185013_27 (sequence is synthesized)
gcaccagttgccctcacctttacagtctggtaaaaaatggtggatatattgtttcagcatctgttaacaggcttatcctcgagggaagaagtgaggaaaagggaggaacaatggtgaacc

SEQ ID NO: 665721 - DNA, 120 bp, Artificial Sequence
  ENSG00000185013_28 (sequence is synthesized)
atactaatatccacataagaggagtcacagtgaaaaaatatgtttgcatcttggttttggatgctctttcaagtggacccccacatagatgctccaaacagaagtgaggactagaccaga

SEQ ID NO: 665722 - DNA, 120 bp, Artificial Sequence
  ENSG00000185013_29 (sequence is synthesized)
gttagaatagtacagaagagttcaggttgagttaagagtcattgaggccagggatcttctcactgggtgctgctatattcagcctgacatgactattctgcaggcacacgtatagaagga

SEQ ID NO: 665723 - DNA, 120 bp, Artificial Sequence
  ENSG00000185013_30 (sequence is synthesized)
gttccgcttcgtcaaggtattctgcaagctgtctttggcccgccaggacactcgatggcgagggagggacccaggccaacccttgggagggcatccaatttcccagatcattcctagccc

SEQ ID NO: 665724 - DNA, 120 bp, Artificial Sequence
  ENSG00000185013_31 (sequence is synthesized)
acccttgtcattcttgtctccttctagctgacccaggtcagtttatgatttcgcacaggcttccagactgtggaggaagggactccagcccacagccctagatttggtatgttagtcttc

SEQ ID NO: 665725 - DNA, 120 bp, Artificial Sequence
  ENSG00000185013_32 (sequence is synthesized)
cctaagtgaagtcctaatcatgagacttgtaacagaaacctctctccctcgaaggagtgctaagaagccataatgagtttatgatcctgagtagtagaaataaaacgccatattacagtg

SEQ ID NO: 665726 - DNA, 120 bp, Artificial Sequence
  ENSG00000185015_0 (sequence is synthesized)
attcacttcctggaagtcctctaggcaacactttcctctcccgagtgacgactcctcagaaggcaggagatcccccccggaaacctttctctctccgtctctccctctaactcaaatctc

SEQ ID NO: 665727 - DNA, 120 bp, Artificial Sequence
  ENSG00000185015_1 (sequence is synthesized)
tcattcccgagtccaaactaagagagactcgcgccccaggagtcagccagcggcgcgggcgccttccccgcacgcctctgccgtctggaggacgcaggcgggagcgccccggaccgggtt

SEQ ID NO: 665728 - DNA, 120 bp, Artificial Sequence
  ENSG00000185015_2 (sequence is synthesized)
cacggtctcgcactcctgccgccggcgccccgcggtcccgccctagcaggctccttcccgggcccctccccgctccctcctctttctcgctgctcagtcacatctttctcttccttccac

SEQ ID NO: 665729 - DNA, 120 bp, Artificial Sequence
  ENSG00000185015_3 (sequence is synthesized)
cccgagggaccatgtcgaggctcagctggggataccgcgagcacaacggtcctattcactggaaggaatttttccctattgctgatggtgatcagcaatctccaattgagattaaaacca

SEQ ID NO: 665730 - DNA, 120 bp, Artificial Sequence
  ENSG00000185015_4 (sequence is synthesized)
aagaagtgaaatatgactcttccctccgaccacttagtatcaagtatgacccaagctcagctaaaatcatcagcaacagcggccattccttcaatgttgactttgatgacacagagaaca

SEQ ID NO: 665731 - DNA, 120 bp, Artificial Sequence
  ENSG00000185015_5 (sequence is synthesized)
aatcagttctgcgtggtggtcctctcactggaagctacaggttacggcaggttcaccttcactgggggtccgctgatgaccacggctccgagcacatagtagatggagtgagctatgctg

SEQ ID NO: 665732 - DNA, 120 bp, Artificial Sequence
  ENSG00000185015_6 (sequence is synthesized)
cagagctccatgttgttcactggaattcagacaaataccccagctttgttgaggcagctcatgaaccagatggactggctgtcttgggagtgtttttacagattggtgaacctaattccc

SEQ ID NO: 665733 - DNA, 120 bp, Artificial Sequence
  ENSG00000185015_7 (sequence is synthesized)
aactgcaaaagattactgacactttggattccattaaagaaaagggtaaacaaactcgattcacaaattttgacctattgtctctgcttccaccatcctgggactactggacatatcctg

SEQ ID NO: 665734 - DNA, 120 bp, Artificial Sequence
  ENSG00000185015_8 (sequence is synthesized)
gttctcttacagttccacctcttcttgagagtgtcacatggattgttttaaagcaacctataaacatcagctctcaacagctggccaaatttcgcagtctcctgtgcacagcggagggtg

SEQ ID NO: 665735 - DNA, 120 bp, Artificial Sequence
  ENSG00000185015_9 (sequence is synthesized)
aagcagcagcttttctggtgagcaatcaccgcccaccacagcctctaaagggccgcaaagtgagagcctctttccattaaaaattgtcaccaatgaactcccccaaacatggctgtggag

SEQ ID NO: 665736 - DNA, 120 bp, Artificial Sequence
  ENSG00000185015_10 (sequence is synthesized)
agacaacaaaacaaaacaaagcacaaaagtctctgccaacaactcttttgtggaattctaatttataggaaacattttagtatgagcttcagtgtcacaaagaaaaccagatctctctct

SEQ ID NO: 665737 - DNA, 79 bp, Artificial Sequence
  ENSG00000185015_11 (sequence is synthesized)
tatgagcttcagtgtcacaaagaaaaccagatctctctctcttttttttttattttttttagtacagtcttggctaatt

SEQ ID NO: 665738 - DNA, 120 bp, Artificial Sequence
  ENSG00000185015_12 (sequence is synthesized)
gtgatcctcccacctcagcctccagagtaagtaggaccacaggcatgcacaagcatgcctggctaatttttaaattttttttttttaagaaatagggtcttgctatgttgcccaggctgg

SEQ ID NO: 665739 - DNA, 120 bp, Artificial Sequence
  ENSG00000185015_13 (sequence is synthesized)
taaagtaggcctcctgcctttgcctctcaaagtgctgggatttcaggcatgggtcatcaagcccagctgacccagagctctttactaacttatctgtctcttatttgcactcatggatat

SEQ ID NO: 665740 - DNA, 120 bp, Artificial Sequence
  ENSG00000185015_14 (sequence is synthesized)
tcacagtaagcattgtttgacatatattaaaacccatgaaatatgtctacttcaacctgtgtgaaaatatagttaacattgcaaactttagaatgtattaaaaattttaccttgccatag

SEQ ID NO: 665741 - DNA, 120 bp, Artificial Sequence
  ENSG00000185015_15 (sequence is synthesized)
agactgaattagtcacagctctcagtgatgttagatggaaacttatatctcaaatgataggattgtgatgctttttttgtaacaagtgattctgcttaatattttgttattccagttcat

SEQ ID NO: 665742 - DNA, 120 bp, Artificial Sequence
  ENSG00000185015_16 (sequence is synthesized)
ttatattgctaactctcattgcatgatacctttaataaaatgaacaatataagagttaagggcaatgggataaagctacttaatgtgtctcctccactgatcaaaaatattccatatagt

SEQ ID NO: 665743 - DNA, 120 bp, Artificial Sequence
  ENSG00000185015_17 (sequence is synthesized)
cttggtgaggaattccccaggatataaatggctatttacactgtaatgaattataccatatatgatattcactcagtaatgttaataatgaactggctaataattgacaagatgcagtgc

SEQ ID NO: 665744 - DNA, 120 bp, Artificial Sequence
  ENSG00000185015_18 (sequence is synthesized)
ctgccagtttatgacattaacttggtttgaaactaacatatgacatagtaccagtgcagtcagagctgcccttaggcatgatgaacatgtggcccgtttttgcctggtgttttggcagca

SEQ ID NO: 665745 - DNA, 120 bp, Artificial Sequence
  ENSG00000185015_19 (sequence is synthesized)
aagcaggaagcaattttgtgtgggtcattgttctgtcaatttgtggaaaaaattacttcagtctcatataaatatagaatgggtccataaacccttcaactcatttccatggcaaaactc

SEQ ID NO: 665746 - DNA, 120 bp, Artificial Sequence
  ENSG00000185015_20 (sequence is synthesized)
acttttctttttatacatgtccttcagtctcttaattttgtcaggtggagcttgatcttaattttaacctattatcttttatttttgtttgtttttggtgaaggataagagtggtgtttc

SEQ ID NO: 665747 - DNA, 120 bp, Artificial Sequence
  ENSG00000185015_21 (sequence is synthesized)
ttttgccctttctggtacaaacagagggacactaagcattaacttaataatcacatttaagacttgaacacatgctacccttttgtcatcttctgacataagtttacctgagtttccttg

SEQ ID NO: 665748 - DNA, 88 bp, Artificial Sequence
  ENSG00000185015_22 (sequence is synthesized)
ttttgtcatcttctgacataagtttacctgagtttccttgatttggaagatttgtttcttttatctctcttcctctggagacggagtc

SEQ ID NO: 665749 - DNA, 87 bp, Artificial Sequence
  ENSG00000185015_23 (sequence is synthesized)
ttgctggaattacagttgtgagccaccacacctggcttgaatgtagattttaataattgaatttattctgccgtgttgatagaataa

SEQ ID NO: 665750 - DNA, 120 bp, Artificial Sequence
  ENSG00000185015_24 (sequence is synthesized)
ttttaataattgaatttattctgccgtgttgatagaataactgaatatcagtaaattgtgtaacagtggtggatactgttgcataagatgagctcctgaagagtgaagctaattctttgg

SEQ ID NO: 665751 - DNA, 120 bp, Artificial Sequence
  ENSG00000185015_25 (sequence is synthesized)
tcaatgttcttttcccctcagtgtctagtttaaggcttttagaagattgatctgtagcaattatttaatgaattgaatatttaaaaaattttttatttgctgtctttggtaattatctct

SEQ ID NO: 665752 - DNA, 120 bp, Artificial Sequence
  ENSG00000185015_26 (sequence is synthesized)
ctgcttgaaattaaatgcactataagttaatataacaagtaaaatacattgtcttttgaaaatagtttctttttaaaggaatactaattaattgtaacttgtaaaaccaaaagttctaat

SEQ ID NO: 665753 - DNA, 120 bp, Artificial Sequence
  ENSG00000185015_27 (sequence is synthesized)
ggtttttaaaaaccagtgttgagtggaaaagtgtttctttagtttggaaagacctgtgaagtatcctagtcagggaaagaacctgttttctggaagaatgtaagttgctatatgtggagg

SEQ ID NO: 665754 - DNA, 120 bp, Artificial Sequence
  ENSG00000185015_28 (sequence is synthesized)
ggcatgtaggacaggggttctaattactgtctgtgagagttactactttgtaacttatggtttctgcttcagtattgtgttggttctgtattataaattgcaccttaatagaccaaaaat

SEQ ID NO: 665755 - DNA, 120 bp, Artificial Sequence
  ENSG00000185015_29 (sequence is synthesized)
atctatacagcactgatttccttgaatattgtgtgttaattgatatatcttctagaggcaaaaggtttaaatgtgttaaaatggttatattgcctcctttttaaacaaattaaagagttg

SEQ ID NO: 665756 - DNA, 120 bp, Artificial Sequence
  ENSG00000185015_30 (sequence is synthesized)
taaatactagtgtagatctcttttgtttaccacagcaaatactgattttatgattgttaagcatttcatattttaatttaaattggattcaaccacaataaagaaaatgagaaaagcttt

SEQ ID NO: 665757 - DNA, 120 bp, Artificial Sequence
  ENSG00000185015_31 (sequence is synthesized)
attagcatcccttgtcttccgcggtgttgcagacttatcctcagctcaagcgagtttggggcgttatggagccagccaagtctccccttgctggcgtgggtacttgtgcagaaacttccc

SEQ ID NO: 665758 - DNA, 120 bp, Artificial Sequence
  ENSG00000185015_32 (sequence is synthesized)
gaggtgcttctgagactgcacagtgaagaccgccgcaccggaggtcagcgctccgccgcggactcccggctgactctgccactctcccaggaggaggcgctgtgcacctctgggtggttt

SEQ ID NO: 665759 - DNA, 120 bp, Artificial Sequence
  ENSG00000185015_33 (sequence is synthesized)
ccagggctcggctggcggtagagggagccttgaggttggaaaagatctagagctataatctccgaaaggaagatttgtaatgcactgcgagttagaaatgtttttctcactgcagcttcc

SEQ ID NO: 665760 - DNA, 120 bp, Artificial Sequence
  ENSG00000185015_34 (sequence is synthesized)
agcactgcaaaggcacaagaaaccaggcacagtataaaatatacaaataaaacaggtaccaaggaacttaaaacattcaacccataacgtcgtctaggtttttctgctttaagaaaattg

SEQ ID NO: 665761 - DNA, 120 bp, Artificial Sequence
  ENSG00000185015_35 (sequence is synthesized)
actcaattcttccaagagaataaccctattaaaggtcaaattcctggaaatatctggagggtaagaaccagtgaatgaaaagagatggttaatgctttgcagtgaaggaaaagtgactcg

SEQ ID NO: 665762 - DNA, 89 bp, Artificial Sequence
  ENSG00000185015_36 (sequence is synthesized)
agagatggttaatgctttgcagtgaaggaaaagtgactcgcatcagtagattactatgaagctgcaagagggtctcactctgtcacccg

SEQ ID NO: 665763 - DNA, 71 bp, Artificial Sequence
  ENSG00000185015_37 (sequence is synthesized)
cctccacctcccagacctattcactggaaggaatttttccctattgctgatggtgatcagcaatctccaat

SEQ ID NO: 665764 - DNA, 120 bp, Artificial Sequence
  ENSG00000185015_38 (sequence is synthesized)
tgtgcccctttgtcacaccccatactctccatgtgttgtaactcatgaacagagaatgcttcacggatggcaacaattccttgcctttggacaccaagtaggggtggttgcggcaggatc

SEQ ID NO: 665765 - DNA, 120 bp, Artificial Sequence
  ENSG00000185015_39 (sequence is synthesized)
gcaagtgcttgagactatccctgtggcaccccctaccacagccctaggaacaatagcataagatccttgcaccaataaatgtcacagaaaggatggagttttctgcctttaaatgtaatg

SEQ ID NO: 665766 - DNA, 120 bp, Artificial Sequence
  ENSG00000185015_40 (sequence is synthesized)
gtgactcgcatcagtagattactatgaagctgcaagagggcccagaaaaaaaagtcaccttggatttccattcatgaatacatacttctgtgacataggaggtgtgaaagaagcatttgc

SEQ ID NO: 665767 - DNA, 120 bp, Artificial Sequence
  ENSG00000185015_41 (sequence is synthesized)
atacctagaagaacacttttcgtcttcttgtagcactgcttcttggatgtgataggtgctccacaaatatactattaatttaattaagcaaatttgatttagaataatctcctggccaaa

SEQ ID NO: 665768 - DNA, 120 bp, Artificial Sequence
  ENSG00000185015_42 (sequence is synthesized)
tgcctagggatcttgaacctgaactaattatagtcacaaagaagggcttgcatttgaaatcttcgagggttaagaatggtcaaatacatgtcacaaagacaataaaaatattccaagggc

SEQ ID NO: 665769 - DNA, 120 bp, Artificial Sequence
  ENSG00000185019_0 (sequence is synthesized)
gctgtgaggctcggagtcgccggaggagccagtatctgtgtcgccgccgcccgcggcgtccccggtttggtgttgcggcgcccaccttcgggaggatcaggctgcttctgatgcttggaa

SEQ ID NO: 665770 - DNA, 120 bp, Artificial Sequence
  ENSG00000185019_1 (sequence is synthesized)
gatatcctctcagccacaaagatggtaataaatctttgcctcccacagttcagaccaagaattcactgcaacaagatatcagctgatggttacgaagtagaaaatctcatctctgaagat

SEQ ID NO: 665771 - DNA, 120 bp, Artificial Sequence
  ENSG00000185019_2 (sequence is synthesized)
ctcacaaagagaagtcatggtttcaggacagagtatttcattaagccaccagtctatgtgacagtttcatttccctttaatgtggaaatctgtaggatcaacatagacctcacagctggg

SEQ ID NO: 665772 - DNA, 120 bp, Artificial Sequence
  ENSG00000185019_3 (sequence is synthesized)
ggaggtcagaacgtcactggcctggaaatgtacacatctgcctcatctagcagagtgtcttggaatacgccccagtgccggaccctgggcccagctgagccatctgtcccagacaaggag

SEQ ID NO: 665773 - DNA, 120 bp, Artificial Sequence
  ENSG00000185019_4 (sequence is synthesized)
gcgttcaccttggtaggcaaagtcttactgaaaaaccagagccaagtggtgtttagccacaggggcttcaaggccaggcccccttttggcgcgatggaagccacactcccctcccctgct

SEQ ID NO: 665774 - DNA, 120 bp, Artificial Sequence
  ENSG00000185019_5 (sequence is synthesized)
gttgtggcccaggagctctggaataaaggggctctttcccttagccacgtggcccacttaaggatctgtatcacccatgtgacaggcggcggtatcccttgtatcaagcggttggaagtg

SEQ ID NO: 665775 - DNA, 120 bp, Artificial Sequence
  ENSG00000185019_6 (sequence is synthesized)
tggggtcagccggccaagacctgctcccaggaagtgatagacagcatcctgctggtcacctcagagaacctgcctcaggatgtggctctgcaggctccagccttgcccatggaaagtgac

SEQ ID NO: 665776 - DNA, 120 bp, Artificial Sequence
  ENSG00000185019_7 (sequence is synthesized)
tgtgaccctggggaccagcctgagagccagcaggctccctccagcctgcagaagctggccgagatcattcaggatgtgcctgaggagttcctggatcccatcaccctggagatcatgcct

SEQ ID NO: 665777 - DNA, 120 bp, Artificial Sequence
  ENSG00000185019_8 (sequence is synthesized)
tgtcccatgctgctgccctcaggcaaggtcatcgaccagagcacactggagaagtgtaaccgcagtgaagccacatggggccgagtgcccagtgaccctttcacgggggtagcttttact

SEQ ID NO: 665778 - DNA, 120 bp, Artificial Sequence
  ENSG00000185019_9 (sequence is synthesized)
ccgcactctcagcccctgcctcacccctccctcaaggcccggattgaccatttcctgctccagcactccatccctggctgccacctgcttgggagagcacagacggcattggcagtgatc

SEQ ID NO: 665779 - DNA, 120 bp, Artificial Sequence
  ENSG00000185019_10 (sequence is synthesized)
ccttcttccattgttctgccctctcagaaaaggaagatagagcaggctgaacatgtcccagacagtaactttggtgtaaatgcttcctgtttttctgccacaagccctttggtcttaccc

SEQ ID NO: 665780 - DNA, 120 bp, Artificial Sequence
  ENSG00000185019_11 (sequence is synthesized)
actacctcagagcacactgctaagaaaatgaaagccaccaatgagcccagcctgacacatatggactgctcgacaggtccactgtcccacgagcagaagctgtcacaaagcttggaaatt

SEQ ID NO: 665781 - DNA, 120 bp, Artificial Sequence
  ENSG00000185019_12 (sequence is synthesized)
gccttggcatccacccttggctctatgccctccttcacggcacggctgaccaggggacagctccagcaccttggcacaagagggagcaacacttcctggaggcctggcaccggctcggag

SEQ ID NO: 665782 - DNA, 120 bp, Artificial Sequence
  ENSG00000185019_13 (sequence is synthesized)
cagcctgggagcatcctgggccccgaatgtgcctcctgcaaaagagtattttctccctacttcaaaaaggagccggtgtaccagctgccctgcggccacctcctgtgccgaccctgcctg

SEQ ID NO: 665783 - DNA, 120 bp, Artificial Sequence
  ENSG00000185019_14 (sequence is synthesized)
ggtgagaagcaacgctccctgcccatgacgtgcacagcctgccagcggccggttgctagccaagacgtgctgcgggtccacttctgagtgactgacctccactggaggagacccattgct

SEQ ID NO: 665784 - DNA, 120 bp, Artificial Sequence
  ENSG00000185019_15 (sequence is synthesized)
gggaggagctgagggggaacaggagcagggccacagcacccctgaggtctggccaggccccaggcacagagctgcctgctccctcccggggctcttcttcatcacctcacggtatagcac

SEQ ID NO: 665785 - DNA, 120 bp, Artificial Sequence
  ENSG00000185019_16 (sequence is synthesized)
attgcttctgcgctggtggcaatagggcaacaaagccataggccagagggcggggggatgtccctgcctccctgccaccccccctgcctgagcccaggacccactggagccagccccacc

SEQ ID NO: 665786 - DNA, 120 bp, Artificial Sequence
  ENSG00000185019_17 (sequence is synthesized)
tctcaggagtctctgccttcagggtcatccaaaagtggaccttgggagcagtgggggtgtctgtggagtgcatgactcagccccccgactcgcagccttaataaagcgatggttgacgtc

SEQ ID NO: 665787 - DNA, 120 bp, Artificial Sequence
  ENSG00000185019_18 (sequence is synthesized)
tgctgtgggtttcctcctggtggagtgcctgtctgtgtcacacactcctgtcgcccacctgcacccacacaagtggagctcacagggtagctgtgtgcagtcactgcagcttgccaggct

SEQ ID NO: 665788 - DNA, 120 bp, Artificial Sequence
  ENSG00000185019_19 (sequence is synthesized)
gtcattcctgtcgatgacctgaaaggacacaaactggaattttcaggtctgtcccctgcatggggactcagaacccaggtttgcaggtgggcatacgtggtgggagggtggagggctccc

SEQ ID NO: 665789 - DNA, 120 bp, Artificial Sequence
  ENSG00000185019_20 (sequence is synthesized)
tctggccagtgccagctgtgctcagctggcttcagaaactgctccctgagggggagcgcagcgtttcctcatgcagttggtttcaggaaaaatacttgtttataggctgcatcctttttt

SEQ ID NO: 665790 - DNA, 120 bp, Artificial Sequence
  ENSG00000185019_21 (sequence is synthesized)
cagcccaacatttagctttatggagtgccaaagggaaaatatatccatatccctacaacttggtactctatcagattccagccactagaagaacctcagtgagaaaacacacccgccttt

SEQ ID NO: 665791 - DNA, 120 bp, Artificial Sequence
  ENSG00000185019_22 (sequence is synthesized)
ccctgttcccttctaagcacgtttgggaaggaacagcctaaagatgctttgtaaagctgtattttacccttgagcttagccgcgggtccctgtgaaccggcacattcctttcctttaggc

SEQ ID NO: 665792 - DNA, 120 bp, Artificial Sequence
  ENSG00000185019_23 (sequence is synthesized)
cgtccagagctctagtccacacccaatactttagagatctgggtttggggttagttgcttttttttttttttttttaattgagacagggttggtctctgttgcccaagcttgagggcagt

SEQ ID NO: 665793 - DNA, 120 bp, Artificial Sequence
  ENSG00000185019_24 (sequence is synthesized)
caagcttgagggcagtggtgcaatcataactcattgcagcctcgaactcctgggcttaagggatccttctacctcagcctcccaggtagcaggaactataggcatgtgccaccatgccca

SEQ ID NO: 665794 - DNA, 90 bp, Artificial Sequence
  ENSG00000185019_25 (sequence is synthesized)
aagtgcttggattgcaggcatgagccacttcgcctagccaagcctgcatttttttgagttcctacatcatttgtccacaaagatggcttc

SEQ ID NO: 665795 - DNA, 120 bp, Artificial Sequence
  ENSG00000185019_26 (sequence is synthesized)
tttttgagttcctacatcatttgtccacaaagatggcttcagagaggtggtcacatgctttgctctgcttcctcttggcactgaccttgatgcagccttcacatgagatttgagggtccg

SEQ ID NO: 665796 - DNA, 120 bp, Artificial Sequence
  ENSG00000185019_27 (sequence is synthesized)
catggatggcctgtgccgccctcgctggcgaggctcctgtgtgcccctggctttctgggtctgtgcctctccagaatcttgtcttaccctccggtgtgcttgtgttcttagaaaagcccc

SEQ ID NO: 665797 - DNA, 120 bp, Artificial Sequence
  ENSG00000185019_28 (sequence is synthesized)
cagcctgggcgacggagtgagactccctctcaaaaaaagaaaaaagccccagcatgtagcaaaagcatttcttggtgagtgtgggggctggtgattcccaccttcaccctgtcatggtct

SEQ ID NO: 665798 - DNA, 120 bp, Artificial Sequence
  ENSG00000185019_29 (sequence is synthesized)
caccctgtcatggtctcagggaacagcctgcttcccaccagcagcttgacacccacagtgtgctctggctgctgggagcccatctctcggagaaaccctgtccacccaaccccgagagcc

SEQ ID NO: 665799 - DNA, 120 bp, Artificial Sequence
  ENSG00000185019_30 (sequence is synthesized)
ctagcgtgcagtcagcgtcagcacggcgctcccagatgagggccggactgcctccccttaagcagctgtgttggaggtactgcccagaccgctgcaggtccctggggatctgcatttcta

SEQ ID NO: 665800 - DNA, 120 bp, Artificial Sequence
  ENSG00000185019_31 (sequence is synthesized)
acaggctcctgcccccaagactgctctggtggaaaatccagcctgggagcccctggagtggcaggccctgtcctgggtacaggtggagccacccccaggagttgcgtgtgtttttcttaa

SEQ ID NO: 665801 - DNA, 120 bp, Artificial Sequence
  ENSG00000185019_32 (sequence is synthesized)
ttgaaagacttcccccaaaaggaagtggtcttttcactacccttgccagaaacatgctaggcaccactgggctctgtttctgtcccctagaaaatgggaataaaatttcttttgctgtca

SEQ ID NO: 665802 - DNA, 120 bp, Artificial Sequence
  ENSG00000185019_33 (sequence is synthesized)
accgcgccgggactaagctgcttaatgacttccagagcgatccatccaggaaggtgttttccctctgcaggtcctagactccccctgcctcctcaacaacgtcctccagtggaaaatgtc

SEQ ID NO: 665803 - DNA, 120 bp, Artificial Sequence
  ENSG00000185019_34 (sequence is synthesized)
ccggaagtggggctgtgaggctcggagtcgccggaggagccagtatctgtgtcgccgccgcccgcggcgtccccggtttggtgttgcggcgcccaccttcgggaggatcagttagcatcg

SEQ ID NO: 665804 - DNA, 120 bp, Artificial Sequence
  ENSG00000185022_0 (sequence is synthesized)
aattccgggaagctcgccttacaactccgcgcggcctcggccccctgcgccgcccgccccacaacaaaactcagcgcagcgctcccgggcgcccggttcagagcgacctgcggctcagag

SEQ ID NO: 665805 - DNA, 120 bp, Artificial Sequence
  ENSG00000185022_1 (sequence is synthesized)
cggaggggagactgaccggagcgcggatcgggacagcggccgggacagcggcgagacgcgcgtgtgtgagcgcgccggaccaagcgggcccagaagcgggtctgcagcccagagggcacc

SEQ ID NO: 665806 - DNA, 120 bp, Artificial Sequence
  ENSG00000185022_2 (sequence is synthesized)
ttctgcaaacatgtctgtggatcccctatccagcaaagctctaaagatcaagcgagagctgagcgagaacacgccgcacctgtcggacgaggcgctgatggggctgtcggtgcgcgagct

SEQ ID NO: 665807 - DNA, 120 bp, Artificial Sequence
  ENSG00000185022_3 (sequence is synthesized)
gaaccggcatctgcgcgggctctccgccgaggaggtgacacggctcaagcagcggcgccgcacactcaaaaaccgtggctacgccgccagctgccgcgtgaagcgcgtgtgccagaagga

SEQ ID NO: 665808 - DNA, 120 bp, Artificial Sequence
  ENSG00000185022_4 (sequence is synthesized)
ggagctgcagaagcagaagtcggagctggagcgcgaggtggacaagctggcgcgcgagaacgccgccatgcgcctggagctcgacgcgctgcgcggcaagtgcgaggcgctgcagggctt

SEQ ID NO: 665809 - DNA, 120 bp, Artificial Sequence
  ENSG00000185022_5 (sequence is synthesized)
caagtgcgaggcgctgcagggcttcgcgcgctccgtggccgccgcccgcgggcccgccacgctcgtggcgccggccagcgtcatcaccatcgtcaagtccaccccgggctcggggtctgg

SEQ ID NO: 665810 - DNA, 120 bp, Artificial Sequence
  ENSG00000185022_6 (sequence is synthesized)
ccacggcccggcctcctgctcctagtgcccgcccccgccatgcctcagccacgcccctccggcctcagctccctccccaaagtgcctgagcgccgcctctgtgcccaggtcccatttctc

SEQ ID NO: 665811 - DNA, 120 bp, Artificial Sequence
  ENSG00000185022_7 (sequence is synthesized)
tgcagcactggccccttggtgcacacacattcccttcgtgggccctgtcttcctcttgcagccccccaaactgggaccgaatgaccctgggaaggggaacttgggtaggttggggatggg

SEQ ID NO: 665812 - DNA, 120 bp, Artificial Sequence
  ENSG00000185022_8 (sequence is synthesized)
gcagaggtctggatctgggatcgcccttggctgaaagtttagcctttttagattgagagatacagagccggcttagagaacagctgttgggggagaagagggcacccctcatcttggaaa

SEQ ID NO: 665813 - DNA, 120 bp, Artificial Sequence
  ENSG00000185022_9 (sequence is synthesized)
ttgcactgaagagatgcccccacctctggttgggcctgggggtgcctggccttccgaaactaaaagagtgggtgggaagactagtgaaacccagttcacggatggggaaacaggcctgag

SEQ ID NO: 665814 - DNA, 120 bp, Artificial Sequence
  ENSG00000185022_10 (sequence is synthesized)
gtcacatttcacttagtggttgtgttgggaccaaaacctgggtgtcctcactgctgccctgagtccagccatggttttcagggggacagtggacagggactcagaaatgtggtgggaggg

SEQ ID NO: 665815 - DNA, 120 bp, Artificial Sequence
  ENSG00000185022_11 (sequence is synthesized)
cctccctggcttgggagaccgctctctgcaagggagggggagagaagcagagggagagagaaggtgacacggatggaagagtgggaaggagctggcctggctcagccctaggctgtccct

SEQ ID NO: 665816 - DNA, 120 bp, Artificial Sequence
  ENSG00000185022_12 (sequence is synthesized)
gcagccagggtgtccgggggctggccagtcagagaaagggggccatggactgctgtggcaaatagggagacaaggagacagaccctgcagtcctactacagtctggagtggggtcctaag

SEQ ID NO: 665817 - DNA, 120 bp, Artificial Sequence
  ENSG00000185022_13 (sequence is synthesized)
aagaagggtcccacctcaacccctgtcagtgtccactgtggggtgggggctgacccctgcctttgattgtcattctcctgggaagcccagtctcagtccctcccccaacactgtccacac

SEQ ID NO: 665818 - DNA, 120 bp, Artificial Sequence
  ENSG00000185022_14 (sequence is synthesized)
tgcccctccccactgtttatttattgcacggatctaagttattctccccagccagagcccgagctcctgctccctgggaaaagtggcgtatggccctgagctgggctttatattttatat

SEQ ID NO: 665819 - DNA, 120 bp, Artificial Sequence
  ENSG00000185022_15 (sequence is synthesized)
gccctgagctgggctttatattttatatctgcaaataaatcacattttatcttatatttagggaaagccggagagcaacaacaaaaaatgtttaagccgggcgcggtggctcacatctgt

SEQ ID NO: 665820 - DNA, 64 bp, Artificial Sequence
  ENSG00000185022_16 (sequence is synthesized)
aatcctgtctcaaaaaaaaagttaaaaaatattgcccggctcctagaatttatttatttcctga

SEQ ID NO: 665821 - DNA, 120 bp, Artificial Sequence
  ENSG00000185022_17 (sequence is synthesized)
aaaaatattgcccggctcctagaatttatttatttcctgacttacagcaagcgagttatcgtcttctgtattttgtagactttctaaataaagtcaaattctttctttttccacagagaa

SEQ ID NO: 665822 - DNA, 120 bp, Artificial Sequence
  ENSG00000185022_18 (sequence is synthesized)
cagaatggtcaaagaggacctcctgaggaggtgacattgggcaaagacctaaatgatgaggagtcaccatggggctagaacagtaaagagcacagcctgtgcacagctcccgcggctgga

SEQ ID NO: 665823 - DNA, 120 bp, Artificial Sequence
  ENSG00000185022_19 (sequence is synthesized)
tgaagactgctttaaccagggtggtcaggaaatgtctctctgaggcagtgacatccgggctgacgtgaaagatgagaaagagtcaggcaagtgaacagaagaccagacagccagtgccaa

SEQ ID NO: 665824 - DNA, 120 bp, Artificial Sequence
  ENSG00000185022_20 (sequence is synthesized)
gggcctgtcgcaggaatgagcttggtatgtttgggggacagaaagaagggcactgtggccgaagagcagtggatgaggagagagtggccaaagaaggtgtgtaaacaacctgagctttgt

SEQ ID NO: 665825 - DNA, 120 bp, Artificial Sequence
  ENSG00000185022_21 (sequence is synthesized)
tttgagaagaacattggctggtatagaaagaaagactttggaggcaaagtagggagcctcggaggctgctgccattgtccgggtaagctgatggtgccgagaccaggtgccatgactgga

SEQ ID NO: 665826 - DNA, 120 bp, Artificial Sequence
  ENSG00000185022_22 (sequence is synthesized)
ggtggtgagaaatggtcctatgcaggagacctggagacaccgctagcttgagtcctgaggtggggaggaagggagagggagggatggagccaggctccaaggttttggcttgagcagctg

SEQ ID NO: 665827 - DNA, 120 bp, Artificial Sequence
  ENSG00000185022_23 (sequence is synthesized)
agatggggtggcaagggagcagaggtagggctgacgatcaggagcgggtttttgggccgagtcctctgcagtgcccatctgacacccactggatgcgcagagtgggcagctggctatgag

SEQ ID NO: 665828 - DNA, 120 bp, Artificial Sequence
  ENSG00000185022_24 (sequence is synthesized)
tctggaactcagagaagctgttcgctccggaaatacaaacctggggctcatagccatataaatgtcatttaaagccacgggactggatgagatcattaaggcagaaggtctaggtcgaaa

SEQ ID NO: 665829 - DNA, 120 bp, Artificial Sequence
  ENSG00000185022_25 (sequence is synthesized)
gaagagggccaggaccactacctgtaaaatgagccaatgacacctacacccacggggctctcgcgaggtgtcacgtgaacgcacccagcgagccctggaaccaggcagagaatcgcggca

SEQ ID NO: 665830 - DNA, 120 bp, Artificial Sequence
  ENSG00000185022_26 (sequence is synthesized)
gccccgggggcggggcttccagggggcggggtcatacgggggcggggccgagggaccaagcggccgctcctggccggagggcggccgggtcggtgacgtcaccgcatgactgggttttta

SEQ ID NO: 665831 - DNA, 120 bp, Artificial Sequence
  ENSG00000185022_27 (sequence is synthesized)
aagcgggtgaggaacgcgggaccaggaggacggtgcgcgggaccccaaggcggcagggtttctgcgtcccgggatgcgcctggggtgggcgcccgggcccgatccgtcggggctcccgga

SEQ ID NO: 665832 - DNA, 80 bp, Artificial Sequence
  ENSG00000185022_28 (sequence is synthesized)
gagcggccgtcccggggacgccgaggacggggccgaggccagctcgggggagtgggggtggagacggggccccttcccgg

SEQ ID NO: 665833 - DNA, 120 bp, Artificial Sequence
  ENSG00000185022_29 (sequence is synthesized)
cggcgatctccgcgtccgcccggcgggggcgggggcgctgtgctcctacgtgactcggtgggaacaggccctggcccggcgcccgcgggcggtgcgtgcgcggtttgtttacgtccgagg

SEQ ID NO: 665834 - DNA, 120 bp, Artificial Sequence
  ENSG00000185022_30 (sequence is synthesized)
gcgggcgtgtgttccctggcgggcggcctgggtatcctgcccggtgcgtgcgtgcgctgtgtacctcgggggcgtgtgtgcgtgtgttgtgcttgtgtgtgcgtgtccgcgcgcgcgctc

SEQ ID NO: 665835 - DNA, 120 bp, Artificial Sequence
  ENSG00000185022_31 (sequence is synthesized)
cctggggcctgtacaccagcagtgtgtacctcggagagggcgtgccctgggccggccaccggagtaaacgcggaacaaggacccgagcgaaggaagcggacccgtgcgtcttcgcacggg

SEQ ID NO: 665836 - DNA, 120 bp, Artificial Sequence
  ENSG00000185022_32 (sequence is synthesized)
gtctgggaattctggcccgggccgccccagtcctactacccggggctgtccgtccccggctctccccggagtttcccagggcctccgccacgtgaccccagtgtttgtctcccgcccaga

SEQ ID NO: 665837 - DNA, 120 bp, Artificial Sequence
  ENSG00000185022_33 (sequence is synthesized)
gcccgcgcccgcagccacagggtggggcaaggtatcaaagaccccacccagctgagctaggagtgagggatgtgagccacccccgcttggcaccccggtggatctggtaacaaagtgagt

SEQ ID NO: 665838 - DNA, 120 bp, Artificial Sequence
  ENSG00000185022_34 (sequence is synthesized)
tggagcccaggttcttgtccccagattttggggcttcctggggagggaagaaccaagggactctcgttcgtccccagggttgcccatcccctcagtcccatgagaacaggaagggccaga

SEQ ID NO: 665839 - DNA, 120 bp, Artificial Sequence
  ENSG00000185022_35 (sequence is synthesized)
aaaccttgactgcaagggtgcggcgcagggagaggaccacaggcttttagctagtccgggttctggaggctgtacctgctaggtcgtggaggatggggcggagccggtttccgctctcct

SEQ ID NO: 665840 - DNA, 120 bp, Artificial Sequence
  ENSG00000185022_36 (sequence is synthesized)
ggtagtttcagttcacaagtgggactggtgagactagactgacctacagctggacgccggaagctagctgaggctctgagccagccgacagaccccgagtgccctcaccctgggccaggc

SEQ ID NO: 665841 - DNA, 120 bp, Artificial Sequence
  ENSG00000185022_37 (sequence is synthesized)
agggtcagtaggcattggggatagaactctgactgcacggagggttaatgagtgaggggtggggcctgacctagccgccacccacccactcacccaatagccctgcagaaagcacctgtt

SEQ ID NO: 665842 - DNA, 120 bp, Artificial Sequence
  ENSG00000185022_38 (sequence is synthesized)
tgtcgtagccgcctgcaggatgggctgggggctagagattccttggtcttaatccaccttccccctccacccacccacccacggtctatggaattgtgggaggggagcaattgaacttgc

SEQ ID NO: 665843 - DNA, 120 bp, Artificial Sequence
  ENSG00000185022_39 (sequence is synthesized)
tagggtgaggaaccaatgatcttttgactttggatctttgaaccctgggtgagctctgctacagcagcccggaccctcagtattcccatctaccactgggaactaggtaacagccaggat

SEQ ID NO: 665844 - DNA, 120 bp, Artificial Sequence
  ENSG00000185022_40 (sequence is synthesized)
ggcaggatggtgggtagaagggggaagctctggaagtctgtgcagacagcgtattttccaggtgaattgtggaagagaaagcagggctgacagccccatgccaggagctgggggtaccca

SEQ ID NO: 665845 - DNA, 120 bp, Artificial Sequence
  ENSG00000185022_41 (sequence is synthesized)
agagtaggtggggtttgagtcaggagggttggggccaggagcacaggaaccagacaggcccaccctcaaagctgggcaggaaacattacaaagtagggcctggggtcaggggatgagggg

SEQ ID NO: 665846 - DNA, 120 bp, Artificial Sequence
  ENSG00000185024_0 (sequence is synthesized)
gccagtcctcggctgcgctcaccggtaggccccgctcgggttccgccgaagcccagcccccgcaggtcgcccctccgacgccggcgcgccgcaagggaggccagctcgctcgcagtgggg

SEQ ID NO: 665847 - DNA, 80 bp, Artificial Sequence
  ENSG00000185024_1 (sequence is synthesized)
aggtcgcggctccagtcctcgcgtccccgccgtggtcccggtgcctgtcccatcccgcgggcgcggccgttgcgggcggc

SEQ ID NO: 665848 - DNA, 120 bp, Artificial Sequence
  ENSG00000185024_2 (sequence is synthesized)
gcgaatcggctggagcggggcctcgcgagagcggcgaggcctgggcggctgggcctgggcgggcggcgcgggctgctccggaggctcgggtggcttgagagtcttgggaggctccgggcg

SEQ ID NO: 665849 - DNA, 120 bp, Artificial Sequence
  ENSG00000185024_3 (sequence is synthesized)
gcggtcgccggcatgacgggccgcgtgtgccgcggttgcggcggcacggacatcgagctggacgcggcgcgcggggacgcggtgtgcaccgcctgcggctcagtgctggaggacaacatc

SEQ ID NO: 665850 - DNA, 120 bp, Artificial Sequence
  ENSG00000185024_4 (sequence is synthesized)
atcgtgtccgaggtgcagttcgtggagagcagcggcggcggctcctcggccgtgggccagttcgtgtccctggacggtgctggcaaaaccccgactctgggtggcggcttccacgtgaat

SEQ ID NO: 665851 - DNA, 120 bp, Artificial Sequence
  ENSG00000185024_5 (sequence is synthesized)
ctggggaaggagtcgagagcgcagaccctgcagaatgggaggcgccacatccaccacctggggaaccagctgcagctgaaccagcactgcctggacaccgccttcaacttcttcaagatg

SEQ ID NO: 665852 - DNA, 120 bp, Artificial Sequence
  ENSG00000185024_6 (sequence is synthesized)
gccgtgagcaggcacctgacccgcggccggaagatggcccacgtgattgctgcctgcctctacctggtctgccgtacggagggcacgccgcacatgctcctggacctcagcgacctgctc

SEQ ID NO: 665853 - DNA, 120 bp, Artificial Sequence
  ENSG00000185024_7 (sequence is synthesized)
caggtgaatgtgtacgtgcttggaaagacgtttcttctcttggcaagagagctctgcatcaatgcgccggccatagacccgtgcctgtatattccacgctttgcgcacctgctggaattc

SEQ ID NO: 665854 - DNA, 120 bp, Artificial Sequence
  ENSG00000185024_8 (sequence is synthesized)
ggggagaagaaccacgaggtgtccatgactgccctgaggctcctacagaggatgaagcgggactggatgcacacaggccggcgcccctcgggcctctgcggagcagcgctcctggttgca

SEQ ID NO: 665855 - DNA, 120 bp, Artificial Sequence
  ENSG00000185024_9 (sequence is synthesized)
gccagaatgcatgacttcaggaggactgtgaaggaggtcatcagtgtggtcaaagtgtgtgagtccacgctgcggaagaggctcacggaatttgaagacacccccaccagtcagttgacc

SEQ ID NO: 665856 - DNA, 120 bp, Artificial Sequence
  ENSG00000185024_10 (sequence is synthesized)
attgatgagttcatgaagatcgacctggaggaggagtgcgaccccccctcgtacacagctgggcagaggaagctgcggatgaagcagcttgaacaagtcctgtcaaaaaaactggaggag

SEQ ID NO: 665857 - DNA, 120 bp, Artificial Sequence
  ENSG00000185024_11 (sequence is synthesized)
gttgaaggtgaaatatccagttaccaggatgcaattgagattgaactagaaaacagccggccaaaggccaaggggggcctggccagcctggcaaaagatggctccaccgaggacaccgcg

SEQ ID NO: 665858 - DNA, 120 bp, Artificial Sequence
  ENSG00000185024_12 (sequence is synthesized)
tccagcttgtgtggcgaggaggacacagaggacgaggagctggaagccgcggccagccacctgaacaaagacttataccgggagctccttggtggtgcccccggcagctcggaagcagca

SEQ ID NO: 665859 - DNA, 120 bp, Artificial Sequence
  ENSG00000185024_13 (sequence is synthesized)
ggaagccccgagtggggcggcagacctccggccctggggtccctgctggaccccctccccactgcagccagcctgggcatctcagactccatccgcgaatgcatctcctctcagagcagc

SEQ ID NO: 665860 - DNA, 120 bp, Artificial Sequence
  ENSG00000185024_14 (sequence is synthesized)
gaccccaaagatgcttcaggagacggtgagctggacctcagtggcattgatgacctggagattgacaggtacatcctgaatgagtcggaagcccgcgtgaaggccgagctgtggatgagg

SEQ ID NO: 665861 - DNA, 120 bp, Artificial Sequence
  ENSG00000185024_15 (sequence is synthesized)
ctacaaggaacacaagcccaagaagtcttgcaagcgacgggagccaattcaggccagtaccgccagggaggccatcgagaagatgctggagcagaagaagatctccagcaagatcaatta

SEQ ID NO: 665862 - DNA, 120 bp, Artificial Sequence
  ENSG00000185024_16 (sequence is synthesized)
tagcgtgctccggggcctcagcagcgccggcgggggcagtccgcacagggaggatgcacagcccgagcatagcgccagtgccaggaagctgtcacgaaggaggacgccggccagcagaag

SEQ ID NO: 665863 - DNA, 120 bp, Artificial Sequence
  ENSG00000185024_17 (sequence is synthesized)
tggggctgaccctgtgaccagtgtggggaaaaggttgaggcctctggtgtctacgcagccagcaaagaaggtggccacgggagaggctttgctcccaagctctcccaccctcggagctga

SEQ ID NO: 665864 - DNA, 120 bp, Artificial Sequence
  ENSG00000185024_18 (sequence is synthesized)
gcctgccaggccccaggcggtgctggtggagagcgggcccgtgtcataccacgccgacgaggaggctgacgaggaggagcctgacgaggaggacggggagccctgcgtcagtgccctgca

SEQ ID NO: 665865 - DNA, 120 bp, Artificial Sequence
  ENSG00000185024_19 (sequence is synthesized)
gatgatgggcagcaacgactatggctgtgatggcgatgaggacgacggctactgaagtgtggcctccaggcaggtgatgtcctggcagggggcctcgcgggtctcctcagcatcagacgg

SEQ ID NO: 665866 - DNA, 120 bp, Artificial Sequence
  ENSG00000185024_20 (sequence is synthesized)
gcttccaggaccgcagcaggcaggccccagcgccgagactcctggtgacaggtggcacctgtcccacagccctcgtcccatgtggaacttaccattgggattgtgtttctattcagcaag

SEQ ID NO: 665867 - DNA, 120 bp, Artificial Sequence
  ENSG00000185024_21 (sequence is synthesized)
ggaaaccggaccaagcgtctgcatgtgtgtgatcagatgtgggccgggtgtgtgcagggctgggtcccgctgcctgccgtcgactcatccaaggaccctccaaggctggcagtgtggtgt

SEQ ID NO: 665868 - DNA, 120 bp, Artificial Sequence
  ENSG00000185024_22 (sequence is synthesized)
tgctactattaaggaaacaggcttggggcagccccactgctggtccaagtgtgtggagggctgagtgtgctggccctgtgactcaggaccagctctggagtctccagcccaccctccgca

SEQ ID NO: 665869 - DNA, 120 bp, Artificial Sequence
  ENSG00000185024_23 (sequence is synthesized)
ccgtcccctcctgagcagcactcggcgccagcagcctctgccagagtggaagccagagccctgcaggtgtccggcgcagccgtgggagctgaggatctggcacttgagaggcagcagctc

SEQ ID NO: 665870 - DNA, 120 bp, Artificial Sequence
  ENSG00000185024_24 (sequence is synthesized)
cttgaaggtcctctgcctccagctgtggccctgcatccagatacctgcctcgtccgaggcagacacccccacccctgcctcctccagacccccctccccgctgcctgcaccgcctggagc

SEQ ID NO: 665871 - DNA, 120 bp, Artificial Sequence
  ENSG00000185024_25 (sequence is synthesized)
agcatgggggtcagacccctgctccagggccacttgagttgtgggcccaggagccctgcggctgccggcaggtgaactgagtgcccgacagctgagaccggcgcccacccgtcctgagca

SEQ ID NO: 665872 - DNA, 120 bp, Artificial Sequence
  ENSG00000185024_26 (sequence is synthesized)
tagctctgtaggcagtgcgggcatagcctgcatagtgtcctggcgctgggagttccccgtggacagagccagagggcagtggcgctccctgtcagagctggatcaggccccccatcgagg

SEQ ID NO: 665873 - DNA, 120 bp, Artificial Sequence
  ENSG00000185024_27 (sequence is synthesized)
agggagggcagacggaggcccgagagcctccccaggcctcttcgtgggaaggccccagtaccactcgtaggaggtctcagctctggcatggctgccccggatgtggccgagggggcttca

SEQ ID NO: 665874 - DNA, 120 bp, Artificial Sequence
  ENSG00000185024_28 (sequence is synthesized)
ccctgtgtccttaggagggggtggccttgaggcagagccgtgcctcactgacccccaggggcctcatcctccccatggaatgggctgtatgtcctgccccaacttggcccgcagcaggcc

SEQ ID NO: 665875 - DNA, 120 bp, Artificial Sequence
  ENSG00000185024_29 (sequence is synthesized)
agacccccctacccccgcccagagctcagtagccagcctgggtcctgccagggcttctcgagggcttgggggaagaatagatttagtaaagcaggaagatctgttgttacttaacagaaa

SEQ ID NO: 665876 - DNA, 120 bp, Artificial Sequence
  ENSG00000185024_30 (sequence is synthesized)
ccgccaaggacacacccaccgaggccacagctgcgatttcatagtgtgggaccccactggcaaagacacgctggctgctgtggccgtggtttctgtcccagccgtctgtttccatagaaa

SEQ ID NO: 665877 - DNA, 120 bp, Artificial Sequence
  ENSG00000185024_31 (sequence is synthesized)
aaggtaacgggcataagcagtttccaggagaaatacaaatggccagagtggagacagcctacatgtccatcagcaacagaaaggatcagcaggttgtggtgggtccatttggggaatgca

SEQ ID NO: 665878 - DNA, 120 bp, Artificial Sequence
  ENSG00000185024_32 (sequence is synthesized)
gtgagaaggaataacttacagcagcacacaagacctgggcgacagctgtctccgggggtgccaggatagaattgctgagccgccagagacccgtgcctgtatattccacgctttgcgcac

SEQ ID NO: 665879 - DNA, 120 bp, Artificial Sequence
  ENSG00000185024_33 (sequence is synthesized)
gggaggtgcgtggcatggggcactggctttgctgatgaggagaccagacttcagaggccgtgtcacctggcctgggccgcacagctggtgcatgccaagctcgcgtgcagacgaagctcc

SEQ ID NO: 665880 - DNA, 120 bp, Artificial Sequence
  ENSG00000185024_34 (sequence is synthesized)
agaggcctggctgtcaggagggttcctccccgaggacacacacgcaacctcctggaccgccaggctttagacttttaaaacttccatatgcaggaaaccccacaggacgcagccagcatc

SEQ ID NO: 665881 - DNA, 120 bp, Artificial Sequence
  ENSG00000185024_35 (sequence is synthesized)
tcgggtcatgggtgcacctgtcaccgcagtcctgggctaaacagtgaacaggagctctgtgtctctgtggtcgttacagttgtagtgaatgttccctgggagagtcctcttcagaagata

SEQ ID NO: 665882 - DNA, 120 bp, Artificial Sequence
  ENSG00000185024_36 (sequence is synthesized)
tttgcggtattttcaacaaaggactctccaggatggaggagcaactacaagtcaggaaggaaaaggctgacaacccagttttttaaaaaacgggcaaaggacgtgaacagacaccatgca

SEQ ID NO: 665883 - DNA, 120 bp, Artificial Sequence
  ENSG00000185024_37 (sequence is synthesized)
atggcccagagtgcacaaatcatcatttctcccaggaatggggtgcccgagcccccaggcggctgaacttgagacttgtcacgtagtgttggtggaatgcagagcagctggagatcacct

SEQ ID NO: 665884 - DNA, 120 bp, Artificial Sequence
  ENSG00000185024_38 (sequence is synthesized)
atagaagacggagctgccgacagccaagacgtactgggaggagaaagcgccgccgtgagcctggctctcccgcaggctgcgtgtcagccacacggcggacggggcggacggggcacgcgt

SEQ ID NO: 665885 - DNA, 120 bp, Artificial Sequence
  ENSG00000185024_39 (sequence is synthesized)
tccgagaggggccgccgctacccaccttgtgggcgggcaccgtcctggtcgcccccgggggccccacgacgaagtgcacgtcggccatgagctcgttgttgaacatgagcgcgttcctgc

SEQ ID NO: 665886 - DNA, 120 bp, Artificial Sequence
  ENSG00000185024_40 (sequence is synthesized)
gggccagttcgtgtccctggacggtgctggcaaaaccccgactctgggtggcggcttccacgtgaatctggggaaggagtcgagagcgcagaccctgcagaatgacccgtgcctgtatat

SEQ ID NO: 665887 - DNA, 120 bp, Artificial Sequence
  ENSG00000185024_41 (sequence is synthesized)
tttctaagttgaggcggagggtgatgtgtaaagttgccctaagtcacaaacaggcatgaggctgtctttgacgtcagaagcctggtccgtctcctttttgctgtggcccgtcctggactt

SEQ ID NO: 665888 - DNA, 120 bp, Artificial Sequence
  ENSG00000185024_42 (sequence is synthesized)
tgagagcccaggtgacccctgtcccagtgagaagccggagtgccataagaggtccccgcatcagtgaaatgagtggcgtagcaagccaggcaggcaggggtggggctttgcaccccggct

SEQ ID NO: 665889 - DNA, 120 bp, Artificial Sequence
  ENSG00000185024_43 (sequence is synthesized)
ttgctgggtggtatttgtcggggttcctcacagctcgcctgcaccgcagccctgtttcatagactttgacaaggtaaatgtgacagtggagttgctgccacctgtaactgctgtgacatt

SEQ ID NO: 665890 - DNA, 120 bp, Artificial Sequence
  ENSG00000185024_44 (sequence is synthesized)
tatcacaaatcttaaacacaggactgctgtttttcagctgagattgtgtcctgtggcattttccaaaaccagctgtaaagtatttcactttaaacatctgaccattgattctgtaaaaaa

SEQ ID NO: 665891 - DNA, 120 bp, Artificial Sequence
  ENSG00000185024_45 (sequence is synthesized)
aatctttgatgaaacgtgtttgaaggttgtgtagcgtgtagaggcgttcgtaagaactgagccccatggctcacaggcctgcagggccccttcctgcccgactgccaggtgctgaggttc

SEQ ID NO: 665892 - DNA, 120 bp, Artificial Sequence
  ENSG00000185024_46 (sequence is synthesized)
tagcccagcctcctctcttcaggccttctgagtcttccgcctaggattggggttctcttgtgagggatgagggtgcctgtgggcctttctcctagtgagcagaggtccgggcaggatcgg

SEQ ID NO: 665893 - DNA, 120 bp, Artificial Sequence
  ENSG00000185024_47 (sequence is synthesized)
gtaggggtggagaagccgccagaagggacctgggcgccgaggggcaaggcctgagtgccaggccccgtggaggaacatccgacaagcacagttcaggtatttgtttttattgttatttat

SEQ ID NO: 665894 - DNA, 70 bp, Artificial Sequence
  ENSG00000185024_48 (sequence is synthesized)
gacaagcacagttcaggtatttgtttttattgttatttattcatttttttgacacagattttcgctcttg

SEQ ID NO: 665895 - DNA, 120 bp, Artificial Sequence
  ENSG00000185024_49 (sequence is synthesized)
attacaggcatgagccacagcacctggccttttattttttatgtattttttgagacaaaatctcactctgctgcccaggctggaggccagtggcgctatcacagctcgttacagcctcaa

SEQ ID NO: 665896 - DNA, 120 bp, Artificial Sequence
  ENSG00000185024_50 (sequence is synthesized)
cagctcgttacagcctcaacctcctgggctcaagcgattctccctgacctcagcctcccaagtagcagaaactacaggtgtgtaccaccatgcgtggctaatttttttttttttttttgg

SEQ ID NO: 665897 - DNA, 120 bp, Artificial Sequence
  ENSG00000185024_51 (sequence is synthesized)
gtagagacagagtctcactgtgttgcctaggctggtctcaaagtcttggactcaagcaatccacccaccttgggctcccaaagcactgggatcacaggcatgagccacgcccaggcgaaa

SEQ ID NO: 665898 - DNA, 120 bp, Artificial Sequence
  ENSG00000185024_52 (sequence is synthesized)
ttttgtctgaaatgtctgtactttaactctccccctaggtctgtgatctgctttgagctaacttccgcgtgcagtgcgaggtgtgggctgaggctcgttctttggcacctgaccgccagg

SEQ ID NO: 665899 - DNA, 120 bp, Artificial Sequence
  ENSG00000185024_53 (sequence is synthesized)
caccgtgcactgacagccgttctatgggttacctggcagcttggtagcattgttttttgtcacaaaagcgggcaccctggccctctgcctggttaacaggtggattgtgtacacctaggc

SEQ ID NO: 665900 - DNA, 120 bp, Artificial Sequence
  ENSG00000185024_54 (sequence is synthesized)
gacctcagtggcattgatgacctggagattgacaggcgcgaccttagcatgccccggtgtgcgaaggctaaaagccagccccacttccctgtgctcgcccagtacatcctgaatgagtcg

SEQ ID NO: 665901 - DNA, 120 bp, Artificial Sequence
  ENSG00000185024_55 (sequence is synthesized)
acgctgcgtcagggccgcgccccgcgcgacgtcgctgcctcgcggccccgcccccaggcccgacatcctcgaagctgctcgagcttctgcccagcaaccggcgcgagccgcgcgctgtgc

SEQ ID NO: 665902 - DNA, 120 bp, Artificial Sequence
  ENSG00000185024_56 (sequence is synthesized)
agaggtagccgtggaaggcggctcccggcgctggcaggcggccgcccccagacccgcagtgccatgcgcaggtgcttgcgcccgttcttcagttagcgatcttttggttaggaacgcagg

SEQ ID NO: 665903 - DNA, 120 bp, Artificial Sequence
  ENSG00000185024_57 (sequence is synthesized)
tggacctgcttgtttggccatttgcattccggagtctgcctctggccgcggcctgtgggatggtcgttgggcttcctcgttcgttcagatgcttcgcgatttagcttgctacggacgcca

SEQ ID NO: 665904 - DNA, 120 bp, Artificial Sequence
  ENSG00000185024_58 (sequence is synthesized)
gcagccagcgcttgcagagagcgcggtccactctgctctgagggctttacaggggcaggcgctgctatttcccggcattttcctcgaggaaataggcacagagaggttagtcgcgcgctg

SEQ ID NO: 665905 - DNA, 120 bp, Artificial Sequence
  ENSG00000185024_59 (sequence is synthesized)
aaggtcacacagccggcgggtgggcaagtcaggatctggccctgggcctgcagccctggagcttgggccccagggcgcgccctgcctctgtggctctgcctgtggatcgcagtcgcaggc

SEQ ID NO: 665906 - DNA, 120 bp, Artificial Sequence
  ENSG00000185024_60 (sequence is synthesized)
gaaaaaaaaaaaagaaaaaaactacctctccttgagccagcggggtctcagggcccttctcaatgggggcctgctggcctcaccttccagagcatgaatctcctggggacttagtcccac

SEQ ID NO: 665907 - DNA, 120 bp, Artificial Sequence
  ENSG00000185024_61 (sequence is synthesized)
cggccaagatcaggcctcccacccaactgccaggcctgcctcctggagcgccagccacttctggagagaccacagtggggtgtctcattgaggtcagcctgctgagaagccccgctgcag

SEQ ID NO: 665908 - DNA, 120 bp, Artificial Sequence
  ENSG00000185024_62 (sequence is synthesized)
ggccagctgccatccccagaggcccccactccactgcacagtgggcctggggatgggagtggggagggcggagcagcagctgtcaggctccaggaagcaggctggaggcctggcctgagg

SEQ ID NO: 665909 - DNA, 120 bp, Artificial Sequence
  ENSG00000185024_63 (sequence is synthesized)
atacagcaccaccaggagccctggtgtccagactgtctccagtctggagagggaccacatggggagcccggggcctcagcctggctcacacctgctatcagcttcaccccgagcagagct

SEQ ID NO: 665910 - DNA, 120 bp, Artificial Sequence
  ENSG00000185024_64 (sequence is synthesized)
ccacgtctagatgttctgctaaggtccacctgtcatggggtcccttcccagtgtcccgagggttcatctgacacgtcagagccaggcagggccctgcctcaggccccctaccgcctcccc

SEQ ID NO: 665911 - DNA, 120 bp, Artificial Sequence
  ENSG00000185024_65 (sequence is synthesized)
acacagctgtgccctggagggaagggctctgccccgctgcgtccttccccacaggccctgagccctctcattgcccgcccgacagccctgtgtgtccgtgctggaggttgtgggtaatgc

SEQ ID NO: 665912 - DNA, 120 bp, Artificial Sequence
  ENSG00000185024_66 (sequence is synthesized)
ctgcgtcctctcccctgggcccccctgtctccctggggggaccagcagtctccaagaagacttggcatgtggaaggcacctttggcctttgtgtgtggcgggccggcgagcaggccctgt

SEQ ID NO: 665913 - DNA, 120 bp, Artificial Sequence
  ENSG00000185024_67 (sequence is synthesized)
gcagggtgttgtcagcagatgtagggattgccctgggcctggtgagggttggggaagcactctcgggtctgacagtgtcccttcaccctccctcccctcctccctgagtgaggtagggca

SEQ ID NO: 665914 - DNA, 120 bp, Artificial Sequence
  ENSG00000185024_68 (sequence is synthesized)
gtgtcgagtgctgctcgctgttgagaatgtgaacgggtcagagctctgtgttgatgtgcagtgagcactgatggagcacacagaacctggacgcagaaccaggcttccaaagggacagag

SEQ ID NO: 665915 - DNA, 120 bp, Artificial Sequence
  ENSG00000185024_69 (sequence is synthesized)
aaacagtcaattaacactgggaaagggaagatgggcaaaagggaacaagtgggcaggcgttcgggagcctgggctgaggccgccatgctgtgcttccttttgcaggttgaggcctctggt

SEQ ID NO: 665916 - DNA, 120 bp, Artificial Sequence
  ENSG00000185024_70 (sequence is synthesized)
ggcgacgcctctaaatgagagacagcgccaaccaggtacccgcgaggacgaccccgccccgcaggacagggcatctccaccgcgcgctggacggaggatacaaccgagtcctgcgcgccc

SEQ ID NO: 665917 - DNA, 120 bp, Artificial Sequence
  ENSG00000185024_71 (sequence is synthesized)
cgtgcgccgggggtcgctcccaggccgaggtctgacagtgtcgccgaacgcgaaaggaagcgtgtggtacccgagagaggaagcaccctcgtcaccccggccggcaccgcattgaggcag

SEQ ID NO: 665918 - DNA, 120 bp, Artificial Sequence
  ENSG00000185024_72 (sequence is synthesized)
gctcgccgctggagaccgcgctcactatccgaggaggaccctcctctgccccgcgtccagctttagtccccgactgcgttcatcgccaagggcccgcccactgccttaggtcgcgtcgcc

SEQ ID NO: 665919 - DNA, 120 bp, Artificial Sequence
  ENSG00000185024_73 (sequence is synthesized)
agccttgggtcccgtcgccagccttgggtcccgtccccggctgcactcaccgcgaggccccacccttagctctagtccccggtgtcgcccaccgacgaggccccgccccaaactccagtc

SEQ ID NO: 665920 - DNA, 120 bp, Artificial Sequence
  ENSG00000185024_74 (sequence is synthesized)
ccacgcatctcagtggccggtctgtgctgcctgcccagtcaggaagttttggtctgtaggatgaggggccttcatgacatgggggtcacagtccgagacttgtgggagtgtgggtctcca

SEQ ID NO: 665921 - DNA, 120 bp, Artificial Sequence
  ENSG00000185024_75 (sequence is synthesized)
tggcaggagggcacctgccaatgctgggcacggttgggtgttagctaggcctgggtgaacagtgaacttttgtcctacacaaaggagattattttcaattaaaaaatttttttgtgagta

SEQ ID NO: 665922 - DNA, 80 bp, Artificial Sequence
  ENSG00000185024_76 (sequence is synthesized)
ccgcggcgctggcgggagcgtagagttccgccgccatcttcgcgggcggggcggcgggggcagcctcggcgcctgtggac

SEQ ID NO: 665923 - DNA, 120 bp, Artificial Sequence
  ENSG00000185024_77 (sequence is synthesized)
gggagcggctctgcaagcaaaagcaaggaggtcaggcactgagcgacgcggccgtgcaggcaggctaggggcagcagcatgggcggcggcggcgctgtgacccgcggggctgccacccgc

SEQ ID NO: 665924 - DNA, 80 bp, Artificial Sequence
  ENSG00000185024_78 (sequence is synthesized)
gtgacccgcggggctgccacccgctcccctgccacccccgcccctgcgaccctgcccgagcccagcctagcgcagcccgg

SEQ ID NO: 665925 - DNA, 120 bp, Artificial Sequence
  ENSG00000185024_79 (sequence is synthesized)
tttcttttcagggctagacattctgatggttgtgaaggaggagcttggggtggtttcatttgcatttccttcaggactggaggtctttgtatatgttcatttacaccaatatgtcgtctt

SEQ ID NO: 665926 - DNA, 120 bp, Artificial Sequence
  ENSG00000185024_80 (sequence is synthesized)
cgccggagtgttcagatctttttccattttttaattgggttgtgttttcttgtgaagttttgggaattcttcatctgttctagatttaagtcctttatcagttacgagatttgcagataa

SEQ ID NO: 665927 - DNA, 120 bp, Artificial Sequence
  ENSG00000185024_81 (sequence is synthesized)
gcctgtgggctgtcttcattgtcttaacgatgtctttcaaagggcagttcttaattttttggaaatccgttttatcagtgttttatggattctgcttttagaaccattagaaatgtttgc

SEQ ID NO: 665928 - DNA, 60 bp, Artificial Sequence
  ENSG00000185024_82 (sequence is synthesized)
cgcggacctcaggtgatccgcccgcctcggcccccaaagtgctgggattagaggtgtgag

SEQ ID NO: 665929 - DNA, 120 bp, Artificial Sequence
  ENSG00000185024_83 (sequence is synthesized)
tagaggtgtgagccaccgcgcccagcctatgagcatattttttatcgttctctttatttctagctgcgatgattgtatcttattgaaaatcattaaaaatcttagcaattgttttaaatt

SEQ ID NO: 665930 - DNA, 120 bp, Artificial Sequence
  ENSG00000185024_84 (sequence is synthesized)
aattatctaatttttttctccaaataatatctattttagcagccaaatcaccacaaatcattggtttttatctttagttgtgggtgcacagcgggtgcgtgtattttggggcatgtgagg

SEQ ID NO: 665931 - DNA, 120 bp, Artificial Sequence
  ENSG00000185024_85 (sequence is synthesized)
tgtcttgatgcgttcatgcagtgtgtaacagtcacatcagggtaaatgggacatctttcacctcaagcatttatccttcgtgttatggacaccctcagctggaaaggggggctgcgtcgt

SEQ ID NO: 665932 - DNA, 120 bp, Artificial Sequence
  ENSG00000185024_86 (sequence is synthesized)
gagtatgaatggatgcaagtcatagccacctgagcctggtggggcacagcagggccctgtggagtcacatcccggcctcatgctcggcataggggagcgctgcttaggtccatgcagtcg

SEQ ID NO: 665933 - DNA, 120 bp, Artificial Sequence
  ENSG00000185024_87 (sequence is synthesized)
ctcagggcccaggctgtgcagcgcccagcctgtcctgctccaggcactcccccgtggcactgtgccgtgctggcagaggtgcacagcgccaggcctcagtgtgcacacacagcccccgtg

SEQ ID NO: 665934 - DNA, 120 bp, Artificial Sequence
  ENSG00000185024_88 (sequence is synthesized)
gcaccgccatgctggtagagatgccagaagtgggccctcctctcacccatgagtgtcagctgatgccggccggctggcgacttgtgtacccagcccacgcctgtcttgctctaagagtcc

SEQ ID NO: 665935 - DNA, 120 bp, Artificial Sequence
  ENSG00000185024_89 (sequence is synthesized)
ccggaccgttgttgcgtgtggtgctgtctgcatggtctggagggaaggctgctgggtgtgcgcccctctgtgtcctgagcagggcggccatgcagtaggagcacgctgcctggccctagc

SEQ ID NO: 665936 - DNA, 120 bp, Artificial Sequence
  ENSG00000185024_90 (sequence is synthesized)
tcctgggttcggtgcgatggctgccctagctgagggtcagagaggctttgtccaggggaggggaactggtggggggcctgggggcctggaaagacaagtgcaggttgccccacccctggg

SEQ ID NO: 665937 - DNA, 120 bp, Artificial Sequence
  ENSG00000185024_91 (sequence is synthesized)
tggcagcaccccttcccaagaggggctgggcttgggagggcgctgcagcccaaggagccctgagtggtcgggcggggttggccacctcccctgcccagagcccaccccgctgggtgaagt

SEQ ID NO: 665938 - DNA, 120 bp, Artificial Sequence
  ENSG00000185024_92 (sequence is synthesized)
gggctcctggccttctggccactgttcccgggacccccccccacactctcttctccagtgtcggctcgggggcggcctgtcgagaggcccctggctttgcgcctggtccttgcggccctc

SEQ ID NO: 665939 - DNA, 120 bp, Artificial Sequence
  ENSG00000185024_93 (sequence is synthesized)
ggcacatagcctgcagcaggcacacatcgcacaaatagcaccaggggcagcccctcgaggggtctctagacacaagagggcacccactgactccacatgcgctgtgcgcccccaaacccc

SEQ ID NO: 665940 - DNA, 120 bp, Artificial Sequence
  ENSG00000185024_94 (sequence is synthesized)
agggcttccagccattgggaccagctctttgcagtttatctcaatatacttgccctctgtcaggcaggaagtcgtcttccctgatttcatggccacgtggtgcctcagacccctccagcc

SEQ ID NO: 665941 - DNA, 120 bp, Artificial Sequence
  ENSG00000185024_95 (sequence is synthesized)
tggcccatctgtacctgagtgggaggctctcaccctcacttggcccctttgtgggaacctgtggcctgcactctggctggccagggtcctggtgccggcagggcttgcaagctgccctag

SEQ ID NO: 665942 - DNA, 120 bp, Artificial Sequence
  ENSG00000185024_96 (sequence is synthesized)
ggggtctcacacatgtggcctgcgtggttggccttgggacaggccacagagcaacaggtccccaactcgccccgcgcgatgaggcctcagcccaggctccgcactaaatagaggctgccc

SEQ ID NO: 665943 - DNA, 120 bp, Artificial Sequence
  ENSG00000185024_97 (sequence is synthesized)
cagcccacttcttcctgggcccagatgcttggtctgtgaccacagggagagcaggcctgacagaggcgcctgcccctgctgccccatacttgcctggcatggccagagaatcgaggcccg

SEQ ID NO: 665944 - DNA, 120 bp, Artificial Sequence
  ENSG00000185024_98 (sequence is synthesized)
agggtgggagctcccggttgccggagcaggagcgggcaggaagtggggaccgttgtgtgcctgctgctcagcgctcgggccaaggctgagcagccttgctgtgggcctggtgcctgcagg

SEQ ID NO: 665945 - DNA, 120 bp, Artificial Sequence
  ENSG00000185024_99 (sequence is synthesized)
gggactggtctggcccaggaaacgagggtgaaggtgctggcaggtggcgggggctggggcaggggccggagcagagcctctgtctgtgttctgggggtcagggcaggccaagcccccggg

SEQ ID NO: 665946 - DNA, 120 bp, Artificial Sequence
  ENSG00000185024_100 (sequence is synthesized)
ggctgaggccacagtgtcctcggccgaggcctatggtctggaaaggtgttctgcatgctccccgagcactggggtggggcccagtaggatacaggagcaggggctggcagaggcctgagg

SEQ ID NO: 665947 - DNA, 120 bp, Artificial Sequence
  ENSG00000185024_101 (sequence is synthesized)
gtgggatcttgatgctgacacagctcatggcacagcccccaggaggccagaaggggccagtgggcctgggagccctggccaaccccgggagccactggtgtggcgggagtggctgagcat

SEQ ID NO: 665948 - DNA, 120 bp, Artificial Sequence
  ENSG00000185024_102 (sequence is synthesized)
cctgggccagccctggtgggtctgaggggtctgttgagatacacagggctcccagctctgtgtgtgtcagagccccacttcgttccaggctttgctcccaagctctcccaccctcggagc

SEQ ID NO: 665949 - DNA, 120 bp, Artificial Sequence
  ENSG00000185028_0 (sequence is synthesized)
acacgccttggggaaagtcgtggggagcggtcctgtctcgggccatggacacaatgaggtcactccgcttcatttctgcagaagctctggtgtcccacccccaggtggcccggcagagcc

SEQ ID NO: 665950 - DNA, 120 bp, Artificial Sequence
  ENSG00000185028_1 (sequence is synthesized)
tggacagcgtggcccacaacctctacccactcctgttcaaagccagctacctgctggagcaggcggaggtgacgcgcgcggtgctggggcgctggcccctggaggagttccggctgggag

SEQ ID NO: 665951 - DNA, 120 bp, Artificial Sequence
  ENSG00000185028_2 (sequence is synthesized)
cgctgctgggtcctggtgccgaccacccccaggacctgcgcgacagaacctgcagggcctgcctggaggcgctggtgcgcggcctcgcggaccacgtgctgcaggaccggagccgccggc

SEQ ID NO: 665952 - DNA, 120 bp, Artificial Sequence
  ENSG00000185028_3 (sequence is synthesized)
ggctgcgggtggctgacctcacgggcatccgagatgtgcaggtgcagcggtgcccgtgcgggagggcgctgggcaggtggggccgcacccagctgctggccaggacctgctgtgagctgc

SEQ ID NO: 665953 - DNA, 120 bp, Artificial Sequence
  ENSG00000185028_4 (sequence is synthesized)
aggcagagcccctcgcagccgggcgccccgtcgaggtcctcgccgacctcttcgtcactgagggcaacttcgaggcggtggtgcaggctctgaggccagcgggcccggcccctctgcggg

SEQ ID NO: 665954 - DNA, 120 bp, Artificial Sequence
  ENSG00000185028_5 (sequence is synthesized)
tgcactgcccctcgttccgggcggacagcctgagccccagccagctcctgcacgtgctgcgtctggctggcccgggtgccctgcgcaagctggaggtggtgcacaacgtgcggctgcatg

SEQ ID NO: 665955 - DNA, 120 bp, Artificial Sequence
  ENSG00000185028_6 (sequence is synthesized)
cgggccacgtgcagcagcttctggcccaggtgggcttcccccggctggcctcgctcaccctgcccaccaaggcctttgatgcaccccccacctacgcctccactcccgacggcgaggacc

SEQ ID NO: 665956 - DNA, 120 bp, Artificial Sequence
  ENSG00000185028_7 (sequence is synthesized)
ccctcctcgcctccatcgcccgggagctcagcaagatggcgcagctcactgagctcagtgtggccttctccacgctgaccgggaagatcccgacgctgcttggccccctacagaccccgc

SEQ ID NO: 665957 - DNA, 120 bp, Artificial Sequence
  ENSG00000185028_8 (sequence is synthesized)
tgcgagtactggacctggccaactgtgccctgaaccacacggacatggccttcttggcagactgtgcccacgctgcccacctggaggtgctggacctcagtggacacaacctggtcagcc

SEQ ID NO: 665958 - DNA, 120 bp, Artificial Sequence
  ENSG00000185028_9 (sequence is synthesized)
tgtacccctcgaccttcttcaggctgctcagccaggcttcccggacgctgaggatcctgacactggaggagtgtggcatcgtagacagccacgttggcatgctgatcctgggcctgagcc

SEQ ID NO: 665959 - DNA, 120 bp, Artificial Sequence
  ENSG00000185028_10 (sequence is synthesized)
cgcgccctccggcgcctcttcaccgcactctgtgagctccccgagctgcgctgcattgagttcccggtgcccaaggactgctaccccgagggtgccgcctacccacaggacgagctggcc

SEQ ID NO: 665960 - DNA, 120 bp, Artificial Sequence
  ENSG00000185028_11 (sequence is synthesized)
atgtccaagttcaaccagcagaaatacgacgagatcgccgaggagctgcgtgccgtgctgctgcgggctgaccgagaggacatccaagtctccacacctctctttggaagttttgaccca

SEQ ID NO: 665961 - DNA, 120 bp, Artificial Sequence
  ENSG00000185028_12 (sequence is synthesized)
gacattcaagaaacaagcaatgagcttggtgctttcttgctgcaagctttcaaaactgctctagaaaacttctccagagcactcaaacaaatagagtagttcctccactcgcaccagtga

SEQ ID NO: 665962 - DNA, 120 bp, Artificial Sequence
  ENSG00000185028_13 (sequence is synthesized)
caggtcttgcatttcagcctgcaggtgccccgggctttagtcctggatctgaggcttgggcccggcattcatccccaccaccaccaccaccaaaagcagttcttagtgaaaattgtaggc

SEQ ID NO: 665963 - DNA, 120 bp, Artificial Sequence
  ENSG00000185028_14 (sequence is synthesized)
gagcctgttaagcgttgtagaagaggaagccttccaggagaggtgccatgcggtgccctttagtggcagcacggcaaggttctggaggcgggggaagccaccaagagacagtgacagggt

SEQ ID NO: 665964 - DNA, 120 bp, Artificial Sequence
  ENSG00000185028_15 (sequence is synthesized)
cagcgggggcagacgccacatggcaaagagcagagaagcccgggaggtgtgaggagtggccgacctggcctcagcgcatctgggcactgggcgcaagatgaagcttcagggggcagatgt

SEQ ID NO: 665965 - DNA, 120 bp, Artificial Sequence
  ENSG00000185028_16 (sequence is synthesized)
gactgggctccacagcagggagggggaggggaagagagaacacatcacagaaactgcacaaaataagcagcccatgaaaaacaaccgagaaaaagaggcgaaaaatgaacagcaaaccgg

SEQ ID NO: 665966 - DNA, 120 bp, Artificial Sequence
  ENSG00000185028_17 (sequence is synthesized)
accctgcttcctccagcaggaggctcccacccactgctggtcacaacccgctgtctggacctgccgcttacgggatgaggtgggcctgcagggaacgcggggcttctggttgctgttagt

SEQ ID NO: 665967 - DNA, 120 bp, Artificial Sequence
  ENSG00000185028_18 (sequence is synthesized)
ggtggcttttcttctcactttgtgtagcccccagaaccgtgaggggcatccgagtgggtgagcacaggcgtccgctgaagagccgcctggaccagggcggtcagcgctgcggggaggcct

SEQ ID NO: 665968 - DNA, 120 bp, Artificial Sequence
  ENSG00000185028_19 (sequence is synthesized)
ttgcccgaccgcgccactgtttctcaccaacattcactgtgtcctgcggggcttgaggcttagactgacgggagctattccgggtgtttaattgaaggtctagcacttgaccagcccctg

SEQ ID NO: 665969 - DNA, 120 bp, Artificial Sequence
  ENSG00000185028_20 (sequence is synthesized)
gaggagctgacaaccacctaagacacatttggacttggtgtccaccaagagtgactttgtgcaaagaaatggctgagcactagaataactaaatgcaaataaaatgcgtctttcagtgca

SEQ ID NO: 665970 - DNA, 120 bp, Artificial Sequence
  ENSG00000185033_0 (sequence is synthesized)
ctccgggtccccaggggctgcgccgggccggcctggcaagggggacgagtcagtggacactccaggaagagcggccccgcggggggcgatgaccgtgcgctgaccctgactcactccagg

SEQ ID NO: 665971 - DNA, 120 bp, Artificial Sequence
  ENSG00000185033_1 (sequence is synthesized)
cccggggcgactcgggggcggaccgcggggcggagctgccgcccgtgagtccggccgagccacctgagcccgagccgcgggacaccgtcgctcctgctctccgaatgctgcgcaccgcga

SEQ ID NO: 665972 - DNA, 120 bp, Artificial Sequence
  ENSG00000185033_2 (sequence is synthesized)
atgctgcgcaccgcgatgggcctgaggagctggctcgccgccccatggggcgcgctgccgcctcggccaccgctgctgctgctcctgctgctgctgctcctgctgcagccgccgcctccg

SEQ ID NO: 665973 - DNA, 120 bp, Artificial Sequence
  ENSG00000185033_3 (sequence is synthesized)
acctgggcgctcagcccccggatcagcctgcctctgggctctgaagagcggccattcctcagattcgaagctgaacacatctccaactacacagcccttctgctgagcagggatggcagg

SEQ ID NO: 665974 - DNA, 120 bp, Artificial Sequence
  ENSG00000185033_4 (sequence is synthesized)
accctgtacgtgggtgctcgagaggccctctttgcactcagtagcaacctcagcttcctgccaggcggggagtaccaggagctgctttggggtgcagacgcagagaagaaacagcagtgc

SEQ ID NO: 665975 - DNA, 120 bp, Artificial Sequence
  ENSG00000185033_5 (sequence is synthesized)
agcttcaagggcaaggacccacagcgcgactgtcaaaactacatcaagatcctcctgccgctcagcggcagtcacctgttcacctgtggcacagcagccttcagccccatgtgtacctac

SEQ ID NO: 665976 - DNA, 120 bp, Artificial Sequence
  ENSG00000185033_6 (sequence is synthesized)
atcaacatggagaacttcaccctggcaagggacgagaaggggaatgtcctcctggaagatggcaagggccgttgtcccttcgacccgaatttcaagtccactgccctggtggttgatggc

SEQ ID NO: 665977 - DNA, 120 bp, Artificial Sequence
  ENSG00000185033_7 (sequence is synthesized)
gagctctacactggaacagtcagcagcttccaagggaatgacccggccatctcgcggagccaaagccttcgccccaccaagaccgagagctccctcaactggctgcaagacccagctttt

SEQ ID NO: 665978 - DNA, 120 bp, Artificial Sequence
  ENSG00000185033_8 (sequence is synthesized)
gtggcctcagcctacattcctgagagcctgggcagcttgcaaggcgatgatgacaagatctactttttcttcagcgagactggccaggaatttgagttctttgagaacaccattgtgtcc

SEQ ID NO: 665979 - DNA, 120 bp, Artificial Sequence
  ENSG00000185033_9 (sequence is synthesized)
cgcattgcccgcatctgcaagggcgatgagggtggagagcgggtgctacagcagcgctggacctccttcctcaaggcccagctgctgtgctcacggcccgacgatggcttccccttcaac

SEQ ID NO: 665980 - DNA, 120 bp, Artificial Sequence
  ENSG00000185033_10 (sequence is synthesized)
gtgctgcaggatgtcttcacgctgagccccagcccccaggactggcgtgacacccttttctatggggtcttcacttcccagtggcacaggggaactacagaaggctctgccgtctgtgtc

SEQ ID NO: 665981 - DNA, 120 bp, Artificial Sequence
  ENSG00000185033_11 (sequence is synthesized)
ttcacaatgaaggatgtgcagagagtcttcagcggcctctacaaggaggtgaaccgtgagacacagcagtggtacaccgtgacccacccggtgcccacaccccggcctggagcgtgcatc

SEQ ID NO: 665982 - DNA, 120 bp, Artificial Sequence
  ENSG00000185033_12 (sequence is synthesized)
accaacagtgcccgggaaaggaagatcaactcatccctgcagctcccagaccgcgtgctgaacttcctcaaggaccacttcctgatggacgggcaggtccgaagccgcatgctgctgctg

SEQ ID NO: 665983 - DNA, 120 bp, Artificial Sequence
  ENSG00000185033_13 (sequence is synthesized)
cagccccaggctcgctaccagcgcgtggctgtacaccgcgtccctggcctgcaccacacctacgatgtcctcttcctgggcactggtgacggccggctccacaaggcagtgagcgtgggc

SEQ ID NO: 665984 - DNA, 120 bp, Artificial Sequence
  ENSG00000185033_14 (sequence is synthesized)
ccccgggtgcacatcattgaggagctgcagatcttctcatcgggacagcccgtgcagaatctgctcctggacacccacagggggctgctgtatgcggcctcacactcgggcgtagtccag

SEQ ID NO: 665985 - DNA, 120 bp, Artificial Sequence
  ENSG00000185033_15 (sequence is synthesized)
cctactgtgcttggagcggctccagctgcaagcacgtcagcctctaccagcctcagctggccaccaggccgtggatccaggacatcgagggagccagcgccaaggacctttgcagcgcgt

SEQ ID NO: 665986 - DNA, 120 bp, Artificial Sequence
  ENSG00000185033_16 (sequence is synthesized)
cttcggttgtgtccccgtcttttgtaccaacaggggagaagccatgtgagcaagtccagttccagcccaacacagtgaacactttggcctgcccgctcctctccaacctggcgacccgac

SEQ ID NO: 665987 - DNA, 120 bp, Artificial Sequence
  ENSG00000185033_17 (sequence is synthesized)
tctggctacgcaacggggcccccgtcaatgcctcggcctcctgccacgtgctacccactggggacctgctgctggtgggcacccaacagctgggggagttccagtgctggtcactagagg

SEQ ID NO: 665988 - DNA, 120 bp, Artificial Sequence
  ENSG00000185033_18 (sequence is synthesized)
agggcttccagcagctggtagccagctactgcccagaggtggtggaggacggggtggcagaccaaacagatgagggtggcagtgtacccgtcattatcagcacatcgcgtgtgagtgcac

SEQ ID NO: 665989 - DNA, 120 bp, Artificial Sequence
  ENSG00000185033_19 (sequence is synthesized)
cagctggtggcaaggccagctggggtgcagacaggtcctactggaaggagttcctggtgatgtgcacgctctttgtgctggccgtgctgctcccagttttattcttgctctaccggcacc

SEQ ID NO: 665990 - DNA, 120 bp, Artificial Sequence
  ENSG00000185033_20 (sequence is synthesized)
ggaacagcatgaaagtcttcctgaagcagggggaatgtgccagcgtgcaccccaagacctgccctgtggtgctgccccctgagacccgcccactcaacggcctagggccccctagcaccc

SEQ ID NO: 665991 - DNA, 120 bp, Artificial Sequence
  ENSG00000185033_21 (sequence is synthesized)
cgctcgatcaccgagggtaccagtccctgtcagacagccccccggggtcccgagtcttcactgagtcagagaagaggccactcagcatccaagacagcttcgtggaggtatccccagtgt

SEQ ID NO: 665992 - DNA, 120 bp, Artificial Sequence
  ENSG00000185033_22 (sequence is synthesized)
gcccccggccccgggtccgccttggctcggagatccgtgactctgtggtgtgagagctgacttccagaggacgctgccctggcttcaggggctgtgaatgctcggagagggtcaactgga

SEQ ID NO: 665993 - DNA, 120 bp, Artificial Sequence
  ENSG00000185033_23 (sequence is synthesized)
cctcccctccgctctgctcttcgtggaacacgaccgtggtgcccggcccttgggagccttggggccagctggcctgctgctctccagtcaagtagcgaagctcctaccacccagacaccc

SEQ ID NO: 665994 - DNA, 120 bp, Artificial Sequence
  ENSG00000185033_24 (sequence is synthesized)
aaacagccgtggccccagaggtcctggccaaatatgggggcctgcctaggttggtggaacagtgctccttatgtaaactgagccctttgtttaaaaaacaattccaaatgtgaaactaga

SEQ ID NO: 665995 - DNA, 120 bp, Artificial Sequence
  ENSG00000185033_25 (sequence is synthesized)
atgagagggaagagatagcatggcatgcagcacacacggctgctccagttcatggcctcccaggggtgctggggatgcatccaaagtggttgtctgagacagagttggaaaccctcacca

SEQ ID NO: 665996 - DNA, 120 bp, Artificial Sequence
  ENSG00000185033_26 (sequence is synthesized)
actggcctcttcaccttccacattatcccgctgccaccggctgccctgtctcactgcagattcaggaccagcttgggctgcgtgcgttctgccttgccagtcagccgaggatgtagttgt

SEQ ID NO: 665997 - DNA, 120 bp, Artificial Sequence
  ENSG00000185033_27 (sequence is synthesized)
tgctgccgtcgtcccaccacctcagggaccagagggctaggttggcactgcggccctcaccaggtcctgggctcggacccaactcctggacctttccagcctgtatcaggctgtggccac

SEQ ID NO: 665998 - DNA, 120 bp, Artificial Sequence
  ENSG00000185033_28 (sequence is synthesized)
acgagaggacagcgcgagctcaggagagatttcgtgacaatgtacgcctttccctcagaattcagggaagagactgtcgcctgccttcctccgttgttgcgtgagaacccgtgtgcccct

SEQ ID NO: 665999 - DNA, 120 bp, Artificial Sequence
  ENSG00000185033_29 (sequence is synthesized)
tcccaccatatccaccctcgctccatctttgaactcaaacacgaggaactaactgcaccctggtcctctccccagtccccagttcaccctccatccctcaccttcctccactctaaggga

SEQ ID NO: 666000 - DNA, 120 bp, Artificial Sequence
  ENSG00000185033_30 (sequence is synthesized)
tatcaacactgcccagcacaggggccctgaatttatgtggtttttatacattttttaataagatgcactttatgtcattttttaataaagtctgaagaattactgtttaatcctggctct

SEQ ID NO: 666001 - DNA, 120 bp, Artificial Sequence
  ENSG00000185033_31 (sequence is synthesized)
cgccctccgccgcttgcgggtgagctctgcccaagccgaggctgcggggccggcgccggcgggaggactgcggtgccccgcggaggggctgagtttgccagggcccacttgaccctgttt

SEQ ID NO: 666002 - DNA, 120 bp, Artificial Sequence
  ENSG00000185033_32 (sequence is synthesized)
ggcactggtaagtgtctgcagcccagcaggctcaggggaaggggtgcacgtggctggtgggtcatgggcagtgggctccacccagggcctgagtcctgtccacaccccaggtgacggccg

SEQ ID NO: 666003 - DNA, 120 bp, Artificial Sequence
  ENSG00000185033_33 (sequence is synthesized)
ggaaattatggggtatgaccgacaagaagagtcaaggctgactgggtttggggcctcagcgactgaaaagacagaattaatgaaagtggcaagatctcggggggaagcatgtgttttagg

SEQ ID NO: 666004 - DNA, 120 bp, Artificial Sequence
  ENSG00000185033_34 (sequence is synthesized)
gaggaccagaaagaagcttggttgcaggtgccagttagataccccatttgaaggtgatgcatgaatctggggttcagggttcagggctgagcagtcctcctgctctgggctgtggcttca

SEQ ID NO: 666005 - DNA, 120 bp, Artificial Sequence
  ENSG00000185033_35 (sequence is synthesized)
tcagctcccagcttggttgggaggggcctgtggcttctgaagaggatgctgctggggaatagtacaactcaaaggggtaggattctgtgccctcacccctaggccgaaggaaagtttgcc

SEQ ID NO: 666006 - DNA, 120 bp, Artificial Sequence
  ENSG00000185033_36 (sequence is synthesized)
agtcacaaaactagctgagcccctgggctccctgcagcacacacactctgtgcacgctccactgtgccccagaaaacccgtgggttctttgttcctagacttgagtgccccatccccagt

SEQ ID NO: 666007 - DNA, 120 bp, Artificial Sequence
  ENSG00000185033_37 (sequence is synthesized)
cctgggagcagaggccgggcctgggtgtggaagggggggctcggcggtgccccctggtggcatgcttgggcgtgggactgatatcccctcgctccttccccccagcgcgactgtcaaaac

SEQ ID NO: 666008 - DNA, 120 bp, Artificial Sequence
  ENSG00000185033_38 (sequence is synthesized)
cttgcctgtttttctggagcttctaatacatcattttttttcccagctgtatagtattcagttggattgaggcatcataatttattttgacaaggtcccctctggttggacggactcttt

SEQ ID NO: 666009 - DNA, 120 bp, Artificial Sequence
  ENSG00000185033_39 (sequence is synthesized)
ggttttcagttttttattaatgtgaagggtgccgtagtaagtatccttgtacatacatctctgcatcatttcttatgtaatgtttgagagtccaggaatgctgctcgcccatcaaacctg

SEQ ID NO: 666010 - DNA, 120 bp, Artificial Sequence
  ENSG00000185033_40 (sequence is synthesized)
tgcagaatctgctcctggacacccacagggtgagcaggccaacgaggaatcctggcagggtacttggggggtgccctccattagcaccaagcagtccccacccagcttctcctcccttgc

SEQ ID NO: 666011 - DNA, 120 bp, Artificial Sequence
  ENSG00000185033_41 (sequence is synthesized)
ctcaggaggatggaaagataaaggatccagtcatgaactattagaaagtggggtcgcctgttacgtaacaggcctcttgggggtggctctgggaggcatacaagccgggtggccatgggt

SEQ ID NO: 666012 - DNA, 120 bp, Artificial Sequence
  ENSG00000185033_42 (sequence is synthesized)
gagatccgtggcaacccgtctgtgcatccccgctacccacctaggcatacctgttcctgcccactctctgggatcagcatcagaaccaagagcaaggctctgtctgggagtaagagtggc

SEQ ID NO: 666013 - DNA, 120 bp, Artificial Sequence
  ENSG00000185033_43 (sequence is synthesized)
ctggagctggctaggctgggcagaggaccacagagggaagatggacgggaagcttgaccttctgggtccaaggatgatgcctatgggagaggagggaggctcagcaaaccctccattttg

SEQ ID NO: 666014 - DNA, 120 bp, Artificial Sequence
  ENSG00000185033_44 (sequence is synthesized)
gaggaaaggcagggcccagagggaggtttctaggtaccactggcctccaagagccctgaggtcccacaccctggcacaaagcgcagccctgacagccatgtctccctgtgcggggaggcg

SEQ ID NO: 666015 - DNA, 120 bp, Artificial Sequence
  ENSG00000185033_45 (sequence is synthesized)
ggggcacatgcggtcacttacccatgaagatcctgtgccacccaggccttgctgccctcttctgcttcttccagcatctctccctctcctttgcttgattctcttgtcttatcttgtaca

SEQ ID NO: 666016 - DNA, 120 bp, Artificial Sequence
  ENSG00000185033_46 (sequence is synthesized)
ctcttcaacatgtactgatgctgcagctgagctgctgcccagcccctggggagaagacaccagcagcatgcccagccagggcagggtggagagctgcagctgcagctgcctcctgagctc

SEQ ID NO: 666017 - DNA, 120 bp, Artificial Sequence
  ENSG00000185033_47 (sequence is synthesized)
tttataaacactggcattctggctgagaaagactcgccaacatccaagagtggcaaaggggaacaggagacacatcgttggcttgggaaccgctcccgctcgcaggaagtctgctcacag

SEQ ID NO: 666018 - DNA, 120 bp, Artificial Sequence
  ENSG00000185033_48 (sequence is synthesized)
actaacggaagaaaggggagcccgcaaagaccaaagctgctgtgctgggggcgtggattcgagggctcttctccaggctgacagctgggaccctcattttgtcagccctgtggagttcct

SEQ ID NO: 666019 - DNA, 120 bp, Artificial Sequence
  ENSG00000185033_49 (sequence is synthesized)
actagagtgccatgcaaggcagtggggatttggaagatggaagtcctgtcactgtcctcaaaggacttgctgcccagtcgacataagacatattggaagcatttgagcaggatatgatta

SEQ ID NO: 666020 - DNA, 120 bp, Artificial Sequence
  ENSG00000185033_50 (sequence is synthesized)
gcaggagggatggagggtggtggacttccatccaggccagaggcgggaggtgggagcagatacagccagcgcgactgtcaaaactacatcaagatcctcctgccgctcagcggcagtcac

SEQ ID NO: 666021 - DNA, 62 bp, Artificial Sequence
  ENSG00000185033_51 (sequence is synthesized)
tcaagcgatcactgagggtacatactgtttatgtaattaagggaagtgttatcttagctttg

SEQ ID NO: 666022 - DNA, 120 bp, Artificial Sequence
  ENSG00000185033_52 (sequence is synthesized)
tactgtttatgtaattaagggaagtgttatcttagctttgacttgaaataatgtgtagacagaggagatgctgactcctgtgggtggggaatcagctcaggaaaggcccttgcccaggcc

SEQ ID NO: 666023 - DNA, 120 bp, Artificial Sequence
  ENSG00000185038_0 (sequence is synthesized)
cattgctgtggctgcttgggccacgggagagggaaccttgtgagccgggcagaatccaccctgtagagactgcctctggagcttgaggaagagatgactgaagccattacagaagcagca

SEQ ID NO: 666024 - DNA, 120 bp, Artificial Sequence
  ENSG00000185038_1 (sequence is synthesized)
gtagcctcaagtgaggaggtgtcagaggaaagagacgacctggggcctcttgaattacatgacagtggtacctttcaacaagtcgtgaaccttctggacatcattgacagcgagtcagca

SEQ ID NO: 666025 - DNA, 120 bp, Artificial Sequence
  ENSG00000185038_2 (sequence is synthesized)
aagacggacacaacaggggcaggccttgacatgcggaagaccctggcctcggtgataatcatggagaaggccaccactgagccttctgtagtgataaacactctcatccgctgcctgcag

SEQ ID NO: 666026 - DNA, 120 bp, Artificial Sequence
  ENSG00000185038_3 (sequence is synthesized)
gtgccagagatttccacccagcgcaaggtcaacatttacaacatcctccaggacatcatccagcaggagggggagctggaggagcagtgcgtgcagaggctggtggccattgcctccaag

SEQ ID NO: 666027 - DNA, 120 bp, Artificial Sequence
  ENSG00000185038_4 (sequence is synthesized)
gagatgagggagatcccagagatggagggctatatgaaggcagaggtggccagcgacacactggtggctctgtcccgaaaccacttcagcttggtcatgtacgagctgcagcaccacctc

SEQ ID NO: 666028 - DNA, 120 bp, Artificial Sequence
  ENSG00000185038_5 (sequence is synthesized)
aagcccctcaacctcactgatgaatttgtcatcatcacactggccaagctggccaacggcaatgtgtttgagttcatgccatacatgggcatcaccctggctaccatattcaccatgctg

SEQ ID NO: 666029 - DNA, 120 bp, Artificial Sequence
  ENSG00000185038_6 (sequence is synthesized)
agacttgccaatgaagccaagatacgccaggcgatctgcagtgccatggagaccttctgtgagacggtgcagttttatctgaagcacctggaggagagcgtgtaccccgtgatgactgag

SEQ ID NO: 666030 - DNA, 120 bp, Artificial Sequence
  ENSG00000185038_7 (sequence is synthesized)
gaggagtttgccctgaaggtgttccccatgtatcgctacttcgtgacagtgtggctgaggcactacaaccccgaggtgaagctgggggtgatcaagtccctgaagcccatgctcggcctc

SEQ ID NO: 666031 - DNA, 120 bp, Artificial Sequence
  ENSG00000185038_8 (sequence is synthesized)
cttctgcccaacgatgacctgcgggagcaggtctacgactacatccccctgctgctggcggagtaccagggcaaaggtcacctgccaccatttgccaatccactgcaggtcttgaggcag

SEQ ID NO: 666032 - DNA, 120 bp, Artificial Sequence
  ENSG00000185038_9 (sequence is synthesized)
atcctggaactgtcagtcaccaccaacacccctgtcccccaaatgcagctacacaccattttcacagaactgcacgtccaggtgtgcaacaaggccccggcccagcatcagtacagcagc

SEQ ID NO: 666033 - DNA, 120 bp, Artificial Sequence
  ENSG00000185038_10 (sequence is synthesized)
cagaatctgatggagatggtgcactgcttcgtagcccttgctcgctcctaccccaaggagctgatgaagttcttcttcagccagatggagacaaacaaggaggccgtccgcgtggggact

SEQ ID NO: 666034 - DNA, 120 bp, Artificial Sequence
  ENSG00000185038_11 (sequence is synthesized)
ctgaatctgattagggctatagtgagcgcagatgagcccaggatgagtatcagggccatctacctggctatccgggtagtcaagaacaccatctctgatacccggtccaaggtgaggatg

SEQ ID NO: 666035 - DNA, 120 bp, Artificial Sequence
  ENSG00000185038_12 (sequence is synthesized)
gctattctccacatcattgggcagttggctctctgtggctaccaggagagaatcaaaggctggggcctgaagtacctgtctgtgcagctgaccttatccacctacaaactgacaaatcgc

SEQ ID NO: 666036 - DNA, 120 bp, Artificial Sequence
  ENSG00000185038_13 (sequence is synthesized)
cgggagaagttttatcagagggacttggaggagaggatggtccacaaagtcaccatggacactgtgaagatcattacctcttctgtcagtgggatgaccaccgagttttgggtgaggctg

SEQ ID NO: 666037 - DNA, 120 bp, Artificial Sequence
  ENSG00000185038_14 (sequence is synthesized)
ctgtgctacatcatggagacagactacgtggaagctttgactcctatctgtatcagcctcacaaacctggcagaacaccagctccatggccaggatgtggatgtcagcgtggctggcaag

SEQ ID NO: 666038 - DNA, 120 bp, Artificial Sequence
  ENSG00000185038_15 (sequence is synthesized)
agcaggcaagtggacctgcctgcacctcagaagctgctggcccgtctcctggtgctgatgtcatcaccttacaagggggagggtcgtgggatagccatgctcaacctcttgaggaccctg

SEQ ID NO: 666039 - DNA, 120 bp, Artificial Sequence
  ENSG00000185038_16 (sequence is synthesized)
agccagagcatcgcaccctccatggccgacatgtgggagctggagattgcgctactggtccggtacctggaagaacatactgagttcacttgggatcagaaagcctgggaagacaagctg

SEQ ID NO: 666040 - DNA, 120 bp, Artificial Sequence
  ENSG00000185038_17 (sequence is synthesized)
attcagtttctgcgaaactccctcaagaagacccgggggtctagctggagcctgcgcttgagtaaagagctgaacaaccagattgcgagctttgacagcccctctctggagaagggcttt

SEQ ID NO: 666041 - DNA, 120 bp, Artificial Sequence
  ENSG00000185038_18 (sequence is synthesized)
ctgtaccgggccttgggcttcaccttggccacaggcctggaggccagcaaggtggaggtcctgctgttggagctgctgtacaagacggactacagcaatgactttgacagcgagggtgtg

SEQ ID NO: 666042 - DNA, 120 bp, Artificial Sequence
  ENSG00000185038_19 (sequence is synthesized)
attatgtgctttggcctgtgtgcccggggccaggtaaaaacggtgctgaatgtgcttcatgacttcgaggagaggatccaggagtcagagcagtcctggcagatcagtgcttggcggaag

SEQ ID NO: 666043 - DNA, 120 bp, Artificial Sequence
  ENSG00000185038_20 (sequence is synthesized)
gaccatccctggaggcgggagacagtgaaaagtgccctcatggtgatgtatagctgcgtggcctcctactgccacccccagttgctcctcaacctcgtggacagccccatcaccgctaag

SEQ ID NO: 666044 - DNA, 120 bp, Artificial Sequence
  ENSG00000185038_21 (sequence is synthesized)
atcattcaccattatgtcagcagctgccaggacatctgtctcaaaatggccttcatgaagagtgttgtgcaggttaccaaggccatcaacaacatcaaggacctggaggactttcacttt

SEQ ID NO: 666045 - DNA, 120 bp, Artificial Sequence
  ENSG00000185038_22 (sequence is synthesized)
ggcagaaccgactgacaacctggtttctccagtgcgagccttggcgatggaggccctctcgcacctgagcaagctgaagcctttctactccacagaggaaaacagtgagctgatggatat

SEQ ID NO: 666046 - DNA, 120 bp, Artificial Sequence
  ENSG00000185038_23 (sequence is synthesized)
cagcatacattctgtaatttctctccaactcccaggagaggacaatgagtccattaagaccctgtatgcaaatgccctgagctccctggagcagctgatggagagcctcctgcagaggca

SEQ ID NO: 666047 - DNA, 120 bp, Artificial Sequence
  ENSG00000185038_24 (sequence is synthesized)
gctggaccccaaggggctgcaggagatggtgcagctcctggaaaagtggatcttgtcggagaaagaatgggagcgggaaaaggccgtgagcctccatctctatctcatgtggatttatgt

SEQ ID NO: 666048 - DNA, 120 bp, Artificial Sequence
  ENSG00000185038_25 (sequence is synthesized)
ccacagcactgctgtctgtatccacctaaagctggggcagtttggcacaatggtcggactcattgccccgtgcacctgtgatgcccatcaaagaacccgcatggcctcaatgaatgtcct

SEQ ID NO: 666049 - DNA, 120 bp, Artificial Sequence
  ENSG00000185038_26 (sequence is synthesized)
gtccagcctgctagatcttcacgcaagccagacctgctccttgtggggcccttccaagcagaaggagcttgagaaatgtaagggggacctccagagcacagatgtggagaagatcttctg

SEQ ID NO: 666050 - DNA, 120 bp, Artificial Sequence
  ENSG00000185038_27 (sequence is synthesized)
tgcatcctccagaatcgccaaggtggtctgcatggagtttagctgcgatgaggtggtctcgctcatccagaagctctgcgagaacactggggccatgaacctgcagcatgacaaggcctc

SEQ ID NO: 666051 - DNA, 120 bp, Artificial Sequence
  ENSG00000185038_28 (sequence is synthesized)
tgtcacctggatagccttcttcctccagatgcgggccaaggagctggaggacaaggtggccgagatcctgagtgccatcctggtgcacctgccggtggtggaccacccagaggtgcggcg

SEQ ID NO: 666052 - DNA, 120 bp, Artificial Sequence
  ENSG00000185038_29 (sequence is synthesized)
ccttctcattgacggcatcctgctgctggcgcaccaccaccaggagaccatcctcacatcgctcctgaggcagccactgcccatggagagccacctggcagaggtgtggctggcagtgtc

SEQ ID NO: 666053 - DNA, 120 bp, Artificial Sequence
  ENSG00000185038_30 (sequence is synthesized)
ggagaacgtgcccttcgcccggaccatgctccacagcctgatgggccggctgcagtcacggctcagccccagaatcagtgccacctccaaggctgacatctggcgcctggctgcggtgga

SEQ ID NO: 666054 - DNA, 120 bp, Artificial Sequence
  ENSG00000185038_31 (sequence is synthesized)
ccccctgatgaccctgtgcaccatccaccttctcattcagaagctggatgagaatgacaagctcccggacttcctccctgacctcatctacaccctcctgctgcagcttggaagcagcca

SEQ ID NO: 666055 - DNA, 120 bp, Artificial Sequence
  ENSG00000185038_32 (sequence is synthesized)
ccgaccagaggccgccccgccggtcttgaagatgtggaagctggtccacaccactcctctgccggaggagatgaacctgcaaaggtgctctcgagggcgggtcactatcaagtccatgca

SEQ ID NO: 666056 - DNA, 120 bp, Artificial Sequence
  ENSG00000185038_33 (sequence is synthesized)
gctcttgttcaagagagtcaagagccagcacctggcacataccctggacgagcaggcagtgtgggacctcctgcaggacggcgggacattcctggagggtgtgagcctgctggccaggct

SEQ ID NO: 666057 - DNA, 120 bp, Artificial Sequence
  ENSG00000185038_34 (sequence is synthesized)
gtgcatgcagcacgtggagggccacaggcagaggctggccgagctggtgctcaggggcatggactcagaagtcctgagctgccgcatcagcagcacagcggtctgcgtggaaatgaggca

SEQ ID NO: 666058 - DNA, 120 bp, Artificial Sequence
  ENSG00000185038_35 (sequence is synthesized)
ccggttcatgagcggcccagttctgtaccaggagaagctgctgaagccggcagctttgctgctggagaagggtgccgaccaggaggaagacgaggccctgcgggtgctgtccctgcgcgc

SEQ ID NO: 666059 - DNA, 120 bp, Artificial Sequence
  ENSG00000185038_36 (sequence is synthesized)
cctcggcaacatggccctgggcgcccccaagaaggtgaagcagtaccggaaggtcttgctggagaagtgcctgggccccctgagggagcccgtgagcaacagcgtgactgccgagggcat

SEQ ID NO: 666060 - DNA, 120 bp, Artificial Sequence
  ENSG00000185038_37 (sequence is synthesized)
ggaggccctgaccaagatcctggctgagctccgggaaggggatgtggggtcctctttcgacgccatgtctgagcagtgcaggatcttcttcgacaacgagagcgagctgctgcgtctgaa

SEQ ID NO: 666061 - DNA, 120 bp, Artificial Sequence
  ENSG00000185038_38 (sequence is synthesized)
agccttcatcctctttggaaagctggcaagggtggtcgggatgtccaagaagcatttcttcaaaggggaggtgaagaaggcctggatccccctcatgctgcactcccaggacccctgctc

SEQ ID NO: 666062 - DNA, 120 bp, Artificial Sequence
  ENSG00000185038_39 (sequence is synthesized)
caatgcagcccaagcctgtatggctaccatgtttcagtgtgtgcacttctggggctggaagtccctggagcatccctcagggccaagtgataccgctactgatgacaagatgaccgtttt

SEQ ID NO: 666063 - DNA, 120 bp, Artificial Sequence
  ENSG00000185038_40 (sequence is synthesized)
ccagacaaccatgtgctccatcctgactcggaaaaagccggctgttctctaccgcttcttgctagaaacaatggcctatgttaaaaataacttgtcaagaatcagaatcgctgcttgcaa

SEQ ID NO: 666064 - DNA, 120 bp, Artificial Sequence
  ENSG00000185038_41 (sequence is synthesized)
cttggcaggaattattatgaagcagatgtctacacattatctgaaaaagctggacttcccagcattacggaattccctccaggaactacagctggacccggatcccggggtcaggagggc

SEQ ID NO: 666065 - DNA, 120 bp, Artificial Sequence
  ENSG00000185038_42 (sequence is synthesized)
agccctggagacgctcacagtcttggatagctgtagtcagcatgggtttctggcttcaccccaaggaatgtcctaggtggtccaaacataagacgtaaactgtcttcttagtgccaaatg

SEQ ID NO: 666066 - DNA, 120 bp, Artificial Sequence
  ENSG00000185038_43 (sequence is synthesized)
caagccctttttaatttagtttgtaagaagtttagtttgtaggaaaaacactattgtaaaataactagtatccttttgtttccttccgttgaaataaacctccactgtcgttggagtaga

SEQ ID NO: 666067 - DNA, 120 bp, Artificial Sequence
  ENSG00000185038_44 (sequence is synthesized)
attcctataagaaatatgactgaagagcccagctgtctcactttgataaccaattcttccatttgcatttccattgatgtgtattgggccaagagcagagctttttcttgtggttaatat

SEQ ID NO: 666068 - DNA, 120 bp, Artificial Sequence
  ENSG00000185038_45 (sequence is synthesized)
ggcaggtgggctggctccttgtctgggaatgcccacccctctccacattcctcccaccctcattcccccttctcctggaaacatccaagtccaaattaatactattaatgcctacctgga

SEQ ID NO: 666069 - DNA, 120 bp, Artificial Sequence
  ENSG00000185038_46 (sequence is synthesized)
gcctctgggtacctttcaacaagtcgtgaaccttctggacatcattgacagcgagtcagcaaagacggacacaacaggggcaggccttgacatgcggaagaccctggcctcggtgataat

SEQ ID NO: 666070 - DNA, 82 bp, Artificial Sequence
  ENSG00000185040_0 (sequence is synthesized)
tggggaggggaaggagcggcacatggggttgagcagaggagaaaatcagaaagatggcttagagaagccagcagtctgcgag

SEQ ID NO: 666071 - DNA, 66 bp, Artificial Sequence
  ENSG00000185040_1 (sequence is synthesized)
tggctggaaaaggaagaaggagtggtcagatgaatctgaggaggagccggagaaggagctcgcccc

SEQ ID NO: 666072 - DNA, 120 bp, Artificial Sequence
  ENSG00000185040_2 (sequence is synthesized)
ctcgcccctgagcctgaggagacctgggtagtggagatgctgtgtgggctcaagatgaagctgaagcaacagcgagtgtcacccatcctccctgagcaccacaaggacttcaacagtcag

SEQ ID NO: 666073 - DNA, 120 bp, Artificial Sequence
  ENSG00000185040_3 (sequence is synthesized)
tccctgagcaccacaaggacttcaacagtcagcttgcccctggggtagatcccagccccccgcataggtccttttgctggaaaaggaagagggagtggtgggacgaatctgaggagtcgt

SEQ ID NO: 666074 - DNA, 120 bp, Artificial Sequence
  ENSG00000185040_4 (sequence is synthesized)
ggagtcgttggaggaggagccacggaaggtgctcgcccctgagcctgaggagatctgggtggtggagatgctgtgtggcctcaagatgaagctgaagcgacggcgagtgtcgctcgtgct

SEQ ID NO: 666075 - DNA, 120 bp, Artificial Sequence
  ENSG00000185040_5 (sequence is synthesized)
acgcattcatttcttcctggctctctacctggccaatgacatggaggaggacgacgaggaccccaaacaaaacatcttctacttcctgtatgggaagacccgctctcgcatacccttggt

SEQ ID NO: 666076 - DNA, 120 bp, Artificial Sequence
  ENSG00000185040_6 (sequence is synthesized)
ggaagacccgctctcgcatacccttggtccgtaaccgtcggttccagttatgccgttgcatgaacccgagggccaggaagaaccgctctcagatagccctgttccagaaacttcggttcc

SEQ ID NO: 666077 - DNA, 120 bp, Artificial Sequence
  ENSG00000185040_7 (sequence is synthesized)
aaccgctctcagatagccctgttccagaaacttcggttccagttcttctgttccatgagcggcagggcttgggtttcccgggaggagttggaggagatccaggcttatgacccagagcac

SEQ ID NO: 666078 - DNA, 70 bp, Artificial Sequence
  ENSG00000185040_8 (sequence is synthesized)
cctgaggtcatcggcctgagagaagaacaccggacccacaacaggaaagaggagaggaaccatttgtgca

SEQ ID NO: 666079 - DNA, 80 bp, Artificial Sequence
  ENSG00000185040_9 (sequence is synthesized)
cctggaccattcttgatggagctgaatacagtgatcacgttgtcctcctgggagcaggggtggggggaggggggtggggt

SEQ ID NO: 666080 - DNA, 79 bp, Artificial Sequence
  ENSG00000185040_10 (sequence is synthesized)
ggtcctgtttcttatgcaggggctcagattggcacagaattcttttgtgaaatatcagtgccacagattgtaacagata

SEQ ID NO: 666081 - DNA, 120 bp, Artificial Sequence
  ENSG00000185040_11 (sequence is synthesized)
catttgaaggcacaatgcaggggctcagattggcacagaattcttttgtgaaatatcagtgccacagattgtaacagatagcttcatgcacactctgcattttattggtttgtttggaaa

SEQ ID NO: 666082 - DNA, 81 bp, Artificial Sequence
  ENSG00000185040_12 (sequence is synthesized)
atatatgtttgaaatgtgagaattcagatgtaattttttaccttgttttggcatctttgtatgttactttaaagaggatgt

SEQ ID NO: 666083 - DNA, 120 bp, Artificial Sequence
  ENSG00000185040_13 (sequence is synthesized)
atggacagaacggagactaggttccgtaagaggggacagattaagggaaagatcacgaccagccgtcaacctcacccccagaatgagcagagtccccagcggagcacctcggggtactcc

SEQ ID NO: 666084 - DNA, 88 bp, Artificial Sequence
  ENSG00000185040_14 (sequence is synthesized)
ggaaatccgaggaacccaattgcttgatccggcttcaagcctgggcaacgtggcgagattcccctctccacaaaaatacaaaaattag

SEQ ID NO: 666085 - DNA, 83 bp, Artificial Sequence
  ENSG00000185040_15 (sequence is synthesized)
gaggaacccaattgcttgatccggcttcaagcctgggcaacgtggcgagatcgtgggatgcatctctactcccaactactcag

SEQ ID NO: 666086 - DNA, 70 bp, Artificial Sequence
  ENSG00000185040_16 (sequence is synthesized)
gaatcataaatactgagtttggggaggttcattatgactgacgcacttgagttaccgatttgggtcgagg

SEQ ID NO: 666087 - DNA, 78 bp, Artificial Sequence
  ENSG00000185040_17 (sequence is synthesized)
acatcttgtgcagctaaccacggtggattaggcttctggactcgtggtttgtgatgttgtcacattagaaacacatct

SEQ ID NO: 666088 - DNA, 120 bp, Artificial Sequence
  ENSG00000185040_18 (sequence is synthesized)
ggaggtaggattaaggattaggcttctggactcgtggtttgtgatgttgtcacattagaaacacatctagcatggttacaagtttagatcttaagtgacacaaaaggccccagctgtgat

SEQ ID NO: 666089 - DNA, 60 bp, Artificial Sequence
  ENSG00000185040_19 (sequence is synthesized)
agataaaattgcatttctcaattgctctgaactctagacttgacatgggacgtgaataac

SEQ ID NO: 666090 - DNA, 120 bp, Artificial Sequence
  ENSG00000185043_0 (sequence is synthesized)
gagaaagttgtctgcgtctcgaggcgagttggcggagctgtgcgcgcggcggggcgatggggggctcgggcagtcgcctgtccaaggagctgctggccgagtaccaggacttgacgttcc

SEQ ID NO: 666091 - DNA, 120 bp, Artificial Sequence
  ENSG00000185043_1 (sequence is synthesized)
tgacgaagcaggagatcctcctagcccacaggcggttttgtgagctgcttccccaggagcagcggagcgtggagtcgtcacttcgggcacaagtgcccttcgagcagattctcagccttc

SEQ ID NO: 666092 - DNA, 120 bp, Artificial Sequence
  ENSG00000185043_2 (sequence is synthesized)
cagagctcaaggccaaccccttcaaggagcgaatctgcagggtcttctccacatccccagccaaagacagccttagctttgaggacttcctggatctcctcagtgtgttcagtgacacag

SEQ ID NO: 666093 - DNA, 120 bp, Artificial Sequence
  ENSG00000185043_3 (sequence is synthesized)
ccacgccagacatcaagtcccattatgccttccgcatctttgactttgatgatgacggaaccttgaacagagaagacctgagccggctggtgaactgcctcacgggagagggcgaggaca

SEQ ID NO: 666094 - DNA, 120 bp, Artificial Sequence
  ENSG00000185043_4 (sequence is synthesized)
tgacagggatggaaccatcaacctctctgagttccagcacgtcatctcccgttctccagactttgccagctcctttaagattgtcctgtgacagcagccccagcgtgtgtcctggcaccc

SEQ ID NO: 666095 - DNA, 120 bp, Artificial Sequence
  ENSG00000185043_5 (sequence is synthesized)
tgtccaagaacctttctactgctgagctgtggccaaggtcaagcctgtgttgccagtgcgggccaagctggcccagcctggagctggcgctgtgcagcctcaccccgggcaggggcggcc

SEQ ID NO: 666096 - DNA, 120 bp, Artificial Sequence
  ENSG00000185043_6 (sequence is synthesized)
ctcgttgtcagggcctctcctcactgctgttgtcattgctccgtttgtgtttgtactaatcagtaataaaggtttagaagtttgaccctatgtgtgacatgagatacactggtatgagga

SEQ ID NO: 666097 - DNA, 120 bp, Artificial Sequence
  ENSG00000185043_7 (sequence is synthesized)
aggactggacttctcttctaagagccttcaatcatcctaggaataagcagcatatcgagcagaggccagcgggaagtcaagccgcacccacgctggctgtccccgtgggagggtgtgagg

SEQ ID NO: 666098 - DNA, 120 bp, Artificial Sequence
  ENSG00000185043_8 (sequence is synthesized)
atgaaggggcagcaggaggtgtgggactcgcctgtatcctgattggggtggtggttagatgagtctctgcatgcatcaaaatgtaaagaaccgtacatcagtaaagtctattttactgca

SEQ ID NO: 666099 - DNA, 120 bp, Artificial Sequence
  ENSG00000185043_9 (sequence is synthesized)
atcctcctttctgtgtacgtggttttagctcctcacctggttgacaatgagcagcaggcaaggagtgggaatgaacacacagggagaccgatcgctgagaacaccgacagttcccctctc

SEQ ID NO: 666100 - DNA, 120 bp, Artificial Sequence
  ENSG00000185046_0 (sequence is synthesized)
atggggaaggaccaggagctgctggaagctgctcgcactggaaatgtggctctggtggagaaactcctgtctggcaggaaaggagggatcctgggcggtggatccggacccctgcccctg

SEQ ID NO: 666101 - DNA, 120 bp, Artificial Sequence
  ENSG00000185046_1 (sequence is synthesized)
tctaatctgctaagcatctggcgaggccccaatgtgaactgcacagacagttcgggttacactgctttacaccacgcagccttaaatggacataaggacatagttctcaaactacttcag

SEQ ID NO: 666102 - DNA, 120 bp, Artificial Sequence
  ENSG00000185046_2 (sequence is synthesized)
tatgaggcatcaacaaatgtagcagacaacaaagggtattttcctattcacctggctgcctggaaaggagatgtggaaattgtgaagattcttattcatcatggaccatcacattccagg

SEQ ID NO: 666103 - DNA, 120 bp, Artificial Sequence
  ENSG00000185046_3 (sequence is synthesized)
gtcaatgaacagaacaatgaaaatgaaactgccctacactgtgcagctcaatatggacactcagaagtagttgctgttctcctagaagagctcactgacccgacaattagaaatagcaag

SEQ ID NO: 666104 - DNA, 120 bp, Artificial Sequence
  ENSG00000185046_4 (sequence is synthesized)
ctggaaacacctttggacttggcggcactctacggacggcttagagtggtaaaaatgatcatcagtgcacatcctaacttaatgagctgcaacactcgcaagcacacgccacttcacctt

SEQ ID NO: 666105 - DNA, 120 bp, Artificial Sequence
  ENSG00000185046_5 (sequence is synthesized)
gctgcgcgcaatggccacaaagcagtcgtgcaggtgctgctggaggcaggaatggatgtgagctgtcaaacagaaaaggggagtgcacttcatgaagcagctttgtttggaaaggtggat

SEQ ID NO: 666106 - DNA, 120 bp, Artificial Sequence
  ENSG00000185046_6 (sequence is synthesized)
gttgtacgagttctgttagaaacaggaattgatgccaacataaaggatagcttaggtagaactgtcttggacattctgaaagaacatccatctcagaaatctctccagattgcaacactc

SEQ ID NO: 666107 - DNA, 120 bp, Artificial Sequence
  ENSG00000185046_7 (sequence is synthesized)
ttacaagagtatttagaaggcgtgggaagatctacagtcctcgaagagcctgtacaggaagatgcaacacaagaaacacacatttcatctcctgttgagtctccttcccaaaagaccaaa

SEQ ID NO: 666108 - DNA, 120 bp, Artificial Sequence
  ENSG00000185046_8 (sequence is synthesized)
agtgaaaccgtcactggagaattatcaaaactcttggatgaaataaaactctgtcaagaaaaggattattcgtttgaagacttgtgccacacaatatcagaccactacttagataatttg

SEQ ID NO: 666109 - DNA, 120 bp, Artificial Sequence
  ENSG00000185046_9 (sequence is synthesized)
agcaagatttcagaggaagaacttgggaaaaatggaagccagagtgtaagaacctcatctacaatcaatttgtcaccaggagaagtggaagaagaggatgatgatgaaaatacgtgtggg

SEQ ID NO: 666110 - DNA, 120 bp, Artificial Sequence
  ENSG00000185046_10 (sequence is synthesized)
ccatcaggactttgggaagcattaactccgtgtaatggatgtaggaaccttggcttccccatgcttgcccaggagtcctatccaaagaagagaaattacactatggaaattgtaccatct

SEQ ID NO: 666111 - DNA, 120 bp, Artificial Sequence
  ENSG00000185046_11 (sequence is synthesized)
gcttctctggatacatttccttcagaaaatgagaactttctgtgtgatctcatggacacagctgttacaaagaaaccttgctccttagaaattgcaagggcaccttccccaagaactgat

SEQ ID NO: 666112 - DNA, 120 bp, Artificial Sequence
  ENSG00000185046_12 (sequence is synthesized)
aatgcctctgaggtagcagttactactccaggaactagtaaccatagaaacagctcaacaggcccaacacctgattgttcacctccatcccctgatactgccctcaaaaatattgtaaaa

SEQ ID NO: 666113 - DNA, 120 bp, Artificial Sequence
  ENSG00000185046_13 (sequence is synthesized)
gtcattcgaccccagcctaaacagcgaacatccattgtgtcttctctggattttcaccgaatgaatcacaaccaagaatattttgaaatcaacacatctacagggtgcacaagctttact

SEQ ID NO: 666114 - DNA, 120 bp, Artificial Sequence
  ENSG00000185046_14 (sequence is synthesized)
gccagtcctcctgctagtccacccacctcttctgtgggaaccacagaagtcaagaatgagggaactaaccatacagatgacctctcccgacaggatgacaatgatcccccaaaagaatat

SEQ ID NO: 666115 - DNA, 120 bp, Artificial Sequence
  ENSG00000185046_15 (sequence is synthesized)
gatcctgggcaatttgcaggcctgctccatggatcctctccagcctgtgagtcccctgaaaatccatttcatctctatgggaaaagagaacaatgtgaaaaaggacaagatgaagtcagt

SEQ ID NO: 666116 - DNA, 120 bp, Artificial Sequence
  ENSG00000185046_16 (sequence is synthesized)
aactcagaacctttggtaaagaaaattaaacccaaagtggtcagtagaacaatttttcacaaaaaaagcaaccaactcgaaaaccataccattgttggcacaagatcaaccaggagtgga

SEQ ID NO: 666117 - DNA, 120 bp, Artificial Sequence
  ENSG00000185046_17 (sequence is synthesized)
tctcggaatggggaccagtgggttatgaacgcagggggatttgtggagagagcctgtactctggggagaataaggtcattgcctaaagccttgatcgacatgcatttgtcaaaaagtgtc

SEQ ID NO: 666118 - DNA, 120 bp, Artificial Sequence
  ENSG00000185046_18 (sequence is synthesized)
tctaaatctgattctgatctcattgcctatccttccaatgagaaaacatcaagagttaactggagtgaatcttccactgctgaacacagttctaaagggaattctgaaagaacaccatcc

SEQ ID NO: 666119 - DNA, 120 bp, Artificial Sequence
  ENSG00000185046_19 (sequence is synthesized)
ttcacatcggaatgggaagaaattgacaaaataatgagttccatagatgttggaatcaacaacgaacttaaagagatgaatggtgagaccacaagacccagatgccctgtccaaacagtg

SEQ ID NO: 666120 - DNA, 120 bp, Artificial Sequence
  ENSG00000185046_20 (sequence is synthesized)
ggacaatggttggaaagcattgggctacctcagtacgagaaccacctgatggctaatggatttgacaatgtgcagtttatgggaagcaatgttatggaagatcaggatttgttggaaatt

SEQ ID NO: 666121 - DNA, 120 bp, Artificial Sequence
  ENSG00000185046_21 (sequence is synthesized)
ggaatccttaattctgggcacagacaaagaattctacaggcaatccagctccttccaaagatgagacccattgggcatgatggctaccatcccacctctgtagctgagtggctggattcc

SEQ ID NO: 666122 - DNA, 120 bp, Artificial Sequence
  ENSG00000185046_22 (sequence is synthesized)
attgaactgggcgactacaccaaagcctttctaattaatggctacacttcgatggacctgttgaaaaaaatctgggaggttgaacttattaatgttttaaaaatcaatttgattggccac

SEQ ID NO: 666123 - DNA, 120 bp, Artificial Sequence
  ENSG00000185046_23 (sequence is synthesized)
aggaaacgtattttggcatctctgggagacaggctgcacgacgatcccccacagaagccccctcggtccatcaccctcagggaacccagtggtaatcacactcctcctcagttgtctcca

SEQ ID NO: 666124 - DNA, 120 bp, Artificial Sequence
  ENSG00000185046_24 (sequence is synthesized)
tcacttagccaaagcacttacaccactggtggctccctagacgttcctcacattatcatgcagggcgatgcaaggaggagaagaaatgaaaactactttgatgatattccccgatcaaaa

SEQ ID NO: 666125 - DNA, 120 bp, Artificial Sequence
  ENSG00000185046_25 (sequence is synthesized)
ctggagaggcagatggctcagacaggagactggggagaaccttccattaccttgcgacctccgaatgaagccacagcctctaccccggtacagtactggcagcatcacccagaaaagctt

SEQ ID NO: 666126 - DNA, 120 bp, Artificial Sequence
  ENSG00000185046_26 (sequence is synthesized)
atcttccagtcgtgtgattacaaagctttttatttaggttctatgctgataaaagagcttagggggacagaatcaacccaagatgcttgtgcaaaaatgcgggctaactgtcagaagtct

SEQ ID NO: 666127 - DNA, 120 bp, Artificial Sequence
  ENSG00000185046_27 (sequence is synthesized)
acagagcaaatgaagaaggtccctactattattctttctgtctcatataaaggagtcaaatttattgatgcaacaaataagaacataattgctgagcatgaaattcgtaatatctcctgt

SEQ ID NO: 666128 - DNA, 120 bp, Artificial Sequence
  ENSG00000185046_28 (sequence is synthesized)
gctgcccaggacccagaagacctctcaacatttgcctatatcacaaaagatttgaagtctaatcaccactactgtcatgtgtttactgcctttgatgtgaatttagcctatgaaatcatc

SEQ ID NO: 666129 - DNA, 120 bp, Artificial Sequence
  ENSG00000185046_29 (sequence is synthesized)
ctaaccctgggacaggcattcgaagtcgcttaccagctagcactacaagcaagaaaagggggacactcctccacacttccagaaagctttgaaaacaaaccctccaaacccatccccaag

SEQ ID NO: 666130 - DNA, 120 bp, Artificial Sequence
  ENSG00000185046_30 (sequence is synthesized)
ccccgcgttagcattcgcaagtccgtggatcttcttcatgccagccataccgggcaggaaccatcagagagacacactgaggaggcactcagaaaattttgatagaattgaatttacata

SEQ ID NO: 666131 - DNA, 120 bp, Artificial Sequence
  ENSG00000185046_31 (sequence is synthesized)
tagctgataaagcctaaatagaaaggttgatgtatttagcttgaatccttcactttagtggtctaatcaacagataaatgacaagcaaagaatgaaacaatccaaaaatgtttttcaaaa

SEQ ID NO: 666132 - DNA, 120 bp, Artificial Sequence
  ENSG00000185046_32 (sequence is synthesized)
ttagcattcgcaagtccgtgatcgacccatctgagcaaaagactctggccaatctaccgtggattgtggagccgggccaagaagccaagaggggcattaataccaagtatgaaaccacga

SEQ ID NO: 666133 - DNA, 120 bp, Artificial Sequence
  ENSG00000185046_33 (sequence is synthesized)
ttttctgatactcgccgtcctcctgtcctcgcggtgccttgctcgccaagcggtcccggagcaggctttccttcgcgcctccgcgtccacccagcccaggaggaagactgctctgagcgt

SEQ ID NO: 666134 - DNA, 120 bp, Artificial Sequence
  ENSG00000185046_34 (sequence is synthesized)
gcggccttgttacgggcgaaaggccactggccattcctggggaagttctttctgcaccagtgatggaaaacgcaagactttccagtcgcaacccctgagaggcgtgagttgagatgggtt

SEQ ID NO: 666135 - DNA, 120 bp, Artificial Sequence
  ENSG00000185046_35 (sequence is synthesized)
aaaaaaaaaaaaaaaaaagtaaaggggatctctaatactgcctaaaagtatgctttcactgtcagcagttttaaaggtgaaatcagagcagcactacccctcccacctccaaagcatctg

SEQ ID NO: 666136 - DNA, 120 bp, Artificial Sequence
  ENSG00000185046_36 (sequence is synthesized)
tcccacctccaaagcatctgtaaaatcattctatcattgagtatcgtttaatgcaaaaggacaaaaacaactcccgtgatatgattgccaggagattctgtttccccatttctatatttg

SEQ ID NO: 666137 - DNA, 120 bp, Artificial Sequence
  ENSG00000185046_37 (sequence is synthesized)
tggattttatatgtaatcacctatgtcagagaaagaaaacctttcaaccaaatgattggttcaaaaggaaagaatgattcaaagcagaggaatttattatgcacagcaaaatgtgtcttg

SEQ ID NO: 666138 - DNA, 120 bp, Artificial Sequence
  ENSG00000185046_38 (sequence is synthesized)
tattaaatatttttattaaaagaatgtttcattaatgcattgataagaaaactaggttagttgcgagggatgtttctggtttcatttcaaataattaaatttctactgctactaccaaga

SEQ ID NO: 666139 - DNA, 120 bp, Artificial Sequence
  ENSG00000185046_39 (sequence is synthesized)
ggactggctcagtggtggcaaaatactggtgatgctccctagagcaggaggcccggaagtgctgacgcagccatcagcctgccaagattgttttttaatcttcacagtgttttaaagaac

SEQ ID NO: 666140 - DNA, 120 bp, Artificial Sequence
  ENSG00000185046_40 (sequence is synthesized)
atgttaaaaaaaaaaaaatctagtgctcctgctgtcaagatttctgtcatggaaaccttgtttgagaaaggtgttaataaaattctattgcaaaaatttctttttctagaaaaaataaat

SEQ ID NO: 666141 - DNA, 120 bp, Artificial Sequence
  ENSG00000185046_41 (sequence is synthesized)
agaaattccaaagtaataaaacttttcttgagacaaacaaaaaaaaagtttgcttactatttgattaaataaaatttacttacatttctttaaggtattttaattttttaatgtctctgt

SEQ ID NO: 666142 - DNA, 120 bp, Artificial Sequence
  ENSG00000185046_42 (sequence is synthesized)
taacaatcatattgtgaatcattttgaagttcattatagcgatattgataaattgtggaattgtcttaatgtttttttattaactgacattattttaaacctaactgagatgatcagtta

SEQ ID NO: 666143 - DNA, 120 bp, Artificial Sequence
  ENSG00000185046_43 (sequence is synthesized)
cattcatcagttggtgagttttgaagaataactacattttatttcaaactaacaaatgtatacggttttagttcagtgttgaagaattttaatacaatattaaattacttgaactgaaca

SEQ ID NO: 666144 - DNA, 120 bp, Artificial Sequence
  ENSG00000185046_44 (sequence is synthesized)
gttccttgtatatattttgcctattcactgttgatatgtatgtagcaaaatgagagttaaataacactaaaatatggtaccaggaggcaattgtataggagcaaagttaataggagcttt

SEQ ID NO: 666145 - DNA, 120 bp, Artificial Sequence
  ENSG00000185046_45 (sequence is synthesized)
gctgaaacagaagcatatgtgtaaataagcttgggcttccagttataaattttgtaatttttgtcattatttatatcctataaaaaaagcacacaaaaataaaacagaagttgtacagca

SEQ ID NO: 666146 - DNA, 120 bp, Artificial Sequence
  ENSG00000185046_46 (sequence is synthesized)
agcttaaatgcttttcttctttgcaagccatttgaaaacagcagtgattaccatgagagaagtgcagcctatttaagagatgacctctcccgacaggatgacaatgatcccccaaaagaa

SEQ ID NO: 666147 - DNA, 120 bp, Artificial Sequence
  ENSG00000185046_47 (sequence is synthesized)
caagctgacagcttgatatgccttcttctgctgcctggttttgggggctgtatgacgtactggtcggtagtaaagattaatatgtaagaaatgtggagctaggatcaagtcatactccac

SEQ ID NO: 666148 - DNA, 120 bp, Artificial Sequence
  ENSG00000185046_48 (sequence is synthesized)
agcctgcctggcaaactatgttttacttctgactttgctctctcgctgagaacattaatctgtcaagctggcgggctcctttgatagcaactttcccaggggcatgatgtggcaatgcca

SEQ ID NO: 666149 - DNA, 85 bp, Artificial Sequence
  ENSG00000185046_49 (sequence is synthesized)
ccagcctggccaacatggtgagaccctgcctctactgaaaacagaaaaaatttagccaggtgtggttgtgcctgaaaatcacttg

SEQ ID NO: 666150 - DNA, 120 bp, Artificial Sequence
  ENSG00000185046_50 (sequence is synthesized)
gcactccagcctgggcaacagagtaagaaaataaaagaattattttatgtagttttataggttttataaacgtgcactttatacaactgaagcaatagatcaggaagtgctggctctttt

SEQ ID NO: 666151 - DNA, 120 bp, Artificial Sequence
  ENSG00000185046_51 (sequence is synthesized)
atacaactgaagcaatagatcaggaagtgctggctcttttctatgaagtttaccatatctgtgtagaaaacaatctgtcttttgattgtttgacacaatcaaaacaacaagatttgtttt

SEQ ID NO: 666152 - DNA, 120 bp, Artificial Sequence
  ENSG00000185046_52 (sequence is synthesized)
tctagattggttaaatatatatttttgagatttagatatccatctataatggaattcagcctgacaaaccactacctttaaagaaccactccctcacctcccatcccacaccccatctac

SEQ ID NO: 666153 - DNA, 120 bp, Artificial Sequence
  ENSG00000185046_53 (sequence is synthesized)
gccaagagagcggaaatgggttttctgtcagactcctcaaacccacagaaagaaaattgatcaaggaccacagttaagtaaagatcaatttaaaattaaccttagggtcttctgtttttc

SEQ ID NO: 666154 - DNA, 120 bp, Artificial Sequence
  ENSG00000185046_54 (sequence is synthesized)
aagaagtaaaatttgtccagctttactcacttcaaaaattcagaatagagaatctaaaaccttacttaataaattgtatttcttttattcaactacactttagaattatgaggtaggggc

SEQ ID NO: 666155 - DNA, 78 bp, Artificial Sequence
  ENSG00000185046_55 (sequence is synthesized)
ttattcaactacactttagaattatgaggtaggaaggcagaggtgggcgggtcatgaggtcaggagatctagaccatc

SEQ ID NO: 666156 - DNA, 120 bp, Artificial Sequence
  ENSG00000185046_56 (sequence is synthesized)
ggagagcccggcgctcggcgcagcgcggcgcggccaagctccgcgcctctcccgcccttcctcggcgcgctcgccctcgcctcgccgctcgcattcgctgggggcgcccagaaagatgca

SEQ ID NO: 666157 - DNA, 120 bp, Artificial Sequence
  ENSG00000185046_57 (sequence is synthesized)
agtttgcagtggaggtgagtgagaggtgagaaagaattgctgctaaagaggattctctagcttgcaaccatgaagtatagaagagtaatccacaaatagtttgttgaaaggcttcatcta

SEQ ID NO: 666158 - DNA, 120 bp, Artificial Sequence
  ENSG00000185046_58 (sequence is synthesized)
ctgcgctcccgctccagctaggactctctctgccgcctcctcctcctcctccgacctcagtcctcaccaccctcctcccgctcctcaaaagcacccccgagtccccaccccctcacgccg

SEQ ID NO: 666159 - DNA, 120 bp, Artificial Sequence
  ENSG00000185046_59 (sequence is synthesized)
cacccgcgggaacgaggccttgggaattcaggggagtggctgtgggggcgcgtcgcggctcccagctcggccagcccctctttcaagacatggtctgatccccattgtaaaagctgcgcc

SEQ ID NO: 666160 - DNA, 120 bp, Artificial Sequence
  ENSG00000185046_60 (sequence is synthesized)
ccgaagaggaggagagagtcgtgctccctgcctggggctgcagggagctctccgtgctgaagctcttgcattattttagggtggggcgaagagggccctggattttggggagtgggggtg

SEQ ID NO: 666161 - DNA, 120 bp, Artificial Sequence
  ENSG00000185046_61 (sequence is synthesized)
tatccatagtaaccgaggatgcgaggggcgcccagcagcagcgagtgcctgggagccaggaggagcccccgcgcgccgcgcctgggcccgcatcgctctcgcagtgagggtccgcccgag

SEQ ID NO: 666162 - DNA, 120 bp, Artificial Sequence
  ENSG00000185046_62 (sequence is synthesized)
agtcgcggtgctgcttatgtgcgccgggcacgttggatcagtagattagagacacgggaactttggaattgcttgatgattcttagacacttataaggatacttgctctgtggactcctg

SEQ ID NO: 666163 - DNA, 120 bp, Artificial Sequence
  ENSG00000185046_63 (sequence is synthesized)
acttgggaaaaatggaagccagagtgtagtaagtaaggcgggggggaatgaagataatgtgtctgtctttgccagttcagtgtgtacacttaagaggtatgggatgtggtgcattatcag

SEQ ID NO: 666164 - DNA, 120 bp, Artificial Sequence
  ENSG00000185046_64 (sequence is synthesized)
attccgccactctaagatgtcagtttccttattgctcttttcctgacgttctttggggttttactcgcagtgcatgtgtaggggaaggagtgctttgacagatcacttcatggtctctct

SEQ ID NO: 666165 - DNA, 120 bp, Artificial Sequence
  ENSG00000185046_65 (sequence is synthesized)
gagatatccatagtaaccgaggatgcgaggggcgcccagcagcagcgagtgcctgggagccaggaggaggcccccgcgcgccggcaacccccagtgctaggcgccctgcagcccccgcgc

SEQ ID NO: 666166 - DNA, 120 bp, Artificial Sequence
  ENSG00000185046_66 (sequence is synthesized)
ctggctccccacaagccttcaggacagctagataccacctctgagctttagacttttccaggcatatatcaggtaaagcttctggactctaccaactccaccccctgcatccagatttca

SEQ ID NO: 666167 - DNA, 120 bp, Artificial Sequence
  ENSG00000185046_67 (sequence is synthesized)
agctgttccagggattctcttgaagcttccctcagccagcccaagttttgggaaaagcaccctgacatttgtcctcatttaggatggacagtctcccaaataaatacacacttaacattg

SEQ ID NO: 666168 - DNA, 120 bp, Artificial Sequence
  ENSG00000185046_68 (sequence is synthesized)
attatatatatgaagtccaatgtaatttataatacaaaaaaatacagcaagggaaaatgctttagaaatgctcatctgcaaactacaaaacaaaatcctcctcttgaccgactgcatgaa

SEQ ID NO: 666169 - DNA, 120 bp, Artificial Sequence
  ENSG00000185046_69 (sequence is synthesized)
ctgccatgaaatttgcagctccatcatactaggtatctcttctttcttcatgttaccttgtctttcttcccatttttcttttaagacagggtcttgctatgtcacccaggctggactcaa

SEQ ID NO: 666170 - DNA, 120 bp, Artificial Sequence
  ENSG00000185046_70 (sequence is synthesized)
cctcccaaggagctgggattacaggcacgtgccaccgcacctggctcctaatttctttttaagacaagggccattcaaggctttttaaaacctgatgtgtgttgttatactttataacag

SEQ ID NO: 666171 - DNA, 120 bp, Artificial Sequence
  ENSG00000185046_71 (sequence is synthesized)
aacctgatgtgtgttgttatactttataacagtcagtggcttttaattccaaaaggtaatactttatactctgcctacatgagatgagcccctaacagtgtgtacaaataaaattatgat

SEQ ID NO: 666172 - DNA, 120 bp, Artificial Sequence
  ENSG00000185046_72 (sequence is synthesized)
ttgggtattctaaggagacataccatttacagaaatttcttttgataaaattaaggtttcacttttcacatttgcttaaatcacagtaagcctgtaaactagctccttgacccaccattt

SEQ ID NO: 666173 - DNA, 120 bp, Artificial Sequence
  ENSG00000185046_73 (sequence is synthesized)
aaaccagaggttctgcttccactcaaggggaggggattacacaaaggcatgagaaacagggataattgggggtaatttcagagtttttctgccataggtccctaacacagaagcgagtta

SEQ ID NO: 666174 - DNA, 120 bp, Artificial Sequence
  ENSG00000185046_74 (sequence is synthesized)
aaacaccgcctcataactgggaaaggagcactttcatccaaagacgcgaactcagagcaaaatgaacatttccaaagcagccctgccacttcagctgacacacatttatgtgactggtag

SEQ ID NO: 666175 - DNA, 120 bp, Artificial Sequence
  ENSG00000185046_75 (sequence is synthesized)
agagaaggttggttacttagtcctcaagaagaagaatcttaatttccctggaaagcccatctgataacacctctgttcctgcaaactgtatactctcctagtcttctgcactatatacct

SEQ ID NO: 666176 - DNA, 120 bp, Artificial Sequence
  ENSG00000185046_76 (sequence is synthesized)
gtgggttgcctgtgcaaattcatggggaactggtctgaaacatgacgtggaaattcaggctgtgacatcaaaacgtcaccccccaggagagcgagtctattctgtgccattctgactcca

SEQ ID NO: 666177 - DNA, 120 bp, Artificial Sequence
  ENSG00000185046_77 (sequence is synthesized)
gtaacgtataaccagtatgaagattcaattcagatttaagcactttggtttgcttttgaatcttgctattttctgcatttgttttgactgctctcatcattcaagattgacgcttggatg

SEQ ID NO: 666178 - DNA, 120 bp, Artificial Sequence
  ENSG00000185046_78 (sequence is synthesized)
acagaggcaacggctaggggagcggaggttcaagccacatgtctgcgtcctcgggggccagagcccgccagccctcgcggatcccggctcgcggccagcccgagcggctcgggttttaaa

SEQ ID NO: 666179 - DNA, 120 bp, Artificial Sequence
  ENSG00000185046_79 (sequence is synthesized)
ctcaggggcgatgcaaggaggagaagaaatgaaaactactttgatgatattccccgatcaaaactggagaggcagatggctcagcagtcgtctgtctgtgaaatatggacgaatcagaac

SEQ ID NO: 666180 - DNA, 120 bp, Artificial Sequence
  ENSG00000185046_80 (sequence is synthesized)
ggcgatcttcttcatgccagccataccgggcaggaaccatcagagagacacactgaggaggcactcagaaaattttgatagaattgaatttacatatagctgataaagcctaaatagaaa

SEQ ID NO: 666181 - DNA, 120 bp, Artificial Sequence
  ENSG00000185046_81 (sequence is synthesized)
acacaatctagagtgaactctcacttacatgtgtagggcaagaagaaattgtacttttcatattcagtatctactttttccaagtcactaacaagcagacattggcaaagtcttcagaaa

SEQ ID NO: 666182 - DNA, 120 bp, Artificial Sequence
  ENSG00000185049_0 (sequence is synthesized)
ataagatgccggggcagcggcgcgcgctttcccccaagatggcgtccatgcgggagagcgacacgggcctgtggctgcacaacaagctgggggccacggacgagctgtgggcgccgccca

SEQ ID NO: 666183 - DNA, 120 bp, Artificial Sequence
  ENSG00000185049_1 (sequence is synthesized)
gcatcgcgtccctgctcacggccgcggtcatcgacaacatccgtctctgcttccatggcctctcgtcggcagtgaagctcaagttgctactcgggacgctgcacctcccgcgccgcacgg

SEQ ID NO: 666184 - DNA, 120 bp, Artificial Sequence
  ENSG00000185049_2 (sequence is synthesized)
tggacgagcatcctattttgcagatgaagggcgccctaatggagatcatccagctcgccagcctcgactcggacccctgggtgctcatggtcgccgacatcttgaagtcctttccggaca

SEQ ID NO: 666185 - DNA, 120 bp, Artificial Sequence
  ENSG00000185049_3 (sequence is synthesized)
atattttgggagaacttagagaaaaggtgggtgagtgtgaagcgtctgccatgctgccactggagtgccagtacttgaacaaaaacgccctgacgaccctcgcgggacccctcactcccc

SEQ ID NO: 666186 - DNA, 120 bp, Artificial Sequence
  ENSG00000185049_4 (sequence is synthesized)
cggtgaagcattttcagttaaagcggaaacccaagagcgccacgctgcgggcggagctgctgcagaagtccacggagaccgcccagcagttgaagcggagcgccggggtgcccttccacg

SEQ ID NO: 666187 - DNA, 120 bp, Artificial Sequence
  ENSG00000185049_5 (sequence is synthesized)
ccaagggccgggggctgctgcggaagatggacaccaccaccccactcaaaggcatcccgaagcaggcgcccttcagaagccccacggcgcccagcgtcttcagccccacagggaaccgga

SEQ ID NO: 666188 - DNA, 120 bp, Artificial Sequence
  ENSG00000185049_6 (sequence is synthesized)
cccccatcccgccttccaggacgctgctgcggaaggaacgaggtgtgaagctgctggacatctctgagctggatatggttggcgctggccgagaggcgaagcggagaaggaagactctcg

SEQ ID NO: 666189 - DNA, 120 bp, Artificial Sequence
  ENSG00000185049_7 (sequence is synthesized)
atggtgactaggcaccagctcagctgtcacgggtgctgccccaggtcccaggccccaccccctgctgcccaggcacacacccccgcggcaggtgactccaccctgctcctgcgctctgct

SEQ ID NO: 666190 - DNA, 120 bp, Artificial Sequence
  ENSG00000185049_8 (sequence is synthesized)
gtgccgggcacctgcctgctctacgcccctcatccccaggatttcccacccgcaggctttctgcgggagcagtggtggccccggcttctcacccttcaggttttcttgcatctgcgcacc

SEQ ID NO: 666191 - DNA, 120 bp, Artificial Sequence
  ENSG00000185049_9 (sequence is synthesized)
ggtggaagagtaggcccagtggactgggtgctgctgggaggtgggaggctgctgggagggcaccggatgccggggccttgcaacctggcagaggctgtgctgctcagggaagcaaggtgg

SEQ ID NO: 666192 - DNA, 120 bp, Artificial Sequence
  ENSG00000185049_10 (sequence is synthesized)
ccctggggtgaggcggggggctcagaggaaggggagccctcaggaggaagtgttgggggcaactgccagagagcccggccactgcccagtgcccatccggaagctcagcagggagtgggc

SEQ ID NO: 666193 - DNA, 120 bp, Artificial Sequence
  ENSG00000185049_11 (sequence is synthesized)
cctccacgcccagcgtggttcccgcctcctcctacatccccagctccgagacgcccccagccccatcttcccgggaagccagccgcccaccagaggagcccagcgccccgagccccacgt

SEQ ID NO: 666194 - DNA, 120 bp, Artificial Sequence
  ENSG00000185049_12 (sequence is synthesized)
tgccagcgcagttcaagcagcgggcgcccatgtacaacagcggcctgagccctgccacacccacgcctgcggcgcccacctcgcctctgacacccaccacacctccggctgtcgccccta

SEQ ID NO: 666195 - DNA, 120 bp, Artificial Sequence
  ENSG00000185049_13 (sequence is synthesized)
ccactcagacacccccggttgccatggtggccccgcagacccaggcccctgctcagcagcagcctaagaagaacctgtccctcacgagagagcagatgttcgctgcccaggagatgttca

SEQ ID NO: 666196 - DNA, 120 bp, Artificial Sequence
  ENSG00000185049_14 (sequence is synthesized)
agacggccaacaaagtcacgcggcccgagaaggccctcatcctgggcttcatggccggctcccgagagaacccgtgccaggagcagggggacgtgatccagatcaagctgagcgagcaca

SEQ ID NO: 666197 - DNA, 120 bp, Artificial Sequence
  ENSG00000185049_15 (sequence is synthesized)
cggaggacctgcccaaggcggacggccagggtagcacaaccatgctggtggacacagtgtttgagatgaactatgccacgggccagtggacgcgcttcaagaagtacaagcccatgacca

SEQ ID NO: 666198 - DNA, 120 bp, Artificial Sequence
  ENSG00000185049_16 (sequence is synthesized)
atgtgtcctagaaccacctgcctcacagctggccgtcacttgtgggggtccacgggacgatggctttgccagcttaaagtaaccggatggcggacacctggcccccgaggtcccccggcc

SEQ ID NO: 666199 - DNA, 120 bp, Artificial Sequence
  ENSG00000185049_17 (sequence is synthesized)
gccgccctgctgctgacccagcctgttttaagttctggatgcatttctctggggtatttggggcttatttttaaaattttaatatgggttcttttttgtgtgatttaagacactttttgg

SEQ ID NO: 666200 - DNA, 120 bp, Artificial Sequence
  ENSG00000185049_18 (sequence is synthesized)
actcaacgttacatttttgaatgtagtaagtaaattaaccaaaaaagttacaacttcctaattttagtgacagctctgcctgttagactcttactttttaaaatcttttctattttccct

SEQ ID NO: 666201 - DNA, 120 bp, Artificial Sequence
  ENSG00000185049_19 (sequence is synthesized)
cgctggggcagtgccctcctacccccagggttgaggggaccaaggtggcacggtggtactgggggtgcggcagggacacccgaccacaccagagcgtgggagacggtgggccttgtcccc

SEQ ID NO: 666202 - DNA, 120 bp, Artificial Sequence
  ENSG00000185049_20 (sequence is synthesized)
tgcctgtgcctgcctgggagttttgtattcatcttttgtatagttgtggacatttaagacagtctttgggtacctattttcattgtaaaactatctgaaccattaaagtcgagcttttct

SEQ ID NO: 666203 - DNA, 120 bp, Artificial Sequence
  ENSG00000185049_21 (sequence is synthesized)
aggaaggcctggggctggggtttcagccccggcgtctggacagggcagggcgctgttgttcacccccagcgccagccagcccagctgtctcacactgtgagcagcccagtgggcgcatgg

SEQ ID NO: 666204 - DNA, 120 bp, Artificial Sequence
  ENSG00000185049_22 (sequence is synthesized)
ggctctcggctttgccacaaagcttcccgaagacgcggccgctacccggagacgcggtcgccacccagaagcgctctcccgggaagccccgctcgtgggaccgcgccacctgcgccgcct

SEQ ID NO: 666205 - DNA, 120 bp, Artificial Sequence
  ENSG00000185049_23 (sequence is synthesized)
cgccgttttgcgtcattccaataagtgggtgtgtgagggtctggcgctgtcaaccaggctggagtgcagtggcaccatcgtgactcactgcagccttgacctcctcacctcagatcttcc

SEQ ID NO: 666206 - DNA, 73 bp, Artificial Sequence
  ENSG00000185049_24 (sequence is synthesized)
tgcttgcctcagcctcctgaagggctgggattacagagtcttgccctgtcgccaggctggagtgcagtggcgc

SEQ ID NO: 666207 - DNA, 61 bp, Artificial Sequence
  ENSG00000185049_25 (sequence is synthesized)
ccacaacctacacgcgccaccatgcccagctaattagctaatttttgtatttttagtggag

SEQ ID NO: 666208 - DNA, 120 bp, Artificial Sequence
  ENSG00000185049_26 (sequence is synthesized)
gcaaatgctcctgggtgttctgctggagccgtggggagtcagtctcgaggacctcaggggacagccgaagctcccatgacctaaccctaactgaggagggtgtggggctgggcagccgcc

SEQ ID NO: 666209 - DNA, 120 bp, Artificial Sequence
  ENSG00000185049_27 (sequence is synthesized)
gaggtccgggatcctgggggtcctgcccgctgcccgccaggggtttggcccttcccctctgcggcgctagcctagaagagggtgggacgttctgagctcggggtgggggacgtttgccgg

SEQ ID NO: 666210 - DNA, 120 bp, Artificial Sequence
  ENSG00000185049_28 (sequence is synthesized)
tgcggaggtggtggagaagccggccaaggaggaaacggtggtggagaacgccaccccggactacgcagccggcctggtgtccacgcagaaacttgggtccctgaacaatgagcctgcgct

SEQ ID NO: 666211 - DNA, 120 bp, Artificial Sequence
  ENSG00000185049_29 (sequence is synthesized)
ggacgctccaggaatcgggtgtgcctggccctggccgggggctgcccccgggagcagcgtccaggcccatggcggatgcagtctagaggactgcctggaggaggcggcgccggggcgaga

SEQ ID NO: 666212 - DNA, 120 bp, Artificial Sequence
  ENSG00000185049_30 (sequence is synthesized)
cctccagagcgcaaggccggcgggagaaaagctgaggaagtgggaaatctgtggctggagctcagcagattgcaacacttctacatcaagaaaatgtggcaataaggctgccaaaccctc

SEQ ID NO: 666213 - DNA, 120 bp, Artificial Sequence
  ENSG00000185049_31 (sequence is synthesized)
ctgtcttctgaaccgaatccttgtagattctggatatcgcaccttcataggaatattctgagaatattttctcctattcgcttccaggagccgtcgtagcagccgattaggactggctgc

SEQ ID NO: 666214 - DNA, 120 bp, Artificial Sequence
  ENSG00000185049_32 (sequence is synthesized)
cggaagatggacaccaccagtaaggcccccaccctggtgccgtgagccttgcttttggggcagagctaagggcttcacctggagacccgctccctgttggggaggtggtgcctgtgaatg

SEQ ID NO: 666215 - DNA, 120 bp, Artificial Sequence
  ENSG00000185049_33 (sequence is synthesized)
gagctccctgggaggatgtgtgggcacggagacaggagggccgggatctgaggacagtgctgggcacggagacaggaaggccgggatctgaggacaccgctgggcatggagacaggaagg

SEQ ID NO: 666216 - DNA, 120 bp, Artificial Sequence
  ENSG00000185049_34 (sequence is synthesized)
ccgggatctgaggacagtgctggcccctgctcctctgctgttggcaccggtggctctcggccttcccagctcgggctttcggccccaagtgctgctcttgggttccgagtgtccctgggc

SEQ ID NO: 666217 - DNA, 120 bp, Artificial Sequence
  ENSG00000185052_0 (sequence is synthesized)
gatagcgacgaggagggcgacgacgaggagacgggcagcggcgaggaggaggaagaggaggcggaggcggcggccgggtgggagcgcagcgaggacgcgcggctgctgcgcgcagggctg

SEQ ID NO: 666218 - DNA, 80 bp, Artificial Sequence
  ENSG00000185052_1 (sequence is synthesized)
cgaggatgcggccgtccggcgacgaggaccgcgcgcgtcgccgccgccgccgccgccgccggagggaccttctgctgagc

SEQ ID NO: 666219 - DNA, 120 bp, Artificial Sequence
  ENSG00000185052_2 (sequence is synthesized)
cgccgccgccgccgccggagggaccttctgctgagccagctctgcttcctggcctcggtggcgctgctgctctggtcgctgtcgagcctgcgagagcagaaggagcttgacctcatggac

SEQ ID NO: 666220 - DNA, 120 bp, Artificial Sequence
  ENSG00000185052_3 (sequence is synthesized)
ctcgtaggggaagacagaaagtggatgatggcgaggaagctgatgcaggtgaacgacactctgacttccgaagatgccggactccggaacagcaagaactgcaccgaaccagccctgcat

SEQ ID NO: 666221 - DNA, 120 bp, Artificial Sequence
  ENSG00000185052_4 (sequence is synthesized)
gaattccccaatgacatcttcacaaacgaggatagaagacaaggtgcggtggtcctccatgtgctctgtgccatatacatgttctatgcgctggccattgtgtgtgatgacttcttcgtc

SEQ ID NO: 666222 - DNA, 120 bp, Artificial Sequence
  ENSG00000185052_5 (sequence is synthesized)
ccttccttggaaaagatctgtgagcgcctgcacctcagtgaagatgtggctggggccacattcatggcagcgggaagttcggccccagagctgttcacatcggtcataggggtcttcatc

SEQ ID NO: 666223 - DNA, 120 bp, Artificial Sequence
  ENSG00000185052_6 (sequence is synthesized)
accaaaggcgatgtgggagttggcaccatcgtgggctcagcggtattcaacatcctgtgcatcattggtgtctgtgggctctttgctgggcaggttgtggctctttcctcctggtgcctg

SEQ ID NO: 666224 - DNA, 120 bp, Artificial Sequence
  ENSG00000185052_7 (sequence is synthesized)
ctgagggattctatttactacacgctgtctgtgatcgcgctcatcgtgtttatttatgatgaaaaagtttcctggtgggagtctttagtccttgtgctgatgtatcttatctacattgtc

SEQ ID NO: 666225 - DNA, 120 bp, Artificial Sequence
  ENSG00000185052_8 (sequence is synthesized)
atcatgaaatataacgcttgcatacatcagtgctttgagaggaggacaaaaggtgccgggaacatggtcaacggattggccaacaatgctgaaattgatgacagcagcaactgcgacgca

SEQ ID NO: 666226 - DNA, 120 bp, Artificial Sequence
  ENSG00000185052_9 (sequence is synthesized)
actgtggtgctacttaagaaagcaaatttccaccgcaaagcatcagtgatcatggtagacgagctgctgtcagcctacccacaccagctttccttctctgaggctggccttcgaatcatg

SEQ ID NO: 666227 - DNA, 120 bp, Artificial Sequence
  ENSG00000185052_10 (sequence is synthesized)
ataaccagccactttccccccaagacccggctctccatggccagtcgcatgttgatcaatgagagacaaagattgataaacagcagggcttataccaacggggaatctgaggtggccatc

SEQ ID NO: 666228 - DNA, 120 bp, Artificial Sequence
  ENSG00000185052_11 (sequence is synthesized)
aaaatcccaattaagcacaccgtggagaatgggacagggcccagcagtgccccagacaggggcgtgaatgggacacggagggacgatgttgtggctgaggctggcaacgaaacagagaat

SEQ ID NO: 666229 - DNA, 120 bp, Artificial Sequence
  ENSG00000185052_12 (sequence is synthesized)
gaaaatgaggacaatgagaatgatgaggaggaagaggaggacgaggatgatgatgaaggaccgtacacaccattcgacaccccctcgggtaaactggaaacagtgaaatgggcgttcacc

SEQ ID NO: 666230 - DNA, 120 bp, Artificial Sequence
  ENSG00000185052_13 (sequence is synthesized)
tggccgctgagtttcgtcttatacttcactgtacccaactgcaacaagccgcgctgggagaaatggttcatggtgacgtttgcttcctccacgctgtggatcgcagccttctcctacatg

SEQ ID NO: 666231 - DNA, 120 bp, Artificial Sequence
  ENSG00000185052_14 (sequence is synthesized)
atggtgtggatggtcacaatcattggttacaccctggggattcctgacgtcatcatggggatcaccttcctggctgctgggaccagcgtgcctgactgcatggccagcctcattgtggcc

SEQ ID NO: 666232 - DNA, 120 bp, Artificial Sequence
  ENSG00000185052_15 (sequence is synthesized)
agacaagggatgggggacatggctgtgtccaactccattgggagcaacgtgtttgacatcctgattggcctcggtctcccctgggctctgcagaccctggctgtggattacggatcctac

SEQ ID NO: 666233 - DNA, 120 bp, Artificial Sequence
  ENSG00000185052_16 (sequence is synthesized)
tgaacaagtggcagctggacaagaagctgggctgtgggtgcctcctcctgtatggtgtgttcctgtgcttctccatcatgactgagttcaacgtgttcacctttgtgaacctgcccatgt

SEQ ID NO: 666234 - DNA, 120 bp, Artificial Sequence
  ENSG00000185052_17 (sequence is synthesized)
gcggggaccactgagccgccgggtgcccacagaggctcagctccttcttttctgtgcaatacgagacccggccgcaccccgagtcacacaggcccccggggccacggcgttcgtctctcc

SEQ ID NO: 666235 - DNA, 120 bp, Artificial Sequence
  ENSG00000185052_18 (sequence is synthesized)
tgtgctgtcctcaggcctccgctcctgttttggtggcccaggctctcccctgacccatcctcgctcccccacctccttgggtcatgcccacccaccctttcctgcctcctccgtgtgaag

SEQ ID NO: 666236 - DNA, 120 bp, Artificial Sequence
  ENSG00000185052_19 (sequence is synthesized)
acatccaacatccacgtgacttttccagctccatttttgaacagtgactgagattctagaaaaactggctgctaactggcctgagccaggcaacactgattccaatccctcctccttttt

SEQ ID NO: 666237 - DNA, 120 bp, Artificial Sequence
  ENSG00000185052_20 (sequence is synthesized)
taagttatttgatggaagactcacctaatttgtgacctgagactgttgaagaaatagagaggagggggcccgttgattacagagagcatttgggattttgtttggtttggagatgatgcc

SEQ ID NO: 666238 - DNA, 120 bp, Artificial Sequence
  ENSG00000185052_21 (sequence is synthesized)
taggttactgggtttggggggattgttttcttttgggggccttccccttttactccttttcttccagagatcaagagcttctcttgcatcttcttccactgggctctggattaatcaatt

SEQ ID NO: 666239 - DNA, 120 bp, Artificial Sequence
  ENSG00000185052_22 (sequence is synthesized)
acccaaaggctgcacctgccgtgttgtctgggcttgcatcccagatgtgttggagtatgcatggatgtagtgctttttagaggagccactgggcaaggccaccaagaacaaatgcatgac

SEQ ID NO: 666240 - DNA, 120 bp, Artificial Sequence
  ENSG00000185052_23 (sequence is synthesized)
attttatagccaaggacgcctcgctaaagtcttatgggcgtcccctggggttgggggggcacaaggttttggaggaagaagacaacttccctcattccatcatcaccatctctttctcac

SEQ ID NO: 666241 - DNA, 120 bp, Artificial Sequence
  ENSG00000185052_24 (sequence is synthesized)
taggttctttctagttttcaagcaatagttctagcctgccttggacaagggggccccagttaaacaaactacccatccatgagctgccaggcagtcaaaaacagaagcttccccgacttg

SEQ ID NO: 666242 - DNA, 120 bp, Artificial Sequence
  ENSG00000185052_25 (sequence is synthesized)
tgagtccctgagatgtgctcttgttgtttggcatttggggtgacagggagtgacccagaggccaccactgcttttcatgcaggagttacagacactggtttcttggaaaatggagagaag

SEQ ID NO: 666243 - DNA, 120 bp, Artificial Sequence
  ENSG00000185052_26 (sequence is synthesized)
cgcactttgcacagacgtcgtcaattaagtcccaatttgccacttggtattgagtacactggaccctgaccactggctcttgggcaaacgtccttcctcacggggcgcctccgccaagcc

SEQ ID NO: 666244 - DNA, 120 bp, Artificial Sequence
  ENSG00000185052_27 (sequence is synthesized)
ggcccagctgcacccctcccttcctggagggatggccagggaaggagaaaacagagaactgacacctttgaaaccacagaatgtgttacatgcagactcgctcaagggcataagttattg

SEQ ID NO: 666245 - DNA, 120 bp, Artificial Sequence
  ENSG00000185052_28 (sequence is synthesized)
tgaacgtttttgccaatcactgctcaacagccctgctagattttgtatgatgctgaattattatgcagactaattccacccagttgagacacaccatgcttgttcacttgtatttattga

SEQ ID NO: 666246 - DNA, 120 bp, Artificial Sequence
  ENSG00000185052_29 (sequence is synthesized)
aactgtggattcttgcccgtgctgtcccttgtatttactttaagcactgatcacttatcattcattcggtatggttttccctgtcccttgtacacattctggtatgaatttgtaaaaata

SEQ ID NO: 666247 - DNA, 120 bp, Artificial Sequence
  ENSG00000185052_30 (sequence is synthesized)
acctgctacaaattggttgaatgtttctgtctgtggtgcgaaccagcattaacggatggggcacgtgcccaactgaggaacaggagaagaaatcaccaatttgggctctcagagctaaga

SEQ ID NO: 666248 - DNA, 120 bp, Artificial Sequence
  ENSG00000185052_31 (sequence is synthesized)
cacacttattgattctgttgcacattttgcactggtttatggcgattgttttcttggacggatagtgtaaaataaacttctctgttctctatccttcccagagcagagtgcattactttc

SEQ ID NO: 666249 - DNA, 120 bp, Artificial Sequence
  ENSG00000185053_0 (sequence is synthesized)
agtgttggctgtgggaagagagaagcgaagtcagtcacctggtggtgaaggccagtaaaacagcgaagcaggaggaaaatttttctctccctctctctttctctccctctttttctctcc

SEQ ID NO: 666250 - DNA, 120 bp, Artificial Sequence
  ENSG00000185053_1 (sequence is synthesized)
gttggatccacctcctattccctcaactcttttagcataaccttcaaaggagaacgttcccttctgacttgattatcttcttttccccactgagaaaatacctctcagctacaagacatt

SEQ ID NO: 666251 - DNA, 120 bp, Artificial Sequence
  ENSG00000185053_2 (sequence is synthesized)
ttttaagtctatgcaggacttcggggattctgttatcttgccggggaaactgatcattgctaatgcctgggactggagctaaattacctaccagagtaagcctgacggaggaagcctttt

SEQ ID NO: 666252 - DNA, 120 bp, Artificial Sequence
  ENSG00000185053_3 (sequence is synthesized)
atcatacactcttctcttcagtttgaacacatttgcttgaaatttgccgcatgatgctgaccagggaagcagctttttttctcgggatgcagcaattcgctgggttctaagcttattgca

SEQ ID NO: 666253 - DNA, 120 bp, Artificial Sequence
  ENSG00000185053_4 (sequence is synthesized)
gaagaagaaataatcttaaatagagtggatttttttttccttttttcttttggcccctgtttcaatcgactcagctgtgttgcaccgcggtagagatcacctgtcactaaatctttgagg

SEQ ID NO: 666254 - DNA, 120 bp, Artificial Sequence
  ENSG00000185053_5 (sequence is synthesized)
aagtaaaataaagtgaattatcattattatttatttattttccttatttttaacccggtggaggcggcgtgaccacggagaatgagactgagaggagctgccggggcttggaggaggata

SEQ ID NO: 666255 - DNA, 120 bp, Artificial Sequence
  ENSG00000185053_6 (sequence is synthesized)
aagctgagtttaagctggaaactaaaagactagattgtttttgggtgccactcgcccggttcctctccacttcgtttagttgcgctccatggacagatcaacgaacctggacattgagga

SEQ ID NO: 666256 - DNA, 120 bp, Artificial Sequence
  ENSG00000185053_7 (sequence is synthesized)
aagatgacacgagaacaatacatactagcaacccaacagaataacctgccaaggactgagaatgcacaactttacccagtgggaatttatggatggcgaaagaggtgcttatacttcttt

SEQ ID NO: 666257 - DNA, 120 bp, Artificial Sequence
  ENSG00000185053_8 (sequence is synthesized)
ctttgtccttctgctgttggttaccatgatagttaacttagccatgacaatatggatattgaaagttatgaatttcactgtggatggtatgggaaatctgagagtcaccaagaagggaat

SEQ ID NO: 666258 - DNA, 120 bp, Artificial Sequence
  ENSG00000185053_9 (sequence is synthesized)
ccgacttgaaggtatatctgagtttctacttccattgtatgtgaaagaaattcattctcgaaaggatagtccgctggtcttacagtctgacaggaatgtcacagtgaatgcaagaaatca

SEQ ID NO: 666259 - DNA, 120 bp, Artificial Sequence
  ENSG00000185053_10 (sequence is synthesized)
catggggcagttaaccggacagctgaccataggagctgatgctgtggaagctcagtgtaaaagatttgaagtgagagccagtgaagatggcagggtgctgttttctgcagatgaagatga

SEQ ID NO: 666260 - DNA, 120 bp, Artificial Sequence
  ENSG00000185053_11 (sequence is synthesized)
gattaccattggggctgaaaagctgaaagttacaggcactgaaggagccgtatttgggcactctgtggagacgccgcacatcagagcagagccatcccaagatctcaggcttgaatcacc

SEQ ID NO: 666261 - DNA, 120 bp, Artificial Sequence
  ENSG00000185053_12 (sequence is synthesized)
caccagatccttgatcatggaagctccccgtggggtccaggtgagtgctgctgcaggagacttcaaggccacctgcaggaaggagctccatctgcaatctacagaaggggagatattttt

SEQ ID NO: 666262 - DNA, 120 bp, Artificial Sequence
  ENSG00000185053_13 (sequence is synthesized)
aaatgcagagacaatcaagctgggaaatctaccaactggctccttctcatcttcttcacccagctcctcaagttctcgacagacagtgtatgaactctgcgtctgccccaatggcaaact

SEQ ID NO: 666263 - DNA, 120 bp, Artificial Sequence
  ENSG00000185053_14 (sequence is synthesized)
ttacctttctccagcaggagtaggttccacttgtcagtccagtagcaacatctgcctgtggagctgaagtgactgatttctcctcacaccagaatagccttttgttcctgtccgtctgct

SEQ ID NO: 666264 - DNA, 120 bp, Artificial Sequence
  ENSG00000185053_15 (sequence is synthesized)
tcacagttctgctcggtttcccttgtgatcagtccagagcttcttcgaatggtccacagagcaacttccagtgtgagcagggattcgccaccaccttctcttgtgatttactgtactgct

SEQ ID NO: 666265 - DNA, 120 bp, Artificial Sequence
  ENSG00000185053_16 (sequence is synthesized)
caacacagagggtgtgattgacacagcagtggaaaaagcgtcgtcagcaggaaaactggatcatgacttttgctcgaaagggagaataacataggtgcctttgctacgcgaagtgaagca

SEQ ID NO: 666266 - DNA, 120 bp, Artificial Sequence
  ENSG00000185053_17 (sequence is synthesized)
cacagttttagatttttgcaggacctggatatgaactgcacatatatacattacataaatgaaattcccagtatccaatggcaagatgaaatggttaaccctgtaagaaaacttattcta

SEQ ID NO: 666267 - DNA, 120 bp, Artificial Sequence
  ENSG00000185053_18 (sequence is synthesized)
cattctgaaagcacaattttccattcatctttttggatgtaaacttttatccccgacttttaaaattttaaagcattatgtaatgcttgctttactaaaatttaaattcaatacatggtt

SEQ ID NO: 666268 - DNA, 120 bp, Artificial Sequence
  ENSG00000185053_19 (sequence is synthesized)
tttaacaaaacagaacaaaacaaaacaatacagaatctctccctgagttttccttctgtttctttaatttcaatgtgctgttactctttgtctactaagtctagaattttgtacatcagg

SEQ ID NO: 666269 - DNA, 120 bp, Artificial Sequence
  ENSG00000185053_20 (sequence is synthesized)
taattttgaaagcactcagcaatatatcctttacagaattaacaaaatgccattataatgtcattggtcagatctggatggccttatatagtatttacatggctactgcatgtgacgtat

SEQ ID NO: 666270 - DNA, 120 bp, Artificial Sequence
  ENSG00000185053_21 (sequence is synthesized)
ttgcttttaacaaaacatctactctattgcaatataagacaggattaagaaggatatgttgatggtattaaatccatagatgatttttaaaaaattcacatgctatcctttacacctagg

SEQ ID NO: 666271 - DNA, 120 bp, Artificial Sequence
  ENSG00000185053_22 (sequence is synthesized)
ttttaatagtataatttttgtttgctccactcactctgcacttgattctgactgctaaaattcaaacatcttctaaataaataatactaatatgatgcataatgctgagaataaattctc

SEQ ID NO: 666272 - DNA, 120 bp, Artificial Sequence
  ENSG00000185053_23 (sequence is synthesized)
tttccattggggtatcatcttcagaattattctccatctattttttattggaggttaagatttaaagaagtcagaagctaactaaaatttcttgactaaacagtaaaaatgacaaatgct

SEQ ID NO: 666273 - DNA, 120 bp, Artificial Sequence
  ENSG00000185053_24 (sequence is synthesized)
aataaatattgaaaatgtgtttacttcactacattcatattttagggaatttagtcccatttctattcagctgttaacatatatttacttttattagatcgttgttaggctaccctgacc

SEQ ID NO: 666274 - DNA, 120 bp, Artificial Sequence
  ENSG00000185053_25 (sequence is synthesized)
tcaaaaattatagttcttttcattttccaatgcttatttttgtatatgacctcttagtaaacaactccagaatactgaatattcatttatcacagcaccccttaactcaaactcttgaaa

SEQ ID NO: 666275 - DNA, 120 bp, Artificial Sequence
  ENSG00000185053_26 (sequence is synthesized)
cttacagagtcaaagaatgtaaaactgtattaagtatttcctattatgggaagatgacttaattactataaggtaagtcctgaattttcacatgtcaatcaaacgtttttctccctcatg

SEQ ID NO: 666276 - DNA, 120 bp, Artificial Sequence
  ENSG00000185053_27 (sequence is synthesized)
cacactatcaacatttgtgttgaaacttccttttggggattaatggctgtagagtctttggagttcaggtgtctacagctcagagtgaactgggagattagaacttgttgcaaaagatgt

SEQ ID NO: 666277 - DNA, 120 bp, Artificial Sequence
  ENSG00000185053_28 (sequence is synthesized)
ggttagtgaaagtagaaatattggcaatgcaagaagaaaagtgaaatatttgaccagaattatcttgtttgcataacctagcatatcaaataactgaaaaagctcatttccactgtactc

SEQ ID NO: 666278 - DNA, 120 bp, Artificial Sequence
  ENSG00000185053_29 (sequence is synthesized)
agcagaagggttcaaaggctaatttattactgttaaaataaaatgtgattatatttgggtgttattatataactttttaaatcaatattgaaataagaatttatgatatacgattgctta

SEQ ID NO: 666279 - DNA, 120 bp, Artificial Sequence
  ENSG00000185053_30 (sequence is synthesized)
attaaaataagagaatttaatataagaaatctcacattggtctttgcaaaataaagtataatacaagaaatattgagaaattatgtgtgctaatcactatattatggacttttaaggaaa

SEQ ID NO: 666280 - DNA, 120 bp, Artificial Sequence
  ENSG00000185053_31 (sequence is synthesized)
gaaaacattatgtagtaatttaatttaagacatattcaagttctaatcatccttccattaaaacaattagaaactttctaagtcaaatgggaataattcttttgattaggaactggccct

SEQ ID NO: 666281 - DNA, 120 bp, Artificial Sequence
  ENSG00000185053_32 (sequence is synthesized)
gtttctaatctcagctgtcttctactaatcaattgagctgttttaggcagttcgagaatctctccaggcttcagtttactcaacttcacagcaaaagtattgaataaaatagtctcttgg

SEQ ID NO: 666282 - DNA, 120 bp, Artificial Sequence
  ENSG00000185053_33 (sequence is synthesized)
ggttcctttctgttccaacatgttctaatttcaagttctaattcaagttctaatttcaaaattacaaaaggcaaaagagaaaaatgaaattttaaattatatgtcataagaggagaaaag

SEQ ID NO: 666283 - DNA, 120 bp, Artificial Sequence
  ENSG00000185053_34 (sequence is synthesized)
atgaaaaaaaaagtgagaaaaaaagatgtaaaaaccgattccagtgagggactgacacatttttaattcaaatgcattctgagaagtatagacataattcaaaagtaacttacaagcttg

SEQ ID NO: 666284 - DNA, 120 bp, Artificial Sequence
  ENSG00000185053_35 (sequence is synthesized)
agagctttagactgtatccagatgatataacaaatcggttcagtacagtagaaaatatagtgatagcgatggctttcctattcaacaccaaataattgctttaagttatctgactagctg

SEQ ID NO: 666285 - DNA, 120 bp, Artificial Sequence
  ENSG00000185053_36 (sequence is synthesized)
tttcagatttctgaatctaagccaagatccctgcctcagagagatcaagcctattgtgaaggcttagaagaatggccccaaatgtcctcgttttccacattcaaacacaaaaaagcattt

SEQ ID NO: 666286 - DNA, 120 bp, Artificial Sequence
  ENSG00000185053_37 (sequence is synthesized)
ttttttttttaaaaatatagtggtcccttaattgcacagtaccctaacagattatgttttcccagtaccatctttatgttacaatatgtataaataaaatgcagtttacttatataaatt

SEQ ID NO: 666287 - DNA, 120 bp, Artificial Sequence
  ENSG00000185053_38 (sequence is synthesized)
tcatcttccccaaatgacactgagaaaaatgagtcctttatagtgtactacatggatgcgactaagctatcttattacccgtatcttaataacttcatactcagtgtacgccaggaagga

SEQ ID NO: 666288 - DNA, 120 bp, Artificial Sequence
  ENSG00000185053_39 (sequence is synthesized)
acaaacggaagaagaaaaagaggttggtagttttgctagcatttaagttatttgccaggaatggataaaccgagatgtatctgaattcaggtttgggggatcacaaaaggaaagatgcaa

SEQ ID NO: 666289 - DNA, 120 bp, Artificial Sequence
  ENSG00000185053_40 (sequence is synthesized)
agaggacacattattcttttctttttcagaagatttcaattaaatacttcaaaaaaaaacagcaagaacaacaaaaacttccaaatttcctacttcccttgttcaacatttccaaaattt

SEQ ID NO: 666290 - DNA, 120 bp, Artificial Sequence
  ENSG00000185053_41 (sequence is synthesized)
ctatccggtacttacttattagtcatacacacacatacacacatttatgtctaaaatatatatattttattgtgaatgatatgttttataatttggcacataattatttatctaagagtt

SEQ ID NO: 666291 - DNA, 120 bp, Artificial Sequence
  ENSG00000185053_42 (sequence is synthesized)
taagacaattatacacctcaaattttactgtaacttaggaatcttagattacagtacttcaaatctcggaaaatggagccagcaattccagttctagttctgcccctggctagtcatgtg

SEQ ID NO: 666292 - DNA, 120 bp, Artificial Sequence
  ENSG00000185053_43 (sequence is synthesized)
aacttacctacttaagacatatatttaattacgttggtcacagttcacttatctgtgagaggggtatatcaaactagacatttcctttagtcacattcatttttaagtttttctgattca

SEQ ID NO: 666293 - DNA, 120 bp, Artificial Sequence
  ENSG00000185053_44 (sequence is synthesized)
gttaaggaagcactcataaatcttaggttaagtagccatatctgaactagcatttgtgatctccttctgcaccttaaaaagctgcttataaaagttgaaatacaaacctttttggcacgc

SEQ ID NO: 666294 - DNA, 120 bp, Artificial Sequence
  ENSG00000185053_45 (sequence is synthesized)
tacttcctatgctcttttttatactcccttttacactcttaacatttgaacattaaggttcctttggaaaaatcatgcctggttaacaggattcagtaatatggttgacgttaaaaagga

SEQ ID NO: 666295 - DNA, 120 bp, Artificial Sequence
  ENSG00000185053_46 (sequence is synthesized)
aaataatgcatttggatcttattcaaaatgactgtttaggaaattaatagaaatattaaccaaatatgaacattctgtgattattacctccataaagctaaaaagcagtgatcttttgaa

SEQ ID NO: 666296 - DNA, 120 bp, Artificial Sequence
  ENSG00000185053_47 (sequence is synthesized)
gaaatgataatgtgatcacagaggttaattgctgaactgttttattccattcaaaattcctacatattctatcgaatgactcaatcagagaatgcctcgttttacaaaaatagcatttga

SEQ ID NO: 666297 - DNA, 120 bp, Artificial Sequence
  ENSG00000185053_48 (sequence is synthesized)
tacaataaaactcctaataaattatttcattgcaaacatggtatctctgtatgaggcagcaatagcctggagagcgtctaatgcatatgagtgttatatttcatagcagagaatgtcaac

SEQ ID NO: 666298 - DNA, 120 bp, Artificial Sequence
  ENSG00000185053_49 (sequence is synthesized)
ataataatgttaaattattaaaatcattgaaagtatttaatagccaaattttctataaaatcctcaaagccaaattcatatttgagttttatatgagtgaggtcttgtcacctaattctt

SEQ ID NO: 666299 - DNA, 120 bp, Artificial Sequence
  ENSG00000185053_50 (sequence is synthesized)
caaatagctgtggtctaataagagttgttcatgtgatcatatttaatgacatatggagaaattatttgctctatgtactggtgtatattacagtaatgaacactacaaaatatcattatc

SEQ ID NO: 666300 - DNA, 120 bp, Artificial Sequence
  ENSG00000185053_51 (sequence is synthesized)
acaaaggaaatttgcatttgtattcattttaaataatcataaactaatcaataatttaattgaacactgttattcatgttgttttatactgaaatttattagttgtttaaatgtcaaaga

SEQ ID NO: 666301 - DNA, 120 bp, Artificial Sequence
  ENSG00000185053_52 (sequence is synthesized)
ccaaagaatgggatttctattgtatttaactctaaaacactgctgctcctactaatttattcaaatgaataggggggcttataattataacatgaggtagtaaacatccttcttggagga

SEQ ID NO: 666302 - DNA, 120 bp, Artificial Sequence
  ENSG00000185053_53 (sequence is synthesized)
tcctgagttgtataaattaaggaatgcttttgtttcagaagggaaacatcattagtgtggtccacttttcttttatacatgcataacaaactccttggtattcataaaacctatatgcaa

SEQ ID NO: 666303 - DNA, 120 bp, Artificial Sequence
  ENSG00000185053_54 (sequence is synthesized)
agaccgtatcccaaaatgggcccagcatggatctcctcagctgagtttcaactttcactgcttgctgaacactatttggagaataaaatttgaaatacttgtagaaccagagggctattt

SEQ ID NO: 666304 - DNA, 120 bp, Artificial Sequence
  ENSG00000185053_55 (sequence is synthesized)
tttaattgttaactgaggtggctctgcattttgagaaagccaatgaaaaccattaaaggaaatgagatataatgaactgtagttattttttgtttttttcagtcttagtatctcatttgt

SEQ ID NO: 666305 - DNA, 120 bp, Artificial Sequence
  ENSG00000185053_56 (sequence is synthesized)
ttgcgtatttataaataaaaaccaaacagggttaaagatgggcaaggacattcattaacaatggagatatgtaatctggagtttgagtgtctcgttatttatacaattctttaaatcagg

SEQ ID NO: 666306 - DNA, 120 bp, Artificial Sequence
  ENSG00000185053_57 (sequence is synthesized)
tccactattcatttattttgttttgtactttcatgtaaatgttttcttgtatatatagatatatgaaaaatggaactattttcttacacatactatgcaacatgtttgtaaaattgcaat

SEQ ID NO: 666307 - DNA, 120 bp, Artificial Sequence
  ENSG00000185053_58 (sequence is synthesized)
attaccaaaattacaaaagctgtgcttttgtactctatcttgctttatgtaaaatcactttttctatttaaatggactgtctgccctataaactgtagataacatatctattcaaaaatc

SEQ ID NO: 666308 - DNA, 120 bp, Artificial Sequence
  ENSG00000185053_59 (sequence is synthesized)
agtctattgtatcttttgtttagatggaacttaattggggtatattttgggggagagaaaatgcagcaaagttttggcaattggaaacctttttttctctgaaatgagaccttttgaagc

SEQ ID NO: 666309 - DNA, 120 bp, Artificial Sequence
  ENSG00000185053_60 (sequence is synthesized)
atgcaatgagctcatataatttaagatctctcctgtgattcttgtaatttgtcctaattttggtgctactatgtaaccatgattaaatgtgatagtcaaaacaaagaggataaaaactta

SEQ ID NO: 666310 - DNA, 120 bp, Artificial Sequence
  ENSG00000185055_0 (sequence is synthesized)
ggcagtcgcctagcaacagcgggacgcggagcgatggagaccagcagcagggagctccaagccgcggagtatttggaaaagcatcagatcaaggaggtggttagctacctcaccagcgcc

SEQ ID NO: 666311 - DNA, 120 bp, Artificial Sequence
  ENSG00000185055_1 (sequence is synthesized)
ctccttttctttcggccggaaaaaccaaaagaatatttaatatctctattggaacgactgagaattgcaaaagtaacaggcgtggcgtttcctttctttatggataactctaacattgtg

SEQ ID NO: 666312 - DNA, 120 bp, Artificial Sequence
  ENSG00000185055_2 (sequence is synthesized)
gctatgtttgagatgatggactcctcaggcagaggcaccatatcatttgtgcagtataaagaagccctaaaaaccctgggtctatgcactgaagatgaagatttacaagatgatggacat

SEQ ID NO: 666313 - DNA, 120 bp, Artificial Sequence
  ENSG00000185055_3 (sequence is synthesized)
ccgagtcatatcaaactgcagctgggctgctcctccttcattgaagtgattagcaagaattatctgaaacaaagaataattcatataacagttgtctttattatcacagcccaaaaacag

SEQ ID NO: 666314 - DNA, 120 bp, Artificial Sequence
  ENSG00000185055_4 (sequence is synthesized)
tctattcttacttacttcttggtagatgtatacatccagcttctctacaagcatttgccagaaaattttaaataaggagaaacaaagctgctgctccaactgaagtaaatggtctcgtaa

SEQ ID NO: 666315 - DNA, 120 bp, Artificial Sequence
  ENSG00000185055_5 (sequence is synthesized)
cgtcagcagcaacgggcaagccgaactggacagggacatcactgcctgctctgactgagatggcaaggacaaccatctggaaaaaacacatttttaccaaaaaattttcatcagtttcta

SEQ ID NO: 666316 - DNA, 120 bp, Artificial Sequence
  ENSG00000185055_6 (sequence is synthesized)
gccctaagcctggatcgcggacagtgacgttggtccacacctcacctgccctctctgccctgctacatgccccaggcttgccctgaaccgtgagctctagaaattccaggtccgggtcgc

SEQ ID NO: 666317 - DNA, 120 bp, Artificial Sequence
  ENSG00000185055_7 (sequence is synthesized)
taataagtaattctataaagttttccagtttcattaattcagaatttcatcatataacttgaaatccaattggcttcctctttcttagaaacaaaaaccaaagaaacctttttctgaaag

SEQ ID NO: 666318 - DNA, 120 bp, Artificial Sequence
  ENSG00000185055_8 (sequence is synthesized)
acattattttccagtattaggccaatttgtcctcaaattaagtagaatctcaacatcttgttgagccagtttgtaaattccaacttcatttaatgctgctgtggcaggaagctgccctga

SEQ ID NO: 666319 - DNA, 120 bp, Artificial Sequence
  ENSG00000185055_9 (sequence is synthesized)
gttaatgaactgatgactgaaacaggcccacactcctactttcagagcaaagcaattttatcagactctctgggggaagagggagcagacactgcattttccttttttaaatttctttct

SEQ ID NO: 666320 - DNA, 120 bp, Artificial Sequence
  ENSG00000185055_10 (sequence is synthesized)
aacagcttctctgcactgctggtccacatgttctctataaaaatatttatggatttattatttggttcttttaacatggtaagactacacaggtgcagagttgctatttctttagattac

SEQ ID NO: 666321 - DNA, 120 bp, Artificial Sequence
  ENSG00000185055_11 (sequence is synthesized)
tataaggtaatacgatccctatttcaatatgtatccgttatttccctaaatacaatacttaatattaacactatattaaatatagctataactttaggtagattagaacatgggaaaaga

SEQ ID NO: 666322 - DNA, 120 bp, Artificial Sequence
  ENSG00000185055_12 (sequence is synthesized)
caaaaataagagataaatgaaagcagcagaaagaacattaaaataaattttaaaaacagtcctatgaaacgtgtaaacataagctttcattttataagtctaaaaggaatgctttataac

SEQ ID NO: 666323 - DNA, 120 bp, Artificial Sequence
  ENSG00000185055_13 (sequence is synthesized)
ctcacaaaacccaaacataatttaaattttactttttttttttgagacatggtcttgctctgtcacctaggctggagtgaaactgcacgatcatagctcactacagcctcagcctctcaa

SEQ ID NO: 666324 - DNA, 120 bp, Artificial Sequence
  ENSG00000185055_14 (sequence is synthesized)
atagctcactacagcctcagcctctcaagtagctaggactacaggtccacacccccacacctggcttttttttgtttgttcattttaatactttctgtagagatggagtcttgctatgtt

SEQ ID NO: 666325 - DNA, 120 bp, Artificial Sequence
  ENSG00000185055_15 (sequence is synthesized)
caagcaattctcccacctctgcctcccaaagtactgggattacagatgtgggctactatgcctggcctataaattttagatcaacaaattctgaaactataattatatttagaaccaaaa

SEQ ID NO: 666326 - DNA, 86 bp, Artificial Sequence
  ENSG00000185055_16 (sequence is synthesized)
cattcgctcggcacgtctccttcttgctgccttgtgaagaatgtgtcttgcttacccttcgccttccaccattattgtgctagtca

SEQ ID NO: 666327 - DNA, 120 bp, Artificial Sequence
  ENSG00000185056_0 (sequence is synthesized)
aaccgctcccgcatccctcgcctgcacagtgggcagtctggcgcctgtggcgtcgtgtttgctgagggcccggctgccgttgactgaggctgcgatggcggcggcaggccggggtcggga

SEQ ID NO: 666328 - DNA, 120 bp, Artificial Sequence
  ENSG00000185056_1 (sequence is synthesized)
gcaggactcggcgcgcttcgtctatgtgacgcgcttcggctcgcatcagtgcagtggcgtcctgcaactgggcggccgtggagctcaaggcctttggggtcaggggcctggggcaggctg

SEQ ID NO: 666329 - DNA, 120 bp, Artificial Sequence
  ENSG00000185056_2 (sequence is synthesized)
tcgccaggagaagccgagggaagcaatggcggtggcgggcgttcagggtggcagcgagctgcccctcggttcccagctcagggtccccacgacccctggtgtggaggctgcggcctctgc

SEQ ID NO: 666330 - DNA, 120 bp, Artificial Sequence
  ENSG00000185056_3 (sequence is synthesized)
ctcctcccagctgcgggcatcgagagttcagagcggcaccagacagtcggcgcgtgcaggtttaatccagaaggatgcagctaaaaagtatgattttcccataccattgaatgaagcttc

SEQ ID NO: 666331 - DNA, 120 bp, Artificial Sequence
  ENSG00000185056_4 (sequence is synthesized)
caaaataatgaagaaaaagaaaaaggttttagtatggaatagagtatacaaagtcatttcaagaatgcttgaagaaaatgaaaaatatagacacaggctgaaatgccaaaggttatctag

SEQ ID NO: 666332 - DNA, 120 bp, Artificial Sequence
  ENSG00000185056_5 (sequence is synthesized)
tgaaagctcaaattacacaagatgaatcttcttatcttctggaataacctatctttggatgtttcccaaagaagagtatgaagaatctaaagatgaaacattaaatgaatcataattatt

SEQ ID NO: 666333 - DNA, 120 bp, Artificial Sequence
  ENSG00000185056_6 (sequence is synthesized)
tgttaattttgatgtgttttattagaattgggactttagtagtcgaacagaaaaattaccttctttataaattaataatatttctttgctacttaataatacctttagttaaatattgtt

SEQ ID NO: 666334 - DNA, 120 bp, Artificial Sequence
  ENSG00000185056_7 (sequence is synthesized)
aaccatatgcatgcaagtgttattttcagaattaatgcttattctacatacttttaaattaacctcatacataaaattaaattagcatatcaatgcaattgcatgaattttataattacc

SEQ ID NO: 666335 - DNA, 120 bp, Artificial Sequence
  ENSG00000185056_8 (sequence is synthesized)
agcttttccattttattaatgagtctacaactgctgctttgttcatctcttcttttagatgtaactcttaaattaaacttggattcatttaaattatttttggcttcctctaaacttctc

SEQ ID NO: 666336 - DNA, 120 bp, Artificial Sequence
  ENSG00000185056_9 (sequence is synthesized)
aattattttatggaaaaaaccttagaatttacatagcaacgattattttgggtgttaaaactaagctaatgattatttaagccatcttttcatcctaaggaaaattagtaaatgtatgca

SEQ ID NO: 666337 - DNA, 120 bp, Artificial Sequence
  ENSG00000185056_10 (sequence is synthesized)
atacattatttttaagtcaatgaatgagaggattagaattctgaaaatcatttagaagtattgtttaataagtcctttttttctactcaacattaagtagtaatcaacttttacctccgc

SEQ ID NO: 666338 - DNA, 120 bp, Artificial Sequence
  ENSG00000185056_11 (sequence is synthesized)
cagtttttctgcttttttgctggtacgatctctctttctaaattgaatcaaagacctaggtggaactggaaacttaggagggaaagacaaaatgaggcttgttcatgatcaaattctgtg

SEQ ID NO: 666339 - DNA, 120 bp, Artificial Sequence
  ENSG00000185056_12 (sequence is synthesized)
tactctagttgcttctttcccttggagtgacaggtacttttatatccaggatgattacagtgatgacatccattcttttttgggggcattgagaaggtgggcttcctaattattttacaa

SEQ ID NO: 666340 - DNA, 120 bp, Artificial Sequence
  ENSG00000185056_13 (sequence is synthesized)
aggtattacaaagtgttaatatacaaaattctcatgaaatagtacaagttgtaaggactgtaaagtaattcatagttttgttttttcctctaatagttgtaacttaattacttcaggaga

SEQ ID NO: 666341 - DNA, 120 bp, Artificial Sequence
  ENSG00000185056_14 (sequence is synthesized)
ctacgacagtgtagaatttgtggtaacatgatcttctagtgactatttatcaaatccacctgtttctagatgaaggacacattgcctggggaaatggcctcggtttttttgccatgtagg

SEQ ID NO: 666342 - DNA, 120 bp, Artificial Sequence
  ENSG00000185056_15 (sequence is synthesized)
ctctcaagtttccctgcattgagggtcacacaacttctttatattatgctgggtaaatttcaggctgctaaatccttgggtgaagcttcaaattttagcttatgcaactgaagtccattg

SEQ ID NO: 666343 - DNA, 120 bp, Artificial Sequence
  ENSG00000185056_16 (sequence is synthesized)
caaaatgagacatatttacactgtttatactgtaatttatgctgcataaagttttgtagtgaatgtgtatgagagttttaggtttgcttcaatgtatgtttatatttatgtgacttatac

SEQ ID NO: 666344 - DNA, 120 bp, Artificial Sequence
  ENSG00000185056_17 (sequence is synthesized)
aacttgacatagtagtctgttttaatttattaggtatatcaatatttgttagatttaaaataagagtctaatgctggatacaaactcagtttatttcactgttctagaaccatggaggaa

SEQ ID NO: 666345 - DNA, 120 bp, Artificial Sequence
  ENSG00000185056_18 (sequence is synthesized)
tgaagactcccactgaaatgaatgttctaaatatttgttctaaatcttttaatttttgtttaataatttctggtgaatatgtgttcaatctgttatgttaaatagaatataataaacata

SEQ ID NO: 666346 - DNA, 120 bp, Artificial Sequence
  ENSG00000185056_19 (sequence is synthesized)
agacttttctttactgatacatcactgaacataagctgcaatactttaacttatttctgttccataatttcagtaggggctaatgacccacccctgctacattaaagacttcagactgca

SEQ ID NO: 666347 - DNA, 120 bp, Artificial Sequence
  ENSG00000185056_20 (sequence is synthesized)
agcatggagagaagcctggagccacgggaacctctggatggtgtcaggtgctctgcggcccacgggggcgggggaaggactagtgagcagaaactcctcctcgccttatcaggcagcaag

SEQ ID NO: 666348 - DNA, 120 bp, Artificial Sequence
  ENSG00000185056_21 (sequence is synthesized)
ccaatcactgaggtgatgcgttttgcaagggagaaaagatgttattcacaaggctgctgtgtgagaagacgggagaacaaacctgaaatccacctccccaaatatagggcttgaaggctc

SEQ ID NO: 666349 - DNA, 120 bp, Artificial Sequence
  ENSG00000185069_0 (sequence is synthesized)
atccctctcagctcttgctaagtgatcactagcttgcctccaagctctctcactatgaacagacaagtttgcaagaaatccttcagtggcaggagccagggtttctctggccgctctgct

SEQ ID NO: 666350 - DNA, 120 bp, Artificial Sequence
  ENSG00000185069_1 (sequence is synthesized)
gtggtctccggcagcagcaggatgagctgtgtggcccgctctgggggagctggtggaggggcctgtggcttcaggagcggagcaggcagctttggcagtcgcagcctctacaacctgggc

SEQ ID NO: 666351 - DNA, 120 bp, Artificial Sequence
  ENSG00000185069_2 (sequence is synthesized)
agcaacaagagcatctccatcagcgtggcagctggcagctcccgggctggaggctttgggggagggcggagcagctgtggctttgcaggtggctatggaggtggctttgggggcagctat

SEQ ID NO: 666352 - DNA, 120 bp, Artificial Sequence
  ENSG00000185069_3 (sequence is synthesized)
ggtggtggctttggtggtggcagaggagtaggtagtggttttggaggggctggtggctttggtggagctggtggctttggtggtcctggtgtatttggtgggcctggcagctttggtggt

SEQ ID NO: 666353 - DNA, 120 bp, Artificial Sequence
  ENSG00000185069_4 (sequence is synthesized)
cctggtggctttggccctgggggctttcctgggggaattcaggaagtgattgtaaaccagagtctcctgcagcccctcaatgtggagatcgacccccagattgggcaagtaaaggcccag

SEQ ID NO: 666354 - DNA, 120 bp, Artificial Sequence
  ENSG00000185069_5 (sequence is synthesized)
cctcaacaacaagtttgcctccttcatcgacaaggtgcggttcctggaacagcagaacaaggtcctggagaccaagtgggaactgctccagcagcagaccacaggctcagggcccagcag

SEQ ID NO: 666355 - DNA, 120 bp, Artificial Sequence
  ENSG00000185069_6 (sequence is synthesized)
acaggctcagggcccagcagcctggagccttgttttgaatcctacatcagcttcctatgcaagcagctagattcacttctaggggagagggggaacctggagggagagctgaaaagcatg

SEQ ID NO: 666356 - DNA, 120 bp, Artificial Sequence
  ENSG00000185069_7 (sequence is synthesized)
caggacctggtggaagacttcaaaaagaagtatgaagatgaaatcaacaaacgcactgccgcagagaatgagtttgtggggctcaagaaggatgtggatgcggctttcatgaacaaggtg

SEQ ID NO: 666357 - DNA, 120 bp, Artificial Sequence
  ENSG00000185069_8 (sequence is synthesized)
gagctgcaggccaaagtggacagcctgacagatgaagtcagcttcctgaggaccctctatgagatggagctgtcccagatgcaaagccatgccagtgacacgtctgtggttctgtccatg

SEQ ID NO: 666358 - DNA, 120 bp, Artificial Sequence
  ENSG00000185069_9 (sequence is synthesized)
gacaacaaccgctgcctggacctgggcagcatcattgccgaggtccgcgcccagtatgaggagattgcccagaggagcaagtctgaagctgaggccctgtaccagaccaagcttggggag

SEQ ID NO: 666359 - DNA, 120 bp, Artificial Sequence
  ENSG00000185069_10 (sequence is synthesized)
acagctggcaggcatggggatgacctgaggaacaccaagagtgagatcatggagctcaacaggatgatccagaggctacgggctgagattgaaaatgtcaagaagcagaatgccaacctg

SEQ ID NO: 666360 - DNA, 120 bp, Artificial Sequence
  ENSG00000185069_11 (sequence is synthesized)
cagacggcaattgcagaggctgagcagcgtggagagatggccctcaaggacgccaatgccaagctccaagacttgcagactgccctacagaaggctaaggatgacctggctcggctcctg

SEQ ID NO: 666361 - DNA, 120 bp, Artificial Sequence
  ENSG00000185069_12 (sequence is synthesized)
cgtgactaccaggagctgatgaacgtcaagctggccctggatgtggagattgccacctaccgcaagctgctggagggagaggagtgcaggatgtctggagaatgtcagagtgccgtgtgc

SEQ ID NO: 666362 - DNA, 120 bp, Artificial Sequence
  ENSG00000185069_13 (sequence is synthesized)
atttcagtggtcagcaatgtcaccagcacaagtggcagctctggcagtagccgtggagtttttggaggggtcagtggcagtggcagtggtggctacaaaggcggcagcagcagcagcagc

SEQ ID NO: 666363 - DNA, 120 bp, Artificial Sequence
  ENSG00000185069_14 (sequence is synthesized)
agcagtggctatggagtcagtggcggcagcggcagtggctatggaggggtcagcagtggcagcactgggggcaggggtagcagcgggagctaccagagcagcagtagtgggagcaggctc

SEQ ID NO: 666364 - DNA, 120 bp, Artificial Sequence
  ENSG00000185069_15 (sequence is synthesized)
ggcggtgcaggtagcatctccgtgagccacagtggaatgggctccagctctggcagcatccagacttctggaggaagtggctacaagtctggtggtggaggcagcaccagtatccgcttc

SEQ ID NO: 666365 - DNA, 120 bp, Artificial Sequence
  ENSG00000185069_16 (sequence is synthesized)
tcccagaccacgagctcaagccagcatagctccaccaagtgatctactgttccaaatctctataaccacctgcttcccactcagcctgcaatagtgtttcccactctctgcttggcatca

SEQ ID NO: 666366 - DNA, 120 bp, Artificial Sequence
  ENSG00000185069_17 (sequence is synthesized)
atagatgcataagggtcaaccacatttttcctcaagttccctggagaagaagctgaactcctggtttctccatccccatgaccttcccagggccatggaggtcctgctgctggtctggga

SEQ ID NO: 666367 - DNA, 120 bp, Artificial Sequence
  ENSG00000185069_18 (sequence is synthesized)
tgatgatgcccctggaaaccttcctgcaatggccccttactttggacagcaacccctgagcccaagccagttttggccttcacagcctggcctgttcccactctggcccatctccctttc

SEQ ID NO: 666368 - DNA, 120 bp, Artificial Sequence
  ENSG00000185069_19 (sequence is synthesized)
ttactgggagttggagatttgaagccagtcatctcagcactgtctgaggagggcagagccatgggttctgtgctggagggtgcacggccaagatctccagactgctggttcccagggaac

SEQ ID NO: 666369 - DNA, 120 bp, Artificial Sequence
  ENSG00000185069_20 (sequence is synthesized)
cctccctacatctgggcttcagatcctgactcccttctgtcccctaattccctgagctgtagatcctctggtgatgagtatgttgcactttcttttctcaataaattgcactgaacttca

SEQ ID NO: 666370 - DNA, 120 bp, Artificial Sequence
  ENSG00000185070_0 (sequence is synthesized)
agttgtacgttcgaaacctgtcgccgtcacttgcgcgtttggcattatccattgtcaccgcggaggaacgagcgctcgagatatcatcagtgcccgcaaatctccgcgccaaggcgctga

SEQ ID NO: 666371 - DNA, 120 bp, Artificial Sequence
  ENSG00000185070_1 (sequence is synthesized)
gctactcctttccgaggtgcgcctctggtcctccgtccctggtgcccagcagcggcgaggcggcatctccgctcccgccgccgtgtccaccgagccctgggatcagggtggcagttctca

SEQ ID NO: 666372 - DNA, 120 bp, Artificial Sequence
  ENSG00000185070_2 (sequence is synthesized)
acgatgggcaggagggacctcggcggcgacccctaaaacaataccatgccccgggatccccgctgctgccgcgccagcgtcttccctttccacctccctgaccctgtcggattcggatga

SEQ ID NO: 666373 - DNA, 120 bp, Artificial Sequence
  ENSG00000185070_3 (sequence is synthesized)
gcccattgcaaggagaagacgcagccgtcagattgcagattgagcttaaccaagaagttcgtaggctaatcaaggctggcttgacctacaaaagaagaagagagttctgcctgcccactt

SEQ ID NO: 666374 - DNA, 120 bp, Artificial Sequence
  ENSG00000185070_4 (sequence is synthesized)
gggcttgtgttgacacggctgataacttgccatcacctgttgccagtgtggaaaaattctccctgttgaattttttgcacatggaggacagcagcaaagagggcaacacaggctgataag

SEQ ID NO: 666375 - DNA, 120 bp, Artificial Sequence
  ENSG00000185070_5 (sequence is synthesized)
accagagacagcagggagattattttaccatacgccctcaggacgttccctctagctggagttctggacttcaacagaaccccatccagtcattttgattttgctgtttatttttttttt

SEQ ID NO: 666376 - DNA, 120 bp, Artificial Sequence
  ENSG00000185070_6 (sequence is synthesized)
ctttttctttttcccaccacattgtattttatttccgtacttcagaaatgggcctacagaccacaaagtggcccagccatggggcttttttcctgaagtcttggcttatcatttccctgg

SEQ ID NO: 666377 - DNA, 120 bp, Artificial Sequence
  ENSG00000185070_7 (sequence is synthesized)
ggctctactcacaggtgtccaaactcctggcctgccctagtgtgtgccgctgcgacaggaactttgtctactgtaatgagcgaagcttgacctcagtgcctcttgggatcccggagggcg

SEQ ID NO: 666378 - DNA, 120 bp, Artificial Sequence
  ENSG00000185070_8 (sequence is synthesized)
taactgtactctacctccacaacaaccaaattaataatgctggatttcctgcagaactgcacaatgtacagtcggtgcacacggtctacctgtatggcaaccaactggacgaattcccca

SEQ ID NO: 666379 - DNA, 120 bp, Artificial Sequence
  ENSG00000185070_9 (sequence is synthesized)
tgaaccttcccaagaatgtcagagttctccatttgcaggaaaacaatattcagaccatttcacgggctgctcttgcccagctcttgaagcttgaagagctgcacctggatgacaactcca

SEQ ID NO: 666380 - DNA, 120 bp, Artificial Sequence
  ENSG00000185070_10 (sequence is synthesized)
tatccacagtgggggtggaagacggggccttccgggaggctattagcctcaaattgttgtttttgtctaagaatcacctgagcagtgtgcctgttgggcttcctgtggacttgcaagagc

SEQ ID NO: 666381 - DNA, 120 bp, Artificial Sequence
  ENSG00000185070_11 (sequence is synthesized)
tgagagtggatgaaaatcgaattgctgtcatatccgacatggccttccagaatctcacgagcttggagcgtcttattgtggacgggaacctcctgaccaacaagggtatcgccgagggca

SEQ ID NO: 666382 - DNA, 120 bp, Artificial Sequence
  ENSG00000185070_12 (sequence is synthesized)
ccttcagccatctcaccaagctcaaggaattttcaattgtacgtaattcgctgtcccaccctcctcccgatctcccaggtacgcatctgatcaggctctatttgcaggacaaccagataa

SEQ ID NO: 666383 - DNA, 120 bp, Artificial Sequence
  ENSG00000185070_13 (sequence is synthesized)
accacattcctttgacagccttctcaaatctgcgtaagctggaacggctggatatatccaacaaccaactgcggatgctgactcaaggggtttttgataatctctccaacctgaagcagc

SEQ ID NO: 666384 - DNA, 120 bp, Artificial Sequence
  ENSG00000185070_14 (sequence is synthesized)
tcactgctcggaataacccttggttttgtgactgcagtattaaatgggtcacagaatggctcaaatatatcccttcatctctcaacgtgcggggtttcatgtgccaaggtcctgaacaag

SEQ ID NO: 666385 - DNA, 120 bp, Artificial Sequence
  ENSG00000185070_15 (sequence is synthesized)
tccgggggatggccgtcagggaattaaatatgaatcttttgtcctgtcccaccacgacccccggcctgcctctcttcaccccagccccaagtacagcttctccgaccactcagcctccca

SEQ ID NO: 666386 - DNA, 120 bp, Artificial Sequence
  ENSG00000185070_16 (sequence is synthesized)
ccctctctattccaaaccctagcagaagctacacgcctccaactcctaccacatcgaaacttcccacgattcctgactgggatggcagagaaagagtgaccccacctatttctgaacgga

SEQ ID NO: 666387 - DNA, 120 bp, Artificial Sequence
  ENSG00000185070_17 (sequence is synthesized)
tccagctctctatccattttgtgaatgatacttccattcaagtcagctggctctctctcttcaccgtgatggcatacaaactcacatgggtgaaaatgggccacagtttagtagggggca

SEQ ID NO: 666388 - DNA, 120 bp, Artificial Sequence
  ENSG00000185070_18 (sequence is synthesized)
tcgttcaggagcgcatagtcagcggtgagaagcaacacctgagcctggttaacttagagccccgatccacctatcggatttgtttagtgccactggatgcttttaactaccgcgcggtag

SEQ ID NO: 666389 - DNA, 120 bp, Artificial Sequence
  ENSG00000185070_19 (sequence is synthesized)
aagacaccatttgttcagaggccaccacccatgcctcctatctgaacaacggcagcaacacagcgtccagccatgagcagacgacgtcccacagcatgggctccccctttctgctggcgg

SEQ ID NO: 666390 - DNA, 120 bp, Artificial Sequence
  ENSG00000185070_20 (sequence is synthesized)
gcttgatcgggggcgcggtgatatttgtgctggtggtcttgctcagcgtcttttgctggcatatgcacaaaaaggggcgctacacctcccagaagtggaaatacaaccggggccggcgga

SEQ ID NO: 666391 - DNA, 120 bp, Artificial Sequence
  ENSG00000185070_21 (sequence is synthesized)
aagatgattattgcgaggcaggcaccaagaaggacaactccatcctggagatgacagaaaccagttttcagatcgtctccttaaataacgatcaactccttaaaggagatttcagactgc

SEQ ID NO: 666392 - DNA, 120 bp, Artificial Sequence
  ENSG00000185070_22 (sequence is synthesized)
agcccatttacaccccaaatgggggcattaattacacagactgccatatccccaacaacatgcgatactgcaacagcagcgtgccagacctggagcactgccatacgtgacagccagagg

SEQ ID NO: 666393 - DNA, 120 bp, Artificial Sequence
  ENSG00000185070_23 (sequence is synthesized)
cccagcgttatcaaggcggacaattagactcttgagaacacactcgtgtgtgcacataaagacacgcagattacatttgataaatgttacacagatgcatttgtgcatttgaatactctg

SEQ ID NO: 666394 - DNA, 120 bp, Artificial Sequence
  ENSG00000185070_24 (sequence is synthesized)
taatttatacggtgtactatataatgggatttaaaaaaagtgctatcttttctatttcaagttaattacaaacagttttgtaactctttgctttttaaatcttaaaaaaaaaaaagttgc

SEQ ID NO: 666395 - DNA, 120 bp, Artificial Sequence
  ENSG00000185070_25 (sequence is synthesized)
tgaagtactgtacagggttgtacaatgagaacccaatgccaaggcaaaaagaacgagtgatttttccttaggatacacatcaaccactttgctgttgaagctgtcagaataaattcctgg

SEQ ID NO: 666396 - DNA, 120 bp, Artificial Sequence
  ENSG00000185070_26 (sequence is synthesized)
tggtcagatgaaagggcagattaaatggactcatcagggtaagaggaataatatgggtaaaacaagaaatggcccgatagtttcacactattcctatacctccaggtccggaagacaggt

SEQ ID NO: 666397 - DNA, 120 bp, Artificial Sequence
  ENSG00000185070_27 (sequence is synthesized)
aaaaaattctataatgtaagaatggaggtagttaccctgatttgaccctgtgtgggaaatgctgaaagcaccaggaggaagccggttcccgtgagataagttaacccggcctgacagaat

SEQ ID NO: 666398 - DNA, 120 bp, Artificial Sequence
  ENSG00000185070_28 (sequence is synthesized)
caagaaaattgagatgagatttgaaaggacccgaaaatgcaggggttggctttctgactgggaacttaaaaatcactcttcatgcttccctggtcctatgtgataacagagttagagact

SEQ ID NO: 666399 - DNA, 120 bp, Artificial Sequence
  ENSG00000185070_29 (sequence is synthesized)
tgagtctgatttcagtcatcttcagggaccagtctgatgttgtagcaagaagactccctttaaaagtgttactgttcaaatcatatatcaggttgaatcacattcaacagagatatattc

SEQ ID NO: 666400 - DNA, 120 bp, Artificial Sequence
  ENSG00000185070_30 (sequence is synthesized)
tagaatacttttttagaagaggctaataaagggaagaattatattgaatggaattatttttgataatgagaattatttgggtagattcactgaggctatgtcaacatgatatttagacca

SEQ ID NO: 666401 - DNA, 120 bp, Artificial Sequence
  ENSG00000185070_31 (sequence is synthesized)
acaggtgatcaatgtttggaaaatacaacaatgacttatttaaaaattacccttcctgctatttagacaaaaacaactgatcagtggttctgttatgtcagctgactttgttagtatcat

SEQ ID NO: 666402 - DNA, 120 bp, Artificial Sequence
  ENSG00000185070_32 (sequence is synthesized)
gttgaaatagcttgaagtaatatcttttatccccttgcaaattcttgtcttccaatcatctcccatatattttcataattagttgtttatgacacctttgtttttctccctctgttcagt

SEQ ID NO: 666403 - DNA, 120 bp, Artificial Sequence
  ENSG00000185070_33 (sequence is synthesized)
atttcaaggaaaattatggatgccagtcttggctgcacaagatatccattacgtacttatacattttaaaatgagtactaattttcactgctaataattctgtaaggacacatcaaagct

SEQ ID NO: 666404 - DNA, 120 bp, Artificial Sequence
  ENSG00000185070_34 (sequence is synthesized)
ggccaaaataatgaattttttttaaaaagcaatacctggtttccaccttggactgactttgatcctgttccacttttgaaattttatttgttccttttccatcgtggatgttcctctact

SEQ ID NO: 666405 - DNA, 120 bp, Artificial Sequence
  ENSG00000185070_35 (sequence is synthesized)
ttggcaattgtggagggctaatcaatcttatgttagcaggacaacccatgaaaaacaagtcagagagtgaaggctttttcccctaatcctggcagagcagggcgtagaaaagagaggatg

SEQ ID NO: 666406 - DNA, 120 bp, Artificial Sequence
  ENSG00000185070_36 (sequence is synthesized)
tccgtgcttaattctagatacttttgagacaacaccttcagaaaacacataatttaatctttgccatccttagatagagaagggctatagatcacatacgttatcaaaaactactccctt

SEQ ID NO: 666407 - DNA, 120 bp, Artificial Sequence
  ENSG00000185070_37 (sequence is synthesized)
ggaaaaaatatctttcgaaaatcaaatttaaacatttcactctgtgctgcatatttcttttaccattgaccattattatagggacccatgaagtaaatgtcacaatcatcttactagctc

SEQ ID NO: 666408 - DNA, 120 bp, Artificial Sequence
  ENSG00000185070_38 (sequence is synthesized)
tctctctctcagcaaaataaaactgtgatgtgtcttctttgtaaaagtttaggtataaaatgctatgcaactttttctttatagtaagagctttattttctttaataatatagcccaact

SEQ ID NO: 666409 - DNA, 120 bp, Artificial Sequence
  ENSG00000185070_39 (sequence is synthesized)
tatatgttttaatctcccttgtccctcagaataagcagaaaatataactgcagctgtatgtcgtagacacaagaattgaaactgtgcagtcagtagagctgaacttagctatgaattaat

SEQ ID NO: 666410 - DNA, 120 bp, Artificial Sequence
  ENSG00000185070_40 (sequence is synthesized)
ttaaattaattctaaagtgactctggtttccattttagtctattagctagagggttttggctgttgctttttttaaagttaggtccacacagtgaagggaaaagagtctgtgaaggtgat

SEQ ID NO: 666411 - DNA, 120 bp, Artificial Sequence
  ENSG00000185070_41 (sequence is synthesized)
cagtgtagcagtaagacatctaaaatcaagacaatgacatgggggctttgtgtacttagctggataattcccttctactgtcctcttccccttggctgtgtagataaaattgtgcattca

SEQ ID NO: 666412 - DNA, 120 bp, Artificial Sequence
  ENSG00000185070_42 (sequence is synthesized)
aatgatggtactttgacttttgagggtttttatttctgttattcacaaaatactcattctcatttatgtatattgtatgtttaacccccagtgggatttctggctgctgaaaccactttg

SEQ ID NO: 666413 - DNA, 120 bp, Artificial Sequence
  ENSG00000185070_43 (sequence is synthesized)
ggccaggaagaacaaggatgaagaggttcctgtcatttcttatggggttcacagaattatttggggcttaaatggtacaatggagacagtcatgtgcaatgcttaagatggtctgacagg

SEQ ID NO: 666414 - DNA, 120 bp, Artificial Sequence
  ENSG00000185070_44 (sequence is synthesized)
gtcccttttgctggaggtgttcctgaagagattgaacctagtaacaggctttattttcaccttgtgtacaacatggcaaagactgctaagattaaaatccgtctcccatttgttacagcc

SEQ ID NO: 666415 - DNA, 120 bp, Artificial Sequence
  ENSG00000185070_45 (sequence is synthesized)
tcacctgcaccaggatagaaagcacgtgatggaatctgtgatgtctaatgtgtcttatgaaaattgccaaacaactgtccctggggattctgctttgattggcatttttagtcatgggaa

SEQ ID NO: 666416 - DNA, 120 bp, Artificial Sequence
  ENSG00000185070_46 (sequence is synthesized)
tgtatatttgctgatatatctgctctgtgtttgggcctctcttgctgtcattatgatgtattttgagatgattagtcaagagtcaaggttgcgagtacaggccaagaccatgggaaaaaa

SEQ ID NO: 666417 - DNA, 120 bp, Artificial Sequence
  ENSG00000185070_47 (sequence is synthesized)
agccatgctcactggccaataaagagcttgatgctgcctggccaaatgaggtgactcagatagaatctgatcccattcagagcttggtaaatgtcactgtacagaagacattgaaaagga

SEQ ID NO: 666418 - DNA, 120 bp, Artificial Sequence
  ENSG00000185070_48 (sequence is synthesized)
agaggcatagtcatgatcaaaaggatatattgacagttatctatagccagggtagttgttaatacctgcttgtttggggagatatgtttgattatagagagactctgggccaccctcaaa

SEQ ID NO: 666419 - DNA, 120 bp, Artificial Sequence
  ENSG00000185070_49 (sequence is synthesized)
caccgtcagatgcattagcagcccactgcatgggacaatcgcaggcagatacgaggaatgtatcccctgcctattttccttgtgtaacaaatggaaaacattctcccctgtgagaaataa

SEQ ID NO: 666420 - DNA, 120 bp, Artificial Sequence
  ENSG00000185070_50 (sequence is synthesized)
tgcaatttctaattatctggatgttcgttgaaaatatattagacattctccctgaggttaaaaacaaaaagtacgtgaccagtctggtaagaagtattaatgaagtagctaatattacag

SEQ ID NO: 666421 - DNA, 120 bp, Artificial Sequence
  ENSG00000185070_51 (sequence is synthesized)
cttcattttctactagcacctatcataatggtcttagtcatttcacacaaatcagaacttccttccccaccagggaggacaacatcttcatgctgtgattgaagcatccattcagaacac

SEQ ID NO: 666422 - DNA, 120 bp, Artificial Sequence
  ENSG00000185070_52 (sequence is synthesized)
gaggcaatattgcagtccacagggaatggatgcttcacttgatctccggaccttggctgcagaggccatcgcagcttttgaaaagtgaaggggttaattcccattggtgtctttgcttat

SEQ ID NO: 666423 - DNA, 120 bp, Artificial Sequence
  ENSG00000185070_53 (sequence is synthesized)
agcatttttctctaacctataacaaggagacattacattttactttagaacatgagaatagcagttttgctcatgacttaccattccagctgcatgggaaagcaaagcagaaaacagtgc

SEQ ID NO: 666424 - DNA, 120 bp, Artificial Sequence
  ENSG00000185070_54 (sequence is synthesized)
cccaaatggaaaaaagatactcacacagaacaaaacagttcttggtcttgttcttggtcttgtcaaaccttgcctgatgctctttctaaagtcaaaatatgaatgctaagaaggcataac

SEQ ID NO: 666425 - DNA, 120 bp, Artificial Sequence
  ENSG00000185070_55 (sequence is synthesized)
ctacatccttctctgatttcttcagcagggtcaaaagacagttactagcaatggggaatgcttgtcactgtggagaaagagttttgtatatgtctgataccgttgttataacaaaacaaa

SEQ ID NO: 666426 - DNA, 120 bp, Artificial Sequence
  ENSG00000185070_56 (sequence is synthesized)
tttttttactatagttttttgttttctacctgcacacccaccagaagagcacaaagcaaggccattgcaacaggcatttaaaaattattatcaaacatgcacatgcttgtacacacacac

SEQ ID NO: 666427 - DNA, 120 bp, Artificial Sequence
  ENSG00000185070_57 (sequence is synthesized)
acacacacacacaaacaggggcatttgtaaaggtgtccctggaatgtaagatttataatgtttaaggcaaggtgaaggcattgccaagtgtgtgtcgctcataggactagtgtatattca

SEQ ID NO: 666428 - DNA, 120 bp, Artificial Sequence
  ENSG00000185070_58 (sequence is synthesized)
ctgaaagttaacctgatgatttgttattgtttgaaccatatgctgatttgcttctggtttctgtttagtgtgttctctctgataaggggctgaaagattctgcatcacacatcctctgag

SEQ ID NO: 666429 - DNA, 120 bp, Artificial Sequence
  ENSG00000185070_59 (sequence is synthesized)
acctaccatgtcgcacactttgttaatgacaaacttcactctacactatacagtaccttgttgatatattcagtaaagtcttattttaaaagaaaaccacattgtgtttatctgagtaag

SEQ ID NO: 666430 - DNA, 120 bp, Artificial Sequence
  ENSG00000185070_60 (sequence is synthesized)
ttcattgggatacagtcaatacttgtgctgttaatgtagaagaaatgacgcaggagggcaggaataaaagaggtaataggactttcgtattctcctatcatgaatatgacttgcatttct

SEQ ID NO: 666431 - DNA, 120 bp, Artificial Sequence
  ENSG00000185070_61 (sequence is synthesized)
aaaggccatttgatcctttttgtgtgaggagtttatatgaaatcctcatgttcttttaaatttcccaactaaattgtgtgttcctacgaataccttttaggtatgcacacatacacagag

SEQ ID NO: 666432 - DNA, 120 bp, Artificial Sequence
  ENSG00000185070_62 (sequence is synthesized)
catcttattttatactggtgaaatctatgttgtttaggatacagataatgtcattgtatttatcctatcagaataggcttttcccctatttcaaaatagatgctattggctttatttttt

SEQ ID NO: 666433 - DNA, 120 bp, Artificial Sequence
  ENSG00000185070_63 (sequence is synthesized)
tgcccaggctggtctcaaactcctagatgcaagcaatcatcccacctcgatcacccaaagtgctgggagtacaggcagaggacaccatgcccagccacgctattggttttaaatgtcaga

SEQ ID NO: 666434 - DNA, 120 bp, Artificial Sequence
  ENSG00000185070_64 (sequence is synthesized)
ccatgcccagccacgctattggttttaaatgtcagatttctttaagaattctcatagtacttttctgccgcagaatttatagcacatctgtccatcctttcaataggcactcaaggaaat

SEQ ID NO: 666435 - DNA, 120 bp, Artificial Sequence
  ENSG00000185070_65 (sequence is synthesized)
gtatctattcatatgctcaacttcaattgattagtctcatatgatttttcagaaccccttttgctaacccctcttggccatttcattaataatgtatttgacagagattgaatcaggaaa

SEQ ID NO: 666436 - DNA, 120 bp, Artificial Sequence
  ENSG00000185070_66 (sequence is synthesized)
taaattcatgacatttcagttaactagtattacctgtttgtagaatctctgttggaacattgactatgaaagacagtgctaacaagtaattcatattacttttggggattttatgtaaag

SEQ ID NO: 666437 - DNA, 120 bp, Artificial Sequence
  ENSG00000185070_67 (sequence is synthesized)
taacatctatgctattcttgggtacttttgccaagagttacagaccttattctatacagactaaaccattagtcaaaaaataccattcattcaaaataattcattaatgtcctcctactc

SEQ ID NO: 666438 - DNA, 120 bp, Artificial Sequence
  ENSG00000185070_68 (sequence is synthesized)
tgttccaaacactaggctgagttcagaggcctcacagaatagtgaaatgcgttcttagccaaatcaggcaaatcttctccctcactatgtccctgaagaaatctcttcatctgatatatt

SEQ ID NO: 666439 - DNA, 120 bp, Artificial Sequence
  ENSG00000185070_69 (sequence is synthesized)
tactattcatctactttctacagcactatgttagggtcttccggggattcagagaaaagtgtctgtgagccattaagaaactcacagatcaggtaataaacactttttctaatgcattcc

SEQ ID NO: 666440 - DNA, 120 bp, Artificial Sequence
  ENSG00000185070_70 (sequence is synthesized)
agtgtctcagagcctgcataatcactttatactacttcattaaattgacaggacatctaaggtgacaaaagagatgtttctacctgttggtaaggttgatgcaactgtcataattagatg

SEQ ID NO: 666441 - DNA, 120 bp, Artificial Sequence
  ENSG00000185070_71 (sequence is synthesized)
ttcttggtttttaatagatgcagcaatgagagagtacattgctaaagtcagaacttaatttgaattaaattttcaagtttccaccaagtatttgaaaacttagaaattgtatttcgtaat

SEQ ID NO: 666442 - DNA, 120 bp, Artificial Sequence
  ENSG00000185070_72 (sequence is synthesized)
tacacatgcagacatttaaatttttattaagcaccacgatggaactcaatctaaaggaataatggcacctgataattactaacaacctttgtttatataagaccttgtgcaaactgtgtg

SEQ ID NO: 666443 - DNA, 120 bp, Artificial Sequence
  ENSG00000185070_73 (sequence is synthesized)
ataacgtatgtttgcattctgtctttaaaataaccctgtaaggtgcgttattttaatttttagattttaaaacttagcttcaagagaaattaagtgattagtctatagctacaaatcctg

SEQ ID NO: 666444 - DNA, 120 bp, Artificial Sequence
  ENSG00000185070_74 (sequence is synthesized)
taaatggcagagtcaggaattaccactgagcatgactccatggactcttaattgttttcctgcctcttaataaattgaccatccttgagactgactagccttcagatttttcatgatgga

SEQ ID NO: 666445 - DNA, 120 bp, Artificial Sequence
  ENSG00000185070_75 (sequence is synthesized)
gctatcataacttctcagtggatacatatattatcatttatggcaaataaagggaacattttagaagcctcaaaattcttgtcttttaaagcccttggtcatccattcctattttttata

SEQ ID NO: 666446 - DNA, 120 bp, Artificial Sequence
  ENSG00000185070_76 (sequence is synthesized)
aaaattctttttgtgattatttgatggctgcacatttatctgatttgaaggtttcagatggaatcaagatatgtctgtacccatagggtgagctgaaagagctactaaaaggtcttcagt

SEQ ID NO: 666447 - DNA, 120 bp, Artificial Sequence
  ENSG00000185070_77 (sequence is synthesized)
tgggttatttttaggaatgaatttgtttcgtacttgagatgttgctctaagtattttgtagattccgctgaaaaagcacgtatgtcacaatctattagggcattagtaaactggcttctg

SEQ ID NO: 666448 - DNA, 120 bp, Artificial Sequence
  ENSG00000185070_78 (sequence is synthesized)
aatttatgctctttttttttcccataacatagataaaaatgtgtgctttaggggatattatataagctttattttcactggctctactgaaagttaaggatacaaaagtttttaatggta

SEQ ID NO: 666449 - DNA, 89 bp, Artificial Sequence
  ENSG00000185070_79 (sequence is synthesized)
gctctactgaaagttaaggatacaaaagtttttaatggtaataacccaaactatatgtcattttagcacacacataccaatgggtgatc

SEQ ID NO: 666450 - DNA, 120 bp, Artificial Sequence
  ENSG00000185070_80 (sequence is synthesized)
taggggaattcttattacttcaatgacataataaacctcagtattgggtcactcttttcctaatataaaaaactatgctggctcaaaaagtcttctaaactccctagttgggataggatg

SEQ ID NO: 666451 - DNA, 120 bp, Artificial Sequence
  ENSG00000185070_81 (sequence is synthesized)
ggcctttgttggtttagttttgatttcattcagcaaatatttaccgaggcctggtaagttctggtgcagaataagaatgttttccaggagagttaaattttgctcatcaaaaatctttct

SEQ ID NO: 666452 - DNA, 120 bp, Artificial Sequence
  ENSG00000185070_82 (sequence is synthesized)
attttgctcatcaaaaatctttcttggaagctgctggtttttaaccgtcagcctgggctctttctgcctctttgctttttttgagcagaatatggccaggctggtctcaaactcctgatc

SEQ ID NO: 666453 - DNA, 120 bp, Artificial Sequence
  ENSG00000185070_83 (sequence is synthesized)
gggattacaggcatgagccacaccactgcatttaaataatcagcctaggattctgctagttccagcaccagagtggcctctcaaatgtgttttctcctcttggttccctgactctgactt

SEQ ID NO: 666454 - DNA, 120 bp, Artificial Sequence
  ENSG00000185070_84 (sequence is synthesized)
tgactctgacttggttaagacccttcctttagtctttttctaatttagcctttccaacacattgaaggacaaagggtaatcataatctataaggaatgcctgagtacgatactgcagtgc

SEQ ID NO: 666455 - DNA, 120 bp, Artificial Sequence
  ENSG00000185070_85 (sequence is synthesized)
ttgcaaaacatgcgtttttattgcttgcaagatagaattcaaactctttgtgtgacttatgtatcctactacatgttgctccctgacatttcttaccaatattgcctcctccttcattac

SEQ ID NO: 666456 - DNA, 120 bp, Artificial Sequence
  ENSG00000185070_86 (sequence is synthesized)
cctcctccttcattacatgctctagattatatatatataattacatatataatctagattttatatatatatatatatgaaatgagcaaacaaaatgctttcagtttatcttcctgggat

SEQ ID NO: 666457 - DNA, 120 bp, Artificial Sequence
  ENSG00000185070_87 (sequence is synthesized)
ccactatatatgtgctcaaggtctttcatcctgtgacattcccctttgcctgatgacatatttgtcctttaagatacaagtcaaagacctctcttccaaagccgctggaatcacacctgc

SEQ ID NO: 666458 - DNA, 120 bp, Artificial Sequence
  ENSG00000185070_88 (sequence is synthesized)
caattatctgaccgctttgtgcggttaatataactttaaaatacatttatttttagcacctatatattgtaattttttgtgagtctgcttcatgcctatacaatggggcccctggaaaca

SEQ ID NO: 666459 - DNA, 120 bp, Artificial Sequence
  ENSG00000185070_89 (sequence is synthesized)
gaaaacatattctgtaaattgttgtacctcatccagtgttaagagccatgcccaggccctggtgggtgcccagctacaggggaagagccactctgtcagttgcttatggccagatggctc

SEQ ID NO: 666460 - DNA, 120 bp, Artificial Sequence
  ENSG00000185070_90 (sequence is synthesized)
tttttttaatagccccagaaagagctgtggagttctgacttgtgcaaaattagccttgctcaaagaccacagtatgcgttttacaagaacaaacaaacatatatattttccttaaaatct

SEQ ID NO: 666461 - DNA, 120 bp, Artificial Sequence
  ENSG00000185070_91 (sequence is synthesized)
cttgattactcatcaacatttttaaaagaaattttgtttttatgattatttggtggccatgcatctgatttgaaagctttagatggaatcagtatgtctacattcataggatgtgctgag

SEQ ID NO: 666462 - DNA, 67 bp, Artificial Sequence
  ENSG00000185070_92 (sequence is synthesized)
agatggaatcagtatgtctacattcataggatgtgctgagataacaattaaaaagacctgaagaaca

SEQ ID NO: 666463 - DNA, 120 bp, Artificial Sequence
  ENSG00000185070_93 (sequence is synthesized)
ccagccaagaacatcctttttatatattacagacaaactcaaaactgaaccagcttgcagaaaagcatacaaagaggtatctttaaaaatcaccttaatcccagcactttgggaggccga

SEQ ID NO: 666464 - DNA, 83 bp, Artificial Sequence
  ENSG00000185070_94 (sequence is synthesized)
aaaaaaaaaaaaaaaaaaatcaccttgcaacaaaatatcgccatcatgaaaagtccacaaagcacaagtagacacaaagttaa

SEQ ID NO: 666465 - DNA, 120 bp, Artificial Sequence
  ENSG00000185070_95 (sequence is synthesized)
tcatgaaaagtccacaaagcacaagtagacacaaagttaaacatttcgacagtcggctagtcaaaatgaattctttgcatgtgaaaagcagagattttttttttttcatcttcatcagca

SEQ ID NO: 666466 - DNA, 120 bp, Artificial Sequence
  ENSG00000185070_96 (sequence is synthesized)
aaattaaaaaagacagtcattattcactatgtcatatcccatataaaaatacagcatatatcatttaaaggttcacattgtgttatcttggttattgccatgagaatagtctttcctaga

SEQ ID NO: 666467 - DNA, 120 bp, Artificial Sequence
  ENSG00000185070_97 (sequence is synthesized)
aatgatatgcttgtaaagaagggagtggagagtggtagttattaagaaatcagtttgaaatcaagctgacttactttggaatcctgcttcaaccactgacctgccaatttgccttggcaa

SEQ ID NO: 666468 - DNA, 120 bp, Artificial Sequence
  ENSG00000185070_98 (sequence is synthesized)
taacttgcactttagggttatcagtgtacttttcctaaaatggggacaatgatgtctaacacatatggtggttgtcagaattaaaggcatatatagtagttgacagagtatctggtactg

SEQ ID NO: 666469 - DNA, 120 bp, Artificial Sequence
  ENSG00000185070_99 (sequence is synthesized)
agtatacattgaataaatgacatgaagcaccatgtatttttcatgcagatgtaattcacaagcacatggtgacaaattgccagctttttatgatgaaaatcaaatttcttgtgtattggg

SEQ ID NO: 666470 - DNA, 120 bp, Artificial Sequence
  ENSG00000185070_100 (sequence is synthesized)
gtaagaattacatgtagagatgatctatttaaaggtaattagcattcaaaattcctcaaaacactcaataatttgcacagctattatcaagatgggtctgtcagaaaggttttcattatt

SEQ ID NO: 666471 - DNA, 120 bp, Artificial Sequence
  ENSG00000185070_101 (sequence is synthesized)
ctgtattctttctgggggaaaaaaattgggaagatgaggtgccatgggataacacacaaccatggcaggccttttttctcatggtgtgtgggatcattgaacaacatggttgaacagaaa

SEQ ID NO: 666472 - DNA, 120 bp, Artificial Sequence
  ENSG00000185070_102 (sequence is synthesized)
gagaacagacttctttataatgtagcatatattctatctggttgctagagtacacatagatgtagttattgctgaaaattaattcagaatatgtgggtgtcaaaagagccccaggaatga

SEQ ID NO: 666473 - DNA, 120 bp, Artificial Sequence
  ENSG00000185070_103 (sequence is synthesized)
aggaatgagcattcagaaggcattggaaatcaaaatactaaaaacaaaatcaagataagctgagcacagtggctcatgcctataatcgcagtactttgggaggccaaggtgggaggattg

SEQ ID NO: 666474 - DNA, 90 bp, Artificial Sequence
  ENSG00000185070_104 (sequence is synthesized)
caaggtgggaggattgcttgaggtcaggatttccagaccagcctgggcaatgcagtgttagccaggagtggtggcatgtgcctatagtcc

SEQ ID NO: 666475 - DNA, 90 bp, Artificial Sequence
  ENSG00000185070_105 (sequence is synthesized)
cagctacttgggaggttgaagcaggagggtcacttgagcccaggagatcaagattacatttaggcaactgagcaagaccctgtctcaaaa

SEQ ID NO: 666476 - DNA, 120 bp, Artificial Sequence
  ENSG00000185070_106 (sequence is synthesized)
gatattgtttcaaaaatctataatttctagtaagacatagttttatttgatgctagtacaccaccaattacggcatttaaatccacactgggtttgctgatagtggggatggtagcagtc

SEQ ID NO: 666477 - DNA, 120 bp, Artificial Sequence
  ENSG00000185070_107 (sequence is synthesized)
aaatggaagaacattttaatgtctctacaatgcaggtgcaatagtctaccacctgtcatgtggttactttttgcaatcgatatcattattaagtttggaagctggttgttattaacaggc

SEQ ID NO: 666478 - DNA, 120 bp, Artificial Sequence
  ENSG00000185070_108 (sequence is synthesized)
atgcatcctcttcagctggatcacgttgttttctttctgtacactttgtggtagttaatagtctcaaagcaattcactcactacggtctgtattagcattattttcctttctatttatgt

SEQ ID NO: 666479 - DNA, 120 bp, Artificial Sequence
  ENSG00000185070_109 (sequence is synthesized)
ctttccttgcttaataaatgcagaagttcagacatttgatgaggggggaaatatactttttcagtccttgactgcatgatttaattggtttcaggacagttatttggcaagtagtatcaa

SEQ ID NO: 666480 - DNA, 120 bp, Artificial Sequence
  ENSG00000185070_110 (sequence is synthesized)
tgggtactggcattcctgtggtctgctgccaatctctattctgtttggactagtgtctgttttgactggtaggcctcagctatcctattgctaagtattttacataactgccctcattag

SEQ ID NO: 666481 - DNA, 120 bp, Artificial Sequence
  ENSG00000185070_111 (sequence is synthesized)
ttggaatatagcatgctttactagtgtatctgaagtaaggaggaagcaggaagtgagctgttttgtaatggaggccaattatatctaacagcaactgtgtctataagactgtagcctatt

SEQ ID NO: 666482 - DNA, 120 bp, Artificial Sequence
  ENSG00000185070_112 (sequence is synthesized)
ggatgggaagttatattatgaaaacatgatgaatcttttaaattctgagtccaatgctgtctacatctaaatttaaatcctggctcatactaaccttggtccttgggcatgtatatgctt

SEQ ID NO: 666483 - DNA, 120 bp, Artificial Sequence
  ENSG00000185070_113 (sequence is synthesized)
caattttctcatctgtacatgggttaataacaacactcacctcaacagtaaccatactgcacagtgcctgacacatataaagtgctcaataaatgccagctactttctgaaaatatatgg

SEQ ID NO: 666484 - DNA, 120 bp, Artificial Sequence
  ENSG00000185070_114 (sequence is synthesized)
aattagtgtgcaaaaagttgggctatataactcaaatctcctttgtatcttggataagaccacttctctctcgggcttgtttcttatagtcaaaagcgcaggaatttagttgatctccca

SEQ ID NO: 666485 - DNA, 120 bp, Artificial Sequence
  ENSG00000185070_115 (sequence is synthesized)
agttactttggaccttaaattctgttttatggttgttcattttctatgtagtttagatttggttcattggactgatttgtgttctgtgtgcttttaaaattcaggaagatgtgactagga

SEQ ID NO: 666486 - DNA, 120 bp, Artificial Sequence
  ENSG00000185070_116 (sequence is synthesized)
tagataaagcaaacatataaacactcagtttcattgacttaagtataaagactaacatgtttctcattagttataataaccttaaacttgatatgttagggaagcaacctgcataaccat

SEQ ID NO: 666487 - DNA, 120 bp, Artificial Sequence
  ENSG00000185070_117 (sequence is synthesized)
taaaatcaggagctacagaatcacaaagaactgtgactttgtatctgtgtgatattatttaatgtccctaagcctcagtttcctcatatatgaaatgaggtactaatacttttaaggatt

SEQ ID NO: 666488 - DNA, 120 bp, Artificial Sequence
  ENSG00000185070_118 (sequence is synthesized)
tgatgagataatttatatcatcttcacttcagtggttggcatatattcaaacccattatggctgaaaaattacaaatgaatagaaagagaagcaagtgaaaacaaaactcattagttcaa

SEQ ID NO: 666489 - DNA, 120 bp, Artificial Sequence
  ENSG00000185070_119 (sequence is synthesized)
ccacttctccctcaaaacaaggaaatacaaactatattactaagtagactattaataaaacactttatttaagtcaaaattatcaaagatagagtgtcgtacaataaaaattgtataaaa

SEQ ID NO: 666490 - DNA, 120 bp, Artificial Sequence
  ENSG00000185070_120 (sequence is synthesized)
aatattttatgttttcaagccattatataacagctattaaaccctaatatttgacagagaaagaattatgagaatagctagaaaatattaaataataaatgtggtttatttttgatggaa

SEQ ID NO: 666491 - DNA, 120 bp, Artificial Sequence
  ENSG00000185070_121 (sequence is synthesized)
gtggtttatttttgatggaatagaacagattttaaccctgatccctgccacttttatctgaaccttgaacaaacatacaattatggtttaaaaaaaagaaagatgaaaactttttagaat

SEQ ID NO: 666492 - DNA, 120 bp, Artificial Sequence
  ENSG00000185070_122 (sequence is synthesized)
aattaggaaattcttctttcccagaccttcaatacttttataaaaccactacttagcagctaacaatgaaatgttcatttcaaaatgtttagtctttaaagcggttacctaagaatatct

SEQ ID NO: 666493 - DNA, 120 bp, Artificial Sequence
  ENSG00000185070_123 (sequence is synthesized)
gccagtgaacactagctttatttcatcacatcatacacctgaatgtaatcaacattgctttattaaagatgtttatataatttttatataatacacacttccaataattgataatagtct

SEQ ID NO: 666494 - DNA, 120 bp, Artificial Sequence
  ENSG00000185070_124 (sequence is synthesized)
aatgattgatattttaaattaatggcttgtaattgtgtaattggaaagtggtccttgggactcagattaaggtatcattacctgttctttcataagctgttatttatgcttctcattaat

SEQ ID NO: 666495 - DNA, 120 bp, Artificial Sequence
  ENSG00000185070_125 (sequence is synthesized)
tagttctttgttatgaaatctttaaaagttcattaattctgtaaagggaatttaataaaatgcaagcagattagtaaaataatttgttttaaagttagttttaaatattatgctacctct

SEQ ID NO: 666496 - DNA, 120 bp, Artificial Sequence
  ENSG00000185070_126 (sequence is synthesized)
ataaaggaccaaaatagtatttttaaaagaatttatcaaagtaactataataaaagtatttaatggtatttgtattgcaaacattgaaattctacctggcagtttaaagaacatcactaa

SEQ ID NO: 666497 - DNA, 87 bp, Artificial Sequence
  ENSG00000185070_127 (sequence is synthesized)
ttattaatcttaactaattttctttagtgacagaaattcaaacttcgagacatgtttgaaacattttatttcagtaaatatagctgt

SEQ ID NO: 666498 - DNA, 120 bp, Artificial Sequence
  ENSG00000185070_128 (sequence is synthesized)
agacatgtttgaaacattttatttcagtaaatatagctgtcactatggaagtaattactctaaaggaaatctgttttaaaaagccagtataaactgaaaagtaagcaacaaaacatcttc

SEQ ID NO: 666499 - DNA, 120 bp, Artificial Sequence
  ENSG00000185070_129 (sequence is synthesized)
aagccagtataaactgaaaagtaagcaacaaaacatcttcaggaaaagaaaaagaaaggcaaataaaatgtttatatgaaattacgaacattctgggccgggtgtggtggctcatgcctg

SEQ ID NO: 666500 - DNA, 78 bp, Artificial Sequence
  ENSG00000185070_130 (sequence is synthesized)
gcccgcctttactaaaaatacaaaaattagcagggtatggtggcaggcgcctgttatcccagctacttgggaggctga

SEQ ID NO: 666501 - DNA, 120 bp, Artificial Sequence
  ENSG00000185070_131 (sequence is synthesized)
aaaaaaagagagagactaacattctaacagacaaaacaaaaacaaaaaacaaaaaaacacattttacaaaacaataatctaagtgggcaagtaaatactggtgtgacatacatttttagg

SEQ ID NO: 666502 - DNA, 120 bp, Artificial Sequence
  ENSG00000185070_132 (sequence is synthesized)
gaaaaactagcaacatgttttgtggagataaatgtaaacacattttacacatacaaatcttttctggcatgggtacaaatgtaactaatcaagtgtaatttataaactataaaaaatttt

SEQ ID NO: 666503 - DNA, 120 bp, Artificial Sequence
  ENSG00000185070_133 (sequence is synthesized)
catctagacaaagaagttattaaaagcattaacaagtagttgaaaatattatccctctaagtattagaaagttaaactgcagtaattaaaagtcatataagaatcaccatggcatagaca

SEQ ID NO: 666504 - DNA, 120 bp, Artificial Sequence
  ENSG00000185070_134 (sequence is synthesized)
tggtaggaaaagcattagctttggcgttcaaatattgactcattcacttaccagctgtgttctccagtcaaaaaacttcacctctttaatgtttggtttcatattttttaaaaggtataa

SEQ ID NO: 666505 - DNA, 120 bp, Artificial Sequence
  ENSG00000185070_135 (sequence is synthesized)
caaaaacacctaccacagtgttggtgtgaagactcatttaaagttactagcacagtgtctagtatatacagttgctttgttacattaactccattcaatattctttctttccacaatcgt

SEQ ID NO: 666506 - DNA, 120 bp, Artificial Sequence
  ENSG00000185070_136 (sequence is synthesized)
atctcagacagagaagggtgccttctcatgtgatcaggagtgatgtagctttgagggtggacccaccattcctgccatattccttgggtaggctcatctatcacttgtcttaaaggaaga

SEQ ID NO: 666507 - DNA, 120 bp, Artificial Sequence
  ENSG00000185070_137 (sequence is synthesized)
tttgaaacataatagtttcctttgcgcttctgtggatgtctctgaaaaagctggcagggcacacactcttgcaaatttttcatgttgtaatcacccaccagtggtaataatagggttaat

SEQ ID NO: 666508 - DNA, 120 bp, Artificial Sequence
  ENSG00000185070_138 (sequence is synthesized)
tatatgaacccatatagtagtgtcatttaaagggaatttaaattctctcttgtccttactctgctccaccatcctccactgtgcttgaaatgcctatcattatccttattcttttgatac

SEQ ID NO: 666509 - DNA, 120 bp, Artificial Sequence
  ENSG00000185070_139 (sequence is synthesized)
caggcatcactacaaaatgtatacacattacctagattttcaagaagtgaaatgtttagtaaccattatgatggaagctgggactaggtgacttattctaaatgtaacaattaccggtag

SEQ ID NO: 666510 - DNA, 120 bp, Artificial Sequence
  ENSG00000185070_140 (sequence is synthesized)
agaatgggataaaggacaactgagtgtggatagagaaaggagaaatggaagagtttggagcacgggccattgcgatggacagacgccaccgcagagagcaaggtttacctgtgtggttgg

SEQ ID NO: 666511 - DNA, 120 bp, Artificial Sequence
  ENSG00000185070_141 (sequence is synthesized)
cattcttggaagtgctctggttctattggcagagatccttgctgttagcctcttgcctttcgcccaggctgaagacagagtgctttcccatggttctgtctttttctccaggcaacactt

SEQ ID NO: 666512 - DNA, 120 bp, Artificial Sequence
  ENSG00000185070_142 (sequence is synthesized)
cctgatgactgatcaatattggggtaggaagtcttagacatcttactccagctcagatcagctctgatgggctgcaggctcagtttaggcttcccttgagatttcatcatggctttactt

SEQ ID NO: 666513 - DNA, 120 bp, Artificial Sequence
  ENSG00000185070_143 (sequence is synthesized)
ctccctctaccagtcctggttcttcatagccttccacaggtgtcagctgcaaaaaccctcccaagtaagcctcttgtatgctactctgtctcagagtccatttccttgggaacccaacct

SEQ ID NO: 666514 - DNA, 120 bp, Artificial Sequence
  ENSG00000185070_144 (sequence is synthesized)
gctacagcctacttcacacttcttctcaaggctgtcttgaattcctccaacaatagacccgttattatgtgaaagtgtgaggctgggcccaagggatttctttacttattgagcagagcg

SEQ ID NO: 666515 - DNA, 120 bp, Artificial Sequence
  ENSG00000185070_145 (sequence is synthesized)
aagtaacattaatttgtgttataaccactgaatgttctaattccatgaatttaaatgacgcacctgaacatatatgaggcctagattttgctgcatgtccgcaaacctattttgatcaac

SEQ ID NO: 666516 - DNA, 120 bp, Artificial Sequence
  ENSG00000185070_146 (sequence is synthesized)
cagtactgaacttttccccttctcttatgattgtcaaataaccttgttatatgctaaaaataaaagattaaaaaacatacagtgcaaaaaagcaaacaaaagttagctaataatcaattc

SEQ ID NO: 666517 - DNA, 120 bp, Artificial Sequence
  ENSG00000185070_147 (sequence is synthesized)
tttgaacgaagcccagtgaaaccaagtttatcaactctatctgaaaataaaaatgtccaagaaaatgacaatcaaaacgattagtgcattaggataagtgtcgtctcttgtagatagata

SEQ ID NO: 666518 - DNA, 120 bp, Artificial Sequence
  ENSG00000185070_148 (sequence is synthesized)
aaaactaaactgaaaccaaaagaatttccagagcaggcagtctctattctgtaacaaggttttctcatgatccagttattttaaggatacctgcaggatcccacaggttttctcagggat

SEQ ID NO: 666519 - DNA, 120 bp, Artificial Sequence
  ENSG00000185070_149 (sequence is synthesized)
ttgctggaagctgggaaagtgatgactctcattcactgttgccctgtttccttttccttgacaaattcagttaaccggatggcaagttgtttatgagcatgccttctcgttaagttgaca

SEQ ID NO: 666520 - DNA, 120 bp, Artificial Sequence
  ENSG00000185070_150 (sequence is synthesized)
aaatcttgacaggagtaaaagataatcgaattctctttgtgaagtgatttatggttttaaaataagcagcttttcttgaaagtagtttaccgggttgggcaaaaagaggatgagtattaa

SEQ ID NO: 666521 - DNA, 120 bp, Artificial Sequence
  ENSG00000185070_151 (sequence is synthesized)
aggtcattaggcattcaaggtaccacatttactttctacaatgcaagtagaagaaggggccccaccagtcattctgagacgtgtttccattttctgctactttttagtgagcccaaatga

SEQ ID NO: 666522 - DNA, 120 bp, Artificial Sequence
  ENSG00000185070_152 (sequence is synthesized)
tggtagcaatgattgatttatctcaatcttcttgtatagctgctgaattttctctcatgagtttggctaaaattagagtgtgtgttagtagaatttatatttatagactattgatattat

SEQ ID NO: 666523 - DNA, 120 bp, Artificial Sequence
  ENSG00000185070_153 (sequence is synthesized)
tatgtgcattacccattttaaagatggaaacactgaagcccccagaaaggactggctaagctcttacaataagtgatggaatgagctttgaaaacacagggcttaggatttcaaatcagg

SEQ ID NO: 666524 - DNA, 80 bp, Artificial Sequence
  ENSG00000185070_154 (sequence is synthesized)
atgagctttgaaaacacagggcttaggatttcaaatcaggctgttttccctcaccgcaccatggtgcttcactagcagaa

SEQ ID NO: 666525 - DNA, 74 bp, Artificial Sequence
  ENSG00000185070_155 (sequence is synthesized)
gacagtgtctcgctctgtcccccaggccagagtgcagcggcgtgatctcgactcactgcaagctccgccttccg

SEQ ID NO: 666526 - DNA, 120 bp, Artificial Sequence
  ENSG00000185070_156 (sequence is synthesized)
actagcagaaattcttaacagttattgttatctaactacttgactagtgtagattctgctgtgagcttgtggtggttccttctgcagataaagcaaaggaaatctggaaatggccaacct

SEQ ID NO: 666527 - DNA, 120 bp, Artificial Sequence
  ENSG00000185070_157 (sequence is synthesized)
gaatactttatttccaaaactgtatattttatcaggacagtaaggcaatcagtggagtaatgatccttccaaactgctgactacatctagaatcatgcaattattagtttttaataaaga

SEQ ID NO: 666528 - DNA, 120 bp, Artificial Sequence
  ENSG00000185070_158 (sequence is synthesized)
tcgtgaccaagctttccttgggaagtaaactttggtcaccacaatatacatagcaagtattaaatatcttgagaggttttctttaattgtttaattcataggaaagccactgggagcctt

SEQ ID NO: 666529 - DNA, 120 bp, Artificial Sequence
  ENSG00000185070_159 (sequence is synthesized)
ctgggagccagaagcaaattaggagacacagaattatttaataataatggtaataatgactaagttctctcatcaaggtctgtaccatgattgaactacttgctgccataaattttttac

SEQ ID NO: 666530 - DNA, 120 bp, Artificial Sequence
  ENSG00000185070_160 (sequence is synthesized)
tattgaataaatatgctttgtgaatattccatacatttgctaagttctcactggtcaggttcagtctttgctattagagtcgagcatctctgcaaagagatttgagccccttgagtagaa

SEQ ID NO: 666531 - DNA, 120 bp, Artificial Sequence
  ENSG00000185070_161 (sequence is synthesized)
cataggccacatagtgtggcaaacacatcattagaaactgcctcctattcactctcttaatagcttgagagaattgtacacaaacgtttctaaaatacagatcctaccttaggcttttcg

SEQ ID NO: 666532 - DNA, 120 bp, Artificial Sequence
  ENSG00000185070_162 (sequence is synthesized)
gctgcacagctgaatcgcctctgtgaaaatcctgacctcgctttcttctggcctttcttccccgtgaccttgggcaagttgcttaaactgtagccataatttcctcatagatttggtatg

SEQ ID NO: 666533 - DNA, 120 bp, Artificial Sequence
  ENSG00000185070_163 (sequence is synthesized)
agttaaaatgcatagaaagcatgtactacatctagtgcatttctccataatgtgggtggcaattattctaatcccttccacaaagtatttagtctatgacttatttctgcgaaaacccac

SEQ ID NO: 666534 - DNA, 120 bp, Artificial Sequence
  ENSG00000185070_164 (sequence is synthesized)
gaaagtgaaaactaacaatagagaagccttttaaaaacctaacagcctccaaagactgaagaagagagcatggtgtttaatgccagggtggaaagctgtgacagtcagctttttccctgg

SEQ ID NO: 666535 - DNA, 120 bp, Artificial Sequence
  ENSG00000185070_165 (sequence is synthesized)
atatggcttattggtattcattattcccaattccttctatatgccttcctttctggatagaatcgatcacatttgctggactccattatgtttggattctatgtataaattaggttctac

SEQ ID NO: 666536 - DNA, 120 bp, Artificial Sequence
  ENSG00000185070_166 (sequence is synthesized)
caattacaggcacgtgtgcaggattttcaaggtagaagtgaagtggaaactctcttcttactaatgtcagtcttgggcccaagaggccatcaggcacggtgcccataatcagtgttttag

SEQ ID NO: 666537 - DNA, 120 bp, Artificial Sequence
  ENSG00000185070_167 (sequence is synthesized)
tgtctggtcactatcttcagtggagtcaggtgatgtgaatagcagcaggagagacctgatttctggataaggactacagtagtacgtccttggacgcaacagtttaagaggtagttcctg

SEQ ID NO: 666538 - DNA, 120 bp, Artificial Sequence
  ENSG00000185070_168 (sequence is synthesized)
atttattcccctcccctttccaattcattccctgattttgtgcacacctaatacttatattaaatacctctcctgctttgaataaatggaataatttctgtttcctgcattttatcttgt

SEQ ID NO: 666539 - DNA, 120 bp, Artificial Sequence
  ENSG00000185070_169 (sequence is synthesized)
tggattaagtatttgataataaaactgattgtgggtctacttacctaagggtataaatttgatattggttacctaaactgtctgaatttgaaagtagagacaatcttattcatgcataat

SEQ ID NO: 666540 - DNA, 120 bp, Artificial Sequence
  ENSG00000185070_170 (sequence is synthesized)
ggatcactgataatttttggcttgcaatgagaaaaaaaaatcagcagctgaaattattacctgagatcacctggaatgaagagcctattaaagccaaggctttggtgaccaatgtgattg

SEQ ID NO: 666541 - DNA, 120 bp, Artificial Sequence
  ENSG00000185070_171 (sequence is synthesized)
cttcagaattttatgatgagaatgtaaatataataattgtgaggtaggctgaagcatgtatagaaagaaaacaacaaattcagagttttaaataactggctcaaggcaagtcagaggtcc

SEQ ID NO: 666542 - DNA, 120 bp, Artificial Sequence
  ENSG00000185070_172 (sequence is synthesized)
taaataactggctcaaggcaagtcagaggtccaaggagcatctatgattatctccgacactattttatttcttacagtttcaaggttgctgttgacaaaaaaaaaaaaaaagaaagaaag

SEQ ID NO: 666543 - DNA, 120 bp, Artificial Sequence
  ENSG00000185070_173 (sequence is synthesized)
attgctgaaatataatttcagttgaatcacaccctcatcaggtcttctctgtgaaaattagggcattgagtgagaaatatcagaaacccagagcattataatgggaatgttaggtaggtt

SEQ ID NO: 666544 - DNA, 120 bp, Artificial Sequence
  ENSG00000185070_174 (sequence is synthesized)
taaattattctgactatactgaacccccaagtccgatgagccttctttgccagtagaactccttcatctctgttatataaggttgattctgcctttgtggggagaactaacttacctgag

SEQ ID NO: 666545 - DNA, 120 bp, Artificial Sequence
  ENSG00000185070_175 (sequence is synthesized)
gtaactaatgtaaaatagcttgttctgatcacctcactgcctccaagtctagagttagagctcgttcccagtgtctcagtagggcttaaatatgaagtataaactgggaagaaaaggcta

SEQ ID NO: 666546 - DNA, 120 bp, Artificial Sequence
  ENSG00000185070_176 (sequence is synthesized)
aaataacaacaaaaaaacggcaatagtttgttattttttatcaggagaaatctgcggactatgtatggcaacagactcaaagggaggtacaccaggtaggaaaaatcataaccagattgg

SEQ ID NO: 666547 - DNA, 120 bp, Artificial Sequence
  ENSG00000185070_177 (sequence is synthesized)
gccatattagccaatatgggtacatatactagagcctgcatgcaatgagcttacccaaccagctcagagtgattataattgttttgctttctggattggttgactgaaatctggactcaa

SEQ ID NO: 666548 - DNA, 120 bp, Artificial Sequence
  ENSG00000185070_178 (sequence is synthesized)
tggtgagtcacactaattgaagttgagatggaagaaattccttggcatattgtagaatctgaaatataggttgtatatttattagtcagtttggactgctgtaacaaaaataccatagac

SEQ ID NO: 666549 - DNA, 120 bp, Artificial Sequence
  ENSG00000185070_179 (sequence is synthesized)
tgagtggcttaaacaataaacatttattacttccaattcttgaggctgtgaagcccaagatcaagttgcctgcagatctggtgtctggtgatgctcctctttttgagttgtaaacaactg

SEQ ID NO: 666550 - DNA, 120 bp, Artificial Sequence
  ENSG00000185070_180 (sequence is synthesized)
ccctcagaaggctctctcctgtctctttttattaggtcattattctcaacatgagggctccacccttatggattaattgcctcccaaaggcctcatcttcaaacactattccactcgggg

SEQ ID NO: 666551 - DNA, 120 bp, Artificial Sequence
  ENSG00000185070_181 (sequence is synthesized)
ctaggatgtcaacatatgaaatttaggggcacataaatatacagtccataacagggagataggaacattggagtaacccatcatatgattcactttaatgtctaaaaacatctcatgaga

SEQ ID NO: 666552 - DNA, 85 bp, Artificial Sequence
  ENSG00000185070_182 (sequence is synthesized)
ctttctcctttttcttttttttgttttgagacaggttctctctctgtcacccaggcaggaatgcagtggcgtgatctcagctcac

SEQ ID NO: 666553 - DNA, 120 bp, Artificial Sequence
  ENSG00000185070_183 (sequence is synthesized)
gtgatccacccgcctcagcttcccaaatcgctgggtttacaggcgtgagccattgcacctggccagagggtgtttctttaaggcatttattaatgcattgatgaggactctcctctttta

SEQ ID NO: 666554 - DNA, 120 bp, Artificial Sequence
  ENSG00000185070_184 (sequence is synthesized)
gatagagatgaaagtgtagatgctgcccacaaaatgtgctccctgtttaagtggggttggtggaatcctggagtgacagagaacaaacgacaacatttagtccagttgcagcagagtggt

SEQ ID NO: 666555 - DNA, 120 bp, Artificial Sequence
  ENSG00000185070_185 (sequence is synthesized)
tgtggtttttattataagcattaaaagtatagtagtaggaaactgtgtttaacctgttttcaagaatggataattgctcattatagcttcatgaataatatagatgttcagccaacttaa

SEQ ID NO: 666556 - DNA, 120 bp, Artificial Sequence
  ENSG00000185070_186 (sequence is synthesized)
gttgtacctgaattgtgcaaatgaaggaaagatgcaggtttggcaaattgaagccagactaattatcacaatgtagtatcattaacactcacacaattcccagattcaaggtgcagcagt

SEQ ID NO: 666557 - DNA, 120 bp, Artificial Sequence
  ENSG00000185070_187 (sequence is synthesized)
ggatatttctaagacgtcctcatttaacttgatttttttttttaatctatgaagtagttggctatgttttggagaatatacaattaatgtaagtttactcaggtggtaattccagttgct

SEQ ID NO: 666558 - DNA, 120 bp, Artificial Sequence
  ENSG00000185070_188 (sequence is synthesized)
atggttgtggaagatatggtctctacttaaacaaattcaactgagctatggcatctccaatgcaactgtcaatttagaaatttctttctttttatctcaataggcaaagaacactaaagt

SEQ ID NO: 666559 - DNA, 120 bp, Artificial Sequence
  ENSG00000185070_189 (sequence is synthesized)
agtctgctttcactttcattaacacgccccatggagatatcatgaattactctcaggcccttgattatcttatcataccagaggatgtcccacaggtctacagcttaataacatcatgtg

SEQ ID NO: 666560 - DNA, 120 bp, Artificial Sequence
  ENSG00000185070_190 (sequence is synthesized)
actgaagtggaagaactggaaggaaaagataacctagaaactcagtaattcacatgcattcaagaaggtagaagaaaattctcactaaaactcagggacatgccaccttttgcaaatttc

SEQ ID NO: 666561 - DNA, 120 bp, Artificial Sequence
  ENSG00000185070_191 (sequence is synthesized)
tgggagtttagtccggcatgtctggaaatcctttccaaagaaactgggcctgttcttgatgggctccctggatgtttgaaggcaacatatactagttttagatgcgctgcttcgatactt

SEQ ID NO: 666562 - DNA, 120 bp, Artificial Sequence
  ENSG00000185070_192 (sequence is synthesized)
tggattcaatacttagtaatccctaaagctgtgaatttggagtttgttgctgaggaagagtagactctctagcttttccaggctgtggtccaggctgctgtctttgctacttggttacaa

SEQ ID NO: 666563 - DNA, 120 bp, Artificial Sequence
  ENSG00000185070_193 (sequence is synthesized)
tgatccagcaaattcaacggtgcataaaatgtttcaggcagatggtcatgcagtttgtaaaactttgccaatctcgtaggagattaatagcgtagagctctgtggttctgaagcaaaatc

SEQ ID NO: 666564 - DNA, 120 bp, Artificial Sequence
  ENSG00000185070_194 (sequence is synthesized)
atgctttctttcttagattattaatctccttgtgagggacagttcttgtcttgctaatagaaatagatgccgaaagaggctcaactgttggctattggatcccgagtagtaatgcaactg

SEQ ID NO: 666565 - DNA, 120 bp, Artificial Sequence
  ENSG00000185070_195 (sequence is synthesized)
aactgtaatcatgagttttgatcaaccaaccataaagttgagcttgggcagcagaactcctacatcaagtaaaaagtatatatatacacacatatgtgtgtatgtatatgtatacctata

SEQ ID NO: 666566 - DNA, 120 bp, Artificial Sequence
  ENSG00000185070_196 (sequence is synthesized)
tatacacatataaatgtgtgcgtgtatatatatatgattggctgagtgctctatttgttgcttgagcaggtgttcaccctcccacataaattcatcctacttaattggcactttttcttc

SEQ ID NO: 666567 - DNA, 120 bp, Artificial Sequence
  ENSG00000185070_197 (sequence is synthesized)
aacccatacctgcttctcagagaaactatagagaagaggaaacttccaagtgagcaggtctttgaatggtacatctatttgttcactctgcttggaaacaaaggtttcactaagcatgga

SEQ ID NO: 666568 - DNA, 120 bp, Artificial Sequence
  ENSG00000185070_198 (sequence is synthesized)
tacaatttggatcattggtaataaggagacttagggaagaaatacgtgttaaggattgttcataagtggcagaacctatgagaatattcatgccacatgttatttcttttcagaagatct

SEQ ID NO: 666569 - DNA, 120 bp, Artificial Sequence
  ENSG00000185070_199 (sequence is synthesized)
tcctagttgaggaatctttcagagattcagtagataaggtgatctattatatggatgtcaagctgtccttttccccagccaccctcctcacgtcttgctcaatgacttcatgaatgaaaa

SEQ ID NO: 666570 - DNA, 120 bp, Artificial Sequence
  ENSG00000185070_200 (sequence is synthesized)
gtttatgatagcaaagatgttggtaacatatgcattcaacaacatagttcatttggtagagtcaatactgagtacctaagagcccaattctgatactctcatattgcactattcactagg

SEQ ID NO: 666571 - DNA, 120 bp, Artificial Sequence
  ENSG00000185070_201 (sequence is synthesized)
aggttcagcaatctatttagtggcaggtggtgacagtggatttcttctcttatggaaaggacaactatccatattgaaatagacaattactctgtatatagatttgcctgccttgtaacc

SEQ ID NO: 666572 - DNA, 120 bp, Artificial Sequence
  ENSG00000185070_202 (sequence is synthesized)
atgcctttgcatctgtttacttacttaatgggacattattatggtgacccatacaacatcacttttaaacagtggatttatttatggcacagaggttaagaaaatgaactcaggccggta

SEQ ID NO: 666573 - DNA, 120 bp, Artificial Sequence
  ENSG00000185070_203 (sequence is synthesized)
agagtcactgttatcattcaccacaagttgcctgaagcaaccagcctttaaaatactataatggactgtggaaaaatcagttagagtgtcacttggatgaagctgtaattggaagttgag

SEQ ID NO: 666574 - DNA, 120 bp, Artificial Sequence
  ENSG00000185070_204 (sequence is synthesized)
gacactgtcattcagaataagatgtatgatctgaattagtggccaatacctggccctttttgtctgtagttaaatgtgatgtgaggaaataccaaagctcatggtaatctcagatgtcat

SEQ ID NO: 666575 - DNA, 120 bp, Artificial Sequence
  ENSG00000185070_205 (sequence is synthesized)
tggacagagaagctcacagaccaaattaagatgctgaagtcagatgacttatgaatcaatttaaaacaaatcatgagaaggaagggaggaaaggatgaagtaggtttgcagtcctcttag

SEQ ID NO: 666576 - DNA, 120 bp, Artificial Sequence
  ENSG00000185070_206 (sequence is synthesized)
aagaaggtaaaagtgggtagaatggaccatagtacttgaatcttgagttcagaatcagatattcttcctccttggcctcttctgtttcagggcttctcgaatttttttttcttttattta

SEQ ID NO: 666577 - DNA, 86 bp, Artificial Sequence
  ENSG00000185070_207 (sequence is synthesized)
ttctcccaggttcaaggaattctcctgccttagcctctcgagtagatgagattgcaggtgcccaccactacacccagctaattttt

SEQ ID NO: 666578 - DNA, 80 bp, Artificial Sequence
  ENSG00000185070_208 (sequence is synthesized)
caggttcaaggaattctcctgccttagcctctcgagtagatgagattgcaggtgcccaccactacacccagctaattttt

SEQ ID NO: 666579 - DNA, 120 bp, Artificial Sequence
  ENSG00000185070_209 (sequence is synthesized)
tggtatggttatgtggaccagaactgaagtttaaggaaggggcttaagatatggaagttgcctgggaccaacatactctgtccaagagacacagtgacacatacatgcacagctgaccaa

SEQ ID NO: 666580 - DNA, 120 bp, Artificial Sequence
  ENSG00000185070_210 (sequence is synthesized)
agctatagcttcccaattacttgatgaacagctatgaatgttgtttctttttcttagacaaagtgcatatctgctcaagatggatgtcactaatgtgcaactgatccacaacctcataca

SEQ ID NO: 666581 - DNA, 120 bp, Artificial Sequence
  ENSG00000185070_211 (sequence is synthesized)
attttagtatctcatatgcttcgtgtacatgtcatgtatgaaggtgcctgaggtaccccatgtatatatagcatgttatgaatgttaggcatattttggtctttcctttctatctatgtt

SEQ ID NO: 666582 - DNA, 120 bp, Artificial Sequence
  ENSG00000185070_212 (sequence is synthesized)
tagtatgcacaagacatacttattttacctttgcttaatatgccttatagtttactaacttacttaacagaggagttttgttttcttgttatctgtagcagaattgaatgttgcccagca

SEQ ID NO: 666583 - DNA, 120 bp, Artificial Sequence
  ENSG00000185070_213 (sequence is synthesized)
atataatatatgtaaatcataccaaattatatgtgtttaaaactcaagggatggaactgggagagataacactcatttttcacctacgcatcactcacaatatttagctctccttccaca

SEQ ID NO: 666584 - DNA, 120 bp, Artificial Sequence
  ENSG00000185070_214 (sequence is synthesized)
tgatgttgggatatgatggcttagaagtcttactagtcaatggaagaatgtttctcttccaagaggacacaacaatgattcatttgaactctatgattgccactgaataatttggtcttt

SEQ ID NO: 666585 - DNA, 120 bp, Artificial Sequence
  ENSG00000185070_215 (sequence is synthesized)
ccatgcctataagcaaagaagttacgtgtattaactggaacaattggtcctgattattaaggagagtaagtttttcctacaaagagatgtatgtatgggacccagggaattttacagaaa

SEQ ID NO: 666586 - DNA, 120 bp, Artificial Sequence
  ENSG00000185070_216 (sequence is synthesized)
catctctaagaacttccatgcttttttgtcaagttaaatggacaactatcgcaaccacatacaggcagaaccactaagagtaaaaacccctcaggaattaggattcgggtcaccctgctt

SEQ ID NO: 666587 - DNA, 120 bp, Artificial Sequence
  ENSG00000185070_217 (sequence is synthesized)
ggcagagccctaattagtcacagtgctaggtgaggtcaaaagtaatatgaaataggaagaggataaacagtgtcataaacaactgtgatcttatggccagttgcagagtaagaaattaat

SEQ ID NO: 666588 - DNA, 120 bp, Artificial Sequence
  ENSG00000185070_218 (sequence is synthesized)
aactactcctgttctcttctttgccttgttatgcatgtactgactttttacctctttctttttccctacaattttataaaaatggtgatacatttgtaatttgtccctcaaattacagac

SEQ ID NO: 666589 - DNA, 120 bp, Artificial Sequence
  ENSG00000185070_219 (sequence is synthesized)
tatcagcttgaaactatgattggaattgaaggttaaagaaaacccagctatagattcagtgactaacaaaatttggggacagtgtaagcctcattctaattgcataaggaatagttactg

SEQ ID NO: 666590 - DNA, 120 bp, Artificial Sequence
  ENSG00000185070_220 (sequence is synthesized)
tatgttaggcaggtgcatgttgttattgctacttttttcaagtctaagttctaggtacaaagtgtacactgtactggatttagtatttgacatctattttcacatccttctaggagtcat

SEQ ID NO: 666591 - DNA, 120 bp, Artificial Sequence
  ENSG00000185070_221 (sequence is synthesized)
cttgtactaaagaagctgtaagcccacatgtgcatttcccagagtcccttgttgctagggggctgaatgcgaacgaggtttcaccattaaatatacttatacatttggaaaggcaaaaat

SEQ ID NO: 666592 - DNA, 120 bp, Artificial Sequence
  ENSG00000185070_222 (sequence is synthesized)
gaggcagaggccatctttgtgttgctggtttgattagcaagtttgctaagacatgagtgtcaagggaagttgaggtggagatggtggctatatggtgcagctgttttcctgattcccaga

SEQ ID NO: 666593 - DNA, 120 bp, Artificial Sequence
  ENSG00000185070_223 (sequence is synthesized)
gagcaatcactcagatgtgctcttgtacttaatacttccactggcagtcccttttctttcctcttttagttcttcctataattttctaagtgtataattgcccattttccctaaatacct

SEQ ID NO: 666594 - DNA, 120 bp, Artificial Sequence
  ENSG00000185070_224 (sequence is synthesized)
aggtaggttttatttcctaaactggacctcttaccaaacacagatgagatgtactgtctgccaccctaactgcccataggactccaccaaggatgccaactctaagtggtcatttacctc

SEQ ID NO: 666595 - DNA, 120 bp, Artificial Sequence
  ENSG00000185070_225 (sequence is synthesized)
tgtgattgtgtttttaatgcctgcctcccattaagttataagatccaggaatttaataatttattttgataaggacttaacacaatgcttggcacataagaggaattaaataacattttt

SEQ ID NO: 666596 - DNA, 120 bp, Artificial Sequence
  ENSG00000185070_226 (sequence is synthesized)
ctgaatgaatagattttaaaccatgtgtgagcagtcacagaattcactgatctattataatttaccaattcctttgcatcatagcacccatgcaaaatattttggctacagggagtgctc

SEQ ID NO: 666597 - DNA, 120 bp, Artificial Sequence
  ENSG00000185070_227 (sequence is synthesized)
caattttgatactctccctgtcaatatgcctattaccccaatataatttaagattgacagggagagcatcagtattctgcagtctgattgcagaagcatatatgtaaaaatatacctttt

SEQ ID NO: 666598 - DNA, 120 bp, Artificial Sequence
  ENSG00000185070_228 (sequence is synthesized)
agaaatgattttagaatctggaaatttacaaactattaattttcttttctacagtttcctccagaaagcccctatgtatttattccggttaacaattttacttgagtagaaatcacttga

SEQ ID NO: 666599 - DNA, 120 bp, Artificial Sequence
  ENSG00000185070_229 (sequence is synthesized)
ctcaaattttgatgatttaatagctcattgaaagaactagcctgaagcagataaaatatgttgcagatgctgtaactcttatttgcatccattggtcttttggtttatgtgctttaataa

SEQ ID NO: 666600 - DNA, 120 bp, Artificial Sequence
  ENSG00000185070_230 (sequence is synthesized)
tttgaaaaacaagaagataatcaggaaccaagatggatatgtgtgtcttgaggcagaacttaattcaaaattgttcagtgttttgtcagatgaactccttaaccacatttgttatcagta

SEQ ID NO: 666601 - DNA, 120 bp, Artificial Sequence
  ENSG00000185070_231 (sequence is synthesized)
gcacacaatatattggattaagtttttgaatgatgtgcaaagatgatgccagattgatcctaacaaacataaagctcagaatcaaaaccagaatgttgttttgatcatactggttttagg

SEQ ID NO: 666602 - DNA, 120 bp, Artificial Sequence
  ENSG00000185070_232 (sequence is synthesized)
caaaggattttaagataaattctttcatactggaatttgtgatactatccacacttttcctcactataaaatttaatgaaccttatatcattaatatttttgtgtcaatggtgagttctt

SEQ ID NO: 666603 - DNA, 120 bp, Artificial Sequence
  ENSG00000185070_233 (sequence is synthesized)
cttttttctttacctgagttgtatcaacagtttcaaaggagagagagtgtttttggtaaaggcaataaattattttttaatgtacatcttatacacataaaatactttctcatattctga

SEQ ID NO: 666604 - DNA, 120 bp, Artificial Sequence
  ENSG00000185070_234 (sequence is synthesized)
agaatgaagcatttctgtcctaggtgattataaagtttgttgctatagtatttcattattttttattagaaaatattttaataacacaagaaagtaaagaaagtaatacaaggaacactc

SEQ ID NO: 666605 - DNA, 120 bp, Artificial Sequence
  ENSG00000185070_235 (sequence is synthesized)
atgtacacatcaaccagctttgtctgaaattaatatcatcctaaatttgcttcattgcttttattcattaaaaattacaaatacaattgaagcccttgaacccctcacctgtcacactat

SEQ ID NO: 666606 - DNA, 120 bp, Artificial Sequence
  ENSG00000185070_236 (sequence is synthesized)
cctctttgctttgtcaaatacttactacgttcatatgtattgatgtacagtatagccttattttacgtgttttaaatttatacataaacaatttcaaactctatgaatcattctacattt

SEQ ID NO: 666607 - DNA, 120 bp, Artificial Sequence
  ENSG00000185070_237 (sequence is synthesized)
tgctattttgtgttcaatatcctgttgtcgaaacatttccatgttcctttaattcattcattggcaatacagtataatatgttattgtatagatacatatatatttaaaatatataggta

SEQ ID NO: 666608 - DNA, 120 bp, Artificial Sequence
  ENSG00000185070_238 (sequence is synthesized)
ttttaattttactgtattatattgttgaacatttccactgttttacattttttagtatcataaactatccttcaatgaacactcttttaatgtcatctggtgtcaggtatgagagttcct

SEQ ID NO: 666609 - DNA, 120 bp, Artificial Sequence
  ENSG00000185070_239 (sequence is synthesized)
aaacacacacagtgtatctagaatttgaattgctaaaattgaacattcaattttcatttttaactttactaaatactgtaaaattgttctctgtgtgccaattttctttaccactggtaa

SEQ ID NO: 666610 - DNA, 120 bp, Artificial Sequence
  ENSG00000185070_240 (sequence is synthesized)
aatgtgagtttccactttcacatgcttgccatttcctattgcaaaacatttaagtatttatgtttgtgataaaaatggagtcttattttgattttaatttgtacttccccagttcctgtt

SEQ ID NO: 666611 - DNA, 120 bp, Artificial Sequence
  ENSG00000185070_241 (sequence is synthesized)
gtgtttaagtttgttttttatttatttattatctgttcatgattttcttcattttttctcttactggttcatattctctatacatgctgaatggtgttagctagctatattctttgcaat

SEQ ID NO: 666612 - DNA, 120 bp, Artificial Sequence
  ENSG00000185070_242 (sequence is synthesized)
aattattaaaattttctttttcttttctttttttaagagacaaggtcttaccctgtcatccaggctaggatgcagtagcacgatcttagcttactgtagactccaactcctgggctcaag

SEQ ID NO: 666613 - DNA, 120 bp, Artificial Sequence
  ENSG00000185070_243 (sequence is synthesized)
agatactctcctgccttggtttcctaaagtgctgggattataggcctgagccactggcctgttttgtttttcttaatataaggctatacatttccctctaagaactaatttagctgcctc

SEQ ID NO: 666614 - DNA, 120 bp, Artificial Sequence
  ENSG00000185070_244 (sequence is synthesized)
cctccctcaatcttttatatgtaattttaagttaatattcagctttaaacttttctaattcaattatcttttttgattaatcaattgtttaggataatgtctcaaaacttttttggtata

SEQ ID NO: 666615 - DNA, 120 bp, Artificial Sequence
  ENSG00000185070_245 (sequence is synthesized)
atgtctcaaaacttttttggtatatagatatctttaattacatatttctaaattattttcatttaagtcaaaggacatagcctggaaagtattcgtttgtttgtgtgtgtgtgtgtgtgt

SEQ ID NO: 666616 - DNA, 120 bp, Artificial Sequence
  ENSG00000185070_246 (sequence is synthesized)
ttatgttttagcaatttggtcagttgctttaaattagagattttgcctgattgttatctacagaattctatgcaactccattacattaagctaatatcgcttcattttatctctcatcac

SEQ ID NO: 666617 - DNA, 120 bp, Artificial Sequence
  ENSG00000185070_247 (sequence is synthesized)
attttgtttttgtttgtttgtgctgtgaattattgagataatgggttaaatgtatgtgcctgtgtccatttatttcaataatatcttatactatgactctatattattaattgggaagat

SEQ ID NO: 666618 - DNA, 120 bp, Artificial Sequence
  ENSG00000185070_248 (sequence is synthesized)
tttagaatacttaacgtatgttttctaattaagcagtgacccacttaatttctcagaagtacattttgttttattgctttaaactctattttgattgtttttaatctgatcatacagact

SEQ ID NO: 666619 - DNA, 120 bp, Artificial Sequence
  ENSG00000185070_249 (sequence is synthesized)
tttattttggctgatattttcgttacttttttcttatttttatcctttctatgtctttatgattaaattgtgtgccttacaaggaggttttactttttccctcaatggatttggaagata

SEQ ID NO: 666620 - DNA, 120 bp, Artificial Sequence
  ENSG00000185070_250 (sequence is synthesized)
tatgttctatttttatttctgttgttggtttcctgaaaatctcagcatgcatatttgacttaaattctaaaattaataaacactttcttaatttcctgaacaataaaaggaatttcaaac

SEQ ID NO: 666621 - DNA, 120 bp, Artificial Sequence
  ENSG00000185070_251 (sequence is synthesized)
atattattggtcatcatcacctgcctattaaatatgctttcccactagggctggggctaatggaaaatacatcttaaaaagtcttctgtgtaaaacatgggactcaaaacaacactagga

SEQ ID NO: 666622 - DNA, 120 bp, Artificial Sequence
  ENSG00000185070_252 (sequence is synthesized)
aaatagcgtagatcagataattctcattaaatcagctgtttattaaaaaaagcaatgagcaaggaacaacaaagtctccttaggaggcaaaacaaagtattattaaaagtatgtttgatg

SEQ ID NO: 666623 - DNA, 120 bp, Artificial Sequence
  ENSG00000185070_253 (sequence is synthesized)
ttgctgaagattctttcataaacatattaaagtcaattataattctgtttttaatgaccttattagctcagatgatgttttaatgatttgagtttatgtattatttgaagaatctctaaa

SEQ ID NO: 666624 - DNA, 120 bp, Artificial Sequence
  ENSG00000185070_254 (sequence is synthesized)
tagcactattaagtgctctgatatgcagtaatatttatattgagaagcaacttttttaattgtttggggaaagacttctatttcttatgacatgcttccttttcattgaggaatacccaa

SEQ ID NO: 666625 - DNA, 120 bp, Artificial Sequence
  ENSG00000185070_255 (sequence is synthesized)
gataccaagttttctttcagaagtaatttgcattttccaccttgaagttgtatttgccattttgtttgttgccataggaaaattcttttttgagaatttttttcttataacgttcttcat

SEQ ID NO: 666626 - DNA, 120 bp, Artificial Sequence
  ENSG00000185070_256 (sequence is synthesized)
ctgattaaacaaacaaaaaacccatctttatttttagactaaaagcctttgaataaaatattatacaactttaaataaatttaagatgacattatgacttattaggccacagttaaatat

SEQ ID NO: 666627 - DNA, 120 bp, Artificial Sequence
  ENSG00000185070_257 (sequence is synthesized)
gagcttcatctattagtgagtcaatcataggattttcacacatggcttttgttcacagtaagttatatcaattaagttgcttagaatgaacatatagctgaactaataagcatgaaatat

SEQ ID NO: 666628 - DNA, 120 bp, Artificial Sequence
  ENSG00000185070_258 (sequence is synthesized)
tttcactgatttataagaatccagaaattatcaatgagttttctttttctattatttaaaaaagtttttgcttggcaaatcttcccctctaggagattaaagtattttttgctcattaat

SEQ ID NO: 666629 - DNA, 120 bp, Artificial Sequence
  ENSG00000185070_259 (sequence is synthesized)
caatgtaagaacaccttactttacattcattgaactctgaggttatagaactgtgaacttttcgatttgttcggcttggggaatgtcatagttcattctgtgagtggaagttgcctttaa

SEQ ID NO: 666630 - DNA, 120 bp, Artificial Sequence
  ENSG00000185070_260 (sequence is synthesized)
ccacatgagaacaaataagggaatattaaggttttaactcaaggcagctgatatgcaatggctgggataatggccattacctaaaagaaagaaggcagcaaatggttccagacatttata

SEQ ID NO: 666631 - DNA, 120 bp, Artificial Sequence
  ENSG00000185070_261 (sequence is synthesized)
attatgcatctgaagtcagaacaccttttctttttaaacattttcaatttgtgatctgcttgaggacttgtacatagataggctcaagatattttgagtcacatatgtaaatgaaatgtt

SEQ ID NO: 666632 - DNA, 120 bp, Artificial Sequence
  ENSG00000185070_262 (sequence is synthesized)
ttgagcaaagttgtaaccctgcccacaaaatagctttgctagggaacagatgtaacttggagaagtaccaattttgtcattctagatgagaaatcttctggtgccatcaatgggatgcaa

SEQ ID NO: 666633 - DNA, 120 bp, Artificial Sequence
  ENSG00000185070_263 (sequence is synthesized)
tttggctagtcacacctgggtgaccaatatccggaggctctacgtcaagtcattgaacatggatggatgctccattaagtcatttaaaataaacttcctagcaagtgatctctagcatct

SEQ ID NO: 666634 - DNA, 120 bp, Artificial Sequence
  ENSG00000185070_264 (sequence is synthesized)
caatttaactgtatcctttggagatttaaggaaaactgacaaagctaaaaatacctctgctaggggatctattagtattctccacattgctactgaaacttgctgccttttcctagaagc

SEQ ID NO: 666635 - DNA, 120 bp, Artificial Sequence
  ENSG00000185070_265 (sequence is synthesized)
acatgaaagaaaccctggtccaagcgaactgtctccttcaccaaagccaccttggagagagcccacacggagactggagatgtagactattaagagcactcagccacagagtcactttgg

SEQ ID NO: 666636 - DNA, 120 bp, Artificial Sequence
  ENSG00000185070_266 (sequence is synthesized)
ttgtgtcacttaacctctgtgctcttctaagctccattcctggcttgtgttgcagggatgttttgaggatatgttgatgtgtgtgactccttctctgtgtgttgctattaaagacattaa

SEQ ID NO: 666637 - DNA, 120 bp, Artificial Sequence
  ENSG00000185070_267 (sequence is synthesized)
gaactgagctgagtaacaaactttctagaaatgaatgaagaaaacatagcaaaattatacctatttttttaaattgaagtacaaagaaactgtagctataattatctttcttgacactaa

SEQ ID NO: 666638 - DNA, 120 bp, Artificial Sequence
  ENSG00000185070_268 (sequence is synthesized)
cagtacatgattcctaaatgctattgctcacctcaagtcaatgtcactttgtattaatggatttagtgtcatgtatggtcttgttttttgaggtcgtctgatgaaatcagaatgatttca

SEQ ID NO: 666639 - DNA, 120 bp, Artificial Sequence
  ENSG00000185070_269 (sequence is synthesized)
cttaaggcaaggcatattaaaatacaaattcgtaaagataataccttgatgtttatgtctatgccaaacttgctctgctgagttcctggtggaatgaaaagactgtctttttttaattgt

SEQ ID NO: 666640 - DNA, 120 bp, Artificial Sequence
  ENSG00000185070_270 (sequence is synthesized)
gatttgtttatgactaacagcatggatttgagacagttatgaaaatgccatggtatcattctgtaaataactttgtctatgtaattgtagtgtatacttattattgacaacttgaagaaa

SEQ ID NO: 666641 - DNA, 120 bp, Artificial Sequence
  ENSG00000185070_271 (sequence is synthesized)
gtacataaagtacaaaataaaagttacccatattcttatcagccagatctaactaattttaccattttcatatctctgtgcatactcttaataaaaaatggtataatacatttaagcaga

SEQ ID NO: 666642 - DNA, 120 bp, Artificial Sequence
  ENSG00000185070_272 (sequence is synthesized)
aaaaggtagccatgtggtgagaaacttgaagacaggtaagacacggagacctttgggttgatggcaagatttggagggctgattatggcgcctttgatgtgaggaggtattcctgcaatc

SEQ ID NO: 666643 - DNA, 120 bp, Artificial Sequence
  ENSG00000185070_273 (sequence is synthesized)
cgcagccgtcagagcgcctgcggaggtggcgaaggcttggagagcatacgaggcggaatccggatcgaacaggtaagacacggagacctttgggttgatggcaagatttggagggctgat

SEQ ID NO: 666644 - DNA, 120 bp, Artificial Sequence
  ENSG00000185070_274 (sequence is synthesized)
attctctcctggctgtttgatggtaatgggagctgtacatgtatctggagagaggagaaccagcctggggactcaagatatattaaagactatgctcatggacatcaattctttcctgtc

SEQ ID NO: 666645 - DNA, 120 bp, Artificial Sequence
  ENSG00000185070_275 (sequence is synthesized)
ctttagggcagtattcaggccacacggttcaataacgggaaagaatgtcgtcacatgattgcatcatgttcttcaaaatgaaatctattgaacagtataaacaacaaagaacatcatttg

SEQ ID NO: 666646 - DNA, 120 bp, Artificial Sequence
  ENSG00000185070_276 (sequence is synthesized)
tcagaatgacctgggggaaatagtccagtgaaactaagcaaagggaactttataccgtgagggaaaatcaatggattgtaacagaaccctgcaagaagagacatagctttcaagttccag

SEQ ID NO: 666647 - DNA, 120 bp, Artificial Sequence
  ENSG00000185070_277 (sequence is synthesized)
agacctagaggtgactgagaagcaggatgtaccagaaactgggcttcttgttctacttatctagcgcccttttcacagtgttgtatatgtaaataaataataaagcagtgtgatttttaa

SEQ ID NO: 666648 - DNA, 120 bp, Artificial Sequence
  ENSG00000185070_278 (sequence is synthesized)
tcgggcccctgggaagactccaggaggtgatggatgaactttgagctggtcattggtgaaagaacatggattagctgagcagaaaagaagaaggaatactggatgcatttcagaagctat

SEQ ID NO: 666649 - DNA, 120 bp, Artificial Sequence
  ENSG00000185070_279 (sequence is synthesized)
cgtgcaattagatcttcttgactaagaaaaaatgcagacaagcaattactccgttactttaattactctcctaattataacgataaccttgtcacattatcataattccccaaacagaaa

SEQ ID NO: 666650 - DNA, 120 bp, Artificial Sequence
  ENSG00000185070_280 (sequence is synthesized)
aacgcatgctccaaattgcaccaatatttgataattttaccttgttaacggctcactgtcagtatgtagagcactacattttttccccattacctttctattgcacagtctatatttctt

SEQ ID NO: 666651 - DNA, 120 bp, Artificial Sequence
  ENSG00000185085_0 (sequence is synthesized)
cctcgggctcggctcgggctccgggatgtccgcgctgtgcgaccctcccggggccccagggccacctgggcctgccccggccacccacggtcccgcgcctctcagtgctcaggagctgtc

SEQ ID NO: 666652 - DNA, 120 bp, Artificial Sequence
  ENSG00000185085_1 (sequence is synthesized)
ccgcgcctctcagtgctcaggagctgtcccaggaaatcaaggcttttctgactggcgtagaccccattctgggccaccaactctcagcccgggaacatgctcgctgtggtcttctcctgc

SEQ ID NO: 666653 - DNA, 120 bp, Artificial Sequence
  ENSG00000185085_2 (sequence is synthesized)
tccgttctttgccacctgctcgggctgctgtgcttgaccacttgagaggtgtctttgatgagagtgtccgggcccacctggctgccctggatgaaacccctgtggctggtccacctcacc

SEQ ID NO: 666654 - DNA, 120 bp, Artificial Sequence
  ENSG00000185085_3 (sequence is synthesized)
tccgtccacctccaccctctcatgtccctgctggtggacctggtctagaggatgtggttcaggaagtgcagcaggtgctgtctgagtttatccgggccaacccaaaggcctgggcacctg

SEQ ID NO: 666655 - DNA, 120 bp, Artificial Sequence
  ENSG00000185085_4 (sequence is synthesized)
tgattagtgcatggtccattgacctcatggggcaactgagcagcacgtactcaggccagcaccagcgtgttccccacgctactggcgctcttaatgaactgctacagctgtggatgggtt

SEQ ID NO: 666656 - DNA, 120 bp, Artificial Sequence
  ENSG00000185085_5 (sequence is synthesized)
gtagggccacgcgtacattaatggacatctatgtgcagtgcctctcggctctcattggtagctgcccagatgcgtgtgtggatgccttgctggatacctctgttcagcattctccacact

SEQ ID NO: 666657 - DNA, 120 bp, Artificial Sequence
  ENSG00000185085_6 (sequence is synthesized)
ttgactgggttgtggcacatattggctcctcttttcctggcaccatcatttcccgggttctctcctgtggccttaaggacttttgtgtccatggtggggctggaggtggagctggcagta

SEQ ID NO: 666658 - DNA, 120 bp, Artificial Sequence
  ENSG00000185085_7 (sequence is synthesized)
gtggtggaagctcttctcagaccccctctacagaccccttccctggatctcctgccattcctgcggagaaacgggtgcccaagattgcctcagttgtaggcatcctaggtcacctggcct

SEQ ID NO: 666659 - DNA, 120 bp, Artificial Sequence
  ENSG00000185085_8 (sequence is synthesized)
cccgccacggagatagcatccgacgggagctcctgcgaatgttccatgatagcctggcagggggatctggaggccgcagtggggacccctcccttcaggccacggttccgttcctactgc

SEQ ID NO: 666660 - DNA, 120 bp, Artificial Sequence
  ENSG00000185085_9 (sequence is synthesized)
agctggcagtcatgtcaccagctttgctgggcactgtctctggagagcttgtggattgcctcaagcccccagctgtgctgagccagctgcagcaacaccttcaaggattcccccgagagg

SEQ ID NO: 666661 - DNA, 120 bp, Artificial Sequence
  ENSG00000185085_10 (sequence is synthesized)
agctggacaacatgttgaacctggctgtgcacctggtgagccaggcctctggggcaggtgcctaccgcttgctgcagttcctggtggacacagctatgcctgcttcggtcattaccaccc

SEQ ID NO: 666662 - DNA, 120 bp, Artificial Sequence
  ENSG00000185085_11 (sequence is synthesized)
agggcctggctgtgccagacaccgtgcgtgaggcttgtgaccggctaatccagctgctgctgctgcacctgcaaaaactggttcatcaccggggagggtctcctggggaaggggtgctag

SEQ ID NO: 666663 - DNA, 120 bp, Artificial Sequence
  ENSG00000185085_12 (sequence is synthesized)
gcccgcccccacctccccgcttggtgccctttttagatgcgctcaaaaaccatgttggagagctgtgtggagagacgttacgattggaacggaagcgcttcctctggcagcaccagctct

SEQ ID NO: 666664 - DNA, 120 bp, Artificial Sequence
  ENSG00000185085_13 (sequence is synthesized)
ccttgggccatctgctgagccgagcccgaagccctgaagagttgagtttggccacccagttatatgcagggctagtggtcagcctctctggcctcctgcccctggctttccgaagctgtc

SEQ ID NO: 666665 - DNA, 120 bp, Artificial Sequence
  ENSG00000185085_14 (sequence is synthesized)
tggctcgggtgcatgcagggacattacagcctcccttcacggcccggttcctgcgcaacttggcactgctagtagggtgggaacagcagggtggcgagggccctgcagccctaggggcgc

SEQ ID NO: 666666 - DNA, 120 bp, Artificial Sequence
  ENSG00000185085_15 (sequence is synthesized)
actttggggaatctgcctcagcccatctgtctgacctggctcctctcctgctacatcctgaggaggaagtagctgaagctgctgcctctctcctggccatttgtccctttccttctgaag

SEQ ID NO: 666667 - DNA, 120 bp, Artificial Sequence
  ENSG00000185085_16 (sequence is synthesized)
ccttatccccctcccagctcctgggactggtaagggctggggtgcaccgcttctttgcctctctgaggctgcatggacccccaggtgtggcctcagcctgtcagcttctcacccgcctgt

SEQ ID NO: 666668 - DNA, 120 bp, Artificial Sequence
  ENSG00000185085_17 (sequence is synthesized)
ctcagacatccccagctgggctcaaggctgtcctgcagctgctggttgaaggagccttacatcgaggcaacacagaactgtttggtgggcaagtagatggggacaatgagactctctcag

SEQ ID NO: 666669 - DNA, 120 bp, Artificial Sequence
  ENSG00000185085_18 (sequence is synthesized)
ttgtttcagcttctttggcttctgcctccctgttggacactaaccggaggcacactgcagctgtgccaggtcctggagggatttggtcagttttccatgctggagtcatcggccgtggct

SEQ ID NO: 666670 - DNA, 120 bp, Artificial Sequence
  ENSG00000185085_19 (sequence is synthesized)
taaagccacccaagtttgtccagtcacgaaatcagcaggaagtgatctataacacccagagcctcctcagcctcctggttcactgctgcagtgccccagggggcactgaatgtggggaat

SEQ ID NO: 666671 - DNA, 120 bp, Artificial Sequence
  ENSG00000185085_20 (sequence is synthesized)
gctggggggcacccatcttgagtccagaggcagccaaagcagtggcagtgaccttggtggagagtgtgtgtcccgatgcagctggtgcagagctggcctggccccccgaggaacacgccc

SEQ ID NO: 666672 - DNA, 120 bp, Artificial Sequence
  ENSG00000185085_21 (sequence is synthesized)
gggccaccgtggagcgggatctccgcattggccggcgcttccgcgaacagcccctgctctttgagctgttaaagctggtagcagctgcacccccagccctgtgctactgttccgtgctgc

SEQ ID NO: 666673 - DNA, 120 bp, Artificial Sequence
  ENSG00000185085_22 (sequence is synthesized)
ttcgggggctgctggccgccctcttgggccattgggaagcctctcgccaccctgacacgacccactccccctggcacctggaggcatcctgcaccttagtggctgtcatggctgagggaa

SEQ ID NO: 666674 - DNA, 120 bp, Artificial Sequence
  ENSG00000185085_23 (sequence is synthesized)
gcctcctgcctccggccctgggtaatatgcatgaagtatttagccaactggcacctttcgaggtgcgtctgctgctgctcagtgtctggggttttctccgggagcatgggcccttgcctc

SEQ ID NO: 666675 - DNA, 120 bp, Artificial Sequence
  ENSG00000185085_24 (sequence is synthesized)
agaagttcatcttccaatcagagcggggtcgcttcattcgggacttctccagggagggtggaggtgagggtggaccccatctggctgtgctgcacagtgtcctccaccgcaacatcgacc

SEQ ID NO: 666676 - DNA, 120 bp, Artificial Sequence
  ENSG00000185085_25 (sequence is synthesized)
gcctaggtcttttctctggccgtttccaggcaccttcaccgtccactctccttcgacaggggacgtagccttttcttgctctggaagcccagggaggttgagcagtgagagagggaaggg

SEQ ID NO: 666677 - DNA, 120 bp, Artificial Sequence
  ENSG00000185085_26 (sequence is synthesized)
actaacgtgctccggaagggtggaggtttctcttctaagtccttggtctaaagagcgctgtcacttttttctctcccacttttttttttctaaataaaatttgccaacttgagaaaacca

SEQ ID NO: 666678 - DNA, 120 bp, Artificial Sequence
  ENSG00000185088_0 (sequence is synthesized)
gcagatcgcttgcagcttgctagctgtgtgggctgggaggtctggtagggctgagcttgcaagaggatcaacatgcctttggctagagatttactacatccgtccttggaagaggaaaag

SEQ ID NO: 666679 - DNA, 120 bp, Artificial Sequence
  ENSG00000185088_1 (sequence is synthesized)
aaaaaacataaaaagaaacgcctagtacaaagtccaaattcttactttatggatgtaaaatgtccaggttgctacaagatcaccacggttttcagccatgctcagacagtggttctttgt

SEQ ID NO: 666680 - DNA, 120 bp, Artificial Sequence
  ENSG00000185088_2 (sequence is synthesized)
gtaggttgttcaacagtgttgtgccagcctacaggaggaaaggccagactcacagaagggtgttcatttagaagaaagcaacactaatgattcaaacagcttcctgaattttaattttgt

SEQ ID NO: 666681 - DNA, 120 bp, Artificial Sequence
  ENSG00000185088_3 (sequence is synthesized)
gttgtctcacagaaagccttatcataaattccataattctaattaatttaccaagataatgtaattacatttggttttgtaaggtatacagcagtaatctcctattttggtgtcagtttt

SEQ ID NO: 666682 - DNA, 120 bp, Artificial Sequence
  ENSG00000185088_4 (sequence is synthesized)
tcaataaagttttgattatgggcaaatcccctctttttctttttttaaaatatatttgagtatgccatacatttatatatatggtgtatatgaatttggtttaaacattttaaaatttat

SEQ ID NO: 666683 - DNA, 120 bp, Artificial Sequence
  ENSG00000185088_5 (sequence is synthesized)
tgtatatgaatttggtttaaacattttaaaatttattctgattagtttgtgtctttttttttttttttgagagagagagtcctgctctgtcactcaagctggagtgcagtggtgcgatct

SEQ ID NO: 666684 - DNA, 120 bp, Artificial Sequence
  ENSG00000185088_6 (sequence is synthesized)
cacacaccaccatgcctggctaatttgtgtctcattttcaagagtagaaaccctaaatattttattttcattccttttccaaattgctatgaatgggattaaaggattacagatgtaaag

SEQ ID NO: 666685 - DNA, 120 bp, Artificial Sequence
  ENSG00000185088_7 (sequence is synthesized)
aaattgctatgaatgggattaaaggattacagatgtaaagtctattatttgtgaattctaaatgtagttctgctgttgtacctgtggaaacatcttaaagaagtacatattttgcacgtc

SEQ ID NO: 666686 - DNA, 120 bp, Artificial Sequence
  ENSG00000185088_8 (sequence is synthesized)
ctgcacgtgtaccccagaacttaaactataattaaaaagaatagtttcaaaaaaatacatattgatcacagtgtaatgccttggatttatgtggccttgctatactactatataatttag

SEQ ID NO: 666687 - DNA, 120 bp, Artificial Sequence
  ENSG00000185088_9 (sequence is synthesized)
gacagtaactgctagctggggtgtgagttatttattggaagctcctttttagggtagaaaatttgaggagaaatctgaagtggcatgatttacccgcagaagtcctggttggggatagta

SEQ ID NO: 666688 - DNA, 120 bp, Artificial Sequence
  ENSG00000185088_10 (sequence is synthesized)
gatggtgttgaattctctggcccagataggtgagcactcctgactacagatgtgtgttgagtggttctggtgcctgcctcattgtcattttcatagtttatgaagtaatcctggggagct

SEQ ID NO: 666689 - DNA, 120 bp, Artificial Sequence
  ENSG00000185088_11 (sequence is synthesized)
gagacggggagtgtatccactcactatacaactcctcattggactaggaagatagtccagtttctactctgcttctatttgatttgttaccttgtggcaggtatttaaaacaggcatttc

SEQ ID NO: 666690 - DNA, 120 bp, Artificial Sequence
  ENSG00000185088_12 (sequence is synthesized)
ctatcaacaggtaggcctctaatgtgagcaactgatcctcttacatactgcttaaatcagagaactgttgcacaagaactaaagaatgatggcaagtttggggtgtatatagttgtataa

SEQ ID NO: 666691 - DNA, 90 bp, Artificial Sequence
  ENSG00000185088_13 (sequence is synthesized)
tccgtctctatacatatatatgtagatgacccagagattctcagacttttagtttctgacatcattagaatctcagtaatttttttcagg

SEQ ID NO: 666692 - DNA, 120 bp, Artificial Sequence
  ENSG00000185088_14 (sequence is synthesized)
agtttctgacatcattagaatctcagtaatttttttcaggccattccttggccaaaagaaatacctaacagttacatttattaacttatgttctaacaactctagtagccatttgaaaaa

SEQ ID NO: 666693 - DNA, 120 bp, Artificial Sequence
  ENSG00000185088_15 (sequence is synthesized)
aactatacacacacaagagcaaaagtgatgtgatgatttttttaaaaatagagacagtgtcttggctctattgcccaggttggagggtcatagctcattgtgacctcaaactcctgggct

SEQ ID NO: 666694 - DNA, 120 bp, Artificial Sequence
  ENSG00000185088_16 (sequence is synthesized)
caagcaagcctcccacctctgcctcctgagtagcggagacttcaggcacgtgccaccacgcccgcctaatttttttgtagagatggggctctggctgtgttgcccaggctgtaaggaact

SEQ ID NO: 666695 - DNA, 86 bp, Artificial Sequence
  ENSG00000185088_17 (sequence is synthesized)
tgtgataatttttatctcatccttaaatcatcacagttactaatggaatgtgtgtgccttttgggctccatacagtttctcaaaat

SEQ ID NO: 666696 - DNA, 120 bp, Artificial Sequence
  ENSG00000185088_18 (sequence is synthesized)
aatgtgtgtgccttttgggctccatacagtttctcaaaattgaaatcagattggacaccattgtccttatttcttccacattgatttttgcatggtgctttttgtcatagcagtggctcc

SEQ ID NO: 666697 - DNA, 120 bp, Artificial Sequence
  ENSG00000185088_19 (sequence is synthesized)
aaacccagcttcacaaggataggatgccatcaaagggaatgtagtgccatatcatattgaaactgaacttcctggaactagtagtttatacaaaagatgcgtcagtgtcaagtgtttttc

SEQ ID NO: 666698 - DNA, 120 bp, Artificial Sequence
  ENSG00000185088_20 (sequence is synthesized)
ctgaggtactccaaggcacttcagcttgcacagtttaggatacttggctataaggagagacagtgggatgacagcttttgatgagaaggaatcaaacctatgatgaggactaatctaaca

SEQ ID NO: 666699 - DNA, 120 bp, Artificial Sequence
  ENSG00000185088_21 (sequence is synthesized)
caaacctatgatgaggactaatctaacaaaccctgaaaattcccttggaagtattttttaaaaaaggattatactttaaagaccacatctaagggctgggcgcggtggctcacacctata

SEQ ID NO: 666700 - DNA, 120 bp, Artificial Sequence
  ENSG00000185088_22 (sequence is synthesized)
gaaagaacacatctaaggatttacatggcattgggaaacgaatggtgtattaagttttactttattattaatctagatggtattactggttttgaaaagtgctgaataggacaccaggac

SEQ ID NO: 666701 - DNA, 120 bp, Artificial Sequence
  ENSG00000185088_23 (sequence is synthesized)
tttcccaaacttcagggtcagccacatacattattatatactgaatgttttaaatattatttatattgacttcatattttaatgtaaatatatttgtaaaggaaaccttccataaactta

SEQ ID NO: 666702 - DNA, 120 bp, Artificial Sequence
  ENSG00000185088_24 (sequence is synthesized)
tttgtaaaggaaaccttccataaacttaatataaatttatttttaggggaaggcttcctaaatggaaaaaccagttacataaagatagctaaaaataggccgggcgcagtggctcacgcc

SEQ ID NO: 666703 - DNA, 120 bp, Artificial Sequence
  ENSG00000185088_25 (sequence is synthesized)
taaataagctaaaaataaaatgaaattcttggcttctggcctgatgagatgacaaatggttttgtgtctggtcgttcctgtaagtcatctgataaagctctaattcctttctgttttatt

SEQ ID NO: 666704 - DNA, 120 bp, Artificial Sequence
  ENSG00000185088_26 (sequence is synthesized)
tttctggagatatgattcagatactataaaatccaaacttctgtgatgtaaaagtcagtagtttttactatatttacaaggttgtgcaaccattactactgtctaatcccagaccatttt

SEQ ID NO: 666705 - DNA, 120 bp, Artificial Sequence
  ENSG00000185088_27 (sequence is synthesized)
catcaccttagaaagaaacttcatacctatcagcattcactccctattcttccctcctctcagccattggcagccactaagctacttttgtctccatggatttgcttcttctcaatattt

SEQ ID NO: 666706 - DNA, 120 bp, Artificial Sequence
  ENSG00000185088_28 (sequence is synthesized)
catataatgctatttcgtataaatggaatcacatggtatgtagcttctgtatgtttcacttagcataatgttttcaagggctgtccatgctgttgcatgtatcaatatttcattcctttt

SEQ ID NO: 666707 - DNA, 120 bp, Artificial Sequence
  ENSG00000185088_29 (sequence is synthesized)
atatttcattcctttttttgacaatattctgtgtaataatatacaatgtttatccattcatcagttgatagatacttagagtgttttcactttttatttatttatttttgagatggagtc

SEQ ID NO: 666708 - DNA, 75 bp, Artificial Sequence
  ENSG00000185088_30 (sequence is synthesized)
atggagtcttgctctgttccctacctcccaggcttgagtgaccctctggcctcagcctcccgagtagctggaact

SEQ ID NO: 666709 - DNA, 65 bp, Artificial Sequence
  ENSG00000185088_31 (sequence is synthesized)
gttgcccaggctggtcttgaactccttgcctcaggctccggccaaataaagtattcttaatgaca

SEQ ID NO: 666710 - DNA, 120 bp, Artificial Sequence
  ENSG00000185088_32 (sequence is synthesized)
gagccactgcatccggccaaataaagtattcttaatgacatctgcaaaatccattttgctatgtaaggtaacatattcgtaggttctggggattagggtgtgggaatctttagagggcca

SEQ ID NO: 666711 - DNA, 120 bp, Artificial Sequence
  ENSG00000185088_33 (sequence is synthesized)
tttagagggccattattctgctaccacagaatataaagttgtaaaattctaccccatatttggaaactgagattcttaaattatgtctttgtaattctcttttttctttttctttctttt

SEQ ID NO: 666712 - DNA, 62 bp, Artificial Sequence
  ENSG00000185088_34 (sequence is synthesized)
gtggcgcaatctcagttcacagactacaggcgtgtgccaccacgccgggctaatttttttaa

SEQ ID NO: 666713 - DNA, 69 bp, Artificial Sequence
  ENSG00000185088_35 (sequence is synthesized)
tcctgcctcagcctccagagtacctgagactacaggcgtgtgccaccacgccgggctaatttttttaaa

SEQ ID NO: 666714 - DNA, 120 bp, Artificial Sequence
  ENSG00000185088_36 (sequence is synthesized)
gcctctcatgtcttcgtaattttccatggaaaaaaacttaaatctttggaaggaatagagtacattattgcattttacaaagaaaaggataacttttatagaataatgaccttgtattct

SEQ ID NO: 666715 - DNA, 120 bp, Artificial Sequence
  ENSG00000185088_37 (sequence is synthesized)
agaaaaggataacttttatagaataatgaccttgtattcttttaggattttacagctactttttcacaactataggcatagaaaatgacatcaggggccgggcgcggtggctcacgcctg

SEQ ID NO: 666716 - DNA, 78 bp, Artificial Sequence
  ENSG00000185088_38 (sequence is synthesized)
cccaacactttgggaggcccaggcggcggatcacgaggtcgagattgagaccatcctggccaacatgatgaaaccggg

SEQ ID NO: 666717 - DNA, 120 bp, Artificial Sequence
  ENSG00000185088_39 (sequence is synthesized)
tgacatcaggtcatggtgtttgctattgatcgacacttaaatagcctttgaattttgtttcaaaggagatgccagaattgcaaattttctctgctgatttgtgtcctactgattctggct

SEQ ID NO: 666718 - DNA, 120 bp, Artificial Sequence
  ENSG00000185088_40 (sequence is synthesized)
cgctttccccctacactactagggctactctcactttcacacctagcaaaacttcacctttcaaagaatttaggcagaatagtcctaatttagttaataagctttcattttaaatcttag

SEQ ID NO: 666719 - DNA, 120 bp, Artificial Sequence
  ENSG00000185088_41 (sequence is synthesized)
ggaagcagtgttagtttcagttattctataggaacagaaattggagctgccacagccttttgaaccagagcccggcagaccctcagcttcagccctgctcagtgttttgtgtctatgaaa

SEQ ID NO: 666720 - DNA, 120 bp, Artificial Sequence
  ENSG00000185088_42 (sequence is synthesized)
gtctttttaattttctcattacacattttatatatcatgctatgtatttagaacagaggggttgtgtaagattatgactctatgttctttatcttgtctttgtattaatttgaagttgtg

SEQ ID NO: 666721 - DNA, 120 bp, Artificial Sequence
  ENSG00000185088_43 (sequence is synthesized)
ttttttctttatttgtagccaactaattaaaataccaacatatttatttttattcatttttatgtgacaaacttttaaactgaagactgcatcaataaaattgcatgccattaaatatga

SEQ ID NO: 666722 - DNA, 120 bp, Artificial Sequence
  ENSG00000185088_44 (sequence is synthesized)
aggacaaagtttgccttaccatatgtttcctgatcgtgcgaaagcccttttctagggacttggagaacacaagtattatgaaaagtactgatgaaagttattaacaggtttcgaaaaata

SEQ ID NO: 666723 - DNA, 120 bp, Artificial Sequence
  ENSG00000185088_45 (sequence is synthesized)
actttactatctgacgtgttgcttctgccgaggatgaccgttattcctgtttttgcatgtatatttcacgtatggttaaatgtgccagcgttgtggtttaaaactaatagtaataatatg

SEQ ID NO: 666724 - DNA, 120 bp, Artificial Sequence
  ENSG00000185088_46 (sequence is synthesized)
aggttgcgcagcgtcttcgcgcgtggcgggcatgtagtgacttgcccggtcaccgcggcgcggctggccctgcaggggcgtgggctgcaattcagaggcggtggctgggaggggaacagt

SEQ ID NO: 666725 - DNA, 120 bp, Artificial Sequence
  ENSG00000185088_47 (sequence is synthesized)
tctctgtgtagcttatgagcggtcttggtctttgaggatgcccctgaggttgtgatctttgggtcttttggctttcccagtgattggtgtttctcgccccctctgccttctttcggaagc

SEQ ID NO: 666726 - DNA, 120 bp, Artificial Sequence
  ENSG00000185088_48 (sequence is synthesized)
gatttcctacttgttttccttttttaaaaactgtcctcgttgttgccttatatattaattccgtcaaggacggtcgctcagcaagaattcctgtcagatcagctgttgagccacaggagc

SEQ ID NO: 666727 - DNA, 120 bp, Artificial Sequence
  ENSG00000185088_49 (sequence is synthesized)
cacggttttcagccatgctcagacagtggttctttgtgtaggttgttcaacagtgttgtgccagcctacaggaggaaaggccagactcacagaaggctgaaagtgcgtaaatctaactaa

SEQ ID NO: 666728 - DNA, 120 bp, Artificial Sequence
  ENSG00000185088_50 (sequence is synthesized)
gagaaagtgcctgcaatcccagcactttgggaggcggagacgggtggattacttgagctcaggatttcgagactagcctgagcaacatggcagaaaccgcatctctacaaaatatacaaa

SEQ ID NO: 666729 - DNA, 120 bp, Artificial Sequence
  ENSG00000185088_51 (sequence is synthesized)
agaacaaagcaaacctaaggcacagccataccccgcagaaaacttcgaaatctgcgccttgaaaagggaagccaaaaggatacgagcctctttcataatctctctgttggctagagattt

SEQ ID NO: 666730 - DNA, 120 bp, Artificial Sequence
  ENSG00000185088_52 (sequence is synthesized)
gcagatcgcttgcagcttgctagctgtgtgggctgggaggtctggtagggctgagcttgcaagaggatcaacatgcctgacggtcgctcagcaagaattcctgtcagatcagctgttgag

SEQ ID NO: 666731 - DNA, 120 bp, Artificial Sequence
  ENSG00000185088_53 (sequence is synthesized)
gcagatcgcttgcagcttgctagctgtgtgggctgggaggtctggtagggctgagcttgcaagaggatcaacatgcctgtgagttgtttacatcgggctccgggtttgttttgggcttct

SEQ ID NO: 666732 - DNA, 120 bp, Artificial Sequence
  ENSG00000185088_54 (sequence is synthesized)
ccagtgatgagattgatgattataaatgtctctatcttcactgaaaagtttaaagaaatcttaatgattaccaaaataacttatctttcattgtgtgctttcagtaaagaatggcctgtt

SEQ ID NO: 666733 - DNA, 120 bp, Artificial Sequence
  ENSG00000185088_55 (sequence is synthesized)
caaatggatatatttatactcttgaccttgcagtgaactccattgacttatttttcttagtttagaacacatttattcacttagtttgcttaacttggaataaattaagtcagaatagaa

SEQ ID NO: 666734 - DNA, 73 bp, Artificial Sequence
  ENSG00000185088_56 (sequence is synthesized)
ccggttcaagtgattctcttgcctctgcctcccaagtagctgggaccacaggcgcgtgccaccatgcctggct

SEQ ID NO: 666735 - DNA, 120 bp, Artificial Sequence
  ENSG00000185088_57 (sequence is synthesized)
ctgggattacaggcatgagccacctcgccggccaggacatacagatttttaaaaccatatagaattttaaaatttcttttacaaaattttgttccatatatatttagtacatataatagt

SEQ ID NO: 666736 - DNA, 120 bp, Artificial Sequence
  ENSG00000185088_58 (sequence is synthesized)
acatataatagttttttttttatcattgccagctaagcaacagatagctaatatataagttaaaatgccagagattttacttttatgagcaactgcaatgattaatataaaaacctaatt

SEQ ID NO: 666737 - DNA, 120 bp, Artificial Sequence
  ENSG00000185088_59 (sequence is synthesized)
ttaattcctctttcactttagtgcaataagaaaaaaaaattatatatatagtttccatagtaatacttgtaaatttgtgattccataatgatgttataaatttgcttgtgatattttggg

SEQ ID NO: 666738 - DNA, 120 bp, Artificial Sequence
  ENSG00000185088_60 (sequence is synthesized)
gagctgtaagttccatgctctcactggaagagttcaagtggattggcagcaaatctgagatctatttggtgtgacctggtgagatctaaatatggagtcagcacatgatttttttaagag

SEQ ID NO: 666739 - DNA, 120 bp, Artificial Sequence
  ENSG00000185088_61 (sequence is synthesized)
taatattgctaagtaatattgctaagtatacttgggagatttttgaaacaaagtatgtcatgtcatgattttggaatttagtgcccatatgctgacagatggtttaatgggtctatctgt

SEQ ID NO: 666740 - DNA, 120 bp, Artificial Sequence
  ENSG00000185088_62 (sequence is synthesized)
tctagagttttcctaataggtctgaaaatacctctaatcaaaattatttacttgagaaaagtattcagaatagttcctaaaaattaagagtatatcttctgacagcttgcttgaaacagt

SEQ ID NO: 666741 - DNA, 120 bp, Artificial Sequence
  ENSG00000185088_63 (sequence is synthesized)
cttcactgttgaattcaggctcatggtcttaagtagacttcattatagcatttgagaaacaggagtgacacttatagtcataccagagtaaactcagatatgatagatgtattatagcaa

SEQ ID NO: 666742 - DNA, 120 bp, Artificial Sequence
  ENSG00000185088_64 (sequence is synthesized)
atttctggtataaaaggataaataatctgtatatgagtattaatccaatattcttaaaacttcagtattttacttaaaagtactttttgtcattaaaattatagcaaaggtagaatgcac

SEQ ID NO: 666743 - DNA, 120 bp, Artificial Sequence
  ENSG00000185090_0 (sequence is synthesized)
cctctctcccgcgctccggaaggcctgcgtccccgctccccagccaggcgccaccacctgccgcccaggcagccaggcgactcttctttcgcgggtcacgcggcctgactcaggcccctg

SEQ ID NO: 666744 - DNA, 120 bp, Artificial Sequence
  ENSG00000185090_1 (sequence is synthesized)
ctcctgtggccccgaaactcgccgttcgctgggccttgcgttgcactcggcgtgcagttccccctcggctcgcggccacttggtccgcgccgcctgcgtcctgtgtgccgagcccgcccg

SEQ ID NO: 666745 - DNA, 80 bp, Artificial Sequence
  ENSG00000185090_2 (sequence is synthesized)
ctctgccgggcgcacagtctgcctgggaagcgcgcggccgggcgggcggccatggcgcggcacgctgggaggtagcgcgg

SEQ ID NO: 666746 - DNA, 120 bp, Artificial Sequence
  ENSG00000185090_3 (sequence is synthesized)
tgcaggagcgcacagtcggccatggcccggcggcggcgccgcgcctgcatcgctctgttcctggtgctgctcttcgccttcggcaccctcatgggtctgcgcacgctcaaggctccggac

SEQ ID NO: 666747 - DNA, 120 bp, Artificial Sequence
  ENSG00000185090_4 (sequence is synthesized)
cggcaccctcatgggtctgcgcacgctcaaggctccggacggactcccggcgctgggcccgggcctggagctggcgccctttgagcgacgcccagagggggcccccgcgcccgctgccag

SEQ ID NO: 666748 - DNA, 120 bp, Artificial Sequence
  ENSG00000185090_5 (sequence is synthesized)
ccgccccgcaccgcggaccctggcggctcccctgggccggcacccgcggaggccgagcccgcccccgtgcagagcctgcgcgtctactcggacctgcacgccttctactactcgtggtac

SEQ ID NO: 666749 - DNA, 120 bp, Artificial Sequence
  ENSG00000185090_6 (sequence is synthesized)
gggagcccgcggcgcgagggccactacattcactgggaccacgtcatggtgccgcactgggaccccaagatctcggccagctacccccgcggccgccacagccccccagacgacttgggc

SEQ ID NO: 666750 - DNA, 120 bp, Artificial Sequence
  ENSG00000185090_7 (sequence is synthesized)
tccagcttctacccggagctggggccctacagctcccgggaccccgaagtgctgcgggagcatatgacccagctcaaggaagccgccatcggcgtcctggtcctgtcctggtacccacct

SEQ ID NO: 666751 - DNA, 120 bp, Artificial Sequence
  ENSG00000185090_8 (sequence is synthesized)
ggcatggctgatgataacggggagccctcagatgacctggtgcccgccattctggacaccgcccatcagtacagcatccaggtggccttccacatccaaccctacaagggccgggatgac

SEQ ID NO: 666752 - DNA, 120 bp, Artificial Sequence
  ENSG00000185090_9 (sequence is synthesized)
atcactgtacatgacaacatcaagtacatcattgacacgtatggctcccatggtgcattttaccgctataagaacagcatgggcaagagcctcccactcttttatatctacgactcatac

SEQ ID NO: 666753 - DNA, 120 bp, Artificial Sequence
  ENSG00000185090_10 (sequence is synthesized)
ctgacgtcccctgaggcctgggcccacctcctgacaccaaacgggccccattcgatccgcaacacgccctacgatggggtcttcatagcgctgctggtggaggagggccacacccacgat

SEQ ID NO: 666754 - DNA, 120 bp, Artificial Sequence
  ENSG00000185090_11 (sequence is synthesized)
aatggtttctcctttggttcttcccatcagaactggaaagctgtgaagaacttttgtgatgccaacaacctcatgttcatccccagtgtggggcctggctacatagacaccagcattcgg

SEQ ID NO: 666755 - DNA, 120 bp, Artificial Sequence
  ENSG00000185090_12 (sequence is synthesized)
ccctggaacaaccacaatacgcgcaacagggtcaatggcaagtactatgagacggccctgcaggcggccctgacagtgaggcccgagatcgtttccattacctccttcaatgagtggcac

SEQ ID NO: 666756 - DNA, 120 bp, Artificial Sequence
  ENSG00000185090_13 (sequence is synthesized)
gagggcacccagattgagaaggccattcccaagaagacacccacccgcctgtatttggactacctgcctcaccagcccagcctgtacctggagctgacacgccgctgggcggagcacttc

SEQ ID NO: 666757 - DNA, 120 bp, Artificial Sequence
  ENSG00000185090_14 (sequence is synthesized)
atcaaagagaaggagcagtggctcatgtgaggggcctgtaaatgggcgtgaggtgctgatgtccttgccttgctggaagatgtcaccatgtggggttcagctgaggttgtagccactcac

SEQ ID NO: 666758 - DNA, 120 bp, Artificial Sequence
  ENSG00000185090_15 (sequence is synthesized)
tcgttcccaggtcagaggtcagcagatgggtgtttctgggtgggccgtcaggcatgggcctgtgcaacacagagcccgttcctcaggcgagtggtgctgaggtgctctgtggtgatggga

SEQ ID NO: 666759 - DNA, 120 bp, Artificial Sequence
  ENSG00000185090_16 (sequence is synthesized)
acggcagaggctggcaggtgactgaacttagcccagggcagctccacatcctgggaacactttcatgtaaccccttctagttttgaactctgcagcaggctggtgctgtgtagtggccac

SEQ ID NO: 666760 - DNA, 120 bp, Artificial Sequence
  ENSG00000185090_17 (sequence is synthesized)
ccagtcaccacccttggaagggtgtcagggtctgggctcgcatgcaccctgctcccttctgccagcctgcatcctctcctcaggcctccttcccacatcatctgtcttctctaagttagg

SEQ ID NO: 666761 - DNA, 120 bp, Artificial Sequence
  ENSG00000185090_18 (sequence is synthesized)
gaaccatatttgagactttcaaaaagggaacttctaggtttaagctcctcccagtagattcctgaacccaattatcaggaaatcatcctgagcactcacaggttcatttaacactcactc

SEQ ID NO: 666762 - DNA, 120 bp, Artificial Sequence
  ENSG00000185090_19 (sequence is synthesized)
atcaagcaccttcctatgtgctaggtgctggggaaaacttgaccaaggaagagttcctgtcctgaagcttccaggacccagctttccttttctggtgtggccttgtagctagtgcctggg

SEQ ID NO: 666763 - DNA, 120 bp, Artificial Sequence
  ENSG00000185090_20 (sequence is synthesized)
cacaggtgtttttctttttgcagttttacctagtgctgggagttcagttctttttcctctagaaaaatacctctgtgctccagagcctaatttttcccagatgcatatttagctctaggg

SEQ ID NO: 666764 - DNA, 120 bp, Artificial Sequence
  ENSG00000185090_21 (sequence is synthesized)
agaggactaggaggaaatccccctccctttagctgcctgaactgactgaggcccactcactagagccatgttcagtgctactgtgattagtagtaattaaatatgaactggtattctcaa

SEQ ID NO: 666765 - DNA, 120 bp, Artificial Sequence
  ENSG00000185090_22 (sequence is synthesized)
agtctaaagcctggctcccttccggcctggcgcgctacggttcccgcaggcgctccgcttcagcaccgcgggcgtggacagctccggggcgcgaggctctgggactcatctgcaggaagt

SEQ ID NO: 666766 - DNA, 120 bp, Artificial Sequence
  ENSG00000185090_23 (sequence is synthesized)
gaacctggcaggaggcttgcttcaggtttttaggaaccatttttgcaattggagatgtttgtgaggaaaaaaatctctgttgaggggggtactgtgtgtctctgaagtggcctctgtgtt

SEQ ID NO: 666767 - DNA, 120 bp, Artificial Sequence
  ENSG00000185100_0 (sequence is synthesized)
ccccggcccggctccatttaatggcgcggacgccggcggcggcgggctcctggccgggccagcgcagcggaagagccaagccagcatgtcggggacccgagcctccaacgaccggccccc

SEQ ID NO: 666768 - DNA, 120 bp, Artificial Sequence
  ENSG00000185100_1 (sequence is synthesized)
cggcgcaggcggcgtcaagcgggggcggctgcagcaggaggcggcggcgaccggctcccgcgtgacggtggtgctgggcgcgcagtggggggacgagggcaaaggcaaggtggtggacct

SEQ ID NO: 666769 - DNA, 120 bp, Artificial Sequence
  ENSG00000185100_2 (sequence is synthesized)
gctggccacggacgccgacatcatcagccgctgccaggggggcaacaacgccggccacacggtggtggtggatgggaaagagtacgacttccacctgctgcccagcggcatcatcaacac

SEQ ID NO: 666770 - DNA, 120 bp, Artificial Sequence
  ENSG00000185100_3 (sequence is synthesized)
caaggccgtgtccttcattggcaacggggtggtcatccacttgccaggcttgtttgaggaagcagagaagaatgaaaagaaaggcctgaaggactgggagaagaggctcatcatctctga

SEQ ID NO: 666771 - DNA, 120 bp, Artificial Sequence
  ENSG00000185100_4 (sequence is synthesized)
cagagcccaccttgtgtttgattttcaccaggctgtcgacggacttcaggaagtgcagcgccaggcacaagaggggaagaatataggcaccaccaagaagggaatcggaccaacctactc

SEQ ID NO: 666772 - DNA, 120 bp, Artificial Sequence
  ENSG00000185100_5 (sequence is synthesized)
ttccaaagctgcccggacaggcctccgcatctgcgacctcctgtcagattttgatgagttttcctccagattcaagaacctggcccaccagcaccagtcgatgttccccaccctggaaat

SEQ ID NO: 666773 - DNA, 120 bp, Artificial Sequence
  ENSG00000185100_6 (sequence is synthesized)
agacattgaaggccaactcaaaaggctcaagggctttgctgagcggatcagacccatggtccgagatggtgtttactttatgtatgaggcactccacggcccccccaagaagatcctggt

SEQ ID NO: 666774 - DNA, 120 bp, Artificial Sequence
  ENSG00000185100_7 (sequence is synthesized)
gcacgggcctgggcatccccccgcagaacataggtgacgtgtatggcgtggtgaaagcctataccacacgtgtgggcatcggggccttccccaccgagcagatcaacgagattggaggcc

SEQ ID NO: 666775 - DNA, 120 bp, Artificial Sequence
  ENSG00000185100_8 (sequence is synthesized)
tgctgcagacccgcggccacgagtggggagtgaccacaggcaggaagaggcgctgcggctggctcgacctgatgattctaagatatgctcacatggtcaacggattcactgcgctggccc

SEQ ID NO: 666776 - DNA, 120 bp, Artificial Sequence
  ENSG00000185100_9 (sequence is synthesized)
tgacgaagctggacatcctggacgtactgggtgaggttaaagtcggtgtctcatacaagctgaacgggaaaaggattccctatttcccagctaaccaggagatgcttcagaaggtcgaag

SEQ ID NO: 666777 - DNA, 120 bp, Artificial Sequence
  ENSG00000185100_10 (sequence is synthesized)
ttgagtatgaaacgctgcctgggtggaaagcagacaccacaggcgccaggaggtgggaggacctgcccccacaggcccagaactacatccgctttgtggagaatcacgtgggagtcgcag

SEQ ID NO: 666778 - DNA, 120 bp, Artificial Sequence
  ENSG00000185100_11 (sequence is synthesized)
tcaaatgggttggtgttggcaagtcaagagagtcgatgatccagctgttttagtcacagactgagctgatcccaacaggccctggcagcgtctggacttgtgtaaacagcagcagtcacg

SEQ ID NO: 666779 - DNA, 120 bp, Artificial Sequence
  ENSG00000185100_12 (sequence is synthesized)
ttcctcggccgccacaaccaacaccaaagcaggaaaaccattttctgtacttttatatttctgttcaacctgttggtttctacaatgattttaaacattggaaagccagccttgtgtata

SEQ ID NO: 666780 - DNA, 120 bp, Artificial Sequence
  ENSG00000185100_13 (sequence is synthesized)
tttttaaaaattatattcaaaatgagccaaagtgctcagagaccttctatgacacattagtgtcacatggttgcgtgtccagccgaagcagtgtaataaacatctccaatggccactgaa

SEQ ID NO: 666781 - DNA, 120 bp, Artificial Sequence
  ENSG00000185100_14 (sequence is synthesized)
ctgatctcgacccttccacaaagcacggcccagaggttagcggtatggaggcctgtgcagggtgtgttggagccagccgtaggagcacaaactcccaccccagggctgatgccgtgaagg

SEQ ID NO: 666782 - DNA, 120 bp, Artificial Sequence
  ENSG00000185100_15 (sequence is synthesized)
atgagggcatcccggcacttgtgagaggttaaaatgcttcatgtggagagcggaagtacccaggacgaaaggatgcactgtcatcctgctagaaggacggcagcatgggtgccggcctgt

SEQ ID NO: 666783 - DNA, 120 bp, Artificial Sequence
  ENSG00000185100_16 (sequence is synthesized)
cgtcgtggggaggagcgtggcgtcggcatggtggggaggagctgtggggtggcaacccagaggcaaggaggtgggcagaggcccacgaacctggccctgaccctcagctcgtccccagct

SEQ ID NO: 666784 - DNA, 120 bp, Artificial Sequence
  ENSG00000185100_17 (sequence is synthesized)
tcgtccccagctcacagcacagccctcccctggctgcctccaaggagtctccagttactgagtggccactccgtgccagctcagcccacccctcaccttcccagtgcctgtggaggccca

SEQ ID NO: 666785 - DNA, 120 bp, Artificial Sequence
  ENSG00000185100_18 (sequence is synthesized)
actagggtgacgctgggagaggagagggcttggaggagccacgggtcaaatgcaggaggccacacctgcctgcccaggaggactgcaggagccggatccttaacacctggaggggagcgg

SEQ ID NO: 666786 - DNA, 120 bp, Artificial Sequence
  ENSG00000185100_19 (sequence is synthesized)
tggaatagataggacctgtgacttctcagagaggggtgagttcccacgttcacaggacacagggcaagcagcttgtctccagtgaccagcctccatcatggcttttgcctctcacgggtt

SEQ ID NO: 666787 - DNA, 120 bp, Artificial Sequence
  ENSG00000185100_20 (sequence is synthesized)
tctccccacagcgttccccaggaggcctggctgggcaggggtggctgtaggccccttccagtgttttgggaatggctcagggggacagactactcgcctgggaccctgggggaccttcag

SEQ ID NO: 666788 - DNA, 120 bp, Artificial Sequence
  ENSG00000185100_21 (sequence is synthesized)
ctgccttgaggaaaaggcccacctgcagggagccacgggaggcacacaggagttagtggatgcggtcggctctggaagatgtaaagctctatgcggacgtacaggatgactatttcatct

SEQ ID NO: 666789 - DNA, 120 bp, Artificial Sequence
  ENSG00000185100_22 (sequence is synthesized)
gagaaaatacgctttgtggcgagatttttaagacctaaccgggatccctgctccatgcaccccttcttctggaaagcatgaaggaggtgccattttcctgggtttcacaggtttcagttt

SEQ ID NO: 666790 - DNA, 120 bp, Artificial Sequence
  ENSG00000185100_23 (sequence is synthesized)
cgtgtgcgtctggatgtgccccctcgacctcggtccagggtcatgttctgaccctgttccccacaatggcttcctcctcagcagccctgggcgagctgctcctggctggtctccactcag

SEQ ID NO: 666791 - DNA, 120 bp, Artificial Sequence
  ENSG00000185100_24 (sequence is synthesized)
cagatctttgtaggccacacagggccacttggctacaggagccatgtgtgtccttgcaggcggtgtccctgaccctcctgacccttgacctttgagaggctgcacttgtgaggactgcaa

SEQ ID NO: 666792 - DNA, 120 bp, Artificial Sequence
  ENSG00000185100_25 (sequence is synthesized)
ctgtaagggtggttgtcttctaccaggagccacagagtcctgcacagggccgggatccctgccctctgggagttgatgctcttggggtgggaggacacagatgcttcaggatcccttagt

SEQ ID NO: 666793 - DNA, 120 bp, Artificial Sequence
  ENSG00000185100_26 (sequence is synthesized)
gcttcaggattctagagtctcagaatttccaagccaaggcttggagtgcctcagctgatgtcacagtggaggttctagcagagtgggtagcacatatgtgtcatgtccctctggtctgga

SEQ ID NO: 666794 - DNA, 120 bp, Artificial Sequence
  ENSG00000185100_27 (sequence is synthesized)
aggcgtgtagtgtctgagccccactgctgtcccctgcttaccacccaacactgagaaaatcaaactgggccacgtgcccacttgctgccttccttgcagctgagtccctaggcaaggagg

SEQ ID NO: 666795 - DNA, 120 bp, Artificial Sequence
  ENSG00000185100_28 (sequence is synthesized)
ccctggatgggggtggccgtgtcaccaaatatccgcttccctggtgataggaggtctgtgggccccactcatctcctgtgtgcttcccccagctaaccaggagatgcttcagaaggtcga

SEQ ID NO: 666796 - DNA, 120 bp, Artificial Sequence
  ENSG00000185100_29 (sequence is synthesized)
attctaccagtctggacaaacgtatgctgtgtatctgccactatagtatcgtacagaattttttactgtcctaaaacccccgagctccacccatttcattcatctctcccccctcaaccc

SEQ ID NO: 666797 - DNA, 120 bp, Artificial Sequence
  ENSG00000185100_30 (sequence is synthesized)
tcggcagccactcaccttatgctgtctcctcagttttgccttttccagaatctcagagttggaattgtacagtatgtcgccttttcggattggcttctttcactcagtaacatgcattta

SEQ ID NO: 666798 - DNA, 120 bp, Artificial Sequence
  ENSG00000185100_31 (sequence is synthesized)
actttcctctatgtcttttcatggcttgaaagctcatttcttttcagtgttgaataatactccactgtctggatggaccacagttgatttctccttttgtttactgatgggcctcttgac

SEQ ID NO: 666799 - DNA, 120 bp, Artificial Sequence
  ENSG00000185100_32 (sequence is synthesized)
tgctgccgagtttcggcgattatgaatagagctgcacatctacgcgcaggtttctgcagggacatcaatttccagctccttaaataccgaggaatgtgttttgcatccatcaccaccatc

SEQ ID NO: 666800 - DNA, 120 bp, Artificial Sequence
  ENSG00000185100_33 (sequence is synthesized)
cacctccagaactttcttatcttcacacactgaaatgctgaaatatcaaataactccccagtctccctctcccagcccctggcgcctcccattctactttctatctctatgaatttcact

SEQ ID NO: 666801 - DNA, 120 bp, Artificial Sequence
  ENSG00000185100_34 (sequence is synthesized)
tttccagggacttcatataagcggaatcatcctgtttgtgtccgtttgtaactgccttatttcactcagcataatgtcttcgaggcctgtgtcagaatttccttccttttttaaggctga

SEQ ID NO: 666802 - DNA, 120 bp, Artificial Sequence
  ENSG00000185100_35 (sequence is synthesized)
atactcttccatcgtatgggtagaccgtgttctgcttacccattcatctgtcaatggacagctcttggctactctgaataatgctgctatgaacataggtgtgcccatttcatgctgggt

SEQ ID NO: 666803 - DNA, 78 bp, Artificial Sequence
  ENSG00000185100_36 (sequence is synthesized)
atgctgctatgaacataggtgtgcccatttcatgctgggttgttttttgttgttgtttgtttggtgcagtggcaggat

SEQ ID NO: 666804 - DNA, 88 bp, Artificial Sequence
  ENSG00000185100_37 (sequence is synthesized)
cccatttcatgctgttcttaatgtatgttttccagtgtctgggacacaactctgtctctcatgcctctgtctctcatgcaggcaacgg

SEQ ID NO: 666805 - DNA, 120 bp, Artificial Sequence
  ENSG00000185100_38 (sequence is synthesized)
gatcacttaatctctcttttccactcagtgtaaatcagcagtccctaacttttttggcaccagggaccagtttggcgggagatgattttcccacagacagggcaggtggcaggggtgtgg

SEQ ID NO: 666806 - DNA, 120 bp, Artificial Sequence
  ENSG00000185100_39 (sequence is synthesized)
ggcaggtggcaggggtgtggcggcggatggtttcgggatgaaactgtcccacctctgatcttcaggcattcgattctcacaaggagcatgtggcctagatccctcgcatgcacagttcac

SEQ ID NO: 666807 - DNA, 120 bp, Artificial Sequence
  ENSG00000185100_40 (sequence is synthesized)
gagaattgaatgacaggaggtggagctcaggccgtaatgctagcttgcccgccactcatctgctctgcagcccaattccaaacaggccaccaaccagtactggtccacagcccagggact

SEQ ID NO: 666808 - DNA, 120 bp, Artificial Sequence
  ENSG00000185101_0 (sequence is synthesized)
acgcggaagtcaggtaggagcacccgccgctggcagccactctcctggccgccaaaccccagctggaactccggccacagccagcatgcagggcgaagagagcctccggatcctggtgga

SEQ ID NO: 666809 - DNA, 120 bp, Artificial Sequence
  ENSG00000185101_1 (sequence is synthesized)
gcccgaaggggacagcttcccgctgatggagatcagcacctgtgagaccgaggcctccgagcagtgggactatgtcctcgtggcccaacgtcacacccagagagacccccggcaggcgcg

SEQ ID NO: 666810 - DNA, 120 bp, Artificial Sequence
  ENSG00000185101_2 (sequence is synthesized)
gcagcaacagttcctggaggagctcaggagaaagggcttccacattaaggtgatccgggaccagaaacaggtcttctttgggatccgtgctgacaacagtgtctttggcctgtaccgcac

SEQ ID NO: 666811 - DNA, 120 bp, Artificial Sequence
  ENSG00000185101_3 (sequence is synthesized)
tctcctcctggagcctgaggggcctgccccccacgccgagctggccgcgccgaccaccatcccggtcaccacgagtctcagaatccgaatcgtgaacttcgttgtcatgaacaacaagac

SEQ ID NO: 666812 - DNA, 120 bp, Artificial Sequence
  ENSG00000185101_4 (sequence is synthesized)
ctcggctggtgagaccttcgaggatctgatgaaggacggggtctttgaggccaggttccccctgcacaagggggagggacgcctgaagaagacgtgggcgcggtggagacacatgttccg

SEQ ID NO: 666813 - DNA, 120 bp, Artificial Sequence
  ENSG00000185101_5 (sequence is synthesized)
ggagcagccagttgatgaaatcaggaactactttggggaaaaggtggccctgtacttcgtctggctgggctggtacacctacatgctggtgccggccgccctgacgggcctcttagtctt

SEQ ID NO: 666814 - DNA, 120 bp, Artificial Sequence
  ENSG00000185101_6 (sequence is synthesized)
tctgagcggattctcgctgtttgaggccagccagatcagcaaggagatctgtgaggcccacgacatcctcatgtgtcccctcggcgaccacagccgcaggtaccagcggctctcggaaac

SEQ ID NO: 666815 - DNA, 120 bp, Artificial Sequence
  ENSG00000185101_7 (sequence is synthesized)
ctgcacttttgccaagctcacccacctctttgacaatgatggcacggtggtgttcgccatcttcatggctctctgggccacggtgttcctggagatctggaagcggcagcgcgcccgcgt

SEQ ID NO: 666816 - DNA, 120 bp, Artificial Sequence
  ENSG00000185101_8 (sequence is synthesized)
ggtcctgcactgggacctgtacgtgtgggacgaggaacaggaggaaatggcacttcagctcattaactgccccgactacaagctccggccataccagcactcctacctacgcagcaccgt

SEQ ID NO: 666817 - DNA, 120 bp, Artificial Sequence
  ENSG00000185101_9 (sequence is synthesized)
catcctcgtcctgaccctgctcatgatctgcctcatgatcggcatggcccacgtcctggtggtctaccgcgtcctggcctccgcgctcttcagcagctcggccgtgcccttcctggagga

SEQ ID NO: 666818 - DNA, 120 bp, Artificial Sequence
  ENSG00000185101_10 (sequence is synthesized)
gcaggtgaccacggccgtggtggtgaccggggctctggtgcactatgtgaccatcatcatcatgaccaagatcaacaggtgcgtggccctgaagctttgtgacttcgagatgcccaggac

SEQ ID NO: 666819 - DNA, 120 bp, Artificial Sequence
  ENSG00000185101_11 (sequence is synthesized)
gccaccccgggaagtccacgcgcctggcgggcttgtggaagctggaagagtgccacgccagcggctgcatgatggacctcttcgtgcagatggccatcatcatgggcctgaagcagacgc

SEQ ID NO: 666820 - DNA, 120 bp, Artificial Sequence
  ENSG00000185101_12 (sequence is synthesized)
tcagcaactgcgtcgagtacctggtcccgtgggtgacccacaagtgccgctctctgcgggcctccgagtccgggcacctgccccgggaccccgagctcagggactggcggcgcaactacc

SEQ ID NO: 666821 - DNA, 120 bp, Artificial Sequence
  ENSG00000185101_13 (sequence is synthesized)
ttctgaacccggtcaacaccttcagcctgttcgacgagttcatggagatgatgatccagtacggcttcaccaccatcttcgtggccgccttcccgctggcgccgctgctcgcgctcttca

SEQ ID NO: 666822 - DNA, 120 bp, Artificial Sequence
  ENSG00000185101_14 (sequence is synthesized)
gcaacctcgtggagatccgcctggacgccatcaagatggtctggttgcagcggcgcctggtgccgcgcaaggccaaggacatcgggacctggctgcaggtgctggagaccatcggtgtgc

SEQ ID NO: 666823 - DNA, 120 bp, Artificial Sequence
  ENSG00000185101_15 (sequence is synthesized)
tggcggtcattgccaatgggatggtcattgccttcacatctgagttcatcccccgagtggtctacaagtaccgctatagcccatgcctgaaagaaggcaactctactgtcgactgcctca

SEQ ID NO: 666824 - DNA, 120 bp, Artificial Sequence
  ENSG00000185101_16 (sequence is synthesized)
agggctacgtcaaccacagcctgtccgtcttccacaccaaggacttccaggaccctgatgggattgagggctcagaaaacgtgactctgtgcagatacagggactaccgcaatccccccg

SEQ ID NO: 666825 - DNA, 120 bp, Artificial Sequence
  ENSG00000185101_17 (sequence is synthesized)
attacaacttctccgagcagttctggttcctcctggccatccgcctggccttcgtcatcctctttgagcacgtggccttgtgcatcaagctcatcgccgcctggttcgtgcccgacatcc

SEQ ID NO: 666826 - DNA, 120 bp, Artificial Sequence
  ENSG00000185101_18 (sequence is synthesized)
ctcagtcggtgaagaacaaggttctggaggtgaagtaccagaggctgcgtgagaagatgtggcatggaaggcagaggctgggtggggtgggggcaggctctcggcccccaatgcctgccc

SEQ ID NO: 666827 - DNA, 120 bp, Artificial Sequence
  ENSG00000185101_19 (sequence is synthesized)
atcccaccccagcatccatcttcagtgccaggagcacagacgtgtagggccagagcccgtccagaggccaccaggagctgagacagtgccaccaccagcacctcccacaagcccaccgct

SEQ ID NO: 666828 - DNA, 120 bp, Artificial Sequence
  ENSG00000185101_20 (sequence is synthesized)
gtgcgtgttgaggggtgctgtgagaaggctgtgcccatgtggggccgcaggaatcccctgtatgttcagggctgtgagctgccaccctattccgcctgctccgtctttgtgggggctctc

SEQ ID NO: 666829 - DNA, 120 bp, Artificial Sequence
  ENSG00000185101_21 (sequence is synthesized)
aggcttggcacagccctgacttgaactctgggtgaccctgggcacccacagaactgggagtgagggctcctcaggcagccacaaggcaggaaaactggcgcaaatttcctgggcctccct

SEQ ID NO: 666830 - DNA, 120 bp, Artificial Sequence
  ENSG00000185101_22 (sequence is synthesized)
ctgacttctgggcgccagatcctgccgtgcccccatcctggctgttgggggtgtcctgagcccacctcgctggcctgttcccttcagccaacccgtttctgcagtaaaattaagcctgtc

SEQ ID NO: 666831 - DNA, 120 bp, Artificial Sequence
  ENSG00000185101_23 (sequence is synthesized)
cagaccgggcaggagacagtgccaggctccaggcgtcgccaaggcaggacagccgtgtggtctcagggcaggggccacaggtgtgagacccactggctgtgtgagcctcagcttccccat

SEQ ID NO: 666832 - DNA, 120 bp, Artificial Sequence
  ENSG00000185101_24 (sequence is synthesized)
cccattaaaggatcacggtggttctcaacgctcagagcattctgagggctccgtgtggctgcctgtgttcctggggacacagtcacagccagccttaggggttgggcaggatttgcagag

SEQ ID NO: 666833 - DNA, 120 bp, Artificial Sequence
  ENSG00000185101_25 (sequence is synthesized)
gcccaggggcccctcctggatcaaggccagtgtctcttgaagacccctcctctccagttccgatgccccttcctggacaccgtccctggcctccaaggcaaagacccagaggcccagcag

SEQ ID NO: 666834 - DNA, 120 bp, Artificial Sequence
  ENSG00000185101_26 (sequence is synthesized)
ggacaccctcctcgctccctaaggccctgcttctccccagtcctccagcccaggagggagcctccaagcctggccctccatgcccccatgacctgcccagccccatccaggccccgcagg

SEQ ID NO: 666835 - DNA, 120 bp, Artificial Sequence
  ENSG00000185101_27 (sequence is synthesized)
gctcagccagggcctgcttggtggaccggccaaggacactcctggcattggttacgaggcagtggagggcacccgtgaagagagctatgggtcttggggagtcgcgaggcggcatcaaag

SEQ ID NO: 666836 - DNA, 120 bp, Artificial Sequence
  ENSG00000185101_28 (sequence is synthesized)
gaggggaggtggcttgagggggctgacgggagcaggcttggggggcgcatacctgcgacgtgccctggggtgtccaggagccatgtctgtaggcacagggggaggctgggagcccggctc

SEQ ID NO: 666837 - DNA, 120 bp, Artificial Sequence
  ENSG00000185101_29 (sequence is synthesized)
tgccgtcggacgcttggctgtgccgcttcatggctgtgtggccttgggacgttccctttcctgagccccagtctctgctctgcacagtggaacagaacagctccagggtataaggagggt

SEQ ID NO: 666838 - DNA, 120 bp, Artificial Sequence
  ENSG00000185101_30 (sequence is synthesized)
gtgtgcggatgcaggctggggtgtgctctggacacatggggcccgcaggtgggaggtgtggttgcaggtgcgggctgtggtctgggcttctgggagggacgggctgggaggagaaggagc

SEQ ID NO: 666839 - DNA, 120 bp, Artificial Sequence
  ENSG00000185101_31 (sequence is synthesized)
ccccagcccagcctcatcctggacgccgtggggcaggccaggccctgggagcactttaaggagggtgcggggtgggctcccgggtgagttgtggattctgggctctggtcagggctggca

SEQ ID NO: 666840 - DNA, 120 bp, Artificial Sequence
  ENSG00000185101_32 (sequence is synthesized)
ggctgggggctctgccaggacagggaggggcctgggcctggccagaccagagggcaggttgagacctggaggcagggtccactgtggtcacacggggccaccctgctctggctcttgagt

SEQ ID NO: 666841 - DNA, 120 bp, Artificial Sequence
  ENSG00000185101_33 (sequence is synthesized)
ctcagaatccgaatcgtgaacttcgttgtcatgaacaacaagacctcggctggtggtaagggcaggggtggggcactgacaggggcgctgcgggcagggttctcccagcacctcactccc

SEQ ID NO: 666842 - DNA, 120 bp, Artificial Sequence
  ENSG00000185101_34 (sequence is synthesized)
cctgactcgtgaacccctgtgacccagagaccttcgaggatctgatgaaggacggggtctttgaggccaggttccccctgcacaaggtgaggggtgggctggcctggagagggccctggg

SEQ ID NO: 666843 - DNA, 120 bp, Artificial Sequence
  ENSG00000185101_35 (sequence is synthesized)
cctccgggtccaccccagggcctgcggaagatgggaacggtgcatccacccgaagcgggggagatcaaggcctggagccctgcagagctgctcagctttccccacagggctgacggggag

SEQ ID NO: 666844 - DNA, 120 bp, Artificial Sequence
  ENSG00000185101_36 (sequence is synthesized)
gcccagccccagcccacccgcccatttcctcagcccacctgcccccttccccggctttcctgcctccctccctggctcacctgcccccctccccagctcacccacctcctctccggccca

SEQ ID NO: 666845 - DNA, 120 bp, Artificial Sequence
  ENSG00000185101_37 (sequence is synthesized)
tgtgggcttcccgctggccaggccggctcacctggaaaaaataatctctcggatctcaggccgcagacagcccccagcccttctccgacggcctcggatgcgggttgagcctgggtggga

SEQ ID NO: 666846 - DNA, 120 bp, Artificial Sequence
  ENSG00000185101_38 (sequence is synthesized)
gggtaccaggagtgggcggggccgagcgctttgtaggctcctcccacaaaccgtcaggatctcagaggggcttgacgcccccaagggggacccaggttctgccagtggctggggctggaa

SEQ ID NO: 666847 - DNA, 120 bp, Artificial Sequence
  ENSG00000185101_39 (sequence is synthesized)
cagagcagccggcctctgtcccaagactggccacgctgagacggacaggcagcaggggagcgacgggagctggggcgctggatgtggggaaagggagagaggtgttagggaggcccccag

SEQ ID NO: 666848 - DNA, 120 bp, Artificial Sequence
  ENSG00000185101_40 (sequence is synthesized)
tctcgggcccaggttacaaggtcttaccctggggtgggaacccaggaggtggagtggctggggggcacagctgagaagttcaggaagatggaggatgaggattcccaggttcctccctgt

SEQ ID NO: 666849 - DNA, 120 bp, Artificial Sequence
  ENSG00000185101_41 (sequence is synthesized)
ccatgtcagggtgaggggtgcaggagcgcagaggccatgctctgccatggctggggacttccttgtgaatactgcagccctagggctgcaaggggacaccacgcacagagacacggcagg

SEQ ID NO: 666850 - DNA, 120 bp, Artificial Sequence
  ENSG00000185101_42 (sequence is synthesized)
ccccgtgttggccgggggtgggggtgagggcagaaccagccgagggacgctgagtcagaccgcttgcccactgctctggtgcagggacctggctgcaggtgctggagaccatcggtgtgc

SEQ ID NO: 666851 - DNA, 120 bp, Artificial Sequence
  ENSG00000185101_43 (sequence is synthesized)
ggtgagttgctgcgggacgcctctgcggggccaggggaagtgccagcccaagctccgaggtccacctggcgtagtgcagtgatgcccctccttgcccccgccgcagccacggtgttcctg

SEQ ID NO: 666852 - DNA, 120 bp, Artificial Sequence
  ENSG00000185101_44 (sequence is synthesized)
ggcaggccctgggctggaggtcagggataactggccaggaccgcagttgggggtgaagttcccagacctggctgcctcctgagtaggccctgccagaacggctccctcccgatgtgaggt

SEQ ID NO: 666853 - DNA, 120 bp, Artificial Sequence
  ENSG00000185101_45 (sequence is synthesized)
tccgcatgtcctcttctgatttatccagctctctgacctcgaggagccaccaaactgcagactgggtccccagggccagtctctggcagggaaagtggctggtgatgcccagagtcccca

SEQ ID NO: 666854 - DNA, 120 bp, Artificial Sequence
  ENSG00000185101_46 (sequence is synthesized)
tggcgtggcccccacctcactgtttgctccacaacgcaggctagaagcactctggggcctgaaggggccgccctggaagcccaccccaccccacactcctctcccctctccccagctgcc

SEQ ID NO: 666855 - DNA, 120 bp, Artificial Sequence
  ENSG00000185104_0 (sequence is synthesized)
aggggcggaggcggcggccagggaggaagcggaggaggcggaggcggccgcggcgttcgcccgcccgctcgctcgctcggtttccccgcccccgccgggcttaacgccgctgaaggtatc

SEQ ID NO: 666856 - DNA, 120 bp, Artificial Sequence
  ENSG00000185104_1 (sequence is synthesized)
tatccgggtgcgcgctgtcgcaacctgccctcatcctggcccgcgactgtaagaccggacccacatccagaccaatcttcctgtccgggctgctgcgacgcgggctccgcaggttgcagg

SEQ ID NO: 666857 - DNA, 120 bp, Artificial Sequence
  ENSG00000185104_2 (sequence is synthesized)
ctgtccgggctgctgcgacgcgggctccgcaggttgcaggcgggcggccggggcgcctgaaggttaccgagtgcatgagcgcctagcgcttcccgcgctgccccgcccgctggcccgccg

SEQ ID NO: 666858 - DNA, 120 bp, Artificial Sequence
  ENSG00000185104_3 (sequence is synthesized)
cggcggcggcggcggtggcggcgacggtcgcaggaggtgccgtctgcctcccaggtgcgcgcttcgctcccggagccgcggaactcggcggccgccatggcgtccaacatggaccgggag

SEQ ID NO: 666859 - DNA, 120 bp, Artificial Sequence
  ENSG00000185104_4 (sequence is synthesized)
atgatcctggcggattttcaggcatgtactggcattgaaaacattgacgaagctattacattgcttgaacaaaataattgggacttagtggcagctatcaatggtgtaataccacaggaa

SEQ ID NO: 666860 - DNA, 120 bp, Artificial Sequence
  ENSG00000185104_5 (sequence is synthesized)
aatggcattctacaaagtgaatatggaggtgagaccataccaggacctgcatttaatccagcaagtcatccagcttcagctcctacttcctcttcttcttcagcgtttcgacctgtaatg

SEQ ID NO: 666861 - DNA, 120 bp, Artificial Sequence
  ENSG00000185104_6 (sequence is synthesized)
ccatccaggcagattgtagaaaggcaacctcggatgctggacttcagggttgaatacagagacagaaatgttgatgtggtacttgaagacacctgtactgttggagagattaaacagatt

SEQ ID NO: 666862 - DNA, 120 bp, Artificial Sequence
  ENSG00000185104_7 (sequence is synthesized)
ctagaaaatgaacttcagatacctgtgtccaaaatgctgttaaaaggctggaagacgggagatgtggaagacagtacggtcctaaaatctctacacttgccaaaaaacaacagtctttat

SEQ ID NO: 666863 - DNA, 120 bp, Artificial Sequence
  ENSG00000185104_8 (sequence is synthesized)
gtccttacaccagatttgccaccaccttcatcatctagtcatgctggtgccctgcaggagtcattaaatcaaaacttcatgctgatcatcacccaccgagaagtccagcgggagtacaac

SEQ ID NO: 666864 - DNA, 120 bp, Artificial Sequence
  ENSG00000185104_9 (sequence is synthesized)
ctgaacttctcaggaagcagtactattcaagaggtaaagagaaatgtgtatgaccttacaagtatccccgttcgccaccaattatgggagggctggccaacttctgctacagacgactca

SEQ ID NO: 666865 - DNA, 120 bp, Artificial Sequence
  ENSG00000185104_10 (sequence is synthesized)
atgtgtcttgctgaatcagggctctcttatccctgccatcgacttacagtgggaagaagatcttcacctgcacagacccgggaacagtcggaagaacaaatcaccgatgttcatatggtt

SEQ ID NO: 666866 - DNA, 120 bp, Artificial Sequence
  ENSG00000185104_11 (sequence is synthesized)
agtgatagcgatggagatgactttgaagatgctacagaatttggggtggatgatggagaagtatttggcatggcgtcatctgccttgagaaaatctccaatgatgccagaaaacgcagaa

SEQ ID NO: 666867 - DNA, 120 bp, Artificial Sequence
  ENSG00000185104_12 (sequence is synthesized)
aatgaaggagatgccttattacaatttacagcagagttttcttcaagatatggtgattgccatcctgtattttttattggctcattagaagctgcttttcaagaggccttctatgtgaaa

SEQ ID NO: 666868 - DNA, 120 bp, Artificial Sequence
  ENSG00000185104_13 (sequence is synthesized)
gcccgagatagaaagcttcttgctatctacctccaccatgatgaaagtgtgttaaccaacgtgttctgctcacaaatgctttgtgctgaatccattgtttcttatctgagtcaaaatttt

SEQ ID NO: 666869 - DNA, 120 bp, Artificial Sequence
  ENSG00000185104_14 (sequence is synthesized)
ataacctgggcttgggatctgacaaaggactccaacagagcaagatttctcactatgtgcaatagacactttggcagtgttgtggcacaaaccattcggactcaaaaaacggatcagttt

SEQ ID NO: 666870 - DNA, 120 bp, Artificial Sequence
  ENSG00000185104_15 (sequence is synthesized)
ccgcttttcctgattattatgggaaagcgatcatctaatgaagtgttgaatgtgatacaagggaacacaacagtagatgagttaatgatgagactcatggctgcaatggagatcttcaca

SEQ ID NO: 666871 - DNA, 120 bp, Artificial Sequence
  ENSG00000185104_16 (sequence is synthesized)
gcccaacaacaggaagatataaaggacgaggatgaacgtgaagccagagaaaatgtgaagagagagcaagatgaggcctatcgcctttcacttgaggctgacagagcaaagagggaagct

SEQ ID NO: 666872 - DNA, 120 bp, Artificial Sequence
  ENSG00000185104_17 (sequence is synthesized)
cacgagagagagatggcagaacagtttcgtttggagcagattcgcaaagaacaagaagaggaacgtgaggccatccggctgtccttagagcaagccctgcctcctgagccaaaggaagaa

SEQ ID NO: 666873 - DNA, 120 bp, Artificial Sequence
  ENSG00000185104_18 (sequence is synthesized)
aatgctgagcctgtgagcaaactgcggatccggacccccagtggcgagttcttggagcggcgtttcctggccagcaacaagctccagattgtctttgattttgtagcttccaaaggattt

SEQ ID NO: 666874 - DNA, 120 bp, Artificial Sequence
  ENSG00000185104_19 (sequence is synthesized)
ccatgggatgagtacaagttactgagcacctttcctaggagagacgtaactcaactggacccaaataaatcattattggaggtaaagttgttccctcaagaaacccttttccttgaagca

SEQ ID NO: 666875 - DNA, 120 bp, Artificial Sequence
  ENSG00000185104_20 (sequence is synthesized)
aaagagtaaacacggcccagcggtggaaccagccattccttgacaagccagcagcctgcgtcaggagaagggctcctcgccaacccacccacacgctcgtctcactcaattcaatgtcac

SEQ ID NO: 666876 - DNA, 120 bp, Artificial Sequence
  ENSG00000185104_21 (sequence is synthesized)
acttctgcctcttgcaaaattgctggaaaaagtaataataaatatagctacttaagatttcccatccatgagtatatattcccaacccttattacagagaattacaactctgccaccctc

SEQ ID NO: 666877 - DNA, 120 bp, Artificial Sequence
  ENSG00000185104_22 (sequence is synthesized)
ccctaccccctgcacttcaccctccttcaatgacgaatgcattgttcaagtgtgagtgatcactaaatagaatttttacctctccagtgcccatcttttccccacagtgtctaggacagt

SEQ ID NO: 666878 - DNA, 120 bp, Artificial Sequence
  ENSG00000185104_23 (sequence is synthesized)
tctgtctgttctgtgacaccaggatgctgtatatttgatatatgtctttttattttcatgactgaatttctacttcatcacctaattttaaggggcagagggaaaaaaagtcaaatgaga

SEQ ID NO: 666879 - DNA, 120 bp, Artificial Sequence
  ENSG00000185104_24 (sequence is synthesized)
cattgtcggcatggagattaaacattgtaggaaaaaagtataccatttttgttagaactttctgatggctttactaagatgtcaggttttgtttgaggactgaatttgacatatatgcaa

SEQ ID NO: 666880 - DNA, 120 bp, Artificial Sequence
  ENSG00000185104_25 (sequence is synthesized)
gatatttatttactgctgctgccttgggtctccaggttctacctaggaggtatttgctgttccattgcagcatagggaaactgttcaagcacacaatgtgaatgttgagatcatgtgcag

SEQ ID NO: 666881 - DNA, 120 bp, Artificial Sequence
  ENSG00000185104_26 (sequence is synthesized)
agaggccagtaccaaaacttcagtatctggcccaatggcaagaggctactgttaggtttgcatttgggcagttagaacctcacagataccagctcccaagttgctagtccatcagtgtaa

SEQ ID NO: 666882 - DNA, 120 bp, Artificial Sequence
  ENSG00000185104_27 (sequence is synthesized)
actgaacacaattctctcttgctttctctctctctactccctcacacatttggaccttgtcacttggtgtttaagcaccttgcctatcaacaaaatctgatgagcagccccatggactct

SEQ ID NO: 666883 - DNA, 120 bp, Artificial Sequence
  ENSG00000185104_28 (sequence is synthesized)
gacttcatatgttgaagagagcaaacttggggactcaactcagaagacatgtgttgcctgaaacctgcatataataatttttgatttgatttagtaagtgtggatttttcttaatctaca

SEQ ID NO: 666884 - DNA, 120 bp, Artificial Sequence
  ENSG00000185104_29 (sequence is synthesized)
gatttggggtttggggtttagatcatgagaacaccgtttataccttcacagccaatgatttatttttagtcttgaaatatttctccatatctgtttttgtgtcacctgtgggttttatcc

SEQ ID NO: 666885 - DNA, 120 bp, Artificial Sequence
  ENSG00000185104_30 (sequence is synthesized)
taggggttgggatcctgattttaacattttgtacttgtccaaaaaagagttcaaatgctgggtttgttcccccagcctcggccaaggggttctcagaagattctaaccaaagctggagat

SEQ ID NO: 666886 - DNA, 120 bp, Artificial Sequence
  ENSG00000185104_31 (sequence is synthesized)
aggtctgctcattttccttctgcccagaagtggatgttggccaggaaaattacaccttgtgtcttctctgatgctccaaccagggacctctccagattactatctagcacagactagtgc

SEQ ID NO: 666887 - DNA, 120 bp, Artificial Sequence
  ENSG00000185104_32 (sequence is synthesized)
tacatctgcctaggtatgggctttctctggcagcaggggtctctctagggaggctgagagacccatgggtctcccttcaggggaagtgttcaggggagttcaaactgaacacttctctcc

SEQ ID NO: 666888 - DNA, 120 bp, Artificial Sequence
  ENSG00000185104_33 (sequence is synthesized)
agctctattcctatcttcctaatctaatggctctacaagatagtcatttccagtgctacagatgcaccagggcaccacctctttttttttctaggtagaccttgttctgtagctgctgtg

SEQ ID NO: 666889 - DNA, 120 bp, Artificial Sequence
  ENSG00000185104_34 (sequence is synthesized)
aagaagctgcagccctgaactcaggtcatactcaggaacagcagcaggggtgtgggtggggtttgagggaaggtactctgaattcaccttcatgtttaacctgttccatctgacttgggt

SEQ ID NO: 666890 - DNA, 120 bp, Artificial Sequence
  ENSG00000185104_35 (sequence is synthesized)
ttcttcattatattgttccctcccactcaccttcacttctgtattacaacaatatagactttactctaaagccaatttcatggaagttattaaatgctacttgaatgtgtgtgaagttga

SEQ ID NO: 666891 - DNA, 120 bp, Artificial Sequence
  ENSG00000185104_36 (sequence is synthesized)
tacaacctttttcaacctgccttagaaagttcttttggcctactcagccccatgatttcctatgctctaggcctcataactgggaaaggcctcagctaattgtcactgttcactcaggac

SEQ ID NO: 666892 - DNA, 120 bp, Artificial Sequence
  ENSG00000185104_37 (sequence is synthesized)
atgatggtctactaagcttcagacaaaaggccaaagcaattttatccttttcatacaagcagagcattaaaatgacttcccatcaccacagaaatagcagtgtcctctgcagttcttcct

SEQ ID NO: 666893 - DNA, 120 bp, Artificial Sequence
  ENSG00000185104_38 (sequence is synthesized)
cctaccattaggcttccttgggctttacatcccagcctccaggcccagtaagtgagtcagtctgaatatttgcttggcattcttatgcccaactgttgacagtgaagctccaggactctt

SEQ ID NO: 666894 - DNA, 120 bp, Artificial Sequence
  ENSG00000185104_39 (sequence is synthesized)
tgtcatcccccattccagtttactcccttgtgttcttggactgctggatgtgcagttgcagcattagtttgaaagttaaaggaagtgttgccaatttcccattgcctttaagaaggtgca

SEQ ID NO: 666895 - DNA, 120 bp, Artificial Sequence
  ENSG00000185104_40 (sequence is synthesized)
gggatttttttggaggtttctgatttcggatgttgccattctctggcactactagttttatagcacacacagatgttcatctctggattgtaagcatccagaatcaaagatgaatgagag

SEQ ID NO: 666896 - DNA, 120 bp, Artificial Sequence
  ENSG00000185104_41 (sequence is synthesized)
catcttttatggaatctacctttttaacataagagagtaagatttatgcttttatagattttacttgctgctgacattagaaacatattagtcacataataacatctaagtgtgctggtc

SEQ ID NO: 666897 - DNA, 120 bp, Artificial Sequence
  ENSG00000185104_42 (sequence is synthesized)
agtagaataggtttttaagaggtggagagctctggcaaatttcccccaaagtatagactttttcatttgaatgtgggagagggtcttaattctctccacaacagcatcactgattgacac

SEQ ID NO: 666898 - DNA, 120 bp, Artificial Sequence
  ENSG00000185104_43 (sequence is synthesized)
atttctacccatccttttctgtcccttagccatccagtcctgggtccccacaagtggatgggacttggagtctttagttcagtccaggagtaactcatataggcattgcacattatagtc

SEQ ID NO: 666899 - DNA, 120 bp, Artificial Sequence
  ENSG00000185104_44 (sequence is synthesized)
tgtgtaaccctttcacctgtattttctcttttgatcctttttaaaattcttagaggaagagagatcttcacatacatataaccacagccacatacacacacattccagagacttcagtgt

SEQ ID NO: 666900 - DNA, 120 bp, Artificial Sequence
  ENSG00000185104_45 (sequence is synthesized)
cttccaagttgaacctctcttctgccacttagtagctgcgtgaccttaaggtaagtaacctctctgaacctcagtgtccttacaacattctgatagcactttgcaattggacacaccttt

SEQ ID NO: 666901 - DNA, 120 bp, Artificial Sequence
  ENSG00000185104_46 (sequence is synthesized)
cacacatcataatagtctcccgctatgagggaagcagggcagagatgatgattccatttttgcacaaggggcttagaggatagtggcttgcctaaaatcacacagcatgtcagtagaagg

SEQ ID NO: 666902 - DNA, 90 bp, Artificial Sequence
  ENSG00000185104_47 (sequence is synthesized)
tagtggcttgcctaaaatcacacagcatgtcagtagaagggtcaggacttaaagtgctaactctaattttccactgcttgtctacaaaga

SEQ ID NO: 666903 - DNA, 120 bp, Artificial Sequence
  ENSG00000185104_48 (sequence is synthesized)
tggtctagaactcctgacctcaggtaatcggcccacctcagcctcccaaagtgccagggttacaggcgtgagccacggcgcccggccaagaatctctaaattttatattcaagaacggat

SEQ ID NO: 666904 - DNA, 120 bp, Artificial Sequence
  ENSG00000185104_49 (sequence is synthesized)
cccggccaagaatctctaaattttatattcaagaacggatcttggaatcctctacagttgtacataaaaagttaaacatcactttgggaggcaaaggcaggaggattgcttgaggccaga

SEQ ID NO: 666905 - DNA, 120 bp, Artificial Sequence
  ENSG00000185104_50 (sequence is synthesized)
agttcaagaccagccctgaccacataccaagaccctgtctctaaaaaaataaataaataaaaaataaaacttttcattagccaggcatgctggtacttgcctgtagtcccagctactgtt

SEQ ID NO: 666906 - DNA, 120 bp, Artificial Sequence
  ENSG00000185104_51 (sequence is synthesized)
gagcccaggagttcaaggctacagtgagccatgatagtgcgactgctactctggcctaggcatcagagtaagacctcatctctttaaaaaaaaaaaaaaaagaaaggttaaacatgtatt

SEQ ID NO: 666907 - DNA, 120 bp, Artificial Sequence
  ENSG00000185104_52 (sequence is synthesized)
aaaaagaaaggttaaacatgtattttcctggaaagggaatctgtattcatcagattctcagtgggacctattgatcaaaaaattttaagaatcaccatttacgtcatcctatttggggag

SEQ ID NO: 666908 - DNA, 120 bp, Artificial Sequence
  ENSG00000185104_53 (sequence is synthesized)
aagaatctgtccattctttttatcaatccgtatttttatctaaaagaaacctccagaggatgaaatacaatcactagactttcttgccttgaatatctctgcatttagtattttgtcctt

SEQ ID NO: 666909 - DNA, 120 bp, Artificial Sequence
  ENSG00000185104_54 (sequence is synthesized)
gtctcaaataatctgctttggaaggtgacacttaaccccaactggccacacagctcctcactgttgcattttgaaagtttggtctgaaagaaaatattaataaaagagacatgatctcca

SEQ ID NO: 666910 - DNA, 120 bp, Artificial Sequence
  ENSG00000185104_55 (sequence is synthesized)
agtgtgttctcttgcctttaggagctgaaaatatgataacattgggcccagacatgcctgtgtggaggttagggtactcctggggtttttgcagctagctgtaaagcaagctagaacttg

SEQ ID NO: 666911 - DNA, 120 bp, Artificial Sequence
  ENSG00000185104_56 (sequence is synthesized)
atattcattttatgttctttattctcattctgaagacttggatcatctcctgtttttagactaagacggttttttcctccccattccattcttaatagaatcccctctgggccttcccca

SEQ ID NO: 666912 - DNA, 120 bp, Artificial Sequence
  ENSG00000185104_57 (sequence is synthesized)
cttatattgtcatttaatagtatagtgaccaaagccaccatcaaggataccactgcaaggagaaggttacagcttttgtttggtgcccagggtgtccccgacagtgtgccaagtttgaga

SEQ ID NO: 666913 - DNA, 120 bp, Artificial Sequence
  ENSG00000185104_58 (sequence is synthesized)
ccattttaacattataataccttagagctggtgtcttcactaaacagtccatctaaaggcataggctaggaatgaagaatccagatttgccatgaatgctgaataaacttgggtaactca

SEQ ID NO: 666914 - DNA, 120 bp, Artificial Sequence
  ENSG00000185105_0 (sequence is synthesized)
cttcagatgccagtcccaagtacagctgtccctttgtatccttgggggatgggatccagtacctccaaaacaccagaatccacaaggccagagtccctgatacaaaatggcatgttattt

SEQ ID NO: 666915 - DNA, 120 bp, Artificial Sequence
  ENSG00000185105_1 (sequence is synthesized)
gcatataaccccctcctctggacttaaatcacctcttgattacttataacacctgaaccctgtgaaccccaggcaatgacagcaggatcctgaagcccatgcaggctctgaaccacgcgg

SEQ ID NO: 666916 - DNA, 120 bp, Artificial Sequence
  ENSG00000185105_2 (sequence is synthesized)
ccatccagaaggggctgcaggcacctgccactaccgcagaggactgaggggccttggcccagcagggaccccagggccttgggggactgtgtgagctggaaacgtggctggccagatggg

SEQ ID NO: 666917 - DNA, 120 bp, Artificial Sequence
  ENSG00000185105_3 (sequence is synthesized)
cagcaccatggagccccctgggggtgcgtacctgcacctgggcgccgtgacatcccctgtgggcacagcccgcgtgctgcagctggcctttggctgcactaccttcagcctggtggccca

SEQ ID NO: 666918 - DNA, 120 bp, Artificial Sequence
  ENSG00000185105_4 (sequence is synthesized)
ccggggtggctttgcgggcgtccagggcaccttctgcatggccgcctggggcttctgcttcgccgtctctgcgctggtggtggcctgtgagttcacacggctccacggctgcctgcggct

SEQ ID NO: 666919 - DNA, 120 bp, Artificial Sequence
  ENSG00000185105_5 (sequence is synthesized)
ctcctggggcaacttcaccgccgccttcgccatgctggccaccctgctatgcgcgacggctgcggtcctgtatccgctgtactttgcccggcgggagtgttcccccgagcccgccggctg

SEQ ID NO: 666920 - DNA, 120 bp, Artificial Sequence
  ENSG00000185105_6 (sequence is synthesized)
tgctgccagggacttccgcctggcagccagtgtcttcgccgggctcctcttcctggcctacgctgtggaggtggccctgacgcgggcccggcccggccaggtgagcagctatatggccac

SEQ ID NO: 666921 - DNA, 120 bp, Artificial Sequence
  ENSG00000185105_7 (sequence is synthesized)
ggtgtcggggctcctcaagatcgtccaggccttcgtggcctgcatcatcttcggggcgctggtccatgacagccgctacgggcgctacgtggccacccagtggtgcgtggccgtctacag

SEQ ID NO: 666922 - DNA, 120 bp, Artificial Sequence
  ENSG00000185105_8 (sequence is synthesized)
cctgtgcttcctggccacagtggccgtggtggccctgagtgtgatgggccacacagggggcctgggctgcccctttgaccggctggtggtggtgtacaccttcctggctgtgctcctgta

SEQ ID NO: 666923 - DNA, 120 bp, Artificial Sequence
  ENSG00000185105_9 (sequence is synthesized)
cctcagcgccgccgtgatctggccagtcttctgtttcgatcccaagtacggtgagcccaaacggccccccaactgtgctcggggcagctgtccctgggacagccagctggtggtggccat

SEQ ID NO: 666924 - DNA, 120 bp, Artificial Sequence
  ENSG00000185105_10 (sequence is synthesized)
aggattcgcttcgtgcccagcctgtagcccacagtggcagcccacccacctctgctctctggccaccagctccaggctctgcgagggaaactcaggtgaaccaaagtgtcaagtagcgag

SEQ ID NO: 666925 - DNA, 120 bp, Artificial Sequence
  ENSG00000185105_11 (sequence is synthesized)
caggagggaagccgcgggctcaggggagatgaagtacaacgggagaggtcactccccgacttccagactgggctcagagggacaagggcaggacagtagggcagaggccctgagcagacg

SEQ ID NO: 666926 - DNA, 120 bp, Artificial Sequence
  ENSG00000185105_12 (sequence is synthesized)
caggggagagcctcacctaggccaatccccaactcactctctctcaccatttcccagcgctcctggggctcagtgctggtcactggaacatcataagggaaaactttaaagcagctgctg

SEQ ID NO: 666927 - DNA, 120 bp, Artificial Sequence
  ENSG00000185105_13 (sequence is synthesized)
ttgtgacccattttgcagctggggacatggaggctagaagcatttgcgaggcacccagtacctccattagtgtctggagaccacagtcaggctgggtaaggcaagctgaaagaggaatga

SEQ ID NO: 666928 - DNA, 120 bp, Artificial Sequence
  ENSG00000185105_14 (sequence is synthesized)
cttccagaggagacgaacccaggagagtagctgggccaggcaaggggagggaggggcgtggggagccggaaccactcctggttcagagaggcagctcccagaaccctgggaagagagccc

SEQ ID NO: 666929 - DNA, 120 bp, Artificial Sequence
  ENSG00000185105_15 (sequence is synthesized)
tgcctggggagctgtgccagctcacagagaaggagccagaaatctggaccagcctctcccacccacgtccgggaagcctctgggctggtagccacagtgtttggaagcaggcttcctccg

SEQ ID NO: 666930 - DNA, 120 bp, Artificial Sequence
  ENSG00000185105_16 (sequence is synthesized)
gagtctccgcaggctggaggtggcgcgggtggcctggaagagcctgcagagcccggcggcaccgagtgcacagtggacggggaggacctggttccgccatagccacggagccccacctgg

SEQ ID NO: 666931 - DNA, 120 bp, Artificial Sequence
  ENSG00000185105_17 (sequence is synthesized)
acactcaccattggctgtgacgaagcagcttcagcagtgcccggcgggcatctgtgcactgtgggcatctgtggcactgggagggagcccggctgagggcggccgctggacacagaatct

SEQ ID NO: 666932 - DNA, 120 bp, Artificial Sequence
  ENSG00000185105_18 (sequence is synthesized)
gggtactgcttgcctctgctcaagggtccagttgccgaaactcctgacgccggggccatcatcctccaggctccagccagcttctcctgcacagaagcccagcctggtccagccaggagc

SEQ ID NO: 666933 - DNA, 120 bp, Artificial Sequence
  ENSG00000185105_19 (sequence is synthesized)
tgacccactggccacccctgagtccaagccgggtgggcagtggcacaacagcccctcagcccattgactgggccccattgacgtccttgagcaggaaataaatgctgacatttatacgta

SEQ ID NO: 666934 - DNA, 120 bp, Artificial Sequence
  ENSG00000185112_0 (sequence is synthesized)
aaggatgtgaggcaggcgagccggacgccgctcgcagcaccggagagggcgcactgcaaaggcgggcagcagaccgtggagagcccgggagcggagctggacaccgcctcggagggaaga

SEQ ID NO: 666935 - DNA, 120 bp, Artificial Sequence
  ENSG00000185112_1 (sequence is synthesized)
aatgaggtagcggcggttcccggacccggccatgcccgtcccctgttctcggagcccagcgccgtctcggccaggccagcccggacactgagcgggccgagcgcgagtccccggcgtccg

SEQ ID NO: 666936 - DNA, 120 bp, Artificial Sequence
  ENSG00000185112_2 (sequence is synthesized)
gcggagcgaagatgcagtgagtccccgcgggactgctgcgcggggcccgccgcggccagccggacccagcatccgaccgcactttgggcgagctgctgacttgagaccagcccaaacggg

SEQ ID NO: 666937 - DNA, 120 bp, Artificial Sequence
  ENSG00000185112_3 (sequence is synthesized)
gggctttccatctccagcacccctcggaggtggggagcaccggcccctaggcacactcgctgtagagtttccgcgggttttggccccagtcctgagggttgtgtgtgttaggggacccac

SEQ ID NO: 666938 - DNA, 120 bp, Artificial Sequence
  ENSG00000185112_4 (sequence is synthesized)
ctcacgttcgccgaggagttcctgcatattcttgcaccatcccgggtgctgttgctggggctctctttatttgcacgcgcgcttctagcttttttcctgacattttccactctacgctcg

SEQ ID NO: 666939 - DNA, 120 bp, Artificial Sequence
  ENSG00000185112_5 (sequence is synthesized)
ttctttctcccttgcattttgttgcttgcctgagactctttgctctcgcccttgcccaggctggggtaattctgtgtgcgcgcgtgtctcccccgcaccaaccttttttgcacactcgaa

SEQ ID NO: 666940 - DNA, 120 bp, Artificial Sequence
  ENSG00000185112_6 (sequence is synthesized)
gctgaatattttcttttttagagaatttacccgcacctcctgcggggttcctaagcactctctctgctcccctccccccaactccctaccacagggccgctcccagtagttttattcttc

SEQ ID NO: 666941 - DNA, 120 bp, Artificial Sequence
  ENSG00000185112_7 (sequence is synthesized)
gttttattcttcgatcttgcccgggccgagcctggcaggggccggtggctcagcgggcctcgcacccggcgctccgccgccgccgccgcccagctgcgccggggcgccctccggagatgc

SEQ ID NO: 666942 - DNA, 120 bp, Artificial Sequence
  ENSG00000185112_8 (sequence is synthesized)
agcacaagttcgagctgctggccgaggcgccgccgcggcaggcgtccaagcccaagggctacgctgtgagcctgcactactcggcgctcagctcgctggcgcgggcgtgccccgaaggcg

SEQ ID NO: 666943 - DNA, 120 bp, Artificial Sequence
  ENSG00000185112_9 (sequence is synthesized)
cgcttagccgggtgggcagcatgttccgctccaagcgcaagaagctgcacatcactagcgaggacccaacttacaccgtgctctacctgggcaatgccaccaccatccaggcgcgcggcg

SEQ ID NO: 666944 - DNA, 120 bp, Artificial Sequence
  ENSG00000185112_10 (sequence is synthesized)
acggctgcaccgaccttgctgtgggcaagatctggagcaagagcgaggcgggccgtcagggcaccaagatgaagctgacggtgagtgcgcagggtatccgcatggtgcacgccgaggagc

SEQ ID NO: 666945 - DNA, 120 bp, Artificial Sequence
  ENSG00000185112_11 (sequence is synthesized)
gcgcgctgcgccgcccgggccacctctacctgctgcaccgcgtcacctactgcgtggccgacgcgcggctgcccaaggtcttcgcctgggtgtaccggcacgagctgaagcacaaggccg

SEQ ID NO: 666946 - DNA, 120 bp, Artificial Sequence
  ENSG00000185112_12 (sequence is synthesized)
tgatgctgcgctgccacgccgtgctggtgtccaagcccgaaaaggcgcaggccatggccctgctgctctaccagacgtcggccaacgcgctggcggaatttaaacgcctcaagcggcggg

SEQ ID NO: 666947 - DNA, 120 bp, Artificial Sequence
  ENSG00000185112_13 (sequence is synthesized)
gcacacaccatcccgctagtgccgctgcgcaagctgctcctacacggaccctgctgctataaaccgccggtggagcgcagccgcagcgcgcccaagcttggctccatcaccgaggacctg

SEQ ID NO: 666948 - DNA, 120 bp, Artificial Sequence
  ENSG00000185112_14 (sequence is synthesized)
ctcggcgaacagctggagcaggagctgcaggaggaagaggaagaggagcaacccgagggctgcccggaggaggaggagaaccgtgcggcagagggagatccagcagaggaggaggccgag

SEQ ID NO: 666949 - DNA, 120 bp, Artificial Sequence
  ENSG00000185112_15 (sequence is synthesized)
gcgcagcgtgcgctagtggtcgccatgcactttgagtgcggggacttgttggatactctggagaatggccgtggggaggcgctaggaggcggcgggggctccctgggcccgggggccggg

SEQ ID NO: 666950 - DNA, 120 bp, Artificial Sequence
  ENSG00000185112_16 (sequence is synthesized)
ccgccgcctctgctgctgggcagcgcctccgacatgaaggctgagctgtcgcaacttattagcgacctgggcgagctcagcttcggcaacgacgtgcgcaccctgcaggccgacttgcgg

SEQ ID NO: 666951 - DNA, 120 bp, Artificial Sequence
  ENSG00000185112_17 (sequence is synthesized)
gtgacgcgcctgctgtcaggcgacagcacgggcagcgagagctccatcgagggcgggggccctgacgccacctccgccaccgccggggactcgtcccgccaggccgacggcgccagtgca

SEQ ID NO: 666952 - DNA, 120 bp, Artificial Sequence
  ENSG00000185112_18 (sequence is synthesized)
gacgagccccactcgggctgagctcctccgcgcgtcgccggcgctccaccgtggctacccatccgtggtcccgacaacctccctgtcccttgcccgcccccaggaagggggaaatggggc

SEQ ID NO: 666953 - DNA, 120 bp, Artificial Sequence
  ENSG00000185112_19 (sequence is synthesized)
atttggggcccagacctacacttggagcccaggtccagcgttcccccgaccgctttcccctacctcccggcccccgctcccgccccagcacttttggctctgttgcgcgtggggatgcgg

SEQ ID NO: 666954 - DNA, 120 bp, Artificial Sequence
  ENSG00000185112_20 (sequence is synthesized)
ggagatttgagaggggaaaaccccgccaggagggagagagaggcacccctctgggatgcgggtgagggaaggttggctgaagttcctagtctcaggccgtaggtgcctggccagtttcct

SEQ ID NO: 666955 - DNA, 120 bp, Artificial Sequence
  ENSG00000185112_21 (sequence is synthesized)
gtttgtggggcagctggggcctgaggaggaggggttcacttcctcctcccaccccctgggagcggccctgcgctgtcactgacatctcattaaaaaaaaaaaaaaatttgctctcaaggt

SEQ ID NO: 666956 - DNA, 120 bp, Artificial Sequence
  ENSG00000185112_22 (sequence is synthesized)
gtttgaggctttaatgcaaccctttagcccttggttctttttggtgcaagaattctggctgtttacctcagactcagacccctgaaatgttgccaaattcttcaaataactgtttggggg

SEQ ID NO: 666957 - DNA, 120 bp, Artificial Sequence
  ENSG00000185112_23 (sequence is synthesized)
gtggggggagatgaaagagagtcgcgttttgtttacagttaaagacatccaatatcttaaaaaggagttttcctttagaaacacacacacccttcctcttgctcaaaagatctcactcca

SEQ ID NO: 666958 - DNA, 120 bp, Artificial Sequence
  ENSG00000185112_24 (sequence is synthesized)
tgatactgtgtaaaatatttttgcactgttgtgaagtatttttgacttttttctgtacataactgtgttctcagagctgaatgtttatatcttttgctgtgcaaaagaaacatgtaaaat

SEQ ID NO: 666959 - DNA, 120 bp, Artificial Sequence
  ENSG00000185112_25 (sequence is synthesized)
gttgttcagttgtatatacagaaatgtgtataaaacattttgttattttttaaaagtagcactgttctggttctgtttgcacgccagtggggagagaataaagaggaaaatttaacagaa

SEQ ID NO: 666960 - DNA, 120 bp, Artificial Sequence
  ENSG00000185115_0 (sequence is synthesized)
agtctcagccgacactgcgcgcgcctccaggcaccggcgttagcgggtcgccgacccgcaatccccgccgcggctgcttgcctaccggagtgtgcgccggcacctgccgccggagacatg

SEQ ID NO: 666961 - DNA, 120 bp, Artificial Sequence
  ENSG00000185115_1 (sequence is synthesized)
ttgcaaaaaccgaggaaccggggccgctctggcggccaggccgagagggacagagactggagccatagcggaaaccccggggcttcgcgggccggggaagacgcccgggttctcagagac

SEQ ID NO: 666962 - DNA, 120 bp, Artificial Sequence
  ENSG00000185115_2 (sequence is synthesized)
ggcttcgcgggccggggaagacgcccgggttctcagagacggctttgccgaggaggccccgagcacgtcccgcgggccgggcggctcgcaggggtcgcagggcccctcgcctcagggcgc

SEQ ID NO: 666963 - DNA, 120 bp, Artificial Sequence
  ENSG00000185115_3 (sequence is synthesized)
cagaagcagctggagctgaaagtgtccgagctggtgcagttcttgctgattaaagaccagaagaagattccgatcaagcgggccgacatactgaagcacgtcatcggggactacaaggac

SEQ ID NO: 666964 - DNA, 120 bp, Artificial Sequence
  ENSG00000185115_4 (sequence is synthesized)
atcttccccgacctcttcaaacgggccgccgagcgcctccagtacgtcttcgggtataagctggtggaacttgaacccaagagcaacacttacatcctcatcaacaccctggagcctgtg

SEQ ID NO: 666965 - DNA, 120 bp, Artificial Sequence
  ENSG00000185115_5 (sequence is synthesized)
gaggaggatgccgagatgaggggtgaccaaggcacgcccactacgggcctcctgatgatcgtcttagggctcatctttatgaagggcaacaccatcaaggaaactgaagcctgggacttt

SEQ ID NO: 666966 - DNA, 120 bp, Artificial Sequence
  ENSG00000185115_6 (sequence is synthesized)
ctgcggcgcttaggggtctaccccaccaagaagcatttaattttcggagatccaaagaaactcattactgaggactttgtgcgacagcgttacctggaataccggcggataccccacacc

SEQ ID NO: 666967 - DNA, 120 bp, Artificial Sequence
  ENSG00000185115_7 (sequence is synthesized)
gaccccgtcgactacgaattccagtggggcccgcgaaccaacctggaaaccagcaagatgaaagttcttaagtttgtggccaaggtccataatcaagaccccaaggactggccagcgcag

SEQ ID NO: 666968 - DNA, 120 bp, Artificial Sequence
  ENSG00000185115_8 (sequence is synthesized)
tactgtgaggctttggcagatgaggagaacagggccagacctcagcctagtggcccagctccatcctcttgaaaggtggattcagagggacccccgggacaagggtctgagacccaaagg

SEQ ID NO: 666969 - DNA, 120 bp, Artificial Sequence
  ENSG00000185115_9 (sequence is synthesized)
cacagtttagaggattgggggaagggagaacgaacccagggagcatattgctgtaaacgcttcaatgtgtgtagctttaggatgtgtttgcaaagttttgtttttttaatgttgtgttat

SEQ ID NO: 666970 - DNA, 120 bp, Artificial Sequence
  ENSG00000185115_10 (sequence is synthesized)
tttgctccagattttcatctataaacaaaggagcatttgttttgattttactctttttggtataaaaaattttgctagcttagtaaaacgaattggaaaacttgactatgatctggaaca

SEQ ID NO: 666971 - DNA, 120 bp, Artificial Sequence
  ENSG00000185115_11 (sequence is synthesized)
gataatgcaagaaggaacacataagtaagttgctttggtgccaagaaaataaaaaagctattatcaggtctcctaactaccccagtttgtaaggaaaaataaaagtttttataaaattaa

SEQ ID NO: 666972 - DNA, 120 bp, Artificial Sequence
  ENSG00000185115_12 (sequence is synthesized)
aaaaaataattgcctatatccttattatgttaacctattttatttttctatatttcgtacatatataagtattattcatggttccaagcaatgagtgtaatgtattttctcccaatagta

SEQ ID NO: 666973 - DNA, 120 bp, Artificial Sequence
  ENSG00000185115_13 (sequence is synthesized)
attgtttatattcataattattcagctctgctgctaaacacgtagttccacttcgtttttttcttcttgctactgtagttattacaataaatactgtatttttgaagcacttaagcattg

SEQ ID NO: 666974 - DNA, 120 bp, Artificial Sequence
  ENSG00000185115_14 (sequence is synthesized)
tgtgttttttaaatcgtgggtcatgagagaatttcatgactggaaatcaacatcttaaagtttttgctacatattaaggtcaatgctgttttgtagaagttgtttcacttttgtgtgaaa

SEQ ID NO: 666975 - DNA, 120 bp, Artificial Sequence
  ENSG00000185115_15 (sequence is synthesized)
caaaatcaggatcatgaggtgaaatatatttctcactgtggatctcaaaaaggcttataaaacaatagcgtaaccattaaccatgcctgtttgggaatcggactgtctgggttgagatcc

SEQ ID NO: 666976 - DNA, 120 bp, Artificial Sequence
  ENSG00000185115_16 (sequence is synthesized)
tggccccaccataactagtatatgaatttacataggttccttagtttgtatgcagatgtttcttgacctgtaaaatggttttagtccgtgatgtggagaattttatttgttattctttaa

SEQ ID NO: 666977 - DNA, 120 bp, Artificial Sequence
  ENSG00000185115_17 (sequence is synthesized)
tgtttttattttttattctccttggtctggagctgccactttttaaatataacttttctttatctttttttccaaatcattcctaggagagcaattcctggttcaaaagatagtcctcta

SEQ ID NO: 666978 - DNA, 120 bp, Artificial Sequence
  ENSG00000185115_18 (sequence is synthesized)
gtctcactctattgtatggggaaatataacgtgtatggtgagtgtgccccacatagaacataagagcaggacataagatctacctcctagggagttaggtatagggaaaagggtatgggt

SEQ ID NO: 666979 - DNA, 120 bp, Artificial Sequence
  ENSG00000185115_19 (sequence is synthesized)
cttggggctgtctggcaaactgaatttgaattacggctcatgctaacttgtcagcatggtggttgtgggggtaggttttaagctctctgaatctcaatttatctgtaaaatgagaaaaat

SEQ ID NO: 666980 - DNA, 120 bp, Artificial Sequence
  ENSG00000185115_20 (sequence is synthesized)
ctagaagagttcatagtcccattgtgttcctccattacgtgtagcagatgctgtttttaatgcagagattcaacacgttttattcagtgggcaaataagttaattgttttagggggaggt

SEQ ID NO: 666981 - DNA, 120 bp, Artificial Sequence
  ENSG00000185115_21 (sequence is synthesized)
gctgcaaattaaccttgaaataaggcaaatatttttaactcggggaaaaaagtgaacttcatcaacactggacggaatgtcatttaaaagagtctatagtgagtatggaggaatgtgata

SEQ ID NO: 666982 - DNA, 120 bp, Artificial Sequence
  ENSG00000185115_22 (sequence is synthesized)
ggttactgggttttatttcattctgttgaattgggatttgcatttgtttcatcagtggaatatgtttggcccttacaggcatttcttcttgatctgcattttatttcagtgtataaactc

SEQ ID NO: 666983 - DNA, 120 bp, Artificial Sequence
  ENSG00000185115_23 (sequence is synthesized)
cttcctgcctcctggtccccttacctccctgactcagctttctcctcctcatgccctctgatactcgcattctcacctgtataataaaaattattacccagcagtcaccaccagttatat

SEQ ID NO: 666984 - DNA, 120 bp, Artificial Sequence
  ENSG00000185115_24 (sequence is synthesized)
ctgaggcaaaattccccccgcttttctcagaggtgttagcaatttaccatcgataatcttgtttcaaattttaaaatatgaaacatcagaggccacatcaaggccttatatcttttcctt

SEQ ID NO: 666985 - DNA, 120 bp, Artificial Sequence
  ENSG00000185115_25 (sequence is synthesized)
ctcaccctccccagaggtaacaaaagtctgtggctatcgggctgttgtatgactttataattttactatacatgtatatatacataaccaatatagagttttattttgtgggctttcatg

SEQ ID NO: 666986 - DNA, 120 bp, Artificial Sequence
  ENSG00000185115_26 (sequence is synthesized)
atttatataagcggtgttacgtgtgtccttatgcaacttgctgtactcactcaccattatgtatttgagattcagccatgtggatatatgtagacctgattcactcattttaattgttct

SEQ ID NO: 666987 - DNA, 120 bp, Artificial Sequence
  ENSG00000185115_27 (sequence is synthesized)
tttatgggggaaaaataactatccattccttaatgtctggacatttaaggtctttccagttctttgagatttgcaggcattgtacagtacttctttaggcacatgtgtgagtttctccag

SEQ ID NO: 666988 - DNA, 120 bp, Artificial Sequence
  ENSG00000185115_28 (sequence is synthesized)
ccagaaacaaatggagcaatcaaggactattgccaagctgctcttgagcttgtgtcaagttacactcccatcaacattttatacagttttgttttgtttttgtttaccaatccctccacc

SEQ ID NO: 666989 - DNA, 120 bp, Artificial Sequence
  ENSG00000185115_29 (sequence is synthesized)
ttcaccccctgtgaacacttggccttttcagtatcttttcagccattctggtacagtgtgaaatgataatttattacggtattaacttatacctgttgcttactagtaatgttaagtatc

SEQ ID NO: 666990 - DNA, 120 bp, Artificial Sequence
  ENSG00000185115_30 (sequence is synthesized)
tgcctatcttttgctctcactcctttttgagtgtcagatttcatgtcttagacctatttctattgatttgtaagacatctttatatgttctacatgttaatccatggtctgctctatcta

SEQ ID NO: 666991 - DNA, 120 bp, Artificial Sequence
  ENSG00000185115_31 (sequence is synthesized)
tctagtgcaaataccttctcccacattttcacttcttttggtcatacagatcatttgacctaaatgtgttacgatcattagtgtttataagagctacatttgtgtatagtgctttaaaaa

SEQ ID NO: 666992 - DNA, 120 bp, Artificial Sequence
  ENSG00000185115_32 (sequence is synthesized)
attcccctaatcctaaaattgtaaatatgttttctgccttttttccctaagtgttcaaagttttgatcttcacattttatgcttttaatctgcttttgtgtatgatgtgaggtatggaaa

SEQ ID NO: 666993 - DNA, 120 bp, Artificial Sequence
  ENSG00000185115_33 (sequence is synthesized)
tagtttttgtatttttcctatatggatagcctagcaccagtttttcatcatttatactttccacactgatttatgacactcagtattttgtagcaatgtcccatgtatagataaatttat

SEQ ID NO: 666994 - DNA, 120 bp, Artificial Sequence
  ENSG00000185115_34 (sequence is synthesized)
attttgtagcaatgtcccatgtatagataaatttatggctaggactgaattggtttatttgctatccatttgcaaataccatactgtaattctttttttctttttgagacggagtcttgc

SEQ ID NO: 666995 - DNA, 65 bp, Artificial Sequence
  ENSG00000185115_35 (sequence is synthesized)
gactttaggtaatctgccataattctttagcatcatatgcctgtcttctttttcaattcttaaag

SEQ ID NO: 666996 - DNA, 120 bp, Artificial Sequence
  ENSG00000185115_36 (sequence is synthesized)
tttagcatcatatgcctgtcttctttttcaattcttaaagccttttattttagtcttttttgcattggctgaaaatgcaatatattattgaaaagaagcagttacagcaggctctaagga

SEQ ID NO: 666997 - DNA, 120 bp, Artificial Sequence
  ENSG00000185115_37 (sequence is synthesized)
tgtttctgattccttattcttgattttaaaggaaataattttaagttttgccatagagtgtgatgtttgctgttaagagtttttttcccctataaataccttttattgggctatttagtt

SEQ ID NO: 666998 - DNA, 120 bp, Artificial Sequence
  ENSG00000185115_38 (sequence is synthesized)
accccttcagtcctagcttgcttagagatgttcagaaaaaaaactatgaatgactttggatgtatatatgctctttatttacctgctaatatgattaaaatgtcttatttactctgtaaa

SEQ ID NO: 666999 - DNA, 120 bp, Artificial Sequence
  ENSG00000185122_0 (sequence is synthesized)
cggggctgtgtgtgcgcagcgggcggcggcgcggcccggaaggctggcgcggcgacggcgttagcccggccctcggcccctctttgcggccgctccctccgcctattccctccttgctcg

SEQ ID NO: 667000 - DNA, 120 bp, Artificial Sequence
  ENSG00000185122_1 (sequence is synthesized)
gccgctccctccgcctattccctccttgctcgagatggatctgcccgtgggccccggcgcggcggggcccagcaacgtcccggccttcctgaccaagctgtggaccctcgtgagcgaccc

SEQ ID NO: 667001 - DNA, 120 bp, Artificial Sequence
  ENSG00000185122_2 (sequence is synthesized)
ggacaccgacgcgctcatctgctggagcccgagcgggaacagcttccacgtgttcgaccagggccagtttgccaaggaggtgctgcccaagtacttcaagcacaacaacatggccagctt

SEQ ID NO: 667002 - DNA, 120 bp, Artificial Sequence
  ENSG00000185122_3 (sequence is synthesized)
cgtgcggcagctcaacatgtatggcttccggaaagtggtccacatcgagcagggcggcctggtcaagccagagagagacgacacggagttccagcacccatgcttcctgcgtggccagga

SEQ ID NO: 667003 - DNA, 120 bp, Artificial Sequence
  ENSG00000185122_4 (sequence is synthesized)
gcagctccttgagaacatcaagaggaaagtgaccagtgtgtccaccctgaagagtgaagacataaagatccgccaggacagcgtcaccaagctgctgacggacgtgcagctgatgaaggg

SEQ ID NO: 667004 - DNA, 120 bp, Artificial Sequence
  ENSG00000185122_5 (sequence is synthesized)
gaagcaggagtgcatggactccaagctcctggccatgaagcatgagaatgaggctctgtggcgggaggtggccagccttcggcagaagcatgcccagcaacagaaagtcgtcaacaagct

SEQ ID NO: 667005 - DNA, 120 bp, Artificial Sequence
  ENSG00000185122_6 (sequence is synthesized)
cattcagttcctgatctcactggtgcagtcaaaccggatcctgggggtgaagagaaagatccccctgatgctgaacgacagtggctcagcacattccatgcccaagtatagccggcagtt

SEQ ID NO: 667006 - DNA, 120 bp, Artificial Sequence
  ENSG00000185122_7 (sequence is synthesized)
ctccctggagcacgtccacggctcgggcccctactcggccccctccccagcctacagcagctccagcctctacgcccctgatgctgtggccagctctggacccatcatctccgacatcac

SEQ ID NO: 667007 - DNA, 120 bp, Artificial Sequence
  ENSG00000185122_8 (sequence is synthesized)
ccccccagcccgcctcagagcccccgggtagaggaggcgagtcccgggcgcccatcttccgtggacaccctcttgtccccgaccgccctcattgactccatcctgcgggagagtgaacct

SEQ ID NO: 667008 - DNA, 120 bp, Artificial Sequence
  ENSG00000185122_9 (sequence is synthesized)
gcccccgcctccgtcacagccctcacggacgccaggggccacacggacaccgagggccggcctccctcccccccgcccacctccacccctgaaaagtgcctcagcgtagcctgcctggac

SEQ ID NO: 667009 - DNA, 120 bp, Artificial Sequence
  ENSG00000185122_10 (sequence is synthesized)
aagaatgagctcagtgaccacttggatgctatggactccaacctggataacctgcagaccatgctgagcagccacggcttcagcgtggacaccagtgccctgctggacctgttcagcccc

SEQ ID NO: 667010 - DNA, 120 bp, Artificial Sequence
  ENSG00000185122_11 (sequence is synthesized)
tcggtgaccgtgcccgacatgagcctgcctgaccttgacagcagcctggccagtatccaagagctcctgtctccccaggagccccccaggcctcccgaggcagagaacagcagcccggat

SEQ ID NO: 667011 - DNA, 120 bp, Artificial Sequence
  ENSG00000185122_12 (sequence is synthesized)
tcagggaagcagctggtgcactacacagcgcagccgctgttcctgctggaccccggctccgtggacaccgggagcaacgacctgccggtgctgtttgagctgggagagggctcctacttc

SEQ ID NO: 667012 - DNA, 120 bp, Artificial Sequence
  ENSG00000185122_13 (sequence is synthesized)
tccgaaggggacggcttcgccgaggaccccaccatctccctgctgacaggctcggagcctcccaaagccaaggaccccactgtctcctagaggccccggaggagctgggccagccgccca

SEQ ID NO: 667013 - DNA, 120 bp, Artificial Sequence
  ENSG00000185122_14 (sequence is synthesized)
cccccacccccagtgcagggctggtcttggggaggcagggcagcctcgcggtcttgggcactggtgggtcggccgccatagccccagtaggacaaacgggctcgggtctgggcagcacct

SEQ ID NO: 667014 - DNA, 120 bp, Artificial Sequence
  ENSG00000185122_15 (sequence is synthesized)
ctggtcaggagggtcaccctggcctgccagtctgccttcccccaaccccgtgtcctgtggtttggttggggcttcacagccacacctggactgaccctgcaggttgttcatagtcagaat

SEQ ID NO: 667015 - DNA, 120 bp, Artificial Sequence
  ENSG00000185122_16 (sequence is synthesized)
tgtattttggatttttacacaactgtcccgttccccgctccacagagatacacagatatatacacacagtggatggacggacaagacaggcagagatctataaacagacaggctctatgc

SEQ ID NO: 667016 - DNA, 120 bp, Artificial Sequence
  ENSG00000185122_17 (sequence is synthesized)
catagcccaggtgtgccctgtggcctagggctttcttggtcacagccaccagaccgtgggtctcatccccacagcagcaccagggcagggactgagccacccacacactgagcagagccc

SEQ ID NO: 667017 - DNA, 120 bp, Artificial Sequence
  ENSG00000185122_18 (sequence is synthesized)
cacctgttttcccagtgcaacgggaaacctcaccaaccctgaacactgaaatccctgatccttgtgctggagctgaatacgccccttgtctcctgggtccactgccaccaaggcccccag

SEQ ID NO: 667018 - DNA, 120 bp, Artificial Sequence
  ENSG00000185122_19 (sequence is synthesized)
gccctcatggcaaagggatgcccagcataggcccagccgcacccctgcagggcacagagcctccactgccttccaggccgtcctcgaatgcgctgccccctccagcctgtgcaggcgtac

SEQ ID NO: 667019 - DNA, 120 bp, Artificial Sequence
  ENSG00000185122_20 (sequence is synthesized)
ataccgtctccaccccacagatccaagagctcctgtctccccaggagccccccaggcctcccgaggcagagaacagcagcccggattcaggtgagccaagtcccaccggccccacctctg

SEQ ID NO: 667020 - DNA, 120 bp, Artificial Sequence
  ENSG00000185122_21 (sequence is synthesized)
cccccaaccccccaccgccttgacacccccacccccgcagggaagcagctggtgcactacacagcgcagccgctgttcctgctggaccccggctccgtggacaccgggagcaacgacctg

SEQ ID NO: 667021 - DNA, 120 bp, Artificial Sequence
  ENSG00000185122_22 (sequence is synthesized)
ttttgtatcttgcagtttggctcgcactccacagatgtctagggtcgcccgcctcttcccctgcccctcttcctctccgcatggccaagtccagccagggttagcgctgaccccactggg

SEQ ID NO: 667022 - DNA, 120 bp, Artificial Sequence
  ENSG00000185122_23 (sequence is synthesized)
gagggaggagggctctgccagcgctcgggccctcccacacagccgtggaccagacccagcctggccgggcatgagcgtcgggcctgggcggcagcagccgagacccctctgtggcggggg

SEQ ID NO: 667023 - DNA, 120 bp, Artificial Sequence
  ENSG00000185122_24 (sequence is synthesized)
ctcagtgtcgtcatggctcccctggccacgggcctgtggtcattgcctgtgacagggatgacagggacaggcctccctgctctggcacggcctctggtgttggcaggatccagactgcgg

SEQ ID NO: 667024 - DNA, 120 bp, Artificial Sequence
  ENSG00000185122_25 (sequence is synthesized)
gacaccgacgcgctcatctgctggagcccgttgcctggcagcaggcttgtttacatggtccgaccctgcaagaccggacagctccggtttgcagaagtaaatcagtgattgtctggagtt

SEQ ID NO: 667025 - DNA, 120 bp, Artificial Sequence
  ENSG00000185122_26 (sequence is synthesized)
ggccagacatggtcacacttacccctgctcctgcatgggggacagggagggtctgtggggctccctcagccctggggctcatgggattgggccccactgacccagcctggtctgttgcag

SEQ ID NO: 667026 - DNA, 120 bp, Artificial Sequence
  ENSG00000185122_27 (sequence is synthesized)
gggtatgaacctggggtccccatggaagaaccgtgaagccggagctgtactccacgtgtgtcgggcgcagggagccctgtggggacacagggtctcccttagaccaaggccactcggcca

SEQ ID NO: 667027 - DNA, 120 bp, Artificial Sequence
  ENSG00000185122_28 (sequence is synthesized)
cccaggcatgggctctgagggggcagggcagggtctgaccatggccaagccccgcagcagcctcctggagcagtggccgctcttcaggggttctggtcccgccctgaggcagagctgccc

SEQ ID NO: 667028 - DNA, 120 bp, Artificial Sequence
  ENSG00000185122_29 (sequence is synthesized)
gagaatgaggctctgtggcgggaggtggccagccttcggcagaagcatgcccagcaacagaaagtcgtcaacaaggtgggggcagggccagagggccggcgggggccccacaagggccgg

SEQ ID NO: 667029 - DNA, 120 bp, Artificial Sequence
  ENSG00000185122_30 (sequence is synthesized)
agcgcaggggtgcgggaggcagacctgcagatggcgggaccccagcaggaggaccctgtgatgaaggacggggcgtcctgtgctggccaagggcatggcgtgggaccctgcaagcctggg

SEQ ID NO: 667030 - DNA, 120 bp, Artificial Sequence
  ENSG00000185122_31 (sequence is synthesized)
ctggcgcccaccaagaggccccgggtgctgtgggggcagggccctgaccggggccaggtgctcagctccaccctcccgctccacgcacatctaccctgggcctctgccccagccccgccg

SEQ ID NO: 667031 - DNA, 120 bp, Artificial Sequence
  ENSG00000185122_32 (sequence is synthesized)
cccgtggctgctgcaacagctctggggccagccgttttccatgtgcagaagggggttgggagggtcccctgctctgcacatccccagcgccctctgggccattggcttctgcctggctcc

SEQ ID NO: 667032 - DNA, 120 bp, Artificial Sequence
  ENSG00000185122_33 (sequence is synthesized)
gagcttggcgggacccaccagcctacttttgaggacaagccttgcacagcagacccgtcccacccgcctcgggcctggggtcagacccacctcaggcccttcctggaaccgctgtcccac

SEQ ID NO: 667033 - DNA, 120 bp, Artificial Sequence
  ENSG00000185122_34 (sequence is synthesized)
actcgcctgggcccatggagctagcccccagcccctcctcaccgggaccctgcggctctggggaaaccttagcaggagcctaacacacggtggcacctgagaaactgaggcaagcccacc

SEQ ID NO: 667034 - DNA, 120 bp, Artificial Sequence
  ENSG00000185122_35 (sequence is synthesized)
tcggaaggccagctcaggtctcacgtccactttggggctccaggcatgcgggaaccccaatgccagtacggcttcctcggctccgtgcagcaggcgctcttgacccccacgtcatggagg

SEQ ID NO: 667035 - DNA, 120 bp, Artificial Sequence
  ENSG00000185122_36 (sequence is synthesized)
aggccttggcctcagactctcctgcatggggtctagcaggagccaccggctttgtgattcctggagtccggccacgtggacctggcctaccaagaagactcacaggcttgacagggccca

SEQ ID NO: 667036 - DNA, 120 bp, Artificial Sequence
  ENSG00000185122_37 (sequence is synthesized)
gcctcccagagcagcaggagcgcggtcatggccctgctcacctggctggggacagctcttccccacccctgagccacctccaggcctggcgagggccctgagcacctacaggacatggga

SEQ ID NO: 667037 - DNA, 120 bp, Artificial Sequence
  ENSG00000185122_38 (sequence is synthesized)
cagccagtgtcgcagcctgaagaaccgtcctcccttaacctggctgctcaggccttggaagggcggcccaagggtctgctcctggcctgtgtccaaggcagccctccaggtgtttgccag

SEQ ID NO: 667038 - DNA, 120 bp, Artificial Sequence
  ENSG00000185127_0 (sequence is synthesized)
agtggtggtgagtccgagggtgccacagcggccctgcccctgcccctgcccctgccctgagtgggcgccgcgctacgggggaggggttaacccacccctcctccccggggcctcacgcgg

SEQ ID NO: 667039 - DNA, 120 bp, Artificial Sequence
  ENSG00000185127_1 (sequence is synthesized)
gtgggaagggacagtcccagcgacagaccaggcgcctggacgcgccgtggacccgcgtgcggacggcggggacaggctccggtgctgagcgcctccggtgtccccagcagcactgaccca

SEQ ID NO: 667040 - DNA, 120 bp, Artificial Sequence
  ENSG00000185127_2 (sequence is synthesized)
cttgcaggccccggagctgagccgccagccatggccgctccccgcgggagggccgcgccctggacgacggccctgctgctgctcctagcctcgcaggtcctgtctccgggaagctgcgcg

SEQ ID NO: 667041 - DNA, 120 bp, Artificial Sequence
  ENSG00000185127_3 (sequence is synthesized)
gacgaggaggaggtccccgaggagtgggtgctcctgcacgtcgtccagggccagataggcgccgggaactacagctacctgcggctgaaccacgagggcaagatagtcctcaggatgcgc

SEQ ID NO: 667042 - DNA, 120 bp, Artificial Sequence
  ENSG00000185127_4 (sequence is synthesized)
agcctcaagggagatgcggatctgtacgtctccgccagcagcctgcaccccagcttcgacgactacgagctgcaatcggccacctgcggcccggacgccgtgtccatccccgcgcacttc

SEQ ID NO: 667043 - DNA, 120 bp, Artificial Sequence
  ENSG00000185127_5 (sequence is synthesized)
cggcgcccagtgggcatcggcgtctatggacacccctcccacctggagagcgagttcgagatgaaggtgtactacgacggcacggtcgagcagcacccgttcggcgaggccgcctacccc

SEQ ID NO: 667044 - DNA, 120 bp, Artificial Sequence
  ENSG00000185127_6 (sequence is synthesized)
gccgacggcgcagatgccggccagaagcacgctggtgccccggaagacgcctcgcaagaggaggaatctgttctctggacgatattaattagcattttgaaactggtacttgaaattctc

SEQ ID NO: 667045 - DNA, 120 bp, Artificial Sequence
  ENSG00000185127_7 (sequence is synthesized)
ttttgagtcgttgaccacactctgggatataaaaccctccatctgtgaagctgattgcagtttgctgtgaaccttgctacttgtacttggttgaagttctaggtacctttagtcaaggga

SEQ ID NO: 667046 - DNA, 120 bp, Artificial Sequence
  ENSG00000185127_8 (sequence is synthesized)
tggaaaaataaagccatacgcagttttgttacctcagttaccccaaaaataggaaaagcagcaagcacagtattttaaagatcataattcctataaaaggactgtgcacaaagtgtttag

SEQ ID NO: 667047 - DNA, 120 bp, Artificial Sequence
  ENSG00000185127_9 (sequence is synthesized)
actccattttcattaggcaggttgactaaaaatgattgcagtaacaggtttatataaaatagagcaacctttcatgctgtgacacaaatcaaaaggttgataactttgtaattttactct

SEQ ID NO: 667048 - DNA, 120 bp, Artificial Sequence
  ENSG00000185127_10 (sequence is synthesized)
ggagattctaaccgaagttggtgtaagttttcaagagttactaaaatcaagttggaaatgatttacgtacacttccctgagcctggactaaagcctcatgcctgtaccccaagtaggtga

SEQ ID NO: 667049 - DNA, 120 bp, Artificial Sequence
  ENSG00000185127_11 (sequence is synthesized)
cctggcaggcaggtatttacaaagtttgttcctgtaccagtccaataatgacaactctaaatccagctgcaccaaatcttagtgggccatttgtcatacctatgaaaattcttcagttat

SEQ ID NO: 667050 - DNA, 120 bp, Artificial Sequence
  ENSG00000185127_12 (sequence is synthesized)
taaataactttgtcagtgctacctatggtaggccggaaacaatgtagattaggaagtttcatgaaaattaacttttggggctatggagaaacagttaagtatcttaagttactaaacatt

SEQ ID NO: 667051 - DNA, 120 bp, Artificial Sequence
  ENSG00000185127_13 (sequence is synthesized)
tccactgaatttttggagtgagccaaggttactataaaatactttggaagatgaattctctacctggagttagtttcgagagtaagcgtagcttttaacagaaataactgcagattttaa

SEQ ID NO: 667052 - DNA, 120 bp, Artificial Sequence
  ENSG00000185127_14 (sequence is synthesized)
gctcataatttgcaaaaaaaatcttttattggcatgaaaataatgttgtaaatggcaccaaatattccacttaaatgcatatacagtattagagtcaaaaactattttatccctctttgc

SEQ ID NO: 667053 - DNA, 120 bp, Artificial Sequence
  ENSG00000185127_15 (sequence is synthesized)
tgtttttcccccttctgcccactttcctgggtgttgggggggcccgctgacaacagtcacaaatccagcgacctaggaaaaaaattgttaatatagaatgaaaaattatctttacaggac

SEQ ID NO: 667054 - DNA, 120 bp, Artificial Sequence
  ENSG00000185127_16 (sequence is synthesized)
tgaattttaagcccatctaaactcttctgccttagctatcactaatgatattcctctctggattttgtggtgagaagggcactatgagttccttaatttaaggaaaaaatgtaaacttaa

SEQ ID NO: 667055 - DNA, 120 bp, Artificial Sequence
  ENSG00000185127_17 (sequence is synthesized)
tcaatgtaatcaatgccatgcaaaattcattgcaagtcaagggggatgggagagatgcaatgccatacggtgatacggacctttaagaaagtacaatctttcctgaaattcaaacactat

SEQ ID NO: 667056 - DNA, 120 bp, Artificial Sequence
  ENSG00000185127_18 (sequence is synthesized)
catacttcaaaaggtcaaaacccattccggaatttggcttttttaagactttttctctcctgctcactggcagctgtgtgtcttaacagcattctttcaagtcctggtgtactctgctga

SEQ ID NO: 667057 - DNA, 120 bp, Artificial Sequence
  ENSG00000185127_19 (sequence is synthesized)
cagcactttaaaactttaacagcacaatgataacttgtactacatacttgatctgaattactacagaaaaataattatgttgcttgcttaatgattcccaggaaacttcgttgtaggcat

SEQ ID NO: 667058 - DNA, 120 bp, Artificial Sequence
  ENSG00000185127_20 (sequence is synthesized)
atattttataagagtattatacagtgttaactatgcaagtaagttctaaaattacacaattatctgtgtaatgttttagtccaattactgtgatttattcaactctgttctaaagttatc

SEQ ID NO: 667059 - DNA, 120 bp, Artificial Sequence
  ENSG00000185127_21 (sequence is synthesized)
tggaattgtcatgctgcctcaatttacagaaatctataatagatttctatagaaatgtataaagacgtagcagtcattttgttgtttctaaatagataacatataaaaataaaggctttg

SEQ ID NO: 667060 - DNA, 120 bp, Artificial Sequence
  ENSG00000185129_0 (sequence is synthesized)
ctgaggcgactgaggcggcgggcggagcggcaggcggcggcggcgcggcagcggagcgcagcatcatggcggaccgagacagcggcagcgagcagggtggtgcggcgctgggttcgggcg

SEQ ID NO: 667061 - DNA, 80 bp, Artificial Sequence
  ENSG00000185129_1 (sequence is synthesized)
cagggtggtgcggcgctgggttcgggcggctccctggggcaccccggctcgggctcaggctccggcgggggcggtggtgg

SEQ ID NO: 667062 - DNA, 120 bp, Artificial Sequence
  ENSG00000185129_2 (sequence is synthesized)
cgagacgcaggagctggcctccaagcgggtggacatccagaacaagcgcttctacctggacgtgaagcagaacgccaagggccgcttcctgaagatcgccgaggtgggcgcgggcggcaa

SEQ ID NO: 667063 - DNA, 120 bp, Artificial Sequence
  ENSG00000185129_3 (sequence is synthesized)
caagagccgccttactctctccatgtcagtggccgtggagttccgcgactacctgggcgacttcatcgagcactacgcgcagctgggccccagccagccgccggacctggcccaggcgca

SEQ ID NO: 667064 - DNA, 120 bp, Artificial Sequence
  ENSG00000185129_4 (sequence is synthesized)
ggacgagccgcgccgggcgctcaaaagcgagttcctggtgcgcgagaaccgcaagtactacatggatctcaaggagaaccagcgcggccgcttcctgcgcatccgccagacggtcaaccg

SEQ ID NO: 667065 - DNA, 120 bp, Artificial Sequence
  ENSG00000185129_5 (sequence is synthesized)
ggggcctggcctgggctccacgcagggccagaccattgcgctgcccgcgcaggggctcatcgagttccgtgacgctctggccaagctcatcgacgactacggagtggaggaggagccggc

SEQ ID NO: 667066 - DNA, 120 bp, Artificial Sequence
  ENSG00000185129_6 (sequence is synthesized)
cgagctgcccgagggcacctccttgactgtggacaacaagcgcttcttcttcgatgtgggctccaacaagtacggcgtgtttatgcgagtgagcgaggtgaagcccacctatcgcaactc

SEQ ID NO: 667067 - DNA, 120 bp, Artificial Sequence
  ENSG00000185129_7 (sequence is synthesized)
catcaccgtgccctacaaggtgtgggccaagttcggacacaccttctgcaagtactcggaggagatgaagaagattcaagagaagcagagggagaagcgggctgcctgtgagcagcttca

SEQ ID NO: 667068 - DNA, 120 bp, Artificial Sequence
  ENSG00000185129_8 (sequence is synthesized)
ccagcagcaacagcagcagcaggaggagaccgccgctgccaccctgctactgcagggtgaggaagaaggggaagaagattgatcaaactgaatgaaacccccacacacacacacatgcat

SEQ ID NO: 667069 - DNA, 120 bp, Artificial Sequence
  ENSG00000185129_9 (sequence is synthesized)
acacacacacacacagccacacacacagaaaatatactgtaaagaaagagagaaaataaaaagttaaaaagttaaaaaaaaaaaaaaacctgttaactccaagggagcaccacccacaga

SEQ ID NO: 667070 - DNA, 120 bp, Artificial Sequence
  ENSG00000185129_10 (sequence is synthesized)
acctccaccaactgacagtttctcttcttgacttgccacccatcgctggatgttgtccactttatccaccatataaaacagtaagcagctgctaaaaacaaaaaaaatacaaaaagtaat

SEQ ID NO: 667071 - DNA, 120 bp, Artificial Sequence
  ENSG00000185129_11 (sequence is synthesized)
aacattatatgaactgtgtttcctacttgattaaaaaatataaagaactgagtgtttatttccctaattaaccaagaacttttgtacacgtttaagctattattattaaaaagtgtttgc

SEQ ID NO: 667072 - DNA, 120 bp, Artificial Sequence
  ENSG00000185129_12 (sequence is synthesized)
aaaatggtcaagattataatattgctgaattatataaaagtccttttcatgttgagctaacatttgactttagcacaaaaaagagatattttagaacacgtaaaataatatttttagttt

SEQ ID NO: 667073 - DNA, 120 bp, Artificial Sequence
  ENSG00000185129_13 (sequence is synthesized)
ttctcattttgttaccaaatttcaaaccttacatggaggttattatagtatatttgacaccctatatacctgtgattagagatgtgtatatatatgagggctaggcatgctgtgtgtctg

SEQ ID NO: 667074 - DNA, 120 bp, Artificial Sequence
  ENSG00000185129_14 (sequence is synthesized)
agctttgtctaaatgttatgcagaagtttgtagagttaaaggtacgtaggtttaattcatgcaaggtaaacaataagtgctctcttttatacaatatgcattgcatctggaccttaaact

SEQ ID NO: 667075 - DNA, 120 bp, Artificial Sequence
  ENSG00000185129_15 (sequence is synthesized)
tataaaaatggtcagtgaaacttctgtgaacatgaagaaattattaaaaaaggcatttaaatgaaatttgctaagttgtgatttttatggttggaaccaaagttattcaaatagtaaaag

SEQ ID NO: 667076 - DNA, 120 bp, Artificial Sequence
  ENSG00000185129_16 (sequence is synthesized)
gaaaaagaaagaaaaaggagatctcccataatatttttctgcatctgtttgctttgactgagtaggcgttttgtcattattgtgtatatgagatgtacttgtatcgttcataatatattt

SEQ ID NO: 667077 - DNA, 120 bp, Artificial Sequence
  ENSG00000185129_17 (sequence is synthesized)
tttttattatgtgtagaaagattttaaaaaactaacgtgcagcaatttccagtgaacctgtacttggacatcaggtagtgagtctatttgtggtcactagcactgtctcctaaacttgta

SEQ ID NO: 667078 - DNA, 120 bp, Artificial Sequence
  ENSG00000185129_18 (sequence is synthesized)
agaggtctgaagctattctttgatttttgctagtgctattaacttatgtagacctgttaaaaagcagagcaacacaattatagttatcctactgagccatggattctgagttttgtttta

SEQ ID NO: 667079 - DNA, 120 bp, Artificial Sequence
  ENSG00000185129_19 (sequence is synthesized)
aaagtgaaagccaagttggtgtatgtaaaggatttccatgtagctgtggtgctagttattactggctacattatatgctaagtgtatttgtgttccccaagtgtacaagccttctatcaa

SEQ ID NO: 667080 - DNA, 120 bp, Artificial Sequence
  ENSG00000185129_20 (sequence is synthesized)
aagtatgttctataactcatatattcaaggtgtagggtatgaaaatgcaaagtttaggagagcactttaccaagctggtgtcctccaaactgaaattgtttgtaacgatagtcttttaca

SEQ ID NO: 667081 - DNA, 120 bp, Artificial Sequence
  ENSG00000185129_21 (sequence is synthesized)
ggttttcctttaaagatgtttgtgtgcttttaattgacaactaacttcttgctgctgtatagtaaaatattaatatatttttatcattaaactgctgcatgactatcatctttgagtgaa

SEQ ID NO: 667082 - DNA, 120 bp, Artificial Sequence
  ENSG00000185129_22 (sequence is synthesized)
gagaaaatgttataaaaaagatgccttaaacagtacattttggtttggaattctgtagaaagtattttggtaaaaaaaaaaaaaaaaaaaaagggtcttgtctgacagagagttctgggg

SEQ ID NO: 667083 - DNA, 120 bp, Artificial Sequence
  ENSG00000185129_23 (sequence is synthesized)
atggaattgtttcttggcaaatccagccatatagatctaactgctgtatgtataagacaccacctgtaggagcgggaaggtatcagtgcttcttatattgtaaagcattggcctaggaag

SEQ ID NO: 667084 - DNA, 120 bp, Artificial Sequence
  ENSG00000185129_24 (sequence is synthesized)
gcaaacagttgtctttttgaaggatttttttctgctggtcctttgggttttgatttgatatttttatgctccctggttgagtgtgttgtcttcgtttttgagatctactgtatgtgttga

SEQ ID NO: 667085 - DNA, 120 bp, Artificial Sequence
  ENSG00000185129_25 (sequence is synthesized)
ataacaagctattttcattgtactgtgcattttcccattaaattgtttgcttttaatattcaatgttaaatatgaggtgaccgtacagtagttaggagtttctttacttacaaaatcact

SEQ ID NO: 667086 - DNA, 120 bp, Artificial Sequence
  ENSG00000185129_26 (sequence is synthesized)
ggaaatgattaaattgcttttccccctccccagaggtgcatttttcttatttccatatagtaaagttgagcttttacagtgcataatgtgacatttggaatgcttatcaactgcatgtaa

SEQ ID NO: 667087 - DNA, 120 bp, Artificial Sequence
  ENSG00000185129_27 (sequence is synthesized)
acattaataacctgcacttttttgtcttaaggtttgttgagctgttttgttcactgtactttaactgtgatatggaaaagactgcattctctgtgctgttactaattaggaaagagaatt

SEQ ID NO: 667088 - DNA, 120 bp, Artificial Sequence
  ENSG00000185129_28 (sequence is synthesized)
gctttgattttgtctcttgtttactatagcttcttaaagttaagccttgtactacaggttgttggagtactcctagatcactgtttcatagtagccagcaataagtagtgcaagtcaaca

SEQ ID NO: 667089 - DNA, 120 bp, Artificial Sequence
  ENSG00000185129_29 (sequence is synthesized)
aaaacacagcaaacttaggcaaagtgtcctttctttgagatgcgagttctttcatgaggttttctttagggccagagttacctaaagtgaagcctttcttatctatagacttcagattct

SEQ ID NO: 667090 - DNA, 120 bp, Artificial Sequence
  ENSG00000185129_30 (sequence is synthesized)
gcttggaatcccaccggctcaagaagcacatgtattgtgcaattaattgtctttacactaaaacagtttaatacaatctaactacgattttgaaaccagtgtctgatttatggtcagtgg

SEQ ID NO: 667091 - DNA, 120 bp, Artificial Sequence
  ENSG00000185129_31 (sequence is synthesized)
gtttaaaaagaaatccacatgcagatcttttaagacttaaaaagtgatcatagaaaagactaagtgactgtaaagatgctctttttttaagcatctcactttacctccccaagcaccctc

SEQ ID NO: 667092 - DNA, 120 bp, Artificial Sequence
  ENSG00000185129_32 (sequence is synthesized)
ccaaaccttgtcttccctcttctgttgcatcctttccctacccttccctcccaggtgctcggtactttacctagtttctatatatcagtgttttatgttggaatttttccttgtttttat

SEQ ID NO: 667093 - DNA, 120 bp, Artificial Sequence
  ENSG00000185129_33 (sequence is synthesized)
tttactagttggtaaaccctgtttatgctgaaacaaataaggaaatggtatatttgaccatatgtgttattcatagaagacagtatgatcaaatgtgccaaaaacaagcaaacaaaactt

SEQ ID NO: 667094 - DNA, 120 bp, Artificial Sequence
  ENSG00000185129_34 (sequence is synthesized)
aattcctgagaagtatgccttatttttattgatctgctttgtcttacaattaaggtccaagagcttggttaaactgtattatttgcctaagtataaaagaaaacttgaactgcattgcaa

SEQ ID NO: 667095 - DNA, 120 bp, Artificial Sequence
  ENSG00000185129_35 (sequence is synthesized)
tattgacgttctttaaaatgagagacactgtcaagtaatttaatccagagatcagccaccagatttgaaatgcttatgtatgtgtgtgtgtttggagttgtttttttcttttaaatcacc

SEQ ID NO: 667096 - DNA, 120 bp, Artificial Sequence
  ENSG00000185129_36 (sequence is synthesized)
aaattttttttaagctactttttatttgtgcctcctatttatcatgctgatgttagaagcagcagtcatccagccacagagggagctaaagttaactaaccagaactgtagaaatcatta

SEQ ID NO: 667097 - DNA, 120 bp, Artificial Sequence
  ENSG00000185129_37 (sequence is synthesized)
tacatgcctttgacaacaaaggaagttcataagaaaagccatgtcggcttttcctctactagatacagattggaggtagatgaatatttgccaaatggaaaaaaagacaatgctagtcag

SEQ ID NO: 667098 - DNA, 120 bp, Artificial Sequence
  ENSG00000185129_38 (sequence is synthesized)
aaaagacaaactgttttccagcttctcaaaaagccatggagagtagaaaccaaaaccaacagggaaataaaaaaccttgaaagtctcactttctagttgtcccatgcaggggttgaaatt

SEQ ID NO: 667099 - DNA, 120 bp, Artificial Sequence
  ENSG00000185129_39 (sequence is synthesized)
tgattccaagcggaaagtatattatgttttttcaggccttcacatctagagagatggataacttccaatttgatttttcaggtaatagagaaagctgctagtaattttaacccctgccta

SEQ ID NO: 667100 - DNA, 120 bp, Artificial Sequence
  ENSG00000185129_40 (sequence is synthesized)
aagaagacatatacttcatttgggagcaaatacttattgccttgaaaagtagcactgtaatagcctatgataattagttgtagaataacctttatccctttcaaactatgcaaattatta

SEQ ID NO: 667101 - DNA, 120 bp, Artificial Sequence
  ENSG00000185129_41 (sequence is synthesized)
aataagtgtaaattaggattcaattaaagatagttgattatattgcaatcagatggcattcacaaacttaactggagcatatacaaatatattagtctaagttttgtatgctaacagaaa

SEQ ID NO: 667102 - DNA, 120 bp, Artificial Sequence
  ENSG00000185129_42 (sequence is synthesized)
gatataatttagctacctattctaaaaatggtgaatattattaatattgtataataggagtgggaagactgcctccttttttgaagagagagattaaggatttttataattgtttttcat

SEQ ID NO: 667103 - DNA, 120 bp, Artificial Sequence
  ENSG00000185129_43 (sequence is synthesized)
caaattttaatatttttgtcaaatttttaggtatttaatttgtaaaacagtttgctttgtactggcatacagaaaatagggtattgattttaaactttttgaagccaagtgatcaagtac

SEQ ID NO: 667104 - DNA, 120 bp, Artificial Sequence
  ENSG00000185129_44 (sequence is synthesized)
atttgtaataaaagtcaatggatctatatcagttgtactcactgttttcatttcttattaatatagggatgctgtactttttcttaaggaaaactgaattaaatttgggtggaagggagg

SEQ ID NO: 667105 - DNA, 120 bp, Artificial Sequence
  ENSG00000185129_45 (sequence is synthesized)
gggaaaagataaatccgttgataatgagaatctgggtgggtatcatggcccaagcactttatatcattttttaagtcagttaagatttgatatattttaaaagatactatgtcaactttt

SEQ ID NO: 667106 - DNA, 120 bp, Artificial Sequence
  ENSG00000185129_46 (sequence is synthesized)
ttcttcctattttcttatgtaacttgacgtttggggggattatctcattcatttttgtttgtgtgcttttaacattttgtgttttggccctgttcaaactttctaaacacatttttcttt

SEQ ID NO: 667107 - DNA, 120 bp, Artificial Sequence
  ENSG00000185129_47 (sequence is synthesized)
ttcaggttatatatacacacacatttccagataattttagaatggggctatctgaaattgatggtctagtagctttcatagctccacaattcattttattttacatgtgaacataatttt

SEQ ID NO: 667108 - DNA, 120 bp, Artificial Sequence
  ENSG00000185129_48 (sequence is synthesized)
aagattttcttcaccataaaaagtgagataccaagtctaatgacttttttccctttttaaaatcttttgagtatcagaatgagaccttgctatctatgtaaaaggatgctaaaacaaggg

SEQ ID NO: 667109 - DNA, 120 bp, Artificial Sequence
  ENSG00000185129_49 (sequence is synthesized)
catctgtagcaacttaggtttggaatagttggtgatgactctgagtataacatttatagtttattatccctaaatttgaatatcttcataatttggagagagatgtatacacacacatac

SEQ ID NO: 667110 - DNA, 120 bp, Artificial Sequence
  ENSG00000185129_50 (sequence is synthesized)
acatatatatgtatatatacattgtgtgtgtgtatatgtatatagatacacacatctccttgagagtggaataagtaggagagataatttattggaattgcttacatagataaattcacc

SEQ ID NO: 667111 - DNA, 120 bp, Artificial Sequence
  ENSG00000185129_51 (sequence is synthesized)
aaagttatttgtgtagatttgttaaagtgtatcaatttttaaatcacaatatttctgttttcttcattgcatattaaccaaattttggccattcataagtatgctataaaactaaagtga

SEQ ID NO: 667112 - DNA, 120 bp, Artificial Sequence
  ENSG00000185129_52 (sequence is synthesized)
tcactgctattcacgaattattatagaatcttctttgcagattttgtgatatattaagaaaagctgattttaatattaatatttaagaagttatttgatcctgaaaacctaaatttaagg

SEQ ID NO: 667113 - DNA, 120 bp, Artificial Sequence
  ENSG00000185129_53 (sequence is synthesized)
tataggccatttgacacgtcctttttgaacagaaatttcattacaggctaagtgaaaataagccagaattagcatgagtcaggtagaatttcatgataaaagaacaaccagatgaaataa

SEQ ID NO: 667114 - DNA, 120 bp, Artificial Sequence
  ENSG00000185129_54 (sequence is synthesized)
gaaataatgattggtttcaagccaatgaatctgctaagctaactaccaagttttgatgttgaatggtccaggcaatttatgtctttaggaaagctgagtgtggcaaaggtcacttgttaa

SEQ ID NO: 667115 - DNA, 120 bp, Artificial Sequence
  ENSG00000185129_55 (sequence is synthesized)
catttttcttaacaagaatgtcataactactcattcatttttattttgtccccacgtttggtatttgttttgttttgtgtttttccttcctgatgtcctttgcttttgtggaagattgtc

SEQ ID NO: 667116 - DNA, 120 bp, Artificial Sequence
  ENSG00000185129_56 (sequence is synthesized)
ctgttgataggcagaaacatggtggtgatcctctatgtaaaatatagttgcttcttacacatcagaagtatttcactcattttggaatcacaggattttcatgttttcataaatacacac

SEQ ID NO: 667117 - DNA, 120 bp, Artificial Sequence
  ENSG00000185129_57 (sequence is synthesized)
attgttttgataattattagcaattagcttattttgtagcattagatggaaaaatgtttaagctaaagagtttaattttcttgattttggttccactttaataattcaagaggcctccaa

SEQ ID NO: 667118 - DNA, 120 bp, Artificial Sequence
  ENSG00000185129_58 (sequence is synthesized)
gttcaaggaccaagtccttctattttagaattgtgaaaaacatggaaatactcttgttagtgtgtgttttggtctaaggtagattattaacacagaaggatcctaggaggatttaagaaa

SEQ ID NO: 667119 - DNA, 120 bp, Artificial Sequence
  ENSG00000185129_59 (sequence is synthesized)
atatgtccttatcgtgaagtggcagttaaagttatgggacaggtgaattacctattcatcttgactagctcaaacaatgatagccatcagctaatgacttatcagacacatgttgagttt

SEQ ID NO: 667120 - DNA, 120 bp, Artificial Sequence
  ENSG00000185129_60 (sequence is synthesized)
gggtcaaactcccattcagctggagtggattggcaattttaaatgcaggtagttggtggtggtacttgacctacctccttaccatgtacatctggcatcttctctctcctatcctttttc

SEQ ID NO: 667121 - DNA, 120 bp, Artificial Sequence
  ENSG00000185129_61 (sequence is synthesized)
tttgtttctctctccacttttactcttgctgtaggcctaccagtggcactcaagcttacttcttcagagagaagtaaagaaatttctgactcctgccttagaacatagctaactgatgat

SEQ ID NO: 667122 - DNA, 120 bp, Artificial Sequence
  ENSG00000185129_62 (sequence is synthesized)
ccagaacaatttcagtattatgaggtaactgggcagtttttttctgattgctattttccccatagtcttaagctggcagtttgaaggtatctaaattaatgttaagaaacttgtgaactg

SEQ ID NO: 667123 - DNA, 120 bp, Artificial Sequence
  ENSG00000185129_63 (sequence is synthesized)
aagagagtaagaagtatgtgtattttaggtaagttactgggaactgagacttactggtttggaaattggagagtaggacgaggagagctgtttaatgtgtttgtggatgggggtttgaga

SEQ ID NO: 667124 - DNA, 120 bp, Artificial Sequence
  ENSG00000185129_64 (sequence is synthesized)
ggtatatagagaatggtttggaaataaagtgagaggaatttttactagaggtaggaaaaggtactatgatggagtccgaatgagagttatttgctaaggaaatgaagttgatcttcacta

SEQ ID NO: 667125 - DNA, 120 bp, Artificial Sequence
  ENSG00000185129_65 (sequence is synthesized)
aggaagtttcaataaagccagagaaaatgggtccctcattgattatgagaaagctgttagttactatagctagagttatgataatgatcatgcattatacaagtctgttttcatgtatag

SEQ ID NO: 667126 - DNA, 120 bp, Artificial Sequence
  ENSG00000185129_66 (sequence is synthesized)
gatgtctgcttttctgggacaaattagcacaattgtggaatgacagcttttctggtcaaggcaagtggatgctggggagttattattttgaggaaaagaaaatttcaagcttttcaccat

SEQ ID NO: 667127 - DNA, 120 bp, Artificial Sequence
  ENSG00000185129_67 (sequence is synthesized)
tattctttttaaactatcagaaatatttatcacacatactatctattttcttgggctcttgttacaatgtagtttacctttacttttcaaatggtccttagatcaaattatttgattttg

SEQ ID NO: 667128 - DNA, 120 bp, Artificial Sequence
  ENSG00000185129_68 (sequence is synthesized)
tactccacaaagacacatattattccttgcttttatagaattttgagactttggcccacacaaatttcttagaagacaataaaccaggtaaaaacactaacttgcaattttaggtgtctt

SEQ ID NO: 667129 - DNA, 120 bp, Artificial Sequence
  ENSG00000185129_69 (sequence is synthesized)
ttttatttcttttacatttgcatccgtagcaaccatttaaccttgtagaccttatgaggccctcaataatactgtatttctaaaattagacaacataccccccaaactcatgtttctgtt

SEQ ID NO: 667130 - DNA, 120 bp, Artificial Sequence
  ENSG00000185129_70 (sequence is synthesized)
tccctactttctctcttactttaaaattgtagtattcccaagagttcagtggtggcaaatgttaataaaataagttagtacattttggaggttcttatatcctttgtagggtaagctgat

SEQ ID NO: 667131 - DNA, 120 bp, Artificial Sequence
  ENSG00000185129_71 (sequence is synthesized)
agtgtttagatttctgttcccattattccagtagtgttttaaattatttaagataaataattactgtaatgtttgtttttaagttacataattcaagtatgtttggattaactctttgtt

SEQ ID NO: 667132 - DNA, 120 bp, Artificial Sequence
  ENSG00000185129_72 (sequence is synthesized)
gtcaaatttagtatggatttattcctggtgatttggacagattactttgaagtttcattttactcacatctctatatattagtgataaaaatctcttttaaaaatagcaaaaaagtggtt

SEQ ID NO: 667133 - DNA, 120 bp, Artificial Sequence
  ENSG00000185129_73 (sequence is synthesized)
ctgattttgtactttgaaggtaatttttcttttttacgaatgtcaggttcattaacaatagcaggattatttttactatagcttattttgtagagttggcactttagtataattttcaca

SEQ ID NO: 667134 - DNA, 120 bp, Artificial Sequence
  ENSG00000185129_74 (sequence is synthesized)
ttttattgtgtcagattttaaattataatagttatatactataactcatttaagtcaatgcaaagccttcttaaatagcccctcccttagaaatttgtttaaaaagaagtgaattcccaa

SEQ ID NO: 667135 - DNA, 120 bp, Artificial Sequence
  ENSG00000185129_75 (sequence is synthesized)
acctgtgtcaagaacttgtgatttaaatgactgtgagacaagtccttgaaaggcttaagtctagtcagtggagataaatgatagcccatttccatgctgcatatagttgttagggtttat

SEQ ID NO: 667136 - DNA, 120 bp, Artificial Sequence
  ENSG00000185129_76 (sequence is synthesized)
aaagttgtcaatgtgtaaaagtgcaaaagcaggaaagactaaagttgcctgtaaaatttctagttttcattatttgcactatttatctttgcacttgattttttgaaagttaaggctagt

SEQ ID NO: 667137 - DNA, 120 bp, Artificial Sequence
  ENSG00000185129_77 (sequence is synthesized)
cactttcacttttgtttctagtcttttctaatttcttgcagaattgtgttttcaatattccacccaaagcaaaaattatatgcaattaaaaatattttataaggccaagaaaatatttct

SEQ ID NO: 667138 - DNA, 120 bp, Artificial Sequence
  ENSG00000185129_78 (sequence is synthesized)
taatgttagctgtataaaacaaaaatttgttctgataaaatttttaatatgggcctttatttgccaataaaatcctttgtaaatgtgagctttattaaactgtttaaatagacaaagtta

SEQ ID NO: 667139 - DNA, 120 bp, Artificial Sequence
  ENSG00000185129_79 (sequence is synthesized)
aagcttaggatagggaatatatatgtatgtgtatatgaaatgatgtcttcgagttttaacttccagcctgagatggcctagatttggtgtgttagtttgtttcactgaagtcagtgagat

SEQ ID NO: 667140 - DNA, 120 bp, Artificial Sequence
  ENSG00000185129_80 (sequence is synthesized)
aggagtctagctgggtacatgcttaaaaagctggaagtgaagtgggtggcaagtggcagctccctctttcatgtagttttccataatgttcatatagtttccttatggtctaagtgttac

SEQ ID NO: 667141 - DNA, 120 bp, Artificial Sequence
  ENSG00000185129_81 (sequence is synthesized)
aactggttttcaagttgttatattgaatattcctttttggaattcagggttgaatcactttgagggggaagggaagcaagggcaagagactttattttaaccagatgcggtcttatgacc

SEQ ID NO: 667142 - DNA, 120 bp, Artificial Sequence
  ENSG00000185129_82 (sequence is synthesized)
tcaaagatgtgctctagaaagaaaataacaaaaagtgtacctgtgaacatattttttgtcttggtgatattatgcaacacagtgttcagaattgcaaaaaaatttaaaaattgatagttt

SEQ ID NO: 667143 - DNA, 120 bp, Artificial Sequence
  ENSG00000185129_83 (sequence is synthesized)
tatcaatggaacagagagatgtgtttttggctaaaattattttttgtaagttatttggttatttcattttatattccctttcccatagctttgtacacacctcatacttaaaaccaagtg

SEQ ID NO: 667144 - DNA, 120 bp, Artificial Sequence
  ENSG00000185129_84 (sequence is synthesized)
agaggcctcttttcagatctggtttatttttggaatgcctgagtgtgtttccagattggggggggagaggtggtgttttactttttgacatgctcttagcatgttttgctagtcattctg

SEQ ID NO: 667145 - DNA, 120 bp, Artificial Sequence
  ENSG00000185129_85 (sequence is synthesized)
gatcttatgtttgcaaattctgttgaacattcagtgatgtatttgaaatgagaaagtcctttataacatagtgtgaatgtttgtggccaattcaattgtggaatcttatggctttgtttt

SEQ ID NO: 667146 - DNA, 120 bp, Artificial Sequence
  ENSG00000185129_86 (sequence is synthesized)
tactttgggtagaagtttaacttccattgttcagattttaggtttatctagtgaaattgtgccaggtagttgtctaaatatggaccaattttgggaaatgaagattaataagtgtatatt

SEQ ID NO: 667147 - DNA, 120 bp, Artificial Sequence
  ENSG00000185129_87 (sequence is synthesized)
tgattctagataatcctttactcaaaatcataagttaaagattcacatcattaagagttatctaacttttatgttgtcaaatctttaaatgtggatgatattcagcattctatctatgaa

SEQ ID NO: 667148 - DNA, 120 bp, Artificial Sequence
  ENSG00000185129_88 (sequence is synthesized)
tttcctttaggaaaagagaaaaattcagtctccaaaccttttcttggagacaaaatttaccacatatcgaaaatgaaaaaaatttagaaagcgatttgattattttttaatggagtttaa

SEQ ID NO: 667149 - DNA, 120 bp, Artificial Sequence
  ENSG00000185129_89 (sequence is synthesized)
ccagcttaattaatgatttttccagtttgaagcacttattttcccaatgtgaataaagggaaaagatcagcaatttgtccctggcctttttcgaggccatttttagttttctgcccccat

SEQ ID NO: 667150 - DNA, 120 bp, Artificial Sequence
  ENSG00000185129_90 (sequence is synthesized)
ttcccagtcctggtataaaatgaattacgggtatccctctaagtccctataaccctttttgggggtcacagatatctttgataatctgatgacagtgtgatggatcctctacccaagaaa

SEQ ID NO: 667151 - DNA, 120 bp, Artificial Sequence
  ENSG00000185129_91 (sequence is synthesized)
aaaaaaatgcccatccctggataattttgcatacaacttcaggggcatcacacatcttctgaaacccaagttaaagatctctgctctaagtaaattgtagagaattttagtgcaaatcgt

SEQ ID NO: 667152 - DNA, 120 bp, Artificial Sequence
  ENSG00000185129_92 (sequence is synthesized)
tgataaaattaggaaccaactattggcttaaaacctttcatattggaattattgttagatggtggcccctactagcaaaatgtgacattgcaaccagcttcgttagacattataacaacc

SEQ ID NO: 667153 - DNA, 120 bp, Artificial Sequence
  ENSG00000185129_93 (sequence is synthesized)
agagagaagggaaaaaagcaaagttctgaaagctatttataaggagtcagggcatctctagacatgggagccttcctggttcaaggcaggggtcagggtgcctgacaatttctagcaggg

SEQ ID NO: 667154 - DNA, 120 bp, Artificial Sequence
  ENSG00000185129_94 (sequence is synthesized)
tagagtttgataaaccacaatgctcaggatgccaaggggttagccattatcttaaccccttcctcaccaaaagattttagttttgtctgttgggaaacaagatgtcactagggaaaaaaa

SEQ ID NO: 667155 - DNA, 120 bp, Artificial Sequence
  ENSG00000185129_95 (sequence is synthesized)
gccacgacttgccgtctgcggcggcggcggcggcggcgagcggatcccgcaggggaaggaggaggaggagggagagccaagggggctgtgagtgagcgggagaagcagggtgtgagccgg

SEQ ID NO: 667156 - DNA, 120 bp, Artificial Sequence
  ENSG00000185129_96 (sequence is synthesized)
acttgcccatgggagggagagcgagcgagagccgagccagccatccgagccgcctcctcctcctcccctcggcgtcccgcccccgcccgccagcccgccctccttcctcctcagcccgca

SEQ ID NO: 667157 - DNA, 120 bp, Artificial Sequence
  ENSG00000185129_97 (sequence is synthesized)
gagcctaagtgaggcgcagctcggctagcgccgctgtccaggacaggtgtgcgcgcgcgcgccctcctcccctccccccttcctcgcgcctgtctcgcgcgcgccctccctcccgccagc

SEQ ID NO: 667158 - DNA, 120 bp, Artificial Sequence
  ENSG00000185129_98 (sequence is synthesized)
tgctcacagggcctggttcatccgcagagctggccagcaactcaggctgggctcagccctgagcagggtgccccccttccccaaatctcagaaggaggagggggaggcgggcgggcaggc

SEQ ID NO: 667159 - DNA, 120 bp, Artificial Sequence
  ENSG00000185129_99 (sequence is synthesized)
agtcagtcgtggtcccaagggggactggctgcaggtttttgggtgagtgtggagtttctttttgattgttgcatgtggggaagggcagagtcgacgggaacagtcactgcgggcacccta

SEQ ID NO: 667160 - DNA, 120 bp, Artificial Sequence
  ENSG00000185130_0 (sequence is synthesized)
ttggttttgccactattgtttcattatgcccgagctggccaagtctgctcccgccccgaagaagggctccaagaaggcggtgaccaaggcccagaagaaggatggcaagaagcgcaagcg

SEQ ID NO: 667161 - DNA, 120 bp, Artificial Sequence
  ENSG00000185130_1 (sequence is synthesized)
cagccgcaaggagagctactccgtgtacgtgtacaaggtgctgaagcaggtccaccccgacaccggcatctcttctaaggccatgggaatcatgaactccttcgtcaacgacatcttcga

SEQ ID NO: 667162 - DNA, 120 bp, Artificial Sequence
  ENSG00000185130_2 (sequence is synthesized)
gaccatcacctccagggagatccagaccgccgtgcgcctgctgcttccgggggagctggccaagcacgcggtgtcggagggcaccaaggccgtcaccaagtacaccagctccaagtaaat

SEQ ID NO: 667163 - DNA, 120 bp, Artificial Sequence
  ENSG00000185130_3 (sequence is synthesized)
gcaccaaggccgtcaccaagtacaccagctccaagtaaattctcaagctcttgtccaacccaaaggctcttttcagagccactcactattatctaaagaagagctggttcgctcttccta

SEQ ID NO: 667164 - DNA, 120 bp, Artificial Sequence
  ENSG00000185133_0 (sequence is synthesized)
aggctgccgggggctgcagacatggagggccagagcagcaggggcagcaggaggccagggacccgggctggcctgggttccctgcccatgccccagggtgttgcccaaactggggcaccc

SEQ ID NO: 667165 - DNA, 120 bp, Artificial Sequence
  ENSG00000185133_1 (sequence is synthesized)
tccaaggtggactcaagttttcagctcccagcaaagaagaacgcagccctaggaccctcggaaccaaggatcactgtggtcacatggaacgtgggcactgccatgcccccagacgatgtc

SEQ ID NO: 667166 - DNA, 120 bp, Artificial Sequence
  ENSG00000185133_2 (sequence is synthesized)
acatccctcctccacctgggcggtggtgacgacagcgacggcgcagacatgatcgccatagggttgcaggaagtgaactccatgctcaacaagcgactcaaggacgccctcttcacggac

SEQ ID NO: 667167 - DNA, 120 bp, Artificial Sequence
  ENSG00000185133_3 (sequence is synthesized)
cagtggagtgagctgttcatggatgcgctagggcccttcaacttcgtgctggtgagttcggtgaggatgcagggtgtcatcctgctgctgttcgccaagtactaccacctgcccttcctg

SEQ ID NO: 667168 - DNA, 120 bp, Artificial Sequence
  ENSG00000185133_4 (sequence is synthesized)
cgagacgtgcagaccgactgcacgcgcactggcctgggcggctactggggtaacaagggtggcgtgagcgtgcgcctggcggccttcgggcacatgctctgcttcctgaactgccacttg

SEQ ID NO: 667169 - DNA, 120 bp, Artificial Sequence
  ENSG00000185133_5 (sequence is synthesized)
cctgcgcatatggacaaggcggagcagcgcaaagacaacttccagaccatcctcagcctccagcagttccaagggccgggcgcacagggcatcctggatcatgacctcgtgttctggttc

SEQ ID NO: 667170 - DNA, 120 bp, Artificial Sequence
  ENSG00000185133_6 (sequence is synthesized)
ggggacctgaacttccgcattgagagctatgacctgcactttgtcaagtttgccatcgacagtgaccagctccatcagctctgggagaaggaccagctcaacatggccaagaacacctgg

SEQ ID NO: 667171 - DNA, 120 bp, Artificial Sequence
  ENSG00000185133_7 (sequence is synthesized)
cccattctgaagggctttcaggaggggcccctcaacttcgctcccaccttcaagtttgatgtgggtaccaacaaatacgataccagtgccaagaaacggaagccagcttggacagaccgt

SEQ ID NO: 667172 - DNA, 120 bp, Artificial Sequence
  ENSG00000185133_8 (sequence is synthesized)
atcctatggaaggtcaaggctccaggtgggggtcccagcccctcaggacggaagagccaccgactccaggtgacgcagcacagctaccgcagccacatggaatacacagtcagcgaccac

SEQ ID NO: 667173 - DNA, 120 bp, Artificial Sequence
  ENSG00000185133_9 (sequence is synthesized)
tggtgcggctggaggtggcagatgagtgggtgcggcccgagcaggcggtggtgaggtaccgcatggaaacagtgttcgcccgcagctcctgggactggatcggcttataccgggtgggtt

SEQ ID NO: 667174 - DNA, 120 bp, Artificial Sequence
  ENSG00000185133_10 (sequence is synthesized)
tccgccattgcaaggactatgtggcttatgtctgggccaaacatgaagatgtggatgggaatacctaccaggtaacattcagtgaggaatcactgcccaagggccatggagacttcatcc

SEQ ID NO: 667175 - DNA, 120 bp, Artificial Sequence
  ENSG00000185133_11 (sequence is synthesized)
tgggctactatagtcacaaccacagcatcctcatcggcatcactgaacccttccagatctcgctgccttcctcggagttggccagcagcagcacagacagctcaggcaccagctcagagg

SEQ ID NO: 667176 - DNA, 120 bp, Artificial Sequence
  ENSG00000185133_12 (sequence is synthesized)
gagaggatgacagcacactggagctccttgcacccaagtcccgcagccccagtcctggcaagtccaagcgacaccgcagccgcagcccgggactggccaggttccctgggcttgccctac

SEQ ID NO: 667177 - DNA, 120 bp, Artificial Sequence
  ENSG00000185133_13 (sequence is synthesized)
ggccctcatcccgtgaacgccgtggtgccagccgtagcccctcaccccagagccgccgcctgtcccgagtggctcctgacaggagcagtaatggcagcagccggggcagtagtgaagagg

SEQ ID NO: 667178 - DNA, 120 bp, Artificial Sequence
  ENSG00000185133_14 (sequence is synthesized)
ggccctctgggttgcctggcccctgggccttcccaccagctgtgcctcgaagcctgggcctgttgcccgccttgcgcctagagactgtagaccctggtggtggtggctcctggggacctg

SEQ ID NO: 667179 - DNA, 120 bp, Artificial Sequence
  ENSG00000185133_15 (sequence is synthesized)
atcgggaggccctggcgcccaacagcctgtctcctagtccccagggccatcgggggctggaggaagggggcctggggccctgagggtggggtaggcagatgggccaaggtgaccaccatt

SEQ ID NO: 667180 - DNA, 120 bp, Artificial Sequence
  ENSG00000185133_16 (sequence is synthesized)
ctgcctcaatcttttgcaagcccacctgcctctctcctgctgctcctccagctgtatctgcacctgcctctctgtcctggccaggggtggacaactggggtcccccaaaactcagtcctg

SEQ ID NO: 667181 - DNA, 120 bp, Artificial Sequence
  ENSG00000185133_17 (sequence is synthesized)
gcacctcaactgtgacaatcagcaaagccccacccaggcccccatctgggatgatgggagagctctggcagatgtcccaatcctggaggtcatccattaggaattaaattctccagcctc

SEQ ID NO: 667182 - DNA, 120 bp, Artificial Sequence
  ENSG00000185133_18 (sequence is synthesized)
acgggcagctatgtcagcttcctcggaaggaccgaggctggctctggcatctccccgaccaatcctggctccactgtgtacccctgaagggcagaaaacagctactgcccaccgcagctc

SEQ ID NO: 667183 - DNA, 120 bp, Artificial Sequence
  ENSG00000185133_19 (sequence is synthesized)
cagcctggccccaacatctgtgggccagctggtgatgtctgcctcagctggaccaaagcctcccccagcgaccacaggctcagttctggctccgacgtccctggggctggtgatgcctgc

SEQ ID NO: 667184 - DNA, 120 bp, Artificial Sequence
  ENSG00000185133_20 (sequence is synthesized)
ctcagcagggccaagatctcccccagtcaccctggggcccaatctggccccaacctccagagaccagaagcaggagccacctgcctccgtgggacccaagccaacactggcagcctctgg

SEQ ID NO: 667185 - DNA, 120 bp, Artificial Sequence
  ENSG00000185133_21 (sequence is synthesized)
cctgagcctggccctggcttctgaggagcagcccccagaactcccctccaccccttccccggtgcccagtccagttctgtctccaactcaggaacaggccctggctccagcatccacggc

SEQ ID NO: 667186 - DNA, 120 bp, Artificial Sequence
  ENSG00000185133_22 (sequence is synthesized)
atcaggcgcagcctctgtgggacagacatcagctagaaagagggatgccccagcccctagacctctccctgcttctgaggggcatctccagcctccagctcagacatctggtcctacagg

SEQ ID NO: 667187 - DNA, 120 bp, Artificial Sequence
  ENSG00000185133_23 (sequence is synthesized)
ctccccaccctgcatccaaacctccccagaccctcggctctccccctccttccgagcccggcctgaggccctccacagcagccctgaggatcctgttttgccacggccaccccagacctt

SEQ ID NO: 667188 - DNA, 120 bp, Artificial Sequence
  ENSG00000185133_24 (sequence is synthesized)
gcccttggatgtgggccagggtccttcagagcctggcactcactcccctggacttctgtcccccaccttccggcctggggccccctcaggccagactgtgcccccacctctgcccaagcc

SEQ ID NO: 667189 - DNA, 120 bp, Artificial Sequence
  ENSG00000185133_25 (sequence is synthesized)
accccgatcacccagccgttccccaagccactccccgaatcgctctccctgtgttcccccagcccctgacatggccctcccaaggcttggcacacagagtacagggcctggcaggtgcct

SEQ ID NO: 667190 - DNA, 120 bp, Artificial Sequence
  ENSG00000185133_26 (sequence is synthesized)
gagccccaaccttcaggcccaagaagccccagccccagtcaccacctcctcttctacatccaccctgtcatcctccccttggtcagctcagcctacctggaagagcgaccccggcttccg

SEQ ID NO: 667191 - DNA, 120 bp, Artificial Sequence
  ENSG00000185133_27 (sequence is synthesized)
tccaagacagagaaactgaggcgctgggcagagaggtacttgcctaaggtcacacagagctgggctttgaatctacacagccagtctcagctcccagctcttgctcctgagtggagctct

SEQ ID NO: 667192 - DNA, 120 bp, Artificial Sequence
  ENSG00000185133_28 (sequence is synthesized)
gggctggaggctctggcaccactcacccactcactacatcccctcgggttggatgggctggaaggatctgggctgagcccttatcctccatggacctgttgacaccccccactgcccccc

SEQ ID NO: 667193 - DNA, 120 bp, Artificial Sequence
  ENSG00000185133_29 (sequence is synthesized)
cagctctgggagaaggaccaggtggggtccttgtccccagaagcacacagagcatgtcccaggacacgcctgtaccttagactatggtccctgtcctcacctgccccaccccctccctgg

SEQ ID NO: 667194 - DNA, 120 bp, Artificial Sequence
  ENSG00000185133_30 (sequence is synthesized)
tcgtgctggtaacgcacccctcaccccctggacagccagagaccctgctgaattcctggctccagctgtaccctggctcactgtggggcccgctgggcctctgtggctgggtccgtgaca

SEQ ID NO: 667195 - DNA, 120 bp, Artificial Sequence
  ENSG00000185133_31 (sequence is synthesized)
tgggtgggtggaggagcagacctgaaggtgggcgcgagggcgggggagttgtgttctgtcccccagccacgtggcctcccgctgcaggtgagttcggtgaggatgcagggtgtcatcctg

SEQ ID NO: 667196 - DNA, 120 bp, Artificial Sequence
  ENSG00000185133_32 (sequence is synthesized)
ctgctgttcgccaagtactaccacctgcccttcctgcgagacgtgcagaccgactgcacgcgcactggcctgggcggctactgggtgagcctgtgagcaggcccagaagaggatgggaca

SEQ ID NO: 667197 - DNA, 120 bp, Artificial Sequence
  ENSG00000185133_33 (sequence is synthesized)
tgaagggggctttagattagtccccccgccccatgcacagcaaggtccccttcccatcctccaccctttaccctgcggcccagcccccccatgcaccacccaataccccatcctattcct

SEQ ID NO: 667198 - DNA, 120 bp, Artificial Sequence
  ENSG00000185133_34 (sequence is synthesized)
ctatacccccgcccttttctctccccactgtgtcccagcgttgttcctcatttctgtaggacccacccaccttccacccacatctcctctctaacccccgctcccagtgcctcacctcct

SEQ ID NO: 667199 - DNA, 120 bp, Artificial Sequence
  ENSG00000185133_35 (sequence is synthesized)
ctgggggtgcctaaagacttttgtcaaatgccacagcctctacattctgctccttgagttcagacaaataacctgacctcccaagatctgccaacgagagaggcagacctcgggaggtca

SEQ ID NO: 667200 - DNA, 120 bp, Artificial Sequence
  ENSG00000185133_36 (sequence is synthesized)
gtgaaggtagacagacagcctccttcctgctgccagttgggacctgggccaggcagatggcaggttgaaatggctgatgacatcactggttcccgggagcggtagagctggagccggagc

SEQ ID NO: 667201 - DNA, 120 bp, Artificial Sequence
  ENSG00000185149_0 (sequence is synthesized)
gagagaccctggacactgttcctgctccctcgccaccaaaacttctcctccagtcccctcccctgcaggaccatcgcccgcagcctctgcacctgttttcttgtgtttaagggtggggtt

SEQ ID NO: 667202 - DNA, 120 bp, Artificial Sequence
  ENSG00000185149_1 (sequence is synthesized)
tgcccccctccccacgctcccatctctgatcctcccaccttcacccgcccaccccgcgagtgagtgcggtgcccaggcgcgcttggcctgagaggtcggcagcagacccggcagcgccaa

SEQ ID NO: 667203 - DNA, 120 bp, Artificial Sequence
  ENSG00000185149_2 (sequence is synthesized)
ccgcccagccgctctgactgctccggctgcccgcccgcgcggcgcgggctgtcctggaccctaggaggggacggaaccggacttgcctttgggcaccttccagggccctctccaggtcgg

SEQ ID NO: 667204 - DNA, 120 bp, Artificial Sequence
  ENSG00000185149_3 (sequence is synthesized)
ctggctaatcatcggacagacggactgcacacatcttgtttccgcgtctccgcaaaaacgcgaggtccaggtcagttgtagactcttgtgctggttgcaggccaagtggacctgtactga

SEQ ID NO: 667205 - DNA, 120 bp, Artificial Sequence
  ENSG00000185149_4 (sequence is synthesized)
aaatgggtccaataggtgcagaggctgatgagaaccagacagtggaagaaatgaaggtggaacaatacgggccacaaacaactcctagaggtgaactggtccctgaccctgagccagagc

SEQ ID NO: 667206 - DNA, 120 bp, Artificial Sequence
  ENSG00000185149_5 (sequence is synthesized)
ttatagatagtaccaagctgattgaggtacaagttgttctcatattggcctactgctccatcatcttgcttggggtaattggcaactccttggtgatccatgtggtgatcaaattcaaga

SEQ ID NO: 667207 - DNA, 120 bp, Artificial Sequence
  ENSG00000185149_6 (sequence is synthesized)
gcatgcgcacagtaaccaactttttcattgccaatctggctgtggcagatcttttggtgaacactctgtgtctaccgttcactcttacctataccttaatgggggagtggaaaatgggtc

SEQ ID NO: 667208 - DNA, 120 bp, Artificial Sequence
  ENSG00000185149_7 (sequence is synthesized)
ctgtcctgtgccacctggtgccctatgcccagggcctggcagtacaagtatccacaatcaccttgacagtaattgccctggaccggcacaggtgcatcgtctaccacctagagagcaaga

SEQ ID NO: 667209 - DNA, 120 bp, Artificial Sequence
  ENSG00000185149_8 (sequence is synthesized)
tctccaagcgaatcagcttcctgattattggcttggcctggggcatcagtgccctgctggcaagtcccctggccatcttccgggagtattcgctgattgagatcatcccggactttgaga

SEQ ID NO: 667210 - DNA, 120 bp, Artificial Sequence
  ENSG00000185149_9 (sequence is synthesized)
ttgtggcctgtactgaaaagtggcctggcgaggagaagagcatctatggcactgtctatagtctttcttccttgttgatcttgtatgttttgcctctgggcattatatcattttcctaca

SEQ ID NO: 667211 - DNA, 120 bp, Artificial Sequence
  ENSG00000185149_10 (sequence is synthesized)
ctcgcatttggagtaaattgaagaaccatgtcagtcctggagctgcaaatgaccactaccatcagcgaaggcaaaaaaccaccaaaatgctggtgtgtgtggtggtggtgtttgcggtca

SEQ ID NO: 667212 - DNA, 120 bp, Artificial Sequence
  ENSG00000185149_11 (sequence is synthesized)
gctggctgcctctccatgccttccagcttgccgttgacattgacagccaggtcctggacctgaaggagtacaaactcatcttcacagtgttccacatcatcgccatgtgctccacttttg

SEQ ID NO: 667213 - DNA, 120 bp, Artificial Sequence
  ENSG00000185149_12 (sequence is synthesized)
ccaatccccttctctatggctggatgaacagcaactacagaaaggctttcctctcggccttccgctgtgagcagcggttggatgccattcactctgaggtgtccgtgacattcaaggcta

SEQ ID NO: 667214 - DNA, 120 bp, Artificial Sequence
  ENSG00000185149_13 (sequence is synthesized)
aaaagaacctggaggtcagaaagaacagtggccccaatgactctttcacagaggctaccaatgtctaaggaagctgtggtgtgaaaatgtatggatgaattctgaccagagctatgaatc

SEQ ID NO: 667215 - DNA, 120 bp, Artificial Sequence
  ENSG00000185149_14 (sequence is synthesized)
tggttgatggcggctcacaagtgaaaactgatttcccattttaaagaagaagtggatctaaatggaagcatctgctgtttaattcctggaaaactggctgggcagagcctgtgtgaaaat

SEQ ID NO: 667216 - DNA, 120 bp, Artificial Sequence
  ENSG00000185149_15 (sequence is synthesized)
gcaacaaaatggtttacttaacagttggttgggtagtaggttgcattatgagtaaaagcagagagaagtacttttgattattttcctggagtgaagaaaacttgaacaagaaattggtat

SEQ ID NO: 667217 - DNA, 120 bp, Artificial Sequence
  ENSG00000185149_16 (sequence is synthesized)
tatcaaagcattgctgagagacggtgggaaaataagttgactttcaaatcacgttaggacctggattgaggaggtgtgcagttcgctgctccctgcttggcttatgaaaacaccactgaa

SEQ ID NO: 667218 - DNA, 120 bp, Artificial Sequence
  ENSG00000185149_17 (sequence is synthesized)
cagaaatttctccagggagccacaggctctccttcatcgcattttgatttttttgttcattctctagacaaaatccatcagggaatgctgcaggaaacgattgccaactatacgaatggc

SEQ ID NO: 667219 - DNA, 120 bp, Artificial Sequence
  ENSG00000185149_18 (sequence is synthesized)
ttcgaggagataaactgaaatttgctatataattaatattttggcagatgataggggaactcctcaacactcagtgggccaattgttcttaaaaccaattgcacgtttggtgaaagtttc

SEQ ID NO: 667220 - DNA, 120 bp, Artificial Sequence
  ENSG00000185149_19 (sequence is synthesized)
ttcaactctgaatcaaaagctgaaattctcagaattacaggaaatgcaaaccatcatttaatttctaatttcaagttacatccgctttatggagatactatttagataacaagaatacaa

SEQ ID NO: 667221 - DNA, 120 bp, Artificial Sequence
  ENSG00000185149_20 (sequence is synthesized)
cttgatacttttattgttatacctttttgaacatgtatgatttctgttgttattcctattggagctaagtttgtctacactaaaatttaaatcagactagagaataatttttgtggcatg

SEQ ID NO: 667222 - DNA, 120 bp, Artificial Sequence
  ENSG00000185149_21 (sequence is synthesized)
ttgtaacatttcacagtatttacaagctatttttgcacaggtacatagctctcatgtatttaaagaacactgcagtgttattttctttgaaattcatcctccacggacccattcatacta

SEQ ID NO: 667223 - DNA, 120 bp, Artificial Sequence
  ENSG00000185149_22 (sequence is synthesized)
aataaaacaatgtaattacattaaaatggacctatctgtaagaggtactaaaaacactggattcatttcatcttgcaaatgttgtatttcaaaccagtttcacataagttatttgtcttc

SEQ ID NO: 667224 - DNA, 120 bp, Artificial Sequence
  ENSG00000185149_23 (sequence is synthesized)
gttatttcaatagtacccaaccaaagatgcttaaaaaccttctatgttcataaaaaataacaactgagatgttaaaatagtcatacgtctttagatgctattaaagtttcattagtcata

SEQ ID NO: 667225 - DNA, 120 bp, Artificial Sequence
  ENSG00000185149_24 (sequence is synthesized)
tttttgtaaatatgacagaatttgtgaatatatttttaaagcaaaaaacttcaacatgcatatgatatatagttacaacattaattttatgaactggagagctttactttgtggatatat

SEQ ID NO: 667226 - DNA, 120 bp, Artificial Sequence
  ENSG00000185149_25 (sequence is synthesized)
ttaaaattcatattatagctcctattaaattccttccatgatagatataaaggactggtttttaagtgcactgcacttctggaatactgaaaaagaatgaaaacaatatgttagattagg

SEQ ID NO: 667227 - DNA, 120 bp, Artificial Sequence
  ENSG00000185149_26 (sequence is synthesized)
tgtaagactttaagaagcgaacaaaaagtaatgtatatctgtaatatataatcaaatgattcatttttctgttagactaggcaaattgttcaaaaataacctttttgtcttttaagtagc

SEQ ID NO: 667228 - DNA, 120 bp, Artificial Sequence
  ENSG00000185149_27 (sequence is synthesized)
agtcactttgcttaagatgctaatagaaaactgtggttaaagatttaccctccctcttggtgaattattacactgtaagaaatgtatatgctactgtgttacatgttgtattagtaaatt

SEQ ID NO: 667229 - DNA, 120 bp, Artificial Sequence
  ENSG00000185149_28 (sequence is synthesized)
attagaatccaattaatgattcaattaacatatatcttatccaattcattatgtcaattcattaataaaataccttttatgtagaggctttatgttgcaattaaaaagttgggaaaatga

SEQ ID NO: 667230 - DNA, 120 bp, Artificial Sequence
  ENSG00000185155_0 (sequence is synthesized)
cctggcccgggagggtataagtgcggcccgcgcccctccgagcggcgcgctgggttccggagcgatggccacagccgagtcccgtgcgctccagtttgccgagggcgccgcgtttccagc

SEQ ID NO: 667231 - DNA, 80 bp, Artificial Sequence
  ENSG00000185155_1 (sequence is synthesized)
cgcgtttccagcgtaccgggccccccacgccggcggggcgctcctgccgcccccgagccctgcggcagccctgctccctg

SEQ ID NO: 667232 - DNA, 120 bp, Artificial Sequence
  ENSG00000185155_2 (sequence is synthesized)
ccgccccccgccagcctgggctcgcctgcgccccccaaaggcgcggccgccccgtcggcgtcgcagcgccgcaagcgcacgtctttcagcgccgaacagctgcagctgctggagctcgtc

SEQ ID NO: 667233 - DNA, 120 bp, Artificial Sequence
  ENSG00000185155_3 (sequence is synthesized)
gctgctggagctcgtcttccgccggacccggtaccccgacatccacttgcgcgagcgcctggccgcgctcaccctgctccccgagtccaggatccaggtatggttccagaacaggcgtgc

SEQ ID NO: 667234 - DNA, 120 bp, Artificial Sequence
  ENSG00000185155_4 (sequence is synthesized)
caagtctcggcgtcagagtgggaaatccttccaacctttggctaggccggagattatcctcaaccactgtgctcctggaactgaaacgaaatgtctgaagccccagctgcctcttgaggt

SEQ ID NO: 667235 - DNA, 120 bp, Artificial Sequence
  ENSG00000185155_5 (sequence is synthesized)
agatgtgaactgcctgcccgaaccaaacggggttggagggggcatctctgactctagctcccaaggtcagaattttgaaacctgttcccctctctctgaagacattggttcaaagctgga

SEQ ID NO: 667236 - DNA, 120 bp, Artificial Sequence
  ENSG00000185155_6 (sequence is synthesized)
ctcatgggaggaacacatcttttctgcctttggtaacttttgaggattctgggagaattcgggataagctctgaggagccatgactgacagcctgggagagacacatcagcatactgtcc

SEQ ID NO: 667237 - DNA, 120 bp, Artificial Sequence
  ENSG00000185155_7 (sequence is synthesized)
tttctgacttccatgctaaggacatgtccttgttaaccttgatgatggttttgacagcacctctcacatttgaaggtaccccgccactttgtcaatgacgttttaagcccacactcccac

SEQ ID NO: 667238 - DNA, 120 bp, Artificial Sequence
  ENSG00000185155_8 (sequence is synthesized)
gcctgtttttagtttttggactggttgttcagaactcattattttcttcacaagaatgcctcagcttgactcagtttccccttgtgtttgacagctgccattttctcctggtccctccaa

SEQ ID NO: 667239 - DNA, 120 bp, Artificial Sequence
  ENSG00000185155_9 (sequence is synthesized)
ggcttataatcttaaagtcactctaccccgtctcttcaaccctcatcctaggtttattactttttaaaattgggcctgtcatcttcacgttcaatcatagctccaatgactctgcatgca

SEQ ID NO: 667240 - DNA, 120 bp, Artificial Sequence
  ENSG00000185155_10 (sequence is synthesized)
gattatttcgacagcccccttgcctctagcttctcaactacttaaaaaaaattaccctctgtgggccaggtgcagtggctcactcctgcaatctcagcactttgggaggccgagtgggtg

SEQ ID NO: 667241 - DNA, 61 bp, Artificial Sequence
  ENSG00000185155_11 (sequence is synthesized)
gctaaaaatataaaacttagctgggcacggtgacgggagcctgtagtcccagctactcagg

SEQ ID NO: 667242 - DNA, 83 bp, Artificial Sequence
  ENSG00000185155_12 (sequence is synthesized)
agcctgggaggtggaggttgcagtgatctaagatcgtgccactgcacttcagcctgggagacagagggaggtatggttctgtg

SEQ ID NO: 667243 - DNA, 120 bp, Artificial Sequence
  ENSG00000185155_13 (sequence is synthesized)
aaaaaattactctatggttctgtggtagcctccagttgctaccaaattataaaaagctttcagttaccctcccagataactgatatcatccttagcctgcaggacagctatgcaaatctg

SEQ ID NO: 667244 - DNA, 120 bp, Artificial Sequence
  ENSG00000185155_14 (sequence is synthesized)
aaggtcaactatccacaatatatgctttggtcttaaagtcactcctttcagttttgaaccaaattcataccttttgctttcaaaacactcgaggactccccacctgccttctgaagtctg

SEQ ID NO: 667245 - DNA, 120 bp, Artificial Sequence
  ENSG00000185155_15 (sequence is synthesized)
aaattttctctaagtaatcctgattttgcacctgttacttcgatcactccattacccttagcacttgttattgtacttcctgtgcaagttttgtggattattaaatgtctttcacaaatg

SEQ ID NO: 667246 - DNA, 120 bp, Artificial Sequence
  ENSG00000185156_0 (sequence is synthesized)
ctttcggtccaacggcaggacctgggggctgtggccgggggcggccgttgacctggtgaccgcggcgccgccccagaccgggggcgcagtcccactcgctccgagccccggtcccccaag

SEQ ID NO: 667247 - DNA, 120 bp, Artificial Sequence
  ENSG00000185156_1 (sequence is synthesized)
cactcgctccgagccccggtcccccaagcctccctcccgggtacctggggccgcgcccgccctgcgcccagctccgccctccgtcggcccaggcctgacagagcccggcagccatgagtg

SEQ ID NO: 667248 - DNA, 120 bp, Artificial Sequence
  ENSG00000185156_2 (sequence is synthesized)
cagccatgagtgccaacccccggtgggacatcagcagggcgctgggggtggccaagctcttccacctggtgtgcggggtgcgggaagcctgcgtgaccccgttcctgaccctttacctga

SEQ ID NO: 667249 - DNA, 120 bp, Artificial Sequence
  ENSG00000185156_3 (sequence is synthesized)
ggcagctgggcttggccgcgccctgggtgggcaccctaatgggaaccaagcacctaatcgctgccttctgggctcccgtctgtgccttcctggccaaaagctaccggaaaaggagagcgc

SEQ ID NO: 667250 - DNA, 120 bp, Artificial Sequence
  ENSG00000185156_4 (sequence is synthesized)
ttctgatcggctccctgctcggctcggtgggggccagcctgctgatggtcctggtcccaccggtagacaaaaatcgggtgcacttcccttgtaatggaagcagcggcctgaccagcacag

SEQ ID NO: 667251 - DNA, 120 bp, Artificial Sequence
  ENSG00000185156_5 (sequence is synthesized)
acgcactcccgggggtcacgctacctgtgaacatcacctcggcccaagagtctgcctccagccacccagccaagaggactgcagaggtggaaatgcctggcttcagaaacccacctggtg

SEQ ID NO: 667252 - DNA, 120 bp, Artificial Sequence
  ENSG00000185156_6 (sequence is synthesized)
aaagtgaccgagaaactttccgtgatctgcacgtctacttagcgccctccgttgaaggagctaggaccacatcccaagctctcctccatcctgtcacttcggggctgaaagatcatccct

SEQ ID NO: 667253 - DNA, 120 bp, Artificial Sequence
  ENSG00000185156_7 (sequence is synthesized)
gggaagttacttttgaggtggtcaagacagccctccccttgcttcctggggggaaagggcccgggaatccagccaatttgtcagggaccaaggggaaagcctgggcttttgacctgtcct

SEQ ID NO: 667254 - DNA, 120 bp, Artificial Sequence
  ENSG00000185156_8 (sequence is synthesized)
tggaggcgttgcggcggacttttatcctctccttggggtccgtggcgttctgggagctgctgacagcgcctctggagcaggtggcagatgacagcctttatgagttcctggattttgtgg

SEQ ID NO: 667255 - DNA, 120 bp, Artificial Sequence
  ENSG00000185156_9 (sequence is synthesized)
gcttcctgatgaccagtggcccccgaggtgtggtccacttctatgggtactcggtggtcagcaccctggccttactggtgagcattgcctttcccattcccatctgtcagcagtgggagc

SEQ ID NO: 667256 - DNA, 120 bp, Artificial Sequence
  ENSG00000185156_10 (sequence is synthesized)
ccagctacaaaagggtcaaagcactgtccattgtggggggtgacccccacctcattctcctcgcctccaccactgttttggtaggagccatcgtcagtactgtccagaactttctgttct

SEQ ID NO: 667257 - DNA, 120 bp, Artificial Sequence
  ENSG00000185156_11 (sequence is synthesized)
ggcacatgaaggaccatgggagcggcgagctggtcatgggtttctcggtcgccctcagcttgctgggggaaattctgcttcatccgttcaaagctacattgcttaggaaactgtccagga

SEQ ID NO: 667258 - DNA, 120 bp, Artificial Sequence
  ENSG00000185156_12 (sequence is synthesized)
cgggcctggtggggctggggctgagctgcctcgctgggcagctgctgtactactctttcctctggagctggtggtccgtcctccccattcagatcttgagtgccattagcaacagagctt

SEQ ID NO: 667259 - DNA, 120 bp, Artificial Sequence
  ENSG00000185156_13 (sequence is synthesized)
tgtggtgggctgtgggggcctcagtagaggacctggccactccccgcatggagagggctctgagtgccttgttccgaggccacttttacgggagtggctgtagcctgggcagctttgtcg

SEQ ID NO: 667260 - DNA, 120 bp, Artificial Sequence
  ENSG00000185156_14 (sequence is synthesized)
ggggcttcgtggtgatgcgcttcagcctggctgtgctctaccaggcctgctgtgtggccctgttgctctggttggccttgctcctgtccatacagcggaggctgccccgagagcggaaaa

SEQ ID NO: 667261 - DNA, 120 bp, Artificial Sequence
  ENSG00000185156_15 (sequence is synthesized)
tcaagtactcgaagctgctgtccatggaggtgagtgacaccagtgactctgagcaggggacagaacaggactggcttgtgaaggccatgagggaggaacactcagactgaaagggctgag

SEQ ID NO: 667262 - DNA, 120 bp, Artificial Sequence
  ENSG00000185156_16 (sequence is synthesized)
aaatccagagtgtgctgatccagcaaggaacgaatggactgaacaaaactcagcctgctgaggacagaaacctgccctggactgctgggagccggggaagagaggatgggtctgtgctga

SEQ ID NO: 667263 - DNA, 120 bp, Artificial Sequence
  ENSG00000185156_17 (sequence is synthesized)
aggcccaacaggatcatctcattgcatgattttctttacttttgaagtaaaaggagatttaactttttgccaatcttttttagataatggaggaagaatacatttgctttttaaaaagtt

SEQ ID NO: 667264 - DNA, 120 bp, Artificial Sequence
  ENSG00000185158_0 (sequence is synthesized)
gtgtcatgtcttggctgcgtttctggggcccatggcccctccttacgtggcaactattgtctttactagtcaaggaggctcagcctctggtgtgggtcaaggacccgctccagctgacct

SEQ ID NO: 667265 - DNA, 120 bp, Artificial Sequence
  ENSG00000185158_1 (sequence is synthesized)
ctaaccccctggggccacctgagccctggtcttcccgctcctcccatctcccatgggaatctccccatgcacctgctcccccagcagccccgggggactttgattacctggggccctctg

SEQ ID NO: 667266 - DNA, 120 bp, Artificial Sequence
  ENSG00000185158_2 (sequence is synthesized)
cttcttcgcagatgtcagccctgcctcaggaaccaactgaaaatttggctccattcctgaaggaattggattcagctggagagctgcccctggggccagagccgttcttggctgcacatc

SEQ ID NO: 667267 - DNA, 120 bp, Artificial Sequence
  ENSG00000185158_3 (sequence is synthesized)
aggacttaaatgacaagcggactccagaagaaaggctcccagaggtggttccgcttctcaaccgggatcagaaccaggccctagttcagcttcctcgcctcaagtgggttcaaactacag

SEQ ID NO: 667268 - DNA, 120 bp, Artificial Sequence
  ENSG00000185158_4 (sequence is synthesized)
atctagatcgggctgcaggtcatcaggcagatgaaatacttgttccactagacagtaaggtttcaagaccaaccaaatttgttgtttcgcccaagaacctgaagaaagatctagctgaac

SEQ ID NO: 667269 - DNA, 120 bp, Artificial Sequence
  ENSG00000185158_5 (sequence is synthesized)
gttggagccttcctgagattgttgggattccacaccaattatccaaacctcagcgtcagaaacagactttgccagatgattatttgagtatggacacactgtatcccggcagcctacctc

SEQ ID NO: 667270 - DNA, 120 bp, Artificial Sequence
  ENSG00000185158_6 (sequence is synthesized)
cagaactccgggtgaacgcagatgagcctccagggcctcctgagcaagttggactttctcaattccatctagagcccaaaagtcaaaatccagagacccttgaagacatccagtcctctt

SEQ ID NO: 667271 - DNA, 120 bp, Artificial Sequence
  ENSG00000185158_7 (sequence is synthesized)
cactccaggaagaagccccagcgcagcttctacagctccctcaggaggtagaaccttcaacccagcaggaggccccagctctgcctccagagtcctctatggagagtctagctcaaactc

SEQ ID NO: 667272 - DNA, 120 bp, Artificial Sequence
  ENSG00000185158_8 (sequence is synthesized)
cactgaatcatgaagtgacagttcaacctccaggtgaggatcaagctcattataatttgcccaagtttacagtcaaacctgcagatgtggaggttaccatgacttcagagcctaaaaatg

SEQ ID NO: 667273 - DNA, 120 bp, Artificial Sequence
  ENSG00000185158_9 (sequence is synthesized)
agacagaatctacccaagcccagcaggaggccccaattcagcctcccgaggaggcggaaccttcttctacagccctgaggactacagatcctcctccagaacaccctgaggtgacacttc

SEQ ID NO: 667274 - DNA, 120 bp, Artificial Sequence
  ENSG00000185158_10 (sequence is synthesized)
caccttcagacaagggtcaggctcagcattcacacctgactgaagccacagttcaacctctggacctggagcttagcataactacagagcctactacagaggttaaaccgtctccaacca

SEQ ID NO: 667275 - DNA, 120 bp, Artificial Sequence
  ENSG00000185158_11 (sequence is synthesized)
cggaggaaacctcagctcagcctccagacccggggcttgccataactccagaacccactacagagattggacattccacagccctggagaagactagagctcctcatccagaccaggttc

SEQ ID NO: 667276 - DNA, 120 bp, Artificial Sequence
  ENSG00000185158_12 (sequence is synthesized)
agtcacaggtccacctacaaagttagaatcttcgcaggattcattggtgcagtctgaaactgcaccagaggaacagaaggcctccacaagcaccaacatatgtgagctctgcacctgcgg

SEQ ID NO: 667277 - DNA, 120 bp, Artificial Sequence
  ENSG00000185158_13 (sequence is synthesized)
agatgagactctgtcatgtgttggtctcagcccaaagcagaggctccgccaagtgcctgtgccagagcccgacacctacaatggcatcttcaccaccttaaatttccaaggaaactatat

SEQ ID NO: 667278 - DNA, 120 bp, Artificial Sequence
  ENSG00000185158_14 (sequence is synthesized)
ttcataccttgatggaaatgtatggaaagcatacagttggaccgagaaactaattctcagtgaaaattatttgactgaattacctaaggattcatttgaaggcctgctatacctccagta

SEQ ID NO: 667279 - DNA, 120 bp, Artificial Sequence
  ENSG00000185158_15 (sequence is synthesized)
tttagatttatcctgcaataaaatacgatatattgaaagacaaacatttgaatcactaccatttttgcagtatataaatctgggctgcaatttaattacaaaactgagccttggaacatt

SEQ ID NO: 667280 - DNA, 120 bp, Artificial Sequence
  ENSG00000185158_16 (sequence is synthesized)
tcaggcctggcacggaatgcagtttttacacaacttaattctcaatcgcaatcctctgactactgtcgaagatccatatctctttgaactgccggcattaaaatatctagacatgggaac

SEQ ID NO: 667281 - DNA, 120 bp, Artificial Sequence
  ENSG00000185158_17 (sequence is synthesized)
aacacacatcacacttacaacacttaagaacattctcacgatgactgttgaactggaaaaactgatcttacctagccatatggcctgctgcctctgccaatttaaaaatagcattgaggc

SEQ ID NO: 667282 - DNA, 120 bp, Artificial Sequence
  ENSG00000185158_18 (sequence is synthesized)
tgtctgcaagacagtcaagctgcattgcaacactgcatgtctgactaacagcatacattgtcctgaagaagcatctgtagggaatccagaaggagcgttcatgaagatgttacaagcccg

SEQ ID NO: 667283 - DNA, 120 bp, Artificial Sequence
  ENSG00000185158_19 (sequence is synthesized)
gaagcagcacatgagcactcagctgactattgagtcggaggcgccctcagacagcagtggcatcaacttgtcaggctttgggggtgatcagcttgaaattcagctaaccgagcagctacg

SEQ ID NO: 667284 - DNA, 120 bp, Artificial Sequence
  ENSG00000185158_20 (sequence is synthesized)
gtccctcatccccaacgaggatgtgagaaagttcatgtctcatgttatccggaccttgaaaatggaatgttcagaaacacatgtgcaagggagctgtgccaagctcatgttgcgaacagg

SEQ ID NO: 667285 - DNA, 120 bp, Artificial Sequence
  ENSG00000185158_21 (sequence is synthesized)
cctcctgatgaagcttctcagcgagcagcaggaagcaaaggcattgaatgtagaatgggatacggaccaacaaaaaacaaattatattaatgagaacatggaacagaatgaacagaaaga

SEQ ID NO: 667286 - DNA, 120 bp, Artificial Sequence
  ENSG00000185158_22 (sequence is synthesized)
gcagaagtcaagtgagctcatgaaagaagttccaggagatgactataagaacaaactcatcttcgcaatatctgtgactgtaatactaataattttgattataattttttgtcttataga

SEQ ID NO: 667287 - DNA, 120 bp, Artificial Sequence
  ENSG00000185158_23 (sequence is synthesized)
ggtgaattcacataaaagggcatcagaaaaatacaaagacaacccatcaatatcaggagcctgagcatgagttaaagcatgtggatggcctggagctatgtttttaaaattgttattaaa

SEQ ID NO: 667288 - DNA, 120 bp, Artificial Sequence
  ENSG00000185158_24 (sequence is synthesized)
tattggttttttacttaaatcaatgaaaactttctttactttgtggttgtgttcctcaaaatgagaatttttaacaataataaaaataaagcttgttagatcatttttaatggtaataaa

SEQ ID NO: 667289 - DNA, 120 bp, Artificial Sequence
  ENSG00000185158_25 (sequence is synthesized)
aacagatctggacccaagcctaataaaggtgacataaataaaggtgtcataaagacagggcatggcacacgcttataaggggcatgagcatctcagggctgccagaatggcttttgctga

SEQ ID NO: 667290 - DNA, 120 bp, Artificial Sequence
  ENSG00000185158_26 (sequence is synthesized)
gatgccgaggagacccaggagtctgaggacaactaggaggatgacatggaggaggacgacgatgactccgattatccggaggagctggaagatgacgacgaggacgccagttactccacg

SEQ ID NO: 667291 - DNA, 120 bp, Artificial Sequence
  ENSG00000185158_27 (sequence is synthesized)
gaaagcagcttcagcagcactccagaaagtggtaaaatagctgtggagtgcagacccagtgaagagattgtagatgtcagatgggaagaactacacagtttaattcaagtcagttgctct

SEQ ID NO: 667292 - DNA, 120 bp, Artificial Sequence
  ENSG00000185158_28 (sequence is synthesized)
tgtgtcctccttcccattggccttctggttcctacccaagtgtccagtccacgggtctcagtaacacctctttgcccagccctgtggtagcgttggctgcctcctttacctactcaagta

SEQ ID NO: 667293 - DNA, 120 bp, Artificial Sequence
  ENSG00000185158_29 (sequence is synthesized)
gtcaggctttgggggtgagcagctagacaccaatgacgagagtgatgttagcagtgcactaagttacatcttgccttatctctcactgggaaatctaggtgcagaatcaatattgttacc

SEQ ID NO: 667294 - DNA, 120 bp, Artificial Sequence
  ENSG00000185158_30 (sequence is synthesized)
aagtcaggtttattgagatttaattttcatataacattcaccctttataagtgtatagtttgatgagttttgacaaatgtatagttacataaccaccaccacattcccaatataaagcat

SEQ ID NO: 667295 - DNA, 120 bp, Artificial Sequence
  ENSG00000185158_31 (sequence is synthesized)
ttctgtcacctcagaaaggcccctcatttccctttgtaggcaatcccttcctcccaccatcagcccctgttagctactaatctgatttctgttcctagttttgtctttttcagaatgtct

SEQ ID NO: 667296 - DNA, 120 bp, Artificial Sequence
  ENSG00000185158_32 (sequence is synthesized)
tataaatgaaatcatgtagcatgtagcctcttgtgtttgacttctttcacttagtattgttttttattttttttgagacggagtctcactgtcactcaggctgcagtgcagaggcatgac

SEQ ID NO: 667297 - DNA, 83 bp, Artificial Sequence
  ENSG00000185158_33 (sequence is synthesized)
cacgatgactgttgaactggaaaaactacggagtctcactgtcactcaggctgcagtgcagaggcatgacctcagctcactac

SEQ ID NO: 667298 - DNA, 120 bp, Artificial Sequence
  ENSG00000185158_34 (sequence is synthesized)
gggactgcattcaacttagaaccaactgttaaacaaactgagacaaaatgggaatacaacaatgtgggcattgacttgtcccctgagcccaaaagcttcaattacccattgctctcgtcc

SEQ ID NO: 667299 - DNA, 120 bp, Artificial Sequence
  ENSG00000185158_35 (sequence is synthesized)
ttaaggctgaggtgtgctttgttcttttactgcaatgtatattccaggattgttaaaggatcctcgcttccaggaggtctctgtgaaataaaaccaagttaatcccactagactatttta

SEQ ID NO: 667300 - DNA, 120 bp, Artificial Sequence
  ENSG00000185158_36 (sequence is synthesized)
agaagttaagttgatataatagcaaaatttctcccacccaaaactatgtcaacaattggatgtactcactgagtcaccccttactctgccactaatttatttccttgttgcttaaatgat

SEQ ID NO: 667301 - DNA, 120 bp, Artificial Sequence
  ENSG00000185158_37 (sequence is synthesized)
gagagacatataatctccaccctcacggagttgtaatcaccctggagaggaagaagacagccaaaagagagaagtattgtcttgtagacttattagattcacatagtatcatccttctcc

SEQ ID NO: 667302 - DNA, 120 bp, Artificial Sequence
  ENSG00000185158_38 (sequence is synthesized)
gaggaggacgacgatgactccgattatccggaggagctggaagatgacgacgaggacgccagttactccacggaaagcagcttcagcagcactccaggatcttcatgacattcaatgagt

SEQ ID NO: 667303 - DNA, 120 bp, Artificial Sequence
  ENSG00000185158_39 (sequence is synthesized)
ctaatgtgtactcatctggatcttaggggaaataacctatcaggttatagggaaggaggacctttaataaccaagctaaatgtgtgggctgtttacctctccctcttatgcaaaggtatc

SEQ ID NO: 667304 - DNA, 120 bp, Artificial Sequence
  ENSG00000185158_40 (sequence is synthesized)
ccttgcacacactgaaaacttcatagaccaaaagcattatagctctagtttgccttgaaggaagttgtattgtctgtagagcatgtgggccattttctgccaataaaatgttcaaatgtt

SEQ ID NO: 667305 - DNA, 120 bp, Artificial Sequence
  ENSG00000185158_41 (sequence is synthesized)
ggctatgatatgtgggagcagagaatggggtgggtgggtggagcacatgccagatgaggatctatcagcaatgggagggggcatcccgccctgctcctttagcatctccaccctgctcct

SEQ ID NO: 667306 - DNA, 120 bp, Artificial Sequence
  ENSG00000185158_42 (sequence is synthesized)
ctcagaggaccgcctttgattgcattcagctgcgatggtagcaagaacacgggcacactgaggatgaggagagtgggagccttgtgctctctctgcatatgaggcaggacagcacagggt

SEQ ID NO: 667307 - DNA, 120 bp, Artificial Sequence
  ENSG00000185158_43 (sequence is synthesized)
atggagcagtctgcagagaggccagttcatcagctcatcagggaagcacttgtcttccaccttgggctttgactgagcactgggcaattggcccctggggatcaacggaataatcctaag

SEQ ID NO: 667308 - DNA, 120 bp, Artificial Sequence
  ENSG00000185158_44 (sequence is synthesized)
cagagttactctatgtcacactatggaatgttccaagtaggtggccatgtcttttcctcctttcgttgttgccatttcataggtttaggtttgggtgtatgtttctcctctctgaatggc

SEQ ID NO: 667309 - DNA, 120 bp, Artificial Sequence
  ENSG00000185158_45 (sequence is synthesized)
actcgaatgtttgctgactcttactctgtgtgactggggcatatagctatggactgagtatgaaagatgatcaaagatatttcatgatcaaagcagtctcttcttttctgacagctgaag

SEQ ID NO: 667310 - DNA, 80 bp, Artificial Sequence
  ENSG00000185163_0 (sequence is synthesized)
gagtcccaggcgtgcggctggccatggcgctgttctacgtcgcgcggtacccgggccccgatgcggcagctgcggcgggg

SEQ ID NO: 667311 - DNA, 80 bp, Artificial Sequence
  ENSG00000185163_1 (sequence is synthesized)
cgctgctcgagcggctgcagagccgggcccgcgaacggcagcagcagcgggagcccgcgcagaccgaggcggctgcatcg

SEQ ID NO: 667312 - DNA, 120 bp, Artificial Sequence
  ENSG00000185163_2 (sequence is synthesized)
ggcggcgggtgaacgacgcggagccggggagcccggaggcgccgcagggaaagcgacggaaggcggacggcgaggacgcgggcgcagaaagcaacgaggaggcgccaggggagcccagcg

SEQ ID NO: 667313 - DNA, 120 bp, Artificial Sequence
  ENSG00000185163_3 (sequence is synthesized)
cagaaagcaacgaggaggcgccaggggagcccagcgcagggagcagcgaggaggcgccaggggagcccagcgcagggagcagcgaggaggcgccgggggagcgcagcaccagcgccagcg

SEQ ID NO: 667314 - DNA, 120 bp, Artificial Sequence
  ENSG00000185163_4 (sequence is synthesized)
cggccggacccctggtccccggcctggtgctgggggggttcgggaagaggaaggcgccgaaggtccagcctttcctgccaaggtggctggctgagcctaactgtgtcagaaggaatgtca

SEQ ID NO: 667315 - DNA, 120 bp, Artificial Sequence
  ENSG00000185163_5 (sequence is synthesized)
ccgaagacctggttcctatcgaggacatccctgacgtccatcctgacctgcagaagcagctgcgggcacacggcatctcgtcctactttccagtccaggcagctgtgattcctgccctcc

SEQ ID NO: 667316 - DNA, 120 bp, Artificial Sequence
  ENSG00000185163_6 (sequence is synthesized)
tggagagcgcagcctgtgggtttctggtgggcagaggtggctaccggcctagcgacctctgtgtttctgccccaacaggcagtgggaagacactggccttcgtcatccctgtggtgcagg

SEQ ID NO: 667317 - DNA, 120 bp, Artificial Sequence
  ENSG00000185163_7 (sequence is synthesized)
ccctgctttcgagagtggtctgccacatccgtgccctggttgtgctgcccaccaaggagctggcccagcaggtgagcaaagttttcaacatctacacagatgccacacctctgagagtct

SEQ ID NO: 667318 - DNA, 120 bp, Artificial Sequence
  ENSG00000185163_8 (sequence is synthesized)
ccctggttacgggacagaagtctctggccaaggagcaggagagcctcgtccagaaaacagctgatgggtaccgctgcttggctgacatcgtggtagccacccccggccgcctggtggacc

SEQ ID NO: 667319 - DNA, 120 bp, Artificial Sequence
  ENSG00000185163_9 (sequence is synthesized)
acatcgaccagaccccaggattcagcctccagcagctccgcttcctgattatcgacgaggctgaccggatgattgacagcatgcatcagtcctggctgccgcgggtggtggcggccgcct

SEQ ID NO: 667320 - DNA, 120 bp, Artificial Sequence
  ENSG00000185163_10 (sequence is synthesized)
tccagagcgaggaccccgcggacccctgtgccctgctccagcgaaggcaggcccaggctgtgacagccgccagcacctgctgtccccagatgcccctgcagaagctgctcttctcagcta

SEQ ID NO: 667321 - DNA, 120 bp, Artificial Sequence
  ENSG00000185163_11 (sequence is synthesized)
ctctgacccagaaccctgaaaagctgcagcagctgggcctccaccagccccggcttttctccacagggctagcacacaggggcctggaagatacagatggggacggggattcggggaagt

SEQ ID NO: 667322 - DNA, 120 bp, Artificial Sequence
  ENSG00000185163_12 (sequence is synthesized)
atgcctttcctgttgggctcacgcaccactacgtgccctgcagcctcagctctaagccgctggtcgtcctgcacctggtcctggagatgggcttctcgagggttctctgcttcactaact

SEQ ID NO: 667323 - DNA, 120 bp, Artificial Sequence
  ENSG00000185163_13 (sequence is synthesized)
cccgagagaactcccacaggctcttcctgctggtgcaagcttttgggggtgtggacgtggctgagttctcctcgcgctacgggcctggccagaggaggatgatcctgaagcagtttgaac

SEQ ID NO: 667324 - DNA, 120 bp, Artificial Sequence
  ENSG00000185163_14 (sequence is synthesized)
aggggaagatccagctgctcatcagcacggacgccaccgcgcgaggcatcgacgtgcagggtgtggagctggtggtgaactacgacgccccccagtacctgagaacctacgtgcaccggg

SEQ ID NO: 667325 - DNA, 120 bp, Artificial Sequence
  ENSG00000185163_15 (sequence is synthesized)
ttgggaggacagctcgcgctgggaaaactggacaggccttcacactgctcctgaaagtgcaggagaggagattcctccgaatgctaactgaagctggggcacctgagttgcagcggcacg

SEQ ID NO: 667326 - DNA, 120 bp, Artificial Sequence
  ENSG00000185163_16 (sequence is synthesized)
agctctccagcaagctgctgcagccgctggttcctcggtacgaggaggccctgtcccagctggaggagtctgtcaaggaagagcgcaagcagagggcggcctaggctggggctcagaggg

SEQ ID NO: 667327 - DNA, 120 bp, Artificial Sequence
  ENSG00000185163_17 (sequence is synthesized)
ccggagggactgaacgctcaccaccctgaccctccttccagagcagtgctgatcactggatcctgtatgtgaggaaaggaatcccccagtggacacagccttcctccccaagcacgtggt

SEQ ID NO: 667328 - DNA, 120 bp, Artificial Sequence
  ENSG00000185163_18 (sequence is synthesized)
ctctgcgccaggcagcccgggcgtcagagctcaagcacctgccccgactggagacttcagggcttgtcactttcagagtgtggaggtcaggatggctgcgggcaatgaagccttagtaaa

SEQ ID NO: 667329 - DNA, 120 bp, Artificial Sequence
  ENSG00000185163_19 (sequence is synthesized)
ggtgaaaagtactcccagacggacgcgggcacccgtcatgcttttgctgagagttgggggcattaaccttgagctaatgttaaaaatcaagctcttggccaggcatggtggctcatgcct

SEQ ID NO: 667330 - DNA, 90 bp, Artificial Sequence
  ENSG00000185163_20 (sequence is synthesized)
gctctcctccccagatttgtgaaccttgtgactgttcagtggacacctcacatattgctggtgggaaggtcacgtggagacagctgggca

SEQ ID NO: 667331 - DNA, 120 bp, Artificial Sequence
  ENSG00000185163_21 (sequence is synthesized)
catattgctggtgggaaggtcacgtggagacagctgggcaaagccttggggcgttaaacacagagtcactcatgacccagcacttcctctcctatgcaccttgtacaccccagatcaatg

SEQ ID NO: 667332 - DNA, 120 bp, Artificial Sequence
  ENSG00000185163_22 (sequence is synthesized)
aaacctacatccacacagaaacgtacacaaatctctcagcagcactgttcacagtagccaaaaactagaaaccacatgtccgtcagctgatgaatggagaataaaacgtgggaaatccac

SEQ ID NO: 667333 - DNA, 120 bp, Artificial Sequence
  ENSG00000185163_23 (sequence is synthesized)
accaggagagaaaaaggagtgaggcaccagcataggcaccccgtggatgaacccggaacctgacgctaactgaaggaaggctccggctatagggagtgtcccaggcacagccagagattg

SEQ ID NO: 667334 - DNA, 120 bp, Artificial Sequence
  ENSG00000185163_24 (sequence is synthesized)
aagggtgccggggccgggagttggtgggggttggggctggggacacagtggccagtgtgtgggtttgttttggggatgatgaaaatgttcttaggttgtgtgtggtgatggctgctcacc

SEQ ID NO: 667335 - DNA, 120 bp, Artificial Sequence
  ENSG00000185163_25 (sequence is synthesized)
tctataaaccttttactaaaaaccatggactgggtggatacagtgtgtgaattctctcagtccagtgctttgtttgaaaaaggtggatgatgccaacatcactaaccgccagggagacgc

SEQ ID NO: 667336 - DNA, 120 bp, Artificial Sequence
  ENSG00000185163_26 (sequence is synthesized)
aggccacggccacacccggctcactggagttgtgaggatggaaacaccagcccaccccactcagttcagacctcagcttagatgcaaagaatgtctgggatggggactggcagctgatta

SEQ ID NO: 667337 - DNA, 120 bp, Artificial Sequence
  ENSG00000185163_27 (sequence is synthesized)
gagatgcaaccactgaacctgtggactgtgttcaaacaaatgccagcagaacacaaaaggcgactgttacaggaggcagaaagaaatgatttaggtagacggggtaaagccagtccccag

SEQ ID NO: 667338 - DNA, 120 bp, Artificial Sequence
  ENSG00000185163_28 (sequence is synthesized)
cagaaaatttgccttttaacaaaaagcagctcaaaaatagctccctttctaacctcggggttcaaaatcacttctcacgacaagcagccagaaagagcagactgtgaatcacagatgaga

SEQ ID NO: 667339 - DNA, 120 bp, Artificial Sequence
  ENSG00000185163_29 (sequence is synthesized)
cagctcgggcacaggagtgcggggggtgtctcctgggtgatcaccaaacttcacacttccacaatgggccccagtaaaacagtggaccctaataagcacattcccgtccccttaggtgca

SEQ ID NO: 667340 - DNA, 120 bp, Artificial Sequence
  ENSG00000185163_30 (sequence is synthesized)
ctaagggaagctaaaagcagactgaggggtgcctgtaaccccaagaagatgtctgggagcagacccagagaccctcgcagaaaagtgtcacagagcagcacagactgagtctgacagaaa

SEQ ID NO: 667341 - DNA, 120 bp, Artificial Sequence
  ENSG00000185163_31 (sequence is synthesized)
ctctctatacaaatagcacaccttgtcccagctaaaaccctgggccctgggaggacaagacatccctcctctaacccctcgtcactagcccatttgtaaaaaccttgacaggccgggcac

SEQ ID NO: 667342 - DNA, 120 bp, Artificial Sequence
  ENSG00000185163_32 (sequence is synthesized)
agcctggcgacagaaaaaaaagaaaccttgacatctttactacaacttagcaacccgctcaggccccctctgcaacggagagctcttcttcctttttgcttattaaacttctgctccaaa

SEQ ID NO: 667343 - DNA, 120 bp, Artificial Sequence
  ENSG00000185163_33 (sequence is synthesized)
ctcttgaaggctcaggggccagtctggagatagctgcgtttgattccagggttgggaggacagctcgcgctgggaaaactggacaggccttcacactgctcctgaaagtgcaggtgaggc

SEQ ID NO: 667344 - DNA, 120 bp, Artificial Sequence
  ENSG00000185163_34 (sequence is synthesized)
tgcgagggtcttgggagtttctgctgttggtgggtgttaaggggctggcccaagaacccccttccaccatgagcttctctccaggagaggagattcctccgaatgctaactgaagctggg

SEQ ID NO: 667345 - DNA, 120 bp, Artificial Sequence
  ENSG00000185163_35 (sequence is synthesized)
cttaagtgcggcggtcgccccggaagatttcgttcagcgaatgttcccgggtcacagccgcgcctcgctgccaggtctgcagtttcatcgcctaggggtctggatcctgcacgtgcagag

SEQ ID NO: 667346 - DNA, 120 bp, Artificial Sequence
  ENSG00000185163_36 (sequence is synthesized)
ctcccgtttcctctgctaggcttgcccctgtcctcccgccgcgccgcgccagttctgcaagatgtgtttgcgtgaacgtgcggggtttcctgctgtgcgctcaccgcctcaggagtaagt

SEQ ID NO: 667347 - DNA, 120 bp, Artificial Sequence
  ENSG00000185163_37 (sequence is synthesized)
cagaggccgttctgcaagctcctgaccgttggtgtttttgcttagcacgtgtggttttcggtaaagagatttccggcgagacaggtgaagaaagcgagaagtttgacagagtgctcgggc

SEQ ID NO: 667348 - DNA, 120 bp, Artificial Sequence
  ENSG00000185163_38 (sequence is synthesized)
accttaggtagggcaggtggaggaggttctctttgagttgggatgcaaagacttgaagccaggtcaaggttgggggttgggggtgccaggcagaggcctcgaggcagggacgccggcgtg

SEQ ID NO: 667349 - DNA, 120 bp, Artificial Sequence
  ENSG00000185163_39 (sequence is synthesized)
gctggggcaggcgagcgccaggtcacaggacctcctggctgcgggagggtgggtgccactgtgggttgatgggaggctacagagtgagtttgctcagggagtggcatctgcttttactgt

SEQ ID NO: 667350 - DNA, 120 bp, Artificial Sequence
  ENSG00000185163_40 (sequence is synthesized)
ttaacttctgaaggctgtatggaaagcgcatcctggggctgagaaggagctgaagacgacagaggtttccccagcctccctcccctagctttttccaccgtgggcttctgcgcgagagcc

SEQ ID NO: 667351 - DNA, 120 bp, Artificial Sequence
  ENSG00000185163_41 (sequence is synthesized)
agcacgcccaggtgctggcctcccctgagcagagtcctctgcacacagctctccttccttaatgcccagagataagggtggcttgagctctggtgcacagaaccgcatcgtactgtcacg

SEQ ID NO: 667352 - DNA, 120 bp, Artificial Sequence
  ENSG00000185163_42 (sequence is synthesized)
tgagctggacccaccttgctcctggtctgcggcagtctctacagtgcgtagcatgaggaatcctgttccctggaggttcggggcagccactggtagggtgccagcaacacccccttctct

SEQ ID NO: 667353 - DNA, 120 bp, Artificial Sequence
  ENSG00000185163_43 (sequence is synthesized)
tggcccagcaggtatgtggaccctagacctggagcgtggcaccgcccgcctcagcttccctgctgagtgcacagcgatcagcccctgggggacccagattagatctggggtcctttttgc

SEQ ID NO: 667354 - DNA, 120 bp, Artificial Sequence
  ENSG00000185163_44 (sequence is synthesized)
agtctctggccaaggagcaggagagcctcgtccagaaaacgtaggttgtgtcagggtgcgggtttttcagggggtccctgctcagccctgcaggtggcctgaggcaccgtgggagcagag

SEQ ID NO: 667355 - DNA, 120 bp, Artificial Sequence
  ENSG00000185163_45 (sequence is synthesized)
gaggggccaccatctttaaccacctgttcccgtgaagaggaggagctcccaccggcccccttcccatgtggggtggagtcggggctgtggggtgaggcagcgtcttgctatccggaagcc

SEQ ID NO: 667356 - DNA, 80 bp, Artificial Sequence
  ENSG00000185164_0 (sequence is synthesized)
gagcctgcggcgtgcagtgtgaggggcgggacccggctgccggcggtgggtctagctgggggaggtcgggccatgctggt

SEQ ID NO: 667357 - DNA, 120 bp, Artificial Sequence
  ENSG00000185164_1 (sequence is synthesized)
gccgcggtggtgctgctgctgagcggcgtggggccggcgcacggctcggaggacatcgtggtgggctgcggtggcttcgtcaagtcggacgtggagatcaactactcgctcatcgagata

SEQ ID NO: 667358 - DNA, 120 bp, Artificial Sequence
  ENSG00000185164_2 (sequence is synthesized)
aagctgtacaccaagcatgggactttgaaataccagacagactgtgcccctaataatggttactttatgatccctttgtatgataagggggatttcattctgaagattgagcctccccta

SEQ ID NO: 667359 - DNA, 120 bp, Artificial Sequence
  ENSG00000185164_3 (sequence is synthesized)
gggtggagttttgagccgacgaccgtggagctccatgtggatggagtcagtgacatctgcacaaagggtggggacatcaactttgtcttcactgggttctctgtgaatggcaaggtcctc

SEQ ID NO: 667360 - DNA, 120 bp, Artificial Sequence
  ENSG00000185164_4 (sequence is synthesized)
agcaaagggcagcccctgggtcctgcgggagttcaggtgtctctgagaaacactgggaccgaagcaaagatccagtccacagttacacagcctggcggaaagtttgcattttttaaagtt

SEQ ID NO: 667361 - DNA, 120 bp, Artificial Sequence
  ENSG00000185164_5 (sequence is synthesized)
ctgcctggagattatgaaatcctcgcaactcatccaacctgggcgttgaaagaggcaagcaccacagtgcgtgtaaccaactccaatgccaatgcggccagtcccctcatagttgctggc

SEQ ID NO: 667362 - DNA, 120 bp, Artificial Sequence
  ENSG00000185164_6 (sequence is synthesized)
tacaatgtgtctggctctgtccgaagtgatggggagcccatgaaaggggtgaagtttcttctcttttcttctttagtaactaaagaggatgtcctgggctgcaatgtctcaccagtgcct

SEQ ID NO: 667363 - DNA, 120 bp, Artificial Sequence
  ENSG00000185164_7 (sequence is synthesized)
gggttccagccccaagacgagagtctggtgtatttgtgctacacggtctccagagaagatggctcgttctctttctattccttgccaagtgggggctacactgtgattccgttctatcga

SEQ ID NO: 667364 - DNA, 120 bp, Artificial Sequence
  ENSG00000185164_8 (sequence is synthesized)
ggggagaggattacctttgatgtggcgccttccagacttgacttcacagtggagcatgacagcttgaaaatcgagcccgtgttccacgtcatgggattctccgtcaccgggagggtcttg

SEQ ID NO: 667365 - DNA, 120 bp, Artificial Sequence
  ENSG00000185164_9 (sequence is synthesized)
aacggacccgaaggagatggtgttccagaagcagtagtcaccctgaataaccaaatcaaagttaaaacaaaagctgatggctcattccgccttgagaacataaccacagggacatacacc

SEQ ID NO: 667366 - DNA, 120 bp, Artificial Sequence
  ENSG00000185164_10 (sequence is synthesized)
atccatgctcagaaagagcacctctactttgaaacggtcaccatcaaaattgcaccgaacacacctcagctggctgacattgttgcaacagggttcagtgtctgtggtcggatatcaatc

SEQ ID NO: 667367 - DNA, 120 bp, Artificial Sequence
  ENSG00000185164_11 (sequence is synthesized)
attcgcttcccggacaccgtcaagcagatgaataaatacaaagttgtcctgtcatctcaagacaaggacaagtctttggtcaccgtggagacagatgctcatggatcattttgttttaaa

SEQ ID NO: 667368 - DNA, 120 bp, Artificial Sequence
  ENSG00000185164_12 (sequence is synthesized)
gcaaaaccagggacttacaaagtgcaggtgatggttcctgaggcagaaaccagagcagggctgacgttgaaaccccagacatttcctcttactgtgaccgacaggcccgtgatggatgtg

SEQ ID NO: 667369 - DNA, 120 bp, Artificial Sequence
  ENSG00000185164_13 (sequence is synthesized)
gcctttgtacagttcttggcatcagtttctgggaaagtctcttgtttggacacctgtggtgacttgctggtgactctacagtccctgagccgccagggtgagaagcggagcctccagctc

SEQ ID NO: 667370 - DNA, 120 bp, Artificial Sequence
  ENSG00000185164_14 (sequence is synthesized)
tccggcaaggtcaacgccatgactttcacctttgacaacgtgctccctggaaaatacaaaataagcatcatgcatgaggattggtgctggaagaacaagagcctggaggtggaagtgctg

SEQ ID NO: 667371 - DNA, 120 bp, Artificial Sequence
  ENSG00000185164_15 (sequence is synthesized)
gaggatgacgtgtctgcagttgagttcaggcagacgggctacatgctgagatgttccctgtctcacgccatcactctggaattttatcaggatggaaatgggcgtgagaatgtggggatt

SEQ ID NO: 667372 - DNA, 120 bp, Artificial Sequence
  ENSG00000185164_16 (sequence is synthesized)
tataacctctccaaaggagtcaaccgattctgcctgtccaagcctggtgtgtacaaagtgacccctcgctcctgccaccggtttgagcaagcgttctacacctatgacacgtcttcacct

SEQ ID NO: 667373 - DNA, 120 bp, Artificial Sequence
  ENSG00000185164_17 (sequence is synthesized)
ccgacaaaatgatggatgtcactgtgactatcaagtcttccatcgacagtgaacccgccttggtcttaggccctctgaagtctgtgcaggagctgcggagggagcagcagctggctgaga

SEQ ID NO: 667374 - DNA, 120 bp, Artificial Sequence
  ENSG00000185164_18 (sequence is synthesized)
tcgaggcccgcaggcaggagagggagaaaaacggcaatgaggaaggtgaagaaagaatgaccaagcctcccgtgcaggagatggtagatgagttacaaggccccttctcgtatgatttct

SEQ ID NO: 667375 - DNA, 120 bp, Artificial Sequence
  ENSG00000185164_19 (sequence is synthesized)
cttactgggcgcggtctggagagaaaatcactgttacaccgtcatctaaagagctgctcttttatcccccttcaatggaagccgttgtcagtggagaaagctgcccagggaagctgatcg

SEQ ID NO: 667376 - DNA, 120 bp, Artificial Sequence
  ENSG00000185164_20 (sequence is synthesized)
agatccacgggaaggcaggcctgtttttagaaggccagatccaccccgagttggaaggagtcgagattgtcatcagtgaaaagggggcaagttcaccgctgatcacagtctttactgatg

SEQ ID NO: 667377 - DNA, 120 bp, Artificial Sequence
  ENSG00000185164_21 (sequence is synthesized)
acaaaggtgcctacagtgttggccccctgcacagtgacctggagtacacggtgacctcacagaaggagggctatgttctgactgcagtggaaggaaccatcggagacttcaaggcctatg

SEQ ID NO: 667378 - DNA, 120 bp, Artificial Sequence
  ENSG00000185164_22 (sequence is synthesized)
ccctggcaggcgtaagctttgagataaaagctgaggatgaccagcccctcccgggagtcctcttatccctgagtggtggcctgtttcgttccaacctcttgacccaggacaacggcattc

SEQ ID NO: 667379 - DNA, 120 bp, Artificial Sequence
  ENSG00000185164_23 (sequence is synthesized)
tgacattctcaaacctgagccctggccagtattacttcaaacccatgatgaaggagttccggtttgagccatcctcacagatgatcgaggtgcaggaaggccagaacctgaagatcacca

SEQ ID NO: 667380 - DNA, 120 bp, Artificial Sequence
  ENSG00000185164_24 (sequence is synthesized)
tcacggggtaccgaaccgcttacagttgctatggcacagtgtcttccttaaacggagagcccgaacaaggggttgccatggaagcggtgggccagaacgactgcagcatttacggagaag

SEQ ID NO: 667381 - DNA, 120 bp, Artificial Sequence
  ENSG00000185164_25 (sequence is synthesized)
acaccgtgacagacgaagagggcaagttcagattacgtggattgctgccgggatgtgtgtaccacgttcagctcaaggcagaaggcaacgaccacattgagcgggcgctcccccaccata

SEQ ID NO: 667382 - DNA, 120 bp, Artificial Sequence
  ENSG00000185164_26 (sequence is synthesized)
gggtgattgaggttgggaataatgacatcgatgatgtaaacatcatagttttccggcagattaatcaatttgatttaagtggaaatgtgatcacttcctctgaataccttcctacgttat

SEQ ID NO: 667383 - DNA, 120 bp, Artificial Sequence
  ENSG00000185164_27 (sequence is synthesized)
gggtcaagctttacaaaagcgaaaacctcgacaatccaatccagacagtttcccttggccagtccctgttcttccatttccccccactgctcagagatggcgagaactatgttgtgcttc

SEQ ID NO: 667384 - DNA, 120 bp, Artificial Sequence
  ENSG00000185164_28 (sequence is synthesized)
tggactccacactccccagatcccagtatgactacatcttgcctcaagtttctttcaccgcagtgggctaccataaacacatcaccttgatttttaatcccacgaggaagctgcctgaac

SEQ ID NO: 667385 - DNA, 120 bp, Artificial Sequence
  ENSG00000185164_29 (sequence is synthesized)
aggacatcgcacaaggatcctacattgccctgccattgacgctgctggttctgctggccggttacaaccatgacaagctcattcctttgctgctgcagttgacaagccggctacagggag

SEQ ID NO: 667386 - DNA, 120 bp, Artificial Sequence
  ENSG00000185164_30 (sequence is synthesized)
tcggcgcgctcggccaggcagcctctgacaatagcggcccagaagatgcaaagagacaagccaagaaacagaagacaaggcggacgtgaggaggaaggggacagttgcagtctcacttgg

SEQ ID NO: 667387 - DNA, 120 bp, Artificial Sequence
  ENSG00000185164_31 (sequence is synthesized)
gacaggccacagccaggggtccggccactacccgcccgtgggataaaagccaaaagcatgcgtcagctaacttcagcctgtgctgctgggcccgcaccccatgtcccttgtcactgtggc

SEQ ID NO: 667388 - DNA, 120 bp, Artificial Sequence
  ENSG00000185164_32 (sequence is synthesized)
atcctgcacccatcctcacccctccgtagagcccctcgtgcaatgcaatgaatggaccctcctgtcactctgctgaacagaatttattttctgagtcaaatataatttattattattttt

SEQ ID NO: 667389 - DNA, 120 bp, Artificial Sequence
  ENSG00000185164_33 (sequence is synthesized)
gtcaaagaagtatttaagctgtgctgtggtgtgagaatgtcattcttgatcttcagccttcgtttgcaagaagagttccagttgatgtggtgtttggttccatggcggggtaccctaggg

SEQ ID NO: 667390 - DNA, 120 bp, Artificial Sequence
  ENSG00000185164_34 (sequence is synthesized)
attcatctgttttcttcacttccctttgcatctgagatcctgctggaaaccacggcaacctgtatccactattaggaggtaaaaatcaataaaatggcccattcatttgtgttgtagctc

SEQ ID NO: 667391 - DNA, 120 bp, Artificial Sequence
  ENSG00000185164_35 (sequence is synthesized)
agacgggctacatgctgagatgttccctgtctcacgccatcactctggtatgtacggcttatggagtctcttatttggaaaagcgctcgccttgtggatgtcaagaaagactaacatccc

SEQ ID NO: 667392 - DNA, 120 bp, Artificial Sequence
  ENSG00000185164_36 (sequence is synthesized)
ttgtggatcctcagttgtatcacgtacctccctcatcagaattggctcataataattttttgtgtttcataaagtcagatcctcagaggaccgtaattgtcaaggttgggtactcataaa

SEQ ID NO: 667393 - DNA, 120 bp, Artificial Sequence
  ENSG00000185164_37 (sequence is synthesized)
aaggctgcaggctctgacagccttatcagaagccacagtctcagagacactggggacacatgcccgccactgatggaatagcccgctgaggttgatactttgaaggcagcaaccttggtt

SEQ ID NO: 667394 - DNA, 120 bp, Artificial Sequence; identical to SEQ ID NO: 137888
  ENSG00000185164_38 (sequence is synthesized)

SEQ ID NO: 667395 - DNA, 120 bp, Artificial Sequence; identical to SEQ ID NO: 135836
  ENSG00000185164_39 (sequence is synthesized)

SEQ ID NO: 667396 - DNA, 120 bp, Artificial Sequence
  ENSG00000185164_40 (sequence is synthesized)
tgtgaatctgtacaaccacatgaaaaggagcggctctgtgtctacacctgaagaaaccgaacacgagcttgcccaaggccacacaacacgtggaagactcagatggcatttgggcatctt

SEQ ID NO: 667397 - DNA, 120 bp, Artificial Sequence
  ENSG00000185176_0 (sequence is synthesized)
gtcccctcaggtgtcctgcaggcacagcatctcggggggcccaggccgatggcaggtcttaacgtgtccctctccttcttctttgccaccttcaccctctgtgaggcagccaggcgggcc

SEQ ID NO: 667398 - DNA, 120 bp, Artificial Sequence
  ENSG00000185176_1 (sequence is synthesized)
tccaaggccctgctcccagtgggcgcctatgaagtcttcgcccgggaggcggtgggcgcggtgcagctcggggcctgcttcctggagatgaggacgctggtcgagctcgggccctgggct

SEQ ID NO: 667399 - DNA, 120 bp, Artificial Sequence
  ENSG00000185176_2 (sequence is synthesized)
ggggactttgggcctgacctgctgctcaccctgctcttcctgctcttcctggcgcacggggtcaccttggacggggcctcggccaaccccaccgtgtccctgcaggagttcctcatggcc

SEQ ID NO: 667400 - DNA, 120 bp, Artificial Sequence
  ENSG00000185176_3 (sequence is synthesized)
gaggagtctctgcctggcacgctgctgaagctggcggcacaggggctgggcatgcaggccgcctgcaccctgacgcgcctctgctgggcctgggagctcagtgacctgcacctgctgcag

SEQ ID NO: 667401 - DNA, 120 bp, Artificial Sequence
  ENSG00000185176_4 (sequence is synthesized)
gcagctcggccctgcgcacatccgtgccccacggggcgcttgtggaggccgcctgcgccttttgtttccatctgaccctcctgcacctgcggcacagtcctcccgcctacagcgggcccg

SEQ ID NO: 667402 - DNA, 120 bp, Artificial Sequence
  ENSG00000185176_5 (sequence is synthesized)
ctgtggctctgttggtcaccgtcacggcctacacggccgggcccttcacgtctgccttcttcaaccctgccctggccgcctctgtgacctttgcctgctcgggacacaccttactggagt

SEQ ID NO: 667403 - DNA, 120 bp, Artificial Sequence
  ENSG00000185176_6 (sequence is synthesized)
acgtgcaggtgtactggctgggccctctgacagggatggtcctggctgtgctgctgcaccagggccgccttccccaccttttccagaggaacctgttctacggccagaagaacaagtacc

SEQ ID NO: 667404 - DNA, 120 bp, Artificial Sequence
  ENSG00000185176_7 (sequence is synthesized)
gagcaccccgagggaagccggccccggcctcaggggacacccagacccctgcaaaggggtccagtgtccgggagcctgggcgcagtggtgttgaggggccacattccagctgagtggcct

SEQ ID NO: 667405 - DNA, 120 bp, Artificial Sequence
  ENSG00000185176_8 (sequence is synthesized)
tgctctgtgtgagccccgtgcgagggccctgcttgtagctggaccctggaaccttctgtagctaagagggaatcctggccccctccccagaagccatttgtcaataaaccatttctaaga

SEQ ID NO: 667406 - DNA, 120 bp, Artificial Sequence; identical to SEQ ID NO: 664895
  ENSG00000185176_9 (sequence is synthesized)

SEQ ID NO: 667407 - DNA, 120 bp, Artificial Sequence
  ENSG00000185176_10 (sequence is synthesized)
gaaccccctcctgcccccgttgccgaggcagcactgccctctgctaggaacagctccgtgttggcctctctgtccccacacactgggcctgcagggcttctccgagactcttcagttcag

SEQ ID NO: 667408 - DNA, 120 bp, Artificial Sequence
  ENSG00000185176_11 (sequence is synthesized)
gtactggctgggccctctgacagaggagcagcatggggaggtcatggagccccctcttggacctagatctggggattctggcccctggcttcagaggcccaggtggagcccacaccttct

SEQ ID NO: 667409 - DNA, 120 bp, Artificial Sequence
  ENSG00000185176_12 (sequence is synthesized)
cctgcacctgctctcagacactcggctccacctcactgaggtaccagaagggcagctgggttcctatggaattctggaagcttttttcagcttctgctggctctacactggggaggtctc

SEQ ID NO: 667410 - DNA, 120 bp, Artificial Sequence
  ENSG00000185176_13 (sequence is synthesized)
aggggcaatgcctcagcctccccttggggggaaagacaggagctgggggtctctcaggcacctggccctgcgatggtgacactgacgtcatcgtgatttgtcgccatggttctgatgtgg

SEQ ID NO: 667411 - DNA, 120 bp, Artificial Sequence
  ENSG00000185176_14 (sequence is synthesized)
tcctgcggatccttcactccgggtgggtcggcctcttcctcctgatcagctccagagccccctctagttccctggcatggaaacacggcccgggtgagctgtggtggccccggaggcctc

SEQ ID NO: 667412 - DNA, 120 bp, Artificial Sequence
  ENSG00000185176_15 (sequence is synthesized)
tccgctcctgcacaggccttgcttcctgcgggtgacgaggtcctggactctctcctgcccaggcttctgggtgctttccttagttcagcaccagtgctctgtgtgggcagcgtctccccc

SEQ ID NO: 667413 - DNA, 120 bp, Artificial Sequence
  ENSG00000185176_16 (sequence is synthesized)
gaggatccgcagctccgggttacccgcaggcgtccatctccggtatggtgctgcccttcactgatcctggttgtatttctgtttcctgctttcctcatcgcctcctgtttcggttgattc

SEQ ID NO: 667414 - DNA, 120 bp, Artificial Sequence
  ENSG00000185176_17 (sequence is synthesized)
gtgcccgtctcacagtagcttcctgagaacggggacctggcaggtacacttcagacctcctgtgtctgaaatagtgtcctggttctgacctgcacttgagtgtcggtgaggcctgggcag

SEQ ID NO: 667415 - DNA, 120 bp, Artificial Sequence
  ENSG00000185176_18 (sequence is synthesized)
ggttccgggtgggagctcagtttcgtcctgagtttctcaggccccaaccatggcctgtggtggcttcacgggctacaaggcaaaggacgcaaacgaagaggcttcacgtgacagggttgt

SEQ ID NO: 667416 - DNA, 120 bp, Artificial Sequence
  ENSG00000185176_19 (sequence is synthesized)
atgctcagccagctctggaggctggagtctgagctggcagcactgacagggtcagctctcctcggaggctgctggggaggagcctcctgcctcttccgggctccgggggcctctggcacc

SEQ ID NO: 667417 - DNA, 120 bp, Artificial Sequence
  ENSG00000185176_20 (sequence is synthesized)
cccggtgtccccgggcttggagacgcagcactcccatgtctgccggttcccctggccgcctcctctgtgtcattgtctgttctcttcatatagggacaccagtcatcgaattggaggttc

SEQ ID NO: 667418 - DNA, 120 bp, Artificial Sequence
  ENSG00000185176_21 (sequence is synthesized)
actctactcaagtatgacgtcaccgtgatttcactgattttatgtcccaggccgtattctaacaagggcacatcctgtgttctgggaagggcgtgtcgctggggaaatactcttcacccg

SEQ ID NO: 667419 - DNA, 120 bp, Artificial Sequence
  ENSG00000185176_22 (sequence is synthesized)
gctgcaacctctcactgtagaactgcctctgtggagaagcccaaagggcatttgcggcttctaggagccaagtaggaggaggctgggatccgtgtttcaggcgggactccaggcttgggc

SEQ ID NO: 667420 - DNA, 120 bp, Artificial Sequence
  ENSG00000185176_23 (sequence is synthesized)
gggcctgatactcgagtccacatgccccctctagagaggaacctgtctcctgccagggccagggaggggggcactggctgcttctgtattttggggtttggggccctggagcttcccatg

SEQ ID NO: 667421 - DNA, 120 bp, Artificial Sequence
  ENSG00000185176_24 (sequence is synthesized)
cggaattgccgtccctcctcctaggcgagtcccagggccaccccatcccacagggacccgggcgccagcttctgaaagcatggggcatctgcggaagaactgggttgtttcccagctttc

SEQ ID NO: 667422 - DNA, 120 bp, Artificial Sequence
  ENSG00000185176_25 (sequence is synthesized)
gtccctgcggaggggcgatccggcccctccatgtcagcagtgtttggtcgtccacatgcttgtcagccccacgctgtgctcctgcgtctcttcccgtctcatccatctggatgcttgaca

SEQ ID NO: 667423 - DNA, 120 bp, Artificial Sequence
  ENSG00000185176_26 (sequence is synthesized)
cctctgacagcatccctttcctgtcatcttagggcagcttcaggaaaccgaaaaacaggcttgtgtccttccattaacccctttatccacaagttcagtatcagcatgagccctggggag

SEQ ID NO: 667424 - DNA, 120 bp, Artificial Sequence
  ENSG00000185177_0 (sequence is synthesized)
caggtatctgcagatttatggctaaaagaccaggaccccctggaagccgagaaatgggactgttgacattcagagacatagctatagaattctctctggaggaatggcaatgcctggatt

SEQ ID NO: 667425 - DNA, 120 bp, Artificial Sequence
  ENSG00000185177_1 (sequence is synthesized)
gtgctcagcggaatttatatagagatgtgatgttagagaactacagaaacctggtctccctgggtattgctgtctctaagccagacttgatcacctgtctggagcaaaataaagagtccc

SEQ ID NO: 667426 - DNA, 120 bp, Artificial Sequence
  ENSG00000185177_2 (sequence is synthesized)
agaatataaagagaaatgagatggtagccaaacacccagttacgcgttcccatttcacccaagaccttcagccagagcagggcatcaaagattcactccaaaaagtaataccaagaacat

SEQ ID NO: 667427 - DNA, 120 bp, Artificial Sequence
  ENSG00000185177_3 (sequence is synthesized)
atggaaaatgtggacatgagaaattacaatttaaaaaatgctgtaaaagtgtgggtgaatatgaggtgcacaagggaggttatagtgaagttaaccaatgtttgtcaactacccaaaaca

SEQ ID NO: 667428 - DNA, 120 bp, Artificial Sequence
  ENSG00000185177_4 (sequence is synthesized)
aaatatttcagactcataaatatgtcaaagtctttggtaaattttcaaattccaatagagataaaacaagatatactggaaataaacatttcaaatgtaacaaatatggcaaatcatttt

SEQ ID NO: 667429 - DNA, 120 bp, Artificial Sequence
  ENSG00000185177_5 (sequence is synthesized)
gcatgctttcacacctaaatcaacatcaggtaattcatactagggagaagtcctacaaatgcaaagaatgtggcaaatcctttaactgctcctcaaaccatactacacataaaataattc

SEQ ID NO: 667430 - DNA, 120 bp, Artificial Sequence
  ENSG00000185177_6 (sequence is synthesized)
atactggagagaaaccatatagatgtgaggaatgtggcaaagcctttagctggtctgcaaaccttactagacataagagaactcatactggagagaaaccctacacgtgtgaagaatgtg

SEQ ID NO: 667431 - DNA, 80 bp, Artificial Sequence
  ENSG00000185177_7 (sequence is synthesized)
agagaaaccctacacgtgtgaagaatgtggccaagcctttaggcgctcctcagcacttactaaccacaagagaattcata

SEQ ID NO: 667432 - DNA, 120 bp, Artificial Sequence
  ENSG00000185177_8 (sequence is synthesized)
catactggagagaaaccctgcaggtgtgaggaatgtggcaaagcctttagctggtcctcaaaccttactagacataagagaattcatactagagagaaaccctatgcctgtgaagaatgt

SEQ ID NO: 667433 - DNA, 80 bp, Artificial Sequence
  ENSG00000185177_9 (sequence is synthesized)
aattcatactagagagaaaccctatgcctgtgaagaatgtggccaagcctttagcttatcctcgaaccttatgagacata

SEQ ID NO: 667434 - DNA, 120 bp, Artificial Sequence
  ENSG00000185177_10 (sequence is synthesized)
cacaagagaattcatactggagagagaccctacaaatgtgaagagtgtggcaaagtctttagcttatcctcaaccctcactgaccacaagagaattcatactggagagagaccctacaaa

SEQ ID NO: 667435 - DNA, 85 bp, Artificial Sequence
  ENSG00000185177_11 (sequence is synthesized)
tgtgaagaatgtggcaaagcctttagcttatcctcaaccctcactgaccacaagagaattcatactggagagagattgctcctca

SEQ ID NO: 667436 - DNA, 86 bp, Artificial Sequence
  ENSG00000185177_12 (sequence is synthesized)
aaaccctacaaatgtgaagaatgtgagcaagcttttaagtggcattcaagtcttgctaaacataagattaatatggcaaagtccac

SEQ ID NO: 667437 - DNA, 120 bp, Artificial Sequence
  ENSG00000185177_13 (sequence is synthesized)
aaaccctacaaatgtgaataatatggcaaagtccaccctcaggccttataatacataaaataatttacactggaaaaaaacactacaaatgtagagaatgtggccaagcctttaaccagt

SEQ ID NO: 667438 - DNA, 120 bp, Artificial Sequence
  ENSG00000185177_14 (sequence is synthesized)
tccaaaccttaattgaatgtaagagaattcatattggacagaaattttataaatgtaaaaaaatgtaacaaagcctttaaccaaccctcaaaccttaataaacctaagagaatttatttt

SEQ ID NO: 667439 - DNA, 120 bp, Artificial Sequence
  ENSG00000185177_15 (sequence is synthesized)
ggcaggaaagaagagtcacatcacgtaggtgatgggcctagagatatttcacaatgccttctgtaattagaacccagaaaaaagagttatatcatttgggttaaaggtcttgtgatatgt

SEQ ID NO: 667440 - DNA, 120 bp, Artificial Sequence
  ENSG00000185177_16 (sequence is synthesized)
cacaatcccaactaagggcaggacccaggcagaaaaggagagtcacttcctttgatgattggtccagagatacattacaatttcccctgaggacagctctcatgcagaagaggaactgaa

SEQ ID NO: 667441 - DNA, 120 bp, Artificial Sequence
  ENSG00000185187_0 (sequence is synthesized)
gttgccgctgcgcacctggctcaggtgagctgccccgcccccgcccggcgcgagccccaggtcctggcagcagcctctgacctgtccaggtgccctgtccagctgactgcaaggacagag

SEQ ID NO: 667442 - DNA, 120 bp, Artificial Sequence
  ENSG00000185187_1 (sequence is synthesized)
aggagtcctgcccagctcttggatcagtctgctggccgaggagcccggtggagccaggggtgaccctggagcccagcctgccccgaggaggccccggctcagagccatgccaggtgtctg

SEQ ID NO: 667443 - DNA, 120 bp, Artificial Sequence
  ENSG00000185187_2 (sequence is synthesized)
tgatagggcccctgacttcctctccccgtctgaagaccaggtgctgaggcctgccttgggcagctcagtggctctgaactgcacggcttgggtagtctctgggccccactgctccctgcc

SEQ ID NO: 667444 - DNA, 120 bp, Artificial Sequence
  ENSG00000185187_3 (sequence is synthesized)
ttcagtccagtggctgaaagacgggcttccattgggaattgggggccactacagcctccacgagtactcctgggtcaaggccaacctgtcagaggtgcttgtgtccagtgtcctgggggt

SEQ ID NO: 667445 - DNA, 120 bp, Artificial Sequence
  ENSG00000185187_4 (sequence is synthesized)
caacgtgaccagcactgaagtctatggggccttcacctgctccatccagaacatcagcttctcctccttcactcttcagagagctggccctacaagccacgtggctgcggtgctggcctc

SEQ ID NO: 667446 - DNA, 120 bp, Artificial Sequence
  ENSG00000185187_5 (sequence is synthesized)
cctcctggtcctgctggccctgctgctggccgccctgctctatgtcaagtgccgtctcaacgtgctgctctggtaccaggacgcgtatggggaggtggagataaacgacgggaagctcta

SEQ ID NO: 667447 - DNA, 120 bp, Artificial Sequence
  ENSG00000185187_6 (sequence is synthesized)
cgtcggggctacaagctcttcctggacgaccgcgacctcctgccgcgcgctgagccctccgccgacctcttggtgaacctgagccgctgccgacgcctcatcgtggtgctttcggacgcc

SEQ ID NO: 667448 - DNA, 120 bp, Artificial Sequence
  ENSG00000185187_7 (sequence is synthesized)
ttcctgagccgggcctggtgcagccacagcttccgggagggcctgtgccggctgctggagctcacccgcagacccatcttcatcaccttcgagggccagaggcgcgaccccgcgcacccg

SEQ ID NO: 667449 - DNA, 120 bp, Artificial Sequence
  ENSG00000185187_8 (sequence is synthesized)
gcgctccgcctgctgcgccagcaccgccacctggtgaccttgctgctctggaggcccggctccgtgactccttcctccgatttttggaaagaagtgcagctggcgctgccgcggaaggtg

SEQ ID NO: 667450 - DNA, 120 bp, Artificial Sequence
  ENSG00000185187_9 (sequence is synthesized)
cagtacaggcctgtggaaggagacccccagacgcagctgcaggacgacaaggaccccatgctgattcttcgaggccgagtccctgagggccgggccctggactcagaggtggacccggac

SEQ ID NO: 667451 - DNA, 120 bp, Artificial Sequence
  ENSG00000185187_10 (sequence is synthesized)
cctgagggcgacctgggtgtccgggggcctgtctttggagagccatcagctccaccgcacaccagtggggtctcgctgggagagagccggagcagcgaagtggacgtctcggatctcggc

SEQ ID NO: 667452 - DNA, 120 bp, Artificial Sequence
  ENSG00000185187_11 (sequence is synthesized)
tcgcgaaactacagtgcccgcacagacttctactgcctggtgtccaaggatgatatgtagctcccaccccagagtgcaggatcatagggacagcgggggccagggcagcggcgtcgctcc

SEQ ID NO: 667453 - DNA, 120 bp, Artificial Sequence
  ENSG00000185187_12 (sequence is synthesized)
tctgctcaacaggaccacaacccctgccagcagccctgggaccctgccagcagccctgggaaaaggctgtggcctcagggcgcctcccagtgccagaaaataaagtccttttggattctg

SEQ ID NO: 667454 - DNA, 120 bp, Artificial Sequence
  ENSG00000185187_13 (sequence is synthesized)
gaaagttctgatcaaaatacacaaagacacaagccaggtccccaccgcgcttggcgatgcatccatagcagccttggtgctgtggacactccctggggcccagcgaaggggagagtttgc

SEQ ID NO: 667455 - DNA, 120 bp, Artificial Sequence
  ENSG00000185187_14 (sequence is synthesized)
gtgctgtggacactccctggggcccagcgaaggggagagtttgctcccaaaggcgcaccaatgaccaacatttgccccccggaggaaagaactggaaccagggtcaaggccaacctgtca

SEQ ID NO: 667456 - DNA, 80 bp, Artificial Sequence
  ENSG00000185187_15 (sequence is synthesized)
ttcctggacgaccgcgacctcctgccgcgcgctggtatcccgggccccaccccgtgccccgcccacccggagggcccgcc

SEQ ID NO: 667457 - DNA, 120 bp, Artificial Sequence
  ENSG00000185187_16 (sequence is synthesized)
tgggtatgcccgcccagccccactccccaactggagaagctcagcacagggcggagtgggggcaggcacagggcacagggcctggaggggctccaggtgttgaggactcttcccggcacc

SEQ ID NO: 667458 - DNA, 120 bp, Artificial Sequence
  ENSG00000185187_17 (sequence is synthesized)
gggagcccctgcacggcctctgccctggaggtgctcggccctcggtctgcctgggaacttcctgggcctcacaggccatcacagcagggggtgagcaggggcagcccctggcagtgggtc

SEQ ID NO: 667459 - DNA, 120 bp, Artificial Sequence
  ENSG00000185187_18 (sequence is synthesized)
cccgggctccaggctgggacccctccgtggggagctctgcggcaccacgctttgtgaatgggccctggggggaggttccgctgcctggggccccgatgcggggagccgcccttgaggccc

SEQ ID NO: 667460 - DNA, 120 bp, Artificial Sequence
  ENSG00000185187_19 (sequence is synthesized)
ccggagccacggaatagctgtcgcagggcgtggaacccgtgggcagccgcaggtgtgctcttgggggccaggacgccaggggcttccgaggtgttcacacctgcaaaccgccccgacctg

SEQ ID NO: 667461 - DNA, 120 bp, Artificial Sequence
  ENSG00000185187_20 (sequence is synthesized)
cttatttcttcctgcaccacggaccactgtggaggtggtggggccaggcaccctggcacagctgacccactgtgtcctctctcttcagggtcaaggccaacctgtcagaggtgcttgtgt

SEQ ID NO: 667462 - DNA, 120 bp, Artificial Sequence
  ENSG00000185187_21 (sequence is synthesized)
gggctacgccgccgccggggctgttgccgctgcgcacctggctcaggtgagctgccccgcccccgcccggcgcgagccccaggtcctggcagcaggtgagtggcggtcgccatcagaccc

SEQ ID NO: 667463 - DNA, 120 bp, Artificial Sequence
  ENSG00000185187_22 (sequence is synthesized)
acctcctgcccctcaggctggctccacattgtgcatcctgctcttatcccaggcactctgcctggccacatgccgggggtacaaaggcccctgctcacccctcccactgggcccttggcc

SEQ ID NO: 667464 - DNA, 120 bp, Artificial Sequence
  ENSG00000185187_23 (sequence is synthesized)
ctgaaaccagggcgagtggtgaggatgagccctgcaccctctcctgccccagaccaggctcatgagggtcagtaaagcccaggaatgctaggagtgggcactgctggggcccacagcagg

SEQ ID NO: 667465 - DNA, 120 bp, Artificial Sequence
  ENSG00000185187_24 (sequence is synthesized)
gtgtggccgatgtgagctggcaggagaccataccctactgagaagatggtggtttgacctcccgctagggctcatcaccctgatgtaaagatgaacaagttcaggcctcaggtggtgggg

SEQ ID NO: 667466 - DNA, 120 bp, Artificial Sequence
  ENSG00000185187_25 (sequence is synthesized)
agccgctgccgacgcctcatcgtggtgctttcggacgccttcctgagccgggcctggtgcagccacagcttccgactccttcctccgatttttggaaagaagtgcagctggcgctgccgc

SEQ ID NO: 667467 - DNA, 80 bp, Artificial Sequence
  ENSG00000185189_0 (sequence is synthesized)
attcccagagccggggctggggctctaggctgccgcggcggctctaggctgggctgctgggcgcgaggccagggcgggcc

SEQ ID NO: 667468 - DNA, 120 bp, Artificial Sequence
  ENSG00000185189_1 (sequence is synthesized)
ggcctgggctggccgaaccatggcggccccggagccggcgccgaggcgggcccgggaacgggagcgggagcgggaggacgagagcgaggacgagagcgacatcctggaggaaagcccgtg

SEQ ID NO: 667469 - DNA, 120 bp, Artificial Sequence
  ENSG00000185189_2 (sequence is synthesized)
tggtcgctggcaaaagcgacgggagcaggtaaaccaagggaacatgccagggcttcagagcaccttcctagccatggacacggaggagggggtagaggtggtgtggaacgagctccactt

SEQ ID NO: 667470 - DNA, 120 bp, Artificial Sequence
  ENSG00000185189_3 (sequence is synthesized)
cggagacaggaaggccttcgcggcgcacgaggagaagatccagaccgtgttcgagcagctggtgctggtggaccacccgaacatcgtgaagttgcacaagtactggctggatacctctga

SEQ ID NO: 667471 - DNA, 120 bp, Artificial Sequence
  ENSG00000185189_4 (sequence is synthesized)
ggcctgcgcgagggtcatcttcatcacagagtacgtgtcatcaggcagcctcaagcaattcctcaaaaagaccaagaagaaccacaaggccatgaacgcccgggcctggaagcgctggtg

SEQ ID NO: 667472 - DNA, 120 bp, Artificial Sequence
  ENSG00000185189_5 (sequence is synthesized)
cacgcagatcctgtctgcgctcagcttcctgcacgcctgcagccccccaatcatccacgggaacctgaccagcgacaccatcttcattcagcacaacggcctcatcaagatcggctccgt

SEQ ID NO: 667473 - DNA, 120 bp, Artificial Sequence
  ENSG00000185189_6 (sequence is synthesized)
gtggcaccgaatcttctccaatgcacttccagatgatctccgaagccccatccgcgctgagcgagaggaacttcggaacctgcacttcttccccccagagtatggagaggtggccgatgg

SEQ ID NO: 667474 - DNA, 120 bp, Artificial Sequence
  ENSG00000185189_7 (sequence is synthesized)
gaccgctgtggacatcttctcctttgggatgtgtgcgctggagatggctgtactggaaatccagaccaatggggacacccgggtcacagaggaggccattgctcgcgccaggcactcgct

SEQ ID NO: 667475 - DNA, 120 bp, Artificial Sequence
  ENSG00000185189_8 (sequence is synthesized)
gagtgaccccaacatgcgggagttcatcctttgctgcctggcccgggaccctgcccgccggccctctgcccacagcctcctcttccaccgcgtgctcttcgaggtgcactcgctgaagct

SEQ ID NO: 667476 - DNA, 120 bp, Artificial Sequence
  ENSG00000185189_9 (sequence is synthesized)
cctggcagcccactgcttcatccagcaccagtacctcatgcctgagaatgtggtggaggagaagaccaaggccatggacctgcacgcggtcttggcggagcttccccggccccgcaggcc

SEQ ID NO: 667477 - DNA, 120 bp, Artificial Sequence
  ENSG00000185189_10 (sequence is synthesized)
cccgctgcagtggcggtactcggaagtctccttcatggagctggacaaattcctggaggatgtcaggaatggaatctacccactgatgaactttgcagccactcgacccctggggctgcc

SEQ ID NO: 667478 - DNA, 120 bp, Artificial Sequence
  ENSG00000185189_11 (sequence is synthesized)
ccgtgtgctggccccacccccggaggaggtccaaaaggccaagaccccgacgccagagccctttgactctgagaccagaaaggtcatccagatgcagtgcaacctggagagaagcgagga

SEQ ID NO: 667479 - DNA, 120 bp, Artificial Sequence
  ENSG00000185189_12 (sequence is synthesized)
caaggcgcgctggcatctcactctgcttctggtgctggaagaccggctgcaccggcagctgacctacgacctgctcccaacggacagcgcccaggacctcgcctcggagctcgtgcacta

SEQ ID NO: 667480 - DNA, 120 bp, Artificial Sequence
  ENSG00000185189_13 (sequence is synthesized)
tggcttcctccacgaggacgaccggatgaagctggccgccttcctggagagcaccttcctcaagtaccgtgggacccaggcctgacccggagccccagccccaggggaccatgccggggt

SEQ ID NO: 667481 - DNA, 120 bp, Artificial Sequence
  ENSG00000185189_14 (sequence is synthesized)
gctgcctgggcaggccatgttggggagactccagcaccgtggggctgccctcctccatgcgcctgggagcacaaaggccccggtagtgaaggaaccccccgtctcctgagagtggggctg

SEQ ID NO: 667482 - DNA, 120 bp, Artificial Sequence
  ENSG00000185189_15 (sequence is synthesized)
tgccttgggcgccgaggggttggggggtgggtgtgggggagccgttaggcctcccaggtccttaggatcagggttgcccccagaaccccttcccatatcctccattctccgccctgagtt

SEQ ID NO: 667483 - DNA, 120 bp, Artificial Sequence
  ENSG00000185189_16 (sequence is synthesized)
cctacccaggctgcctggccggggccactgcctcctcagcatgcaggaggctgccctgtagggaaccccagctctggggcttgggggtgagggtcagccctggacagacctctgcccagg

SEQ ID NO: 667484 - DNA, 120 bp, Artificial Sequence
  ENSG00000185189_17 (sequence is synthesized)
gaactgctccatggggtctgggagagcagccatcccctgctggcaccatagacccacacaaggagcctgcacagcaagccagcggtgacacacctgcaggtgtcaggcatggcactgggc

SEQ ID NO: 667485 - DNA, 120 bp, Artificial Sequence
  ENSG00000185189_18 (sequence is synthesized)
acaacagggacctggcaggagaaacagaccacagagaggtctggagttgaggctgttgtcagcaaagcccctggtcccacacagctctgccctagagccacctctttgaccctttaccca

SEQ ID NO: 667486 - DNA, 120 bp, Artificial Sequence
  ENSG00000185189_19 (sequence is synthesized)
ccctgagaccagaacttgcagcccctctgcagatctcctctggccactgcagcccctccaatgggctttttctctcatgcattccctggcctggaggcgtcagggaccccacatcctccc

SEQ ID NO: 667487 - DNA, 120 bp, Artificial Sequence
  ENSG00000185189_20 (sequence is synthesized)
tgctcctcagactcacagcccctccatgttacctcccgcacctcctccctggggcagctgctccctgggcctctgaggatgtcagctcctggctccctgcctctctcccactccactcct

SEQ ID NO: 667488 - DNA, 120 bp, Artificial Sequence
  ENSG00000185189_21 (sequence is synthesized)
ggctcagtcttagagatttctatgccctcatggattctacccctgccttcctggcctcttgattcttggcttgcctctcctccaattccaaacttagtgaaatggccttaagcattttaa

SEQ ID NO: 667489 - DNA, 120 bp, Artificial Sequence
  ENSG00000185189_22 (sequence is synthesized)
actgtatgtatacattagcgcattcatgcctttctaaacgcatttcaaatgtcaaccaggaaggcacaccactgtattagttttatactgccgctgtaaaatttaccacaaacttagtga

SEQ ID NO: 667490 - DNA, 120 bp, Artificial Sequence
  ENSG00000185189_23 (sequence is synthesized)
cttaacacaaatttattgcaattctgtaggctggaagtctgactatgggtctcactggactagaatcaaggctggcaggctgccttccttcctggaggttctaggggagactctgtctcc

SEQ ID NO: 667491 - DNA, 120 bp, Artificial Sequence
  ENSG00000185189_24 (sequence is synthesized)
tgctccttcaggctgctggcagaatccacatcctttcggtggcagggccaaggtccccactttcttgctgactgtaaactaaggccacttccagcttgtagaggctgcctacattccttg

SEQ ID NO: 667492 - DNA, 120 bp, Artificial Sequence
  ENSG00000185189_25 (sequence is synthesized)
gctcttggccccctcctccatcttcagagctagcaggttcagtctgtgtcacgaaccatttctctggttccctgcagacaggaaaggttgtccctaaggactcatgagattaggttgggc

SEQ ID NO: 667493 - DNA, 120 bp, Artificial Sequence
  ENSG00000185189_26 (sequence is synthesized)
ccagccagataatacatgataatctccctcctcaaggtttttaatattaaacacatctgcaggacacattttgccatgtaaactaacattcactggttccagggattaaggaatgaacct

SEQ ID NO: 667494 - DNA, 120 bp, Artificial Sequence
  ENSG00000185189_27 (sequence is synthesized)
cttttgttggggaagggtggcattctgctgaccacagcactccaaccaaaagccaaaaaccaaagcaagacttactaacgcatatcaaataaattaaaggtacaaaatcgtgaatctcag

SEQ ID NO: 667495 - DNA, 120 bp, Artificial Sequence
  ENSG00000185189_28 (sequence is synthesized)
ttatcttaaatattccaatactatttacaaaattattcaaattctcacgccttccaactcaaaattagcaatctaaagtaatttccatatcctagatggaaaccctcatgctaaactgtc

SEQ ID NO: 667496 - DNA, 120 bp, Artificial Sequence
  ENSG00000185189_29 (sequence is synthesized)
tgattatgcatggttctaaatggtttcagtggcaaatacataacattgtactactgattaaactgaacttaaaagcatcaataccaccattgctgcacttaatcatgtctctgttgaatt

SEQ ID NO: 667497 - DNA, 120 bp, Artificial Sequence
  ENSG00000185189_30 (sequence is synthesized)
tttccttttaaattttatcttttcagaattatatatgtattgtttttaaagtagaatagttttttttttgaggccaataataaataataaatgcaggctcctactctgatcctctccaaa

SEQ ID NO: 667498 - DNA, 120 bp, Artificial Sequence
  ENSG00000185189_31 (sequence is synthesized)
ccgagctgagccgatcaaaaggccatgggtaggaggcttgcaggtgtgactttaggatcatggcttctccccacgattttttgggggtcgagggaagcagagcatggtgctccaatccca

SEQ ID NO: 667499 - DNA, 120 bp, Artificial Sequence
  ENSG00000185189_32 (sequence is synthesized)
gaacccagctgtcctcaagctcagaggaccaggtcctggcctggctgctgctgctgggactcctccctatgggcatccctgcatgtcctgtgtgtccctgaggagggacatggggaactc

SEQ ID NO: 667500 - DNA, 120 bp, Artificial Sequence
  ENSG00000185189_33 (sequence is synthesized)
gcctcggacaggggctgggcgaggatgcggggcgggctccgcaggcccagccgcctctcctgcgcccacccgaccgacggagtcgtgcgtccgccgccaggcctggaagcgctggtgcac

SEQ ID NO: 667501 - DNA, 120 bp, Artificial Sequence
  ENSG00000185189_34 (sequence is synthesized)
cgggcaggcagagaccacagctaggtggggcgggcatggggacgaacccgcagctggtggaaatcctgagctcgcaccgtgcaggtcatcttcatcacagagtacgtgtcatcaggcagc

SEQ ID NO: 667502 - DNA, 120 bp, Artificial Sequence
  ENSG00000185189_35 (sequence is synthesized)
gggggcgctgggagagcgcggcggctggaaacctctccgcggcccctcgcggcccgcgaatcagccacccctggacccctttggcctggcgctcgccctgggactccctgagggccagtc

SEQ ID NO: 667503 - DNA, 120 bp, Artificial Sequence
  ENSG00000185189_36 (sequence is synthesized)
tcctcccaggaccacctccccatgcctctggactcagccgctagcttcctggggatccccctcgaccccctgaaacctgctccaaatccccttagcccagcccttggataggagcccttg

SEQ ID NO: 667504 - DNA, 120 bp, Artificial Sequence
  ENSG00000185189_37 (sequence is synthesized)
agctgacctacgacctgctcccaagtaggctgggcaggggacttgggcggcgggcggtgaccccaggcggcgggtgggcagcggcctcatgcctcgccttacgccattgcctcagcggac

SEQ ID NO: 667505 - DNA, 120 bp, Artificial Sequence
  ENSG00000185198_0 (sequence is synthesized)
ggccgttggctgagggtgggagccacggcccgaagacctctgcggggagacgccagcctgcgtctgccatggggctcgggttgaggggctggggacgtcctctgctgactgtggccaccg

SEQ ID NO: 667506 - DNA, 120 bp, Artificial Sequence
  ENSG00000185198_1 (sequence is synthesized)
ccctgatgctgcccgtgaagccccccgcaggctcctggggggcccagatcatcgggggccacgaggtgaccccccactccaggccctacatggcatccgtgcgcttcgggggccaacatc

SEQ ID NO: 667507 - DNA, 120 bp, Artificial Sequence
  ENSG00000185198_2 (sequence is synthesized)
actgcggaggcttcctgctgcgagcccgctgggtggtctcggccgcccactgcttcagccacagagacctccgcactggcctggtggtgctgggcgcccacgtcctgagtactgcggagc

SEQ ID NO: 667508 - DNA, 120 bp, Artificial Sequence
  ENSG00000185198_3 (sequence is synthesized)
ccacccagcaggtgtttggcatcgatgctctcaccacacaccccgactaccaccccatgacccacgccaacgacatctgcctgctgcggctgaacggctctgctgtcctgggccctgcag

SEQ ID NO: 667509 - DNA, 120 bp, Artificial Sequence
  ENSG00000185198_4 (sequence is synthesized)
gaggccgccagggagaagggccaggccccccacagcggggacacggtgccgggtggctggctggggcttcgtgtctgactttgaggagctgccgcctggactgatggaggccaaggtccg

SEQ ID NO: 667510 - DNA, 120 bp, Artificial Sequence
  ENSG00000185198_5 (sequence is synthesized)
agtgctggacccggacgtctgcaacagctcctggaagggccacctgacacttaccatgctctgcacccgcagtggggacagccacagacggggcttctgctcggccgactccggagggcc

SEQ ID NO: 667511 - DNA, 120 bp, Artificial Sequence
  ENSG00000185198_6 (sequence is synthesized)
cctggtgtgcaggaaccgggctcacggcctcgtttccttctcgggcctctggtgcggcgaccccaagacccccgacgtgtacacgcaggtgtccgcctttgtggcctggatctgggacgt

SEQ ID NO: 667512 - DNA, 120 bp, Artificial Sequence
  ENSG00000185198_7 (sequence is synthesized)
ggttcggcggagcagtccccagcccggccccctgcctgggaccaccaggcccccaggagaagccgcctgagccacaaccttgcggcatgcaaatgagatggccgctccaggcctggaatg

SEQ ID NO: 667513 - DNA, 120 bp, Artificial Sequence
  ENSG00000185198_8 (sequence is synthesized)
ttccgtggctgggccccacgggaagcctgatgttcagggttggggtgggacgggcagcggtggggcacacccattccacatgcaaagggcagaagcaaacccagtaaaatgttaactgac

SEQ ID NO: 667514 - DNA, 120 bp, Artificial Sequence
  ENSG00000185198_9 (sequence is synthesized)
ctctgcggggagacgccagcctgcgtctgccatggggctcgggttgaggggctggggacgtcctctgctgactgtggccaccgccctgatgctgcccgtgaagccccccggctcctgggg

SEQ ID NO: 667515 - DNA, 120 bp, Artificial Sequence
  ENSG00000185201_0 (sequence is synthesized)
atcccggtaacccgatcaccgctggtcaccatgaaccacattgtgcaaaccttctctcctgtcaacagcggccagcctcccaactacgagatgctcaaggaggagcaggaagtggctatg

SEQ ID NO: 667516 - DNA, 120 bp, Artificial Sequence
  ENSG00000185201_1 (sequence is synthesized)
ctgggggtgccccacaaccctgctcccccgatgtccaccgtgatccacatccgcagcgagacctccgtgcctgaccatgtggtctggtccctgttcaacaccctcttcatgaacacctgc

SEQ ID NO: 667517 - DNA, 120 bp, Artificial Sequence
  ENSG00000185201_2 (sequence is synthesized)
cgacgtgaccggggcccaggcctatgcctccaccgccaagtgcctgaacatctgggccctgattttgggcatcttcatgaccattctgctcatcatcatcccagtgttggtcgtccaggc

SEQ ID NO: 667518 - DNA, 120 bp, Artificial Sequence
  ENSG00000185201_3 (sequence is synthesized)
ccagcgatagatcaggaggcatcattgaggccaggagctctgcccgtgacctgtatcccacgtactctatcttccattcctcgccctgcccccagaggccaggagctctgcccttgacct

SEQ ID NO: 667519 - DNA, 120 bp, Artificial Sequence
  ENSG00000185201_4 (sequence is synthesized)
gtattccacttactccaccttccattcctcgccctgtccccacagccgagtcctgcatcagccctttatcctcacacgcttttctacaatggcattcaataaagtgtatatgtttctggt

SEQ ID NO: 667520 - DNA, 120 bp, Artificial Sequence
  ENSG00000185201_5 (sequence is synthesized)
agtctccaggaccccacaccactaacaagatgagacttgtgctcctttgggctctagagaggaagcccctcttagccctcagcccctctttcctccctctcctaaagtaatttgatcctc

SEQ ID NO: 667521 - DNA, 120 bp, Artificial Sequence
  ENSG00000185201_6 (sequence is synthesized)
gggcttcatagcattcgcgtactccgtgaagtctagggacaggaagatggttggcgacgtgaccggggcccaggcctatgcctccaccgccaagtgcctgaacatctgggccctgattct

SEQ ID NO: 667522 - DNA, 120 bp, Artificial Sequence
  ENSG00000185201_7 (sequence is synthesized)
ttcatcctgttactggtattcggctctgtgacagtctaccatattatgttacagataatacaggaaaaacggggttactagtagccgcccatagcctgcaacctttgcactccactgtgc

SEQ ID NO: 667523 - DNA, 120 bp, Artificial Sequence
  ENSG00000185201_8 (sequence is synthesized)
aatgctggccctgcacgctggggctgttgcccctgcccccttggtcctgcccctagatacagcagtttatacccacacacctgtctacagtgtcattcaataaagtgcacgtgcttgtga

SEQ ID NO: 667524 - DNA, 120 bp, Artificial Sequence
  ENSG00000185201_9 (sequence is synthesized)
ccgtgatccacatccgcagcgagacctccgtgcctgaccatgtggtctggtccctgttcaacaccctcttcatgaacacctgctgcctgggcttcatagcattcgcgtactccgtgaaga

SEQ ID NO: 667525 - DNA, 120 bp, Artificial Sequence
  ENSG00000185201_10 (sequence is synthesized)
ctggcacccaggctctcccagaaagtgagaagggaactcacaggtgacttcaccccatggtggggagaacagcctgtgctggggccaaggcagaaggaggatgagccccgaggctcctgg

SEQ ID NO: 667526 - DNA, 120 bp, Artificial Sequence
  ENSG00000185215_0 (sequence is synthesized)
gcaggagcctgcaggcctgaaccagggtgatgctgaagatgatgaccttcttccaaggcctctagagccatcagcctgtgccaggcaccctcgacttgcctagaggcccccaaaagttgc

SEQ ID NO: 667527 - DNA, 120 bp, Artificial Sequence
  ENSG00000185215_1 (sequence is synthesized)
agtccacatcagaggcagagtcagaggcctccatgtcggaggcctcctctgaggacctggtgccacccctggaggctggggcagccccatatagggaggaggaagaggcggcgaagaaga

SEQ ID NO: 667528 - DNA, 120 bp, Artificial Sequence
  ENSG00000185215_2 (sequence is synthesized)
agaaggagaagaagaagaagtccaaaggcctggccaatgtgttctgcgtcttcaccaaagggaagaagaagaagggtcagcccagctcagcggagcccgaggacgcagccgggtccaggc

SEQ ID NO: 667529 - DNA, 80 bp, Artificial Sequence
  ENSG00000185215_3 (sequence is synthesized)
aggggctggatggcccgccccccacagtggaggagctgaaggcggcgctggagcgcgggcagctggaggcggcgcggccg

SEQ ID NO: 667530 - DNA, 120 bp, Artificial Sequence
  ENSG00000185215_4 (sequence is synthesized)
cgggcggtgtgagcgaggaggagctggtgcggcgccagagcaaggtggaggcgctgtacgagctgctgcgcgaccaggtgctgggcgtgctgcggcggccgctggaggcgccgcccgagc

SEQ ID NO: 667531 - DNA, 120 bp, Artificial Sequence
  ENSG00000185215_5 (sequence is synthesized)
ggcggcgcggcgtggcggaggcggccgaggagcgcatgggccagcggccggccgcgggcgccgaggtccccgagagcgtctttctgcacttgggccgcaccatgaaggaggacctggagg

SEQ ID NO: 667532 - DNA, 120 bp, Artificial Sequence
  ENSG00000185215_6 (sequence is synthesized)
ccgtggtggagcggctgaagccgctgttccccgccgagttcggcgtcgtggcggcctacgccgagagctaccaccagcacttcgcggcccacctggccgccgtggcgcagttcgagctgt

SEQ ID NO: 667533 - DNA, 120 bp, Artificial Sequence
  ENSG00000185215_7 (sequence is synthesized)
gcgagcgcgacacctacatgctgctgctctgggtgcagaacctctaccccaatgacatcatcaacagccccaagctggtgggtgagctgcagggtatggggctcgggagcctcctgcccc

SEQ ID NO: 667534 - DNA, 120 bp, Artificial Sequence
  ENSG00000185215_8 (sequence is synthesized)
ccaggcagatccgactgctggaggccacattcctgtccagtgaggcggccaatgtgagggagttgatggaccgagctctggagctagaggcacggcgctgggctgaggatgtgcctcccc

SEQ ID NO: 667535 - DNA, 120 bp, Artificial Sequence
  ENSG00000185215_9 (sequence is synthesized)
agaggctggacggccactgccacagcgagctggccatcgacatcatccagatcacctcccaggcccaggccaaggccgagagcatcacgctggacttgggctcacagataaagcgggtgc

SEQ ID NO: 667536 - DNA, 120 bp, Artificial Sequence
  ENSG00000185215_10 (sequence is synthesized)
tgctggtggagctgcctgcgttcctgaggagctaccagcgcgcctttaatgaatttctggagagaggcaagcagctgacgaattacagggccaatgttattgccaacatcaacaactgcc

SEQ ID NO: 667537 - DNA, 120 bp, Artificial Sequence
  ENSG00000185215_11 (sequence is synthesized)
tgtccttccggatgtccatggagcagaattggcaggtaccccaggacaccctgagcctcctgctgggccccctgggtgagctcaagagccacggctttgacaccctgctccagaacctgc

SEQ ID NO: 667538 - DNA, 120 bp, Artificial Sequence
  ENSG00000185215_12 (sequence is synthesized)
atgaggacctgaagccactgttcaagaggttcacgcacacccgctgggcggcccctgtggagaccctggaaaacatcatcgccactgtagacacgaggctgcctgagttctcagagctgc

SEQ ID NO: 667539 - DNA, 120 bp, Artificial Sequence
  ENSG00000185215_13 (sequence is synthesized)
agggctgtttccgggaggagctcatggaggccttgcacctgcacctggtgaaggagtacatcatccaactcagcaaggggcgcctggtcctcaagacggccgagcagcagcagcagctgg

SEQ ID NO: 667540 - DNA, 120 bp, Artificial Sequence
  ENSG00000185215_14 (sequence is synthesized)
ctgggtacatcctggccaatgctgacaccatccagcacttctgcacccagcacggctccccggcgacctggctgcagcctgctctccctacgctggccgagatcattcgcctgcaggacc

SEQ ID NO: 667541 - DNA, 120 bp, Artificial Sequence
  ENSG00000185215_15 (sequence is synthesized)
ccagtgccatcaagattgaggtggccacttatgccacctgctaccctgacttcagcaaaggccacctgagcgctatcctggccatcaaggggaacctatccaacagtgaggtcaagcgca

SEQ ID NO: 667542 - DNA, 120 bp, Artificial Sequence
  ENSG00000185215_16 (sequence is synthesized)
gccttgggcacaccccgctgggagctgttaagagcagcgctggttctcggttcctcccgggtctcctgtgctctgatgctacttctgcctagccctggcggaggtgcaggccctgtcagc

SEQ ID NO: 667543 - DNA, 120 bp, Artificial Sequence
  ENSG00000185215_17 (sequence is synthesized)
tggaactggacagaccttggtttgtttacatgtccgatgggggcaggagctcccatcctgggcagccaaccaggcaacaccaaggactctttgtaaacgatagctgatcgtgtgcacgca

SEQ ID NO: 667544 - DNA, 120 bp, Artificial Sequence
  ENSG00000185215_18 (sequence is synthesized)
aggaaagaaccaggagggagagtgcagccaggctcagggatccccggacacctctgtccagagcccctccacagtcggcctcatgactgtcctcctcgtgggtggggccgagggccctct

SEQ ID NO: 667545 - DNA, 120 bp, Artificial Sequence
  ENSG00000185215_19 (sequence is synthesized)
tcagctctctggagacaggggccgagcctcacccatctgccctctgcagcccagggccgccgtgagcgggattcagcaatggtggaatggaagacagaactggaagagaaagaaggaaaa

SEQ ID NO: 667546 - DNA, 120 bp, Artificial Sequence
  ENSG00000185215_20 (sequence is synthesized)
gatgagctctcgtctggcaggggcttttagggtcctgtggcgagctgtgagcaccgccagcattagacgtcacatccaggtggccccacggcccctacaggctggccctgcaatggggcc

SEQ ID NO: 667547 - DNA, 120 bp, Artificial Sequence
  ENSG00000185215_21 (sequence is synthesized)
ctgagccctccctcttcatcccccaaggcctcaactagagggtggtcccccgagggcttggtgtctactaccgaagggcccaagacctcctgggtcctctcaggctcccccttccccaag

SEQ ID NO: 667548 - DNA, 120 bp, Artificial Sequence
  ENSG00000185215_22 (sequence is synthesized)
gcagggacaggccctgggggtgccaccgtgggccctgccacccagaagtctggctgaggtctgggcaggggcagggcaagcttgacctctcactgttgaccctttggcctctgtatttgt

SEQ ID NO: 667549 - DNA, 120 bp, Artificial Sequence
  ENSG00000185215_23 (sequence is synthesized)
ttcctattgccgtgacaggtttccacaaacttcgtggatcaaaacgaggtcttccagttctgcgggtcagaaggctgacccggggctcaaatctgggtgtcggcagtcctgcactccttc

SEQ ID NO: 667550 - DNA, 120 bp, Artificial Sequence
  ENSG00000185215_24 (sequence is synthesized)
tggaggctctaggggagaattcatttctggccttttcatttttagaggctgaccgtaattcttgacttcaggctcctccatcttcagagccagctgtgggtagttgaatctttttcccgt

SEQ ID NO: 667551 - DNA, 79 bp, Artificial Sequence
  ENSG00000185215_25 (sequence is synthesized)
tcttcagagccagctgtgggtagttgaatctttttcccgtcacctcattgaggcctcccctctcctgcctccctccacc

SEQ ID NO: 667552 - DNA, 120 bp, Artificial Sequence
  ENSG00000185215_26 (sequence is synthesized)
ctcactgcagcctggacctcctggttcaagtgatcctcttgtctcagtcccctgagacaatcccccacgcccagctacatattttttgtggatacagggtctcattctgttgcctaggct

SEQ ID NO: 667553 - DNA, 82 bp, Artificial Sequence
  ENSG00000185215_27 (sequence is synthesized)
acccggcctgctctaccgcttttaaggacgcttatgatcacattgcgcctacccagagaacccaggtcgtctttctattttc

SEQ ID NO: 667554 - DNA, 120 bp, Artificial Sequence
  ENSG00000185215_28 (sequence is synthesized)
ttgcgcctacccagagaacccaggtcgtctttctattttcaggtcagctgattagccaccttagttccatctgcaactttagttcccactggctgtgtaacctaacatagtcacaggctc

SEQ ID NO: 667555 - DNA, 120 bp, Artificial Sequence
  ENSG00000185215_29 (sequence is synthesized)
tggggactgtcacgtggacatctttgggaggccgttattctgcccaccgcaccctccgttcatcccctgccctgccgggcacctcgctctaccccaggaaaatgtgagctcgttttcctg

SEQ ID NO: 667556 - DNA, 120 bp, Artificial Sequence
  ENSG00000185215_30 (sequence is synthesized)
ctcggcatgtgctccccctaaggctctgctcctccctgggcctgaaagttccttctcagcctgagagggggcccttcggactcaggcatgactcagcccggctgatgcctctgcagtgct

SEQ ID NO: 667557 - DNA, 120 bp, Artificial Sequence
  ENSG00000185215_31 (sequence is synthesized)
gagtcaggatttggggccggctctcttgggtccgtccccttttcccaggtactgccttacaaagctgtggccaggaagtggccggtataaaggatgcccaaggtctttgtacgtgtgtag

SEQ ID NO: 667558 - DNA, 120 bp, Artificial Sequence
  ENSG00000185215_32 (sequence is synthesized)
gagttagcgtgtttgatattgttaatataataataattattttttagagtactgcttttgtatgtatgttgaacaggatccaggtttttatagcttgatataaaacagaattcaaaagtg

SEQ ID NO: 667559 - DNA, 120 bp, Artificial Sequence
  ENSG00000185215_33 (sequence is synthesized)
agtggcggccaggccgggacacggtaagtgacctccgcttccacacgtccattccccgccgctccgcgcggcttctcgcccgcccctaccccgaggccaggccggattccccgaggaaag

SEQ ID NO: 667560 - DNA, 120 bp, Artificial Sequence
  ENSG00000185215_34 (sequence is synthesized)
aaagagcctgtcgccgcggcggggacaggagggggctggacgcttccagggaaactgaggccctggcgcgcccagcgtccgcgcgtccgggcgcagaggggccaaggctggctgagggcc

SEQ ID NO: 667561 - DNA, 120 bp, Artificial Sequence
  ENSG00000185215_35 (sequence is synthesized)
cctgccagaggcagggagggcggggctggggcaggcgcaggggtctcccctccattacagcagaaaggccccaggtccggcgtgactccccggccgggcgacacaggccgagtcacttcc

SEQ ID NO: 667562 - DNA, 120 bp, Artificial Sequence
  ENSG00000185215_36 (sequence is synthesized)
tcgcccgtgcccgggtgtcctcatcgggggatgggtgcgccttccacatcctgcccaggactgaaggagccgggcccagcgagctcccgggaggtgtgtggacatcagccctgacgggga

SEQ ID NO: 667563 - DNA, 120 bp, Artificial Sequence
  ENSG00000185215_37 (sequence is synthesized)
agtggcggccaggccgggacacgctgcctcggagagcggagacctggggcgaggcccagggggctgcagcaggaccttcaggcgctctgggtttcgtgtcacagaggggagaaggcggtg

SEQ ID NO: 667564 - DNA, 120 bp, Artificial Sequence
  ENSG00000185215_38 (sequence is synthesized)
acaggacatgggcagggagcttgacgggtcttccaggtgagcgaggtgagggatagtgccccagtgacctgcccctcctcctccaggccaatgtgagggagttgatggaccgagctctgg

SEQ ID NO: 667565 - DNA, 120 bp, Artificial Sequence
  ENSG00000185219_0 (sequence is synthesized)
ggagccgccgggaggtaggcgcgggacgggcggctgcggtggcggcgggtggaccgattgtcgctcggcggcgggagtcggtggagtctcgctctttcgcaaggctggagtgcaatggca

SEQ ID NO: 667566 - DNA, 77 bp, Artificial Sequence
  ENSG00000185219_1 (sequence is synthesized)
atgctggtaatttcagtcacttgctgatgacttctgatgtcccagcaaatgttggcattgttgactgctgagaagat

SEQ ID NO: 667567 - DNA, 120 bp, Artificial Sequence
  ENSG00000185219_2 (sequence is synthesized)
tgtcccagcaaatgttggcattgttgactgctgagaagatacttctgaggacccacgtctaaggtggacttggttcgcactcttctggttagtccctgaacaggagtgatgcctccaggc

SEQ ID NO: 667568 - DNA, 120 bp, Artificial Sequence
  ENSG00000185219_3 (sequence is synthesized)
aggtggcatgctgcctatccagctcaggcccagtcttcgagggagcgagggcggcttcagacagtaaagaaggaagaagaggatgaaagctatactccagtgcaggctgccaggccacag

SEQ ID NO: 667569 - DNA, 120 bp, Artificial Sequence
  ENSG00000185219_4 (sequence is synthesized)
actctcaaccgccctggccaggagctgttccgccagctcttcagacagcttcgctaccatgagtcttcagggcccctagaaactctgagccggctccgggaactctgtcgctggtggctg

SEQ ID NO: 667570 - DNA, 120 bp, Artificial Sequence
  ENSG00000185219_5 (sequence is synthesized)
aggcctgacgttctctccaaggcacagatcctagagctgctggtgctggaacagttcctgagcatcctgcctggggagctccgggtttgggtgcagcttcataaccctgagagtggcgag

SEQ ID NO: 667571 - DNA, 120 bp, Artificial Sequence
  ENSG00000185219_6 (sequence is synthesized)
gaggctgtggccttgctggaggagctgcagagggaccttgatgggacatcctggagggacccgggccctgcccagagcccagatgtgcattggatgggtacaggagccctgcgatctgca

SEQ ID NO: 667572 - DNA, 120 bp, Artificial Sequence
  ENSG00000185219_7 (sequence is synthesized)
cagatatggtcccttgcttcacctctcaggagcagctctgctctgggggaccacctggagcctccctatgaaatagaagcacgtgacttcctggctgggcaatccgatactcctgctgcc

SEQ ID NO: 667573 - DNA, 120 bp, Artificial Sequence
  ENSG00000185219_8 (sequence is synthesized)
cagatgcctgcccttttcccgagagaggggtgcccgggagaccaggtaacaccaaccaggtccctgacagcccagctccaggagaccatgactttcaaggatgtggaggtgaccttctcc

SEQ ID NO: 667574 - DNA, 120 bp, Artificial Sequence
  ENSG00000185219_9 (sequence is synthesized)
caggacgagtgggggtggctggactctgctcagaggaacctgtacagggatgtgatgctggagaattataggaacatggcttccctggtgggaccattcaccaaacctgctctgatctcc

SEQ ID NO: 667575 - DNA, 120 bp, Artificial Sequence
  ENSG00000185219_10 (sequence is synthesized)
tggttggaagcaagggagccatggggcctgaacatgcaggcagctcagcctaaggggaatccagttgctgctcctacaggagatgacctccagagtaaaacaaacaaattcatcttaaat

SEQ ID NO: 667576 - DNA, 120 bp, Artificial Sequence
  ENSG00000185219_11 (sequence is synthesized)
caggaacctttggaagaagcagaaaccttagctgtgtcatcaggatgtcctgcgacaagtgtttctgagggaattgggctcagagaatcttttcaacagaagagcaggcagaaggatcaa

SEQ ID NO: 667577 - DNA, 120 bp, Artificial Sequence
  ENSG00000185219_12 (sequence is synthesized)
tgtgaaaatcccatacaagtaagagttaagaaagaagagaccaatttcagtcacaggacaggaaaagactctgaagtatcaggaagtaatagtcttgacttaaaacatgttacatatttg

SEQ ID NO: 667578 - DNA, 120 bp, Artificial Sequence
  ENSG00000185219_13 (sequence is synthesized)
agagtttctggaagaaaggaatcccttaaacatggctgtggcaaacacttcagaatgagttcacaccactatgactacaagaaatatgggaaggggctcagacacatgattgggggcttc

SEQ ID NO: 667579 - DNA, 120 bp, Artificial Sequence
  ENSG00000185219_14 (sequence is synthesized)
agcctacatcagagaattcatagtggactgaaagggaacaaaaaggacgtgtgtggaaaagacttcagccttagctctcatcaccaacgtgggcagagtcttcacacagtgggagtgtca

SEQ ID NO: 667580 - DNA, 120 bp, Artificial Sequence
  ENSG00000185219_15 (sequence is synthesized)
tttaagtgcagtgactgtggaaggactttcagtcatagctcccatcttgcgtatcatcagagacttcacactcaagagaaagcatttaaatgtagggtgtgtgggaaagccttccggtgg

SEQ ID NO: 667581 - DNA, 120 bp, Artificial Sequence
  ENSG00000185219_16 (sequence is synthesized)
agttccaactgtgcgcggcatgagaaaattcacactggagtgaagccttataaatgcgatttatgtgagaaagctttccgacgcctgtcagcctaccgtctgcaccgagaaacccatgct

SEQ ID NO: 667582 - DNA, 120 bp, Artificial Sequence
  ENSG00000185219_17 (sequence is synthesized)
aagaagaaatttcttgaattgaatcagtatagggcagctctcacctacagctcagggtttgatcatcatttgggagaccaaagtggggagaaactctttgactgcagccagtgcaggaaa

SEQ ID NO: 667583 - DNA, 120 bp, Artificial Sequence
  ENSG00000185219_18 (sequence is synthesized)
tccttccactgtaagtcatatgttcttgaacatcaaaggattcacacccaggagaagccctataaatgtaccaaatgtaggaaaacctttagatggagatcaaactttactcgtcatatg

SEQ ID NO: 667584 - DNA, 120 bp, Artificial Sequence
  ENSG00000185219_19 (sequence is synthesized)
aggttgcatgaggaggaaaaattctacaaacaagatgaatgtcgtgaaggcttcaggcaatctcctgactgcagtcagccccagggtgctcccgctgtggagaaaacatttctgtgtcag

SEQ ID NO: 667585 - DNA, 120 bp, Artificial Sequence
  ENSG00000185219_20 (sequence is synthesized)
cagtgtgggaaaacttttactagaaagaaaactctcgttgaccaccagagaattcacacaggtgagaaaccttaccagtgtagcgattgtgggaaggactttgcctataggtcagccttt

SEQ ID NO: 667586 - DNA, 120 bp, Artificial Sequence
  ENSG00000185219_21 (sequence is synthesized)
attgttcataagaagaagcatgccatgaaaagaaaacctgagggcgggccatcttttagtcaggacacagtgttccaggttcctcagagcagtcactccaaagaggagccctacaaatgc

SEQ ID NO: 667587 - DNA, 120 bp, Artificial Sequence
  ENSG00000185219_22 (sequence is synthesized)
agccagtgtggcaaggccttccgcaatcactcattcctcctcatccatcagagagttcacactggagagaagccatataagtgcagggagtgtgggaaagccttcagatggagttccaat

SEQ ID NO: 667588 - DNA, 120 bp, Artificial Sequence
  ENSG00000185219_23 (sequence is synthesized)
ctctaccgacatcagaggattcactctcttcaaaaacagtatgattgccatgaaagtgaaaagactccaaatgtggagccaaaaatcctcactggtgagaaacgtttttggtgtcaagaa

SEQ ID NO: 667589 - DNA, 120 bp, Artificial Sequence
  ENSG00000185219_24 (sequence is synthesized)
tgtgggaaaacctttacacgtaaaagaacccttttagatcataagggaatacacagtggagagaagcgctataaatgtaatctatgtgggaaatcttatgatagaaactatcgccttgtt

SEQ ID NO: 667590 - DNA, 120 bp, Artificial Sequence
  ENSG00000185219_25 (sequence is synthesized)
aaccatcagaggatccactctacagagagacctttcaaatgtcagtggtgtgggaaagagttcattgggagacataccctttccagtcaccagaggaaacacaccagagcagcacaggct

SEQ ID NO: 667591 - DNA, 120 bp, Artificial Sequence
  ENSG00000185219_26 (sequence is synthesized)
gaacgtagcccgcctgcacggtcttcctctcaggacacaaagttgagattacagaagctaaaaccaagtgaagagatgcccctcgaagactgcaaagaagcttgcagccagagctccagg

SEQ ID NO: 667592 - DNA, 120 bp, Artificial Sequence
  ENSG00000185219_27 (sequence is synthesized)
ctcactggactccaggacataagcattgggaaaaagtgccacaaatgcagcatatgtgggaaaacttttaacaagagttcacaactcattagccacaagagatttcatactcgagagagg

SEQ ID NO: 667593 - DNA, 120 bp, Artificial Sequence
  ENSG00000185219_28 (sequence is synthesized)
cccttcaaatgcagcaagtgtggaaagaccttcaggtggtcttcgaacctggctcggcatatgaaaaaccatattagagattagcctgggacctgacagtgacagtgggggtgggttctc

SEQ ID NO: 667594 - DNA, 120 bp, Artificial Sequence
  ENSG00000185219_29 (sequence is synthesized)
agtcccctgctagagaacccttaattataggcattgtggagtaactttgataaagggcccagccctttctgttttggaagctagtgacagaatcccaaggatttgaaagctcggggagtc

SEQ ID NO: 667595 - DNA, 120 bp, Artificial Sequence
  ENSG00000185219_30 (sequence is synthesized)
cccagcctgcctgctaggatgtgacgctggggaagtgcagcaccatgtcctttggagcccttctggagactccggcccctaggagtggcctctgcaccatagcctgcggctcccctattc

SEQ ID NO: 667596 - DNA, 120 bp, Artificial Sequence
  ENSG00000185219_31 (sequence is synthesized)
aggtctccttccacaactctgaagagagagaccactgccctttgtggttggacagaatatctgtggcatcatgggctatggctgctggaaaggggccagtgggatcctagatttgtcttc

SEQ ID NO: 667597 - DNA, 120 bp, Artificial Sequence
  ENSG00000185219_32 (sequence is synthesized)
aagtttggcctgtggccatgcctattctgttgactttaaaagcagcagcatcaagaactcctagccttcccaaatgccccctggggagttctggctggggcttcagccttcctggctggc

SEQ ID NO: 667598 - DNA, 120 bp, Artificial Sequence
  ENSG00000185219_33 (sequence is synthesized)
ttttggatatctgctagggggttagagtggtctcagcggcaggtggaggagagcaggatgctgggctcaagcgcttggcgtgtggatctctaccagtaccctgttgccatccccatccca

SEQ ID NO: 667599 - DNA, 120 bp, Artificial Sequence
  ENSG00000185219_34 (sequence is synthesized)
caggcctgcataggcagcagcggtccatctgtttaacagaaatgtgctgagcactcccatacaccaggcgctggtgtgtttgccagagacccagcagggaccagaacagatgaaaatcct

SEQ ID NO: 667600 - DNA, 120 bp, Artificial Sequence
  ENSG00000185219_35 (sequence is synthesized)
gccatcttggatctttacagatgacaaacaaatgggatacgcagtattctggatggtgatgtgtgtagtggacaaagtgaatcagagaagagcagagggagtgctggattgggagatcag

SEQ ID NO: 667601 - DNA, 120 bp, Artificial Sequence
  ENSG00000185219_36 (sequence is synthesized)
tcgtgattttagatagtctggtcagggagggcctcaactgagaaggtgaaatgtgagcaaagacgtgaaggaagccagggaggtagcaggtagctctctagggagagttgcaggcagagg

SEQ ID NO: 667602 - DNA, 120 bp, Artificial Sequence
  ENSG00000185219_37 (sequence is synthesized)
agattgggtcttgactggtgtcctcaggaaggaagcccctgggatggagtgcagggagccagctggaagggaaggagaggggccagggaggccacaggcccggccatatgagcatcatgg

SEQ ID NO: 667603 - DNA, 120 bp, Artificial Sequence
  ENSG00000185219_38 (sequence is synthesized)
gtcattacgggggcttgagctggctcagagggaggcagggagcttttggacaattttgagttgaggagtgatgtggtttgaatctgaattatattttataagggttaaccacagatccaa

SEQ ID NO: 667604 - DNA, 120 bp, Artificial Sequence
  ENSG00000185219_39 (sequence is synthesized)
ggactcagtaaaagggtgaaaggcttctcatgcagttagccttgctgccagttcccataaatcagactcctccccactccgtttctgaattttctataggatcctcggcctcagcagata

SEQ ID NO: 667605 - DNA, 120 bp, Artificial Sequence
  ENSG00000185219_40 (sequence is synthesized)
taaacgcttaccattgttgtgttcatgtctctagcccctgcacactgcaggcccctctcagcttcacatacccctctccatgtatgagatctggtgctagcaatcagattcaacccgaag

SEQ ID NO: 667606 - DNA, 120 bp, Artificial Sequence
  ENSG00000185219_41 (sequence is synthesized)
gaacaagtgcatgtgcctgctgctctcaggagaaaaggcagcctgttctgggaggagctccctcactggcccacccacttgtgttgaagcaaaaagcaagaatcaattacttaaaggcaa

SEQ ID NO: 667607 - DNA, 120 bp, Artificial Sequence
  ENSG00000185219_42 (sequence is synthesized)
aggagtgatattgctaaagcatgtgagtaatcattgcttctgattattgaagaggtcagattatgaatgaaaggataaaatgttttaatagtagagcagtgtcctgactataggggcccg

SEQ ID NO: 667608 - DNA, 120 bp, Artificial Sequence
  ENSG00000185219_43 (sequence is synthesized)
ttcatggagctggtcatttcttgaaatgagaagaaaccaacctggaagatgtctttttcagtagagtatggaataatcttacctgctctggattgccatgagcaggtgaaaatgaaggct

SEQ ID NO: 667609 - DNA, 120 bp, Artificial Sequence
  ENSG00000185219_44 (sequence is synthesized)
ctgatattgtgtggtggtgtcacaggatggtgggggcggggcagaagtctcctgttggtgttctgatgcctgttcagctttgtcctcaggaaggtttggtcatcttggttctgccatcct

SEQ ID NO: 667610 - DNA, 120 bp, Artificial Sequence
  ENSG00000185219_45 (sequence is synthesized)
cttgccttcctacggcagcagctgttcatggcactgaagatgtcccttcactgtcccaaaactggcactagaagtggctgggcaggggggccagagtcataggaagggtcttggagtcat

SEQ ID NO: 667611 - DNA, 120 bp, Artificial Sequence
  ENSG00000185219_46 (sequence is synthesized)
cagatctgggttccaggcatggtgtgccttttcttggcaggattgatcttgagcaagtcaatgaacctctgcatcaatttccttatgtgtgaagttagagtgcttggctgtgctacctga

SEQ ID NO: 667612 - DNA, 120 bp, Artificial Sequence
  ENSG00000185219_47 (sequence is synthesized)
ttcctgagattggtgaaagagggcttggtttaccaaggctctccatcaggtggttgacctctaggaccagggccctctcagaggtgcagcttccatgtcagttggtgttgtaaccatgga

SEQ ID NO: 667613 - DNA, 120 bp, Artificial Sequence
  ENSG00000185219_48 (sequence is synthesized)
aaagtccctttccaatcaaacttttagcacccctttccccccatctctgctccctttgccacaggataccttgtaaagttcctgccccagtatagggatatttttactgtcttttttatt

SEQ ID NO: 667614 - DNA, 90 bp, Artificial Sequence
  ENSG00000185219_49 (sequence is synthesized)
cctgccccagtatagggatatttttactgtcttttttattttttgagacagggttgcccagggtggagtgcagtggcaggatcacaggtc

SEQ ID NO: 667615 - DNA, 120 bp, Artificial Sequence
  ENSG00000185219_50 (sequence is synthesized)
agtagctggggctacaggtgtgtgccaccctgccagctaattttttatatttttttgtagagacaaaacttttatttttttttcccatgttgctcatgctggtctcaaactcctgggctc

SEQ ID NO: 667616 - DNA, 120 bp, Artificial Sequence
  ENSG00000185219_51 (sequence is synthesized)
acaggcgtgagccactgtgcctgacctgtcatttttatagaatgaaatgtgcttatttctaaacattctaatcaaattttaaaatgtgcaaagaatgaagtgaaaaactgaatttttttt

SEQ ID NO: 667617 - DNA, 120 bp, Artificial Sequence
  ENSG00000185219_52 (sequence is synthesized)
atcctgaagtaagctgtttatatttgggattatactgaacctatttgtccaataacctgagttttcaaataattttagttctataagtactataattatataaatattaatgaattcaga

SEQ ID NO: 667618 - DNA, 120 bp, Artificial Sequence
  ENSG00000185219_53 (sequence is synthesized)
ttagctgaaaggaaaaaaagtagaagcctgactacttggtgctaactactaaagattttggcagaatcaatgttggatttggctttcctgtcccttccccatgccagccccccagagtgt

SEQ ID NO: 667619 - DNA, 120 bp, Artificial Sequence
  ENSG00000185219_54 (sequence is synthesized)
tctgccttgtgctgcctcccttcacctggagtgccacacccctctctctgccagttcagctcttcattcttcaaggcctgaccttgtctgacccttgtgcctctaaacccgtggccccac

SEQ ID NO: 667620 - DNA, 120 bp, Artificial Sequence
  ENSG00000185219_55 (sequence is synthesized)
ctctcttggttcctatgtcaggtgatgtttgtgtttttggttatgcccatctccatagccagaccaagcactctggaagccagggttgggtgcttatttatctgtttgccatgcagaaaa

SEQ ID NO: 667621 - DNA, 120 bp, Artificial Sequence
  ENSG00000185219_56 (sequence is synthesized)
tatcttgcacaaaattacctctgttaaggaatctgaagctgaatttagtttggctgagtcagggttgggttttttttaaggggctgtggggtgaaatgttgactggaagccacccacaaa

SEQ ID NO: 667622 - DNA, 120 bp, Artificial Sequence
  ENSG00000185219_57 (sequence is synthesized)
cacacacctgctggttaggaacccggctgtgggtggttctgagctgtttggcttcagttgacagtttctgattgccctgagcaccaggtctcatcttgcatctcatcctggcctggagaa

SEQ ID NO: 667623 - DNA, 120 bp, Artificial Sequence
  ENSG00000185219_58 (sequence is synthesized)
cattcagtttccttccaacccttcccacctttcccccactcccttggaggaactgaagttggggttgaggagagccagatggctggagtgggtatttgaaggtctttctgtcacctgttc

SEQ ID NO: 667624 - DNA, 120 bp, Artificial Sequence
  ENSG00000185219_59 (sequence is synthesized)
agtgtggtctgccccacccctgctgaccaagactgactgaaatgtaaaataatacagaccatctcacactcagaaagctggcacatttttgaaagcccaagtgtgggtaagtgcgtggaa

SEQ ID NO: 667625 - DNA, 120 bp, Artificial Sequence
  ENSG00000185219_60 (sequence is synthesized)
caacgataattcacactgctttatgagtagaaattgtgagaaatattgtgccaggcaatttgcaaaatcttggaaggttgtgtgcacttaaccacccagcaactactcctggatgcatcc

SEQ ID NO: 667626 - DNA, 120 bp, Artificial Sequence
  ENSG00000185219_61 (sequence is synthesized)
tagagaagtgccatgtgaacagagaatgattttaagacttcactgaagtattgtttaggtagcaagattgggaaaagcctgcatttcatcagcagaagaatggataaataaatgggttgt

SEQ ID NO: 667627 - DNA, 120 bp, Artificial Sequence
  ENSG00000185219_62 (sequence is synthesized)
ttttggtccttggaaagtgaatatgaaagagttacgtctcaacacagatagatgaaaaattatgctgagaaagttggtgaagctacatacaaggtacccttagtgtaaagttaagcatac

SEQ ID NO: 667628 - DNA, 120 bp, Artificial Sequence
  ENSG00000185219_63 (sequence is synthesized)
tgtgtacctgtgggcacgttacttcaacttgtttttcactttttctgtaaaatgggatagtagtggcaatctcacagggtgattgtgggtgggggggtggtcaatgaagtaatgcatgta

SEQ ID NO: 667629 - DNA, 120 bp, Artificial Sequence
  ENSG00000185219_64 (sequence is synthesized)
aaatgcttagaatagtgtctagcatgtaagccttgtggacatatagaaagtgttattgttttgcacagtaatctattttctgtggattcaaataatatgaaatgagtataaaatcatgta

SEQ ID NO: 667630 - DNA, 120 bp, Artificial Sequence
  ENSG00000185219_65 (sequence is synthesized)
ttggaacgatgtgtgcaagtcaccattctgccttcctaaggcaggagacctgatggatttggggagggtacatggggccttcagttgtgttttctttgtttttttctaaaaattgatgca

SEQ ID NO: 667631 - DNA, 120 bp, Artificial Sequence
  ENSG00000185219_66 (sequence is synthesized)
gaggcatcacaatgttaagatttttacagggtagtgtggtgggtactttttaactgtttgcttaaagtgtttcaaagtaaaaatatttcttaagcatagtctctgacatcttatgacttt

SEQ ID NO: 667632 - DNA, 120 bp, Artificial Sequence
  ENSG00000185219_67 (sequence is synthesized)
atagaaatccctgccaggtacatgatgttacttagagtgagccacctaatctttcaaggcttccatttcctcacctgcaaaaattgggagtgtcagaggcgtttgaaccagagtgactcc

SEQ ID NO: 667633 - DNA, 62 bp, Artificial Sequence
  ENSG00000185219_68 (sequence is synthesized)
aaattgggagtgtcagaggcgtttgaaccagagtgactccatcttgaatagggaaagtcatg

SEQ ID NO: 667634 - DNA, 120 bp, Artificial Sequence
  ENSG00000185219_69 (sequence is synthesized)
ccttgccaataaaacagcatgtggtaaagaagccggtcaaaaccaagatggcaatgaaagtgacctctggttgtcctcactgctgtaattatactgtaattataatgcattagcatgcta

SEQ ID NO: 667635 - DNA, 88 bp, Artificial Sequence
  ENSG00000185219_70 (sequence is synthesized)
tgctgtaattatactgtaattataatgcattagcatgctaacagcgccatggcaggcctggcacgatggctcatgcctgtaatcccag

SEQ ID NO: 667636 - DNA, 120 bp, Artificial Sequence
  ENSG00000185219_71 (sequence is synthesized)
acttatgaataatctaccccttgtttagcatataatcaataaataaccataaaaataggcaaccagcagcccttggggctactcttcctatggagtagccattctgtatttctttacttt

SEQ ID NO: 667637 - DNA, 120 bp, Artificial Sequence
  ENSG00000185219_72 (sequence is synthesized)
cttaatattaactactttcactttgtggactcgcccgaattcttttcttgagcaaggtccaagaactctctcttggggactggatcacgaccgctttctggtaacaggagcaatacaaat

SEQ ID NO: 667638 - DNA, 120 bp, Artificial Sequence
  ENSG00000185219_73 (sequence is synthesized)
ggctattagtaaacgaacgcttaagtaactctagtacatctatgatgaaataccaggccacagtttttttaaaaatgaggatgttctctatatactgacgcacagtcaccaagacatgca

SEQ ID NO: 667639 - DNA, 120 bp, Artificial Sequence
  ENSG00000185219_74 (sequence is synthesized)
ctttataggaaattataagctcctccttgcctaaatctccttaattttgcttaataaataacaagtgaagccagaagctgtaaactcataattttaatgaagaaatgggatccagaagat

SEQ ID NO: 667640 - DNA, 120 bp, Artificial Sequence
  ENSG00000185219_75 (sequence is synthesized)
ggagatgtttttcattctactttattagatgaggaaaaggagagtaaatacttgtatgccagctaccacaccttttaaagttaatgttaaccctgctaagaacagcaaggagattttata

SEQ ID NO: 667641 - DNA, 120 bp, Artificial Sequence
  ENSG00000185219_76 (sequence is synthesized)
tcagccaggttttagttgccagaaaccacaccagttattttagcaaagaccttataaagaagtgtactatatttaagtagctaaaaaggcaagaagaaaatgccaaggtgtcttggaggt

SEQ ID NO: 667642 - DNA, 120 bp, Artificial Sequence
  ENSG00000185219_77 (sequence is synthesized)
agcaactgctaagcagctgccaccccaggactgggggagctagaatagagtctccccatgtttgacgtttgtctgctaatagcattcaagctctccccctcagtttgcctggatctggac

SEQ ID NO: 667643 - DNA, 120 bp, Artificial Sequence
  ENSG00000185219_78 (sequence is synthesized)
aagctgataagaaagcccagccacttcctctttgcgtcagaggggaagttcaaactgtgcaaaccctgactgtcaaatgcactgagctctcataaccacaacaaaaaccagagccacttg

SEQ ID NO: 667644 - DNA, 120 bp, Artificial Sequence
  ENSG00000185219_79 (sequence is synthesized)
ttcgtcctttcactgaagcccaacagactggcgtgggtgcccgctttgctttccctagaaggcctcatgtgagtagtaaactttttcataacctcttggtgtctgcagtgtcatcagttt

SEQ ID NO: 667645 - DNA, 120 bp, Artificial Sequence
  ENSG00000185219_80 (sequence is synthesized)
caacatccgaaccagttttgagtgatggtagtttattgatcccacctcatgtggagcaaagtgcaaagcaggaacaaagagacgtggctagaattgttgaaaggtgggagattggaagag

SEQ ID NO: 667646 - DNA, 120 bp, Artificial Sequence
  ENSG00000185219_81 (sequence is synthesized)
ggaccttgtggagctgaactcagacctatggtggaggagtggactgctgggctgacatagtgtctgtgctcagggaggggccctgtggcctttggatctgtgcttctgtggagaggtccc

SEQ ID NO: 667647 - DNA, 120 bp, Artificial Sequence
  ENSG00000185219_82 (sequence is synthesized)
agctactaatgctggggcagggagcagaagggagggtcacaatgagactttgagtgttagttaaccaccttttgcctgaagaacatgtaatggccttccctgaggtatatgtcttccaaa

SEQ ID NO: 667648 - DNA, 82 bp, Artificial Sequence
  ENSG00000185219_83 (sequence is synthesized)
gaacatgtaatggccttccctgaggtatatgtcttccaaaagtccgctgacgttgctcatgacctatggtcaccactgcaca

SEQ ID NO: 667649 - DNA, 62 bp, Artificial Sequence
  ENSG00000185219_84 (sequence is synthesized)
ctaatttttgtatttttgtagagacaaggtttgttgccaaagtgctgggattacaggtgtga

SEQ ID NO: 667650 - DNA, 120 bp, Artificial Sequence
  ENSG00000185219_85 (sequence is synthesized)
ttgtctcaattaaaaaaaaaaaaaagtgaagtgcaaaatgtgactgaggagatacagtactctccaaattgcataattttgccaatttttatagaaacctggggaatctgtagagatagc

SEQ ID NO: 667651 - DNA, 120 bp, Artificial Sequence
  ENSG00000185219_86 (sequence is synthesized)
gtcagaagcattggaacgagagcaactccatgttgaataggggctgggtaaaagtgtcagaggtatttgaaccagagcgactccattttgagtgagggctgggaaaatgaggctgagact

SEQ ID NO: 667652 - DNA, 120 bp, Artificial Sequence
  ENSG00000185219_87 (sequence is synthesized)
tactggcctgcattctcagaaagttaggcattcctaccctctaggattgaattgggacccctttcctgtaacatatttctggtgaccacagaagggactatagtgcagaaacgttgaccc

SEQ ID NO: 667653 - DNA, 120 bp, Artificial Sequence
  ENSG00000185219_88 (sequence is synthesized)
aacggctacctttgcgtaagtgttggggtcctgtaacatatttctggcaaaccacagaaaggatgatactgaagaaatccccccaaccccaaagaaatagactgcagcactgattggacg

SEQ ID NO: 667654 - DNA, 120 bp, Artificial Sequence
  ENSG00000185219_89 (sequence is synthesized)
actttgggtaagtgatggggtacccgagtaacaaatgggattgggttagaggcccaacttaggggagttggagtttctcctaagacagagtgagttagaggcccctcttaataaaaggca

SEQ ID NO: 667655 - DNA, 120 bp, Artificial Sequence
  ENSG00000185219_90 (sequence is synthesized)
aggacacttgactgacctcaggttagaggttactccatcctactctatggagtagctgtcctttcaccactttactttcttaataaacttgtttttgctttgcactgcggacttgccctg

SEQ ID NO: 667656 - DNA, 120 bp, Artificial Sequence
  ENSG00000185219_91 (sequence is synthesized)
ttttgctttgcactgcggacttgccctgaatcctttcttgcacgagatccaagaactctcttaagagtctggatcgggacccctttcctgtaacaaaatgaggctgagacctactgggct

SEQ ID NO: 667657 - DNA, 82 bp, Artificial Sequence
  ENSG00000185219_92 (sequence is synthesized)
ggatgagataggagattggcacaagatccaggccacaaagaccttgctgataaagcaggttgcagtaaagaagccagctaaa

SEQ ID NO: 667658 - DNA, 120 bp, Artificial Sequence
  ENSG00000185219_93 (sequence is synthesized)
cagctaaaacccaccaaaaccaagacggtgatgagaatgacctctggtcatcctcactgctaccctcccaccagtgccatgacagtttacagttgccatggcaacatcaggaagttaccc

SEQ ID NO: 667659 - DNA, 120 bp, Artificial Sequence
  ENSG00000185219_94 (sequence is synthesized)
agaaccctctcttggggtctggattgggaaccttttgcggtaacaagggtgcaggatcatcgtggaaggaatataaagtcagatcaagctgaattattcgatatgggataattaagcaga

SEQ ID NO: 667660 - DNA, 120 bp, Artificial Sequence
  ENSG00000185219_95 (sequence is synthesized)
ctgaattattcgatatgggataattaagcagagatttgtggttcattgttttaacttgagaagctgagaatggctgtcttcatttgctttgagttgttgagatatggactcactgtaatc

SEQ ID NO: 667661 - DNA, 120 bp, Artificial Sequence
  ENSG00000185219_96 (sequence is synthesized)
ggattgcttgaggccaggagtttgagactggcttgggcaatatagtgagaactcatctccaaaagaaaaaaaaaacacgaatgcaaacataacctgcactgaatgagttgaaatgcgaga

SEQ ID NO: 667662 - DNA, 120 bp, Artificial Sequence
  ENSG00000185219_97 (sequence is synthesized)
cactgaatgagttgaaatgcgagaacttcgttggtatactgtagaggaagatatgtaaatgcttaaggagataaaaatgcttgagtatttatcatgtaaatacctgctcacccacccagg

SEQ ID NO: 667663 - DNA, 120 bp, Artificial Sequence
  ENSG00000185219_98 (sequence is synthesized)
gagggtccagaggacacttcattatgagaaataaattcatgtagagagtgccagatattctatacaggccacattacagtgggaaatgctccctgaagtgcagtggggctgatggaatcc

SEQ ID NO: 667664 - DNA, 120 bp, Artificial Sequence
  ENSG00000185219_99 (sequence is synthesized)
tgaggaggcagggaccatatggtaacacttagtcaccaaaaacacaattggtgtggtgactgccatggacagtgcagccaaagcaggatcctgaatggtctgacccacagagatctgtga

SEQ ID NO: 667665 - DNA, 120 bp, Artificial Sequence
  ENSG00000185219_100 (sequence is synthesized)
tgtctgcctgctgatcatagtgtcctgagaactgaaatggatgggctgcctactaaagttttacttgatccgagtaagtaggaaagctccagatctggtgaataaagtctgacctaaatt

SEQ ID NO: 667666 - DNA, 120 bp, Artificial Sequence
  ENSG00000185219_101 (sequence is synthesized)
accaacacagagttacaatcactcagtcaattccaagtcttgatctagttcacaaacccacagcttcttgaataaaggataggccaggtccctttgaagtaggaccctgctgcactgaca

SEQ ID NO: 667667 - DNA, 120 bp, Artificial Sequence
  ENSG00000185219_102 (sequence is synthesized)
ataatttatactttttatcttcctaggcctccccaaaggcacccaaggccatttatcagagtgattgtgcattgggaagggcaaataattagacttttctgggataaccagcctctagtt

SEQ ID NO: 667668 - DNA, 120 bp, Artificial Sequence
  ENSG00000185219_103 (sequence is synthesized)
ctgaactagcagtaattacaggagactcaaaatgccaccatggttcctcagagtaagagtgtatggaggtcaggtgatcaatgggctttttggctcagattcatctcacagtagatctag

SEQ ID NO: 667669 - DNA, 120 bp, Artificial Sequence
  ENSG00000185219_104 (sequence is synthesized)
tagattcctgaacccatcctatggttatttccctggttctagaatgcgtaattagaatagacatagtcaacaatgggcagaatcccacactagttccctgatccatacagtaaaagtaat

SEQ ID NO: 667670 - DNA, 120 bp, Artificial Sequence
  ENSG00000185219_105 (sequence is synthesized)
tctggtagaaaaggccaagtagaagccactagagctgcctcattcacaaaaatattaaagcaaactaataccacattcctggagagattgttgagattagtgccaccatcaaagacggga

SEQ ID NO: 667671 - DNA, 120 bp, Artificial Sequence
  ENSG00000185219_106 (sequence is synthesized)
acacatctccacttagctcacctactcagcctgtgcagaagacagatggatcttggagaatgacaattggattaattgtaaacttaattaactagtgattccaagtgcaggtgctgtttc

SEQ ID NO: 667672 - DNA, 120 bp, Artificial Sequence
  ENSG00000185219_107 (sequence is synthesized)
cacatgtggtttcagtgctgagcaaacgatacgtctgacaactggtttgcagttgttactgagccaggcccaggtttgttctgttctcacacagtaaatcaatcactgtgacatgggttt

SEQ ID NO: 667673 - DNA, 120 bp, Artificial Sequence
  ENSG00000185219_108 (sequence is synthesized)
tgcaaaagagagaagaattattcacaaggctgtccagtgaggagatgggagaatggctctcaaattcacctccccaaagatgaggcttagagagatttataggttagagaagtagggtgg

SEQ ID NO: 667674 - DNA, 120 bp, Artificial Sequence
  ENSG00000185219_109 (sequence is synthesized)
tctgaggcatggggaaaggtgattggcagtggggaaaaatgcagtcataattggggttcatatgacatatgtgcagaaaatggtggcgttaacatgatctgagggtggagtttttggccc

SEQ ID NO: 667675 - DNA, 120 bp, Artificial Sequence
  ENSG00000185219_110 (sequence is synthesized)
tctgatgtcaaaaggccacctcttgggcatgtgtacaggcccagttgaagggttggcagtctcaactggtttgaactggacaggatctgccccaagttcctgaaaaataagtggttgtta

SEQ ID NO: 667676 - DNA, 120 bp, Artificial Sequence
  ENSG00000185219_111 (sequence is synthesized)
tggtgacttataaatgttatctataaggtagcacgtaaaagttgagttacagtgttcaatagcatagccttcagctatcgtggccttcagcttcatgggggaaaaaataacaaagagcaa

SEQ ID NO: 667677 - DNA, 120 bp, Artificial Sequence
  ENSG00000185219_112 (sequence is synthesized)
gcaaccaaaagcaagcggggcaggcgaagtgtggcacacccgatccgattatccccttggctgcccagttacccatctggtgaatgtttctctatacctgtgagtaaagaccatcaggaa

SEQ ID NO: 667678 - DNA, 120 bp, Artificial Sequence
  ENSG00000185219_113 (sequence is synthesized)
cagtttgctttcagctagatacaccttcaccaccctatctcaaggctgcctcaactctgccgcccagctcatgatctagttcccaggtcctttgagaaccttttcaccctcaggacgaca

SEQ ID NO: 667679 - DNA, 120 bp, Artificial Sequence
  ENSG00000185219_114 (sequence is synthesized)
cactggtccattatattgatgacattatagtcactggacctggtgtacagggagtagcaactgctccagacatgttggaagacacataatatgactcagtgtaggaaataaacccacaac

SEQ ID NO: 667680 - DNA, 83 bp, Artificial Sequence
  ENSG00000185219_115 (sequence is synthesized)
cagctcgagctggagtggaggcaatcttggctcactgcaacctgcacctcctgggtacaagtgaagctgcttcctcagcctgt

SEQ ID NO: 667681 - DNA, 79 bp, Artificial Sequence
  ENSG00000185219_116 (sequence is synthesized)
ctcgagctggagtggaggcaatcttggctcactgcaacctgcacctcctgggtacaagtgaagctgcttcctcagcctg

SEQ ID NO: 667682 - DNA, 75 bp, Artificial Sequence
  ENSG00000185219_117 (sequence is synthesized)
agccaggccctttttctctctctttccaatagttacattctatatgtttaaaagggacacgagacaattttgtat

SEQ ID NO: 667683 - DNA, 120 bp, Artificial Sequence
  ENSG00000185219_118 (sequence is synthesized)
cattctatatgtttaaaagggacacgagacaattttgtatgtgattttctgaatcacataattccacatttaacattttggggaaatgccaaactgttttccaaaggggctgcctgggag

SEQ ID NO: 667684 - DNA, 120 bp, Artificial Sequence
  ENSG00000185219_119 (sequence is synthesized)
tctcagctctagttctcagtcctcagcagccattcctttcctcagtggggcgtcagtgctgccttccaaagtccagggctgccttgagacctgatcaggaccggctattttgccaggtgc

SEQ ID NO: 667685 - DNA, 120 bp, Artificial Sequence
  ENSG00000185219_120 (sequence is synthesized)
agtgcatgatgttcaagaccattcagaatttcaagaccctgacagcagagcaagatagcaggcggaggccattctaagtgtggggccccgcagggctgcccaggctgcctgcctgtgaag

SEQ ID NO: 667686 - DNA, 120 bp, Artificial Sequence
  ENSG00000185219_121 (sequence is synthesized)
ccagtcctgcctgatggagatgcttttgccatggcgtgagggaaagtgagctgatggttctccactttcccactctctctctgcaggtccggctcctctaagggcagaagccagaacttg

SEQ ID NO: 667687 - DNA, 120 bp, Artificial Sequence
  ENSG00000185219_122 (sequence is synthesized)
gtccctgaaccttctccagtctccctccctgggcatttctctcataaccccatcagaccccccagtaatggcctgacgtgggttctggaaatagaacatgggttcttagaatggctctct

SEQ ID NO: 667688 - DNA, 120 bp, Artificial Sequence
  ENSG00000185219_123 (sequence is synthesized)
gagacttcattgagttgtctgtcctatttctttcctcaacaaaatgtccacatcctcaatctcctgtctcagcaggaaagatgaaaagaacagtgaggcttaggccaggcacggtggctc

SEQ ID NO: 667689 - DNA, 89 bp, Artificial Sequence
  ENSG00000185219_124 (sequence is synthesized)
gaggctgaggtgggcagatcacctgagaacgggagttcgagaccagtctgaactccctgtggtagcgggcacctgtaaatcccagctac

SEQ ID NO: 667690 - DNA, 74 bp, Artificial Sequence
  ENSG00000185219_125 (sequence is synthesized)
ggagaatcgtttgaacctgggaggcggacgttgtgggaaaaaaaaaaaaaaagaacgatgacccttagcatccc

SEQ ID NO: 667691 - DNA, 120 bp, Artificial Sequence
  ENSG00000185219_126 (sequence is synthesized)
gggaaaaaaaaaaaaaaagaacgatgacccttagcatcccaggaagctttgggtggtgagagatggagagtatctccttcctgtggtacttcagtttcccgtctccttgttaggatgttg

SEQ ID NO: 667692 - DNA, 120 bp, Artificial Sequence
  ENSG00000185219_127 (sequence is synthesized)
caaagctggcctgctgaggtcttctgtgatctcctgtgcttcctacacttccacctgaaaatgaacctactgcagggatgaatccatgagcagaattttaatgaaaaggaagcagacaca

SEQ ID NO: 667693 - DNA, 120 bp, Artificial Sequence
  ENSG00000185219_128 (sequence is synthesized)
aaggaatccatgggttgtaactccaccgacttaaaatgaaaaacacaggcaacaaagaacaggcacgatgctgcttcgccagctggttccttgttgggttctgccattcagggatgtaag

SEQ ID NO: 667694 - DNA, 120 bp, Artificial Sequence
  ENSG00000185219_129 (sequence is synthesized)
agggaagctgggatgttggaggactggagtgtgagggtaaattttaggtgtcaacttggctgagccacaaggtccccaggtatttgatcaaacattatgctgggtgtttctgtgaggttg

SEQ ID NO: 667695 - DNA, 120 bp, Artificial Sequence
  ENSG00000185219_130 (sequence is synthesized)
ctttggatgagattaacgtttaaatttgtggactttgaggaaagcagattgccctctatctgtgggtgggcttcatccaatcacctgaagacctgaggagaacataaagtctggctgccc

SEQ ID NO: 667696 - DNA, 120 bp, Artificial Sequence
  ENSG00000185219_131 (sequence is synthesized)
cagactctctctcaggcaagagagaattcttccgcagactgccttcagagttcatgcacaccatctactaatcctgctccacagcaggtgccactgggctctcactggaatatgtattct

SEQ ID NO: 667697 - DNA, 120 bp, Artificial Sequence
  ENSG00000185219_132 (sequence is synthesized)
cctggttctccagcctgctcatccaccctgaagatttgggacttgccagcctccttaattctataagccaattccttatcataaattcataaatccctctctctctatctccatccacac

SEQ ID NO: 667698 - DNA, 120 bp, Artificial Sequence
  ENSG00000185219_133 (sequence is synthesized)
acacacacacagacacacacacacaaatgagtgtagatgtgttccaataaaacttcatttagagacattgaaatttaaatttcaagggctgggcatggtggctcaacgcctgtaatctca

SEQ ID NO: 667699 - DNA, 120 bp, Artificial Sequence
  ENSG00000185219_134 (sequence is synthesized)
atgtagccacgtgcagtggctcatgcctgtaatcccagctgggaggctaagatgggagaatagcttgaacacaggaggcagaggttgctgtgagctgaaatggtgcccagaagacagagc

SEQ ID NO: 667700 - DNA, 120 bp, Artificial Sequence
  ENSG00000185219_135 (sequence is synthesized)
gaccctgtctcaaaaaaataaaaaataaaaaataaatttcatataatcttcagatatattcattcatttacatattgtctgtggttgttttcaccctttaggtcagaagtagccgacaac

SEQ ID NO: 667701 - DNA, 120 bp, Artificial Sequence
  ENSG00000185219_136 (sequence is synthesized)
ctttacacagtatttaccactgttatagacatctttaaatatggtttacttttgcctgtttttgtactttatagaaatgaagtaataaagtattgtctgtcttgcattttttgctcaaaa

SEQ ID NO: 667702 - DNA, 120 bp, Artificial Sequence
  ENSG00000185219_137 (sequence is synthesized)
tgtctcaaaaaaaaaaaaaaaaaatgccatggcaacatcaggaagtaacactatatggtctaaaaaggagaggaaccctcagttctggtaattgctcacacctttcccgggaaacttatg

SEQ ID NO: 667703 - DNA, 120 bp, Artificial Sequence
  ENSG00000185219_138 (sequence is synthesized)
gagtgtgagcaagtgtgtggtgcccagggaactctgcctgctagtgagccagcttgtctggggatgggggtggccctctaaactgtcaatatagaggagtgcaggggaagccttcctttc

SEQ ID NO: 667704 - DNA, 120 bp, Artificial Sequence
  ENSG00000185219_139 (sequence is synthesized)
ttcccatggtacctgagcagctgagaacgggaccctgagccacggaccctttagcaggtatcctttcctaccttcccagaggaatatcagctccagatagggtcagcaagtctccataaa

SEQ ID NO: 667705 - DNA, 120 bp, Artificial Sequence
  ENSG00000185219_140 (sequence is synthesized)
cctggttttagatcctggctctgtaactgctgaccagatcacttaatctagcaccttggtagcctcttttgaaaaatggggagaataatgcctgccattctggattattgtaaagattaa

SEQ ID NO: 667706 - DNA, 87 bp, Artificial Sequence
  ENSG00000185219_141 (sequence is synthesized)
ataatgcctgccattctggattattgtaaagattaaaggtccacttcgggaggcccaggtgggaagattgcttgagctcaggagttt

SEQ ID NO: 667707 - DNA, 120 bp, Artificial Sequence
  ENSG00000185220_0 (sequence is synthesized)
ggacgttgcgcggccgcgacgcccgacgccaacgcaggcgcagcgctccgattcggcgcggctcatggtccggttcgggctcgcgagtctccgtctggggtagggcaggttcttagactc

SEQ ID NO: 667708 - DNA, 120 bp, Artificial Sequence
  ENSG00000185220_1 (sequence is synthesized)
tgtgagtaaagacagcttcatcttcccagttcatcatggcttcaacatccagagatgtcattgctgggagaggtatccactcaaaggtgaagtctgcaaagctgcttgaggttctgaatg

SEQ ID NO: 667709 - DNA, 120 bp, Artificial Sequence
  ENSG00000185220_2 (sequence is synthesized)
ctatggaggaggaagagtccaacaacaacagggaagagattttcattgcacctcccgacaatgctgcgggggaattcactgatgaggactcaggggatgaagacagccagcgaggtgctc

SEQ ID NO: 667710 - DNA, 120 bp, Artificial Sequence
  ENSG00000185220_3 (sequence is synthesized)
acctacctggcagtgtgctgcatgcttcagtcctgtgtgaggactctggcaccggggaggataatgacgacctggagctgcagccagccaagaagaggcagaaagcagttgtgaaacctc

SEQ ID NO: 667711 - DNA, 120 bp, Artificial Sequence
  ENSG00000185220_4 (sequence is synthesized)
agcgcatttggaccaaaagagatattcgtccagactttggcagttggactgcatcagatcctcatattgaggatctgaaaagccaagagctgagtcccgtgggcctttttgagttgtttt

SEQ ID NO: 667712 - DNA, 120 bp, Artificial Sequence
  ENSG00000185220_5 (sequence is synthesized)
ttgatgaaggaacaattaatttcattgttaatgaaaccaatcgttatgcttggcagaaaaatgtcaatttgagtcttacggctcaggaattgaagtgtgttttgggcattttgattttaa

SEQ ID NO: 667713 - DNA, 120 bp, Artificial Sequence
  ENSG00000185220_6 (sequence is synthesized)
gtgggtacatctcttatccaaggagaaggatgttctgggaaacctctcccgattcacatcatcatcttgtggctgatgcaattagaagggacagatttgaactaatcttctcatacttac

SEQ ID NO: 667714 - DNA, 120 bp, Artificial Sequence
  ENSG00000185220_7 (sequence is synthesized)
attttgcagataacaacgaacttgatgcaagtgataggtttgccaaggtcagacctctcatcatccggatgaactgcaatttccagaagcatgcacccttggaagagttctacagctttg

SEQ ID NO: 667715 - DNA, 120 bp, Artificial Sequence
  ENSG00000185220_8 (sequence is synthesized)
gcgagtctatgtgtgagtactttgggcaccgggggtccaagcagctgcacagggggaagcctgtgcgacttggctacaagatttggtgtgggacaaccagcagaggctacttggtgtggt

SEQ ID NO: 667716 - DNA, 120 bp, Artificial Sequence
  ENSG00000185220_9 (sequence is synthesized)
ttgagccctcacagggcacactgtttaccaagccagacaggagcttggatctaggaggcagtatggtaataaaatttgtggatgcgcttcaggagcgtggttttctgccatatcacatat

SEQ ID NO: 667717 - DNA, 120 bp, Artificial Sequence
  ENSG00000185220_10 (sequence is synthesized)
tttttgacaaggttttcacaagtgttaaactgatgtccattttgaggaaaaagggggtgaaagccacaggaactgttcgtgagtacaggactgagcgatgtcccctaaaagaccccaaag

SEQ ID NO: 667718 - DNA, 120 bp, Artificial Sequence
  ENSG00000185220_11 (sequence is synthesized)
gatagcagcgtggtcaacatttgctccaatgctgtgggcatagagccagtgaggctgaccagtcgtcactctggagcagctaaaacgcggactcaggtccaccagccatcactggtgaag

SEQ ID NO: 667719 - DNA, 120 bp, Artificial Sequence
  ENSG00000185220_12 (sequence is synthesized)
ctgtatcaggagaaggtgggtggcgttggtaggatggatcagaatattgccaagtacaaggtgaagatccgaggcatgaagtggtactcaagctttattggctatgtcattgatgctgcc

SEQ ID NO: 667720 - DNA, 120 bp, Artificial Sequence
  ENSG00000185220_13 (sequence is synthesized)
ctcaacaatgcatggcagctgcatagaatctgctgccaagatgcccaggtggacctccttgccttccggagatacattgcctgtgtgtatctggagagcaatgctgacacaacatctcaa

SEQ ID NO: 667721 - DNA, 120 bp, Artificial Sequence
  ENSG00000185220_14 (sequence is synthesized)
gggaggcgaagcaggcggttggagactgagagccgcttcgatatgattgggcactggattatccatcaggacaagaggacccggtgtgccctctgccactcacagaccaacacccggtgt

SEQ ID NO: 667722 - DNA, 120 bp, Artificial Sequence
  ENSG00000185220_15 (sequence is synthesized)
gagaagtgccagaagggtgtccatgccaaatgcttcagggagtaccacatccggtgacatcatgagacatgcttctttggtttataatgagatgtttacagttaaatacagatggcagtt

SEQ ID NO: 667723 - DNA, 120 bp, Artificial Sequence
  ENSG00000185220_16 (sequence is synthesized)
gagcacttctgttttgtgttggaaaaaagacctgaatttctaatgacttgattttctattttctccctacccacaatacagttatcttttttattgtgttgtgttatgcctacatgtgat

SEQ ID NO: 667724 - DNA, 120 bp, Artificial Sequence
  ENSG00000185220_17 (sequence is synthesized)
ttatattcatttatatttatatttttgaacttatttatttaaagttatggatcactttttattcaaataaaagttgtgctttggggtatatttgaatcctagcaagaataatcaaaggaa

SEQ ID NO: 667725 - DNA, 120 bp, Artificial Sequence
  ENSG00000185220_18 (sequence is synthesized)
taatcaaaggaaaacttgcaagaacagtaagaagactttaccattgcatgccatggtttataatctaagataggcaatagtgtataaatatcatgtaaatgtgatggatttcttaatcat

SEQ ID NO: 667726 - DNA, 120 bp, Artificial Sequence
  ENSG00000185220_19 (sequence is synthesized)
atttatttcatattaatccaagtttatcaaacttttgagggataatctgccttgtatttagtcagagggctagaggtgcagatttcatattttcttaatgaaaatattttcctaatacac

SEQ ID NO: 667727 - DNA, 120 bp, Artificial Sequence
  ENSG00000185220_20 (sequence is synthesized)
atatatcaatgtgagattcatttttgtaaaaaaaattatttttttaattttgtgggtacatagtaggagtgtatttttatgggttacatgagatattctgatacaaacatgcaatgtata

SEQ ID NO: 667728 - DNA, 120 bp, Artificial Sequence
  ENSG00000185220_21 (sequence is synthesized)
aaaatcacatcagggtaaatggggtatccatcttgtcaaacacttgtcctttgtgtttcaaacaatccaattatactgttagttattttaaaatgtgcaattaaattatttttaactata

SEQ ID NO: 667729 - DNA, 120 bp, Artificial Sequence
  ENSG00000185220_22 (sequence is synthesized)
tttttcatacccattaactattcccactctcccccaccccctaactaccctttccaagctctggtaaccttctttccactctgtgtgtccatgagttcaattgttttcatttttagctcc

SEQ ID NO: 667730 - DNA, 120 bp, Artificial Sequence
  ENSG00000185220_23 (sequence is synthesized)
gttccattcatgttgttgcaaatgactgaatatcatttttttgtggctaaatattaatcacacttcattgtgtatatgtacattttctttatccattcttctgttgatggacacttaggt

SEQ ID NO: 667731 - DNA, 120 bp, Artificial Sequence
  ENSG00000185220_24 (sequence is synthesized)
cattttctttatccattcttctgttgatggacacttaggttgctcccaaatcatgactattgagaatagtgcagaaaataaacatgagttcagatctttcttcaatatactgattttttt

SEQ ID NO: 667732 - DNA, 120 bp, Artificial Sequence
  ENSG00000185220_25 (sequence is synthesized)
atttttttttcttttggatgtatacttaggaatgggattcctgaatcatatggtagctctatttttagtttttgaggaagcttcaaactgttctccatagaggttgtactaatttacatt

SEQ ID NO: 667733 - DNA, 120 bp, Artificial Sequence
  ENSG00000185220_26 (sequence is synthesized)
ccacatccttgccagcatttgttattgtctgtcttttggattacagccatttctgcccggatgagatatctcaatgtagttttcacttgcatttttctgttgatcagtgatgttgagcac

SEQ ID NO: 667734 - DNA, 120 bp, Artificial Sequence
  ENSG00000185220_27 (sequence is synthesized)
ctgttgatcagtgatgttgagcactttttttatacctgtttgccatttgtaccttttgtttttattttgagatggagttgccttgtcacccaggctggaatgcagtggtgcgcaatctcg

SEQ ID NO: 667735 - DNA, 120 bp, Artificial Sequence
  ENSG00000185220_28 (sequence is synthesized)
agggcttcgcttgagtacaggagtggttggcgttgatgttgcgttttctcaacggcggcatccgaggagttcgtcctcaccactgcgcgccgacggttcttagactctgtgagtaaagac

SEQ ID NO: 667736 - DNA, 120 bp, Artificial Sequence
  ENSG00000185222_0 (sequence is synthesized)
tgtgcagaagtcctggtaatctggtccttgttcccgtctggataccagcttccttcagcagcgcaggcggtggtccctgaggcccgtggaaggagtcaaacttgcgggaattttgcagaa

SEQ ID NO: 667737 - DNA, 120 bp, Artificial Sequence
  ENSG00000185222_1 (sequence is synthesized)
gtcattgtattcaaagaagaataagcaagaaagaaaagaaggaaggaagagaggtagacagatacaagatgaaatcctgtcaaaaaatggaaggaaaaccagaaaatgagagtgaaccaa

SEQ ID NO: 667738 - DNA, 120 bp, Artificial Sequence
  ENSG00000185222_2 (sequence is synthesized)
aatctctccaggagtttaaagaagatatacacaacaggcatttaagcaatgaagatatgtttagagaagtggatgaaatagatgagataaggagagtcagaaacaaacttatagtgatgc

SEQ ID NO: 667739 - DNA, 120 bp, Artificial Sequence
  ENSG00000185222_3 (sequence is synthesized)
gttggaaggttaatcgaaaccatccttacccctatttaatgtagtttaccttgatttttatctgatattaacaataccatatagcttgctttttattagcatttcctgatattcctttgt

SEQ ID NO: 667740 - DNA, 120 bp, Artificial Sequence
  ENSG00000185222_4 (sequence is synthesized)
ccatatttctacttataacctgttgctattaatggttttagatgtatctcttgttatctgcatctcattgtttattgtattttgaaccaatctacaagtctctgtcttttaataaaagaa

SEQ ID NO: 667741 - DNA, 120 bp, Artificial Sequence
  ENSG00000185222_5 (sequence is synthesized)
aatctggtccttgttcccgtctggataccagcttccttcagcagcgcaggcggtggtccctgaggcccgtggaaggagtcaaacttgcgggaattttgcagtttatctgcagggctgttg

SEQ ID NO: 667742 - DNA, 120 bp, Artificial Sequence
  ENSG00000185222_6 (sequence is synthesized)
ttggtaagatataaaatggaaaaaggctaagtaatatgtgaatatcatatttttgaaaggtaaaaagtacatttgtatattacatatatggacataacttgtgaaggatgaaagaaagta

SEQ ID NO: 667743 - DNA, 120 bp, Artificial Sequence
  ENSG00000185222_7 (sequence is synthesized)
cagcctctcggtggtgggattatgaatgatttttctccttttgcttgtttgtattttctatattcctaaaattaacacacattattattgctagaataataaaagttttataaaaaagaa

SEQ ID NO: 667744 - DNA, 120 bp, Artificial Sequence
  ENSG00000185222_8 (sequence is synthesized)
gttcccgtctggataccagcttccttcagcagcgcaggcggtggtccctgaggcccgtggaaggagtcaaacttgcgggaattttgcaggttggtgtcactgtaggtgttgactggggat

SEQ ID NO: 667745 - DNA, 120 bp, Artificial Sequence
  ENSG00000185222_9 (sequence is synthesized)
ttctagtgtgggggggtttaaggcagagacttgtgggagtgccggtcaggtccgtccctccaccctccacctccaggtctacgggaactgatgacccttgggaaagggactaggggtcct

SEQ ID NO: 667746 - DNA, 120 bp, Artificial Sequence
  ENSG00000185222_10 (sequence is synthesized)
aggagaagaacagggagacctgtggtagtttaaaaataatcatcctctgctatctaagactgctttccggacccccaccctcctcccgaaccccgcctcagtcttaaagatagtttggaa

SEQ ID NO: 667747 - DNA, 120 bp, Artificial Sequence
  ENSG00000185222_11 (sequence is synthesized)
ataatctgctttctcactctttgtctgatgggaaaaacgaactgacttgcatgcactgtggagagggggtgaactaggggaaacaaaaggtgggaaactttccatatccgaaaccctaaa

SEQ ID NO: 667748 - DNA, 120 bp, Artificial Sequence
  ENSG00000185222_12 (sequence is synthesized)
ggaggaaagctacgtgtgtcagtctctggcgctggtcggcccaccaagcgctcgccccacccccaccgtcccctcccgtttccagtttatctgcagggctgttgtttccagcaagaccca

SEQ ID NO: 667749 - DNA, 120 bp, Artificial Sequence
  ENSG00000185222_13 (sequence is synthesized)
aagctagaaaaggaggaggaagaaactgacccgatcagtgccaggtaggtgagaggaatattataaagtctcctggggtggagacaaaggttgtaagcgccaccgttcctgccggctccc

SEQ ID NO: 667750 - DNA, 120 bp, Artificial Sequence
  ENSG00000185222_14 (sequence is synthesized)
ttccaccccacccctttcccctcttcttttctctcccccttctcctttcccctcttcctctgcctgccagccacctttctcttttctggcctggtccctgtgttaggccctatgggggaa

SEQ ID NO: 667751 - DNA, 120 bp, Artificial Sequence
  ENSG00000185222_15 (sequence is synthesized)
aaaggtctggggagggctggacggcggaaaggagggccttggaaaaggttagagggaaggacaagagagaagtgaggaggtggaaagtggaggtaaaaggagtggggatagtgaagctct

SEQ ID NO: 667752 - DNA, 120 bp, Artificial Sequence
  ENSG00000185222_16 (sequence is synthesized)
ttaggtggaagatattttataacagctctgaataaaaaaaattaaatgctaaggcctctgtccacagcacctgtccactcaccaagtctttaacttactgtcttctttttgctttctaga

SEQ ID NO: 667753 - DNA, 120 bp, Artificial Sequence
  ENSG00000185231_0 (sequence is synthesized)
attccttctcattcattttgcccagaaagttcctgcttcagagctgaaggtgattgggagattttaacttagatctccagcaagtgctacaaggaagaaaagatcctgaagaatcaatca

SEQ ID NO: 667754 - DNA, 120 bp, Artificial Sequence
  ENSG00000185231_1 (sequence is synthesized)
agttttccgtgaagtcaagtccaagtaacatccccgccttaaccacaagcaggagaaatgaagcacattatcaactcgtatgaaaacatcaacaacacagcaagaaataattccgactgt

SEQ ID NO: 667755 - DNA, 120 bp, Artificial Sequence
  ENSG00000185231_2 (sequence is synthesized)
cctcgtgtggttttgccggaggagatatttttcacaatttccattgttggagttttggagaatctgatcgtcctgctggctgtgttcaagaataagaatctccaggcacccatgtacttt

SEQ ID NO: 667756 - DNA, 120 bp, Artificial Sequence
  ENSG00000185231_3 (sequence is synthesized)
ttcatctgtagcttggccatatctgatatgctgggcagcctatataagatcttggaaaatatcctgatcatattgagaaacatgggctatctcaagccacgtggcagttttgaaaccaca

SEQ ID NO: 667757 - DNA, 120 bp, Artificial Sequence
  ENSG00000185231_4 (sequence is synthesized)
gccgatgacatcatcgactccctgtttgtcctctccctgcttggctccatcttcagcctgtctgtgattgctgcggaccgctacatcaccatcttccacgcactgcggtaccacagcatc

SEQ ID NO: 667758 - DNA, 120 bp, Artificial Sequence
  ENSG00000185231_5 (sequence is synthesized)
gtgaccatgcgccgcactgtggtggtgcttacggtcatctggacgttctgcacggggactggcatcaccatggtgatcttctcccatcatgtgcccacagtgatcaccttcacgtcgctg

SEQ ID NO: 667759 - DNA, 120 bp, Artificial Sequence
  ENSG00000185231_6 (sequence is synthesized)
ttcccgctgatgctggtcttcatcctgtgcctctatgtgcacatgttcctgctggctcgatcccacaccaggaagatctccaccctccccagagccaacatgaaaggggccatcacactg

SEQ ID NO: 667760 - DNA, 120 bp, Artificial Sequence
  ENSG00000185231_7 (sequence is synthesized)
accatcctgctcggggtcttcatcttctgctgggccccctttgtgcttcatgtcctcttgatgacattctgcccaagtaacccctactgcgcctgctacatgtctctcttccaggtgaac

SEQ ID NO: 667761 - DNA, 120 bp, Artificial Sequence
  ENSG00000185231_8 (sequence is synthesized)
ggcatgttgatcatgtgcaatgccgtcattgaccccttcatatatgccttccggagcccagagctcagggacgcattcaaaaagatgatcttctgcagcaggtactggtagaatggctga

SEQ ID NO: 667762 - DNA, 120 bp, Artificial Sequence
  ENSG00000185231_9 (sequence is synthesized)
tccctggttttagaatccatgggaataacgttgccaagtgccagaatagtgtaacattccaacaaatgccagtgctcctcactggccttccttccctaatggatgcaaggatgatcccac

SEQ ID NO: 667763 - DNA, 120 bp, Artificial Sequence
  ENSG00000185231_10 (sequence is synthesized)
cagctagtgtttctaatagctaggttctatgtgaacagtcttattgtaggggcaacctcttaactttgtgactggacagataaaacgatgtagtaaaagaaggatagaatacaaagtatt

SEQ ID NO: 667764 - DNA, 120 bp, Artificial Sequence
  ENSG00000185231_11 (sequence is synthesized)
aggtaggtacaaaagtaattaaggtttttgccattactttcaatgaccaaaaattgcaattacttttgcaccaatctagtaaaacagcaataaaaattcaagggctttgggctaaggcaa

SEQ ID NO: 667765 - DNA, 120 bp, Artificial Sequence
  ENSG00000185231_12 (sequence is synthesized)
agacttgctttcctgtggacatctaacaagccagttctgaggtggcctttccaggtggaggccattgcagccaatttccagaagttaagtacctggacatgcgactccaggcagaagatg

SEQ ID NO: 667766 - DNA, 120 bp, Artificial Sequence
  ENSG00000185231_13 (sequence is synthesized)
tagggtctctgtaagccaataataaattggaaggaatgcattgctgcagctgaatttgtctgtctcccacagccatgtggaatctccaccctcctctttctccctgttagtctgatgtat

SEQ ID NO: 667767 - DNA, 120 bp, Artificial Sequence
  ENSG00000185231_14 (sequence is synthesized)
tgatgccacctcagtttcagaaagtaggctgagtataaactataaatgtcaaataacgagcttcgagtttccaatgataaatggaccttctctgttagtcttctttgctcactcagtatc

SEQ ID NO: 667768 - DNA, 120 bp, Artificial Sequence
  ENSG00000185231_15 (sequence is synthesized)
acatttcaaaggaagaaatgaaaatttaatccatttagttcccatgtgggaatacataaaggccagatgaaaattgtcactatttgaagaagctgtaaccaaactatgtgtgttacaatg

SEQ ID NO: 667769 - DNA, 120 bp, Artificial Sequence
  ENSG00000185231_16 (sequence is synthesized)
tgaagaagctgtaaccaaactatgtgtgttacaatgtagaagtacaagaaaagagccccaacatgtattttaagaaataaagagagagagacagagacagacagagagagagagagagag

SEQ ID NO: 667770 - DNA, 120 bp, Artificial Sequence
  ENSG00000185231_17 (sequence is synthesized)
tgtgtgtgtgtgtgtgtgtattttccccatgcttttggactatggggaaaaccaaaaccaaagcaagacatcaagcaatggtgctgttattatagccccaagtcaaagacctgagggagg

SEQ ID NO: 667771 - DNA, 120 bp, Artificial Sequence
  ENSG00000185231_18 (sequence is synthesized)
gagggaggcaaacaccacctcattctgcagatgaatgtgaaagcagacccagtcactgggaaatgtcatcctcccatcagccaagatgccagcaatggaagagtggcaaccccagtagga

SEQ ID NO: 667772 - DNA, 120 bp, Artificial Sequence
  ENSG00000185231_19 (sequence is synthesized)
ataaaagaaacataatttgcaagttcattcatttttaatagctaaaaatcagcttaaaggagaagcacatcctgattgtaagtccccactaagttggagggtgacttgaatggggtgaaa

SEQ ID NO: 667773 - DNA, 120 bp, Artificial Sequence
  ENSG00000185231_20 (sequence is synthesized)
ggtgaaagggacagaggagagcagtggggcttcagaggccaccaggctcaggatctgcaggatggatggtatcttccagaacaggcaatgctttgccctcaggagaatttcccagagctg

SEQ ID NO: 667774 - DNA, 120 bp, Artificial Sequence
  ENSG00000185231_21 (sequence is synthesized)
ctgaggggagaagacagccacacacaggacagaccatttggtgatgggtttgatattagaagtggcagggacaggaacttcagaagcaaaggaggcaaggcagctggagtcaagtgagga

SEQ ID NO: 667775 - DNA, 120 bp, Artificial Sequence
  ENSG00000185231_22 (sequence is synthesized)
cagtggcaggcgtgctttcacatggcctgtcccacagatggaggtgaaaggtgcaccttcttgtcctctgttctgtagaaatccttccctgtttgatccttcccctgccaaatgaactat

SEQ ID NO: 667776 - DNA, 120 bp, Artificial Sequence
  ENSG00000185231_23 (sequence is synthesized)
ctgccaaatgaactatgttactctaatactaacctgtattaattaatatatgagatatatataagttaatttttcatgaaatctaaagcacaaccctagaactaatttttaaaagtgtta

SEQ ID NO: 667777 - DNA, 120 bp, Artificial Sequence
  ENSG00000185231_24 (sequence is synthesized)
agtaatgtataacatattttatgtgattaaagtgcgtattctcaataagaggtaacctttttttgatgctgcaatgctctgtgataccacagaggtaagcaatgccacttaacctgtatc

SEQ ID NO: 667778 - DNA, 120 bp, Artificial Sequence
  ENSG00000185231_25 (sequence is synthesized)
ataaatagtcccaaactgctcttcctataaaattctgcctttgtcaacagctttgctgtctcctaatcactctcaagctctctgctgtgcatgtgactgttgtcagaaggaaaatcacca

SEQ ID NO: 667779 - DNA, 120 bp, Artificial Sequence
  ENSG00000185231_26 (sequence is synthesized)
agaaacttcacctctcactgcctttgatttgttgcagttaatctaagaaacaaaatgaagatggctagtctaatggtggatgaaacaaaaatgaagtctgagtgctaattcagagaactt

SEQ ID NO: 667780 - DNA, 120 bp, Artificial Sequence
  ENSG00000185231_27 (sequence is synthesized)
gcaattccagacattttcaattctaggtcttctgctatattccaatcagaacagaagcttcagggctcatagttactgagaaaactcacgtttttctacctctaacttcatatagaattc

SEQ ID NO: 667781 - DNA, 120 bp, Artificial Sequence
  ENSG00000185231_28 (sequence is synthesized)
caaatgaaagcaccaccaaactgcacatatttgtgtgaggaagatcaacaagcttcagacttttcccatgaggacttaattcttttatcaaattacccaatttttaaactgctgtgtgga

SEQ ID NO: 667782 - DNA, 120 bp, Artificial Sequence
  ENSG00000185231_29 (sequence is synthesized)
tactgtgagtgttcagctttatcgatgacctagccttggaccagatagctgaaaatgttcaggatgtgtactcaagctgatagtaattctgagccctgtctaataaaaaaggaaggatgt

SEQ ID NO: 667783 - DNA, 120 bp, Artificial Sequence
  ENSG00000185231_30 (sequence is synthesized)
atctgcctgtgtctttccatttctctaacttcacattaccagaaatgcacagttcatgtgggatgacatttattcaaggtgattgggagattttaacttagatctccagcaagtgctaca

SEQ ID NO: 667784 - DNA, 120 bp, Artificial Sequence
  ENSG00000185236_0 (sequence is synthesized)
gtcgggtgtttgtggtggggctgcggagtcgccgatcccgccggaagcgccaggacaatggggacccgggacgacgagtacgactacctattcaaagtggtgctcatcggggactcaggc

SEQ ID NO: 667785 - DNA, 120 bp, Artificial Sequence
  ENSG00000185236_1 (sequence is synthesized)
gtgggcaagagcaacctgctgtcgcgcttcacccgcaacgagttcaacctggagagcaagagcaccatcggcgtggagttcgccacccgcagcatccaggtggacggcaagaccatcaag

SEQ ID NO: 667786 - DNA, 120 bp, Artificial Sequence
  ENSG00000185236_2 (sequence is synthesized)
gcgcagatctgggacaccgctggccaggagcgctaccgcgccatcacctccgcgtactaccgtggtgcagtgggcgccctgctggtgtacgacatcgccaagcacctgacctatgagaac

SEQ ID NO: 667787 - DNA, 120 bp, Artificial Sequence
  ENSG00000185236_3 (sequence is synthesized)
gtggagcgctggctgaaggagctgcgggaccacgcagacagcaacatcgtcatcatgctggtgggcaacaagagtgacctgcgccacctgcgggctgtgcccactgacgaggcccgcgcc

SEQ ID NO: 667788 - DNA, 120 bp, Artificial Sequence
  ENSG00000185236_4 (sequence is synthesized)
ttcgcagaaaagaacaacttgtccttcatcgagacctcagccttggattccactaacgtagaggaagcattcaagaacatcctcacagagatctaccgcatcgtgtcacagaaacagatc

SEQ ID NO: 667789 - DNA, 120 bp, Artificial Sequence
  ENSG00000185236_5 (sequence is synthesized)
gcagaccgcgctgcccacgacgagtccccggggaacaacgtggtggacatcagcgtgccgcccaccacggacggacagaagcccaacaagctgcagtgctgccagaacctgtgacccctg

SEQ ID NO: 667790 - DNA, 120 bp, Artificial Sequence
  ENSG00000185236_6 (sequence is synthesized)
cgcccgcccccgccacggtatcctctggcccctccctgctgtccctctgtggccggctcgttccagccctcccagtgagctctgcacggccgggccggggcccaggaaggacaggagcca

SEQ ID NO: 667791 - DNA, 120 bp, Artificial Sequence
  ENSG00000185236_7 (sequence is synthesized)
gtgctaccccgtcctgcccggggaaaagctagaagccccggtttgctgcacccatgaaactcgggtccccacagcgtcttggcggggtggggagggcggcaggatggacggggctggcca

SEQ ID NO: 667792 - DNA, 120 bp, Artificial Sequence
  ENSG00000185236_8 (sequence is synthesized)
gaggcgaggaggacgggcggacggcgccgccttctccccttttccttggccgactctagggagcgattgcctccctccctccgtgaccgggtggcccagccagcccgtcgtccccaccca

SEQ ID NO: 667793 - DNA, 120 bp, Artificial Sequence
  ENSG00000185236_9 (sequence is synthesized)
gaaccgtgctctgggccaaagcccgaagaaccaggcagcgggggccggggcaggcggaccccccgggctctcagcgcccacccgctcctccgcacacagcagctcgcacaggcctcccac

SEQ ID NO: 667794 - DNA, 120 bp, Artificial Sequence
  ENSG00000185236_10 (sequence is synthesized)
ctctgcctgttgattgatgcagggagaagcccgtccccccctctcccctctcccctcccctctcctgcacgcaacgcgccctctcggccctccctgtccccctcctctgtctcgtctccc

SEQ ID NO: 667795 - DNA, 120 bp, Artificial Sequence
  ENSG00000185236_11 (sequence is synthesized)
catctggtctggaacctgtttgcaagtgaagcaatatctccgtgttttgtatatacaaccgctcttgtagcctttggtttttgttaatgtagagaaacacagattctttatacactttgt

SEQ ID NO: 667796 - DNA, 120 bp, Artificial Sequence
  ENSG00000185236_12 (sequence is synthesized)
aagatttacgccaaaccccagctctcgatctcttcttctccctgtggcccctgcgctgttgccccgtccccgtcaccccgcccgttactgaaatgtataatctgacttcctgtacagaaa

SEQ ID NO: 667797 - DNA, 120 bp, Artificial Sequence
  ENSG00000185236_13 (sequence is synthesized)
tgggcttgcagcgcgtgggcttggaaggatgtgtaggagttgggcaggagaaggggagagtgtgctcccaagaccagggagtgaggctggaagaacgctttagccatgcgccgtgggacc

SEQ ID NO: 667798 - DNA, 120 bp, Artificial Sequence
  ENSG00000185236_14 (sequence is synthesized)
ctcaggctgaccagcgcccagccttcgccacaccagggtatctctgggtaccaagtgcagtgaggacctagctcaggccactccgccttgccgctgcccctgcccagccagcatcccagc

SEQ ID NO: 667799 - DNA, 120 bp, Artificial Sequence
  ENSG00000185236_15 (sequence is synthesized)
ggtggccggggaccagatgggtgtgggtagggcaccagccaggcagggtggaacacggcctctgaaccttcgcttgttttgttcgtttgcttgtttttttcttttttttgtcggggcagg

SEQ ID NO: 667800 - DNA, 120 bp, Artificial Sequence
  ENSG00000185236_16 (sequence is synthesized)
ttttcttttttttgtcggggcaggatggatttttgctctttgcccaggctggagtgtggtggctcgatctcagcttactgcaacctccgccttccaggttcaggcaattctcctgcctca

SEQ ID NO: 667801 - DNA, 81 bp, Artificial Sequence
  ENSG00000185236_17 (sequence is synthesized)
ggattacaggtgcctgccaccacacccgctaatttttgtaatttttagtagagacaggatttcacaatgttgtccaggttg

SEQ ID NO: 667802 - DNA, 120 bp, Artificial Sequence
  ENSG00000185236_18 (sequence is synthesized)
cgccgatcccgccggaagcgccaggacaatggggacccgggacgacgagtacgactacctattcaaaggtactaccgtggtgcagtgggcgccctgctggtgtacgacatcgccaagcac

SEQ ID NO: 667803 - DNA, 120 bp, Artificial Sequence
  ENSG00000185238_0 (sequence is synthesized)
agacacgccgggctctcggggcaccacagccatgtgctcgttagcgtcaggcgctaccggcggccggggcgctgtggagaatgaggaggacctgccagaactgtcggacagcggggacga

SEQ ID NO: 667804 - DNA, 120 bp, Artificial Sequence
  ENSG00000185238_1 (sequence is synthesized)
ggccgcctgggaggatgaggacgatgcagatctcccccacggcaagcagcagaccccctgcctgttctgtaacaggttattcacatctgctgaagaaacattttcacactgtaagtctga

SEQ ID NO: 667805 - DNA, 120 bp, Artificial Sequence
  ENSG00000185238_2 (sequence is synthesized)
gcatcagtttaatattgacagcatggttcataaacatggacttgaattttatggatacattaagctaataaattttattagacttaagaatcctacagttgagtacatgaattccatata

SEQ ID NO: 667806 - DNA, 120 bp, Artificial Sequence
  ENSG00000185238_3 (sequence is synthesized)
caacccagtgccttgggagaaagaagagtatttgaagccagtattagaagatgaccttttacttcaatttgatgtagaagatctttatgaaccggtgtcagtacccttctcataccccaa

SEQ ID NO: 667807 - DNA, 120 bp, Artificial Sequence
  ENSG00000185238_4 (sequence is synthesized)
tggactcagtgaaaatacatctgttgttgaaaaattgaaacatatggaagccagggcactgtctgctgaagccgcattggccagagcacgtgaggatctgcaaaaaatgaaacaatttgc

SEQ ID NO: 667808 - DNA, 120 bp, Artificial Sequence
  ENSG00000185238_5 (sequence is synthesized)
tcaggattttgtgatgcacacagatgtcagaacctgctcgtcatctactagtgtcattgcggacctccaggaggatgaggatggtgtttatttcagctcatacgggcattatgggataca

SEQ ID NO: 667809 - DNA, 120 bp, Artificial Sequence
  ENSG00000185238_6 (sequence is synthesized)
tgaagaaatgctaaaggacaaaatacgaacagaaagctaccgagatttcatataccaaaatccacatatcttcaaagacaaggtagttttggatgttgggtgtggaactggaattctctc

SEQ ID NO: 667810 - DNA, 120 bp, Artificial Sequence
  ENSG00000185238_7 (sequence is synthesized)
tatgtttgctgctaaagctggggcgaagaaggttcttggagttgatcaatctgaaatactttaccaggcaatggatattataagactaaataaacttgaagatactattacactaattaa

SEQ ID NO: 667811 - DNA, 120 bp, Artificial Sequence
  ENSG00000185238_8 (sequence is synthesized)
aggaaagattgaagaagttcatcttcctgtagaaaaagtagatgttatcatatctgagtggatgggctattttcttctgtttgagtctatgttagattctgtcctttatgcaaagaacaa

SEQ ID NO: 667812 - DNA, 120 bp, Artificial Sequence
  ENSG00000185238_9 (sequence is synthesized)
atacttggcaaaaggaggctcggtctaccctgacatttgcactatcagccttgtagcagtgagtgatgtgaataaacatgctgatagaattgctttttgggatgatgtctatggcttcaa

SEQ ID NO: 667813 - DNA, 120 bp, Artificial Sequence
  ENSG00000185238_10 (sequence is synthesized)
aagctgttgtggaagttttagatccgaagactcttatttcagaaccttgtggtattaagcatatagattgccatacgacgtctatctcagatttggaattttcatcagattttaccctga

SEQ ID NO: 667814 - DNA, 120 bp, Artificial Sequence
  ENSG00000185238_11 (sequence is synthesized)
aaatcacaaggacatccatgtgcacggcaattgctggctactttgatatatattttgagaagaattgccacaacagggtcgtgttctctacgggccctcagagcaccaaaacacactgga

SEQ ID NO: 667815 - DNA, 120 bp, Artificial Sequence
  ENSG00000185238_12 (sequence is synthesized)
aacaaacagtatttctactggaaaaaccattttcagttaaagcaggtgaagccttgaaaggaaaggtcacagttcacaagaataagaaagatccacgttctctcaccgtgaccctcacgt

SEQ ID NO: 667816 - DNA, 120 bp, Artificial Sequence
  ENSG00000185238_13 (sequence is synthesized)
tgaataattcaactcaaacttatggtctccagtgaaacagccataaaagcacactaccttgtagtttttaatgtgggggtagagtgggtcagcaggagggagctggttttatgtgagcag

SEQ ID NO: 667817 - DNA, 120 bp, Artificial Sequence
  ENSG00000185238_14 (sequence is synthesized)
atggatggatgatggaccctttcctaatgagcctcctcaataagagagaagttctcattgtgggaatctgacatagttcagctgaggaagagaatcagctgatcctcatggtctgccacg

SEQ ID NO: 667818 - DNA, 120 bp, Artificial Sequence
  ENSG00000185238_15 (sequence is synthesized)
taatcattttcttagacgtttgctccaccagatttaaccaaatgtaactcccacattgagtttatctatattgaaaatcatttacattggcctatatttggaagagagatagtcttttgt

SEQ ID NO: 667819 - DNA, 120 bp, Artificial Sequence
  ENSG00000185238_16 (sequence is synthesized)
ttttaataagtttcttactataaattttaaacaaattggttagttatttggatattttattaaactagtaacacaggtactacacattttattatggactcctctgaggaggagttttta

SEQ ID NO: 667820 - DNA, 120 bp, Artificial Sequence
  ENSG00000185238_17 (sequence is synthesized)
attgtatttgctagaaaatcaggatgtaataaagatttgtataaaaaaactaaaatatggaaaagagcttcagccttcatatacaaatcatatatgcagacagcctagttgattatctag

SEQ ID NO: 667821 - DNA, 120 bp, Artificial Sequence
  ENSG00000185238_18 (sequence is synthesized)
catacttagggttctcattttgtagtttcttccctctttgtgactattccttagccttatagatttctagtactgcccaggaaatctaatttcaatacatttatcctaggtttcatgaaa

SEQ ID NO: 667822 - DNA, 120 bp, Artificial Sequence
  ENSG00000185238_19 (sequence is synthesized)
gtttttaaagattgggataaatatgtacttatttactaacgtattatctttttcaaaccagatttatgtgcaaaggttaaacatgtaactgttactaagcagtctataaagttgtcattt

SEQ ID NO: 667823 - DNA, 120 bp, Artificial Sequence
  ENSG00000185238_20 (sequence is synthesized)
cgcgcttgtgctcgcgctcgttcctggagtcggcggccgctgcgcgcgctcgttgcccaacccggtccccgcccccagacacgccgggctctcggggcaccacagccatgtgctcgttag

SEQ ID NO: 667824 - DNA, 120 bp, Artificial Sequence
  ENSG00000185238_21 (sequence is synthesized)
atgtgataaataactaacatacaattaaaaatataggctttagaagaaggttaacctgtgtttgaatgcaggccctacaatttaccagctgtgtgaccctggacctatttctttgcctct

SEQ ID NO: 667825 - DNA, 120 bp, Artificial Sequence
  ENSG00000185238_22 (sequence is synthesized)
ctgaagctcacattcttcatttgtaaaatgagaattaaataaggatttcatacacatacacatatatgcatttgtatatacattatatatgaatgtatgtatggatagtcttacaaaaaa

SEQ ID NO: 667826 - DNA, 120 bp, Artificial Sequence
  ENSG00000185238_23 (sequence is synthesized)
acacatactcttattggaatatactaaacatatctttctatacttaactttcttcactcagcagcttttcttggagaaattccttattatctttttacccccgtgttttttcttatggta

SEQ ID NO: 667827 - DNA, 120 bp, Artificial Sequence
  ENSG00000185238_24 (sequence is synthesized)
aataaacatgatacaaaatttgccatcttagctatccctaagtgtataggtaagtggtattaaatacatttataatgtcatgcagccatcaccacctccatctccagaactcttcatctt

SEQ ID NO: 667828 - DNA, 120 bp, Artificial Sequence
  ENSG00000185238_25 (sequence is synthesized)
ataaaactggaactgttctcattaaacggtaattccccattctcccttcctcccagcccctggaaatcactgttctactttctgtctctatgattttgactactcatatacatcatataa

SEQ ID NO: 667829 - DNA, 120 bp, Artificial Sequence
  ENSG00000185238_26 (sequence is synthesized)
gtggaatcttacagtacagtcgttccttcagtatctgtgagggattggttccaggaccctctgtggataccagcatccacaaatgctcatttaccggatataaaatggtgtagtgtttgc

SEQ ID NO: 667830 - DNA, 90 bp, Artificial Sequence
  ENSG00000185238_27 (sequence is synthesized)
tccgtgctatataaatagttgttatgctgtattgtttagaaccgtgacaagagaaagaagacttcatgttcagtacagaagcaatttgtt

SEQ ID NO: 667831 - DNA, 120 bp, Artificial Sequence
  ENSG00000185238_28 (sequence is synthesized)
gagaaagaagacttcatgttcagtacagaagcaatttgttttcccgaatgttttcgattagcagttggttgactccctggatggggaacccagggatataaagggctgactgtatttcct

SEQ ID NO: 667832 - DNA, 120 bp, Artificial Sequence
  ENSG00000185238_29 (sequence is synthesized)
tttgtaaccggcttattgcacttagcataatgtcctcaagatttgaccttgttacagcgaatgtcagaatttttttcatttttaaggctcaataatccattttacatatgtatgacattt

SEQ ID NO: 667833 - DNA, 120 bp, Artificial Sequence
  ENSG00000185238_30 (sequence is synthesized)
tgcttatccattcattcatctgtctatggatatttgggttacttatatattaaagctgttgtgaatattgctgctattaacataggtatacagatatctcttaggggccatgcttttaat

SEQ ID NO: 667834 - DNA, 120 bp, Artificial Sequence
  ENSG00000185238_31 (sequence is synthesized)
tcttttgggtatatacccagaaatgaaattgctgagtcatatggtaattccatttttaattccttgagaaatcactgtgctgtttttcacagtgggtgtaccattttgtattcccaccag

SEQ ID NO: 667835 - DNA, 120 bp, Artificial Sequence
  ENSG00000185238_32 (sequence is synthesized)
cagtgcacaagggttccaatttttccatatccttagcaatacttgttgttttctagttttttgataatagctatcctagttggtgtgaggtgatatttatattgatttgcatttttctaa

SEQ ID NO: 667836 - DNA, 120 bp, Artificial Sequence
  ENSG00000185238_33 (sequence is synthesized)
cgattagtgattttgagcatcttttcattaatattcttttaatagttcgtatatccaatgtaagaatgtccataagttgtttcagtttttatgttagaaacaatgcttcatataaaatat

SEQ ID NO: 667837 - DNA, 120 bp, Artificial Sequence
  ENSG00000185238_34 (sequence is synthesized)
taaaaatatttgtatacatatgcgagcacaattataaggtaatttgttagcactggactccctaggtcatgaagggtatataccatgtatggtgtcaccagttgtgctgccagcttgtct

SEQ ID NO: 667838 - DNA, 120 bp, Artificial Sequence
  ENSG00000185238_35 (sequence is synthesized)
ttggtacacagcaagggagtgttgatcttcccagacagtatcaccaaagcactttcagcaaacttctaaattccacactgatcttttatttttcattttttagttttgtaaatgttttat

SEQ ID NO: 667839 - DNA, 120 bp, Artificial Sequence
  ENSG00000185238_36 (sequence is synthesized)
tttaatgagagtttctggaaacttattatatactgttctattgtgtatatttttctattttttcattttctgccgtacagtatttcaagttgaggtactataactgtactggatacatat

SEQ ID NO: 667840 - DNA, 120 bp, Artificial Sequence
  ENSG00000185238_37 (sequence is synthesized)
atactatgtagtatactgttttcttgccatttttgttactacgttttatttggaacttttaaaaaattctttttgtttgcagtgatgtatacagattgcatgttaaagtaaaattcttaa

SEQ ID NO: 667841 - DNA, 120 bp, Artificial Sequence
  ENSG00000185238_38 (sequence is synthesized)
gaaaccatctgggcataggataggaagcacaaagtagtagcctttcaacaactttatttcttcagtggatatcaggatggttagattatctctcttctggagtcaatactaataaattat

SEQ ID NO: 667842 - DNA, 83 bp, Artificial Sequence
  ENSG00000185238_39 (sequence is synthesized)
ttagattatctctcttctggagtcaatactaataaattataatttcaatacgtaatggaaagagccgggcatggtgagattac

SEQ ID NO: 667843 - DNA, 120 bp, Artificial Sequence
  ENSG00000185238_40 (sequence is synthesized)
tgtgatcttttcctagccagaaacatcataatatatgaatagaatttaatatagagacctttttgataacatctgttttgttttggttttttcttaattaccctaggtagttttggatgt

SEQ ID NO: 667844 - DNA, 120 bp, Artificial Sequence
  ENSG00000185238_41 (sequence is synthesized)
atgtgctcgttagcgtcaggcgctaccggtgggtaccctggcccctcagcacccggctcgtccagccccaggccgcgccgctgtggggccggtggaagaccctccgggacacgggcccgg

SEQ ID NO: 667845 - DNA, 120 bp, Artificial Sequence
  ENSG00000185238_42 (sequence is synthesized)
gcagggtggggggctcgcagggatcatgaaggaggtgctgagtgagggccgcgggcgaacggggcggaggagagcccatcgtcacctgctcctcgagcccccgggccgcaccggtgtccg

SEQ ID NO: 667846 - DNA, 120 bp, Artificial Sequence
  ENSG00000185245_0 (sequence is synthesized)
agtcctccatggggctagaagagagaaggacggagtcgagtggcaccctagaagacgctctgtgccttcggaggtctttctgcctgcctgtcctcatgcctctcctcctcttgctgctcc

SEQ ID NO: 667847 - DNA, 120 bp, Artificial Sequence
  ENSG00000185245_1 (sequence is synthesized)
tgctgccaagccccttacacccccaccccatctgtgaggtctccaaagtggccagccacctagaagtgaactgtgacaagaggaatctgacagcgctgcctccagacctgccgaaagaca

SEQ ID NO: 667848 - DNA, 120 bp, Artificial Sequence
  ENSG00000185245_2 (sequence is synthesized)
caaccatcctccacctgagtgagaacctcctgtacaccttctccctggcaaccctgatgccttacactcgcctcactcagctgaacctagataggtgcgagctcaccaagctccaggtcg

SEQ ID NO: 667849 - DNA, 120 bp, Artificial Sequence
  ENSG00000185245_3 (sequence is synthesized)
atgggacgctgccagtgctggggaccctggatctatcccacaatcagctgcaaagcctgcccttgctagggcagacactgcctgctctcaccgtcctggacgtctccttcaaccggctga

SEQ ID NO: 667850 - DNA, 120 bp, Artificial Sequence
  ENSG00000185245_4 (sequence is synthesized)
cctcgctgcctcttggtgccctgcgtggtcttggcgaactccaagagctctacctgaaaggcaatgagctgaagaccctgcccccagggctcctgacgcccacacccaagctggagaagc

SEQ ID NO: 667851 - DNA, 120 bp, Artificial Sequence
  ENSG00000185245_5 (sequence is synthesized)
tcagtctggctaacaacaacttgactgagctccccgctgggctcctgaatgggctggagaatctcgacacccttctcctccaagagaactcgctgtatacaataccaaagggcttttttg

SEQ ID NO: 667852 - DNA, 120 bp, Artificial Sequence
  ENSG00000185245_6 (sequence is synthesized)
ggtcccacctcctgccttttgcttttctccacgggaacccctggttatgcaactgtgagatcctctattttcgtcgctggctgcaggacaatgctgaaaatgtctacgtatggaagcaag

SEQ ID NO: 667853 - DNA, 120 bp, Artificial Sequence
  ENSG00000185245_7 (sequence is synthesized)
gtgtggacgtcaaggccatgacctctaacgtggccagtgtgcagtgtgacaattcagacaagtttcccgtctacaaatacccaggaaaggggtgccccacccttggtgatgaaggtgaca

SEQ ID NO: 667854 - DNA, 120 bp, Artificial Sequence
  ENSG00000185245_8 (sequence is synthesized)
cagacctatatgattactacccagaagaggacactgagggcgataaggtgcgtgccacaaggactgtggtcaagttccccaccaaagcccatacaaccccctggggtctattctactcat

SEQ ID NO: 667855 - DNA, 120 bp, Artificial Sequence
  ENSG00000185245_9 (sequence is synthesized)
ggtccactgcttctctagacagccaaatgccctcctccttgcatccaacacaagaatccactaaggagcagaccacattcccacctagatggaccccaaatttcacacttcacatggaat

SEQ ID NO: 667856 - DNA, 120 bp, Artificial Sequence
  ENSG00000185245_10 (sequence is synthesized)
ccaagcccgaccaccccagagcccacctcagagcccgcccccagcccgaccaccccggagcccacctcagagcccgcccccagcccgaccaccccagagcccacctcagagcccgccccc

SEQ ID NO: 667857 - DNA, 120 bp, Artificial Sequence
  ENSG00000185245_11 (sequence is synthesized)
cgaccaccccggagcccaccccaatcccgaccatcgccacaagcccgaccatcctggtgtctgccacaagcctgatcactccaaaaagcacatttttaactaccacaaaacccgtatcac

SEQ ID NO: 667858 - DNA, 120 bp, Artificial Sequence
  ENSG00000185245_12 (sequence is synthesized)
tcttagaatccaccaaaaaaaccatccctgaacttgatcagccaccaaagctccgtggggtgctccaagggcatttggagagctccagaaatgacccttttctccaccccgacttttgct

SEQ ID NO: 667859 - DNA, 120 bp, Artificial Sequence
  ENSG00000185245_13 (sequence is synthesized)
gcctcctccccctgggcttctatgtcttgggtctcttctggctgctctttgcctctgtggtcctcatcctgctgctgagctgggttgggcatgtgaaaccacaggccctggactctggcc

SEQ ID NO: 667860 - DNA, 120 bp, Artificial Sequence
  ENSG00000185245_14 (sequence is synthesized)
aaggtgctgctctgaccacagccacacaaaccacacacctggagctgcagaggggacggcaagtgacagtgccccgggcctggctgctcttccttcgaggttcgcttcccactttccgct

SEQ ID NO: 667861 - DNA, 120 bp, Artificial Sequence
  ENSG00000185245_15 (sequence is synthesized)
ccagcctcttcctgtgggtacggcctaatggccgtgtggggcctctagtggcaggaaggaggccctcagctctgagtcagggtcgtggtcaggacctgctgagcacagtgagcattaggt

SEQ ID NO: 667862 - DNA, 120 bp, Artificial Sequence
  ENSG00000185245_16 (sequence is synthesized)
actctggccacagcctctgagggtgggaggtttggggaccttgagagaagagcctgtgggctctcctattggaatctagttgggggttggaggggtaaggaacacagggtgatagggagg

SEQ ID NO: 667863 - DNA, 120 bp, Artificial Sequence
  ENSG00000185245_17 (sequence is synthesized)
ggtcttagttcctttttctgtatcagaagccctgtcttcacaacacaggcacacaatttcagtcccagccaaagcagaaggggtaatgacatggacttggcggggggacaagacaaagct

SEQ ID NO: 667864 - DNA, 120 bp, Artificial Sequence
  ENSG00000185245_18 (sequence is synthesized)
cccgatgctgcatggggcgctgccagatctcacggtgaaccattttggcagaatacagcatggttcccacatgcatctatgcacagaagaaaatctggaaagtgatttatcaggatgtga

SEQ ID NO: 667865 - DNA, 120 bp, Artificial Sequence
  ENSG00000185245_19 (sequence is synthesized)
gcactcgttgtgtctggatgttacaaatatgggtggttttattttctttttccctgtttagcattttctagttttccactattattgtatattatctgtataataaaaaataattttagg

SEQ ID NO: 667866 - DNA, 120 bp, Artificial Sequence
  ENSG00000185246_0 (sequence is synthesized)
gtgccctggaccaggcggccgtggcgcgggtggcggctgctgtgctggctgtggggacggaggcggtgaagtgccatcttcggctaggtcgtcacaggctccggctcatggcatcaagtg

SEQ ID NO: 667867 - DNA, 120 bp, Artificial Sequence
  ENSG00000185246_1 (sequence is synthesized)
gcatccatcataagatcgttaactgaagacaatatgcaaaattctcacatggatgaatacagaaattctagtaatggcagcacaggcaacagttcagaggtagtggtagaacatcctact

SEQ ID NO: 667868 - DNA, 120 bp, Artificial Sequence
  ENSG00000185246_2 (sequence is synthesized)
gatttcagtactgagattatgaacgttacagaaatggaacagtcacctgatgactctcccaatgtgaatgcatctacagaagaaactgaaatggcaagtgctgtggaccttccagtgacg

SEQ ID NO: 667869 - DNA, 120 bp, Artificial Sequence
  ENSG00000185246_3 (sequence is synthesized)
ctgacagaaacagaagcaaatttccctccagaatatgaaaaattttggaaaactgtagaaaataatcctcaggattttacaggctgggtatatttgcttcaatatgtagaacaggagaat

SEQ ID NO: 667870 - DNA, 120 bp, Artificial Sequence
  ENSG00000185246_4 (sequence is synthesized)
cacttgatggctgccaggaaggcatttgacagatttttcatacactatccgtattgctatggttactggaaaaagtatgcagaccttgaaaagcggcacgacaacattaaaccatcagat

SEQ ID NO: 667871 - DNA, 120 bp, Artificial Sequence
  ENSG00000185246_5 (sequence is synthesized)
gaggtttatcggcgggggcttcaggcaatacctcttagtgttgacctttggatacattatataaacttcttaaaagaaacattggaccctggtgatcctgagacaaacaatacaataaga

SEQ ID NO: 667872 - DNA, 120 bp, Artificial Sequence
  ENSG00000185246_6 (sequence is synthesized)
ggaacttttgagcatgctgttctagctgcaggaacagatttccgttctgacagactgtgggaaatgtatataaactgggaaaatgagcagggaaacctgagagaagttacagctatatat

SEQ ID NO: 667873 - DNA, 120 bp, Artificial Sequence
  ENSG00000185246_7 (sequence is synthesized)
gatcgtattcttggtattccaacacagctgtatagtcatcattttcagagatttaaagaacatgtacagaataatttgcctagagatcttttaactggtgaacagtttattcagttgcga

SEQ ID NO: 667874 - DNA, 120 bp, Artificial Sequence
  ENSG00000185246_8 (sequence is synthesized)
agggaattagcttctgtaaatggtcatagtggtgatgatggtcctcctggtgatgatctaccatcgggaattgaagacataaccgatcctgcaaagctaattacagaaatagaaaacatg

SEQ ID NO: 667875 - DNA, 120 bp, Artificial Sequence
  ENSG00000185246_9 (sequence is synthesized)
agacatagaatcattgagattcatcaagaaatgtttaattataatgagcatgaagttagtaaaaggtggacatttgaagaaggtattaaaagaccttactttcatgtgaaacctttggaa

SEQ ID NO: 667876 - DNA, 120 bp, Artificial Sequence
  ENSG00000185246_10 (sequence is synthesized)
aaggcacaactaaaaaactggaaagaatacttagaatttgaaattgaaaatgggactcatgaacgagttgtggttctctttgaaagatgtgtcatatcatgtgccctctatgaggagttt

SEQ ID NO: 667877 - DNA, 120 bp, Artificial Sequence
  ENSG00000185246_11 (sequence is synthesized)
tggattaagtatgccaagtacatggaaaaccatagcattgaaggagtgaggcatgtcttcagcagagcttgtactatacatctcccaaagaaacccatggtgcatatgctttgggcagct

SEQ ID NO: 667878 - DNA, 120 bp, Artificial Sequence
  ENSG00000185246_12 (sequence is synthesized)
tttgaggaacagcagggtaatattaatgaagccaggaatatcttgaaaacatttgaagaatgtgttctaggattggcaatggttcgtttacgaagagtaagtttagaacgacggcatgga

SEQ ID NO: 667879 - DNA, 120 bp, Artificial Sequence
  ENSG00000185246_13 (sequence is synthesized)
aatctggaagaagctgaacatttgcttcaggatgccattaagaatgccaaatcaaataatgaatcttcattttatgctgtcaaactagcccggcatcttttcaaaatacagaaaaacctt

SEQ ID NO: 667880 - DNA, 120 bp, Artificial Sequence
  ENSG00000185246_14 (sequence is synthesized)
caaagttatacctcaatttacttgaaatggaatatagtggtgacctcaaacaaaatgaagaaaatatcctaaattgttttgacaaagctgtacatggttcattacctattaaaatgagaa

SEQ ID NO: 667881 - DNA, 120 bp, Artificial Sequence
  ENSG00000185246_15 (sequence is synthesized)
ttacattttctcagagaaaagtggaatttcttgaagattttggttccgatgttaataagcttctgaatgcttatgatgaacatcaaacactcctgaaagaacaggattctttaaaaagga

SEQ ID NO: 667882 - DNA, 120 bp, Artificial Sequence
  ENSG00000185246_16 (sequence is synthesized)
aagcagaaaatggatcagaagaaccagaggaaaagaaagcacatacagaagatacaacttcatcatctacacagatgattgatggtgatttacaggcaaaccaagctgtatataattata

SEQ ID NO: 667883 - DNA, 120 bp, Artificial Sequence
  ENSG00000185246_17 (sequence is synthesized)
gtgcgtggtatcaatacaattatcagaatccttggaattatggacaatattatcctccccctccaacctgatgggaaaaatgtaaatttcaaatgcagtgtgtgaaaagtatgaaattat

SEQ ID NO: 667884 - DNA, 120 bp, Artificial Sequence
  ENSG00000185246_18 (sequence is synthesized)
tattttttttaatgagggatgtaaacagtataagcttgttgtatttgataacctgtcttccttgtttctgtgtaacatgatttgtttagtaatagggggaaaatgtcaattagtagctta

SEQ ID NO: 667885 - DNA, 120 bp, Artificial Sequence
  ENSG00000185246_19 (sequence is synthesized)
ccacagatactgtttcctaccatttataaaatttactttttattgaaaaactattttttgatttttgcattaagtggtctagaattcttttgcaatgcatttgcaacagaattttgtagc

SEQ ID NO: 667886 - DNA, 120 bp, Artificial Sequence
  ENSG00000185246_20 (sequence is synthesized)
cttaaggggtaggaagaaaaacctgactgcaaatcatgtcagtgtagtacaaaattctgaaaacacataagggctggttatttacctccttttttttttttttttttaaagaaaaaagga

SEQ ID NO: 667887 - DNA, 120 bp, Artificial Sequence
  ENSG00000185246_21 (sequence is synthesized)
cttttaacctttgctgacaaggttttgtctgtttcagttatacttgtgaattgtgatctaactgcagaaaggatacattattaaaatactttgccttggaatagattataaatgagaaaa

SEQ ID NO: 667888 - DNA, 120 bp, Artificial Sequence
  ENSG00000185246_22 (sequence is synthesized)
tggaatgtttgcatccctttaaaaatgaaaatcatatcaaaagtatgttgtttcaggagactttgtatttagaatattcatgtaaaacttgtgaacaagctttcattttgatcaaactga

SEQ ID NO: 667889 - DNA, 120 bp, Artificial Sequence
  ENSG00000185246_23 (sequence is synthesized)
tcttcatttttgtaataaaacggaagactcatccagtaattgtttatgaatttattttggggggatcaattagtaatattaaccttatgttcacctttattagtggctcattggttttga

SEQ ID NO: 667890 - DNA, 120 bp, Artificial Sequence
  ENSG00000185246_24 (sequence is synthesized)
agtacaccttttctaaattcaggtcttgatcttcctgccaagatttttctgcttttagcattttgtttcccctcaagccttatgcttttgccttctcattatacaggcaatctgtccaga

SEQ ID NO: 667891 - DNA, 120 bp, Artificial Sequence
  ENSG00000185246_25 (sequence is synthesized)
taattttactgggagttactccctggtttgatgaggtccttagttccaattccctaatcagaacaataatatattaacaccaaacaaatcacagtcagatcaagacagtggatcaatttt

SEQ ID NO: 667892 - DNA, 120 bp, Artificial Sequence
  ENSG00000185246_26 (sequence is synthesized)
tattgagccacttaagtttacaacatgaggtaaaaggaaaaagttctccttgaccagtattttacacagctgtaggaaagtattttagaccagggattcataagggatttatctctcaaa

SEQ ID NO: 667893 - DNA, 120 bp, Artificial Sequence
  ENSG00000185246_27 (sequence is synthesized)
agctgggaccaagtaaacaaattttattaactccttgaattttccagttgactcttcctttacaatagtaacaagttctaactagttgtgtaaatttcttcaaggccaagttttatcatt

SEQ ID NO: 667894 - DNA, 120 bp, Artificial Sequence
  ENSG00000185246_28 (sequence is synthesized)
gttgctaatatccttagagctgaagcactgctatttcaatcaatatccactaattccacttcaaaagtgagttttgcatttggtggaattctgttgaagaagtcaaggtacatttgataa

SEQ ID NO: 667895 - DNA, 120 bp, Artificial Sequence
  ENSG00000185246_29 (sequence is synthesized)
ctctacagtttgtcaagctttgcagtgcaagcctctgtattacactgcagcttaacaaacgctgtcattgatgctctaatgggtctgtgccctatggtctgtaacccaaagcctgcccac

SEQ ID NO: 667896 - DNA, 120 bp, Artificial Sequence
  ENSG00000185246_30 (sequence is synthesized)
tcatatcatgtgccctctatgaggagttttggattaaggtaagaaaatcatgtgctcttaaacttgaatatattataaacattgatctagtgactaaccttttttgtacttctgttgaat

SEQ ID NO: 667897 - DNA, 120 bp, Artificial Sequence
  ENSG00000185246_31 (sequence is synthesized)
gttgttcatataactatatctgttgcattaggagatggtctgcttgcaaccagatttgactgctgcatatgccaacctcgttgcctctcttcgtccttccttacagaaactagtctagtg

SEQ ID NO: 667898 - DNA, 120 bp, Artificial Sequence
  ENSG00000185246_32 (sequence is synthesized)
acctctacagtttgtcaagctttgcagtgcaagcctctgtattacactgcagcttaacaagtagggcagggcttttctctcacttacatttatttctcattttccaaacaatatagttgg

SEQ ID NO: 667899 - DNA, 120 bp, Artificial Sequence
  ENSG00000185246_33 (sequence is synthesized)
ctttgttcatagatgttattagcataaattaggatagtttctttttttttaaaaaaagtttttgttccaattgtgtaatacattctttggtggttaagtactagaattttagcagtgaac

SEQ ID NO: 667900 - DNA, 120 bp, Artificial Sequence
  ENSG00000185246_34 (sequence is synthesized)
tccacccaaatggtaatggtagattatttaaacaaaattccagtaattagtatttctaaggttcaccggataacacagtgttgcctctctgttaagaaataattaaatatttgaagtaca

SEQ ID NO: 667901 - DNA, 120 bp, Artificial Sequence
  ENSG00000185246_35 (sequence is synthesized)
aatttataatgaaacagtagaccttattgtttatgattaaaattgactcataattttcaaatgaagttgaataacattaggtagctacatttttagctttgaaaatagcttacagctttt

SEQ ID NO: 667902 - DNA, 120 bp, Artificial Sequence
  ENSG00000185246_36 (sequence is synthesized)
ggtgcgtacatcactgaataaacttatctccaataggtactgtaagccaattaataacaaaacaaagatttttttttttttttttttttggctggcagtacctaccatttatggtcaaac

SEQ ID NO: 667903 - DNA, 120 bp, Artificial Sequence
  ENSG00000185247_0 (sequence is synthesized)
attggcttccgcctctgggatctgagagaagcgaaagcgtctttctgaggggtgtcttgagagtggcagagggcagcgggtccaggctccatgaggaggcaagccttgggaatctgaggg

SEQ ID NO: 667904 - DNA, 120 bp, Artificial Sequence
  ENSG00000185247_1 (sequence is synthesized)
atggagactcagttccgcagagggggtctggggtgcagccctgccagcatcaagaggaagaagaagagggaggactcaggagactttggactccaggtgagcactatgttctcagaggac

SEQ ID NO: 667905 - DNA, 120 bp, Artificial Sequence
  ENSG00000185247_2 (sequence is synthesized)
gacttccagtcaacagaaagagccccatatggtccacaactacagtggtcccaggatctgccaagagtccaggtttttagagaacaggccaacctggaggacaggagtcccaggagaacc

SEQ ID NO: 667906 - DNA, 120 bp, Artificial Sequence
  ENSG00000185247_3 (sequence is synthesized)
cagaggatcactggaggagaacaagtgctgtggggccccatcacccagatatttcccacagttcggcctgctgacctaaccagagtcatcatgcctcttgagcaaagaagtcagcactgc

SEQ ID NO: 667907 - DNA, 120 bp, Artificial Sequence
  ENSG00000185247_4 (sequence is synthesized)
aagcctgaggaaggccttcaggcccaagaagaagacctgggcctggtgggtgcacaggctctccaagctgaggagcaggaggctgccttcttctcctctactctgaatgtgggcactcta

SEQ ID NO: 667908 - DNA, 120 bp, Artificial Sequence
  ENSG00000185247_5 (sequence is synthesized)
gaggagttgcctgctgctgagtcaccaagtcctccccagagtcctcaggaagagtccttctctcccactgccatggatgccatctttgggagcctatctgatgagggctctggcagccaa

SEQ ID NO: 667909 - DNA, 120 bp, Artificial Sequence
  ENSG00000185247_6 (sequence is synthesized)
gaaaaggaggggccaagtacctcgcctgacctgatagaccctgagtccttttcccaagatatactacatgacaagataattgatttggttcatttattgctccgcaagtatcgagtcaag

SEQ ID NO: 667910 - DNA, 120 bp, Artificial Sequence
  ENSG00000185247_7 (sequence is synthesized)
tttggcattgatgtgaaggaagtggaccccactagccactcctatgtccttgtcacctccctcaacctctcttatgatggcatacagtgtaatgagcagagcatgcccaagtctggcctc

SEQ ID NO: 667911 - DNA, 120 bp, Artificial Sequence
  ENSG00000185247_8 (sequence is synthesized)
ctgataatagtcctgggtgtaatcttcatggaggggaactgcatccctgaagaggttatgtgggaagtcctgagcattatgggggtgtatgctggaagggagcacttcctctttggggag

SEQ ID NO: 667912 - DNA, 120 bp, Artificial Sequence
  ENSG00000185247_9 (sequence is synthesized)
cccaagaggctccttacccaaaattgggtgcaggaaaagtacctggtgtaccggcaggtgcccggcactgatcctgcatgctatgagttcctgtggggtccaagggcccacgctgagacc

SEQ ID NO: 667913 - DNA, 120 bp, Artificial Sequence
  ENSG00000185247_10 (sequence is synthesized)
agcaagatgaaagttcttgagtacatagccaatgccaatgggagggatcccacttcttacccatccctgtatgaagatgctttgagagaggagggagagggagtctgagcatgagatgca

SEQ ID NO: 667914 - DNA, 120 bp, Artificial Sequence
  ENSG00000185247_11 (sequence is synthesized)
accagggccagcgggcagggaaatgggccaatgcatgcttcagggccacacccagcagtttccctgtcctgtgtgaaatcaggcccattcttccctctgtgtttgatgagagaagtcagt

SEQ ID NO: 667915 - DNA, 120 bp, Artificial Sequence
  ENSG00000185247_12 (sequence is synthesized)
gttctcagtagtagaaggcacagtgaatggaagggaacacattgtatactgcctttaggtttctcttccatcgggtgacttggagatttctttttgtttccctttggtaattttcaaata

SEQ ID NO: 667916 - DNA, 120 bp, Artificial Sequence
  ENSG00000185247_13 (sequence is synthesized)
ttgttcctgtaataaaagttttagttagcttcaacatctaagtgtatggatgatactgaccacacatgttgttttgcttatccatttcaagtgcaagtgtttgccattttgtaaaacatt

SEQ ID NO: 667917 - DNA, 120 bp, Artificial Sequence
  ENSG00000185247_14 (sequence is synthesized)
ttgggaaatcttccatcttgctgtgatttgcaataggtattttcttggagaatgtaagaacttaacaataaagctgaactggtgttgtgaaacagagaaataaaaggagaaggtcattaa

SEQ ID NO: 667918 - DNA, 120 bp, Artificial Sequence
  ENSG00000185247_15 (sequence is synthesized)
tgcactctcaccagggcagggagctgtcttgacccccagtggaggctgacaatttttttcctgtgtacactggacccctttcatagaggtgggtgctatgcaagtggagctggtgactga

SEQ ID NO: 667919 - DNA, 120 bp, Artificial Sequence
  ENSG00000185247_16 (sequence is synthesized)
atgggtcaggacctcttctgaaatgggagtttaagacctacaatcagacaagaggtgggtgctatgcaagtggagctggtgactgatggctgaccattgatacaggctaggaataccaat

SEQ ID NO: 667920 - DNA, 120 bp, Artificial Sequence
  ENSG00000185247_17 (sequence is synthesized)
gagcaaggggactcagagtcagagacttggtccgagaggagcagacatcattggcagaggacggagctccaggctctgcaaggaatcaagggaagctccaggcgtgggggccggatgtga

SEQ ID NO: 667921 - DNA, 120 bp, Artificial Sequence
  ENSG00000185247_18 (sequence is synthesized)
cttggagttccaaggcacggtggccacatgtggtgcatcctcactctgcctttggggtgtcagcaaggagtgggttgtggtctgaggagtggagcctcaggtcaacccagggaggagtcc

SEQ ID NO: 667922 - DNA, 120 bp, Artificial Sequence
  ENSG00000185247_19 (sequence is synthesized)
cagagggaggactcaggcaaccaattatccctgaggtagaaaacctgcccctgccatcggtccttggaggccccaagcaggactctaggaaagagaggcagctccccacttcctagttgg

SEQ ID NO: 667923 - DNA, 120 bp, Artificial Sequence
  ENSG00000185247_20 (sequence is synthesized)
ggttctctgggagatggtggtcgtggcctgcaaaactcatccacagttcagcaggagagacatggataggccttgtcaggagtaaatctgaatacctggaggaaacccagagagaggagg

SEQ ID NO: 667924 - DNA, 120 bp, Artificial Sequence
  ENSG00000185247_21 (sequence is synthesized)
cacccctgaaatctgcttcatctgtcagcctttggcatcccatgaggggtgtccatgtagtgccccttcactttctgcctcccatatctcagagaggtggggcccttggtctgaggcagg

SEQ ID NO: 667925 - DNA, 120 bp, Artificial Sequence
  ENSG00000185247_22 (sequence is synthesized)
tcctcaggtcagcagagggatacacacctggtcagcacagggtggagtccaggatctgccagtagtcaaggagaggaaaattgatgaagactgaaggtaagaatgtaccctcccacatgc

SEQ ID NO: 667926 - DNA, 120 bp, Artificial Sequence
  ENSG00000185247_23 (sequence is synthesized)
caaagaaaaagggacctcaccaatccttgcttcctctgttttcatccctcggaggcccaagttggggaggcatgtgccatgctcacatttctgccacgaggttgggggtggcaccttgct

SEQ ID NO: 667927 - DNA, 120 bp, Artificial Sequence
  ENSG00000185247_24 (sequence is synthesized)
cagggaggtgagcaccttgtttcaagggggtgatgacaggtcagcaggtggagccacacctgatcagcagagggaggagtcccaggatctttaggactcaaggtgtatgtgtccccttgg

SEQ ID NO: 667928 - DNA, 120 bp, Artificial Sequence
  ENSG00000185247_25 (sequence is synthesized)
tgaggactggagatacccacatcccataatgaagggatcccacagagtctctctgtcccctgtccttggctgtgtggggacctcatcacgggtggccccaagtggcaaggtcacttgtac

SEQ ID NO: 667929 - DNA, 120 bp, Artificial Sequence
  ENSG00000185247_26 (sequence is synthesized)
cacaggcagaaagttgggaaaccttcagggagatgaggtcttggtgtaaagggatatgtctgctcatctcaggggttgggagtcaaggaaggacaggccctggcagaagtaaagatgaaa

SEQ ID NO: 667930 - DNA, 120 bp, Artificial Sequence
  ENSG00000185247_27 (sequence is synthesized)
aacccacaggaggactttggaatccccagaaccgaagggtccagcctctgctgtcagccctggacaaccacatgatggggtgatgggacgtggggccccttacttctgttttggaatctt

SEQ ID NO: 667931 - DNA, 120 bp, Artificial Sequence
  ENSG00000185250_0 (sequence is synthesized)
cagcagttgaggttgaagatccgcagtcgcagggagaagttgggcttcatggttggggagctccaggggcgctaggcggctcgaactctccagcgacggccgcggtggggacgggggcgg

SEQ ID NO: 667932 - DNA, 120 bp, Artificial Sequence
  ENSG00000185250_1 (sequence is synthesized)
ccggcggcgccttctccccagaccgttccttcttcgcaggcggcgcgcacaggtgggcaccaagcccgcgtggctcaggtcgggcccgactcccgcgttcccccggcaaccggccggctg

SEQ ID NO: 667933 - DNA, 120 bp, Artificial Sequence
  ENSG00000185250_2 (sequence is synthesized)
ttcccaatcaggcgggccgccaacccggaaaggcgatccgctgccgaaatccgggcgcccaggctcggtaagggccgcgcgctaggaccctgggggtccggagagcgcccccgggtgggc

SEQ ID NO: 667934 - DNA, 120 bp, Artificial Sequence
  ENSG00000185250_3 (sequence is synthesized)
ggctcccggttccttttcctccaagctcgtccccggcggtcgcggccgcccgcgcgccggcggcccagcaacaggcgcaaagttgaggaaaggcccagccgccacgggccgccctcgacc

SEQ ID NO: 667935 - DNA, 80 bp, Artificial Sequence
  ENSG00000185250_4 (sequence is synthesized)
cgcccctgggccccgcctcctgcgagcggcggaggcggggccgcgcggttgccggagcgacgcgcagtgtttggggtcac

SEQ ID NO: 667936 - DNA, 120 bp, Artificial Sequence
  ENSG00000185250_5 (sequence is synthesized)
gcgggcccccgcacgctaggtgcggctcgccgtcgctgccggagcggccgctgcaggtgaaggtggtggggctcttcagctgccccaactttcagattgcgaagagcgccgctgagaatc

SEQ ID NO: 667937 - DNA, 120 bp, Artificial Sequence
  ENSG00000185250_6 (sequence is synthesized)
tgaagaataatcatccatccaaatttgaagatcctatattagttcctcttcaagaatttgcatggcatcaatatctacaggagaaaaaaagggaactcaaaaatgaaacctgggaatatt

SEQ ID NO: 667938 - DNA, 120 bp, Artificial Sequence
  ENSG00000185250_7 (sequence is synthesized)
cttcctctgtgatttcttttgttaatggtcagtttctgggtgatgcattggatctgcagaaatgggcccacgaggtgtgggatatagttgacattaaaccctctgcactttatgacgcac

SEQ ID NO: 667939 - DNA, 120 bp, Artificial Sequence
  ENSG00000185250_8 (sequence is synthesized)
tcactgaggatttttccgctaagttcttaagagacaccaagcatgatttcgtgtttttggacatttgtattgattcttctccaattggaagattgatttttgagctatactgtgatgtgt

SEQ ID NO: 667940 - DNA, 120 bp, Artificial Sequence
  ENSG00000185250_9 (sequence is synthesized)
gtcccaaaacatgtaaaaattttcaggtcttgtgcacaggaaaagcagggttttctcaacgtggcataagactacattacaaaaattccatttttcatcgaatagtacagaatggctgga

SEQ ID NO: 667941 - DNA, 120 bp, Artificial Sequence
  ENSG00000185250_10 (sequence is synthesized)
tacaaggaggggatatagtgtatggaaaaggagataatggagagtcgatttatggtccaacatttgaagatgaaaacttttcagttcctcataataaaagaggagtacttggaatggcca

SEQ ID NO: 667942 - DNA, 120 bp, Artificial Sequence
  ENSG00000185250_11 (sequence is synthesized)
acaaaggccgtcacagcaacgggtcacaattctatatcacactgcaagcaactccttatctagatagaaaatttgtggcttttgggcaactgattgaaggaacagaagtgcttaaacaac

SEQ ID NO: 667943 - DNA, 120 bp, Artificial Sequence
  ENSG00000185250_12 (sequence is synthesized)
tagaattagttccaacacagaatgaaagaccaatacatatgtgtagaattactgacagtggagatccttatgcttgattttcatatcaatattttctgtgataatttattactttgtatc

SEQ ID NO: 667944 - DNA, 120 bp, Artificial Sequence
  ENSG00000185250_13 (sequence is synthesized)
tgatcagctgtttgtggatttaattaaaaagtacttgataaattgtaatttgaaagccgtggcagacactgtaggttgcctcatctacacccaatccctccccatcttcctttcctgtct

SEQ ID NO: 667945 - DNA, 120 bp, Artificial Sequence
  ENSG00000185250_14 (sequence is synthesized)
ctgtcatagagactgtgaaagggtggtactcaatttcctagactcctttgcagccacgggtggccatgagagatggttctggccagtgggacaggaatagaacgccagtggtcctgcccc

SEQ ID NO: 667946 - DNA, 120 bp, Artificial Sequence
  ENSG00000185250_15 (sequence is synthesized)
ccagtggtcctgccccttccccttcatccagtctggaatgtggagaggctggagctacagctgtcatcttgtggccataaagaaaaggctgaggccaggtgtggtagctcacgcctgtaa

SEQ ID NO: 667947 - DNA, 120 bp, Artificial Sequence
  ENSG00000185250_16 (sequence is synthesized)
actccagcctggcgacagagagagactgtctcaaaaaaaaagaaaggccaagtactgcagagatgtcagccccagtctcttgagctgcgggaccaataccagcaaccacctactctggac

SEQ ID NO: 667948 - DNA, 120 bp, Artificial Sequence
  ENSG00000185250_17 (sequence is synthesized)
gggaccaataccagcaaccacctactctggacttcttattataggagactaacagagccctgtgttgtgttgtttatgttactgttggttgagaattttgttacttgtggacaaaaaatt

SEQ ID NO: 667949 - DNA, 120 bp, Artificial Sequence
  ENSG00000185250_18 (sequence is synthesized)
cttaatttagcaacacacctgatagcctaagacatttgtaatagaattatgttcttgtttgtaactacatgtactcctaggagaaacttggtaagtaaccaaataggaatgatgcagaag

SEQ ID NO: 667950 - DNA, 120 bp, Artificial Sequence
  ENSG00000185250_19 (sequence is synthesized)
aaaaagcaattcattgtaatatttcattgtttataccagcattcagaaagagtatctacactttggatgttttcatatatgacatgaacatcatccttatctctctgagccataccaacc

SEQ ID NO: 667951 - DNA, 120 bp, Artificial Sequence
  ENSG00000185250_20 (sequence is synthesized)
ctatgaaaaccaagggcttgttttacagtgtccgtggtggctgactcatgtgatgttattggagattcagctttatcactactctgtaatctaaagttctcaagctcatatcacctgggg

SEQ ID NO: 667952 - DNA, 120 bp, Artificial Sequence
  ENSG00000185250_21 (sequence is synthesized)
agcttttaaaatgtaacctaacagaccttgtccttgacctactgaggcagagttcccaggcgtggggcagagattctgtgttcatttggttctttccccagggttcccaggcgtggggca

SEQ ID NO: 667953 - DNA, 120 bp, Artificial Sequence
  ENSG00000185250_22 (sequence is synthesized)
cagattctgtgttcatttagctctttccccagggttcccatttagacagctgggcactagtcatctgggaatcactgcaagacataaggaactggttccagtccccatggtgtaatgtag

SEQ ID NO: 667954 - DNA, 120 bp, Artificial Sequence
  ENSG00000185250_23 (sequence is synthesized)
gtagtcagcagagtgcttgactctgctattggtgaccttgctcagctcctgttaccaccactaccctgtgcccctgctctgcccagactaagagtgcttttctttttttttttttttttt

SEQ ID NO: 667955 - DNA, 120 bp, Artificial Sequence
  ENSG00000185250_24 (sequence is synthesized)
ggcctcccaaagtgctgagattacaaaggcgtgagccaccgcacccggctgagagtgcttttcttaccctaagcagaatgaggtttgtcttccaagaacaatctctatttacatcagtct

SEQ ID NO: 667956 - DNA, 120 bp, Artificial Sequence
  ENSG00000185250_25 (sequence is synthesized)
taaagaggcaggcttctaatggatatgaggcttgccaaaagtaggcgtaggcttttttaactttttattttgaaatatagattcacaggaagttgcaaaaatagtacagagcagtcctgt

SEQ ID NO: 667957 - DNA, 120 bp, Artificial Sequence
  ENSG00000185250_26 (sequence is synthesized)
gtacctttcacccattttccccagtggctacgcttacaaaacggtagtacaatatcaaaccaggcagctgacattggtacaatgtgtgtgatgccattttatcatgagtatattcatgta

SEQ ID NO: 667958 - DNA, 120 bp, Artificial Sequence
  ENSG00000185250_27 (sequence is synthesized)
accaacactatagagaaaatatagaacctttccagcacctcaaagacccccttccagtacccctttacagtcaacccactcccctgccctctgccatccctaactcctgacaactggcat

SEQ ID NO: 667959 - DNA, 120 bp, Artificial Sequence
  ENSG00000185250_28 (sequence is synthesized)
ttgcttttccttttaatgacagctttattgctatatgacatatgctttatgctaagacctgaggtggatgggaggaagcagaccgcctatgttacattctcaactgacccagagcaacat

SEQ ID NO: 667960 - DNA, 120 bp, Artificial Sequence
  ENSG00000185250_29 (sequence is synthesized)
agtgttaagaatgtgtgttctagggccagaatcctggctctgccattccctagctgcacaaactcaggcaagaacttttctgtgcctcaattccttcatctgagaaacagtggtacctac

SEQ ID NO: 667961 - DNA, 120 bp, Artificial Sequence
  ENSG00000185250_30 (sequence is synthesized)
cacataagattgctgtgagggttccatgaatcaataatttctataaagaacctataagagacctggtctgctgtaagcactcgataaatttaataataaattactaatgtgtaaccttca

SEQ ID NO: 667962 - DNA, 120 bp, Artificial Sequence
  ENSG00000185250_31 (sequence is synthesized)
tatggtccaacatttgaaggcaactgattgaaggaacagaagtgcttaaacaactagaattagttccaacacagaatgaaagaccaatacatatgtgtagaattactgacagtggagatc

SEQ ID NO: 667963 - DNA, 120 bp, Artificial Sequence
  ENSG00000185250_32 (sequence is synthesized)
gcatcaaaattatccaggatacagggacaatcatgacaaagagggaataggaacagagtcagaaatttaaggaagaaagccacatgcttcaatatgcaagattttcaacatgcaagaggg

SEQ ID NO: 667964 - DNA, 120 bp, Artificial Sequence
  ENSG00000185252_0 (sequence is synthesized)
gcagcggccgcctgctgctctttgtggcagtcgcagtccttttgtgggagtccggtctgtccacttgccggtccctcagaccgtcggcggtctctgtccgcttcgggacctgtccgctgg

SEQ ID NO: 667965 - DNA, 120 bp, Artificial Sequence
  ENSG00000185252_1 (sequence is synthesized)
tcgctccgcgtccgatggctcctggccgcggaaccttaggcctggccctggtctccgagcgcgggttcgccgggaggagcgtgtggcgggggtgtgccggggcgtgagtgcgccgagcat

SEQ ID NO: 667966 - DNA, 120 bp, Artificial Sequence
  ENSG00000185252_2 (sequence is synthesized)
ggggctgagcctggtgtggggagtgggtatctgcggagccggcctgaaccccacctcagccgggcgcggggagggggctccgtgcgtgtgatcgtgcagctgtgagcgcgtggccgcccc

SEQ ID NO: 667967 - DNA, 120 bp, Artificial Sequence
  ENSG00000185252_3 (sequence is synthesized)
gcggggctccgctgcaggcccctcagccccaggagcagtactcgctcttcagggcctgccctggatcctggaggctacacagctgcccactcctcctggggaggctgccgtggaggccat

SEQ ID NO: 667968 - DNA, 120 bp, Artificial Sequence
  ENSG00000185252_4 (sequence is synthesized)
ggagatccctgccccggagcccgagaagacagctctttcctctcaggatcctgctctttccctgaaagagaatctcgaggatatatcgggttggggtcttcccgaagccaggtccaagga

SEQ ID NO: 667969 - DNA, 120 bp, Artificial Sequence
  ENSG00000185252_5 (sequence is synthesized)
atcggtgagtttcaaggatgtggctgtggacttcacccaggaggagtggggtcaactagactcccctcagagggccttgtaccgggatgtgatgttggagaactaccagaaccttcttgc

SEQ ID NO: 667970 - DNA, 120 bp, Artificial Sequence
  ENSG00000185252_6 (sequence is synthesized)
cctaggacctccactgcacaagccagatgtgatctctcatctggaacgaggcgaggagccatggagcatgcagagggaagtccccagagggccctgtccagaatgggagctgaaggcggt

SEQ ID NO: 667971 - DNA, 120 bp, Artificial Sequence
  ENSG00000185252_7 (sequence is synthesized)
gccctctcaacagcagggcatttgcaaagaagaaccggcccaggagcccatcatggagcggcccctcggcggggcgcaggcgtgggggcgccaggcaggtgctctgcagaggagtcaggc

SEQ ID NO: 667972 - DNA, 120 bp, Artificial Sequence
  ENSG00000185252_8 (sequence is synthesized)
tgcgccctgggcgcccgcacctgccatggtctgggacgtccctgtagaggaattccccctcaggtgtcccctcttcgcccagcaacgcgttcccgaggggggacccttgctggacacacg

SEQ ID NO: 667973 - DNA, 120 bp, Artificial Sequence
  ENSG00000185252_9 (sequence is synthesized)
caagaacgtccaggccactgagggcagaaccaaggcccccgcgagactgtgtgcaggggaaaacgcctccacgccaagtgagccagaaaagttcccccaggtgcgccggcagcgcggggc

SEQ ID NO: 667974 - DNA, 120 bp, Artificial Sequence
  ENSG00000185252_10 (sequence is synthesized)
gggcgccggggagggcgagttcgtgtgcggcgagtgcgggaaggcgttccgccagagctcctccctcacgctgcaccggcgctggcacagccgggagaaggcttacaagtgcgatgaatg

SEQ ID NO: 667975 - DNA, 120 bp, Artificial Sequence
  ENSG00000185252_11 (sequence is synthesized)
cggcaaggccttcacctggagcaccaaccttctggagcaccggcgcatccacaccggcgagaagcccttcttctgcggcgagtgcgggaaggccttcagctgccactcgtccctcaacgt

SEQ ID NO: 667976 - DNA, 120 bp, Artificial Sequence
  ENSG00000185252_12 (sequence is synthesized)
gcaccagcgcatccacacgggcgagcggccctacaagtgcagcgcctgcgagaaggccttcagctgcagctcgctgctcagcatgcacctgcgggtgcacaccggcgagaagccctaccg

SEQ ID NO: 667977 - DNA, 120 bp, Artificial Sequence
  ENSG00000185252_13 (sequence is synthesized)
gtgcggcgagtgcggcaaggccttcaaccagcgtacacacctcacacgccaccaccgcatccacacgggcgagaagccctaccagtgcggctcctgcggcaaggccttcacctgccactc

SEQ ID NO: 667978 - DNA, 120 bp, Artificial Sequence
  ENSG00000185252_14 (sequence is synthesized)
atccctcaccgtgcatgagaagatccacagcggggacaagccgttcaagtgcagcgactgcgagaaggccttcaacagccgctcgcgcctcaccctccaccagaggacgcacacgggcga

SEQ ID NO: 667979 - DNA, 120 bp, Artificial Sequence
  ENSG00000185252_15 (sequence is synthesized)
gaagcccttcaagtgcgccgactgcgggaagggcttcagctgccacgcgtacctgctcgtgcaccggcgcatccacagcggcgagaagcccttcaagtgcaacgagtgcggcaaagcctt

SEQ ID NO: 667980 - DNA, 120 bp, Artificial Sequence
  ENSG00000185252_16 (sequence is synthesized)
ctgcagccagtgttggaaggccttcagctgccactcgtccctcatcgtgcaccagcgcatccacaccggtgagaagccctacaagtgcagcgagtgcggcagagccttcagccagaacca

SEQ ID NO: 667981 - DNA, 120 bp, Artificial Sequence
  ENSG00000185252_17 (sequence is synthesized)
ctgtctcattaaacatcagaaaatccactccggggagaagtcgtttaagtgtgagaaatgtggggagatgttcaactggagctcgcacctcactgagcaccagaggctgcacagcgaggg

SEQ ID NO: 667982 - DNA, 120 bp, Artificial Sequence
  ENSG00000185252_18 (sequence is synthesized)
gaagcccttggccatccagttcaacaaacacctgctcagcacatactacgtgcctggcagcctgctgggtgcaggggatgctggactgagggacgtggatcccatcgacgcgctggatgt

SEQ ID NO: 667983 - DNA, 120 bp, Artificial Sequence
  ENSG00000185252_19 (sequence is synthesized)
ggcaaagctcttgtgcgtggttccccccagagctggcaggaatttctccctggggagcaaacctcgaaactaacatgatgtgctttggtgtcagtagctgctttctgagctactcaacaa

SEQ ID NO: 667984 - DNA, 120 bp, Artificial Sequence
  ENSG00000185252_20 (sequence is synthesized)
ggaaagcaccctggtcctccctggctcctagatccagaccaccttcctccaggtgtgggagccttgccttatcacccccatcaggtctgcatgccagggtgcctcctctagttaaagtca

SEQ ID NO: 667985 - DNA, 120 bp, Artificial Sequence
  ENSG00000185252_21 (sequence is synthesized)
gtcacctccccagaagggccacactccaggaggagtgttgagagtcatttgaggtagtcttgccacctgttttccttgatgggcctggaagttgttgacaaggggaaagatctttcttgc

SEQ ID NO: 667986 - DNA, 120 bp, Artificial Sequence
  ENSG00000185252_22 (sequence is synthesized)
caataaaaagaagggatatcgttgggtgccatggctcacacctgtaatcttaacactgtgggaggccaaggcaaggggatcacttgagcccaggagtctaggaccagcctggacaacatg

SEQ ID NO: 667987 - DNA, 120 bp, Artificial Sequence
  ENSG00000185252_23 (sequence is synthesized)
tgagcccaggagtctaggaccagcctggacaacatggtgagacctcgtctctacaaaaaatgcaaaaattagccagatgtggcggcatgtccctgtggtcccagctactcaggaggctga

SEQ ID NO: 667988 - DNA, 120 bp, Artificial Sequence
  ENSG00000185252_24 (sequence is synthesized)
gcagtgagccatgattcacagcactgcactgcagcctgggtgacaaagcaagaccctgtgtgaaattaaaaggaggtatatcaactgttgtatcctcggacgggctcctgacacggcttt

SEQ ID NO: 667989 - DNA, 120 bp, Artificial Sequence
  ENSG00000185252_25 (sequence is synthesized)
aatcaggagtttcctccataaactattattttcagaataataataaaacaagaattatgactagcatcactttccagtgaacattattatattgctagagaggagaataatcttgggtgg

SEQ ID NO: 667990 - DNA, 120 bp, Artificial Sequence
  ENSG00000185252_26 (sequence is synthesized)
tgggcatttggaaaaagtgaatttcctggacttaactcatgtaaatagctctactgcagagctgtgtgtttagtgacagtgcagtcaggggcattcccacagctgtcacagcacggccca

SEQ ID NO: 667991 - DNA, 120 bp, Artificial Sequence
  ENSG00000185252_27 (sequence is synthesized)
gcatcattgtagccagatcctaacatgccaacatcacctcttgccatttagcccctagtgagaaattgggagctaccaggcaggtgcccagtgcattcagggaagatgggcacaacatca

SEQ ID NO: 667992 - DNA, 120 bp, Artificial Sequence
  ENSG00000185252_28 (sequence is synthesized)
ggatgggtgtgtctggaagctcctcttcactgaccagggctgggcagggccaccctgggctggtgaggctgccctgcagggcttctcactatgtagcaccagtcaccagcccaggtcaca

SEQ ID NO: 667993 - DNA, 120 bp, Artificial Sequence
  ENSG00000185252_29 (sequence is synthesized)
gaagaagcccctcccagcacccactggagaggggaagctgaagcccagggagacgggctccatggtggtcccacatggagctgttttgcaaaccctggaaaaggcggctctccctgtccc

SEQ ID NO: 667994 - DNA, 120 bp, Artificial Sequence
  ENSG00000185252_30 (sequence is synthesized)
aacactcttcagagacaggaagacagagttaatcttgaatgaatgttatttctacttagtcctaagcaagaataagctgccctcttggtgatcatactttatacggagtgctatcgttta

SEQ ID NO: 667995 - DNA, 120 bp, Artificial Sequence
  ENSG00000185252_31 (sequence is synthesized)
tgaaatgctttcagtatgctttttaaattatgcaggcaaaataaccacacttcagaaaatgtggacttctgaaaaataaaatccccataattcttaataaaactgccttttgcactttga

SEQ ID NO: 667996 - DNA, 120 bp, Artificial Sequence
  ENSG00000185252_32 (sequence is synthesized)
gcttcactcttgtagtcagtatgtctgtggatttgcacttgaggatattgacactcagagagatcaggccagtttcccagaagcatccagcatctttttttttttttttaaatggaatct

SEQ ID NO: 667997 - DNA, 89 bp, Artificial Sequence
  ENSG00000185252_33 (sequence is synthesized)
aagcatccagcatctttttttttttttttaaatggaatctcactctgtcacccaggcgggagtggtgcaatggcttgatctccactatt

SEQ ID NO: 667998 - DNA, 120 bp, Artificial Sequence
  ENSG00000185252_34 (sequence is synthesized)
caggcgtgagccatcgctcctggcctcctgcttctttcttccccgcgcccaatcatttgttcccactcagacgtgcttgattgggggtagcagctcttttcgtcatgaattggagtgtct

SEQ ID NO: 667999 - DNA, 120 bp, Artificial Sequence
  ENSG00000185252_35 (sequence is synthesized)
gagacacaggcagattattcctcgatgctgtttctgttggtgctagctactggggctcgttccccacctggccttgctggcaggttctgcctcctctctgattctcacttgtgccacgac

SEQ ID NO: 668000 - DNA, 90 bp, Artificial Sequence
  ENSG00000185252_36 (sequence is synthesized)
ttggagtgtttaaactattcgcatttagtgtaattattaatatggttggatttacatgtcctttttttttttttcttttgacagagtttg

SEQ ID NO: 668001 - DNA, 86 bp, Artificial Sequence
  ENSG00000185252_37 (sequence is synthesized)
ccacctcttgggttcaagcaattctcctgacctcaggtgatctgccaccttggcctccccggccttgctattagttttctatgtct

SEQ ID NO: 668002 - DNA, 120 bp, Artificial Sequence
  ENSG00000185252_38 (sequence is synthesized)
ccttgctattagttttctatgtcttatgtcttttttgtttctcatttcctcccttaatgacttcttttgaggtaaacacatactgttctaatatactcttaattcctctgatttcattaa

SEQ ID NO: 668003 - DNA, 120 bp, Artificial Sequence
  ENSG00000185252_39 (sequence is synthesized)
tatttttcaccttttagttatttgattggatgctggacattgtgaattttactttgttgagtaggtttttggaattccttgtttctgggatttgttctgggatgcagtgaaattacttgg

SEQ ID NO: 668004 - DNA, 120 bp, Artificial Sequence
  ENSG00000185252_40 (sequence is synthesized)
catctatttgatcctttcaaggatcaaagcaagtctggagttgggtggtggccaggatgcccaggcccagggggagcaggcaggaaggattggaaggcagtcaggtgaggactgcaggta

SEQ ID NO: 668005 - DNA, 120 bp, Artificial Sequence
  ENSG00000185252_41 (sequence is synthesized)
gcctctcttagtcccttggggcacagaacttgctgatatatacaaggtttccttccttagagtgtaataacagtttctagtctgggatcggatccttttgcgttactgagctttgaatag

SEQ ID NO: 668006 - DNA, 120 bp, Artificial Sequence
  ENSG00000185252_42 (sequence is synthesized)
agttgctgggatttttgtactattaatattctctcaaatttttaagtttgaaattcttgactccaggaagcatagcatctcacccaggacttagagcctgatacaacagccatgtacagc

SEQ ID NO: 668007 - DNA, 120 bp, Artificial Sequence
  ENSG00000185252_43 (sequence is synthesized)
ccctgggtcccaccgcaagttgccagggccctgtggtgtctattcagacctgctttcccaatctagaaggtggtgtgggaatgcatgccaattcccagcccccctccctgcccctggtcc

SEQ ID NO: 668008 - DNA, 120 bp, Artificial Sequence
  ENSG00000185252_44 (sequence is synthesized)
ccgaattcagtcatggtcagtgtctacagcacaaccttctggcatgggagaaggtcacctgaggttaaccctttacttgtagggtccttaatcaatctctggctcctttggaaccatgga

SEQ ID NO: 668009 - DNA, 120 bp, Artificial Sequence
  ENSG00000185252_45 (sequence is synthesized)
cccttcagtgccggccctggtgccagatatatcatggggtgggaagcaaggcctgtgccttggggcactcatggccaggggcctcggccacgccagaagtccccaagggacagcgtggga

SEQ ID NO: 668010 - DNA, 120 bp, Artificial Sequence
  ENSG00000185252_46 (sequence is synthesized)
gctggtagcatccttgcttggtgtttcccctggtcctgggataggggcagggagagaagagaagaaggtgggaccctggagcccagctggctctggaacagtcctcaagcaatgaagtaa

SEQ ID NO: 668011 - DNA, 120 bp, Artificial Sequence
  ENSG00000185252_47 (sequence is synthesized)
ggacgtcagcacacgtggggtcttcagagtatacactgggatttgggttccagtctgagaccctcactgcttttggcccagaggacctcctgttcccagagagggtgtccacttcacagg

SEQ ID NO: 668012 - DNA, 120 bp, Artificial Sequence
  ENSG00000185261_0 (sequence is synthesized)
tacctggtgcagagcttgagtctggccagcgggtcaggctcttgctagatcagcaccggaggtggaagactgaatggattgggatgatgaatattctcataattcttttgacctacattg

SEQ ID NO: 668013 - DNA, 120 bp, Artificial Sequence
  ENSG00000185261_1 (sequence is synthesized)
tttgttaaactcatttcctggagacttggagtttgagcagatcttcagtgacattgatgaaaagattgaacaaaatgctgcaagcataaaacattgcattaaagagatacagtccgaaat

SEQ ID NO: 668014 - DNA, 120 bp, Artificial Sequence
  ENSG00000185261_2 (sequence is synthesized)
taacaaacaatgtccaggtgtgcagctgcaaacaacaactgactgctttgaatggctaactaactataattacagtacatctgaatcatctttcatttctcatggagacttgataaaatt

SEQ ID NO: 668015 - DNA, 120 bp, Artificial Sequence
  ENSG00000185261_3 (sequence is synthesized)
tttcaaaacactgcaagatttgttgaagaatgaacaaaatcaagaagaaatgacattggatttactttgggacctctcctgccacagcagcgtttcattcccatcaaccctaagtggaac

SEQ ID NO: 668016 - DNA, 120 bp, Artificial Sequence
  ENSG00000185261_4 (sequence is synthesized)
atctttccatttcctctctaggacgtctcttcattctgttgaagataattcctctatggatgtcaagtctatgtgggatgatataagactgcatcttcgacgcttcttagtgagcaaatt

SEQ ID NO: 668017 - DNA, 120 bp, Artificial Sequence
  ENSG00000185261_5 (sequence is synthesized)
acaaagccataatgaaataaacaattcacagcaaaaaattttattgaaaaagcagtgcttacaacaactcttgtttctttatccagaatcagaagttataatcaaataccaaaacataca

SEQ ID NO: 668018 - DNA, 120 bp, Artificial Sequence
  ENSG00000185261_6 (sequence is synthesized)
gaataaactgttggctaatcttctgtggaactgctttccttcttacaacagagattcaaatttagatgtaatagctcatggatatcaaagtacaatgcttaagttatactcagtaataaa

SEQ ID NO: 668019 - DNA, 120 bp, Artificial Sequence
  ENSG00000185261_7 (sequence is synthesized)
agaggattttaacacactatgtgaaattttagctccatcttcaatggtgaaattcattaaagaaacttacctggatactgttacagaagaaatggcaaaatttcttgaaaatttttgtga

SEQ ID NO: 668020 - DNA, 120 bp, Artificial Sequence
  ENSG00000185261_8 (sequence is synthesized)
gctgcagttcagagaaaatgctgttcgtgtggttaaaacaagcaagagctccagcaagcatagaggagcagtgcatgctttggttactactgaatgcccacagaaaggaagaaacttctc

SEQ ID NO: 668021 - DNA, 120 bp, Artificial Sequence
  ENSG00000185261_9 (sequence is synthesized)
tctccctttagacaaagtcgaattcttatcgcagctcataaaatcctttatgaaactggaaaaaggtgttcaagaattgtttgacgaaatacttttatcactcaagataaccagggatac

SEQ ID NO: 668022 - DNA, 120 bp, Artificial Sequence
  ENSG00000185261_10 (sequence is synthesized)
ttcaggaattttggagaaatccgatagagaggttgtaatggaaaaacctagagcaaacgaaaccaatattccttccgagcaatcactaccaggaaaagaggctaccttactagattttgg

SEQ ID NO: 668023 - DNA, 120 bp, Artificial Sequence
  ENSG00000185261_11 (sequence is synthesized)
ctggagaagtgcatttaaagaagtgtctcttcccatggcgcactgcgtagtaactgcaattgaaggtttttccacaaaaattctccaacaggaacagaatgaaaggtcttcagctgtgag

SEQ ID NO: 668024 - DNA, 120 bp, Artificial Sequence
  ENSG00000185261_12 (sequence is synthesized)
ctatgctatgaaccttgtaaatgtccagcaagtttggcaagacagccatatgtttcctgaggaggaacaaccaaagaaaattggaaaattttgttctgacatcatggaaaaacttgacac

SEQ ID NO: 668025 - DNA, 120 bp, Artificial Sequence
  ENSG00000185261_13 (sequence is synthesized)
aatgcttccactggctctggcatgcagagatgattcttttcaggaaattagagcaaacttggtggaggcctgttgtaaagtggcaacagctgtcctgcagagactgcaagagagagccaa

SEQ ID NO: 668026 - DNA, 120 bp, Artificial Sequence
  ENSG00000185261_14 (sequence is synthesized)
ggaggttccttccaaagcacccctgaaaaacttgcacacatacctctccacagcggtgtatgtcttccagcatttcaagcgatatgataatttgatgaaggaaatgactaaaaaacccat

SEQ ID NO: 668027 - DNA, 120 bp, Artificial Sequence
  ENSG00000185261_15 (sequence is synthesized)
attcctggtgcttgtccaacgatatcaggaattcatcaacactctacagtttcaggttacgaactactgcgtcagagtttgtgctacaagcattttacaggatgctgagagccaccactg

SEQ ID NO: 668028 - DNA, 120 bp, Artificial Sequence
  ENSG00000185261_16 (sequence is synthesized)
ggatgactacaaagctttttatgagggggaaagatgttccttctcgatccagatgtggcattatttctgctggtctcttcattacgatctctggaccattctgcctcctaagttagccca

SEQ ID NO: 668029 - DNA, 120 bp, Artificial Sequence
  ENSG00000185261_17 (sequence is synthesized)
ggagattctagtggaagtgctggagaaatctttgagtctactggcctccagatacgctcgggcccaccccagccgtaaaagaactccacagttaagacttgatgtcacaacaattttgat

SEQ ID NO: 668030 - DNA, 120 bp, Artificial Sequence
  ENSG00000185261_18 (sequence is synthesized)
atgcactgagaacatgttatggtcagtttgtacatctgtacagaaacttttgaatcctcatcagcatacagatgataaaatttttaaaattcacactcattgtaataatctgtttacaac

SEQ ID NO: 668031 - DNA, 120 bp, Artificial Sequence
  ENSG00000185261_19 (sequence is synthesized)
attagtcattttgacttcaccattaacagaattatataagacttttcagcatggcctggatgagtctgcttcagattccttaaaatcattttttaagcaaccattatattgggtttcttg

SEQ ID NO: 668032 - DNA, 120 bp, Artificial Sequence
  ENSG00000185261_20 (sequence is synthesized)
ttactcaggactccatcagctggaggactgaaagccgagggtcagttgaaactgctcttatcccagccacgttgtaactggaacttgcttctggaaaccctactgcatcatgatggactt

SEQ ID NO: 668033 - DNA, 120 bp, Artificial Sequence
  ENSG00000185261_21 (sequence is synthesized)
ttactgagaatcttgctgaagagctcaaaacaagtttccgacacagaaaataacctgaaccaaggacccagcttgatggaagccatctttaaaatattgtaccattgcagtttttctcca

SEQ ID NO: 668034 - DNA, 120 bp, Artificial Sequence
  ENSG00000185261_22 (sequence is synthesized)
caaacatttgcaaacgtttttgtgagctacatggaagaagagcaattatgggactttttatataacatcccagtctcaacgtgcgtggagtacgagctagaggtcatccgatgcttgaga

SEQ ID NO: 668035 - DNA, 120 bp, Artificial Sequence
  ENSG00000185261_23 (sequence is synthesized)
ctggcactgaccgatgccatcaaggacactgtacagcagatagtatctgtaatgagttctaggagaaactgtgagacaaacctaaacaagcacattgttcctgattgtttgcttgagagc

SEQ ID NO: 668036 - DNA, 120 bp, Artificial Sequence
  ENSG00000185261_24 (sequence is synthesized)
atgccaaaggaatggaattatagtccaaaagaaactaacaggaaagaatcatgcaaaagcttcacaaggcttactgctcaggcagtatctattgtaatcagcaagttacctacggtgatt

SEQ ID NO: 668037 - DNA, 120 bp, Artificial Sequence
  ENSG00000185261_25 (sequence is synthesized)
gcatgtttgcctcccccagttaaatacttcttttttctgtctgagagaaaaatgtcaaaaaaatttgttgaattgaagaaagctggcctgcttgtctggaacttgattgtaattatatgt

SEQ ID NO: 668038 - DNA, 120 bp, Artificial Sequence
  ENSG00000185261_26 (sequence is synthesized)
cggatatttgaggacggaaacactgtggaacttttaacaggtgcctctcttgacagatggagtaaagaaaaattgggtttaatttgtatgtgtttgaaaagcatcatgggagaccagaca

SEQ ID NO: 668039 - DNA, 120 bp, Artificial Sequence
  ENSG00000185261_27 (sequence is synthesized)
agtatccataatcaaatgatccaaaaggtcatacagagcattgagcagcagaagcccaactggattgaacgtcaattgttgaaagcaaggaaactgagcactgaatgtgcatttatgaca

SEQ ID NO: 668040 - DNA, 120 bp, Artificial Sequence
  ENSG00000185261_28 (sequence is synthesized)
atagagaaaagcacggccttacaagaaggagatgttgctcttgaactgactgagcagaaaataaacacgatggtcctggatctctgccacaaaccaggtggcagggagtacctgaggcaa

SEQ ID NO: 668041 - DNA, 120 bp, Artificial Sequence
  ENSG00000185261_29 (sequence is synthesized)
atttatcacatcatgcagctcaatgaggaatatttaaaagaacagctgttttctatgaatagttcagaggaaaagccattacccatccgacctttaaagacgaccttgaggagtatagaa

SEQ ID NO: 668042 - DNA, 120 bp, Artificial Sequence
  ENSG00000185261_30 (sequence is synthesized)
gatcagccttctgcctttaaccctttccatgtgtataaggcgtttagtgaaaacatgctagatcagtcagccatcacaaaatggaactggaattgggcaaagttgctgccaaattatctg

SEQ ID NO: 668043 - DNA, 120 bp, Artificial Sequence
  ENSG00000185261_31 (sequence is synthesized)
agactggataagatgaccttcagtgtgctgctcaaaaacaggtgggaaatgaagaaggatgaaacactagaagaggaagaaaaagcaatactggagcacttaaaacaaatttgcacccca

SEQ ID NO: 668044 - DNA, 120 bp, Artificial Sequence
  ENSG00000185261_32 (sequence is synthesized)
cagaactcttctgcctcagataacatagaggaacagtaatctgcagaaaacagcaacagctttattttaggaaacaatcccatgtaatggagtaggattttttaccatagtcagaatgaa

SEQ ID NO: 668045 - DNA, 120 bp, Artificial Sequence
  ENSG00000185261_33 (sequence is synthesized)
cctcatatgtgctgtgaagcatgaaaccaatgactgagtaatctctgtactgaaaaggaatacagcacataaaggataaggtgctacatatttttttattttaaaaataatttcaaatgt

SEQ ID NO: 668046 - DNA, 120 bp, Artificial Sequence
  ENSG00000185261_34 (sequence is synthesized)
ttttctttccccaatctttctctttatatgatataactgctgccatctcgtgttccctttgaattatttttttctcctttcagtcttgaagtatctatgacaacaggaagaaatgttcag

SEQ ID NO: 668047 - DNA, 120 bp, Artificial Sequence
  ENSG00000185261_35 (sequence is synthesized)
aaattttttaaaggattttttaaatacaacatttggatgttaagttgagtggagtcacatagccccaggaggtcatctgaaatttttaatttaattttgttgtagctgtagcccaagtcc

SEQ ID NO: 668048 - DNA, 120 bp, Artificial Sequence
  ENSG00000185261_36 (sequence is synthesized)
caattttaattgcctttactatccacaattgtgtcaactttcctcattcaatttatctaattatagtcaaaaaaaagcattctcctgaactataactttagtcacacctctgcttgtagt

SEQ ID NO: 668049 - DNA, 120 bp, Artificial Sequence
  ENSG00000185261_37 (sequence is synthesized)
ggttttcagtcttcctcctaaaccagaatcaaatttctactcatacatattcaggtcctataccaaatggctccatgttcagacaattgcttgccatcctcttggttcaagtcacatgct

SEQ ID NO: 668050 - DNA, 120 bp, Artificial Sequence
  ENSG00000185261_38 (sequence is synthesized)
tgccatgttttcccaatcagaatccatctttcttccaaaattaggctcaaaactaattccagcaatctttaccccaaagctcattagctcatataatgtgttactttaaaattttttcat

SEQ ID NO: 668051 - DNA, 120 bp, Artificial Sequence
  ENSG00000185261_39 (sequence is synthesized)
tgtattgatacacacacacaaaataagaaaacagaacatgctctagtaccctctctgccaaggacaattatagatatttattatttccttcctatcactgcctgatattagattataaag

SEQ ID NO: 668052 - DNA, 120 bp, Artificial Sequence
  ENSG00000185261_40 (sequence is synthesized)
acattgaagatattatgatataatatgaagtctccctttataactccctgtatgcctactacagtgttatttcatcaagtggacagttaacgaacacaattgattaaatagctgccaatg

SEQ ID NO: 668053 - DNA, 120 bp, Artificial Sequence
  ENSG00000185261_41 (sequence is synthesized)
atagatacttatatgtacctttaaagatgtttagaagttgtattgatactggttttgctgaatctgttgttggtgaaagtttaccttacattttttcagtataaagccttctgttgggaa

SEQ ID NO: 668054 - DNA, 120 bp, Artificial Sequence
  ENSG00000185261_42 (sequence is synthesized)
tcattaattattggttcctgtaaaatttcatatactttgggacaagatgcaagggaggtggaagggaaaagattttctttttttattaattagggaatgttctatcataaaaatttattt

SEQ ID NO: 668055 - DNA, 120 bp, Artificial Sequence
  ENSG00000185261_43 (sequence is synthesized)
taatatttatcacagattatgttttgctattgagcatataagatattagtaagatgtgaaaagtattttgtgattcttgggtgcatttattcagcaaattaatggacaatactattggtc

SEQ ID NO: 668056 - DNA, 120 bp, Artificial Sequence
  ENSG00000185261_44 (sequence is synthesized)
gattttcttcagatgtataaggcatttattattatgaccatagtgtgtctctctacaaggcaagcatatcctgtgattcctttggagagaatatatttttcccatctgtattgttcttct

SEQ ID NO: 668057 - DNA, 120 bp, Artificial Sequence
  ENSG00000185261_45 (sequence is synthesized)
tccttcagctagagagaataataaaggcagtgcaggttgtatatttgaacaggaagttttgatgggttgccccaccctctggcaggcgtaaaaattctcacattgtcttatccttaatat

SEQ ID NO: 668058 - DNA, 120 bp, Artificial Sequence
  ENSG00000185261_46 (sequence is synthesized)
tctgcctttaaattttcatatttaatatcttgtgaaaacaaaggatgaaaacttagacaatgatttttattattatcctgctattcaaatagtgatttttatcatttacatttagttttc

SEQ ID NO: 668059 - DNA, 120 bp, Artificial Sequence
  ENSG00000185261_47 (sequence is synthesized)
aacctgtaagctttcttttatcctgctttggaacctgaattttcataaaatatttcctaggctccatataaaagatctaactagttcataatcatggtttcactcctcccagactttttg

SEQ ID NO: 668060 - DNA, 120 bp, Artificial Sequence
  ENSG00000185261_48 (sequence is synthesized)
actatcctccagatattacttgaatatcattctagctgttttacagtcattatgtttcattttctcttggccattatccctataaactagcaatagataactttatgttatgatttccaa

SEQ ID NO: 668061 - DNA, 120 bp, Artificial Sequence
  ENSG00000185261_49 (sequence is synthesized)
agtccaaatctgtcatttaaagtttctgtaataatgatctctttttaaaatgttatctcctagttgccatgcattcccttactgcttcttgcttcccaaaggaagggcatattcctaggt

SEQ ID NO: 668062 - DNA, 120 bp, Artificial Sequence
  ENSG00000185261_50 (sequence is synthesized)
aaaaaggctgaattagaagcttgttgtgtttctgatgtagtctttattgaattgaaagaaaaacgaacttgaaagttctgccaccctctgctgattttagttgtttctggggaagtaaga

SEQ ID NO: 668063 - DNA, 120 bp, Artificial Sequence
  ENSG00000185261_51 (sequence is synthesized)
tacttaaaataacctagaagatataaatggatttcaggtgctgctaggcaaaataaaactgtttcttgctcctaatttgacatctctccatgtatgtagtgagcaaaccctcccctacat

SEQ ID NO: 668064 - DNA, 120 bp, Artificial Sequence
  ENSG00000185261_52 (sequence is synthesized)
ggtcagacaagtctctggaaacagacgttatacatattcacagagcctgaattatatgtgaaagctcaaaggggcagaacttcaaatgggtgaaactcccttctcctttatacaagttgt

SEQ ID NO: 668065 - DNA, 120 bp, Artificial Sequence
  ENSG00000185261_53 (sequence is synthesized)
tgctccataaacattaaatattctctggaacctgatacctgcagtggttatgagggtctgaagttttctcttttctctcccatttaagtctttgaaaatatctttttttttttctgttag

SEQ ID NO: 668066 - DNA, 120 bp, Artificial Sequence
  ENSG00000185261_54 (sequence is synthesized)
caatcatggttattttaaaaaccctaataagataatacaaggtactaattcataacgaaattaagccttttactatgacttttgtttaatttggaaacataacattgttacaagtaatac

SEQ ID NO: 668067 - DNA, 120 bp, Artificial Sequence
  ENSG00000185261_55 (sequence is synthesized)
agctgagacatgtaatcataatcccgcaatatttacattttattactaatagatctatgcttcagtatctataattaacctacccagattaactaaagtacattattttaaaacttcact

SEQ ID NO: 668068 - DNA, 120 bp, Artificial Sequence
  ENSG00000185261_56 (sequence is synthesized)
gctgtagtttcctcctgctaaatcactgtctatgatttctgcacagtttacccataaaacatcacagtcttatcattttagggtaaaaggacaaagatgaagtggtatcttcatcttatt

SEQ ID NO: 668069 - DNA, 120 bp, Artificial Sequence
  ENSG00000185261_57 (sequence is synthesized)
gttgagtaaacaaaaagcagaaatattaagagagttgcctaagactgtccaccaattaagttggacaagacttagcacaagaaaccagatctcctctctcctaaggcagcagtccccaac

SEQ ID NO: 668070 - DNA, 120 bp, Artificial Sequence
  ENSG00000185261_58 (sequence is synthesized)
accagttttgtggaagacagtttttccaccaggagggggatggatgaaaccgttccacctcagatcatcaggtattggttagattctcataaggagcaaacaaccaagatcccttgcatg

SEQ ID NO: 668071 - DNA, 120 bp, Artificial Sequence
  ENSG00000185261_59 (sequence is synthesized)
atcccttgcatgtgcagttcacaataggatttgtgctcctatgagaatctaacatgcttctgatttgacaggaggggaagctcaagcagtaatgctcacccacctgctgctcacctcctg

SEQ ID NO: 668072 - DNA, 120 bp, Artificial Sequence
  ENSG00000185261_60 (sequence is synthesized)
cctgctgtgcggcccagttcctaacaggtcacgaacctgtactggtctgcagtctaggggttggggaccctgtcctaggccatgttatttctcatttttttctattagactaaatttttt

SEQ ID NO: 668073 - DNA, 120 bp, Artificial Sequence
  ENSG00000185261_61 (sequence is synthesized)
gagacactacttttatgaacatacgaattcagtaatgaattatacaatctgattttatacttagaattctatctaacacataactctttagactggacataagctagggagggatgacaa

SEQ ID NO: 668074 - DNA, 120 bp, Artificial Sequence
  ENSG00000185261_62 (sequence is synthesized)
gaaggaaaatacccacttaagattactacaaaagctataagtacaacaaataattaagtcagtgacctaatgtgggtgtttctaaggccaatgcactctgtaagaaataaatttgctaac

SEQ ID NO: 668075 - DNA, 120 bp, Artificial Sequence
  ENSG00000185261_63 (sequence is synthesized)
aatcattggacacctatgttttcaaagtagatcaagcattattcagttagacaaatgaaaatatcaaagcatacattacctcagctggtttttaagacaatgtcagaacaggcttgtaaa

SEQ ID NO: 668076 - DNA, 120 bp, Artificial Sequence
  ENSG00000185261_64 (sequence is synthesized)
tgaggcaaatactgtcaaaaatgcccatctaatatgatagtaatatactcaaaaagtattgtttacttggctcctcgataatggcattgggcttacttttgttttctgaatcagttttct

SEQ ID NO: 668077 - DNA, 120 bp, Artificial Sequence
  ENSG00000185261_65 (sequence is synthesized)
taactttctcccaacctttgggaaaaaagttttccataacctagcaaaattaagggttgagattcaaagtttccactttggttttctactcctcctcagcctcataaagacctttaagaa

SEQ ID NO: 668078 - DNA, 120 bp, Artificial Sequence
  ENSG00000185261_66 (sequence is synthesized)
gtgttgtctagagagcatatatatgctatattgtctgcctgttgccaaaattaatttacagtgccttaccttcctatcagacacagtgattgtctctattacctacataaatacctgcgc

SEQ ID NO: 668079 - DNA, 120 bp, Artificial Sequence
  ENSG00000185261_67 (sequence is synthesized)
catagtataggtagattttaaatgtaagctttcacatattgaaaggctgtctttgttctatgttgtaactaatcatgtattctgagccttttgtcaccagtttgtttgcaatccacctta

SEQ ID NO: 668080 - DNA, 120 bp, Artificial Sequence
  ENSG00000185261_68 (sequence is synthesized)
aaaatgttttaaaatatatttattgattgaatacaataaaattcactcatttcaagtgaagagttcagtaagtttgaccaatgtataaatctgtgtgacaaccacaacgataaagatatg

SEQ ID NO: 668081 - DNA, 120 bp, Artificial Sequence
  ENSG00000185261_69 (sequence is synthesized)
gaacattttatgtcatctccaaaggttctttcattccccctttgccgtccattctcctttcaactctcagccccaggaagacactgacctgctttttgtcgtgatagtttacttttgata

SEQ ID NO: 668082 - DNA, 120 bp, Artificial Sequence
  ENSG00000185261_70 (sequence is synthesized)
ttctagaatttcatataaatagaaatctatatattcttttgtgtctagcttcttttgctcagcttaatgtttttgataattttatattatgctttatcattagtttatttctgctcattg

SEQ ID NO: 668083 - DNA, 120 bp, Artificial Sequence
  ENSG00000185261_71 (sequence is synthesized)
ctgagcagtatttcactgagtagtactttttttatccacttaccagttgggtggacattttgattatttctagtttttggctacgatgaataaagctgctatgaatactagtgtataagt

SEQ ID NO: 668084 - DNA, 120 bp, Artificial Sequence
  ENSG00000185261_72 (sequence is synthesized)
gtataagtctttgtgggactacagtcatccctcagtatatgtgaggaattcattccaggaaccattccccttcttaaaaaatccatatactcggccaagcatggtggctcacgcctgtaa

SEQ ID NO: 668085 - DNA, 120 bp, Artificial Sequence
  ENSG00000185261_73 (sequence is synthesized)
ctccggagccgtcgccagggtggtaatacctggtgcagagcttgagtctggccagcgggtcaggctcttgctagatcagcaccggaggtggaagactggtacattttacatactttggga

SEQ ID NO: 668086 - DNA, 120 bp, Artificial Sequence
  ENSG00000185261_74 (sequence is synthesized)
aaaaaaaacgttgctgaagttactagaaaagagacagttcttctgctgacaactcttcaggaaataattttctacctccttaggattcgaagaccagttcattcttagtgtcttctgaaa

SEQ ID NO: 668087 - DNA, 120 bp, Artificial Sequence
  ENSG00000185261_75 (sequence is synthesized)
aaatctcactgcaaacatgaaaattagaaaatgaatgtaatgaaattttgcagtatacatttctcatgcatttttttctataattgtagttataaaagtattttctttcttattaaattg

SEQ ID NO: 668088 - DNA, 120 bp, Artificial Sequence
  ENSG00000185261_76 (sequence is synthesized)
ttaaagatattggaaatataagccaaaaatactttaaataagagtttaatttctcttgattgcatatgacaaacagtatttgtgaaactgtgtgtatacacacatatatataaatgagta

SEQ ID NO: 668089 - DNA, 120 bp, Artificial Sequence
  ENSG00000185261_77 (sequence is synthesized)
tgtgaaactgtgtgtatacacacatatatataaatgagtatatatgcttatacacatataagctcctttatctgtttattaaatatacgcatatatataagcacatatactcagttatat

SEQ ID NO: 668090 - DNA, 120 bp, Artificial Sequence
  ENSG00000185261_78 (sequence is synthesized)
ttttaatccattgtatcttccaaagctaaagcattattaggtaaaaagaatttttgaaaatttgttgaaatttgcagtaaaattggatatttaaaagttgtaatattttagtcagtcaat

SEQ ID NO: 668091 - DNA, 120 bp, Artificial Sequence
  ENSG00000185261_79 (sequence is synthesized)
atgtatacaaataaaagatgatttgaaaatttctattttattcataagataaaggaaaaaaggaaagaagttattgtgatataataaacttttcttattgtggttgtactttcctaccag

SEQ ID NO: 668092 - DNA, 120 bp, Artificial Sequence
  ENSG00000185261_80 (sequence is synthesized)
tggagaaaaatcagggtaaaaataggattatttctaaaattatcattagttatgcttttatataaaatctgaggtgtatttctgaataagttcataaactatatggcttaagtatttgaa

SEQ ID NO: 668093 - DNA, 120 bp, Artificial Sequence
  ENSG00000185261_81 (sequence is synthesized)
aattattatttggtgaattatggatctttgaatttatgatcatctttttaaaattcctatagctcactatacttgtgcgtatcttcattaataaaatttcagttgaccaaattaatgtga

SEQ ID NO: 668094 - DNA, 120 bp, Artificial Sequence
  ENSG00000185262_0 (sequence is synthesized)
tccggccggagacgccgggccccgcgccgcgccgcgccatgtcggtgaacatggacgagctgcggcaccaggtcatgatcaaccagttcgtgctggccgcgggctgcgcggccgaccagg

SEQ ID NO: 668095 - DNA, 120 bp, Artificial Sequence
  ENSG00000185262_1 (sequence is synthesized)
cgaagcagttgctgcaggcggcccactggcagttcgagaccgcgctgagcacgttcttccaagaaaccaacattcccaacagccaccaccaccaccagatgatgtgcactcccagcaaca

SEQ ID NO: 668096 - DNA, 120 bp, Artificial Sequence
  ENSG00000185262_2 (sequence is synthesized)
cccctgccacgccgcccaacttccccgatgcgctggccatgttctccaagctccgcgcctccgagggcctgcagagcagcaacagccccatgacagccgcagcctgctccccacctgcaa

SEQ ID NO: 668097 - DNA, 120 bp, Artificial Sequence
  ENSG00000185262_3 (sequence is synthesized)
acttcagccccttctgggcctcgtccccgcccagccaccaggcgccctggatcccgccctcctcccccaccaccttccaccacctccaccgcccacagcccacgtggcccccaggagcac

SEQ ID NO: 668098 - DNA, 120 bp, Artificial Sequence
  ENSG00000185262_4 (sequence is synthesized)
agcaggggggcgcccagcagaaagccatggcggccatggacggccagagatgagactggacgccgccgggcgctgggctggagctgggggcagcccagggttgtggggacacaggagggc

SEQ ID NO: 668099 - DNA, 120 bp, Artificial Sequence
  ENSG00000185262_5 (sequence is synthesized)
ggggggagccggggagggcagggggtttcccgaagatcgcactggaagattttataaaagaatttttgtgggtcggggggacagtaaacttcctgggccacgtgggtccttcaggagttt

SEQ ID NO: 668100 - DNA, 120 bp, Artificial Sequence
  ENSG00000185262_6 (sequence is synthesized)
ttcaggcaagtttttcctctgtttttaatatataactataatatatatgaatagataaatataactaatgtgcgtgagaatgggcctggcacacctggggtgctcgggggtagggctgcc

SEQ ID NO: 668101 - DNA, 120 bp, Artificial Sequence
  ENSG00000185262_7 (sequence is synthesized)
atgctgcagagctgatggagtgatgttgtgggcacaaggcatctgtcagctgcctcctttaacagccatgccttctggaatctggaagaggacaccactcctgcagtcactgggcagcca

SEQ ID NO: 668102 - DNA, 120 bp, Artificial Sequence
  ENSG00000185262_8 (sequence is synthesized)
catagcagctgcaggtcccaggagggcctgaggtcaaagctgtggaaggccctcttggtatcagggctctctccccatggcctcttccccacctctgattgctggttgtggccccatagc

SEQ ID NO: 668103 - DNA, 120 bp, Artificial Sequence
  ENSG00000185262_9 (sequence is synthesized)
tcatcacccctgtctcctgctgaatgtgcagggctgatgtggcactgaggagctgactttggtcaaaggccaggctctgcccagcaggggacttgactgccctgggcgccctgcccctcc

SEQ ID NO: 668104 - DNA, 120 bp, Artificial Sequence
  ENSG00000185262_10 (sequence is synthesized)
cgctgcgtgtccaggtccaaagtggagagcctgcctttgggtttagttcccgaatcagaatcccatctcaccagggcgaaattttaatttaaaaacttaaaaagagacttttctaacttc

SEQ ID NO: 668105 - DNA, 80 bp, Artificial Sequence
  ENSG00000185262_11 (sequence is synthesized)
gttgtcggcccggaaggcgatcggcgcccgcgagcgggtcttacgcgggaccggggccgggaccggctcccctctgcacg

SEQ ID NO: 668106 - DNA, 120 bp, Artificial Sequence
  ENSG00000185264_0 (sequence is synthesized)
gcacttctgggcttcagcacacatcagtgtggttcacgtgtttcctgctgttatgaaagagattggagaggactaagcttggaattgcctgtcccacagcaagaggctatggagctgggc

SEQ ID NO: 668107 - DNA, 120 bp, Artificial Sequence
  ENSG00000185264_1 (sequence is synthesized)
cacggagcagggcccatctgaatgacaaggagggccaacaggacttggacccctggaaagcggcctacagttccttggacacctccaagttcaagaaccagggtctgtcatccccacagc

SEQ ID NO: 668108 - DNA, 120 bp, Artificial Sequence
  ENSG00000185264_2 (sequence is synthesized)
ccctgcccctgggagccagcgctcaaggcagctccctagggcagtgccacttgaaggagattccccctccacccccgactgctgccagcagggattctctgggcatggacccacagtcca

SEQ ID NO: 668109 - DNA, 120 bp, Artificial Sequence
  ENSG00000185264_3 (sequence is synthesized)
ggtccctgaagaatgcgggctctcgatcctcctcgagagagaacagggccacctcgggagagggggctcagccatgccaggggacggatgacggtcccagcttgggggctcaggaccaga

SEQ ID NO: 668110 - DNA, 120 bp, Artificial Sequence
  ENSG00000185264_4 (sequence is synthesized)
agcatcattcctaacaacattcgccacaagtttgggagcaatgtggtggaccagctggtctccgaggagcaggctcaaaaggctattgatgaagtcttcgagggccagaaaagggcaagc

SEQ ID NO: 668111 - DNA, 120 bp, Artificial Sequence
  ENSG00000185264_5 (sequence is synthesized)
tcatggcccagcaggacccagaatcctgtggaaatctcctccgtcttctcagactactatgacctcggctacaacatgcggtcaaacttgtttcgaggggctgctgaggagacaaagagc

SEQ ID NO: 668112 - DNA, 120 bp, Artificial Sequence
  ENSG00000185264_6 (sequence is synthesized)
ctcatgaaggcttcttacacaccagaggtcattgagaaatcagtgagggacttagaacactggcatggcaggaagacggatgatctggggcggtggcaccagaaaaatgctatgaacctg

SEQ ID NO: 668113 - DNA, 120 bp, Artificial Sequence
  ENSG00000185264_7 (sequence is synthesized)
aacttgcagaaagcactggaagagaaatatggagaaaacagcaaatccaagagctccaagtactagttttgacacagtagaggtgtcttctactcaaataaagtgctaacaataaggaaa

SEQ ID NO: 668114 - DNA, 120 bp, Artificial Sequence
  ENSG00000185264_8 (sequence is synthesized)
aaccatccattggtcttcaccagtagttctgcagtggggatctgcacttctgggcttcagcacacatcagtgtggttcacgtgtttcctgctgttatgaaagagattggagaggtgagaa

SEQ ID NO: 668115 - DNA, 120 bp, Artificial Sequence
  ENSG00000185264_9 (sequence is synthesized)
actggaagtgagtccacacttccattgtagcccgtccagactgctgtggactggcagtgcactgggacgtacagagctgccgtgggcacgtcaggactaagcttggaattgcctgtccca

SEQ ID NO: 668116 - DNA, 120 bp, Artificial Sequence
  ENSG00000185267_0 (sequence is synthesized)
ctttccaacctcgaattctgctcagctcgctttggcagcttggtgggcggtgggcgcgggtggcggaggcgattgaagctgctggcccagcatgtggtgcgcgagcccagttgctgtggt

SEQ ID NO: 668117 - DNA, 120 bp, Artificial Sequence
  ENSG00000185267_1 (sequence is synthesized)
ggccttttgcgccgggcttttggtctctcacccggtgctgacgcagggccaggaggccggggggcggccaggggccgactgtgaagtatgtaaagaattcttgaaccgattctacaagtc

SEQ ID NO: 668118 - DNA, 120 bp, Artificial Sequence
  ENSG00000185267_2 (sequence is synthesized)
actgatagacagaggagttaacttttcgctggacactatagagaaagaattgatcagtttttgcttggacaccaaaggaaaagaaaaccgcctgtgctattatctaggagccacaaaaga

SEQ ID NO: 668119 - DNA, 120 bp, Artificial Sequence
  ENSG00000185267_3 (sequence is synthesized)
cgcagccacaaagatcctaagtgaagtcactcgcccaatgagtgtgcatatgcctgcaatgaagatttgtgagaagctgaagaagttggatagccagatctgtgagctgaaatatgaaaa

SEQ ID NO: 668120 - DNA, 120 bp, Artificial Sequence
  ENSG00000185267_4 (sequence is synthesized)
aacactggacttggcatcagttgacctgcggaagatgagagtggcagagctgaagcagatcctgcatagctggggggaggagtgcagggcctgtgcagaaaaaactgactatgtgaatct

SEQ ID NO: 668121 - DNA, 120 bp, Artificial Sequence
  ENSG00000185267_5 (sequence is synthesized)
catttgtgacttgtaattagagagaaaagtgactctctaggatatggacatgttgattaaggataactgggaatgcatcatatttggtctcatgctttttgtgttggtattattcctcag

SEQ ID NO: 668122 - DNA, 120 bp, Artificial Sequence
  ENSG00000185267_6 (sequence is synthesized)
aattttgttacgtgggtttatgagtgaaactaatactactgataacttacatttgcagtgtaccaaaagctaaaagttcctttctcataagtttcttggaatgactatgccagttttcat

SEQ ID NO: 668123 - DNA, 120 bp, Artificial Sequence
  ENSG00000185267_7 (sequence is synthesized)
tgcctgtctcctaaaagtgacctactgacaaattgatggagtaaattgattccaagaaagaagaaggcattcagagactcctctctggatgcaattttaaaatatattggactaaaacaa

SEQ ID NO: 668124 - DNA, 120 bp, Artificial Sequence
  ENSG00000185267_8 (sequence is synthesized)
aagacacaacagtcagcttatctaatgcacaacttcaatcccaaatacagaatcaaaagtttttttcaagtgaattttctgttttcactctatattgtagctctctttggtatcagaaat

SEQ ID NO: 668125 - DNA, 120 bp, Artificial Sequence
  ENSG00000185267_9 (sequence is synthesized)
ggtcaggcaggagtactcgtttttcccattggaagaaaacccacttaaacctacttaaagaaaatagagagatcaagaaaccgtataagtatagccaatgtttggcaattatatcaacat

SEQ ID NO: 668126 - DNA, 120 bp, Artificial Sequence
  ENSG00000185267_10 (sequence is synthesized)
ttacattgttaattgaaccaagctcaaggtctttttcattccttacagtcacatatcagacaagtttttgatggaagattaaagcatattaaaaacactcataggcaacttggaacttta

SEQ ID NO: 668127 - DNA, 120 bp, Artificial Sequence
  ENSG00000185267_11 (sequence is synthesized)
gtggtggccttttgcgccgggcttttggtctctcacccggtgctgacgcagggccaggaggccggggggcggccaggggccgactgtgaaggtaaagaagcttgtgtaatcgcagaggaa

SEQ ID NO: 668128 - DNA, 120 bp, Artificial Sequence
  ENSG00000185267_12 (sequence is synthesized)
gccactccacgacatccctaggccggcgacacgccgctctcaagcctgtggatgacccagcgccagaaaaccgggtggccgtcatgaagccctagcccagctccgcagcccctcacctta

SEQ ID NO: 668129 - DNA, 120 bp, Artificial Sequence
  ENSG00000185267_13 (sequence is synthesized)
tagacggccacacaggctgaggtgcagcccaggtaaagaagcttgtgtaatcgcagaggaaggacataacagtttgagcctcactctgtcacccaggttggagtacagtggaacagtctc

SEQ ID NO: 668130 - DNA, 80 bp, Artificial Sequence
  ENSG00000185269_0 (sequence is synthesized)
attggcgcgggccgcagccagcgcacccagaccctgcgctgccctcggacggccgggcgcggagccccagctgcggaggc

SEQ ID NO: 668131 - DNA, 120 bp, Artificial Sequence
  ENSG00000185269_1 (sequence is synthesized)
gcctcaaggccgcccgctccccgcaggtggacgcggccatgggccgaggggtgcgcgtgctgctgctgctgagcctgctgcactgcgccgggggcagcgagggcaggaagacctggcggc

SEQ ID NO: 668132 - DNA, 120 bp, Artificial Sequence
  ENSG00000185269_2 (sequence is synthesized)
gccggggtcagcagccgcctcctcccccgcggaccgaggcggcgccggcggccggacagcccgtggagagcttcccgctggacttcacggccgtggagggtaacatggacagcttcatgg

SEQ ID NO: 668133 - DNA, 120 bp, Artificial Sequence
  ENSG00000185269_3 (sequence is synthesized)
cgcaagtcaagagcctggcgcagtccctgtacccctgctccgcgcagcagctcaacgaggacctgcgcctgcacctcctactcaacacctcggtgacctgcaacgacggcagccccgccg

SEQ ID NO: 668134 - DNA, 120 bp, Artificial Sequence
  ENSG00000185269_4 (sequence is synthesized)
gctactacctgaaggagtccaggggcagccggcggtggctcctcttcctggaaggcggctggtactgcttcaaccgcgagaactgcgactccagatacgacaccatgcggcgcctcatga

SEQ ID NO: 668135 - DNA, 120 bp, Artificial Sequence
  ENSG00000185269_5 (sequence is synthesized)
gctcccgggactggccgcgcactcgcacaggcacagggatcctgtcctcacagccggaggagaacccctactggtggaacgcaaacatggtcttcatcccctactgctccagtgatgttt

SEQ ID NO: 668136 - DNA, 120 bp, Artificial Sequence
  ENSG00000185269_6 (sequence is synthesized)
ggagcggggcttcatccaagtctgagaagaacgagtacgccttcatgggcgccctcatcatccaggaggtggtgcgggagcttctgggcagagggctgagcggggccaaggtgctgctgc

SEQ ID NO: 668137 - DNA, 120 bp, Artificial Sequence
  ENSG00000185269_7 (sequence is synthesized)
tggccgggagcagcgcggggggcaccggggtgctcctgaatgtggaccgtgtggctgagcagctggagaagctgggctacccagccatccaggtgcgaggcctggctgactccggctggt

SEQ ID NO: 668138 - DNA, 120 bp, Artificial Sequence
  ENSG00000185269_8 (sequence is synthesized)
aggccatccgccgtggcatcaggtactggaacggggtggtcccggagcgctgccgacgccagttccaggagggcgaggagtggaactgcttctttggctacaaggtctacccgaccctgc

SEQ ID NO: 668139 - DNA, 120 bp, Artificial Sequence
  ENSG00000185269_9 (sequence is synthesized)
gctgccctgtgttcgtggtgcagtggctgtttgacgaggcacagctgacggtggacaacgtgcacctgacggggcagccggtgcaggagggcctgcggctgtacatccagaacctcggcc

SEQ ID NO: 668140 - DNA, 120 bp, Artificial Sequence
  ENSG00000185269_10 (sequence is synthesized)
gcgagctgcgccacacactcaaggacgtgccggccagctttgcccccgcctgcctctcccatgagatcatcatccggagccactggacggatgtccaggtgaaggggacgtcgctgcccc

SEQ ID NO: 668141 - DNA, 120 bp, Artificial Sequence
  ENSG00000185269_11 (sequence is synthesized)
gagcactgcactgctgggacaggagcctccatgacagccacaaggccagcaagacccccctcaagggctgccccgtccacctggtggacagctgcccctggccccactgcaacccctcat

SEQ ID NO: 668142 - DNA, 120 bp, Artificial Sequence
  ENSG00000185269_12 (sequence is synthesized)
gccccaccgtccgagaccagttcacggggcaagagatgaacgtggcccagttcctcatgcacatgggcttcgacatgcagacggtggcccagccgcagggactggagcccagtgagctgc

SEQ ID NO: 668143 - DNA, 120 bp, Artificial Sequence
  ENSG00000185269_13 (sequence is synthesized)
tggggatgctgagcaacggaagctaggcagactgtctggaggaggagccggcactgaggggcccagacacccgctgccccagtgccacctcaccccccaccagcaggccctcccgtctct

SEQ ID NO: 668144 - DNA, 120 bp, Artificial Sequence
  ENSG00000185269_14 (sequence is synthesized)
tcgggacagggccccagccgtcccccctgtctgggtctgcccactgccctcctgccccggctttccctgcccctctcccacagcccagccagagacaagggacctgctgtcatccccatc

SEQ ID NO: 668145 - DNA, 120 bp, Artificial Sequence
  ENSG00000185269_15 (sequence is synthesized)
tgtggcctgggggtccttcctgacaacgagggggtagccagaagagaagcactggattcctcagtccaccagctcagacagcacccaccggccccacccatcaagcccttttatattatt

SEQ ID NO: 668146 - DNA, 120 bp, Artificial Sequence
  ENSG00000185269_16 (sequence is synthesized)
cggccccacccatcaagcccttttatattattttataaagtgacttttttattactttaattttttaaaaaaaggaaaataagaatatatgatgaatgatattgttttgtaactttttaa

SEQ ID NO: 668147 - DNA, 120 bp, Artificial Sequence
  ENSG00000185269_17 (sequence is synthesized)
cccgcctcctggagccccagccaggcccccaccccgcacatcatgcccagcctggcgcccgggtttactaagagcaaggggcgcccttcactcttgccttttggggcccattccacatta

SEQ ID NO: 668148 - DNA, 120 bp, Artificial Sequence
  ENSG00000185269_18 (sequence is synthesized)
gcattcaggcgcttacccagcggctctggccctccccagggtcaaagcagggcaaggggttgaagtcaaggtcagacctggtgtccagcctagccgggcaccgtggccatggtggcttcc

SEQ ID NO: 668149 - DNA, 120 bp, Artificial Sequence
  ENSG00000185269_19 (sequence is synthesized)
cgggggtaactaaacccaactgtcctccactttcccggcaaccttggttcgggctagcaacaccagcacacctcccttcctggggccaagtaggagccccaacacctcaccagggttccc

SEQ ID NO: 668150 - DNA, 120 bp, Artificial Sequence
  ENSG00000185269_20 (sequence is synthesized)
agacccgaccctacacagcctcctcccgctagaaagacccaccgcctctgtgtccccaggcacagggatcctgtcctcacagccggaggagaacccctactggtggaacgcaaacatggt

SEQ ID NO: 668151 - DNA, 80 bp, Artificial Sequence
  ENSG00000185269_21 (sequence is synthesized)
agagggggagcgcagccgagccgggcgcaccagcgggacggcgcagggccaggggcgctgagaggacggggccactgggc

SEQ ID NO: 668152 - DNA, 120 bp, Artificial Sequence
  ENSG00000185271_0 (sequence is synthesized)
gccacgcagccccaagcacagcgggcgcttaagtgagagggcaagcggaacgctggtgtctcctgaggctatccagcaaacctcggcatgagcgtctcggacaccccacattatccccct

SEQ ID NO: 668153 - DNA, 120 bp, Artificial Sequence
  ENSG00000185271_1 (sequence is synthesized)
gagctggagagtgtctctcatcccgtccagagggactgccttggactccttgtgcacgcccagagaaccccttcctggcctccctcccccgacgaggatcccagattgccttcctttcct

SEQ ID NO: 668154 - DNA, 120 bp, Artificial Sequence
  ENSG00000185271_2 (sequence is synthesized)
ctggaggagcctggttccaggcccctggtcccaaggaaccttccctttccagccttgtccctagaggaagaagaggaagaggaagaagatgaagatgcggcagagcccgagtggctgcgc

SEQ ID NO: 668155 - DNA, 120 bp, Artificial Sequence
  ENSG00000185271_3 (sequence is synthesized)
agcgaggagcatccgagccagtttttcgccgaggcccagcggctgcgggagcagagactgttgctggacgaagaggtgtcagtcgcggggcgggtatacggggtgcatcgggtgatcctg

SEQ ID NO: 668156 - DNA, 120 bp, Artificial Sequence
  ENSG00000185271_4 (sequence is synthesized)
gccgcaatcagcagcctcttccgagacaggctgctgggcggcggaggtccgcggccccccttcagcctcgaggtgtccccagggggctgggaggccgtgctgacctttgcctatgagggg

SEQ ID NO: 668157 - DNA, 120 bp, Artificial Sequence
  ENSG00000185271_5 (sequence is synthesized)
gtgctgggccccgcctcgcagggggatgtgctggccgcagcagaggcgctgggagcgccccgggtgaaggctgctgcccagcagacatgcgagagggctggaaatgccagggaagatgta

SEQ ID NO: 668158 - DNA, 120 bp, Artificial Sequence
  ENSG00000185271_6 (sequence is synthesized)
aagaagcccagccaggcagaggagctgagggagaacctgcgcggaatcgagctcctctaccgagagggcgtcgggtgtgacttgaagctggaggcaggcggctgccagctgtcggtgcac

SEQ ID NO: 668159 - DNA, 120 bp, Artificial Sequence
  ENSG00000185271_7 (sequence is synthesized)
cgagccgccctggcctgtggcagtgagttctttggggccatgctcctgagcgggatgagggaatcccagggcacagaggtatctctgcggacgatctccacccaggacctgcgactcctc

SEQ ID NO: 668160 - DNA, 120 bp, Artificial Sequence
  ENSG00000185271_8 (sequence is synthesized)
gtctcttttgcttactccggagttgtgcgggcaaggtggccagggctactgagagctgcccaggctgctctgcagtaccagagctcttcctgcttggatttgtgtcagaaaggcttggca

SEQ ID NO: 668161 - DNA, 120 bp, Artificial Sequence
  ENSG00000185271_9 (sequence is synthesized)
cggggcctcagccctgcccgttgcctggccctgttccccatggcggaagcccctgggttggagaggctctggagcaaagcccgtcactacctcctcacccacctgcctgctgtagccttg

SEQ ID NO: 668162 - DNA, 120 bp, Artificial Sequence
  ENSG00000185271_10 (sequence is synthesized)
tgtcctgctttcccttctttaccagctgcctgcttggctgagctcctggatagtgatgagctccatgtgcaggaggagtttgaggcctttgtggctgcacggtgttggctggctgccaac

SEQ ID NO: 668163 - DNA, 120 bp, Artificial Sequence
  ENSG00000185271_11 (sequence is synthesized)
cccgagacccaggagtcagaggccaaggccctgctgcgatgtgtccgctttggccgcatgtccaccagggagttgcggagggtgcgggcagccgggctacttccacccctgaccccagat

SEQ ID NO: 668164 - DNA, 120 bp, Artificial Sequence
  ENSG00000185271_12 (sequence is synthesized)
ctgttgcaccagctgatggtagaggctgatgttccaggccaagagagacggagggagcctgaccgggcactggtagtgattggcggggatgggctcagaccagacatggccctaagacaa

SEQ ID NO: 668165 - DNA, 120 bp, Artificial Sequence
  ENSG00000185271_13 (sequence is synthesized)
ccatcccgagcagtgtggtgggcccgggccttccgctgtggcgtgggactggtacgaactgttgagtgggggcagctgcctgccctgcctgcccccggacgcttccggcatggggctgca

SEQ ID NO: 668166 - DNA, 120 bp, Artificial Sequence
  ENSG00000185271_14 (sequence is synthesized)
agcctggcaggaagtgaactctatgtgtgtgggggacaagatttctacagtcactccaacaccctggcttcaactctcaggtgggagcccagtcaagaggactgggaggagatggctcct

SEQ ID NO: 668167 - DNA, 120 bp, Artificial Sequence
  ENSG00000185271_15 (sequence is synthesized)
ttgtcccaggctcgaagccttttctccttggtggcactggatggaaaactttatgccctgggtggaagacacaatgatgttgccctggactctgtggagacctacaaccctgagctcaat

SEQ ID NO: 668168 - DNA, 120 bp, Artificial Sequence
  ENSG00000185271_16 (sequence is synthesized)
gtctggaggccagcacctgcacttccagcaccatgttttgcccacgcagctgcgattttggagggccagttgtacgtgagcggtggctgtggtgggactggccaatacctggcctcactg

SEQ ID NO: 668169 - DNA, 120 bp, Artificial Sequence
  ENSG00000185271_17 (sequence is synthesized)
atgcactatgaccccaaacttgagaagccagggacgtttctgagccctatgggggtacctcgggctggccatgtcatggctgcattgggtgggaggttgtatgtggcaggtgggctgggt

SEQ ID NO: 668170 - DNA, 120 bp, Artificial Sequence
  ENSG00000185271_18 (sequence is synthesized)
gagactgaggacctgctaagctttgaggcctatgaactaaggactgatagctggactcacctggcacccctaccctccccccatgtgggggctgcaagtgctgtgctgcagggggagcta

SEQ ID NO: 668171 - DNA, 120 bp, Artificial Sequence
  ENSG00000185271_19 (sequence is synthesized)
ctggtgctcgggggctacagtcaccgtacttatgccctctctcaccttatccatgcctactgtcctggcctgggccgatggctctgcctgggaactctgccaaggcctcgggctgagatg

SEQ ID NO: 668172 - DNA, 120 bp, Artificial Sequence
  ENSG00000185271_20 (sequence is synthesized)
cctgcctgcatcctgacactgcccgctgtgcagcacatagctttggttcccaccccacaccaaaccaaacctgctgggtgaagagggagcaacagtgtatggggagaggagggcataaga

SEQ ID NO: 668173 - DNA, 120 bp, Artificial Sequence
  ENSG00000185271_21 (sequence is synthesized)
aatagcctgagagaaggacagagattgtggggagtgaaaagaggctttattcttggtagtattttattctcacactgtgcattgtaaactgcttttgtacgtatgatctccgttgaggaa

SEQ ID NO: 668174 - DNA, 120 bp, Artificial Sequence
  ENSG00000185271_22 (sequence is synthesized)
cgggagcaactccacaaggcttagggattcttagggaaagggcatctagtttgaaagagagttaagaagcttcagtagccaaagtgtagagaccatgggaggacagttggaaaaatggtt

SEQ ID NO: 668175 - DNA, 120 bp, Artificial Sequence
  ENSG00000185271_23 (sequence is synthesized)
ctgacccatggatcatgggaaaaatgtggaatggccatccatgaaagagtttgaggagtgtaggagtaaggactgtaaatcgttcagccctttttttcctggaacttgctcctttctcct

SEQ ID NO: 668176 - DNA, 120 bp, Artificial Sequence
  ENSG00000185271_24 (sequence is synthesized)
ctcccacccctgggatgcctaaaccttcttaacaatattctctcccgggtaactttgtaggcctggtctagcgtttcccagcgagacaccacaggctgcccctgagaacctcttggtttc

SEQ ID NO: 668177 - DNA, 120 bp, Artificial Sequence
  ENSG00000185271_25 (sequence is synthesized)
cttctgaggcagaagctcccacatggacatgcacggcacaggggcctgagaggcctgacgggccccccagggccatgtggcaggagtgttgtgtgggaaagatgatgggggcagaggcca

SEQ ID NO: 668178 - DNA, 120 bp, Artificial Sequence
  ENSG00000185271_26 (sequence is synthesized)
aggagggagaggcccacagtggaaaaacagatgatctgaggtttaaggagatggggtggaagaagtcagaagcctgtgtgccttctttcttttgggcaaactgaggaatcaggagtgaaa

SEQ ID NO: 668179 - DNA, 120 bp, Artificial Sequence
  ENSG00000185271_27 (sequence is synthesized)
atgagaccgttgttgcctgaggtctcaagtggtgagaggatgtggggggagagaagagtgagaagcagacaagactcagaaaagtcatttccccctttcagttcctttcccccagagtta

SEQ ID NO: 668180 - DNA, 120 bp, Artificial Sequence
  ENSG00000185271_28 (sequence is synthesized)
tttttaaatccatttccctttatcttggccagggaaggtagtcaggtgcttcctctttctctcttcccccatcctgctctccccactgcctctcttttttctttctcttctttctccctc

SEQ ID NO: 668181 - DNA, 120 bp, Artificial Sequence
  ENSG00000185271_29 (sequence is synthesized)
acacagttattaattacctactgtgtggcaggcactgtaggaggcaccaagatacagaggtcagagagctcctgaccagcagatagacataaacaaatacaaattttgagtggacttaca

SEQ ID NO: 668182 - DNA, 120 bp, Artificial Sequence
  ENSG00000185271_30 (sequence is synthesized)
tgtatggacgagtcttgcgagagcccagaggatagagcagtgaactctgctcaggaaggcttctgttaggaaaggtgtcatccgatgggtgtattttgaactggatcttaaaggctgcct

SEQ ID NO: 668183 - DNA, 120 bp, Artificial Sequence
  ENSG00000185271_31 (sequence is synthesized)
agagtctcacccattagagaagggggaatgcatttgaaacagaaagaagtggggcatgccatgccctgtttctccatagcaaagaggaagtgggtattccagaggcttttcagataattc

SEQ ID NO: 668184 - DNA, 120 bp, Artificial Sequence
  ENSG00000185271_32 (sequence is synthesized)
tgctgctcttgccacctactctcttctctggagccttcctgaggataatggctttcacttaatgattgtgtattcccgccctctatgactcacctctatccttcctgtctgctctttcca

SEQ ID NO: 668185 - DNA, 120 bp, Artificial Sequence
  ENSG00000185271_33 (sequence is synthesized)
ctcacctctatccttcctgtctgctctttccatttctgcctactggacagctgagagcaaaaaagggtcagtttttttgtgtgtgtttaggtcaattttctttttcttttttttttttta

SEQ ID NO: 668186 - DNA, 79 bp, Artificial Sequence
  ENSG00000185271_34 (sequence is synthesized)
tggcgtgatctcagctcaccgcaaactctagttgctgggattacagctattacatctggctaattttgtatttttagta

SEQ ID NO: 668187 - DNA, 120 bp, Artificial Sequence
  ENSG00000185271_35 (sequence is synthesized)
tcagttttctattaccattgtttattaagattttcatgtttctaagggtgatgatggagtctcccttgcacccttcttcattctggccccagaagtacttggcatgtattttatttattt

SEQ ID NO: 668188 - DNA, 120 bp, Artificial Sequence
  ENSG00000185271_36 (sequence is synthesized)
atttttagatttcgttattttagtaagatctttttctgtatctctatttaagatagactaggaatgtaattgaaaatgagaaggggtaagtaggatgtataagagaaaagagaaggaaga

SEQ ID NO: 668189 - DNA, 120 bp, Artificial Sequence
  ENSG00000185271_37 (sequence is synthesized)
ataaagaacgggaagaaggaaattgaaggagatgacaagctctctggatgaacttctatgaacattttttgtgatttgtacctaaaggcagacttaaataaaggtttcatagtgactgaa

SEQ ID NO: 668190 - DNA, 120 bp, Artificial Sequence
  ENSG00000185272_0 (sequence is synthesized)
cctacttcattctacggccgagaccggaggatgttccctgctcaggaggaggccgacaggaccgtgtttgttgggaatttagaggcccgagttcgggaagagattctgtacgagctgttc

SEQ ID NO: 668191 - DNA, 120 bp, Artificial Sequence
  ENSG00000185272_1 (sequence is synthesized)
cttcaggcggggccactaaccaaagtgactatatgcaaagacagagaaggaaagccaaagtcttttggatttgtctgctttaaacacccagaatcggtgtcttatgccatagctttgctg

SEQ ID NO: 668192 - DNA, 120 bp, Artificial Sequence
  ENSG00000185272_2 (sequence is synthesized)
aatggaattcgtttatatggaagaccaattaacgtgcagtatcgatttgggagttctcgctcttctgaaccagctaaccaaagttttgagagctgtgttaagataaattcacacaactac

SEQ ID NO: 668193 - DNA, 120 bp, Artificial Sequence
  ENSG00000185272_3 (sequence is synthesized)
aggaatgaagaaatgttggtgggcagatcttcctttcccatgcagtattttccaattaataatacttctttacctcaagaatattttctctttcagaagatgcagtggcatgtgtataat

SEQ ID NO: 668194 - DNA, 120 bp, Artificial Sequence
  ENSG00000185272_4 (sequence is synthesized)
ccagtgctgcagcttccttactatgaaatgacagctccacttcctaatagtgcatccgtgtcttcctcactgaatcatgttccagatcttgaggctggacccagctcatataaatggact

SEQ ID NO: 668195 - DNA, 120 bp, Artificial Sequence
  ENSG00000185272_5 (sequence is synthesized)
caccaacaaccaagtgactctgacctttatcagatgacagctccacttcctaatagtgcatccgtgtcttcctcactgaatcatgttccagatcttgaggctggacccagctcatataaa

SEQ ID NO: 668196 - DNA, 120 bp, Artificial Sequence
  ENSG00000185272_6 (sequence is synthesized)
tggactcaccaacaaccaagtgactctgacctttatcagatgaataaacgaaagagacaaaagcaaacaagtgatagtgatagtagcacagacaacaacagaggcaacgaatgtagccaa

SEQ ID NO: 668197 - DNA, 120 bp, Artificial Sequence
  ENSG00000185272_7 (sequence is synthesized)
aagttccgaaagtctaagaagaagaaaagatactagtattacctacaaatgaaacttacctacactgatcttagttctcttatgaaaaaaataagatgttatcccatcaaataaacaatg

SEQ ID NO: 668198 - DNA, 120 bp, Artificial Sequence
  ENSG00000185272_8 (sequence is synthesized)
aagacttatctctggtttgctgttcaatttttgccttgaacgacaaaagctttctaaaaatagtataatgtaccactttttgtatttgtcatgatatttttgacccattggcaacaaata

SEQ ID NO: 668199 - DNA, 120 bp, Artificial Sequence
  ENSG00000185272_9 (sequence is synthesized)
gactattgtcattttattagtaccaatgatgaaatttcaccaaactattaatcaaaagtcacttattgaacacattgataaagcatcatgttccctttgattatcccctataaccaacac

SEQ ID NO: 668200 - DNA, 120 bp, Artificial Sequence
  ENSG00000185272_10 (sequence is synthesized)
tcaactacaaataggctgggattcaatgtggagtggtggatttcctgaaagaaagtagtgcagatatttaaggattgcatattgttcctaatgaggatgtaataaacaggcattagtacc

SEQ ID NO: 668201 - DNA, 120 bp, Artificial Sequence
  ENSG00000185272_11 (sequence is synthesized)
cctttcttttagtacctaaatatgttgtttctgagccatattcttcttcaggtttattttataaagtgaggacatatgataatgataccaaaggaaagataattatcatgaaaccaactt

SEQ ID NO: 668202 - DNA, 120 bp, Artificial Sequence
  ENSG00000185272_12 (sequence is synthesized)
ttggatcattccctttttatacaattgtgtatttatagggataccttcctcttctcacatattaattgtatgtcattaaaatcagttggctatgtcagtgtgtattattcacctcttttg

SEQ ID NO: 668203 - DNA, 120 bp, Artificial Sequence
  ENSG00000185272_13 (sequence is synthesized)
tttgctagcaaggtttgagatgctatattaacatttaaatcatgaaaatgagcaagtaaatagaataatattttattaatgtatgatatgtaatacttattgtctaaatcaagtttccta

SEQ ID NO: 668204 - DNA, 120 bp, Artificial Sequence
  ENSG00000185272_14 (sequence is synthesized)
tggtttatttattttagaagaaaaataaaattatttgggcatttttgtttatagctcattacaaactagagtgatgaatatatatatttactaaagctaattgaaagagtcatgcaactc

SEQ ID NO: 668205 - DNA, 120 bp, Artificial Sequence
  ENSG00000185272_15 (sequence is synthesized)
agttgggaattaaccactcaattcaatagtaaaagccatgcttggatgtttcttttgcatgttgcctagcattttatagatatttattatttaaaaaaataaagatatgtttttaatgaa

SEQ ID NO: 668206 - DNA, 120 bp, Artificial Sequence
  ENSG00000185272_16 (sequence is synthesized)
tttatgccaagaggagtttttatatattttgggctattgtaaaaccttactttttaggcctaggataaaattaaggaatatcttttttttccgagcccatgaaaagtgatagaaaatatt

SEQ ID NO: 668207 - DNA, 120 bp, Artificial Sequence
  ENSG00000185272_17 (sequence is synthesized)
ttcatttaaaattcagtcttaatattttcagtagtagggggtagagacttatatttgtagttttttatagttttctacatgcttttcatagctgttaaatcatttaagcatacaaggttt

SEQ ID NO: 668208 - DNA, 120 bp, Artificial Sequence
  ENSG00000185274_0 (sequence is synthesized)
gagacttgagcgtgactgcggagcctggaggatgcgggctccccgagcgggcttcccctctgcccggcgcgatggagcgggtcggtgagcggaacaaaggcgcctgcccgggggagcggg

SEQ ID NO: 668209 - DNA, 120 bp, Artificial Sequence
  ENSG00000185274_1 (sequence is synthesized)
gtcggtgagcggaacaaaggcgcctgcccgggggagcgggtcttccgctgaagagcgcgggtggcgcgccgcgacggccgcctgcgggccaaggtgggaggctgtgcggccccaggcgcg

SEQ ID NO: 668210 - DNA, 120 bp, Artificial Sequence
  ENSG00000185274_2 (sequence is synthesized)
cacctgtgcgccgctccctctgtgcctcccgggcagccccgcctgccggcctcggagtccgcggcgccggcggctagaggtccagaggcgaaccacttgctggtgcagaagagaaaccct

SEQ ID NO: 668211 - DNA, 120 bp, Artificial Sequence
  ENSG00000185274_3 (sequence is synthesized)
caaatccctggcctttcgcggagacgcctggacggggccgtgcgccgtggactgagcaggcgtctcggggagcacttctgcagagcgaggacttccatgtgagcgattccgttctcccca

SEQ ID NO: 668212 - DNA, 120 bp, Artificial Sequence
  ENSG00000185274_4 (sequence is synthesized)
ccaccaatccgacctcccagccgtctccgccgcccgagcatccttgaggtgggacgagcaggggcttggatccctgccggccgtctggtgtgtgaggcttgcacggcccctggctgcccc

SEQ ID NO: 668213 - DNA, 120 bp, Artificial Sequence
  ENSG00000185274_5 (sequence is synthesized)
gcgcctcgccggagcccgagggggcgcaggtccggggcgagggccggccgggctgtttgatggcttcactgagaagagtcaaagtgctgttggtgttgaacttgatcgcggtagccggct

SEQ ID NO: 668214 - DNA, 120 bp, Artificial Sequence
  ENSG00000185274_6 (sequence is synthesized)
tcgtgctcttcctggccaagtgccggcccatcgcggtgcgcagcggagacgccttccacgagatccggccgcgcgccgaggtggccaacctcagcgcgcacagcgccagccccatccagg

SEQ ID NO: 668215 - DNA, 120 bp, Artificial Sequence
  ENSG00000185274_7 (sequence is synthesized)
atgcggtcctgaagcgcctgtcgctgctggaggacatcgtgtaccggcagctgaatggcttatccaaatcccttgggctcattgaaggttatggtgggcggggtaaagggggccttccgg

SEQ ID NO: 668216 - DNA, 120 bp, Artificial Sequence
  ENSG00000185274_8 (sequence is synthesized)
ctactctttccccggctgaagaagaaaaggctaagggaccccatgagaagtatggctacaattcatacctcagtgaaaaaatttcactggaccgttccattccggattatcgtcccacca

SEQ ID NO: 668217 - DNA, 120 bp, Artificial Sequence
  ENSG00000185274_9 (sequence is synthesized)
agtgtaaggagctcaagtactccaaggacctgccccagatatccatcatattcatcttcgtgaacgaggccctgtcggtgatcctgcggtccgtgcacagtgccgtcaatcacacgccca

SEQ ID NO: 668218 - DNA, 120 bp, Artificial Sequence
  ENSG00000185274_10 (sequence is synthesized)
cacacctgctgaaggaaatcattctggtggatgacaacagcgacgaagaggagctgaaggtccccctagaggagtatgtccacaaacgctaccccgggctggtgaaggtggtaagaaatc

SEQ ID NO: 668219 - DNA, 120 bp, Artificial Sequence
  ENSG00000185274_11 (sequence is synthesized)
agaagagggaaggcctgatccgcgctcgcattgagggctggaaggtggctaccgggcaggtcactggcttctttgatgcccacgtggaattcaccgctggctgggctgagccggttctat

SEQ ID NO: 668220 - DNA, 120 bp, Artificial Sequence
  ENSG00000185274_12 (sequence is synthesized)
cccgcatccaggaaaaccggaagcgtgtgatcctcccctccattgacaacatcaaacaggacaactttgaggtgcagcggtacgagaactcggcccacgggtacagctgggagctgtggt

SEQ ID NO: 668221 - DNA, 120 bp, Artificial Sequence
  ENSG00000185274_13 (sequence is synthesized)
gcatgtacatcagccccccaaaagactggtgggacgccggagacccttctctccccatcaggaccccagccatgataggctgctcgttcgtggtcaacaggaagttcttcggtgaaattg

SEQ ID NO: 668222 - DNA, 120 bp, Artificial Sequence
  ENSG00000185274_14 (sequence is synthesized)
gtcttctggatcctggcatggatgtatacggaggagaaaatattgaactgggaatcaaggtatggctctgtgggggcagcatggaggtccttccttgctcacgggtggcccacattgagc

SEQ ID NO: 668223 - DNA, 120 bp, Artificial Sequence
  ENSG00000185274_15 (sequence is synthesized)
ggaagaagaagccatataatagcaacattggcttctacaccaagaggaatgctcttcgcgttgctgaggtctggatggacgattacaagtctcatgtgtacatagcgtggaacctgccgc

SEQ ID NO: 668224 - DNA, 120 bp, Artificial Sequence
  ENSG00000185274_16 (sequence is synthesized)
agaatttccagtggtacctggaccatgtttacccagaaatgagaagatacaataataccgttgcttacggggagcttcgcaacaacaaggcaaaagacgtctgcttggaccaggggccgc

SEQ ID NO: 668225 - DNA, 120 bp, Artificial Sequence
  ENSG00000185274_17 (sequence is synthesized)
tggagaaccacacagcaatattgtatccgtgccatggctggggaccacagcttgcccgctacaccaaggaaggcttcctgcacttgggtgccctggggaccaccacactcctccctgaca

SEQ ID NO: 668226 - DNA, 120 bp, Artificial Sequence
  ENSG00000185274_18 (sequence is synthesized)
cccgctgcctggtggacaactccaagagtcggctgccccagctcctggactgcgacaaggtcaagagcagcctgtacaagcgctggaacttcatccagaatggagccatcatgaacaagg

SEQ ID NO: 668227 - DNA, 120 bp, Artificial Sequence
  ENSG00000185274_19 (sequence is synthesized)
gcacgggacgctgcctggaggtggagaaccggggcctggctggcatcgacctcatcctccgcagctgcacaggtcagaggtggaccattaagaactccatcaagtagagggagggagctg

SEQ ID NO: 668228 - DNA, 120 bp, Artificial Sequence
  ENSG00000185274_20 (sequence is synthesized)
gggcactggagcctggcccccaggacatggctgctccccccaacatctggaccagctgccctggcggagagacagcaaggggccggcaggtgctcgatgggccccccagggcttctccag

SEQ ID NO: 668229 - DNA, 120 bp, Artificial Sequence
  ENSG00000185274_21 (sequence is synthesized)
ggcagcacagggaccccggatgaagactctgtcccccctcaggcattcagctgcccacaagtttcctgcaccctggaaaagccccccacccttcctctgggaaactgacagctgtcttcc

SEQ ID NO: 668230 - DNA, 120 bp, Artificial Sequence
  ENSG00000185274_22 (sequence is synthesized)
acagcctctgatgtggacctggtactgaggagcaagactgtccagttctcctccacatctcccatcccagaatcaggatctgggactggcagggtcccctcctgtgtctcatctcttgca

SEQ ID NO: 668231 - DNA, 120 bp, Artificial Sequence
  ENSG00000185274_23 (sequence is synthesized)
gcagcagctgctgaactccagccatcaacacggtgggaggcagcgggggcttcagccatgtcctagctccccgccctaaaaggaggcagtgaggaccaggcactatttcctccgaggtta

SEQ ID NO: 668232 - DNA, 120 bp, Artificial Sequence
  ENSG00000185274_24 (sequence is synthesized)
cttctacccagatgacacctgcctgttcacgccccaaggcagctactgcccctaacccttcccaccagggtagctttgggcactgcagctctggacttttctggcccctcctgagatgac

SEQ ID NO: 668233 - DNA, 120 bp, Artificial Sequence
  ENSG00000185274_25 (sequence is synthesized)
ctgatggagctgatgctttctctcctaatccctgggcactaggctcttatcagtgtgcttgggccagctctcctgcctgtgtctagaggaagccagagacagaaataggctaagcctgca

SEQ ID NO: 668234 - DNA, 120 bp, Artificial Sequence
  ENSG00000185274_26 (sequence is synthesized)
gtaggatctcagccacaagggccccgcaggatggagctgggtcaaggaccagggagccctgactcccagaggctgccaccggggagaagcagcggtcctccatccagaacctaagggctg

SEQ ID NO: 668235 - DNA, 120 bp, Artificial Sequence
  ENSG00000185274_27 (sequence is synthesized)
aagcaaaggctgccaggacccttgaagatgcttttggctcacctcatttcaccccacgctctgctggctggcagaggagaaggcagtcgtttcctctctgaagagtatttttttcgattg

SEQ ID NO: 668236 - DNA, 120 bp, Artificial Sequence
  ENSG00000185274_28 (sequence is synthesized)
ccctctggttagggtgcacatataaatcagagttaatatatgaacgcgtgtgcatgcacaagtgtgtgtgtgcctgcgtgctgtgcgtggcagggtgtgtgtgtgtgtgtctggctgtgc

SEQ ID NO: 668237 - DNA, 120 bp, Artificial Sequence
  ENSG00000185274_29 (sequence is synthesized)
gttccggagtgtgtgacgatgctgacctagctgtgtggccttgggcttgctgcttcattactcacctggatggggacgagggatgagaagggtgtgggtttggccccatgtcactggccg

SEQ ID NO: 668238 - DNA, 120 bp, Artificial Sequence
  ENSG00000185274_30 (sequence is synthesized)
gaaggatgtgtctcagccctgccctgtggggtgcccccgatgggaggctgtcccatctcccagtccccatctctttttccccacactgtccctggccaagccctgcccagagctgaaccc

SEQ ID NO: 668239 - DNA, 120 bp, Artificial Sequence
  ENSG00000185274_31 (sequence is synthesized)
tgtagctgcccccttgccctgtgtgggattcgcagtgtctcatttggtgacgtcttactggtgatcatctcctcaccccatctcccaccttgtggaataaatacatgttagcacttccca

SEQ ID NO: 668240 - DNA, 120 bp, Artificial Sequence
  ENSG00000185274_32 (sequence is synthesized)
gtctcctctcagctaggactttctgtttgcacagccgaggcctgcagggtacattccagaggtggacttggggctggccttgaacttccagaccctctctcccctctctggccggggctg

SEQ ID NO: 668241 - DNA, 120 bp, Artificial Sequence
  ENSG00000185274_33 (sequence is synthesized)
gggacaaataagggaataaaagctggcggcagggaagcccgcagctgcaaccggctctggttcttttcggtgctgtggaagctttgttttttcgctcttcacagtaaatcttgctgctgt

SEQ ID NO: 668242 - DNA, 120 bp, Artificial Sequence
  ENSG00000185274_34 (sequence is synthesized)
tgttttttcgctcttcacagtaaatcttgctgctgtatattctttgggtccacgccgcctttgagatgtaacactcataacactcaccctgaaagtccgtggcttcattcttgaagtcag

SEQ ID NO: 668243 - DNA, 120 bp, Artificial Sequence
  ENSG00000185274_35 (sequence is synthesized)
tcattcttgaagtcagcgagaccacgaacccaccggaaggaaccaactctggacacagtggcatgatctcggctctctgcagcctctgcctcttgggttcaaacgattctcctgcctcag

SEQ ID NO: 668244 - DNA, 74 bp, Artificial Sequence
  ENSG00000185274_36 (sequence is synthesized)
gtagctgggactacaggtgtgtgctagcacacccggctaagttttgtatgtttagtagacaactgatccaccgg

SEQ ID NO: 668245 - DNA, 89 bp, Artificial Sequence
  ENSG00000185274_37 (sequence is synthesized)
ttacaggcgtgagccaccacaccaggctgagatctgacggttttataaggggcttttcccccttctgcttggcacttctccttagttcc

SEQ ID NO: 668246 - DNA, 120 bp, Artificial Sequence
  ENSG00000185274_38 (sequence is synthesized)
ttgttggatttcaaaaccaagacgacaccacctcttggtgtgctggcagacacagagagaggactgtctgtcttccctcctgtgtccctctctgccacagctgaaatggctgatcttttc

SEQ ID NO: 668247 - DNA, 120 bp, Artificial Sequence
  ENSG00000185278_0 (sequence is synthesized)
agactttcctccaggggcttcctcactggggaattgccggaaagagcaaacaaaaaaggcgctggtgtaggctccaaaataaacacatctgaattcatgatggcatcgacagaggctctt

SEQ ID NO: 668248 - DNA, 120 bp, Artificial Sequence
  ENSG00000185278_1 (sequence is synthesized)
attggattaaaagtttcaaaacaaacaataacgctttggaaaaagggttgaatgcaccctcaggcacgaccatggagaaaggtgggaacatacaattggagattcctgacttcagcaact

SEQ ID NO: 668249 - DNA, 120 bp, Artificial Sequence
  ENSG00000185278_2 (sequence is synthesized)
ctgtcctgagccatctaaaccagttgcgcatgcagggccgtctctgtgatattgtggtcaatgtgcaaggacaagcttttcgggctcacaaagtggtgctggctgccagctccccctatt

SEQ ID NO: 668250 - DNA, 120 bp, Artificial Sequence
  ENSG00000185278_3 (sequence is synthesized)
tccgggatcacatgtccttgaatgagatgagtacagtctccatttcagtcatcaagaaccctactgtttttgaacagctcctttctttctgttacacagggcggatatgcctgcaactgg

SEQ ID NO: 668251 - DNA, 120 bp, Artificial Sequence
  ENSG00000185278_4 (sequence is synthesized)
cagatatcatcagctacctaacagctgccagttttctgcaaatgcagcatattatagacaaatgtacacagatcctggagggcattcatttcaaaattaatgtggctgaggttgaagcag

SEQ ID NO: 668252 - DNA, 120 bp, Artificial Sequence
  ENSG00000185278_5 (sequence is synthesized)
aattaagtcaaacaaggacaaagcatcaagagagacctccagagtctcacagggttacaccaaatctcaaccgctcccttagcccacgacataataccccaaagggaaaccggcgaggtc

SEQ ID NO: 668253 - DNA, 120 bp, Artificial Sequence
  ENSG00000185278_6 (sequence is synthesized)
aggttagtgctgtgctggatatcagagagctaagtcctcctgaggagtccaccagccctcagatcattgaaccaagttctgatgtagagagccgggagcccattcttcggatcaaccgag

SEQ ID NO: 668254 - DNA, 120 bp, Artificial Sequence
  ENSG00000185278_7 (sequence is synthesized)
caggacagtggtatgtggagacaggagtggcggaccgtgggggtcggagtgatgatgaagttagagttcttggagcagtacacatcaaaactgaaaatctggaggagtggcttgggcctg

SEQ ID NO: 668255 - DNA, 120 bp, Artificial Sequence
  ENSG00000185278_8 (sequence is synthesized)
agaatcagccttctggagaagatgggagtagtgcagaggaagtaacagccatggtgattgataccacaggccatggttctgtaggacaggaaaattatactttagggtcttcaggagcca

SEQ ID NO: 668256 - DNA, 120 bp, Artificial Sequence
  ENSG00000185278_9 (sequence is synthesized)
aggtggctcggccaacaagcagtgaagttgacagatttagcccctccggcagtgttgttcccttgacagagagacacagagccagaagtgagtctcctgggagaatggatgagcctaagc

SEQ ID NO: 668257 - DNA, 120 bp, Artificial Sequence
  ENSG00000185278_10 (sequence is synthesized)
aacccagctcccaggtagaagagtcagcaatgatgggagtaagtggctatgtggagtatctccgagagcaggaagtatctgagcggtggttccggtacaaccctcgtctcacctgcatct

SEQ ID NO: 668258 - DNA, 120 bp, Artificial Sequence
  ENSG00000185278_11 (sequence is synthesized)
attgcgccaaatctttcaaccagaagggaagcctggaccgccacatgcgcctacacatggggatcacaccattcgtctgccgcatgtgtggcaagaagtatacccggaaagatcagctgg

SEQ ID NO: 668259 - DNA, 120 bp, Artificial Sequence
  ENSG00000185278_12 (sequence is synthesized)
agtatcatatccgcaagcacacaggcaacaagccctttcactgtcatgtctgtggcaaaagtttccccttccaggccatcttgaatcagcactttcgcaaaaaccaccctggctgtatac

SEQ ID NO: 668260 - DNA, 120 bp, Artificial Sequence
  ENSG00000185278_13 (sequence is synthesized)
ccctggaggggcctcacagcatctcccctgaaacaactgtcacatctcgaggacaagctgaggaagagtcaccttcacaggaagagacagttgctcctggggaagctgtccagggctctg

SEQ ID NO: 668261 - DNA, 120 bp, Artificial Sequence
  ENSG00000185278_14 (sequence is synthesized)
tgtccaccactgggccagactgaaacatccagggggagggggctgaccctcttcccctatgagccataagcagccagcatcagagccatgggctgatacttagattcacaaaatgccaca

SEQ ID NO: 668262 - DNA, 120 bp, Artificial Sequence
  ENSG00000185278_15 (sequence is synthesized)
tcactaggccagaagatgctcccaagatgttgccaaactggaggatcagcaacttacacaaaagcactaaaggctcctcccttcttattgcccgcctcacactttggaaaataatcaagc

SEQ ID NO: 668263 - DNA, 120 bp, Artificial Sequence
  ENSG00000185278_16 (sequence is synthesized)
aaatcaactttctaattcagggatcaacagccttggtttgttaactttataagaaaaaaggttttttaacaaaacgatgatgataaatggtcatttatctatcagtcatgtttgaacact

SEQ ID NO: 668264 - DNA, 120 bp, Artificial Sequence
  ENSG00000185278_17 (sequence is synthesized)
gtactttggtccatatcatcttggtggctataattgcccggatctaaaaaatgcagcaggagcctcaaccatccgaagcagccaaccgcaagagaggaggtagtcatgatggtgatgagg

SEQ ID NO: 668265 - DNA, 120 bp, Artificial Sequence
  ENSG00000185278_18 (sequence is synthesized)
aggagaaatttctcctcttccttccctggcataacatgcatttttgtgtttcaagaaaaaaatgaatactggtggttcttattttgaaaggttaggctttatctttcccctgactaggca

SEQ ID NO: 668266 - DNA, 120 bp, Artificial Sequence
  ENSG00000185278_19 (sequence is synthesized)
tctaatactttgcctggttatttcatataatcagccatcttgaagcagtattctagtggacaacatcacctgaagcacttggcaactgggagtgaaatgagcagcaaagtgtatgcaata

SEQ ID NO: 668267 - DNA, 120 bp, Artificial Sequence
  ENSG00000185278_20 (sequence is synthesized)
ggtactgctacatttggggggcttgagtgttgtgttgaggaagaggagagcagggagggaagtgtttttatgttttgcaaatatcaaacagcacagagccgttctgcaacttcctgactg

SEQ ID NO: 668268 - DNA, 120 bp, Artificial Sequence
  ENSG00000185278_21 (sequence is synthesized)
gtatttgtaaaccatagtgctacacatccttgggtaatggctctagttcaggtgaattaatgtgttaggctgactaccaaagtttcatctagtctctttggctcctattttcacgttcag

SEQ ID NO: 668269 - DNA, 120 bp, Artificial Sequence
  ENSG00000185278_22 (sequence is synthesized)
caatattgtaatcaaaaatgtcactttccagtgaaatgagcctggattgtatttttaaatccacaggtctccatatttgataacttttatatgaagttttaaacatgttttttctgcagt

SEQ ID NO: 668270 - DNA, 120 bp, Artificial Sequence
  ENSG00000185278_23 (sequence is synthesized)
attgtggttgaagaaattcaacactatggttcttactgcaaccacaatttcatttccttatacatatgtaatagtttatattttcaggcatatagaaggacctcacttaaaactatgtct

SEQ ID NO: 668271 - DNA, 120 bp, Artificial Sequence
  ENSG00000185278_24 (sequence is synthesized)
cgggtctgcaaacctagtaattcataaaccaaccatcagcaaaccatagctggtgactccaagagctttgctttttaataatatactacagggcacttatcagaaaacatcatgcagaat

SEQ ID NO: 668272 - DNA, 120 bp, Artificial Sequence
  ENSG00000185278_25 (sequence is synthesized)
catgttgcaataaatgatcaaaggatcaattttggtcaggtttggttacttagtcattcctaagatttttaaaacttcaagggacccttttagtaattctgggtatttctaagattctta

SEQ ID NO: 668273 - DNA, 120 bp, Artificial Sequence
  ENSG00000185278_26 (sequence is synthesized)
atccagcactgagagaaagaacttagcaaacatgtagagctttggataccccgtctttcatgaagtgagagaaggaggaatattaagggatgccggcaaatagatgcttataacttacag

SEQ ID NO: 668274 - DNA, 120 bp, Artificial Sequence
  ENSG00000185278_27 (sequence is synthesized)
tgcaagttgaaaaatctctagcttctgttgacggagcactagttgttggggttcttttaagtatgtaatggtttaagaaattgtttcagtgcagaggcatagatgactgtaaaagagatt

SEQ ID NO: 668275 - DNA, 120 bp, Artificial Sequence
  ENSG00000185278_28 (sequence is synthesized)
tggcagagggacaggttgtacctgcactggtgaaccatctgtgagaatgttagtcatgtgctcctttcctgagattgctttgtggtatgtgaaaaggtgggtagaaaagaaagaaatctc

SEQ ID NO: 668276 - DNA, 120 bp, Artificial Sequence
  ENSG00000185278_29 (sequence is synthesized)
tttgagataagaaattagaatgcaaagggtagatcttaagcaatctgagaattgtacatgtacataaagctgcaccctctcacaagagaaaggttattttatcttctgaaaaagcataga

SEQ ID NO: 668277 - DNA, 120 bp, Artificial Sequence
  ENSG00000185278_30 (sequence is synthesized)
aatgcatcttttatgggaagataatgatgctaccatttaataagagcctacccttaaaggcagcattgaaactgtattttgtctttagaagacatagactggtgcatcctccgctttagt

SEQ ID NO: 668278 - DNA, 120 bp, Artificial Sequence
  ENSG00000185278_31 (sequence is synthesized)
tagacaacagcatgataaggaaaaaactgtcttctaaagccatctttagggactggctgtgctctgtggcatagaaaaggtaaagttgaattagccaaaaatccttagggaaacaactgg

SEQ ID NO: 668279 - DNA, 120 bp, Artificial Sequence
  ENSG00000185278_32 (sequence is synthesized)
taataaggttttcagtggacagattttgtcattactaaataggcagtgaggtgagaagtacagattatgctgctttggatggagcctttaagcctaccaaaaaacttttaagtccatcct

SEQ ID NO: 668280 - DNA, 90 bp, Artificial Sequence
  ENSG00000185278_33 (sequence is synthesized)
ggagcctttaagcctaccaaaaaacttttaagtccatcctacttttgagaaatagtatgctagaaagttctgagagactgtgtcttcctc

SEQ ID NO: 668281 - DNA, 120 bp, Artificial Sequence
  ENSG00000185278_34 (sequence is synthesized)
actgtaatcttgaactcctaggctcaagtgattgacctgcctcagcctccaggtagctaggactataggcatgcaccaccatgtctagctaatttttaaatttttttgtagagacggtgt

SEQ ID NO: 668282 - DNA, 86 bp, Artificial Sequence
  ENSG00000185278_35 (sequence is synthesized)
tcaagtaatcctaccaccttgagtgaacttggcctggagaaagaattctttgttgctttgttagtttcttagattatatgtgagaa

SEQ ID NO: 668283 - DNA, 120 bp, Artificial Sequence
  ENSG00000185278_36 (sequence is synthesized)
tctttgttgctttgttagtttcttagattatatgtgagaaaatggagctttttaaactattaccaaattttaaaggtgaagtgcagtaatttctgtaaagagaaactttgcagcatttgt

SEQ ID NO: 668284 - DNA, 120 bp, Artificial Sequence
  ENSG00000185278_37 (sequence is synthesized)
caattctccttccagggttagcaacaaacaaatgaggtagggactatctcattcatgtggaaatgctatgaatgtttggtgggtttcccctcccttttcttttcattcactttaaatagc

SEQ ID NO: 668285 - DNA, 120 bp, Artificial Sequence
  ENSG00000185278_38 (sequence is synthesized)
cttttcctatattgatactgtgaatagggtgcttcctggtcatctaggaccactttagcacaatcatgtttgctggttctctcaattggcctagccagagccacaaaattcatgaaaatt

SEQ ID NO: 668286 - DNA, 120 bp, Artificial Sequence
  ENSG00000185278_39 (sequence is synthesized)
taaggcaggctagcttttaaacaaattaaaacttctgaaaacaatttcagctttttcgttaaaagagatgttgttattctaaataactgtccaagactcttacccacatacactgtgaca

SEQ ID NO: 668287 - DNA, 120 bp, Artificial Sequence
  ENSG00000185278_40 (sequence is synthesized)
ttgtcctagttcttagctaacaacacattggtcataggagttactgatgttctatctacattaatgaacagctattggtgtatgcacagaggatacctcttaaggatgtactaaatggac

SEQ ID NO: 668288 - DNA, 120 bp, Artificial Sequence
  ENSG00000185278_41 (sequence is synthesized)
tttgtttggttgatgctgaaaattaattaccaaatcttaacttgcacgtgttaccttgtgaagggaactgcattagcaatgagagctacatcatcatgaagtactttaatgccatgaaat

SEQ ID NO: 668289 - DNA, 120 bp, Artificial Sequence
  ENSG00000185278_42 (sequence is synthesized)
tgcaaacactgggactgttttcatttattgagtggcacttagtagcaaaggagctatccagtattctcagcaaagaagagagacggaagtatattaatctattttcatactaagatgttc

SEQ ID NO: 668290 - DNA, 120 bp, Artificial Sequence
  ENSG00000185278_43 (sequence is synthesized)
ctttattctgtctgaactctaataccagtataaaatatagcattggcatgaacagttaatgctgtacttaggcagaaaggctccttctaatgacttgttctctctttactcagaaccgta

SEQ ID NO: 668291 - DNA, 120 bp, Artificial Sequence
  ENSG00000185278_44 (sequence is synthesized)
tttacctctgaaccaagttgaattttattttatccaagttgcaaactaccccatgccatttttattataatagagggttaaatctaatctcaaatacataaaggtaaattagttcataga

SEQ ID NO: 668292 - DNA, 120 bp, Artificial Sequence
  ENSG00000185278_45 (sequence is synthesized)
ggataaagtttgggaatgaagagagcagttaaggaaaattttattttttgtcattttttaaatgtttccagttccctctacatcagtgaaacagggttttccaaagatggtttgaagata

SEQ ID NO: 668293 - DNA, 120 bp, Artificial Sequence
  ENSG00000185278_46 (sequence is synthesized)
gaaaaaactttttccccccgacttcatagttgacatctggtattggttggaattggtctggtggcagagtgaagtagggaacttcatttttttcttttttttcttaaaggcagggtctca

SEQ ID NO: 668294 - DNA, 87 bp, Artificial Sequence
  ENSG00000185278_47 (sequence is synthesized)
ggtcctcctttgtgaccacacctggctgtaaatgtcattcttaatagctgaataatctttggtcaagaagtaacttttccagagttt

SEQ ID NO: 668295 - DNA, 120 bp, Artificial Sequence
  ENSG00000185278_48 (sequence is synthesized)
ctgaataatctttggtcaagaagtaacttttccagagttttagctgttacttgacattaattgggtttcttttaactggtgaaaactgtatttattttgtttgaccagactgtctaactt

SEQ ID NO: 668296 - DNA, 120 bp, Artificial Sequence
  ENSG00000185278_49 (sequence is synthesized)
aaatgaaagcaatggataatggaaaggaaactgaacaaagacaaaagtcttcttcatcatagtgaaaggcatttaatcaggaagagttggaatcctggaagtttttctttttttcaggta

SEQ ID NO: 668297 - DNA, 120 bp, Artificial Sequence
  ENSG00000185278_50 (sequence is synthesized)
caagaggcatgatttttttctcttcctaaaatgtccttccccttatctgtgtacttattagttcaaggaataacaaatgagtcttaattgaacttagtctttggaaattgagctctttat

SEQ ID NO: 668298 - DNA, 120 bp, Artificial Sequence
  ENSG00000185278_51 (sequence is synthesized)
ttaggttatatgtgaaagagtttaaaatattgaaatactttggttgctaagcagatttagaaaagcaacaagcaattgtcgggcaaatccctaggtttgagaagatgtcctcagcaaaat

SEQ ID NO: 668299 - DNA, 120 bp, Artificial Sequence
  ENSG00000185278_52 (sequence is synthesized)
atacccttaggacttacggaattagatcagggttcagcaaacagtagtttccaggccaaatgctgaggctacttgcttgtgtaaagaaaattataatggaatagggccacacttacttgt

SEQ ID NO: 668300 - DNA, 120 bp, Artificial Sequence
  ENSG00000185278_53 (sequence is synthesized)
ttaggtattgtttatgccttctttctactacaatggcaaagttgagtacttgtgacaaagatcacgtggctacaaagcttgaaaatatttactgtctggtacttgttagaaaaaatttgc

SEQ ID NO: 668301 - DNA, 120 bp, Artificial Sequence
  ENSG00000185278_54 (sequence is synthesized)
caactccaagaaagaattacctcctaaagttgttactcatgacattttgcctttataatagtttggttgaagttttaaattcatgttgtcacatatacatgttttcttgaaagagtttgc

SEQ ID NO: 668302 - DNA, 120 bp, Artificial Sequence
  ENSG00000185278_55 (sequence is synthesized)
caactttttctagatcctcttatcataactctttttgtgctccttcatgatttttttgtgctccttcatgattcccattactttaaaagcatttagaattggcctgttgtttgtccttgt

SEQ ID NO: 668303 - DNA, 120 bp, Artificial Sequence
  ENSG00000185278_56 (sequence is synthesized)
cttaatggtgccggtattttaaagtttagttgtaagtaagttttgccattcctctgagttaacttgaactggtttgcataatggtgacaagaatgaattttttcccaagtggattaaaaa

SEQ ID NO: 668304 - DNA, 120 bp, Artificial Sequence
  ENSG00000185278_57 (sequence is synthesized)
ctaatttcattatgaagaagtattttgattcatatccaaagtactgtttttctggattagaacccctaccttttccctttgcaatgtatcttaattttaacttctttaaacttactctgt

SEQ ID NO: 668305 - DNA, 120 bp, Artificial Sequence
  ENSG00000185278_58 (sequence is synthesized)
tccatgtagagcagtaaaaagccaagtttttcttccttttttcctggatgttttgaaacataatgaaacatctgaggatttcaaattctttttagacctatcttcccatttctgttattg

SEQ ID NO: 668306 - DNA, 120 bp, Artificial Sequence
  ENSG00000185278_59 (sequence is synthesized)
tctataattcttctaaatacatattggaccattaacatgtttgctttgtgaatgttcattcttagtgttcagatagcctacttatactcgatgtgggaaaaatgggaaatgttagggggt

SEQ ID NO: 668307 - DNA, 90 bp, Artificial Sequence
  ENSG00000185278_60 (sequence is synthesized)
cttatactcgatgtgggaaaaatgggaaatgttagggggttcataaacagaaatccttgcaggaagccgggtgtgacagcagacactgag

SEQ ID NO: 668308 - DNA, 120 bp, Artificial Sequence
  ENSG00000185278_61 (sequence is synthesized)
aacatagaccttatctctaaaacaaaaaaaaatccttgcaagaagagagaataattgcttcccatttggaaatgatatagggacttttgaattagatctatcttgacaaagttttctagg

SEQ ID NO: 668309 - DNA, 120 bp, Artificial Sequence
  ENSG00000185278_62 (sequence is synthesized)
ccatgctgatacagtatagggagtttgaatctgttgtgagcgctgtcaacatagacaaagttcaagtgagtaactagctttctataatagggactctcttcactaggtattttaaagttg

SEQ ID NO: 668310 - DNA, 120 bp, Artificial Sequence
  ENSG00000185278_63 (sequence is synthesized)
ctgctttctaattggatattaggaagttttatatgatataccctctgagtaatagataatcctcatctataaagttccagaatatttgcctaggttagatctcccctggcttagagcagt

SEQ ID NO: 668311 - DNA, 120 bp, Artificial Sequence
  ENSG00000185278_64 (sequence is synthesized)
tatacctatagtaacagtaggtttttgagattttggagtattacttttctgattaacctaggattctgattaacctggaaggtgggacttgtgaaagaaattggattttgttagcccagt

SEQ ID NO: 668312 - DNA, 120 bp, Artificial Sequence
  ENSG00000185278_65 (sequence is synthesized)
gaatcatctgcatcccactctatttgaggtcttggtaatagatgtcaatttaaatatgcatctattgaaagcaatggagttttccaagcattatgacttccttgataattttcagtctta

SEQ ID NO: 668313 - DNA, 120 bp, Artificial Sequence
  ENSG00000185278_66 (sequence is synthesized)
tcttttttcgtattttctagtctctttccctgtctttagtcttcttcctcttaaatggtgcttttcccagggccagtctttctactttctaagcaagcaggcttttttgttcaggataag

SEQ ID NO: 668314 - DNA, 120 bp, Artificial Sequence
  ENSG00000185278_67 (sequence is synthesized)
ccagagttagatattatgaatactttgaaacatctgaatatgttacattccaaagtatgtaattattgatagtagtatcaaaacctggaagatattggtgcagattattcagttttgctg

SEQ ID NO: 668315 - DNA, 120 bp, Artificial Sequence
  ENSG00000185278_68 (sequence is synthesized)
tgtaggcaggctgtctttctcctcaactgtgacacagcagtgacttgagaaggcaaatattacttgaaacccccattatctttatagagggtacgtatataaattttcttacctgacatt

SEQ ID NO: 668316 - DNA, 120 bp, Artificial Sequence
  ENSG00000185278_69 (sequence is synthesized)
tttaccattatcaatatatcagtagctcacatcttaacatagaagaagcccattagctcaaatactggaaacttcaaacaaggaaataaattacaaaagcaaagcagttaatgaaaaaaa

SEQ ID NO: 668317 - DNA, 120 bp, Artificial Sequence
  ENSG00000185278_70 (sequence is synthesized)
cttgtctattgcctgcgtctttcatgtctactcaataggtcctgttgaggaggctagaatacaccatccggttaagaaaggggttgttttgttttgtttaagacagagtcttggtctgtc

SEQ ID NO: 668318 - DNA, 68 bp, Artificial Sequence
  ENSG00000185278_71 (sequence is synthesized)
gggttgttttgttttgtttaagacagagtcttggtctgtctttggttcaagcaattcttgtgcctcag

SEQ ID NO: 668319 - DNA, 120 bp, Artificial Sequence
  ENSG00000185278_72 (sequence is synthesized)
catgaaccactgcacccagccccatttaagagagttttatattcagcatctcatatggcctacaccatgattttaatatactgtgaatcttaggatttcagttaatccataatgccagga

SEQ ID NO: 668320 - DNA, 120 bp, Artificial Sequence
  ENSG00000185278_73 (sequence is synthesized)
gttaaggtatttcatgggaacatgtttcctcttctatgaaatcacctgtctgcagtgataggtaatgtataagagaatgtttcattaagtaaatattaagtactttttgataccagacaa

SEQ ID NO: 668321 - DNA, 120 bp, Artificial Sequence
  ENSG00000185278_74 (sequence is synthesized)
catgcttgggatttgtataataaaactggttttagacatagtttagacatgatgtgtcttcctatacttgagagtcctaagcccacttggttggcgtctgggatgtattgcttttgaaaa

SEQ ID NO: 668322 - DNA, 120 bp, Artificial Sequence
  ENSG00000185278_75 (sequence is synthesized)
gcctgcactttttactgtagagataaaagatcaaaaaggggacagaattagctttattaagtgctttatcgtcataactgtggttaagacaataatactatgaggtaataacagtaatgt

SEQ ID NO: 668323 - DNA, 120 bp, Artificial Sequence
  ENSG00000185278_76 (sequence is synthesized)
taaaaataactaactttttttgaatgcttactatgtgccaggcacagttctatgtgcttcacattgattaactcatctaatccttatgacaatcccatgagggtagataacatcctcatt

SEQ ID NO: 668324 - DNA, 120 bp, Artificial Sequence
  ENSG00000185278_77 (sequence is synthesized)
ttagatgggaagaaacagacacaactgactcaggctaacactagagttgcctctagtaggtgtaattatatcatattttatagatgaggaaactgatgaacccaaggttacataactggt

SEQ ID NO: 668325 - DNA, 120 bp, Artificial Sequence
  ENSG00000185278_78 (sequence is synthesized)
tctgcatgatgtcatattgactccatttacttatcaagagttgaagttgactggaatatacagtagccaggaacagtactgctttttgtgaatgtgtaattcaagagtaagtgattagaa

SEQ ID NO: 668326 - DNA, 120 bp, Artificial Sequence
  ENSG00000185278_79 (sequence is synthesized)
ggttcttcaaaagctgatgcagttgatctctgagcagagttgaatagtgaatattttcagtggatattgcccactgattcaagggagtcacccgtgtggttaggtctaatagtgagtgag

SEQ ID NO: 668327 - DNA, 120 bp, Artificial Sequence
  ENSG00000185278_80 (sequence is synthesized)
gtactatcaaggcaaaaattgaaagagttccagttacctattgctgtgtaacaaacttaattaaaattaagtaattttaattacttaaaatcaaccatttcctatatcatggttttgtga

SEQ ID NO: 668328 - DNA, 120 bp, Artificial Sequence
  ENSG00000185278_81 (sequence is synthesized)
atcagaaaatccaggaagggcttgtctgggcaattctcctccctgtgacaacgactcaggtcacctggtggtattcagcaggtggttagacaagtctggaaggagtgtccaagatgatcg

SEQ ID NO: 668329 - DNA, 120 bp, Artificial Sequence
  ENSG00000185278_82 (sequence is synthesized)
atcttacatacctgacactttggtggggagactagaaggatggactcagcaggtctcctctttctctccatgaagtctaaggactctccatgtgttctcttcatcaaggtagtcagattt

SEQ ID NO: 668330 - DNA, 120 bp, Artificial Sequence
  ENSG00000185278_83 (sequence is synthesized)
actacgaggacagctaaggcctctgaaaggctgggcagaagaatctagtcaacttaaaggccaggcctagaattatcatacagccaccactgtactcttggtcgaagaacttaatggtaa

SEQ ID NO: 668331 - DNA, 120 bp, Artificial Sequence
  ENSG00000185278_84 (sequence is synthesized)
gatgacagcaagaatgaagggggaaaaaagaactcaatggtcagcccaaatttaaggagagaagaaataccctaccactttatggaaggcatgtccaggacttggggctatttttaatgt

SEQ ID NO: 668332 - DNA, 120 bp, Artificial Sequence
  ENSG00000185278_85 (sequence is synthesized)
tttttttgttttgttttgttttttgtcttgactctttggtgtttattcatcagttgtttgtgctgtagaaaccatttattatgtctaccatgggtcactaaaggagctagaaggagaatg

SEQ ID NO: 668333 - DNA, 120 bp, Artificial Sequence
  ENSG00000185278_86 (sequence is synthesized)
ggagaatgagacaaatatctggagcatacttcatttgctgccctctccctccaagtttcatttatcttatagcaaaattttcattttgtactgtgttccaagttgtgaacatttgcctgg

SEQ ID NO: 668334 - DNA, 120 bp, Artificial Sequence
  ENSG00000185278_87 (sequence is synthesized)
ttttgctctgaagccacggtaactgcatgcggagctagaaatactctagagggagtaaaaagcttacattttttttgtttgttttttgttttaggacagagtttcactctgtcacccagg

SEQ ID NO: 668335 - DNA, 120 bp, Artificial Sequence
  ENSG00000185278_88 (sequence is synthesized)
ctcaacctcctggactcaagcaatcctcctacctcatcctcccaagtagctgggactccagacgtgtgccactacacctggctaatttttgtgtatttttagagacgggatctcaccatg

SEQ ID NO: 668336 - DNA, 120 bp, Artificial Sequence
  ENSG00000185278_89 (sequence is synthesized)
tacacctggctaatttttgtgtatttttagagacgggatctcaccatgttgcctgggctggtcttgaactcctggactcaagagatccaccttcctcggcctcctgaagtgctgggatta

SEQ ID NO: 668337 - DNA, 120 bp, Artificial Sequence
  ENSG00000185278_90 (sequence is synthesized)
aacgtgcctggcccggaaagcttactattaaataatttgatttcttggagatatcagttgtattttaagtttacaaataggtgaatactcttgtggtatggaaacattgcatggctgctg

SEQ ID NO: 668338 - DNA, 120 bp, Artificial Sequence
  ENSG00000185278_91 (sequence is synthesized)
aatctctttcaacaggagtttctattgggtggctacatggatcatattcttgagatagtgaaaagttttacctacttatcttaatcccattctacctctacacctccagcatgattttgt

SEQ ID NO: 668339 - DNA, 120 bp, Artificial Sequence
  ENSG00000185278_92 (sequence is synthesized)
gctcgaagatgaatcaattcctttcattcttgttacctttcatacaggaaaattcatcgcccaattttatatgttgttaatcttttaaaattggcagttgttaccagcctctctcattta

SEQ ID NO: 668340 - DNA, 120 bp, Artificial Sequence
  ENSG00000185278_93 (sequence is synthesized)
aaataacagatcattgaagttttttgatttttggttagatgtgtcagatttaggatgccttatttaaactcgtgctgtcttactagactgttcctgctctgagaagaaatatggacagag

SEQ ID NO: 668341 - DNA, 120 bp, Artificial Sequence
  ENSG00000185278_94 (sequence is synthesized)
aatgaatttcattgtccatattgatgaaccccaaatcaatacacttcttaagaaaggtttgagattatccagtccatgtgcaatgaatccttggagcattagctgtgtggccttcctact

SEQ ID NO: 668342 - DNA, 120 bp, Artificial Sequence
  ENSG00000185278_95 (sequence is synthesized)
gataatctgcagttatcacagtaaagagatctctgttcctaggtcaggccttagcaattacaaatacaggaaataaaggggtactcaatgctgaagacttaattttgggtacctacaaag

SEQ ID NO: 668343 - DNA, 120 bp, Artificial Sequence
  ENSG00000185278_96 (sequence is synthesized)
tcctgggaagggaaaaagaagaccttggcatttgtatttgcataaccagagatggaatgtttgaggcttttaggcataaagattaattagattttatcatataaagattagggcaaatta

SEQ ID NO: 668344 - DNA, 120 bp, Artificial Sequence
  ENSG00000185278_97 (sequence is synthesized)
tttttttttccagttcattcttaacatgttaagggacaaattttaatgaataaaaatttaaaggccttaaaactttcttttggattcacatttccactctggtataatccactctggtgt

SEQ ID NO: 668345 - DNA, 120 bp, Artificial Sequence
  ENSG00000185278_98 (sequence is synthesized)
agtctgccctttatgacagagaaagcctttgaaaatattgtcccagggaatgaaaaatcttaatgatgatctatggaaatgtctctcattctctattacagccctttgggccctcctata

SEQ ID NO: 668346 - DNA, 120 bp, Artificial Sequence
  ENSG00000185278_99 (sequence is synthesized)
gattctctgtgaatttaagtttgaaatcatttggtgtttgcatgaaaaataattcttactattcatttaaataattcttaaatgtggtcttaaattgcaagagagaacaaagccagaaaa

SEQ ID NO: 668347 - DNA, 120 bp, Artificial Sequence
  ENSG00000185278_100 (sequence is synthesized)
aggggaaccttgtagattgaccaaatatttattctttattttcagcatcacaaatctaaaccatttcaagctaatacaacaacctgagtgagtagaaattccttaaggtttagatttctg

SEQ ID NO: 668348 - DNA, 120 bp, Artificial Sequence
  ENSG00000185278_101 (sequence is synthesized)
cttttagtcacatcttgaagcagatgtttatgacatatttgaagatgatccactgagtttcctataaagtaatagaatcctaactatagtggttctttaagaaccactgaaaaaacagaa

SEQ ID NO: 668349 - DNA, 120 bp, Artificial Sequence
  ENSG00000185278_102 (sequence is synthesized)
ttgcagtgcagggaacaaagcttaaaatgtgtttcctctggaagccaagatgctaaaaaaggggtcactaatagtgtgactgaagtccgtctctagaatggctatctgttagatagcaga

SEQ ID NO: 668350 - DNA, 120 bp, Artificial Sequence
  ENSG00000185278_103 (sequence is synthesized)
aatatttagaatgtatatggcatttctaatatttttacaaaaataattttaaatcatgtaactcgaattttttttaaaaagtctgttttctttttggaaaactggcacaataaaaataac

SEQ ID NO: 668351 - DNA, 120 bp, Artificial Sequence
  ENSG00000185278_104 (sequence is synthesized)
actaatataattccattgtatatgcatgtgcattgaacccagagtgggtatactaaagatagttcatgcaaataacttatgggaagtttggctattttttcatgtatgtttataaatata

SEQ ID NO: 668352 - DNA, 120 bp, Artificial Sequence
  ENSG00000185278_105 (sequence is synthesized)
tttagtcatctactgtgaccttggtagcacagaagcattttgttagctgtatcattaattctaaaaatcaaattcttggcatagtaggctatgagagctttttgttacttggtattttgg

SEQ ID NO: 668353 - DNA, 120 bp, Artificial Sequence
  ENSG00000185278_106 (sequence is synthesized)
ctaagaaaattatttcttgcactttctatttgtaaagatgttataacacaatgcacccacttaatgcagcttttctttagagaaaaaagatgtaggtgtaaaagtgaaatgtatgttttc

SEQ ID NO: 668354 - DNA, 120 bp, Artificial Sequence
  ENSG00000185278_107 (sequence is synthesized)
aaacctggcaaaaggagggacctcaaaaaaataaatttggcttgccatctacctgagtagggttggggattaatataaaacttaggttgaaagtggctgttgggataggtatactgttgc

SEQ ID NO: 668355 - DNA, 120 bp, Artificial Sequence
  ENSG00000185278_108 (sequence is synthesized)
tgtgaattgcaatattgctgtgagttgccagctatgtatgtgtaagtttatgtgtgtatgtgagaaaaaggtatttcgtgaaggcataaaagtcagtgtagaatatcctacctcccacta

SEQ ID NO: 668356 - DNA, 120 bp, Artificial Sequence
  ENSG00000185278_109 (sequence is synthesized)
gagactgagcatattcaagattgctctgtagtcccttgggcaggaagctggattcctcagccactgtctaccccattcttctctatactcacttcagctcctctacctctgagcacttgg

SEQ ID NO: 668357 - DNA, 120 bp, Artificial Sequence
  ENSG00000185278_110 (sequence is synthesized)
ctgaagaaagagtatagctttctgtagcaagcaaaggaaagccagacccaaaatagagaggctgcagtatctgaaattcttatcatgttcagatatcaatatttaattttgttgcccaaa

SEQ ID NO: 668358 - DNA, 120 bp, Artificial Sequence
  ENSG00000185278_111 (sequence is synthesized)
tcaaacaatgtcagaacacttgagtttagtgcttttttttctctctctgtctcctacagacttctcccggtttactgcttttatccactggcttctgtttggcaggagtagccagtggag

SEQ ID NO: 668359 - DNA, 120 bp, Artificial Sequence
  ENSG00000185278_112 (sequence is synthesized)
gtcaagtctgtttttaaagactaaaacacctaattccttttaatgatgtgtaacatttgtttgaatccccaacttctttttttttggggggcaggggtagagatggagtctccctatgtt

SEQ ID NO: 668360 - DNA, 71 bp, Artificial Sequence
  ENSG00000185278_113 (sequence is synthesized)
tttttggggggcaggggtagagatggagtctccctatgttgcccagtctcgtcttaaacatctaggtttgg

SEQ ID NO: 668361 - DNA, 75 bp, Artificial Sequence
  ENSG00000185278_114 (sequence is synthesized)
cagcctgtgggctcaagcgatcctaccacctcagcctccccaaagtgataggattacaggtgccagtcaccacac

SEQ ID NO: 668362 - DNA, 120 bp, Artificial Sequence
  ENSG00000185278_115 (sequence is synthesized)
ctccccaaagtgataggattacaggtgccagtcaccacacctggcccatgatggattttcagatgacctcttttacttctaatctctccaaagagagatattcttgtttttaaggtcaat

SEQ ID NO: 668363 - DNA, 120 bp, Artificial Sequence
  ENSG00000185278_116 (sequence is synthesized)
attgtcataatagtcatgatgtcctcacctgaatgttgtaggtgtcagaaagttgtttcaatagtaatatgccaccaggcagaccacctaatctttaaatccagttgtagcactcaattt

SEQ ID NO: 668364 - DNA, 120 bp, Artificial Sequence
  ENSG00000185278_117 (sequence is synthesized)
attttctgtttggggcactagtgcactgagccaagtcaacttgtccacttttctaatatttcttacagctaaggaggaactgttggtcctttgatatcctagaatgctttctacttgtgg

SEQ ID NO: 668365 - DNA, 120 bp, Artificial Sequence
  ENSG00000185278_118 (sequence is synthesized)
aaatgctttttaccctaatacactgattatattgtctaaatgtctaaacagggattctctggttagaagtgaaatgagagagtgacccattttcagatttttagagattggctcccgtat

SEQ ID NO: 668366 - DNA, 120 bp, Artificial Sequence
  ENSG00000185278_119 (sequence is synthesized)
tttaggaactagctgataagtatttagtttcctggtgactttggatacggcaagtggagatgcagagaatgtgaaattccaaataataagacaagcattactcacaaataacaactgata

SEQ ID NO: 668367 - DNA, 120 bp, Artificial Sequence
  ENSG00000185278_120 (sequence is synthesized)
cagtaatttctgcccaaatgcagtaagaatcttgtagggagatgaagtggtaaaattaaattatatgaatctttttaccacgactatttttttttttctacctgtagcatagttctctgc

SEQ ID NO: 668368 - DNA, 120 bp, Artificial Sequence
  ENSG00000185278_121 (sequence is synthesized)
ctataagccatgctaatatcctagacccaggaattaattcctgcttaggaaaatttttccttctggcttatcttttgtttgtgcccagagttttgtcctaggcctgtcccctgatctttt

SEQ ID NO: 668369 - DNA, 120 bp, Artificial Sequence
  ENSG00000185278_122 (sequence is synthesized)
gctataacacatacttaaggtgcagccttcttacctaaatcagtactttactgttgctgttgctgcctattacagccagttatttatttaaaaagtagtgaaaaaatgcctaggtagttt

SEQ ID NO: 668370 - DNA, 120 bp, Artificial Sequence
  ENSG00000185278_123 (sequence is synthesized)
gattgcagcatgttaaatccataaatctggacagaagccatggagtcttaccttttctctctctagcttggatgaacaccggccttatgctttctattacaggactagttgacccagttc

SEQ ID NO: 668371 - DNA, 120 bp, Artificial Sequence
  ENSG00000185278_124 (sequence is synthesized)
ttcatattggttgcacattagaattgcataggaccccctctagacatttacattttattggtctgttgtgcaacctgggctttaggtgattctaatgtgcagccaaggttgagaatcact

SEQ ID NO: 668372 - DNA, 120 bp, Artificial Sequence
  ENSG00000185278_125 (sequence is synthesized)
ccctatgtaatccctagtggtcatggcaggataacctcaatccagtcctctttgacctgaaaatatctttattgatattccatgcatggctctcaattcaaagtgtacagtgggtcaagg

SEQ ID NO: 668373 - DNA, 120 bp, Artificial Sequence
  ENSG00000185278_126 (sequence is synthesized)
cttaggtagtaaaatggatcatccatttgtcctcagaataattctggagggagatattgtcatccatccagtttcctctctataccaaatacaaagtacacataaataagcaaaacaaat

SEQ ID NO: 668374 - DNA, 120 bp, Artificial Sequence
  ENSG00000185278_127 (sequence is synthesized)
tttcaaagttccttctctagaatcctctttcttttgcatatgtagtttcagtggagatttctcaactagctgaaatggagcacttgaatatattaaaagagcccaaactgcttacagcaa

SEQ ID NO: 668375 - DNA, 120 bp, Artificial Sequence
  ENSG00000185278_128 (sequence is synthesized)
tttctatttgtaaaataaacaggtggcattgttaatggagaaaaggaaggatcctgcctgtggtgatggtaatatgtttgattatttatctcttagcctgtcttctaagtgggatttcag

SEQ ID NO: 668376 - DNA, 120 bp, Artificial Sequence
  ENSG00000185278_129 (sequence is synthesized)
tgtcagttaactttcacttttcttggattgtttttttgtgaatgaaatgaactagttaaggcttaagtatttctgaataatatatgaaatgtgaaatgagtcattttaggatctttcttc

SEQ ID NO: 668377 - DNA, 120 bp, Artificial Sequence
  ENSG00000185278_130 (sequence is synthesized)
tgggatgtcaaagacctaaccaagtaactcccaaatgaggttccagattcatttttctcatcccaggtagtaaacgtgttttaatgggtttgtttcttgcccatggcaacctcaacacag

SEQ ID NO: 668378 - DNA, 120 bp, Artificial Sequence
  ENSG00000185278_131 (sequence is synthesized)
aggggagaactgttttattaccctaaaatagtgagaaccactgttcaaactaactagctaccaagtgacttctaactcatgaagaaaatttgtatttaagagcaagttcaaatgtagcag

SEQ ID NO: 668379 - DNA, 120 bp, Artificial Sequence
  ENSG00000185278_132 (sequence is synthesized)
gctctcttctgagagtattctggataccacggaaagtttcatttatatattgcttacaagtacgtggtaatttgaacttcagtaggtgatatgtgcaaggagaaaaagtaggtcaaggag

SEQ ID NO: 668380 - DNA, 120 bp, Artificial Sequence
  ENSG00000185278_133 (sequence is synthesized)
aaagttggttagtgcagaggactgacttagcatcagtctgtgaaatttcattaaagtagcactaaggcctggctgtttgcttagcatgtaaatgctgcagtgtccaagaaaatgcctcct

SEQ ID NO: 668381 - DNA, 120 bp, Artificial Sequence
  ENSG00000185278_134 (sequence is synthesized)
atgccttagaaaatttgctgaaggcttcctgttactggtggagtagaaaagcaatagcctttgagactccaaagagagtagcccccttagggttttcatactgaagaaccttgtggagta

SEQ ID NO: 668382 - DNA, 120 bp, Artificial Sequence
  ENSG00000185278_135 (sequence is synthesized)
ctgtgaaacattgttgaactttatgcaaattatactgcactggattttaagattttatggggagagagtagagcagagtggggaagtaatgataaaagataaatacgtaaacttgtacta

SEQ ID NO: 668383 - DNA, 120 bp, Artificial Sequence
  ENSG00000185278_136 (sequence is synthesized)
tattttaagcaaggaatgaaacaaattccctaacaggaattccctgtcagcactgtgaagtttggtcaagttctgcctaatgggttggcttgctgattcctcttaaacctctaggaaatc

SEQ ID NO: 668384 - DNA, 120 bp, Artificial Sequence
  ENSG00000185278_137 (sequence is synthesized)
ctttctaagacagcaaaacaaacgttagtttgagtactactatttcaccaccctgctccatccccctactctcaacgaaagaaaagcattcccaaactataggcaaaagaaatgtgttct

SEQ ID NO: 668385 - DNA, 120 bp, Artificial Sequence
  ENSG00000185278_138 (sequence is synthesized)
cagtccattaatttttcatctgctatgatctctgttcacagttttagcacattgcattattttgtaatctgatagcagaacatcaggaactaatggcttccttccctttaagaaatctta

SEQ ID NO: 668386 - DNA, 68 bp, Artificial Sequence
  ENSG00000185278_139 (sequence is synthesized)
ttttttttttttgagacagggtcttgccacctcctggactctatcctcctgcctcagcctcccaagta

SEQ ID NO: 668387 - DNA, 120 bp, Artificial Sequence
  ENSG00000185278_140 (sequence is synthesized)
ggctcaagcgatcctcccacctaggactcctaaagttacaggtgtgagccactgtgcttggcctagaactctgtttttggcatttctttctaaatgagtacattggaagaacatttaggt

SEQ ID NO: 668388 - DNA, 120 bp, Artificial Sequence
  ENSG00000185278_141 (sequence is synthesized)
ttccaggctcctcataatttctgaatgggacccgctctgctctgcctctgaaaggaggagaaaaggctgagggttcaaagacagaaaagtcaatgtagcagaaatttgatttccttcaga

SEQ ID NO: 668389 - DNA, 120 bp, Artificial Sequence
  ENSG00000185278_142 (sequence is synthesized)
tggacatagtctgaaagaaatctatccagctgttctctatggtgcttatatgatgggtgacagctgtccccatctacctgtccctggcactgtgccttcacactggtcactgtgaaaagc

SEQ ID NO: 668390 - DNA, 120 bp, Artificial Sequence
  ENSG00000185278_143 (sequence is synthesized)
agatcacactggactcagaggccagaatccaggacaagatcccccttctcatcttgagcccatcacatctttgtatagctgttaatgtagcatttacttctctatgggaaactcttgggt

SEQ ID NO: 668391 - DNA, 120 bp, Artificial Sequence
  ENSG00000185278_144 (sequence is synthesized)
ttttaacccaagaagaaattgtaaagcatttaaactagtcagaaaataagattctgatggtagcgatcaaataaaggaaaatttcacttcctctcagttgatattgattgatagcaagga

SEQ ID NO: 668392 - DNA, 120 bp, Artificial Sequence
  ENSG00000185278_145 (sequence is synthesized)
tcaactatgcccacctcttcctaagtttctaaaggctaccataatatttgtaaacaacaaatttatctaatattttttacaacttgctaatcaaggaggattcatattaaaacagacaat

SEQ ID NO: 668393 - DNA, 120 bp, Artificial Sequence
  ENSG00000185278_146 (sequence is synthesized)
cagtttctaaaatgttatccctgaaagggaatggaatagagtatttttagctgtaagaacctaccagtctgttttttccctttgaaaaaaactaatgtttgagatttgtgtcttttcatc

SEQ ID NO: 668394 - DNA, 120 bp, Artificial Sequence
  ENSG00000185278_147 (sequence is synthesized)
tgaagcagttactccattaatagtaaagatgcctcgggaaagtcagtgaaccagaatagtgctcttgcaccactgagggtgctagactggctttgtgcatcttatttcctaagaatatca

SEQ ID NO: 668395 - DNA, 120 bp, Artificial Sequence
  ENSG00000185278_148 (sequence is synthesized)
gtttttattatgaccttaattataaatacctatatataggagtaggattttctctcacccaaccctactttaatcattatcacttaagtgtaaacctccacctccccctctttcccttta

SEQ ID NO: 668396 - DNA, 120 bp, Artificial Sequence
  ENSG00000185278_149 (sequence is synthesized)
ccgaaaaaaaatgcactttaattcctaaggagagtggctgttcctggccctgaaaccagattacttcaggaggagagttaaggagggagagctcttaccagaccctgtgaaatgaaccaa

SEQ ID NO: 668397 - DNA, 120 bp, Artificial Sequence
  ENSG00000185278_150 (sequence is synthesized)
atttcttaatgtaaacacacaagtaataacatccacttttaagtggcccccactccatgccaaagggaaaaagaaccgccaaattgaaaaagggttctaaatacctgtcctgattttgga

SEQ ID NO: 668398 - DNA, 120 bp, Artificial Sequence
  ENSG00000185278_151 (sequence is synthesized)
agtttcactggggaaaaactacctaagattattttcacagctaccaatttgtcagaaactttggtggtgttttgtgggaggctgagattttttaaattaaaaatcaagtgaaaacacaaa

SEQ ID NO: 668399 - DNA, 120 bp, Artificial Sequence
  ENSG00000185278_152 (sequence is synthesized)
gactctaagacacgatcctgatttgtgtcatttctaagtatcagatttgttctcccttcatttgacaggtgttctcagtctctcctcctgtaagattctgtccttcccctgatgacaagc

SEQ ID NO: 668400 - DNA, 120 bp, Artificial Sequence
  ENSG00000185278_153 (sequence is synthesized)
caatagttcttggtggggttgcatgtctcctagagccccaggacccctgtcgtgtcggggaaggggggagggcaggagggtgggcagagactcgggttgggggagggagttcaaagaaag

SEQ ID NO: 668401 - DNA, 120 bp, Artificial Sequence
  ENSG00000185278_154 (sequence is synthesized)
agtgaaaatatgggtttatataaacatatttaaagcagtttagcaaaagctttctcgttgaacagctttaagaacaatgtgaatgaaatcttagcaacttggttagtaatctgaaaagtc

SEQ ID NO: 668402 - DNA, 120 bp, Artificial Sequence
  ENSG00000185278_155 (sequence is synthesized)
tattaatgtatacttgaaattctgtttgtataaaaatgcattttcccctttattttaacactgtgtaaaagaacattatgcatgtgagtggtttgagaattaaatggtttaatactcaga

SEQ ID NO: 668403 - DNA, 120 bp, Artificial Sequence
  ENSG00000185278_156 (sequence is synthesized)
aacctccctcaatcttcctctcatccagtatcaccttcttcccaccccttaagtccgccccttttccccgcccttcctcgccattgtgggcagagacatgaccgtccacgtgatgccgtg

SEQ ID NO: 668404 - DNA, 120 bp, Artificial Sequence
  ENSG00000185290_0 (sequence is synthesized)
accttcacgcggagcccatcggaactcgaggcggggctgctgggtcttccaggagcgcccagacgcgggcaggtggccgccggtggccacaggcctgggcaggatggaagcgcccgcaga

SEQ ID NO: 668405 - DNA, 120 bp, Artificial Sequence
  ENSG00000185290_1 (sequence is synthesized)
gcgggcgcttccacgtctgcaggctctggctcggccgccgccacccataagctacgaggaggagctttacgactgcctggactactactacctgcgcgacttcccggcctgcggggcagg

SEQ ID NO: 668406 - DNA, 120 bp, Artificial Sequence
  ENSG00000185290_2 (sequence is synthesized)
ggcgcgagcaggcgctgcgcaccaactggcctgcacctggcgggcacgagcgcaaggtcgcgcagaagctcctcaatggccagcgcaagcgccgccagcgccagctgcatcccaagatgc

SEQ ID NO: 668407 - DNA, 120 bp, Artificial Sequence
  ENSG00000185290_3 (sequence is synthesized)
gcactcgcctcacctgagcctgggataccgaaggacctgttcgaagtatttactgtaactccaactgtaacttggttctgaggaggagagaatccatgtttggtcaacagaacttttcgc

SEQ ID NO: 668408 - DNA, 120 bp, Artificial Sequence
  ENSG00000185290_4 (sequence is synthesized)
tgtcacttaagtttactgcttcgatatcttttccttactaattgattgttaattaagtagtgcccaagtggattagcctttttagagtttattaattaaaagagagcagcaagaatggca

SEQ ID NO: 668409 - DNA, 120 bp, Artificial Sequence
  ENSG00000185291_0 (sequence is synthesized)
cttcggtttctcttcggggaaagctgctttcagcgcacacgggaagatatcagaaacatcctaggatcaggacaccccagatcttctcaactggaaccacgaaggctgtttcttccacac

SEQ ID NO: 668410 - DNA, 120 bp, Artificial Sequence
  ENSG00000185291_1 (sequence is synthesized)
agtactttgatctccatttaagcaggcacctctgtcctgcgttccggagctgcgttcccgatggtcctcctttggctcacgctgctcctgatcgccctgccctgtctcctgcaaacgaag

SEQ ID NO: 668411 - DNA, 120 bp, Artificial Sequence
  ENSG00000185291_2 (sequence is synthesized)
gaagatccaaacccaccaatcacgaacctaaggatgaaagcaaaggctcagcagttgacctgggaccttaacagaaatgtgaccgatatcgagtgtgttaaagacgccgactattctatg

SEQ ID NO: 668412 - DNA, 120 bp, Artificial Sequence
  ENSG00000185291_3 (sequence is synthesized)
ccggcagtgaacaatagctattgccagtttggagcaatttccttatgtgaagtgaccaactacaccgtccgagtggccaacccaccattctccacgtggatcctcttccctgagaacagt

SEQ ID NO: 668413 - DNA, 120 bp, Artificial Sequence
  ENSG00000185291_4 (sequence is synthesized)
gggaagccttgggcaggtgcggagaatctgacctgctggattcatgacgtggatttcttgagctgcagctgggcggtaggcccgggggcccccgcggacgtccagtacgacctgtacttg

SEQ ID NO: 668414 - DNA, 120 bp, Artificial Sequence
  ENSG00000185291_5 (sequence is synthesized)
aacgttgccaacaggcgtcaacagtacgagtgtcttcactacaaaacggatgctcagggaacacgtatcgggtgtcgtttcgatgacatctctcgactctccagcggttctcaaagttcc

SEQ ID NO: 668415 - DNA, 120 bp, Artificial Sequence
  ENSG00000185291_6 (sequence is synthesized)
tgcaaagtgtaataagacacattcctttatgcactggaaaatgagaagtcatttcaatcgcaaatttcgctatgagcttcagatacaaaagagaatgcagcctgtaatcacagaacaggt

SEQ ID NO: 668416 - DNA, 120 bp, Artificial Sequence
  ENSG00000185291_7 (sequence is synthesized)
cagagacagaacctccttccagctactcaatcctggaacgtacacagtacaaataagagcccgggaaagagtgtatgaattcttgagcgcctggagcaccccccagcgcttcgagtgcga

SEQ ID NO: 668417 - DNA, 120 bp, Artificial Sequence
  ENSG00000185291_8 (sequence is synthesized)
ccaggaggagggcgcaaacacacgtgcctggcggacgtcgctgctgatcgcgctggggacgctgctggccctggtctgtgtcttcgtgatctgcagaaggtatctggtgatgcagagact

SEQ ID NO: 668418 - DNA, 120 bp, Artificial Sequence
  ENSG00000185291_9 (sequence is synthesized)
ctttccccgcatccctcacatgaaagaccccatcggtgacagcttccaaaacgacaagctggtggtctgggaggcgggcaaagccggcctggaggagtgtctggtgactgaagtacaggt

SEQ ID NO: 668419 - DNA, 120 bp, Artificial Sequence
  ENSG00000185291_10 (sequence is synthesized)
cgtgcagaaaacttgagactggggttcagggcttgtgggggtctgcctcaatctccctggccgggccaggcgcctgcacagactggctgctggacctgcgcacgcagcccaggaatggac

SEQ ID NO: 668420 - DNA, 120 bp, Artificial Sequence
  ENSG00000185291_11 (sequence is synthesized)
attcctaacgggtggtgggcatgggagatgcctgtgtaatttcgtccgaagctgccaggaagaagaacagaactttgtgtgtttatttcatgataaagtgatttttttttttttaaccca

SEQ ID NO: 668421 - DNA, 120 bp, Artificial Sequence
  ENSG00000185291_12 (sequence is synthesized)
gtcaggttcatggttacgaagctgctgaccccaggatcccagcccgtgggagagaagggggtctctgacagcccccacccctccccactgccagatccttattgggtctgagtttcaggg

SEQ ID NO: 668422 - DNA, 120 bp, Artificial Sequence
  ENSG00000185294_0 (sequence is synthesized)
agatgttgcagtaggaactgaagaagatggcgtgcctgggcttcctcctccccgtgggcttcctcctcctcatcagcaccgtggccgggggaaagtacggcgtggcccacgtggtgtcgg

SEQ ID NO: 668423 - DNA, 120 bp, Artificial Sequence
  ENSG00000185294_1 (sequence is synthesized)
agaattggagcaaggactactgtatcctgttcagctccgactacatcaccctcccccgggacctgcaccacgccccactcctgcccctgtatgatggcaccaaggcaccctggtgcccgg

SEQ ID NO: 668424 - DNA, 120 bp, Artificial Sequence
  ENSG00000185294_2 (sequence is synthesized)
gtgaggattccccccaccaggcccagctccgctcccccagccagcggcccctccgccagaccactgccatggtcatgaggggtaactgcagcttccacacgaaaggctggctggctcagg

SEQ ID NO: 668425 - DNA, 120 bp, Artificial Sequence
  ENSG00000185294_3 (sequence is synthesized)
gccaaggtgcccacgggctgctcatcgtgagccgggtcagtgaccaacagtgctcagacaccaccctggcaccccaggatccccgccagcccctggcagacctcaccatccctgtggcta

SEQ ID NO: 668426 - DNA, 120 bp, Artificial Sequence
  ENSG00000185294_4 (sequence is synthesized)
tgctccactatgctgacatgctggacatcctcagccacactcgtggggaggccgtcgtccgcgtggccatgtacgcacccccagagcccatcatcgactacaacatgctggtcatcttca

SEQ ID NO: 668427 - DNA, 120 bp, Artificial Sequence
  ENSG00000185294_5 (sequence is synthesized)
tcctggctgtgggcacagtggctgcaggcggctactgggccggcctgaccgaagccaaccggctacagcggcgccgtgcccgaagaggaggggggtctggtggtcaccatcagctgcagg

SEQ ID NO: 668428 - DNA, 120 bp, Artificial Sequence
  ENSG00000185294_6 (sequence is synthesized)
aagctgcagcagctgagggagcccagaaggaagataatgaggacatcccagtggacttcacgccggccatgacaggcgtggtggtcaccctgtcctgctcgctcatgctgctgctctact

SEQ ID NO: 668429 - DNA, 120 bp, Artificial Sequence
  ENSG00000185294_7 (sequence is synthesized)
tcttctatgaccactttgtctatgtcaccattgggatctttggcctgggtgctggcattggcctctacagctgcctgtcacccctggtgtgccgcctgtccctgcggcaataccagaggc

SEQ ID NO: 668430 - DNA, 120 bp, Artificial Sequence
  ENSG00000185294_8 (sequence is synthesized)
ctccgcacagcctctgggcctctctgccgctgcctctgctgctgctggcgagcctgtgcgcaaccgtgatcatcttctgggtggcctaccgcaatgaggaccgctgggcgtggctcctgc

SEQ ID NO: 668431 - DNA, 120 bp, Artificial Sequence
  ENSG00000185294_9 (sequence is synthesized)
tgttcgtcctgcaccgtgtgcggctgcccactctcaagaactgctcctccttcctgctggccctgctggcctttgatgtcttctttgtcttcgtcacccccttcttcaccaaaaccggtg

SEQ ID NO: 668432 - DNA, 120 bp, Artificial Sequence
  ENSG00000185294_10 (sequence is synthesized)
agagcatcatggcgcaggttgccttgggccctgcagagtcttcaagccatgagaggctgcccatggtactcaaagtgccccggctaagagtctccgccttgaccctgtgcagccagccct

SEQ ID NO: 668433 - DNA, 120 bp, Artificial Sequence
  ENSG00000185294_11 (sequence is synthesized)
tctccatccttggcttcggtgacattgtggtccccggcttcctggttgcttactgttgccgctttgatgtgcaagtctgctcccgtcagatctacttcgtggcctgcaccgtggcctatg

SEQ ID NO: 668434 - DNA, 120 bp, Artificial Sequence
  ENSG00000185294_12 (sequence is synthesized)
ctgtgggcctgctggtcacattcatggccatggtcctcatgcagatgggccaacctgccttgctctacctagtgtccagcaccctgctcaccagcctggctgtggctgcctgccgccaag

SEQ ID NO: 668435 - DNA, 120 bp, Artificial Sequence
  ENSG00000185294_13 (sequence is synthesized)
agctcagcctcttctggactggccagggcagagctaagatgtgtgggctcggctgtgccccttcagctggctctaggcagaagcaggagggcgcagcagatgcccacacagccagcacac

SEQ ID NO: 668436 - DNA, 120 bp, Artificial Sequence
  ENSG00000185294_14 (sequence is synthesized)
ttgagagaggcaccagccgaggagcaggggacttagacagcaaccctggagaagacaccactgagattgtcaccatatctgagaatgaagccaccaatccagaggaccgcagtgatagct

SEQ ID NO: 668437 - DNA, 120 bp, Artificial Sequence
  ENSG00000185294_15 (sequence is synthesized)
ccgagggctggagtgacgcccacttggatcctaatgagctgcccttcatcccccctggggcctcggaggagctgatgccactgatgccaatggccatgctgatcccactcatgcccctga

SEQ ID NO: 668438 - DNA, 120 bp, Artificial Sequence
  ENSG00000185294_16 (sequence is synthesized)
tgcccccgccctcagagctgggccatgtccatgcccaggcccaggcccacgagactggcctgccctgggcgggactccacaagaggaagggtttgaaagtaagaaagagcatgtcgaccc

SEQ ID NO: 668439 - DNA, 120 bp, Artificial Sequence
  ENSG00000185294_17 (sequence is synthesized)
aggctcccttgtgaactggaggcactgggacacacgcctctcaaagggctggtggaacattgcagagcaaagccatgcatggcaacaagaaatcagggtatcaaagagatttcatatcta

SEQ ID NO: 668440 - DNA, 120 bp, Artificial Sequence
  ENSG00000185298_0 (sequence is synthesized)
ggcttcgctagggagcctcccggcgtggagatggcgggagctggtcgcggagcagcggtgtccagggtgcaggcgggtcctgggagtccccggcgagcgcgggggcggcagcaagtgcag

SEQ ID NO: 668441 - DNA, 120 bp, Artificial Sequence
  ENSG00000185298_1 (sequence is synthesized)
ccgctggggaagcagcgcccagccccgtggcccgggcttcgcagcaaagagaagaagaaagtgaactgcaagcccaagaaccaggacgaacaggagattcctttccggctccgggagatt

SEQ ID NO: 668442 - DNA, 120 bp, Artificial Sequence
  ENSG00000185298_2 (sequence is synthesized)
atgaggagccgccaagagatgaaaaacccgatcagtaacaagaagaggaagaaagcagcccaggtgaccttcagaaagacattggagaaggaagcaaagggagaggagcccgacatcgca

SEQ ID NO: 668443 - DNA, 120 bp, Artificial Sequence
  ENSG00000185298_3 (sequence is synthesized)
gtccccaagttcaaacagaggaagggggagtctgacggggcctatatccaccgcatgcagcaagaggcccagcatgtgctgttcctcagcaagaaccaggccatccggcagccagaggtg

SEQ ID NO: 668444 - DNA, 120 bp, Artificial Sequence
  ENSG00000185298_4 (sequence is synthesized)
caggcagctcccaaggagaagtctgagcagaaaaaagcaaaaaaagcgttccagaagcggcgactagataaagtccgacggaaaaaggaggaaaaggcggcagacaggctggagcaggag

SEQ ID NO: 668445 - DNA, 120 bp, Artificial Sequence
  ENSG00000185298_5 (sequence is synthesized)
ttgctccgagacacggtgaagtttggtgaggttgtcctgcagcccccagagctgactgccaggccccagaggagcgtaagcaaggaccagcctggcaggagatcgcagatgctgcggatg

SEQ ID NO: 668446 - DNA, 120 bp, Artificial Sequence
  ENSG00000185298_6 (sequence is synthesized)
cttctgagccccggtggtgtgtcccagcctctgaccgcctccctggcccgccagcggattgtggaggaggagagagagcgggccgtgcaggcctacagagcgttgaagcagcggcagcag

SEQ ID NO: 668447 - DNA, 120 bp, Artificial Sequence
  ENSG00000185298_7 (sequence is synthesized)
cagctgcacggggagcgaccccacctcacttcccggaagaagccagagccgcagctgtgatggagagacacccggggcctggccacgctctggggcaactggcaccaggagctgctacac

SEQ ID NO: 668448 - DNA, 120 bp, Artificial Sequence
  ENSG00000185298_8 (sequence is synthesized)
ttgttcacacgttgggcactagtgggtccacatcttgcagggggtgagtgcccgatggactagggccaaggcctggttgacagacggcccgtggggcccggtgtcactcacagctccatc

SEQ ID NO: 668449 - DNA, 120 bp, Artificial Sequence
  ENSG00000185298_9 (sequence is synthesized)
tctttgttttgaacgtccattctgagtctcagcccaggtggaccttaggaagggctggatccctgtccctgaacaccaaataccgagacagctgatgaggctggctcagtgtgtgacgga

SEQ ID NO: 668450 - DNA, 120 bp, Artificial Sequence
  ENSG00000185298_10 (sequence is synthesized)
ggcccccgggagtcagcagagccgagcgtacagtgcacatcaggcagagcaggccacgggcagggacgacgcatcgggacagggctctgcaggggaccgtgactacaggccagctgtgag

SEQ ID NO: 668451 - DNA, 120 bp, Artificial Sequence
  ENSG00000185298_11 (sequence is synthesized)
gctgtgagtggtcccctacagaggctgcccacccaaggtttggttggggtgaaacatgatgacaacacatacacttaagaaggtgggaaccgggggccgggcgcggtggctcacacctgt

SEQ ID NO: 668452 - DNA, 73 bp, Artificial Sequence
  ENSG00000185298_12 (sequence is synthesized)
gagttcgcgaagaaaaaaaaaacagtgggaacagagttgtcacctacctaacagggctctgagagagccggga

SEQ ID NO: 668453 - DNA, 120 bp, Artificial Sequence
  ENSG00000185298_13 (sequence is synthesized)
gagttgtcacctacctaacagggctctgagagagccgggaggcccaaagtggctggaagaaggtaaaggaaaaatcctgtcttgggctcaaggtcacagagtggggcccagggggagttc

SEQ ID NO: 668454 - DNA, 120 bp, Artificial Sequence
  ENSG00000185298_14 (sequence is synthesized)
ctgctgagggcagggccttgccaggcttcagtctccagtgccaaaggaggaaatgcccaggctgtcagcatttccagatgagagcagaagggagaagcttaaacccaagtcacacatcca

SEQ ID NO: 668455 - DNA, 120 bp, Artificial Sequence
  ENSG00000185298_15 (sequence is synthesized)
gcaatggagtccgacagcccagcaccatctgggaactgagaagcacctctgcccggcccccacaccgtgtggaaagtgaggagcacctctgcctggccgccaccccgtctggcaagtgag

SEQ ID NO: 668456 - DNA, 70 bp, Artificial Sequence
  ENSG00000185298_16 (sequence is synthesized)
gagcgcctctgccttttctgccttccccaagtttgcactttcgacattaaagtttactttttagttaaaa

SEQ ID NO: 668457 - DNA, 120 bp, Artificial Sequence
  ENSG00000185298_17 (sequence is synthesized)
tggggtggtaaggggagcggggacttggaggcagccacctgttcttgggtccctgctctgccacaggggatcccttgtgggtggggcggcctctgcctcctccctgggtggaaagagaat

SEQ ID NO: 668458 - DNA, 120 bp, Artificial Sequence
  ENSG00000185298_18 (sequence is synthesized)
tcttccccaggttccagaagcggcgactagataaagtccgacggaaaaaggaggaaaaggcggcagacaggctggagcaggagttgctccgagacacggtgaagtttggtgaggttgtcc

SEQ ID NO: 668459 - DNA, 120 bp, Artificial Sequence
  ENSG00000185298_19 (sequence is synthesized)
gacgaacaggagattcctttccggctccgggagattatgaggagccgccaagagatgaaaaacccgatcagtaacaagaagaggaagaaagcaggtgaccttcagaaagacattggagaa

SEQ ID NO: 668460 - DNA, 120 bp, Artificial Sequence
  ENSG00000185303_0 (sequence is synthesized)
aacttggaggcagagacccaagcagctggaggctctgtgtgtgggtcgctgatttcttggagcctgaaaagaaggagcagcgactggacccagagccatgtggctgtgccctctggccct

SEQ ID NO: 668461 - DNA, 120 bp, Artificial Sequence
  ENSG00000185303_1 (sequence is synthesized)
caccctcatcttgatggcagcctctggtgctgcgtgcgaagtgaaggacgtttgtgttggaagccctggtatccccggcactcctggatcccacggcctgccaggcagggacgggagaga

SEQ ID NO: 668462 - DNA, 120 bp, Artificial Sequence
  ENSG00000185303_2 (sequence is synthesized)
tggtgtcaaaggagaccctggccctccaggccccatgggtccgcctggagaaacaccatgtcctcctgggaataatgggctgcctggagcccctggtgtccctggagagcgtggagagaa

SEQ ID NO: 668463 - DNA, 120 bp, Artificial Sequence
  ENSG00000185303_3 (sequence is synthesized)
gggggaggctggcgagagaggccctccagggcttccagctcatctagatgaggagctccaagccacactccacgacttcagacatcaaatcctgcagacaaggggagccctcagtctgca

SEQ ID NO: 668464 - DNA, 120 bp, Artificial Sequence
  ENSG00000185303_4 (sequence is synthesized)
gggctccataatgacagtaggagagaaggtcttctccagcaatgggcagtccatcacttttgatgccattcaggaggcatgtgccagagcaggcggccgcattgctgtcccaaggaatcc

SEQ ID NO: 668465 - DNA, 120 bp, Artificial Sequence
  ENSG00000185303_5 (sequence is synthesized)
agaggaaaatgaggccattgcaagcttcgtgaagaagtacaacacatatgcctatgtaggcctgactgagggtcccagccctggagacttccgctactcagatgggacccctgtaaacta

SEQ ID NO: 668466 - DNA, 120 bp, Artificial Sequence
  ENSG00000185303_6 (sequence is synthesized)
caccaactggtaccgaggggagcctgcaggtcggggaaaagagcagtgtgtggagatgtacacagatgggcagtggaatgacaggaactgcctgtactcccgactgaccatctgtgagtt

SEQ ID NO: 668467 - DNA, 120 bp, Artificial Sequence
  ENSG00000185303_7 (sequence is synthesized)
ctgagaggcatttaggccatgggacagggaggatcctgtctggccttcagtttccatccccaggatccacttggtctgtgagatgctagaactccctttcaacagaattcacttgtggct

SEQ ID NO: 668468 - DNA, 120 bp, Artificial Sequence
  ENSG00000185303_8 (sequence is synthesized)
attagagctggaggcacccttagccacttcattcccctgatgggccctgactcttccccataatcactgaccagccttgacactccccttgcaaaccatcccagcactgcaccccaggca

SEQ ID NO: 668469 - DNA, 120 bp, Artificial Sequence
  ENSG00000185303_9 (sequence is synthesized)
cttattccccatctggtccagttccttcacttacagatggcagcagtgaggccttggggtagaaggatcctccaaagtcacacagagtgcctgcctcctggtcccctcagctctgcctct

SEQ ID NO: 668470 - DNA, 120 bp, Artificial Sequence
  ENSG00000185303_10 (sequence is synthesized)
gcagcccactgcctgcccagtgccatcaggatgagcagtaccggccaagcataatgacagagagaggcagatttcagggaagccctgactgtgtggagctaaggacacagtggagattct

SEQ ID NO: 668471 - DNA, 120 bp, Artificial Sequence
  ENSG00000185303_11 (sequence is synthesized)
ctggcactctgaggtctctgtggcaggcctggtcaggctctccaggtggtcagagggcccagtggtgccccagcacggtggtgcccaagccaaccctgtgactgacatgtacgattcact

SEQ ID NO: 668472 - DNA, 120 bp, Artificial Sequence
  ENSG00000185303_12 (sequence is synthesized)
cctttgagtctttggatgccaactcagccccctgacctggaggcagccggccaaggcctctagggaagagccccccactgcagacatgacccgagtaactttctgctgatgaacaaatct

SEQ ID NO: 668473 - DNA, 120 bp, Artificial Sequence
  ENSG00000185303_13 (sequence is synthesized)
gcaccccacttcagacctcggtgggcattcacaccaccccccatgccaccggctccactttccccttttattaatacattcacccagataatcattaaaattaacatgtgccaggtctta

SEQ ID NO: 668474 - DNA, 120 bp, Artificial Sequence
  ENSG00000185303_14 (sequence is synthesized)
ggatgtgtcttggggtgggcacagtacccggtgactcttggggatatttatttattttccctgagcctatatcttcatctgtgaaatggggataaaaatacttgttgctgtcacaattat

SEQ ID NO: 668475 - DNA, 120 bp, Artificial Sequence
  ENSG00000185303_15 (sequence is synthesized)
taccatctctccagctagcaaaattactaccagagccgttactacacacaaaggctattgaccgagcacataccatgtgccacacaccttgacaaaatcttttaatacagtttattatgt

SEQ ID NO: 668476 - DNA, 120 bp, Artificial Sequence
  ENSG00000185303_16 (sequence is synthesized)
actattcaatctttacacaatgtcacgggaccagtattgtttacccaattttttataaggacactgaagcttagaggagtgaaatgttttgagtgttatttcagagagcaaatggcaaag

SEQ ID NO: 668477 - DNA, 120 bp, Artificial Sequence
  ENSG00000185303_17 (sequence is synthesized)
actggatccaaacccatcttcctggacctgaagttcatgctcccagccaccccacccctgagctgaataaagatgatttaagcataataaatcgttagtgtgttcacatgagtttccata

SEQ ID NO: 668478 - DNA, 120 bp, Artificial Sequence
  ENSG00000185303_18 (sequence is synthesized)
gccagtttcccagggtaacatagtgaggcactgaaagaaaggagactgcactggagcccaggtccctgggctccccagagctccttactcttcctcctcctcagcagtcttgagacccca

SEQ ID NO: 668479 - DNA, 120 bp, Artificial Sequence
  ENSG00000185303_19 (sequence is synthesized)
caacctccagccggaggcctgaagcatgaggccatgccaggtgccaggtgatgcttggaattttcccgggtgcttcgggtcttcccagcactctggtctcgcccgccctgcctctcgggc

SEQ ID NO: 668480 - DNA, 120 bp, Artificial Sequence
  ENSG00000185303_20 (sequence is synthesized)
gaagcatgaggccatgccaggtgccaggagcagcgactggacccagagccatgtggctgtgccctctggccctcaccctcatcttgatggcagcctctggtgctgcgtgcgaagtgaagg

SEQ ID NO: 668481 - DNA, 120 bp, Artificial Sequence
  ENSG00000185303_21 (sequence is synthesized)
cagagacccaagcagctggaggctctgtgtgtggatccatccctaccagggactcagcagggcctaagcagggggagtgggagaacagaccccaagaggaaggaagacctcatcactgac

SEQ ID NO: 668482 - DNA, 120 bp, Artificial Sequence
  ENSG00000185303_22 (sequence is synthesized)
tgtgagagggtcatcaccccccgatgatcaccttgaagggtccaggctgtgggccctattcatctcttttcattctcaggtcgctgatttcttggagcctgaaaagaaggagcagcgact

SEQ ID NO: 668483 - DNA, 120 bp, Artificial Sequence
  ENSG00000185304_0 (sequence is synthesized)
caagacaccctcagagcacagggtgctgccaagagcccggccgagtgcagctcgagcgccgacgtcgccaaggatacacagtgctgacgcagtacacaagtgcgtcacagtggtcctccg

SEQ ID NO: 668484 - DNA, 120 bp, Artificial Sequence
  ENSG00000185304_1 (sequence is synthesized)
ccggctacgtcagtggctttcaggcgctttcctgttggaattggcgactgctgcggggctgagcgctggtttcacgcgtctcgggagccaggttggcggtgcgatgaggcgcagcaaagc

SEQ ID NO: 668485 - DNA, 120 bp, Artificial Sequence
  ENSG00000185304_2 (sequence is synthesized)
ctacggggagcggtacctcgcctcggtgcagggctccgccccgtcgcctggaaagaagttgagaggattctattttgcaaagctgtattatgaagctaaagaatatgatcttgctaaaaa

SEQ ID NO: 668486 - DNA, 120 bp, Artificial Sequence
  ENSG00000185304_3 (sequence is synthesized)
atacgtatgtacttaccttagtgtgcaagagagggatcccagagctcacagatttctgggtcttctttatgaattggaagaaaacacagagaaagccgttgaatgttacaggcgttcact

SEQ ID NO: 668487 - DNA, 120 bp, Artificial Sequence
  ENSG00000185304_4 (sequence is synthesized)
ggaattaaacccaccacaaaaagatcttgtgttgaagattgcagaattgctttgtaaaaatgatgttactgatggaagagcaaaatactgggttgaaagggcagcgaaacttttcccagg

SEQ ID NO: 668488 - DNA, 120 bp, Artificial Sequence
  ENSG00000185304_5 (sequence is synthesized)
agattgtgaaggtgaagatggatggaataaactttttgactggattcagtcagaactttatgtaagacctgatgacgtccatatgaacatccggctagtggagttgtatcgctcaaataa

SEQ ID NO: 668489 - DNA, 120 bp, Artificial Sequence
  ENSG00000185304_6 (sequence is synthesized)
gaacatccggctagtggagttgtatcgctcaaataaaagattgaaggatgctgtggcccgctgccatgaggcagagaggaacatagctttgcgttcaagtttagagtggaattcgtgtgt

SEQ ID NO: 668490 - DNA, 120 bp, Artificial Sequence
  ENSG00000185304_7 (sequence is synthesized)
tgtacagacccttaaggaatatctggagtctttacagtgtttggagtctgataaaagtgactggcgagcaaccaatacagacttactgctggcctatgctaatcttatgcttcttacgct

SEQ ID NO: 668491 - DNA, 120 bp, Artificial Sequence
  ENSG00000185304_8 (sequence is synthesized)
ttccactagagatgtgcaggaaagtagagaattactggaaagttttgatagtgctcttcagtctgcaaaatcttctttgggtggaaatgatgaactgtcagctactttcttagaaatgaa

SEQ ID NO: 668492 - DNA, 120 bp, Artificial Sequence
  ENSG00000185304_9 (sequence is synthesized)
aggacatttctacatgcatgctggttctctgctcttgaagatgggtcagcatggtaataatgttcaatggcaagctctttctgagctggctgcattgtgctatgtcatagcatttcaggt

SEQ ID NO: 668493 - DNA, 120 bp, Artificial Sequence
  ENSG00000185304_10 (sequence is synthesized)
tccaagaccaaagattaaattaataaaaggtgaagctggacaaaatctgctggaaatgatggcctgtgaccgactgagccaatcagggcatatgttgctaaacttaagtcgtggcaagca

SEQ ID NO: 668494 - DNA, 120 bp, Artificial Sequence
  ENSG00000185304_11 (sequence is synthesized)
agattttttaaaagaggttgttgaaacttttgccaacaaaagcgggcagtctgtgttatataatgctctgttttctagtcagtcatctaaggatacatcttttcttggtagcgatgatat

SEQ ID NO: 668495 - DNA, 120 bp, Artificial Sequence
  ENSG00000185304_12 (sequence is synthesized)
aagatttggctagatacgatgttggtgctattcaagcacataatggtagtcttcagcaccttacttggcttggcttacagtggaattcattgcctgctttacctggaatccgaaaatggc

SEQ ID NO: 668496 - DNA, 120 bp, Artificial Sequence
  ENSG00000185304_13 (sequence is synthesized)
attgcctgctttacctggaatccgaaaatggctaaaacagcttttccatcatttgccccaggaaacctcaaggcttgaaacaaatgcacctgaatcaatatgtattttagatcttgaagt

SEQ ID NO: 668497 - DNA, 120 bp, Artificial Sequence
  ENSG00000185304_14 (sequence is synthesized)
atttctccttggagtagtatataccagccacttacaattaaaggagaaatgtaattctcaccacagctcctatcagccgttatgcctgccccttcctgtgtgtaaacggctttgtacaga

SEQ ID NO: 668498 - DNA, 120 bp, Artificial Sequence
  ENSG00000185304_15 (sequence is synthesized)
gagacaaaaatcttggtgggatgcggtttgtactctgattcacagaaaagcagtacctggaaactcagcagaattgagacttgtagttcagcatgaaataaacactctaagagcccagga

SEQ ID NO: 668499 - DNA, 120 bp, Artificial Sequence
  ENSG00000185304_16 (sequence is synthesized)
aaaacatggccttcaacctgctctgcttgtacattgggcaaaatgccttcagaaaatgggcaggggtcttaattcttcttatgatcaacaagaatacatagggagaagtgttcattattg

SEQ ID NO: 668500 - DNA, 120 bp, Artificial Sequence
  ENSG00000185304_17 (sequence is synthesized)
gaagaaagttttgccattgttgaagataataaagaagaacagtattcctgaacctattgatcctctgtttaaacattttcatagtgtagacattcaggcatcagaaattgttgagtatga

SEQ ID NO: 668501 - DNA, 120 bp, Artificial Sequence
  ENSG00000185304_18 (sequence is synthesized)
agaagatgcacacataacttttgctatattggatgcagtacatggaaatatagaagatgctgtgactgcttttgaatctataaaaagtgttgtttcttattggaatcttgcactgatttt

SEQ ID NO: 668502 - DNA, 120 bp, Artificial Sequence
  ENSG00000185304_19 (sequence is synthesized)
tcacaggaaagcagaagacattgaaaatgatgccgtttttcctgaagaacaagaagaatgcaaaaattatctgagaaagaccagggactacctaataaagattatagatgacagtgattc

SEQ ID NO: 668503 - DNA, 120 bp, Artificial Sequence
  ENSG00000185304_20 (sequence is synthesized)
aaatctttcagtggtcaagaaattgcctgtgcccctggagtctgtaaaagagatgcttaagtcagtcatgcaggaactcgaagactatagtgaaggaggtcctctctataaaaatggttc

SEQ ID NO: 668504 - DNA, 120 bp, Artificial Sequence
  ENSG00000185304_21 (sequence is synthesized)
tttgcgaaatgcagattcagaaataaaacattctacaccatctcctaccaaatattcactatcaccaagtaaaagttacaagtattctcccaaaacaccacctcgatgggcagaagatca

SEQ ID NO: 668505 - DNA, 120 bp, Artificial Sequence
  ENSG00000185304_22 (sequence is synthesized)
gaattctttacggaaaatgatttgccaagaagtaaaggccattacgaaactaaatagcagtaagtcagcatcccgtcatcgttggcccacagagaattatggaccagactcggtgcctga

SEQ ID NO: 668506 - DNA, 80 bp, Artificial Sequence
  ENSG00000185304_23 (sequence is synthesized)
gttggcccacagagaattatggaccagactcggtgcctgatggatatcaggggtcacagacatttcatggggctccacta

SEQ ID NO: 668507 - DNA, 120 bp, Artificial Sequence
  ENSG00000185304_24 (sequence is synthesized)
taatgttactcccacaaagggttcttctaatacagaatttaagtcaaccaaagaaggattttccatcgctgtgtctgctgatggatttaaatttggcatttcggaaccaggaaatcaaga

SEQ ID NO: 668508 - DNA, 120 bp, Artificial Sequence
  ENSG00000185304_25 (sequence is synthesized)
aaagaaaagtgaaaagcctcttgaaaatgatactggcttccaggctcaggatattagtggccagaagaatggccgtggtgtgatttttggccaaacaagtagcacttttacatttgcaga

SEQ ID NO: 668509 - DNA, 120 bp, Artificial Sequence
  ENSG00000185304_26 (sequence is synthesized)
tgttgcaaaatcaacttcaggagaaggatttcagtttggcaaaaaagaccccaatttcaagggattttcaggtgctggagaaaaattattctcatcacaatgcggtaaaatggccaataa

SEQ ID NO: 668510 - DNA, 120 bp, Artificial Sequence
  ENSG00000185304_27 (sequence is synthesized)
agcaaacacttccggtgactttgagaaagatgatgatgcctgtaagactgaggacagcgatgacatccattttgaaccagtagttcaaatgcctgaaaaagtagaacttgtaacaggaga

SEQ ID NO: 668511 - DNA, 120 bp, Artificial Sequence
  ENSG00000185304_28 (sequence is synthesized)
ggaacttaaaaattctcaaaaatgaggtcaatggcaaaccaagaatgctgatgcgaagagaccaagtactaaaagtgtgtgctaatcattggataacaactacaatgaacctgaagcccc

SEQ ID NO: 668512 - DNA, 120 bp, Artificial Sequence
  ENSG00000185304_29 (sequence is synthesized)
tctctggatcagatagagcatggatgtggttagccagtgatttctctgatggtgatgccaaactagagcggttggcagcacaatttaaaacaccagagctggctgaagaattcaagcaga

SEQ ID NO: 668513 - DNA, 120 bp, Artificial Sequence
  ENSG00000185304_30 (sequence is synthesized)
aatttgaggaatgccagcggcttctgttagacataccacttcaaactccccataaacttgtagatactggcagagctgccaagctaatacagagagctgaagaaatgaagagtggactga

SEQ ID NO: 668514 - DNA, 120 bp, Artificial Sequence
  ENSG00000185304_31 (sequence is synthesized)
aagatttcaaaacgtttttgacaaatgatcaaacaaaagtcactgaggaagaaaataagggttcaggtacaggtgcagccggtgcctcagacacaacaataaaacccaatcctgaaaaca

SEQ ID NO: 668515 - DNA, 120 bp, Artificial Sequence
  ENSG00000185304_32 (sequence is synthesized)
ctgggcccacattagaatgggataactatgatttaagggaagatgctttggatgataatgttagtagtagctcagtacatgattctccgttggcaagtagccctgtgagaaaaaatattt

SEQ ID NO: 668516 - DNA, 120 bp, Artificial Sequence
  ENSG00000185304_33 (sequence is synthesized)
tccgctttgatgagtcaacaacaggatttaacttcagttttaaatctgctttgagtctatctaagtctcctgccaagttgaatcagagtgggacttcagttggcactgatgaagaatctg

SEQ ID NO: 668517 - DNA, 120 bp, Artificial Sequence
  ENSG00000185304_34 (sequence is synthesized)
atgttactcaagaagaagagagagatggacagtactttgaacctgttgttcctttacctgatctagttgaagtatccagtggtgaggaaaatgaacaagttgtttttagtcacatggcag

SEQ ID NO: 668518 - DNA, 120 bp, Artificial Sequence
  ENSG00000185304_35 (sequence is synthesized)
aactctacagatatgataaagatgttggtcaatggaaagaaaggggcattggtgatataaagattttacagaattatgataataagcaagttcgtatagtgatgagaagggaccaagtat

SEQ ID NO: 668519 - DNA, 120 bp, Artificial Sequence
  ENSG00000185304_36 (sequence is synthesized)
taaaactttgtgccaatcacagaataactccagacatgagtttgcaaaatatgaaagggacagaaagagtatgggtgtggactgcatgtgattttgcagatggagaaagaaaagtagagc

SEQ ID NO: 668520 - DNA, 120 bp, Artificial Sequence
  ENSG00000185304_37 (sequence is synthesized)
atttagctgttcgttttaaactacaggatgttgcagactcatttaagaaaatttttgatgaagcaaaaacagcccaggaaaaagattctttgataacacctcatgtttctcggtcaagca

SEQ ID NO: 668521 - DNA, 120 bp, Artificial Sequence
  ENSG00000185304_38 (sequence is synthesized)
ctcccagagagtcaccatgtggcaaaattgctgtagctgtattagaagaaaccacaagagagaggacagatgttattcagggtgatgatgtagcagatgcagcttcagaagttgaagtgt

SEQ ID NO: 668522 - DNA, 120 bp, Artificial Sequence
  ENSG00000185304_39 (sequence is synthesized)
ctagcacatctgaaacaacaacaaaagcagtggtttctcctccaaagtttgtatttggttcagagtctgttaaaagaatttttagtagtgaaaaatcaaacccatttgcatttggcaaca

SEQ ID NO: 668523 - DNA, 120 bp, Artificial Sequence
  ENSG00000185304_40 (sequence is synthesized)
gttctgccactgggtctttgtttggatttagttttaatgcacctttgaaaagtaacgatagtgaaactagttcagtagcccagagtggatctgaaagcaaagtggaacctaaaaaatgtg

SEQ ID NO: 668524 - DNA, 120 bp, Artificial Sequence
  ENSG00000185304_41 (sequence is synthesized)
aactgtcaaagaactctgatatcgaacagtcttcagatagcaaagtcaaaaatctctctgcttcctttccaatggaagaatcttcaatcaactacacatttaaaacaccagaaaaggagc

SEQ ID NO: 668525 - DNA, 120 bp, Artificial Sequence
  ENSG00000185304_42 (sequence is synthesized)
ctccattatggcatgctgaatttaccaaagaagaattggttcagaagctcagttccaccacaaaaagtgcagatcagttaaacggcctgcttcgggaaacagaggcaaccagtgcagtcc

SEQ ID NO: 668526 - DNA, 120 bp, Artificial Sequence
  ENSG00000185304_43 (sequence is synthesized)
tgaaataagaagattggaaaggaatcaagaggagtctgcagctaacgtggaacacttgaagaacgtcttgctgcagttcattttcttgaagccaggtagtgagagagagagccttcttcc

SEQ ID NO: 668527 - DNA, 120 bp, Artificial Sequence
  ENSG00000185304_44 (sequence is synthesized)
caggtagtgagagagagagccttcttcctgttataaatacgatgttgcagctcagccctgaagaaaagggaaaacttgctgcggttgctcaaggtcttcaagaaacctccatacccaaga

SEQ ID NO: 668528 - DNA, 120 bp, Artificial Sequence
  ENSG00000185304_45 (sequence is synthesized)
aaaaatagaaagcaaccatgttctactatggtgccaaaaatagttgaacatcgacatcaaaaagattctttctgtctgcttattcacatattctggtttgaattaaaagtgatgaaatta

SEQ ID NO: 668529 - DNA, 120 bp, Artificial Sequence
  ENSG00000185304_46 (sequence is synthesized)
tcctaaatacagttggccctctgtatccatgggttccacatccacaaattcaaccaactgtggatggaaaagacttgaaaaagatgagagaaaataacaatatgacaataaaacataata

SEQ ID NO: 668530 - DNA, 120 bp, Artificial Sequence
  ENSG00000185304_47 (sequence is synthesized)
caaataaaaacaatacagtataacaacgattacatagcatttacattatattagggattgcacaagagaaggtatgtaggttatatgcaaatactgcaccattttacataagggacttga

SEQ ID NO: 668531 - DNA, 120 bp, Artificial Sequence
  ENSG00000185304_48 (sequence is synthesized)
gaagcatggattttggtagccacaggggtcctggaaccaatccctcacagacacagacggacactttacagtagatgaacacaaagatgaaaggaaaagtctgacctaggtctgcgggga

SEQ ID NO: 668532 - DNA, 120 bp, Artificial Sequence
  ENSG00000185304_49 (sequence is synthesized)
gaagtggaactccatttttgacaggtgatgccattttttgttttggacatcgtccctctgtagttctttccattcccagtcttgcactctgaaagatacactgaaggaaagtccacacag

SEQ ID NO: 668533 - DNA, 120 bp, Artificial Sequence
  ENSG00000185304_50 (sequence is synthesized)
tggtcaaagtctttcacaagacaccacgtgaaggtctgcacagcacagtcacattgagaaaaagatctcatgcaccagaccccctgtttctgctttctaaaagatcatcttttgcacctg

SEQ ID NO: 668534 - DNA, 120 bp, Artificial Sequence
  ENSG00000185304_51 (sequence is synthesized)
caaaaaggctgcagtaaactgggccattccatactttgattcatgtattcaaatgctacttatgagctctctgtgtattgagccccaccaggatgctggggacacacggggcacagtgca

SEQ ID NO: 668535 - DNA, 120 bp, Artificial Sequence
  ENSG00000185304_52 (sequence is synthesized)
gccagaggcttggccatcatagagctcacattctagtggaatcagacaggggggttacaggaaatattcaagtaaacaatataaaatgagatcacttaatgatgatacatggatacatgt

SEQ ID NO: 668536 - DNA, 120 bp, Artificial Sequence
  ENSG00000185304_53 (sequence is synthesized)
tacatacatgatgagacagagtaagagaatggggaaagggtttttagatgggggaatggcaggcttttccgaggctgaaagagatccaacccacttctatttcttcaggctcccagtgat

SEQ ID NO: 668537 - DNA, 120 bp, Artificial Sequence
  ENSG00000185304_54 (sequence is synthesized)
atgaaaaagtgccaaacaggactataaaattgtggtctactgtaaatggtttgcagtaaaagttctcaaccagcttccactcaaccaactcaccagttagacaatgggccctctcctgtg

SEQ ID NO: 668538 - DNA, 120 bp, Artificial Sequence
  ENSG00000185304_55 (sequence is synthesized)
tttaaaacagtccggtgcccacctgggtccacatgcagctggcaggtgtttgctagtgtgcccacccatgtctgttccccccacgtgagttatgtgcttacaacgagtcgtttctttgca

SEQ ID NO: 668539 - DNA, 120 bp, Artificial Sequence
  ENSG00000185304_56 (sequence is synthesized)
ttttccaactttcttacatttatatttaattaaagatgatctaaactgagaaatgaatgtgaaaagaaacaaagctcttttttgtttggtttttaactaaattaaatgtttttaacaagt

SEQ ID NO: 668540 - DNA, 120 bp, Artificial Sequence
  ENSG00000185305_0 (sequence is synthesized)
gttgctggctttttcaggagctgctcgctcgcagccagagacgctgctttttttttccgggttcggagccgttccggatgctttaggctgccggatgtctgatctccgaataactgaggc

SEQ ID NO: 668541 - DNA, 120 bp, Artificial Sequence
  ENSG00000185305_1 (sequence is synthesized)
gtttctgtacatggattatctgtgttttagagcactttgctgcaagggaccaccacctgcacgaccagaatatgacctggtttgcataggcctcacaggttctggcaaaaccagtctgtt

SEQ ID NO: 668542 - DNA, 120 bp, Artificial Sequence
  ENSG00000185305_2 (sequence is synthesized)
gtccaaactctgcagtgaaagccccgataacgtcgtgtcgaccacaggttttagtattaaagcagtgccattccagaatgccatcttgaatgtaaaagaacttggaggggctgataacat

SEQ ID NO: 668543 - DNA, 120 bp, Artificial Sequence
  ENSG00000185305_3 (sequence is synthesized)
ccggaaatactggagccgctactaccaaggatctcaaggggtaatatttgtattagacagtgcctcttcagaggatgatttagaagctgctagaaatgagctgcactcagctcttcagca

SEQ ID NO: 668544 - DNA, 120 bp, Artificial Sequence
  ENSG00000185305_4 (sequence is synthesized)
tccacagttatgcactttaccctttttaatattggccaatcatcaagacaagccagcagctcgctcagtacaagagatcaaaaaatattttgaacttgaaccacttgcacgtggaaaacg

SEQ ID NO: 668545 - DNA, 120 bp, Artificial Sequence
  ENSG00000185305_5 (sequence is synthesized)
ctggattctacagccctgctcactggatgacatggatgcactgaaagacagcttctctcagctgattaatttgttagaagaaaaagaccatgaagctgtaagaatgtgaaatctggcaaa

SEQ ID NO: 668546 - DNA, 120 bp, Artificial Sequence
  ENSG00000185305_6 (sequence is synthesized)
gaaaacaggctcccaaaaggccttgaacctatcatgttagtttctcattttaattttattttggtatcaagactatattggcttcagtatctattttcctctggtcatttcagactctca

SEQ ID NO: 668547 - DNA, 120 bp, Artificial Sequence
  ENSG00000185305_7 (sequence is synthesized)
tctctctattaaagtgaatattctgtagatcagatgaattatcatcggcattaacgtcaagtacacactactgagagagaatttattctctgtttaccactaattatcttccccgcatgt

SEQ ID NO: 668548 - DNA, 120 bp, Artificial Sequence
  ENSG00000185305_8 (sequence is synthesized)
ctcttccttctgttgttctaagcatctcttctatactctgtgctgaaacggatggaattcatggcttatggaaatcaaatcccttttgaaggactcagaaagactcacaagaccttgatc

SEQ ID NO: 668549 - DNA, 120 bp, Artificial Sequence
  ENSG00000185305_9 (sequence is synthesized)
gatcattttctctgggtttgggagtggagtattatgtgactgggactccacaaaatatttatattattttcaagacctattgggggttttgttttattttatctaatttttttttttttt

SEQ ID NO: 668550 - DNA, 120 bp, Artificial Sequence
  ENSG00000185305_10 (sequence is synthesized)
atactgagcttatagactatgagagaaaagtgagcaccaaaaacttcattaatcaccttatcaggaaggaatatcctgccatagtaaaattggctctgaagagcttagaggcaagttaca

SEQ ID NO: 668551 - DNA, 120 bp, Artificial Sequence
  ENSG00000185305_11 (sequence is synthesized)
caatgttttcttgattacatctgaagtctcttctcttttaagagcaaagacattgtttcagtttctgagagtggttagaggaaatttaggtacaatgcatgcatcacagactgtatttga

SEQ ID NO: 668552 - DNA, 120 bp, Artificial Sequence
  ENSG00000185305_12 (sequence is synthesized)
ttgattcgagtcttcaaatattgtttaatggaatgatgagcctgcataaagtgaagctgcaatgtaacataggtatctttttctaaaaacttcaagtgtttgattaaaatagagaaaata

SEQ ID NO: 668553 - DNA, 120 bp, Artificial Sequence
  ENSG00000185305_13 (sequence is synthesized)
aaagataacaaagacagaatcatctatatattcattcattacgtgttactgtagtttattggaatctgttaatgccttcctctagtagttaaaggtttatcagtatttctattataaacc

SEQ ID NO: 668554 - DNA, 120 bp, Artificial Sequence
  ENSG00000185305_14 (sequence is synthesized)
tctattttcaggggtttcaatgtgcccttaaaattgtgctggggctgcagcaaataaataatattgggactcatattcagtctttggaactagttttttttccatttaatttaaatgaca

SEQ ID NO: 668555 - DNA, 120 bp, Artificial Sequence
  ENSG00000185305_15 (sequence is synthesized)
aaattgcatagggataaatgtacagttttactaaggtttagcacctttgatcttttctaaatcaggaaaaaaatctatgcatattgaggttcacagatgaaatattctttggcatacttt

SEQ ID NO: 668556 - DNA, 120 bp, Artificial Sequence
  ENSG00000185305_16 (sequence is synthesized)
gtagactttgaccacttaaaatactaagtggccaaatgataaaaaaaactgctccctgcacatgagtgtaaaaacatgtttgtaattttaagtaaaatggactgatacccaaataccaca

SEQ ID NO: 668557 - DNA, 120 bp, Artificial Sequence
  ENSG00000185305_17 (sequence is synthesized)
gactcacactatattacagaatgatgtaatacctggtaattctccagaagatagacttcagacccttaatgccatttaaatgtagtttttgtggtttaatcttatgagtagattgtaatg

SEQ ID NO: 668558 - DNA, 120 bp, Artificial Sequence
  ENSG00000185305_18 (sequence is synthesized)
aaatcattacctttgaaacatcaaacacttctttaagctttttttttttaatgtcatgaatcaggaaggatacatagtgattcgtatacaattttgtctgcagcattcttgaatattttt

SEQ ID NO: 668559 - DNA, 120 bp, Artificial Sequence
  ENSG00000185305_19 (sequence is synthesized)
aacactgtgtaatccctgagcagcacaaaacttttattccgatgaccagttacacaattcctgtttttattttgtcctgttgtgctcatcttctatgaaaaataaatgattattaggcct

SEQ ID NO: 668560 - DNA, 120 bp, Artificial Sequence
  ENSG00000185305_20 (sequence is synthesized)
tgctttccctgcaagttcattaaatgtagaatgttgtctttttaagacaccgtggctgagtgctcctaagccatctgttaaatgacttcccgtggtctgcgtgtgtgtgttcatgtgtgc

SEQ ID NO: 668561 - DNA, 120 bp, Artificial Sequence
  ENSG00000185305_21 (sequence is synthesized)
gccagtgatgggcctctcctcaaacccacgactgtctgcagcgtctcagccgtcagaatgaaaacattatcaatcagtacccaacaacagctgtttttgacaagtttctgtctgacgcct

SEQ ID NO: 668562 - DNA, 120 bp, Artificial Sequence
  ENSG00000185305_22 (sequence is synthesized)
aatgctttacaactgtcaataaggctccctctttgtctagcaggtcggagctcgctgtcttgctgcttccgcgcggcatcctgtccttgtaaccctagaatttgccatgttttggaaatc

SEQ ID NO: 668563 - DNA, 120 bp, Artificial Sequence
  ENSG00000185305_23 (sequence is synthesized)
cacgtgggggcggggtggggcctgaacgggtggggatgggtgggtgggtggtggggtgggtgggatggctgggggtgggagtgtaagtcccttttcctactttcatgtaaagtgccacag

SEQ ID NO: 668564 - DNA, 120 bp, Artificial Sequence
  ENSG00000185305_24 (sequence is synthesized)
gtgtcttggtttgcatattcaaatattatataggaaaaacagtctgttatgtatttcttcacctagcttcttgtaatatttatggacgtttccagtttttgtaccttcttagctaaagca

SEQ ID NO: 668565 - DNA, 120 bp, Artificial Sequence
  ENSG00000185305_25 (sequence is synthesized)
gttgcctttttgtaatggcaattaatttatatgataaaactttgtatccactgtagttgacagtattggttgctaattaactgccatattgccctgtctttctattaaaaaaatactgta

SEQ ID NO: 668566 - DNA, 120 bp, Artificial Sequence
  ENSG00000185305_26 (sequence is synthesized)
cctgtacttagaggctaacagattcatgtggacatttaccaggcaagaccaacttgtattgtccatgatttctacgatttccactatcttcaaatgaaaaataaacgctgagtagaactg

SEQ ID NO: 668567 - DNA, 120 bp, Artificial Sequence
  ENSG00000185305_27 (sequence is synthesized)
taattcaaacataatgataacttattttagtaggtggttcatttttatcttgataatatatttcctagaaatatttccttctcttcgtatgttttaaaaattgttgaagagttctaagta

SEQ ID NO: 668568 - DNA, 120 bp, Artificial Sequence
  ENSG00000185305_28 (sequence is synthesized)
ggtggcatgtcgcctctcggatctcggcgtgcccgatggccccctgccttgaggagcagcctttttgctttctttctttgggataggatgcctctggggttctttctcccgcagccggct

SEQ ID NO: 668569 - DNA, 120 bp, Artificial Sequence
  ENSG00000185306_0 (sequence is synthesized)
agggctggggagggcgctccagggaagccgacctagcgtcgattcctgcagttgcggcccgggtccccgcgcctggagaggaggcgacgcgtggccggcggctttgtggcgcgcgggttc

SEQ ID NO: 668570 - DNA, 120 bp, Artificial Sequence
  ENSG00000185306_1 (sequence is synthesized)
gttccagcgcgggggcggggagagggcgagctgagggcctcgagtcccagcactccgccacgctgcgggcgccgggcatggccagccccttgccgtccggcttccccgcgcgcaggaaca

SEQ ID NO: 668571 - DNA, 120 bp, Artificial Sequence
  ENSG00000185306_2 (sequence is synthesized)
cctggatgtgttcctgcggcggcatctgccgcccgaggtctacgacgcggtccgcgcctacgagccatgcatcgtggtgtccaactctgagaaccacatcctcaagtatgtggtgctaag

SEQ ID NO: 668572 - DNA, 120 bp, Artificial Sequence
  ENSG00000185306_3 (sequence is synthesized)
cgaccggctcgtctacctaaccgagaacccgcccaagtccatccggcgggtagtggctctgcgggacgtcgtggccattgacctgattgatgattacccggaatttttgagttcgccaga

SEQ ID NO: 668573 - DNA, 120 bp, Artificial Sequence
  ENSG00000185306_4 (sequence is synthesized)
tagagaaatcagccaacacattcgtatcatctattcttcaaccgttttgaaaaaagagtgtaaaaagtcaaacagtgtcaggaaattcctatttccatttcatcatactaaagctaacaa

SEQ ID NO: 668574 - DNA, 120 bp, Artificial Sequence
  ENSG00000185306_5 (sequence is synthesized)
caagaaagtcaaggaagaaaagaacggccttgccttttggagaagcaaagagtccagaagtctgaaagaatctcctctcagggaccagcaggagagcagtacaccatccaaggactcaac

SEQ ID NO: 668575 - DNA, 120 bp, Artificial Sequence
  ENSG00000185306_6 (sequence is synthesized)
tctctgtcctcgtccaggcctcaaaaagctgtcccttcatggccaaggtgcctttcgacccctaccttccccctccaggaggagctctcagtctgcaccaacaactggcaaggctgtcag

SEQ ID NO: 668576 - DNA, 120 bp, Artificial Sequence
  ENSG00000185306_7 (sequence is synthesized)
cgagccatcttgcacaacaaacacaaaagaaccccagggacttccagatcacaactccataagtgaaattcctttcaagtgcaatgggaatggaaatgagttttacttaggaaattccct

SEQ ID NO: 668577 - DNA, 120 bp, Artificial Sequence
  ENSG00000185306_8 (sequence is synthesized)
cttagattccccttcacagagcaactcaaatttagagaaaaaggagtcagaacttcatttgtatgttatttccacaacctcatcaatatttctgcacttaaaaagttcatggaacaatta

SEQ ID NO: 668578 - DNA, 120 bp, Artificial Sequence
  ENSG00000185306_9 (sequence is synthesized)
tattataaaagctactcttttacaagatcccttctatgctagtgagttcagtcctgctattggaagtcaaaagccatataggtctgaggagaaaattaagcacttcagtcaacttaaatc

SEQ ID NO: 668579 - DNA, 120 bp, Artificial Sequence
  ENSG00000185306_10 (sequence is synthesized)
tgaactttttcttaaagacaattctttgaggaggatactttctttacttatggaacttaaagtagcagcccagaaaaacttcattctgaaaaggcttttctggaagaccagtgacctttt

SEQ ID NO: 668580 - DNA, 120 bp, Artificial Sequence
  ENSG00000185306_11 (sequence is synthesized)
ctatttcatagtaaacaaacttcatgagtacttgccggagtctagggataagaatgcactacaaaatcaaagccaaagggttgatgagctggtggcatgcattgaaattatacagaccct

SEQ ID NO: 668581 - DNA, 120 bp, Artificial Sequence
  ENSG00000185306_12 (sequence is synthesized)
agtattgatgttcagagaaacagaaaccgagtcatcacgcctgaacacattggcagctaagaagggagcactatttaatctcttggtaattttaattagtgagcctcagattccaaaatc

SEQ ID NO: 668582 - DNA, 120 bp, Artificial Sequence
  ENSG00000185306_13 (sequence is synthesized)
ttgtcctgtgtttgatatccagttggtggctgattcagctttagtcagaatgtcttttgacgctgagttacagaagcttattctggagtatacaaatactgctacagcacttttatatga

SEQ ID NO: 668583 - DNA, 120 bp, Artificial Sequence
  ENSG00000185306_14 (sequence is synthesized)
gatacttctggtctttcagcagggaaatctcggattgggatccacaaagtttgctattagctggataatgtcctttctacaaagctgtcctcccatcattacttttgtggccagtattgt

SEQ ID NO: 668584 - DNA, 120 bp, Artificial Sequence
  ENSG00000185306_15 (sequence is synthesized)
gaaacaagtggtgaggggtctttcagcttcatttcagctgctaagtccctgccaagcagttctgttgtaccagcaattttacatcctcaagagctgtctgcggcacagcaggactctagc

SEQ ID NO: 668585 - DNA, 120 bp, Artificial Sequence
  ENSG00000185306_16 (sequence is synthesized)
tgagtatattaggaataactacagagaagaattcaggtactttattcacatgccagccttgcagaaaaggctcccattgtgttaccccatcactcaacctaccattcaactttttcatga

SEQ ID NO: 668586 - DNA, 120 bp, Artificial Sequence
  ENSG00000185306_17 (sequence is synthesized)
agttctgaaattggttgaatagaaacaaacaatgtacgcaatgttaataagagtataaaatgttaatcaagagtcaacttgatattcacgagaaacatttttttatttgtttaatatctg

SEQ ID NO: 668587 - DNA, 120 bp, Artificial Sequence
  ENSG00000185306_18 (sequence is synthesized)
catcaatacctctctatgagaagtttaaaattttaaaaaataaatttgatttattataagtgtgcaaagatctttatgccattgggcaaaagagccatttctttattagagtagttcttc

SEQ ID NO: 668588 - DNA, 120 bp, Artificial Sequence
  ENSG00000185306_19 (sequence is synthesized)
aaactcactcttgccacaaaataaacgactatccatcaagacacaggaaaaaggaatgcagggatttaggaaagctgtactcacttctcttccaccttagcagcaaaagcaagaaggttc

SEQ ID NO: 668589 - DNA, 120 bp, Artificial Sequence
  ENSG00000185306_20 (sequence is synthesized)
tcaaaattctcctgataatagttctgttgcttaagcaataggatgccggggagtgtgggggcctgaggcatgggcattcaagttcttctcaaggtgttttatcttctcagcttgggcaca

SEQ ID NO: 668590 - DNA, 120 bp, Artificial Sequence
  ENSG00000185306_21 (sequence is synthesized)
gtgttctcggtgaaaccatgccaggcacaggagcatgctcttcacccgattctgtactcagagccatccaaaaaccattatttcgactaggttcttggagtccactatgtccaccaccag

SEQ ID NO: 668591 - DNA, 120 bp, Artificial Sequence
  ENSG00000185306_22 (sequence is synthesized)
cagggcctggcgcatccacgccacttctggaattacagcttggtctgggcctaaggtcactcactcaagatctcatccgccagccacgcctccaggtagaacaccaaagggtctctcagt

SEQ ID NO: 668592 - DNA, 120 bp, Artificial Sequence
  ENSG00000185306_23 (sequence is synthesized)
tcctgcaccagaaaccaccaaggccggaggccagagttttaaaatctgctacaaagaaacctacatccattctgacatacataaagtggtgctaaacagtagcgtttctccagaaaaaaa

SEQ ID NO: 668593 - DNA, 120 bp, Artificial Sequence
  ENSG00000185306_24 (sequence is synthesized)
ggttctaagacaaaaatctatcaagggaacagaagcctatggagagtgaacacagaaaatataatctggtgagtttcactggtgtaataatggtgagtggtgtgaagccacgaaacatcc

SEQ ID NO: 668594 - DNA, 120 bp, Artificial Sequence
  ENSG00000185306_25 (sequence is synthesized)
tgagataaactgttgtggggagtataagctacagagtgattatttgggaaatgctgagcaataggatgacaccctcctcctccacctatacaaattctagtgacaaaagtattcctggaa

SEQ ID NO: 668595 - DNA, 120 bp, Artificial Sequence
  ENSG00000185306_26 (sequence is synthesized)
gaatgagcagaacacaggcatagctgtatagaatgtcacttcctcttttatcatagagaaagaagcttggacttcaacaaaattaagtgcatggtgccactctgtttcaggcatctgtgg

SEQ ID NO: 668596 - DNA, 120 bp, Artificial Sequence
  ENSG00000185306_27 (sequence is synthesized)
gctaatttgtgtagtcccatagagtctctatgaaagataaattgtctacgagcagttatggctctcccacaaccatttaaaaacttgtctttactatattttatgccataaactaattta

SEQ ID NO: 668597 - DNA, 120 bp, Artificial Sequence
  ENSG00000185306_28 (sequence is synthesized)
attccacaaatacttaactttggcatcaccgtgaggtgttgaatttggacttctaagaacataggaactggactctccattcaacttattatgacttgagggaggatcagagaaaaatct

SEQ ID NO: 668598 - DNA, 120 bp, Artificial Sequence
  ENSG00000185306_29 (sequence is synthesized)
acttccaaagaaagagttcctaagccagattcgcctgtgttgggcagtggagataattactaggacattttattccaggttctgacagagccaaatgaccagctatttgacttcaagcaa

SEQ ID NO: 668599 - DNA, 120 bp, Artificial Sequence
  ENSG00000185306_30 (sequence is synthesized)
gtcaggccccctttccaggccacatctgtttcttcctgggcttcctctgctaggtggaagggtgggactagatgttctccaagttctcttccagctcttacattctctgcctgtgacaag

SEQ ID NO: 668600 - DNA, 120 bp, Artificial Sequence
  ENSG00000185306_31 (sequence is synthesized)
acatttaacactctgaaatggagtagtgtgtttctctgctatctcggctcagtggatgattttgcactaacttcaagtaatcctcctttctttttacccaaagtttccctttcagctgtc

SEQ ID NO: 668601 - DNA, 120 bp, Artificial Sequence
  ENSG00000185306_32 (sequence is synthesized)
accagccatcaccccataaagtgtccaagtcttttccttcattacccaatgaggagtccacattttctaccctcaattttgggggcagagagagaggagcaaaatggtgtttttgagtgt

SEQ ID NO: 668602 - DNA, 120 bp, Artificial Sequence
  ENSG00000185306_33 (sequence is synthesized)
cctggctgttagatgggggattattttcaagagacggtcaatcaaaggaatatgaaaagattcttggaacataggcaagtattacctcaaaccggacaaagaatgtactgatgaacccgc

SEQ ID NO: 668603 - DNA, 120 bp, Artificial Sequence
  ENSG00000185306_34 (sequence is synthesized)
aggatgacaacgagaggatcaactcagctctgccttagcttctccgcagtgccctggatctgggctagtagtcatgcaggctctagtgagggcttggggtttctctcccacatgatttct

SEQ ID NO: 668604 - DNA, 120 bp, Artificial Sequence
  ENSG00000185306_35 (sequence is synthesized)
gcatgcctctcccactcctctctttgccctgggatcttactttaatctctgggagcaaaatctctgtcaaaatatatctgaatctttttatgtggggctaaagtcagtggttttttggag

SEQ ID NO: 668605 - DNA, 120 bp, Artificial Sequence
  ENSG00000185306_36 (sequence is synthesized)
agttaatggttgaatatttgtcaccctgattttcttcagtctactctgtataactcatgtctattcatttgcacagtctgggatcagaaactaataattcgaaggattgtccaaccacta

SEQ ID NO: 668606 - DNA, 120 bp, Artificial Sequence
  ENSG00000185306_37 (sequence is synthesized)
gctgagtatattaggaataactacagagaagaattcaggcttttactgaggccgtgggggatgagttctactcttccctcttgacttggccctagtagtcaccacagcttgaccctttca

SEQ ID NO: 668607 - DNA, 120 bp, Artificial Sequence
  ENSG00000185306_38 (sequence is synthesized)
tatgatatatgtatattatgtgattatgttatatgattaataatatatcaaaaatgcttgtacttgagatggtctccaaaactggttgatttcaatgatatgaactttgctcttaagtgc

SEQ ID NO: 668608 - DNA, 120 bp, Artificial Sequence
  ENSG00000185306_39 (sequence is synthesized)
tcatctagtttattttccaaaactgattttaaggattcgattaatcaggataaaaatgtatttaagaatgagtatccttttatatactacttgaactttatgaatataacttgtttattt

SEQ ID NO: 668609 - DNA, 120 bp, Artificial Sequence
  ENSG00000185306_40 (sequence is synthesized)
ccttgagtcttttagggaaatctcggattgggatccacaaagtttgctattagctggataatgtcctttctacaaagctgtcctcccatcattacttttgtggccagtattgtgaaacaa

SEQ ID NO: 668610 - DNA, 120 bp, Artificial Sequence
  ENSG00000185306_41 (sequence is synthesized)
aagaatctcctctcagaaagctactcttttacaagatcccttctatgctagtgagttcagtcctgctattggaagtcaaaagccatataggtctgaggagaaaattaagcacttcagtca

SEQ ID NO: 668611 - DNA, 120 bp, Artificial Sequence
  ENSG00000185313_0 (sequence is synthesized)
ttcttgcttcacacactagcctcttggctagagaacagacatcagatggagtttcttctggctatgcctgaatgttaagctgaacgtatgttccaggagctcgtggtctccagtagaggc

SEQ ID NO: 668612 - DNA, 120 bp, Artificial Sequence
  ENSG00000185313_1 (sequence is synthesized)
aatctgggatagaagagaagatatttcttacgtagaagacaagcaagattgagcagcaaagagtataaatacttcctgaagaagaatgagaagatggaattccccattggatccctcgaa

SEQ ID NO: 668613 - DNA, 120 bp, Artificial Sequence
  ENSG00000185313_2 (sequence is synthesized)
actaacaacttccgtcgctttactccggagtcactggtggagatagagaagcaaattgctgccaagcagggaacaaagaaagccagagagaagcatagggagcagaaggaccaagaagag

SEQ ID NO: 668614 - DNA, 120 bp, Artificial Sequence
  ENSG00000185313_3 (sequence is synthesized)
aagcctcggccccagctggacttgaaagcctgcaaccagctgcccaagttctatggtgagctcccagcagaactgatcggggagcccctggaggatctagatccgttctacagcacacac

SEQ ID NO: 668615 - DNA, 120 bp, Artificial Sequence
  ENSG00000185313_4 (sequence is synthesized)
cggacatttatggtgctgaacaaagggaggaccatttcccggtttagtgccactcgggccctgtggctattcagtcctttcaacctgatcagaagaacggccatcaaagtgtctgtccac

SEQ ID NO: 668616 - DNA, 120 bp, Artificial Sequence
  ENSG00000185313_5 (sequence is synthesized)
tcgtggttcagtttatttattacggtcactattttggttaattgtgtgtgcatgacccgaactgaccttccagagaaaattgaatatgtcttcactgtcatttacacctttgaagccttg

SEQ ID NO: 668617 - DNA, 120 bp, Artificial Sequence
  ENSG00000185313_6 (sequence is synthesized)
ataaagatactggcaagaggattttgtctaaatgagttcacgtacctgagagatccttggaactggctggattttagcgtcattaccctggcatatgttggcacagcaatagatctccgt

SEQ ID NO: 668618 - DNA, 120 bp, Artificial Sequence
  ENSG00000185313_7 (sequence is synthesized)
gggatctcaggcctgcggacattcagagttcttagagcattaaaaacagtttctgtgatcccaggcctgaaggtcattgtgggggccctgattcactcagtgaagaaactggctgatgtg

SEQ ID NO: 668619 - DNA, 120 bp, Artificial Sequence
  ENSG00000185313_8 (sequence is synthesized)
accatcctcaccatcttctgcctaagtgtttttgccttggtggggctgcaactcttcaagggcaacctcaaaaataaatgtgtcaagaatgacatggctgtcaatgagacaaccaactac

SEQ ID NO: 668620 - DNA, 120 bp, Artificial Sequence
  ENSG00000185313_9 (sequence is synthesized)
tcatctcacagaaaaccagatatctacataaataagcgaggcacttctgaccccttactgtgtggcaatggatctgactcaggccactgccctgatggttatatctgccttaaaacttct

SEQ ID NO: 668621 - DNA, 120 bp, Artificial Sequence
  ENSG00000185313_10 (sequence is synthesized)
gacaacccggattttaactacaccagctttgattcctttgcttgggctttcctctcactgttccgcctcatgacacaggattcctgggaacgcctctaccagcagaccctgaggacttct

SEQ ID NO: 668622 - DNA, 120 bp, Artificial Sequence
  ENSG00000185313_11 (sequence is synthesized)
gggaaaatctatatgatcttttttgtgctcgtaatcttcctgggatctttctacctggtcaacttgatcttggctgtagtcaccatggcgtatgaggagcagaaccaggcaaccactgat

SEQ ID NO: 668623 - DNA, 120 bp, Artificial Sequence
  ENSG00000185313_12 (sequence is synthesized)
gaaattgaagcaaaggagaagaagttccaggaggccctcgagatgctccggaaggagcaggaggtgctagcagcactagggattgacacaacctctctccactcccacaatggatcacct

SEQ ID NO: 668624 - DNA, 120 bp, Artificial Sequence
  ENSG00000185313_13 (sequence is synthesized)
ttaacctccaaaaatgccagtgagagaaggcatagaataaagccaagagtgtcagagggctccacagaagacaacaaatcaccccgctctgatccttacaaccagcgcaggatgtctttt

SEQ ID NO: 668625 - DNA, 120 bp, Artificial Sequence
  ENSG00000185313_14 (sequence is synthesized)
ctaggcctcgcctctggaaaacgccgggctagtcatggcagtgtgttccatttccggtcccctggccgagatatctcactccctgagggagtcacagatgatggagtctttcctggagac

SEQ ID NO: 668626 - DNA, 120 bp, Artificial Sequence
  ENSG00000185313_15 (sequence is synthesized)
cacgaaagccatcggggctctctgctgctgggtgggggtgctggccagcaaggccccctccctagaagccctcttcctcaacccagcaaccctgactccaggcatggagaagatgaacac

SEQ ID NO: 668627 - DNA, 120 bp, Artificial Sequence
  ENSG00000185313_16 (sequence is synthesized)
caaccgccgcccactagtgagcttgcccctggagctgtcgatgtctcggcattcgatgcaggacaaaagaagactttcttgtcagcagaatacttagatgaacctttccgggcccaaagg

SEQ ID NO: 668628 - DNA, 120 bp, Artificial Sequence
  ENSG00000185313_17 (sequence is synthesized)
gcaatgagtgttgtcagtatcataacctccgtccttgaggaactcgaggagtctgaacagaagtgcccaccctgcttgaccagcttgtctcagaagtatctgatctgggattgctgcccc

SEQ ID NO: 668629 - DNA, 120 bp, Artificial Sequence
  ENSG00000185313_18 (sequence is synthesized)
atgtgggtgaagctcaagacaattctctttgggcttgtgacggatccctttgcagagctcaccatcaccttgtgcatcgtggtgaacaccatcttcatggccatggagcaccatggcatg

SEQ ID NO: 668630 - DNA, 120 bp, Artificial Sequence
  ENSG00000185313_19 (sequence is synthesized)
agccctaccttcgaagccatgctccagataggcaacatcgtctttaccatattttttactgctgaaatggtcttcaaaatcattgccttcgacccatactattatttccagaagaagtgg

SEQ ID NO: 668631 - DNA, 120 bp, Artificial Sequence
  ENSG00000185313_20 (sequence is synthesized)
aatatctttgactgcatcatcgtcactgtgagtctgctagagctgggcgtggccaagaagggaagcctgtctgtgctgcggagcttccgcttgctgcgcgtattcaagctggccaaatcc

SEQ ID NO: 668632 - DNA, 120 bp, Artificial Sequence
  ENSG00000185313_21 (sequence is synthesized)
tggcccaccttaaacacactcatcaagatcatcggaaactcagtgggggcactggggaacctcaccatcatcctggccatcattgtctttgtctttgctctggttggcaagcagctccta

SEQ ID NO: 668633 - DNA, 120 bp, Artificial Sequence
  ENSG00000185313_22 (sequence is synthesized)
ggggaaaactaccgtaacaaccgaaaaaatatctccgcgccccatgaagactggccccgctggcacatgcacgacttcttccactctttcctcattgtcttccgtatcctctgtggagag

SEQ ID NO: 668634 - DNA, 120 bp, Artificial Sequence
  ENSG00000185313_23 (sequence is synthesized)
tggattgagaacatgtgggcctgcatggaagttggccaaaaatccatatgcctcatccttttcttgacggtgatggtgctagggaacctggtggtgcttaacctgttcatcgccctgcta

SEQ ID NO: 668635 - DNA, 120 bp, Artificial Sequence
  ENSG00000185313_24 (sequence is synthesized)
ttgaactctttcagtgctgacaacctcacagccccggaggacgatggggaggtgaacaacctgcaggtggccctggcacggatccaggtctttggccatcgtaccaaacaggctctttgc

SEQ ID NO: 668636 - DNA, 120 bp, Artificial Sequence
  ENSG00000185313_25 (sequence is synthesized)
agcttcttcagcaggtcctgcccattcccccagcccaaggcagagcctgagctggtggtgaaactcccactctccagctccaaggctgagaaccacattgctgccaacactgccaggggg

SEQ ID NO: 668637 - DNA, 120 bp, Artificial Sequence
  ENSG00000185313_26 (sequence is synthesized)
agctctggagggctccaagctcccagaggccccagggatgagcacagtgacttcatcgctaatccgactgtgtgggtctctgtgcccattgctgagggtgaatctgatcttgatgacttg

SEQ ID NO: 668638 - DNA, 120 bp, Artificial Sequence
  ENSG00000185313_27 (sequence is synthesized)
gagcttccagcaggaagtgatccccaaaggacagcaggagcagctgcagcaagtcgagaggtgtggggaccacctgacacccaggagcccaggcactggaacatcttctgaggacctggc

SEQ ID NO: 668639 - DNA, 120 bp, Artificial Sequence
  ENSG00000185313_28 (sequence is synthesized)
tccatccctgggtgagacgtggaaagatgagtctgttcctcaggtccctgctgagggagtggacgacacaagctcctctgagggcagcacggtggactgcctagatcctgaggaaatcct

SEQ ID NO: 668640 - DNA, 120 bp, Artificial Sequence
  ENSG00000185313_29 (sequence is synthesized)
gaggaagatccctgagctggcagatgacctggaagaaccagatgactgcttcacagaaggatgcattcgccactgtccctgctgcaaactggataccaccaagagtccatgggatgtggg

SEQ ID NO: 668641 - DNA, 120 bp, Artificial Sequence
  ENSG00000185313_30 (sequence is synthesized)
ctggcaggtgcgcaagacttgctaccgtatcgtggagcacagctggtttgagagcttcatcatcttcatgatcctgctcagcagtggatctctggcctttgaagactattacctggacca

SEQ ID NO: 668642 - DNA, 120 bp, Artificial Sequence
  ENSG00000185313_31 (sequence is synthesized)
gaagcccacggtgaaagctttgctggagtacactgacagggtcttcacctttatctttgtgttcgagatgctgcttaagtgggtggcctatggcttcaaaaagtacttcaccaatgcctg

SEQ ID NO: 668643 - DNA, 120 bp, Artificial Sequence
  ENSG00000185313_32 (sequence is synthesized)
gtgctggctggacttcctcattgtgaatatctcactgataagtctcacagcgaagattctggaatattctgaagtggctcccatcaaagcccttcgaacccttcgcgctctgcggccact

SEQ ID NO: 668644 - DNA, 120 bp, Artificial Sequence
  ENSG00000185313_33 (sequence is synthesized)
gcgggctctttctcgatttgaaggcatgcgggtggtggtggatgccctggtgggcgccatcccatccatcatgaatgtcctcctcgtctgcctcatcttctggctcatcttcagcatcat

SEQ ID NO: 668645 - DNA, 120 bp, Artificial Sequence
  ENSG00000185313_34 (sequence is synthesized)
gggtgtgaacctcttcgcagggaagttttggaggtgcatcaactataccgatggagagttttcccttgtacctttgtcgattgtgaataacaagtctgactgcaagattcaaaactccac

SEQ ID NO: 668646 - DNA, 120 bp, Artificial Sequence
  ENSG00000185313_35 (sequence is synthesized)
tggcagcttcttctgggtcaatgtgaaagtcaactttgataatgttgcaatgggttaccttgcacttctgcaggtggcaacctttaaaggctggatggacattatgtatgcagctgttga

SEQ ID NO: 668647 - DNA, 120 bp, Artificial Sequence
  ENSG00000185313_36 (sequence is synthesized)
ttcccgggaggtcaacatgcaacccaagtgggaggacaacgtgtacatgtatttgtactttgtcatcttcatcatttttggaggcttcttcacactgaatctctttgttggggtcataat

SEQ ID NO: 668648 - DNA, 120 bp, Artificial Sequence
  ENSG00000185313_37 (sequence is synthesized)
tgacaacttcaatcaacagaaaaaaaagttagggggccaggacatcttcatgacagaggagcagaagaaatactacaatgccatgaagaagttgggctccaagaagccccagaagcccat

SEQ ID NO: 668649 - DNA, 120 bp, Artificial Sequence
  ENSG00000185313_38 (sequence is synthesized)
cccacggcccctgaacaagttccagggttttgtctttgacatcgtgaccagacaagcttttgacatcaccatcatggtcctcatctgcctcaacatgatcaccatgatggtggagactga

SEQ ID NO: 668650 - DNA, 120 bp, Artificial Sequence
  ENSG00000185313_39 (sequence is synthesized)
tgaccaaagtgaagaaaagacgaaaattctgggcaaaatcaaccagttctttgtggccgtcttcacaggcgaatgtgtcatgaagatgttcgctttgaggcagtactacttcacaaatgg

SEQ ID NO: 668651 - DNA, 120 bp, Artificial Sequence
  ENSG00000185313_40 (sequence is synthesized)
ctggaatgtgtttgacttcattgtggtggttctctccattgcgagcctgattttttctgcaattcttaagtcacttcaaagttacttctccccaacgctcttcagagtcatccgcctggc

SEQ ID NO: 668652 - DNA, 120 bp, Artificial Sequence
  ENSG00000185313_41 (sequence is synthesized)
ccgaattggccgcatcctcagactgatccgagcggccaaggggatccgcacactgctctttgccctcatgatgtccctgcctgccctcttcaacatcgggctgttgctattccttgtcat

SEQ ID NO: 668653 - DNA, 120 bp, Artificial Sequence
  ENSG00000185313_42 (sequence is synthesized)
gttcatctactctatcttcggtatgtccagctttccccatgtgaggtgggaggctggcatcgacgacatgttcaacttccagaccttcgccaacagcatgctgtgcctcttccagattac

SEQ ID NO: 668654 - DNA, 120 bp, Artificial Sequence
  ENSG00000185313_43 (sequence is synthesized)
cacgtcggccggctgggatggcctcctcagccccatcctcaacacagggcccccctactgtgaccccaatctgcccaacagcaatggcaccagaggggactgtgggagcccagccgtagg

SEQ ID NO: 668655 - DNA, 120 bp, Artificial Sequence
  ENSG00000185313_44 (sequence is synthesized)
catcatcttcttcaccacctacatcatcatctccttcctcatcatggtcaacatgtacattgcagtgattctggagaacttcaatgtggccacggaggagagcactgagcccctgagtga

SEQ ID NO: 668656 - DNA, 120 bp, Artificial Sequence
  ENSG00000185313_45 (sequence is synthesized)
ggacgactttgacatgttctatgagacctgggagaagtttgacccagaggccactcagtttattaccttttctgctctctcggactttgcagacactctctctggtcccctgagaatccc

SEQ ID NO: 668657 - DNA, 120 bp, Artificial Sequence
  ENSG00000185313_46 (sequence is synthesized)
aaaacccaatcgaaatatactgatccagatggacctgcctttggtccctggagataagatccactgcttggacatcctttttgctttcaccaagaatgtcctaggagaatccggggagtt

SEQ ID NO: 668658 - DNA, 120 bp, Artificial Sequence
  ENSG00000185313_47 (sequence is synthesized)
ggattctctgaaggcaaatatggaggagaagtttatggcaactaatctttcaaaatcatcctatgaaccaatagcaaccactctccgatggaagcaagaagacatttcagccactgtcat

SEQ ID NO: 668659 - DNA, 120 bp, Artificial Sequence
  ENSG00000185313_48 (sequence is synthesized)
tcaaaaggcctatcggagctatgtgctgcaccgctccatggcactctctaacaccccatgtgtgcccagagctgaggaggaggctgcatcactcccagatgaaggttttgttgcattcac

SEQ ID NO: 668660 - DNA, 120 bp, Artificial Sequence
  ENSG00000185313_49 (sequence is synthesized)
agcaaatgaaaattgtgtactcccagacaaatctgaaactgcttctgccacatcattcccaccgtcctatgagagtgtcactagaggccttagtgatagagtcaacatgaggacatctag

SEQ ID NO: 668661 - DNA, 120 bp, Artificial Sequence
  ENSG00000185313_50 (sequence is synthesized)
ctcaatacaaaatgaagatgaagccaccagtatggagctgattgcccctgggccctagtgagaacactccagcctggatatgttcagttatgatgcgtccttctgctctgtgttaactct

SEQ ID NO: 668662 - DNA, 120 bp, Artificial Sequence
  ENSG00000185313_51 (sequence is synthesized)
ttcccattgcagatcacacccagctacagcctcaccaatgcatgccactggtcacaatgtcagaactgggcagggaatgcaactggtaaccacctttgaaaaaaccatcatacacaaata

SEQ ID NO: 668663 - DNA, 120 bp, Artificial Sequence
  ENSG00000185313_52 (sequence is synthesized)
ggagtcagaagctaagagcacttccactgtgatttcccttctgaatttcaatatcagatcatgggttctcttactctccagaaaatatcccttgtccttttatttttgttgtaatcagat

SEQ ID NO: 668664 - DNA, 120 bp, Artificial Sequence
  ENSG00000185313_53 (sequence is synthesized)
tatatttactgagacaaacttctcaggaccagaacttccaaagatatagaacaagaacattactgaaggtccaaggtagtcctctgtggagcaccatacagagattggcaatattattta

SEQ ID NO: 668665 - DNA, 120 bp, Artificial Sequence
  ENSG00000185313_54 (sequence is synthesized)
ggattttgcatgactgcatgtgagagctgtcggacaactgctctgacccagggtaacacctgtggcctatgtcatgaaaagcctttgagatatccattaaaattaatatttttaaatgta

SEQ ID NO: 668666 - DNA, 120 bp, Artificial Sequence
  ENSG00000185324_0 (sequence is synthesized)
agaggcggggccagcgctcggcatggcggagccagatctggagtgcgagcagatccgtctgaagtgtattcgtaaggagggcttcttcacggtgcctccggaacacaggctgggacgatg

SEQ ID NO: 668667 - DNA, 120 bp, Artificial Sequence
  ENSG00000185324_1 (sequence is synthesized)
ccggagtgtgaaggagtttgagaagctgaaccgcattggagagggtacctacggcattgtgtatcgggcccgggacacccagacagatgagattgtcgcactgaagaaggtgcggatgga

SEQ ID NO: 668668 - DNA, 120 bp, Artificial Sequence
  ENSG00000185324_2 (sequence is synthesized)
caaggagaaggatggcatccccatcagcagcttgcgggagatcacgctgctgctccgcctgcgtcatccgaacatcgtggagctgaaggaggtggttgtggggaaccacctggagagcat

SEQ ID NO: 668669 - DNA, 120 bp, Artificial Sequence
  ENSG00000185324_3 (sequence is synthesized)
cttcctggtgatgggttactgtgagcaggacctggccagcctcctggagaatatgccaacacccttctcggaggctcaggtcaagtgcatcgtgctgcaggtgctccggggcctccagta

SEQ ID NO: 668670 - DNA, 120 bp, Artificial Sequence
  ENSG00000185324_4 (sequence is synthesized)
tctgcacaggaacttcattatccacagggacctgaaggtttccaacttgctcatgaccgacaagggttgtgtgaagacagcggatttcggcctggcccgggcctatggtgtcccagtaaa

SEQ ID NO: 668671 - DNA, 120 bp, Artificial Sequence
  ENSG00000185324_5 (sequence is synthesized)
gccaatgacccccaaggtggtcactctctggtaccgagcccctgaactgctgttgggaaccaccacgcagaccaccagcatcgacatgtgggctgtgggctgcatactggccgagctgct

SEQ ID NO: 668672 - DNA, 120 bp, Artificial Sequence
  ENSG00000185324_6 (sequence is synthesized)
ggcgcacaggcctcttctccccggcacttccgagatccaccagatcgacttgatcgtgcagctgctgggcacgcccagtgagaacatctggccgggcttttccaagctgccactggtcgg

SEQ ID NO: 668673 - DNA, 120 bp, Artificial Sequence
  ENSG00000185324_7 (sequence is synthesized)
cctgttcatgtacgaccctaagaaaagggcgacggccggggactgcctggagagctcctatttcaaggagaagcccctaccctgtgagccggagctcatgccgacctttccccaccaccg

SEQ ID NO: 668674 - DNA, 120 bp, Artificial Sequence
  ENSG00000185324_8 (sequence is synthesized)
caacaagcgggccgccccagccacctccgagggccagagcaagcgctgtaaaccctgacggtgggcctggcacacgcctgtattcccacaccaggtcttccgatcagtggtgtctgtgaa

SEQ ID NO: 668675 - DNA, 120 bp, Artificial Sequence
  ENSG00000185324_9 (sequence is synthesized)
gggtgccgcgagccaggctgaccaggcgcccgggatccagctcatccccttggctgggaacatcctccactgacttcctcccactgtctgccctgaacccactgctgcccccagaaaaag

SEQ ID NO: 668676 - DNA, 120 bp, Artificial Sequence
  ENSG00000185324_10 (sequence is synthesized)
gccgggtgacaccggggggctcccagcccgtgcaccctggaagggcaggtctggcggctccatccgtggctgcaggggtctcatgtggtcctcctcgctatgttggaaatgtgcaaccac

SEQ ID NO: 668677 - DNA, 120 bp, Artificial Sequence
  ENSG00000185324_11 (sequence is synthesized)
tgcttcttgggaggagtggtgggtgcagtccccccgctgtctttgagttgtggtggacgctggcctgggatgagagggcccagaagaccttcgtatcccctctcagtcgcccggggctgt

SEQ ID NO: 668678 - DNA, 120 bp, Artificial Sequence
  ENSG00000185324_12 (sequence is synthesized)
cccgtgcatgggttggctgtggggaccccaggtgggcctggcaggactccagatgaggacaagagggacaaggtatggggtgggagccacaattgaggataccccgagactaccaggaga

SEQ ID NO: 668679 - DNA, 120 bp, Artificial Sequence
  ENSG00000185324_13 (sequence is synthesized)
gccctgggctggaggctgagctgcatccctgctccccacatggaggacccaacaggaggccgtggctctgatgctgagcgaagctataggctcttgttggataaaagcttttttaacaga

SEQ ID NO: 668680 - DNA, 120 bp, Artificial Sequence
  ENSG00000185324_14 (sequence is synthesized)
acaagggttgtgtgaagacaggtgggtgcaacttgggccaggccctgtccctagatggcacttggtgacacacactcccctctctgctgcagcggatttcggcctggcccgggcctatgg

SEQ ID NO: 668681 - DNA, 120 bp, Artificial Sequence
  ENSG00000185324_15 (sequence is synthesized)
aatgacccccaaggtggtcactctctggtaagtccttctgaagcatggtggcccctggggaccaggcctgtctggtggaggtctccttggggatgtcaggccgaagctgcaactggcctt

SEQ ID NO: 668682 - DNA, 120 bp, Artificial Sequence
  ENSG00000185324_16 (sequence is synthesized)
gggaatgttaagctacagggtctgtgcacactcagaaacgttgggtctaggacagcctccaggacacagcagggctgtgccacaaaatggtgagagacgggctcagtggcgtcaagggcc

SEQ ID NO: 668683 - DNA, 120 bp, Artificial Sequence
  ENSG00000185324_17 (sequence is synthesized)
tgcctagatcagacacacctcgccttgagagctggaaacaccgtggccgtgaaaccatctctggagggaaggctgcttcacggactgaaggacaggcagcttgcatgctttccctggttc

SEQ ID NO: 668684 - DNA, 120 bp, Artificial Sequence
  ENSG00000185324_18 (sequence is synthesized)
ttcctcctggatacttttaaccaaacagggtcatgcttagccagggctgaatatcagagttggtcagaatcaggtcaggaccccagtgtcgtgtactccccatctgagaacgggttggta

SEQ ID NO: 668685 - DNA, 120 bp, Artificial Sequence
  ENSG00000185324_19 (sequence is synthesized)
gtggctggtgtggctgtgtgccgagggtccgtggtccctgcgactctcaggacaccgctgcacgtgacagctctcgcccccggcaaccattgctgtgtgtgccacctggatctgcagggc

SEQ ID NO: 668686 - DNA, 120 bp, Artificial Sequence
  ENSG00000185324_20 (sequence is synthesized)
aggcggggccagcgctcggcatggcggagccagatctggagtgcgagcagatccgtctgaagtgtattcgtaaggagggcttcttcacggtgcctccggaacacaggatcgggcccggga

SEQ ID NO: 668687 - DNA, 90 bp, Artificial Sequence
  ENSG00000185324_21 (sequence is synthesized)
gatccgtctgaagtgtattcggtctagcgctcacggctcagtgcatcgtcagcctcctgggctcaagtgatcttcctgcctcggcctccc

SEQ ID NO: 668688 - DNA, 120 bp, Artificial Sequence
  ENSG00000185324_22 (sequence is synthesized)
gcaagagaggcggggccagcgctcggcatggcggagccagatctggagtgcgagcagatccgtctgaagtgtattcgtaaggagggcttcttcacggtgcctccggaacacaggggtcta

SEQ ID NO: 668689 - DNA, 61 bp, Artificial Sequence
  ENSG00000185324_23 (sequence is synthesized)
gttgtatgccacataagtaaccaaatttgcttgtcaattatgtcttttttttttctttttt

SEQ ID NO: 668690 - DNA, 86 bp, Artificial Sequence
  ENSG00000185324_24 (sequence is synthesized)
tctgcctcccaggttcaagcgattctcatacctcagcctccagagtagctggactgcaggcgcatgctaccacggccagatttttt

SEQ ID NO: 668691 - DNA, 70 bp, Artificial Sequence
  ENSG00000185324_25 (sequence is synthesized)
gtatttttaatagagacggggtttcttttttttttttttccctgacagagttttgcttttgttgcccagg

SEQ ID NO: 668692 - DNA, 120 bp, Artificial Sequence
  ENSG00000185324_26 (sequence is synthesized)
gatccacccgcctcagtctcccaaagttttgggattataaatgtgcgccactgcacccggtcaagacagggttttgccatgttagccagggaggtctcaaactcctgacctcaagttatc

SEQ ID NO: 668693 - DNA, 120 bp, Artificial Sequence
  ENSG00000185324_27 (sequence is synthesized)
cgccctgcttggtctcccaaagtgctgggattgcacacatgagccactgtgcctggcctcaattatgtctttaactgtggctgttctaagacttttgtcatccacaattgttgttttact

SEQ ID NO: 668694 - DNA, 120 bp, Artificial Sequence
  ENSG00000185324_28 (sequence is synthesized)
tttatcctttcacagagcagtttataatcagctatagaactctgaggtactcttcaatctaagtttctgatcacttttgagattgtgccattggaatagagcaaaaaacttccaagactc

SEQ ID NO: 668695 - DNA, 120 bp, Artificial Sequence
  ENSG00000185324_29 (sequence is synthesized)
tcattgagagctgctatattcatgaggattgttcatccaatattgggcaaaatgagagttaattttatggactaaactaatataagactgaaataatctttttatgtttttgcttaaaac

SEQ ID NO: 668696 - DNA, 77 bp, Artificial Sequence
  ENSG00000185324_30 (sequence is synthesized)
tataagactgaaataatctttttatgtttttgcttaaaacattactgattctttctgttctttcagaaccaagaaaa

SEQ ID NO: 668697 - DNA, 64 bp, Artificial Sequence
  ENSG00000185324_31 (sequence is synthesized)
tggtaacttttttaactttgagctatttgcagcttttagcaattgagtaaagtacactcctgtg

SEQ ID NO: 668698 - DNA, 120 bp, Artificial Sequence
  ENSG00000185324_32 (sequence is synthesized)
atttgcagcttttagcaattgagtaaagtacactcctgtgaggaagatttggaacatatttctgttttcttttttgttttttatattttgcttgggtagcatatttctttctgatttctc

SEQ ID NO: 668699 - DNA, 120 bp, Artificial Sequence
  ENSG00000185324_33 (sequence is synthesized)
caaaaattgggaactatctgtgagcactatttaaaaaaaaaaaaaaaacttttccctctcccttcccctatttgtattctaatgtcaatataatgatgtgtgcacgtgcagtaacaatct

SEQ ID NO: 668700 - DNA, 120 bp, Artificial Sequence
  ENSG00000185324_34 (sequence is synthesized)
tgacctatagtgcccatcaaagcccttgggaaaactggcttcatactgtatccacccagtggattcttcttgcccagatggagcccatgtatcaagatcgggcccgggacacccagacag

SEQ ID NO: 668701 - DNA, 120 bp, Artificial Sequence
  ENSG00000185324_35 (sequence is synthesized)
gcgcgcaagagaggcggggccagcgctcggcatggcggagccagatctggagtgcgagcagatccgtctgaagtgtattcatcgtggctggatgacaacaggagccacactttactcatc

SEQ ID NO: 668702 - DNA, 120 bp, Artificial Sequence
  ENSG00000185324_36 (sequence is synthesized)
ggagagtgcagccccggggccaagagccttgtgagggcactggtttcctgggctgctgggagcgtgcagccccggggccgagagccttctgagggcactggtttcctgggctattgggac

SEQ ID NO: 668703 - DNA, 120 bp, Artificial Sequence
  ENSG00000185324_37 (sequence is synthesized)
tgctagtcctgctggccagtgtgggtgtggcagggcccagctgggcttccctgcaggctcaccctgactggtacctctgaccctctgcacaggtcaagtgcatcgtgctgcaggtgctcc

SEQ ID NO: 668704 - DNA, 120 bp, Artificial Sequence
  ENSG00000185324_38 (sequence is synthesized)
cccgacagccggtccctggagatctgaggggccggggcgggctcagggatgcctcgcgcccgcggagagacgggcccgggacttgggaagagcaagctccgggatccagctcgggcgctg

SEQ ID NO: 668705 - DNA, 120 bp, Artificial Sequence
  ENSG00000185324_39 (sequence is synthesized)
ctgggttcagcgcccgagctgggctttgcaggctgagccgcgagccacttgtttgtggggagaatttacacccgcgacgagttcgagcttgaaggctcccgctgggcttgggctgcatgg

SEQ ID NO: 668706 - DNA, 120 bp, Artificial Sequence
  ENSG00000185324_40 (sequence is synthesized)
agcggggtccagcgctgcctggcggcttcacgcgaaccctgggcgcgtcccttgcggaggtgccggtgcctccctctgcagagaccaggagagagcctctgggcgttgggcggtgttgcc

SEQ ID NO: 668707 - DNA, 120 bp, Artificial Sequence
  ENSG00000185324_41 (sequence is synthesized)
ctgaactgctgttgggaaccaccacgcagaccaccagcatcgacatgtgggcttttccaagctgccactggtcggccagtacagcctccggaagcagccctacaacaacctgaagcacaa

SEQ ID NO: 668708 - DNA, 120 bp, Artificial Sequence
  ENSG00000185324_42 (sequence is synthesized)
ctaactctgctgcccctgtggagttactaaaagctcaggggttcccagctgcagcagcctgcccgctgctcgcactccatttgtgtttttttctaaaatagagaaggggtctctctgtgt

SEQ ID NO: 668709 - DNA, 120 bp, Artificial Sequence
  ENSG00000185324_43 (sequence is synthesized)
atttctgggtaaacgtaagcatccggttgctaatgcccataatccaaacgtgtcactgcagagtacacagaactgttagagaaataaaatacagaactttccagaagcagcaggagctgg

SEQ ID NO: 668710 - DNA, 120 bp, Artificial Sequence
  ENSG00000185324_44 (sequence is synthesized)
acatggtgctcatgtctatcacctcagcaactctggaggagtcacctgagcccaggtgttttttctttttgtttgtttttgagatgggtcttgctctattgcccagactggagtgcagtg

SEQ ID NO: 668711 - DNA, 65 bp, Artificial Sequence
  ENSG00000185324_45 (sequence is synthesized)
agagtacataagcacacccagctaatttttaaatttttggtagagatgggatctccctatgttgc

SEQ ID NO: 668712 - DNA, 89 bp, Artificial Sequence
  ENSG00000185324_46 (sequence is synthesized)
ccactgcaccccagccttccaaaaacaccacacacaactaaaggttataacagatgtgaaattggcgtaggtcattctggaagctgcac

SEQ ID NO: 668713 - DNA, 120 bp, Artificial Sequence
  ENSG00000185324_47 (sequence is synthesized)
catcttcacacaaaataaggtttgcttttttctgcatagagtaccttatttgcttttaggacattacaagagagcacaaagcagtgatctgcatgctaaggaggacatggagagcctgga

SEQ ID NO: 668714 - DNA, 120 bp, Artificial Sequence
  ENSG00000185324_48 (sequence is synthesized)
gccacagaactgagtggctggaggccagggtccagcacagagcaaagttgggcaccccctgcccagttcaaatgaggaaaccctccgggggaacgcgtctcgggctaggggcgttgcaca

SEQ ID NO: 668715 - DNA, 120 bp, Artificial Sequence
  ENSG00000185324_49 (sequence is synthesized)
gagtggggactgagtgtcactgggcatgaggttgtcagaggaaagaacggggacccctgtggctcagggagagcctcccgttcagcgctagggagcccacgaggggcatcgagatgatgt

SEQ ID NO: 668716 - DNA, 120 bp, Artificial Sequence
  ENSG00000185324_50 (sequence is synthesized)
caccagcatcgacatgtggtgaggagatacggttaccgctcctggggcctcaggaagggctgggacaggagccgggtcacctggttcctgagctcagcctcaggggaggggcaggagtgc

SEQ ID NO: 668717 - DNA, 120 bp, Artificial Sequence
  ENSG00000185324_51 (sequence is synthesized)
agtggggtctttgccagcctcccactcccagggaggtgggcctgagcctggaaacccaggaggaggtgtgagaacttagcttgctgttctcaggctgggagcacagaggtctggaggagg

SEQ ID NO: 668718 - DNA, 80 bp, Artificial Sequence
  ENSG00000185338_0 (sequence is synthesized)
gcccgcggcgtcccgcgccccgccgccagcgcacccccggacgctatggcccacccctccggctggccccttctgtagga

SEQ ID NO: 668719 - DNA, 120 bp, Artificial Sequence
  ENSG00000185338_1 (sequence is synthesized)
gcccacccctccggctggccccttctgtaggatggtagcacacaaccaggtggcagccgacaatgcagtctccacagcagcagagccccgacggcggccagaaccttcctcctcttcctc

SEQ ID NO: 668720 - DNA, 120 bp, Artificial Sequence
  ENSG00000185338_2 (sequence is synthesized)
cttcctcctcttcctcctcctcgcccgcggcccccgcgcgcccgcggccgtgccccgcggtcccggccccggcccccggcgacacgcacttccgcacattccgttcgcacgccgattacc

SEQ ID NO: 668721 - DNA, 120 bp, Artificial Sequence
  ENSG00000185338_3 (sequence is synthesized)
cagcgcgctcctggacgcctgcggattctactgggggcccctgagcgtgcacggggcgcacgagcggctgcgcgccgagcccgtgggcaccttcctggtgcgcgacagccgccagcggaa

SEQ ID NO: 668722 - DNA, 120 bp, Artificial Sequence
  ENSG00000185338_4 (sequence is synthesized)
ctgctttttcgcccttagcgtgaagatggcctcgggacccacgagcatccgcgtgcactttcaggccggccgctttcacctggatggcagccgcgagagcttcgactgcctcttcgagct

SEQ ID NO: 668723 - DNA, 120 bp, Artificial Sequence
  ENSG00000185338_5 (sequence is synthesized)
gcatgctgggggccccgctgcgccagcgccgcgtgcggccgctgcaggagctgtgccgccagcgcatcgtggccaccgtgggccgcgagaacctggctcgcatccccctcaaccccgtcc

SEQ ID NO: 668724 - DNA, 120 bp, Artificial Sequence
  ENSG00000185338_6 (sequence is synthesized)
gtcctccgcgactacctgagctccttccccttccagatttgaccggcagcgcccgccgtgcacgcagcattaactgggatgccgtgttattttgttattacttgcctggaaccatgtggg

SEQ ID NO: 668725 - DNA, 120 bp, Artificial Sequence
  ENSG00000185338_7 (sequence is synthesized)
taccctccccggcctgggttggagggagcggatgggtgtaggggcgaggcgcctcccgccctcggctggagacgaggccgcagaccccttctcacctcttgagggggtcctccccctcct

SEQ ID NO: 668726 - DNA, 120 bp, Artificial Sequence
  ENSG00000185338_8 (sequence is synthesized)
ggtgctccctctgggtccccctggttgttgtagcagcttaactgtatctggagccaggacctgaactcgcacctcctacctcttcatgtttacatatacccagtatctttgcacaaacca

SEQ ID NO: 668727 - DNA, 120 bp, Artificial Sequence
  ENSG00000185338_9 (sequence is synthesized)
ggggttgggggagggtctctggctttatttttctgctgtgcagaatcctattttatattttttaaagtcagtttaggtaataaactttattatgaaagttttttttttaaaaaaaaataa

SEQ ID NO: 668728 - DNA, 80 bp, Artificial Sequence
  ENSG00000185338_10 (sequence is synthesized)
agagcgagctgcggccgtggcagctgcacggctcctggccccggagcatgcgcgagagccgccccggagcgccccggagc

SEQ ID NO: 668729 - DNA, 120 bp, Artificial Sequence
  ENSG00000185338_11 (sequence is synthesized)
aggtgagccgggccctgggcgaggaggcgggagggaggagggaggggagtccagggcagccaggagtcgggcgagcctcgggggctgcagaatggggtcgcggccgcgatgcccctgacc

SEQ ID NO: 668730 - DNA, 120 bp, Artificial Sequence
  ENSG00000185338_12 (sequence is synthesized)
agaatggggtcgcggccgcgatgcccctgaccctcgccggccccacccaggccgccccccgcgcgcggggctcccgcagcacagcctttctccggccctagcccaaatcgcccagaccag

SEQ ID NO: 668731 - DNA, 120 bp, Artificial Sequence
  ENSG00000185338_13 (sequence is synthesized)
cggcgagccggggccggacggctggagccagaaccggctgctctccacgcccccctctcggtgctgcccggaggccggactccgcctccaccgagcccccacccgccgggaagagctccg

SEQ ID NO: 668732 - DNA, 120 bp, Artificial Sequence
  ENSG00000185338_14 (sequence is synthesized)
gagctccgcggagtacagagcccattttctagctgtgtccactgaggctgaacggatccgcgcggacttggtgctccgtgctcgccccctagggccgggtccgccgggagcgccgccctc

SEQ ID NO: 668733 - DNA, 120 bp, Artificial Sequence
  ENSG00000185339_0 (sequence is synthesized)
gcagacttagccgtgcattgcaggcatggaggattaatcagtgacaggaagctgcgtctctcggagcggtgaccagctgtggtcaggagagcctcagcagggccagccccaggagtcttt

SEQ ID NO: 668734 - DNA, 120 bp, Artificial Sequence
  ENSG00000185339_1 (sequence is synthesized)
cccgattcttgctcactgctcacccacctgctgctgccatgaggcaccttggggccttcctcttccttctgggggtcctgggggccctcactgagatgtgtgaaataccagagatggaca

SEQ ID NO: 668735 - DNA, 120 bp, Artificial Sequence
  ENSG00000185339_2 (sequence is synthesized)
gccatctggtagagaagttgggccagcacctcttaccttggatggaccggctttccctggagcacttgaaccccagcatctatgtgggcctacgcctctccagtctgcaggctgggacca

SEQ ID NO: 668736 - DNA, 120 bp, Artificial Sequence
  ENSG00000185339_3 (sequence is synthesized)
aggaagacctctacctgcacagcctcaagcttggttaccagcagtgcctcctagggtctgccttcagcgaggatgacggtgactgccagggcaagccttccatgggccagctggccctct

SEQ ID NO: 668737 - DNA, 120 bp, Artificial Sequence
  ENSG00000185339_4 (sequence is synthesized)
acctgctcgctctcagagccaactgtgagtttgtcaggggccacaagggggacaggctggtctcacagctcaaatggttcctggaggatgagaagagagccattgggcatgatcacaagg

SEQ ID NO: 668738 - DNA, 120 bp, Artificial Sequence
  ENSG00000185339_5 (sequence is synthesized)
gccacccccacactagctactaccagtatggcctgggcattctggccctgtgtctccaccagaagcgggtccatgacagcgtggtggacaaacttctgtatgctgtggaacctttccacc

SEQ ID NO: 668739 - DNA, 120 bp, Artificial Sequence
  ENSG00000185339_6 (sequence is synthesized)
agggccaccattctgtggacacagcagccatggcaggcttggcattcacctgtctgaagcgctcaaacttcaaccctggtcggagacaacggatcaccatggccatcagaacagtgcgag

SEQ ID NO: 668740 - DNA, 120 bp, Artificial Sequence
  ENSG00000185339_7 (sequence is synthesized)
aggagatcttgaaggcccagacccccgagggccactttgggaatgtctacagcaccccattggcattacagttcctcatgacttcccccatgcgtggggcagaactgggaacagcatgtc

SEQ ID NO: 668741 - DNA, 120 bp, Artificial Sequence
  ENSG00000185339_8 (sequence is synthesized)
tcaaggcgagggttgctttgctggccagtctgcaggatggagccttccagaatgctctcatgatttcccagctgctgcccgttctgaaccacaagacctacattgatctgatcttcccag

SEQ ID NO: 668742 - DNA, 120 bp, Artificial Sequence
  ENSG00000185339_9 (sequence is synthesized)
gctgctgagaccattcctcagacccaagagatcatcagtgtcacgctgcaggtgcttagtctcttgccgccgtacagacagtccatctctgttctggccgggtccaccgtggaagatgtc

SEQ ID NO: 668743 - DNA, 120 bp, Artificial Sequence
  ENSG00000185339_10 (sequence is synthesized)
ctgaagaaggcccatgagttaggaggattcacatatgaaacacaggcctccttgtcaggcccctacttaacctccgtgatggggaaagcggccggagaaagggagttctggcagcttctc

SEQ ID NO: 668744 - DNA, 120 bp, Artificial Sequence
  ENSG00000185339_11 (sequence is synthesized)
cgagaccccaacaccccactgttgcaaggtattgctgactacagacccaaggatggagaaaccattgagctgaggctggttagctggtagcccctgagctccctcatcccagcagcctcg

SEQ ID NO: 668745 - DNA, 120 bp, Artificial Sequence
  ENSG00000185339_12 (sequence is synthesized)
cacactccctaggcttctaccctccctcctgatgtccctggaacaggaactcgcctgaccctgctgccacctcctgtgcactttgagcaatgccccctgggatcaccccagccacaagcc

SEQ ID NO: 668746 - DNA, 120 bp, Artificial Sequence
  ENSG00000185339_13 (sequence is synthesized)
cttcgagggccctataccatggcccaccttggagcagagagccaagcatcttccctgggaagtctttctggccaagtctggccagcctggccctgcaggtctcccatgaaggccacccca

SEQ ID NO: 668747 - DNA, 120 bp, Artificial Sequence
  ENSG00000185339_14 (sequence is synthesized)
tggtctgatgggcatgaagcatctcagactccttggcaaaaaacggagtccgcaggccgcaggtgttgtgaagaccactcgttctgtggttggggtcctgcaagaaggcctcctcagccc

SEQ ID NO: 668748 - DNA, 120 bp, Artificial Sequence
  ENSG00000185339_15 (sequence is synthesized)
gggggctatggccctgaccccagctctccactctgctgttagagtggcagctccgagctggttgtggcacagtagctggggagacctcagcagggctgctcagtgcctgcctctgacaaa

SEQ ID NO: 668749 - DNA, 120 bp, Artificial Sequence
  ENSG00000185339_16 (sequence is synthesized)
attaaagcattgatggcctgtggacctgctacagtggcctggtgcctcatactcctcaggtgcaggggcagggacaagagaagggggaagtaaccccatcagggaggagtggagggtgcc

SEQ ID NO: 668750 - DNA, 120 bp, Artificial Sequence
  ENSG00000185339_17 (sequence is synthesized)
tgagccgccatgtgggcattgggggagtgatgggaatgccagcagtgatgacattgactactgactgagcacccactactatgactgagcactcactcgctagatactatcttgaactgc

SEQ ID NO: 668751 - DNA, 120 bp, Artificial Sequence
  ENSG00000185339_18 (sequence is synthesized)
gagaccccaacaccccactgttgcaaggtgagtcatggcctgacactctggatgtgtcccctaccccaagcttactcagccaagaggcttcatcaactcaccccagctttccctagcacc

SEQ ID NO: 668752 - DNA, 120 bp, Artificial Sequence
  ENSG00000185339_19 (sequence is synthesized)
ctcctgggccacaccttcacaaaatcactgatgctcaaagttggatataatatattgaactgaagccttagaatttttatgcaagttactgtggaaattctaggaaaccagacagattac

SEQ ID NO: 668753 - DNA, 120 bp, Artificial Sequence
  ENSG00000185339_20 (sequence is synthesized)
tgagttaggaggattcacgtgagactcccacctcccagtcctcaccccacccaacctcacatgcctgataacagggtcacagaagagacggggaacagaggagagggttccctcgggaga

SEQ ID NO: 668754 - DNA, 120 bp, Artificial Sequence
  ENSG00000185339_21 (sequence is synthesized)
gacactggccctgcttctgcttctacctgctcagctcctttcttgcccacggtgttatggaaacagggagccataggccagcattgtcactgagagagcaggctttggaggcagagcccc

SEQ ID NO: 668755 - DNA, 120 bp, Artificial Sequence
  ENSG00000185339_22 (sequence is synthesized)
ccgggctctttaagcaggaacgtgaatggcctcaagatgtctcacatggtcccactagccctcctcctccctttgttccctacctccaggagggctgctctgcccttccttcctctgttc

SEQ ID NO: 668756 - DNA, 120 bp, Artificial Sequence
  ENSG00000185340_0 (sequence is synthesized)
ggcccggctccggcccccgctggggcaatgctccccggggccgcgggatgagccaggtgagcgcggagacccccagcactccctgcctgtgactcggccggtccgggcatggcagaccca

SEQ ID NO: 668757 - DNA, 120 bp, Artificial Sequence
  ENSG00000185340_1 (sequence is synthesized)
ccctgcctgtgactcggccggtccgggcatggcagacccagtggcgggcatcgcgggctcggcggccaagagcgtgcggccatttcgctccagtgaggcctacgtggaggccatgaagga

SEQ ID NO: 668758 - DNA, 120 bp, Artificial Sequence
  ENSG00000185340_2 (sequence is synthesized)
ggacctggccgagtggctcaatgccttgtacggcctgggtctcccgggtggtggcgatggcttcctgacagggctggccacgggcacgaccctgtgccaacatgccaacgccgtgaccga

SEQ ID NO: 668759 - DNA, 120 bp, Artificial Sequence
  ENSG00000185340_3 (sequence is synthesized)
ggctgcccgtgcattggcagccgcccgcccggcccgaggtgtggccttccaggcgcacagtgtagtgcctggctccttcatggcgcgcgacaacgtggccaccttcatcggctggtgccg

SEQ ID NO: 668760 - DNA, 120 bp, Artificial Sequence
  ENSG00000185340_4 (sequence is synthesized)
cgtggagctgggtgtgccggaggtgctcatgtttgagactgaggacctggtgctgcgcaagaacgagaagagcgtggtgctgtgcctgctggaggtggcgcggcgtggggcacgcctggg

SEQ ID NO: 668761 - DNA, 120 bp, Artificial Sequence
  ENSG00000185340_5 (sequence is synthesized)
cctgctggccccacgcctcgtgcagtttgagcaggagattgagcgggagctgcgtgctgcacccccagcccccaacgcccctgccgctggggaggacaccactgaaaccgcccccgcacc

SEQ ID NO: 668762 - DNA, 120 bp, Artificial Sequence
  ENSG00000185340_6 (sequence is synthesized)
agggactcctgcccgcggcccccgcatgacacccagcgacctgcgcaacctcgacgagctggtgagggagattctgggccgctgcacctgccctgaccagtttcccatgatcaaggtctc

SEQ ID NO: 668763 - DNA, 120 bp, Artificial Sequence
  ENSG00000185340_7 (sequence is synthesized)
agaggggaagtaccgtgtgggggactcgagcctgctcatctttgtgcgggtgctgaggagccacgtgatggtgcgagtgggtggtggctgggacacgctggagcattacctggacaagca

SEQ ID NO: 668764 - DNA, 120 bp, Artificial Sequence
  ENSG00000185340_8 (sequence is synthesized)
cgacccgtgccgctgctcctccactgctcatcgcccaccccagccgagggtctgcaccttttctccacagagggtgtcgcccaccaccagtccccgccctgctagcccagtccctgggag

SEQ ID NO: 668765 - DNA, 120 bp, Artificial Sequence
  ENSG00000185340_9 (sequence is synthesized)
tgagcgccggggctcccggcctgagatgactcccgttagcttacgaagcacaaaggaggggcccgagaccccacccaggccccgggatcagctgcccccccatccccgctcccgccgcta

SEQ ID NO: 668766 - DNA, 120 bp, Artificial Sequence
  ENSG00000185340_10 (sequence is synthesized)
cacaggcactggcccccggagggagcgacccagccggcggctgaccacaggcaccccggcctctccgagacggcctcctgccctgcgcagccagtcccgagaccggctggatcgcggccg

SEQ ID NO: 668767 - DNA, 120 bp, Artificial Sequence
  ENSG00000185340_11 (sequence is synthesized)
ggaggcaggggagcccagctgtcggtccccagccctgcccggcgggcccggagccagagccgcgaggagcaggctgtgctgcttgtgcgcagggatcgagacgggcagcactcatgggtg

SEQ ID NO: 668768 - DNA, 120 bp, Artificial Sequence
  ENSG00000185340_12 (sequence is synthesized)
ccaaggggcaggggcagtgggggctcgggcaggagcaccccccagactccccgtgcccgcagccctgcagcaccccggctttcccgggtctccagccccagtccagagttgggcaccaca

SEQ ID NO: 668769 - DNA, 120 bp, Artificial Sequence
  ENSG00000185340_13 (sequence is synthesized)
ccggccagcatcttccgcacacccctgcagctcgacccgcagcaggagcagcagctgttccggcgcctggaagaggagttcctggccaatgcccgggcccttgaggctgttgctagcgtg

SEQ ID NO: 668770 - DNA, 120 bp, Artificial Sequence
  ENSG00000185340_14 (sequence is synthesized)
acccccactggaccagcccctgacccagctcgggcccccgaccctccagctcctgactctgcctattgttcctccagttcctcctcttcgtccctcagcgtcctgggtggcaaatgtggc

SEQ ID NO: 668771 - DNA, 120 bp, Artificial Sequence
  ENSG00000185340_15 (sequence is synthesized)
caacctggggactctggccggacggccaatgggctgcctgggccccgaagccaagccctttccagctcctccgatgaaggcagcccctgccctggcatgggggggccactagatgcacct

SEQ ID NO: 668772 - DNA, 120 bp, Artificial Sequence
  ENSG00000185340_16 (sequence is synthesized)
gggagccccctggcttgcactgaaccctcgaggacctgggcacggggtcggatggacacacagccagaccgtaaaccctcacgtatccccacgcctcggggcccccgccgcccctccgga

SEQ ID NO: 668773 - DNA, 120 bp, Artificial Sequence
  ENSG00000185340_17 (sequence is synthesized)
cccgcagagctggggacatggcatgccctgcactcagtcaccccgagggctgagccagattcctggatgtgatggaccagctcagctgtccccagaccccatcccttctccttttccttt

SEQ ID NO: 668774 - DNA, 120 bp, Artificial Sequence
  ENSG00000185340_18 (sequence is synthesized)
gtggccttaacccttctgcatcagggagccccctctgcctcttgagtaccagacctcatgggaccagaccccttgggaccacatggcacaatgggacctctgttgtacattccggttggg

SEQ ID NO: 668775 - DNA, 120 bp, Artificial Sequence
  ENSG00000185340_19 (sequence is synthesized)
ggatgagcgttgctatttaattactaatattattgaatgccttagaggaggccgggcgagcccggtgttctgaagacctgtggcccagcagagcctctgacagtaaagttttgctccagc

SEQ ID NO: 668776 - DNA, 120 bp, Artificial Sequence
  ENSG00000185340_20 (sequence is synthesized)
cgcggcggtgccgtttatctggccaggggaggtccacccgggaggaggtgactttgcagcctccagccgctatcgcttcctgccttcatcttgggaacaggccgtgctgtgcgccagccc

SEQ ID NO: 668777 - DNA, 120 bp, Artificial Sequence
  ENSG00000185340_21 (sequence is synthesized)
ggggagcccaccgtctggggaggggggcgattaaaaggtcccaacctcctccccaggagaccaaagaggttggacggggccccgggtactaggctgggtgggggttgggcgcctgggccg

SEQ ID NO: 668778 - DNA, 120 bp, Artificial Sequence
  ENSG00000185340_22 (sequence is synthesized)
gtcgcagttgtctgggggccctggggctctctgcgtcgagagcgctcgaagacccgggattcctggcccgatcgcgggcggggggagaccccagctccaccccagctcccgccggctcgg

SEQ ID NO: 668779 - DNA, 120 bp, Artificial Sequence
  ENSG00000185340_23 (sequence is synthesized)
ggaaggggcggcccctttaagagcgcgcggccccgcccgccccctccgggcaggatccgaattccagggaggcggggcggagacggcggcgaggaggaggccgcggcgcgggacgcatag

SEQ ID NO: 668780 - DNA, 120 bp, Artificial Sequence
  ENSG00000185340_24 (sequence is synthesized)
ccctgcctggtgcgcatggacgggggtggggaggcggggcgggaagcggcgtcctcggcctctgttccccggggctgtgtgaccttgggcggccccgcaccctctctgggcccagagccc

SEQ ID NO: 668781 - DNA, 120 bp, Artificial Sequence
  ENSG00000185340_25 (sequence is synthesized)
cagcaccggcagggcctgcggaggccgctctgagtcctggccccgcaggcaccggcctggagcgctggggaggcttcttggaggaggcggggcctggccctggccccggatcgccgagac

SEQ ID NO: 668782 - DNA, 120 bp, Artificial Sequence
  ENSG00000185340_26 (sequence is synthesized)
cggccacgctgcgccgcctggacgccgggctcctccacccacagctctgcgaccttcacgagctcgaccctttctgcgcctcagtttcctcatctataaaatggagataatgcctccgcg

SEQ ID NO: 668783 - DNA, 120 bp, Artificial Sequence
  ENSG00000185340_27 (sequence is synthesized)
cgctgagcccgagcgcggtcgtgctgttacactattgctgctgctatgtcgttaatgacggcacagcccttatggaaggggggccaaggaaggcacggggaccttcccgcaggacatggg

SEQ ID NO: 668784 - DNA, 120 bp, Artificial Sequence
  ENSG00000185340_28 (sequence is synthesized)
gtgggcaccagccctaagccatgcacataacccactctgaggtcaggacctgggttcctttcgtgtccactgggggccttagccgttgtcttcacttctctaggtcccagcccttcacaa

SEQ ID NO: 668785 - DNA, 120 bp, Artificial Sequence
  ENSG00000185340_29 (sequence is synthesized)
tgggcgcgcctccctgcctgagagggaggccccagccaagccccagtttccaccgcaaaaagccacacagcaaacacttaatggaccctaaatttataaaaattatcccatagagtccta

SEQ ID NO: 668786 - DNA, 120 bp, Artificial Sequence
  ENSG00000185340_30 (sequence is synthesized)
tgaggcagggaatgttactgtacccatttcgcagatgaggaaacttggggcaccgacatttcccagagccaacatgtaaaccaggcatttggcctgagtgacagactggtgcaggtggcc

SEQ ID NO: 668787 - DNA, 120 bp, Artificial Sequence
  ENSG00000185340_31 (sequence is synthesized)
ggacgcatagagctgcggctcgggcggcgcctccctgcggcggcccggcccggctccggcccccgctggggcaatgctccccggggccgcgggatgagccagcgatcctgaactgtgttc

SEQ ID NO: 668788 - DNA, 80 bp, Artificial Sequence
  ENSG00000185340_32 (sequence is synthesized)
cggctccggcccccgctggggcaatgctccccggggccgcgggatgagccaggcaccggcctggagcgctggggaggctt

SEQ ID NO: 668789 - DNA, 120 bp, Artificial Sequence
  ENSG00000185340_33 (sequence is synthesized)
cgaggagtgaggggtccagagggtgggggggcgtcagccctggcctgcatgatgggttgcctgtgcgccagagtgactcacaccctgggaaaagttcccgtgggtgggggcgggcctggc

SEQ ID NO: 668790 - DNA, 120 bp, Artificial Sequence
  ENSG00000185340_34 (sequence is synthesized)
ttcccatctccatggcaacccaaccaaaccaacaacacagctggggcgggccctgtggctgggcggcagccagtccagctcttgcttcctctggcccgtcctgggaaggggggtgtctag

SEQ ID NO: 668791 - DNA, 120 bp, Artificial Sequence
  ENSG00000185340_35 (sequence is synthesized)
agcccaggaaacttcttcttccgtggcttttggggccctgggccgctggaggaagctgctcacttctccctggaagtccccaggacagaccgatgcccctgacagccccgtccaccagcc

SEQ ID NO: 668792 - DNA, 120 bp, Artificial Sequence
  ENSG00000185340_36 (sequence is synthesized)
acataccctgctgttcctctccctgcctgttctgcatgccagtccttccgtggtaccccatctgtctctattgtccccctgccccaggccccgggatcagctgcccccccatccccgctc

SEQ ID NO: 668793 - DNA, 120 bp, Artificial Sequence
  ENSG00000185340_37 (sequence is synthesized)
aaagaaaggtcacgtgtggaagctgtaccccatccggggcaacactgcctccatccacttacccggaaagcctgacttcctcctgaccctggaatggctgacattaagccccaggaggag

SEQ ID NO: 668794 - DNA, 120 bp, Artificial Sequence
  ENSG00000185344_0 (sequence is synthesized)
gggacctcgcggactgctgtggcggcagctggagcggcggccgcggtggcagaaccgggggcggccgctgcagtctggagccccatagtgcggggccgcggccaggccacaggaagagct

SEQ ID NO: 668795 - DNA, 120 bp, Artificial Sequence
  ENSG00000185344_1 (sequence is synthesized)
ctgagtgtgcgggcccgcgcggctcggagccgccgccgcccatcgagcccctccgggcgcgggtcggcccgccatggggtccctgttccggagcgagaccatgtgcctggcgcagctctt

SEQ ID NO: 668796 - DNA, 120 bp, Artificial Sequence
  ENSG00000185344_2 (sequence is synthesized)
atgtgcctggcgcagctcttcctgcagtcgggcacggcctacgagtgcctcagcgccctgggcgagaaaggcctggtccagttccgagacctcaaccagaacgtaagttctttccaaaga

SEQ ID NO: 668797 - DNA, 120 bp, Artificial Sequence
  ENSG00000185344_3 (sequence is synthesized)
aaatttgttggtgaggtgaagaggtgtgaagagctagagcgaatattggtgtatttggtacaggaaattaatagagctgatattccccttcctgaaggagaggccagccctcctgcgcca

SEQ ID NO: 668798 - DNA, 120 bp, Artificial Sequence
  ENSG00000185344_4 (sequence is synthesized)
cccctgaaacaggttctagaaatgcaggagcagttgcagaagctcgaggttgaactgagagaagtcactaagaacaaggagaaactgaggaaaaacttgctggaactgatagagtacact

SEQ ID NO: 668799 - DNA, 120 bp, Artificial Sequence
  ENSG00000185344_5 (sequence is synthesized)
cacatgctgagagtgacaaagacctttgtgaaacgcaatgttgagtttgaacccacttatgaagaattcccttccttagagagtgattctttgttggattacagctgtatgcagaggctg

SEQ ID NO: 668800 - DNA, 120 bp, Artificial Sequence
  ENSG00000185344_6 (sequence is synthesized)
ggagcaaaactgggatttgtgtctggcctaattaaccaaggaaaagtggaagcatttgaaaaaatgttgtggagagtctgcaaagggtacaccatcgtgtcctatgcagaactggatgaa

SEQ ID NO: 668801 - DNA, 120 bp, Artificial Sequence
  ENSG00000185344_7 (sequence is synthesized)
tcccttgaagaccctgaaacaggggaagtcataaaatggtatgtctttttaatatccttttggggagagcagattggccacaaggttaagaagatatgtgattgctaccactgccacgtg

SEQ ID NO: 668802 - DNA, 120 bp, Artificial Sequence
  ENSG00000185344_8 (sequence is synthesized)
tacccctatccaaacacagccgaggagcggagggagatccaggaggggctgaacacccgcatccaggatctctacactgtactgcacaaaaccgaggactatttgaggcaagtgctatgt

SEQ ID NO: 668803 - DNA, 120 bp, Artificial Sequence
  ENSG00000185344_9 (sequence is synthesized)
aaagccgccgagtctgtctacagccgtgtgatccaggtgaagaaaatgaaggccatctatcacatgctgaacatgtgcagctttgacgtgaccaacaagtgcctcattgctgaggtctgg

SEQ ID NO: 668804 - DNA, 120 bp, Artificial Sequence
  ENSG00000185344_10 (sequence is synthesized)
tgtcccgaggcggatctgcaggacctgcgccgggcactggaggagggctcgagagagagtggtgctacaatcccctcattcatgaatataatccccacaaaagaaacaccccccactcgg

SEQ ID NO: 668805 - DNA, 120 bp, Artificial Sequence
  ENSG00000185344_11 (sequence is synthesized)
atccgcaccaacaaattcaccgagggatttcagaacatcgtggatgcttatggagtcggaagctacagagaagtcaatccagctctctttaccatcatcaccttcccgtttttatttgct

SEQ ID NO: 668806 - DNA, 120 bp, Artificial Sequence
  ENSG00000185344_12 (sequence is synthesized)
gtgatgtttggagacttcggacatggctttgtgatgtttttatttgccctcttgttggtgttaaatgaaaatcatcccagactaaatcagtcacaagagatcatgaggatgttttttaat

SEQ ID NO: 668807 - DNA, 120 bp, Artificial Sequence
  ENSG00000185344_13 (sequence is synthesized)
ggccggtacatcctcctgctgatggggctgttctcagtgtacactggcctcatctacaacgactgcttttcaaagtcagtcaacctgttcggctctgggtggaacgtgtcggccatgtac

SEQ ID NO: 668808 - DNA, 120 bp, Artificial Sequence
  ENSG00000185344_14 (sequence is synthesized)
agctccagccacccacccgcagagcataagaagatggtgctttggaatgacagcgtcgttagacacaacagcattttgcagctggatccaagcattcctggagtgttccgaggcccttat

SEQ ID NO: 668809 - DNA, 120 bp, Artificial Sequence
  ENSG00000185344_15 (sequence is synthesized)
ccccttggcattgatcctatttggaacttggccacaaatcgcctcacttttctaaactctttcaaaatgaaaatgtccgtgattttaggaatcattcatatgacttttggagtcattctg

SEQ ID NO: 668810 - DNA, 120 bp, Artificial Sequence
  ENSG00000185344_16 (sequence is synthesized)
ggaatatttaaccacttgcacttcaggaagaagttcaacatttacctggtttccatcccggaacttctcttcatgctctgtatctttggataccttatatttatgattttctacaagtgg

SEQ ID NO: 668811 - DNA, 120 bp, Artificial Sequence
  ENSG00000185344_17 (sequence is synthesized)
ctggttttttcagcagaaacctccagagttgctcccagcattctgattgaatttattaacatgtttttattcccagccagtaaaacaagtggcctttacacagggcaggagtatgtccag

SEQ ID NO: 668812 - DNA, 120 bp, Artificial Sequence
  ENSG00000185344_18 (sequence is synthesized)
agagtgctgctggttgtcacagcattgtctgtccctgtcctcttcttgggaaagccactgtttttgttgtggcttcacaatgggcgtagttgcttcggggtgaaccggagtggctacaca

SEQ ID NO: 668813 - DNA, 120 bp, Artificial Sequence
  ENSG00000185344_19 (sequence is synthesized)
cttataaggaaagatagtgaggaagaagtttcattgctgggaagccaagatatagaagagggaaatcaccaggtggaagatggatgtagagaaatggcgtgtgaagagtttaattttgga

SEQ ID NO: 668814 - DNA, 120 bp, Artificial Sequence
  ENSG00000185344_20 (sequence is synthesized)
gaaatattaatgacccaagtaatccattccatcgagtactgtctgggatgcatctccaacaccgcctcctacctgaggctctgggcgcttagcctggctcacgcacagttgtctgatgtc

SEQ ID NO: 668815 - DNA, 120 bp, Artificial Sequence
  ENSG00000185344_21 (sequence is synthesized)
ctgtgggccatgctgatgcgcgtgggcctccgcgttgacaccacctatggcgtcttgctactgctcccggttatcgcgctctttgcagttttgaccattttcatccttctgatcatggaa

SEQ ID NO: 668816 - DNA, 120 bp, Artificial Sequence
  ENSG00000185344_22 (sequence is synthesized)
gggctttctgcgtttcttcacgccatacgcctccactgggtagaatttcagaacaaattctacgttggtgcaggcaccaaatttgttcctttctcattcagtctactttcatcaaagttc

SEQ ID NO: 668817 - DNA, 120 bp, Artificial Sequence
  ENSG00000185344_23 (sequence is synthesized)
aataacgacgacagtgtggcatgatcatattgctgtaaccaacaagctttcagatttatggagaatgaccatgttatagactttcacttatgtcagatttatgataggaaaaattccatc

SEQ ID NO: 668818 - DNA, 120 bp, Artificial Sequence
  ENSG00000185344_24 (sequence is synthesized)
ttcattactgccttatgacatagccaaataattctgtaagatatacctcttcctcatatgttaaatattttgtaaagtttaccaatttgagatataaaaatttcttttggttttttatga

SEQ ID NO: 668819 - DNA, 120 bp, Artificial Sequence
  ENSG00000185344_25 (sequence is synthesized)
tgagcaaatataagttaatgccaaacgttatgttaaagttattttttcaaatacaggatttggggagagaagccaattttgcatggctagttgaaaatggtattagatacttatttcctt

SEQ ID NO: 668820 - DNA, 120 bp, Artificial Sequence
  ENSG00000185344_26 (sequence is synthesized)
taaactttatttaaaacaaacaacagagttaatctgtcacctgaagttgccagataatattttccaacagctgaagtagggatagttttttaaaaaatttaatgatgggtaatcaaaaca

SEQ ID NO: 668821 - DNA, 120 bp, Artificial Sequence
  ENSG00000185344_27 (sequence is synthesized)
tttttttttttgagatgaagtcttgctgtgtcacgtaggctggagtgcaatggcacgatcgtgtctcattgcaacttccgcctcctggattcaggtgattctcctgtctcagcctcccga

SEQ ID NO: 668822 - DNA, 89 bp, Artificial Sequence
  ENSG00000185344_28 (sequence is synthesized)
atgcaaatattttttatcctgtgctacctagaattacaagtagaggattgtttttacaattttgtcttgttttagtaattggggacaat

SEQ ID NO: 668823 - DNA, 120 bp, Artificial Sequence
  ENSG00000185344_29 (sequence is synthesized)
gtttttacaattttgtcttgttttagtaattggggacaatgggataaaatgacatacaacaaatggttatcccacttgtatatttttttaaagactcttatcctgttacccttacataaa

SEQ ID NO: 668824 - DNA, 120 bp, Artificial Sequence
  ENSG00000185344_30 (sequence is synthesized)
accagttatgataattgtatgtttggaagataaattgtatgctgagccttaaaacccagtgtgactgtagaagatataatgcggacatgatttgaatttagtgacagcttggctgatgtc

SEQ ID NO: 668825 - DNA, 120 bp, Artificial Sequence
  ENSG00000185344_31 (sequence is synthesized)
actgaaccagaagggtttatactgagtgaaggaaaggtaaaaagtagtattttgtatatttttgtaacaaaatataaatgaagatattttaccatgaagagattgcacttatccttgaga

SEQ ID NO: 668826 - DNA, 120 bp, Artificial Sequence
  ENSG00000185344_32 (sequence is synthesized)
acagtctaaatataaatgaagatattttaccatgaagagattgcacttatccttgagaacagtctaatgatactttttttactttcagactgtttctagctaaagttctgataaaagtat

SEQ ID NO: 668827 - DNA, 120 bp, Artificial Sequence
  ENSG00000185344_33 (sequence is synthesized)
tgagttaatttaaactttcaaacactgtttagatcagttgaaaactaattcttaatagccattgttttataatctttagtttaaattcatctgtttgacatttggttttttgtgaacttg

SEQ ID NO: 668828 - DNA, 120 bp, Artificial Sequence
  ENSG00000185344_34 (sequence is synthesized)
agtcagtcctattgaacattttgacctatattcttgcaaattatgttaatttttcatattttagtttgattttagacaattattttcaaaaagaaacctgactttttttcaccttcttga

SEQ ID NO: 668829 - DNA, 120 bp, Artificial Sequence
  ENSG00000185344_35 (sequence is synthesized)
cattgtgagtgatacacgttaaaaggctatttgcccgcatcctcctctatcctgtttcgaggtagagagcttggcacttctgttacaagctgagagtctggaggtgctgagtttaacgtg

SEQ ID NO: 668830 - DNA, 120 bp, Artificial Sequence
  ENSG00000185344_36 (sequence is synthesized)
gctgtgcagctgatttcaaggcatgagctgaacagcgttgacacagccgtgacttacaattaaaccctttcaattacagtacagattctgtgtgctacttgatgagatgttacccaaggc

SEQ ID NO: 668831 - DNA, 120 bp, Artificial Sequence
  ENSG00000185344_37 (sequence is synthesized)
cagtttggacttactgctttttgtccctcatattaaattatcaaatgatgccgatgaaatgcttgaaaatgattctgctctcaaagttatgcttccctagaaaggtgtcatgtcgggcac

SEQ ID NO: 668832 - DNA, 120 bp, Artificial Sequence
  ENSG00000185344_38 (sequence is synthesized)
ttgtgttgggtgactatgacatcccagcagtgctggtcaggtctcagagttgctttcacctagagctgatgcttccacaaggggacatttgtgttactttgctccaggggtctgtcataa

SEQ ID NO: 668833 - DNA, 120 bp, Artificial Sequence
  ENSG00000185344_39 (sequence is synthesized)
aaacaatggtaactacttcatccctaggaagcccaagacttcagggcactgttagctgattggtaaataagggacacgatattcacgggaattgtttactgctccccactagtaattctc

SEQ ID NO: 668834 - DNA, 120 bp, Artificial Sequence
  ENSG00000185344_40 (sequence is synthesized)
atggggccacttttttaactctttctaattaacacctcttctcagcatagagcagaggatgcagtcatttctctgttgaaatctatgtagtatttatgtagaatgtcattatatgaaaag

SEQ ID NO: 668835 - DNA, 120 bp, Artificial Sequence
  ENSG00000185344_41 (sequence is synthesized)
cgaattcagaatcctaactctgggaaagcgctctctggaaatgtagtttgataatagtgtcttataggggccacgggaatttgtttctctataaagcgatgggctccagtgtcatgttac

SEQ ID NO: 668836 - DNA, 120 bp, Artificial Sequence
  ENSG00000185344_42 (sequence is synthesized)
cagagttatcgctcagttttgtttgttaaggcttttgctagaacctattatgtatccagtttttaaaacatacttcattcccttgatagcagagatccagagcacagatggcaagttgtg

SEQ ID NO: 668837 - DNA, 120 bp, Artificial Sequence
  ENSG00000185344_43 (sequence is synthesized)
tggatgatactgaatatgtttattttcctaaagataaatgtcacgacacgacatttctcagtttttatttagatgtttattaccatgtgttaacagaatcttaaaacccaagggatttct

SEQ ID NO: 668838 - DNA, 120 bp, Artificial Sequence
  ENSG00000185344_44 (sequence is synthesized)
tcagtaaactagactttgattcaacctgctgggctggagactgtaattgccgtggtcagttaaggagtgcaaagggtgttctgtctgataggatctgggtgagccctgcggactttccag

SEQ ID NO: 668839 - DNA, 120 bp, Artificial Sequence
  ENSG00000185344_45 (sequence is synthesized)
cagcgaaaggacttggaactcctctttcgctgaatgctgctctgtttctggaatggatattttataacaacattctggtgtcagcatcccctcagcagttgtttatttaaaaattttttt

SEQ ID NO: 668840 - DNA, 120 bp, Artificial Sequence
  ENSG00000185344_46 (sequence is synthesized)
ggcgtgagccaccgcgcctggccctctgcagttgtttaataaggcacagaatacctgtagcataggtcagccttacgatgtccatgaattacatattcagacgttttagagcctgataca

SEQ ID NO: 668841 - DNA, 120 bp, Artificial Sequence
  ENSG00000185344_47 (sequence is synthesized)
atattcagacgttttagagcctgatacattttggaaaagaaaaacaacttctacacctattctacagtccgcatttaaaacaataaattcctctattaaaaacgtaaagccgggtttgct

SEQ ID NO: 668842 - DNA, 120 bp, Artificial Sequence
  ENSG00000185344_48 (sequence is synthesized)
tgcgtgccacagggaatatatccaggaaggttattatgaagctgtcaaatcaagatgatgggaataaggcagtttgaacgaacagtcttcccacagtcaggccatttttgctgatttggt

SEQ ID NO: 668843 - DNA, 120 bp, Artificial Sequence
  ENSG00000185344_49 (sequence is synthesized)
ttagaattttcagaaatacttagtacactccacctgttctttgatgggaatatctaagaaggctaggtaggttcttagggttagcctgagtcatctaggggctcaactccttgtgagggg

SEQ ID NO: 668844 - DNA, 120 bp, Artificial Sequence
  ENSG00000185344_50 (sequence is synthesized)
aaatgacagtgaacaagttagtactttgctccacaaatgcatgaaaggacaaatttgcatcttctatcagtatttaacttccttttgctaatgacaaataaatatatctatatttttaaa

SEQ ID NO: 668845 - DNA, 120 bp, Artificial Sequence
  ENSG00000185344_51 (sequence is synthesized)
gagggctcggtaaggctgccttcctctcctctgccaggaacagaagagagactgatggaactgataaattcagagaaaaaaaggaagtgagaatttcatagagtaatgagaatgcagtgt

SEQ ID NO: 668846 - DNA, 88 bp, Artificial Sequence
  ENSG00000185344_52 (sequence is synthesized)
aaggaagtgagaatttcatagagtaatgagaatgcagtgtgttgactcttcttttgtttttttaaaatattaattaacaaaattaaaa

SEQ ID NO: 668847 - DNA, 120 bp, Artificial Sequence
  ENSG00000185344_53 (sequence is synthesized)
agatcaaaactgttctgaagtagcatttacatattttttgagttttttctttattaagagaaaatatcagtaattctcatgcgagcatttactcaagttaaaattgttttttaatagaat

SEQ ID NO: 668848 - DNA, 90 bp, Artificial Sequence
  ENSG00000185344_54 (sequence is synthesized)
ctaatttttgtatttttaatggagacgggattttaccatgttggctaggctggccttgaactcctgacctcaagcgattgcctgccttgg

SEQ ID NO: 668849 - DNA, 120 bp, Artificial Sequence
  ENSG00000185344_55 (sequence is synthesized)
ggcctcttatgccaaatttttatggaatatgttaaagggcagtaaacatctgtgaaggaatacagagaatggatagatgtatatcttgaaaatacaatccctgtccccacggttataaag

SEQ ID NO: 668850 - DNA, 120 bp, Artificial Sequence
  ENSG00000185344_56 (sequence is synthesized)
aaaatgcatgtccattatagaaaattgggaacaatgtagaaaacaagaagaaaaagaagtccctcgcagtctcctattctgagccactgtttacatgccaagtgtgttctctcagtcttt

SEQ ID NO: 668851 - DNA, 120 bp, Artificial Sequence
  ENSG00000185344_57 (sequence is synthesized)
ctctgggtaagataggggtattttatctggtaacttttactcaggttctaggatttgtttatagtgtcaggtttactgtcttttgggttcaatgtctgaccctcttgaagttattacaga

SEQ ID NO: 668852 - DNA, 120 bp, Artificial Sequence
  ENSG00000185344_58 (sequence is synthesized)
ccttagagactatttttagccattttcccccattggtgtttctaagtgctgaccattctctctgcatcaaagctagacatgggcgctttcttcggttgtatagattgtgtttttctgttg

SEQ ID NO: 668853 - DNA, 120 bp, Artificial Sequence
  ENSG00000185344_59 (sequence is synthesized)
gggcgctttcttcggttgtatagattgtgtttttctgttgtgtgtggcatttcttctgccttgtgccttaagtggttgtgttccttgacacactactatgttgcccaggctggtcttgaa

SEQ ID NO: 668854 - DNA, 120 bp, Artificial Sequence
  ENSG00000185344_60 (sequence is synthesized)
gtgttgggattacaggcctgggctcaaacgatcctcctgccttggccccctgaagtgttgggattaccattcccagcctctttttcctggttctaactcttttctgacagtgtgaagtca

SEQ ID NO: 668855 - DNA, 120 bp, Artificial Sequence
  ENSG00000185344_61 (sequence is synthesized)
gcttccattatcctcagtgtgtctagtgggttgctcagttaactgacttattcattcattgtattcattctcccagccacatcctccctctcctcctcctgccatcccctccctcccacc

SEQ ID NO: 668856 - DNA, 120 bp, Artificial Sequence
  ENSG00000185344_62 (sequence is synthesized)
accgcctgcctgtgctatgctgtagctccccagtctgtgctcctgttccctgggcccagggctcaatttttggacagcttctctcttctttctgcctttagagatctcacataattttat

SEQ ID NO: 668857 - DNA, 120 bp, Artificial Sequence
  ENSG00000185344_63 (sequence is synthesized)
gattttaagtaccatgccccaaatgtgtatatccctagcttggacctgtccccagaatactagacttttatgtctgtctactccatatctccttttaagtatctggaagaccgtttctgc

SEQ ID NO: 668858 - DNA, 120 bp, Artificial Sequence
  ENSG00000185344_64 (sequence is synthesized)
ttttgcctaaaactgaacatctgatctttcttcccagacctgcccttccagacccattgatctcactgcgcaggctgaaagccctgggcttctccccactcttctctgtttcttgcgtct

SEQ ID NO: 668859 - DNA, 120 bp, Artificial Sequence
  ENSG00000185344_65 (sequence is synthesized)
cacttaaatccctcagcagatctggtggccatgtctgctaaatagagagtcccgccgcctctcctcgctcttcctccctcctggtccaggtctcgtcccacacttgcctcgcctggctgg

SEQ ID NO: 668860 - DNA, 120 bp, Artificial Sequence
  ENSG00000185344_66 (sequence is synthesized)
gcccctgctcctgcctctgccttagcctggtctcttctcctggcatccagaatgatccacaggaaaccacagtcagatcatttcattcctgtactcaagaccctccaggggcttcctgtt

SEQ ID NO: 668861 - DNA, 120 bp, Artificial Sequence
  ENSG00000185344_67 (sequence is synthesized)
ttcctcagcaacagccctgtggagccgcacaatgggcctgtggccctcgtcattcctcagagctgtgttactacatccctccccggcggtgctggcctcctcgagtctcctgactgtgct

SEQ ID NO: 668862 - DNA, 120 bp, Artificial Sequence
  ENSG00000185344_68 (sequence is synthesized)
tctgtgtgtactcctctgcttggaagtctcttctcccagtggccatggggctcgcgtcctcacctcctgcatttttttttttccatttaccctgacttgaagctcacctgcacgtcttta

SEQ ID NO: 668863 - DNA, 120 bp, Artificial Sequence
  ENSG00000185344_69 (sequence is synthesized)
cttgcccatcctatgtgagatcacagtgcccaagcccaccctccctccctcccgtctcctcatcctgcgtctgttctttatagcacttacctctacctggcgtactttctttgtttcttt

SEQ ID NO: 668864 - DNA, 120 bp, Artificial Sequence
  ENSG00000185344_70 (sequence is synthesized)
tgctgtcaagttgaatataagtttaagttcccttcccctcccaggtcagggatttttgtcagttttcttcactgctgtatccctagcacctataatagtgcctattcagtttttatagaa

SEQ ID NO: 668865 - DNA, 120 bp, Artificial Sequence
  ENSG00000185344_71 (sequence is synthesized)
ttcagtttttatagaattctgttttgttggatacttgtaaatacagggtgattcttattatttacagtagttatgcttcataaagtcactgagggctgagcacggtggctcatgcctgta

SEQ ID NO: 668866 - DNA, 79 bp, Artificial Sequence
  ENSG00000185344_72 (sequence is synthesized)
ttgaacccaggaggtggaggttgcggtgggccgagattgtgccattgcattccggcctgggcaccactgaaatctctga

SEQ ID NO: 668867 - DNA, 120 bp, Artificial Sequence
  ENSG00000185344_73 (sequence is synthesized)
aaaaaaaaaaaaaaaaaaagtcactgaaatctctgaattaccaactgtggaaaaactcactgctcctaggggaagtacgggagttgagtcatttacattgagctcccagccagcagctct

SEQ ID NO: 668868 - DNA, 120 bp, Artificial Sequence
  ENSG00000185344_74 (sequence is synthesized)
gtgactcgagcccgaacgaagtgtccctaacacacgccacatctctgtcagggacatcacagctgtcttgtgctcaggacaccagactgcacctcagccctacactcggggctgtttata

SEQ ID NO: 668869 - DNA, 120 bp, Artificial Sequence
  ENSG00000185344_75 (sequence is synthesized)
ccgtgaaatcaccaaaaaaagcacagaagtgtgaaaaacatgataccaaacagactctgaaaaggacacttggtgatagtctgagagcagagatgggaagggagagcgtcaccttgttgg

SEQ ID NO: 668870 - DNA, 120 bp, Artificial Sequence
  ENSG00000185344_76 (sequence is synthesized)
actttacctgggaacgcgggtgtcgggtgcctaaaagttttggctgctctgcacatgactggaagcgctccgtggattggtttggggctgttactacaagtaggtgaattcgtaattaca

SEQ ID NO: 668871 - DNA, 120 bp, Artificial Sequence
  ENSG00000185344_77 (sequence is synthesized)
gaatcctcaaataaggagtattgactgtattgaatgagtgaatgaatgaacgctttgacagtgtttgagctgccgaagttctagaagtttatacacgcagaaataacacttatccttatt

SEQ ID NO: 668872 - DNA, 120 bp, Artificial Sequence
  ENSG00000185344_78 (sequence is synthesized)
gctctacttagaatgctcacatctagtgaatcgcagtctactcttagggttggtgaatacctattttatcagtagatgtttcataattactgagacctgccccagaatcccattagtata

SEQ ID NO: 668873 - DNA, 120 bp, Artificial Sequence
  ENSG00000185344_79 (sequence is synthesized)
gcagctgtggccacggcagttcctctggtctaccttcttggtttacacaggggagtctgaggcgtgcggtgggagtggggctgatgaaggtggggatttggggtggtaaagtctggtcat

SEQ ID NO: 668874 - DNA, 120 bp, Artificial Sequence
  ENSG00000185344_80 (sequence is synthesized)
ggagctgggtagtggcagagtggtgaacagagtgcgtctggggtttctgttcctcacactctagcgtgttcttaccagcatccagccggcagctctttcattgtaatccttgaagtggaa

SEQ ID NO: 668875 - DNA, 120 bp, Artificial Sequence
  ENSG00000185344_81 (sequence is synthesized)
taacagcagtcatctggattggcctgttcgatgggtcgcttgtgatgtaattacaaacatagtgatgactgtgtacagtgcttgtaaggcaaagcagaagtaatgaatatagtatattaa

SEQ ID NO: 668876 - DNA, 120 bp, Artificial Sequence
  ENSG00000185344_82 (sequence is synthesized)
gtgatttgtttgaatacaagttttcattgactcaatgatttgccttacggatttttgcttctgttattttaatacttaagtatttttaaggatgtttagtatgtaactaattattaaaga

SEQ ID NO: 668877 - DNA, 63 bp, Artificial Sequence
  ENSG00000185344_83 (sequence is synthesized)
ttctcatgtagtggtgcgatctcggctcactgcagcctgtgcctcccgggttcaagcaattct

SEQ ID NO: 668878 - DNA, 87 bp, Artificial Sequence
  ENSG00000185344_84 (sequence is synthesized)
gtcatgaatttttatcctcaattaattgtgtaaatgtgagtgcatagtaactcatatgctagagactaggaaaataagttagaaaag

SEQ ID NO: 668879 - DNA, 120 bp, Artificial Sequence
  ENSG00000185344_85 (sequence is synthesized)
taactcatatgctagagactaggaaaataagttagaaaagattatctaaatatattctgtgttgcaaaaaaaggaaatgtagacttaaagaggaagagtctttgatgtgtgatatgaata

SEQ ID NO: 668880 - DNA, 120 bp, Artificial Sequence
  ENSG00000185344_86 (sequence is synthesized)
agcagacaaaggaaatccgagaaatgacagcacctgtggttagagacgagggccagtcttgggggtctcacgctcatcacagccttcggaatgttttagctaatatgtggtgtgaacttc

SEQ ID NO: 668881 - DNA, 120 bp, Artificial Sequence
  ENSG00000185344_87 (sequence is synthesized)
gttttagctaatatgtggtgtgaacttcacagaaattacctgaattaatatgaaacaataaatgagcctatttatttatttactttgagaaggagtcttgctctgtcacccaagctggag

SEQ ID NO: 668882 - DNA, 120 bp, Artificial Sequence
  ENSG00000185344_88 (sequence is synthesized)
aaaagaaaaaaacaaaacaaaaaaacccactgtttttggtatactgcatgaagattattggaattacacttggaactaattactaccctcttaagtaaccattgttttgttttaggagca

SEQ ID NO: 668883 - DNA, 120 bp, Artificial Sequence
  ENSG00000185344_89 (sequence is synthesized)
gaaattatggtgagctggtcattcaaagctgtatgtgagtacatgtgtttttaaattgctcttttgagtaattcattcacatggtgtaaaagtgaaaagaaataaaagagtatgaaagac

SEQ ID NO: 668884 - DNA, 120 bp, Artificial Sequence
  ENSG00000185344_90 (sequence is synthesized)
tagttaaaaaaaaatgcttatgtttttataagcatagccaaaggtctggaattttgtggctggaggggccctgtctcgttcatctccattttgcagaggtggtgactgaagccactgagt

SEQ ID NO: 668885 - DNA, 120 bp, Artificial Sequence
  ENSG00000185344_91 (sequence is synthesized)
gtcggtgctttactcatggtcatccagttgatccctcagtggcagaaccaggcctgggagcctgtttctggctgcctggtccagtgcgctttgggaggtcacaacccaaacctagtctgg

SEQ ID NO: 668886 - DNA, 120 bp, Artificial Sequence
  ENSG00000185344_92 (sequence is synthesized)
ggcaagacctccctttgggagatggcctctgatatttttggagcaccaggtcttccttagtgtttgagaccgtctcggagctgactggctttcacatgagaaacagttgggtctgtgtta

SEQ ID NO: 668887 - DNA, 120 bp, Artificial Sequence
  ENSG00000185344_93 (sequence is synthesized)
catgtgtgtctattattttatgggataatagttcagggccgtcagggggaaactcagtccaggtagctcacagagggacccactgtacataagcgagcatgacctgtgcaggctgcactc

SEQ ID NO: 668888 - DNA, 120 bp, Artificial Sequence
  ENSG00000185344_94 (sequence is synthesized)
gtttctgtttttttttggtttctcttgtttatgatttttaagaattgtattttatcattattttattgaagctttgtacaatggcatagataccacagataaatgcaggggcgttcagtg

SEQ ID NO: 668889 - DNA, 120 bp, Artificial Sequence
  ENSG00000185344_95 (sequence is synthesized)
ggcacaggtgctatggacagaaagatcaaggaagggcagctacctttctttactacctgccgcatacctgagagtgtgctttccttacttagtgtttcttaattctcacaacagccccag

SEQ ID NO: 668890 - DNA, 120 bp, Artificial Sequence
  ENSG00000185344_96 (sequence is synthesized)
gaggtaggtgtgtcatcccctgttactggtgataactggtggctcagggcagtcctggtcactcagcggtctgtagggccaggctgttaacctaggtcagcctggctccagcccaggact

SEQ ID NO: 668891 - DNA, 120 bp, Artificial Sequence
  ENSG00000185344_97 (sequence is synthesized)
tctgatgtggctctgcctgtggccgccacctttctcggcatttcaagaggttcatcctgttgatggtgtgtagataatacagctttgtgcctgagtagcacacagagctctaggaacctg

SEQ ID NO: 668892 - DNA, 120 bp, Artificial Sequence
  ENSG00000185344_98 (sequence is synthesized)
tttttggtgaggggcgaccatacagagtgataagcttggacagcacagtgtcccgtccaaaccctgggaagccatgcagactgccgtggctgtgtaagcctgagtggattttgcttttga

SEQ ID NO: 668893 - DNA, 120 bp, Artificial Sequence
  ENSG00000185344_99 (sequence is synthesized)
tttagctttaagtaactataaatcttcgtttttctaaggaagtgtttttggttttgttctgaattctcttccacgattttctgtgtgtggaggtaaatccacttgctgattcacactcat

SEQ ID NO: 668894 - DNA, 120 bp, Artificial Sequence
  ENSG00000185344_100 (sequence is synthesized)
agtcctcagacggtctttataatcatcaaagaacaggaaaacagaaccaagaatatacaaaatattctgcttgtgcttatactttctcatttacagtgtttacagaaaatgattagttgg

SEQ ID NO: 668895 - DNA, 120 bp, Artificial Sequence
  ENSG00000185344_101 (sequence is synthesized)
ataatactttaccacagggtcattaatgttattcatcagttctagaattcagctatgagtttaggaaaagaaaacccgctggcaagtgtagctggctggcatttattgaatgttcctcgc

SEQ ID NO: 668896 - DNA, 120 bp, Artificial Sequence
  ENSG00000185345_0 (sequence is synthesized)
aggatttaacccaggagagccgctggtgggaggcgcggctggcgccgctgcgcgcatgggcctgttcctggcccgcagccgccacctacccagtgaccatgatagtgtttgtcaggttca

SEQ ID NO: 668897 - DNA, 120 bp, Artificial Sequence
  ENSG00000185345_1 (sequence is synthesized)
actccagccatggtttcccagtggaggtcgattctgacaccagcatcttccagctcaaggaggtggttgctaagcgacagggggttccggctgaccagttgcgtgtgattttcgcaggga

SEQ ID NO: 668898 - DNA, 120 bp, Artificial Sequence
  ENSG00000185345_2 (sequence is synthesized)
aggagctgaggaatgactggactgtgcagaattgtgacctggatcagcagagcattgttcacattgtgcagagaccgtggagaaaaggtcaagaaatgaatgcaactggaggcgacgacc

SEQ ID NO: 668899 - DNA, 120 bp, Artificial Sequence
  ENSG00000185345_3 (sequence is synthesized)
ccagaaacgcggcgggaggctgtgagcgggagccccagagcttgactcgggtggacctcagcagctcagtcctcccaggagactctgtggggctggctgtcattctgcacactgacagca

SEQ ID NO: 668900 - DNA, 120 bp, Artificial Sequence
  ENSG00000185345_4 (sequence is synthesized)
ggaaggactcaccaccagctggaagtccagcaggtagatcaatctacaacagcttttatgtgtattgcaaaggcccctgtcaaagagtgcagccgggaaaactcagggtacagtgcagca

SEQ ID NO: 668901 - DNA, 120 bp, Artificial Sequence
  ENSG00000185345_5 (sequence is synthesized)
cctgcaggcaggcaacgctcaccttgacccagggtccatcttgctgggatgatgttttaattccaaaccggatgagtggtgaatgccaatccccacactgccctgggactagtgcagaat

SEQ ID NO: 668902 - DNA, 120 bp, Artificial Sequence
  ENSG00000185345_6 (sequence is synthesized)
ttttctttaaatgtggagcacaccccacctctgacaaggaaacatcagtagctttgcacctgatcgcaacaaatagtcggaacatcacttgcattacgtgcacagacgtcaggagccccg

SEQ ID NO: 668903 - DNA, 120 bp, Artificial Sequence
  ENSG00000185345_7 (sequence is synthesized)
tcctggttttccagtgcaactcccgccacgtgatttgcttagactgtttccacttatactgtgtgacaagactcaatgatcggcagtttgttcacgaccctcaacttggctactccctgc

SEQ ID NO: 668904 - DNA, 120 bp, Artificial Sequence
  ENSG00000185345_8 (sequence is synthesized)
cttgtgtggctggctgtcccaactccttgattaaagagctccatcacttcaggattctgggagaagagcagtacaaccggtaccagcagtatggtgcagaggagtgtgtcctgcagatgg

SEQ ID NO: 668905 - DNA, 120 bp, Artificial Sequence
  ENSG00000185345_9 (sequence is synthesized)
ggggcgtgttatgcccccgccctggctgtggagcggggctgctgccggagcctgaccagaggaaagtcacctgcgaagggggcaatggcctgggctgtgggtttgccttctgccgggaat

SEQ ID NO: 668906 - DNA, 120 bp, Artificial Sequence
  ENSG00000185345_10 (sequence is synthesized)
gtaaagaagcgtaccatgaaggggagtgcagtgccgtatttgaagcctcaggaacaactactcaggcctacagagtcgatgaaagagccgccgagcaggctcgttgggaagcagcctcca

SEQ ID NO: 668907 - DNA, 120 bp, Artificial Sequence
  ENSG00000185345_11 (sequence is synthesized)
aagaaaccatcaagaaaaccaccaagccctgtccccgctgccatgtaccagtggaaaaaaatggaggctgcatgcacatgaagtgtccgcagccccagtgcaggctcgagtggtgctgga

SEQ ID NO: 668908 - DNA, 120 bp, Artificial Sequence
  ENSG00000185345_12 (sequence is synthesized)
actgtggctgcgagtggaaccgcgtctgcatgggggaccactggttcgacgtgtagccagggcggccgggcgccccatcgccacatcctgggggagcatacccagtgtctaccttcattt

SEQ ID NO: 668909 - DNA, 120 bp, Artificial Sequence
  ENSG00000185345_13 (sequence is synthesized)
tctaattctcttttcaaacacacacacacacgcgcgcgcgcgcacacacactcttcaagtttttttcaaagtccaactacagccaaattgcagaagaaactcctggatccctttcactat

SEQ ID NO: 668910 - DNA, 120 bp, Artificial Sequence
  ENSG00000185345_14 (sequence is synthesized)
gtccatgaaaaacagcagagtaaaattacagaagaagctcctgaatccctttcagtttgtccacacaagacagcagagccatctgcgacaccaccaacaggcgttctcagcctccggatg

SEQ ID NO: 668911 - DNA, 120 bp, Artificial Sequence
  ENSG00000185345_15 (sequence is synthesized)
acacaaataccagagcacagattcaagtgcaatccatgtatctgtatgggtcattctcacctgaattcgagacaggcagaatcagtagctggagagagagttctcacatttaatatcctg

SEQ ID NO: 668912 - DNA, 120 bp, Artificial Sequence
  ENSG00000185345_16 (sequence is synthesized)
ccttttaccttcagtaaacaccatgaagatgccattgacaaggtgtttctctgtaaaatgaactgcagtgggttctccaaactagattcatggctttaacagtaatgttcttatttaaat

SEQ ID NO: 668913 - DNA, 120 bp, Artificial Sequence
  ENSG00000185345_17 (sequence is synthesized)
ccaactatgcgtaaatcaacttgtcacaaagtgagaaattatgaaagttaatttgaatgttgaatgtttgaattacagggaagaaatcaagttaatgtactttcattccctttcatgatt

SEQ ID NO: 668914 - DNA, 120 bp, Artificial Sequence
  ENSG00000185345_18 (sequence is synthesized)
tgcaactttagaaagaaattgtttttctgaaagtatcaccaaaaaatctatagtttgattctgagtattcattttgcaacttggagattttgctaatacatttggctccactgtaaattt

SEQ ID NO: 668915 - DNA, 120 bp, Artificial Sequence
  ENSG00000185345_19 (sequence is synthesized)
aatagataaagtgcctataaaggaaacacgtttagaaatgatttcaaaatgatattcaatcttaacaaaagtgaacattattaaatcagaatctttaaagaggagcctttccagaactac

SEQ ID NO: 668916 - DNA, 120 bp, Artificial Sequence
  ENSG00000185345_20 (sequence is synthesized)
caaaatgaagacacgcccgactctctccatcagaagggtttatacccctttggcacaccctctctgtccaatctgcaagtcccagggagctctgcataccaggggttccccaggagagac

SEQ ID NO: 668917 - DNA, 120 bp, Artificial Sequence
  ENSG00000185345_21 (sequence is synthesized)
cttctcttaggacagtaaactcactagaatattccttatgttgacatggattggatttcagttcaatcaaactttcagcttttttttcagccattcacaacacaatcaaaagattaacaa

SEQ ID NO: 668918 - DNA, 120 bp, Artificial Sequence
  ENSG00000185345_22 (sequence is synthesized)
cactgcatgcggcaaaccgcatgctcttacccacactacgcagaagagaaagtacaaccactatcttttgttctacctgtattgtctgacttctcaggaagatcgtgaacataactgagg

SEQ ID NO: 668919 - DNA, 120 bp, Artificial Sequence
  ENSG00000185345_23 (sequence is synthesized)
gcatgagtctcactagcacatggaggcccttttggatttagagactgtaaattattaaatcggcaacagggcttctctttttagatgtagcactgaaatccttgctggagggaagagagg

SEQ ID NO: 668920 - DNA, 120 bp, Artificial Sequence
  ENSG00000185345_24 (sequence is synthesized)
ggatgaactcaagttttccacatcctgggacacctgtccctcttttcctaactgcctaagataacccatttcttccaaccatctgaggacagtcccgtcgtctcagaggccctgcaccgg

SEQ ID NO: 668921 - DNA, 120 bp, Artificial Sequence
  ENSG00000185345_25 (sequence is synthesized)
ggagagactgggctctgcagcagccacatcagcattcacagcttcatgtggcttcactgtctgaaaatctaccgactccaacatggccccacggtgacaacagacctgtgacaggaagcc

SEQ ID NO: 668922 - DNA, 120 bp, Artificial Sequence
  ENSG00000185345_26 (sequence is synthesized)
caaagctcacatagaaatggtggacagatcaaagtctctatagtaagggaaaaaaagagaggtggcaggcatgagccccctgcacccagtggctcgtgtccatactgagtccagaccctg

SEQ ID NO: 668923 - DNA, 120 bp, Artificial Sequence
  ENSG00000185345_27 (sequence is synthesized)
atcaaggcctgacttagtgtcactggcagtcccactaaattacacttccttacactggcccgatgcgacaaatcaggtggctcccttctgtcacgtggagcacacagtgttttccatcat

SEQ ID NO: 668924 - DNA, 120 bp, Artificial Sequence
  ENSG00000185345_28 (sequence is synthesized)
ccatagctttcttcctgatggtgtttgcattattgcgccttcccaatctgcatgctgcgttgggcttgcggtgcctgaacaaggtttgctcccatgagctcaggcaccctaggatcccct

SEQ ID NO: 668925 - DNA, 120 bp, Artificial Sequence
  ENSG00000185345_29 (sequence is synthesized)
gttagactattaggctgtccagcatggtctcctttcccttcttggtggtggtcttttccctttccagaatagaacagtgattcttaaaataagttagagcaggccgggcgcggtggctca

SEQ ID NO: 668926 - DNA, 120 bp, Artificial Sequence
  ENSG00000185345_30 (sequence is synthesized)
aaaaaaaaacaaaaacaaaaaagcaagatcatccactacacatgaacatgaatcacagtattatttgcacaggaagggtgtaacaaaatatgaatgtatcaaaaaatagaaataaagtct

SEQ ID NO: 668927 - DNA, 120 bp, Artificial Sequence
  ENSG00000185345_31 (sequence is synthesized)
aatgtatcaaaaaatagaaataaagtctttgcagaaaaagtctgtttttctctgaagtgtgttgagattatctgacaactctaagattgtacttaaattgtcaataaagcatcaaaagag

SEQ ID NO: 668928 - DNA, 120 bp, Artificial Sequence
  ENSG00000185345_32 (sequence is synthesized)
gccacctacccagtgaccatgatagatcacactgacttgtgctgcagatgacagttaatctgcttaaatacttcaagctgtacaagtctgctgtggaagtgagcaccacacaatgtggct

SEQ ID NO: 668929 - DNA, 120 bp, Artificial Sequence
  ENSG00000185345_33 (sequence is synthesized)
tagacctcccatgcagctctcaaagtgctttgcattgctgtggttacatggaaatgttaaacaaatgagttaatggaataatttttatttaattgtttttaataaatattcatgaaaaat

SEQ ID NO: 668930 - DNA, 120 bp, Artificial Sequence
  ENSG00000185345_34 (sequence is synthesized)
cacctacccagtgaccatgatagatcacactgacttgtgctgcagatgacaggtgtggacatgataggagcatattgacatttactgggatttgacttcaaagctttagagatgaaaagc

SEQ ID NO: 668931 - DNA, 120 bp, Artificial Sequence
  ENSG00000185345_35 (sequence is synthesized)
atactgacaaagtcgactagaacttgattcacataattattgtggtgctaagttttgttcagcagcacagtataaacacgaatgtagatccgacacagaacatccaggcaaggacaatgc

SEQ ID NO: 668932 - DNA, 120 bp, Artificial Sequence
  ENSG00000185345_36 (sequence is synthesized)
gcatgaaacctgctttggaattattttggaaaactctaactgttgaatatgtgatccagatgaataactttaaaaaatacagtgttgctgactacaatttgaaaaattatggaagtccac

SEQ ID NO: 668933 - DNA, 120 bp, Artificial Sequence
  ENSG00000185345_37 (sequence is synthesized)
accataaaccctgcccttacataggttgatgtagcattcttgcctttccctagggatggacttcagttgtcctacacattcctttcctagggtatataagccctgggtgtggtgggtagc

SEQ ID NO: 668934 - DNA, 120 bp, Artificial Sequence
  ENSG00000185345_38 (sequence is synthesized)
caaagctatagaagaattacagagttccagatgtggaaaaagccctagacgtcattaactccagtgattatcaggatgtggttcacagatttattgtaagatgcctgtgaattcacccgt

SEQ ID NO: 668935 - DNA, 120 bp, Artificial Sequence
  ENSG00000185345_39 (sequence is synthesized)
gcttaatttttttttccctcaattatcaagatagaaaaagtacaactcttaccatgtgggtatgcaagaaatgttagctgttacaaaaaaaatcgcgtataaaaaagttgaaaaccaaat

SEQ ID NO: 668936 - DNA, 68 bp, Artificial Sequence
  ENSG00000185345_40 (sequence is synthesized)
caatctcccgctggagtggactggtgcgatcttggttcactgcaacgtccacatcccaggttcgagag

SEQ ID NO: 668937 - DNA, 120 bp, Artificial Sequence
  ENSG00000185345_41 (sequence is synthesized)
attctcctgcctcagcctctcaagtagccaggattacaggttatttaagaaagaactcaatctatcaatacccagtaaccatagacagtggtacagtaaagtcaaagattaagcaattaa

SEQ ID NO: 668938 - DNA, 120 bp, Artificial Sequence
  ENSG00000185345_42 (sequence is synthesized)
gacagtggtacagtaaagtcaaagattaagcaattaatgatttcagaaacagggatgccaactgagacttttagaattcataggaggggtaaggaagacagaaactgttttactatacag

SEQ ID NO: 668939 - DNA, 120 bp, Artificial Sequence
  ENSG00000185345_43 (sequence is synthesized)
tactcaggaggctgcatgcacatgaagtgtccgcagccccagtgcaggctcgagtggtgctggaactgtggctgcgagtggaaccgcgtctgcatgggggaccactggttcgacgtgtag

SEQ ID NO: 668940 - DNA, 120 bp, Artificial Sequence
  ENSG00000185347_0 (sequence is synthesized)
ttccagccggagcggtaactgggcgcaggtcccagccgccgcactaaacccggcccgtgcggtgattggacgcaggccccgggccgcggcggaggcgggcgatccgaaagaggctggtgc

SEQ ID NO: 668941 - DNA, 120 bp, Artificial Sequence
  ENSG00000185347_1 (sequence is synthesized)
gatccgaaagaggctggtgctggctgcatggggaggcggcggcagcgggtggaccccgcggctggggcccgggccggggccctgcctgaggccatcgccgcgttgagtcggtcgctgccc

SEQ ID NO: 668942 - DNA, 120 bp, Artificial Sequence
  ENSG00000185347_2 (sequence is synthesized)
cttccgccgcgccaagttcgaccgtccggaggcgacctccgcgctctggcagctcctcttccgtgtgctctcgccactccctgcgggcaacgccttggcatcgctcgccctggaggtcca

SEQ ID NO: 668943 - DNA, 120 bp, Artificial Sequence
  ENSG00000185347_3 (sequence is synthesized)
agcccgcttggtgaagtcagcactatgctcccagggctacccgaggctggcactggcacaactacctgaggatggctcgcagggcagtcgggagctgctgctggctctgtcctggctctt

SEQ ID NO: 668944 - DNA, 120 bp, Artificial Sequence
  ENSG00000185347_4 (sequence is synthesized)
ggcccgaggacctgtgcccgagcagatgctggcccaggcccgagtgcctctgggtgacgagatgactgtgtgccagtgtgaggccctggccagccctggcccacctgcaccccacatgga

SEQ ID NO: 668945 - DNA, 120 bp, Artificial Sequence
  ENSG00000185347_5 (sequence is synthesized)
agcagagggtcctgtggatgtccgccatgtgcagtggctgatgggaaagctgcggttccggtggcgccagctggtgtccagtcagcaggagcagtgcgccctcctgagcaagatccacct

SEQ ID NO: 668946 - DNA, 120 bp, Artificial Sequence
  ENSG00000185347_6 (sequence is synthesized)
gacccagagggaggccagcagctgctgcggactctggagcgtgagaaccagcgcctggaggctgtcctggcgtggcggcgctctgagctggtcttctggcggtggatggacacggtcctg

SEQ ID NO: 668947 - DNA, 120 bp, Artificial Sequence
  ENSG00000185347_7 (sequence is synthesized)
ggcacctgtgccccggaggtgcctgctgcagcctcacagcccaccttcctgccctgggtccccgagcgcgggggtggcgagttggacctggtagtgcgggagctgcaggcactggaggag

SEQ ID NO: 668948 - DNA, 120 bp, Artificial Sequence
  ENSG00000185347_8 (sequence is synthesized)
gagctgcgggaggctgcggagcgcaggcgggcggcctgggaggccaaggctggaggctgtggacgggggccagagtggagtgccgcgcggcgggcctctcgggaggctgtggaaaaggag

SEQ ID NO: 668949 - DNA, 120 bp, Artificial Sequence
  ENSG00000185347_9 (sequence is synthesized)
ctgggagctctacagcagtgctgggagcgagacggtggcccggcccagccccatgggccacaccggctggtgagacgagaggatggggcagcaggggaccgggacctgcgggcagctgtg

SEQ ID NO: 668950 - DNA, 120 bp, Artificial Sequence
  ENSG00000185347_10 (sequence is synthesized)
gtgatcaggacgctgaggagccaggaggcctgcctggaggcggtgctacgtcgactacagggacagtgtcggcaggaactggccaggctggtgggagcccgccctggtctcatctggatc

SEQ ID NO: 668951 - DNA, 120 bp, Artificial Sequence
  ENSG00000185347_11 (sequence is synthesized)
ccgccacctggacgctgagggcctgtcgacgggccctcgtgtgggaagcctgccctggcccagcctggctgggtcttggaggagcagattccaaggccaggtggccgcagggacgatgca

SEQ ID NO: 668952 - DNA, 120 bp, Artificial Sequence
  ENSG00000185347_12 (sequence is synthesized)
gatgcagagcccacgtcacatgctcgctccaggggtggggctgggctgactctggccggatcccaggcctgtggctagcagcactggggacaggaatggctggtcccttgaggaggtcgt

SEQ ID NO: 668953 - DNA, 120 bp, Artificial Sequence
  ENSG00000185347_13 (sequence is synthesized)
gggagagcgctgaacaaggccgcagagctgctccgccatctcccccacgcctcctgccaagttctgtggcgccgcggttccccacctcctgctcccatccccctggctcccgccgccctg

SEQ ID NO: 668954 - DNA, 120 bp, Artificial Sequence
  ENSG00000185347_14 (sequence is synthesized)
tagctcggcagccctgccaggagcccggaagtgggtccgcacgagacagaatagactacactcaaactccaggggaaccgttcattgggcttggacacgaaggcgggaccctgccgacgc

SEQ ID NO: 668955 - DNA, 120 bp, Artificial Sequence
  ENSG00000185347_15 (sequence is synthesized)
gcagctttcctgccgctggccctccccctgccaccctgtcgggtttccctgtttgggggtgggagcgtggaggagcccctgggcagtggtggccagtgtagggctggccaggtgctggag

SEQ ID NO: 668956 - DNA, 120 bp, Artificial Sequence
  ENSG00000185347_16 (sequence is synthesized)
gacatgcataccccagcactggtgagtggcaggaccacggggaggtggcacaggcctccctggagcgggattatctcggccccgccccccttcatttgggctcccgctgtgggcctggcc

SEQ ID NO: 668957 - DNA, 120 bp, Artificial Sequence
  ENSG00000185347_17 (sequence is synthesized)
ctgggctgtgagcacagctgcccccacctccggccaaggctgtgcctggtgggtgcgccggatgggagcccggggctctgctccttcccgggaggtggtgctccgggtggggaggcacag

SEQ ID NO: 668958 - DNA, 120 bp, Artificial Sequence
  ENSG00000185347_18 (sequence is synthesized)
acgcggctgccacagcgaccagagccttagccatctgtctgtcactgaagcagagatgctcagggacccagagggaggccagcaggtttctggagcgggagctgcccaaaacctggacct

SEQ ID NO: 668959 - DNA, 120 bp, Artificial Sequence
  ENSG00000185347_19 (sequence is synthesized)
tcccagaaccttctggaatgatctgtggctggtatgtgagcagccaggtctgctgccgggtgactgggcagcacccttggatcctggtggggcctcagcctgcagcctgctctccccttt

SEQ ID NO: 668960 - DNA, 120 bp, Artificial Sequence
  ENSG00000185347_20 (sequence is synthesized)
acggagggcgtgcggggagggagaggaggggcttgctggggggggggccccgaggcggggccgggagggccgcctggaagaggaggtcgggggcgaaggaggccgagaagaaagccctgc

SEQ ID NO: 668961 - DNA, 120 bp, Artificial Sequence
  ENSG00000185347_21 (sequence is synthesized)
atgattgggctcaggttccagccggagcggtaactgggcgcaggtcccagccgccgcactaaacccggcccgtgcggtgattggacgcaggccccgggccgcggcggaggcgggcgatcc

SEQ ID NO: 668962 - DNA, 120 bp, Artificial Sequence
  ENSG00000185347_22 (sequence is synthesized)
tcagctccatggccttctagagtgtggcctttgtgcctccctggacgtcacagttgctgagatggtggcatccagcccgctgtgggacctgggggactaccactgccctctttgccctct

SEQ ID NO: 668963 - DNA, 120 bp, Artificial Sequence
  ENSG00000185347_23 (sequence is synthesized)
caagacgtggcacgggtgggggcccaggacgcaggagcctgggctgggcaggcagctggctaagggcaggctgttggaataaaggaacacagatctcaggtgtgagctggtggtgttggc

SEQ ID NO: 668964 - DNA, 120 bp, Artificial Sequence
  ENSG00000185347_24 (sequence is synthesized)
atctcaagcaggtctcacttggtgtgtcagggggcacctaggggtgtggggggccagcccacactgggtgaagggttgggcacagggctgactgtgggaggggacaactgcccttcagaa

SEQ ID NO: 668965 - DNA, 120 bp, Artificial Sequence
  ENSG00000185347_25 (sequence is synthesized)
cccaaggccaggcccacatggggtgtgctggaccgagcctcccaagctggagccagctccataggccctggagacttgcagtcccgttctgcttgctacacccggaccacccgggggcac

SEQ ID NO: 668966 - DNA, 120 bp, Artificial Sequence
  ENSG00000185347_26 (sequence is synthesized)
ggcgctttctaggcaggcctgcccccggcgaccggggctctgtggtcccaggcagatcctgagccctggatagcatagacctggaggaaaacctgcctctgagccccaggtggctgtgtg

SEQ ID NO: 668967 - DNA, 120 bp, Artificial Sequence
  ENSG00000185347_27 (sequence is synthesized)
accttggggagacagcatcctcctctgactggggctgctggagcactgacccaagtgttagggttgacctagccccaggcatcttccccagggatggccgcttcctcgcaccctgctgct

SEQ ID NO: 668968 - DNA, 120 bp, Artificial Sequence
  ENSG00000185347_28 (sequence is synthesized)
ggccttccatcctcatccttctttctgggggtctgcccgcccgtcatcactggcttcttcctcttggctggcttggtttcaggggatagggcagggctggctgccactcttttaatttat

SEQ ID NO: 668969 - DNA, 64 bp, Artificial Sequence
  ENSG00000185347_29 (sequence is synthesized)
agagtctcgctgtgtcgcccaggctggcatcctatctcaacctcctgagtagctgggactacag

SEQ ID NO: 668970 - DNA, 120 bp, Artificial Sequence
  ENSG00000185347_30 (sequence is synthesized)
gagtgctgggattacaggcgtgagccaaccacttgggctgggctctgtactgtcctgagtgacgggctggcactgtcctgctccaggtgcatatggccgggcaggagggcagaggctcag

SEQ ID NO: 668971 - DNA, 120 bp, Artificial Sequence
  ENSG00000185347_31 (sequence is synthesized)
gcaggagggcagaggctcagggctggtgtgacctcttcttccagacccagtcccccttctctgcctcttccctctccaatcccagagacttggcccctgtacctcatcccaggcctgccc

SEQ ID NO: 668972 - DNA, 120 bp, Artificial Sequence
  ENSG00000185347_32 (sequence is synthesized)
agggggacctaggggtcagaggcggatggcctggctcctggcccctagtcttgtgtctgctggggcttcctgctcgtagcaagggcctgtgggttccagctctgcagcccaagcctgggg

SEQ ID NO: 668973 - DNA, 120 bp, Artificial Sequence
  ENSG00000185347_33 (sequence is synthesized)
gattgcatgcctcactcatgggcttacagggcccaacccctgacgcctgcctggcccctggtgccagctggacctgtgtccctggctgaagccgggctggcgcccacccagtcagcctgc

SEQ ID NO: 668974 - DNA, 120 bp, Artificial Sequence
  ENSG00000185347_34 (sequence is synthesized)
actggcgttggcagtgctgaggcagcatccgggcgtcctggtctgcccttgtccctacctgccttgtagaggcggctcagcgaagcccaggcttctggcccctgggacccctgggttggg

SEQ ID NO: 668975 - DNA, 120 bp, Artificial Sequence
  ENSG00000185347_35 (sequence is synthesized)
gcagaggagaggctgccctggccccaggctgctcctgcccagtgcctctgtgggaccaccctctgtggtgggctgggggggcctggaagtgaggccccgccctctccccgaagctgtgtg

SEQ ID NO: 668976 - DNA, 120 bp, Artificial Sequence
  ENSG00000185347_36 (sequence is synthesized)
cggcactggccaggtggactggggccatggctggcttccttccaaggtttctggagcgggagctgcccaaaacctggacctggcctacccaaagtgcctgcactccttctgcactcctgg

SEQ ID NO: 668977 - DNA, 120 bp, Artificial Sequence
  ENSG00000185347_37 (sequence is synthesized)
cctggcccttaccttcttgggaactgtggtgattgccttctgtcaggtgtgttgaagcggccgtacccatggtggaggcctttgctcttcttgtggcgtgctggggtgggcaggtgggct

SEQ ID NO: 668978 - DNA, 120 bp, Artificial Sequence
  ENSG00000185347_38 (sequence is synthesized)
tggacctggtgttcaaggccattcctatctgccccccagcccactgctggagccccaggcccctgcagcctgctccacactctgggttcccgggggaagcaggggtagagtggggcagga

SEQ ID NO: 668979 - DNA, 120 bp, Artificial Sequence
  ENSG00000185347_39 (sequence is synthesized)
ttcaggtgtagagggcctgtccccagcaggggtccccttgccccgggcccagggtcactggtacagatagcccatgagcgaacctgggaggccttccgtgtgtgggcagagcagctgctg

SEQ ID NO: 668980 - DNA, 120 bp, Artificial Sequence
  ENSG00000185347_40 (sequence is synthesized)
tgtcctggccattctccagccgcctgtctgtgggcactgtgggcaggtacctttgtgcagggccatggggcaggcagggcggggtctcctggccctgcctgacccttcacttgggaatgt

SEQ ID NO: 668981 - DNA, 120 bp, Artificial Sequence
  ENSG00000185347_41 (sequence is synthesized)
caagtgtggctcagctctgccttctctgccacctgggtcactaggcagactcctcactgccttagggggtccctgaagttacaggggatgggttttccctcccccagagcctggcttgct

SEQ ID NO: 668982 - DNA, 120 bp, Artificial Sequence
  ENSG00000185347_42 (sequence is synthesized)
ccttcgtttggggcctccccgtccgcctgcagtccccggatacagcccgcattcagtgagggctgtggggcagaggtctaggcttgagaggcacctggacctgtccctgaccttgttgga

SEQ ID NO: 668983 - DNA, 120 bp, Artificial Sequence
  ENSG00000185347_43 (sequence is synthesized)
ctggcagtggggctggtgtgggggacagcggatgtcctcagagccggggggcagctcttgcctggcaggcagggcctggccgtgcactggttgggggctgccctgcactgcagaaaggac

SEQ ID NO: 668984 - DNA, 120 bp, Artificial Sequence
  ENSG00000185347_44 (sequence is synthesized)
aggtgggctgtggcgtccgcaccacaccagggtgccctgctcatcgctctggccagagaacctgggcgcaggcaggggagggctgcaggggcggggcgtgagctaggcgttgggccgggt

SEQ ID NO: 668985 - DNA, 120 bp, Artificial Sequence
  ENSG00000185347_45 (sequence is synthesized)
gtcggcgctgggtccagctgtccatccgactgtctgtccatggggtcccgtgtgaggttctaggccagctgccgtttgccttccagctgctgcggactctggagcgtgagaaccagcgcc

SEQ ID NO: 668986 - DNA, 120 bp, Artificial Sequence
  ENSG00000185347_46 (sequence is synthesized)
cacgaaggcgggaccctgccgacgcagtgattggatgcatgtccggccagcgcggtgattgggtacaggtctcgggagcgcggtgattggacctccgcgctctggcagctcctcttccgt

SEQ ID NO: 668987 - DNA, 120 bp, Artificial Sequence
  ENSG00000185347_47 (sequence is synthesized)
gtccagggaggactgagtttccctctcccgccgtcctcgcagccccgggaggtgcaggggcatcgcgggaacagccccggtgacacgctgcccggggtcttcacgaatgcccggaggcgc

SEQ ID NO: 668988 - DNA, 120 bp, Artificial Sequence
  ENSG00000185347_48 (sequence is synthesized)
agaagccagcccgaccttccatccccgcagacagccccacgttcctcccggcccgcgtctttcggggccgcccgtgcaggcgggcccggctcagcggcgcccgggcagcagctgcttcca

SEQ ID NO: 668989 - DNA, 120 bp, Artificial Sequence
  ENSG00000185347_49 (sequence is synthesized)
cagctgcttccatgcgccggcttcctccggggctgctccgtggcggcggcagagggaagcgctgccgcgggcgggcgaggatcgggagcgcctgaggaggctgccgcgggctccggctgc

SEQ ID NO: 668990 - DNA, 80 bp, Artificial Sequence
  ENSG00000185347_50 (sequence is synthesized)
gccgcgctggggtctgcgctgtgcggcgcggcgggctctgggcgcctcctggcggcccagcctggaaggcggcgcgatgg

SEQ ID NO: 668991 - DNA, 120 bp, Artificial Sequence
  ENSG00000185347_51 (sequence is synthesized)
aagttcgaccgtccggaggcggtgacgctctcgcggagggcaggcgggccgggtggggtcccgggccctcgcagggagttgggccggctccgctgaccgcccgctttttattttccgcag

SEQ ID NO: 668992 - DNA, 120 bp, Artificial Sequence
  ENSG00000185352_0 (sequence is synthesized)
gcctgccggcctgagagcgggaccatggatgaaaggttcaacaagtggctgctgacgccggtgctcactctcctcttcgtggtcatcatgtaccagtacgtgtccccctcctgcaccagc

SEQ ID NO: 668993 - DNA, 120 bp, Artificial Sequence
  ENSG00000185352_1 (sequence is synthesized)
atcatgtaccagtacgtgtccccctcctgcaccagctcctgcaccaacttcggggagcagccccgcgcgggggaggccggcccgcccgccgtcccgggtcccgcccgccgggctcaggcg

SEQ ID NO: 668994 - DNA, 120 bp, Artificial Sequence
  ENSG00000185352_2 (sequence is synthesized)
gggccccccgagggacctcggggggccgcggcgccggaggaggaggacgaggagcccggagacccccgggagggggaggaagaggaggaggaagacgagccggaccccgaggccccggaa

SEQ ID NO: 668995 - DNA, 120 bp, Artificial Sequence
  ENSG00000185352_3 (sequence is synthesized)
gaggccccggaaaacggctccctgccccgattcgtgccgcgcttcaacttcagcctgaaggacctgacccgcttcgtggatttcaacatcaaagggcgcgacgtgatcgtgttcctccac

SEQ ID NO: 668996 - DNA, 120 bp, Artificial Sequence
  ENSG00000185352_4 (sequence is synthesized)
atccagaagacggggggcaccactttcggccggcacctggtgaagaacatccggctggagcagccttgtagctgcaaagcgggtcagaagaagtgcacctgccaccggcctggcaagaag

SEQ ID NO: 668997 - DNA, 120 bp, Artificial Sequence
  ENSG00000185352_5 (sequence is synthesized)
gagacgtggctcttctcccgcttctccaccggctggagctgcgggctgcacgccgactggacggagctcaccaactgcgtgccggccatcatggagaagaaggactgtccccgcaaccac

SEQ ID NO: 668998 - DNA, 120 bp, Artificial Sequence
  ENSG00000185352_6 (sequence is synthesized)
caggaatttctattacatcacaatgttacgggatccagtgtcacgttacctgagcgagtggaaacatgtccagagaggggccacttggaaaacctctcttcatatgtgtgatggaagaag

SEQ ID NO: 668999 - DNA, 120 bp, Artificial Sequence
  ENSG00000185352_7 (sequence is synthesized)
ggaagaagccccaccccagatgagctgcctacctgctaccctggggatgactggtctggggtcagcttgcgggagtttatggattgcacctacaacctggctaacaatcgccaggtgcgc

SEQ ID NO: 669000 - DNA, 120 bp, Artificial Sequence
  ENSG00000185352_8 (sequence is synthesized)
atgctggctgacctcagcctggtgggctgctataacttgactttcatgaacgagagtgaaagaaacaccatcctgttgcagagtgcaaagaacaacctgaagaacatggccttctttggg

SEQ ID NO: 669001 - DNA, 120 bp, Artificial Sequence
  ENSG00000185352_9 (sequence is synthesized)
ctcactgagttccagaggaagacacagtttctctttgagagaacattcaacctcaagttcatctcccccttcacacagttcaacatcacgcgggcttctaacgtggagatcaacgagggt

SEQ ID NO: 669002 - DNA, 120 bp, Artificial Sequence
  ENSG00000185352_10 (sequence is synthesized)
gcccgccaacgcattgaggatctaaacttcctggacatgcagctttacgagtatgcaaaagatctcttccagcagcgctaccaccacaccaagcagctagagcaccagagggaccgccag

SEQ ID NO: 669003 - DNA, 120 bp, Artificial Sequence
  ENSG00000185352_11 (sequence is synthesized)
aagcggcgggaggagcggaggctgcagcgagagcacagggaccaccagtggcccaaagaagatggggctgcagaagggactgtcaccgaggactacaacagccaggtggtgagatggtga

SEQ ID NO: 669004 - DNA, 120 bp, Artificial Sequence
  ENSG00000185352_12 (sequence is synthesized)
cctcctgccctctcctctctcaggagggggagggtgagcaggcacattgactttctgttgaggtaccttggagaagctgagccattctgaggacatctggctgtgtgtgcttgatttgga

SEQ ID NO: 669005 - DNA, 120 bp, Artificial Sequence
  ENSG00000185352_13 (sequence is synthesized)
catcttcttccttctttgtcttcatttttatccagctggagattatccgtcttgttcttttttttcttgacattttgcaattggtgatattaagtagggtaggagtgcatcccatatagg

SEQ ID NO: 669006 - DNA, 120 bp, Artificial Sequence
  ENSG00000185352_14 (sequence is synthesized)
ccattttagaaggccaaggagagccacaccgaaaaaggagacagttcctgtgatctcctttgcaggagcatagaatagtttgggtaccaggaacccacagaggcacacatgaaaagccaa

SEQ ID NO: 669007 - DNA, 120 bp, Artificial Sequence
  ENSG00000185352_15 (sequence is synthesized)
attatggcttggatgttctgctgaaactggtctatgtcatactgtctcctgttatgagaatatcagttggtataaagagagagaaagagaaaaacatttcagcccttagatgaggtctta

SEQ ID NO: 669008 - DNA, 120 bp, Artificial Sequence
  ENSG00000185352_16 (sequence is synthesized)
caccaacccccacttggctgttggctgtcatcttgaactctatttgaatgtgacttaaatcacaagtaacgtgttttgttgttgcagttgttttgaaacaaaattatcctattattgacc

SEQ ID NO: 669009 - DNA, 120 bp, Artificial Sequence
  ENSG00000185352_17 (sequence is synthesized)
attgctagagacccacatcctacaaaatcctgacaccataaccttaagccatgcctttccttccatcttttagggaacggggagtggatccaggacaggggaggttgtaacccctgagaa

SEQ ID NO: 669010 - DNA, 120 bp, Artificial Sequence
  ENSG00000185352_18 (sequence is synthesized)
atgaacattggtaggagcatttaagagaaaacttgcttatttgctaatgcctaaaggggtctcactttaccaattgttactttcaatgtgaggaatgaatgataaattaagagaaaaaaa

SEQ ID NO: 669011 - DNA, 120 bp, Artificial Sequence
  ENSG00000185352_19 (sequence is synthesized)
tatcaggaaggtcaatatatgcctaacatttctaaactggccacataaccttagatttttaaaggaatatttcagagtttaatctttttggagaagttatgttctttaatcgggtactac

SEQ ID NO: 669012 - DNA, 120 bp, Artificial Sequence
  ENSG00000185352_20 (sequence is synthesized)
cagtcttgaaattttgccaccacagaaagaaagatgtttttaaaagcttggcccaaagaataggaacttagctagcatgtatacaaaatatatttgaggttactaaatgaataaaaactc

SEQ ID NO: 669013 - DNA, 120 bp, Artificial Sequence
  ENSG00000185352_21 (sequence is synthesized)
ggaattaggccaggagacatggaataccattcatgggatggttatcacaggagtttagaaagactctgcctcccagcatcttgaatatctccagcctgttcactgttttcttcctacatg

SEQ ID NO: 669014 - DNA, 120 bp, Artificial Sequence
  ENSG00000185352_22 (sequence is synthesized)
atctttacctgttgttagactgtggccacagccagtaaatcaggccagagtgtctcaaactggacaagaaatgtgctgcattgccgagttcttattttcaccttttcataatcccaacta

SEQ ID NO: 669015 - DNA, 120 bp, Artificial Sequence
  ENSG00000185352_23 (sequence is synthesized)
caataacaagaattttattgactaataagggaatatgtatggaagaaggaagagaaagcctttgtctagcatttattaggaggatcagagtgagtgggaagtttcacaacggattgatct

SEQ ID NO: 669016 - DNA, 120 bp, Artificial Sequence
  ENSG00000185352_24 (sequence is synthesized)
gatcaatcccttcaaggagctgaaggcaaaatgtgtaaaacccctaaatcagattgaaaagcctatttcattgatatccaacatgtttgatgtttaagctagctttacctaagccacttc

SEQ ID NO: 669017 - DNA, 120 bp, Artificial Sequence
  ENSG00000185352_25 (sequence is synthesized)
tcagcctccagaatactctctctggggttgtgagtcagtcagcccacaagcattcacagagtgcttacctgccccgagggaagtccagcagctccaccagatagagatctggagatgctt

SEQ ID NO: 669018 - DNA, 120 bp, Artificial Sequence
  ENSG00000185352_26 (sequence is synthesized)
ctctcactgtgcttggcttcatctggggtgcaagggaaggcattatcgggtggctcccttgctccaggaactgaacgaggcccttttcataccttaaatatattctgcacaacaaatggg

SEQ ID NO: 669019 - DNA, 120 bp, Artificial Sequence
  ENSG00000185352_27 (sequence is synthesized)
tattgttagtctccatttcatagatgaaaatagtgaagcccacagaaaataagtagctcctccacaggttgtaagctaggtctagctgactgcaaaggtcaagttctctttactccgtca

SEQ ID NO: 669020 - DNA, 120 bp, Artificial Sequence
  ENSG00000185352_28 (sequence is synthesized)
ccatatccatatggaataagggctcgtcctacctaaagcttcctgccaataatgcaagaagccagctgcaatttcccagaagcatttgtctctaacccatgtgggtagcccgaccatgac

SEQ ID NO: 669021 - DNA, 120 bp, Artificial Sequence
  ENSG00000185352_29 (sequence is synthesized)
agcaccacgctaacagtgacccagagccatactgccttgggtcagtccagccccctccacatcactgagccatcaatgagctgagagatcaatgactttttaggcagctgtgttttttaa

SEQ ID NO: 669022 - DNA, 120 bp, Artificial Sequence
  ENSG00000185352_30 (sequence is synthesized)
gccatatacaagagtaagttaaaaggggccaagtaaatgttgcttgttatttggtagagattaggctcacaaaatatttctccatttccagtgatttgttcctaaggtagaagggaagga

SEQ ID NO: 669023 - DNA, 120 bp, Artificial Sequence
  ENSG00000185352_31 (sequence is synthesized)
ggattgcagctgggattaatgttcgtctctctctctctctctctctagcttctcatctcattgttaggatctaatgttctgcctagaatagcaggactgcaaattatccttctgcctgcc

SEQ ID NO: 669024 - DNA, 120 bp, Artificial Sequence
  ENSG00000185352_32 (sequence is synthesized)
acacacacacacacacacacaaacaatccagtgttttgtcatgtggaaaatcaaaacaagttagaaagcattcagattgtttcttttaaactcactttaaaattttggcaaggaattcat

SEQ ID NO: 669025 - DNA, 120 bp, Artificial Sequence
  ENSG00000185352_33 (sequence is synthesized)
caaggaattcatgcataactgagacttggaggcagcccctgctcacttcacgctgttccttaggcacctcgggattggtatcaaaggcttccactgccttctgctgaaggcatgatgtat

SEQ ID NO: 669026 - DNA, 120 bp, Artificial Sequence
  ENSG00000185352_34 (sequence is synthesized)
gcggctccacttgagaccaggtatcaggatgttcagagggagccagctctttatgttggccccaggccagtactaagcaaattaaaaagaccgacatgggcttcctccctcatatcattt

SEQ ID NO: 669027 - DNA, 120 bp, Artificial Sequence
  ENSG00000185352_35 (sequence is synthesized)
cattctaaagcagcaagcttgtcatacccatggggtcctatgttgatagaaatggagaggtagggatacagtttattctccaaaaatggactgcccacttccatgctgagtgatgctcag

SEQ ID NO: 669028 - DNA, 120 bp, Artificial Sequence
  ENSG00000185352_36 (sequence is synthesized)
ggaagtgatgcccgcagaaggcgtctgggcctaaggatccatggaagtcaggagcattaaatcccaaaccaaatcaactccagatatatcagtgtcaaaagcccaagaaaagacaaaaaa

SEQ ID NO: 669029 - DNA, 120 bp, Artificial Sequence
  ENSG00000185352_37 (sequence is synthesized)
gaaaaaaacaatccccaggggttctatgaccctattgactcctacagttctttcccttctcttggcaatggaagctccagtacccagattggagattaggatgagacaactttgtgtata

SEQ ID NO: 669030 - DNA, 120 bp, Artificial Sequence
  ENSG00000185352_38 (sequence is synthesized)
tgtgcacgtgtgtggtgtgtgtgtgttttattaaggactaagatacacacttatctattctgtctccttctagcttttaggcagcctactcttggaaactggaggaaactgccctgagaa

SEQ ID NO: 669031 - DNA, 120 bp, Artificial Sequence
  ENSG00000185352_39 (sequence is synthesized)
ttattagaatgctaataatagtaattggtaacattaacaatcagtgttagacaacagtgaggcatatcatgtgtttttattaaaaatgataaagatgtgtttcttctcatctaaaggagg

SEQ ID NO: 669032 - DNA, 120 bp, Artificial Sequence
  ENSG00000185352_40 (sequence is synthesized)
taactttgtgataattagtttgattaaaagtttgaagtatgaggactccttgttatgcctttaaggtaatttttaaaaaaaatctgagtagagatagtactaatattggcaagaaggtcc

SEQ ID NO: 669033 - DNA, 120 bp, Artificial Sequence
  ENSG00000185352_41 (sequence is synthesized)
ccaggatagacctagcaaggagataagaatagatcattaaaaaataaatataaatggattggatagaattcccattcagctgttttaacacagaaattcaaaatagtgacttaacatgga

SEQ ID NO: 669034 - DNA, 120 bp, Artificial Sequence
  ENSG00000185352_42 (sequence is synthesized)
agctatttctctcttacttaaaggcaaactggttttacagctctggtgtgtgatgttaccagacgcctaggccctctcctgttgctctgtcatcctaatgtgctgcatccacctcatgga

SEQ ID NO: 669035 - DNA, 120 bp, Artificial Sequence
  ENSG00000185352_43 (sequence is synthesized)
ccaagatggctgccacagctcctgccatcacatttacatttaagatagtagagaggaagtggagggaagttgcacatattgcttccagtcacatctcatgggttaaaacctagacatttg

SEQ ID NO: 669036 - DNA, 120 bp, Artificial Sequence
  ENSG00000185352_44 (sequence is synthesized)
ccacatctagctgcaaagaaggctagggaatgtctttattattgattgtcatgtgccttgataagcataggaggttctgttattaaagaaacaatgtgaaataatgtggaaattaatact

SEQ ID NO: 669037 - DNA, 120 bp, Artificial Sequence
  ENSG00000185352_45 (sequence is synthesized)
gataaagactatcagtatctgatacaaaagggaaccaaacgatatttaagtgctttttaatgtcacttacttcatcatatgttttgcgaaagataagactaaaattcatcactttgtgta

SEQ ID NO: 669038 - DNA, 120 bp, Artificial Sequence
  ENSG00000185352_46 (sequence is synthesized)
gcatttaatggttttcagaacatttttgcatgtgctgtctcatttggtcctcattacattcttgtgtgctaaataggacctctattcattacaccacttgctagtttgggatggagagtc

SEQ ID NO: 669039 - DNA, 120 bp, Artificial Sequence
  ENSG00000185352_47 (sequence is synthesized)
agatatgttgaaagatttcccaacgactctaatttatgagcaagaaagttgcttagagccccagccttttgacttcatagtctttccgactactttatgcagctcagcatcagtactggg

SEQ ID NO: 669040 - DNA, 120 bp, Artificial Sequence
  ENSG00000185352_48 (sequence is synthesized)
attgggaactgcaagaatatgaaatgtaaatctttattgatttatatccttccttaccttttttgacatggaaaatgccaaagacactggtcaagtttactctcagctccctacctccag

SEQ ID NO: 669041 - DNA, 120 bp, Artificial Sequence
  ENSG00000185352_49 (sequence is synthesized)
tgagggggcctcttattaggaatgaaatatccaagagatgggcggtgctgcaggggagaccaaaactcagaggaggcattcaaacacttctagcaggttgtctactccatccaactcaaa

SEQ ID NO: 669042 - DNA, 120 bp, Artificial Sequence
  ENSG00000185352_50 (sequence is synthesized)
acctattcaatatgaaggccgagggaatgtgctcacaactccctattaagggaaatcaatataaacccgcccccaccaaccaaaaaaaaaaaaagaaagaaaactctccctttttaatgt

SEQ ID NO: 669043 - DNA, 120 bp, Artificial Sequence
  ENSG00000185352_51 (sequence is synthesized)
cttcttccccaggctcctggtactttgtcagcaacatactgctttcattcttaaaggtttcattggctgttaaatgagtccctttgcatactcactggagagaggaaatgctttaagttg

SEQ ID NO: 669044 - DNA, 120 bp, Artificial Sequence
  ENSG00000185352_52 (sequence is synthesized)
tcctaagataacatctgcacacagagagtttatctgattccttatcaaccatgatctctatctgaggtcctgtatagtgggatcatttagagatgggggttagggagagtaggagtaact

SEQ ID NO: 669045 - DNA, 120 bp, Artificial Sequence
  ENSG00000185352_53 (sequence is synthesized)
ctagagaaaattgtggctcctaaaggaggcagatctttccaaggtggaaaggtaatgaattaaatatatgacatgtaatactgaaaaaatagaaaaatgactaagatacagtctctgtcc

SEQ ID NO: 669046 - DNA, 120 bp, Artificial Sequence
  ENSG00000185352_54 (sequence is synthesized)
tctagaactagggcagcctggaaacatatggactataattattttagctatttaaaagaaatgaatgaagaggatcttgagacaggaccagagcattggaatggttgtagggactgaaag

SEQ ID NO: 669047 - DNA, 120 bp, Artificial Sequence
  ENSG00000185352_55 (sequence is synthesized)
ctgagttggaaggatcagatcaaagagaaagctgggttggacttacacaagaataccctgatctgatcgcagctgtgactccaaggttttcctttcccatagttgctgtgaccccattgg

SEQ ID NO: 669048 - DNA, 120 bp, Artificial Sequence
  ENSG00000185352_56 (sequence is synthesized)
tcaccagagcaactgcatgtcttcaggctgggtattagggctggctgggtctgatgattctacccattttgtgccatctgaggagcatgcgagggttctttctccaaggcactttcggcc

SEQ ID NO: 669049 - DNA, 120 bp, Artificial Sequence
  ENSG00000185352_57 (sequence is synthesized)
ttccttcttctccccttccgccatctccactggacataagccaatgcctgctctcttctcaccacattcacctggacaaatctgaactaattccttgagacttcaaattagcccttctga

SEQ ID NO: 669050 - DNA, 120 bp, Artificial Sequence
  ENSG00000185352_58 (sequence is synthesized)
gcaagtgggcaggttctgaaacctgtgtgttttgtagcctaatgaattgatggaatgcacatgaacccatcttcacagcatgtgaaagaaccaacctgcctggcagaggtgcagaaattt

SEQ ID NO: 669051 - DNA, 120 bp, Artificial Sequence
  ENSG00000185352_59 (sequence is synthesized)
ccagaggactggcctagctataaacaccagcaacatctgcaacacaaaagcccttgaacttctaggcaaggactcatgctaacctagcagtactccagattgagaacgcagatggacagg

SEQ ID NO: 669052 - DNA, 120 bp, Artificial Sequence
  ENSG00000185352_60 (sequence is synthesized)
tgtctcttgagcctgtgttccaagatgtctgtggaaaggattgcaactgtcatcctttggcacactcagtggaacctgtgtgagctacatgttctgctgcattatgggaactcatcaaag

SEQ ID NO: 669053 - DNA, 120 bp, Artificial Sequence
  ENSG00000185352_61 (sequence is synthesized)
ggccagattgacatcttgccagaaaaaccagtgttttgaggagcaaaagttttgtgtacttcagtaattgtcacatgtgtcttccacctccttgacatttatttgttaatcatatgatca

SEQ ID NO: 669054 - DNA, 120 bp, Artificial Sequence
  ENSG00000185352_62 (sequence is synthesized)
tttttttttcactttcctttttttctttctcagaagtacttctggggctttgattgcattatttctcttttaatgtatcatttcagtgttggaaagaaaaatctggatctttatgtgggg

SEQ ID NO: 669055 - DNA, 120 bp, Artificial Sequence
  ENSG00000185352_63 (sequence is synthesized)
acctattttacatgtagatagttattcagtagatagtaaattatttctcttaagagatatttccttttatttctgtacaataatatgtatgaactcagttactaggggactgtattgtga

SEQ ID NO: 669056 - DNA, 120 bp, Artificial Sequence
  ENSG00000185352_64 (sequence is synthesized)
cattatcaacctttattgctatttaaaaatgatagtttgtagaactgaagatttccattgatgtgaagcacaatttaatgaataagttaaaatattaaactgttgtgatgtcaagagcaa

SEQ ID NO: 669057 - DNA, 120 bp, Artificial Sequence
  ENSG00000185359_0 (sequence is synthesized)
gcgccagctcgtagcaggggagcgcccgcggcgtcgggtttgggctggaggtcgccatggggcgaggcagcggcaccttcgagcgtctcctagacaaggcgaccagccagctcctgttgg

SEQ ID NO: 669058 - DNA, 120 bp, Artificial Sequence
  ENSG00000185359_1 (sequence is synthesized)
agacagattgggagtccattttgcagatctgcgacctgatccgccaaggggacacacaagcaaaatatgctgtgaattccatcaagaagaaagtcaacgacaagaacccacacgtcgcct

SEQ ID NO: 669059 - DNA, 120 bp, Artificial Sequence
  ENSG00000185359_2 (sequence is synthesized)
tgtatgccctggaggtcatggaatctgtggtaaagaactgtggccagacagttcatgatgaggtggccaacaagcagaccatggaggagctgaaggacctgctgaagagacaagtggagg

SEQ ID NO: 669060 - DNA, 120 bp, Artificial Sequence
  ENSG00000185359_3 (sequence is synthesized)
taaacgtccgtaacaagatcctgtacctgatccaggcctgggcgcatgccttccggaacgagcccaagtacaaggtggtccaggacacctaccagatcatgaaggtggaggggcacgtct

SEQ ID NO: 669061 - DNA, 120 bp, Artificial Sequence
  ENSG00000185359_4 (sequence is synthesized)
ttccagaattcaaagagagcgatgccatgtttgctgccgagagagccccagactgggtggacgctgaggaatgccaccgctgcagggtgcagttcggggtgatgacccgtaagcaccact

SEQ ID NO: 669062 - DNA, 120 bp, Artificial Sequence
  ENSG00000185359_5 (sequence is synthesized)
gccgggcgtgtgggcagatattctgtggaaagtgttcttccaagtactccaccatccccaagtttggcatcgagaaggaggtgcgcgtgtgtgagccctgctacgagcagctgaacagga

SEQ ID NO: 669063 - DNA, 120 bp, Artificial Sequence
  ENSG00000185359_6 (sequence is synthesized)
aagcggagggaaaggccacttccaccactgagctgccccccgagtacctgaccagccccctgtctcagcagtcccagctgccccccaagagggacgagacggccctgcaggaggaggagg

SEQ ID NO: 669064 - DNA, 120 bp, Artificial Sequence
  ENSG00000185359_7 (sequence is synthesized)
agctgcagctggccctggcgctgtcacagtcagaggcggaggagaaggagaggctgagacagaagtccacgtacacttcgtaccccaaggcggagcccatgccctcggcctcctcagcgc

SEQ ID NO: 669065 - DNA, 120 bp, Artificial Sequence
  ENSG00000185359_8 (sequence is synthesized)
cccccgccagcagcctgtactcttcacctgtgaactcgtcggcgcctctggctgaggacatcgaccctgagctcgcacggtatctcaaccggaactactgggagaagaagcaggaggagg

SEQ ID NO: 669066 - DNA, 120 bp, Artificial Sequence
  ENSG00000185359_9 (sequence is synthesized)
ctcgcaagagccccacgccatctgcgcccgtgcccctgacggagccggctgcacagcctggggaagggcacgcagcccccaccaacgtggtggagaaccccctcccggagacagactctc

SEQ ID NO: 669067 - DNA, 120 bp, Artificial Sequence
  ENSG00000185359_10 (sequence is synthesized)
agcccattcctccctctggtggcccctttagtgagccacagttccacaatggcgagtctgaggagagccacgagcagttcctgaaggcgctgcagaacgccgtcaccaccttcgtgaacc

SEQ ID NO: 669068 - DNA, 120 bp, Artificial Sequence
  ENSG00000185359_11 (sequence is synthesized)
gcatgaagagtaaccacatgcggggccgcagcatcaccaatgactcggccgtgctctcactcttccagtccatcaacggcatgcacccgcagctgctggagctgctcaaccagctggacg

SEQ ID NO: 669069 - DNA, 120 bp, Artificial Sequence
  ENSG00000185359_12 (sequence is synthesized)
ctatgaggggctgcaggacaagctggcacagatccgcgatgcccggggggcgctgagtgccctgcgcgaagagcaccgggagaagcttcgccgggcagccgaggaggcagagcgccagcg

SEQ ID NO: 669070 - DNA, 120 bp, Artificial Sequence
  ENSG00000185359_13 (sequence is synthesized)
ccagatccagctggcccagaagctggagataatgcggcagaagaagcaggagtacctggaggtgcagaggcagctggccatccagcgcctgcaggagcaggagaaggagcggcagatgcg

SEQ ID NO: 669071 - DNA, 120 bp, Artificial Sequence
  ENSG00000185359_14 (sequence is synthesized)
gctggagcagcagaagcagacggtccagatgcgcgcgcagatgcccgccttccccctgccctacgcccagctccaggccatgcccgcagccggaggtgtgctctaccagccctcgggacc

SEQ ID NO: 669072 - DNA, 120 bp, Artificial Sequence
  ENSG00000185359_15 (sequence is synthesized)
agccagcttccccagcaccttcagccctgccggctcggtggagggctccccaatgcacggcgtgtacatgagccagccggcccctgccgctggcccctaccccagcatgcccagcactgc

SEQ ID NO: 669073 - DNA, 120 bp, Artificial Sequence
  ENSG00000185359_16 (sequence is synthesized)
ggctgatcccagcatggtgagtgcctacatgtacccagcaggggccactggggcgcaggcggccccccaggcccaggccggacccaccgccagccccgcttactcatcctaccagcctac

SEQ ID NO: 669074 - DNA, 120 bp, Artificial Sequence
  ENSG00000185359_17 (sequence is synthesized)
tcccacagcgggctaccagaacgtggcctcccaggccccacagagcctcccggccatctctcagcctccgcagtccagcaccatgggctacatggggagccagtcagtctccatgggcta

SEQ ID NO: 669075 - DNA, 120 bp, Artificial Sequence
  ENSG00000185359_18 (sequence is synthesized)
ccagccttacaacatgcagaatctcatgaccaccctcccaagccaggatgcgtctctgccaccccagcagccctacatcgcggggcagcagcccatgtaccagcagatggcaccctctgg

SEQ ID NO: 669076 - DNA, 120 bp, Artificial Sequence
  ENSG00000185359_19 (sequence is synthesized)
cggtcccccccagcagcagccccccgtggcccagcaaccgcaggcacaggggccgccggcacagggcagcgaggcccagctcatttcattcgactgacccaggccatgctcacgtccgga

SEQ ID NO: 669077 - DNA, 120 bp, Artificial Sequence
  ENSG00000185359_20 (sequence is synthesized)
gtaacactacatacagttcacctgaaacgcctcgtctctaactgccgtcgtcctgcctccctgtcctctactgccggtagtgtcccttctctgcgagtgagggggggccttcaccccaag

SEQ ID NO: 669078 - DNA, 120 bp, Artificial Sequence
  ENSG00000185359_21 (sequence is synthesized)
cccacctcccttgtcctcagcctactgcagtccctgagttagtctctgctttctttccccagggctgggccatggggagggaaggactttctcccaggggaagcccccagccctgtgggt

SEQ ID NO: 669079 - DNA, 120 bp, Artificial Sequence
  ENSG00000185359_22 (sequence is synthesized)
catggtctgtgagaggtggcaggaatggggaccctcaccccccaagcagcctgtgccctctggccgcactgtgagctggctgtggtgtctgggtgtggcctggggctccctctgcagggg

SEQ ID NO: 669080 - DNA, 120 bp, Artificial Sequence
  ENSG00000185359_23 (sequence is synthesized)
cctctctcggcagccacagccaagggtggaggcttcaggtctccagcttctctgcttctcagctgccatctccagtgccccagaatggtacagcgataataaaatgtatttcagaaagca

SEQ ID NO: 669081 - DNA, 120 bp, Artificial Sequence
  ENSG00000185359_24 (sequence is synthesized)
gcgaggggagaggaagtgcccgtggagggcggcaggccccctcatcccgcgccaattatcctcagctcgggccgtcccccgctcccgaaggctggccttaagtcacgacctgacccgctg

SEQ ID NO: 669082 - DNA, 120 bp, Artificial Sequence
  ENSG00000185359_25 (sequence is synthesized)
cgcctcggcgtgcacttagaggagcccggagctcttcgccaagcgcagaactgaccccccgcaactccacccgcgggggcggacacctaccgtgggccgtgtcgggggcggctcccccag

SEQ ID NO: 669083 - DNA, 120 bp, Artificial Sequence
  ENSG00000185359_26 (sequence is synthesized)
ttgggctgcaggtggggcaggctctccaggctgggttttctgtccctcttggccatggtgcctgaggcctgcagaccccagaggaccctcacagcacagcagctggaaggtcaagggaaa

SEQ ID NO: 669084 - DNA, 120 bp, Artificial Sequence
  ENSG00000185359_27 (sequence is synthesized)
cccagggtggccgcatgccctcggaccctgccccacactagggcaggtgggtgtgagagacagggcgccgcggctccagggaccgaggctgccccgacaaacctgttgcttgggtttggg

SEQ ID NO: 669085 - DNA, 120 bp, Artificial Sequence
  ENSG00000185359_28 (sequence is synthesized)
gcggccgccaggggttctggagtcgggctgctcaggaagcgtgaaggggagtgctgggagcccggcttgtttgagggttggtggctgagctctcgtctgtctgggacctgaggatgcctg

SEQ ID NO: 669086 - DNA, 120 bp, Artificial Sequence
  ENSG00000185359_29 (sequence is synthesized)
tgtgtcctgggcggaggcgtagcagctgtctctgcagggcgaggtggagacgtggcttgagggcctttagagtggctagggggctcgggaaaggaaaacaagcacctttgatgaggaagg

SEQ ID NO: 669087 - DNA, 120 bp, Artificial Sequence
  ENSG00000185359_30 (sequence is synthesized)
aagtcccttcctcaggcctcggcagcttcaccccaggccacgccgctgggaagggccgcccggggcattgctctcgctcgtgctggggtcctctctgggtccgttgccttctgtggggca

SEQ ID NO: 669088 - DNA, 120 bp, Artificial Sequence
  ENSG00000185359_31 (sequence is synthesized)
cccgccttccccctgccctacgcccaggcatgtgccatcctcccgccacccagaggcttgtgggctgaggaccaactctcaccgctgtctcttttgtccccagctccaggccatgcccgc

SEQ ID NO: 669089 - DNA, 120 bp, Artificial Sequence
  ENSG00000185359_32 (sequence is synthesized)
cccgcagctgctggagctgctcaaccagctggacgagcgcaggcgtaggtgcccgcgccacggggcctcggctcaggggcagccaggtgttgtgagcgccatcctgggccagggcctccc

SEQ ID NO: 669090 - DNA, 120 bp, Artificial Sequence
  ENSG00000185359_33 (sequence is synthesized)
tcccctgagggtgctgagctcttgtgagtccttcattggggccgtggcttcctccagagagtgtcaacaggaggtggtctcagtgatgaccatgccctgccctgccctgccctgccctgc

SEQ ID NO: 669091 - DNA, 120 bp, Artificial Sequence
  ENSG00000185359_34 (sequence is synthesized)
ccctgcccaggaccctctgcctgcctcccccagagcccagcaccttcagagccctctgcagaaggttgggcacagggcggcccatctgcgtgtccgttccacccaggagcttctcggcac

SEQ ID NO: 669092 - DNA, 120 bp, Artificial Sequence
  ENSG00000185359_35 (sequence is synthesized)
cctcgtctttattttagccgaatttacagaaaagcagtaagaatggtgcgaagggttttcccagttgccccgatgtgaatgttgtccctgctttttcctgtttccatgcaaacgcactca

SEQ ID NO: 669093 - DNA, 120 bp, Artificial Sequence
  ENSG00000185359_36 (sequence is synthesized)
acaggctttcctgctggagccgtgtttcagtccgtgcgtggcaggtactgccctctcccctgaatgcgacagcgagcatttcctgaaaccagcaggtgctgggctgccgatcctcgtctg

SEQ ID NO: 669094 - DNA, 120 bp, Artificial Sequence
  ENSG00000185359_37 (sequence is synthesized)
tagcaggctcagccctcatggactgtcccagtggtgtcctgtaaacagcacgccccctgctgcgtggcatttgccccccccccccccgcctttaatctagagtgttccccagtcagcttc

SEQ ID NO: 669095 - DNA, 120 bp, Artificial Sequence
  ENSG00000185359_38 (sequence is synthesized)
tgtgttttgtgacatctactgtcccaagagcactggcctgtcattcggcagaccgtcctcagctcaggtttgtctggtgtctccacgcggtgaccataaggctgtgcttttctcagagtg

SEQ ID NO: 669096 - DNA, 120 bp, Artificial Sequence
  ENSG00000185359_39 (sequence is synthesized)
gcagccgaggtgacgtgcatcccgtcagtcccattgctggccgttcggctgagacggggtctgccaggggttttcactgtgaagtgactgttttgccctttacagatgtctcttggggga

SEQ ID NO: 669097 - DNA, 120 bp, Artificial Sequence
  ENSG00000185359_40 (sequence is synthesized)
ggccttccaaataccctgggactcctcaaggtctagcattttttgctaatgttgcctgtgtttattacggtgtttgccaaatagcgccttctaattctgctgttgtctttccactggcgg

SEQ ID NO: 669098 - DNA, 120 bp, Artificial Sequence
  ENSG00000185359_41 (sequence is synthesized)
gaggtactcttccccactctcctgcttatcgtcagtcacagcagcgtggagacgtgtttattttttctttcaaaggtgacactcctctgtcatcactctttatttttagagtctcgctgt

SEQ ID NO: 669099 - DNA, 72 bp, Artificial Sequence
  ENSG00000185359_42 (sequence is synthesized)
actcctctgtcatcactctttatttttagagtctcgctgtcatccaggctggagtgcagtgccatgatcatg

SEQ ID NO: 669100 - DNA, 86 bp, Artificial Sequence
  ENSG00000185359_43 (sequence is synthesized)
gcctcttgagtagctgggactacaggattgcaccaccatgcctggctaattaaaaaaaaaagggcattgggaggctgaggcaggtg

SEQ ID NO: 669101 - DNA, 69 bp, Artificial Sequence
  ENSG00000185359_44 (sequence is synthesized)
ggtcaggagttcaagaccagcctgccaggatggtgagaccctgtctctactaaacatacaaacattagg

SEQ ID NO: 669102 - DNA, 89 bp, Artificial Sequence
  ENSG00000185359_45 (sequence is synthesized)
cagtgagccgaggttgcaccaccacactctagcctgatgtagaaatgaggtctttctgtgttgcccaagctgacctcaaactcctgacc

SEQ ID NO: 669103 - DNA, 120 bp, Artificial Sequence
  ENSG00000185359_46 (sequence is synthesized)
tttccttgcccttacttttaacttaccttattttccccaaaacggtggctggcgttgagactcccgggagcatgtccaggttccccggccttagggtcttcccaggcacttgttctgctt

SEQ ID NO: 669104 - DNA, 120 bp, Artificial Sequence
  ENSG00000185359_47 (sequence is synthesized)
gtcccttgccttcccccacctgtgaggcccagcttcggcatcgtacggggtggttctgggccgggtggcgcatcagggtcccccagtgcctgtgaccaggcccgcccgccccatcttaca

SEQ ID NO: 669105 - DNA, 120 bp, Artificial Sequence
  ENSG00000185359_48 (sequence is synthesized)
gcggtgggaacctgcggggccgcggccggtgcctcggcggtcggtgttttgtcgcagagtttactctgcctcccctctcctgcgcgtgcgtgtgttcacacaggttttattttgaatttg

SEQ ID NO: 669106 - DNA, 120 bp, Artificial Sequence
  ENSG00000185359_49 (sequence is synthesized)
agatgtcatgccccttggcactcagatcttcgcctgtgatctctgagagggacagtgctctcatggccacagcagtcactcgggactgcgctgccacccagtgctggcttctgctctgtg

SEQ ID NO: 669107 - DNA, 120 bp, Artificial Sequence
  ENSG00000185359_50 (sequence is synthesized)
gtccacgttccatttctgccgtggtcccagcagcgtcgctgtgggtctggcctgggttgcgtgtgtttcgtatgtgggccgtgctccctgcttggttcccttttcctggaacgtgtcact

SEQ ID NO: 669108 - DNA, 120 bp, Artificial Sequence
  ENSG00000185359_51 (sequence is synthesized)
gcctccctgtctcgctccgtggacatttctgggaggtcaggccgtggccacctggccccctgttcaggtctgaggctcccacctgcttaggttcgggaagctcaggagtgaggccatgcc

SEQ ID NO: 669109 - DNA, 120 bp, Artificial Sequence
  ENSG00000185359_52 (sequence is synthesized)
ctcctcaggacatcccatccaagccagccatgtccggtgatgggccgctgcccggaaagttccttttccttcttgtaactgagaagaacttgccttgagccacgtcaagtcccgtccgtc

SEQ ID NO: 669110 - DNA, 120 bp, Artificial Sequence
  ENSG00000185359_53 (sequence is synthesized)
gcagccactgcccacaagcgtgagtctgctgtgagccagcggctccatggcagggcatcccagcgccattcctgccttcacacacacttgctgccgtttccctgtgctgggggctgtgca

SEQ ID NO: 669111 - DNA, 85 bp, Artificial Sequence
  ENSG00000185359_54 (sequence is synthesized)
cacacacttgctgccgtttccctgtgctgggggctgtgcaggtctgcctcggtgtggacttttctcttaggaaagagccccaggt

SEQ ID NO: 669112 - DNA, 86 bp, Artificial Sequence
  ENSG00000185359_55 (sequence is synthesized)
aagacattttaagtattttatacttaaaatttttgtattttatacaaaaattagcgggcttggtggcagatgcctgtagtcccagc

SEQ ID NO: 669113 - DNA, 120 bp, Artificial Sequence
  ENSG00000185359_56 (sequence is synthesized)
ggcccaagccgcccttggaggctctgcctgttctgatctgaaggcggaggctcagccgtgctctcccaggaagccacctgggcgtttggggctttagctaggaaagaggatgtcgcctgc

SEQ ID NO: 669114 - DNA, 120 bp, Artificial Sequence
  ENSG00000185359_57 (sequence is synthesized)
ggctgcgaaggcgccaaagcccagacctcgcgcctccgcccgcgacggcggcactgggggcccggagcgggcgggagacgtggattactgcgggcttcggggccctagcctcgaccgcga

SEQ ID NO: 669115 - DNA, 80 bp, Artificial Sequence
  ENSG00000185359_58 (sequence is synthesized)
cgcgtccccacccgacggctcggccttggtcagcccgcagcctccgcccggcgctgagtcagcgcggccccgagggcccg

SEQ ID NO: 669116 - DNA, 120 bp, Artificial Sequence
  ENSG00000185359_59 (sequence is synthesized)
cgctgtcctcccgggttcggagccgccgatcctggaccctcggcgcggccgtggggtcggcgtccgtcgggcgttggcaaatggggctctgcgagggtccgcgcagggcgccaggggcgc

SEQ ID NO: 669117 - DNA, 120 bp, Artificial Sequence
  ENSG00000185359_60 (sequence is synthesized)
ctctgctccaggcttgagtatagctgggtgcctccatcccaggccccaccagggaggctggctggggcgtggccgcactcatccagaaccctgctctgcctgcagccacagttccacaat

SEQ ID NO: 669118 - DNA, 120 bp, Artificial Sequence
  ENSG00000185361_0 (sequence is synthesized)
ggccccggccccggctccggcgctgctcccaccgccgcggcaacggccccggcccacggaggcggctggacggacccccgacggttggacgtacggactctgcttcgagagtaggccatg

SEQ ID NO: 669119 - DNA, 120 bp, Artificial Sequence
  ENSG00000185361_1 (sequence is synthesized)
gacaccttcagcaccaagagcctggctctgcaggcgcagaagaagctcctgagtaagatggcgtccaaggcagtggtggccgtgctggtggatgacaccagcagtgaggtgctggatgag

SEQ ID NO: 669120 - DNA, 120 bp, Artificial Sequence
  ENSG00000185361_2 (sequence is synthesized)
ctgtaccgcgccaccagggagttcacgcgcagccgcaaggaggcccagaagatgctcaagaacctggtcaaggtggccctgaagctgggactgctgctgcgtggggaccagctgggcggt

SEQ ID NO: 669121 - DNA, 120 bp, Artificial Sequence
  ENSG00000185361_3 (sequence is synthesized)
gaggagctggcgctgctgcggcgcttccgccaccgggcgcgctgcctggccatgacggccgtcagcttccaccaggtggacttcaccttcgaccggcgcgtgctggccgccgggctgctc

SEQ ID NO: 669122 - DNA, 120 bp, Artificial Sequence
  ENSG00000185361_4 (sequence is synthesized)
gagtgccgcgacctgctgcaccaggccgtgggtccccacctgaccgccaagtcccacggccgcatcaaccacgtgttcggccacctagccgactgcgacttcctggctgcgctctacggc

SEQ ID NO: 669123 - DNA, 120 bp, Artificial Sequence
  ENSG00000185361_5 (sequence is synthesized)
cccgccgagccctaccgctcccacctgcgcaggatctgcgagggcctgggccggatgctggacgagggcagcctctgaaccccggcgccgcccaaccgcgcccctcgcgccttttggggc

SEQ ID NO: 669124 - DNA, 120 bp, Artificial Sequence
  ENSG00000185361_6 (sequence is synthesized)
tctcctgctgggcgcgggtggggtttgtgggtttttttccacctcttttctcccaatcggactccggccaaactcccctagacagatgggtgacctgtctcctttgagaggatgctgagg

SEQ ID NO: 669125 - DNA, 120 bp, Artificial Sequence
  ENSG00000185361_7 (sequence is synthesized)
catctgtagcagctgtttcaaacaccaatgtcacctctcctcctggcccccgcccaatggggagaggaatttggggccctactctggggaccacctttcacccgtttgtactttctgggc

SEQ ID NO: 669126 - DNA, 120 bp, Artificial Sequence
  ENSG00000185361_8 (sequence is synthesized)
cacgccgacccctgggtcgcttgatgtaaaagccaaaagctgctgcctcccacttggatcatgtcgcctgggattttcatccctcgcacaaggactacgggttcacacggtgaactgggg

SEQ ID NO: 669127 - DNA, 120 bp, Artificial Sequence
  ENSG00000185361_9 (sequence is synthesized)
gaagggaagtgttagggggcaagtcgcggcacccccccttccataaactcacgtcctaacccccaggacctcagaagatgatctgatttggaaataggatcattacagatggaattagtt

SEQ ID NO: 669128 - DNA, 120 bp, Artificial Sequence
  ENSG00000185361_10 (sequence is synthesized)
ggatcattacagatggaattagttcagatgatctcatcttggagtagggtgggccccaattcaaggactggggtccttaaaaaaagggggcctggggcagggcgcggtggctcacgcctg

SEQ ID NO: 669129 - DNA, 77 bp, Artificial Sequence
  ENSG00000185361_11 (sequence is synthesized)
cagagcaagactctgtctcaaaaaaagaagcgggggagtgggggattgaggccacgtgcagtggctcactactcact

SEQ ID NO: 669130 - DNA, 120 bp, Artificial Sequence
  ENSG00000185361_12 (sequence is synthesized)
aaaaaaaaaaaaaaaaaaaaagtgactgtggtggtgcacacgtataatcccagctacttgagagatgacgagggaagatcacttgagcccaggagttaagaggctgcagtgaccgatgat

SEQ ID NO: 669131 - DNA, 120 bp, Artificial Sequence
  ENSG00000185361_13 (sequence is synthesized)
catgccactgcactccagcttgggtgagagtgggactctgtcttagaaagaaaaaaaaaagtatttggacacagacatgcatgcaaggaaggccaatgatgccggccaccaccaggagct

SEQ ID NO: 669132 - DNA, 120 bp, Artificial Sequence
  ENSG00000185361_14 (sequence is synthesized)
caggagctgggagaggcccagggcagatccccttcagccttggagggacctagccctggccacaccttcatctcagacttgcggcccagagaactgaatgagaataaatgtgcgtgaagc

SEQ ID NO: 669133 - DNA, 120 bp, Artificial Sequence
  ENSG00000185361_15 (sequence is synthesized)
ccctcagtccacaggatgtggtactggaagcccccactcaagaaggctccagtgaatgctggcacgttcagccaggatgcctccgtgaagctggagacctctgccctgggtcgggagggg

SEQ ID NO: 669134 - DNA, 120 bp, Artificial Sequence
  ENSG00000185361_16 (sequence is synthesized)
aaactgctccaatccagggactgccacatgggaggggacggagcgtgcccacctcccaggggtgaggggggacccacctgagatgtgtgcacattttatttatttattgttttgagacaa

SEQ ID NO: 669135 - DNA, 90 bp, Artificial Sequence
  ENSG00000185361_17 (sequence is synthesized)
tctcggctcattgcagccccttccttccgggtagctgggactacaggtgtgcacgagcacacccggctaatctttgtattttttgtagac

SEQ ID NO: 669136 - DNA, 120 bp, Artificial Sequence
  ENSG00000185361_18 (sequence is synthesized)
gcacgagcacacccggctaatctttgtattttttgtagacagaaggtctcaccatgttgcccaggatggtctcgaactcctgggctcaagcgacctacctacctcggcctcacaaagtgt

SEQ ID NO: 669137 - DNA, 120 bp, Artificial Sequence
  ENSG00000185361_19 (sequence is synthesized)
gcacattgtaatatcgtgatttcatatttggagaatcagcaaccaaccagccaaccatgttgcttttataagacagagctgagaaagcaaagcttggctgtcgtcttggctctggtacca

SEQ ID NO: 669138 - DNA, 120 bp, Artificial Sequence
  ENSG00000185361_20 (sequence is synthesized)
cccacgagatgcgggcgattctcagctcagggcgtggaggcgtggtgtgggggagtctatttgccatttttgtttgtcagcagggggcaggggttctcaaagattgcaaaatgctgctgc

SEQ ID NO: 669139 - DNA, 120 bp, Artificial Sequence
  ENSG00000185361_21 (sequence is synthesized)
aggtcaggaaggttattttgggtgcctgtgggggaggtgaaacaaggtcccatgactgttttgcagaaccttgtctgtggagggtagaggttgcggcaggggcctgtgggccttacttgg

SEQ ID NO: 669140 - DNA, 120 bp, Artificial Sequence
  ENSG00000185361_22 (sequence is synthesized)
tgagaaggtaggtctagctggctccattcagtatttgagacatttggaatttgtctgcatttaaaaccaagagatcacacacacctgtctggatttggagtttctcttgaaaactcgcca

SEQ ID NO: 669141 - DNA, 120 bp, Artificial Sequence
  ENSG00000185361_23 (sequence is synthesized)
gtccggccgtctgagcctgcactgacgcctggtgaagctgtgcaggggccgcccctctccctttcaccacagtcctctccactccctttcgcctctccctggcctgctgcactcactgat

SEQ ID NO: 669142 - DNA, 120 bp, Artificial Sequence
  ENSG00000185361_24 (sequence is synthesized)
aggaaattctgaccccagactcggagcagccttcccgtggttcggtttttgcttccgcgaaaaagccaaaggccttggccagagagccagctgttcctacctctaccccacgcttccaag

SEQ ID NO: 669143 - DNA, 120 bp, Artificial Sequence
  ENSG00000185361_25 (sequence is synthesized)
gcaaccttctccacttatcttaggccgagagacagctcttcaagaacgtacatggatcctgattttctcacgaagtcccgatggaaccctgtgctgttgagacatcagtgtgtaaaactc

SEQ ID NO: 669144 - DNA, 120 bp, Artificial Sequence
  ENSG00000185361_26 (sequence is synthesized)
tctgtgtccctgttgggctgtccagacagtctggactcttgtaaatttgagatttaattaaaggaaacaaaccaaataggactgcggaacaatttaaataaaagcacacaccagcctggg

SEQ ID NO: 669145 - DNA, 120 bp, Artificial Sequence
  ENSG00000185361_27 (sequence is synthesized)
gcatcggtccaggcatcggtggcggggagccaggcctaggccagcccgggcccacccagactggcccctaatgagctcccaagtggcctgtggggacttggcctcagttttgccagctgt

SEQ ID NO: 669146 - DNA, 120 bp, Artificial Sequence
  ENSG00000185361_28 (sequence is synthesized)
gctgctcccaccgccgcggcaacggccccggcccacggaggcggctggacggacccccgacggttggacgtacggactctgcttcgagagtaggtgagcgagcagtgccggggcgccccc

SEQ ID NO: 669147 - DNA, 120 bp, Artificial Sequence
  ENSG00000185361_29 (sequence is synthesized)
catttcagcgcatctcgggggccacctggccgccctctgtctctcccgccccttaatgcttctgcaccccaccgcctgtccgtctacattcctgcctcagtttccgtctgtctctctgtc

SEQ ID NO: 669148 - DNA, 120 bp, Artificial Sequence
  ENSG00000185361_30 (sequence is synthesized)
actctcgctgtataggttagggggagacagattgagtctcaattgccccccttggcgtggggctctgctctgggaccagcacccccatcccccatgtggactctagtggactctgccccc

SEQ ID NO: 669149 - DNA, 120 bp, Artificial Sequence
  ENSG00000185361_31 (sequence is synthesized)
tttaactgtagggccgcaggtgctcaggccagattccagaaccctgagggcattccaggcggtgggcagctgggccagccgtgcggaggtgggcatgactgtagcttctagctaaaccag

SEQ ID NO: 669150 - DNA, 120 bp, Artificial Sequence
  ENSG00000185361_32 (sequence is synthesized)
gaactgggaccgtcgctgctaaggtaattggcaggtgatctgaaggacacctgccgcctcctggccttttctgtgaagtcgaactaggcccatttcctgggatgggaaactaaggcctag

SEQ ID NO: 669151 - DNA, 120 bp, Artificial Sequence
  ENSG00000185361_33 (sequence is synthesized)
aaagaggccaatgcttccaatgtttgtccagggaagtggggacagaggcaggacagaatctgttttctctgcatcctcacatttcccagcaccttctctatggaggggggaagggctggt

SEQ ID NO: 669152 - DNA, 120 bp, Artificial Sequence
  ENSG00000185361_34 (sequence is synthesized)
ggaggagcagccccaggtgtaaacaggccgccagagtttatttcctgagccagtcccagctcagctggaggcgatgaacgccttgggaggccccaggggggccagcccagtggtggcgga

SEQ ID NO: 669153 - DNA, 120 bp, Artificial Sequence
  ENSG00000185361_35 (sequence is synthesized)
gcttggaccaatctaggtttgagctctgccacccgcatgatatcttgaaccagtttttcaattctgcggagcctcagtttcctcatctgtaaaacaggagtgggtcgtaactccccaagt

SEQ ID NO: 669154 - DNA, 120 bp, Artificial Sequence
  ENSG00000185361_36 (sequence is synthesized)
tgagggctgctgggggatcagatgcaggaatacaggccctgctcataacctgcctgactctcgctgtggctctgccccagtcacactggcctcctcctgtttctccaacaccccaggcga

SEQ ID NO: 669155 - DNA, 120 bp, Artificial Sequence
  ENSG00000185361_37 (sequence is synthesized)
ggtcctctctcagggcctttgcatgggctgtgccctctgccactacggcaggtccgagggcgccaactttgaaacataacaagctccctggatgggccggacccaggacctgcacaggca

SEQ ID NO: 669156 - DNA, 120 bp, Artificial Sequence
  ENSG00000185361_38 (sequence is synthesized)
agggctgggaggggcagaggaggggccgctcagggacgctgtacctatggaaaccgtgaacaaagggctgtctccagccacacaaacacctgggtgaatcgggcactggccagaggctgg

SEQ ID NO: 669157 - DNA, 120 bp, Artificial Sequence
  ENSG00000185361_39 (sequence is synthesized)
ggacttgaaccctgctccaatggtggggtggctctgcagacgggtgcaggtctgaggccccgcggtacggcccctcccactgtgtggccttggaccgacggtcaggtgcccccagagcct

SEQ ID NO: 669158 - DNA, 120 bp, Artificial Sequence
  ENSG00000185361_40 (sequence is synthesized)
cagtttcctcatccccgttcccccaggggtcagcccaggtgggtgaggggtcttttgattgcttgacaattcagtatggtgggttccggaggcctcagtgtccctgtctgtccaatgggg

SEQ ID NO: 669159 - DNA, 120 bp, Artificial Sequence
  ENSG00000185361_41 (sequence is synthesized)
ccacgaaagggtgccttgaggacaaaactccagccgttgacaggggaacactcctcccagagagacgtcaacgctaaaaaatgactcacacttgcccaggtacagctcaggtgttacaga

SEQ ID NO: 669160 - DNA, 120 bp, Artificial Sequence
  ENSG00000185361_42 (sequence is synthesized)
cggggagcagggcaaggaggcagagcgagaggcaggaacggcccagttccacagcatgcctgccccttcccagcatctcccgacacccctcagcagatgacctccctggaatcacacccg

SEQ ID NO: 669161 - DNA, 120 bp, Artificial Sequence
  ENSG00000185361_43 (sequence is synthesized)
ctcgagctttgacgcagggacctctggcagagttcttgggatcttgtaaatccccagcttctaggcctcagtttccccatctgtccaatggggctggtcatctcctttttcttgtggggc

SEQ ID NO: 669162 - DNA, 120 bp, Artificial Sequence
  ENSG00000185361_44 (sequence is synthesized)
tgagataactgtggggagggagggtgctttgaggggtgggggagattcaacaagatattgttaaaagcccgaggaggggattacaggacacagtacttctagaagcttcctaaggcttcg

SEQ ID NO: 669163 - DNA, 120 bp, Artificial Sequence
  ENSG00000185361_45 (sequence is synthesized)
atccttcccctctggggtgggctctgggagagacgagacttgaaccccaaatgtgccattgactaggatgaggaaaggattgcactaggttaaaggctgggttcaaattctgattctgcc

SEQ ID NO: 669164 - DNA, 120 bp, Artificial Sequence
  ENSG00000185361_46 (sequence is synthesized)
acatcactgctttataaacaggcaagctcctgaccctctgtgactcagtttccttataaccaaaaacttgcaggtccatctagagaatttcccagcctgggcaacatggtgaaaccctgt

SEQ ID NO: 669165 - DNA, 64 bp, Artificial Sequence
  ENSG00000185361_47 (sequence is synthesized)
catggtgaaaccctgtctctacttaaaacaaagaaaaaaaaattagccaggtgtggtgtcgcag

SEQ ID NO: 669166 - DNA, 89 bp, Artificial Sequence
  ENSG00000185361_48 (sequence is synthesized)
agggaggttgaggctgcagtgagccgagcgagtgaaaccctgtctcaaagaaaaagaagagaattggctgggcgccgtggctcacgcct

SEQ ID NO: 669167 - DNA, 120 bp, Artificial Sequence
  ENSG00000185372_0 (sequence is synthesized)
atgggaagatgggtgaaccagtcctacacagatggcttcttcctcttgggcatcttttcccacagccagactgaccttgtcctcttctctgcagttatggtggtcttcacagtggccctc

SEQ ID NO: 669168 - DNA, 120 bp, Artificial Sequence
  ENSG00000185372_1 (sequence is synthesized)
tgtgggaatgtcctcctcatcttcctcatctacctggacgctggacttcacacccccatgtacttcttcctcagccagctctccctcatggacctcatgttggtctgtaacattgtgcca

SEQ ID NO: 669169 - DNA, 120 bp, Artificial Sequence
  ENSG00000185372_2 (sequence is synthesized)
aagatggcagccaacttcctgtctggcaggaagtccatctcctttgtgggctgtggcatacaaattggcttttttgtctctcttgtgggatctgaggggctcttgctgggactcatggct

SEQ ID NO: 669170 - DNA, 120 bp, Artificial Sequence
  ENSG00000185372_3 (sequence is synthesized)
ggagtgattcagatggtggcagccatgggcttaccttactgtggctcaaggagcgtggatcactttttctgtgaggtacaagctttattgaagctggcctgtgcagacacttcccttttt

SEQ ID NO: 669171 - DNA, 120 bp, Artificial Sequence
  ENSG00000185372_4 (sequence is synthesized)
gacaccctcctctttgcttgctgtgtcttcatgcttctccttcccttctccatcatcatggcctcctatgcttgcatcctaggggctgtgctccgaatacgctctgctcaggcctggaaa

SEQ ID NO: 669172 - DNA, 120 bp, Artificial Sequence
  ENSG00000185372_5 (sequence is synthesized)
aaagccctggccacctgctcctcccacctaacagctgtcaccctcttctatggggcagccatgttcatgtacctgaggcctaggcgctaccgggcccctagccatgacaaggtggcctct

SEQ ID NO: 669173 - DNA, 120 bp, Artificial Sequence
  ENSG00000185372_6 (sequence is synthesized)
atcttctacacagtccttactcccatgctgaaccccctcatttacagcttgaggaatggggaggtgatgggggcactgaggaaggggctggaccgctgcaggattggcagccagcactga

SEQ ID NO: 669174 - DNA, 120 bp, Artificial Sequence
  ENSG00000185372_7 (sequence is synthesized)
gtacctgtgtgggcagtgggaggcggttctgccacctggccagagccagggtgtcctggaggcaggtgggaatcctgggtgggctcagggcactgctcctggctccacctctcctgccag

SEQ ID NO: 669175 - DNA, 120 bp, Artificial Sequence
  ENSG00000185372_8 (sequence is synthesized)
caccagctccttccctgagcctgtttctccctctgagaggaggctgtggtctgtgtgagccttgctctctgagcctgaggggccactggaggctgagggtgccgtgggctccacaacccg

SEQ ID NO: 669176 - DNA, 120 bp, Artificial Sequence
  ENSG00000185372_9 (sequence is synthesized)
atgagtagtcggtgcgggctgaggaaggaggttggggctgcggctcctcctgtcccccgacccagtgggagcaaacacaggaggatgagtgcatggctctgacgctaggaactcctccac

SEQ ID NO: 669177 - DNA, 120 bp, Artificial Sequence
  ENSG00000185372_10 (sequence is synthesized)
aggtgactctgctgagtttgttcccctgcagggacccacccacaggatcttgccgtctgtgtcctgagaggcacaagtggctggtgcctctgaacatggtggtgacagtgaacaactaag

SEQ ID NO: 669178 - DNA, 120 bp, Artificial Sequence
  ENSG00000185372_11 (sequence is synthesized)
cctgtgtcacattgggaagtcactcaacctttgtgagtgtctgtttccattcacctgttgatggtcattggatggtttataggttttggccatcatgagaaaagccattatgaacatttc

SEQ ID NO: 669179 - DNA, 120 bp, Artificial Sequence
  ENSG00000185372_12 (sequence is synthesized)
tgtaccaaaaaaaaaggaaaaaaagataatcaggacactcgtgctctgagggattttgtaaagatcacaatgtgtcaatctaaagctccatgaagaagcaacggctgctattattgtcat

SEQ ID NO: 669180 - DNA, 120 bp, Artificial Sequence
  ENSG00000185372_13 (sequence is synthesized)
tgttgattgtttatgacatccttggactaaatttactctattttttattttctttattttattttttgtgtttttctgccctttagtgctatatttcttaattcttcttggtaatagctg

SEQ ID NO: 669181 - DNA, 120 bp, Artificial Sequence
  ENSG00000185372_14 (sequence is synthesized)
tcttttattggatgcttactaagttctaggttcctgttccttttctattctttctaaattatttaattgatgacttagactaacaaatgtggatatcttaagtggaaactttctaaatgg

SEQ ID NO: 669182 - DNA, 120 bp, Artificial Sequence
  ENSG00000185372_15 (sequence is synthesized)
cagaaattgagtccctataactctttttggacagttctttgcctttttctatgttcaattagaggctttataaaacctcctttaagtaataaaaataaatccctgcagtttagtagttat

SEQ ID NO: 669183 - DNA, 120 bp, Artificial Sequence
  ENSG00000185372_16 (sequence is synthesized)
cctcgtggggggaatatcttgtttttttgtgtgtgttatgaaaggaggatatcttgggcccccaaaatcacgaggataaagggaaaagtcaaggtgggaactgctcagggcaaacctgcc

SEQ ID NO: 669184 - DNA, 120 bp, Artificial Sequence
  ENSG00000185372_17 (sequence is synthesized)
tcccattctttcaaagtcagccctctgctcactgagatcgatgcagcttctgattgactcctttggaatgtctcatcggaaactcaaaagactgcaaccatttgtctctcacctacctgt

SEQ ID NO: 669185 - DNA, 66 bp, Artificial Sequence
  ENSG00000185372_18 (sequence is synthesized)
agctgtccccgcctttctggatggaaccagtgtatttcttacatacattgattgatgtctcatgtc

SEQ ID NO: 669186 - DNA, 120 bp, Artificial Sequence
  ENSG00000185372_19 (sequence is synthesized)
cctgaccaccttgggcacgtgtcgtcaggacctccggagggccgcgtcacgggtgcacgtcctcaaccttgacaaaataaactttctaaattaactgatatctgtctcaaaggttggggg

SEQ ID NO: 669187 - DNA, 120 bp, Artificial Sequence
  ENSG00000185372_20 (sequence is synthesized)
ttcacagtgtattaccagtaccagaccctgtgccttataagtagcagttgctcaataaaacattattgaatgaatgcaagaagagagcatcaagtgaggtaatataaatggaagcatttt

SEQ ID NO: 669188 - DNA, 120 bp, Artificial Sequence
  ENSG00000185379_0 (sequence is synthesized)
cggaagcggcagcgcggcgcgacccggcgggcgggctctgggcgcgggaatcccggcggatcccgggcgggcggatgacccccagccctacccttggtgccgcctcctcctctctccttt

SEQ ID NO: 669189 - DNA, 120 bp, Artificial Sequence
  ENSG00000185379_1 (sequence is synthesized)
tctcctttctcctccggcagccagcgcgcctgtgtcctctctaggaaggggtaggggaggggcgtctggagaggaccccccgcgaatgcccacgtgacgtgcagtccccctggggctgtt

SEQ ID NO: 669190 - DNA, 120 bp, Artificial Sequence
  ENSG00000185379_2 (sequence is synthesized)
ccggcctgcggggaacatgggcgtgctcagggtcggactgtgccctggccttaccgaggagatgatccagcttctcaggagccacaggatcaagacagtggtggacctggtttctgcaga

SEQ ID NO: 669191 - DNA, 120 bp, Artificial Sequence
  ENSG00000185379_3 (sequence is synthesized)
cctggaagaggtagctcagaaatgtggcttgtcttacaaggccctggttgccctgaggcgggtgctgctggctcagttctcggctttccccgtgaatggcgctgatctctacgaggaact

SEQ ID NO: 669192 - DNA, 120 bp, Artificial Sequence
  ENSG00000185379_4 (sequence is synthesized)
gaagacctccactgccatcctgtccactggcattggcagtcttgataaactgcttgatgctggtctctatactggagaagtgactgaaattgtaggaggcccaggtagcggcaaaactca

SEQ ID NO: 669193 - DNA, 120 bp, Artificial Sequence
  ENSG00000185379_5 (sequence is synthesized)
ggtatgtctctgtatggcagcaaatgtggcccatggcctgcagcaaaacgtcctatatgtagattccaatggagggctgacagcttcccgcctcctccagctgcttcaggctaaaaccca

SEQ ID NO: 669194 - DNA, 120 bp, Artificial Sequence
  ENSG00000185379_6 (sequence is synthesized)
ggatgaggaggaacaggcagaagctctccggaggatccaggtggtgcatgcatttgacatcttccagatgctggatgtgctgcaggagctccgaggcactgtggcccagcaggtgactgg

SEQ ID NO: 669195 - DNA, 120 bp, Artificial Sequence
  ENSG00000185379_7 (sequence is synthesized)
ttcttcaggaactgtgaaggtggtggttgtggactcggtcactgcggtggtttccccacttctgggaggtcagcagagggaaggcttggccttgatgatgcagctggcccgagagctgaa

SEQ ID NO: 669196 - DNA, 120 bp, Artificial Sequence
  ENSG00000185379_8 (sequence is synthesized)
gaccctggcccgggaccttggcatggcagtggtggtgaccaaccacataactcgagacagggacagcgggaggctcaaacctgccctcggacgctcctggagctttgtgcccagcactcg

SEQ ID NO: 669197 - DNA, 120 bp, Artificial Sequence
  ENSG00000185379_9 (sequence is synthesized)
gattctcctggacaccatcgagggagcaggagcatcaggcggccggcgcatggcgtgtctggccaaatcttcccgacagccaacaggtttccaggagatggtagacattgggacctgggg

SEQ ID NO: 669198 - DNA, 120 bp, Artificial Sequence
  ENSG00000185379_10 (sequence is synthesized)
gacctcagagcagagtgccacattacagggtgatcagacatgacctgtgctgttgtttgggaaacagggaagcattggggacccctcccaacttttcttcccagtaacgcctgctgttta

SEQ ID NO: 669199 - DNA, 120 bp, Artificial Sequence
  ENSG00000185379_11 (sequence is synthesized)
ctgccacctggcactggtgactacagacgttctcaggctggccagaagagacatcttgggttccttggcctcactctctgtaagcatataaaccacaggcgaaagaggatgctgcattgc

SEQ ID NO: 669200 - DNA, 120 bp, Artificial Sequence
  ENSG00000185379_12 (sequence is synthesized)
gaggacccagaaattcatactggtgccacgtttccttcccttatttctaacgtgtatgtttctggtggaaaccaagttcaccctggctgggagcatctctgatgaggcatgctggcgact

SEQ ID NO: 669201 - DNA, 120 bp, Artificial Sequence
  ENSG00000185379_13 (sequence is synthesized)
ggatggataatcctgtgcatcaccattgtgtcctgtgctccctcctagcgcagtggccaagccgggaaagcctctaacttgcctttgctgctgctgccttttttttcttttgtctctgcc

SEQ ID NO: 669202 - DNA, 120 bp, Artificial Sequence
  ENSG00000185379_14 (sequence is synthesized)
tttccatttgttagatgggggcccactcttccttagctctgtctctgagttactgggtggaaataagcttataaatgaaatactcttcttcatctctgttttgctcttaaaaatataaaa

SEQ ID NO: 669203 - DNA, 120 bp, Artificial Sequence
  ENSG00000185379_15 (sequence is synthesized)
aggcaattccccgagccctagagccacctgatttccccttagaaggctgtttttcagtttcccccagtgaggcccaaagaacagtttattcctcctttcctcttgctgatttggtttcag

SEQ ID NO: 669204 - DNA, 120 bp, Artificial Sequence
  ENSG00000185379_16 (sequence is synthesized)
acctgcctgcatcaccatgactaggtgagaacgtgtgggctcgctgcagttccagggatataatttaacagaaagggagggtatgacctgctcctggtgaatccagccactcatttaata

SEQ ID NO: 669205 - DNA, 120 bp, Artificial Sequence
  ENSG00000185379_17 (sequence is synthesized)
tgcatggtgccctgtggggcccctccacagtacagcataaccagaggtgctgaaccatggccttgcccataaacagacagaggagaatttgcacagtaaatagagccagctgggaaaatt

SEQ ID NO: 669206 - DNA, 120 bp, Artificial Sequence
  ENSG00000185379_18 (sequence is synthesized)
gatgctgacgtaaataatacatggcaaatctagtcctttatgcagaaattcattgctggtggctccaagatgcaatataattacacctctcttcctgccagctgtaccacagctagtgcc

SEQ ID NO: 669207 - DNA, 120 bp, Artificial Sequence
  ENSG00000185379_19 (sequence is synthesized)
ctagtgtatgaaataatccctctgtctttcaccagcactgtggccatccgtctgagagccatgaccctggctgggaggggacgaagacaccagggaatggaaaataaaaggaaaagtaca

SEQ ID NO: 669208 - DNA, 120 bp, Artificial Sequence
  ENSG00000185379_20 (sequence is synthesized)
gaaatgatcaggattggttactggccacatcttttaaaggaaggtcatctttcttggttagagagcctgttgtgtaattaatcagttatgtcttggctgcaggaaaggagggtccgagtt

SEQ ID NO: 669209 - DNA, 120 bp, Artificial Sequence
  ENSG00000185379_21 (sequence is synthesized)
acactcagaaagtaatgacatttagaggtgatgaatgcaacagggatagaatcatggaggattgggaaggagtggcaaactggcaccagggtgttggattcaggacagggttggtaagcc

SEQ ID NO: 669210 - DNA, 120 bp, Artificial Sequence
  ENSG00000185379_22 (sequence is synthesized)
taagcctgggggaatcctagcgcttgctttcacagaagacctcaggagaaattaatcttcagtatctttataccatgggtgattggcacattcctgcaaccacagtaagatgcaatacat

SEQ ID NO: 669211 - DNA, 120 bp, Artificial Sequence
  ENSG00000185379_23 (sequence is synthesized)
gaagctggaaattgcaaattcttgccactcaaggtactatttgggcatcttcagcccacagcagacatgaccaatcgggcacaagcactcttttttgtggaagtcaaagtgtttttagaa

SEQ ID NO: 669212 - DNA, 120 bp, Artificial Sequence
  ENSG00000185379_24 (sequence is synthesized)
gtttttctcaatatagcactccagggggccactaccagtcagttggagttggtattcaaggtggagtctggttgccgtctctgccctgttcccattatgtagtgagttcaggtacttaat

SEQ ID NO: 669213 - DNA, 90 bp, Artificial Sequence
  ENSG00000185379_25 (sequence is synthesized)
ctgccctgttcccattatgtagtgagttcaggtacttaatacctaactgaggaccctaggactgcagtttgagatcatctgggtagcact

SEQ ID NO: 669214 - DNA, 120 bp, Artificial Sequence
  ENSG00000185379_26 (sequence is synthesized)
ttaacagtttaaaatcagcctgggcaacatgatgagacatcgtttctacaaaaaaattttttaaattagctaggcattgtgatgtgcacctgtggtccctgctacttgggagcctgaggc

SEQ ID NO: 669215 - DNA, 88 bp, Artificial Sequence
  ENSG00000185379_27 (sequence is synthesized)
cctgaggcaggagaatcgcttgaaccttggaggttgtggctgcagtgagccctgatcgcaccactacaccaaggaaaaaaaaaatcat

SEQ ID NO: 669216 - DNA, 120 bp, Artificial Sequence
  ENSG00000185379_28 (sequence is synthesized)
tcctgttacttaacagagaaggtacctgaggctcaaaaaggatgactgacagtcctagtggcagaatggaggtgggatctggaacccacaacttgattcctaggactcttttttttttaa

SEQ ID NO: 669217 - DNA, 89 bp, Artificial Sequence
  ENSG00000185379_29 (sequence is synthesized)
actccgtctcaaaaaaaaaaaaaaaatgcaaaaattagccaggcgtcgtggcgcatgtctgtaatcccagctcctcgagaggctgagtg

SEQ ID NO: 669218 - DNA, 74 bp, Artificial Sequence
  ENSG00000185379_30 (sequence is synthesized)
ttgcaatgacttcaaaaagaaaaaaaaaatccccacattttatttaattttcagtccatacagttctattcctg

SEQ ID NO: 669219 - DNA, 120 bp, Artificial Sequence
  ENSG00000185379_31 (sequence is synthesized)
acattttatttaattttcagtccatacagttctattcctgctagggctgtaactccagctgaaggcaccacagctgtcacccaaggagtttctgtggccatgggaaggtgttgcattcac

SEQ ID NO: 669220 - DNA, 120 bp, Artificial Sequence
  ENSG00000185379_32 (sequence is synthesized)
tgctacttgagaccaccacgtgacattcctgcaggctgtgcccctcacagccagcttcatcctttggctcctcctagaccaggactttgtcttgcctgcctgctgccactgcactctgtt

SEQ ID NO: 669221 - DNA, 120 bp, Artificial Sequence
  ENSG00000185379_33 (sequence is synthesized)
ccggccacaccacactgtgcagtcccctggtaggacttgggctaggctggctctcctgtccaagtgccttttgctccctttgcttatgtgtctgtctctgcccagctcccactgtgtctg

SEQ ID NO: 669222 - DNA, 120 bp, Artificial Sequence
  ENSG00000185379_34 (sequence is synthesized)
gtgcacacccaccctgacatccttttttatgcctcagctgtgatctagatagatgcttacagtaacttccctgtattagttattcacttgtactttctgttcacgtgtctgcctacaggc

SEQ ID NO: 669223 - DNA, 120 bp, Artificial Sequence
  ENSG00000185379_35 (sequence is synthesized)
tcccactttttgtcactttttctctttatacattatggaagctcagtaatgattaaatagatgaatgatgttttaaaaatatattttaaaaaagcaaaggactggctctatctcaggggt

SEQ ID NO: 669224 - DNA, 120 bp, Artificial Sequence
  ENSG00000185379_36 (sequence is synthesized)
tccttccataaagcgtcaactttcaatttcccctgcgggggtggtttgagacctgagggcactctctagttcttaggaaaaaaatatacatatacatatacatatatatatatatataca

SEQ ID NO: 669225 - DNA, 120 bp, Artificial Sequence
  ENSG00000185379_37 (sequence is synthesized)
atatatgttcacacccacatcattgagtccccagagtgtcttcttacatatctttttacaggggactattgtatgcccttcgtctgacatcagatgaaattaatgttgagatcctactat

SEQ ID NO: 669226 - DNA, 120 bp, Artificial Sequence
  ENSG00000185379_38 (sequence is synthesized)
gtgctagcacttgatggccttaattaaaaatcaggcatttgaattcccaaggactcaggcaaaggtccatgtatcattaaggctgcaagtaacaaaacctaggcttaaagaagtgtaaat

SEQ ID NO: 669227 - DNA, 120 bp, Artificial Sequence
  ENSG00000185379_39 (sequence is synthesized)
gcaagtaacaaaacctaggcttaaagaagtgtaaatactagggacacttatttatatttatttcttttatgtttcaagacagagtcttgctctggagtgcagtggcacaatcacggctca

SEQ ID NO: 669228 - DNA, 76 bp, Artificial Sequence
  ENSG00000185379_40 (sequence is synthesized)
gactacaggtgtgtgccaccacacccatctaagttttgtattttttgtagagacggggtctctgacccgccttgac

SEQ ID NO: 669229 - DNA, 120 bp, Artificial Sequence
  ENSG00000185379_41 (sequence is synthesized)
gattacagtcatgagccaccatgcctggcagggacacttattatctctgataacaggaagtctgaggtttgttaatttagtggctcattgtcaaatggcgtagagcctttgcatccttct

SEQ ID NO: 669230 - DNA, 120 bp, Artificial Sequence
  ENSG00000185379_42 (sequence is synthesized)
tggctcattgtcaaatggcgtagagcctttgcatccttctgctctgttcttttatgttggttttgtcttcaagcttgttccccttatgaaagcctggctgcagccattttgagcatcaat

SEQ ID NO: 669231 - DNA, 120 bp, Artificial Sequence
  ENSG00000185379_43 (sequence is synthesized)
ccagacgtgacaatatctacaggcaggagaaggatcgcctcctgtgtgtcctttaaagaacaaggtgttaacatgccaggaactgtggctcctgactgtaatcccagtaatttgggaagc

SEQ ID NO: 669232 - DNA, 66 bp, Artificial Sequence
  ENSG00000185379_44 (sequence is synthesized)
aactgtggctcctgactgtaatcccagtaatttgggaagccaaagtaggaggatcgctaaaataaa

SEQ ID NO: 669233 - DNA, 120 bp, Artificial Sequence
  ENSG00000185379_45 (sequence is synthesized)
taaagcaaatatagttttgcagattgtaattgacttttatttgcaattctagaattgggctgccctcagaaccaggacaggttcagagaattccagagctgcaacatagtctgaaagcat

SEQ ID NO: 669234 - DNA, 120 bp, Artificial Sequence
  ENSG00000185379_46 (sequence is synthesized)
ttatggtcagaaaacagaaatgagatacaaagacaactaattggttacagctctgcctttgccttatttgaaaatggtttgaatagttggctgcctggaacccactgaagctgatgatgt

SEQ ID NO: 669235 - DNA, 120 bp, Artificial Sequence
  ENSG00000185379_47 (sequence is synthesized)
gattggctgagcctcagcaatctgttacaaaagtatactcctaaattaggttttcagttagtttgcatactaaggctgcagtttgttaagggcccaagtaaagcctcctcaggtcaattt

SEQ ID NO: 669236 - DNA, 63 bp, Artificial Sequence
  ENSG00000185379_48 (sequence is synthesized)
cagcctcctgagtagctgggactacgactacaggcgcctgccactggctggtctcgaactcct

SEQ ID NO: 669237 - DNA, 120 bp, Artificial Sequence
  ENSG00000185379_49 (sequence is synthesized)
tctgcctgcctcagcctcccaaagaactgggattataggcatgacccactgtgactagccctcaggccaaatttagcttttgtttgtttgtttgagacggagtctctgtcacctaggctg

SEQ ID NO: 669238 - DNA, 81 bp, Artificial Sequence
  ENSG00000185379_50 (sequence is synthesized)
tgcctcccaaagtgcctggattacaggcgtgagacaccacacccgaccccaaatttaatttaacaaaggactaactcagaa

SEQ ID NO: 669239 - DNA, 120 bp, Artificial Sequence
  ENSG00000185379_51 (sequence is synthesized)
cccgaccccaaatttaatttaacaaaggactaactcagaactaacttccaaccaaagctgactcacctcaaatctcattggtgcagaattgcttcatacacccatgtgtaatacagtaac

SEQ ID NO: 669240 - DNA, 120 bp, Artificial Sequence
  ENSG00000185379_52 (sequence is synthesized)
tggcaagaaaaagggactgctgtgattgactcaaaccaactaggaaatagccctggagctgaggctggggacaggctttcctgaagcacatgctggagccactgaaagaaaaatgggagt

SEQ ID NO: 669241 - DNA, 120 bp, Artificial Sequence
  ENSG00000185379_53 (sequence is synthesized)
tctcctttctactagaaaggagagtgtgtggatgaactggatgctgggtgggcagcctctcactagtacttacggtagtaccaaagacgagttaatcaaggctctattatgtatccttag

SEQ ID NO: 669242 - DNA, 120 bp, Artificial Sequence
  ENSG00000185379_54 (sequence is synthesized)
gcccttgatgcatgtctcattatgaccttaggacagccttgtggcagagggaatgattccatttaatagacagtaaatgggatctcagtgaggttaaggacataaagctaataagtggca

SEQ ID NO: 669243 - DNA, 120 bp, Artificial Sequence
  ENSG00000185379_55 (sequence is synthesized)
gcacgggaatccagacacatgtctgcctgataccaaacccattttttcccatctgcacgctgccttctgctgtaaatatgtaaatgtttccacaaaattctttttcatactttgccctga

SEQ ID NO: 669244 - DNA, 120 bp, Artificial Sequence
  ENSG00000185379_56 (sequence is synthesized)
tagcagcaggggctgcacatcccaacctcttttcagcttagctcaccataaaaagcgggatcagagatctacttctcagctctttctgatttcccccagggaagttacaaaagaatgaca

SEQ ID NO: 669245 - DNA, 120 bp, Artificial Sequence
  ENSG00000185379_57 (sequence is synthesized)
aaaacttggagaaggcagatatcattagtattaaagagaactggaggtttagggggaaataaagctgaataaaaaacagcagggctggctgagcgtggtggctcacgcctgtcatctcag

SEQ ID NO: 669246 - DNA, 87 bp, Artificial Sequence
  ENSG00000185379_58 (sequence is synthesized)
agggctggctgagcgtggtggctcacgcctgtcatctcagcgctctgggaggctgaggtgggtggatcatttgaaatcagaagttct

SEQ ID NO: 669247 - DNA, 89 bp, Artificial Sequence
  ENSG00000185379_59 (sequence is synthesized)
gagaatcgcttgaacccgggtggtggaagttgcagtgagccaagatcacactactgcactccagtctgggtgacggaacagggcctatg

SEQ ID NO: 669248 - DNA, 120 bp, Artificial Sequence
  ENSG00000185379_60 (sequence is synthesized)
tccatctcaaaaaaacaaaacaaaacagggcctatgcatccctgagatgtgaagcagggggagataagggatttagatgtatatcctactaggtttttgctgtgttctgccatgcagttg

SEQ ID NO: 669249 - DNA, 120 bp, Artificial Sequence
  ENSG00000185379_61 (sequence is synthesized)
tctgggcaggatttatttatattttaatttatttcaggggccatgctaatcatctttgtattgttccaattttagtgtatgtgctgctgaagcaagcactgggtaaggtttaaactgtct

SEQ ID NO: 669250 - DNA, 120 bp, Artificial Sequence
  ENSG00000185379_62 (sequence is synthesized)
agttctgtgtgctggggtttggcattggagaaggctctgtgatgcatagaccttaaattagagttaggtatattattaatccaaagtgatcctgaatgctttctatcatttttttcttgt

SEQ ID NO: 669251 - DNA, 120 bp, Artificial Sequence
  ENSG00000185379_63 (sequence is synthesized)
cctattgcactggctaaactgacttttagtactacacagaatagaagcaacaataacaatcatccttgtcttgttcctaactttagtggactatttacaatattttactgagttagatgc

SEQ ID NO: 669252 - DNA, 120 bp, Artificial Sequence
  ENSG00000185379_64 (sequence is synthesized)
cttaggttccacgtagctgctctttatgaaagacctcactgggttacccttcagtcttggaggagtctgggtattggccatgacatttgccatgaatgatggagttctctctgccaggtc

SEQ ID NO: 669253 - DNA, 120 bp, Artificial Sequence
  ENSG00000185379_65 (sequence is synthesized)
ctcatgccctggagctgtacggctgcacttcagctgctgcacatttgactttttgagtagcccttgaatctctgctcttccttggcctctctatagtttttggtataatagcctcagctt

SEQ ID NO: 669254 - DNA, 120 bp, Artificial Sequence
  ENSG00000185379_66 (sequence is synthesized)
aagtttgagttttgtaggaaaacaatgggcctgtgctgacaaagatacaaagtcaaggaacaggattttttatatctcaactaacttggtcctagctttgacatttacttgccatataac

SEQ ID NO: 669255 - DNA, 120 bp, Artificial Sequence
  ENSG00000185379_67 (sequence is synthesized)
aatggatgaataacagtctctttaagccttagtttcatccaccgtgaaatgggaaaaataatatctgtttcatagagttgttttaggatcatgtaacttatgtaaaacactgaatagttt

SEQ ID NO: 669256 - DNA, 120 bp, Artificial Sequence
  ENSG00000185379_68 (sequence is synthesized)
tccaggcatgatataggcactcaatctcatattatgaataagcttatgatgcatgggggatactgatgacagctttcttctgtccaggcaggcccagctacatggtggtatgaccagtgc

SEQ ID NO: 669257 - DNA, 120 bp, Artificial Sequence
  ENSG00000185379_69 (sequence is synthesized)
agtcacacagccccatgcttagcagggctctgcacttagtttaatgctctgctgttgccatcttgaagttcttaatttttaaacaagcatcccatattttgcactgtttcttgcaaacag

SEQ ID NO: 669258 - DNA, 120 bp, Artificial Sequence
  ENSG00000185379_70 (sequence is synthesized)
tgtagccagttctgtctccaggaatggatccagcactagtactggcccttctctttgggaaacatccttccattgatttcttagggagtaaatcccttgaagagtaacctcccatagaaa

SEQ ID NO: 669259 - DNA, 120 bp, Artificial Sequence
  ENSG00000185379_71 (sequence is synthesized)
aattagggttagcaccctgtgtatgtttatctctaactgttccattctcagtaacctacacatcctctctcattaaaaaaacaaaacaaaacaaaaaacactttatattttacagaagct

SEQ ID NO: 669260 - DNA, 120 bp, Artificial Sequence
  ENSG00000185379_72 (sequence is synthesized)
attagatccagagaggttggtaggggtgctggtgaaatggaatggtgatttgggattttggaatcaggaaaaagatctaagttcaaaaccctgctagtccctttctggccgagttacttg

SEQ ID NO: 669261 - DNA, 120 bp, Artificial Sequence
  ENSG00000185379_73 (sequence is synthesized)
gacaaggtaatgtctctgtcctactggtaaagtgtatgttgcaggggaattacattctttgttggtaaaatatatgcctcaggggaattaaacagataatttatgtaaagtgcctttcac

SEQ ID NO: 669262 - DNA, 120 bp, Artificial Sequence
  ENSG00000185379_74 (sequence is synthesized)
agagagtctggcacatagtaggtggtcggtcactattaattcttccagctcttgccagaaataactaaaatcagggcactaggacttccaagccgtgctgctactaataaaagaaataat

SEQ ID NO: 669263 - DNA, 120 bp, Artificial Sequence
  ENSG00000185379_75 (sequence is synthesized)
atgatttattttttcacaactgtttggggaaaggcctgtgcttcataaatatgcgttggaaagtacttagcaaatgagtagaaataataaaaatatgtccaagtaaacagctcctataaa

SEQ ID NO: 669264 - DNA, 120 bp, Artificial Sequence
  ENSG00000185379_76 (sequence is synthesized)
ctgtccactggcattggcagacatggagggcgcactcaagtgggaacctgggaggactgcagctgcctcaggtccccgcagggagatcgtggagtggggtcaggaatgctctgaagaagg

SEQ ID NO: 669265 - DNA, 120 bp, Artificial Sequence
  ENSG00000185379_77 (sequence is synthesized)
caggacttgggcatggaggaacagatggactttcgctgaatgctttcgatgaacgaggcactgcggtcagcacttcacggcagaagctctccggaggatccaggtggtgcatgcatttga

SEQ ID NO: 669266 - DNA, 120 bp, Artificial Sequence
  ENSG00000185379_78 (sequence is synthesized)
tcatgagaggggtaaaaccaaggaacagactgcatgagcccttgggccccttccagctctaatactccatggtgatggcagccctgcccttctctgaagatctcaaaatgcctgacacct

SEQ ID NO: 669267 - DNA, 120 bp, Artificial Sequence
  ENSG00000185379_79 (sequence is synthesized)
tcccgggcgggcggatgacccccagccctacccttggtgccgcctcctcctctctcctttctcctccggcagccagcgcgcctgtgtcctctctaggaagggtggtggacctggtttctg

SEQ ID NO: 669268 - DNA, 120 bp, Artificial Sequence
  ENSG00000185379_80 (sequence is synthesized)
actcccaggatggaattcccgagcacctaaatcacatacctcattgtttacatgttcatcttccctgctgaacagtaaagccccctgagtggaaggatcatgtcatatttatgtctgcat

SEQ ID NO: 669269 - DNA, 120 bp, Artificial Sequence
  ENSG00000185379_81 (sequence is synthesized)
tgaggccagcagtcaggaggatttaggggtgagggtggtagatgcatagcccagggtccctgggggagcttcagcgtactaatgggttcagagcccaacagagagaagatgggtaataag

SEQ ID NO: 669270 - DNA, 80 bp, Artificial Sequence
  ENSG00000185379_82 (sequence is synthesized)
ttatgtctgcattccccactagtttctaggggttaagaatctgagactaggagcggtggctcacgcctaaaatcccaatg

SEQ ID NO: 669271 - DNA, 120 bp, Artificial Sequence
  ENSG00000185379_83 (sequence is synthesized)
acaggatcaagacaggtgaccgggtgtgcgcgtgccagggagccgcgcgggcctcgcacaacctgggcaggccccgagggctggcgcactgccctggcatacctgcagggcgcttcccct

SEQ ID NO: 669272 - DNA, 120 bp, Artificial Sequence
  ENSG00000185379_84 (sequence is synthesized)
ccattcctagagggccgcgcttctggagaggctcaggaagggtgggcgtggggagccaagctctaaaacagggtagagattcctactgtgtgcagggcaccgcgccggctcctgcagctt

SEQ ID NO: 669273 - DNA, 120 bp, Artificial Sequence
  ENSG00000185379_85 (sequence is synthesized)
tgtgggaggccccagtcctctctgccaatccgctatacgtgttttgttttcagtggtggacctggtttctgcagacctggaagaggtagctcagaaatgtggcttgtcttacaaggcaga

SEQ ID NO: 669274 - DNA, 73 bp, Artificial Sequence
  ENSG00000185385_0 (sequence is synthesized)
tatgtaaaagatggaaccagagaatgacacagggatttcagaatttgttcttctgggactttctgaggaacca

SEQ ID NO: 669275 - DNA, 120 bp, Artificial Sequence
  ENSG00000185385_1 (sequence is synthesized)
gatttcagaatttgttcttctgggactttctgaggaaccagaattgcagcccttcctctttgggctgtttctgtccatgtacctggtcactgtgctcgggaatctgctcatcatcctggc

SEQ ID NO: 669276 - DNA, 120 bp, Artificial Sequence
  ENSG00000185385_2 (sequence is synthesized)
tgtacttcttcctctccaacctgtcctttgcagacatctgtttcatctccactacaatcccaaagatgctcattaacatccagacacagagcagagtcatcacctatgcaggctgcatca

SEQ ID NO: 669277 - DNA, 120 bp, Artificial Sequence
  ENSG00000185385_3 (sequence is synthesized)
gagcagagtcatcacctatgcaggctgcatcacccagatgtgcttttttgtactttttggagggttagacagcttactcctggctgtgatggcctatgatcggtttgtggccatctgtca

SEQ ID NO: 669278 - DNA, 120 bp, Artificial Sequence
  ENSG00000185385_4 (sequence is synthesized)
tggttctggcatcctggatgattgctgccctgaattccttgtcacaaagcttaatggtattgtggctgtccttctgcacagacttggaaatcccccactttttctgtgaacttaatcagg

SEQ ID NO: 669279 - DNA, 120 bp, Artificial Sequence
  ENSG00000185385_5 (sequence is synthesized)
tcatccaccttgcctgttctgacacctttcttaatgacatggggatgtattttgcagcagggctgctggctggtggtccccttgtggggatcctttgctcttactctaagatagtttcct

SEQ ID NO: 669280 - DNA, 120 bp, Artificial Sequence
  ENSG00000185385_6 (sequence is synthesized)
ccatacgtgcaatctcatcagctcaggggaagtacaaggcattttccacctgtgcatcacacctctcagttgtctctttattttgttgtacgggcctaggtgtgtaccttacttctgctg

SEQ ID NO: 669281 - DNA, 120 bp, Artificial Sequence
  ENSG00000185385_7 (sequence is synthesized)
caacccacaactcacacacaagtgcaacagcctcagtgatgtacactgtggccacccccatgctgaacccctttatctacagtctgaggaataaagacataaagagggctctgaaaatgt

SEQ ID NO: 669282 - DNA, 120 bp, Artificial Sequence
  ENSG00000185385_8 (sequence is synthesized)
ccttcagaggaaagcaataaaagggccatttttcaagaaataactgtgatttcagagctttaagtctcatactcagaaattgtgattcacgaatcaggttgtgaaagtggaatttgctcc

SEQ ID NO: 669283 - DNA, 120 bp, Artificial Sequence
  ENSG00000185385_9 (sequence is synthesized)
agcatatgcaaccttgggctggaaatgacatggtggtttcatttggagtccttagtctggctcaagtatagatgatgcttcaacttttcctgatgccttgtcttgagacagagattccat

SEQ ID NO: 669284 - DNA, 120 bp, Artificial Sequence
  ENSG00000185385_10 (sequence is synthesized)
ctccaccatcaacctgctagagaggaatttacacttctccatggagaccttcctttcagaaaactcagtaggcatggtgaatatagttcatgatgatatattgaattattggaaaatgcc

SEQ ID NO: 669285 - DNA, 120 bp, Artificial Sequence
  ENSG00000185385_11 (sequence is synthesized)
aagaaaatggatgttaagtgttctcgccacaagaatgatgactatatgagtcacattgaaaagatgcaaccaagcctgggcacaatggcttatgcctataatctcagcacttttgtaggc

SEQ ID NO: 669286 - DNA, 89 bp, Artificial Sequence
  ENSG00000185385_12 (sequence is synthesized)
attttttctcagagtttcaatttctttgatctcaactgacatagaatttaatgtattcctttataaagctttccgctctctgatatcca

SEQ ID NO: 669287 - DNA, 120 bp, Artificial Sequence
  ENSG00000185385_13 (sequence is synthesized)
aaggtggagattcctatttttctcctacacttgtgggttgcattagtcctgcagaatcaattgcacctggcagccataaggtcattaatataattttattttagataaatatctgagaag

SEQ ID NO: 669288 - DNA, 120 bp, Artificial Sequence
  ENSG00000185385_14 (sequence is synthesized)
ttattcctttctccaccaccaccttaagtgttcttcctggtcatgtaaactttaccccacacgagtgtgcattttagctcatcatggcatttatttttttagatggagtctcgctctgtc

SEQ ID NO: 669289 - DNA, 120 bp, Artificial Sequence
  ENSG00000185385_15 (sequence is synthesized)
ttggccaggctggtctcgaactcctaccctcaggggatccgcctgcctcggccccccaaagtgctgtcatcatggcattttatcctactcattagggtcctgtcctctattcagttcagt

SEQ ID NO: 669290 - DNA, 120 bp, Artificial Sequence
  ENSG00000185385_16 (sequence is synthesized)
tcattagggtcctgtcctctattcagttcagtgtccaccgtgcctgctcaattccctggaaagagtaagaaggtaaaaatttcctatcaagtgcaggcacggtggctcaggcctgtaatc

SEQ ID NO: 669291 - DNA, 78 bp, Artificial Sequence
  ENSG00000185385_17 (sequence is synthesized)
tggcgcatgcctgtaatcccagctacgcaggagactgaggcaggagaatgggcattgccctccagtctgggcaacaag

SEQ ID NO: 669292 - DNA, 120 bp, Artificial Sequence
  ENSG00000185385_18 (sequence is synthesized)
tctcaaaaaaaaaaaaattgcctatcaaattcacacttcaagtgtagtctgcacagaaaaataaatttgtgtgaatcaattgatttcatctggacttagattacaaaaacacctgaaaga

SEQ ID NO: 669293 - DNA, 120 bp, Artificial Sequence
  ENSG00000185385_19 (sequence is synthesized)
aagaatatggattaaaaaatttattcataactgaaagaataaatgcttaatggggtgggtaccccattcaccatgatgtgattattatataacgcatgcctgtatcaaaacatctcatgt

SEQ ID NO: 669294 - DNA, 90 bp, Artificial Sequence
  ENSG00000185385_20 (sequence is synthesized)
tgtatcaaaacatctcatgtaccccataagataaaagaaaaaaagatggagtaaaatttttggcccggcatggtggctcacgcctgtaat

SEQ ID NO: 669295 - DNA, 120 bp, Artificial Sequence
  ENSG00000185385_21 (sequence is synthesized)
tcatacattgaattgcattgggagatttgatctgatgatatacatctacttatagaggcttggtgcccatttgtaatgaggtttgttagtccaagggaaggatttggaatcacagtctat

SEQ ID NO: 669296 - DNA, 120 bp, Artificial Sequence
  ENSG00000185385_22 (sequence is synthesized)
gtaatttcattatatcattttactgtttctgcttaaaaatttacagtgctacacacaaataagactccttctgttgtcctgcttaaaatcttccttttaaaatattgtgtcttagccatt

SEQ ID NO: 669297 - DNA, 120 bp, Artificial Sequence
  ENSG00000185385_23 (sequence is synthesized)
aaaatgtaggtaagtgaacaatgtgtgtatttaacttatcatcagttcatttgtctcttttatactctaactctcttcaacccttataatcaaatgatgactcacaaaggaacctgaatt

SEQ ID NO: 669298 - DNA, 120 bp, Artificial Sequence
  ENSG00000185385_24 (sequence is synthesized)
tctaaccagcattggcttggagaatagagacttgtgaatcagaatcacaatttatatctacaaatacatacacgttctttcaaaatattctagctccctagaagggaatctaataggtag

SEQ ID NO: 669299 - DNA, 120 bp, Artificial Sequence
  ENSG00000185385_25 (sequence is synthesized)
gggaggagtccctctttttccattgtttgaaatcgtttcagaaggagtgataccaggtcctctctgtacctccggcagaattcagctgtgaaactgactggtcctgggcctctttttgca

SEQ ID NO: 669300 - DNA, 120 bp, Artificial Sequence
  ENSG00000185386_0 (sequence is synthesized)
gcgcggggcgcggggctgggcccgggcggagcggcggctgctccggacatgtcgggccctcgcgccggcttctaccggcaggagctgaacaagaccgtgtgggaggtgccgcagcggctg

SEQ ID NO: 669301 - DNA, 120 bp, Artificial Sequence
  ENSG00000185386_1 (sequence is synthesized)
ggagctgaacaagaccgtgtgggaggtgccgcagcggctgcaggggctgcgcccggtgggctccggcgcctacggctccgtctgttcggcctacgacgcccggctgcgccagaaggtggc

SEQ ID NO: 669302 - DNA, 120 bp, Artificial Sequence
  ENSG00000185386_2 (sequence is synthesized)
ggtgaagaagctgtcgcgccccttccagtcgctgatccacgcgcgcagaacgtaccgggagctgcggctgctcaagcacctgaagcacgagaacgtcatcgggcttctggacgtcttcac

SEQ ID NO: 669303 - DNA, 120 bp, Artificial Sequence
  ENSG00000185386_3 (sequence is synthesized)
gccggccacgtccatcgaggacttcagcgaagtgtacttggtgaccaccctgatgggcgccgacctgaacaacatcgtcaagtgccaggcgctgagcgacgagcacgttcaattcctggt

SEQ ID NO: 669304 - DNA, 120 bp, Artificial Sequence
  ENSG00000185386_4 (sequence is synthesized)
ttaccagctgctgcgcgggctgaagtacatccactcggccgggatcatccaccgggacctgaagcccagcaacgtggctgtgaacgaggactgtgagctcaggatcctggattttgggct

SEQ ID NO: 669305 - DNA, 120 bp, Artificial Sequence
  ENSG00000185386_5 (sequence is synthesized)
ggcgcgccaggcggacgaggagatgaccggctatgtggccacgcgctggtaccgggcacctgagatcatgctcaactggatgcattacaaccaaacagtggatatctggtccgtgggctg

SEQ ID NO: 669306 - DNA, 120 bp, Artificial Sequence
  ENSG00000185386_6 (sequence is synthesized)
catcatggctgagctgctccagggcaaggccctcttcccgggaagcgactacattgaccagctgaagcgcatcatggaagtggtgggcacacccagccctgaggttctggcaaaaatctc

SEQ ID NO: 669307 - DNA, 120 bp, Artificial Sequence
  ENSG00000185386_7 (sequence is synthesized)
ctcagaacacgcccggacatatatccagtccctgccccccatgccccagaaggacctgagcagcatcttccgtggagccaaccccctggccatagacctccttggaaggatgctggtgct

SEQ ID NO: 669308 - DNA, 120 bp, Artificial Sequence
  ENSG00000185386_8 (sequence is synthesized)
ggacagtgaccagagggtcagtgcagctgaggcactggcccacgcctacttcagccagtaccacgaccccgaggatgagccagaggccgagccatatgatgagagcgttgaggccaagga

SEQ ID NO: 669309 - DNA, 120 bp, Artificial Sequence
  ENSG00000185386_9 (sequence is synthesized)
gcgcacgctggaggagtggaaggagctcacttaccaggaagtcctcagcttcaagcccccagagccaccgaagccacctggcagcctggagattgagcagtgaggtgctgcccagcagcc

SEQ ID NO: 669310 - DNA, 120 bp, Artificial Sequence
  ENSG00000185386_10 (sequence is synthesized)
ggcttgggcctgcacccttccacagctggcctggtttcctcgagaggcacctcccacactcctatggtcacagacttctggcctaggacccctcgccttcaggagaatctacacgcatgt

SEQ ID NO: 669311 - DNA, 120 bp, Artificial Sequence
  ENSG00000185386_11 (sequence is synthesized)
atgcatgcacaaacatgtgtgtacatgtgcttgccatgtgtaggagtctgggcacaagtgtccctgggcctaccttggtcctcctgtcctcttctggctactgcactctccactgggacc

SEQ ID NO: 669312 - DNA, 120 bp, Artificial Sequence
  ENSG00000185386_12 (sequence is synthesized)
tgactgtggggtcctagatgccaaaggggttcccctgcggagttcccctgtctgtcccaggccgacccaagggagtgtcagccttgggctctcttctgtcccagggctttctggaggacg

SEQ ID NO: 669313 - DNA, 120 bp, Artificial Sequence
  ENSG00000185386_13 (sequence is synthesized)
cgctggggccgggaccccgggagactcaaagggagaggtctcagtggttagagctgctcagcctggaggtagggggctgtcttggtcactgctgagacccacaggtctaagaggagaggc

SEQ ID NO: 669314 - DNA, 120 bp, Artificial Sequence
  ENSG00000185386_14 (sequence is synthesized)
agagccagtgtgccaccaggctgggcagggacaaccaccaggtgtcaaatgagaaaagctgcctggagtcttgtgttcacccgtgggtgtgtgtgggcacgtgtggatgagcgtgcactc

SEQ ID NO: 669315 - DNA, 120 bp, Artificial Sequence
  ENSG00000185386_15 (sequence is synthesized)
cccgtgttcatatgtcagggcacatgtgatgtggtgcgtgtgaatctgtgggcgcccaaggccagcagccatatctggcaagaagctggagccggggtgggtgtgctgttgccttccctc

SEQ ID NO: 669316 - DNA, 120 bp, Artificial Sequence
  ENSG00000185386_16 (sequence is synthesized)
tcctcggttcctgatgccttgaggggtgtttcagactggcggctccagtgggccaaagggcaaccacatgagcatgggcaggggctttctccttggatgtgggacccacagcagcttcct

SEQ ID NO: 669317 - DNA, 120 bp, Artificial Sequence
  ENSG00000185386_17 (sequence is synthesized)
gaggctgggggtgggtgggtgggtggtttggccttgaggacgctagggcaggcagcacacctggatgtggacttggactcggacacttctgccctgcaccctggcccgctctctacctct

SEQ ID NO: 669318 - DNA, 120 bp, Artificial Sequence
  ENSG00000185386_18 (sequence is synthesized)
gcccaccgttgtggccctgcagccggagatctgaggtgctctggtctgtgggtcagtcctctttccttgtcccaggatggagctgatccagtaacctcggagacgggaccctgcccagag

SEQ ID NO: 669319 - DNA, 120 bp, Artificial Sequence
  ENSG00000185386_19 (sequence is synthesized)
ctgagttgggggtgtggctctgccctggaaagggggtgacctcttgcctcgaggggcccagggaagcctgggtgtcaagtgcctgcaccaggggtgcacaataaagggggttctctctca

SEQ ID NO: 669320 - DNA, 120 bp, Artificial Sequence
  ENSG00000185386_20 (sequence is synthesized)
gtctttagaaggtgctattcatatttctgtcttgaaaaatacttcccatggtttacccctggcttcttcgcttttgacggttctccctcgttggggagggcgccgccggggtagggaagc

SEQ ID NO: 669321 - DNA, 120 bp, Artificial Sequence
  ENSG00000185386_21 (sequence is synthesized)
ggtaggtgcgaccgcagggtgagggtcgggtccagcagggctccgtcccagcctcctgtgctcacgctccgcgtgacctgcaggacctgaagcccagcaacgtggctgtgaacgaggact

SEQ ID NO: 669322 - DNA, 120 bp, Artificial Sequence
  ENSG00000185404_0 (sequence is synthesized)
agggcagccacactgcacgcaggctgggccgactggggagctcataggccaggctctgacacccaggcagggcctagggtgggacgatggcaggtgggggcagcgacctgagcaccaggg

SEQ ID NO: 669323 - DNA, 120 bp, Artificial Sequence
  ENSG00000185404_1 (sequence is synthesized)
ggctgaacggaggtgtttcacaagtagcaaatgagatgaaccatcttcctgcacacagccaaagtctgcaaaggctgttcacggaagaccaggatgtagatgagggacttgtctatgaca

SEQ ID NO: 669324 - DNA, 120 bp, Artificial Sequence
  ENSG00000185404_2 (sequence is synthesized)
ctgtattcaagcacttcaaaagacataagctggagatatcaaatgcaataaaaaagacatttccattccttgagggcctccgcgatcgggaactcatcacaaataaaatgtttgaagatt

SEQ ID NO: 669325 - DNA, 120 bp, Artificial Sequence
  ENSG00000185404_3 (sequence is synthesized)
ctgaagattcttgtagaaacctggtccctgtacaaagagtggtgtacaatgttctcagtgaactggagaagacatttaacctgtcagttttggaagcactgttcagcgaggtcaacatgc

SEQ ID NO: 669326 - DNA, 120 bp, Artificial Sequence
  ENSG00000185404_4 (sequence is synthesized)
aggaataccccgatttaattcacatttataaaagcttcaaaaatgcaatccaagacaaattgtctttccaagaaagtgatcgaaaagaaagggaagagaggcctgacatcaaactaagtc

SEQ ID NO: 669327 - DNA, 120 bp, Artificial Sequence
  ENSG00000185404_5 (sequence is synthesized)
ttaaacaaggagaagtgccagaaagcccggaagcaaggaaggaaagtgaccaagcatgtggcaaaatggatactgtggatattgcaaacaactctactttgggaaaacccaagaggaaaa

SEQ ID NO: 669328 - DNA, 120 bp, Artificial Sequence
  ENSG00000185404_6 (sequence is synthesized)
gaagaaaaaagaaggggcatggctggagcagaatgggaacgagaacgcagaaaaacaaccaacaaaatgataacagcaaagccgatggccagctggtctcgagtgaaaagaaggcgaaca

SEQ ID NO: 669329 - DNA, 120 bp, Artificial Sequence
  ENSG00000185404_7 (sequence is synthesized)
tgaatctgaaagacctttccaagattagggggagaaagagaggcaaacctggaacccactttactcagagtgacagagctccacagaaaagagtccgatcaagagcttcaagaaagcaca

SEQ ID NO: 669330 - DNA, 120 bp, Artificial Sequence
  ENSG00000185404_8 (sequence is synthesized)
aagatgaaactgtggattttcaggctcctttacttccagtgacctgtggtggggtgaagggaattttacataaggagaaattggaacaaggaaccttggcaaagtgtatacagactgagg

SEQ ID NO: 669331 - DNA, 120 bp, Artificial Sequence
  ENSG00000185404_9 (sequence is synthesized)
atggaaaatggttcacccccatggaatttgaaatcaaaggaggctacgcaagatcaaagaactggaggctgagtgtgcgctgtggcgggtggcccctacgacggctgatggaggaaggat

SEQ ID NO: 669332 - DNA, 120 bp, Artificial Sequence
  ENSG00000185404_10 (sequence is synthesized)
ctctacctaatcctccaagaatatattacaggaacaaaaagagaatactgaagtctcaaaacaatagctcagttgacccttgtatgagaaacttggatgagtgtgaggtgtgccgggacg

SEQ ID NO: 669333 - DNA, 120 bp, Artificial Sequence
  ENSG00000185404_11 (sequence is synthesized)
ttgttcaagagtcttccatgaggactgccacatcccacctgtggaaagtgagaagaccccgtggaattgcatcttctgcaggatgaaggagtctccgggaagccaacagtgttgtcagga

SEQ ID NO: 669334 - DNA, 120 bp, Artificial Sequence
  ENSG00000185404_12 (sequence is synthesized)
atctgaggtcctggagaggcagatgtgtcctgaggaacagttgaaatgtgagttcctcctcttgaaagtctattgctgttctgagagctccttttttgccaagattccatactattatta

SEQ ID NO: 669335 - DNA, 120 bp, Artificial Sequence
  ENSG00000185404_13 (sequence is synthesized)
tattagagaggcgtgtcaaggcctgaaggagcccatgtggttggataaaatcaagaaaaggctgaatgagcacggttacccccaagtggaggggtttgtacaagacatgcgcctcatctt

SEQ ID NO: 669336 - DNA, 120 bp, Artificial Sequence
  ENSG00000185404_14 (sequence is synthesized)
ccagaaccacagggcctcttacaagtataaggattttggccaaatgggacttagactggaggctgaatttgagaaggatttcaaggaagtgtttgctattcaggaaacaaatgggaacag

SEQ ID NO: 669337 - DNA, 120 bp, Artificial Sequence
  ENSG00000185404_15 (sequence is synthesized)
ttgactggtttagtggatgctgaaggccttcaggaaatatgctactggttgccactgacttcaaactgagagcacttgggaaatagcacatgcagggagaggcttttctctgagcctccc

SEQ ID NO: 669338 - DNA, 120 bp, Artificial Sequence
  ENSG00000185404_16 (sequence is synthesized)
tcatctgcccaaaaacaaatcctcaaaagaaatttgatcatcatgaatcccatccccaagaatctcatcaaccagggaagaggaactgagatcacagggaaggagattggaggtgatacc

SEQ ID NO: 669339 - DNA, 120 bp, Artificial Sequence
  ENSG00000185404_17 (sequence is synthesized)
agcacagacagactctcacctcttctcctgaggtctgctccagacaacatttattactcacaagacctttttcctccgttttttttttgagatggagtctcacacagtcacccgggattg

SEQ ID NO: 669340 - DNA, 88 bp, Artificial Sequence
  ENSG00000185404_18 (sequence is synthesized)
aggctggtctcgaactcctgacctcatgaggtgacaggagtgagccaccacacctggccactcgcaagaccttttatctgaaaaccag

SEQ ID NO: 669341 - DNA, 120 bp, Artificial Sequence
  ENSG00000185404_19 (sequence is synthesized)
cacacctggccactcgcaagaccttttatctgaaaaccagccaagctttattcacgacacacttcttcccttcactctcccacttctgtggtcaactccctgcagaactcccaaactgcc

SEQ ID NO: 669342 - DNA, 120 bp, Artificial Sequence
  ENSG00000185404_20 (sequence is synthesized)
gttcttttcgatagctcacgatggtgtatgagtgtcaatcatctgacccttcttggagtctcatatttcgtggaactcctgtgcaaacatatattattaaattttttttcctcctgtcaa

SEQ ID NO: 669343 - DNA, 85 bp, Artificial Sequence
  ENSG00000185404_21 (sequence is synthesized)
gtccgtgggcgtaggaccttccgagccaggctgttcacggaagaccaggatgtagatgagggacttgtctatgacactgtattca

SEQ ID NO: 669344 - DNA, 120 bp, Artificial Sequence
  ENSG00000185404_22 (sequence is synthesized)
ctgttattatttgcaatactgtggtagagagaatgatggccaccccaaaaaacgtccacctcctaatccctggacctgtaatctgctatcttacatggcaaacgggactttacagataca

SEQ ID NO: 669345 - DNA, 120 bp, Artificial Sequence
  ENSG00000185404_23 (sequence is synthesized)
tgggcccaatctaatcttgtaggctttaaagagtggagaacttttcctggctgtggagaaaggaaaatgtgactatggaagagtcatcagaaacatgtaatgttgcaggctttgaagatg

SEQ ID NO: 669346 - DNA, 120 bp, Artificial Sequence
  ENSG00000185404_24 (sequence is synthesized)
gaagagggaaccaaggaatgtggatgacctctagaagctgaaaaaacaaggaaatagtttgtcctttccagcccccagaaaggaatgaaggcctacaccttgactttaggcagtaagacc

SEQ ID NO: 669347 - DNA, 120 bp, Artificial Sequence
  ENSG00000185404_25 (sequence is synthesized)
cgtgtcacacttctcactgacataactggaagataatatatttgtgttgttttaaaccactaaatttgtggtaatttgttatggcagcaattaagagtaatacggattttagtacttggc

SEQ ID NO: 669348 - DNA, 120 bp, Artificial Sequence
  ENSG00000185404_26 (sequence is synthesized)
agtggggtgtggctatcacatattcctgaaagtgttggggtgtctttgagattgcgcagtggaaagaggttggaagaattttaaatagagtgataggaaaatcctagatgaaaaaatgga

SEQ ID NO: 669349 - DNA, 120 bp, Artificial Sequence
  ENSG00000185404_27 (sequence is synthesized)
atagagtgataggaaaatcctagatgaaaaaatggaaattaagtcaattaataaccctacaatggcctgtaagtgctcaagttaaagaaagagtcggccgggcgcggtggctcacgcctg

SEQ ID NO: 669350 - DNA, 120 bp, Artificial Sequence
  ENSG00000185404_28 (sequence is synthesized)
agccatctgcagactcaggcctggtctctactcccagaattcaacagcaagttggagtcctctcatctttcagaatcacttgcttttccttctgaaccttggcaaagtgtatacagactg

SEQ ID NO: 669351 - DNA, 120 bp, Artificial Sequence
  ENSG00000185404_29 (sequence is synthesized)
gcgacacttgttcaagagtcttccatgaggactgccacatcccacctgtggaaagtgagaaatggggaaggagcaggttcatcgggtactgggacccagcagtgtgatccagagagcagt

SEQ ID NO: 669352 - DNA, 120 bp, Artificial Sequence
  ENSG00000185404_30 (sequence is synthesized)
gggagacgctggcagcaggaggaccccgtggaattgcatcttctgcaggatgaaggagtctccgggaagccaacagtgttgtcaggaatctgaggtcctggagaggcagatgtgtcctga

SEQ ID NO: 669353 - DNA, 120 bp, Artificial Sequence
  ENSG00000185404_31 (sequence is synthesized)
tctttcatcctttaagggaccttccacctgccatgcgcactctccagcagaatgtctgcttgtgtctagatggggaaggagcaggttcatcgggtactgggacccagcagtgtgatccag

SEQ ID NO: 669354 - DNA, 120 bp, Artificial Sequence
  ENSG00000185404_32 (sequence is synthesized)
cttgaagttttgcagtagggtctcctgtcccagggggttgaggaaaaaaaacaccagttgtttatattttgtgcttattcatacaagacaggaagcacggtcttaggcggatggaggcct

SEQ ID NO: 669355 - DNA, 120 bp, Artificial Sequence
  ENSG00000185404_33 (sequence is synthesized)
gggcaggggaatgtactgaaaggagcctgctcttccgcgccacacttcaatggcactgatagaacaccacaccttgtttgcacaaaaaataactcagccatgacatgtctgtttccaaga

SEQ ID NO: 669356 - DNA, 120 bp, Artificial Sequence
  ENSG00000185404_34 (sequence is synthesized)
gccacacatgttagagaaacttgaggaagaagggtgtgagtcgtgtgctgtgtctcatgcatgtgggctcattctctccaagctgcttttcatttacggcctctttcttttgcagaaatg

SEQ ID NO: 669357 - DNA, 120 bp, Artificial Sequence
  ENSG00000185404_35 (sequence is synthesized)
tgagttcctcctcttgaaagtctattgctgttctgagagctccttttttgccaagattccatactattattatgtaagtaacaacagcaacccatgattacaggctgccatgacattacc

SEQ ID NO: 669358 - DNA, 120 bp, Artificial Sequence
  ENSG00000185404_36 (sequence is synthesized)
gcaagagcacacgctgtcattagttgccttcaccttgttgtatttctgctggattttatgggaatccacagaaggtagacactgaactatgctggtagcttttccattggtatatttgtc

SEQ ID NO: 669359 - DNA, 120 bp, Artificial Sequence
  ENSG00000185404_37 (sequence is synthesized)
ttctgacacacaggcctggcaggcaggactccttgtgctcccagcagctcagacagggaaaggatagtccccactcacggtgacaccaccttcctgaggcttccctcctgctgctaccac

SEQ ID NO: 669360 - DNA, 120 bp, Artificial Sequence
  ENSG00000185404_38 (sequence is synthesized)
tgatgcgagggaaaggccagtggctggagaccccatgtgcagttcttggatactctgggaggtgttcccctccctcccatgactgagcccatcagccattcctgaaggaagacagtggta

SEQ ID NO: 669361 - DNA, 120 bp, Artificial Sequence
  ENSG00000185404_39 (sequence is synthesized)
gtggaattgcatcttctgcaggatgaaggagtctccgggaagccaacagtgttgtcaggaatctgaggtcctggagaggcagatgtgtcctgaggaacagttggtaaatcagatgcaaac

SEQ ID NO: 669362 - DNA, 120 bp, Artificial Sequence
  ENSG00000185404_40 (sequence is synthesized)
ataatacaattattcagattcctataagatcatcctcttgctttgttgctaggctttctgtgtcataatctctggttttataaggaaaacgtttttattctgacatataccccttcctcc

SEQ ID NO: 669363 - DNA, 120 bp, Artificial Sequence
  ENSG00000185404_41 (sequence is synthesized)
tgaacttcactgcagaccaggatttgttctgaaatctccatgccatatttttccttcatatcccagggagaagcatatgcctgtctatacaggctcacacataagcagtgtgttctagat

SEQ ID NO: 669364 - DNA, 120 bp, Artificial Sequence
  ENSG00000185404_42 (sequence is synthesized)
ctaaacatctaatttcctgtgctttatgctgtattttcagtaataaacctatttctttaattgttttatgaagctatactaactattgaaaaacatatcttattaagtcattttccaaaa

SEQ ID NO: 669365 - DNA, 120 bp, Artificial Sequence
  ENSG00000185414_0 (sequence is synthesized)
gtagttcttcctctgctctgcttcccttcggaggaaaatttcaggctgaaggtttagcgggtgccgcctctaaagagagcaatcactacacttatggctgggattttgcgcttagtagtt

SEQ ID NO: 669366 - DNA, 120 bp, Artificial Sequence
  ENSG00000185414_1 (sequence is synthesized)
caatggcccccaggcagactacagactgtgacaaaaggtgtggagtctcttatttgtacagattggattcgtcacaaattcaccagatcaagaattccagaaaaagtgtttcaggcctca

SEQ ID NO: 669367 - DNA, 120 bp, Artificial Sequence
  ENSG00000185414_2 (sequence is synthesized)
cctgaagatcatgaaaaatacggtggggatccacagaaccctcataaactgcatattgttaccagaataaaaagtacaagaagacgtccatattgggaaaaagatataataaagatgctt

SEQ ID NO: 669368 - DNA, 120 bp, Artificial Sequence
  ENSG00000185414_3 (sequence is synthesized)
ggattagaaaaagcacatacccctcaagttcacaagaatatcccttcagtgaatgcaaaattgaaagtagttaagcatttgataagaatcaagcccttgaagttgccacaaggacttcca

SEQ ID NO: 669369 - DNA, 120 bp, Artificial Sequence
  ENSG00000185414_4 (sequence is synthesized)
gcagaggagaacatgtctaacacgtgcctcaaaagcactggggagttagtagtgcagtggcatctgaaacctgtggagcagaaagcacatgagtcctaatgccccagcagcttccgattg

SEQ ID NO: 669370 - DNA, 120 bp, Artificial Sequence
  ENSG00000185414_5 (sequence is synthesized)
tccgattggaaaatgcaaattgtttttatttaaagatggtgagaaagtgttttcattaaaatatgttttcaaaaccattttcaggccgggcacggtggctcacctgtaatcccagcactt

SEQ ID NO: 669371 - DNA, 65 bp, Artificial Sequence
  ENSG00000185414_6 (sequence is synthesized)
taggatgagactccatctcaggggaaaaaaaaaaatttttttttcactgactaaacctgctgcag

SEQ ID NO: 669372 - DNA, 120 bp, Artificial Sequence
  ENSG00000185414_7 (sequence is synthesized)
aaaaaaaaaatttttttttcactgactaaacctgctgcagctctcttttactacagacttggagattttagtttaatttggtttaattctctgtcctttccctttcactgtttcactcca

SEQ ID NO: 669373 - DNA, 120 bp, Artificial Sequence
  ENSG00000185414_8 (sequence is synthesized)
aaacatgtaagaatggcaatgtttgaacatctgcgtttgggtctactgccaccttagcaagcctcattaaccattttataaaaattgcgttagtattgttgttgttgtttttgagacagg

SEQ ID NO: 669374 - DNA, 120 bp, Artificial Sequence
  ENSG00000185414_9 (sequence is synthesized)
ggactacaggcagtgtgccaccacatccagctaattttttaaagttttttcatagagacagggactcactatgttgtccaagctggtctcaaactcctgggttcaagccatcctcccacc

SEQ ID NO: 669375 - DNA, 120 bp, Artificial Sequence
  ENSG00000185414_10 (sequence is synthesized)
acaggcatgagccactgtacccagccaaaattgttttcttttttaagtgaattcaacaatttctgtgagtggctctttgcatgaacactgtgcaaggtgttggagaaatccaaagctgac

SEQ ID NO: 669376 - DNA, 120 bp, Artificial Sequence
  ENSG00000185414_11 (sequence is synthesized)
tccaaagctgaccaaaacatggtccccaccttttggagcttacagtctgttctggggaacagagattcagccaaagtcaagaaacactggatgccagctagattatctgttctgtgcttt

SEQ ID NO: 669377 - DNA, 120 bp, Artificial Sequence
  ENSG00000185414_12 (sequence is synthesized)
ggtgtctataagtacatatgtggatatgggttcattttatccctaaacttagtaccaaaccagcatttaatatctaattataaatctaatttggcctaaactttattattgcacactgcc

SEQ ID NO: 669378 - DNA, 120 bp, Artificial Sequence
  ENSG00000185414_13 (sequence is synthesized)
tgaacaaaacctatttgtctctatgtaaattttttcctcatggaacaagggtgtgaaatgaaaatattttaggatttattcaaaaacagactattctgttttcagcttcagaattgttct

SEQ ID NO: 669379 - DNA, 120 bp, Artificial Sequence
  ENSG00000185414_14 (sequence is synthesized)
ttgaatcctaaggaacctctgtcaacagttgaggttgctgttgaaaagaaagaagaaggaggcggaaatctctcagggagaattatttcctttcttttctattttagatacctggagggg

SEQ ID NO: 669380 - DNA, 120 bp, Artificial Sequence
  ENSG00000185414_15 (sequence is synthesized)
tggggagaagtaagaattgtaagggaggttcagtagtggggaattctgtgacagctgattgaagatgatgatgaagaacctctgcattctagttaccctttgcttcccttcacctcttgt

SEQ ID NO: 669381 - DNA, 120 bp, Artificial Sequence
  ENSG00000185414_16 (sequence is synthesized)
accagatcccattaataaataagcttaaaggcaactgcagttttaattccatagttattgaatatccagtgtgtgtaaggcctggaggggagccaaaggacactaacttctaagagctcc

SEQ ID NO: 669382 - DNA, 120 bp, Artificial Sequence
  ENSG00000185414_17 (sequence is synthesized)
gtctagttggagagaaacctgtgtgccacaacatacagtgtccttgcttatgtggggtcgaagacatctgtgaaaataaaagcagcctctgctaatttagcgccatctcttttactgtgc

SEQ ID NO: 669383 - DNA, 89 bp, Artificial Sequence
  ENSG00000185414_18 (sequence is synthesized)
tactgtgctaatttttttttccctggagggcagtggtgtgatcgtagctcactattacctccaactcttgggctcaagtgatcctccca

SEQ ID NO: 669384 - DNA, 120 bp, Artificial Sequence
  ENSG00000185414_19 (sequence is synthesized)
tcctgagcagctaggactacagatacatgccaccgctcccggctagtattttttaaaattttttgtagagccaagtgttgctatgttgtccacactgatctggagcttctaatctcaaat

SEQ ID NO: 669385 - DNA, 120 bp, Artificial Sequence
  ENSG00000185414_20 (sequence is synthesized)
ctgggaatacaggtgtgagccaccatacctggccttactgtactaatattaatattgtgtaaataggggaaaataccatggttaatttttactcaaacagtaagaaagtttgagtaacta

SEQ ID NO: 669386 - DNA, 120 bp, Artificial Sequence
  ENSG00000185414_21 (sequence is synthesized)
tcaaacagtaagaaagtttgagtaactaattttaatctcaacagcccatagctagaagaggggatctaaatgttaagttgaatatttagaaataaaagtgtctacaagaagaaaagtctt

SEQ ID NO: 669387 - DNA, 120 bp, Artificial Sequence
  ENSG00000185414_22 (sequence is synthesized)
tagtgaaaatatgggcataggccagcagcattagctttctattgctgcagaacaaattaccacaaacttagctgcttaaaacaacacacacttattgtctcacaatgtttgtgggtcgga

SEQ ID NO: 669388 - DNA, 120 bp, Artificial Sequence
  ENSG00000185414_23 (sequence is synthesized)
agtctaggcgtggcttagctgggtagtctgtttaggatctcagtgctggaaaaacgtgtctggccaggtgctcattgtagctttgacagggaagggatctgctcccaagcactctcaggt

SEQ ID NO: 669389 - DNA, 120 bp, Artificial Sequence
  ENSG00000185414_24 (sequence is synthesized)
tgttggcagaatttgtttccttatggctgtaggattcatggcaagttgcttcttccaaaaccagcattggagacagactagcaagatgggcactacactcttagataatcaaataaatgc

SEQ ID NO: 669390 - DNA, 120 bp, Artificial Sequence
  ENSG00000185414_25 (sequence is synthesized)
aatcatgtgcctcgtgtcaccttttttgcattccattcattaagaacaagttgcagttcctacctacactcaaggaagggaggaattacacagaagtgtgaccacaggaggcagggctca

SEQ ID NO: 669391 - DNA, 120 bp, Artificial Sequence
  ENSG00000185414_26 (sequence is synthesized)
tggaggcctccttaaagtcccccagccaaacctgaaaagtcaatcctggaccttatcatagtggctgtatagtttagaaggtttcttcagattggcattcctttgcctcatatcatcact

SEQ ID NO: 669392 - DNA, 120 bp, Artificial Sequence
  ENSG00000185414_27 (sequence is synthesized)
tcaaaaccctataagggtttgttcctcggtcttgactttgtgtctttgaggattgctttgtttagtgtcacctgccttctttcaggaggttttgcctgacatctggtggtgaccgtggcc

SEQ ID NO: 669393 - DNA, 120 bp, Artificial Sequence
  ENSG00000185414_28 (sequence is synthesized)
accaagtcaacccaaacactacctttaaggacgactgcagttctcttagggtctcctcaatctaaaattgtacctctttcaggccaaacacctattttcttcattttttttttctcataa

SEQ ID NO: 669394 - DNA, 120 bp, Artificial Sequence
  ENSG00000185414_29 (sequence is synthesized)
gaatgctagctagtatgcctattatctaactggcacagtttcaccaaggacagtttggaactacacaggccattttagggagattttgacatgaacaagattgcttctttgggaggtacc

SEQ ID NO: 669395 - DNA, 120 bp, Artificial Sequence
  ENSG00000185414_30 (sequence is synthesized)
ttaaaatgaaaagcaaagaaacttccatgcggagattgtcttgtttttctcaaaatgggataattttgcttaacataagtagtatcccttccttcctttccatactttgagaattaataa

SEQ ID NO: 669396 - DNA, 120 bp, Artificial Sequence
  ENSG00000185414_31 (sequence is synthesized)
ggactagctttttgatcacacagcttgataaaattttcaagggtccaaattactgtctaaaccatttgccactctttgtgtatatttgtcaaaatctgcttttctatatcaaaacttttc

SEQ ID NO: 669397 - DNA, 120 bp, Artificial Sequence
  ENSG00000185414_32 (sequence is synthesized)
tctcaagacctgagggaattaattaataaggaatccttggaacactggaaattctaaaataagagtcagatacaaaacactggtcactaaaattcttacctttatgtattagaatggcaa

SEQ ID NO: 669398 - DNA, 120 bp, Artificial Sequence
  ENSG00000185414_33 (sequence is synthesized)
tcaatgaacaaactgaaaatgtctttggatattatttctgtttattttttgcctcaaaattattaaatgacatgaaataagtgctcaagaagaaaaataaacaattcttcatttcctgtt

SEQ ID NO: 669399 - DNA, 120 bp, Artificial Sequence
  ENSG00000185414_34 (sequence is synthesized)
tatacatttattatttattttgtattacttagggtaatttatttataaatttggcttagaatgaaccttcaatttaacattttactgaaacatggaactatctgcttttcagattgataa

SEQ ID NO: 669400 - DNA, 120 bp, Artificial Sequence
  ENSG00000185418_0 (sequence is synthesized)
gtcttctgccgtgcgctgagtgtccgcgtcgccctcgccgcagtcgcgggcaccccgctcggcgtcggtgcctgagggaggccgcgatggcggccgaggccctggcggcggaggccgtgg

SEQ ID NO: 669401 - DNA, 120 bp, Artificial Sequence
  ENSG00000185418_1 (sequence is synthesized)
cgtcgcgcctggagcggcaggaggaggacatccgctggctgtggtcggaggtcgagcgcctgagggacgagcagctgaacgcgccctacagctgccaggcggaggggccgtgcctcacgc

SEQ ID NO: 669402 - DNA, 120 bp, Artificial Sequence
  ENSG00000185418_2 (sequence is synthesized)
gggaggtggcgcagctccgggccgagaactgcgacctgcgccaccgcctgtgcagcctgcggctgtgcctcgccgaggagcggagccgccaggccacgctggagagcgcggagctagagg

SEQ ID NO: 669403 - DNA, 120 bp, Artificial Sequence
  ENSG00000185418_3 (sequence is synthesized)
cggcgcaggaggccggcgcacagcctcctcctagtcaaagccaagacaaggacatgaaaaagaagaaaatgaaggaaagcgaggctgacagcgaggtgaagcatcaaccaattttcataa

SEQ ID NO: 669404 - DNA, 120 bp, Artificial Sequence
  ENSG00000185418_4 (sequence is synthesized)
aagaaagattgaagctttttgaaatactgaagaaagaccatcagctcttacttgccatttatggaaaaaagggggatacaagcaacatcatcacagtaagagtggctgatgggcaaacag

SEQ ID NO: 669405 - DNA, 120 bp, Artificial Sequence
  ENSG00000185418_5 (sequence is synthesized)
tgcaaggggaagtctggaaaacaacgccttaccaagtggctgctgaaattagtcaggaactggctgaaagcacggtaatagccaaagtcaatggtgaactgtgggacctggaccgcccat

SEQ ID NO: 669406 - DNA, 120 bp, Artificial Sequence
  ENSG00000185418_6 (sequence is synthesized)
tggaaggggactcttctctagagctgcttacatttgataatgaggaagctcaagctgtgtactggcactccagtgctcacattcttggggaggccatggagctttactatggaggccacc

SEQ ID NO: 669407 - DNA, 120 bp, Artificial Sequence
  ENSG00000185418_7 (sequence is synthesized)
tgtgctacggtccgcccattgaaaatggattttattatgacatgttcattgaagacagagcagtgtccagcacagaattgtcagccctggagaatatatgtaaagccatcataaaagaaa

SEQ ID NO: 669408 - DNA, 120 bp, Artificial Sequence
  ENSG00000185418_8 (sequence is synthesized)
agcaaccttttgaaagactagaagtcagcaaggaaatcctcctggaaatgtttaagtacaataaatttaaatgccgcattctgaatgagaaagttaacactgcaactaccaccgtgtaca

SEQ ID NO: 669409 - DNA, 120 bp, Artificial Sequence
  ENSG00000185418_9 (sequence is synthesized)
ggtgcggtccattaattgacctttgcaaaggtccacatgtaagacacactggaaaaattaaaaccatcaaaatttttaagaattcctcaacatattgggagggcaatccggaaatggaaa

SEQ ID NO: 669410 - DNA, 120 bp, Artificial Sequence
  ENSG00000185418_10 (sequence is synthesized)
cattgcagaggatctatggaatatcctttcctgataacaagatgatgagagactgggaaaagttccaagaggaagcaaagaaccgagatcacaggaagatcgggaaggaacaagaacttt

SEQ ID NO: 669411 - DNA, 120 bp, Artificial Sequence
  ENSG00000185418_11 (sequence is synthesized)
tctttttccacgatttgagtcctggaagctgttttttccttcccagaggagccttcatttataatacgcttacagatttcatacgagaggaatatcacaaacgggacttcacggaggtgc

SEQ ID NO: 669412 - DNA, 120 bp, Artificial Sequence
  ENSG00000185418_12 (sequence is synthesized)
tctctcccaatatgtacaacagtaaactctgggaagcctcaggccactggcagcattacagcgagaacatgtttacctttgagattgaaaaggacacttttgccctcaaacccatgaatt

SEQ ID NO: 669413 - DNA, 120 bp, Artificial Sequence
  ENSG00000185418_13 (sequence is synthesized)
gtccagggcactgtctaatgtttgcccatcgtccacgatcttggagggaaatgcctattagatttgctgattttggagttctgcatagaaatgaactgtcggggactctcagcggcttga

SEQ ID NO: 669414 - DNA, 120 bp, Artificial Sequence
  ENSG00000185418_14 (sequence is synthesized)
cagagtgaggcgcttccagcaggacgatgctcacattttttgcacagtggagcagattgaagaagaaataaaggggtgtttgcagtttttgcaatctgtttactcaacatttggcttctc

SEQ ID NO: 669415 - DNA, 120 bp, Artificial Sequence
  ENSG00000185418_15 (sequence is synthesized)
ctttcaattaaacctgtcaacaaggccggaaaacttcctaggagagattgagatgtggaatgaggctgagaagcaactgcagaacagcttgatggactttggagaaccgtggaaaatgaa

SEQ ID NO: 669416 - DNA, 120 bp, Artificial Sequence
  ENSG00000185418_16 (sequence is synthesized)
cccaggagatggagcattttatggccctaaaattgacataaaaatcaaggatgctattggcagataccatcaatgtgctacaattcagctggacttccaactgcctattagatttaatct

SEQ ID NO: 669417 - DNA, 120 bp, Artificial Sequence
  ENSG00000185418_17 (sequence is synthesized)
cacatatgttagtaaggatggggatgataagaagagacctgtgatcattcatcgagccattttgggatcagtggaaagaatgatagccattctttcagaaaactatggcggaaaatggcc

SEQ ID NO: 669418 - DNA, 120 bp, Artificial Sequence
  ENSG00000185418_18 (sequence is synthesized)
tttctggctatctcctcgtcaggtgatggtcatccctgtggggccaacttgtgaaaaatatgcacttcaggtatccagtgaattttttgaagaaggatttatggctgacgttgacttgga

SEQ ID NO: 669419 - DNA, 120 bp, Artificial Sequence
  ENSG00000185418_19 (sequence is synthesized)
tcacagttgtacactaaataagaaaatacgaaatgcacagctggctcagtataattttattttggtggttggagaaaaggaaaagatagataatgctgtaaacgtgcgaacaagagacaa

SEQ ID NO: 669420 - DNA, 120 bp, Artificial Sequence
  ENSG00000185418_20 (sequence is synthesized)
caaaattcatggagagattttagtaacttctgccattgataaactgaagaatctcaggaagacacggacactcaatgctgaggaggccttttgaagtccttccctgatatttgcttctgt

SEQ ID NO: 669421 - DNA, 120 bp, Artificial Sequence
  ENSG00000185418_21 (sequence is synthesized)
gtaactttgttttgacccttaaaaatgtatttttcttaacatgttagtacttctacgactttggagccactgatgggtccactcatggcctcagctgagaaaggagacgatgaacgtgta

SEQ ID NO: 669422 - DNA, 120 bp, Artificial Sequence
  ENSG00000185418_22 (sequence is synthesized)
gctgacatgcacgaagtttaatttactcatgtccacgggggacgtttagagggcacgtgggaaattttccagcaatcaatgccttgagaaacttaaatggggaaatattattcatcgaga

SEQ ID NO: 669423 - DNA, 120 bp, Artificial Sequence
  ENSG00000185418_23 (sequence is synthesized)
aagtgaaacaaaacactaggaaatgattatgaaatgttagtgattttcaaaagatgggcttcaaataaaagtctgcagagttttttttaaataggagggaaaatcttattttctaatatg

SEQ ID NO: 669424 - DNA, 120 bp, Artificial Sequence
  ENSG00000185418_24 (sequence is synthesized)
tctcaggtatttttatgacttctactaaaattcacactgaaactttatcttctaaactggaatcattacttaattttaactaaccaacaaccacaaaagcagcagctactgctaaatatt

SEQ ID NO: 669425 - DNA, 120 bp, Artificial Sequence
  ENSG00000185418_25 (sequence is synthesized)
ggattactgacaaaggaattcagttttgtggaatctggtgtttgcactataggttaagagttgccatttaaatgtttcttattcataattaggttttgttccgctttagaaaaaaataaa

SEQ ID NO: 669426 - DNA, 120 bp, Artificial Sequence
  ENSG00000185418_26 (sequence is synthesized)
ttcccaaatgaattgcatcagtgtttccagcgtttcagctgtgggcttctaccaccactaagccgctcacctagagttgttacttttttgatgggatgacattccatggatttatgtact

SEQ ID NO: 669427 - DNA, 120 bp, Artificial Sequence
  ENSG00000185418_27 (sequence is synthesized)
gaaatggatttcagattttaaagagaggaatgctctacgtgctcagaactgaattaaaatggcattatgtcaatagagaattcagctaccaaacaagaagtattgtttattttgcgatat

SEQ ID NO: 669428 - DNA, 120 bp, Artificial Sequence
  ENSG00000185418_28 (sequence is synthesized)
gctgtgaaattcaaaagaaatgtaagaaataatctcttttcaatatactgatcatttagttaacttcctgagggatgtgaacagtgaaacagttggcaaacaaaacaatatatatcaggc

SEQ ID NO: 669429 - DNA, 120 bp, Artificial Sequence
  ENSG00000185418_29 (sequence is synthesized)
ccttctgtgtggcaagaagcatggctgtagattcctgcatcatctcacaatatgggtcactagagagaacaaactttttacccacattccagaaagttctggctggctcgcatgggtctg

SEQ ID NO: 669430 - DNA, 81 bp, Artificial Sequence
  ENSG00000185418_30 (sequence is synthesized)
tccacgatttgagtcctggaagctgttttttccttcccagaggagccttcatttataatacgcttacagatttcatacgaa

SEQ ID NO: 669431 - DNA, 81 bp, Artificial Sequence
  ENSG00000185418_31 (sequence is synthesized)
gctgggattataggcatgagccaccaccgcgcccggccttttatttttttattttatttttttcctaagatggagttttgc

SEQ ID NO: 669432 - DNA, 120 bp, Artificial Sequence
  ENSG00000185418_32 (sequence is synthesized)
gttgtaaactacattatataagaggccacatattgaagtcacgaatgttgagttttttgggggtttctaagatttaaaatttgattattgatgtttaataaatatttgtggcatgaatgt

SEQ ID NO: 669433 - DNA, 120 bp, Artificial Sequence
  ENSG00000185418_33 (sequence is synthesized)
tttttgcctgattggtacagtggagttagtaggactccgaaaagtctaatctctccgttttggaggagcaagggtcagaactattagagagaaagtcaaaccttcaggatcagtcctaca

SEQ ID NO: 669434 - DNA, 120 bp, Artificial Sequence
  ENSG00000185418_34 (sequence is synthesized)
acaaaattgcttagggccatcagaatgcaagtgaaactactcatttaaggaggacgtggaggagaaacaaatcagcccagccagccatcataggtgttgtgtggcaaatggcgagtaggc

SEQ ID NO: 669435 - DNA, 120 bp, Artificial Sequence
  ENSG00000185420_0 (sequence is synthesized)
agcccgtgagacgcccgctgctggacgcgggtagccgtctgaggtgccggagctgcgggaggatggagccgctgaaggtggaaaagttcgcaaccgccaagaggggaaacgggctgcgcg

SEQ ID NO: 669436 - DNA, 120 bp, Artificial Sequence
  ENSG00000185420_1 (sequence is synthesized)
ccgtgaccccgctgcgccccggagagctactcttccgctcggatcccttggcgtacacggtgtgcaaggggagtcgtggcgtcgtctgcgaccgctgccttctcgggaaggaaaagctga

SEQ ID NO: 669437 - DNA, 120 bp, Artificial Sequence
  ENSG00000185420_2 (sequence is synthesized)
tgcgatgctctcagtgccgcgtcgccaaatactgtagtgctaagtgtcagaaaaaagcttggccagaccacaagcgggaatgcaaatgccttaaaagctgcaaacccagatatcctccag

SEQ ID NO: 669438 - DNA, 120 bp, Artificial Sequence
  ENSG00000185420_3 (sequence is synthesized)
actccgttcgacttcttggcagagttgtcttcaaacttatggatggagcaccttcagaatcagagaagctttactcattttatgatctggagtcaaatattaacaaactgactgaagata

SEQ ID NO: 669439 - DNA, 120 bp, Artificial Sequence
  ENSG00000185420_4 (sequence is synthesized)
agaaagagggcctcaggcaactcgtaatgacatttcaacatttcatgagagaagaaatacaggatgcctctcagctgccacctgcctttgacctttttgaagcctttgcaaaagtgatct

SEQ ID NO: 669440 - DNA, 120 bp, Artificial Sequence
  ENSG00000185420_5 (sequence is synthesized)
gcaactctttcaccatctgtaatgcggagatgcaggaagttggtgttggcctatatcccagtatctctttgctcaatcacagctgtgaccccaactgttcgattgtgttcaatgggcccc

SEQ ID NO: 669441 - DNA, 120 bp, Artificial Sequence
  ENSG00000185420_6 (sequence is synthesized)
ttactgcgagcagtccgagacatcgaggtgggagaggagctcaccatctgctacctggatatgctgatgaccagtgaggagcgccggaagcagctgagggaccagtactgctttgaatgt

SEQ ID NO: 669442 - DNA, 120 bp, Artificial Sequence
  ENSG00000185420_7 (sequence is synthesized)
gactgtttccgttgccaaacccaggacaaggatgctgatatgctaactggtgatgagcaagtatggaaggaagttcaagaatccctgaaaaaaattgaagaactgaaggcacactggaag

SEQ ID NO: 669443 - DNA, 120 bp, Artificial Sequence
  ENSG00000185420_8 (sequence is synthesized)
tgggagcaggttctggccatgtgccaggcaatcataagcagcaattctgaacggcttcccgatatcaacatctaccagctgaaggtgctcgactgcgccatggatgcctgcatcaacctc

SEQ ID NO: 669444 - DNA, 120 bp, Artificial Sequence
  ENSG00000185420_9 (sequence is synthesized)
ggcctgttggaggaagccttgttctatggtactcggaccatggagccatacaggatttttttcccaggaagccatcccgtcagaggggttcaagtgatgaaagttggcaaactgcagcta

SEQ ID NO: 669445 - DNA, 120 bp, Artificial Sequence
  ENSG00000185420_10 (sequence is synthesized)
catcaaggcatgtttccccaagcaatgaagaatctgagactggcttttgatattatgagagtgacacatggcagagaacacagcctgattgaagatttgattctacttttagaagaatgc

SEQ ID NO: 669446 - DNA, 120 bp, Artificial Sequence
  ENSG00000185420_11 (sequence is synthesized)
gacgccaacatcagagcatcctaagggaacgcagtcagagggaaatacggcgtgtgtctttgttgaatgccttattgaggtcacacactctatgctttgttagctgtgtgaacctctcct

SEQ ID NO: 669447 - DNA, 120 bp, Artificial Sequence
  ENSG00000185420_12 (sequence is synthesized)
attggaaattctgttccgtgtttgtgtaggtaaataaaggcagacatggtttgcaaaccacaagaatcattagttgtagagaagcacgattataataaattcaaaacatttggttgagga

SEQ ID NO: 669448 - DNA, 120 bp, Artificial Sequence
  ENSG00000185420_13 (sequence is synthesized)
tttatctacatgtgacagttttctatcattgggttttttaaaaaatctgtgtattcaactagaacttgagctccacggaggcaggaacttttgttttgtttttcttcactgctcttttcc

SEQ ID NO: 669449 - DNA, 120 bp, Artificial Sequence
  ENSG00000185420_14 (sequence is synthesized)
tcgcacctgtctgaagcagtgattttagccagaatctagatttcctgattctggtccagtgctctttccatggttctgtgtgacctcatacatcaaccttatttcacaaacgaggttttt

SEQ ID NO: 669450 - DNA, 120 bp, Artificial Sequence
  ENSG00000185420_15 (sequence is synthesized)
aagttccttgagcacagtcgattgtgttttttactgcttctgctccgtccctgcataagacaggactgtgtcatgtacccagtgatggactcctggtaaataccatggcttgactaaatg

SEQ ID NO: 669451 - DNA, 120 bp, Artificial Sequence
  ENSG00000185420_16 (sequence is synthesized)
acctccagtgctccctgtggtcttcaccaacacgcatcagacgacaggctcagtcacgggatacttcgctttctgtaggagtaagagacaagttgctatcactgaacagatacacagtgg

SEQ ID NO: 669452 - DNA, 120 bp, Artificial Sequence
  ENSG00000185420_17 (sequence is synthesized)
catttggaaactgcatgcagtttgaaaaaatcgtgatacagcaggagtctagttttcaataaatagcttattcatattctggattttgaacagttcatgtaactgtaactttggggtagt

SEQ ID NO: 669453 - DNA, 120 bp, Artificial Sequence
  ENSG00000185420_18 (sequence is synthesized)
ggataatgagactgaaattaatggttcctctgctggtttccgtctgttttttttttttttctcccaggaggttggtatttctgcacttaaccacctgatgtttttagggggagtatatcc

SEQ ID NO: 669454 - DNA, 120 bp, Artificial Sequence
  ENSG00000185420_19 (sequence is synthesized)
cagataaattctgttgtaagtcaaagagcatccatgattggcttggctctttcttaagcaactactaagatgctcctacatttgggtttgaacgttttttattctcttggctatgaagtt

SEQ ID NO: 669455 - DNA, 120 bp, Artificial Sequence
  ENSG00000185420_20 (sequence is synthesized)
ctgaaaaatgaaaaaatagaaaataatgttatctatttgtataacctagtaatgaacatagggtcatttgtaattttttgcatttacaaacagtgttcctatggaaattctcttcataag

SEQ ID NO: 669456 - DNA, 120 bp, Artificial Sequence
  ENSG00000185420_21 (sequence is synthesized)
cgcctcctagaagacacatcaagaggtctgtcagctataaactatagcaacatgcatcaacataaatgaatcttaggatataatgttgagccaaaaaaaaaaaaaacccaaaacaaattg

SEQ ID NO: 669457 - DNA, 120 bp, Artificial Sequence
  ENSG00000185420_22 (sequence is synthesized)
caaaatcatcaatgcagtatgattccatctagttacatcctaaaaaatgtttttagttaattgaaagattttggtctagttggagttgatatattaatgtgcagtgaagtttcccaatgt

SEQ ID NO: 669458 - DNA, 120 bp, Artificial Sequence
  ENSG00000185420_23 (sequence is synthesized)
cagtttctgaagcctgtgtagtaataattagcagtggcacactggcaccacttggcacataattagagtcataagtaactgagatttttttcccaggaagccatcccgtcagaggggttc

SEQ ID NO: 669459 - DNA, 120 bp, Artificial Sequence
  ENSG00000185420_24 (sequence is synthesized)
tgccagcaaagaggcctgaacaagtaggtaatgagactgtctacacagaggttctgcgagcccacagctgcccactggcaagacccgtttaggattaatatttcagatcatctattctgc

SEQ ID NO: 669460 - DNA, 120 bp, Artificial Sequence
  ENSG00000185420_25 (sequence is synthesized)
ggcggaggccgtccctgaggaagtaggagaagaccactagggctgtgtctaagtcacagcgaaaagttgttccgtgagacctcttgcataatgactctaaggggcttcagagacattctc

SEQ ID NO: 669461 - DNA, 120 bp, Artificial Sequence
  ENSG00000185420_26 (sequence is synthesized)
ctgcgaggtaactgtgcctgtgatgtggggagagtgtgagactgggaagcagaagaccggaatgtgatacagcctttcccacgacttggctgaggaactgctgttgtgaaccttttgccc

SEQ ID NO: 669462 - DNA, 90 bp, Artificial Sequence
  ENSG00000185420_27 (sequence is synthesized)
atgaggctggccctttcatttatttagagatcttatttagtttatcccaaatgtgcttgtctgttttgattgtgatttaatgtatgcaac

SEQ ID NO: 669463 - DNA, 120 bp, Artificial Sequence
  ENSG00000185420_28 (sequence is synthesized)
atgtgcttgtctgttttgattgtgatttaatgtatgcaacacctattctaggacaggcaaagtacaaagtgccttacacttaatctcccataattacttcctgaacatggattgttctca

SEQ ID NO: 669464 - DNA, 120 bp, Artificial Sequence
  ENSG00000185420_29 (sequence is synthesized)
ctgtgttcagatgtcataactgcacctgagcgttacagagccaacaaatgttggaactgggattcaaaggagatctggtcactccaaaggccatgctcttagtctctagtagtcaagata

SEQ ID NO: 669465 - DNA, 120 bp, Artificial Sequence
  ENSG00000185420_30 (sequence is synthesized)
acacatttgagaattctgtagataaatatttaaagacatttttagcaattgttgcatgcttgtttctcacctcctgtctccctcaaccaaaaataaacacataaattgtatgagtggata

SEQ ID NO: 669466 - DNA, 120 bp, Artificial Sequence
  ENSG00000185420_31 (sequence is synthesized)
agaggagaaagaatgtgaatgctcattgctggtcatttttttttcctgtgctatgccatcttaattgttcatagctcttctcttttaagaaagcttatgtgagagccacaattgtatcag

SEQ ID NO: 669467 - DNA, 120 bp, Artificial Sequence
  ENSG00000185420_32 (sequence is synthesized)
agaacattattacataattatacagccttccctttcccttaaatggtcctttaaggctttacatctgcaatagagatagcttagtgaatattcttccaaataagtttttttagtttcatt

SEQ ID NO: 669468 - DNA, 120 bp, Artificial Sequence
  ENSG00000185420_33 (sequence is synthesized)
gtgtgtttgcatttgttttaatgttgatcacaatttaataacaagtaaaactttacttttgacaattttgccacttattttgtaatttgtaagcacacgtttgaagatatatttatgcca

SEQ ID NO: 669469 - DNA, 120 bp, Artificial Sequence
  ENSG00000185420_34 (sequence is synthesized)
ttaatattttaaggcatgttttaaaatttactgttttctgaaaaattaaatgtaattggtttgattgctggagatttattccagtttttctcaaatgtatttttattctgtatggtacat

SEQ ID NO: 669470 - DNA, 120 bp, Artificial Sequence
  ENSG00000185420_35 (sequence is synthesized)
ttttatgattttctgattaatgtcatcttagcattatattctggttatctataatttaaaattgatttcaaaatttactgatttcttacagtgcatctgaaaactttctcatctatttca

SEQ ID NO: 669471 - DNA, 120 bp, Artificial Sequence
  ENSG00000185420_36 (sequence is synthesized)
tatgcttctgaaaattataacctgtagtagtatcgtgtgccgtgcccaaggctgttttcatgttcaacactataaacacgaacacctactgaaagataaaaatataccttatgatgatta

SEQ ID NO: 669472 - DNA, 120 bp, Artificial Sequence
  ENSG00000185420_37 (sequence is synthesized)
agaggcggcccacgctgtccacatgcagaggctcgctacagaagctacagaagaagatggttacatttcaagtgggcaggtgccgtttgcttatgagcaccatcagccacatcagccacg

SEQ ID NO: 669473 - DNA, 120 bp, Artificial Sequence
  ENSG00000185420_38 (sequence is synthesized)
ggtcctgcctcttccccgccatcttctgtcagacaaaaggacttagtttttctatcagtgtctcacatggaaggttcaagaggaggctcatcagtgtgaaaatccaaatcttaagggact

SEQ ID NO: 669474 - DNA, 120 bp, Artificial Sequence
  ENSG00000185420_39 (sequence is synthesized)
gtggatttgagagatacctcccctccttctgctcagctgccttgcagtaattaaactctttctctgctgcaacacccctactgttctccgtgtattggcttttctgggcagcaggaagga

SEQ ID NO: 669475 - DNA, 120 bp, Artificial Sequence
  ENSG00000185420_40 (sequence is synthesized)
tggaggaagccttgttctatggtactcggaccatggagccatacagttgaagaagaccaggaaagaatcttcttttaaaaaactgagctctatctgtcctgattcctggtgctgcttcag

SEQ ID NO: 669476 - DNA, 120 bp, Artificial Sequence
  ENSG00000185420_41 (sequence is synthesized)
tcgagaatcttgacaggaaattcaagacccttaatgccttatattacttccttatcatagtgagtagagcatgagagaatgtattgtgtgcattgagaagggtatgaatttttctgtttg

SEQ ID NO: 669477 - DNA, 120 bp, Artificial Sequence
  ENSG00000185420_42 (sequence is synthesized)
attaatattcttgttattgcctgagtatgttcattgtgaattctcaaagtgtacccttggaagaaagagtatgctttcttttctcagaagaaaatagcatatcccattattttttgtgaa

SEQ ID NO: 669478 - DNA, 120 bp, Artificial Sequence
  ENSG00000185420_43 (sequence is synthesized)
tggacttgtttgccgttgcattgcattcattgagttttatggtggttgtttaagcatagagcctgtctttgaaatgaaaaatttattgaaatccatttcttttcttttcttttttgtttt

SEQ ID NO: 669479 - DNA, 120 bp, Artificial Sequence
  ENSG00000185432_0 (sequence is synthesized)
atctgtttttttcccttctgagcaatggagcttaccatctttatcctgagactggccatttacatcctgacatttcccttgtacctgctgaactttctgggcttgtggagctggatatgc

SEQ ID NO: 669480 - DNA, 120 bp, Artificial Sequence
  ENSG00000185432_1 (sequence is synthesized)
aaaaaatggttcccctacttcttggtgaggttcactgtgatatacaacgaacagatggcaagcaagaagcgggagctcttcagtaacctgcaggagtttgcgggcccctccgggaaactc

SEQ ID NO: 669481 - DNA, 120 bp, Artificial Sequence
  ENSG00000185432_2 (sequence is synthesized)
tccctgctggaagtgggctgtggcacgggggccaacttcaagttctacccacctgggtgcagggtgacctgtattgaccccaaccccaactttgagaagtttttgatcaagagcattgca

SEQ ID NO: 669482 - DNA, 120 bp, Artificial Sequence
  ENSG00000185432_3 (sequence is synthesized)
gagaaccgacacctgcagtttgagcgctttgtggtagctgccggggagaacatgcaccaggtggctgatggctctgtggatgtggtggtctgcaccctggtgctgtgctctgtgaagaac

SEQ ID NO: 669483 - DNA, 120 bp, Artificial Sequence
  ENSG00000185432_4 (sequence is synthesized)
caggagcggattctccgcgaggtgtgcagagtgctgagaccgggaggggctttctatttcatggagcatgtggcagctgagtgttcgacttggaattacttctggcaacaagtcctggat

SEQ ID NO: 669484 - DNA, 120 bp, Artificial Sequence
  ENSG00000185432_5 (sequence is synthesized)
cctgcctggcaccttctgtttgatgggtgcaacctgaccagagagagctggaaggccctggagcgggccagcttctctaagctgaagctgcagcacatccaggccccactgtcctgggag

SEQ ID NO: 669485 - DNA, 120 bp, Artificial Sequence
  ENSG00000185432_6 (sequence is synthesized)
ttggtgcgccctcatatctatggatatgctgtgaaatagtgtgagctggcagttaagagctgaatggctcaaagaatttaaagcttcagttttacatttaaaatgctaagtgggagaaga

SEQ ID NO: 669486 - DNA, 120 bp, Artificial Sequence
  ENSG00000185432_7 (sequence is synthesized)
tacatttaaaatgctaagtgggagaagagaaaccttttttttggggggcggtttttttggtttgttgttggttttttttttttttttggcgggaagaaagagttttgctcttgttgccca

SEQ ID NO: 669487 - DNA, 64 bp, Artificial Sequence
  ENSG00000185432_8 (sequence is synthesized)
aaccgcacccagcttaaggtttttttgttttgttttgagacggagttttcgctcttgttgccca

SEQ ID NO: 669488 - DNA, 74 bp, Artificial Sequence
  ENSG00000185432_9 (sequence is synthesized)
acaggcgtgagcaaccgcacccagcttaaggtttttttgttttgtttttgatctcagcttaccacaacctccac

SEQ ID NO: 669489 - DNA, 120 bp, Artificial Sequence
  ENSG00000185432_10 (sequence is synthesized)
ttctattgtctcccaaagaattcacatcaaaaaaacagctttgaactcccccttcaaaggaaacagtcgactttcataattagcatctaccattatccccaaatcttattttattcattg

SEQ ID NO: 669490 - DNA, 120 bp, Artificial Sequence
  ENSG00000185432_11 (sequence is synthesized)
acttgaaattttttccaattgcttttttttttttttttttaaggttaagagcagaggtttactaggccaaagaaagagaatagctctctgttgcagagaggggtcctggagaaatgggtt

SEQ ID NO: 669491 - DNA, 120 bp, Artificial Sequence
  ENSG00000185432_12 (sequence is synthesized)
accccagttgtcttatttaaatggttacccatcagattttaattttatcttctctttgagagcttggtaataagaagcacttaaatcactccaaagaagactttaaaaagggagcagtga

SEQ ID NO: 669492 - DNA, 120 bp, Artificial Sequence
  ENSG00000185432_13 (sequence is synthesized)
aaaggtcttaataatttattgattgaattaagaaatactagctaattaagaatctgagtctaaacagcacagattttttctttctgcttttaaattgtgttttaaaaaaagagacagggg

SEQ ID NO: 669493 - DNA, 60 bp, Artificial Sequence
  ENSG00000185432_14 (sequence is synthesized)
cagggagacagggtctcactgtgttgcctaggccggtcttgaactcctgggctcaagtga

SEQ ID NO: 669494 - DNA, 120 bp, Artificial Sequence
  ENSG00000185432_15 (sequence is synthesized)
tcctgggctcaagtgattctcccaccttgacctcctaaattgttgggattacaggtgtgagacagtgcacctggccgaaatagctcaagtttctgaaaaacaaatctgaatctatttgtt

SEQ ID NO: 669495 - DNA, 120 bp, Artificial Sequence
  ENSG00000185432_16 (sequence is synthesized)
attcttagcgtcactggtctggctttcagaattaacatacaaggttgccacacctagttctgcccagctttatgtcttttattccagtattccaccaaagtttgttttcctgcattccag

SEQ ID NO: 669496 - DNA, 120 bp, Artificial Sequence
  ENSG00000185432_17 (sequence is synthesized)
ttctcaagtcttaagataaagattgtacttgacagtttagtatatccataaaactatttgaggtggttaaggttcttgggttcattttccttaatactttgctgaatattgtagattgta

SEQ ID NO: 669497 - DNA, 120 bp, Artificial Sequence
  ENSG00000185432_18 (sequence is synthesized)
ggcaatgaaaaagtctactaaattaggaaaaccttgaataattaggtatcctaggtaagagcccctaaacatcaagcaatctgtgagtctgtaaagaaataaatattttttggattattc

SEQ ID NO: 669498 - DNA, 120 bp, Artificial Sequence
  ENSG00000185432_19 (sequence is synthesized)
ttatctaattccacccctgttggaagatgatttctttgttctttgcaactatggaagctgtgaaaatcatcacaagtgcctctgaaagcgagtgttaggttggttagagggtttaatatt

SEQ ID NO: 669499 - DNA, 120 bp, Artificial Sequence
  ENSG00000185432_20 (sequence is synthesized)
ttctgcaatggtttgtaggaattttaataaatgtagtatattttctgagatgattttgtaaaagtactattttaaatatcaaatcaaccaataaattcacatttgtgttaggaacagaaa

SEQ ID NO: 669500 - DNA, 120 bp, Artificial Sequence
  ENSG00000185432_21 (sequence is synthesized)
taaagagatagagtctcactatgttgcccagacaggatttgaattcctgggctcaaggtatgcttctgtcttagctcctcagtagctgagaccatgggcacccaccactgtgcccagatt

SEQ ID NO: 669501 - DNA, 120 bp, Artificial Sequence
  ENSG00000185432_22 (sequence is synthesized)
cgggctttcttgtaaaaagcggatggatgcttgaaactattttctgaatccctttggctcccaaatgtgaatattctgggaaatatttttatccaaattagctgagtaatcgagtagtta

SEQ ID NO: 669502 - DNA, 120 bp, Artificial Sequence
  ENSG00000185432_23 (sequence is synthesized)
ggcacattttgaagactgaggcttgtcctttaaaagaagggcagcccacaaactgacttccttgagccaaaaattgttttaaaaggggaagtacagcccaaaacagtgattttaaaatat

SEQ ID NO: 669503 - DNA, 78 bp, Artificial Sequence
  ENSG00000185432_24 (sequence is synthesized)
ttattctgagccaaatatgagtgaccatgtcctgtgacacagccctcgggaaatccctacattttagggagacatgag

SEQ ID NO: 669504 - DNA, 87 bp, Artificial Sequence
  ENSG00000185432_25 (sequence is synthesized)
gccagtccagaaaggcaggacaacccgacgcgaggcagggagcttccaggttatagaggtcactggagagcccggtggggtgtaagt

SEQ ID NO: 669505 - DNA, 120 bp, Artificial Sequence
  ENSG00000185432_26 (sequence is synthesized)
aggttatagaggtcactggagagcccggtggggtgtaagtacactgcgcttataaaactctagcaggaagctagcagctgtctccaaacccagagaaggggaaacaggaatcgattagga

SEQ ID NO: 669506 - DNA, 120 bp, Artificial Sequence
  ENSG00000185432_27 (sequence is synthesized)
ataaaggattataatccactttccttctgaggaaaagctgggaaccttctcattttgccttatgaaaactaagctgaatcgactgctgccaaacatctattaggcaaaattggcctcttg

SEQ ID NO: 669507 - DNA, 120 bp, Artificial Sequence
  ENSG00000185436_0 (sequence is synthesized)
ggacgccgcggcaggaaggccatggcggggcccgagcgctggggccccctgctcctgtgcctgctgcaggccgctccagggaggccccgtctggcccctccccagaatgtgacgctgctc

SEQ ID NO: 669508 - DNA, 120 bp, Artificial Sequence
  ENSG00000185436_1 (sequence is synthesized)
cccagaatgtgacgctgctctcccagaacttcagcgtgtacctgacatggctcccagggcttggcaacccccaggatgtgacctattttgtggcctatcagagctctcccacccgtagac

SEQ ID NO: 669509 - DNA, 120 bp, Artificial Sequence
  ENSG00000185436_2 (sequence is synthesized)
ggtggcgcgaagtggaagagtgtgcgggaaccaaggagctgctatgttctatgatgtgcctgaagaaacaggacctgtacaacaagttcaagggacgcgtgcggacggtttctcccagct

SEQ ID NO: 669510 - DNA, 120 bp, Artificial Sequence
  ENSG00000185436_3 (sequence is synthesized)
ccaagtccccctgggtggagtccgaatacctggattacctttttgaagtggagccggccccacctgtcctggtgctcacccagacggaggagatcctgagtgccaatgccacgtaccagc

SEQ ID NO: 669511 - DNA, 120 bp, Artificial Sequence
  ENSG00000185436_4 (sequence is synthesized)
tgcccccctgcatgcccccactggatctgaagtatgaggtggcattctggaaggagggggccggaaacaagaccctatttccagtcactccccatggccagccagtccagatcactctcc

SEQ ID NO: 669512 - DNA, 120 bp, Artificial Sequence
  ENSG00000185436_5 (sequence is synthesized)
agccagctgccagcgaacaccactgcctcagtgccagaaccatctacacgttcagtgtcccgaaatacagcaagttctctaagcccacctgcttcttgctggaggtcccagaagccaact

SEQ ID NO: 669513 - DNA, 120 bp, Artificial Sequence
  ENSG00000185436_6 (sequence is synthesized)
gggctttcctggtgctgccatcgcttctgatactgctgttagtaattgccgcagggggtgtgatctggaagaccctcatggggaacccctggtttcagcgggcaaagatgccacgggccc

SEQ ID NO: 669514 - DNA, 120 bp, Artificial Sequence
  ENSG00000185436_7 (sequence is synthesized)
tggacttttctggacacacacaccctgtggcaacctttcagcccagcagaccagagtccgtgaatgacttgttcctctgtccccaaaaggaactgaccagaggggtcaggccgacgcctc

SEQ ID NO: 669515 - DNA, 120 bp, Artificial Sequence
  ENSG00000185436_8 (sequence is synthesized)
gagtcagggccccagccacccaacagacaagatggaagaaggaccttgcagaggacgaagaggaggaggatgaggaggacacagaagatggcgtcagcttccagccctacattgaaccac

SEQ ID NO: 669516 - DNA, 120 bp, Artificial Sequence
  ENSG00000185436_9 (sequence is synthesized)
cttctttcctggggcaagagcaccaggctccagggcactcggaggctggtggggtggactcagggaggcccagggctcctctggtcccaagcgaaggctcctctgcttgggattcttcag

SEQ ID NO: 669517 - DNA, 120 bp, Artificial Sequence
  ENSG00000185436_10 (sequence is synthesized)
acagaagctgggccagcactgtggactcctcctgggacagggctgggtcctctggctatttggctgagaaggggccaggccaagggccgggtggggatgggcaccaagaatctctcccac

SEQ ID NO: 669518 - DNA, 120 bp, Artificial Sequence
  ENSG00000185436_11 (sequence is synthesized)
cacctgaattctccaaggactcgggtttcctggaagagctcccagaagataacctctcctcctgggccacctggggcaccttaccaccggagccgaatctggtccctgggggacccccag

SEQ ID NO: 669519 - DNA, 120 bp, Artificial Sequence
  ENSG00000185436_12 (sequence is synthesized)
tttctcttcagacactgaccttctgctgggaaagcagccctgaggaggaagaggaggcgagggaatcagaaattgaggacagcgatgcgggcagctggggggctgagagcacccagagga

SEQ ID NO: 669520 - DNA, 120 bp, Artificial Sequence
  ENSG00000185436_13 (sequence is synthesized)
ccgaggacaggggccggacattggggcattacatggccaggtgagctgtcccccgacatcccaccgaatctgatgctgctgctgcctttgcaaggactactgggcttcccaagaaactca

SEQ ID NO: 669521 - DNA, 120 bp, Artificial Sequence
  ENSG00000185436_14 (sequence is synthesized)
agagcctccgtacctcccctgggcggcggaggggcattgcacttccgggaagtccacctagcggctgtttgcctgtcgggctgagcaacaagatgcccctccctcctgtgacccgccctc

SEQ ID NO: 669522 - DNA, 120 bp, Artificial Sequence
  ENSG00000185436_15 (sequence is synthesized)
tttaggctgagctataagaggggtggacacagggtgggctgaggtcagaggttggtggggtgtcatcacccccattgtccctagggtgacaggccagggggaaaaattatccccggacaa

SEQ ID NO: 669523 - DNA, 120 bp, Artificial Sequence
  ENSG00000185436_16 (sequence is synthesized)
catgaaacaggtgaggtcaggtcactgcggacatcaagggcggacaccaccaaggggccctctggaacttgagaccactggaggcacacctgctatacctcatgcctttcccagcagcca

SEQ ID NO: 669524 - DNA, 120 bp, Artificial Sequence
  ENSG00000185436_17 (sequence is synthesized)
ctgaactcccccatcccagggctcagcctcctgattcatgggtcccctagttaggcccagataaaaatccagttggctgagggttttggatgggaagggaagggtggctgtcctcaaatc

SEQ ID NO: 669525 - DNA, 120 bp, Artificial Sequence
  ENSG00000185436_18 (sequence is synthesized)
ctggtctttggagtcatggcactgtacggttttagtgtcagacagaccggggttcaaatcccagctctgctgttcactggttgtatgatcttggggaagacatcttccttctctgcctcg

SEQ ID NO: 669526 - DNA, 120 bp, Artificial Sequence
  ENSG00000185436_19 (sequence is synthesized)
tcatctgcagctacgcctgggtgtggtgagggttctaggggatctcagatgtgtgtagcacggagcctgctgtgtcctgggtgctctctacgtggtggccggtagaattctccatctatc

SEQ ID NO: 669527 - DNA, 120 bp, Artificial Sequence
  ENSG00000185436_20 (sequence is synthesized)
caggctccaggagacccctgggcatctcccacctgtggcccctaaacccagagtgactgagagcacttaacattcagcttgtctcatccccagtctacctccttccttctaccctcactg

SEQ ID NO: 669528 - DNA, 120 bp, Artificial Sequence
  ENSG00000185436_21 (sequence is synthesized)
cctcccagtcaggagagtgagctctcagaagccagagccccacccaaggggaccctggtctctccgccttcacctagcaatgggaaccctgcttcccaggggaggaaccaactgctccac

SEQ ID NO: 669529 - DNA, 120 bp, Artificial Sequence
  ENSG00000185436_22 (sequence is synthesized)
cttctagggacccagtttgttggagtaggacagtaacatggcaggaatcggacttctgggcctgtaatcccagtttggatggcacgttagactcttggttgaccgttgtggtccttagaa

SEQ ID NO: 669530 - DNA, 120 bp, Artificial Sequence
  ENSG00000185436_23 (sequence is synthesized)
gtcccattctcccttccagttatgagaaaccaatgccttctagattcaggtgactatccttacctgggggtgctgatgcatcctcagttaacctacacccacctgaatatagatgagcgt

SEQ ID NO: 669531 - DNA, 120 bp, Artificial Sequence
  ENSG00000185436_24 (sequence is synthesized)
agctgagttttcacccgtaggaccgaagtgttttgtggtggagtatctgaacaaccttggctctgtggccattcaacctgccaggactaacatttctggatttgtgaagaagggatcttc

SEQ ID NO: 669532 - DNA, 120 bp, Artificial Sequence
  ENSG00000185436_25 (sequence is synthesized)
aaagccattgaacccacagagctgtgttgctttaaagccaccacaagggtacagcattaaatggcagaactggaaaagcttcttagggcatctcatccagggattctcaaaccatgtccc

SEQ ID NO: 669533 - DNA, 120 bp, Artificial Sequence
  ENSG00000185436_26 (sequence is synthesized)
ccagaggccttgggctgcagttgcagggggcgccatggggctataggagcctcccactttcaccagagcagcctcactgtgccctgattcacacactgtggctttccacgtgaggttttg

SEQ ID NO: 669534 - DNA, 120 bp, Artificial Sequence
  ENSG00000185436_27 (sequence is synthesized)
tttagagggatccactactcaagaaaaagttagcaaaccactccttttgttgcaaaggagctgaggtcaagggtggcaaaggcacttgtccaaggtcgcccagcagtgctgctctgatga

SEQ ID NO: 669535 - DNA, 120 bp, Artificial Sequence
  ENSG00000185436_28 (sequence is synthesized)
cttgtgcacatccccaagggtaagagcttcgatctctgcacagccgggccaacctctgaccccttgtccatgtcagtaaaatatgaaggtcacagccaggatttctaagggtcaggaggc

SEQ ID NO: 669536 - DNA, 120 bp, Artificial Sequence
  ENSG00000185436_29 (sequence is synthesized)
cttcaccgctgctggggcacacacacacacatgcatacacacatacgacacacacctgtgtctccccaggggttttccctgcagtgaggcttgtccagatgattgagcccaggagaggaa

SEQ ID NO: 669537 - DNA, 120 bp, Artificial Sequence
  ENSG00000185436_30 (sequence is synthesized)
gaacaaacaaactacggagctggggagggctgtggcttggggccagctcccagggaaattcccagacctgtaccgatgttctctctggcaccagccgagctgcttcgtggaggtaacttc

SEQ ID NO: 669538 - DNA, 120 bp, Artificial Sequence
  ENSG00000185436_31 (sequence is synthesized)
aaaaaagtaaaagctatcatcagcatcatcttagacttgtatgaaataaccactccgtttctattcttaaaccttaccatttttgttttgttttgtttttttgagtcggagttttgttct

SEQ ID NO: 669539 - DNA, 120 bp, Artificial Sequence
  ENSG00000185436_32 (sequence is synthesized)
ggcgtgagccaccgcgcccagccaaaccttactatttttttaaagaattttttccagagtttaatttctgacatagcttaagttttccagtaactctaaactccatctcctttatcgtca

SEQ ID NO: 669540 - DNA, 120 bp, Artificial Sequence
  ENSG00000185436_33 (sequence is synthesized)
gtcattaagtcattcacaaaaagccaggagaagcatttggaaagggcatgataatcagtataataatttgccttgtgtggtcagcacttaactgtttacaaagccctttcacgtgcacag

SEQ ID NO: 669541 - DNA, 120 bp, Artificial Sequence
  ENSG00000185436_34 (sequence is synthesized)
caggtgggaactgcgcggtgtgggctgggcctgcgctggaagcatatcccgtgaaaagtgttagtgccttaggtgaaagcaacatgtatccctttagactactaacggtatatgttgttc

SEQ ID NO: 669542 - DNA, 120 bp, Artificial Sequence
  ENSG00000185436_35 (sequence is synthesized)
ttatgtatttgtatttatttctattttttctatgtttatgtcatatttaaacgatatcctactgcttgttggtattaccctaaactgtttaaataaagagctctatttttaaagaaaaaa

SEQ ID NO: 669543 - DNA, 120 bp, Artificial Sequence
  ENSG00000185436_36 (sequence is synthesized)
tcctcctaaagggccgcataatattgcgcgtcgtggcgtgtgccttactgggaagctactgctgtccaggtgaacaccacagccttcggggtcagaaagacagctttccccagaacaagc

SEQ ID NO: 669544 - DNA, 120 bp, Artificial Sequence
  ENSG00000185436_37 (sequence is synthesized)
ccccttcttactcaggttcttctcaccctcccagcctgctcctgcacccctcctccaggaagtcttccctgtacactcctgacttctggcagtcagccctaataaaatctgatcaaagta

SEQ ID NO: 669545 - DNA, 120 bp, Artificial Sequence
  ENSG00000185437_0 (sequence is synthesized)
gctgcttttatcgaccaatcaaatattttcctgacagatcccaaaatattcctgggccaatggagggaggagcccaagatgcctctgctgctccttggagagacagagcctcttaagttg

SEQ ID NO: 669546 - DNA, 120 bp, Artificial Sequence
  ENSG00000185437_1 (sequence is synthesized)
gagcgggactgccggagcccagtggacccctgggctgctgccagccccgacctggcacttgcttgcctgtgtcactgtcaggatttgtctagcggcgcattccctgacaggggtgtgttg

SEQ ID NO: 669547 - DNA, 120 bp, Artificial Sequence
  ENSG00000185437_2 (sequence is synthesized)
gggggagtcctctttccaactgtcgaaatggttatcaaagtgtttgttgctacatcttctgggtccatagcgattaggaagaaacagcaagaagtagtgggttttttggaagcgaataaa

SEQ ID NO: 669548 - DNA, 120 bp, Artificial Sequence
  ENSG00000185437_3 (sequence is synthesized)
atcgactttaaggaattagatattgctggagatgaagacaacaggaggtggatgagagagaatgttcctggagagaaaaaacctcaaaatgggattcctttgcctccccagatcttcaat

SEQ ID NO: 669549 - DNA, 120 bp, Artificial Sequence
  ENSG00000185437_4 (sequence is synthesized)
gaggagcagtactgtggggattttgactctttcttctctgcaaaagaagagaatattatttattccttccttggtttggctcctcctccagactcaaagggatcagagaaggctgaagaa

SEQ ID NO: 669550 - DNA, 120 bp, Artificial Sequence
  ENSG00000185437_5 (sequence is synthesized)
cctgaagcccaggagaagaatgaagaagaaggagagacagccacagaagagacggaagaaatagccatggagggtgcggaaggggaagccgaggaggaggaagaaactgcagaaggagaa

SEQ ID NO: 669551 - DNA, 120 bp, Artificial Sequence
  ENSG00000185437_6 (sequence is synthesized)
gagcctggagaagacgaagattcctaggccttttcatgcttcatttcttccacttctccagaaaatggaagctatgaagcaacatttcaaatgtctctccacaaaccaaactcaacagaa

SEQ ID NO: 669552 - DNA, 120 bp, Artificial Sequence
  ENSG00000185437_7 (sequence is synthesized)
tactttggcttgaagccggcacacccagggttactgaggacttatgctgcctgacctggttagatgtacatggaggtatctcccgaatcatacaaaattaaatgtgaagaccgtttatgc

SEQ ID NO: 669553 - DNA, 120 bp, Artificial Sequence
  ENSG00000185437_8 (sequence is synthesized)
ataccttcatgtgcctgacagtcttggcttttgaagatttttttttcttttttgctctgcatagctagaccatcttattaataatactctgaaaaaaatgatttcaaggcatggaagttc

SEQ ID NO: 669554 - DNA, 120 bp, Artificial Sequence
  ENSG00000185437_9 (sequence is synthesized)
tctgtgatacaacaatagtatttcttcaaatgcgccttatgctacttatctcagaaacaggttttaaaatgaagtgctttccagagaaccatcatataaataaagattaatagaaaaata

SEQ ID NO: 669555 - DNA, 120 bp, Artificial Sequence
  ENSG00000185437_10 (sequence is synthesized)
tgtagacgtctgtaaacgatcctcctgccgtccctgttcggcgcccgggaccctgccttcccgcgtggccgcaccgagacgagggagcctgtcacgcgctctggcgctctcctgacctct

SEQ ID NO: 669556 - DNA, 120 bp, Artificial Sequence
  ENSG00000185437_11 (sequence is synthesized)
caggagccgcggcggggaggggcgtcttgggcctggaggtcagtgtggcctcgcgtttgtcttcggtgacgggaaattaggaagaaacagcaagaagtagtgggttttttggaagcgaat

SEQ ID NO: 669557 - DNA, 120 bp, Artificial Sequence
  ENSG00000185437_12 (sequence is synthesized)
ggatcagagaaggctgaagaaggtggagaaactgaggcacaaaaagagggcagtgaagatgtgggcaacctccctgaagcccaggagaagaataaaatggaagctatgaagcaacatttc

SEQ ID NO: 669558 - DNA, 120 bp, Artificial Sequence
  ENSG00000185442_0 (sequence is synthesized)
aagcaccgcgcagccgcctccgccgcaggatcccccggtgcaggcctccgtgctggtgcggatcctggagctcagccgcgcgcgccctgcccgatcctgtgccgacccaccgcactatgc

SEQ ID NO: 669559 - DNA, 120 bp, Artificial Sequence
  ENSG00000185442_1 (sequence is synthesized)
ctgtgccgacccaccgcactatgcgcgccgtgccgctgcccgccccgctcctgccgctgctgctgctcgcgctcctggccgctcccgccgcccgcgccagcagagccgagtccgtctccg

SEQ ID NO: 669560 - DNA, 120 bp, Artificial Sequence
  ENSG00000185442_2 (sequence is synthesized)
agtcgcggccaccgcccggcccggggcccgggaacaccacccggtttgggtctggggcggcgggcggcagcggcagctccagctccaacagcagtggcgacgccttggtgacccgcattt

SEQ ID NO: 669561 - DNA, 120 bp, Artificial Sequence
  ENSG00000185442_3 (sequence is synthesized)
ccatcctcctccgcgacctacccaccctcaaggcagccgtgatcgtggcgttcgcctttaccaccctcctcatcgcctgcctgctgctgcgcgtcttcaggtcgggaaagaggttaaaga

SEQ ID NO: 669562 - DNA, 120 bp, Artificial Sequence
  ENSG00000185442_4 (sequence is synthesized)
agacacgcaagtatgatatcatcaccactccagcagagcgagtggaaatggcgccactaaatgaagaggatgatgaagatgaggactccacagtattcgacatcaaatacaggtaaaacc

SEQ ID NO: 669563 - DNA, 120 bp, Artificial Sequence
  ENSG00000185442_5 (sequence is synthesized)
tgtttcccagcctggtggcatcctgtggaaagttggtcagctgcaacctggggtgtgaaggactggacctggaagccctcttgcgtcggaggtgttgaaaccaaaacgaacgttatgtat

SEQ ID NO: 669564 - DNA, 120 bp, Artificial Sequence
  ENSG00000185442_6 (sequence is synthesized)
aaaaccccagctccatcgtgcgtgtcaggcatctgctcagactgtcactggcaagctcgtttccacgtcaccacaatggagttgcttctgccaccctttgggcatccctttaaagtgccc

SEQ ID NO: 669565 - DNA, 120 bp, Artificial Sequence
  ENSG00000185442_7 (sequence is synthesized)
cctacttctactccccatgtaagaggctttgtgccttgctaaggagcaaagggtagaaacatgttgattttaaagaagtttttttaagacaattgttgacaatagtaaaagagatcagga

SEQ ID NO: 669566 - DNA, 120 bp, Artificial Sequence
  ENSG00000185442_8 (sequence is synthesized)
ggatcaagaatctaaaacaagcctgaaggatgtccaactgtgtatttagaatttccgacattcttctctactggatctacacattggaccccatctgatcctttgctgcttttttggctt

SEQ ID NO: 669567 - DNA, 120 bp, Artificial Sequence
  ENSG00000185442_9 (sequence is synthesized)
ggtcaggtcctggcctcattttggcgttacctgtgtcagagttcaaggtggatgtgcttagagctggtcagccccttccagacctggacacgtctgtggctccttttctttcttcctttt

SEQ ID NO: 669568 - DNA, 120 bp, Artificial Sequence
  ENSG00000185442_10 (sequence is synthesized)
gtgtgtgtgtgtgtgtgtgcacgtgtgtgcgtgtgcacgtgtgtgatacctataaaacagtttctccttctctgaagggaaaggaaagtgctaggcagcctgtgattagcaacattcttt

SEQ ID NO: 669569 - DNA, 120 bp, Artificial Sequence
  ENSG00000185442_11 (sequence is synthesized)
ctttgtgcttttttgttgttcctctgctctgtcacagttctacgttgtttgccttagaaatgtaatttttaaaaaccattttaaaaatgaacggtgatttggctggctggaaaaaatcac

SEQ ID NO: 669570 - DNA, 120 bp, Artificial Sequence
  ENSG00000185442_12 (sequence is synthesized)
actgtcaggggactatatttgaagtcagtctagacggggctggactaggaacccacctggacccaggagaccccacaggacccaggaggtccctgccggaaggcagaggttcaggtgaga

SEQ ID NO: 669571 - DNA, 120 bp, Artificial Sequence
  ENSG00000185442_13 (sequence is synthesized)
gtggctcacctctgagctggtgaagtgaggacttgcctgtgacatgacccagggatctgctgctggcttctggagacagggccttgggctgacttctcaggttgattgaggcctcctgac

SEQ ID NO: 669572 - DNA, 120 bp, Artificial Sequence
  ENSG00000185442_14 (sequence is synthesized)
tagcggtgttcccaggctagaggtgattggctgcaacaaagatgcttctattagtctattagcagtgccttcgggaccctgggattttgctctctctagaaaggtgttttttattttttt

SEQ ID NO: 669573 - DNA, 120 bp, Artificial Sequence
  ENSG00000185442_15 (sequence is synthesized)
attttttatctcccccttttttcctggctttgctccagggtttgtgtatttgcctgtttattgtcctgctctttttttttttggatgaaaactccagcctttcctgactcacctccatct

SEQ ID NO: 669574 - DNA, 120 bp, Artificial Sequence
  ENSG00000185442_16 (sequence is synthesized)
tcggttcttcagttttctgagaagagttgggatatgtgggaaggggcatgggagctcggcagcctccgcctgccaggaaggcagtttcgcctctgcaggaaagagcagagcccgtgggaa

SEQ ID NO: 669575 - DNA, 120 bp, Artificial Sequence
  ENSG00000185442_17 (sequence is synthesized)
gccctgggtgagggtggcgcagccggcccagcacgcatggtattgccagccacggggggcctgcgtgtagtctctgctccctgcatttcaccttctttgttgactttccttctctgtttt

SEQ ID NO: 669576 - DNA, 120 bp, Artificial Sequence
  ENSG00000185442_18 (sequence is synthesized)
cccccatctgtttgccagaggggtgggactggcaacagaacagccgtggctgctttatctctcctctccacggtgtactcaggcctgagtggtgactcacgggagcctggccacctcgca

SEQ ID NO: 669577 - DNA, 120 bp, Artificial Sequence
  ENSG00000185442_19 (sequence is synthesized)
gctgttcgccccctcaacctttgaactggaactgctggctcacacagggttttcgacaactgcagctgaatctcatggaaaagctggattcctctgccttacgcagaaacacccgggctc

SEQ ID NO: 669578 - DNA, 120 bp, Artificial Sequence
  ENSG00000185442_20 (sequence is synthesized)
catctgccaggtgcttgccactggtcctggcagaaatggcggctgctgaaagtgaccttccaaatccttggtggcacttcagcgccacaggctctccaataaaaaccctttacacacaaa

SEQ ID NO: 669579 - DNA, 120 bp, Artificial Sequence
  ENSG00000185442_21 (sequence is synthesized)
cgcgacctacccaccctcaaggcagccgtgatcgtggcgttcgcctttaccaccctcctcatcgcctgcctgctgctgcgcgtcttcaggtgggccctcccgccctcttccttcccccgc

SEQ ID NO: 669580 - DNA, 120 bp, Artificial Sequence
  ENSG00000185442_22 (sequence is synthesized)
cgacagggcggcatcgccaacctgctgtcgccgcgcgcccgccccacctgcacgcacaggtgccctggtgcgccccagccagccgtgtgcctcctgccctgcccgggagagtgggtgggg

SEQ ID NO: 669581 - DNA, 120 bp, Artificial Sequence
  ENSG00000185442_23 (sequence is synthesized)
aatgcattaattcgatccaagaggactcgcctcgttggatttgcagcaacctaatctctcgctcaggaagaaaacgccacgataaagagttttctgtcctccttgtttgcacggagcagc

SEQ ID NO: 669582 - DNA, 120 bp, Artificial Sequence
  ENSG00000185442_24 (sequence is synthesized)
aaacgcagagacaaaagaaacgggccccgactggtggtggcagaagtgggatccaaagtagagcttctcgtaacccccagaagcactgagtgaccaagtgtgacaccagctggactcatt

SEQ ID NO: 669583 - DNA, 120 bp, Artificial Sequence
  ENSG00000185442_25 (sequence is synthesized)
tgtcatgtgtatttaactgtttacccaccaccgaaaagcttcctgccaggacccatctgcagtgtaaaaggggaaccctgaagccctgggaatggctcctagtacttcaggtcgggaaag

SEQ ID NO: 669584 - DNA, 120 bp, Artificial Sequence
  ENSG00000185442_26 (sequence is synthesized)
ccttctgcagcctcagcttccgtgctcaagggacgcgcccgcctcagcctcccaacatgctgggattacgggcgtgagccaccgcccgggaacaacttaattaaaaaaaaaaaagccata

SEQ ID NO: 669585 - DNA, 120 bp, Artificial Sequence
  ENSG00000185442_27 (sequence is synthesized)
ccttccttccttcccctctcctcttcccctctctctctctttctctctccctctctccctcttggtttctcttttcttttctttctcagtgagaaaccagaatgggaaatatctactgga

SEQ ID NO: 669586 - DNA, 120 bp, Artificial Sequence
  ENSG00000185442_28 (sequence is synthesized)
atatactcattatgttcctgtttcccagaagacactgcttgggagttctgttctgtcatcaacggagctgtgatgaccgtggatgtcactggtagtggccaacatttctgcagctccttc

SEQ ID NO: 669587 - DNA, 120 bp, Artificial Sequence
  ENSG00000185442_29 (sequence is synthesized)
tcagttacatcctcaacacaaactcctcaccaggtggcagaagtggaagaagctgagatgtggctgtgagtcctgacttcactgctgtccagcggaaagagtctgagcagtctaaacccg

SEQ ID NO: 669588 - DNA, 120 bp, Artificial Sequence
  ENSG00000185442_30 (sequence is synthesized)
acactttcaaacaaccagatctcatgaaaactcactatcacaagaacagcaaaagggaaatccacccatgatctaatcatctcccaccagctccctctcgcaacattgggaattacagtt

SEQ ID NO: 669589 - DNA, 120 bp, Artificial Sequence
  ENSG00000185448_0 (sequence is synthesized)
agctggagacgtggcaccacagcgagggccaccatgggggaccagaggctgcaggactggctgaggtccccgggcatggactccaagccctggtactgtaacaaacggccttccaagtgc

SEQ ID NO: 669590 - DNA, 120 bp, Artificial Sequence
  ENSG00000185448_1 (sequence is synthesized)
ttcgcgaagtgcaagcacaggcgcctgaggttcccacccatggacacccagaactgggtatttgtgaaggagggcatggacgacttccgctacggctgtccgtctcccgaagatactctc

SEQ ID NO: 669591 - DNA, 120 bp, Artificial Sequence
  ENSG00000185448_2 (sequence is synthesized)
gtttgtcgccgtgacgagtttttactccccaaaatatctctcagaggtccccaagctgaccccaaaagcgggcagaaaaagctgctcaagaaagcggccctattttccaagctctctcca

SEQ ID NO: 669592 - DNA, 120 bp, Artificial Sequence
  ENSG00000185448_3 (sequence is synthesized)
gcccagctagcacggaaggcgttcgtagagcaagtggaagcccagctaatggccaagcatcccttggccatgtaccccaatctgggagaagatatgcctccagatctcctactacaggtg

SEQ ID NO: 669593 - DNA, 120 bp, Artificial Sequence
  ENSG00000185448_4 (sequence is synthesized)
ctgaaacacctggatcctgagagggagctggaggacgcttgggcttgttgtgagacccaggagaagacaacagaggtacccactgagcctggtaaacatccctgtggggaattctgcctg

SEQ ID NO: 669594 - DNA, 120 bp, Artificial Sequence
  ENSG00000185448_5 (sequence is synthesized)
aagcctcccgagactccggtgtcccatctcctcccagagcctcccgagactggagtgtcccatctaagcccggagcctcccaagactccggtgtccagtctccgcccggagcctcctgag

SEQ ID NO: 669595 - DNA, 120 bp, Artificial Sequence
  ENSG00000185448_6 (sequence is synthesized)
actggagtgtcccatctccgcccggagcctccagagactggagtgtcccatatccgcccggggcctcccatcactcgtcggagatccagtctcctacgacagctgctgaaactggattct

SEQ ID NO: 669596 - DNA, 120 bp, Artificial Sequence
  ENSG00000185448_7 (sequence is synthesized)
gagaggaagctggaagacgcacgggctccttgtgagggccgggagaagacaactgacgaacccacagagcctggtaaatacccttgtgggaaattctgtcctcggcctttcgagactcca

SEQ ID NO: 669597 - DNA, 120 bp, Artificial Sequence
  ENSG00000185448_8 (sequence is synthesized)
ctgtcccatctccgccaggagcctcccaagactccggtgtccagtctccgcccggagcctccggagactggagagtcccatctccgcctagagcattccaagactcgtcgggggtccagt

SEQ ID NO: 669598 - DNA, 120 bp, Artificial Sequence
  ENSG00000185448_9 (sequence is synthesized)
ctccgctcggagccttccgagactggagtgtcccgtctccgcctagcgcctcccaagactcgtcgggggtccagtctccacgcggagccttccaagactggagtgtcccatctcagcccg

SEQ ID NO: 669599 - DNA, 120 bp, Artificial Sequence
  ENSG00000185448_10 (sequence is synthesized)
gtgcctcccaagactggagtgtgccatctccgcctggaacctcccgacactagtcaggtgtccaatctcctactatacatactgaaagtgctggattctgggaggacgctgaaggacgta

SEQ ID NO: 669600 - DNA, 120 bp, Artificial Sequence
  ENSG00000185448_11 (sequence is synthesized)
tgggatcgttgtgaggcccgggtgaagaaaactaaggaacccaccgagcctcataaatccccttgtggggaaccctgcctgcagcctcccgagactcaggtgtcccatccccacccggaa

SEQ ID NO: 669601 - DNA, 120 bp, Artificial Sequence
  ENSG00000185448_12 (sequence is synthesized)
catcccaagacacgtcggaggtccagtctccactcgcagcctcccaagactcgtcggacgtccagtctccgctcggagcctcccaagactcgtcggacgtccagtctccgctcggagcct

SEQ ID NO: 669602 - DNA, 120 bp, Artificial Sequence
  ENSG00000185448_13 (sequence is synthesized)
cccaagactcgtcggacgtccagtctcggtccggagcctcccaagactcgtcgagtgtccagtctccgcccggagcttcccaagagtcgtcgggtgtccagtctccacccggagcctccc

SEQ ID NO: 669603 - DNA, 120 bp, Artificial Sequence
  ENSG00000185448_14 (sequence is synthesized)
aaagctccagagtcccatcaattctcggagcctcccaagattcgagcatcctacataaaagaactgcttcaggaagatacaccaagcacaaaagagtgcgtttctgactctcttcaatat

SEQ ID NO: 669604 - DNA, 120 bp, Artificial Sequence
  ENSG00000185448_15 (sequence is synthesized)
agatacacatcggaaaaactccgtgaattcttcaagtgggctggagacctgggagctgatgaagaatccatcaggaatctgtttgactttacccccaagtacagagcaacccatgaggac

SEQ ID NO: 669605 - DNA, 120 bp, Artificial Sequence
  ENSG00000185448_16 (sequence is synthesized)
caaaagtttaagaaagtaaaggagtgttcctcagagctgaagtacagcatggagctagatgaaaaggatgaggacaaattcttctcacaggaaaaatactggggcaggaaattccacacg

SEQ ID NO: 669606 - DNA, 120 bp, Artificial Sequence
  ENSG00000185448_17 (sequence is synthesized)
ccatcgaattcttataccgcacagcgtgtgaagatgaagtatggagcatggtacctcaagcctaagttgtggaaaaagctaagaagtgatgaacctttgattgaccccaagctcttactt

SEQ ID NO: 669607 - DNA, 120 bp, Artificial Sequence
  ENSG00000185448_18 (sequence is synthesized)
aaaaagcctgatgaacctgacgttcttgacgatctttatggaccaattgcctttaaggatttcattctaagcaagggctatgaaatgcctggcatcattcaaaggctgtttgccaggagg

SEQ ID NO: 669608 - DNA, 120 bp, Artificial Sequence
  ENSG00000185448_19 (sequence is synthesized)
ggatggacttatgactctgttaagactcctattcaacgtgcaatgatattttacaagtacaaagaaatcgtagaggcatcggaagaagattaggcagttttcaatttactactcaattgg

SEQ ID NO: 669609 - DNA, 120 bp, Artificial Sequence
  ENSG00000185448_20 (sequence is synthesized)
gtatttcttgctctcattttaatcatcaatcataatttatgatgactggccccgtggatgcacaactttggcaacatctgtaaattcaatacctaatgtttatcaatatttcttaatgaa

SEQ ID NO: 669610 - DNA, 120 bp, Artificial Sequence
  ENSG00000185453_0 (sequence is synthesized)
attgtgggaggtggacgccgctccggggcgggtaggcccccaggatggagcggccggagcccccacccggcacggctgcggggcaggaggagcaggagctgcgggagcgggccttcttct

SEQ ID NO: 669611 - DNA, 120 bp, Artificial Sequence
  ENSG00000185453_1 (sequence is synthesized)
cgtgggccgagttcagccgcttcttcgacgcgtggtgccagcagcggctggcgctcttcttcgtcaagagctccatgcacctggcgcgctgccgctgggccagtgcgcccccgctctaca

SEQ ID NO: 669612 - DNA, 120 bp, Artificial Sequence
  ENSG00000185453_2 (sequence is synthesized)
cgctcatcgacgtgctcaagtacagctacgtgcggcttgtgtgcaaggacgtgcgtgcgcccagccggcccgccgtggggcctccccagcccggctgccccgccttcatcatcgtcaagc

SEQ ID NO: 669613 - DNA, 120 bp, Artificial Sequence
  ENSG00000185453_3 (sequence is synthesized)
tgagcccgctgcgggaccgcctcgtggtgacggagtgccagctgacccactcacacccggcctgcccgctggagttcgcctactacttccgcccgggccacctgctggccaacgcctgcc

SEQ ID NO: 669614 - DNA, 120 bp, Artificial Sequence
  ENSG00000185453_4 (sequence is synthesized)
tgccggtgcgcaccaccaacaagatctccaagcagttcgtggccccagccgacgtgcgccgcctgctgtcctactgcaagggccgcgaccacggcgtcctggacgccctgcacgtgctcg

SEQ ID NO: 669615 - DNA, 120 bp, Artificial Sequence
  ENSG00000185453_5 (sequence is synthesized)
agggcctcttccgcaccgaccccgaggccaaggtgaagctggtgttcgtggaggaccaggctgtggtggagacggtgttcttcctgacgtcgcgcaccagggcgctgctgcggcgcttcc

SEQ ID NO: 669616 - DNA, 120 bp, Artificial Sequence
  ENSG00000185453_6 (sequence is synthesized)
ttccctcgcatgctgctggtggaccggctgccggggctgcagggcgcgctggatctgctggccgtgctgtgcgtggacggctcgggccgtgcgcgccaggctgcctgctgcgtggcgcgc

SEQ ID NO: 669617 - DNA, 120 bp, Artificial Sequence
  ENSG00000185453_7 (sequence is synthesized)
gcacaccgagcctgctgcgcttcgcgctcgcgtcgctgctgcagagcgcgccagacgtcaagggccgcgtgcgctgcctcaccgccgggcccgaggtggcggcgcagttgcctgcagtgc

SEQ ID NO: 669618 - DNA, 120 bp, Artificial Sequence
  ENSG00000185453_8 (sequence is synthesized)
gccagctgctgccctgcgcgcgcgtgcagatctgccgcgcgcagggcctggagacgctcttcagcaaggcgcaggagctgggcggcgccggccgcgaggacccgggcctgtggtcgcgcc

SEQ ID NO: 669619 - DNA, 120 bp, Artificial Sequence
  ENSG00000185453_9 (sequence is synthesized)
tgtgccgcctggctggcgcgtcgtcgcccgcagcctacgacgaggcgctggccgagctccacgcccacggcccagccgccttcgtggactacttcgagcgcaactgggagccccgccgcg

SEQ ID NO: 669620 - DNA, 120 bp, Artificial Sequence
  ENSG00000185453_10 (sequence is synthesized)
acatgtgggtccgcttccgcgccttcgaggcggccagagacctggacgcgtgtgccctggtgcgaggccaccgccggcgactgctgcgtcgtctcagcccctcgcgtggcgtggcgcagt

SEQ ID NO: 669621 - DNA, 120 bp, Artificial Sequence
  ENSG00000185453_11 (sequence is synthesized)
cagtgccttcgcgacctggtggccatgcagtgggccgacgcggccggggaggcggtgcccgaggggcccgatggcggggggccttggctggaggatgagccagggaggggagcccagggg

SEQ ID NO: 669622 - DNA, 120 bp, Artificial Sequence
  ENSG00000185453_12 (sequence is synthesized)
acgagagggtgaggggcctggagacaggcgactggggaggggctccgaaagaaggaagtatttggaggggagcccagatggagaaggagtgggcaagggcactggaaaccagagactggg

SEQ ID NO: 669623 - DNA, 120 bp, Artificial Sequence
  ENSG00000185453_13 (sequence is synthesized)
gcggggctcagttcgaaggtgagaaggggagggcactgcagatcagagattggagagggggtcggttggagaatcagaagccgaggggactggaagggggtgtcttgagagggtcgaagt

SEQ ID NO: 669624 - DNA, 120 bp, Artificial Sequence
  ENSG00000185453_14 (sequence is synthesized)
tagagaaagggcacctgagagggccagagattagagactggagggggccccagttggagggtgagaaagattggggactggaaggttatgtctggagggggtcccagttggaggaccagg

SEQ ID NO: 669625 - DNA, 120 bp, Artificial Sequence
  ENSG00000185453_15 (sequence is synthesized)
cgctaagaggattggaagggtatacctggagggtggcccagctggaagatcgcaggagtaccaccgacctgagggggacccagtttgactatgagagggtcaggagtcttgaaggaagcc

SEQ ID NO: 669626 - DNA, 120 bp, Artificial Sequence
  ENSG00000185453_16 (sequence is synthesized)
cctggaggggggcgcagctgcacgatgaaagggcagggggactgagaactgcagaatggaaggggccacagtcagaagtagagaaggggagggggctggaggtcagaaacttgaggggga

SEQ ID NO: 669627 - DNA, 120 bp, Artificial Sequence
  ENSG00000185453_17 (sequence is synthesized)
tccccttggagaagtccctggagttggcccctgagaacggagaccaaaggggaccccagtgggaagatgagaggaggagagggccagagattgcagaggagaggggagcgagggtggggg

SEQ ID NO: 669628 - DNA, 120 bp, Artificial Sequence
  ENSG00000185453_18 (sequence is synthesized)
tcaaaagaagaaggggcctggaggatatagttctggtccagctgggagacacgagggtcacaggcatggagaatggagatggagggggagcccggtccgtgggccccaagagccgagccg

SEQ ID NO: 669629 - DNA, 120 bp, Artificial Sequence
  ENSG00000185453_19 (sequence is synthesized)
gacgagggatggagtggggagacgcaggagggcggtgtctagggctggggaatggagtcgtgtctggcaccccggtggggactgtattggaaggcagcccagaatgggcagcggcgagga

SEQ ID NO: 669630 - DNA, 120 bp, Artificial Sequence
  ENSG00000185453_20 (sequence is synthesized)
gtgaacacctggctgcaggtgacggcctgcaggaaggaggcgaagatggccccagggaaccaaagaggctttgccgacccccgggagaggaggaggtggactgggaacccctggccaaat

SEQ ID NO: 669631 - DNA, 120 bp, Artificial Sequence
  ENSG00000185453_21 (sequence is synthesized)
tccgagcagcctgcgggccagagctggcagacctggtggctgaggagttggcctttgctaggcagcatgggacccggggtttccactggaccggagctggctttgcccttaaggacggca

SEQ ID NO: 669632 - DNA, 120 bp, Artificial Sequence
  ENSG00000185453_22 (sequence is synthesized)
cctcggacttcttcctggatggggccctgacacgctgcagctgctcaattcacgccgcccgccgtctgccctgcagacacctctttgcagcgcgcctcctcactggggctgccttattcc

SEQ ID NO: 669633 - DNA, 120 bp, Artificial Sequence
  ENSG00000185453_23 (sequence is synthesized)
acatggacctgctcagggattgctgggggagagccccagagccctgacccttcatgcctctgcccaccaccctccaccaggagggtcggagggcattcttcgatcccaaagataataggg

SEQ ID NO: 669634 - DNA, 120 bp, Artificial Sequence
  ENSG00000185453_24 (sequence is synthesized)
ctgaggccaaggagaccgttgcagtccccctggccaccttctgggtcatccagggacctcctcatggcagtttgcctctctgggtccaagggcaagctgtaagtggtctctgaggtcctg

SEQ ID NO: 669635 - DNA, 120 bp, Artificial Sequence
  ENSG00000185453_25 (sequence is synthesized)
gagccacagcttgggaaggtgttgatgggcagggtggattctgagggcttccctctggagaggaagcatgtgatgagaggtgtagacagggtcaggctgggacagaaggaaggaaagggg

SEQ ID NO: 669636 - DNA, 120 bp, Artificial Sequence
  ENSG00000185453_26 (sequence is synthesized)
cagagctggggggagggggaggaagcgatcatatggggagtgtctggcaagagtagactggccagtctagggagtgcagcggggagaggggaaagggagaaagtacagaagacagatgaa

SEQ ID NO: 669637 - DNA, 120 bp, Artificial Sequence
  ENSG00000185453_27 (sequence is synthesized)
ggagaggaggtaagcgagaaaaaatggaaaggggagccggaaatggaggagagaggacaagcaaagagacagaaatgaagacatgaggaaaagctgggggaagcaggagaggaagggacg

SEQ ID NO: 669638 - DNA, 120 bp, Artificial Sequence
  ENSG00000185453_28 (sequence is synthesized)
ggatgtaggagggggaagaaaaatcggagatgagacaaaagaaatgtgtgggagacgggtagagacgaaatgcaaggggcgtggttttggtttttctccaagacctggagacatcgaccc

SEQ ID NO: 669639 - DNA, 120 bp, Artificial Sequence
  ENSG00000185453_29 (sequence is synthesized)
ccatcgccttctgaagagagagggagggcgggcactgggggtcaggagagtctccagcaggggaggggaattgtttggactattgttcttcaggattggaataaaacaatcttattttgg

SEQ ID NO: 669640 - DNA, 120 bp, Artificial Sequence
  ENSG00000185453_30 (sequence is synthesized)
acacatcacccagaaacctagaacgttagagcttgcaagaagctcaaagaagctcaggcctaatctgaaacctattaacagaacccagttccaatgtaacaaatgcttattgagcaccta

SEQ ID NO: 669641 - DNA, 120 bp, Artificial Sequence
  ENSG00000185467_0 (sequence is synthesized)
tgctgtccaacctgcaggtaacttactacttccagtcaatatgccgaccttagatgctccagaagagaggcggagaaaatttaagtaccgaggcaaagatgtgtctctgaggcgacagca

SEQ ID NO: 669642 - DNA, 120 bp, Artificial Sequence
  ENSG00000185467_1 (sequence is synthesized)
gaggatggcggtcagtctggagctccgaaaggccaagaaagatgaacagaccttaaagagaaggaatatcacgagcttctgccctgacacaccttctgaaaaaacagccaaaggggtggc

SEQ ID NO: 669643 - DNA, 120 bp, Artificial Sequence
  ENSG00000185467_2 (sequence is synthesized)
ggtcagcctcactctgggtgaaataatcaaaggtgtgaatagctcagatccagtcctatgtttccaggccacccagacagccaggaaaatgctatcccaggaaaagaacccccctctgaa

SEQ ID NO: 669644 - DNA, 120 bp, Artificial Sequence
  ENSG00000185467_3 (sequence is synthesized)
actggtcattgaagcgggcctcattcccaggatggtggagttcctgaagtcatcactttacccctgcttgcagtttgaggctgcctgggccctgaccaacatcgcttcagggacttcgga

SEQ ID NO: 669645 - DNA, 120 bp, Artificial Sequence
  ENSG00000185467_4 (sequence is synthesized)
gcagactcgtgccgtggtagaagggggagccatccagcccttgattgagctcctgtcttcctccaacgtggctgtgtgtgaacaggcagtgtgggctcttggtaatatagccggtgatgg

SEQ ID NO: 669646 - DNA, 120 bp, Artificial Sequence
  ENSG00000185467_5 (sequence is synthesized)
cccagagttcagagataacgtcatcacaagcaatgccatcccacatctcctagccttgatttcacccaccctgccgatcacatttctgcggaacatcacgtggaccttgtcgaatctgtg

SEQ ID NO: 669647 - DNA, 120 bp, Artificial Sequence
  ENSG00000185467_6 (sequence is synthesized)
ccgaaacaagaacccatacccttgcgacactgcggtgaagcagatactgccggccctccttcacctcctgcagcaccaggacagtgaggttctctcggatgcctgctgggcactgtccta

SEQ ID NO: 669648 - DNA, 120 bp, Artificial Sequence
  ENSG00000185467_7 (sequence is synthesized)
gggggtcctgcccaggctggtagtgctcatgaccagctcagaactcaatgtcttgactccttctctccgcaccgtggggaacattgtcacgggcacagatgagcagacgcagatggccat

SEQ ID NO: 669649 - DNA, 120 bp, Artificial Sequence
  ENSG00000185467_8 (sequence is synthesized)
tgatgcgggtatgctgaacgtgctcccccagctcctgcaacacaacaagccctccatccagaaggaggcagcctgggccctgagcaacgtagcagcggggccttgtcaccacatccagca

SEQ ID NO: 669650 - DNA, 120 bp, Artificial Sequence
  ENSG00000185467_9 (sequence is synthesized)
gctgcttgcctacgacgtcttgcctcccttggtggctctgctaaaaaacggagaatttaaagtccagaaagaggctgtctggatggtggcgaactttgcaacaggggccaccatggatca

SEQ ID NO: 669651 - DNA, 120 bp, Artificial Sequence
  ENSG00000185467_10 (sequence is synthesized)
gctgatccagctcgtccactctggggtcctggagccactggtgaatctgctcactgccccagatgttaaaattgttctcatcatccttgatgtcatctcttgcatcctccaggcggcaga

SEQ ID NO: 669652 - DNA, 120 bp, Artificial Sequence
  ENSG00000185467_11 (sequence is synthesized)
gaaacggtctgagaaggaaaacctgtgtcttctgatagaagaacttggtgggatcgatagaattgaggctttacagctgcatgagaaccgtcaaattggccagtcggctttgaacatcat

SEQ ID NO: 669653 - DNA, 120 bp, Artificial Sequence
  ENSG00000185467_12 (sequence is synthesized)
cgagaagcactttggtgaggaagaagatgagagccaaactttactgagccaagtcatagaccaagattatgaatttatagattatgaatgcttagcaaaaaaatagccaagctccctacc

SEQ ID NO: 669654 - DNA, 120 bp, Artificial Sequence
  ENSG00000185467_13 (sequence is synthesized)
tcctaaaccaacaacccagtgctaaaggataacttctttaagaagcagcagtcctctatcttagtgtaacccaaatgtgaagcttttaaaacttgacattaataaaatgttcaacacttt

SEQ ID NO: 669655 - DNA, 120 bp, Artificial Sequence
  ENSG00000185475_0 (sequence is synthesized)
gcagcggcgcttcctggtggtcagggcgccatggcgctgtcctggctgcagcgcgtcgagcttgcgctctttgctgccgccttcctgtgcggggccgtggcggccgcggcgatgactcgg

SEQ ID NO: 669656 - DNA, 120 bp, Artificial Sequence
  ENSG00000185475_1 (sequence is synthesized)
acccagggctccttcagtggtagatgtcccctgtatggtgtggccaccctgaatggctcctccctggccttatcccgtccctcagcaccatccctgtgctactttgtagctggggcctct

SEQ ID NO: 669657 - DNA, 120 bp, Artificial Sequence
  ENSG00000185475_2 (sequence is synthesized)
ggcctcttggccctctactgcctcctgcttttgctcttctggatctacagcagctgcatcgaggactcccacagaggtgctatagggctgcgcattgcactggccatctcagctatagcc

SEQ ID NO: 669658 - DNA, 120 bp, Artificial Sequence
  ENSG00000185475_3 (sequence is synthesized)
gtcttcctggtcttggtgtctgcctgtatccttcgatttggcaccaggtctctctgcaactccatcatctccttgaacactacaattagctgttctgaagcccagaaaattccatggaca

SEQ ID NO: 669659 - DNA, 120 bp, Artificial Sequence
  ENSG00000185475_4 (sequence is synthesized)
ggtcttggtgctccaggtcgtgcagtggaagtctgaagccaccccataccggcctctggagaggggtgaccctgagtggagctctgagacagatgctctcgttgggtcacgcctttccca

SEQ ID NO: 669660 - DNA, 120 bp, Artificial Sequence
  ENSG00000185475_5 (sequence is synthesized)
ttcctgaagaataagcggagtgcttcctgcagccgaagactccatgcccaagtgcctgtaatcccccccctcaaggccctgtttatgttgggagtcttagttttcctttcgttggggggt

SEQ ID NO: 669661 - DNA, 120 bp, Artificial Sequence
  ENSG00000185475_6 (sequence is synthesized)
gggggggaaacataatgacaggcccccctccacctcttcctgcagctgtttttgtaccaaaatattatattactgtcttcatcttagtagtgagtttttgatgttaaagtacaactagat

SEQ ID NO: 669662 - DNA, 120 bp, Artificial Sequence
  ENSG00000185475_7 (sequence is synthesized)
aggaggaaggagtgaaggctaagcagacatggactgaaacttagaggtactgttaggcagctgccctagggatgactgctcctttatttgttgttaatgaatcttgacctccttgtgtga

SEQ ID NO: 669663 - DNA, 120 bp, Artificial Sequence
  ENSG00000185475_8 (sequence is synthesized)
ctggtggtcagggcgccatggcgctgtcctggctgcagcgcgtcgagcttgcgctctttgctgccgccttcctgtgcggggccgtggcggccgcggcgatgactcggacccagcagctgc

SEQ ID NO: 669664 - DNA, 120 bp, Artificial Sequence
  ENSG00000185475_9 (sequence is synthesized)
tctacagcagctgcatcgaggactcccacaggtgactgcctaaccctgagggccaggggctgaggtaggatgagcctcacctccaccacaaggcttgttctctccctttcagaggtgcta

SEQ ID NO: 669665 - DNA, 120 bp, Artificial Sequence
  ENSG00000185475_10 (sequence is synthesized)
aggtaatgggagagggagggaagcctggctggggctgactaccttccctctgcagcggggtcctataatttccttttatccccatcagttgctctcaactcacagggcactgggcacagg

SEQ ID NO: 669666 - DNA, 120 bp, Artificial Sequence
  ENSG00000185475_11 (sequence is synthesized)
tgtgcctcggatataaactatcacgctttctcacaactgtctctttgacctcacagctgttctgaagcccagaaaattccatggacaccccctggaactgctctgcagttttactccaac

SEQ ID NO: 669667 - DNA, 120 bp, Artificial Sequence
  ENSG00000185475_12 (sequence is synthesized)
aactgacataaatatctgtagctgtgtgggtgctcaccagtgtattgtgagcttggcctaccagtgagaggagctgaaggggttgtcagcttaaaattcagcagttcagagtggtgtgtg

SEQ ID NO: 669668 - DNA, 120 bp, Artificial Sequence
  ENSG00000185477_0 (sequence is synthesized)
ggttacttaaatttcgtatcttgtaaactatgtttttatatttgttatccattttttcaatggattatttgatctcctcataaatgttaaagagctcctgctatattataggtatttttg

SEQ ID NO: 669669 - DNA, 120 bp, Artificial Sequence
  ENSG00000185477_1 (sequence is synthesized)
cctgccctctagggttatacactttttatttcccccaaaatcttgtattttttatagcatcttttgtcatgccataaaattcaggttttgaattttatttagtcacctatgtttgttttc

SEQ ID NO: 669670 - DNA, 120 bp, Artificial Sequence
  ENSG00000185477_2 (sequence is synthesized)
tcttacagtgtttctaccatctcagaaaaagcctagctcacctgtctctagattacatttatgattcgtaggttttcttatatgattttatttatttattttatattttaacctttaatc

SEQ ID NO: 669671 - DNA, 120 bp, Artificial Sequence
  ENSG00000185477_3 (sequence is synthesized)
cactgcatccatctaggatttatttttggaattggtataatataaacatctacttttcttttcttccagatgcatgaacagtttgccaactccttctatgaaataactcagcctttcacc

SEQ ID NO: 669672 - DNA, 120 bp, Artificial Sequence
  ENSG00000185477_4 (sequence is synthesized)
accaaattgtaatacttcttttgtcatagattaagtccccatttatatttggatctatccctagatttcttatttcacatatctgtttatgcctacttcaatacttacttattgatttaa

SEQ ID NO: 669673 - DNA, 120 bp, Artificial Sequence
  ENSG00000185477_5 (sequence is synthesized)
ttagagtggctttacaggattttctgacatctgctaagtcagattacaccaataacttttgaggtagttagcaaacttaggtagatacatgaaaaacctatttgctagacattagtggga

SEQ ID NO: 669674 - DNA, 120 bp, Artificial Sequence
  ENSG00000185477_6 (sequence is synthesized)
tgcaagcagaaactaatatatcaaaataatattttcgtaattataatttttttcaaaatctttttctcaagtctatttttatttatttatttttcttctccctccccacaaggtctattt

SEQ ID NO: 669675 - DNA, 120 bp, Artificial Sequence
  ENSG00000185477_7 (sequence is synthesized)
ttatatcaacaggtatgggaagaaaagtttttaatgtgctcttataaaaacgacagtttggtttatttttcaatccttaagcgacgtactgtattaatgatgctgtttccttgattcaca

SEQ ID NO: 669676 - DNA, 120 bp, Artificial Sequence
  ENSG00000185477_8 (sequence is synthesized)
ggctggttcttcagaggaatcatccctgactgtgtcatcactctgagctctgactgcgctcccctcccccaccagtgggaccagtactcaagagagctctggagtgctcctgaagagaaa

SEQ ID NO: 669677 - DNA, 120 bp, Artificial Sequence
  ENSG00000185477_9 (sequence is synthesized)
ttccatggggactgtacctgaccctctgagatcagctaaaacttccctgattgcagcttccggaaaagaagacgatctaggagagccacaggctgcctcacctcggcatcgaccagctct

SEQ ID NO: 669678 - DNA, 120 bp, Artificial Sequence
  ENSG00000185477_10 (sequence is synthesized)
cctgtgtaagaatgccaatggcttttcaggtgcccctgcagaaccagacctcagccccagggcagctgccgaagccctgatgcaggtttgtgagcatgagaccacccaaccagatatgtc

SEQ ID NO: 669679 - DNA, 120 bp, Artificial Sequence
  ENSG00000185477_11 (sequence is synthesized)
ttctcctggtgtgttcaatgaagtgcagaaagcacctgccacattcaactctcccggcaatccccagctgccagggagcagccagcccgcagcatcagccccgagttctgcagcaggaag

SEQ ID NO: 669680 - DNA, 120 bp, Artificial Sequence
  ENSG00000185477_12 (sequence is synthesized)
ggatcttatacacacaccattgacaatgcccgccaatcagcacacctgccagtccatcccaggtgatcagcccaatgccatcacctcatccatgcctgaagattccctgatgagatcaca

SEQ ID NO: 669681 - DNA, 120 bp, Artificial Sequence
  ENSG00000185477_13 (sequence is synthesized)
gagaacctcaaatagagagcaacctgagaaaccaagttgtcctgtgggaggcgtcctcagtagcagcaaagatcaggtgtcctgtgagtttccttctccagaaacaatccagggaacagt

SEQ ID NO: 669682 - DNA, 120 bp, Artificial Sequence
  ENSG00000185477_14 (sequence is synthesized)
gcagactccagtgacagcagccagggtggtcagtcactcatcctctcctgtaggtggacctgaaggggaaaggcagggagccatctgtgactctgaaatgaggtcctgtaaacctctaac

SEQ ID NO: 669683 - DNA, 120 bp, Artificial Sequence
  ENSG00000185477_15 (sequence is synthesized)
tagagaatctggatgttcagagaacaagcagccctctgtcactgcctcgggcccccaaggcacaacttctgtgacacctcaaccaacccccctcactagcgaaccttcggcatgtccccc

SEQ ID NO: 669684 - DNA, 120 bp, Artificial Sequence
  ENSG00000185477_16 (sequence is synthesized)
aggtccagagaaggtgccgctgccagcacagcgtcagatgtcaaggttcaaagaagccagtacgatgaccaaccaagctgaaagtgaaatcaaggaagttcccagcagggcttggcaaga

SEQ ID NO: 669685 - DNA, 120 bp, Artificial Sequence
  ENSG00000185477_17 (sequence is synthesized)
tgcggaggtgcaggcagtggcgagtgtcgagagcagatccgtctccaccagccccagtatcctcactgcatttctgaaggaaagccgtgctcctgagcattttgaacaagagcagctgcg

SEQ ID NO: 669686 - DNA, 120 bp, Artificial Sequence
  ENSG00000185477_18 (sequence is synthesized)
tgtcatttgccacagcagtgggagccacacactggagctctctgacagcacgctagccccccaggagtccagccagtgccctggcatcatgccacaggtgcacattcaggcagctgcagc

SEQ ID NO: 669687 - DNA, 120 bp, Artificial Sequence
  ENSG00000185477_19 (sequence is synthesized)
tgagtctacagctttccaacgggaaaataaacttgcgagcctaccaggtggggtccttaaaacctcatcaatcaatttggtctccagtaatgcccagcatacgtgtaaagaagatgggag

SEQ ID NO: 669688 - DNA, 120 bp, Artificial Sequence
  ENSG00000185477_20 (sequence is synthesized)
gttagcaggaatgactccagtgagggaagagtcaactgctaaaaagctcgcaggtactaattctagctccctgaaagctaccgccattgaccagatttctatcagtgcatgcagtcaagc

SEQ ID NO: 669689 - DNA, 120 bp, Artificial Sequence
  ENSG00000185477_21 (sequence is synthesized)
tgaaacaagttatggattggggaaatttgaaaccaggccatctgagtttgcagagaaaacgacaaacggccacaaaacagacccagattgcaaactatctgactcttgtggctctatcag

SEQ ID NO: 669690 - DNA, 120 bp, Artificial Sequence
  ENSG00000185477_22 (sequence is synthesized)
caaagctgatcattctgggagcttggatcccactaataaaggagatgcaagggaaaagaagcctgcatctcctcaggtagtaaaagaaaaagagtctactggcactgatacctcggatgc

SEQ ID NO: 669691 - DNA, 120 bp, Artificial Sequence
  ENSG00000185477_23 (sequence is synthesized)
caaaaccctactgctcaatcctaaatcccaagaaagtggaggcacagaatcagctgctaatcctacaccctccccaattaggaagaaccaggagagcaccttagaagaaaacagacagac

SEQ ID NO: 669692 - DNA, 120 bp, Artificial Sequence
  ENSG00000185477_24 (sequence is synthesized)
caagacagccaccagcctgagcctgccatctgatcccatgggtgactccagcccaggttctggcaagaagaccccatctcgctccgtcaaagccagcccacgcaggcccagccgcgtcag

SEQ ID NO: 669693 - DNA, 120 bp, Artificial Sequence
  ENSG00000185477_25 (sequence is synthesized)
cgagttcctcaaggagcaaaagttaaatgtgacagcagctgctgctcaggtaggactcactccaggagataagaaaaagcagcttggcgcagactccaagctccagctgaaacagtccaa

SEQ ID NO: 669694 - DNA, 120 bp, Artificial Sequence
  ENSG00000185477_26 (sequence is synthesized)
gggatgagcagggaatgacctgggaagtgtatggtgcatccttggacgcagagtccctgggaatcgcgatccagaaccatttgcaaagacaaatcagggaacatgagaaattaatcaaaa

SEQ ID NO: 669695 - DNA, 120 bp, Artificial Sequence
  ENSG00000185477_27 (sequence is synthesized)
ctcaaaatagccagacccggagatccatttcctcagatacttcttcaaataagaagctcagaggaaggcagcacagtgttttccagtccatgctgcagaacttccgacgccccaactgct

SEQ ID NO: 669696 - DNA, 120 bp, Artificial Sequence
  ENSG00000185477_28 (sequence is synthesized)
gcgtccgtcctgccccgtcttctgtgttagattgaaagggagtatttatgggagtttgtgtataaatttacggtattcacatgcgtccctctatgtcaaagcttgcttagttttttgctg

SEQ ID NO: 669697 - DNA, 120 bp, Artificial Sequence
  ENSG00000185477_29 (sequence is synthesized)
caagactaggaagaaaaagcaagtattcactataggaaattgctattaaaaattgttagatcctttgacctggagctctataaacaaaaatgtcatttcaatttgaaagaaggaacaaga

SEQ ID NO: 669698 - DNA, 120 bp, Artificial Sequence
  ENSG00000185477_30 (sequence is synthesized)
aaagagaaacaagcttcactgaaggtttgcaaccttaacaaattgaaaataatactcactgggtttttaaaaatatgatgttgttcatagaaatagcattattgtatcattatacatgta

SEQ ID NO: 669699 - DNA, 120 bp, Artificial Sequence
  ENSG00000185477_31 (sequence is synthesized)
ttattttgtataactgcctcaatttatcacacagtagtagttccattaaaatccctgcttcatattgaaagtagcaaaaacactattggcgaaaacattgttataatttctagtcttatt

SEQ ID NO: 669700 - DNA, 120 bp, Artificial Sequence
  ENSG00000185477_32 (sequence is synthesized)
gcagtaagaatgctgtaaccacacaaattataaataggtgataagaaccataatgaaaaaaatgagaacatatttgattcattcctaggccagataacattaaataaaaacagttaaatg

SEQ ID NO: 669701 - DNA, 120 bp, Artificial Sequence
  ENSG00000185477_33 (sequence is synthesized)
tgtaaaatatgaaatatgaattaatgtttataaacatctgcagacaactctttttataaaccttcttattgctgttaataaatataagaaagttatattaggaacattagctaagctttt

SEQ ID NO: 669702 - DNA, 120 bp, Artificial Sequence
  ENSG00000185477_34 (sequence is synthesized)
gactatgaaaactgcctacattaaacatggatttatatagacccattttcctgcactgaaggcaaggcgcatctctgtgattctgaccagacatattcatattttcttaccctagaggaa

SEQ ID NO: 669703 - DNA, 120 bp, Artificial Sequence
  ENSG00000185477_35 (sequence is synthesized)
gtacatgggactgaattcttgaaaagagccatcaaattagggataatactaaattgatactgtgcaggtgttctccagtgatattctactgagaatgctaaggttctggtcaggaactat

SEQ ID NO: 669704 - DNA, 120 bp, Artificial Sequence
  ENSG00000185477_36 (sequence is synthesized)
aaatagcagattaccaaacactgctttttctgtgatgataaaagcctcataagtaacaaaaacaatgtttaatttagactcctgtaaacaggatgcaattagtgattttttttaattggg

SEQ ID NO: 669705 - DNA, 120 bp, Artificial Sequence
  ENSG00000185477_37 (sequence is synthesized)
ttcagtaacttccagtaacaaatgtagtcaacaccaaattagaatgtgagcttccttacaatttttgtacatagactactatcatctaattgcttaaatatatatgctggagtaaaaagg

SEQ ID NO: 669706 - DNA, 120 bp, Artificial Sequence
  ENSG00000185477_38 (sequence is synthesized)
taacttctgcaaacttattgattttaagagaaatacccataatatccttcaaacccaatgaaagaagaggcctttacgaaaacatggcttgtgatttgggtggattatacttcctgggac

SEQ ID NO: 669707 - DNA, 120 bp, Artificial Sequence
  ENSG00000185477_39 (sequence is synthesized)
cttggccctcccgtgtctccagaagagacgtgtgtcccgagacacatgagtatcctccaaggcactggcctggatgagcagcatcgccttgagaattggggtagtgtggaaaggaagaat

SEQ ID NO: 669708 - DNA, 120 bp, Artificial Sequence
  ENSG00000185477_40 (sequence is synthesized)
gaacaacggccctgggaagccttcccttcctgcagatattgttgggggagtgctggtctccattttgcgtttagaaaaccagacttagatgctggaggggcaccggttgtcttctttgaa

SEQ ID NO: 669709 - DNA, 120 bp, Artificial Sequence
  ENSG00000185477_41 (sequence is synthesized)
ctcattccccgtaatgagctagaaaagagtacctaaccataggtattctctctagagactcatgtgtcccgtgggtacagtcaattcacagtatctgttctggcttttttcactttaatt

SEQ ID NO: 669710 - DNA, 120 bp, Artificial Sequence
  ENSG00000185477_42 (sequence is synthesized)
ctgttctgcacattctgaacatatgcaggaaaaaaaatcattcctgaacttagcacaagctacactcgacacaacctaaattagtaaaaagcctttgatttattttgaagcaatttaact

SEQ ID NO: 669711 - DNA, 120 bp, Artificial Sequence
  ENSG00000185477_43 (sequence is synthesized)
gtagacaaagcttgcatatatggaacagtattctcagagcctgagagttgttacagttgttctatttggaaattagaaggaattttttaataaggcacatttttcagtttcttacccatt

SEQ ID NO: 669712 - DNA, 120 bp, Artificial Sequence
  ENSG00000185477_44 (sequence is synthesized)
ggtgtctattaagaatactatgtaatgttgaaatttccatcaaattaccaagcaaattactattaatgattagagatttagcctaacactctctctttgggccttaaatacccatttgta

SEQ ID NO: 669713 - DNA, 120 bp, Artificial Sequence
  ENSG00000185477_45 (sequence is synthesized)
gttgtgttcgtgtcacttctgtctcagatgcctctgccaggacataatctctctaactcttgctagctggcttctccctcccacatgggcatacatgctgtgtatacacagagtacagcc

SEQ ID NO: 669714 - DNA, 120 bp, Artificial Sequence
  ENSG00000185477_46 (sequence is synthesized)
tgtgtacacagtagcagctgtcaacagggcctactccagatgggtggccccaggtaatcctctgctgtaaagtggctagaacaggctgtccctgcattaaaataggtgagaataaggaat

SEQ ID NO: 669715 - DNA, 120 bp, Artificial Sequence
  ENSG00000185477_47 (sequence is synthesized)
ttcgcctctgataataatatttattttcatgactttagagtaaccacatgatttgtaaacagttaaatgaagcagaggcctgagagagttgttggcatttgtctcacattaaatacatta

SEQ ID NO: 669716 - DNA, 120 bp, Artificial Sequence
  ENSG00000185477_48 (sequence is synthesized)
aaattgctagatttgctattgtggttatgtctatcaaaactttaagaaaatttgtttaatgtactgagtttaactgattttctttggtgctgggaccaaattcttcacttctacaacact

SEQ ID NO: 669717 - DNA, 120 bp, Artificial Sequence
  ENSG00000185477_49 (sequence is synthesized)
caagagattgtcacaaaatattacaaaaatattgtttgttttgtggctcattaaaccctatataactaacagcttttaaggacattaacagaaatatatcttcagatggataaataagat

SEQ ID NO: 669718 - DNA, 120 bp, Artificial Sequence
  ENSG00000185477_50 (sequence is synthesized)
agggacctattcaagacagcagcatttttgtattgtgatacctcccctaagttactctcacaataaaaccttatttgagaattttccttcacttcaatctgtgacatagcattaggcatt

SEQ ID NO: 669719 - DNA, 120 bp, Artificial Sequence
  ENSG00000185477_51 (sequence is synthesized)
tagtataccttatttgtgaaacctaaggttcattcaacagatgaagctgcaaaacagttttcttggtagactcttggaacttgctcagttttttccttactttacctgcatgacacacat

SEQ ID NO: 669720 - DNA, 120 bp, Artificial Sequence
  ENSG00000185477_52 (sequence is synthesized)
gcatagtaatttcagttcctgaacgcacggagctcgctccgggaccgggctgagaaggacctcagctcgcgggcccgccggagccatcggtgtggcgccgagagacggtgcttgggatat

SEQ ID NO: 669721 - DNA, 120 bp, Artificial Sequence
  ENSG00000185477_53 (sequence is synthesized)
tcttagatatgatttggttctttttcatgcattatatttttgaaatatatggaggaaatattttattgaatcaagaaatagaaaatattccttaaaccagtagtaaaaaggtgagttaga

SEQ ID NO: 669722 - DNA, 120 bp, Artificial Sequence
  ENSG00000185477_54 (sequence is synthesized)
actccatgtctggaagacaattcaacatttaaaatattaagatgctataccacttaacaagtgaatactaaaatttttaatttaaagattgattgttctgtttttatgaccatgagaaaa

SEQ ID NO: 669723 - DNA, 120 bp, Artificial Sequence
  ENSG00000185477_55 (sequence is synthesized)
atgtgacagcttcagctgtcatatgtttatcttgaatgcttttctaattatgtatttctggattattgactttgaatgccacagaccaactactttacatagagtaaaatattgattaac

SEQ ID NO: 669724 - DNA, 120 bp, Artificial Sequence
  ENSG00000185477_56 (sequence is synthesized)
ctttgtgctttgggtcactggcaaaagttgaacatcctgataagtcaatgttaaccagaaacctttttgttcacgtctgaaattgaatatttataaaatgtgttagtatgtttcctgcct

SEQ ID NO: 669725 - DNA, 120 bp, Artificial Sequence
  ENSG00000185477_57 (sequence is synthesized)
tgataagttcacctatattgaatgtaatttgatctttgataattttttttaatcttgagaattctctgatactgttttgaataccagtgttcaccatgttataaagttaaacataaaaat

SEQ ID NO: 669726 - DNA, 120 bp, Artificial Sequence
  ENSG00000185477_58 (sequence is synthesized)
tgaaataaattgaactaaatatgcatgtgtaacatataccttagaggttggatttcagaaccaaattcataataggagcttgctgtcttaaagtagaaagcagaagaggaaaatagcatt

SEQ ID NO: 669727 - DNA, 120 bp, Artificial Sequence
  ENSG00000185477_59 (sequence is synthesized)
tgtttgtattctagcatattgaggtttcactgttcctagcttatactaatgtttttcctctcatttctgggaatgcctgtcattctgagaatccctatatatagcataccaagaacagag

SEQ ID NO: 669728 - DNA, 120 bp, Artificial Sequence
  ENSG00000185477_60 (sequence is synthesized)
tatgatgttactttaaaatgtgtttacagaggatatatgcaagtgtgctgttaatataaattgtttgtccttttctgcatccactttgttactgttttgctgccaaaatgtgtgaaatgt

SEQ ID NO: 669729 - DNA, 120 bp, Artificial Sequence
  ENSG00000185477_61 (sequence is synthesized)
gtgtcttctcttcctcctacatattgtgccaagtgtttaaaattttgtctactcctagtaacacataattaaccacatcccttgtctacttttatgaatcagtataaagaaaaacaatac

SEQ ID NO: 669730 - DNA, 120 bp, Artificial Sequence
  ENSG00000185477_62 (sequence is synthesized)
attaggataaggtttgcatatatgtatatgtgtttttattgaaaactgggcacttgtagccttgtgtagacctctacctgcctgatttactaattatctgtaatgctgccatggagatga

SEQ ID NO: 669731 - DNA, 120 bp, Artificial Sequence
  ENSG00000185477_63 (sequence is synthesized)
tgctgtttactctctcctgctttgttctaagtggtgtttgagaagtgaggcctgtgaatttccctttgtggtagaacagtgaactcagcagtatcttgcataagtgagccgactacctta

SEQ ID NO: 669732 - DNA, 120 bp, Artificial Sequence
  ENSG00000185477_64 (sequence is synthesized)
ttcccactctgtttttgtgtacatggtgaaatcagaagtcaaacatcccctttagtgtttgttattttacatatgtatctgagcattttgttttctgttagcaatgcttcctgatgttgt

SEQ ID NO: 669733 - DNA, 120 bp, Artificial Sequence
  ENSG00000185477_65 (sequence is synthesized)
attcttcaactggctgagcaattacaaatgtcatctgtccagacacatgggcttaaggatgtctacaaaattttagacatttttgcaaatgggaaaaaaaatagtcttgtaaatactgaa

SEQ ID NO: 669734 - DNA, 120 bp, Artificial Sequence
  ENSG00000185477_66 (sequence is synthesized)
acagatttccatgaactttatcctactcttggaaagaaaacaattctccttggctgcagaaatcaaataagctgggtttgcaatgaccaaggacataaatgaagatggattgaagtggaa

SEQ ID NO: 669735 - DNA, 120 bp, Artificial Sequence
  ENSG00000185477_67 (sequence is synthesized)
aaattctgtctcccaagtgatcagtgacatctgccagaggtcattacagctacttttaactgtgaacagtcaccagctaaactactcacttgccacaacaaaataacctctctcaaaata

SEQ ID NO: 669736 - DNA, 120 bp, Artificial Sequence
  ENSG00000185477_68 (sequence is synthesized)
aatccagtgcatctgtatatatgtgtagatagcagcaacaaacaatcctgaaacattatttttggctgttaggtaagtaaacgtgatgataattataaacaacattcaaataaccttgga

SEQ ID NO: 669737 - DNA, 120 bp, Artificial Sequence
  ENSG00000185477_69 (sequence is synthesized)
ccttggtgaaatgacttgtggtggccagaatggtgcaacaagatgttatttgcaagtttttttaagacacaaatatctcagatactaataatgagaataaagactgttgaatatgaaatt

SEQ ID NO: 669738 - DNA, 120 bp, Artificial Sequence
  ENSG00000185477_70 (sequence is synthesized)
aaagccaagcaataatgtgccaaaaagaggcagttataccagcaaatgcatctattatgggcacaccattatataatgatggtttgctttatgaagactgactgtaacccacaggataaa

SEQ ID NO: 669739 - DNA, 120 bp, Artificial Sequence
  ENSG00000185477_71 (sequence is synthesized)
ataagcaaaggcatagtttctgctttcttcctggaaaaacttgtttagaagcttcataaagaggtacagcactaatgagcattagtcaggatacagttggcatctatgtttttatgtgag

SEQ ID NO: 669740 - DNA, 120 bp, Artificial Sequence
  ENSG00000185477_72 (sequence is synthesized)
cccagagggaagaggagccactcaaagtcttgctggcttaaaactcaagacagctgcaaccagaagttttgttgaaatggagactttaaacttatggtaattactctttctggacactag

SEQ ID NO: 669741 - DNA, 120 bp, Artificial Sequence
  ENSG00000185477_73 (sequence is synthesized)
catgtagaaagcaattcagttaactctgcccagaggattaccagctttagctgtgaaaaaatgggctcccggatgtaaaatcactaaaacatgagatcttgtatccaaagaggcttcaaa

SEQ ID NO: 669742 - DNA, 120 bp, Artificial Sequence
  ENSG00000185477_74 (sequence is synthesized)
tgatgccttacagaaaacgatgctccagatgggcacttctaaatgctaactcttcatcaagtatctttctggattcaagctcaaaattaattggctgcaaaatagtaggaataaaaatca

SEQ ID NO: 669743 - DNA, 120 bp, Artificial Sequence
  ENSG00000185477_75 (sequence is synthesized)
catattttacactttagaaaaggatattgatgatcaacctgcatggtgataattatgatgagataccccagtgatttaatgatgttagaaagaattaaatgggagagaattgctaacagc

SEQ ID NO: 669744 - DNA, 120 bp, Artificial Sequence
  ENSG00000185477_76 (sequence is synthesized)
tttcttgatctcttaactatggagatgtcattcatttatttctggggtgaaaattatagcttgctttttgacattgctgctagtattgttctttgttgctttaaaaattgtctctcttta

SEQ ID NO: 669745 - DNA, 120 bp, Artificial Sequence
  ENSG00000185477_77 (sequence is synthesized)
gaaaaactcttgagcagttaaacagttttttttctgattcatatcattgcttttaataacatgtaaaggctgtgtgtagagcaaactatataaaatgagtagaaagggcttactcatgtt

SEQ ID NO: 669746 - DNA, 120 bp, Artificial Sequence
  ENSG00000185477_78 (sequence is synthesized)
aattggcatccttgatgattttagttgagattccttaacatttattttagatcacatctttacgtaacttatttttcctaatgttttccatcgtgtcttaaaatgatgctggtatatcag

SEQ ID NO: 669747 - DNA, 120 bp, Artificial Sequence
  ENSG00000185477_79 (sequence is synthesized)
gagattgcagtattatagtcatactccccaatccctagaggagaggaaagactaattcttgttttaagggcccctggagataccttttattaaggttgaaaaaggtcaacacagcctgaa

SEQ ID NO: 669748 - DNA, 120 bp, Artificial Sequence
  ENSG00000185477_80 (sequence is synthesized)
aataagaaaaatatatactagcaattactaattttctaaatgtgtgtatctctgctgtactaatgtgtgaacaatatgtcgtgcataatactgtagctggtcgtggtatgtcaatacatt

SEQ ID NO: 669749 - DNA, 120 bp, Artificial Sequence
  ENSG00000185477_81 (sequence is synthesized)
ctgtgagtgtgtacagtctgagtgatcagttttctatttttatgtgtaaaaaaaataacttgtcgtatcccatttaaaggccaatttctgtattcaggcaggcatatgtacatacatgaa

SEQ ID NO: 669750 - DNA, 120 bp, Artificial Sequence
  ENSG00000185477_82 (sequence is synthesized)
taaagccaacaaaagtgtgcacatgtattcagtaacagaatttgtccttttatttttgaaggtcagaaagggctgtttgatttgtgttttttttttatcatctccttgagtaggtaacat

SEQ ID NO: 669751 - DNA, 120 bp, Artificial Sequence
  ENSG00000185477_83 (sequence is synthesized)
aattatcacaaaggctgaatatagtaatcagtacattggcatattattaaatatgccagggctaagtaaccatgccattagtcacaggtaaggtcagttctttgaccactgggataattt

SEQ ID NO: 669752 - DNA, 120 bp, Artificial Sequence
  ENSG00000185477_84 (sequence is synthesized)
acattcctcacacatcctctccgtgttaagtgtgtgactaggatgtacatactatgggtgtgattgtgtacataccttgtatgaattatctaaatcctcaaagcagttgcaggaaagaag

SEQ ID NO: 669753 - DNA, 120 bp, Artificial Sequence
  ENSG00000185477_85 (sequence is synthesized)
gaagatgaaacagttgttcaaaagcctcaaaagggctaatcaatatatatttttcattttctacacataaaaatgtaaatagcttatccacatatataggcacacataatacattttatt

SEQ ID NO: 669754 - DNA, 120 bp, Artificial Sequence
  ENSG00000185477_86 (sequence is synthesized)
tatactagtatattcagataaatcacaaattaaaaccactaattgaaagttgcatatttccatgactgctctgttttacaaatattattattgaatgagatgcccccccaattaatggtg

SEQ ID NO: 669755 - DNA, 120 bp, Artificial Sequence
  ENSG00000185477_87 (sequence is synthesized)
ttactccctggtagcagattttgtgcttagaaaactccagcaactgaagcacagactggtaactgagtagctacagggaattaatgcttctctttaagcacctaatttcatatctggaaa

SEQ ID NO: 669756 - DNA, 120 bp, Artificial Sequence
  ENSG00000185477_88 (sequence is synthesized)
tggcaaacagggatgaaaatcgattatgttttggagactccttttggacatgtatcagtgtgttgatttgcacaaaccaataaaagccctacattttttggaaatggatccctagatttc

SEQ ID NO: 669757 - DNA, 120 bp, Artificial Sequence
  ENSG00000185477_89 (sequence is synthesized)
aagcatgtataatcactcaaagtggatatgatcacaggcattcttctcttgagctcagcaaaactatgcctaccaacaccgaagagaagtcaaagatttaaatgaaaaaaaattgcagat

SEQ ID NO: 669758 - DNA, 120 bp, Artificial Sequence
  ENSG00000185477_90 (sequence is synthesized)
gatgttggtgagataataggatatgagcaatgaacccttgggtggggttccagggcacttaaattgcctcgtgtcttgagttccttaagatggactcaaacaaaaaattagtattatcaa

SEQ ID NO: 669759 - DNA, 120 bp, Artificial Sequence
  ENSG00000185477_91 (sequence is synthesized)
taacaggtaatactgtgtggattctaacaacattagaatcattagctggcaagtgtcaactctgaacaagatttgtcagcttatcataattccaaccagttaattgatattgttcgaatt

SEQ ID NO: 669760 - DNA, 120 bp, Artificial Sequence
  ENSG00000185477_92 (sequence is synthesized)
tatctcattttttctcaaaggaagtgctctattagggatcaaaaagtctcacctggttcttaaaacctaacacaatttgaccttgaatcctcgacactaaaaattacgttggttgggtat

SEQ ID NO: 669761 - DNA, 60 bp, Artificial Sequence
  ENSG00000185477_93 (sequence is synthesized)
ccttgaatcctcgacactaaaaattacgttggttgggtatcagattgaaaatatgcatgg

SEQ ID NO: 669762 - DNA, 120 bp, Artificial Sequence
  ENSG00000185477_94 (sequence is synthesized)
gccattgcactccagcctgggagacagggcaaggctctgtctcaaaaaaaagaaaatataaatggaaataccagaatcaccccttgatagagaattccatttggcaaagtacaaacaacc

SEQ ID NO: 669763 - DNA, 120 bp, Artificial Sequence
  ENSG00000185477_95 (sequence is synthesized)
ttggcaaagtacaaacaaccacttctcagtagaaagttaagaataacatttaaaaacatattcatgttttagagaacgaatgtgccatcgttgtatattaaataaaaataaaagattaac

SEQ ID NO: 669764 - DNA, 120 bp, Artificial Sequence
  ENSG00000185477_96 (sequence is synthesized)
cagctataagaacactacaattacaactagagtggcagtgttttttaactaataaaagtatacatgtttataagtgcagcatacctgaaatcttgatgtttgtcaatacttatggttgct

SEQ ID NO: 669765 - DNA, 120 bp, Artificial Sequence
  ENSG00000185477_97 (sequence is synthesized)
tgcttcaaagataaatttatgtgattatttttgaaagatgtgtattaatttgaataatacccagaaaaattataacttaaaaattgcagttttcaatatgagaatcatttatgtgtgtaa

SEQ ID NO: 669766 - DNA, 120 bp, Artificial Sequence
  ENSG00000185477_98 (sequence is synthesized)
tcaactaagaaagatcaaaagtgtggtataatattacaagaaaaaatattcaaaatggaaagtccatttatgaatgtattaatattaaaatccaaagttatgtttttttataatgtctac

SEQ ID NO: 669767 - DNA, 120 bp, Artificial Sequence
  ENSG00000185477_99 (sequence is synthesized)
attataatgtttacaaaggccataaaatcatttcagaaagttctcatcctccagatattgaccaataaaacttcatttcctagaaaaaagaagaaatgttataatttatacaaagatgaa

SEQ ID NO: 669768 - DNA, 120 bp, Artificial Sequence
  ENSG00000185477_100 (sequence is synthesized)
gtaagattttggaattacgtatacttacaccttcattttggatttgatttttgaatggatgcttaaaattctgatattcaactaatgacttagttttaccatcaaaaaatttagattatg

SEQ ID NO: 669769 - DNA, 120 bp, Artificial Sequence
  ENSG00000185477_101 (sequence is synthesized)
atttttttgcatctcacttttcataataaatgtaatatagatacaatttattctgttttttgttgatgttattattgtttccactgctattgaaatcgttcttttaaccatgaatgtgca

SEQ ID NO: 669770 - DNA, 120 bp, Artificial Sequence
  ENSG00000185477_102 (sequence is synthesized)
gaatcagttgattttccatgtgacagcttctgctaggaatctgcagtggaactggaagtatttgcaatgaaagaacttttttctttaattaaaatagaattcccatagaatcaacaattc

SEQ ID NO: 669771 - DNA, 120 bp, Artificial Sequence
  ENSG00000185477_103 (sequence is synthesized)
ctcctggtcatcaaacgcgaggtttttcctgtacttggtagagcagagtgtgtgtgtgtttgtgcgttgtgtgtgtgttgtttggtgagaatgatgagagctgagcattgtgaaaataca

SEQ ID NO: 669772 - DNA, 120 bp, Artificial Sequence
  ENSG00000185477_104 (sequence is synthesized)
ggcgggggtggggtaacagagctgggtaggggtccagggcgcttagattgccttattgtccaggcttagatgcctcttacccagagccatcaggtgtaccctatatagctccagcctttc

SEQ ID NO: 669773 - DNA, 120 bp, Artificial Sequence
  ENSG00000185477_105 (sequence is synthesized)
tgcctactcctgagaagataaactgggatcctgcagtctggattcctagaaggagatggaaagcccagccatatccccagtttgacttgaccagtagtaaaactagcactacagtttgat

SEQ ID NO: 669774 - DNA, 120 bp, Artificial Sequence
  ENSG00000185477_106 (sequence is synthesized)
ccctttttacctccttgaatatcttcaattcatcaaggatctgtaaagaaggagaggtacaagatatatgaaacccaaatctcaaaacaatgatttagtgaatttcccatgaactttaaa

SEQ ID NO: 669775 - DNA, 120 bp, Artificial Sequence
  ENSG00000185477_107 (sequence is synthesized)
cagtgattgcttcaaaatttccaagagccatactctccctccagctgctgtgtgtgtgtgtgtgtataaatgcacactattttaacctaaaatggtgccctgtggctgccattctctaac

SEQ ID NO: 669776 - DNA, 120 bp, Artificial Sequence
  ENSG00000185477_108 (sequence is synthesized)
tcttgcatacttaaacatttattcttggtcaaattaaaacctcatgcatttccaaagatataaatgccttgcctggagaagttagatcttgcaagtctcaggagggccgagatggtttgt

SEQ ID NO: 669777 - DNA, 120 bp, Artificial Sequence
  ENSG00000185477_109 (sequence is synthesized)
cttatgcctatagctgtttatgtcccaccagtgggtgtttgtttcattaggtgccgtttccagccaaatgttctcattcttcacatcttcaatgttgagtagcaaacagaagaacatcct

SEQ ID NO: 669778 - DNA, 120 bp, Artificial Sequence
  ENSG00000185477_110 (sequence is synthesized)
tcttagcataatattgcttcactggactgattgtgaactcaaaatacctcttgtttcttgtgaagggtttgccttttgtaaacaatataagatcacttttggtcaaccaccctgtctgaa

SEQ ID NO: 669779 - DNA, 120 bp, Artificial Sequence
  ENSG00000185477_111 (sequence is synthesized)
tttatctgggctgctataataaagtatcataaactgggaggcttgtaaataaatttatttcttacagttttggaagctgggaaccccaaaatcaaggccaatttggtgtctggtgagggc

SEQ ID NO: 669780 - DNA, 120 bp, Artificial Sequence
  ENSG00000185477_112 (sequence is synthesized)
ctacttgccggctcacgtgtggtgcctgtttgctgtgtcctcacacagtaaaagggatgaagtgtcccctcccgggccactttcaaaagggcactaatctcactcatgagggctctgtga

SEQ ID NO: 669781 - DNA, 120 bp, Artificial Sequence
  ENSG00000185477_113 (sequence is synthesized)
ccaccatctaatcaccacccaaagcccccactttctaacaccatcgccttaggagttcagacttcaacatgagttttggagggatacagacatttagaccatggcatacacattcttaat

SEQ ID NO: 669782 - DNA, 120 bp, Artificial Sequence
  ENSG00000185477_114 (sequence is synthesized)
gaacttctgaatgccaccattattaaattttcttcaacaccattctacacaaccactgagctaattgacagagttctaaaatgtttagacccttgtaactaccttagcaatgttctgaag

SEQ ID NO: 669783 - DNA, 120 bp, Artificial Sequence
  ENSG00000185477_115 (sequence is synthesized)
ctggtttttctaaatatatcacagaggtctaacatagttgaaattcaaattgtctggatggaagctgaaagtgcttgcagagatttctggtgggagtactggcatctcaagaatggtatt

SEQ ID NO: 669784 - DNA, 120 bp, Artificial Sequence
  ENSG00000185477_116 (sequence is synthesized)
tccctacaccttttttagtcccgcttgacgtctctcaatcaaactgcaaaagagccttgacctgccattaaaaataataataagcagaatgtcattgccaaagattattataggtgttta

SEQ ID NO: 669785 - DNA, 120 bp, Artificial Sequence
  ENSG00000185477_117 (sequence is synthesized)
aaagcaagataagacttcttaaagggctccaaagcatttgcttgttatctatgtttttttagcccaaagccaaaacaaaaaataatgcctttgtgccagacgttttgctgggcacttcca

SEQ ID NO: 669786 - DNA, 120 bp, Artificial Sequence
  ENSG00000185477_118 (sequence is synthesized)
tctatgtctcaaccttaggaggtataatgtatacatgcacagttttacaatttgtcaatggcacagatacttgagacatataaattggatgatcacagagatattgtggtaaatatctgg

SEQ ID NO: 669787 - DNA, 120 bp, Artificial Sequence
  ENSG00000185477_119 (sequence is synthesized)
gcttggaatcaaaggaccctgggttcaaatctcagcttcgaatcaaagaagctaaattctttggctgagtaaaccaaaacacctcccaccagaccccacctccaaatttcaacatgaaat

SEQ ID NO: 669788 - DNA, 120 bp, Artificial Sequence
  ENSG00000185477_120 (sequence is synthesized)
ttggagaggataaatatccaaattatttcagtgcattcatctggaaactgagaataacaatgctcactttgcaaatttgtgggaattaaatggcataggcaaaatattgttcttttcttc

SEQ ID NO: 669789 - DNA, 120 bp, Artificial Sequence
  ENSG00000185477_121 (sequence is synthesized)
tcttactcctctgagttttgctttcttccacttgaactttaccactcaattgttaaaagccttgaattttgccattgtattctatttaataaacttttgataaatctggataaataataa

SEQ ID NO: 669790 - DNA, 120 bp, Artificial Sequence
  ENSG00000185479_0 (sequence is synthesized)
gtcctgcttctcctccctctcgcctccagcctctcacactctcctaagccctctcatctcctggaaccatggccagcacatccaccaccatcaggagccacagcagcagccgccggggtt

SEQ ID NO: 669791 - DNA, 120 bp, Artificial Sequence
  ENSG00000185479_1 (sequence is synthesized)
tcagtgccaactcagccaggctccctggggtcagccgctctggcttcagcagcatctccgtgtcccgctccaggggcagtggtggcctgggtggcgcatgtggaggagctggctttggca

SEQ ID NO: 669792 - DNA, 120 bp, Artificial Sequence; identical to SEQ ID NO: 568507
  ENSG00000185479_2 (sequence is synthesized)

SEQ ID NO: 669793 - DNA, 120 bp, Artificial Sequence; identical to SEQ ID NO: 568508
  ENSG00000185479_3 (sequence is synthesized)

SEQ ID NO: 669794 - DNA, 120 bp, Artificial Sequence
  ENSG00000185479_4 (sequence is synthesized)
gcatccaagaggtcactgtcaaccagagtctcctgactcccctcaacctgcaaattgaccccgccatccagcgggtgcgggccgaggagcgtgagcagatcaagaccctcaacaacaagt

SEQ ID NO: 669795 - DNA, 120 bp, Artificial Sequence; identical to SEQ ID NO: 568510
  ENSG00000185479_5 (sequence is synthesized)

SEQ ID NO: 669796 - DNA, 120 bp, Artificial Sequence
  ENSG00000185479_6 (sequence is synthesized)
tcaacaacctcaggaggcagctggacaacatcgtgggggaacggggtcgtctggactcggagctgagaaacatgcaggacctggtggaggacctcaagaacaaatatgaggatgaaatca

SEQ ID NO: 669797 - DNA, 120 bp, Artificial Sequence
  ENSG00000185479_7 (sequence is synthesized)
acaagcgcacagcagcagagaatgaatttgtgactctgaagaaggatgtggatgctgcctacatgaacaaggttgaactgcaagccaaggcagacactcttacagatgagatcaacttcc

SEQ ID NO: 669798 - DNA, 120 bp, Artificial Sequence; identical to SEQ ID NO: 568513
  ENSG00000185479_8 (sequence is synthesized)

SEQ ID NO: 669799 - DNA, 120 bp, Artificial Sequence
  ENSG00000185479_9 (sequence is synthesized)
tcagaggagcagggctgaggctgagtcctggtaccagacaaagtacgaggagctgcagatcacagcaggcagacatggggacgacctgcgcaacaccaagcaggagattgctgagatcaa

SEQ ID NO: 669800 - DNA, 120 bp, Artificial Sequence
  ENSG00000185479_10 (sequence is synthesized)
ccgcatgatccagaggctgagatctgagatcgaccacgtcaagaagcagtgtgccaacctacaggccgccattgctgatgctgagcagcgtggggagatggccctcaaggatgctaagaa

SEQ ID NO: 669801 - DNA, 120 bp, Artificial Sequence
  ENSG00000185479_11 (sequence is synthesized)
caagctggaagggctggaggatgccctgcagaaggccaagcaggacctggcccggctgctgaaggagtaccaggagctgatgaacgtcaagctggccctggatgtggagatcgccaccta

SEQ ID NO: 669802 - DNA, 120 bp, Artificial Sequence
  ENSG00000185479_12 (sequence is synthesized)
ccgcaagctgctggagggcgaggagtgcaggctgaatggcgaaggcgttggacaagtcaacatctctgtagtgcagtccaccgtctccagtggctatggcggtgccagcggtgtcggcag

SEQ ID NO: 669803 - DNA, 120 bp, Artificial Sequence
  ENSG00000185479_13 (sequence is synthesized)
tggcttaggcctgggtggaggaagcagctactcctatggcagtggtcttggcgttggaggcggctttagttccagcagcggcagagccactgggggtggcctcagctctgttggaggcgg

SEQ ID NO: 669804 - DNA, 120 bp, Artificial Sequence
  ENSG00000185479_14 (sequence is synthesized)
cagttccaccatcaagtacaccaccacctcctcctccagcaggaagagctacaagcactgaagtgctgccgccagctctcagtcccacagctctcaggcccctctctggcagcagagccc

SEQ ID NO: 669805 - DNA, 120 bp, Artificial Sequence
  ENSG00000185479_15 (sequence is synthesized)
tctcctcaggttgcttgtcctcccctggcctccagtctcccctgccctcccgggtagagctgggatgccctcacttttcttctcatcaatacctgttccactgagctcctgttgcttacc

SEQ ID NO: 669806 - DNA, 120 bp, Artificial Sequence
  ENSG00000185479_16 (sequence is synthesized)
atcaagtcaacagttatcagcactcagacatgcgaatgtcctttttagttcccgtattattacaggtatctgagtctgccataattctgagaagaaaatgacctatatccccataagaac

SEQ ID NO: 669807 - DNA, 120 bp, Artificial Sequence
  ENSG00000185479_17 (sequence is synthesized)
tgaaactcagtctaggtccagctgcagatgaggagtcctctctttaattgctaaccatcctgcccattatagctacactcaggagttctcatctgacaagtcagttgtcctgatcttctc

SEQ ID NO: 669808 - DNA, 120 bp, Artificial Sequence
  ENSG00000185479_18 (sequence is synthesized)
ttgcagtgtccctgaatggcaagtgatgtaccttctgatgcagtctgcattcctgcactgctttctctgctctctttgccttcttttgttctgttgaataaagcatattgagaatgtgaa

SEQ ID NO: 669809 - DNA, 120 bp, Artificial Sequence
  ENSG00000185480_0 (sequence is synthesized)
ccgcacactgaagagtacgtcttcgggtctacccctaatcacataatggctgtgtttaatcagaagtctgtctcggatatgattaaagagtttcgaaaaaattggcgtgctctttgtaac

SEQ ID NO: 669810 - DNA, 120 bp, Artificial Sequence
  ENSG00000185480_1 (sequence is synthesized)
tctgagagaactactctatgtggtgcagactccatgctcttggcattgcagctttctatggcggagaacaacaaacagcacagtggagaatttacagtctctctcagtgatgttttattg

SEQ ID NO: 669811 - DNA, 120 bp, Artificial Sequence
  ENSG00000185480_2 (sequence is synthesized)
acatggaaatacttgctccatgagaaattgaacttaccagttgaaaacatggacgtgactgaccattatgaggacgttaggaagatttatgatgatttcttgaagaacagtaatatgtta

SEQ ID NO: 669812 - DNA, 120 bp, Artificial Sequence
  ENSG00000185480_3 (sequence is synthesized)
gatctgattgatgtttatcaaaaatgtagggctttgacttctaattgtgaaaattataacacagtatctcctagtcaactactggattttctgtctggcaaacagtatgcagtaggtgat

SEQ ID NO: 669813 - DNA, 120 bp, Artificial Sequence
  ENSG00000185480_4 (sequence is synthesized)
gaaactgatctttctataccaacatcaccaacaagtaaatacaaccgtgataatgaaaaggtgcagctgctagcaaggaaaattatcttttcatatttaaatctgctagtgaattcaaag

SEQ ID NO: 669814 - DNA, 120 bp, Artificial Sequence
  ENSG00000185480_5 (sequence is synthesized)
aatgacctggctgtggcttatattctcaatattcctgatagaggactaggaagagaagccttcactgatttgaaacatgctgctcgagagaaacaaatgtctatctttttggtggccacg

SEQ ID NO: 669815 - DNA, 120 bp, Artificial Sequence
  ENSG00000185480_6 (sequence is synthesized)
tcttttattagaacaatagagcttggagggaaaggatatgcaccaccaccatcagatcctttaaggacacatgtaaagggattgtctaattttattaatttcattgacaaattagatgag

SEQ ID NO: 669816 - DNA, 120 bp, Artificial Sequence
  ENSG00000185480_7 (sequence is synthesized)
attcttggagaaataccaaacccaagcattgcagggggtcaaatactgtcagtgataaagatgcaactgattaaaggccaaaacagcagggatcctttttgcaaagcaatagaggaagtt

SEQ ID NO: 669817 - DNA, 120 bp, Artificial Sequence
  ENSG00000185480_8 (sequence is synthesized)
gctcaggatttggatttgaggattaaaaatattatcaattctcaagaaggtgttgtagctcttagcaccactgacatcagtcctgctcggccaaaatctcatgccataaaccatggtact

SEQ ID NO: 669818 - DNA, 120 bp, Artificial Sequence
  ENSG00000185480_9 (sequence is synthesized)
gcatactgtggcagagatactgtgaaagccttattagttcttttggacgaagaagcagctaatgctcctaccaaaaacaaagcagagcttttatatgatgaggaaaacacaatccatcat

SEQ ID NO: 669819 - DNA, 120 bp, Artificial Sequence
  ENSG00000185480_10 (sequence is synthesized)
catggaacgtctattcttacactttttaggtctcccacacaggtgaataattcgataaaacccctaagagaacgcatctgtgtgtcaatgcaagagaaaaaaattaagatgaagcaaact

SEQ ID NO: 669820 - DNA, 120 bp, Artificial Sequence
  ENSG00000185480_11 (sequence is synthesized)
ttaattagatcccaatttgcttgtacttataaagatgactacatgataagcaaggataattggaataatgttaatttagcatcaaagcctttgtgtgttctttacatggaaaatgacctt

SEQ ID NO: 669821 - DNA, 120 bp, Artificial Sequence
  ENSG00000185480_12 (sequence is synthesized)
tccatctgttggaagatcaacaattggaacgagttttggaaatgttcatctggacagaagtaaaaatgaaaaagtatcaagaaaatcaaccagtcagacaggaaataaaagctcaaaaag

SEQ ID NO: 669822 - DNA, 120 bp, Artificial Sequence
  ENSG00000185480_13 (sequence is synthesized)
gaaacaggtggatttggatggtgaaaatattctctgtgataatagaaatgaaccacctcaacataaaaatgctaaaatacctaagaaatcaaatgattcacagaatagattgtacggcaa

SEQ ID NO: 669823 - DNA, 120 bp, Artificial Sequence
  ENSG00000185480_14 (sequence is synthesized)
actagctaaagtagcaaaaagtaataaatgtactgccaaggacaagttgatttctggccaggcaaagttaactcagttttttagactataaatttgtgtcttatatgctttaggtttatg

SEQ ID NO: 669824 - DNA, 120 bp, Artificial Sequence
  ENSG00000185480_15 (sequence is synthesized)
tatctataaaccattcaccaaagacatgcttaatttttaagagatcaaggtgtaaattatgatgatttattattttggtctacagtgtatgtaaggttagtatgttaagcattgtttaaa

SEQ ID NO: 669825 - DNA, 120 bp, Artificial Sequence
  ENSG00000185480_16 (sequence is synthesized)
aatactagtaagtcataattatgcagaattttcacaaagtttaatgcacagagaaagcatatcatttcagttactgatacatcttaacactactttcttttaaaacagacatttaacata

SEQ ID NO: 669826 - DNA, 120 bp, Artificial Sequence
  ENSG00000185480_17 (sequence is synthesized)
cacaagttatagtagcagtatgggcttctcctcccattggcaattaaatgcttttattttcttctgaaaagatgatgtggaccaacaggtatcagacttgccaacaaggtcggtagactc

SEQ ID NO: 669827 - DNA, 120 bp, Artificial Sequence
  ENSG00000185480_18 (sequence is synthesized)
ttcccagcatacatctgagcactgaaggaagaagaaagtttaaattgtttaaaggactataattatcacacaaaatttattaagaaaaaaagaatggatctagtataactaattctgagt

SEQ ID NO: 669828 - DNA, 120 bp, Artificial Sequence
  ENSG00000185480_19 (sequence is synthesized)
aaaccaaaatgataataattaattgttgctatttaatcccacatttttggcaggtgtaattgagccatggtcttatttgattttgttatgattgcatccaaattcactttaactcagagt

SEQ ID NO: 669829 - DNA, 120 bp, Artificial Sequence
  ENSG00000185480_20 (sequence is synthesized)
tctgtttaatggtggtaggatgtaagaattgaattttgaaaagactactcactgtcaaaatctctccttcctataggaaatttagctgagttttcttcatccccaatttctctcttttct

SEQ ID NO: 669830 - DNA, 120 bp, Artificial Sequence
  ENSG00000185480_21 (sequence is synthesized)
tgtgttgattcagtattctgaactccattctcagctgggaaagctacagatccttttagtgcaagataaggttttatagccagattcagtggcagaccatgatttaagaaattatgtttg

SEQ ID NO: 669831 - DNA, 120 bp, Artificial Sequence
  ENSG00000185480_22 (sequence is synthesized)
gagcctgtgttctgtaaagagaaggttgatttggtttttagctatcgtattcggagtggaactataatacaattgtataatattcttgttgatcaattcaaagttactctgcactgtttt

SEQ ID NO: 669832 - DNA, 120 bp, Artificial Sequence
  ENSG00000185480_23 (sequence is synthesized)
tgactttttaaaaataccttagatgcaaatttataggagaaaaaacactttcagataagaggtgtttgctgggatggaagaactacctggcatgtaagaaatatcgtcagtcgtcctaat

SEQ ID NO: 669833 - DNA, 120 bp, Artificial Sequence
  ENSG00000185480_24 (sequence is synthesized)
gcatattgtgactgtttgcatatacttctgtttataaaagtatcagttttacttttcagaggatttgtaagaatcatttaaattttcattgaaataaacgacaagtcacattgccactta

SEQ ID NO: 669834 - DNA, 120 bp, Artificial Sequence
  ENSG00000185480_25 (sequence is synthesized)
atagtatcaccagttatagtaacttggtaatgtttttgctttgtgaatcatgttaaaaatgggaaaatttagctacctgaaagctacttattacttgaaagaaagattttgtggtaaatt

SEQ ID NO: 669835 - DNA, 120 bp, Artificial Sequence
  ENSG00000185480_26 (sequence is synthesized)
ttcttggacttgtgttattgttatttagttgctatacggatagcttcttattagatcaaaaatccctaacaaagaaattagtcccaaatgcctgatttctttttgaatcatgtcaaagat

SEQ ID NO: 669836 - DNA, 120 bp, Artificial Sequence
  ENSG00000185480_27 (sequence is synthesized)
tgcttttgtattcactttcttgatttaatgtgcatctgttcatttggcatatgttggataaatgattggtgtgactttttctatggattaataatgttattttactacatataggtatca

SEQ ID NO: 669837 - DNA, 120 bp, Artificial Sequence
  ENSG00000185480_28 (sequence is synthesized)
tttattttatgaaaatagtattatgcaatatacatgagataatagactattctttttttgcacaagcatttttttaatggagtataaatgtaaaaattaaatggagtagtatcccttgca

SEQ ID NO: 669838 - DNA, 120 bp, Artificial Sequence
  ENSG00000185480_29 (sequence is synthesized)
acagtatctcctgggtcaactatacagccaccttcagaaagaggaagcttgctgctgtctaggccagatctcttggctcctggggaagatccaccagtgtcagcctcattgactctggag

SEQ ID NO: 669839 - DNA, 120 bp, Artificial Sequence
  ENSG00000185480_30 (sequence is synthesized)
cggcagaagggagagtccctcttagcatggagctggtccctaaacttcagattgcctgggattcccatcacggtccagaagaagagacgagacctgaagaagctggcagctgtcatgcgg

SEQ ID NO: 669840 - DNA, 120 bp, Artificial Sequence
  ENSG00000185480_31 (sequence is synthesized)
gcagactccatgctcttggcattgcagctttctatggcggagaacaacaaacagagtcaactactggattttctgtctggcaaacagtatgcagtaggtgatgaaactgatctttctata

SEQ ID NO: 669841 - DNA, 120 bp, Artificial Sequence
  ENSG00000185480_32 (sequence is synthesized)
gtagcaaagtgccgtgggaccgaagtattatggtgcagtgacttgacgctcgagcctggttgggcctgggggctgtaggcggagttcacagtatctagcgatggagctgataatggctgt

SEQ ID NO: 669842 - DNA, 120 bp, Artificial Sequence
  ENSG00000185480_33 (sequence is synthesized)
gtaaatacaaccgtgataatgaaaaggccctcccagtcctgaagagataactgagagtctagcaccttttaataggaagcatttgccatctattgtttctaagggtggccacctatgaga

SEQ ID NO: 669843 - DNA, 120 bp, Artificial Sequence
  ENSG00000185480_34 (sequence is synthesized)
cgtcatctacataataagaaccttggtcttcacaatcccatatcttaaaccagagactcctttctactgattccaggtctttagataataattctttcaaccaattgcttgccaatcaga

SEQ ID NO: 669844 - DNA, 120 bp, Artificial Sequence
  ENSG00000185480_35 (sequence is synthesized)
aaatctttgaatctacctatgacctataagccccatttcaaggtgtcccacctttccaggctgaaccaatctttacctcacatgtactgattgatgtcttatgtctctctaaaacatata

SEQ ID NO: 669845 - DNA, 120 bp, Artificial Sequence
  ENSG00000185480_36 (sequence is synthesized)
ccaaggagcttcagtttaatataaaaccaggagcaaacctccgaagtccaggcatctcagagaaatgctttttttgtgtaccatggttaccaaatacagagctagattttatttttgtaa

SEQ ID NO: 669846 - DNA, 120 bp, Artificial Sequence
  ENSG00000185482_0 (sequence is synthesized)
catttcagccctgacaccaaggcaggaggctaggaggtctacaaatagcgactgggtagctggtgtgaacacagggggtactgggggggcttagcccccaaggaagaggaccagtttttc

SEQ ID NO: 669847 - DNA, 120 bp, Artificial Sequence
  ENSG00000185482_1 (sequence is synthesized)
cccagcaccaccatcaaggcctcgaggctcccagctccctctacagcctgtggactgacttagggaatcccgaacgatgacagaaaaggaggtgctggagtcccctaagccctccttccc

SEQ ID NO: 669848 - DNA, 120 bp, Artificial Sequence
  ENSG00000185482_2 (sequence is synthesized)
agcagagactcggcaaagtgggctacagcggctaaagcagttactcaggaagggttctacagggacaaaggagatggaacttcccccagagccccaggccaatggggaggcagtgggagc

SEQ ID NO: 669849 - DNA, 120 bp, Artificial Sequence
  ENSG00000185482_3 (sequence is synthesized)
tgggggtgggcccatctactacatctatgaggaagaggaagaggaagaagaggaggaggaggagccacccccagaacctcctaagctggtcaacgataagccccacaaattcaaagatca

SEQ ID NO: 669850 - DNA, 120 bp, Artificial Sequence
  ENSG00000185482_4 (sequence is synthesized)
cttcttcaagaagccaaagttctgtgatgtctgtgcccggatgattgttctcaacaacaagtttgggcttcgctgtaagaactgcaaaaccaacatccatgaacactgtcagtcctatgt

SEQ ID NO: 669851 - DNA, 120 bp, Artificial Sequence
  ENSG00000185482_5 (sequence is synthesized)
ggaaatgcagagatgcttcggcaagatcccacctggtttccatcgggcctatagttccccactctacagcaaccagcagtacgcttgtgtcaaagatctctctgctgccaatcgcaatga

SEQ ID NO: 669852 - DNA, 120 bp, Artificial Sequence
  ENSG00000185482_6 (sequence is synthesized)
gcagccatgatggaggaggagccagagtcggccagaccagaggaaggcaaaccccaggatggaaaccctgaaggggataagaaggctgagaagaagacacctgatgacaagcacaagcag

SEQ ID NO: 669853 - DNA, 120 bp, Artificial Sequence
  ENSG00000185482_7 (sequence is synthesized)
cctggcttccagcagtctcattactttgtggctctctatcggttcaaagccctggagaaggacgatctggatttcccgccaggagagaagatcacagtcattgatgactccaatgaagaa

SEQ ID NO: 669854 - DNA, 120 bp, Artificial Sequence
  ENSG00000185482_8 (sequence is synthesized)
tggtggcgggggaaaatcggggagaaggtcggatttttccctccaaacttcatcattcgggtccgggctggagaacgtgtgcaccgcgtgacgagatccttcgtggggaaccgcgagata

SEQ ID NO: 669855 - DNA, 120 bp, Artificial Sequence
  ENSG00000185482_9 (sequence is synthesized)
gggcagatcactctcaagaaggaccagatcgtggtgcagaaaggagacgaagcgggcggctacgtcaaggtctacaccggccgcaaggtggggctgtttcccaccgactttctagaggaa

SEQ ID NO: 669856 - DNA, 120 bp, Artificial Sequence
  ENSG00000185482_10 (sequence is synthesized)
atttaggcgtgcgggcgcctgcaagcgggagacacccacaccccattctgggcgggcccagtggagtttggggaggggggcgaaagcaacgggactgctgggagaggaggggtaggaagg

SEQ ID NO: 669857 - DNA, 120 bp, Artificial Sequence
  ENSG00000185482_11 (sequence is synthesized)
cccgcctgagcgcgacggggcttccgggaagggactggttctcgcccccttccccagcctggggcctcggatacctgctgcccagagcagcccggacccgaaacctttcaggccccgctt

SEQ ID NO: 669858 - DNA, 120 bp, Artificial Sequence
  ENSG00000185482_12 (sequence is synthesized)
gcaagagctggaaaaaaacgcgtatctactaggaggagccagggactggggcggggggcgggggcgagggagggcgaactgtcgaatgttgcgaatttattaaacttttgacaaaactta

SEQ ID NO: 669859 - DNA, 120 bp, Artificial Sequence
  ENSG00000185482_13 (sequence is synthesized)
accagccagctaccccttgctggtctctcctccatcccattcatttctctgctttttctttctcagcccatctctttttctgagaaagggtgagcactcctgggagagataggcttctgg

SEQ ID NO: 669860 - DNA, 120 bp, Artificial Sequence
  ENSG00000185482_14 (sequence is synthesized)
cccaacccagctctgacaccactactcatggccctggcagaagctcactctttaactcctaggcttcccatcacttctgacccacactctccatcaacttgcacacccacccacgaccaa

SEQ ID NO: 669861 - DNA, 120 bp, Artificial Sequence
  ENSG00000185483_0 (sequence is synthesized)
aagttgagcgagagagggagcgtggagagctggagcagccgccaccgccgccgccgagggagccccgggacggcagcccctgggcgcagggtgcgctgttctcggagtccgacccagggc

SEQ ID NO: 669862 - DNA, 120 bp, Artificial Sequence
  ENSG00000185483_1 (sequence is synthesized)
gactcacgcccactggtgcgacccggacagcctgggactgacccgccggcccaggcgaggctgcagccagagggctgggaagggatcgcgctcgcggcatccagaggcggccaggcggag

SEQ ID NO: 669863 - DNA, 120 bp, Artificial Sequence
  ENSG00000185483_2 (sequence is synthesized)
gcgagggagcaggttagagggacaaagagctttgcagacgtccccggcgtcctgcgagcgccagcggccgggacgaggcggccgggagcccgggaagagcccgtggatgttctgcgcgcg

SEQ ID NO: 669864 - DNA, 120 bp, Artificial Sequence
  ENSG00000185483_3 (sequence is synthesized)
gccgcctcagcgagaggaggaatgcaccggccgcgccgccgcgggacgcgcccgccgctcctggcgctgctggccgcgctgctgctggccgcacgcggggctgctgcccaagaaacagag

SEQ ID NO: 669865 - DNA, 120 bp, Artificial Sequence
  ENSG00000185483_4 (sequence is synthesized)
ctgctgcccaagaaacagagctgtcagtcagtgctgaattagtgcctacctcatcatggaacatctcaagtgaactcaacaaagattcttacctgaccctcgatgaaccaatgaataaca

SEQ ID NO: 669866 - DNA, 120 bp, Artificial Sequence
  ENSG00000185483_5 (sequence is synthesized)
tcaccacgtctctgggccagacagcagaactgcactgcaaagtctctgggaatccacctcccaccatccgctggttcaaaaatgatgctcctgtggtccaggagccccggaggctctcct

SEQ ID NO: 669867 - DNA, 120 bp, Artificial Sequence
  ENSG00000185483_6 (sequence is synthesized)
ttcggtccaccatctatggctctcggctgcggattagaaacctcgacaccacagacacaggctacttccagtgcgtggcaacaaacggcaaggaggtggtttcttccactggagtcttgt

SEQ ID NO: 669868 - DNA, 120 bp, Artificial Sequence
  ENSG00000185483_7 (sequence is synthesized)
ttgtcaagtttggcccccctcccactgcaagtccaggatactcagatgagtatgaagaagatggattctgtcagccatacagagggattgcatgtgcaagatttattggcaaccgcaccg

SEQ ID NO: 669869 - DNA, 120 bp, Artificial Sequence
  ENSG00000185483_8 (sequence is synthesized)
tctatatggagtctttgcacatgcaaggggaaatagaaaatcagatcacagctgccttcactatgattggcacttccagtcacttatctgataagtgttctcagttcgccattccttccc

SEQ ID NO: 669870 - DNA, 120 bp, Artificial Sequence
  ENSG00000185483_9 (sequence is synthesized)
tgtgccactatgccttcccgtactgcgatgaaacttcatccgtcccaaagccccgtgacttgtgtcgcgatgaatgtgaaatcctggagaatgtcctgtgtcaaacagagtacatttttg

SEQ ID NO: 669871 - DNA, 120 bp, Artificial Sequence
  ENSG00000185483_10 (sequence is synthesized)
caagatcaaatcccatgattctgatgaggctgaaactgccaaactgtgaagatctcccccagccagagagcccagaagctgcgaactgtatccggattggaattcccatggcagatccta

SEQ ID NO: 669872 - DNA, 120 bp, Artificial Sequence
  ENSG00000185483_11 (sequence is synthesized)
taaataaaaatcacaagtgttataacagcacaggtgtggactaccgggggaccgtcagtgtgaccaaatcagggcgccagtgccagccatggaattcccagtatccccacacacacactt

SEQ ID NO: 669873 - DNA, 120 bp, Artificial Sequence
  ENSG00000185483_12 (sequence is synthesized)
tcaccgcccttcgtttcccagagctgaatggaggccattcctactgccgcaacccagggaatcaaaaggaagctccctggtgcttcaccttggatgaaaactttaagtctgatctgtgtg

SEQ ID NO: 669874 - DNA, 120 bp, Artificial Sequence
  ENSG00000185483_13 (sequence is synthesized)
acatcccagcgtgcgattcaaaggattccaaggagaagaataaaatggaaatcctgtacatactagtgccaagtgtggccattcccctggccattgctttactcttcttcttcatttgcg

SEQ ID NO: 669875 - DNA, 120 bp, Artificial Sequence
  ENSG00000185483_14 (sequence is synthesized)
tctgtcggaataaccagaagtcatcgtcggcaccagtccagaggcaaccaaaacacgtcagaggtcaaaatgtagagatgtcaatgctgaatgcatataaacccaagagcaaggctaaag

SEQ ID NO: 669876 - DNA, 120 bp, Artificial Sequence
  ENSG00000185483_15 (sequence is synthesized)
agctacctctttctgctgtacgctttatggaagaattgggtgagtgtgcctttggaaaaatctataaaggccatctctatctcccaggcatggaccatgctcagctggttgctatcaaga

SEQ ID NO: 669877 - DNA, 120 bp, Artificial Sequence
  ENSG00000185483_16 (sequence is synthesized)
ccttgaaagactataacaacccccagcaatggacggaatttcaacaagaagcctccctaatggcagaactgcaccaccccaatattgtctgccttctaggtgccgtcactcaggaacaac

SEQ ID NO: 669878 - DNA, 120 bp, Artificial Sequence
  ENSG00000185483_17 (sequence is synthesized)
ctgtgtgcatgctttttgagtatattaatcagggggatctccatgagttcctcatcatgagatccccacactctgatgttggctgcagcagtgatgaagatgggactgtgaaatccagcc

SEQ ID NO: 669879 - DNA, 120 bp, Artificial Sequence
  ENSG00000185483_18 (sequence is synthesized)
tggaccacggagattttctgcacattgcaattcagattgcagctggcatggaatacctgtctagtcacttctttgtccacaaggaccttgcagctcgcaatattttaatcggagagcaac

SEQ ID NO: 669880 - DNA, 120 bp, Artificial Sequence
  ENSG00000185483_19 (sequence is synthesized)
ttcatgtaaagatttcagacttggggctttccagagaaatttactccgctgattactacagggtccagagtaagtccttgctgcccattcgctggatgccccctgaagccatcatgtatg

SEQ ID NO: 669881 - DNA, 120 bp, Artificial Sequence
  ENSG00000185483_20 (sequence is synthesized)
gcaaattctcttctgattcagatatctggtcctttggggttgtcttgtgggagattttcagttttggactccagccatattatggattcagtaaccaggaagtgattgagatggtgagaa

SEQ ID NO: 669882 - DNA, 120 bp, Artificial Sequence
  ENSG00000185483_21 (sequence is synthesized)
aacggcagctcttaccatgctctgaagactgcccacccagaatgtacagcctcatgacagagtgctggaatgagattccttctaggagaccaagatttaaagatattcacgtccggcttc

SEQ ID NO: 669883 - DNA, 120 bp, Artificial Sequence
  ENSG00000185483_22 (sequence is synthesized)
ggtcctgggagggactctcaagtcacacaagctctactactccttcagggggaaatgccaccacacagacaacctccctcagtgccagcccagtgagtaatctcagtaaccccagatatc

SEQ ID NO: 669884 - DNA, 120 bp, Artificial Sequence
  ENSG00000185483_23 (sequence is synthesized)
ctaattacatgttcccgagccagggtattacaccacagggccagattgctggtttcattggcccgccaatacctcagaaccagcgattcattcccatcaatggatacccaatacctcctg

SEQ ID NO: 669885 - DNA, 120 bp, Artificial Sequence
  ENSG00000185483_24 (sequence is synthesized)
agtgggtcgactagcactggccatgtgactagcttgccctcatcaggatccaatcaggaagcaaatattcctttactaccacacatgtcaattccaaatcatcctggtggaatgggtatc

SEQ ID NO: 669886 - DNA, 120 bp, Artificial Sequence
  ENSG00000185483_25 (sequence is synthesized)
accgtttttggcaacaaatctcaaaaaccctacaaaattgactcaaagcaagcatctttactaggagacgccaatattcatggacacaccgaatctatgatttctgcagaactgtaaaat

SEQ ID NO: 669887 - DNA, 120 bp, Artificial Sequence
  ENSG00000185483_26 (sequence is synthesized)
gcacaacttttgtaaatgtggtatacaggacaaactagacggccgtagaaaagatttatattcaaatgtttttattaaagtaaggttctcatttagcagacatcgcaacaagtaccttct

SEQ ID NO: 669888 - DNA, 81 bp, Artificial Sequence
  ENSG00000185483_27 (sequence is synthesized)
taaggttctcatttagcagacatcgcaacaagtaccttctgtgaagtttcactgtgtcttaccaagcaggacagacactcg

SEQ ID NO: 669889 - DNA, 120 bp, Artificial Sequence
  ENSG00000185483_28 (sequence is synthesized)
gcattgggattggaacatgtggtttcgagcactgaaagctgcaaaccagtgaagaggaaaagaaccttgtgattaaatataaaaccaaaagtcaaatggtgctttgtgttttagccttca

SEQ ID NO: 669890 - DNA, 120 bp, Artificial Sequence
  ENSG00000185483_29 (sequence is synthesized)
gtcaccatgactggtctctcccccagatgtatatataccatagcatttgtctacctgctgtcttttcttcaggacagatgttcaggaattatattgattgaatttagactctgtgcatgt

SEQ ID NO: 669891 - DNA, 120 bp, Artificial Sequence
  ENSG00000185483_30 (sequence is synthesized)
tcttatggaaatgatgttcagaatccatgaagaaacttcaggccaaatttgaaaccctggagggaaatgagccataagggaagtataacaagccctgaagccttttatgtcgttgtgctt

SEQ ID NO: 669892 - DNA, 120 bp, Artificial Sequence
  ENSG00000185483_31 (sequence is synthesized)
ctttgggaaggtgtagagtgtgcctttttgtgaatcctcctctgatcatgagggtctttcccacagtttctcacagtgtgtttacactgcccttggaataacacagcgcatcagaccata

SEQ ID NO: 669893 - DNA, 120 bp, Artificial Sequence
  ENSG00000185483_32 (sequence is synthesized)
agaaggctagatgtggatgctagaattgattgttggttgatagttctctttgctggattaggaatgaggcgccaaaggaagcacagccaggaaaatggccccacagcctagatcagcatc

SEQ ID NO: 669894 - DNA, 120 bp, Artificial Sequence
  ENSG00000185483_33 (sequence is synthesized)
tgtgggaaaggaaaaagggttcccatggggacagcccccataggagttttctggaaccagtaacactgaaaaataagtgtgtggctacagatgagcacgcccaccccttgcaactccctg

SEQ ID NO: 669895 - DNA, 120 bp, Artificial Sequence
  ENSG00000185483_34 (sequence is synthesized)
tttacaagttgtccgaggcattggagtgcttatggtcaatgggctctagggaagtaggaaactccatcatgatacaaatgtctagtaattttaaagtttctttccctttttttctgtgct

SEQ ID NO: 669896 - DNA, 120 bp, Artificial Sequence
  ENSG00000185483_35 (sequence is synthesized)
ggaaatgttcacagatttgattcccgccccaagaattacaacaatgtattcatacagtcagttggaatccaaaggcaattaattctattttgcaaaatatgatggtcttcctaaaaaaca

SEQ ID NO: 669897 - DNA, 120 bp, Artificial Sequence
  ENSG00000185483_36 (sequence is synthesized)
agtactgagttctcatttcaaaagttaccaagaactgaattctttaaactagcaaaccgaagtaacatgaccatttttgccttagtgggaggtttcaaatgtgcagctcatggcatttac

SEQ ID NO: 669898 - DNA, 120 bp, Artificial Sequence
  ENSG00000185483_37 (sequence is synthesized)
ctgccgaccatcttttgccaagtttagaattcttatgcgtttcaagttctatatagaaagtaattttacttttgatttttctcttgttaaaaaaaaactcctttattctaagaacaatgt

SEQ ID NO: 669899 - DNA, 120 bp, Artificial Sequence
  ENSG00000185483_38 (sequence is synthesized)
ctcaaagtctcatttttactttaaaggtataagagacttctaaagagacttacgggatataaaagtaattcctggaaatgatatttgatgaggagaatgtaagagaatgaaaaacacatt

SEQ ID NO: 669900 - DNA, 120 bp, Artificial Sequence
  ENSG00000185483_39 (sequence is synthesized)
gatgttttcatttttaaaaaatacaactagcatgagaaatcaagaaaatatgtttaccaaaatgcattgcaattttcccaaacctgagtcttcaaataacaaacatgaacttataggtac

SEQ ID NO: 669901 - DNA, 120 bp, Artificial Sequence
  ENSG00000185483_40 (sequence is synthesized)
tgtgaactagaagaattggttatatccagatttctgggagataaattaaaacatatttttgtggcataaataagctgattcagaagttacatttcttaactttaggtagaggagaatatt

SEQ ID NO: 669902 - DNA, 120 bp, Artificial Sequence
  ENSG00000185483_41 (sequence is synthesized)
tgtatccttttgttgctatgcaactgtttaatgatgaagcttcaaaccacaattttgtatatcatatgacaatcaattgttttccaagaatatttattattttaagtacacaatttcagt

SEQ ID NO: 669903 - DNA, 120 bp, Artificial Sequence
  ENSG00000185483_42 (sequence is synthesized)
gaatcttgagtttttctaggagtcccttaaagggaaattagcattccatgagccagtaaaatacctactctggtaaaacattattatggttaaaaagtaaattcaagttagttttttata

SEQ ID NO: 669904 - DNA, 120 bp, Artificial Sequence
  ENSG00000185483_43 (sequence is synthesized)
aagaactataacatttattttaaacattttataataactgaaaacattaaagtgagcaaatgaaatttcaaaaccacttgtaataatgtattttataatcgcactgtgatactatataac

SEQ ID NO: 669905 - DNA, 120 bp, Artificial Sequence
  ENSG00000185483_44 (sequence is synthesized)
acagtctcttttgtattaaaatagtatttttttcacaagctgaaaaatatcttttcctttgttgacaatgttttgtaagatgactttattttcagatctttttctccttttttgcacaaa

SEQ ID NO: 669906 - DNA, 120 bp, Artificial Sequence
  ENSG00000185483_45 (sequence is synthesized)
actatgcttatggtttgtgtcacagaagtgaaaatatatctttgcatttttatatctggtctgtttttcttgtttcctttgtttttaacttgatatagattttcttcaaatatataatgg

SEQ ID NO: 669907 - DNA, 120 bp, Artificial Sequence
  ENSG00000185483_46 (sequence is synthesized)
caattttcagatatctcaccttaccatatctttccttattttcactgcatgcatttaatcactgtattacttaatgtttgatttgttattatgggcatttcaaataggcaagcattgaat

SEQ ID NO: 669908 - DNA, 120 bp, Artificial Sequence
  ENSG00000185483_47 (sequence is synthesized)
tgtaatgacaaaaaggctattttatattaaggatatatgcatttgtatttcacacaccagagatgatattaaacactgattattttatgctgctgtttattaaaaatgtttactataaaa

SEQ ID NO: 669909 - DNA, 120 bp, Artificial Sequence
  ENSG00000185483_48 (sequence is synthesized)
tgcccctaatgtattcaatcatctttaaagatccctatcctacccctcttatttaggagaatcctataaggggggcaaagaaaatggacagtatttgcttgatctcaatctggttttagg

SEQ ID NO: 669910 - DNA, 120 bp, Artificial Sequence
  ENSG00000185483_49 (sequence is synthesized)
gtaaaccttgccgtttctacataaaacacctcgtaaggtaccaaaacacgttctcaagaagtcaactgcctttatacctgcagccattgcactcatggatgtaacagggacccagccctt

SEQ ID NO: 669911 - DNA, 120 bp, Artificial Sequence
  ENSG00000185483_50 (sequence is synthesized)
cagaggcacagttgagacagtttatcacattgatttttatagaaaaagatgttacccagaatggtctgcgtccaagtggaccttttcagcaaaaaaaggaatattggaagcaggaagaaa

SEQ ID NO: 669912 - DNA, 120 bp, Artificial Sequence
  ENSG00000185483_51 (sequence is synthesized)
ttgttttctgtatgccttaagaacaccacaaggcaggatgaatctacaaccattactcggtcatccaggacaatctgtgggtaaactgtgtccttcgttatgtctgttaatactgcagaa

SEQ ID NO: 669913 - DNA, 120 bp, Artificial Sequence
  ENSG00000185483_52 (sequence is synthesized)
gaagcatataggtatctagtaagaaaatggaattcctgagtcagttaactgttcctttttctagaaaatgtttggagaaaataatgaaaatgggccaagcatggtggcttatacctgtaa

SEQ ID NO: 669914 - DNA, 120 bp, Artificial Sequence
  ENSG00000185483_53 (sequence is synthesized)
gtaatcccaacactctaggaaggccgaggcaggaggatcatttgagcccaggggttcaagaccagcccaggcaacatagtgagactccatctctaccaaaaaaaagaaaaaaaaaaaaag

SEQ ID NO: 669915 - DNA, 120 bp, Artificial Sequence
  ENSG00000185483_54 (sequence is synthesized)
caccgcaagccggagcgtcttagttcgctgcgggaagctggggtccttgctgcgtctgagccggtacacaatgagagggaagagcccggctgagcctgtggagacaaccgattcattctt

SEQ ID NO: 669916 - DNA, 120 bp, Artificial Sequence
  ENSG00000185499_0 (sequence is synthesized)
cctccccacccatttcaccaccaccatgacaccgggcacccagtctcctttcttcctgctgctgctcctcacagtgcttacagttgttacgggttctggtcatgcaagctctaccccagg

SEQ ID NO: 669917 - DNA, 120 bp, Artificial Sequence
  ENSG00000185499_1 (sequence is synthesized)
tggagaaaaggagacttcggctacccagagaagttcagtgcccagctctactgagaagaatgctttgtctactggggtctctttctttttcctgtcttttcacatttcaaacctccagtt

SEQ ID NO: 669918 - DNA, 120 bp, Artificial Sequence
  ENSG00000185499_2 (sequence is synthesized)
taattcctctctggaagatcccagcaccgactactaccaagagctgcagagagacatttctgaaatgtttttgcagatttataaacaagggggttttctgggcctctccaatattaagtt

SEQ ID NO: 669919 - DNA, 120 bp, Artificial Sequence
  ENSG00000185499_3 (sequence is synthesized)
gtacaattgactctggccttccgagaaggtaccatcaatgtccacgacgtggagacacagttcaatcagtataaaacggaagcagcctctcgatataacctgacgatctcagacgtcagc

SEQ ID NO: 669920 - DNA, 120 bp, Artificial Sequence
  ENSG00000185499_4 (sequence is synthesized)
gtgagtgatgtgccatttcctttctctgcccagtctggggctggggtgccaggctggggcatcgcgctgctggtgctggtctgtgttctggttgcgctggccattgtctatctcattgcc

SEQ ID NO: 669921 - DNA, 120 bp, Artificial Sequence
  ENSG00000185499_5 (sequence is synthesized)
ttggctgtctgtcagtgccgccgaaagaactacgggcagctggacatctttccagcccgggatacctaccatcctatgagcgagtaccccacctaccacacccatgggcgctatgtgccc

SEQ ID NO: 669922 - DNA, 120 bp, Artificial Sequence
  ENSG00000185499_6 (sequence is synthesized)
cctagcagtaccgatcgtagcccctatgagaaggtttctgcaggtaatggtggcagcagcctctcttacacaaacccagcagtggcagccacttctgccaacttgtaggggcacgtcgcc

SEQ ID NO: 669923 - DNA, 120 bp, Artificial Sequence
  ENSG00000185499_7 (sequence is synthesized)
cagagcccctgcaccctgtttgggctggtgagctgggagttcaggtgggctgctcacagcctccttcagaggccccaccaatttctcggacacttctcagtgtgtggaagctcatgtggg

SEQ ID NO: 669924 - DNA, 120 bp, Artificial Sequence
  ENSG00000185499_8 (sequence is synthesized)
ccgatcgtagcccctatgagaaggaatggagggtagaccgagaaaggctggcatagggggaggtttcccaggtagaagaagaagtgtcagcagaccaggtttctgcaggtaatggtggca

SEQ ID NO: 669925 - DNA, 120 bp, Artificial Sequence
  ENSG00000185499_9 (sequence is synthesized)
accagcagcgtactctccagccacagccccggttcaggctcctccaccactcagggacaggatgtcactctggccccggccacggaaccagcttcaggttcagctgccacctggggacag

SEQ ID NO: 669926 - DNA, 120 bp, Artificial Sequence
  ENSG00000185499_10 (sequence is synthesized)
acaggatgtcacctcggtcccagtcaccaggccagccctgggctccaccaccccgccagcccacgatgtcacctcagccccggacaacaagccagccccgggctccaccgcccccccagc

SEQ ID NO: 669927 - DNA, 89 bp, Artificial Sequence
  ENSG00000185499_11 (sequence is synthesized)
caacaggcccgccttgggctccaccgcccctccagtccacaatgtcacctcggcctcaggctctgcatcaggctcagcttctactctgg

SEQ ID NO: 669928 - DNA, 120 bp, Artificial Sequence
  ENSG00000185499_12 (sequence is synthesized)
tcggcctcaggctctgcatcaggctcagcttctactctggtgcacaacggcacctctgccagggctaccacaaccccagccagcaagagcactccattctcaattcccagccaccactct

SEQ ID NO: 669929 - DNA, 120 bp, Artificial Sequence
  ENSG00000185499_13 (sequence is synthesized)
gatactcctaccacccttgccagccatagcaccaagactgatgccagtagcactcaccatagcacggtacctcctctcacctcctccaatcacagcacttctccccagttgtctactggg

SEQ ID NO: 669930 - DNA, 120 bp, Artificial Sequence
  ENSG00000185499_14 (sequence is synthesized)
cctgagggctcatgcctgggaagtgttgtggtgggggctcccaggaggactggcccagagagccctgagatagcggggatcctgaactggactgaataaaacgtggtctcccactgcgcc

SEQ ID NO: 669931 - DNA, 120 bp, Artificial Sequence
  ENSG00000185499_15 (sequence is synthesized)
tttggctgggcaaggattctgaagggggtacttggaaaacccaaagagcttggaagaggtgagaagtggcgtgaagtgagcaggggagggcctggcaaggatgaggggcagaggtcagag

SEQ ID NO: 669932 - DNA, 120 bp, Artificial Sequence
  ENSG00000185499_16 (sequence is synthesized)
gagttttgggggacaggcctgggaggagactatggaagaaaggggccctcaagagggagtggccccactgccagaattcctaaaagatcattggccgtccacattcatgctggctggcgc

SEQ ID NO: 669933 - DNA, 120 bp, Artificial Sequence
  ENSG00000185499_17 (sequence is synthesized)
tggctgaactggtgccaccgtggcagttttgttttgttttgcttttttgcacccagaggcaaaatgggtggagcactatgcccaggggagcccttcccgaggagtcccaggggtgagcct

SEQ ID NO: 669934 - DNA, 120 bp, Artificial Sequence
  ENSG00000185499_18 (sequence is synthesized)
ctgtgcccctaatcatctcctaggaatggagggtagaccgagaaaggctggcatagggggaggtttcccaggtagaagaagaagtgtcagcagaccaggtgagcgtgggtgccagtgggg

SEQ ID NO: 669935 - DNA, 120 bp, Artificial Sequence
  ENSG00000185499_19 (sequence is synthesized)
tctggtcatgcaagctctaccccaggtggagaaaaggagacttcggctacccagagaagttcagtgcccagctctactgagaagaatgcttctggggctggggtgccaggctggggcatc

SEQ ID NO: 669936 - DNA, 120 bp, Artificial Sequence
  ENSG00000185504_0 (sequence is synthesized)
ccgcgcgcacgatggccggcgccgcgccgcgggtccgctacctggcgggcttctgctgccctctcgggggcctggcggcgggcaagccccgcgtgctgtgccatgaggcagaggtcttcc

SEQ ID NO: 669937 - DNA, 120 bp, Artificial Sequence
  ENSG00000185504_1 (sequence is synthesized)
cagaggtcttcctgtccaccgggagcgagctcgtctacgtgtacgaccaggagggcgggctgctgaccgcggcgttccggttccccgaccaggtgtggcacctggagctgctggcgccgc

SEQ ID NO: 669938 - DNA, 120 bp, Artificial Sequence
  ENSG00000185504_2 (sequence is synthesized)
gcaggttgctgtacgcgctgtgcgcccggaggggcctctactgcctgtcgctggaccacccgggcaggagcaggtctacgagccaggatgacagggacagcgaggacggtgaccagcctt

SEQ ID NO: 669939 - DNA, 120 bp, Artificial Sequence
  ENSG00000185504_3 (sequence is synthesized)
cccccgtgatccctgtggaccccgatgcctgcatccttcccgatgctgcgctgtgcgcgttcaccttgctggacagtgtgctggtcaccctggtgcagggccctgcccgatggaagatgc

SEQ ID NO: 669940 - DNA, 120 bp, Artificial Sequence
  ENSG00000185504_4 (sequence is synthesized)
agctgtttgagcagccctgtcctggggaggacccccggccaggaggccagatcggtgaggtggagctgtcctcctacacgcccccagccggggtcccaggaaagcctgcagccccccact

SEQ ID NO: 669941 - DNA, 120 bp, Artificial Sequence
  ENSG00000185504_5 (sequence is synthesized)
tccttccagtgctgtgctctgtgtcaccatcaggctccagggtcccgcacgacctcctcgggggctccgggggcttcacgctggaggacgccctcttcgggctcctctttggagctgatg

SEQ ID NO: 669942 - DNA, 120 bp, Artificial Sequence
  ENSG00000185504_6 (sequence is synthesized)
ccaccctcctgcagtcacctgtggtcctctgtggtctccctgatggccagctctgctgtgtgatcctgaaggccctggtcacctccaggtcagcccctggtgacccaaatgcccttgtca

SEQ ID NO: 669943 - DNA, 120 bp, Artificial Sequence
  ENSG00000185504_7 (sequence is synthesized)
agatcctccatcacctggaggagcccgtcatcttcataggggccttgaagacagagccacaggctgcagaagctgcagagaattttctgcctgacgaggatgtgcactgtgactgcctgg

SEQ ID NO: 669944 - DNA, 120 bp, Artificial Sequence
  ENSG00000185504_8 (sequence is synthesized)
tggcctttggtcaccacggccggatgctggccatcaaggccagctgggatgagtccgggaagctggtgcccgagctgcgggagtactgcctcccaggccctgtgctctgcgctgcctgtg

SEQ ID NO: 669945 - DNA, 120 bp, Artificial Sequence
  ENSG00000185504_9 (sequence is synthesized)
gcgggggtggccgcgtgtaccacagcaccccttctgacctctgtgtggtggatctgtctcggggaagcaccccgctgggccctgagcagcccgaagaaggcccgggaggcctgcccccca

SEQ ID NO: 669946 - DNA, 120 bp, Artificial Sequence
  ENSG00000185504_10 (sequence is synthesized)
tgctgtgcccagccagcctgaacatctgcagtgtcgtctcgctgtccgcgtctcccaggacgcatgaaggtggcaccaagctcctggccctgtccgccaaaggccgcctgatgacctgca

SEQ ID NO: 669947 - DNA, 120 bp, Artificial Sequence
  ENSG00000185504_11 (sequence is synthesized)
gcctggacctggactctgagatgcctggcccagccaggatgaccacagagagtgcaggtcagaaaataaaggagctgctgtctggaattggcaacatctctgagagagtgtcttttctaa

SEQ ID NO: 669948 - DNA, 120 bp, Artificial Sequence
  ENSG00000185504_12 (sequence is synthesized)
agaaggcggttgaccagcggaacaaggcactgacaagcctcaacgaggccatgaacgtgagctgtgcactgctgtcaagcggcacgggccccagacccatctcctgcaccaccagcacca

SEQ ID NO: 669949 - DNA, 120 bp, Artificial Sequence
  ENSG00000185504_13 (sequence is synthesized)
cctggagccgcctgcagacacaggatgtgctcatggccacctgcgtgctagagaacagcagcagcttcagcctggaccaggggtggaccctgtgcatccaggtgctcaccagctcctgtg

SEQ ID NO: 669950 - DNA, 120 bp, Artificial Sequence
  ENSG00000185504_14 (sequence is synthesized)
tcgacctgcccgtgaccgtgtcctgcacgctgttctacagtctcagggaggtggtgggcggggcccttgccccctcagactctgaggacccctttctggatgagtgcccctccgacgtcc

SEQ ID NO: 669951 - DNA, 120 bp, Artificial Sequence
  ENSG00000185504_15 (sequence is synthesized)
tgcccgagcaagagggtgtttgcctgcccctgagcaggcacacagtggacatgctgcagtgtctgcgcttccctggcctggccccgccacacacacgggccccctccccactcggcccca

SEQ ID NO: 669952 - DNA, 120 bp, Artificial Sequence
  ENSG00000185504_16 (sequence is synthesized)
cccgagaccctgtggccacttttctggaaacttgtcgggagcctggcagccagccagcaggacccgcctccctgcgggccgagtacctgcccccatctgtggcttccatcaaggtgtcgg

SEQ ID NO: 669953 - DNA, 120 bp, Artificial Sequence
  ENSG00000185504_17 (sequence is synthesized)
cggagctgctcagagctgccttgaaggacggccactcaggcgtgcccctgtgctgtgccaccctgcagtggctccttgctgagaatgctgctgtggacgtcgtgagggcccgagcactat

SEQ ID NO: 669954 - DNA, 120 bp, Artificial Sequence
  ENSG00000185504_18 (sequence is synthesized)
cttccatccagggagtggcccctgatggcgccaacgttcacctcatcgtccgagaggtggccatgactgacctgtgcccagcagggcccatccaggccgtggagattcaagtggaaagct

SEQ ID NO: 669955 - DNA, 120 bp, Artificial Sequence
  ENSG00000185504_19 (sequence is synthesized)
cctctctggccgacatttgcagggcgcaccatgccgttgtcgggcgcatgcagacgatggtgacagagcaggccacccagggctccagcgctcctgatctccgtgtgcagtacctccgcc

SEQ ID NO: 669956 - DNA, 120 bp, Artificial Sequence
  ENSG00000185504_20 (sequence is synthesized)
agatccacgccaaccacgagacactgctgcgggaggtgcagaccctgcgcgaccggctctgcacggaggatgaggccagctcctgtgccaccgcccagaggctgctacaggtgtaccggc

SEQ ID NO: 669957 - DNA, 120 bp, Artificial Sequence
  ENSG00000185504_21 (sequence is synthesized)
agctgcgccaccccagcctcatcctgctgtgaccaggcgggcctgcccctgggctctggccacgcttccagcctctgtcacagcccccccaggcctcatgggttagagggaaaccgagct

SEQ ID NO: 669958 - DNA, 120 bp, Artificial Sequence
  ENSG00000185504_22 (sequence is synthesized)
ggcctggccagagccgtcagggaaggtaggacctggccacgtaggagcagaacgctcatgaaagtgcttggaggccgtggagcacaaagcagattctgattgggagcaaccgaggcgggc

SEQ ID NO: 669959 - DNA, 120 bp, Artificial Sequence
  ENSG00000185504_23 (sequence is synthesized)
tctgaacctggccggtccagcttcgcgtcctctgctggtgtctctccttctctgaccgcggccgcagcccctgcactcgccttcctcactgctgggcagccttcccaccaccgcagcagc

SEQ ID NO: 669960 - DNA, 120 bp, Artificial Sequence
  ENSG00000185504_24 (sequence is synthesized)
ccctgaggccaggaggcagtgcagggcattctggacccggagggccagagaaacaggatttctggggtttggacttggggtgagtttgtaactgttgctgccacaccaccaggagcaccg

SEQ ID NO: 669961 - DNA, 120 bp, Artificial Sequence
  ENSG00000185504_25 (sequence is synthesized)
gctgcccctctgggtggcactaccaggtgccccacggtacccttgtcacactgttcacacctgcccggctgcccactctgggaccccgaggtaggagggtgctccctgagaccaaagcac

SEQ ID NO: 669962 - DNA, 120 bp, Artificial Sequence
  ENSG00000185504_26 (sequence is synthesized)
aaaacagcatgcagggagctcctgcaagtgcccgtggtctcgtgccacaccaaggaagggccagcgggtggcctgtggccggaatgctcaacaactaggtgcctccagccggggcagtac

SEQ ID NO: 669963 - DNA, 120 bp, Artificial Sequence
  ENSG00000185504_27 (sequence is synthesized)
ccagcactgtgcactattttcagggccactcagggtggcgctgtggcccgggggggggccctgagccccagcccccagcctcctccctcagcctgggctacggcccacctcctggtgctg

SEQ ID NO: 669964 - DNA, 120 bp, Artificial Sequence
  ENSG00000185504_28 (sequence is synthesized)
gtgttttcatctggggagggtgctcgcgccgctcccgctgcaggcactgtccgcgatgagtgcgggtaggagccgtgaggtgcttctctgctgtgacaaacgaccctgtctgtccgtgaa

SEQ ID NO: 669965 - DNA, 120 bp, Artificial Sequence
  ENSG00000185504_29 (sequence is synthesized)
acaggcgtgagccaccgtgcccggccgttacttgtcctcttaagatgtcttgagagcctcatgcgtcccactgtttggtgacaggctacctggctacctctggaagataagccgggactg

SEQ ID NO: 669966 - DNA, 120 bp, Artificial Sequence
  ENSG00000185504_30 (sequence is synthesized)
agataagccgggactgccccccagcagcccaccctttctccctagtggggcacgggagacgtcccctgctgagtcctcaccctccctgctctcagcacaggatccagtgtgcttttcctc

SEQ ID NO: 669967 - DNA, 120 bp, Artificial Sequence
  ENSG00000185504_31 (sequence is synthesized)
ccgcagcactggcttcgggacgttcagagagaacacactgagtgcgcgcagcctcccctgctcccctcacataaccactggggtcccgagagcgaggggcctgtcactccgggtccctgt

SEQ ID NO: 669968 - DNA, 120 bp, Artificial Sequence
  ENSG00000185504_32 (sequence is synthesized)
ggtttagggctgtttctgtagcgcctgcgacccccctggttttcactgtgaaggctgcaagggagaaaagaggcccactaggaacattctggggagccaagggtggggtaatgcaccacc

SEQ ID NO: 669969 - DNA, 120 bp, Artificial Sequence
  ENSG00000185504_33 (sequence is synthesized)
cggcccctgcgtggcccagatgtgggtggtgcgcttctcatacctggcagattagcctaggtccccggagcaccagcttcatcctctgtcctctttcctcctgtggcccaagaggagagg

SEQ ID NO: 669970 - DNA, 120 bp, Artificial Sequence
  ENSG00000185504_34 (sequence is synthesized)
tcaggtcagatggctggaggcagcttccagagaggctcggtgtgggtggggccgggagaaacatgcccctggggcgggggctcactctctggcgtggctccacacccaccgtgtgcttgt

SEQ ID NO: 669971 - DNA, 120 bp, Artificial Sequence
  ENSG00000185504_35 (sequence is synthesized)
ctaaatacagaagagtcacaaaggagcaaactgtgagcttcacagtgcgggcacccggggagggaggcagctgcgctcaccccaaagccccagcaccgttcatcaggcgtgcccctgtgc

SEQ ID NO: 669972 - DNA, 120 bp, Artificial Sequence
  ENSG00000185504_36 (sequence is synthesized)
tactgatcataaatcttgttgcagataggagctgggcttggcgtggggccaaaagcctgccagcccccggagcagagtggggtgggcagcggagtaaaccgcggggtgaggctgctggtt

SEQ ID NO: 669973 - DNA, 120 bp, Artificial Sequence
  ENSG00000185504_37 (sequence is synthesized)
tggcgggccttctcccacgtccgtttcctcctccacgtgatcgtgatcatttcctctaggacagtcttggcatgttaccatccgtatggaagagatggcctgggaggactggatggggtt

SEQ ID NO: 669974 - DNA, 120 bp, Artificial Sequence
  ENSG00000185504_38 (sequence is synthesized)
ggtgtgtgtgagcgagtgactcacaaggcttcagagggttaaaactagcagtcagaagacctgcggattcctgtggggaaattcggtcagaagaccagcggaggatccctgtggggaaat

SEQ ID NO: 669975 - DNA, 120 bp, Artificial Sequence
  ENSG00000185504_39 (sequence is synthesized)
aagacagcatttccagcccaaacaccttcagagcagccctggcgagaagagaggagcaaggaactgactccaggtctacgagccaggatgacagggacagcgaggacggtgaccagcctt

SEQ ID NO: 669976 - DNA, 120 bp, Artificial Sequence
  ENSG00000185504_40 (sequence is synthesized)
tcccgcacactcctgctgcccccggactgcttcagagcgagcagccccacctcatcgcgcttggggacccgggctgccgccagctctgaagcctcggccgccatccctgcccgattatct

SEQ ID NO: 669977 - DNA, 120 bp, Artificial Sequence
  ENSG00000185507_0 (sequence is synthesized)
ccggccctccgcttccccgcgagacgaaacttcccgtcccggcggctctggcacccagggtccggcctgcgccttcccgccaggcctggacactggttcaacacctgtgacttcatgtgt

SEQ ID NO: 669978 - DNA, 120 bp, Artificial Sequence
  ENSG00000185507_1 (sequence is synthesized)
gcgcgccggccacacctgcagtcacacctgtagccccctctgccaagagatccataccgaggcagcgtcggtggctacaagccctcagtccacacctgtggacacctgtgacacctggcc

SEQ ID NO: 669979 - DNA, 120 bp, Artificial Sequence
  ENSG00000185507_2 (sequence is synthesized)
acacgacctgtggccgcggcctggcgtctgctgcgacaggagcccttacctcccctgttataacacctgaccgccacctaactgcccctgcagaaggagcaatggccttggctcctgaga

SEQ ID NO: 669980 - DNA, 120 bp, Artificial Sequence
  ENSG00000185507_3 (sequence is synthesized)
ggtaagagcccggcccaccctctccagatgccagtccccgagcgccctgcagccggccctgactctccgcggccgggcacccgcagggcagccccacgcgtgctgttcggagagtggctc

SEQ ID NO: 669981 - DNA, 120 bp, Artificial Sequence
  ENSG00000185507_4 (sequence is synthesized)
cttggagagatcagcagcggctgctatgaggggctgcagtggctggacgaggcccgcacctgtttccgcgtgccctggaagcacttcgcgcgcaaggacctgagcgaggccgacgcgcgc

SEQ ID NO: 669982 - DNA, 120 bp, Artificial Sequence
  ENSG00000185507_5 (sequence is synthesized)
atcttcaaggcctgggctgtggcccgcggcaggtggccgcctagcagcaggggaggtggcccgccccccgaggctgagactgcggagcgcgccggctggaaaaccaacttccgctgcgca

SEQ ID NO: 669983 - DNA, 120 bp, Artificial Sequence
  ENSG00000185507_6 (sequence is synthesized)
ctgcgcagcacgcgtcgcttcgtgatgctgcgggataactcgggggacccggccgacccgcacaaggtgtacgcgctcagccgggagctgtgctggcgagaaggcccaggcacggaccag

SEQ ID NO: 669984 - DNA, 120 bp, Artificial Sequence
  ENSG00000185507_7 (sequence is synthesized)
actgaggcagaggcccccgcagctgtcccaccaccacagggtgggcccccagggccattcctggcacacacacatgctggactccaagccccaggccccctccctgccccagctggtgac

SEQ ID NO: 669985 - DNA, 120 bp, Artificial Sequence
  ENSG00000185507_8 (sequence is synthesized)
gcagatccagtcccaaccaaggctcctggagagggacaagaagggcttcccctgactggggcctgtgctggaggcccagggctccctgctggggagctgtacgggtgggcagtagagacg

SEQ ID NO: 669986 - DNA, 120 bp, Artificial Sequence
  ENSG00000185507_9 (sequence is synthesized)
acccccagccccgggccccagcccgcggcactaacgacaggcgaggccgcggccccagagtccccgcaccaggcagagccgtacctgtcaccctccccaagcgcctgcaccgcggtgcaa

SEQ ID NO: 669987 - DNA, 120 bp, Artificial Sequence
  ENSG00000185507_10 (sequence is synthesized)
gagcccagcccaggggcgctggacgtgaccatcatgtacaagggccgcacggtgctgcagaaggtggtgggacacccgagctgcacgttcctatacggccccccagacccagctgtccgg

SEQ ID NO: 669988 - DNA, 120 bp, Artificial Sequence
  ENSG00000185507_11 (sequence is synthesized)
gccacagacccccagcaggtagcattccccagccctgccgagctcccggaccagaagcagctgcgctacacggaggaactgctgcggcacgtggcccctgggttgcacctggagcttcgg

SEQ ID NO: 669989 - DNA, 120 bp, Artificial Sequence
  ENSG00000185507_12 (sequence is synthesized)
gggccacagctgtgggcccggcgcatgggcaagtgcaaggtgtactgggaggtgggcggacccccaggctccgccagcccctccaccccagcctgcctgctgcctcggaactgtgacacc

SEQ ID NO: 669990 - DNA, 120 bp, Artificial Sequence
  ENSG00000185507_13 (sequence is synthesized)
cccatcttcgacttcagagtcttcttccaagagctggtggaattccgggcacggcagcgccgtggctccccacgctataccatctacctgggcttcgggcaggacctgtcagctgggagg

SEQ ID NO: 669991 - DNA, 120 bp, Artificial Sequence
  ENSG00000185507_14 (sequence is synthesized)
cccaaggagaagagcctggtcctggtgaagctggaaccctggctgtgccgagtgcacctagagggcacgcagcgtgagggtgtgtcttccctggatagcagcagcctcagcctctgcctg

SEQ ID NO: 669992 - DNA, 120 bp, Artificial Sequence
  ENSG00000185507_15 (sequence is synthesized)
tccagcgccaacagcctctatgacgacatcgagtgcttccttatggagctggagcagcccgcctagaacccagtctaatgagaactccagaaagctggagcagcccacctagagctggcc

SEQ ID NO: 669993 - DNA, 120 bp, Artificial Sequence
  ENSG00000185507_16 (sequence is synthesized)
agggtgcgaagcgccactgtttaggtttcgctttcccgggagcctgacccgcccctgacgtcgcctttcccgtctccgcagggtccggcctgcgccttcccgccaggcctggacactggt

SEQ ID NO: 669994 - DNA, 120 bp, Artificial Sequence
  ENSG00000185507_17 (sequence is synthesized)
aagaagggcttcccctgactggggcctgtgctggaggtgtgggcgtgcccggggagggggggagcgcgggaggggccagtgcacctggacggacactttagaagggggctggggattggg

SEQ ID NO: 669995 - DNA, 120 bp, Artificial Sequence
  ENSG00000185507_18 (sequence is synthesized)
cccgggccccagcccgcggcactaacgacaggtgagaggggtaggggttgggaggcctggggcacagggagaggctagggatgaggtgccagcacaggattcccttccggatgcaggcga

SEQ ID NO: 669996 - DNA, 120 bp, Artificial Sequence
  ENSG00000185507_19 (sequence is synthesized)
gaggcccccgcagctgtcccaccaccacaggtacccttctctctgcctgcctctcctcctgccaggccgcggagctgcttacgttcaccctgacttttccctgcagggtgggcccccagg

SEQ ID NO: 669997 - DNA, 120 bp, Artificial Sequence
  ENSG00000185513_0 (sequence is synthesized)
ggcgctgggcggccaccggctggccaggcaggcctgccaggatggaggggcatgctgggatggaggggcatgctgaaatggagatgctgaggacactgaaggggccttccacaggggagg

SEQ ID NO: 669998 - DNA, 120 bp, Artificial Sequence
  ENSG00000185513_1 (sequence is synthesized)
tcagcatgcacttggtggccggagacagccccggttctggtcctcacctgcccgcaactgccttcatcattccagccagttcggccaccctcggcctgcccagcagtgccctggatgtgt

SEQ ID NO: 669999 - DNA, 120 bp, Artificial Sequence
  ENSG00000185513_2 (sequence is synthesized)
cttgctttccccgggagccaatccatgtgggtgccccggagcaagtggccggctgcgaaccagtttctgccaccgtcctgccgcagcttagcgccgggccggccagctccagcaccagca

SEQ ID NO: 670000 - DNA, 120 bp, Artificial Sequence
  ENSG00000185513_3 (sequence is synthesized)
cagtgcggcttctggaatggacagaggccgcggccccgcccccagggggcggcctgcggttccggataagcgagtataagccgctgaacatggcgggagtggagcagcccccgagccccg

SEQ ID NO: 670001 - DNA, 120 bp, Artificial Sequence
  ENSG00000185513_4 (sequence is synthesized)
agctgcggcaggaaggcgtgaccgaatacgaagatggcggggccccggcgggagatggcgaggcgggcccccaacaggcggaggaccacccccagaatcctccagaagatcccaatcagg

SEQ ID NO: 670002 - DNA, 120 bp, Artificial Sequence
  ENSG00000185513_5 (sequence is synthesized)
accccccagaggatgatagcacctgtcagtgccaggcgtgcgggcctcaccaagccgcgggtccagatcttggttcctctaatgatggctgccctcagctgttccaggagcggtcagtca

SEQ ID NO: 670003 - DNA, 120 bp, Artificial Sequence
  ENSG00000185513_6 (sequence is synthesized)
tagtggagaactcctcaggctctaccagcgcttctgagctcctcaaacccatgaagaagaggaagcgcagggaataccagagcccatcagaggaggagtcggagccagaggccatggaga

SEQ ID NO: 670004 - DNA, 120 bp, Artificial Sequence
  ENSG00000185513_7 (sequence is synthesized)
agcaagaagaaggaaaggacccagagggacaacccactgctagcaccccagagagtgaggagtggagcagcagccagcctgcaacaggtgagaagaaggaatgctggtcgtgggagtcct

SEQ ID NO: 670005 - DNA, 120 bp, Artificial Sequence
  ENSG00000185513_8 (sequence is synthesized)
acctagaggagcagaaggccattactgctccagtcagcctcttccaggactcccaggcagtcactcacaacaagaatggcttcaaactgggcatgaagttggaaggcattgaccctcaac

SEQ ID NO: 670006 - DNA, 120 bp, Artificial Sequence
  ENSG00000185513_9 (sequence is synthesized)
acccgtccatgtacttcatcctcaccgtggctgaggtatgtggctatcgcctacgcctgcactttgatgggtattctgagtgccatgacttctgggtcaatgccaactcccctgacattc

SEQ ID NO: 670007 - DNA, 120 bp, Artificial Sequence
  ENSG00000185513_10 (sequence is synthesized)
accctgctggctggttcgagaagacgggccacaagctgcagcctcccaaaggttacaaggaggaggagttcagctggagccagtacctgcgcagcacaagagctcaggctgcccccaagc

SEQ ID NO: 670008 - DNA, 120 bp, Artificial Sequence
  ENSG00000185513_11 (sequence is synthesized)
acctgtttgtgagccagagccacagtcccccacccctgggcttccaggtgggcatgaagctggaggctgttgaccgcatgaacccgtcccttgtctgcgtggccagtgtgaccgatgtgg

SEQ ID NO: 670009 - DNA, 120 bp, Artificial Sequence
  ENSG00000185513_12 (sequence is synthesized)
tggacagccgcttcctggtgcactttgacaactgggatgatacttatgactactggtgtgatcccagcagcccctacatccacccagtgggctggtgccagaagcaaggaaagcccctca

SEQ ID NO: 670010 - DNA, 120 bp, Artificial Sequence
  ENSG00000185513_13 (sequence is synthesized)
cccctccacaagactacccagaccctgataacttctgttgggagaaatatctggaagaaactggggcctctgctgtccccacctgggccttcaaggtgcgaccccctcacagcttcctgg

SEQ ID NO: 670011 - DNA, 120 bp, Artificial Sequence
  ENSG00000185513_14 (sequence is synthesized)
tcaatatgaagctggaggctgtggaccgcaggaacccagccctgattcgcgtggccagcgtggaggatgtggaggaccatcggataaagatccactttgatggctggagtcatggctatg

SEQ ID NO: 670012 - DNA, 120 bp, Artificial Sequence
  ENSG00000185513_15 (sequence is synthesized)
atttctggatcgacgctgaccacccagacatccaccctgccggctggtgctccaagacaggacatcccctgcagcctcctctcggacccagagagcccagctctgcctcccctgggggct

SEQ ID NO: 670013 - DNA, 120 bp, Artificial Sequence
  ENSG00000185513_16 (sequence is synthesized)
gtccccctctcagctataggagcctgccccacactaggacctccaaatacagctttcaccaccggaagtgccccactcctggttgcgacggctctggccatgtcacaggcaagttcacag

SEQ ID NO: 670014 - DNA, 120 bp, Artificial Sequence
  ENSG00000185513_17 (sequence is synthesized)
ctcaccattgcctctcaggctgcccactggctgagaggaaccagagccggctgaaagcggagctgtctgactcggaggcctcagcccgcaagaagaacctctcaggcttctccccaagga

SEQ ID NO: 670015 - DNA, 120 bp, Artificial Sequence
  ENSG00000185513_18 (sequence is synthesized)
agaagcctcgccatcacggccgaattggacgccctccgaagtatcgaaagattccgcaggaagatttccagaccctcacgcccgatgtcgtgcaccagtccctcttcatgtcagccctgt

SEQ ID NO: 670016 - DNA, 120 bp, Artificial Sequence
  ENSG00000185513_19 (sequence is synthesized)
cggcccaccctgaccgctcactctcagtgtgctgggagcagcactgcaagctcctgccaggagtagcgggcatctcagcctcgacagtcgccaagtggaccatcgatgagatgattgacg

SEQ ID NO: 670017 - DNA, 120 bp, Artificial Sequence
  ENSG00000185513_20 (sequence is synthesized)
gcgaggccttccttttgctgacacaggcggacattgtgaagatcatgagcgtcaagctgggcccagccttgaagatctataacgccattctcatgttcaaaaacgctgatgacaccttaa

SEQ ID NO: 670018 - DNA, 120 bp, Artificial Sequence
  ENSG00000185513_21 (sequence is synthesized)
agcccctgcttggcctccctctccagctgatgctttcttcctgacctgaattcctcataccccacacgtccccatgctccacctatatctgaccaggctggtccttcttagagggtgcat

SEQ ID NO: 670019 - DNA, 120 bp, Artificial Sequence
  ENSG00000185513_22 (sequence is synthesized)
gggagctgaggagccctggggagggtaggcacccagccccaagtcctagagctcattcgtcaccaggcatgttggtgagggcgtgactggcaggggcattactcatggagtcagttggac

SEQ ID NO: 670020 - DNA, 120 bp, Artificial Sequence
  ENSG00000185513_23 (sequence is synthesized)
tgtggcagcccccacagccccagtggacttttattgtattaccaaagggtctttttcttggcagtggaggagagactagtagagcagcagtccttcaatctgaggcccctttcccttttt

SEQ ID NO: 670021 - DNA, 120 bp, Artificial Sequence
  ENSG00000185513_24 (sequence is synthesized)
tggtatctctgtgtacttttctctccttggctcctttcctcctgccaagaagtgaccccaccacaaatgtatttactcctggaggtacctcctctctttctgtctgctggttttgctgcc

SEQ ID NO: 670022 - DNA, 120 bp, Artificial Sequence
  ENSG00000185513_25 (sequence is synthesized)
ctcattctgctgcttcgtttcctgggcagtgcccccagccagaccccactggctcttccccctgagatatgtgaacctcggaaacatgttttcctaagatcccttggaagtctctagctg

SEQ ID NO: 670023 - DNA, 120 bp, Artificial Sequence
  ENSG00000185513_26 (sequence is synthesized)
cctttctctcttttgcccagaattgagagattttgagccaagatgccttcctgaacttacccagttctggaccagttggcattttagtgtcccacgccaagtccaagtttcagcagaatg

SEQ ID NO: 670024 - DNA, 120 bp, Artificial Sequence
  ENSG00000185513_27 (sequence is synthesized)
agcaggtggtttgagcctgttttatagatggcagaggttgaggttccactgctgttttccatacacccttcatgtgttgagtctgggaaggagtaagcctagcctgccagtagcctaggt

SEQ ID NO: 670025 - DNA, 120 bp, Artificial Sequence
  ENSG00000185513_28 (sequence is synthesized)
taggagaccagcataaggatttgttagacaatctcgggtctttggccagaggggcagctccagcaggcatagtggtgcctgaagttaggaatactgtactctctgtagctttggacctca

SEQ ID NO: 670026 - DNA, 120 bp, Artificial Sequence
  ENSG00000185513_29 (sequence is synthesized)
gccaaggtattgcccatggggtgatggctccaggcctgccaggccttctgccatgagaatgtagcactctgtgtagcacacacccccatgacatcatttaacctgtcccttaaatgttga

SEQ ID NO: 670027 - DNA, 120 bp, Artificial Sequence
  ENSG00000185513_30 (sequence is synthesized)
ccattagctcttgcagcgtcttacaaagacgacttgaagttgggagttaggaaggtgaacttttctatctgaattctccgggtccctgaagccctccttgccgctctccatctgtcttgc

SEQ ID NO: 670028 - DNA, 120 bp, Artificial Sequence
  ENSG00000185513_31 (sequence is synthesized)
actgccagctgggtccctgctggggctctgggacttccacttctcagtccacataggaacccagcttccactgagtcactgccaaacctgcctcccagcctgggtgggaagggggagagc

SEQ ID NO: 670029 - DNA, 120 bp, Artificial Sequence
  ENSG00000185513_32 (sequence is synthesized)
cactggtaggagccagccccacatggaggtgaggagccactgccaacctcccgtgtccaggtgctgatgtgggcctgcggagtgtggggctggtgccttcacccagaccccttcaatcat

SEQ ID NO: 670030 - DNA, 120 bp, Artificial Sequence
  ENSG00000185513_33 (sequence is synthesized)
tgcatgtgtgtgtgtgtgtgtgtgtgtggcactctcagaagtgtttgacagggtgcagatgtgaggcttagtgttgggaaaatgccaagggctattatcattaaaatttgaagctttatt

SEQ ID NO: 670031 - DNA, 120 bp, Artificial Sequence
  ENSG00000185513_34 (sequence is synthesized)
aatttgaagctttatttttcccttagaagtgggaaacccagagctctgttgatttcctaccacaacccagtaggggcctctctctgccatgggctggacagctttttgaggaagccattc

SEQ ID NO: 670032 - DNA, 120 bp, Artificial Sequence
  ENSG00000185513_35 (sequence is synthesized)
agctcccacagttgagctcccacagggctttaggtgtccattccctctcaactgcttagaggcagctttgagcacagccttcctggaaggaagctaggcaagacctgccacacagcgaag

SEQ ID NO: 670033 - DNA, 120 bp, Artificial Sequence
  ENSG00000185513_36 (sequence is synthesized)
gttgggtttacaagggtgacattggtacccccttggccaagagtaaagaagaacaagtctaagccttgcttttatcttagttgtctgggtggtagcagaactcatcagctccttatcctc

SEQ ID NO: 670034 - DNA, 120 bp, Artificial Sequence
  ENSG00000185513_37 (sequence is synthesized)
agtctgttcctctataaaagatgagagatgttcactgactttgtgcagtgagaaggcagcaagtactcacggctggtgctgtgggacctcacagcttctaaggagaggggctgggagggc

SEQ ID NO: 670035 - DNA, 120 bp, Artificial Sequence
  ENSG00000185513_38 (sequence is synthesized)
ctttgccatcagatctgccaagcacctaatgcttgcctgtggtgaaggcaagatggaccaagggccttggagaaaagggctcccaggcttctgaactttgaggcctcagcactttctgca

SEQ ID NO: 670036 - DNA, 120 bp, Artificial Sequence
  ENSG00000185513_39 (sequence is synthesized)
ttatcgtcaaactctttggaaagaaaccaaatcattaaaaagtagaaagaaatctgcctcttgtctgccctactgcccctttacccccactctgtccccaaatgatattattgcaccttg

SEQ ID NO: 670037 - DNA, 120 bp, Artificial Sequence
  ENSG00000185513_40 (sequence is synthesized)
acctgggagcgcagagaggggagggagttggcagagacttctggtgccctctgccctcctagcaacagatgccacttatattttggcccctggcagcctcgcccagcccctgatcagccc

SEQ ID NO: 670038 - DNA, 120 bp, Artificial Sequence
  ENSG00000185513_41 (sequence is synthesized)
aggcctagggcagttaggacctttctgtttattttctgaagcagagagaatgatctcagagtttgcaaatgaagccttttttgcactttcattcacatgcactttggtggggttacattt

SEQ ID NO: 670039 - DNA, 120 bp, Artificial Sequence
  ENSG00000185513_42 (sequence is synthesized)
ttgtacttgcctcttgtgtgtgcacatgtgtgtatgtgttctttaagagaatcttctggcttaagctaaggtgactcttgaaggagaaaaagttacaaacaaaatgtggtgtgatctgtc

SEQ ID NO: 670040 - DNA, 120 bp, Artificial Sequence
  ENSG00000185513_43 (sequence is synthesized)
aggtgcttgggggcgtagcctggagtgagggtttggctggtgtagcttggagtgaggccccctggcgtggagtcttgaggcctgctgagggcgtgagctggcatgaggcgaagagagggc

SEQ ID NO: 670041 - DNA, 120 bp, Artificial Sequence
  ENSG00000185513_44 (sequence is synthesized)
catggcaccgactccgagatgggtcaaggacccgtacgggagtcgcaatcctcagaccctcccgcgctccagttccggataagcgagtataagccgctgaacatggcgggagtggagcag

SEQ ID NO: 670042 - DNA, 120 bp, Artificial Sequence
  ENSG00000185513_45 (sequence is synthesized)
ttgtgaggaccaagcacgcctcttcaaagacgaggtaaggtgcaagtgcagagtgggagacagagccggggtcactgtccttaagacggcaggaagcaggtgccctccccagcgtcactt

SEQ ID NO: 670043 - DNA, 120 bp, Artificial Sequence
  ENSG00000185513_46 (sequence is synthesized)
ctgctaaggagggacccgtgttgccccaccaggcaagaatagtcagagtgacccatgtatctgggaagactctagtctggactgtggcccagcttggggaccttgtgtgctcagatcatc

SEQ ID NO: 670044 - DNA, 120 bp, Artificial Sequence
  ENSG00000185513_47 (sequence is synthesized)
ttcaggaaggaaaaggcatcctggagacaggagtccattcactcctctgctctctacccactcatttgcttgccaaacttagctttgccagtgatagtcaatattaaagtgtactttttt

SEQ ID NO: 670045 - DNA, 120 bp, Artificial Sequence
  ENSG00000185513_48 (sequence is synthesized)
cccctttaatccaatatagttgataattaaagtgtattttgaatgacacagatattgtgatttactgcaaggatcctaacacacacttaaaatcaagagccaaggagtagtgagttgtag

SEQ ID NO: 670046 - DNA, 120 bp, Artificial Sequence
  ENSG00000185513_49 (sequence is synthesized)
ataaaaaaagaatgtcagctttggagacagtctgggtttaaatcccagttctgtcaatttgagctgtttactgtctctgagcctacatcttcttgtctgtaaaatggagataaaatgggt

SEQ ID NO: 670047 - DNA, 120 bp, Artificial Sequence
  ENSG00000185513_50 (sequence is synthesized)
ttaatgaggtctaccttgcagagccattgtgagcattggaaatgatgaatgaatcataccagaacgtctagtataattacagtcatgcattgcttaacgatggggatacattcttagaaa

SEQ ID NO: 670048 - DNA, 120 bp, Artificial Sequence
  ENSG00000185513_51 (sequence is synthesized)
tgtgtcactaggcaattctgtcattgtgtaaacattatagaatgtacttacacaaacctagatgttatatgtatttttatttacatgtatattttcacatgaaataccaaatgtcacagc

SEQ ID NO: 670049 - DNA, 120 bp, Artificial Sequence
  ENSG00000185513_52 (sequence is synthesized)
attattactgaatgtcagtcatttcccctacttgatctgcaatgccaatatcaagggccatgtatcaggtttctgtatatgttccactataatcttatgggaccatggttttaaatgtgg

SEQ ID NO: 670050 - DNA, 120 bp, Artificial Sequence
  ENSG00000185513_53 (sequence is synthesized)
aatcattgacagaaatgtctttatgtagcatatggctgtgtatcactagtatataatagagcaatattatggaggaatatgtagatccaatcactttacctatacaaaatgactgctatg

SEQ ID NO: 670051 - DNA, 120 bp, Artificial Sequence
  ENSG00000185513_54 (sequence is synthesized)
actttacctatacaaaatgactgctatggtgggaacacaataaacaccagttttgacttttagtgcatagttgtccttaagtaaagaactttgtcggccgggcacagtggctcacgcctg

SEQ ID NO: 670052 - DNA, 120 bp, Artificial Sequence
  ENSG00000185513_55 (sequence is synthesized)
gcaggagaatcacttgaacttggaaggaggaggttgcagtgagccgggattgcaccactgcactccggtctgggcaacagaacgaaactctgtctcaaaaaacataaaaagaaagtagtt

SEQ ID NO: 670053 - DNA, 120 bp, Artificial Sequence
  ENSG00000185513_56 (sequence is synthesized)
aagaaagtagttggctcttcttgccctggaagagtgtctgtatccaagcccagcacagccagtttcctcctttgagctgtgtgtggtggagctcccaaactcctcccacttccaggtgct

SEQ ID NO: 670054 - DNA, 120 bp, Artificial Sequence
  ENSG00000185513_57 (sequence is synthesized)
ttccttgccctctgtgttggtgatcttctcttcatgtacgtgtccagagctgaactccctgttttcgatggcctctggccaacatagaacacaccggggtgctgctcccctagaagtgtt

SEQ ID NO: 670055 - DNA, 120 bp, Artificial Sequence
  ENSG00000185513_58 (sequence is synthesized)
ttaattgagataaaatgcctatagagagataggcacacatcttgaaagtacaatttcacaggttttatgacatgtctgcccttgaactcaacatttcaatcaaggtacagacatttcctc

SEQ ID NO: 670056 - DNA, 120 bp, Artificial Sequence
  ENSG00000185513_59 (sequence is synthesized)
caacaggtgagaagaaggaatgctggtcgtgggagtcctacctagaggagcagaaggccattactgctccagtcagcctcttccaggacgtgtgatcccagcagcccctacatccaccca

SEQ ID NO: 670057 - DNA, 120 bp, Artificial Sequence
  ENSG00000185513_60 (sequence is synthesized)
gccctagccttcccctttgggcaggccccagtttccccaggcacagcatttgggctccctctgtggggctcagctctgctgagctgcgccttgccctgaaggcagctgtcccctctgcag

SEQ ID NO: 670058 - DNA, 120 bp, Artificial Sequence
  ENSG00000185513_61 (sequence is synthesized)
tcgagaagacgggccacaagctgcagcctcccaaaggtaaggcctagctgggttggtcacagtgaggcagtgagtcctcagacccttcgcttcttccccttgggtccccggcttccagct

SEQ ID NO: 670059 - DNA, 120 bp, Artificial Sequence
  ENSG00000185513_62 (sequence is synthesized)
cttttgttttctgaccctgtaccctgttccaaagccagcctctcttcatcgcatcctgatgactctgcgctggggccaagttgaccagaagccctagaacttccgctttgcacttgccct

SEQ ID NO: 670060 - DNA, 120 bp, Artificial Sequence
  ENSG00000185513_63 (sequence is synthesized)
ttgagtgtctactcaagtcgtgtcctgcttcagtagtggggaatccctgggcaagttcttgagggttggggggaggtcctcaggcatgcctgattctgctgcttcactgtggggtgccct

SEQ ID NO: 670061 - DNA, 120 bp, Artificial Sequence
  ENSG00000185513_64 (sequence is synthesized)
agcacctgtttgtgagccagagccacgtgagtgcccctgagtgagagtggatgtcactcccatgtgccagagttcactgcagctggcccagggtatctgactcatcagaagggagctcat

SEQ ID NO: 670062 - DNA, 120 bp, Artificial Sequence
  ENSG00000185513_65 (sequence is synthesized)
gtgctggttctctcagctttgttctgatctctcatatcagatgggaggggtacagctgggcagggtccagggccagagatgggaagctggttataggtttttcccgacttccctccctcc

SEQ ID NO: 670063 - DNA, 120 bp, Artificial Sequence
  ENSG00000185513_66 (sequence is synthesized)
tttgctactgcagataccctgtcctcacatccccttggagcccctggcccactaccctagtctgagcactgagatgtcattgctcatatattcttgctttggcttgctctgcagttcttt

SEQ ID NO: 670064 - DNA, 120 bp, Artificial Sequence
  ENSG00000185513_67 (sequence is synthesized)
ggtgtaaggtcaatgcctctattctgggagcttctttttctttccttttgcccaacattgagactcttccatttatttccaacaattcatcccttgtcctttcctctgttcagggcagct

SEQ ID NO: 670065 - DNA, 120 bp, Artificial Sequence
  ENSG00000185513_68 (sequence is synthesized)
agctggcagcttatccagcagttaaagtatctcataatcccaaccaaaaggcctaagagatacagggagcctccattaaaaatatcatactggaccaggtgtggcggctcatgcctgtaa

SEQ ID NO: 670066 - DNA, 79 bp, Artificial Sequence
  ENSG00000185513_69 (sequence is synthesized)
gagaatcgcttgaacctggggggtctcagcaacaagaacgaaactccgtctcaaaaaaaagaagtatgtatcagtctta

SEQ ID NO: 670067 - DNA, 83 bp, Artificial Sequence
  ENSG00000185513_70 (sequence is synthesized)
caagatcacgccattgcactccggtctcagcaacaagaacgaaactccgtctcaaaaaaaagaagtatgtatcagtctttact

SEQ ID NO: 670068 - DNA, 120 bp, Artificial Sequence
  ENSG00000185513_71 (sequence is synthesized)
ttgagaccagcgtaggcaacatagtgagaccccatctgtacaaaaaatgtcattaaattattagctgggcatggtgcatgtgcctgtagtcctagataccacagtagctagctgagctgg

SEQ ID NO: 670069 - DNA, 120 bp, Artificial Sequence
  ENSG00000185513_72 (sequence is synthesized)
gaggattgtttgagcccaggaattcaaggctacagcaagctatgattgtaccactgtaccccagcctgggcgacagagtgagaccctgtgtctaaagaaaaaaaaccatattgaatgtct

SEQ ID NO: 670070 - DNA, 120 bp, Artificial Sequence
  ENSG00000185513_73 (sequence is synthesized)
agagtttccctgggcccaggactccaccatgctcttcaggcagagacagttactcccctaccccagtccagccccagagttcatacttgcaagttcccaggtgacaggtggggtcctgcc

SEQ ID NO: 670071 - DNA, 120 bp, Artificial Sequence
  ENSG00000185513_74 (sequence is synthesized)
tgctgttgtgacaacgaatgccgacttttaattcaaactatttaaatactggccccgccgttgactagcattgtgttctgggccaagtgatttaacttcttaaatgggaatagggttgtt

SEQ ID NO: 670072 - DNA, 120 bp, Artificial Sequence
  ENSG00000185513_75 (sequence is synthesized)
gtaaaggtccaaggaggtgatgtcttttgaagcttacatggcaggtactcagtttatactggttccctgtctgcctctatgccatagatgtccgctgtttcttcccagccaccccactgt

SEQ ID NO: 670073 - DNA, 120 bp, Artificial Sequence
  ENSG00000185513_76 (sequence is synthesized)
tgccacaactgcctcaggacaagctgggaagggcttgtctgggtagggaagatttatacttggttcaccaggttctttgggcgaacgcatagcctccttccaggcacttaccttctgaca

SEQ ID NO: 670074 - DNA, 120 bp, Artificial Sequence
  ENSG00000185513_77 (sequence is synthesized)
caagccaggcctctgagtgcaccttggaggccagaggttcctgagtgcctcagggctcaggttatgattctgccctggagggccctctttcccagcttatttctccttcctttctcactg

SEQ ID NO: 670075 - DNA, 120 bp, Artificial Sequence
  ENSG00000185513_78 (sequence is synthesized)
cccacaccccaggctttcctagagaacctattcctttgtttgccaatgggctctgggctggtcttagccagcttggccctggccgtggcagctcctttttttcccctagagtcccccacc

SEQ ID NO: 670076 - DNA, 120 bp, Artificial Sequence
  ENSG00000185513_79 (sequence is synthesized)
caagaaccccagtggacgcttgaaaccatggatagtactgaaccctatggatactgttttttttcctatccatacctacgataaagcaacaggtgagaagaaggaatgctggtcgtggga

SEQ ID NO: 670077 - DNA, 120 bp, Artificial Sequence
  ENSG00000185513_80 (sequence is synthesized)
agataataaggagagttgtagtcaggctgtttaattaggatgtgcatgctcatgtgagtctgtgctcaagtgatagggggatgtctgctggagctgcactcctgctggcggcctagaaga

SEQ ID NO: 670078 - DNA, 120 bp, Artificial Sequence
  ENSG00000185513_81 (sequence is synthesized)
aattctgcctgtttggggcagaacaccacatggccagagagccaggtaggggccaggatcagaccctagggcttcatcccaaaccatgaggagaagaagctgggatcaggcttgccttct

SEQ ID NO: 670079 - DNA, 120 bp, Artificial Sequence
  ENSG00000185513_82 (sequence is synthesized)
tggctctgggaccctagggctgggaagtggacaggccagttgggcaggaattctgtagactgtttagaggtcaggggcatcatggcatgagagagatgaagccaaagatcttgaatctca

SEQ ID NO: 670080 - DNA, 120 bp, Artificial Sequence
  ENSG00000185513_83 (sequence is synthesized)
ttcttgcctcatctgtgacttatttttgtgggcttggacaagtcattttccctctctaagccttacatcatctgtaaaatgggcctaataatcctcgtcccacctaaggattgccagtgg

SEQ ID NO: 670081 - DNA, 120 bp, Artificial Sequence
  ENSG00000185513_84 (sequence is synthesized)
gagatgccagtaacttaatgagtgatgcccttggaaaatgtggtggccaagacagattattgcagggttggccccttggttctttcaatccaggatcttgcttctgacaggtcccaggga

SEQ ID NO: 670082 - DNA, 120 bp, Artificial Sequence
  ENSG00000185513_85 (sequence is synthesized)
cctgagtggtgtgggtatgcatgggcttcgggaacagtttagtcatcctcgttggcctgccagcctctgcctctgctttccagccctcacgcccgatgtcgtgcaccagtccctcttcat

SEQ ID NO: 670083 - DNA, 120 bp, Artificial Sequence
  ENSG00000185513_86 (sequence is synthesized)
gaaggccattactgctccagtcagcctcttccaggacgtgagttggacaatttccccgtaggaacagcttgtcttcctagcctagggacacaccaccaacctcaggccttctggcgtttt

SEQ ID NO: 670084 - DNA, 120 bp, Artificial Sequence
  ENSG00000185513_87 (sequence is synthesized)
ctgtgtcaggcatgcctcagtggactggcagaatggaaagggagagactgtttaggggcccagagtggaaaagggccccccataaggggctggcagggtgggaagaaacagagaggtgga

SEQ ID NO: 670085 - DNA, 120 bp, Artificial Sequence
  ENSG00000185513_88 (sequence is synthesized)
agctaggctcactcatcactgggcctgcagacttttgaattctggtgacttctactcaattcagcattgatctttccatgactttggtgagagggagcccttgagtccagccctgactca

SEQ ID NO: 670086 - DNA, 120 bp, Artificial Sequence
  ENSG00000185513_89 (sequence is synthesized)
cccacatttttcaagggacctgggagatattctctctctctctctctagatccctgtagtaacgatccccaaataagttgcccctttggaaataccaggcgggtggggcctaaaggcagc

SEQ ID NO: 670087 - DNA, 120 bp, Artificial Sequence
  ENSG00000185513_90 (sequence is synthesized)
tccttcaccccaagcccactaggcaaggataaggctggatggaagctgggtcctctccactctgtgcgttgacagtcccaggcagtcactcacaacaagaatggcttcaaactgggcatg

SEQ ID NO: 670088 - DNA, 120 bp, Artificial Sequence
  ENSG00000185513_91 (sequence is synthesized)
ggaatcagggcccgggcttcctgggggtgtggggccttgtagcctcttggactgggccagacactgattccctgccatggacctggtccgtctttctccagaattggacgccctccgaag

SEQ ID NO: 670089 - DNA, 120 bp, Artificial Sequence
  ENSG00000185513_92 (sequence is synthesized)
gcagggagatggggctgtctggggtatgggcaggtattaggatttcgctgatgaacagagagagcagcaggaaggcagtggcacagaagtgtggttggtagggctgaggatggaatccca

SEQ ID NO: 670090 - DNA, 120 bp, Artificial Sequence
  ENSG00000185513_93 (sequence is synthesized)
gaggctttgtgggtgaatggaggtggaaaagccaggctgaaaggctgacactcagggagagagggcaggacaatctgtgaccaacagggagggtctttgacaagagggcacttggaggtg

SEQ ID NO: 670091 - DNA, 120 bp, Artificial Sequence
  ENSG00000185513_94 (sequence is synthesized)
ctgcattgatgagcatctggaattagcaccaggagaataaagagccaatgctcctggaccatggacagaggctgggaaaaccccttgggaaagtggccacattgcacaaggccggccaag

SEQ ID NO: 670092 - DNA, 120 bp, Artificial Sequence
  ENSG00000185513_95 (sequence is synthesized)
gctgacagcagtgagtggggccaggtttgtcaaagcagccagagggggatgaagtccaagttggcacgtgccaggccccaccaagggggaggccaagctgagcagcatcggtcatcagct

SEQ ID NO: 670093 - DNA, 120 bp, Artificial Sequence
  ENSG00000185513_96 (sequence is synthesized)
cagtacagctgcttgaggtaggaggttggggccagtgatcccagaggcagaccaggaagcaaagccacaggcaacatggagctggggagtgggtcagggatcaccctctagtgctggcat

SEQ ID NO: 670094 - DNA, 120 bp, Artificial Sequence
  ENSG00000185513_97 (sequence is synthesized)
aggcagtagtacagaccgggctggtggaggaaggggaggaactggagcttgaggcaatggcagtggccagaggggtggtcttcagcctggtcagggggactgtgattctgaagcagaatc

SEQ ID NO: 670095 - DNA, 120 bp, Artificial Sequence
  ENSG00000185513_98 (sequence is synthesized)
accctggctctgagaaagttggtcgtggcccggaaggactcatgagaagaagagtaaacagagtggacttctgacatcaaggctgagcttgtttggatgttaaggacccttttgatggtt

SEQ ID NO: 670096 - DNA, 120 bp, Artificial Sequence
  ENSG00000185513_99 (sequence is synthesized)
ggcatctagaaaattatgtctttagagatgctgcagcagctccaagagagtatccttgcagggcccagggtggtgcagcctcagagagacggggtgagggtcattccgaatagctgacct

SEQ ID NO: 670097 - DNA, 120 bp, Artificial Sequence
  ENSG00000185513_100 (sequence is synthesized)
gagagtctttaagagagtcactttaccagcaggagtgaacactgtgtgaggagtcaggagatacggctcaccctcttgactctacaggctgtcagaaggggcccggagtcctgtctactc

SEQ ID NO: 670098 - DNA, 120 bp, Artificial Sequence
  ENSG00000185513_101 (sequence is synthesized)
gctgggccagagaagacacgcataatgactcactcatcatattttggggtcccatcctgagttaggtcctatacctggttaaagggaaatgaattaatcactctcttgattttccagagc

SEQ ID NO: 670099 - DNA, 120 bp, Artificial Sequence
  ENSG00000185513_102 (sequence is synthesized)
tcccatctcagtttagtgtcaaggttaagacatagtcaggtgaactagcacccaaagtacatgtgcaggcagctggaaaactccatcactggagtccagtgcctaggccaaaggccaggg

SEQ ID NO: 670100 - DNA, 120 bp, Artificial Sequence
  ENSG00000185513_103 (sequence is synthesized)
acctttggaggtgtgaggctgagaatgtgggttatgattgtgatggtaggttgtacatgcataaatgagcatgagttagtgtgtgtgaaagagagagagacagtgagagactattttggg

SEQ ID NO: 670101 - DNA, 120 bp, Artificial Sequence
  ENSG00000185513_104 (sequence is synthesized)
tttgtgtattagtgtatgtattttcttgggagttatatgatgtgtttgtttatcctctattatccagtcatgactaggccccagtgccagggagatcttggctcaatttttgaagacttg

SEQ ID NO: 670102 - DNA, 120 bp, Artificial Sequence
  ENSG00000185513_105 (sequence is synthesized)
agtaacttttactggcaccacatgtcattgcttctctttagtggtggggcaagcctgcactggtcattggtctaacattcctgtttggaaccctattctcactctttgattctaagaaaa

SEQ ID NO: 670103 - DNA, 120 bp, Artificial Sequence
  ENSG00000185513_106 (sequence is synthesized)
atggagcagaggtcattcatatctccaaccttcaggccttctcaattaccatctccacattcccacatgacaactgtcaactgtagctaagtagcatacttgtaatcacatagatactgt

SEQ ID NO: 670104 - DNA, 120 bp, Artificial Sequence
  ENSG00000185513_107 (sequence is synthesized)
gtagcagtttgtttaatgtctctcttctgccctcaaaaccatcaacacaaggacagtatctgtttttttttttcttttttaaaattttttaaattaaaagttttggagggtgaccgggtc

SEQ ID NO: 670105 - DNA, 81 bp, Artificial Sequence
  ENSG00000185513_108 (sequence is synthesized)
gctgggaccacaggtgcatgccaccatgcatggctaattttttaaatttttgttatagagatggggatcttactttgttgc

SEQ ID NO: 670106 - DNA, 120 bp, Artificial Sequence
  ENSG00000185513_109 (sequence is synthesized)
ctgggctcaagcagtcctcctgcctaggcttcccaaagttctgggattacaggtgtgaggtaccacgcctggtcgtctttttttttttttctttgagacggagtttcactctgttgccca

SEQ ID NO: 670107 - DNA, 87 bp, Artificial Sequence
  ENSG00000185513_110 (sequence is synthesized)
ttcagagtgcagtagcgccatcttggctcattgcaacctccacctcttgggttccagcaattcttctgcctcagtctcctgagtagc

SEQ ID NO: 670108 - DNA, 120 bp, Artificial Sequence
  ENSG00000185513_111 (sequence is synthesized)
ttggccaggctggtctcgaactcttacctcaggttatctgcccacctcagcctcccaagtggtgggattacaggagtgagccaaggcacccagccttttttttaattttaatttttaatt

SEQ ID NO: 670109 - DNA, 120 bp, Artificial Sequence
  ENSG00000185513_112 (sequence is synthesized)
gccttttttttaattttaatttttaatttaagaaatggagtttcactctattgcccaagctggcgtgtagagctgttcacagacacactacagcctgggactcctgggctcaagggatcc

SEQ ID NO: 670110 - DNA, 120 bp, Artificial Sequence
  ENSG00000185513_113 (sequence is synthesized)
tcctgccccagcctcctgagtagcagtgattataggcatgtgccattgcacttggttcttgtatctgttttattaatcattttatccctggtgcttagctagagcctggtatggaataag

SEQ ID NO: 670111 - DNA, 120 bp, Artificial Sequence
  ENSG00000185513_114 (sequence is synthesized)
ttctcaatcagtgtttgttcagtggatgaatggattgaatggatgatttttatgttgatggtttctcttggactatggcttagttgcctcagtcactgtctttcccgtcccacagagaac

SEQ ID NO: 670112 - DNA, 120 bp, Artificial Sequence
  ENSG00000185513_115 (sequence is synthesized)
cagacagatgaggtcatttcttaggacattatcctgccttgatggatccagtgccagctggaggagcccaatctgcacccagggctctgaactttttatagtgcttcttccaacttctgc

SEQ ID NO: 670113 - DNA, 120 bp, Artificial Sequence
  ENSG00000185513_116 (sequence is synthesized)
ccattgtagctaaaccagaacttcactattatgtctcacccatggtattcatatcagaaggcaaaggtttagctctctttggtttatggcctcttaagacttatgcagaggaaagaagca

SEQ ID NO: 670114 - DNA, 120 bp, Artificial Sequence
  ENSG00000185513_117 (sequence is synthesized)
gtgtcttaactcctgtgggctcaactactgtatcttacttagataaatagattcataaatcaacattcttttagctgggtcctgttgaccagtacaaatcttttgaagcatactactcac

SEQ ID NO: 670115 - DNA, 120 bp, Artificial Sequence
  ENSG00000185513_118 (sequence is synthesized)
tgtctcaactgtgaatattagtgtgacattttcccccaacgcctttttttttttttcgttttccaaggaaagaaactgtatcagtagacagaagtttgcatctatgactgaaatgttttc

SEQ ID NO: 670116 - DNA, 120 bp, Artificial Sequence
  ENSG00000185513_119 (sequence is synthesized)
tcattttcagagtcttctgacagaagaatctggggggtgggaatgggggttgggattgcttgagtttcttgtatgtgggaagaatctatgtttgagctatactctgtttggcagtttgat

SEQ ID NO: 670117 - DNA, 120 bp, Artificial Sequence
  ENSG00000185513_120 (sequence is synthesized)
ggccagctgttcaattcacgtcccacagacctgacatacctagtgctgacggagtgctccagtagtttaagagttaaaaacatgtgactcatgtgcccattcaggccttctgtctcatag

SEQ ID NO: 670118 - DNA, 120 bp, Artificial Sequence
  ENSG00000185513_121 (sequence is synthesized)
atcttctccttttcgataaccatattttgtgaatgatgattttctaacacaccattgcaagtttctacaacttacttagtcgttaatagatattctgactgtgttcacagttatagtagt

SEQ ID NO: 670119 - DNA, 120 bp, Artificial Sequence
  ENSG00000185513_122 (sequence is synthesized)
ccccttttatctgcagggaatacattccaagaaccccagtggacgcttgaaaccatggatagtactgaaccctatggatactgttttttttcctatccatacctacgataaaggtatgat

SEQ ID NO: 670120 - DNA, 120 bp, Artificial Sequence
  ENSG00000185515_0 (sequence is synthesized)
cggacgtgagaagggtcgggccaagatggcggtgcaggtggtgcaggcggtgcaggcggttcatctcgagtctgacgctttcctcgtttgtctcaaccacgctctgagcacagagaagga

SEQ ID NO: 670121 - DNA, 120 bp, Artificial Sequence
  ENSG00000185515_1 (sequence is synthesized)
ggaagtaatggggctgtgcataggggagttgaacgatgatacaaggagtgactccaaatttgcatatactggaactgaaatgcgcacagttgctgaaaaggttgatgccgtcagaattgt

SEQ ID NO: 670122 - DNA, 120 bp, Artificial Sequence
  ENSG00000185515_2 (sequence is synthesized)
tcacattcattctgtcatcatcttacgacgttctgataagaggaaggaccgagtagaaatttctccagagcagctgtctgcagcttcaacagaggcagagaggttggctgaactgacagg

SEQ ID NO: 670123 - DNA, 120 bp, Artificial Sequence
  ENSG00000185515_3 (sequence is synthesized)
ccgccccatgagagttgtgggctggtatcattcccatcctcatataactgtttggccttcacatgttgatgttcgcacacaagccatgtaccagatgatggatcaaggctttgtaggact

SEQ ID NO: 670124 - DNA, 120 bp, Artificial Sequence
  ENSG00000185515_4 (sequence is synthesized)
tattttttcctgtttcatagaagataagaacacaaagactggccgggtactctacacttgcttccaatccatacaggcccaaaagagttcagagtcccttcatggtccacgagacttctg

SEQ ID NO: 670125 - DNA, 120 bp, Artificial Sequence
  ENSG00000185515_5 (sequence is synthesized)
gagctccagccagcacatctccattgagggccagaaggaagaggaaaggtatgagagaatcgaaatcccaatccatattgtacctcatgtcactatcgggaaagtgtgccttgaatcagc

SEQ ID NO: 670126 - DNA, 120 bp, Artificial Sequence
  ENSG00000185515_6 (sequence is synthesized)
agtagagctgcccaagatcctgtgccaggaggagcaggatgcgtataggaggatccacagccttacacatctggactcagtaaccaagatccataatggctcagtgtttaccaagaatct

SEQ ID NO: 670127 - DNA, 120 bp, Artificial Sequence
  ENSG00000185515_7 (sequence is synthesized)
gtgcagtcagatgtcggcagtcagcgggcctctcctacagtggttggaggacagactggagcaaaaccaacagcatttgcaggaattacaacaagaaaaggaagagcttatgcaagaact

SEQ ID NO: 670128 - DNA, 120 bp, Artificial Sequence
  ENSG00000185515_8 (sequence is synthesized)
ttcttctctagaataaatcaggagacaaaatggggaaagatgaaaatatccagtgtaaagttacttaagctaaatcaatttcaaagaagaaaaacttggaggactcattttacctgactt

SEQ ID NO: 670129 - DNA, 120 bp, Artificial Sequence
  ENSG00000185515_9 (sequence is synthesized)
caagacttactataaagctatagtaatcaagatagatggtattggcagaggaacagacacatacgtcaatggaacagatgagagaacccagaaataaacccatataaatatgctcagctg

SEQ ID NO: 670130 - DNA, 120 bp, Artificial Sequence
  ENSG00000185515_10 (sequence is synthesized)
attttgaaaaagtgaaaaagcaattcaatggaggaagaatagcctttctgacaaattatgctagagcaattagacacccatggcgaggagaaaaaagaacctctacttaaacctcacatc

SEQ ID NO: 670131 - DNA, 120 bp, Artificial Sequence
  ENSG00000185515_11 (sequence is synthesized)
atcttcaggatcttgggctaggtgacaagttcttggactttgccccgaaagcacatccataaaagacaaaatctgatatattggacttcttcaaaatttaaaaacttgtgatttaagaag

SEQ ID NO: 670132 - DNA, 120 bp, Artificial Sequence
  ENSG00000185515_12 (sequence is synthesized)
aggaaaagataagctacagattgagatgaatttgcaaaccatatatctgatcaatttggaatatataaagtgtactaaaaactcaactgaagtcaggcatggtagctcatgcttgtaatc

SEQ ID NO: 670133 - DNA, 89 bp, Artificial Sequence
  ENSG00000185515_13 (sequence is synthesized)
actcaactgaagtcaggcatggtagctcatgcttgtaatctcaccactttgggaggccaagatgggaggagtgcttgaggttaggcctc

SEQ ID NO: 670134 - DNA, 87 bp, Artificial Sequence
  ENSG00000185515_14 (sequence is synthesized)
ggtgagctgtgatcacaccaccacactccaacctgtgtaacagagtgaggcctcatctcaaaaaaaaaaaaaggccacaaaactcaa

SEQ ID NO: 670135 - DNA, 120 bp, Artificial Sequence
  ENSG00000185515_15 (sequence is synthesized)
aggcctcatctcaaaaaaaaaaaaaggccacaaaactcaacaataaaaacaaacagtccaattagaaaatgggcaaaagacatgaatagatgtttcactgaagaggatctatagatggca

SEQ ID NO: 670136 - DNA, 120 bp, Artificial Sequence
  ENSG00000185515_16 (sequence is synthesized)
agtaagcatatgaaaagctgttaaactccataagtcatcagggaatgcaaattgaaaccacagcgaggctatgacttacttatctcaatggctaaagaaaaaatagtgaaaataccaaat

SEQ ID NO: 670137 - DNA, 120 bp, Artificial Sequence
  ENSG00000185515_17 (sequence is synthesized)
actgatgaggatacaaactggatattttatacattgctgacaggaatgtaaaatggtacagccactctgggaaagagtttatgaatttcttatcaagttaaacataattttttaatcaag

SEQ ID NO: 670138 - DNA, 120 bp, Artificial Sequence
  ENSG00000185515_18 (sequence is synthesized)
ttaaacataagacccagcagttgtgctcctggacattcattccagagaaatgaaaacctatattgtacttgtactcaaatattcataggagctttatttgtaatagccccaaactggaaa

SEQ ID NO: 670139 - DNA, 120 bp, Artificial Sequence
  ENSG00000185515_19 (sequence is synthesized)
caacccagatgtcctacaacaggtacatggttaaacaaaccatccataacttggaatactgctctggaatgaaaaggaactaactgttgatacaagaacttggttgtacctcaggggtat

SEQ ID NO: 670140 - DNA, 120 bp, Artificial Sequence
  ENSG00000185515_20 (sequence is synthesized)
tatggtgaacaaaaaaaaaaccagtctcaaatggtcacatactgtatgatcgcatttatataacattcttgaggtgacaaaattattgaaatgaagaacagattaatggttgccagggat

SEQ ID NO: 670141 - DNA, 120 bp, Artificial Sequence
  ENSG00000185515_21 (sequence is synthesized)
agggactggagggggtgtggggtatgtatgactataaagggatgacgcaaggagttcctttgtgctgatggaacagttctatatgattatgatgattacgatgttgattataacatttga

SEQ ID NO: 670142 - DNA, 120 bp, Artificial Sequence
  ENSG00000185515_22 (sequence is synthesized)
ttatgaggttaagcacatgagtctttacctgtgctgaagttgtatggacctacatacacacaaatgaatgcatgtaaaatctggtgatactgaataaagtctgtggtctagatagcagta

SEQ ID NO: 670143 - DNA, 120 bp, Artificial Sequence
  ENSG00000185515_23 (sequence is synthesized)
ccttcacatgttggtaagtatcatggggttgcaatgtttattgttttcagaaattaatatcatgtttccttttccattacatagggtatggttattttaaaccaaaatttgactgtcctt

SEQ ID NO: 670144 - DNA, 120 bp, Artificial Sequence
  ENSG00000185515_24 (sequence is synthesized)
accaaaatttgactgtcctttagcagatgtcattattttgatttattttattatgtattaaaagtaatgatttatgtcatattgattgtttttaataagtctgtcagttgatataaaaaa

SEQ ID NO: 670145 - DNA, 120 bp, Artificial Sequence
  ENSG00000185518_0 (sequence is synthesized)
cagagcataaccttcggtggcaggacaaatcaggccagcacgcagtctgccaagtcctgctcgctccctgtcaagaaaaacagctggatccatttctaatcaacacttcccaacgcaaca

SEQ ID NO: 670146 - DNA, 120 bp, Artificial Sequence
  ENSG00000185518_1 (sequence is synthesized)
cttctgagtctctgaaggagaccagagcttgaaactttccagacttccaacagacatcgagtgcaaaaggatatttaggttgtctttgcacaaatctggttgatttgagagataaagggg

SEQ ID NO: 670147 - DNA, 120 bp, Artificial Sequence
  ENSG00000185518_2 (sequence is synthesized)
gggggaaccagtgtgactttcacctaagaagtcacatgaacatatttcacatttgaactacataatgaatgatggttattgaaatagcccaaacctctaccacagagcgagggatatagc

SEQ ID NO: 670148 - DNA, 120 bp, Artificial Sequence
  ENSG00000185518_3 (sequence is synthesized)
tcaaggggcaaccaggcagtcgcagaaccaaggaatggatgactacaagtatcaggacaattatgggggctatgctcccagtgatggctattaccgcggcaatgagtccaacccagaaga

SEQ ID NO: 670149 - DNA, 120 bp, Artificial Sequence
  ENSG00000185518_4 (sequence is synthesized)
agatgcacagagtgatgtcaccgaaggccatgatgaggaagacgagatctatgagggcgagtaccagggtatccctcacccagatgatgtcaaggccaagcaggccaagatggcgccctc

SEQ ID NO: 670150 - DNA, 120 bp, Artificial Sequence
  ENSG00000185518_5 (sequence is synthesized)
cagaatggacagccttcggggccagacagacctgatggctgagaggctggaagatgaggagcagttggcccaccagtacgagaccatcatggatgagtgtggccatggccgcttccagtg

SEQ ID NO: 670151 - DNA, 120 bp, Artificial Sequence
  ENSG00000185518_6 (sequence is synthesized)
gatcctctttttcgtcttgggtttggccctgatggccgatggggtggaagtgttcgtggtgagttttgccctgcccagtgcagagaaggacatgtgtctgtccagttccaaaaaaggaat

SEQ ID NO: 670152 - DNA, 120 bp, Artificial Sequence
  ENSG00000185518_7 (sequence is synthesized)
gctagggatgatagtctacttgggaatgatggcgggcgccttcatcctgggaggcctggctgataagctgggaaggaagcgagtcctcagcatgtctctggccgtcaatgcctccttcgc

SEQ ID NO: 670153 - DNA, 120 bp, Artificial Sequence
  ENSG00000185518_8 (sequence is synthesized)
ctccctctcttccttcgtgcagggatatggagccttcctcttctgccgactcatctcaggcatcggtattgggggtgctctaccgattgtttttgcctatttttctgaattcttgtctcg

SEQ ID NO: 670154 - DNA, 120 bp, Artificial Sequence
  ENSG00000185518_9 (sequence is synthesized)
ggagaagcgaggagaacacctcagttggctgggcatcttctggatgactgggggcctgtacgcatctgccatggcctggagcatcatcccacactatggctggggcttcagcatggggac

SEQ ID NO: 670155 - DNA, 120 bp, Artificial Sequence
  ENSG00000185518_10 (sequence is synthesized)
caattaccacttccatagctggagagtgtttgtcatcgtctgtgctctgccctgcaccgtgtccatggtggccctgaagttcatgccagagagcccaaggtttctgctagagatgggcaa

SEQ ID NO: 670156 - DNA, 120 bp, Artificial Sequence
  ENSG00000185518_11 (sequence is synthesized)
acatgatgaagcctggatgattctcaagcaagtccatgacaccaacatgagagctaaggggaccccagagaaagtgttcacggtttccaacatcaaaactcccaagcaaatggatgaatt

SEQ ID NO: 670157 - DNA, 120 bp, Artificial Sequence
  ENSG00000185518_12 (sequence is synthesized)
cattgagatccaaagttcaacaggaacctggtaccagcgctggctggtcagattcaagaccattttcaagcaggtctgggataatgccctgtactgtgtgatggggccctacagaatgaa

SEQ ID NO: 670158 - DNA, 120 bp, Artificial Sequence
  ENSG00000185518_13 (sequence is synthesized)
tacactgattctggccgtggtttggtttgccatggcattcagttactatggactgacagtttggtttcctgatatgatccgctattttcaagatgaagaatacaagtctaaaatgaaggt

SEQ ID NO: 670159 - DNA, 120 bp, Artificial Sequence
  ENSG00000185518_14 (sequence is synthesized)
gttttttggtgagcatgtgtacggcgccacaatcaacttcacgatggaaaatcagatccaccaacatgggaaacttgtgaatgataagttcacaagaatgtactttaaacatgtactctt

SEQ ID NO: 670160 - DNA, 120 bp, Artificial Sequence
  ENSG00000185518_15 (sequence is synthesized)
tgaggacacattctttgacgagtgctattttgaagacgtaacatcaacagatacctacttcaaaaattgtaccattgaatcaaccatcttttacaacacagacctctacgagcacaagtt

SEQ ID NO: 670161 - DNA, 120 bp, Artificial Sequence
  ENSG00000185518_16 (sequence is synthesized)
catcaactgtcggtttatcaactccaccttcctggagcagaaggagggctgccacatggacttggagcaagataatgacttcctgatttacctcgtcagcttcctgggcagcctgtctgt

SEQ ID NO: 670162 - DNA, 120 bp, Artificial Sequence
  ENSG00000185518_17 (sequence is synthesized)
cttacccgggaacatcatttctgccctgctcatggatagaattggaaggctcaagatgattggtggctccatgctaatctctgcagtctgctgcttcttcctgttttttggcaacagtga

SEQ ID NO: 670163 - DNA, 120 bp, Artificial Sequence
  ENSG00000185518_18 (sequence is synthesized)
gtctgcaatgatcggctggcagtgcctgttctgtgggacaagcattgcagcctggaatgctctggatgtgatcacagtggagctgtatcccaccaaccagagagcaacagccttcggcat

SEQ ID NO: 670164 - DNA, 120 bp, Artificial Sequence
  ENSG00000185518_19 (sequence is synthesized)
tctcaatggattatgcaaatttggcgccatcctgggaaacaccatctttgcttcttttgttgggataaccaaagtggtccccatccttctggctgctgcttctctggttgggggtggcct

SEQ ID NO: 670165 - DNA, 120 bp, Artificial Sequence
  ENSG00000185518_20 (sequence is synthesized)
gattgcccttcgactgccagagactcgagaacaggtcctgatgtgaacaacctatgggaaaaggaaaggtcgagagaatcttgtccaggacactgaaatgcatccacacttcctgcctat

SEQ ID NO: 670166 - DNA, 120 bp, Artificial Sequence
  ENSG00000185518_21 (sequence is synthesized)
cacggtccggaggacaccttggatagcacgggaggagaagttgactttgtgacccctagtttaggacccacttcagctgtcaatatgtttgtaactcaggtgactgatttgggggtgccc

SEQ ID NO: 670167 - DNA, 120 bp, Artificial Sequence
  ENSG00000185518_22 (sequence is synthesized)
tgagccacccttagaatcacagagctgcgtgtttaacttcaagtcttcccagtccaaggcagggagaggattctccagtgagtgcacacactatgcgaggagcaagcatttctctaagtc

SEQ ID NO: 670168 - DNA, 120 bp, Artificial Sequence
  ENSG00000185518_23 (sequence is synthesized)
aagtgcaaggacttaacttgcgtttgaaaaggaattagagggtcagaaacacccaggttcctccagaaagctccttggagcccaacaacttaacaaatcaacttggctggaagttagagt

SEQ ID NO: 670169 - DNA, 120 bp, Artificial Sequence
  ENSG00000185518_24 (sequence is synthesized)
cattatatgaagattgggcttgaagtatatatttttgcatttaaaagtatcacctatcatattttccactcgaaaattgacatagtagcattgaggatactctgatctagaaagccaagt

SEQ ID NO: 670170 - DNA, 120 bp, Artificial Sequence
  ENSG00000185518_25 (sequence is synthesized)
atttgagcaacatctatagagatctacttttctcctatgtctcctaggctttccatgataattaggtaatacatttaagaaggatatttatttctgttttgctctattcaaagaaacgga

SEQ ID NO: 670171 - DNA, 120 bp, Artificial Sequence
  ENSG00000185518_26 (sequence is synthesized)
atgggatagttattctgtaaactaagtttgtatataactttatttgggtttaatttccacaactggtatctgcaaatattgccagcattttagccatattttgggagaacttggtgtttg

SEQ ID NO: 670172 - DNA, 120 bp, Artificial Sequence
  ENSG00000185518_27 (sequence is synthesized)
aggtcccaggaaatgaggtctgatcaaatgaaatgcaagcacaatttcttacagccatttaactttctgttgggaggatgaattaacaaactcacattgtgcagtctgcttaatccaggc

SEQ ID NO: 670173 - DNA, 120 bp, Artificial Sequence
  ENSG00000185518_28 (sequence is synthesized)
acttttctttgtgcaggtgtagtgagtagttacttctctcccttacacagatgacttgtgaaactcaagctcaccatcttcagtgctggcattttactttgccactacccaaaaacaatg

SEQ ID NO: 670174 - DNA, 120 bp, Artificial Sequence
  ENSG00000185518_29 (sequence is synthesized)
tgagatgtgttcagtggcctctggtactctttgcaggcaagaatcaaacaacatggggactgagggaaggatggggaagtgtagccacagttcttccaaatgtaaatactttttgtttgt

SEQ ID NO: 670175 - DNA, 120 bp, Artificial Sequence
  ENSG00000185518_30 (sequence is synthesized)
tctagtggtaaaatgcaaatgcaatccatatttgttaggatggtcaggtctcatgagaaatctatgctatgtgtccagagcttttgaaacagagtccattggagtgggagttagggagtg

SEQ ID NO: 670176 - DNA, 120 bp, Artificial Sequence
  ENSG00000185518_31 (sequence is synthesized)
tagtggatgccaaatatgtttttcttcagtgcttaagagaactgtttcctgaagtccagctttgaacataaacaggggtgtgggttgggggaggagcttaggacaaacctctctgatgaa

SEQ ID NO: 670177 - DNA, 120 bp, Artificial Sequence
  ENSG00000185518_32 (sequence is synthesized)
ggtcagcaatagactgaagtcttgactgcatggaagaggaaaaacatcagaactgtctgacaatggaggggacagtgagctacgcacaactgccagcggaggtgaacttgcacctgccca

SEQ ID NO: 670178 - DNA, 120 bp, Artificial Sequence
  ENSG00000185518_33 (sequence is synthesized)
ggccggatgaacatcagcctgcaagaactagttgtttgagttgatttgcagtgctctcaatgggcaagtgccacattttccctggcagagatctccaaaaatttaaaacagaataataat

SEQ ID NO: 670179 - DNA, 120 bp, Artificial Sequence
  ENSG00000185518_34 (sequence is synthesized)
ggctatatcgagtgttttctcagtattggagaaatgcttaggtcctatgatagcttcgggacatctttctgtaattttcctcaattaacgggttggtaggggtaaatcttatgacacctt

SEQ ID NO: 670180 - DNA, 120 bp, Artificial Sequence
  ENSG00000185518_35 (sequence is synthesized)
tccaccgtcgatttgagatcagttttaatggttaaaatgtttactctccttctgtcaaccctcacctttttatttacacccctccctttttttctgtacagggagagaagacatattgac

SEQ ID NO: 670181 - DNA, 120 bp, Artificial Sequence
  ENSG00000185518_36 (sequence is synthesized)
tctgactggacaccctgattcctccaaatatatataccactgtgtattaatctttctctcagtgttttataggagtactaacatttattgctctgtcaataatgaaaggctcgatgtaat

SEQ ID NO: 670182 - DNA, 120 bp, Artificial Sequence
  ENSG00000185518_37 (sequence is synthesized)
atagctgtaatttactttccatatgaatacagtggctaggttcataaaagagaattgtgtgagtctgggattaccacatctaaaacattattctttaatgggataatacaattcattgag

SEQ ID NO: 670183 - DNA, 120 bp, Artificial Sequence
  ENSG00000185518_38 (sequence is synthesized)
cagctaccacttaaaaaacttgcaggacagttagagcctgcatttctagttaagatggatcttgtaaatttaaaattggattaacattggagtgctggggtggctgcaataatttggggg

SEQ ID NO: 670184 - DNA, 120 bp, Artificial Sequence
  ENSG00000185518_39 (sequence is synthesized)
ctaactccatttggtttccaagatctcacttctgcattatctttatggctctttaaaccagccacctagccaatcaagggcaattcccatctcatccatcactcaggtctttgtaaaggg

SEQ ID NO: 670185 - DNA, 120 bp, Artificial Sequence
  ENSG00000185518_40 (sequence is synthesized)
tgcagccaagctctgcagacttttgcaggattgtctagcctgagtaccgggctacttcttaaatgccgtcactcctgctgagataaatgcgtctttaaaaatagtctctgtggcaggtca

SEQ ID NO: 670186 - DNA, 120 bp, Artificial Sequence
  ENSG00000185518_41 (sequence is synthesized)
ctgggggacaatgtacagcattctggccatccacttctttttcacttcatgttctaccccaagagactcccgatgtcggctgtggagggttaaagggatgaggctttcctttgtttagca

SEQ ID NO: 670187 - DNA, 120 bp, Artificial Sequence
  ENSG00000185518_42 (sequence is synthesized)
aatctgttcacagttcttgatgatgtattttatgatgcccagcttggaaatagttgctttccatagtctcaactgtattgtgtcatctcctgatgctgatttttgatcttttgttttatt

SEQ ID NO: 670188 - DNA, 120 bp, Artificial Sequence
  ENSG00000185518_43 (sequence is synthesized)
aaaaataattagtgaaagaggtgtgcctatctgtgaagtttgtagtacatcatcctgaggtcatgtaacaagtaaaccccaacccagcgttccctcctacgttgtgttagttcattaaaa

SEQ ID NO: 670189 - DNA, 120 bp, Artificial Sequence
  ENSG00000185518_44 (sequence is synthesized)
ctaaataataaaaataactgtaagaaaaccttaaggactggggttagagattattttcaggcactaaggtctcttctgtattccaaaattgattgaatcagctgggagaaacattgagaa

SEQ ID NO: 670190 - DNA, 120 bp, Artificial Sequence
  ENSG00000185518_45 (sequence is synthesized)
tcgcttccttcaacttttattttgcaacatggggaccttgagaggttaaacgatgtggcccagattacatgtaatgtgaggagtgggcgagaaggcctaaggtgatgctctcatgacagt

SEQ ID NO: 670191 - DNA, 120 bp, Artificial Sequence
  ENSG00000185518_46 (sequence is synthesized)
atactcgccattccctgagaccattcattgactattcccttgatggctttactataatgagaggaagcatcagtttaaacataaaaagattagtatttatccatccatttattcattcag

SEQ ID NO: 670192 - DNA, 120 bp, Artificial Sequence
  ENSG00000185518_47 (sequence is synthesized)
caaatccttattgagccctgaccatgggccagtctctctgccaagccctggggacacagtgatgaaaaaactggccacagtttctgcttcctgcctcattccacttgcagtgagcggata

SEQ ID NO: 670193 - DNA, 120 bp, Artificial Sequence
  ENSG00000185518_48 (sequence is synthesized)
ttaaattggccataaacaccgagtacgatgaccttacaatccgcaaactgcacctttcatgtgtaaaaggattgctactactttacttgtcagctgtggatttccaaatgtggtggctcc

SEQ ID NO: 670194 - DNA, 120 bp, Artificial Sequence
  ENSG00000185518_49 (sequence is synthesized)
ctcttatttttttttctttgaggagtgtaccaattttttatctttataaaccaggtaagggaaatgatgcccttgcccattttctacagacctaatcgatttttacctaatcagttttac

SEQ ID NO: 670195 - DNA, 120 bp, Artificial Sequence
  ENSG00000185518_50 (sequence is synthesized)
agaaagggttacatggaagaagagataggggccaggaatgcaagagggacattggtgagtggggtaagaatccccgtagccctgggaaaggtgtctccacttccacatctggcttttcta

SEQ ID NO: 670196 - DNA, 120 bp, Artificial Sequence
  ENSG00000185518_51 (sequence is synthesized)
gggggcatctgtgctaactgacctgggattatgttggatggcatatgactgcaaattcaaagaaaccaatttataataagtttatagtaagttaaaggtttgttttactctcatgtgaag

SEQ ID NO: 670197 - DNA, 120 bp, Artificial Sequence
  ENSG00000185518_52 (sequence is synthesized)
ggaatctggaggaaggaaagccagggctggagtggctgcctttgatcatgggagcacactccttctgcccgatcattgggagcacactccttctgcctgatcgttgggagcacactcctg

SEQ ID NO: 670198 - DNA, 120 bp, Artificial Sequence
  ENSG00000185518_53 (sequence is synthesized)
cctgatcatgggcgcacgttccttctgcctgatcgttgggagcacactccttctgcctgatcatgggagcacactccttctgcctgatcattgggagcacgctccttctgcctgatcgtt

SEQ ID NO: 670199 - DNA, 120 bp, Artificial Sequence
  ENSG00000185518_54 (sequence is synthesized)
gggagcacactctttctgcctgatcgttgggagcacaccccttctgcctgatcattgggagcacactccttctgcctgatcatgggcacacgctccttctgcccgatcatgggcacacgc

SEQ ID NO: 670200 - DNA, 120 bp, Artificial Sequence
  ENSG00000185518_55 (sequence is synthesized)
tccttctgcccgatcgttgggagcacactccttctgcccaatcattgggctcacgctccttctgcccgatcgctgggctcacgctccttctgcccgatcttgggcgcacgctccttctgc

SEQ ID NO: 670201 - DNA, 120 bp, Artificial Sequence
  ENSG00000185518_56 (sequence is synthesized)
ccgatcgttgggcgcacgctccttctgcccgatcgttgggcgcatgctccttctgcccgatcgttgggagcacgctcattctgcccgattgttgggagcacgctccttctgcccgatcgt

SEQ ID NO: 670202 - DNA, 120 bp, Artificial Sequence
  ENSG00000185518_57 (sequence is synthesized)
tgggcgcacgctccttctgcccgatcgttgggcgcacgcttcttctgcctgatcgttgggcgcacgctccttctgcctgatcgttgggcgcacgctccttctgcctgatcgttgggagca

SEQ ID NO: 670203 - DNA, 120 bp, Artificial Sequence
  ENSG00000185518_58 (sequence is synthesized)
cgctccttctgcctgattgttggaagcacgctccttctgccttcagactccttgatttttagtgcagtttccatcactgaggctgcctcatgggctgagatggctgttgaagcactgaac

SEQ ID NO: 670204 - DNA, 120 bp, Artificial Sequence
  ENSG00000185518_59 (sequence is synthesized)
ctcacatccacaattcaggcaggaagcagaaggaagggcaatgggcaaaggggctgtgccttgcagccgatccagcctccctttgctgcagaggaggcagggaaatgcggtatttactgg

SEQ ID NO: 670205 - DNA, 120 bp, Artificial Sequence
  ENSG00000185518_60 (sequence is synthesized)
gaacattgctgcccctcctccaaattgagggtcttggctcgaaggacaaaagccagaaaggataggtggattagtgcttcttaaacttttgcgtgcatcagaatcacccagaaagatgtt

SEQ ID NO: 670206 - DNA, 120 bp, Artificial Sequence
  ENSG00000185518_61 (sequence is synthesized)
aaaactcactcttcaaggccccatccccagagattcggattctggggatttggaatctggggtggggtctgaagaatctgcattttttaacaaactcccaggtgacatagatggcatcaa

SEQ ID NO: 670207 - DNA, 120 bp, Artificial Sequence
  ENSG00000185518_62 (sequence is synthesized)
ttctcaagccatattttgagtagcactgacactcttccaataggtggtactttgacttgtcagggaagttctattgctctgataacttaaaaccaacccaaccagaagctcacaaaaact

SEQ ID NO: 670208 - DNA, 120 bp, Artificial Sequence
  ENSG00000185518_63 (sequence is synthesized)
agcagcctgtgaaaaatgatcaccattttcctagagctccgagacaactagtggtagtgcaacagtaacccaaaaatgtcaatgaaaatatttccttccccagaaactgcttggtttcac

SEQ ID NO: 670209 - DNA, 120 bp, Artificial Sequence
  ENSG00000185518_64 (sequence is synthesized)
tcaggtcctgtccttatgggcctgtgtctggttgcagggcttgaagtatttcggaagctcagcagaggttgaaccctttcccctgggggttggtgatctttgttttggccatttccacct

SEQ ID NO: 670210 - DNA, 120 bp, Artificial Sequence
  ENSG00000185518_65 (sequence is synthesized)
ggtgaagattttcatagacaaatatgcttgtggcatcctgtaattcattgtgccttatgatggacctctgattctataagcttccccctagctagggatgcacgggggtgatcaagacat

SEQ ID NO: 670211 - DNA, 120 bp, Artificial Sequence
  ENSG00000185518_66 (sequence is synthesized)
gactagatgtgaacctgacctgcagacagtccacctgaacgtgcctggaaatgtctcccgaaaaggatgaaaagcctcctcctttagacaaggaagacagagtggagcaaatttctctac

SEQ ID NO: 670212 - DNA, 120 bp, Artificial Sequence
  ENSG00000185518_67 (sequence is synthesized)
atagatctcattcgaaaacaaatttacagaatgcagaatggctactgtgtgtcttgtgctatgctaggtctctctctctctaagtggactctgaccctgtccaaaacattgtgcttttgc

SEQ ID NO: 670213 - DNA, 120 bp, Artificial Sequence
  ENSG00000185518_68 (sequence is synthesized)
atgtagctgtgtcgcatttaggcccagctctaagaaccgtttggaaataaatcacatagagcctttgattgtgaggcaggcttaaagtacattttgtttgatttgcagaggcatggtgag

SEQ ID NO: 670214 - DNA, 120 bp, Artificial Sequence
  ENSG00000185518_69 (sequence is synthesized)
gaatttatatgcatggctgttgtggcagcagcgagatttccaaaaagatgaatgatgaaatgaaacagactgaagctatctcacaaatgttaaatggagaaataaaagttgttatagtca

SEQ ID NO: 670215 - DNA, 120 bp, Artificial Sequence
  ENSG00000185518_70 (sequence is synthesized)
ttgctaattacagaatgagcaagagatttatttagcaggaccatactatgccccctggaaggttcagtttatgagctggagcacaaggatttactgtcatttcacctgaaaacacacatt

SEQ ID NO: 670216 - DNA, 120 bp, Artificial Sequence
  ENSG00000185518_71 (sequence is synthesized)
tagctgtccatttacctttaatcctacaggcttaaaatactttaaaatttcagagaccattaatatgtattcctttagaaagcaaaggtctttcagaagctgtcctctaccaaagttaat

SEQ ID NO: 670217 - DNA, 120 bp, Artificial Sequence
  ENSG00000185518_72 (sequence is synthesized)
gtggtcaccacatttgatgattttgctaggtagggaggtttatttaatcacagctactgtcactcaggaggatgagccatttaaaaatggtggccctgtcctccacttcttacctaccat

SEQ ID NO: 670218 - DNA, 120 bp, Artificial Sequence
  ENSG00000185518_73 (sequence is synthesized)
atataatctcagtaattcagatttctctaaatcagcattagtgatcatttcaatagggtatgaacaaaaggcctataaaaatagctttccaattcgccaccaaaaatgcaaaaatgacaa

SEQ ID NO: 670219 - DNA, 120 bp, Artificial Sequence
  ENSG00000185518_74 (sequence is synthesized)
gtaagtgaggtaacgcatgagctaaatagcttgatttagtcactctaaaatgtgggtgtgtatatatacatacatatatatacacacacacattatgttatacaccataaatatatagaa

SEQ ID NO: 670220 - DNA, 120 bp, Artificial Sequence
  ENSG00000185518_75 (sequence is synthesized)
gttttacttgtcaattaaaactataaataaagtggctttccagaaaaattagatattggactctatcacaaaggaattgcataaaaatacttacaaacataactataagcaattgatgag

SEQ ID NO: 670221 - DNA, 120 bp, Artificial Sequence
  ENSG00000185518_76 (sequence is synthesized)
caaattacaaatgactgttttttattaaaacattcctccaaaagaacggcaaagcaaatcccatagacacccaaaatactaaaagtgacaaaacaatacttctttaaaaatgtattttat

SEQ ID NO: 670222 - DNA, 120 bp, Artificial Sequence
  ENSG00000185518_77 (sequence is synthesized)
gatctatttattgatattctaatggttttaagaaggataattttccaaaacctaaatgctacacattttacagtggcaatatcaaccttatcatgagctaaagatttgcaatcagaacat

SEQ ID NO: 670223 - DNA, 120 bp, Artificial Sequence
  ENSG00000185518_78 (sequence is synthesized)
tggtagagtgcattgctgagttataacaagtgtctcaggacgaggatatttggtaggtatccttaaatatatagatgcttaccagtaggtttaatagaagatttctgaaaggtagcgcaa

SEQ ID NO: 670224 - DNA, 120 bp, Artificial Sequence
  ENSG00000185518_79 (sequence is synthesized)
agcctcccaaagtgctgggattacaaatgtgagctactatgcctggtcccaacttcttaaaattaaattttggggaagttcatggagatatttttgacatgtaaaagtagaaaacaaacc

SEQ ID NO: 670225 - DNA, 120 bp, Artificial Sequence
  ENSG00000185518_80 (sequence is synthesized)
tttgacatgtaaaagtagaaaacaaaccatccatagtgtgtgcatatatacacacaaggtttggtttaatatacttgctgtgcactagtcagttttgattcaggttacataagggataaa

SEQ ID NO: 670226 - DNA, 120 bp, Artificial Sequence
  ENSG00000185518_81 (sequence is synthesized)
atatagaaagacattttaaagtttgaaatatgtgctaagtagttagagatttggcagttttgccacatttcaaatgggccaaacattaaaataacttatccatgaatttcaggtttcaag

SEQ ID NO: 670227 - DNA, 120 bp, Artificial Sequence
  ENSG00000185518_82 (sequence is synthesized)
gaaggaggaatatctgactatttttttttgtgtgtgagatttggtctcagctttttggtccatctgaatcctggaagtccccaactctaccagaccaaaagggtgtctctattttttgtt

SEQ ID NO: 670228 - DNA, 120 bp, Artificial Sequence
  ENSG00000185518_83 (sequence is synthesized)
gttacttctctgttcttgatgtaatgagttaagtagatgaaagagattaaggtgcagggaagggctcttaaaagtttaatgtttcagctttccatagtcattcatacttgtgaatcttct

SEQ ID NO: 670229 - DNA, 120 bp, Artificial Sequence
  ENSG00000185518_84 (sequence is synthesized)
tcctcttctacttcaaagtagccaaaacttggaaagttcaaattaatctttgggctccaaagagcaattctgaaggattaacaggtttcattctctccagtgggaggtggcctagacagg

SEQ ID NO: 670230 - DNA, 120 bp, Artificial Sequence
  ENSG00000185518_85 (sequence is synthesized)
tgccggttttggggagaggtgagagtacccagatgtgggtgactatttcctgttcttccctgaaagtcaggccagtggtctcgaatcattcccacagcaactgctacaaaagtgactatc

SEQ ID NO: 670231 - DNA, 120 bp, Artificial Sequence
  ENSG00000185518_86 (sequence is synthesized)
ttaatcctttggctagatgggatacctcttctaccttttcagaggtgagctgttgagtagtaatgtccgctacaacaccacgctcccggaatggtggttcctaagagcaaagtcagttaa

SEQ ID NO: 670232 - DNA, 120 bp, Artificial Sequence
  ENSG00000185518_87 (sequence is synthesized)
tacaatttctccaggtatccagctatctccaggtgtgcggtcctgtgaagcactctaagaactgtaaaaaatatttcataggtatagaaggcatttgtaatactgttggttcaaatgtgc

SEQ ID NO: 670233 - DNA, 120 bp, Artificial Sequence
  ENSG00000185518_88 (sequence is synthesized)
tgacatgtagccagtggaggaagatgtttctttggaagcctgccatctttctgtaacgcaccttcaacctgagataattaagagtcattacgtttcccagtcccatgtcacattgaccag

SEQ ID NO: 670234 - DNA, 120 bp, Artificial Sequence
  ENSG00000185518_89 (sequence is synthesized)
tcctgtggtcctatggctaagcggaggacacggccacaagctgtgagtcatgaaaaggagggtgcaggtgataggcaaagggacccattagccagtttacaatgactggcaactgaccag

SEQ ID NO: 670235 - DNA, 120 bp, Artificial Sequence
  ENSG00000185518_90 (sequence is synthesized)
atagagcttaccgtatgtccatgtagagttgctcatattagtctgtaaataattctatgcatagtgaatgcagcttctgaattattaaactgatgctataaatgtgaactgacaaaaccc

SEQ ID NO: 670236 - DNA, 120 bp, Artificial Sequence
  ENSG00000185518_91 (sequence is synthesized)
gacacccagagaggagcacacacaatacaagtcagactttaattttttccttttttaatgaatgcttttcctgaattccaggactatgaaggttttgaagcaacacttcacaaaggcagg

SEQ ID NO: 670237 - DNA, 120 bp, Artificial Sequence
  ENSG00000185518_92 (sequence is synthesized)
gactctggaaaattctgagggagtttcagagcagatgaacttctgtctgcttctccctgggtccccgacctatctgttcttgtcccagcccagttcaaaaggaaaactctcccttgattt

SEQ ID NO: 670238 - DNA, 120 bp, Artificial Sequence
  ENSG00000185518_93 (sequence is synthesized)
ccctaaatgggtggaataagggaaaactaaagctgttactaccagtcttttctgggagatgaaaatccaatctcaaggatgtttcttcctggaccaaagctgtgatgggtgacgaaaaat

SEQ ID NO: 670239 - DNA, 120 bp, Artificial Sequence
  ENSG00000185518_94 (sequence is synthesized)
gatagaatgaaaagctcttgtgttatgtatttgccagagatgtgtgttacatgcgcctacatcatcattaaggtatttgaaaagcagcgtgcactacaagaagcatgagcgtggatgctc

SEQ ID NO: 670240 - DNA, 120 bp, Artificial Sequence
  ENSG00000185518_95 (sequence is synthesized)
aaacagacctagggatgatagtctacttgggaatgatggcgggcgccttcatcctgggaggcctggctgataagctgggaaggaagcgagtcctcagcatgtctctggccgtcaatgcct

SEQ ID NO: 670241 - DNA, 120 bp, Artificial Sequence
  ENSG00000185518_96 (sequence is synthesized)
atatttattggtctgcaaatccggagaccttgcggcctcactggtcctccttccctctgagctatctccacacccagccttcgatcagaaggagatttagaagcagagctgcccgcagcg

SEQ ID NO: 670242 - DNA, 120 bp, Artificial Sequence
  ENSG00000185518_97 (sequence is synthesized)
aatacttttaatgcccgggccgggaagaaagcgggttaggatctgatcccgctgagtagaggacccaggagcctcccgccccgcgtgctctgtagcgcgggggcgcgctgcgcgctgcgc

SEQ ID NO: 670243 - DNA, 120 bp, Artificial Sequence
  ENSG00000185518_98 (sequence is synthesized)
gcgtgggcgcggtgatgcaggtgtgacacccgccggcgcctgcctccgcccggatcgcccagctccgcgttagccggagctgcacgcggggctgccggggcggacgctgctctgcctgca

SEQ ID NO: 670244 - DNA, 120 bp, Artificial Sequence
  ENSG00000185518_99 (sequence is synthesized)
actttggatgaggatgcgtctctatgggagtctcttaccttagtggatgaaaaatgcagctcctgaacatccccaccaacctgggccagcgtgatggagaggaagcaaccctggaggggg

SEQ ID NO: 670245 - DNA, 120 bp, Artificial Sequence
  ENSG00000185518_100 (sequence is synthesized)
gcgtttgggctccagcccacgtctgcctctagcttgctgtgtgccctggagctgaaaactctctaaatcttagtttcttttctttgttcttccttcccaaggcagggattttgaatgtag

SEQ ID NO: 670246 - DNA, 120 bp, Artificial Sequence
  ENSG00000185518_101 (sequence is synthesized)
gctgctctgcctgcatccggaggcggccgccagcggatttgccacccaggtcctaagactctcagtccagagagggccctgccccacacccagaaggaaggaatgctgcccagagatgac

SEQ ID NO: 670247 - DNA, 80 bp, Artificial Sequence
  ENSG00000185519_0 (sequence is synthesized)
actgcgcgggaggcggcggcgcgaggcgagccgggcgcggcggcagcagggacgacccaggctggagctgaggccgagct

SEQ ID NO: 670248 - DNA, 120 bp, Artificial Sequence
  ENSG00000185519_1 (sequence is synthesized)
gggcccgcggagacatgaacgccccgcggccccacgcaccccgggcgcagcggcccggccccgcggccccgtgatgggctcctgcgtgtcgcgagacctgttcacaagtgcccacaagaa

SEQ ID NO: 670249 - DNA, 120 bp, Artificial Sequence
  ENSG00000185519_2 (sequence is synthesized)
caagtgcccacaagaactgccccatgccccagggtgcggaccccttgaacccagatctgccctcgggccgcactcccaccgtggctccagactgtgtcattggcaaggacaaacagatgg

SEQ ID NO: 670250 - DNA, 120 bp, Artificial Sequence
  ENSG00000185519_3 (sequence is synthesized)
atttctgttgggatccttggcagaggtgcttccagaccaccaacggctacctgtccgactccagatcccgccccggcaactacaacgtggcagccctggccacctcgtcccttgtggggg

SEQ ID NO: 670251 - DNA, 120 bp, Artificial Sequence
  ENSG00000185519_4 (sequence is synthesized)
tggtgcagagcatcaaggaccacatcacaaagcccacggccatggcccgaggccgcgtggcccacctcatcgagtggaagggctggagtgcccagccggcaggctgggagctgtccccag

SEQ ID NO: 670252 - DNA, 120 bp, Artificial Sequence
  ENSG00000185519_5 (sequence is synthesized)
ctgaggacgagcattactgctgcctcccggatgagctgcgtgaggcccgctttgctgcaggggtcgccgagcagtttgccatcacagaggccacactgagcgcttggtcctcgctggacg

SEQ ID NO: 670253 - DNA, 120 bp, Artificial Sequence
  ENSG00000185519_6 (sequence is synthesized)
aagaggagctgcaccccgagaacagcccccaaggcatcgtccagctccaagatctggagagcatctaccttcaggacagccttcccagcggcccctcacaggatgacagccttcaggcct

SEQ ID NO: 670254 - DNA, 120 bp, Artificial Sequence
  ENSG00000185519_7 (sequence is synthesized)
ctgtccctcacctgaggagccccccagcaccgctggcatcccgcagccccccagcccagagctgcagcatcggcggcggctgcccggggcccaaggacccgagggtgggacccacccccc

SEQ ID NO: 670255 - DNA, 120 bp, Artificial Sequence
  ENSG00000185519_8 (sequence is synthesized)
ctccatggacagcggctccctctgggaggaggacgaggtgttctataactgaggtgggggctgtgctggtccagcacctgctctcaccatgacctcgcctggtgggcagcccaggcatat

SEQ ID NO: 670256 - DNA, 120 bp, Artificial Sequence
  ENSG00000185519_9 (sequence is synthesized)
ctggaccccggggtccagggcagggcatcccttgacccctcgggtaggcacagggtaggtgcggcagggatggggccagtgctcatggtggcctctctgtgcctcggtggacctgcccca

SEQ ID NO: 670257 - DNA, 120 bp, Artificial Sequence
  ENSG00000185519_10 (sequence is synthesized)
gcagtgggagccataaccccctcccccttcattacttcactcaggtgggcaccttcccctgcagggtgtctgccctcagggaactcacggactctcagagacaccagggcagcctggccc

SEQ ID NO: 670258 - DNA, 120 bp, Artificial Sequence
  ENSG00000185519_11 (sequence is synthesized)
agaggagcaacagccaggcccccaggaggacagccatggagagaactgagacccacttacagtggggtctgggaaccctgcctgtacctggggttcagtccctcccaactccctccttgt

SEQ ID NO: 670259 - DNA, 120 bp, Artificial Sequence
  ENSG00000185519_12 (sequence is synthesized)
gtctgccccccagcaaaggtggggtgaccacttctggtagctaagcacctgctccccggctctcttcacccaggacatctgtctctctggagtgtctgtctgtctgtccctccctctctg

SEQ ID NO: 670260 - DNA, 120 bp, Artificial Sequence
  ENSG00000185519_13 (sequence is synthesized)
aacctgcttcctccgtgtcccctgctcctcacccctgggagcccactccccctccttgcggctccctcccatctcactcaaggttctctgaggacattaaagtggtggattcaccctgga

SEQ ID NO: 670261 - DNA, 120 bp, Artificial Sequence
  ENSG00000185522_0 (sequence is synthesized)
gcctaccgcgaaaaacgcggaaatgcggtggctgcggcccgcgggcaggcgtcgggagcaagagtcggtcagtggtcacctgggacctccagcaggcgcacctgcagcccccgagactcc

SEQ ID NO: 670262 - DNA, 120 bp, Artificial Sequence
  ENSG00000185522_1 (sequence is synthesized)
cacgtgcctgccagacaccacgccccaccccgcaccggtggtctgctctgccgacccgcagttggctcttgagtccctggaccctcgcacactgcggctgctgtggagacagcgagaact

SEQ ID NO: 670263 - DNA, 120 bp, Artificial Sequence
  ENSG00000185522_2 (sequence is synthesized)
ggagatccaggccttgcggtgggccatccagaatggcgaggacgcccggctctgccacatcctggaagaggtggcggggcttccgcccaagaggagctcccacagtcaggagaaactcct

SEQ ID NO: 670264 - DNA, 120 bp, Artificial Sequence
  ENSG00000185522_3 (sequence is synthesized)
gcagaaccaggtccagaagctgatccaggagttgaaggaacagaaggagcgagcccagtgggagaaggagcacctggaggagcggctgctgcagaccacccgcacgctccaggagatgga

SEQ ID NO: 670265 - DNA, 120 bp, Artificial Sequence
  ENSG00000185522_4 (sequence is synthesized)
ggccgagctgcagaacttgcagaagtcctgcctcctgcagctggcccgctcctcgtgggtgggccgcatgctacgatcccagactggcagtgtggaggtagtgacggcagagactctgat

SEQ ID NO: 670266 - DNA, 120 bp, Artificial Sequence
  ENSG00000185522_5 (sequence is synthesized)
ggacccaagcgacctctctgaaaacattcaggcccccaccggggagggctttcggctggaggacgtggattggaacagcgttgcccgccggtatcccaacctcttcaccaacatggagcc

SEQ ID NO: 670267 - DNA, 120 bp, Artificial Sequence
  ENSG00000185522_6 (sequence is synthesized)
cagctcaaagcaaaagcagccccggccctggccacagctggacacagggagcccagagtcctctggaaagcattccgagcggcatcacaagaccgtggagtggggctccctgccctgtct

SEQ ID NO: 670268 - DNA, 120 bp, Artificial Sequence
  ENSG00000185522_7 (sequence is synthesized)
gaacaccagcagctcagggggcgctgactccgactccagcagctgccggccgggcctgccttccttcgtgcaggtgatagggcacccgccccgggaccaccgcgcttcctccgagcaagc

SEQ ID NO: 670269 - DNA, 120 bp, Artificial Sequence
  ENSG00000185522_8 (sequence is synthesized)
gctacagcagggactcagaagatctccagaaaacccactcacccaggcacggcgagccggtcctgtcgccccagccctgcacagacccggaccactggagcccggaactcctgcagagcc

SEQ ID NO: 670270 - DNA, 120 bp, Artificial Sequence
  ENSG00000185522_9 (sequence is synthesized)
cgacaggcctgaagatcgtggctgtgagctgccgggagaagttcgtccgcatcttcaacccgtcgcaggagagcacggccgacctgagcggcatggtgctgaagcagctggtgcgcggct

SEQ ID NO: 670271 - DNA, 120 bp, Artificial Sequence
  ENSG00000185522_10 (sequence is synthesized)
tcccggagcgcctgtaccgcttcccgccgggcacgctgctggccccgcggcaccacgtcacggtctggggcgaggcgacccgcagcgccaagaagccgctgcgcgcgtcctcgagccggg

SEQ ID NO: 670272 - DNA, 120 bp, Artificial Sequence
  ENSG00000185522_11 (sequence is synthesized)
agcccgttcccctcctctccatccgcggctgcgcgacgctgctcctgagccccaagggcgaggtcctcagtgagcaccggatcccacgccgcgagactccggccccgagggtcttcgccg

SEQ ID NO: 670273 - DNA, 120 bp, Artificial Sequence
  ENSG00000185522_12 (sequence is synthesized)
gccgacggcaccgacttgtccatcgaccgcttcccgctccctgaggccgggcccggcgccgacacccgcaagccgccgcgcccacctcgacccctgcgcaaaggccgggtgcgggagccc

SEQ ID NO: 670274 - DNA, 120 bp, Artificial Sequence
  ENSG00000185522_13 (sequence is synthesized)
tcagtcgccggagaccagggacgcggggcctgctgcccccagtgagctcggggaagctcttccacgcgcgggaggggcctgcgcggcccgagaaccccgagatccccgcgccgcagcacc

SEQ ID NO: 670275 - DNA, 120 bp, Artificial Sequence
  ENSG00000185522_14 (sequence is synthesized)
tgcccgccatcccgggtgaccccaccctgccgtcgcctcccgcagaggccgggctgggcctggaggactgtcggctccagaaagaacaccgagttcgggtgtgccggaagagcgtggacc

SEQ ID NO: 670276 - DNA, 120 bp, Artificial Sequence
  ENSG00000185522_15 (sequence is synthesized)
gtagctgccccctggtggccctgtcggtgcagaacacggcggagagcagattcggcttccgcttcctcagctgcctgccggtcaccgcggacacctgccgcggcgcctaggggcggagga

SEQ ID NO: 670277 - DNA, 120 bp, Artificial Sequence
  ENSG00000185522_16 (sequence is synthesized)
gtggggccgggaccgcgagggagggcgcgggcgggcgccggggctgggcgggctgtgtccgctgcatcatttattgaaccaacgtggcctacaaagtaaaccgcatttctgtacacctga

SEQ ID NO: 670278 - DNA, 120 bp, Artificial Sequence
  ENSG00000185522_17 (sequence is synthesized)
cgaaaaacgcggaaatgcggtggctgcggcccgcgggcaggcgtcggggctgggctggcccagaactcacctaggggcctggtctggggtctccctggaggctcctggtaacaaacagcc

SEQ ID NO: 670279 - DNA, 120 bp, Artificial Sequence
  ENSG00000185522_18 (sequence is synthesized)
ccaccccttctgggtgctggtatccatggcaacggtatacagcccttccctcccaggcctgcttggaggtcgggcctcagagcaagagtcggtcagtggtcacctgggacctccagcagg

SEQ ID NO: 670280 - DNA, 120 bp, Artificial Sequence
  ENSG00000185522_19 (sequence is synthesized)
acatagccgaaagttgcagagatgaagggtgaaagctggaatgattgggttttaatgggtcaggtctgggacctggcttttctcctggagcagagggaatacttgtcatggtaatggggt

SEQ ID NO: 670281 - DNA, 120 bp, Artificial Sequence
  ENSG00000185522_20 (sequence is synthesized)
gccagacaccacgccccaccccgcaccggtggtctgctctgccgacccgcaggtctgctgccgctgcaggttggctcttgagtccctggaccctcgcacactgcggctgctgtggagaca

SEQ ID NO: 670282 - DNA, 120 bp, Artificial Sequence
  ENSG00000185522_21 (sequence is synthesized)
agcccaacccaaccccgccctgtcctcgcccggactcctggtttctgtctgaccccaaccccaaccgctgaggcagatccttaccctcatccttgcccgcgctgaccctccaccctgatc

SEQ ID NO: 670283 - DNA, 120 bp, Artificial Sequence
  ENSG00000185522_22 (sequence is synthesized)
tccctcgtatcccctcgctaggacggacccctacttccccaggccccgccccggccgccccctggtcctccagtacgccccgcggcccctgccccgccccaggcgcggagccctctaggg

SEQ ID NO: 670284 - DNA, 120 bp, Artificial Sequence
  ENSG00000185522_23 (sequence is synthesized)
cttccctcccaggcctgcttggaggtcgggcctcagctcccgaagaacattgagaatggcccccaagtctggccaggaggttgaagaaaccgaggaagaggctctcctgtcccccacaga

SEQ ID NO: 670285 - DNA, 120 bp, Artificial Sequence
  ENSG00000185523_0 (sequence is synthesized)
tcccagtgggctaatccacaccagtggacttgaaacacgctttgggttgctgtatggtagtatgctaaaggacagcaagaatcacttgacaattggtttgtgaccataatggcatctata

SEQ ID NO: 670286 - DNA, 120 bp, Artificial Sequence
  ENSG00000185523_1 (sequence is synthesized)
aacagaaccattgaaataatgaaaaaacatggagtaagcaaacaacatctcctggaggagataaacaaaaagcgtgaatccaactgcttggtggaacgaagcaatcaagtcagcttactg

SEQ ID NO: 670287 - DNA, 120 bp, Artificial Sequence
  ENSG00000185523_2 (sequence is synthesized)
tgcctatcagtcctttactgataccacaaccaaagagcctgttcccaacagtggcaggagctcctggatcaagctgagtctccttgctcacatggagagaaagcactttccaccaaaaaa

SEQ ID NO: 670288 - DNA, 120 bp, Artificial Sequence
  ENSG00000185523_3 (sequence is synthesized)
taatgccatatttggataaagtgcatctccagagacacacggaaatacattctctttgattcttcttcagtgtgtctaaattatttacaaattattaattataaacaaagctaaacaaaa

SEQ ID NO: 670289 - DNA, 120 bp, Artificial Sequence
  ENSG00000185527_0 (sequence is synthesized)
gggaggcccagcactcacagcacagccccctgagacccgccctgcacttgaccgcagcaggagggagtccaggagccaaggttgccgcggtgtctccgtcagcctcaccatgaacctgga

SEQ ID NO: 670290 - DNA, 120 bp, Artificial Sequence
  ENSG00000185527_1 (sequence is synthesized)
accgcccaaggctgagttccggtcagccaccagggtggccgggggacctgtcacccccaggaaagggccccctaaatttaagcagcgacagaccaggcagttcaagagcaagcccccaaa

SEQ ID NO: 670291 - DNA, 120 bp, Artificial Sequence
  ENSG00000185527_2 (sequence is synthesized)
gaaaggcgttcaagggtttggggacgacatccctggaatggaaggcctgggaacagacatcacagtcatctgcccttgggaggccttcaaccacctggagctgcacgagctggcccaata

SEQ ID NO: 670292 - DNA, 120 bp, Artificial Sequence
  ENSG00000185527_3 (sequence is synthesized)
tggcatcatctagcacgaggccctgctgaagtccagaccctccccctcctgcccactgtgctctaaaccctgctcaggattcctgttgaggagatgcctccctagcccagatggcacctg

SEQ ID NO: 670293 - DNA, 120 bp, Artificial Sequence
  ENSG00000185527_4 (sequence is synthesized)
tctccccctacatattaataccagtcaccaggagcccaccacctccctctaggatgccccctcaggggctggccaggccctgctcaacatctggagatacaggcccacccctcagtcctg

SEQ ID NO: 670294 - DNA, 120 bp, Artificial Sequence
  ENSG00000185527_5 (sequence is synthesized)
cccacagagaggcttggtcggtctccactcccagggagaacgggaagtggaccccagcccgggagcctgctggaccccagatcgtcccctcctcccagctggaaagctagggcaggtctc

SEQ ID NO: 670295 - DNA, 120 bp, Artificial Sequence
  ENSG00000185527_6 (sequence is synthesized)
cccagagtgcttctgcaccccagccccctgtcctgcctgtaaggggatacagagaagctccccgtctctgcatcccttcccaggggggtgcccttagtttggacatgctgggtagcagga

SEQ ID NO: 670296 - DNA, 120 bp, Artificial Sequence
  ENSG00000185527_7 (sequence is synthesized)
ctccagggcgtgcacggtgagcagatgaggccccaagctcatcacaccagggggccatccttctcaatacagcctgcccttgcagtccctatttcaaaataaaattagtgtgtccttgcc

SEQ ID NO: 670297 - DNA, 120 bp, Artificial Sequence
  ENSG00000185532_0 (sequence is synthesized)
cttcccttggtaccatacagcgtggaagagtgagttttgtgtgatggagtgggaccaggctctctgatccaaccctctgctagcaactcggctgtcggtggggtggcgcgcgcgtattct

SEQ ID NO: 670298 - DNA, 120 bp, Artificial Sequence
  ENSG00000185532_1 (sequence is synthesized)
cacggagtgactaggagagggggacgagggagggggtctcaggggaggaagggcagctctaattggtttctcaatgaaagataatcacctactccccagagaggctggagattagcactc

SEQ ID NO: 670299 - DNA, 120 bp, Artificial Sequence
  ENSG00000185532_2 (sequence is synthesized)
tgcctctcctctccatcgcttttagacttctcatcctcccctcggtgcttttagtccattcagcagaagcggatcgaagcaggaggctccccgcgccgcattaggggcgcactccgccgc

SEQ ID NO: 670300 - DNA, 120 bp, Artificial Sequence
  ENSG00000185532_3 (sequence is synthesized)
ccccgcgccgcattaggggcgcactccgccgcgctcgagtacttagcgcccattcactcgctcacccgcgctctccgctgccggctgccgtcccagccgccgccgccgccgccgccgccg

SEQ ID NO: 670301 - DNA, 120 bp, Artificial Sequence
  ENSG00000185532_4 (sequence is synthesized)
tcagtgaaaaaatgagcgagctagaggaagactttgccaagattctcatgctcaaggaggagaggatcaaagagctggagaagcggctgtcagagaaggaggaagaaattcaggagctga

SEQ ID NO: 670302 - DNA, 120 bp, Artificial Sequence
  ENSG00000185532_5 (sequence is synthesized)
agaggaaactccacaaatgccagtcggtgctcccagtgccctcgacccacatcggcccccggaccacccgggcgcagggcatctcggccgagccgcagacgtacaggtccttccacgacc

SEQ ID NO: 670303 - DNA, 120 bp, Artificial Sequence
  ENSG00000185532_6 (sequence is synthesized)
tccgacaggcattccggaagttcaccaagtccgaaaggtccaaggatcttataaaggaagctatccttgacaatgactttatgaagaacttggagctgtcgcagatccaggagattgtgg

SEQ ID NO: 670304 - DNA, 120 bp, Artificial Sequence
  ENSG00000185532_7 (sequence is synthesized)
attgtatgtacccggtggagtatggcaaggacagttgcatcatcaaagaaggagacgtggggtcactggtgtatgtcatggaagatggtaaggttgaagttacaaaagaaggtgtgaagt

SEQ ID NO: 670305 - DNA, 120 bp, Artificial Sequence
  ENSG00000185532_8 (sequence is synthesized)
tgtgtaccatgggtccaggaaaagtgtttggggaattggctattctttacaactgtacccggacagcgaccgtcaagactcttgtaaatgtaaaactctgggccattgatcgacaatgtt

SEQ ID NO: 670306 - DNA, 120 bp, Artificial Sequence
  ENSG00000185532_9 (sequence is synthesized)
ttcaaacaataatgatgaggacaggactcatcaagcataccgagtatatggaatttttaaaaagcgttccaacattccagagccttcctgaagagatcctcagcaagcttgctgatgtcc

SEQ ID NO: 670307 - DNA, 120 bp, Artificial Sequence
  ENSG00000185532_10 (sequence is synthesized)
ttgaagagacccactatgaaaatggagaatatattatcaggcaaggtgcaagaggggacaccttctttatcatcagcaaaggaacggtaaatgtcactcgtgaagactcaccgagtgaag

SEQ ID NO: 670308 - DNA, 120 bp, Artificial Sequence
  ENSG00000185532_11 (sequence is synthesized)
acccagtctttcttagaactttaggaaaaggagactggtttggagagaaagccttgcagggggaagatgtgagaacagcaaacgtaattgctgcagaagctgtaacctgccttgtgattg

SEQ ID NO: 670309 - DNA, 120 bp, Artificial Sequence
  ENSG00000185532_12 (sequence is synthesized)
acagagactcttttaaacatttgattggagggctggatgatgtttctaataaagcatatgaagatgcagaagctaaagcaaaatatgaagctgaagcggctttcttcgccaacctgaagc

SEQ ID NO: 670310 - DNA, 120 bp, Artificial Sequence
  ENSG00000185532_13 (sequence is synthesized)
tgtctgatttcaacatcattgatacccttggagttggaggtttcggacgagtagaactggtccagttgaaaagtgaagaatccaaaacgtttgcaatgaagattctcaagaaacgtcaca

SEQ ID NO: 670311 - DNA, 120 bp, Artificial Sequence
  ENSG00000185532_14 (sequence is synthesized)
ttgtggacacaagacagcaggagcacatccgctcagagaagcagatcatgcagggggctcattccgatttcatagtgagactgtacagaacatttaaggacagcaaatatttgtatatgt

SEQ ID NO: 670312 - DNA, 120 bp, Artificial Sequence
  ENSG00000185532_15 (sequence is synthesized)
tgatggaagcttgtctaggtggagagctctggaccattctcagggatagaggttcgtttgaagattctacaaccagattttacacagcatgtgtggtagaagcttttgcctatctgcatt

SEQ ID NO: 670313 - DNA, 120 bp, Artificial Sequence
  ENSG00000185532_16 (sequence is synthesized)
ccaaaggaatcatttacagggacctcaagccagaaaatctcatcctagatcaccgaggttatgccaaactggttgattttggctttgcaaagaaaataggatttggaaagaaaacatgga

SEQ ID NO: 670314 - DNA, 120 bp, Artificial Sequence
  ENSG00000185532_17 (sequence is synthesized)
ctttttgtgggactccagagtatgtagccccagagatcatcctgaacaaaggccatgacatttcagccgactactggtcactgggaatcctaatgtatgaactcctgactggcagcccac

SEQ ID NO: 670315 - DNA, 120 bp, Artificial Sequence
  ENSG00000185532_18 (sequence is synthesized)
ctttctcaggcccagatcctatgaaaacctataacatcatattgagggggattgacatgatagaatttccaaagaagattgccaaaaatgctgctaatttaattaaaaaactatgcaggg

SEQ ID NO: 670316 - DNA, 120 bp, Artificial Sequence
  ENSG00000185532_19 (sequence is synthesized)
acaatccatcagaaagattagggaatttgaaaaatggagtaaaagacattcaaaagcacaaatggtttgagggctttaactgggaaggcttaagaaaaggtaccttgacacctcctataa

SEQ ID NO: 670317 - DNA, 120 bp, Artificial Sequence
  ENSG00000185532_20 (sequence is synthesized)
taccaagtgttgcatcacccacagacacaagtaattttgacagtttccctgaggacaacgatgaaccaccacctgatgacaactcaggatgggatatagacttctaatgtatttctctta

SEQ ID NO: 670318 - DNA, 120 bp, Artificial Sequence
  ENSG00000185532_21 (sequence is synthesized)
cctgcttctgccttgctgaagacagctttttctgagacacagctgccagcaaacctgagggaaagagagaagattagtgctcggggtcaccatgatgcctttgatcgatgctgctccagt

SEQ ID NO: 670319 - DNA, 120 bp, Artificial Sequence
  ENSG00000185532_22 (sequence is synthesized)
aactacagtggcattaggacttaccgcttagatgacaatagtgctctttacatgttttctgtttgaacctaaaatagcagttgacatggtggtcctgaagcaaagcctttcaccagtaaa

SEQ ID NO: 670320 - DNA, 120 bp, Artificial Sequence
  ENSG00000185532_23 (sequence is synthesized)
agatgttttctattgttgcaatgaccttgctttgctctgattataatttgaaagactgtaggaaacacttcaatgtagtataagagtctgtaccttgctggaatattcaagaagatgaaa

SEQ ID NO: 670321 - DNA, 120 bp, Artificial Sequence
  ENSG00000185532_24 (sequence is synthesized)
gaataatatattgggtacaatagattactatggtacagaaactgggctattccctttcttcaagtgaaggctgtgggatctattactgcaggccggtgtatataccatacaaaagaggac

SEQ ID NO: 670322 - DNA, 120 bp, Artificial Sequence
  ENSG00000185532_25 (sequence is synthesized)
cacacatctgttggtcacagagttcatgtcacaccagtgctagaagtttcatgattttatttcccagcagtgctgatgacaagactgaatgttaccttttctttctgacagattttaaaa

SEQ ID NO: 670323 - DNA, 120 bp, Artificial Sequence
  ENSG00000185532_26 (sequence is synthesized)
attgatatgataaaagcacaactgctatagattctgctgagacctctcatagtaggtatatatgagttttcacagaagactgaaaaataatgcatgatatttgtttgttttttttgataa

SEQ ID NO: 670324 - DNA, 120 bp, Artificial Sequence
  ENSG00000185532_27 (sequence is synthesized)
attggcatgacagagtggggaaaaaaagcaattcacaaaaccatttcatattttttaaaatattgtgcttaaagatggtcctggaagtaaatgactagcagccaattggttttacttaac

SEQ ID NO: 670325 - DNA, 120 bp, Artificial Sequence
  ENSG00000185532_28 (sequence is synthesized)
atgtatatctttcatctgtaaatgtcagtgtctgaacagacaacacaaattcaaatcattatacgtgtagccagaaactcaagcattttcactaaagttattaaaccaaactcctgtcca

SEQ ID NO: 670326 - DNA, 120 bp, Artificial Sequence
  ENSG00000185532_29 (sequence is synthesized)
atttcacttatacaacatagtcagtctagagttgagagacaaaggtaattataaacctatttgaactagcttcttgtcttaggcctgaaccaaaaaacaacaaacaaacaaaaaacaaga

SEQ ID NO: 670327 - DNA, 120 bp, Artificial Sequence
  ENSG00000185532_30 (sequence is synthesized)
atgaaaaacagaaataaaagaagtagaaaagacaaagaaagaaagcccaaagtcaaagttgttaatatttacaggtttaccagatctggaacattacttatttgaggtcagagaacaaaa

SEQ ID NO: 670328 - DNA, 120 bp, Artificial Sequence
  ENSG00000185532_31 (sequence is synthesized)
caagaacctggccaggtgttgattaccttttagtgaataagctgagtccatatacttgtctaactaagaaagcagtacagaggaaaacaggaacctgatttttttaaaataaattttaaa

SEQ ID NO: 670329 - DNA, 120 bp, Artificial Sequence
  ENSG00000185532_32 (sequence is synthesized)
taaaatagaattactacaattctgcaatttcatactacctaaaaaagactagatttgaaaatgtcaagctgatttactttattcacatggagaaaagaatccacaaattaaactgagtcc

SEQ ID NO: 670330 - DNA, 120 bp, Artificial Sequence
  ENSG00000185532_33 (sequence is synthesized)
ttcactggcatgccagttgactattattagctgtcataagtaactcagccatttggaagcatttcctggacaaaattacattatacctgtgaagaaaaatatagaagctttcaagctgtc

SEQ ID NO: 670331 - DNA, 120 bp, Artificial Sequence
  ENSG00000185532_34 (sequence is synthesized)
attctgttttggccctgtgtgaatttggtatattaaattgacgcttgctttttttttcagtagagttttctttttaatcaatcaaacgcctacatttctggaagaaaaagtccaattaga

SEQ ID NO: 670332 - DNA, 120 bp, Artificial Sequence
  ENSG00000185532_35 (sequence is synthesized)
tcattacaccttaactaagaaggcaaatcttataaattttgcttgaattgttcttactcaaaactaccttagaatatggtatcttatgaaaatataatattcttaaaattttggaggata

SEQ ID NO: 670333 - DNA, 120 bp, Artificial Sequence
  ENSG00000185532_36 (sequence is synthesized)
aaatgaaaagggtataaacttcaattagaactttaatcctaaaatattgttattcttgtatttttggagttttccgtcccttacaatttctccaaattggtctattccccaagatatcca

SEQ ID NO: 670334 - DNA, 120 bp, Artificial Sequence
  ENSG00000185532_37 (sequence is synthesized)
tccactgttttctacagattttagaatataaaattaaacatatcaacctaaaatctagctatgaatgttatttcaagagttttatatttttaattggctttttaaaaatatgtaattcca

SEQ ID NO: 670335 - DNA, 120 bp, Artificial Sequence
  ENSG00000185532_38 (sequence is synthesized)
tatagtgaatgttcagtaacttttgttgaaagataatgtggtttaggcttgctaaagaaaggcttgctagaatactaaatttaccttgttatttggaaagagaatctgctcctataacgt

SEQ ID NO: 670336 - DNA, 120 bp, Artificial Sequence
  ENSG00000185532_39 (sequence is synthesized)
tttaaaaatccccaaagtcccagagattagcacttgctatggattttggaactatggttcaagtctaagacaaccaatatgaataagttcaatggagaaggaagaagtagcattcagcac

SEQ ID NO: 670337 - DNA, 120 bp, Artificial Sequence
  ENSG00000185532_40 (sequence is synthesized)
aagaaactgtagattgtttctcccacttgttactgcatctttgttcatttcacccatagcattgcatttgatgtctgaagtaattaccacaaaataaaggtaaactacatcttccaagat

SEQ ID NO: 670338 - DNA, 120 bp, Artificial Sequence
  ENSG00000185532_41 (sequence is synthesized)
gtaccaacagaaaacattcgtctaattttgtcaacattgaatttttaggatttaaatcttgtcttaatgaagactctagggctaaaattcatggtcagttccataaaatgcatctcactt

SEQ ID NO: 670339 - DNA, 120 bp, Artificial Sequence
  ENSG00000185532_42 (sequence is synthesized)
tatttctgaatttttcacaacccctctattttcttacattaaagaacatctggataagttagaatagtgccaacttgtttgatttgttatatgattttcttgttaatgtgttgagtatgg

SEQ ID NO: 670340 - DNA, 120 bp, Artificial Sequence
  ENSG00000185532_43 (sequence is synthesized)
gaaataagggctttctgtgtgtcttgactcacaggaaaactgaaactgccaagggaagcaacattaaaacaactgggatagattgaatacatttgaaaaaataatttctggaaaaacgct

SEQ ID NO: 670341 - DNA, 120 bp, Artificial Sequence
  ENSG00000185532_44 (sequence is synthesized)
atacatgctttttatgtttatatcttctttcttattaagacatgaatcagatccatgtggcattcaaaacaaatttattttggttatattctttacaagtcataatttttacctaaaatt

SEQ ID NO: 670342 - DNA, 120 bp, Artificial Sequence
  ENSG00000185532_45 (sequence is synthesized)
gtggaatatgcatgtgaattacacatgtgtagtaataaactcaactattgaatttttcctgtttcatttctaaatgactgaactgatggtaaacaaatttaatgaagtcagctaccatgt

SEQ ID NO: 670343 - DNA, 120 bp, Artificial Sequence
  ENSG00000185532_46 (sequence is synthesized)
tgaaaataaggatattagaactgatttcatacaatagaggtgatctgtgcattatccataacaacgttttctttcactataggaccacagacaaatatttatgtaaataggtatttttgt

SEQ ID NO: 670344 - DNA, 120 bp, Artificial Sequence
  ENSG00000185532_47 (sequence is synthesized)
gtgatattttgtggtacatataactttttttagtgtttcacagcattattatttcattttatttgtattgaataatgtttttaggtccaagtagacttgaattaatgtcataattgtcag

SEQ ID NO: 670345 - DNA, 120 bp, Artificial Sequence
  ENSG00000185532_48 (sequence is synthesized)
tattattgaaaattatgtcaactgtactgttattcatctgtcccatagtttagaacatgacctggctatctggcattgttgcaagtgccttaaattcatggcatcctattaaaaaaacaa

SEQ ID NO: 670346 - DNA, 120 bp, Artificial Sequence
  ENSG00000185532_49 (sequence is synthesized)
atttggtgttatgctgcatgacaaagacaaacacacctcaaaatgttgtcctttcttagcttgctgcgttttacagttctttctgctaacaatttataagcctttattatataatattga

SEQ ID NO: 670347 - DNA, 120 bp, Artificial Sequence
  ENSG00000185532_50 (sequence is synthesized)
tgaattacagaaatgatgaagttgttctcttatttctgttaaatgtaccagagctgtgtatctgttaatgagatacagcgtcatttctgtgaaatgtataaatgtatgtgcaggtcaaat

SEQ ID NO: 670348 - DNA, 120 bp, Artificial Sequence
  ENSG00000185532_51 (sequence is synthesized)
taatatatgacattctatcagtctgtatacaggtattcctgttttgctaagctgtgcagattctgtaaaaataaattagtgcagtcaagttctaacatatctcattttatagactccatt

SEQ ID NO: 670349 - DNA, 120 bp, Artificial Sequence
  ENSG00000185532_52 (sequence is synthesized)
gacaatggtccaaccgaaaagaaaaattggaaatgactgctaaccagacctcgttatgaaaccaatgatgaaaaagtcacttggtgcacctctcaacaaaacaggatgctttttccgagt

SEQ ID NO: 670350 - DNA, 120 bp, Artificial Sequence
  ENSG00000185532_53 (sequence is synthesized)
tcttgtatatgcaaatcatttacgaggcaagttttcaacagacctagaaagcaaaacattgaaagtgtgttgttagccctcctctctgcccctgaatcaacagacagagctctgggacct

SEQ ID NO: 670351 - DNA, 120 bp, Artificial Sequence
  ENSG00000185532_54 (sequence is synthesized)
tggcaatgactcagaggttggggctttctgagtaaagggacatttctttaagcatcatctatcaaatttatttcaatgtatgatgtttttacaactggtcagttcttttgtattcttaca

SEQ ID NO: 670352 - DNA, 120 bp, Artificial Sequence
  ENSG00000185532_55 (sequence is synthesized)
gctatggttatttgattgtcctcttacaatttgttctacatgaaagagttctttgttagtcagaatgcaacaaactgtcatcaaatggtcattgaccacttgcactcttttgatgtagat

SEQ ID NO: 670353 - DNA, 120 bp, Artificial Sequence
  ENSG00000185532_56 (sequence is synthesized)
taaaaactttttcataaatttacctgctttgatttgctctgtatttttcctgcagctgtaattgctgagtgcctgttgtatactttatagagttgaaataaaaaaataattacttttgaa

SEQ ID NO: 670354 - DNA, 120 bp, Artificial Sequence
  ENSG00000185532_57 (sequence is synthesized)
atggtaaggttgaagttacaaaagaaggtgtgaagttgtgtaccatgggtccaggaaaagtgtttggggaattggctattctttacaactgtacccggacagcgaccgtcaagaagatgg

SEQ ID NO: 670355 - DNA, 120 bp, Artificial Sequence
  ENSG00000185532_58 (sequence is synthesized)
cctgtaaccttagtttgtacaattgttgacttttctgttagaaaatagggaaccttcgtatttaaataactttatagcaagtattgaatgtcaaaggttaacttcaaatagcaaatgctt

SEQ ID NO: 670356 - DNA, 120 bp, Artificial Sequence
  ENSG00000185532_59 (sequence is synthesized)
tttagtgttcctctacccaatgtaaaacaacaaaattaaccaacttccagagcagtataagaattctaaaagcatcattacaccccctggctttacattttacactccatatactgcaaa

SEQ ID NO: 670357 - DNA, 120 bp, Artificial Sequence
  ENSG00000185532_60 (sequence is synthesized)
actcgggaggcagcggcgactttggggaaagttgatcggagaggggaggaagcctcaagacgcggagcagcggcaggaaggagcccccggcagcccggaggagcatgggcaccttgcggg

SEQ ID NO: 670358 - DNA, 120 bp, Artificial Sequence
  ENSG00000185532_61 (sequence is synthesized)
atttacagtacgcgctccaggagaagatcgaggagctgaggcagcgggatgctctcatcgacgagctggagctggagttggatcagaaggacgaactgatccagaagctgcagaacgagc

SEQ ID NO: 670359 - DNA, 120 bp, Artificial Sequence
  ENSG00000185532_62 (sequence is synthesized)
tggacaagtaccgctcggtgatccgaccagccacccagcaggcgcagaagcagagcgcgagcaccttgcagggcgagccgcgcaccaagcggcaggcgatctccgccgagcccaccgcct

SEQ ID NO: 670360 - DNA, 120 bp, Artificial Sequence
  ENSG00000185532_63 (sequence is synthesized)
cggcgcccaccgcgtctcaggtttaatcccgggttggacctgctggtttgctctccccgctctgagcctcacagccagcccagagaagtggaatctgcactgaaactctgggtggctgga

SEQ ID NO: 670361 - DNA, 120 bp, Artificial Sequence
  ENSG00000185532_64 (sequence is synthesized)
aactttaggaaaaggagactggtttggagagaaagccttgcagggctggacttggaatctgtttgaatacgttgtggaataaattccttaatttctaataaatcagtgttatattaattg

SEQ ID NO: 670362 - DNA, 120 bp, Artificial Sequence
  ENSG00000185532_65 (sequence is synthesized)
caggcatgagccaccacacccagccgattgtgactatattttgaaggtaaaactgaaaagctttaccattgcagtaaacttgtaaaatgagagaaagagaggaatcaaggggaaaccctg

SEQ ID NO: 670363 - DNA, 120 bp, Artificial Sequence
  ENSG00000185532_66 (sequence is synthesized)
gagaggaatcaaggggaaaccctgaggtttctgttgtaaataattagaaggatggagttgttatgaattgacgtgaagaagactggaagaacagtacactgaggtggagagataagaagc

SEQ ID NO: 670364 - DNA, 120 bp, Artificial Sequence
  ENSG00000185532_67 (sequence is synthesized)
tcagggagagaggctggagtaaaatcagaagcttaagtgatctttggcaggtagatggtttcttgtagcattgtttaagtagagggagctattggctatctgaatatcattctgtgggac

SEQ ID NO: 670365 - DNA, 120 bp, Artificial Sequence
  ENSG00000185532_68 (sequence is synthesized)
caaatgcggatgaatacaaggcagaaccctgaaggagggagcagccaacaattattataaaaccatgaatcgatcttaaaaacatcatgccgagagaaaagcttaaaaccaaaaaaaaaa

SEQ ID NO: 670366 - DNA, 120 bp, Artificial Sequence
  ENSG00000185532_69 (sequence is synthesized)
gaaagccttgcaggggtaagtagatcatgtgttatacaggtttttgtttgagtgctacataaatttctgtctgaaattttgagctcctagcacaataggctttttatttagtgcttatct

SEQ ID NO: 670367 - DNA, 120 bp, Artificial Sequence
  ENSG00000185532_70 (sequence is synthesized)
caatatcaaatatggacccttgatgataaatacatttttatttattttcagctggacttggaatctgtttgaatacgttgtggaataaattccttaatttctaataaatcagtgttatat

SEQ ID NO: 670368 - DNA, 120 bp, Artificial Sequence
  ENSG00000185532_71 (sequence is synthesized)
acattctgtgtttgttcccctgaggtatcaatgaacgctagagttctctcatagccatgagacacaagagaattggtttagaaccagaagagccgatgtaaattccctgtatggattatt

SEQ ID NO: 670369 - DNA, 120 bp, Artificial Sequence
  ENSG00000185532_72 (sequence is synthesized)
cagatactgacagtgacgccactttgggatacagcgatgatgaagattccagtgacgaagttcaaagaatatcagaggaagatgtgagaacagcaaacgtaattgctgcagaagctgtaa

SEQ ID NO: 670370 - DNA, 120 bp, Artificial Sequence
  ENSG00000185532_73 (sequence is synthesized)
gcagcctcagtgtcaagtgcagtgtctcattcataggaggcacacataaataatgttggtttaattaattaaattaacaaaaggctgcactctcctaaccagattgtgtatctcctctgc

SEQ ID NO: 670371 - DNA, 120 bp, Artificial Sequence
  ENSG00000185532_74 (sequence is synthesized)
tatgttttcatcatagatcttagcaacctcaccatatgacctttttttctttcttatcaagtcaataactttcacctttcatgaaagaagcactttaaggcttttctttggcatatcaga

SEQ ID NO: 670372 - DNA, 120 bp, Artificial Sequence
  ENSG00000185532_75 (sequence is synthesized)
attgccagcatcactactcttgcactttgggacagtgatgtgacagttgatctggtaactgagattgctactaagtggctaatggttggggagcatatacagcatggacacactggagaa

SEQ ID NO: 670373 - DNA, 120 bp, Artificial Sequence
  ENSG00000185532_76 (sequence is synthesized)
ctgctactgctgtggccctcagaaagcttccaattatggcagaaggcaaagaaggagcaggcatatcacatggcaagagcagaaacaagagagggtgggagaggtcccagacttttaaac

SEQ ID NO: 670374 - DNA, 120 bp, Artificial Sequence
  ENSG00000185532_77 (sequence is synthesized)
aactagatcatgtatgaagtaacggagcaataactcacttatcacgaagaggatgatgctcaaccattcatgagggatccacccccatgatccagtcacctcctaccaggctccacctcc

SEQ ID NO: 670375 - DNA, 120 bp, Artificial Sequence
  ENSG00000185532_78 (sequence is synthesized)
gacactgggaaccacatatcaacattagacttggaaggaacaagcatccaaactgtattattctgctgctggccccctaaatcttatgtcctcacattgcaaaatataatcctcccctcc

SEQ ID NO: 670376 - DNA, 120 bp, Artificial Sequence
  ENSG00000185532_79 (sequence is synthesized)
gaggtaattgtttttagcctttgaactttttgagatgggatccagcctgcttggctggcttctttcacagctgtgtgatgaggaatcacaaactgcagagatctttaaaaaatttctaag

SEQ ID NO: 670377 - DNA, 120 bp, Artificial Sequence
  ENSG00000185532_80 (sequence is synthesized)
ctctgggatgagctatatatttggcttcgtatagaaagcagcttatcatgtctgacatttatatgcagaaaggtgcaaatcaacctaattatagagggagacaaactttttgttgtgata

SEQ ID NO: 670378 - DNA, 120 bp, Artificial Sequence
  ENSG00000185532_81 (sequence is synthesized)
aataccatgttactttgacttactagaataggaactggcatatttctcttattttaactagtgtaaagtaaaattgtagttatcaccactctgaagcttcagattagcaatttacaacta

SEQ ID NO: 670379 - DNA, 120 bp, Artificial Sequence
  ENSG00000185532_82 (sequence is synthesized)
ggattagtagttgggcacatattttattaccatataagtatgtttgatacacataattttctgcctgaaagtggaatgccacttttagttgtttttctctgaacccacaaagctatggtt

SEQ ID NO: 670380 - DNA, 120 bp, Artificial Sequence
  ENSG00000185532_83 (sequence is synthesized)
ttgagaaagaggagaaacaacacacattaggctatccttttgtagactgggattcataacagcagcagcaggaggaagtttttctgttcaaattgatgagctttatacggaatgtagtct

SEQ ID NO: 670381 - DNA, 120 bp, Artificial Sequence
  ENSG00000185532_84 (sequence is synthesized)
aaagttgttctcctaaaggtattgggcatatgagttttgtttcaggtcgaaaagattaaaaaattgtcttttcctgtttgctgaggaaatagagatacattggtggtgtaggaaatttca

SEQ ID NO: 670382 - DNA, 120 bp, Artificial Sequence
  ENSG00000185532_85 (sequence is synthesized)
aactttttctctaaaggttaaagtctaagtcttttgaagtgaattgacaatagagagattaacaggagaaaatgtcatacaggaatagtgtatgggggaggtcatggtgacagaattgga

SEQ ID NO: 670383 - DNA, 120 bp, Artificial Sequence
  ENSG00000185532_86 (sequence is synthesized)
ggatggagtcagaaaaaggtgtgtctagagtgctataagtgcagccaagtaatggagagccacttaggacattgcaattaatttagcttttacttagagtgagatagaagtcactggatg

SEQ ID NO: 670384 - DNA, 120 bp, Artificial Sequence
  ENSG00000185532_87 (sequence is synthesized)
gctctaggcagagcaatgaacttatttgacttagatttttaacaaaattgttgtggctgctgtgttgaaaaaataaataaagaagctgctacaataatccagggaacaatagtggtgact

SEQ ID NO: 670385 - DNA, 120 bp, Artificial Sequence
  ENSG00000185532_88 (sequence is synthesized)
tggtgactttgttcactgtgggagaaggagattgaaaaatcatcagattgtgactctctctctctctctctctctgtctatctatctatatgtaatttttttttttttgagacagtgtct

SEQ ID NO: 670386 - DNA, 120 bp, Artificial Sequence
  ENSG00000185532_89 (sequence is synthesized)
ggagtcctgacaaaatattgaaaattggatatacgtgaacagtggtctgtatcagaaaagggaagggagatctatagggataaaagggaatgaatgaatgaatgaatgaagaggaaggca

SEQ ID NO: 670387 - DNA, 120 bp, Artificial Sequence
  ENSG00000185532_90 (sequence is synthesized)
taaggccttgactgattcttcacatttctactttaagagactgaggaatgaagagggaccaggaaagcctgtggaagtaggaggaaaatcaggagctttttgcttgttaaaatccaagag

SEQ ID NO: 670388 - DNA, 120 bp, Artificial Sequence
  ENSG00000185532_91 (sequence is synthesized)
aagagaataacttagagaagagtcagcaaagcttggattttaatttaggtgaaaagataaggagagaaatggggtcaacaggtaggaaagggaaagtcaggttgagagaagaacagaaga

SEQ ID NO: 670389 - DNA, 120 bp, Artificial Sequence
  ENSG00000185532_92 (sequence is synthesized)
tattactgaagcaggggacagagaggtttgcacacataagccccttgagtaagcacaagagaataggcgctgtagtgcctctagaaacagggaaggtagactatctggttacacatgcag

SEQ ID NO: 670390 - DNA, 120 bp, Artificial Sequence
  ENSG00000185532_93 (sequence is synthesized)
gtgggtggattgatgtaatggctggagctgtggaaagcctattctgatatattctattttcataggatgcagaaagcaagtatgattgctaggcatcattaaggccctgcttgatgttag

SEQ ID NO: 670391 - DNA, 120 bp, Artificial Sequence
  ENSG00000185532_94 (sequence is synthesized)
taatcccaaatcttattcaagattattgcaataggggaaggagaattaattccatggaacaaaaggtaggagagcttttaagcactggggtgagctagtggaaaagtcacataggtaaat

SEQ ID NO: 670392 - DNA, 120 bp, Artificial Sequence
  ENSG00000185532_95 (sequence is synthesized)
ccagtgggggtactctaggagggaggcagttgttcattgtgattaggccatctgtgtttgctatttgttcctgatggaagttaggctcccatcctcccaagagactgagagaaaaggatc

SEQ ID NO: 670393 - DNA, 120 bp, Artificial Sequence
  ENSG00000185532_96 (sequence is synthesized)
tgtctcttttcttctaagattacatttcaaaaggatggttccaaggtccttgagaaggacattcctggggtgtgaaatcagctgggagaagattttcatcacaaagaggcagattaagaa

SEQ ID NO: 670394 - DNA, 120 bp, Artificial Sequence
  ENSG00000185532_97 (sequence is synthesized)
ttttcagttgaaatttctttaaaagtaagtgctccaagtaaagggaaatcaggagccttgagtcaggaagctgactgtctaaagtttagtcaaaagtttagtcaagcagaggggaatatt

SEQ ID NO: 670395 - DNA, 120 bp, Artificial Sequence
  ENSG00000185532_98 (sequence is synthesized)
aagccctcttggacactagaacatttgattatgtgtctgttttttagcctcattcgtttacctggattcactttccaggtagatatagaattggatttaaccaggattgttattttgcca

SEQ ID NO: 670396 - DNA, 120 bp, Artificial Sequence
  ENSG00000185532_99 (sequence is synthesized)
agcgaagatgggtggttgatagagggaatggggcgttgagtgcatatggagagtgattgtaatgattgaccttggaatttaaacagggcaaggaggagacaagcaccagatgggcaatgg

SEQ ID NO: 670397 - DNA, 120 bp, Artificial Sequence
  ENSG00000185532_100 (sequence is synthesized)
ccagtgagaagtggtaggatcagtgacttttagtctcatgaggttaaagaatttctggagtagggctataagaagggataagttagaaagatagtgaaaatgcttttgtctctaggtact

SEQ ID NO: 670398 - DNA, 120 bp, Artificial Sequence
  ENSG00000185532_101 (sequence is synthesized)
gactataccagtaattctgtgatccatatacagattcttagctggtggtttattgaagtcagctttgctgtgacttactggtctccttcatctatgtgaacacaaagtgaagcagaacat

SEQ ID NO: 670399 - DNA, 120 bp, Artificial Sequence
  ENSG00000185532_102 (sequence is synthesized)
tgtcacatttgactcctatgttcaagtataaaaaatttatgagaaaaagtactggctatatttctctctgaatgtgctgacctataacctctgtaaatataaaactacttttccaagttg

SEQ ID NO: 670400 - DNA, 120 bp, Artificial Sequence
  ENSG00000185551_0 (sequence is synthesized)
gagaagccacttctgccagccccggcgcctataaatcgcattccctcccgcgcccccctttttagcatatttgatcactttgattctctgttcttttctctccgcggtgtgtgtgtgcgt

SEQ ID NO: 670401 - DNA, 120 bp, Artificial Sequence
  ENSG00000185551_1 (sequence is synthesized)
gcgcgcgtgtgtgttttcttcttctcctcctcctctccccgagttgcctcctttctccgggtgccgtactgccttttttcccctctttcattctttctctccgtctttttctcccccctc

SEQ ID NO: 670402 - DNA, 120 bp, Artificial Sequence
  ENSG00000185551_2 (sequence is synthesized)
tgcgcacgaaggatgtgcttctaggtggtgatctgccctcctctctctcttttatcatttctcccccgccgccggcgagttgactctttccctatgtgtgtgaggcggcggcggcagcag

SEQ ID NO: 670403 - DNA, 120 bp, Artificial Sequence
  ENSG00000185551_3 (sequence is synthesized)
tccctatgtgtgtgaggcggcggcggcagcagcagcagcagcggctccggcggcggcagcagcggcagcagcgacttcagcggcggcggcggcgctagacgcagcggctccgggcccgac

SEQ ID NO: 670404 - DNA, 80 bp, Artificial Sequence
  ENSG00000185551_4 (sequence is synthesized)
ggcccgcagggaacggcgagcggcctccacccagcgactgcgggcggcggcggccggagagagcgaggcgcgcgccggac

SEQ ID NO: 670405 - DNA, 80 bp, Artificial Sequence
  ENSG00000185551_5 (sequence is synthesized)
ccagcgccaggacgacgccgcgcagcgcccgacgcggaccactttcatgctgattcccccggacccgggcagcgctccgg

SEQ ID NO: 670406 - DNA, 120 bp, Artificial Sequence
  ENSG00000185551_6 (sequence is synthesized)
ctccctgggcgcgcccgcacccggcgcctccgatctcctagtcctcctgatttcgatggctttcctgaatggctgactgtgggctgccctggacttggcccccggacagtcgcctctcct

SEQ ID NO: 670407 - DNA, 120 bp, Artificial Sequence
  ENSG00000185551_7 (sequence is synthesized)
cctcctcctcctcctcctcctcctccgccaactcctcggctgcacaccagctctaagagcgagagtgaacgagagagggagggagagagtgagagcgagcgagatctttggagagatttt

SEQ ID NO: 670408 - DNA, 120 bp, Artificial Sequence
  ENSG00000185551_8 (sequence is synthesized)
gagagtgagagcgagcgagatctttggagagatttttttttttgcctcctacttctgtcttgaagccagacaatcgacttcagctctccctcccctccctctttctccacgttctgctcc

SEQ ID NO: 670409 - DNA, 120 bp, Artificial Sequence
  ENSG00000185551_9 (sequence is synthesized)
cactcgctctcctgtccccttcccctcccctcccggcggaaagccccccgaaaccaacaaagctgagccgagagaaacaaacaaaacaaacacaccgggccagacaagccatcgacaaaa

SEQ ID NO: 670410 - DNA, 120 bp, Artificial Sequence
  ENSG00000185551_10 (sequence is synthesized)
ctttgcaaaagcaaaaacaaaaaaggaaaaactaaccaacctcaaccaaccagcccccgagccacccggggcgccctcccgcgccctcttgcaccctcgcacacacaaaaggcggcgcgc

SEQ ID NO: 670411 - DNA, 120 bp, Artificial Sequence
  ENSG00000185551_11 (sequence is synthesized)
cggagcccgagacccggggagccgccgccgccccgccgccgcccgcagccaggggagcaggaagtccggacgcagcccccatagatatggcaatggtagtcagcacgtggcgcgaccccc

SEQ ID NO: 670412 - DNA, 120 bp, Artificial Sequence
  ENSG00000185551_12 (sequence is synthesized)
atatggcaatggtagtcagcacgtggcgcgacccccaggacgaggtgcccggctcacagggcagccaggcctcgcaggcgccgcccgtgcccggcccgccgcccggcgccccgcacacgc

SEQ ID NO: 670413 - DNA, 120 bp, Artificial Sequence
  ENSG00000185551_13 (sequence is synthesized)
cagcccagacggcggccggtggccagggcggccctggcggcccgggtagcgacaagcagcagcagcagcaacacatcgagtgcgtggtgtgcggagacaagtcgagcggcaagcactacg

SEQ ID NO: 670414 - DNA, 120 bp, Artificial Sequence
  ENSG00000185551_14 (sequence is synthesized)
gccagttcacgtgcgagggctgcaagagcttcttcaagcgcagcgtgcggaggaacctgagctacacgtgccgcgccaaccggaactgtcccatcgaccagcaccatcgcaaccagtgcc

SEQ ID NO: 670415 - DNA, 120 bp, Artificial Sequence
  ENSG00000185551_15 (sequence is synthesized)
agtactgccgcctcaaaaagtgcctcaaagtgggcatgagacgggaagcggtgcagaggggcaggatgccgccgacccagccgacccacgggcagttcgcgctgaccaacggggatcccc

SEQ ID NO: 670416 - DNA, 120 bp, Artificial Sequence
  ENSG00000185551_16 (sequence is synthesized)
tcaactgccactcgtacctgtccggatatatttccctgctgttgcgcgcggagccctatcccacgtcgcgcttcggcagccaatgcatgcagcccaacaacatcatgggtatcgagaaca

SEQ ID NO: 670417 - DNA, 120 bp, Artificial Sequence
  ENSG00000185551_17 (sequence is synthesized)
tttgcgaactggccgcgaggatgctcttcagcgccgtcgagtgggcccggaacatccccttcttccccgacctgcagatcacggaccaggtggccctgcttcgcctcacctggagcgagc

SEQ ID NO: 670418 - DNA, 120 bp, Artificial Sequence
  ENSG00000185551_18 (sequence is synthesized)
tgtttgtgttgaatgcggcgcagtgctccatgcccctccacgtcgccccgctcctggccgccgccggcctgcatgcttcgcccatgtccgccgaccgggtggtcgcctttatggaccaca

SEQ ID NO: 670419 - DNA, 120 bp, Artificial Sequence
  ENSG00000185551_19 (sequence is synthesized)
tacggatcttccaagagcaagtggagaagctcaaggcgctgcacgttgactcagccgagtacagctgcctcaaggccatagtcctgttcacctcagatgcctgtggtctctctgatgtag

SEQ ID NO: 670420 - DNA, 120 bp, Artificial Sequence
  ENSG00000185551_20 (sequence is synthesized)
cccatgtggaaagcttgcaggaaaagtctcagtgtgctttggaagaatacgttaggagccagtaccccaaccagccgacgagattcggaaagcttttgcttcgcctcccttccctccgca

SEQ ID NO: 670421 - DNA, 120 bp, Artificial Sequence
  ENSG00000185551_21 (sequence is synthesized)
ccgtctcctcctcagtcatagagcaattgtttttcgtccgtttggtaggtaaaacccccatcgaaaccctcatccgggatatgttactgtccggcagcagttttaactggccgtatatgg

SEQ ID NO: 670422 - DNA, 120 bp, Artificial Sequence
  ENSG00000185551_22 (sequence is synthesized)
ataaataaataaaataagaagggggagtgaaacagagaaagaaaaggcaaaagactggtttgtttgcttaatttccttctgttaagaaaggatataaaaggatgttacaagtttgctaaa

SEQ ID NO: 670423 - DNA, 120 bp, Artificial Sequence
  ENSG00000185551_23 (sequence is synthesized)
agaagagaggggaagaatttaatggactgtgaatttcaaaaaaaaaaaaaaagactgtcaaatgaacttttacagaatgcattaaaaaaaaaaaaaaactcctgtgtcggtcagaacaac

SEQ ID NO: 670424 - DNA, 120 bp, Artificial Sequence
  ENSG00000185551_24 (sequence is synthesized)
ttgctacttatcatttttgtataaaaaggaaattagtctttttctttttttggtaaatttttgaaaaatattgctaaaagtgcatttaaggagattgggagacaattagcagaatggaga

SEQ ID NO: 670425 - DNA, 120 bp, Artificial Sequence
  ENSG00000185551_25 (sequence is synthesized)
aagtaagtcttttttttttccaaattattaattgtcctgtgtctatgtacctctagctgttcttttttgtacttttctggttccaaaccagtttattctgtggttctataataagttttg

SEQ ID NO: 670426 - DNA, 120 bp, Artificial Sequence
  ENSG00000185551_26 (sequence is synthesized)
atataatcttggcttcttaaaaactgtgtatcattaaaatatatgttctgcaagaattaaaactgagtccatgaaaataccataggaagacataaaactttaaaaggcaactcaaagatg

SEQ ID NO: 670427 - DNA, 120 bp, Artificial Sequence
  ENSG00000185551_27 (sequence is synthesized)
atggaaacgcacttacaagtggtgaccaaaatttttaggtgaagtcgagcactctaattagagaactggaggaaccacatataacacttaacttcccctaccctgcccctccccaaaaga

SEQ ID NO: 670428 - DNA, 120 bp, Artificial Sequence
  ENSG00000185551_28 (sequence is synthesized)
aaccatgacaaacctagcttttaaaaaatattttaagaaagagaatgaactgtggaatttattggcagccaaggaatgtgtccaagacacatgctgaggttttgaataaaaagtgaactt

SEQ ID NO: 670429 - DNA, 120 bp, Artificial Sequence
  ENSG00000185551_29 (sequence is synthesized)
ttgtaatttgaattgggtcccgcttagttcttgaattgttatgaaaatcctatatctgtttgtatatttgcaaaccctttgtattataattgttgatattttccctttttaaaaaatacc

SEQ ID NO: 670430 - DNA, 120 bp, Artificial Sequence
  ENSG00000185551_30 (sequence is synthesized)
attgaaatcagcatgacaaaaataacactgttggcacttataggtaacgtgattgattcagtatcttagagtttacagtttgtgttttaaaaaaactgaaggttttttttttaagtgcaa

SEQ ID NO: 670431 - DNA, 120 bp, Artificial Sequence
  ENSG00000185551_31 (sequence is synthesized)
catttctgtatactgtaaaagttataataactgaactgtttggtcgagtctttgtgtgttatattccaaggaaaattgaaagtattcagaaattaaaatattatttgatatctgaaacct

SEQ ID NO: 670432 - DNA, 120 bp, Artificial Sequence
  ENSG00000185551_32 (sequence is synthesized)
ggctgtccccactcactgtctttacatctagaagagcccctgtgagctctcgcttagctggccgggcggggggtggtgggggggggcatttgtttactcccctcagtcagtttgttcaaa

SEQ ID NO: 670433 - DNA, 120 bp, Artificial Sequence
  ENSG00000185551_33 (sequence is synthesized)
ggtggactactgtatttgcctgtttaatttgggtgtgtgtgtgttggggggggagctgaagttaatggtttatctatggtttaggaagtgccatactgatatagtaaaccacccccattc

SEQ ID NO: 670434 - DNA, 120 bp, Artificial Sequence
  ENSG00000185551_34 (sequence is synthesized)
acctaatcctccttttaattaaaaatggattttccaggaaaaaaaaaaaggcccttatatttgtcacacttaagtgcctgcttagggaaggtattgtgaaaaagtattagaaatcttgag

SEQ ID NO: 670435 - DNA, 120 bp, Artificial Sequence
  ENSG00000185551_35 (sequence is synthesized)
atcagtatctattttatgatcagaaaaaaatactcttttgtacatttctgacagttactcagaagatcgttcaagcaagctaatcacagcattgtaactagaggacagttgtttgcagtg

SEQ ID NO: 670436 - DNA, 120 bp, Artificial Sequence
  ENSG00000185551_36 (sequence is synthesized)
agtttttccttaagtaggtacgattttttaaaatattctgtgattctactctagcgtggttgttgagagagtttcaaattcagtgatacaggttctaagactgaaaggtctacttttaat

SEQ ID NO: 670437 - DNA, 120 bp, Artificial Sequence
  ENSG00000185551_37 (sequence is synthesized)
gtatatatgataacttgcagttggtttccctctcccctccccccctttaccttcagtctgtgagagcatgaccacagggtcaagggaatcttttccattggagttatgtacataaaaaca

SEQ ID NO: 670438 - DNA, 120 bp, Artificial Sequence
  ENSG00000185551_38 (sequence is synthesized)
catcgacattttgacatttcagattgtgtggctacaatctgtactgctcttgggatcctttgtccttagaagccaaattaaggaagagaaagcaggacagagaaaaagaaagaaggaagg

SEQ ID NO: 670439 - DNA, 120 bp, Artificial Sequence
  ENSG00000185551_39 (sequence is synthesized)
agggaaactttacagggtgtgctgatttggaagtagtaactatttcttttggagtctttttttcatttttcctctttctcttttcctggtttggaggaagctcggtgctgggagcttgca

SEQ ID NO: 670440 - DNA, 120 bp, Artificial Sequence
  ENSG00000185551_40 (sequence is synthesized)
attttgttcttattcaaggtttccaacccacccccccaccgccagtacttcatcatgttgtggtttaattctaattggtgggggggggggaggactagtgagggaggtgaaagaacaggg

SEQ ID NO: 670441 - DNA, 120 bp, Artificial Sequence
  ENSG00000185551_41 (sequence is synthesized)
ataattttgtaaagtgtattaaacgttaatattcagatccagtcaatacatgcagaccagtaaaatctgatttgtgcagagttctccatctgactctcacttatttctgtagatatatac

SEQ ID NO: 670442 - DNA, 120 bp, Artificial Sequence
  ENSG00000185551_42 (sequence is synthesized)
atatataaatacaagtatgttcttacggcacagtattgctgacctttagttcgaggttttgtcggttgttgttgattttcttcctcttgcaagtgctatccatgtgagtgtgtgaagttt

SEQ ID NO: 670443 - DNA, 120 bp, Artificial Sequence
  ENSG00000185551_43 (sequence is synthesized)
ctctaataagtaaaacacaggcccttttccttgtttgttttgtgttagtttattgtaaacagccatttgttgtaaattattattggcattaaattataatttatgattttcaaagcaaaa

SEQ ID NO: 670444 - DNA, 120 bp, Artificial Sequence
  ENSG00000185551_44 (sequence is synthesized)
gagacgggaaggtatcggcctctcatttctccttccctcgtcctgggtcccggggtcctgggtacgtttggctagcctgctctggcggtgcagaggggcaggatgccgccgacccagccg

SEQ ID NO: 670445 - DNA, 120 bp, Artificial Sequence
  ENSG00000185551_45 (sequence is synthesized)
gcgaggggccctgggcggctgctttcgctctgcgcgagttgggtctttgtgatataaaattcgccgagcgccgcgagccgtgctttgccaatggcgcgctcggcgcggggcgcgggctcc

SEQ ID NO: 670446 - DNA, 120 bp, Artificial Sequence
  ENSG00000185551_46 (sequence is synthesized)
gggttggggcgagccaacgccggggtttctttgtgtttctgcgagagcgactctcccggtccggagtcagataacagcctgggcccgagcctcgccggctttccccggcccttacaggcc

SEQ ID NO: 670447 - DNA, 120 bp, Artificial Sequence
  ENSG00000185551_47 (sequence is synthesized)
ctgcccaggctccgctagtgccggccgcctgctccctgcctctcccggcttcctctctctttagccggcctctctctctccgccctctccctccgtctctttctccgagcacactgatta

SEQ ID NO: 670448 - DNA, 120 bp, Artificial Sequence
  ENSG00000185551_48 (sequence is synthesized)
gacagacgccagacctccgctctctgcttgtctctcactgggggggttccccgccgggctggggctggggcttcggggtttgtgggagagtcgttccggagtggccacaggccgtctggg

SEQ ID NO: 670449 - DNA, 120 bp, Artificial Sequence
  ENSG00000185551_49 (sequence is synthesized)
gtggaccctcgtgccttttgcaaaagcgcctcaccctccccccagactcgcccctcccgctccctctcctccaatcaataagaaatatcagctgtttagcagtaaagaagaaagatgccc

SEQ ID NO: 670450 - DNA, 120 bp, Artificial Sequence
  ENSG00000185551_50 (sequence is synthesized)
tcagaatgctacatcccgcccacagcgccggggaccccgaggcaaggtggccaattctgggtcctcggcggaccagccccgagcgggcctcggagcggtgcagaggggcaggatgccgcc

SEQ ID NO: 670451 - DNA, 120 bp, Artificial Sequence
  ENSG00000185551_51 (sequence is synthesized)
aggatcactccagacatctcctacctacggtttggggttttttttcttaaaggcgaggcttgcattcctcagcagctatgtacaaagctccctgaaaccttgtctctctaaagttagtgt

SEQ ID NO: 670452 - DNA, 120 bp, Artificial Sequence
  ENSG00000185551_52 (sequence is synthesized)
gcagggttttccaaggctgagagagcctaatacatggggaagcacttccttgaggtggaagatctctcccttcacctttcctctttttccctgcaggctagtgcctactttttatcagtt

SEQ ID NO: 670453 - DNA, 120 bp, Artificial Sequence
  ENSG00000185551_53 (sequence is synthesized)
tgcacaatcgcttagataaacaccgaggaggagattctctttaattatcaaagacacatcttttcagggggccaacaaagcatttatttcacccgccaaactaaaggagagttattccag

SEQ ID NO: 670454 - DNA, 120 bp, Artificial Sequence
  ENSG00000185559_0 (sequence is synthesized)
gcagcggcggtggagagcgcagcgcgcagcccggtgcagccctggctttcccctcgctgcgcgcccgcgccccctttcgcgtccgcaaccagaagcccagtgcggcgccaggagccggac

SEQ ID NO: 670455 - DNA, 120 bp, Artificial Sequence
  ENSG00000185559_1 (sequence is synthesized)
caggagccggacccgcgcccgcaccgctcccgggaccgcgaccccggccgcccagagatgaccgcgaccgaagccctcctgcgcgtcctcttgctcctgctggctttcggccacagcacc

SEQ ID NO: 670456 - DNA, 120 bp, Artificial Sequence
  ENSG00000185559_2 (sequence is synthesized)
tatggggctgaatgcttcccggcctgcaacccccaaaatggattctgcgaggatgacaatgtttgcaggtgccagcctggctggcagggtcccctttgtgaccagtgcgtgacctctccc

SEQ ID NO: 670457 - DNA, 120 bp, Artificial Sequence
  ENSG00000185559_3 (sequence is synthesized)
ggctgccttcacggactctgtggagaacccgggcagtgcatttgcaccgacggctgggacggggagctctgtgatagagatgttcgggcctgctcctcggccccctgtgccaacaacagg

SEQ ID NO: 670458 - DNA, 120 bp, Artificial Sequence
  ENSG00000185559_4 (sequence is synthesized)
acctgcgtgagcctggacgatggcctctatgaatgctcctgtgcccccgggtactcgggaaaggactgccagaaaaaggacgggccctgtgtgatcaacggctccccctgccagcacgga

SEQ ID NO: 670459 - DNA, 120 bp, Artificial Sequence
  ENSG00000185559_5 (sequence is synthesized)
ggcacctgcgtggatgatgagggccgggcctcccatgcctcctgcctgtgcccccctggcttctcaggcaatttctgcgagatcgtggccaacagctgcacccccaacccatgcgagaac

SEQ ID NO: 670460 - DNA, 120 bp, Artificial Sequence
  ENSG00000185559_6 (sequence is synthesized)
gacggcgtctgcactgacattgggggcgacttccgctgccggtgcccagccggcttcatcgacaagacctgcagccgcccggtgaccaactgcgccagcagcccgtgccagaacgggggc

SEQ ID NO: 670461 - DNA, 120 bp, Artificial Sequence
  ENSG00000185559_7 (sequence is synthesized)
acctgcctgcagcacacccaggtgagctacgagtgtctgtgcaagcccgagttcacaggtctcacctgtgtcaagaagcgcgcgctgagcccccagcaggtcacccgtctgcccagcggc

SEQ ID NO: 670462 - DNA, 120 bp, Artificial Sequence
  ENSG00000185559_8 (sequence is synthesized)
tatgggctggcctaccgcctgacccctggggtgcacgagctgccggtgcagcagccggagcaccgcatcctgaaggtgtccatgaaagagctcaacaagaaaacccctctcctcaccgag

SEQ ID NO: 670463 - DNA, 120 bp, Artificial Sequence
  ENSG00000185559_9 (sequence is synthesized)
ggccaggccatctgcttcaccatcctgggcgtgctcaccagcctggtggtgctgggcactgtgggtatcgtcttcctcaacaagtgcgagacctgggtgtccaacctgcgctacaaccac

SEQ ID NO: 670464 - DNA, 120 bp, Artificial Sequence
  ENSG00000185559_10 (sequence is synthesized)
atgctgcggaagaagaagaacctgctgcttcagtacaacagcggggaggacctggccgtcaacatcatcttccccgagaagatcgacatgaccaccttcagcaaggaggccggcgacgag

SEQ ID NO: 670465 - DNA, 120 bp, Artificial Sequence
  ENSG00000185559_11 (sequence is synthesized)
gagatctaagcagcgttcccacagccccctctagattcttggagttccgcagagcttactatacgcggtctgtcctaatctttgtggtgttcgctatctcttgtgtcaaatctggtgaac

SEQ ID NO: 670466 - DNA, 120 bp, Artificial Sequence
  ENSG00000185559_12 (sequence is synthesized)
gctacgcttacatatattgtctttgtgctgctgtgtgacaaacgcaatgcaaaaacaatcctctttctctctcttaatgcatgatacagaataataataagaatttcatctttaaatgag

SEQ ID NO: 670467 - DNA, 120 bp, Artificial Sequence
  ENSG00000185559_13 (sequence is synthesized)
taagagaaataagtatgttattctaaaatctaaactcaaatgaaatttcaaaaaagaccaaaaaaaaacaaggcaacagaaccagggctcagtgccgacgcccctaccctgggggtctcg

SEQ ID NO: 670468 - DNA, 120 bp, Artificial Sequence
  ENSG00000185559_14 (sequence is synthesized)
gccacatggtcctcgtgaaaccgttacgagtgctgtacatgaccacccactgtgcaaagagctacgattgctttcgttcgttaattctcacacaccacatccgactcgcactcacatcca

SEQ ID NO: 670469 - DNA, 120 bp, Artificial Sequence
  ENSG00000185559_15 (sequence is synthesized)
gctcaacatcgctacctttagatctttccgattgatttgagatttagcggagtgcagcggctgtgtgtcagtcagagagagccccaggttggctgctggggggccgggcctctgtgccag

SEQ ID NO: 670470 - DNA, 120 bp, Artificial Sequence
  ENSG00000185559_16 (sequence is synthesized)
ccctgccactaactcgctgtgtgatccttggcgagtccctatcccaatcctgggcccactttctcgcccctctcgagggaggggtttgaacaccgaccaccatggtcctctctggctcta

SEQ ID NO: 670471 - DNA, 120 bp, Artificial Sequence
  ENSG00000185559_17 (sequence is synthesized)
aaactctgaattaggaacgagggggtatgaaccaaaacacttcctgaccccaacaattgggatctgatgaagacgaattctcatcctgggatccgaaaggttttggcctatcctggatga

SEQ ID NO: 670472 - DNA, 120 bp, Artificial Sequence
  ENSG00000185559_18 (sequence is synthesized)
acgcttgatgttgaaatttatcctaactgtgtttctcaaagtggggagcctcctggcccacttcccttttgggaaaaaatagcccctttgagtcataatgtgccatctggagttgccact

SEQ ID NO: 670473 - DNA, 120 bp, Artificial Sequence
  ENSG00000185559_19 (sequence is synthesized)
actttgagccgcaagtgcccctggcagaatctgagcagcaacacagccctcaccaaggttttcacagggattagtggaaattgtcacttgtggggcgcttactagttttgtggcaaatgt

SEQ ID NO: 670474 - DNA, 120 bp, Artificial Sequence
  ENSG00000185559_20 (sequence is synthesized)
ggtccaagacctggcccacacagccatgggtttacatttgtgttgctgagttaataatcctcagatctcaaaagacctagccagcttctgaattttgaatttgacttttttttttttttt

SEQ ID NO: 670475 - DNA, 120 bp, Artificial Sequence
  ENSG00000185559_21 (sequence is synthesized)
aacaaagagcatctatcttttttgcaaaaatagaaagaaatgggacagagctctgtttagcttttcagcttttggggttggacagctaaacagcccttgggtaccagataggaatatttt

SEQ ID NO: 670476 - DNA, 120 bp, Artificial Sequence
  ENSG00000185559_22 (sequence is synthesized)
gcttcttagattatttggataagaatctatactcttagctttattgagcattgcctgccgtgtttaccttgctccaggtgtttatttctaagtcatcatcaccttcgtcatctacagtca

SEQ ID NO: 670477 - DNA, 120 bp, Artificial Sequence
  ENSG00000185559_23 (sequence is synthesized)
gtcacatcagtcacccacacacaactcacagtcacccatccattggtcacctgcgccatcgtcatgacacaatatcgacctcatcacctcatcgtcctccagccactacccaagccccct

SEQ ID NO: 670478 - DNA, 120 bp, Artificial Sequence
  ENSG00000185559_24 (sequence is synthesized)
catcctgactcaaagcccgaccagcatctgcccaaactcccaacaccccactctccccaccaagccattggtctcctcactcccggtcctttgtcatcctgattccaagccccgccccac

SEQ ID NO: 670479 - DNA, 120 bp, Artificial Sequence
  ENSG00000185559_25 (sequence is synthesized)
cctcaccgcctcctccgcatcatctgcactctgcagagcccctcctacccgcctctgtccccaccaggcccctccctaccgtcagccctgagtcccacagcacgcgtccccagcccctcc

SEQ ID NO: 670480 - DNA, 120 bp, Artificial Sequence
  ENSG00000185559_26 (sequence is synthesized)
cagcctcaccccaaaaaccctgtcaccccaccgaccaccatcatcactggcaagccccttccccttctccagctcccgtccccactacccctcccgtcccccaatccttcccctcctgtt

SEQ ID NO: 670481 - DNA, 120 bp, Artificial Sequence
  ENSG00000185559_27 (sequence is synthesized)
agcccacccctcctttcctatcacccccacctttcccttcccattctccccacccttcccctccgatcccaccacccttcccttccgatccccgtcatccttcccctctgatcccccacc

SEQ ID NO: 670482 - DNA, 120 bp, Artificial Sequence
  ENSG00000185559_28 (sequence is synthesized)
cttcccctcctgtcctccccagccctcccttcctatcaccctcacccttcccctcccgttctccccacccttcccctcctgtctccaccagccctcccttcctatcacccccacccttct

SEQ ID NO: 670483 - DNA, 120 bp, Artificial Sequence
  ENSG00000185559_29 (sequence is synthesized)
cctcccttccctcaccccaaacccctgggtcctccaccccaatctctgacaaccgccccaagtccctcttccttccccacgaagtcattcataagtcaccatctcatctcattttgagtt

SEQ ID NO: 670484 - DNA, 120 bp, Artificial Sequence
  ENSG00000185559_30 (sequence is synthesized)
tgttttaagaaataaaaaaattaaaaagacaaaaaaaagaattgttggcatgtgtcaggcgggcgtctggtaccctgcctggcctctctcagcgtgagacctggactgagcctgctaacg

SEQ ID NO: 670485 - DNA, 120 bp, Artificial Sequence
  ENSG00000185559_31 (sequence is synthesized)
attctgttcctcagtttccccaaatagaaaattctaagattggtcagatgatcaaattatctatgttttcgatcttgatgctatagagaacagccatgttcccctgataacaagaaaaag

SEQ ID NO: 670486 - DNA, 120 bp, Artificial Sequence
  ENSG00000185559_32 (sequence is synthesized)
acgtcccacggtcgaggtatccttgaccaactccccatccattcatttgttcaccgtccacaacccatctgatcaggaagcatttccaggcacctgcggagcactaggcagtgtgcggaa

SEQ ID NO: 670487 - DNA, 120 bp, Artificial Sequence
  ENSG00000185559_33 (sequence is synthesized)
gctgcagggcaggcaggacgagggggcagtctggaggggggtggacacacagctgtccccagggagcccagcgcggtgccggtcacatgccgtgggagtggagggtcttgagcagacgcc

SEQ ID NO: 670488 - DNA, 120 bp, Artificial Sequence
  ENSG00000185559_34 (sequence is synthesized)
tcccttggagaagagccaccatctcaccttcccacgcaacaaattatctattaccagcacccgatgaggccgtccctcccaaattccacagtgcccaccactcgcactaccccccccgtg

SEQ ID NO: 670489 - DNA, 120 bp, Artificial Sequence
  ENSG00000185559_35 (sequence is synthesized)
ccacagaagcagtgtcagcagcctcgccacggtcttcacgtcatgcagaaatggtcattccatgttctatggccaccagattctgctgagagtgtcgggatccttgactgcccagccaca

SEQ ID NO: 670490 - DNA, 120 bp, Artificial Sequence
  ENSG00000185559_36 (sequence is synthesized)
ccttgtgtgtgtctggtgtagtgtgtagtttacgaaacaaacggaaaagctcaaagacagcgatccaagacatgatcagcaatttggtcccaaattaggagaggaggaagaggagtatca

SEQ ID NO: 670491 - DNA, 120 bp, Artificial Sequence
  ENSG00000185559_37 (sequence is synthesized)
attttgtcaccaaaatgttaaaaaaaatgtccttggcgctctttttagctttcccgtttactaccagtccagacatgcaaaaaaaccttgtttattgaaaaataaacaacaagggctaga

SEQ ID NO: 670492 - DNA, 120 bp, Artificial Sequence
  ENSG00000185559_38 (sequence is synthesized)
aatggggaggaggggtgtctgaggagcactccctctccctgggagctctgcagaggaagagggtctctggcaatcagcatcctctacctccacctctccagcgggcgacccctcagagaa

SEQ ID NO: 670493 - DNA, 120 bp, Artificial Sequence
  ENSG00000185559_39 (sequence is synthesized)
ccctagcccctaccacctcctcccagtctcctgttgctggtgttcctcacttcctcattcctgcacactccgtgccctgtattctaaagatctgtttataaatttcctgtgggtaccgaa

SEQ ID NO: 670494 - DNA, 120 bp, Artificial Sequence
  ENSG00000185559_40 (sequence is synthesized)
tgtttgcaggtaatagagtggctcctcagaggcagcttgtaggggccacgcagaagcctggggagtcgtgaagtcaggcagaaaaaaatagggggcttggccactacgctgcagcaaaca

SEQ ID NO: 670495 - DNA, 120 bp, Artificial Sequence
  ENSG00000185559_41 (sequence is synthesized)
gcttccgggcccctgcagaaaactggtggggcgagctggggagatggggggggcggggggggggcagccacagctcctgtctgcgttctcagaggtgggggggcaggtgggaccactgca

SEQ ID NO: 670496 - DNA, 120 bp, Artificial Sequence
  ENSG00000185561_0 (sequence is synthesized)
cagccctgccgggaaacgggttcccagtcccggccgagagcgcgggcgccgaggggaccgacccggactccccgcaaccccccaaccgccaggccatggcgcccacggggctcctggtgg

SEQ ID NO: 670497 - DNA, 120 bp, Artificial Sequence
  ENSG00000185561_1 (sequence is synthesized)
gcccacggggctcctggtggccggcgcctccttcctcgcgttccgggggctgcactgggggttgcggcggctgcccacgccggaatcggccgctcgggaccgctggcagtggtggaacct

SEQ ID NO: 670498 - DNA, 120 bp, Artificial Sequence
  ENSG00000185561_2 (sequence is synthesized)
cgctggcagtggtggaacctctgcgtctccctggcgcacagcctgctctcggggaccggggcgctgctcggcctgtcactgtaccctcagatggccgccgaccccatccatggccacccg

SEQ ID NO: 670499 - DNA, 120 bp, Artificial Sequence
  ENSG00000185561_3 (sequence is synthesized)
cgctgggctctggtgctggtggctgtgtctgtgggttacttcctggcagacggagctgacctgctgtggaaccagaccttgggcaagacctgggatcttctctgtcatcatttggtggtg

SEQ ID NO: 670500 - DNA, 120 bp, Artificial Sequence
  ENSG00000185561_4 (sequence is synthesized)
gtgagctgcctcagcaccgctgttctgtctggccactacgtgggcttctccatggtgtctctgctcctggaactgaactctgcctgcttgcacctgcggaagctgctgttgctttctcgc

SEQ ID NO: 670501 - DNA, 120 bp, Artificial Sequence
  ENSG00000185561_5 (sequence is synthesized)
caggccccatccctggccttcagcgtgaccagctgggcctccttggccaccttggccctcttccgcctggtcccgctggggtggatgagtctgtggctgttccggcagcaccaccaggtt

SEQ ID NO: 670502 - DNA, 120 bp, Artificial Sequence
  ENSG00000185561_6 (sequence is synthesized)
cctcttgctctggtcaccctgggtggaattgggctggtcactgtgggcatcatgagcatcatattggggatccgtattctggtcaatgatgtcctacagtctcgaccccatccacccagc

SEQ ID NO: 670503 - DNA, 120 bp, Artificial Sequence
  ENSG00000185561_7 (sequence is synthesized)
cctggccatgagaaaaccagggggaccaggacacgtcgtgacaatggacctgtcaccagcaacagttcgactctcagcctgaaagactagagagaagccatgggcccctcgctgggggag

SEQ ID NO: 670504 - DNA, 120 bp, Artificial Sequence
  ENSG00000185561_8 (sequence is synthesized)
gtggggccaggacaaggagatgagggtcttccatgcacagtcccccatcagggtgagggccagacttgctcatcagaatctcagtttctcttccagctaactcacatcccttccccttcc

SEQ ID NO: 670505 - DNA, 120 bp, Artificial Sequence
  ENSG00000185561_9 (sequence is synthesized)
tcggatctaagaagaaatgctgatgttggatgggtgggaacctgggtttctgttcactgaaatccgtcatcagatgagcatcctttccagcaaataaactcaagaggtacagctagagct

SEQ ID NO: 670506 - DNA, 120 bp, Artificial Sequence
  ENSG00000185561_10 (sequence is synthesized)
atcagtaaagggtggcaggaggcatgcagctggaagaaactgccagtggagacagaagctctttgctttaacccagggacagatgggggaaggtgaagtcccactaggatcagagagatc

SEQ ID NO: 670507 - DNA, 120 bp, Artificial Sequence
  ENSG00000185561_11 (sequence is synthesized)
tggtatggggcgggtggggacagagagaaaagagatctcacctataaccaaattctggcagtgggaggaaggtagaggaggtgctatctgtagcagcagagatggacgtgatagttgcca

SEQ ID NO: 670508 - DNA, 120 bp, Artificial Sequence
  ENSG00000185561_12 (sequence is synthesized)
tgtagcagcagagatggacgtgatagttgccaagagacagaacctgggccacagcaattgctgctgatgtttctggttctcaaagccacactcctgtttttctttttctttttctttttt

SEQ ID NO: 670509 - DNA, 120 bp, Artificial Sequence
  ENSG00000185561_13 (sequence is synthesized)
gtgagaacaggcgcacactcctgtttttctccttaaccctggtcctgctgtgtctagccttttatttttatttttatttttagtatcttttgacttttcttttttcttttcttttttttt

SEQ ID NO: 670510 - DNA, 84 bp, Artificial Sequence
  ENSG00000185561_14 (sequence is synthesized)
agctgggactacaggtgcacgccactgcaccaggctaatttttgtatttttttgtagagaccttgcactcaagtgatccaccca

SEQ ID NO: 670511 - DNA, 120 bp, Artificial Sequence
  ENSG00000185561_15 (sequence is synthesized)
gggattacagacgtgagccaccgtacccgaccccttttgacttttcaaagacaattcggattcttagaggaatgaacacagggctggtttgtcttcttaggacggcactgaagtctagaa

SEQ ID NO: 670512 - DNA, 120 bp, Artificial Sequence
  ENSG00000185561_16 (sequence is synthesized)
ttaggacggcactgaagtctagaattacagaaggaaaggtgcccagtacagagttttcccaggcccaggctttcatggaagaacaagggcagaggtagactgtgtgagagaaggctgcag

SEQ ID NO: 670513 - DNA, 66 bp, Artificial Sequence
  ENSG00000185561_17 (sequence is synthesized)
gaacaagggcagaggtagactgtgtgagagaaggctgcaggaggataaaggaatagctggccctct

SEQ ID NO: 670514 - DNA, 120 bp, Artificial Sequence
  ENSG00000185561_18 (sequence is synthesized)
tcgtgccactgcactccagcctgggcaaacagagtgagactcttgtctctaaagaaaaaaaaaaaaggaagagctgggacttttctgagatacattcataaagtcttcttcctccctgct

SEQ ID NO: 670515 - DNA, 120 bp, Artificial Sequence
  ENSG00000185561_19 (sequence is synthesized)
aagtcttcttcctccctgctgcttctgctgcgtttttttctgttgaacaagaccccttccttcccagaacatcgaggtgacgggaagtgcccagcagattaagtctgctgttccactaaa

SEQ ID NO: 670516 - DNA, 120 bp, Artificial Sequence
  ENSG00000185561_20 (sequence is synthesized)
ggactgagagaggcaacccttagccatccacagaaaagctacatgagcaaaagcaagagacaggaagattgtcttcaaaaaaaaacaaaacaaaacaaaaaccttgctaagaagcggagg

SEQ ID NO: 670517 - DNA, 120 bp, Artificial Sequence
  ENSG00000185561_21 (sequence is synthesized)
tacagaaagatacgaagaatgacagagacagacatacatagattgagtgatagatagaaagagagaaggattattcacatagaggtgacagaggcaaagaaggatggagggcaaaagaga

SEQ ID NO: 670518 - DNA, 120 bp, Artificial Sequence
  ENSG00000185561_22 (sequence is synthesized)
caggccctagcagaaatatggagaaaggctgtcatagatcctgagagacaccaaagtcacagaactgataaaagggttataaacaaaaaggaccagaaaaatagaaatgaaggccgacaa

SEQ ID NO: 670519 - DNA, 120 bp, Artificial Sequence
  ENSG00000185561_23 (sequence is synthesized)
gaagagaccccaaggctgaaaggcacagagagtctagacagtgaaatagagtgagtgacaaggagaaacacccaggctcaggagtgatggaggaaatactggcagatagagagatcagaa

SEQ ID NO: 670520 - DNA, 120 bp, Artificial Sequence
  ENSG00000185561_24 (sequence is synthesized)
gagcaagaggagaggtgggaacagagaagagcggggacgagtccggggagctgagaagcagaaggcggaggaggcagtcagtgggaagattcactgacagaagagaccaggagatatggg

SEQ ID NO: 670521 - DNA, 120 bp, Artificial Sequence
  ENSG00000185561_25 (sequence is synthesized)
gacttggaggcaggcagaaagacaaaggacaaacagctgcagcgcaaaccctaaagacaggctgacagtaaccggtcggcagagactggtaggaagataaggacaagtcagaatcagggg

SEQ ID NO: 670522 - DNA, 120 bp, Artificial Sequence
  ENSG00000185561_26 (sequence is synthesized)
tgtcaactgagatgcaaatataggcaaaggagctgacaaagagaatcacagagagaaaaaaaaggaggagagcacagaacaatttaaatatccaggctgggcatggtgggtcacgcctgt

SEQ ID NO: 670523 - DNA, 83 bp, Artificial Sequence
  ENSG00000185561_27 (sequence is synthesized)
gcaggagaatcgtttgaacctgggaggccgaggttgttataatgagccgagatagtgccactgcagtccagcagtgaatatcc

SEQ ID NO: 670524 - DNA, 120 bp, Artificial Sequence
  ENSG00000185561_28 (sequence is synthesized)
gtgagactccgtctcaaaaaaaaaaattgaatatccaaagaacaaagaagaggcaggaacccagaaatgaaaagaggaggaaaaatacaggtgtgaaaaaaaaatgagagggattgtgag

SEQ ID NO: 670525 - DNA, 120 bp, Artificial Sequence
  ENSG00000185561_29 (sequence is synthesized)
aagtctccatcatagagtcataaaaacaggcgcaaaggatgaaaatacatcgagactgaggaaaacacagttggaaggagctaaacacaagcagaaaataagagcagagcatttaaatgt

SEQ ID NO: 670526 - DNA, 120 bp, Artificial Sequence
  ENSG00000185561_30 (sequence is synthesized)
aattagataaaaacccaagaggcaaaggtatagatagtgagctagagaaacaatgcagaattttgtcagagtctgtacttctagaagtcatgtttgctggctgggcatggtggctcacgc

SEQ ID NO: 670527 - DNA, 83 bp, Artificial Sequence
  ENSG00000185561_31 (sequence is synthesized)
ttgggaggccgaggtaggaggagtggttgagacctcctctctacaaaaaaaaaaaattttcttttttctttcttttcttcttt

SEQ ID NO: 670528 - DNA, 120 bp, Artificial Sequence
  ENSG00000185561_32 (sequence is synthesized)
tgacctcaggtgatccgcccaccttgggctcccaaactactgggattatatgcgtgagccaacacacccggccaaaaaaaaatttttaattaaaaaaaaaagtcatatctgcaaaactca

SEQ ID NO: 670529 - DNA, 120 bp, Artificial Sequence
  ENSG00000185561_33 (sequence is synthesized)
atttgccatcttaactgaatgccttgattaacaaaaatgttgtctgccttgagtttttaaagaaaaagaaatatgacaaactcatgtgaggaatctattccttaaatatctgttgaggtt

SEQ ID NO: 670530 - DNA, 120 bp, Artificial Sequence
  ENSG00000185561_34 (sequence is synthesized)
gatatgaattgattctaagtcatacaccttttctttggccactggtatacattcatgatggtttgagtgagtgtcccttttggtaatacttgatagtgtctatgaggccgggcgtggtgg

SEQ ID NO: 670531 - DNA, 120 bp, Artificial Sequence
  ENSG00000185561_35 (sequence is synthesized)
taaatagacagatagatagatagatagtgtctatgaaggctgcccaagaacttgaccattagggaaacatggctgtttctgtggattaactagtcaagcccatacaggaagagtgaggtc

SEQ ID NO: 670532 - DNA, 120 bp, Artificial Sequence
  ENSG00000185561_36 (sequence is synthesized)
agctcccaggtggggcaggatgtagtggacgcttggaagaatttgggaccacacacgaattgctaccatggtgagccagtgaaacttgaggaaggcaggactggattgtgattacaactg

SEQ ID NO: 670533 - DNA, 120 bp, Artificial Sequence
  ENSG00000185561_37 (sequence is synthesized)
agtaagtaggcagagaattggagtgtgggcaacataaagatgatgtgaatcaaagaagaatggtcaattaagaccctaaaaaaaggacgttcaaaaatgcagaggttaaaaaaaaaaaaa

SEQ ID NO: 670534 - DNA, 120 bp, Artificial Sequence
  ENSG00000185561_38 (sequence is synthesized)
gcagagattgccagatgctccatttggtaggagtctgcttagcacagtggtgcttcgccagactttaccgtggcccagggaaatggtcctcaagacggactccatgtctaccaagctact

SEQ ID NO: 670535 - DNA, 120 bp, Artificial Sequence
  ENSG00000185561_39 (sequence is synthesized)
tgctaatgatttctttgtcctccaggacagggaaggggcttttctggatgggatacattgatattttatggccttgaaacactatcctgattataaattaataaattgctatgcaaataa

SEQ ID NO: 670536 - DNA, 120 bp, Artificial Sequence
  ENSG00000185565_0 (sequence is synthesized)
gctgtgtggctgtttctgtacactcactggcaggcttggtgccggctccctcgcccgcccgcccgccagcctgggaaagtgggttacagagcgaaggagctcagctcagacactggcaga

SEQ ID NO: 670537 - DNA, 120 bp, Artificial Sequence
  ENSG00000185565_1 (sequence is synthesized)
ggagcatccagtcacagagagaccaaacaagaaccctttcctttggcttcctcttcagctcttccagagggcttgctatttgcactctctcttttgaaattgtgttgcttttacttttca

SEQ ID NO: 670538 - DNA, 120 bp, Artificial Sequence
  ENSG00000185565_2 (sequence is synthesized)
cccttctgcttgggttttatgagggctttgttaagtcttagagggaaaagagactgagcgagggaaagagagaggcaaagtggaaaggaccataaactggcaaagcccgctctgcgctcg

SEQ ID NO: 670539 - DNA, 120 bp, Artificial Sequence
  ENSG00000185565_3 (sequence is synthesized)
ctgtggatgaaagccccgtgttggtgaagcctctcctcgcgagcagcgcgcacccctccagagcaccccgcggacccgcacctcggcgtggccaccatggtcaggagagttcagccggat

SEQ ID NO: 670540 - DNA, 120 bp, Artificial Sequence
  ENSG00000185565_4 (sequence is synthesized)
cggaaacagttgccactggtcctactgagattgctctgccttcttcccacaggactgcctgttcgcagcgtggattttaaccgaggcacggacaacatcaccgtgaggcagggggacaca

SEQ ID NO: 670541 - DNA, 120 bp, Artificial Sequence
  ENSG00000185565_5 (sequence is synthesized)
gccatcctcaggtgcgttgtagaagacaagaactcaaaggtggcctggttgaaccgttctggcatcatttttgctggacatgacaagtggtctctggacccacgggttgagctggagaaa

SEQ ID NO: 670542 - DNA, 120 bp, Artificial Sequence
  ENSG00000185565_6 (sequence is synthesized)
cgccattctctggaatacagcctccgaatccagaaggtggatgtctatgatgagggttcctacacttgctcagttcagacacagcatgagcccaagacctcccaagtttacttgatcgta

SEQ ID NO: 670543 - DNA, 120 bp, Artificial Sequence
  ENSG00000185565_7 (sequence is synthesized)
caagtcccaccaaagatctccaatatctcctcggatgtcactgtgaatgagggcagcaacgtgactctggtctgcatggccaatggccgtcctgaacctgttatcacctggagacacctt

SEQ ID NO: 670544 - DNA, 120 bp, Artificial Sequence
  ENSG00000185565_8 (sequence is synthesized)
acaccaactggaagggaatttgaaggagaagaagaatatctggagatccttggcatcaccagggagcagtcaggcaaatatgagtgcaaagctgccaacgaggtctcctcggcggatgtc

SEQ ID NO: 670545 - DNA, 120 bp, Artificial Sequence
  ENSG00000185565_9 (sequence is synthesized)
aaacaagtcaaggtcactgtgaactatcctcccactatcacagaatccaagagcaatgaagccaccacaggacgacaagcttcactcaaatgtgaggcctcggcagtgcctgcacctgac

SEQ ID NO: 670546 - DNA, 120 bp, Artificial Sequence
  ENSG00000185565_10 (sequence is synthesized)
tttgagtggtaccgggatgacactaggataaatagtgccaatggccttgagattaagagcacggagggccagtcttccctgacggtgaccaacgtcactgaggagcactacggcaactac

SEQ ID NO: 670547 - DNA, 120 bp, Artificial Sequence
  ENSG00000185565_11 (sequence is synthesized)
acctgtgtggctgccaacaagctgggggtcaccaatgccagcctagtccttttcagacctgggtcggtgagaggaataaatggatccatcagtctggccgtaccactgtggctgctggca

SEQ ID NO: 670548 - DNA, 120 bp, Artificial Sequence
  ENSG00000185565_12 (sequence is synthesized)
gcatctctgctctgccttctcagcaaatgttaatagaataaaaatttaaaaataatttaaaaaacacacaaaaatgcgtcacacagaatacagagagagagagacagagagagagagaga

SEQ ID NO: 670549 - DNA, 120 bp, Artificial Sequence
  ENSG00000185565_13 (sequence is synthesized)
gagagagatgggggagaccgtttatttcacaactttgtgtgtttatacatgaagggggaaataagaaagtgaagaagaaaatacaacatttaaaacaattttacagtccatcattaaaaa

SEQ ID NO: 670550 - DNA, 120 bp, Artificial Sequence
  ENSG00000185565_14 (sequence is synthesized)
tttatgtatcattcaggatggagaaggttctactgggatatgtttatatctactaagcaaatgtatgctgtgtaaagactacaccacactaaggacatctggatgctgtaaaaataagag

SEQ ID NO: 670551 - DNA, 120 bp, Artificial Sequence
  ENSG00000185565_15 (sequence is synthesized)
aagaaccagatggatattaagccccccaacacacactttatccttccttccttcatcttttttcatctgtggggaagaaaataaggtcttgcctttggtgtttatatttccataaccttt

SEQ ID NO: 670552 - DNA, 120 bp, Artificial Sequence
  ENSG00000185565_16 (sequence is synthesized)
taattctatttttcatttgagctgacttgtagccacttcagactatcaatggaatcttatgttgagcctttctctggctttccttcctccactatctctccaactttagagatcatcccc

SEQ ID NO: 670553 - DNA, 120 bp, Artificial Sequence
  ENSG00000185565_17 (sequence is synthesized)
tctccctccagtgcgttctatctcccccacacccaccctagatactcccttttcacccacctttcctccctcacctctcctcacctccaccccctccccagagcactagtcatgccgcaa

SEQ ID NO: 670554 - DNA, 120 bp, Artificial Sequence
  ENSG00000185565_18 (sequence is synthesized)
atgctaggaagtgccattttcattttctccactgtgcgtgtgtgctcaagtctttcgctctcacgtgggtgtacatgtgtgtgagcgtgtgtgtgtctctctctaaagcatgccaaggga

SEQ ID NO: 670555 - DNA, 120 bp, Artificial Sequence
  ENSG00000185565_19 (sequence is synthesized)
atggtccatgtgtacatagactcattgtgctgtagatactgtcctgcattgtaattgtgagatgcggctgtaacaagttgctgggggagatggcggggaaagaggcaaggagcagagtcc

SEQ ID NO: 670556 - DNA, 120 bp, Artificial Sequence
  ENSG00000185565_20 (sequence is synthesized)
tccctacatccatggctgtcacatggcatcagtgtgtattcaaaccaagctatgctccttccaagggcaggaccccatattcctcctagtcccatcatcagaaccgagtggggagtcact

SEQ ID NO: 670557 - DNA, 120 bp, Artificial Sequence
  ENSG00000185565_21 (sequence is synthesized)
cagaatatcactgtaaatgaaagtgcctactatcgatggggtaagcaaacagcataaggaattatgacgtggacgaggtgacctaggagagaaaatttcagattttactctcatttcatg

SEQ ID NO: 670558 - DNA, 120 bp, Artificial Sequence
  ENSG00000185565_22 (sequence is synthesized)
agtctgagggattcttatatttcctggcatttaacagggtaggccctgctccactgtgaaaatgagcagcatgtgttgagtaaatccccagaaacaggaaggtctccaagtgtcaactcc

SEQ ID NO: 670559 - DNA, 120 bp, Artificial Sequence
  ENSG00000185565_23 (sequence is synthesized)
cagtgaaagaatgatgaaccacttggagatcctaagcagccctgttttacctcctccctaatcttaaataacatttgtcccatgaattcccctgagcagagattgtttcctatttcagat

SEQ ID NO: 670560 - DNA, 120 bp, Artificial Sequence
  ENSG00000185565_24 (sequence is synthesized)
aaaatacagtgaaagtgagcaaggcagaaaaagtcaacagatgcccaggctcctactgtattctggagatactgtcagagctctaatacagagcactggccataatgaaaagcagttcac

SEQ ID NO: 670561 - DNA, 120 bp, Artificial Sequence
  ENSG00000185565_25 (sequence is synthesized)
tccttgtgctcctctgcagatgtttttcccagtgttctaggttaatgttttatttggttgcctgcataatccctgttctgtttcactgatggtgtttgcagcaccactgttcatggtggt

SEQ ID NO: 670562 - DNA, 120 bp, Artificial Sequence
  ENSG00000185565_26 (sequence is synthesized)
ccactgttatcctatgccagggtgctaagaattgcatgatattcatcttccctgctctatttaaatttacatctataagagtcatcttgacattaacactgaaatgtgatctaggtcctt

SEQ ID NO: 670563 - DNA, 120 bp, Artificial Sequence
  ENSG00000185565_27 (sequence is synthesized)
aaccaaaattgctgggcaacttgtaataaatttagacagaaattttatgagtaccacaaagcttggtgttaccacatcaccagaaggatttcttaggaaatgtcttgccgagagagctgg

SEQ ID NO: 670564 - DNA, 120 bp, Artificial Sequence
  ENSG00000185565_28 (sequence is synthesized)
ctctctgcatatagatgtctttgtcagaaaaccaacccttgctctcacttacacagtagtaagcactgaaagtggttcagttcatgagaggacagagaattattttgagattatatttga

SEQ ID NO: 670565 - DNA, 120 bp, Artificial Sequence
  ENSG00000185565_29 (sequence is synthesized)
atgtaatcttgcagagccaaatatggtatgtcattaagttggaaccttgtaaatagctgttccatgttataaaatgagaaactttgtaactggaaaaaaagaaaggaaagaaggaaggaa

SEQ ID NO: 670566 - DNA, 120 bp, Artificial Sequence
  ENSG00000185565_30 (sequence is synthesized)
gcaggagggagaaagatctaagtagcattgttaatttcttcaatttcttctaagggattttattgtttgttttagaagcttatcacagccttctttcatgattttgcagtttagacttga

SEQ ID NO: 670567 - DNA, 120 bp, Artificial Sequence
  ENSG00000185565_31 (sequence is synthesized)
tacaaggaaaaattcagcttggggatggttaagagtgtttatagcagattctgacataggagagaaaacaaattctcatccaagaaggtagctagtaaaatatagggaaggtgagccata

SEQ ID NO: 670568 - DNA, 120 bp, Artificial Sequence
  ENSG00000185565_32 (sequence is synthesized)
ttcctatgcagcatcaatttattgacaatcaggtatttctcttaacagtttggtcttcttagttcaagaataaagggtatcatctttaataataagcattccccaaaaattgaagaggca

SEQ ID NO: 670569 - DNA, 120 bp, Artificial Sequence
  ENSG00000185565_33 (sequence is synthesized)
gtcacacacttaagtgtgtggctttagaaaagcgcatgctaatttaaagatatacaggaagagaaaagtaggagttaagttggatgttgttagaagttggatgttagtattaccttcagg

SEQ ID NO: 670570 - DNA, 120 bp, Artificial Sequence
  ENSG00000185565_34 (sequence is synthesized)
aacagatccccatggcatgtcacaggccttaattatatacctggctttcttattgtctccactttatcatgaggacaaggtcttggtttcatgggaggaacttctccattgaaataaatg

SEQ ID NO: 670571 - DNA, 120 bp, Artificial Sequence
  ENSG00000185565_35 (sequence is synthesized)
tctgccatgtcagcaccgtttgttccctcagttttaatataatggaccatatattaaacataattaaacatatatttaaatgtggtgtttgcctgtgtctctagcaggatcttgaaattt

SEQ ID NO: 670572 - DNA, 120 bp, Artificial Sequence
  ENSG00000185565_36 (sequence is synthesized)
taaaaatttgcttctggttcctgtttcagagaaaacattgtccccagaaatttcataggattgaaagtgttccctaagcagtgtgaacaatggaggaaaatatagtttagagaaaagtca

SEQ ID NO: 670573 - DNA, 120 bp, Artificial Sequence
  ENSG00000185565_37 (sequence is synthesized)
gggaaaggtagggccagaggactgacaccaagaaatcattgaatctcaacataagacttcttggaatttagttaatcatattggaataaattccttcaagaatcttgtcccttggtaatc

SEQ ID NO: 670574 - DNA, 120 bp, Artificial Sequence
  ENSG00000185565_38 (sequence is synthesized)
ggagtgaaattcatcaattaatctgagtggctaatatatttaatatcctttgtatacaaagtaaaactccaccattcgtaaaaggaaatccttagacccaactttcagttaacaaaaaca

SEQ ID NO: 670575 - DNA, 120 bp, Artificial Sequence
  ENSG00000185565_39 (sequence is synthesized)
gaaatgactttgacccagggtgcttcctgaagaatgagaactatccagggctttacaactgcagaattgtaattatgctctgtgcaattgttgagcaaaggttttgccttgctggataaa

SEQ ID NO: 670576 - DNA, 120 bp, Artificial Sequence
  ENSG00000185565_40 (sequence is synthesized)
aagtcttgtttgtttcgagacatgaaatccccatgtcttaaaagaactaaggcttatagaaaagcagatgggttttctctcaggaaggactgccccattgacctttgccttctcttccaa

SEQ ID NO: 670577 - DNA, 120 bp, Artificial Sequence
  ENSG00000185565_41 (sequence is synthesized)
gtcagacagacttctcgcttgccatgggcatttttttactacatagtcagactactggggctacttatagagaccttgtaaaagtactcgtgattttcacgttcttggaggaccaaacaa

SEQ ID NO: 670578 - DNA, 120 bp, Artificial Sequence
  ENSG00000185565_42 (sequence is synthesized)
aaatctgtttctcctccaaaaatggacttacctcctttgcacacaaaagctaaactcctcagcatgaaattgtttgagttattactttaccaagttgtgagcttcttgaatcctccagag

SEQ ID NO: 670579 - DNA, 120 bp, Artificial Sequence
  ENSG00000185565_43 (sequence is synthesized)
tcgcagattccatccctgagttggttgtggtttcactgtttctattggctattctccctgaatttttcattttgttctttgcagggctcgaattatttgtggaaaacaataatatatatg

SEQ ID NO: 670580 - DNA, 120 bp, Artificial Sequence
  ENSG00000185565_44 (sequence is synthesized)
tgtgtgtattttttatctttatagatgctatatttacaataatgtatgtattataagacaaattaagaataatgttttgatcttaaaaggaagaaaagtactgaatttggttgtttagaa

SEQ ID NO: 670581 - DNA, 120 bp, Artificial Sequence
  ENSG00000185565_45 (sequence is synthesized)
agaaaatctatgctcacgtagaaagacatagagccccactttttccgttttgtaattatttggcgaaaagaaatttgcttatagactatgtttaatgggattaaccatgtcctcattttt

SEQ ID NO: 670582 - DNA, 120 bp, Artificial Sequence
  ENSG00000185565_46 (sequence is synthesized)
cttttcatcctcatacacttttagcctgcatttagtcttggttaccaatatcattttttaagagaaatgtaagtacagtgctatatcttacctacataaactattaatattttgaagaca

SEQ ID NO: 670583 - DNA, 120 bp, Artificial Sequence
  ENSG00000185565_47 (sequence is synthesized)
aatgtgaaacacaccacaaaaatggtgagataagaaacaaaaatgcagtttaggaagcctcctccttgcttaaatgtttagaatatttcttctccaaagactgcatttgcctcagtgatg

SEQ ID NO: 670584 - DNA, 120 bp, Artificial Sequence
  ENSG00000185565_48 (sequence is synthesized)
taaattttccatcatggttggcataatatctgtaaacatctcactaaatgcaaaatggagtttacatttatgtgcatactagcagaaaagaagtaaactattctcatttgcatgtagcta

SEQ ID NO: 670585 - DNA, 120 bp, Artificial Sequence
  ENSG00000185565_49 (sequence is synthesized)
tgctgttcaaatgtcgccaaccaaaatttaggaaagaatttgttttcacccagcatgtacatctcacttttctcttggcaaggaagctggtgttaacgttgggtttaggtttaacattta

SEQ ID NO: 670586 - DNA, 120 bp, Artificial Sequence
  ENSG00000185565_50 (sequence is synthesized)
caccagcgaaaatgtttatgaatattatggaaaacttattttaaaccttgatttcttttgagcacatttacatgctgcgtgctgattaataaattaggcaccaatcatgtgtaaatcaat

SEQ ID NO: 670587 - DNA, 120 bp, Artificial Sequence
  ENSG00000185565_51 (sequence is synthesized)
gtaaatcactagtttatgtacataatataaactatgtaaacttcatttttcatgcagtgcccaactactgctaaggtttactatgattcttaaggaaaaaaaaatcaaataaaaataaat

SEQ ID NO: 670588 - DNA, 120 bp, Artificial Sequence
  ENSG00000185565_52 (sequence is synthesized)
aaaaactgaaacgtttcacagttcagaatcggaagaattacgactaaagctccaaatatgaggttgccttagccaaaggaagcagacccacaggaacagttcaaggtttatatcctgctc

SEQ ID NO: 670589 - DNA, 120 bp, Artificial Sequence
  ENSG00000185565_53 (sequence is synthesized)
aagtcacctctttggtctttcaggatctaagtggagattgtcccaactgttgctgtagttgtctcacccgaccccaaagcaagggaaatagagggaaaggttttaagggctatatgtctg

SEQ ID NO: 670590 - DNA, 120 bp, Artificial Sequence
  ENSG00000185565_54 (sequence is synthesized)
ctgtatccactcccagctatcttctttttactcctttctcaccatctaagatgtcttatttaaatagctccaaggaagtgacctaaaccttgatgagcaaaatattactcagtttttatt

SEQ ID NO: 670591 - DNA, 120 bp, Artificial Sequence
  ENSG00000185565_55 (sequence is synthesized)
ttccattcaacaaaagcagtgggaaagcttgccatctggattctaagaaattgtgcaatataaaaaatgttatatcctcgagaaatatcttgctgagtcaccctaggaaataactacctt

SEQ ID NO: 670592 - DNA, 120 bp, Artificial Sequence
  ENSG00000185565_56 (sequence is synthesized)
ttatttatctggtagcctaatgtttccacacatttatcctgaatattgcaagtgagggactgaatcatttttaattgggagttatctttctcaggcatgttctcttggagtctttttgaa

SEQ ID NO: 670593 - DNA, 120 bp, Artificial Sequence
  ENSG00000185565_57 (sequence is synthesized)
gtgcctgacacgtgtaacaggatgacatatatatcattcctacaatatgaacaactgttacataaaaaattatcaaggagatgatttcaggaaacaagtgaactttctgcaaagacttat

SEQ ID NO: 670594 - DNA, 120 bp, Artificial Sequence
  ENSG00000185565_58 (sequence is synthesized)
aaaaattttaggtcaaattaacttcaggctttaaatgcactaatctacctaagagaaaaaaaaagaaaaaaaacaggaaggagttttaagggctcatgtgcctgttgtatcaacccccaa

SEQ ID NO: 670595 - DNA, 120 bp, Artificial Sequence
  ENSG00000185565_59 (sequence is synthesized)
gtgtcttcttggtactgcttcctcatcatctaagataaactgacaactttaaagtgaggtagaaggtgtattgaattgggagtcaggagaattgggttctaaccccaagttcagccacaa

SEQ ID NO: 670596 - DNA, 120 bp, Artificial Sequence
  ENSG00000185565_60 (sequence is synthesized)
ataaagctgtgagacattggcaagtcatttaactttcctgagtcttggttttctcatcctgaaagtgagggattcggctgacgtctctaaaatctctttcaactctaacctttattctga

SEQ ID NO: 670597 - DNA, 120 bp, Artificial Sequence
  ENSG00000185565_61 (sequence is synthesized)
ataagaatttaatattcacttagtgctgtgcccagcactgtttgtaaacagcagctgtttgttatctctagtttggtctctgtattctcatcacttctcagaactatcattctaccgtct

SEQ ID NO: 670598 - DNA, 120 bp, Artificial Sequence
  ENSG00000185565_62 (sequence is synthesized)
tcatttctaaacccaaaactgctagaatacagggactctggactgggtctgtaaattttttctgatcaaaactttatagcagtgtagagaagggacacattcaaattacactaaggacat

SEQ ID NO: 670599 - DNA, 120 bp, Artificial Sequence
  ENSG00000185565_63 (sequence is synthesized)
tgacatagctggggttgtttccttgtttatattataaaacctaaatgtggaactatattctaataatctttcataggaaggaaaatagccagactgggtattatgcatgtaacaaatgag

SEQ ID NO: 670600 - DNA, 120 bp, Artificial Sequence
  ENSG00000185565_64 (sequence is synthesized)
gacattgtgcataagaaaggaaacattagttttctgtcatcctgggccaagtacctcattacagtaaatgtgtgtctttggaaactctttgcttgtgctgatggcggtaagcatggggtc

SEQ ID NO: 670601 - DNA, 120 bp, Artificial Sequence
  ENSG00000185565_65 (sequence is synthesized)
ccaggcaggttcaaaggctgaactgtaagaaatgggcaagacaatacattttgttttggaaggaatttctcatgggataagtttcccaaagcttgaattataggctatgaaataaagcaa

SEQ ID NO: 670602 - DNA, 120 bp, Artificial Sequence
  ENSG00000185565_66 (sequence is synthesized)
atagatggagagaaaacaagtattgttttcaaaaagtacaagtcaattctatttaaagaagacaagctgaaaataaaacaaaaataaacacaatttaggaggttacagagttgaagacag

SEQ ID NO: 670603 - DNA, 120 bp, Artificial Sequence
  ENSG00000185565_67 (sequence is synthesized)
tatgaattgttgtgaaggccaaaatcaaatgtgaaagttaggttctctgagaaaagggtaagcagaaaggatgatttctcaagcaattaataaggaattattttcttgtgccatgttcta

SEQ ID NO: 670604 - DNA, 120 bp, Artificial Sequence
  ENSG00000185565_68 (sequence is synthesized)
gatgcattgagcacagatcctcttgtcctaagctgtcctagaggctcaggttagcatctatccaaagttgtcctttgattttattgtctgaaagaacagaaggcatcagagtttccagtc

SEQ ID NO: 670605 - DNA, 120 bp, Artificial Sequence
  ENSG00000185565_69 (sequence is synthesized)
actgaagagtagggtttgttcatcacttcccagcaatcacatcactttgtgtaggtaaggatatatgatgtgcttagattacttatgaagctctctctaagtgggagaatgacctgtcca

SEQ ID NO: 670606 - DNA, 120 bp, Artificial Sequence
  ENSG00000185565_70 (sequence is synthesized)
tgggacaactccccgttttcatggtcatttcagaagtacctctttttgggcagtgctcctggatctacttctacagccacattctactctgcacaatcctccctatgtaaagccaggcac

SEQ ID NO: 670607 - DNA, 120 bp, Artificial Sequence
  ENSG00000185565_71 (sequence is synthesized)
agtacaaatatgcttcttgcaagtgaagaaaacccatggaagtcctagcttcatggcacgctgcagcaatcccaagctaccaggagcctcttttgaacccacttccctaagtctttgctc

SEQ ID NO: 670608 - DNA, 120 bp, Artificial Sequence
  ENSG00000185565_72 (sequence is synthesized)
ttcaccagagaatggaaattgttcatcctggtgaactgtggccaagttctgctccctaagtatttacttggagtagggaggttaaagggaagaaattcagggggagagaagcaaaagaga

SEQ ID NO: 670609 - DNA, 120 bp, Artificial Sequence
  ENSG00000185565_73 (sequence is synthesized)
acacttccaactccctcccccatctcccaatgctccccaccttccttatcactgctctactgaagggtgtataaatcctgctcttggttagaattctccttattaacagtgttatataca

SEQ ID NO: 670610 - DNA, 120 bp, Artificial Sequence
  ENSG00000185565_74 (sequence is synthesized)
tataaatatatatataaatatattccttttttcagccctgtagacatgaactgatcttcccttgaagatacaaacacatggccattttttgtttgggattttttgtttttcaaggttttt

SEQ ID NO: 670611 - DNA, 120 bp, Artificial Sequence
  ENSG00000185565_75 (sequence is synthesized)
catttttgtttattaggtggatttttttccctgggtactagctctgtgaaggagataaaaagcgcaatgtgtgttaaaaaaaaaaaattaaaattaaaatgaaaaaaagctttttttctt

SEQ ID NO: 670612 - DNA, 120 bp, Artificial Sequence
  ENSG00000185565_76 (sequence is synthesized)
ttctttttaaatgtatttaaattctgtttctctcttctgttactttacacgtatgaatgctctgctcttctgtgatcttaaaacaaaatgaaataaacgtgaaaaggagatgtgtcttca

SEQ ID NO: 670613 - DNA, 90 bp, Artificial Sequence
  ENSG00000185565_77 (sequence is synthesized)
gagtgaataagtttcatgagatctgatagttctataaaggggagtttccctgcatgagctctccctttgcctgctgccatccacgtaaga

SEQ ID NO: 670614 - DNA, 120 bp, Artificial Sequence
  ENSG00000185565_78 (sequence is synthesized)
ttgccttctgccatgattgtgaggctcccccagccatgtggaactgtaagtgaaaagatatcttctgaagtgttctccagaaactgtgcaggtggcggttctcttagaagaaaaagaaag

SEQ ID NO: 670615 - DNA, 120 bp, Artificial Sequence
  ENSG00000185565_79 (sequence is synthesized)
ggttctcttagaagaaaaagaaaggcagggatccttgaaatggtaatatttcagttgtttcatatacatagaagtgtctcacatggccagcaaggactgcctgttcgcagcgtggatttt

SEQ ID NO: 670616 - DNA, 120 bp, Artificial Sequence
  ENSG00000185565_80 (sequence is synthesized)
ccgtgcacttcaagcaaaaagtcctgctgcagctgaattttgctccttgagtcaacattaaaagccttgacccatttcacaaatcaatgcctttgattcaggacctgggtcggtgagagg

SEQ ID NO: 670617 - DNA, 120 bp, Artificial Sequence
  ENSG00000185565_81 (sequence is synthesized)
gggtcaccaatgccagcctagtccttttcaaacgtgttttacccacaatcccccaccccattcaagaaattggtaccaccgtgcacttcaagcaaaaaggacctgggtcggtgagaggaa

SEQ ID NO: 670618 - DNA, 120 bp, Artificial Sequence
  ENSG00000185565_82 (sequence is synthesized)
attaaattgacttttcacatgaaaaacgtgaaaaccattcccttagctattaaaagttcacttaaaaacaaataaggatatatgcactgaaacaaaaatacagggttctcaactcctgtg

SEQ ID NO: 670619 - DNA, 120 bp, Artificial Sequence
  ENSG00000185565_83 (sequence is synthesized)
catagcagagatttataaatggaacaacttctctctatagtctttcttacttctgataactgccttgttgtttgtttttcttcgtttttgttttttgttttttcctggttagttaaatga

SEQ ID NO: 670620 - DNA, 80 bp, Artificial Sequence
  ENSG00000185567_0 (sequence is synthesized)
cgtgcgccggagccgggaccagcgactggacgcgacgggccgccaggcccgcaccgcctggccgccgcgatgtgcgactg

SEQ ID NO: 670621 - DNA, 120 bp, Artificial Sequence
  ENSG00000185567_1 (sequence is synthesized)
accgcctggccgccgcgatgtgcgactgcttccacatggtgctgcccacctggcccggaacccccggcagcgtgtccggccgtcagctgcagcccggggagccaggtgcagaaacggaag

SEQ ID NO: 670622 - DNA, 120 bp, Artificial Sequence
  ENSG00000185567_2 (sequence is synthesized)
atgaccactctgtgactgaagggcctgcggatgagggcattcgaccacggccgcaggggtcttcacctgtctacgaatacacgactgaggctgccgactttggactccaggaagacgccc

SEQ ID NO: 670623 - DNA, 120 bp, Artificial Sequence
  ENSG00000185567_3 (sequence is synthesized)
ccggcaggcaaggttctgctgggagacggagatcctggtggaagcgagattcaggggactcacggacatttttcaggatgagtcgtccagaggctgtccaggaggcaacagaggtgacgc

SEQ ID NO: 670624 - DNA, 120 bp, Artificial Sequence
  ENSG00000185567_4 (sequence is synthesized)
tgaagacagaggtggaggcaggagccagtggctacagtgtcacaggtggtggggaccaggggatcttcgtcaagcaagtgctgaaggactcctcagccgccaagctttttaacttgagag

SEQ ID NO: 670625 - DNA, 120 bp, Artificial Sequence
  ENSG00000185567_5 (sequence is synthesized)
aaggggatcagctgctcagtacaaccgtgttctttgaaaacataaaatatgaagatgctctcaaaatccttcaatattcagagccgtacaaggttcagttcaaaatcagacggcagctcc

SEQ ID NO: 670626 - DNA, 120 bp, Artificial Sequence
  ENSG00000185567_6 (sequence is synthesized)
ctgccccacaggatgaagagtgggcttccagcgatgcccagcacggcccacagggcaaggagaaggaggacacggatgttgctgatgggtgcagagagacccccacgaaaactctggaag

SEQ ID NO: 670627 - DNA, 120 bp, Artificial Sequence
  ENSG00000185567_7 (sequence is synthesized)
gagatggggaccaagagagactcatctccaaaccaagggtggggagaggcaggcagagccagagggagaggctctcttggccaaaatttcaatccataaagagcaagcgggggccgggac

SEQ ID NO: 670628 - DNA, 120 bp, Artificial Sequence
  ENSG00000185567_8 (sequence is synthesized)
cccagaggtcacacagctcgtcagaggcctacgaacctagggacgcacatgacgtgtcccctacaagcacagacacagaggcccagctcacggtggagcgccaagagcagaaggcagggc

SEQ ID NO: 670629 - DNA, 120 bp, Artificial Sequence
  ENSG00000185567_9 (sequence is synthesized)
cgggcagccagaggaggcggaagttcctcaacctcagattcaggacaggctcgggacagggcccttcatcgacaggacagccaggcagggggttccagagtggggtgggccgtgctgggg

SEQ ID NO: 670630 - DNA, 120 bp, Artificial Sequence
  ENSG00000185567_10 (sequence is synthesized)
tcctggaagagttggggccctggggtgatagcctcgaggagactggggctgccacaggcagcaggagagaggagagggcagaacaggatcgagaagtgatgcctgctcagagcatgccat

SEQ ID NO: 670631 - DNA, 120 bp, Artificial Sequence
  ENSG00000185567_11 (sequence is synthesized)
tgcccacagagctcggtgaccctagactttgcgagggaacccctcaggaagggggactcagggcagccaggctccatggaaagaccctggaggggcaggcacaggagacagcagtggccc

SEQ ID NO: 670632 - DNA, 120 bp, Artificial Sequence
  ENSG00000185567_12 (sequence is synthesized)
agaggaagcccagggcccagccaactcctggaatgagccgggagggtgaaggcgagggactgcagagcctggaaatcgggatcgccagactgtccttgagagacacaaccgaaggaggca

SEQ ID NO: 670633 - DNA, 120 bp, Artificial Sequence
  ENSG00000185567_13 (sequence is synthesized)
cacagattggcccaccagaaattagggtgcgagtacacgatttaaagacaccaaaatttgcattttccacagaaaaagagccagaaagagaaaggcgccttagtaccccacagcgaggga

SEQ ID NO: 670634 - DNA, 120 bp, Artificial Sequence
  ENSG00000185567_14 (sequence is synthesized)
agagacaggatgcgtcctcaaaagcgggtactggcctgaagggtgaggaggtggaaggagccgggtggatgccgggcagggaaccaaccacacatgcagaagcacagggggatgaaggag

SEQ ID NO: 670635 - DNA, 120 bp, Artificial Sequence
  ENSG00000185567_15 (sequence is synthesized)
atggagaggaaggactacagaggacaaggatcactgaggaacaggacaagggcagggaagacacagaaggacagataagaatgcccaagttcaagataccctccttaggatggtcgccaa

SEQ ID NO: 670636 - DNA, 120 bp, Artificial Sequence
  ENSG00000185567_16 (sequence is synthesized)
gcaagcacacaaagacaggcagagaaaaagccacagaagacacagagcagggaagggaaggagaggccacagcaacagctgatagaagagaacagagacgcacagaggaaggattaaaag

SEQ ID NO: 670637 - DNA, 120 bp, Artificial Sequence
  ENSG00000185567_17 (sequence is synthesized)
acaaagaagacagtgactcaatgacaaacacaacaaaaatacaactaatacacgatgaaaaacgcttaaaaaaggaacaaattctgacagaaaaggaagtggccaccaaagacagcaagt

SEQ ID NO: 670638 - DNA, 120 bp, Artificial Sequence
  ENSG00000185567_18 (sequence is synthesized)
tcaaaatgcccaagttcaagatgccattgttcggggcgtcagccccaggcaagtccatggaggcctcggtggatgtgtctgcgccgaaggtggaggccgacgtgagcctcctctccatgc

SEQ ID NO: 670639 - DNA, 120 bp, Artificial Sequence
  ENSG00000185567_19 (sequence is synthesized)
agggggacctcaagaccactgacctcagcgtccagaccccttccgctgacctggaggtccaggatggccaagtggatgtgaaacttccggagggccccctgcccgagggagccagcctca

SEQ ID NO: 670640 - DNA, 120 bp, Artificial Sequence
  ENSG00000185567_20 (sequence is synthesized)
aagggcacctgcccaaggtgcagaggcccagtttgaagatgcccaaagtggacctcaagggccccaagctggacctgaaaggccccaaggcggaagtgacagcccccgatgtgaagatgt

SEQ ID NO: 670641 - DNA, 120 bp, Artificial Sequence
  ENSG00000185567_21 (sequence is synthesized)
ctctgtccagcatggaggtggacgtccaggccccgagagcaaagctggatggtgcgcggctggagggggacctgtccctggccgacaaggaggtgactgccaaagacagcaagttcaaaa

SEQ ID NO: 670642 - DNA, 120 bp, Artificial Sequence
  ENSG00000185567_22 (sequence is synthesized)
tgcccaagttcaagatgccatcattcggggtgtcggccccaggcaagtccatggaggactcggtggatgtgtctgcgccgaaggtggaggccgacgtgagcctctcctccatgcaggggg

SEQ ID NO: 670643 - DNA, 120 bp, Artificial Sequence
  ENSG00000185567_23 (sequence is synthesized)
acctcaaggccactgacctcagcattcagcccccttccgctgacctggaggtccaggctggccaagtggatgtgaaacttccggagggccctgtgcccgagggagccggccccaaagtgc

SEQ ID NO: 670644 - DNA, 120 bp, Artificial Sequence
  ENSG00000185567_24 (sequence is synthesized)
acctgcccaaagtggagatgcccagtttcaagatgcccaaagtggacctcaagggcccccagatagatgttaagggccccaagctggacctgaaaggccccaaggcggaagtgacagccc

SEQ ID NO: 670645 - DNA, 120 bp, Artificial Sequence
  ENSG00000185567_25 (sequence is synthesized)
ccgatggcgaggtgtctctgcccagcatggaggtggatgtccaggcccagaaggccaagctggatggtgcgtggctggagggggacctgtccctggccgacaaggacgtgactgccaaag

SEQ ID NO: 670646 - DNA, 120 bp, Artificial Sequence
  ENSG00000185567_26 (sequence is synthesized)
ttcaaaatgcccaagttcaagatgccgtcgttcggggtatcggccccagggaagtccatcaaggccttggtggatgtgtctgcacccaaggtggaggccgacctgagtctcccctccatg

SEQ ID NO: 670647 - DNA, 120 bp, Artificial Sequence
  ENSG00000185567_27 (sequence is synthesized)
cctccatgcagggggacctgaagaccactgacctcagcattcagcctgcttctactgacctgaaggtccaggctgaccaggtggatgtgaagctcccggagggccacctgcccgagggag

SEQ ID NO: 670648 - DNA, 120 bp, Artificial Sequence
  ENSG00000185567_28 (sequence is synthesized)
ctggccttaaagggcacttgcccaaggtggagatgcccagtttcaagatgcccaaagtggccctcaagggcccccaggtggacgtcaagggccccaagctggacctgaaaagccccaagg

SEQ ID NO: 670649 - DNA, 120 bp, Artificial Sequence
  ENSG00000185567_29 (sequence is synthesized)
cggaagtcacagcccctgatgtggaggtgtctctgcccagcgtggaggtggacgtcgaggccccgggagccaagctggacagtgcgcggctggagggggaactgtccctggccgacaagg

SEQ ID NO: 670650 - DNA, 120 bp, Artificial Sequence
  ENSG00000185567_30 (sequence is synthesized)
atgtgactgccaaagacagcaggttcaaaatgcccaagttcaagatgccatcgttcggggcgtcagccccaggcaagtccatcgaggcctcggtggatgtgtctgcacccaaagtggagg

SEQ ID NO: 670651 - DNA, 120 bp, Artificial Sequence
  ENSG00000185567_31 (sequence is synthesized)
ccgacgtgagtctcccctccatgcagggggacctcaagaccactgacctcagcattcagcccccttccgctgacctggaggtccacgctggccaggtggacgtgaagctcctggagggcc

SEQ ID NO: 670652 - DNA, 120 bp, Artificial Sequence
  ENSG00000185567_32 (sequence is synthesized)
acgtgcctgagggagccggcttcaaagggcacctgcccaaggtgcagatgcctagtttgaagatgcccaaagtggacctcaagggcccccaggtggaagtcaggggccccaagctggacc

SEQ ID NO: 670653 - DNA, 120 bp, Artificial Sequence
  ENSG00000185567_33 (sequence is synthesized)
tgaaaggtcataaggcagaggtgacggcccacgaagtggctgtgtctctgcccagtgtggaggtggacatgcaggccccgggagccaagttggatggcgcacagctggacggggacctgt

SEQ ID NO: 670654 - DNA, 120 bp, Artificial Sequence
  ENSG00000185567_34 (sequence is synthesized)
agttcaaaatgcccaagttcaagatgccgtcgttcggggtgtctgccccaggcaagtccattgaggcctccgtggacctgtctgcacccaaggtggaggccgacatgagcctcccctcca

SEQ ID NO: 670655 - DNA, 120 bp, Artificial Sequence
  ENSG00000185567_35 (sequence is synthesized)
cacccaaggtggaggccgacatgagcctcccctccatgcagggggacctcaagaccactgacctcagcattcagcccccttccactgacctggagctccaggctggccaattggacgtga

SEQ ID NO: 670656 - DNA, 120 bp, Artificial Sequence
  ENSG00000185567_36 (sequence is synthesized)
aactcccagagggccccgtgcccgagggagccggcctcaaagggcacctgcccaagctgcagatgcccagtttcaaggtgcccaaagtggacctcaagggccctgaaatagacatcaagg

SEQ ID NO: 670657 - DNA, 120 bp, Artificial Sequence
  ENSG00000185567_37 (sequence is synthesized)
gccccaagctggacctaaaagaccccaaggtggaagtgacagcccctgatgtggaggtttctctgcccagcgtggaggtggatgtcgaggccccaggagccaagctggatggtggacggc

SEQ ID NO: 670658 - DNA, 80 bp, Artificial Sequence
  ENSG00000185567_38 (sequence is synthesized)
tcgttcggggtgtctgccccaggcaagtccatcgaggcctcagtggatgtgtctgcgccgaaggtggaggccgacgtgag

SEQ ID NO: 670659 - DNA, 120 bp, Artificial Sequence
  ENSG00000185567_39 (sequence is synthesized)
cagtggatgtgtctgcgccgaaggtggaggccgacgtgagcctcccctccatgcagggggacctcaaggccactgacctgagcatacagcccccttctgctgacctggaggtccaggctg

SEQ ID NO: 670660 - DNA, 120 bp, Artificial Sequence
  ENSG00000185567_40 (sequence is synthesized)
gccaagtggacgtgaaactcccagagggccctgtgtccgagggagccggcctcaaagggcacctgcccaaagtgcagatgcccagtttcaagatgcccaaagtggacctcaaggggcccc

SEQ ID NO: 670661 - DNA, 120 bp, Artificial Sequence
  ENSG00000185567_41 (sequence is synthesized)
agatagatgttaagggccccaagctggacctgaaaggccccaaggtggaagtgacagcccccgatgtgaagatgtctctgtccagcatggaggtggacgtccaggccccgagagcaaagc

SEQ ID NO: 670662 - DNA, 86 bp, Artificial Sequence
  ENSG00000185567_42 (sequence is synthesized)
tccagcatggaggtggacgtccaggccccgagagcaaagctggatggtgcgcagctggagggggacctgtccctggccgacaaggc

SEQ ID NO: 670663 - DNA, 120 bp, Artificial Sequence
  ENSG00000185567_43 (sequence is synthesized)
agtccatcgaggcctcggtggatgtgtctgagccgaaggtggaagctgatgtgagcctcccctccatgcagggggacctgaagaccactgacctcagcattcagtccccttccgccgacc

SEQ ID NO: 670664 - DNA, 120 bp, Artificial Sequence
  ENSG00000185567_44 (sequence is synthesized)
tggaggtccaggctggccaagtgaacgtgaaactcccggagggcccccttcccgagggagccggcttcaaagggcacctccccaaggtgcagatgcccagtttgaagatgcccaaagtgg

SEQ ID NO: 670665 - DNA, 120 bp, Artificial Sequence
  ENSG00000185567_45 (sequence is synthesized)
ccctcaagggcccccagatggacgtcaagggccccaagctggacctgaaaggccccaaggcggaggtgatggcccccgacgtggaggtgtctctgcccagcgtggaggtggacgtcgagg

SEQ ID NO: 670666 - DNA, 120 bp, Artificial Sequence
  ENSG00000185567_46 (sequence is synthesized)
gtctctgcccagcgtggaggtggacgtcgaggctccaggagccaagctggacagtgtgcggctggagggtgacctgtccctggccgacaaggatgtgactgccaaagacagcaagttcaa

SEQ ID NO: 670667 - DNA, 120 bp, Artificial Sequence
  ENSG00000185567_47 (sequence is synthesized)
tgtctgccccaggcaagtccatcgaggcctcggtggatgtgtctgcgccgaaggtggaggccgaagtgagcctcccctccatgcagggggacctcaagaccacggacctctgcattccgc

SEQ ID NO: 670668 - DNA, 120 bp, Artificial Sequence
  ENSG00000185567_48 (sequence is synthesized)
tcccttctgcagacctggtggtccaggctggccaagtggacatgaagctcccggagggccaggtgcccgagggagccggcctcaaagggcacttgcccaaggtggatatgcccagtttca

SEQ ID NO: 670669 - DNA, 120 bp, Artificial Sequence
  ENSG00000185567_49 (sequence is synthesized)
agatgcccaaagtggacctcaagggcccccagacagatgttaagggcgccaagctggacctgaaaggccccaaggcggaagtgacagcccccgatgtcgaggtgtctctgcccagcatgg

SEQ ID NO: 670670 - DNA, 120 bp, Artificial Sequence
  ENSG00000185567_50 (sequence is synthesized)
tctctgcccagcatggaggtggatgtccaggcccagaaggctaagctggatggtgcgcggctggagggagacctgtccctggccgacaaggacatgactgccaaagacagcaagttcaaa

SEQ ID NO: 670671 - DNA, 120 bp, Artificial Sequence
  ENSG00000185567_51 (sequence is synthesized)
tgccgtcgttcggggtatcggccccagggaggtccatcgaggcctcggtggatgtgcctgcacccaaggtggaggccgacgtgagtctcccctccatgcagggggacctgaagaccactg

SEQ ID NO: 670672 - DNA, 120 bp, Artificial Sequence
  ENSG00000185567_52 (sequence is synthesized)
acctcagcattcagcccccttctgccgacctgaaggtccagactggccaggtggatgtgaagctcccggagggccacgtgcccgagggagctggcctcaaagggcacctgcccaaggtgg

SEQ ID NO: 670673 - DNA, 120 bp, Artificial Sequence
  ENSG00000185567_53 (sequence is synthesized)
agatgcccagtttgaagatgcccaaagtggacctcaagggcccccaggtggacatcaagggccccaaactggacctaaaagaccccaaggtggaaatgagagtccccgatgtcgaggtgt

SEQ ID NO: 670674 - DNA, 120 bp, Artificial Sequence
  ENSG00000185567_54 (sequence is synthesized)
ctctgcccagcatggaggtggacgtccaggccccaagagccaagctggatagtgcgcatctgcagggggacctgaccctggccaacaaggacctgactaccaaagacagcaagttcaaaa

SEQ ID NO: 670675 - DNA, 120 bp, Artificial Sequence
  ENSG00000185567_55 (sequence is synthesized)
tgcccaagttcaagatgccgtcgtttggggtgtctgccccaggcaagtccatcgaggcctcggtggatgtgtctccacccaaggtggaggccgacatgagtctcccctccatgcaggggg

SEQ ID NO: 670676 - DNA, 120 bp, Artificial Sequence
  ENSG00000185567_56 (sequence is synthesized)
acctcaagaccactgacctcagcattcagcccctttccgccgacgtgaaggtccaggctggccaggtggacgtgaaactcctggagggccctgtgcccgaggaagtcggcctcaaagggc

SEQ ID NO: 670677 - DNA, 120 bp, Artificial Sequence
  ENSG00000185567_57 (sequence is synthesized)
acctgcccaagctgcagatgcccagtttcaaggtgcccaaagtggacctcaagggccccgaaatagacatcaagggccccaagctggacctaaaagaccccaaggtggaagtgacagccc

SEQ ID NO: 670678 - DNA, 120 bp, Artificial Sequence
  ENSG00000185567_58 (sequence is synthesized)
ctgatgtggaggtgtctctgcccagcgtggaggtggacgtcaaggccccaggagccaagctggatggtgcgcggctggagggggacatgtccctggccgacaaggacgtgactgccaaag

SEQ ID NO: 670679 - DNA, 120 bp, Artificial Sequence
  ENSG00000185567_59 (sequence is synthesized)
ttcaaaatgcccaagttcaagatgctgtcgtttggggtgtctgcccttggcaagtccatcgaggcctcagcggatgtgtctgcgttgaaggtggaggccgacgtgagcctcccctccatg

SEQ ID NO: 670680 - DNA, 120 bp, Artificial Sequence
  ENSG00000185567_60 (sequence is synthesized)
cctccatgcagggggacctcaagaccactgacctcagcgttcagcccccttccgctgacctggaggtccaggctggccaagtggatgtgaaactcccagagggccccgtgccggagggag

SEQ ID NO: 670681 - DNA, 120 bp, Artificial Sequence
  ENSG00000185567_61 (sequence is synthesized)
ccggcctcaaagggcacctgcccaagctgcagatgcccagtttcaagatgcccaaagtagatctcaagggcccccagatagatgtcaagggccccaagctggacctgaaaggccccaaga

SEQ ID NO: 670682 - DNA, 120 bp, Artificial Sequence
  ENSG00000185567_62 (sequence is synthesized)
cggacgtgatggcccccgacgtggaggtgtctcagcccagcgtggaggtggatgtcgaggccccgggagccaagctggatggtgcgtggctggagggggacctgtctgtggcggacaagg

SEQ ID NO: 670683 - DNA, 120 bp, Artificial Sequence
  ENSG00000185567_63 (sequence is synthesized)
atgtgactaccaaagacagcaggttcaaaattcccaagttcaagatgccgtcattcggggtgtctgccccaggcaagtccatcgaggcctcggtggatgtgtctgcgccgaaggtggagg

SEQ ID NO: 670684 - DNA, 120 bp, Artificial Sequence
  ENSG00000185567_64 (sequence is synthesized)
ccgacgggagcctctcctccatgcagggggacctcaaggccactgacctcagcattcagcccccttccgctgacctggaggtccaggctggccaagtggacgtgaaactcccagagggcc

SEQ ID NO: 670685 - DNA, 120 bp, Artificial Sequence
  ENSG00000185567_65 (sequence is synthesized)
ctgtgccggagggagccggcctcaaagggcacctgcccaaggtgcagatgcccagtttcaagatgcctgaaatggacctcaagggcccccagctagatgtcaagggccccaagctggacc

SEQ ID NO: 670686 - DNA, 120 bp, Artificial Sequence
  ENSG00000185567_66 (sequence is synthesized)
tgaaaggccccaaggcggaagtgacagcccccgatgtggagatgtctctgtccagcatggaggtggacgtccaggccccgagagcaaagctggatggtgcgcggctggagggggacctgt

SEQ ID NO: 670687 - DNA, 120 bp, Artificial Sequence
  ENSG00000185567_67 (sequence is synthesized)
agttcaaaatgcccaagttcaagatgccatcattcagggtgtcggccccaggcgagtccatcgaggcgttggtggatgtgtctgagctgaaggtggaagccgacatgagcctcccctcca

SEQ ID NO: 670688 - DNA, 120 bp, Artificial Sequence
  ENSG00000185567_68 (sequence is synthesized)
agctgaaggtggaagccgacatgagcctcccctccatgcaaggggaccttaagaccactgacatcagcattcagcccccctctgcccaactggaggtccaggctggccaggtggatgtga

SEQ ID NO: 670689 - DNA, 120 bp, Artificial Sequence
  ENSG00000185567_69 (sequence is synthesized)
aactcccagagggccacgttcccgagggagccggcctcaaagggcacctgcccaagctgcagatgcccagtttcaagatgcctgaagtggacctcaagggcccccagatagatgttaagg

SEQ ID NO: 670690 - DNA, 120 bp, Artificial Sequence
  ENSG00000185567_70 (sequence is synthesized)
gccccaacgtggacctgaaaggccccaaggcggaagtgacagcccccgatgtgaagatgtctctgtccagcatggaggtggacgtccaggccccgagagcaaagctggatggtgcgcggc

SEQ ID NO: 670691 - DNA, 80 bp, Artificial Sequence
  ENSG00000185567_71 (sequence is synthesized)
tcattcggggtgtcggccccaggcaagtccatcgaggcctcggtggatgtgtctgagctgaaggtggaagctgacgggag

SEQ ID NO: 670692 - DNA, 120 bp, Artificial Sequence
  ENSG00000185567_72 (sequence is synthesized)
cggtggatgtgtctgagctgaaggtggaagctgacgggagcttcccctccatgcaaggggatcttaagaccactgacatccgcattcagcccccctccgcccaactggaggtccaggctg

SEQ ID NO: 670693 - DNA, 120 bp, Artificial Sequence
  ENSG00000185567_73 (sequence is synthesized)
gccaggtggacgtgaaactcccagagggccacgttcccgagggagccggcctcaaagggcacctgcccaaggtgcagatgcccagtttcaagatgcccaaagtggatctcaagggccccc

SEQ ID NO: 670694 - DNA, 120 bp, Artificial Sequence
  ENSG00000185567_74 (sequence is synthesized)
agatagacgtcaagggccccaagctggacctgaaaggccccaaggcggaggtgacggcccccgacgtggaggtgtctctgcccagcgtggaggtggacgtcgaggccccgagagcaaagc

SEQ ID NO: 670695 - DNA, 86 bp, Artificial Sequence
  ENSG00000185567_75 (sequence is synthesized)
cccagcgtggaggtggacgtcgaggccccgagagcaaagctggatggtgcacggctggagggtgacctgtccctggccgacaagga

SEQ ID NO: 670696 - DNA, 120 bp, Artificial Sequence
  ENSG00000185567_76 (sequence is synthesized)
agcattgagcccccctctgcccaactggaggtccaggctggccaggtggacctgaagctcccagagggccacgttcccgagggagctggcctcaaagggcacctgcccaagttgcagatg

SEQ ID NO: 670697 - DNA, 120 bp, Artificial Sequence
  ENSG00000185567_77 (sequence is synthesized)
cccagtttcaagatgcccaaagtagatcgcaagggaccccagatagatgtcaagggccccaagctggacctgaaaggcccgaagacggacgtgacggcccccgacgtggaggtgtctcag

SEQ ID NO: 670698 - DNA, 120 bp, Artificial Sequence
  ENSG00000185567_78 (sequence is synthesized)
tgtctcagcccggcatggaggtggatgtcgaggccccaggagccaagttggatggtgcacggctggagggggacctgtccctggccgacaaggatgtgactgccaaagacagcaagttca

SEQ ID NO: 670699 - DNA, 120 bp, Artificial Sequence
  ENSG00000185567_79 (sequence is synthesized)
aagttcaagatgccgtcgttcggggtgtctgccccaggcaagtccattgaggtcttggtggatgtgtctgcgccaaaggtggaggccgacctgagcctcccctccatgcagggggacctg

SEQ ID NO: 670700 - DNA, 120 bp, Artificial Sequence
  ENSG00000185567_80 (sequence is synthesized)
aagaacactgacatcagcattgagcccccctctgcccaactggaggtccaggctggccaggtggacgtgaagctcccagagggccacgttctcgagggagctggcctcaaagggcacctg

SEQ ID NO: 670701 - DNA, 120 bp, Artificial Sequence
  ENSG00000185567_81 (sequence is synthesized)
cccaagttgcagatgcccagtttcaagatgcccaaagtagatcgcaagggcccccagatagacatcaagggccccaagctggacctgaaaggcccgaagatggatgtgacggcccccgac

SEQ ID NO: 670702 - DNA, 120 bp, Artificial Sequence
  ENSG00000185567_82 (sequence is synthesized)
gtggaggtgtctcagcccagcatggaggtggacgtcgaggccccaggagccaagttggatggtgcacggctggagggggacctgtccctggccgacaaggatgtgactgccaaagacagc

SEQ ID NO: 670703 - DNA, 120 bp, Artificial Sequence
  ENSG00000185567_83 (sequence is synthesized)
aagttcaaaatgcccaaattcaagatgccgtcgtacagggcgtctgccccaggcaagtccatccaggcctcggtggatgtgtctgcgccgaaggcggaggccgacgtgagcctcccctcc

SEQ ID NO: 670704 - DNA, 120 bp, Artificial Sequence
  ENSG00000185567_84 (sequence is synthesized)
atgcagggggacctcaagaccactgacctcagcattcagctcccttctgtggacctggaggtccaggctggccaggtggacgtgaagctcccggagggccacgtgcccgagggagctggc

SEQ ID NO: 670705 - DNA, 120 bp, Artificial Sequence
  ENSG00000185567_85 (sequence is synthesized)
ctcaaagggcacctgcccaaggtggagatgcccagtttcaagatgcccaaagtggacctcaagagcccccaggtggacatcaagggccccaagctggacctaaaagtccccaaggcggaa

SEQ ID NO: 670706 - DNA, 120 bp, Artificial Sequence
  ENSG00000185567_86 (sequence is synthesized)
gtgacagtccctgatgtggaggtgtctctgcccagcgtggaggtggacgtccaggccccgagagccaagctggatggtgcgcggctggagggggacctgtccctggctgaaaaggatgtg

SEQ ID NO: 670707 - DNA, 120 bp, Artificial Sequence
  ENSG00000185567_87 (sequence is synthesized)
agttcaaaatgcccaagttcaagatgccctccttcggggtgtcggccccaggcaggtccatcgaggcctcgctggatgtgtctgcgccgaaggtggaggccgacgtgagcctctcctcca

SEQ ID NO: 670708 - DNA, 120 bp, Artificial Sequence
  ENSG00000185567_88 (sequence is synthesized)
gtgagcctctcctccatgcagggggacctcaaggccactgacctcagcattcagcccccttccgctgacctggaggtccaggctgtccaagtggatgtggaactcctggagggccccgtg

SEQ ID NO: 670709 - DNA, 120 bp, Artificial Sequence
  ENSG00000185567_89 (sequence is synthesized)
cccgagggagccggcctcaaagggcacctgcccaaagtggagatgcccagtttaaagacgcccaaagtggacctcaagggcccccagatagatgttaagggccccaagctggacctgaaa

SEQ ID NO: 670710 - DNA, 120 bp, Artificial Sequence
  ENSG00000185567_90 (sequence is synthesized)
ggccccaaggcagaagtgagagtccccgatgtcgaggtgtctctgcccagcgtggaggtggatgtccaggccccgaaggccaagctggatgctgggcggctggagggagacctgtccctg

SEQ ID NO: 670711 - DNA, 120 bp, Artificial Sequence
  ENSG00000185567_91 (sequence is synthesized)
caaagacagcaagttcaaaatgcccaaattcaagatgccgtcattcagggtatcggccccagggaagtccatggaggcctcggtggatgtgtctgcacccaaggtggaagccgatgtgag

SEQ ID NO: 670712 - DNA, 120 bp, Artificial Sequence
  ENSG00000185567_92 (sequence is synthesized)
aaggtggaagccgatgtgagtctcccctccatgcagggggacctgaagaccactgacctcagcattcagcccccttctgccgacctgaaggtccaggctggccagatggatgtgaagctc

SEQ ID NO: 670713 - DNA, 120 bp, Artificial Sequence
  ENSG00000185567_93 (sequence is synthesized)
ccggagggccaggtgcccgagggagccggcctcaaagagcacctgcccaaggtggagatgcccagtttgaagatgcccaaagtggacctcaagggcccccaggtggacatcaagggcccc

SEQ ID NO: 670714 - DNA, 120 bp, Artificial Sequence
  ENSG00000185567_94 (sequence is synthesized)
aagctggacctaaaagtctccaaggcggaagtcacagcccctgatgtggaggtgtctctgcccagcgtggaggtggacgtccaggccccaagagccaaactggatagtgcacagctggag

SEQ ID NO: 670715 - DNA, 120 bp, Artificial Sequence
  ENSG00000185567_95 (sequence is synthesized)
ggggacctgtccctggccgacaaggatgtgactgccaaagacagcaaattcaaaatgcccaagttcaagatgccgtcatttggggtgtctgccccaggcaagtccattgaggcctcggtg

SEQ ID NO: 670716 - DNA, 120 bp, Artificial Sequence
  ENSG00000185567_96 (sequence is synthesized)
cacgtgtctgcacccaaggtggaggccgatgtgagtctcccctccatgcagggggacctcaagaccactgacctcagcattcagccccattctgccgacctgacggtccaagctcgccag

SEQ ID NO: 670717 - DNA, 120 bp, Artificial Sequence
  ENSG00000185567_97 (sequence is synthesized)
gtggacatgaaactcctggagggccacgtgcccgaggaagccggcctcaaaggacacctgcccaaggtgcagatgcccagtttcaagatgcccaaagtcgacctcaagggccctgaaata

SEQ ID NO: 670718 - DNA, 120 bp, Artificial Sequence
  ENSG00000185567_98 (sequence is synthesized)
gacatcaagggccccaagctggacctaaaagaccccaaggtggaagtgacagcccctgatgtggaggtttctctgcccagcgtggaggtggacgtcgaggccccaggagccaagctggat

SEQ ID NO: 670719 - DNA, 87 bp, Artificial Sequence
  ENSG00000185567_99 (sequence is synthesized)
cgtggaggtggacgtcgaggccccaggagccaagctggatggtgcgcggctggagggggacctgtccctggccgacaaggacatgac

SEQ ID NO: 670720 - DNA, 120 bp, Artificial Sequence
  ENSG00000185567_100 (sequence is synthesized)
atggaggcatcagtggatgtgaccgcgccaaaggtggaggccgacgtgagcctcccttccatgcagggggacctcaaggccactgacctcagcgttcagcccccttccgctgacctggag

SEQ ID NO: 670721 - DNA, 120 bp, Artificial Sequence
  ENSG00000185567_101 (sequence is synthesized)
gtccaggctggccaagtggacgtgaaactcccagagggccccgtgcccgagggagccagcctcaaagggcacctgcccaaggtgcagatgcccagtttcaagatgcccaaagtggacctc

SEQ ID NO: 670722 - DNA, 120 bp, Artificial Sequence
  ENSG00000185567_102 (sequence is synthesized)
aagggcccccagatagatgttaagggccccaagctggacctgaaaggccccaaggcggaagtgacagcccctgatgtgaagatgtctctgtccagcatggaggtggacgtccaggccccg

SEQ ID NO: 670723 - DNA, 120 bp, Artificial Sequence
  ENSG00000185567_103 (sequence is synthesized)
tctctgtccagcatggaggtggacgtccaggccccgagagcaaagctggatggtgtgcagctggagggggacctgtccctggccgacaaggatgtgactgccaaagacagcaagttcaaa

SEQ ID NO: 670724 - DNA, 120 bp, Artificial Sequence
  ENSG00000185567_104 (sequence is synthesized)
gccccaggcaagtccatggaggcgtccgtggatgtgtctgagctgaaggcgaaagccgacgtgagcctcccctccatgcagggggacctcaagaccactgacctcagcattcagtcccct

SEQ ID NO: 670725 - DNA, 120 bp, Artificial Sequence
  ENSG00000185567_105 (sequence is synthesized)
tccgccgacctggaggtccaggctggccaagtggacgtgaaactcccggagggccccctgcccaagggagccggcctcaaagggcacctccccaaggtgcagatgccctgtttgaagatg

SEQ ID NO: 670726 - DNA, 120 bp, Artificial Sequence
  ENSG00000185567_106 (sequence is synthesized)
cccaaagtggccctcaagggcccccaggtggatgtcaagggccccaagctggacctgaaaggccccaaggcggatgtgatgacccccgtcgtggaggtgtctctgcccagcatggaggtg

SEQ ID NO: 670727 - DNA, 120 bp, Artificial Sequence
  ENSG00000185567_107 (sequence is synthesized)
ctctgcccagcatggaggtggacgtcgaggccccgggagccaagctggacagtgtgcggctggagggtgacctgtccctagccgacaaggacatgactgccaaagacagcaagttcaaaa

SEQ ID NO: 670728 - DNA, 120 bp, Artificial Sequence
  ENSG00000185567_108 (sequence is synthesized)
tcgttcggggtgtctgccccaggcaagtccatcgaggcctcgttggatgtgtctgcgctgaaggtggaggctgacgtgagcctcccctccatgcagggggacctgaagaccactcacctc

SEQ ID NO: 670729 - DNA, 120 bp, Artificial Sequence
  ENSG00000185567_109 (sequence is synthesized)
agcattcagcccccttccgctgatctggaggtccaggctggccaagaggatgtgaaactcccagagggccctgtgcatgagggagccggcctcaaagggcacctgccgaagctgcagatg

SEQ ID NO: 670730 - DNA, 120 bp, Artificial Sequence
  ENSG00000185567_110 (sequence is synthesized)
cccagtttcaaggtacccaaagtggacctcaagggtccccagatagacgttaatgtccccaagctggacctgaaaggccccaaggtggaggtgacgtcccccaacctggacgtgtctctg

SEQ ID NO: 670731 - DNA, 120 bp, Artificial Sequence
  ENSG00000185567_111 (sequence is synthesized)
tgtctctgcccagcatggaggtggacatccaagccccaggagccaagctggacagtacgcggctggagggggacctgtccctggctgacaaggacgtgactgccaaagacagcaagttca

SEQ ID NO: 670732 - DNA, 120 bp, Artificial Sequence
  ENSG00000185567_112 (sequence is synthesized)
aagttcaagatgccatcctttgggatgttgtccccaggcaagtccatcgaggtctcggtggatgtgtctgcgccaaagatggaggccgacatgagcattccctccatgcagggggacctc

SEQ ID NO: 670733 - DNA, 120 bp, Artificial Sequence
  ENSG00000185567_113 (sequence is synthesized)
aagaccactgacctccgcattcaggccccttccgccgacctggaggtccaggctggccaggtggacttgaaacttccagaaggccacatgcccgaggtagccggcctcaaagggcacctg

SEQ ID NO: 670734 - DNA, 120 bp, Artificial Sequence
  ENSG00000185567_114 (sequence is synthesized)
cccaaggtggagatgcccagtttcaagatgcccaaagtggacctcaagggcccccaggtggacgtcaagggccccaagctggacctgaaaggcccaaaggcagaggtgatggcccccgat

SEQ ID NO: 670735 - DNA, 120 bp, Artificial Sequence
  ENSG00000185567_115 (sequence is synthesized)
gtggaggtgtctctgcccagcgtggagacggatgtccaggccccaggatccatgctggatggtgcgcggcttgagggggacctgtccctggcccacgaggatgtagctgggaaagacagt

SEQ ID NO: 670736 - DNA, 120 bp, Artificial Sequence
  ENSG00000185567_116 (sequence is synthesized)
aagtttcaaggaccaaaactgagcacgtctggttttgaatggtcgtcaaagaaagtttccatgtcttcctctgaaatcgaaggaaatgttacattccatgagaagacttccacatttccc

SEQ ID NO: 670737 - DNA, 120 bp, Artificial Sequence
  ENSG00000185567_117 (sequence is synthesized)
attgtggaatctgttgttcatgaaggtgatcttcatgatccatctcgcgatggtaacttggggcttgctgttggagaagttggaatggattcgaagtttaagaaactgcattttaaagtg

SEQ ID NO: 670738 - DNA, 120 bp, Artificial Sequence
  ENSG00000185567_118 (sequence is synthesized)
cccaaagtttcattttcttctaccaaaactcctaaagatagtttagtcccaggtgcaaagtctagcataggtctttccacgattcctttatcatcttcagaatgctcaagttttgaatta

SEQ ID NO: 670739 - DNA, 120 bp, Artificial Sequence
  ENSG00000185567_119 (sequence is synthesized)
caacaggtttcggcttgttcagagccatccatgcagatgcctaaggtgggttttgctgggtttccatcatcccggcttgatctcactggtcctcactttgaatcttctattctctctccc

SEQ ID NO: 670740 - DNA, 120 bp, Artificial Sequence
  ENSG00000185567_120 (sequence is synthesized)
tgtgaggatgttacacttacaaaataccaggtgactgttcccagagctgccttggcccctgagcttgctctggaaattccttctgggtctcaggctgatattcctcttcccaagacagag

SEQ ID NO: 670741 - DNA, 120 bp, Artificial Sequence
  ENSG00000185567_121 (sequence is synthesized)
tgctccactgacctgcagcctccagagggagttccaacatctcaagctgagagtcactctggcccactgaattccatgattcctgtttctcttggtcaggtatcttttcctaaattctat

SEQ ID NO: 670742 - DNA, 120 bp, Artificial Sequence
  ENSG00000185567_122 (sequence is synthesized)
aaaccaaagtttgtgttttcagtcccccaaatggcagttcctgagggagacctacatgcagcagtgggtgccccagtcatgtctcctcttagccctggagaaagagtgcagtgccccttg

SEQ ID NO: 670743 - DNA, 120 bp, Artificial Sequence
  ENSG00000185567_123 (sequence is synthesized)
ccaagcacccagctgccatccccaggcacctgtgtgtctcagggcccagaagagcttgtggcctccttgcagacatcagtagtggcccctggagaagccccttctgaagatgctgaccac

SEQ ID NO: 670744 - DNA, 120 bp, Artificial Sequence
  ENSG00000185567_124 (sequence is synthesized)
gaagggaaagggagtcccttgaaaatgcctaagattaagcttccatcatttaggtggtccccgaagaaggaaacagggccaaaggtggacccagaatgcagcgtggaggactcaaaactc

SEQ ID NO: 670745 - DNA, 120 bp, Artificial Sequence
  ENSG00000185567_125 (sequence is synthesized)
agcctggttttagacaaggatgaagtggccccgcagtctgccatccacatggatctgcctcctgagagggatggagagaaggggaggagcacaaagcctggctttgccatgccaaaactt

SEQ ID NO: 670746 - DNA, 120 bp, Artificial Sequence
  ENSG00000185567_126 (sequence is synthesized)
gcacttcccaaaatgaaggcttctaagagtggggtcagcctgccacagagagacgtggatccttccctttctagtgccacagcagggggtagctttcaagacacagaaaaggccagcagt

SEQ ID NO: 670747 - DNA, 120 bp, Artificial Sequence
  ENSG00000185567_127 (sequence is synthesized)
gacggtggtaggggaggacttggtgcaacagcaagtgccacaggaagtgagggtgtgaacctccaccggccacaggtccacattcccagtttgggctttgccaaacctgatctcagatcc

SEQ ID NO: 670748 - DNA, 120 bp, Artificial Sequence
  ENSG00000185567_128 (sequence is synthesized)
tccaaggccaaggtggaggtgagccagcctgaagctgacctgcctcttcccaaacatgatctgtctaccgaaggtgacagcagaggatgtgggctcggggatgtcccagtgagccagcct

SEQ ID NO: 670749 - DNA, 120 bp, Artificial Sequence
  ENSG00000185567_129 (sequence is synthesized)
tgtggggaggggatagcccccacacctgaagatcccctccagccatcctgtagaaaaccagatgctgaagtcctcacagtggaaagcccagaggaggaagccatgaccaagtactcgcag

SEQ ID NO: 670750 - DNA, 120 bp, Artificial Sequence
  ENSG00000185567_130 (sequence is synthesized)
gaaagctggtttaaaatgcccaagttccgcatgcccagccttaggcgctctttcagggacagaggcggggctggaaagctggaagtggctcagacacaggcaccggcagcaacagggggt

SEQ ID NO: 670751 - DNA, 120 bp, Artificial Sequence
  ENSG00000185567_131 (sequence is synthesized)
gaagcagcagctaaagtcaaagagttccttgtttctgggtcaaacgtggaggcagctatgtccctacagctcccagaggcagatgcagaagtgacagcttctgagagcaaatcatccaca

SEQ ID NO: 670752 - DNA, 120 bp, Artificial Sequence
  ENSG00000185567_132 (sequence is synthesized)
gatattctaaggtgtgatcttgacagcacaggcttgaagctgcacctctccactgctgggatgactggggatgagctttccacttctgaggtcaggatccatccatccaaaggacctctc

SEQ ID NO: 670753 - DNA, 120 bp, Artificial Sequence
  ENSG00000185567_133 (sequence is synthesized)
ccttttcagatgcctggcatgaggcttccagaaacccaggttcttccaggagaaatagatgagactcctctttccaagccaggacatgaccttgccagcatggaggataaaacagagaaa

SEQ ID NO: 670754 - DNA, 120 bp, Artificial Sequence
  ENSG00000185567_134 (sequence is synthesized)
tggtcttcccagcctgaaggtccacttaaattgaaagcttcaagtactgatatgccatcccagatttctgtggttaatgtggatcaactgtgggaagattctgtcctaactgtcaaattc

SEQ ID NO: 670755 - DNA, 120 bp, Artificial Sequence
  ENSG00000185567_135 (sequence is synthesized)
cccaaattaatggtaccaaggttctccttccctgcccccagctcagaggatgatgtgttcatccccactgtgagggaagtgcagtgtccagaggccaatattgatacagccctttgtaag

SEQ ID NO: 670756 - DNA, 120 bp, Artificial Sequence
  ENSG00000185567_136 (sequence is synthesized)
gaaagtccggggctctggggagccagcatcctgaaggcaggtgctggggtccctggggagcagcctgtggaccttaacctgcctttggaagctcccccaatttcaaaggtcagagtgcat

SEQ ID NO: 670757 - DNA, 120 bp, Artificial Sequence
  ENSG00000185567_137 (sequence is synthesized)
attcagggtgctcaggttgaaagtcaagaggtcactatacacagcatagtgacaccagagtttgtagatctctcagtacccaggactttttccactcagattgtgcgggaatcagagatc

SEQ ID NO: 670758 - DNA, 120 bp, Artificial Sequence
  ENSG00000185567_138 (sequence is synthesized)
cccacgtcagagattcaaacaccttcgtacggattttccttattaaaagtgaaaatcccagagccccacacgcaggctagagtgtacacaacaatgactcaacactctaggactcaggag

SEQ ID NO: 670759 - DNA, 120 bp, Artificial Sequence
  ENSG00000185567_139 (sequence is synthesized)
ggcacagaagaggctcccatacaagccaccccaggagtagactccatttctggagatctccagcctgacactggagaaccatttgagatgatctcttccagcgtcaatgtactgggacag

SEQ ID NO: 670760 - DNA, 120 bp, Artificial Sequence
  ENSG00000185567_140 (sequence is synthesized)
caaacactcacatttgaagttccttctggccaccagcttgcagacagctgttcagatgaggagccagcagaaattcttgagtttccccctgatgatagccaagaggcaaccacaccactg

SEQ ID NO: 670761 - DNA, 120 bp, Artificial Sequence
  ENSG00000185567_141 (sequence is synthesized)
gcagatgaaggcagggctccaaaagacaaaccagaaagtaaaaaatctggtctgctctggttttggcttccaaacattgggttttcctcttctgttgatgagacaggtgttgattccaaa

SEQ ID NO: 670762 - DNA, 120 bp, Artificial Sequence
  ENSG00000185567_142 (sequence is synthesized)
aatgacgtccagagatctgctcccattcaaacacagcctgaggcacgaccagaggcagaactgcctaaaaaacaggagaaggcaggctggttccgatttcccaaattagggttctcctca

SEQ ID NO: 670763 - DNA, 120 bp, Artificial Sequence
  ENSG00000185567_143 (sequence is synthesized)
tctcctaccaagaaaagcaaaagcaccgaagatggggcagagctggaagaacaaaaacttcaagaagaaacaatcacgttttttgatgcccgagaaagtttctcccctgaagagaaggaa

SEQ ID NO: 670764 - DNA, 120 bp, Artificial Sequence
  ENSG00000185567_144 (sequence is synthesized)
gagggtgaactgatcgggcctgtgggcactgggctggactccagagtgatggtgacatccgcggcaagaacagagttaatcctgcccgagcaggacagaaaagctgacgatgaaagcaaa

SEQ ID NO: 670765 - DNA, 120 bp, Artificial Sequence
  ENSG00000185567_145 (sequence is synthesized)
gggtcaggcctgggaccaaatgaaggctgagaggtatggctcatcagtacaagagagatgcaaaaaactaagttggaaagtaaaggctacacacacatatggagcaccccatcccacagc

SEQ ID NO: 670766 - DNA, 120 bp, Artificial Sequence
  ENSG00000185567_146 (sequence is synthesized)
acattacatccacctcacttcacagaacggagaacagagcagaaatgaccagaacacctttgtcaccatcacacagccctcctaaaatggaaccaaagcttcccagctccctcaaagctt

SEQ ID NO: 670767 - DNA, 120 bp, Artificial Sequence
  ENSG00000185567_147 (sequence is synthesized)
tggatgcaaagaaggcaccctgacttccacaagacaccagaattcacacggtactcagaggcactgctggggaagtttgttggtctttattagataaatttccagagacctgtccataat

SEQ ID NO: 670768 - DNA, 120 bp, Artificial Sequence
  ENSG00000185567_148 (sequence is synthesized)
acccaacagaacatgactgtttctttgaggaaagggttataatgtctgtggtgtacaagtcgtttttggtataacttctttcctgctgctgctgcttcccggcaaacatagttttcctat

SEQ ID NO: 670769 - DNA, 120 bp, Artificial Sequence
  ENSG00000185567_149 (sequence is synthesized)
ttcaggcagagtgcggtatattccaggaaacactgtttcctactcacttagcttacttctttgttgaatgcctcactaatggcaagtttcaagatgttttgggtgacaatgcacacatgc

SEQ ID NO: 670770 - DNA, 120 bp, Artificial Sequence
  ENSG00000185567_150 (sequence is synthesized)
tgggcaaaagggtgatggccagtggctggcagctgggccagcagaagctaggacatctgtgagttgtcattctcatctatccatgtccactggcctgccagcatccgccagtgccttgcc

SEQ ID NO: 670771 - DNA, 120 bp, Artificial Sequence
  ENSG00000185567_151 (sequence is synthesized)
agtgtgcacggtcccacactgtggcccctgagtcccctaatgtacacgctgcagccagaatgcagatggagctggcttggctgttccctggatgggcaataaagaaagtgctgcatccca

SEQ ID NO: 670772 - DNA, 120 bp, Artificial Sequence
  ENSG00000185567_152 (sequence is synthesized)
cccacagggcaaggagaaggaggtgagaccactatgcccggggggcagggccccagctggcttcactaccctgctggctgagcctgggaggggatagcactcccactccatctgtccctg

SEQ ID NO: 670773 - DNA, 120 bp, Artificial Sequence
  ENSG00000185567_153 (sequence is synthesized)
gacaggatgcgtcctcaaaagcggacagagtgctccactgacctgcagcctccagagggagttccaacatctcaagctgagagtcactctggcccactgaattccatgattcctgtttct

SEQ ID NO: 670774 - DNA, 120 bp, Artificial Sequence
  ENSG00000185567_154 (sequence is synthesized)
agaaccacacctggagcttaggatgacctcctcacgcctctgctcaacagcttgaggctgggatcacccactgcatctagtaaaatgggggaccccatccaccttgcctgtgcctgaggc

SEQ ID NO: 670775 - DNA, 120 bp, Artificial Sequence
  ENSG00000185567_155 (sequence is synthesized)
actcagtgggggactggtggggcagactcagtgggattccccctattcatgtccccgggaccctcctcgccagccaaggcaagacagcagaccccgtctcattcacacacccggccctgg

SEQ ID NO: 670776 - DNA, 80 bp, Artificial Sequence
  ENSG00000185585_0 (sequence is synthesized)
agacccgcggggctggcagcagggtgcaggcgcggggcgcggggcaggcagagcgggcgaaggcgcggagctcgcagtgc

SEQ ID NO: 670777 - DNA, 120 bp, Artificial Sequence
  ENSG00000185585_1 (sequence is synthesized)
taccgtgcccgtggcgccatggccgctgccgccctcccgccccggccgctgctccttctgccgctagtgctgctgctgagcggccgccccacgcgcgccgacagtaaggtgtttggggac

SEQ ID NO: 670778 - DNA, 120 bp, Artificial Sequence
  ENSG00000185585_2 (sequence is synthesized)
ctggaccaggtgaggatgacctcggagggctccgactgccgttgcaagtgcatcatgcggcccctgagcaaggacgcgtgtagccgagtgcgcagtgggcgggcacgcgtggaggacttc

SEQ ID NO: 670779 - DNA, 120 bp, Artificial Sequence
  ENSG00000185585_3 (sequence is synthesized)
tacacggtggagactgtgagctcgggcactgactgccgctgctcctgtaccgcacctccctcctctctcaacccctgtgagaacgagtggaagatggagaaactcaaaaagcaggcgccc

SEQ ID NO: 670780 - DNA, 120 bp, Artificial Sequence
  ENSG00000185585_4 (sequence is synthesized)
gagctcctcaagctgcagtccatggtggatctcctggagggcaccctgtacagcatggacttgatgaaggtgcacgcctacgtccacaaggtggcctcccagatgaacacactggaagag

SEQ ID NO: 670781 - DNA, 120 bp, Artificial Sequence
  ENSG00000185585_5 (sequence is synthesized)
agcatcaaggccaacctgagccgggagaatgaggtggtgaaggacagcgtgcgccacctcagtgagcagttgaggcactatgagaatcactctgccatcatgctgggcatcaagaaggag

SEQ ID NO: 670782 - DNA, 120 bp, Artificial Sequence
  ENSG00000185585_6 (sequence is synthesized)
ctgtcccgcctgggcctccagctgctgcagaaggatgccgccgccgcccctgccacccctgccacgggcactggtagcaaggcccaggacacagctagaggaaaaggcaaggacatcagc

SEQ ID NO: 670783 - DNA, 120 bp, Artificial Sequence
  ENSG00000185585_7 (sequence is synthesized)
aagtatggcagtgtgcagaaaagctttgcagacagaggcctcccaaaacctcccaaggagaagctgcttcaggtggagaagctgagaaaggagagcggcaagggcagtttcctccagccc

SEQ ID NO: 670784 - DNA, 120 bp, Artificial Sequence
  ENSG00000185585_8 (sequence is synthesized)
acagccaagccccgcgccctggcccagcagcaggctgtgatccggggcttcacctactacaaggcaggcaagcaggaggtgaccgaggcggtggcagacaacaccctccagggcacttcc

SEQ ID NO: 670785 - DNA, 120 bp, Artificial Sequence
  ENSG00000185585_9 (sequence is synthesized)
tggctggagcaactgccgcccaaggtggagggcaggtccaactccgcagagcccaactccgcagagcaggatgaggctgagcccaggtcctccgagcgagtggacctggcttctggcacc

SEQ ID NO: 670786 - DNA, 120 bp, Artificial Sequence
  ENSG00000185585_10 (sequence is synthesized)
cccacttcaatccctgccaccaccaccaccgccaccaccaccccaacccccaccaccagtctcctgcccaccgagccaccttcaggtccagaagtctccagccaaggcagagaggcgagc

SEQ ID NO: 670787 - DNA, 120 bp, Artificial Sequence
  ENSG00000185585_11 (sequence is synthesized)
tgtgagggcaccctccgggctgtggacccccctgtgaggcaccacagctatgggcgccacgagggagcctggatgaaggaccctgcagctcgagacgacaggatctatgtcaccaactac

SEQ ID NO: 670788 - DNA, 120 bp, Artificial Sequence
  ENSG00000185585_12 (sequence is synthesized)
tactatggaaacagcctggtggagttccgcaacctggaaaacttcaagcaaggccgctggagtaacatgtacaagctaccctacaactggatcggcacaggccacgtggtgtaccagggc

SEQ ID NO: 670789 - DNA, 120 bp, Artificial Sequence
  ENSG00000185585_13 (sequence is synthesized)
gccttctactacaaccgcgccttcaccaagaacatcatcaagtacgacctacggcagcgcttcgtggcctcctgggcgctgctgcccgacgtggtatatgaggacaccacaccttggaag

SEQ ID NO: 670790 - DNA, 120 bp, Artificial Sequence
  ENSG00000185585_14 (sequence is synthesized)
tggcgcggacactcggacattgactttgccgtggacgagagcggcctgtgggtcatctaccccgccgtggacgaccgcgatgaggcccagcccgaggtgatcgtcctgagtcgcttggac

SEQ ID NO: 670791 - DNA, 120 bp, Artificial Sequence
  ENSG00000185585_15 (sequence is synthesized)
cccggcgatctctccgtgcaccgggagaccacgtggaagacacggctgcggcggaactcctacgggaactgcttcctggtgtgcggcatcctgtatgccgtggacacgtacaaccagcag

SEQ ID NO: 670792 - DNA, 120 bp, Artificial Sequence
  ENSG00000185585_16 (sequence is synthesized)
gaaggccaggtcgcctacgctttcgacacgcacacgggcaccgacgcacgcccccagctgccgttcctcaacgagcacgcctacaccacccagatcgactacaaccccaaggagcgggtg

SEQ ID NO: 670793 - DNA, 120 bp, Artificial Sequence
  ENSG00000185585_17 (sequence is synthesized)
ctgtacgcctgggacaatggccaccagctcacctacaccctccacttcgtggtctgagtggagacctgtgctccccggagaggggcagcagtgcgggaggggctttgcacagcagctcct

SEQ ID NO: 670794 - DNA, 120 bp, Artificial Sequence
  ENSG00000185585_18 (sequence is synthesized)
gcaactgacccagtccgcaaatatttattgggggccagcccagggctgggactgggcatgaggtggtcaccaggattgagcttcctcagcacccagtgggtaatacttgcttccacttgc

SEQ ID NO: 670795 - DNA, 120 bp, Artificial Sequence
  ENSG00000185585_19 (sequence is synthesized)
agagcaccgtgccaagcacttcccacacacttacccgtttgattctcctagcacctcccttggaggtagagatcatgaacccatttaacagacgaggagacaggctcagagaggcaccgt

SEQ ID NO: 670796 - DNA, 120 bp, Artificial Sequence
  ENSG00000185585_20 (sequence is synthesized)
cccttgcctaacacctcagttgtgatcaggcaggctgtgctctcaggacagccccattttagggatgaggagacttcaccacgccctcccctccctgccctcccccatctccccggtctc

SEQ ID NO: 670797 - DNA, 120 bp, Artificial Sequence
  ENSG00000185585_21 (sequence is synthesized)
ccttgttctctcaacccagtctcccttcccagggccactcagaaccagaggtctttagggccagtgtactggtgtggggtggaggccctggctctgcctgccatcctagggccctgttct

SEQ ID NO: 670798 - DNA, 120 bp, Artificial Sequence
  ENSG00000185585_22 (sequence is synthesized)
ggctgagctgttggtggccctgggctttgggccccttagccaatgtccttgtctcttgtctttggccagccccctcagcccagcccaccccacccgctgtccggccacattccaaacctc

SEQ ID NO: 670799 - DNA, 120 bp, Artificial Sequence
  ENSG00000185585_23 (sequence is synthesized)
taccgtcacctagctgctgagcagaaaccgcaccccgagagaaaatcccatcctctgttccaaggcccctgtctgctctatgctcatttttattttctcttattcttcatcagtgccgtc

SEQ ID NO: 670800 - DNA, 120 bp, Artificial Sequence
  ENSG00000185585_24 (sequence is synthesized)
atttgtttctgcagcagcagctgagaaggcagccggcagctctgccagggtggggagctgagctgaggctccctctccacccagaagcactggcgttgttcacatagtcaggccttgggt

SEQ ID NO: 670801 - DNA, 120 bp, Artificial Sequence
  ENSG00000185585_25 (sequence is synthesized)
cccctccctggttcatcccagagcctttgggcctggagtccgccttgtcctttttctctgggctttcaaacccacaacctttacacactcagggatacctccgggtctgccatgaataag

SEQ ID NO: 670802 - DNA, 120 bp, Artificial Sequence
  ENSG00000185585_26 (sequence is synthesized)
accctaggcccaagtctggtgtggtgccaggatggcacagtttccctcttccttgccagccctgacctggtcactgggcaggctggcccagcagcctgggggctgcagaagacatggtgt

SEQ ID NO: 670803 - DNA, 120 bp, Artificial Sequence
  ENSG00000185585_27 (sequence is synthesized)
gtctgcagactggacttttcctggctcgacccaggacttgggttgaggatgcacgggggccaccttgcccggggccactggtggctccccagagcctcagacccacacagcccagaggac

SEQ ID NO: 670804 - DNA, 120 bp, Artificial Sequence
  ENSG00000185585_28 (sequence is synthesized)
gaggccttcaagcctgcccctcttctgcttttttagacagtatttttagagctggaaagaaattttctagcccaactccctgtttcatgaaagagaaaagaggctcagaaaagtttagag

SEQ ID NO: 670805 - DNA, 120 bp, Artificial Sequence
  ENSG00000185585_29 (sequence is synthesized)
agcagctcagtgtcacactgggagctgggcacagccgatctccttccagaagggttctgtctgtatcctttattctccgcacatggaggctgccctacctgggaaggcaccccagcacct

SEQ ID NO: 670806 - DNA, 120 bp, Artificial Sequence
  ENSG00000185585_30 (sequence is synthesized)
gtgaaggacatttactgctcatcctcacctgccccctggcccttgctgccttcattctgtcccaatgccagctccctggatgtctgtatgtttgaataccagttgccatgttaggaaggt

SEQ ID NO: 670807 - DNA, 84 bp, Artificial Sequence
  ENSG00000185585_31 (sequence is synthesized)
tgtctgtatgtttgaataccagttgccatgttaggaaggtcagctgcacagccaagagtgtaagagtgtaaagaaatgcccgcc

SEQ ID NO: 670808 - DNA, 60 bp, Artificial Sequence
  ENSG00000185585_32 (sequence is synthesized)
caaatgctttttgtgcagaatacacttctttcaggcattgtcaggtgctgttttgtttaa

SEQ ID NO: 670809 - DNA, 120 bp, Artificial Sequence
  ENSG00000185585_33 (sequence is synthesized)
tacacttctttcaggcattgtcaggtgctgttttgtttaagctctaactcacccctggaatacaggggaatgatgacaaccagcccagccaggcctgactcatcatggtcacatccagcc

SEQ ID NO: 670810 - DNA, 120 bp, Artificial Sequence
  ENSG00000185585_34 (sequence is synthesized)
cccacccccggccaactaaccactgcaggctcctcttccagactcaccagggggcctcgaggccccggcatctcccttggccctgggtgtgggttttacaagactgtgtctttcatgaca

SEQ ID NO: 670811 - DNA, 120 bp, Artificial Sequence
  ENSG00000185585_35 (sequence is synthesized)
tcatagcccaaccatgtgagaagaaggagaaggcccccctttcttcattaatctgaaaaaaaggaaagtgagaataggctgatttttaaaagttaaggggcaagcagcattgcattctgg

SEQ ID NO: 670812 - DNA, 120 bp, Artificial Sequence
  ENSG00000185585_36 (sequence is synthesized)
gggaacgatcctggccacagccgccaaacaaacattcactaggcctcttctgttttcatacccttgtaagtgggttatgtggtgggtatggtcagttttttcttttttcttttcttttct

SEQ ID NO: 670813 - DNA, 61 bp, Artificial Sequence
  ENSG00000185585_37 (sequence is synthesized)
ggtatggtcagggctggaatgcaatggcgcgattcagctcactgcaatctccgcctcccgg

SEQ ID NO: 670814 - DNA, 67 bp, Artificial Sequence
  ENSG00000185585_38 (sequence is synthesized)
aagtgattctcctgccttagcctcctgaaaagctgggattacagggccctgccaccaagcccagcta

SEQ ID NO: 670815 - DNA, 120 bp, Artificial Sequence
  ENSG00000185585_39 (sequence is synthesized)
gcatgagccaccacgcctggccagtttcttcattttacatatggtcacattggcgcctagaacagttaggtcgctcgtcacataggcagttaagtggagaaccaggtttcaaaatcaggt

SEQ ID NO: 670816 - DNA, 120 bp, Artificial Sequence
  ENSG00000185585_40 (sequence is synthesized)
gagaaccaggtttcaaaatcaggtaagaaaaccatcatcattaactgagcaccagctgtgctaagcctgccacgggcgtatccttgcagcctcacaacagtgggaggtctgtatcctgaa

SEQ ID NO: 670817 - DNA, 120 bp, Artificial Sequence
  ENSG00000185585_41 (sequence is synthesized)
tgtcctcattttacagatgaggacattgaggagaagagacttacccaggctcacacagcagctcagcctgttccaggcgctggtcagtgcgtgttctttgccaccagcctgtcactccag

SEQ ID NO: 670818 - DNA, 120 bp, Artificial Sequence
  ENSG00000185585_42 (sequence is synthesized)
tggcagctccagaaacggaggctgttgcttttatccctaaactgcatccacagagaagccccaagaaggaggttggggccagctcataaaaagcctgaatgccaagccaaggagtggatg

SEQ ID NO: 670819 - DNA, 120 bp, Artificial Sequence
  ENSG00000185585_43 (sequence is synthesized)
cctccagtcatatttagaacaaagtcaagtataaatttacagagaaaaaattctaagacagttggatgttgtcctgttggtgaggaagggaaaggtttttcttgtagggaactggaacca

SEQ ID NO: 670820 - DNA, 120 bp, Artificial Sequence
  ENSG00000185585_44 (sequence is synthesized)
gcccacaactgcacacttgtgagctgtcatggaaacctgatccccaacagcttttgaggttgtttgtttgtttgtttgtttacctgtcttgggctttgttgcttttggcaaaaggtactt

SEQ ID NO: 670821 - DNA, 120 bp, Artificial Sequence
  ENSG00000185585_45 (sequence is synthesized)
caaacaagggagggcctggactgagggggaccaggtcttcttgctgacctcgtctacaaaggcaaaggaaggcaaaggaagctgtctcgggtgtttctgaacaacgtgactcatgagggg

SEQ ID NO: 670822 - DNA, 120 bp, Artificial Sequence
  ENSG00000185585_46 (sequence is synthesized)
ctttggctacctcttgcgttccccctagagatgtccaggccttacatttaatcggctttctctgcggtggggtagagaatggagctcccgccttgcgggcagtgctaaaggtggagctgg

SEQ ID NO: 670823 - DNA, 120 bp, Artificial Sequence
  ENSG00000185585_47 (sequence is synthesized)
gggattttcctgggaatgatttgagggctcttgaaagcccatgtgttccaaagcgtctttaactctgggatagcattggaagccgctgtcatgacaggacatggcactggatggctggca

SEQ ID NO: 670824 - DNA, 120 bp, Artificial Sequence
  ENSG00000185585_48 (sequence is synthesized)
gagagccctggctgggagttagggagccctgggttggaatccagccccacctcttttatgccacaggtttggtcaagttctctcccgctcagggtagggctgtgaactccctcttacagc

SEQ ID NO: 670825 - DNA, 120 bp, Artificial Sequence
  ENSG00000185585_49 (sequence is synthesized)
taagaacatgcagcttagtgaggacaagacccttctagagctttacccctaatccccccccaggagccccgaggccggcattattcctccccattacaggtgatgagcctcaaattcaga

SEQ ID NO: 670826 - DNA, 120 bp, Artificial Sequence
  ENSG00000185585_50 (sequence is synthesized)
gagcttaagcaacctgctcagggtcacgtctccaacaggcagtagagtcaaggtataaaccaggtctgtttttgtaccagagtcccagactaactgttggtaggaatcttgtaaccagtc

SEQ ID NO: 670827 - DNA, 120 bp, Artificial Sequence
  ENSG00000185585_51 (sequence is synthesized)
atgttttcttccttgttttggccgctgggaagctcaaagtcaaattcgagacccttttttttccaattgtgctgagtctcctactagactcgcttcattctagctttctgcttttacctt

SEQ ID NO: 670828 - DNA, 120 bp, Artificial Sequence
  ENSG00000185585_52 (sequence is synthesized)
taccctaatctttttatttttatgctattgtactttatttttgtaagttgctgagatatctgttttgcaacaagatgggctatatctaaataaagacatgatcaaaggtttgatttaaaa

SEQ ID NO: 670829 - DNA, 120 bp, Artificial Sequence
  ENSG00000185585_53 (sequence is synthesized)
catatcctagaggttgggtgaccaaccctgtcccagtttgcctgggacttgagggtttttccaggatgcagcactttcagtgctaaaactaggaatgttccaggcactctgggatgagtt

SEQ ID NO: 670830 - DNA, 120 bp, Artificial Sequence
  ENSG00000185591_0 (sequence is synthesized)
acccccccctccctgtccggtccgggttcgcttgcctcgtcagcgtccgcgtttttcccggccccccccaacccccccggacaggacccccttgagcttgtccctcagctgccaccatga

SEQ ID NO: 670831 - DNA, 120 bp, Artificial Sequence
  ENSG00000185591_1 (sequence is synthesized)
gcgaccaagatcactccatggatgaaatgacagctgtggtgaaaattgaaaaaggagttggtggcaataatgggggcaatggtaatggtggtggtgccttttcacaggctcgaagtagca

SEQ ID NO: 670832 - DNA, 120 bp, Artificial Sequence
  ENSG00000185591_2 (sequence is synthesized)
gcacaggcagtagcagcagcactggaggaggagggcaggagtcccagccatcccctttggctctgctggcagcaacttgcagcagaattgagtcacccaatgagaacagcaacaactccc

SEQ ID NO: 670833 - DNA, 120 bp, Artificial Sequence
  ENSG00000185591_3 (sequence is synthesized)
agggcccgagtcagtcagggggaacaggtgagcttgacctcacagccacacaactttcacagggtgccaatggctggcagatcatctcttcctcctctggggctacccctacctcaaagg

SEQ ID NO: 670834 - DNA, 120 bp, Artificial Sequence
  ENSG00000185591_4 (sequence is synthesized)
aacagagtggcagcagtaccaatggcagcaatggcagtgagtcttccaagaatcgcacagtctctggtgggcagtatgttgtggctgccgctcccaacttacagaaccagcaagttctga

SEQ ID NO: 670835 - DNA, 120 bp, Artificial Sequence
  ENSG00000185591_5 (sequence is synthesized)
caggactacctggagtgatgcctaatattcagtatcaagtaatcccacagttccagaccgttgatgggcaacagctgcagtttgctgccactggggcccaagtgcagcaggatggttctg

SEQ ID NO: 670836 - DNA, 120 bp, Artificial Sequence
  ENSG00000185591_6 (sequence is synthesized)
gtcaaatacagatcataccaggtgcaaaccaacagattatcacaaatcgaggaagtggaggcaacatcattgctgctatgccaaacctactccagcaggctgtccccctccaaggcctgg

SEQ ID NO: 670837 - DNA, 120 bp, Artificial Sequence
  ENSG00000185591_7 (sequence is synthesized)
ctaataatgtactctcaggacagactcagtatgtgaccaatgtaccagtggccctgaatgggaacatcaccttgctacctgtcaacagcgtttctgcagctaccttgactcccagctctc

SEQ ID NO: 670838 - DNA, 120 bp, Artificial Sequence
  ENSG00000185591_8 (sequence is synthesized)
aggcagtcacgatcagcagctctgggtcccaggagagtggctcacagcctgtcacctcagggactaccatcagttctgccagcttggtatcatcacaagccagttccagctcctttttca

SEQ ID NO: 670839 - DNA, 120 bp, Artificial Sequence
  ENSG00000185591_9 (sequence is synthesized)
ccaatgccaatagctactcaactactactaccaccagcaacatgggaattatgaactttactaccagtggatcatcagggaccaactctcaaggccagacaccccagagggtcagtgggc

SEQ ID NO: 670840 - DNA, 120 bp, Artificial Sequence
  ENSG00000185591_10 (sequence is synthesized)
tacaggggtctgatgctctgaacatccagcaaaaccagacatctggaggctcattgcaagcaggccagcaaaaagaaggagagcaaaaccagcagacacagcagcaacaaattcttatcc

SEQ ID NO: 670841 - DNA, 120 bp, Artificial Sequence
  ENSG00000185591_11 (sequence is synthesized)
agcctcagctagttcaagggggacaggccctccaggccctccaagcagcaccattgtcagggcagacctttacaactcaagccatctcccaggaaaccctccagaacctccagcttcagg

SEQ ID NO: 670842 - DNA, 120 bp, Artificial Sequence
  ENSG00000185591_12 (sequence is synthesized)
ctgttccaaactctggtcccatcatcatccggacaccaacagtggggcccaatggacaggtcagttggcagactctacagctgcagaacctccaagttcagaacccacaagcccaaacaa

SEQ ID NO: 670843 - DNA, 120 bp, Artificial Sequence
  ENSG00000185591_13 (sequence is synthesized)
tcaccttagccccaatgcagggtgtttccttggggcagaccagcagcagcaacaccactctcacacccattgcctcagctgcttccattcctgctggcacagtcactgtgaatgctgctc

SEQ ID NO: 670844 - DNA, 120 bp, Artificial Sequence
  ENSG00000185591_14 (sequence is synthesized)
aactctcctccatgccaggcctccagaccattaacctcagtgcattgggtacttcaggaatccaggtgcacccaattcaaggcctgccgttggctatagcaaatgccccaggtgatcatg

SEQ ID NO: 670845 - DNA, 120 bp, Artificial Sequence
  ENSG00000185591_15 (sequence is synthesized)
gagctcagcttggtctccatggggctggtggtgatggaatacatgatgacacagcaggtggagaggaaggagaaaacagcccagatgcccaaccccaagccggtcggaggacccggcggg

SEQ ID NO: 670846 - DNA, 120 bp, Artificial Sequence
  ENSG00000185591_16 (sequence is synthesized)
aagcatgcacctgcccctactgtaaagacagtgaaggaaggggctcgggggatcctggcaaaaagaaacagcatatttgccacatccaaggctgtgggaaagtgtatggcaagacctctc

SEQ ID NO: 670847 - DNA, 120 bp, Artificial Sequence
  ENSG00000185591_17 (sequence is synthesized)
acctgcgggcacacttgcgctggcatacaggcgagaggccatttatgtgtacctggtcatactgtgggaaacgcttcacacgttcggatgagctacagaggcacaaacgtacacacacag

SEQ ID NO: 670848 - DNA, 120 bp, Artificial Sequence
  ENSG00000185591_18 (sequence is synthesized)
gtgagaagaaatttgcctgccctgagtgtcctaagcgcttcatgaggagtgaccacctgtcaaaacatatcaagacccaccagaataagaagggaggcccaggtgtagctctgagtgtgg

SEQ ID NO: 670849 - DNA, 120 bp, Artificial Sequence
  ENSG00000185591_19 (sequence is synthesized)
gcactttgcccctggacagtggggcaggttcagaaggcagtggcactgccactccttcagcccttattaccaccaatatggtagccatggaggccatctgtccagagggcattgcccgtc

SEQ ID NO: 670850 - DNA, 120 bp, Artificial Sequence
  ENSG00000185591_20 (sequence is synthesized)
ttgccaacagtggcatcaacgtcatgcaggtggcagatctgcagtccattaatatcagtggcaatggcttctgagatcaggcacccggggccagagacatatgggccataccccttaacc

SEQ ID NO: 670851 - DNA, 120 bp, Artificial Sequence
  ENSG00000185591_21 (sequence is synthesized)
ccgggatgcaaggtagcatgggtccaagagacatggaagagagagccatgaagcattaaaatgcatggtgttgagaagaatcaggagagggatacaagagaggagatggggtcccggcac

SEQ ID NO: 670852 - DNA, 120 bp, Artificial Sequence
  ENSG00000185591_22 (sequence is synthesized)
ccatctgtatcatcagtgcctctttgaaggtgggaaacattagtgaaaattctgttggtgccacgctttgatgagcatttgtttgaccccagtttcttcttacacttcttaccccagcct

SEQ ID NO: 670853 - DNA, 120 bp, Artificial Sequence
  ENSG00000185591_23 (sequence is synthesized)
acccttcctgcatttctcttctcagctcttccatgatggattcccccccctttcctaaagccatcatgccttgataaatatatatgatcattgaaatactttttaacaaaaaacagattc

SEQ ID NO: 670854 - DNA, 120 bp, Artificial Sequence
  ENSG00000185591_24 (sequence is synthesized)
tatattattatatatatatatatatatataaagatatatagagatgcattcacaggggttggctgggaggaggaagaccattctgtgaccaaaataccttggtcattttttttatattgc

SEQ ID NO: 670855 - DNA, 120 bp, Artificial Sequence
  ENSG00000185591_25 (sequence is synthesized)
cttatttccctatggctgagccttgttgtgacacatcaagcttttctgtagatgttgtcttggcttcccaccagcttaagcgttcatatgctctgcttttagttcatatatacatacata

SEQ ID NO: 670856 - DNA, 120 bp, Artificial Sequence
  ENSG00000185591_26 (sequence is synthesized)
atgtttttcctttcttaattttgtctttttgtttgggatcagcttcttgcactccttccctaactcaactgttgccgtctcatcttctctcatctgatcacttcatgttttgtttttgtt

SEQ ID NO: 670857 - DNA, 120 bp, Artificial Sequence
  ENSG00000185591_27 (sequence is synthesized)
actgcctggatgaggcacttctgtcaattttttcaggaccttagttccagcagcagaatggaaaaatccttgaagcccaggctgatgcttgaagtaactgtggagggagtgttcaaaata

SEQ ID NO: 670858 - DNA, 120 bp, Artificial Sequence
  ENSG00000185591_28 (sequence is synthesized)
ctactgacgcaggcaccttcttggcgctggagagtcaaaggcatctcccttcattagctgctctgagcatcaagaattagaagtctttcagtggaattgtacaagagtccctttgaagat

SEQ ID NO: 670859 - DNA, 120 bp, Artificial Sequence
  ENSG00000185591_29 (sequence is synthesized)
aataatcttggctcagtttgtataaactgtcaaattttcaaataataggtagggggctttcactaggaaaatcatgtgctcagaagaggaaatgactcgtagtcaggttcaggagttagt

SEQ ID NO: 670860 - DNA, 120 bp, Artificial Sequence
  ENSG00000185591_30 (sequence is synthesized)
ggagtatttggactttggtactgctgtcttccaaggtagctctaagttttgatgtgtgggcttctgagtttatattctgaaaggaaatacacttcttttgaacatccccactaggttctt

SEQ ID NO: 670861 - DNA, 120 bp, Artificial Sequence
  ENSG00000185591_31 (sequence is synthesized)
ttccattgtcaataaggagcatcagccagtgaatctgtttcaggtttccattctgcagaactcctccaaagcatgtgctagtggcaagacagtggttcttatgatgttttcccttaactt

SEQ ID NO: 670862 - DNA, 120 bp, Artificial Sequence
  ENSG00000185591_32 (sequence is synthesized)
ttccttgtatgttcttgggtggttcctaagggaaagggaagcacatgatcatgggaatgatagcccagaacaaaaagaaatcttgtcttaccacagtgttttataggagagattgggaga

SEQ ID NO: 670863 - DNA, 120 bp, Artificial Sequence
  ENSG00000185591_33 (sequence is synthesized)
aatcatcctgttttctctgtgacctgatttcagaagagactgatccaaaaattataacggcagggaacctagtgcatttggcactgagatttaaatgcaaccagaattgtcctcaaggcc

SEQ ID NO: 670864 - DNA, 120 bp, Artificial Sequence
  ENSG00000185591_34 (sequence is synthesized)
aattgtcctcaaggcccagccataaaagcattgtctctctcgaccttctggtatcttgttagagagcttttcactgtgaggaagtgtggaaaaatagctctgtgtgtgtgtgtgtgtgtg

SEQ ID NO: 670865 - DNA, 120 bp, Artificial Sequence
  ENSG00000185591_35 (sequence is synthesized)
taatctgttaggttggggataggttttctgctagccaatattaaaagagacctgcaataaaaaaattaccctgatctgatagaaagcaagtgtttttgtatgtgtgggtgaatgtgtgtt

SEQ ID NO: 670866 - DNA, 120 bp, Artificial Sequence
  ENSG00000185591_36 (sequence is synthesized)
catgcccgtatatgtctacacacagatgacaaattatatttgaaatcgttggaaaataaattcagatcaaaatgcctttcaggcccattacctagaaatctatcttaaaacctgggtatg

SEQ ID NO: 670867 - DNA, 120 bp, Artificial Sequence
  ENSG00000185591_37 (sequence is synthesized)
ttcctaaggtcatttctttgcttatgctaaattaattacaattatgaatggaggatattctactgtacttttttaaaaagaaactatttttgtgtttgaaagtgaaaccaacatccagat

SEQ ID NO: 670868 - DNA, 120 bp, Artificial Sequence
  ENSG00000185591_38 (sequence is synthesized)
ctatagcagagtccttattcttctcataaatctttttactttggctacaaatagatgatggtatgattctattatatattttatataaaatccatccaaattaagttttgggtaagtgtg

SEQ ID NO: 670869 - DNA, 120 bp, Artificial Sequence
  ENSG00000185591_39 (sequence is synthesized)
ttgtttaatctgaactatagtaacttaatactctaaacaatagttcactccatttggtcctttctccacagatgtaattatgttttcaactcaggaactatggcaaggaactttccccag

SEQ ID NO: 670870 - DNA, 120 bp, Artificial Sequence
  ENSG00000185591_40 (sequence is synthesized)
atcaaattctattaacgctgagatacaagtcatccatgcacagccactatcataccctttattctcactgaaaggcagaactcagaacctgttattttatgtctgtaatcatgtactttg

SEQ ID NO: 670871 - DNA, 120 bp, Artificial Sequence
  ENSG00000185591_41 (sequence is synthesized)
gcatcttttggaggaaaggggcaggataactcactggaatgtacagtattttgctagtgcatttcaaggaatggaatcttctccagtatgaaattaccagatataaaataatgtaatgat

SEQ ID NO: 670872 - DNA, 120 bp, Artificial Sequence
  ENSG00000185591_42 (sequence is synthesized)
gctgaggatataagcttttagaaggtaatttgatggtatttctttctcgaatgaaaagctgctggtttaccctcaaccctattcattagcattaccatgagtgaatttatatctaattat

SEQ ID NO: 670873 - DNA, 120 bp, Artificial Sequence
  ENSG00000185591_43 (sequence is synthesized)
ttccacttgccctgttctcttcacaccaaggaagctccagatccagtatcttgtttggcctcaaaacagaagcagcttcttttgtctcccagcagtagtgagccactcagtctcttccac

SEQ ID NO: 670874 - DNA, 120 bp, Artificial Sequence
  ENSG00000185591_44 (sequence is synthesized)
aggaagtttggagcctacattccttgagtcaggagcttattacagaaaaaccccgtttccctgaacttttggctaacagaaattaatttaactgacatgcatattgattctgaaattttt

SEQ ID NO: 670875 - DNA, 120 bp, Artificial Sequence
  ENSG00000185591_45 (sequence is synthesized)
ttcctaagtttttttcatttttttgaatgagttttttaaattttttagatgaccaaaacttgcagggcaggggatgcccagaagagtggtgagatagtaaaacacttattccctcatcct

SEQ ID NO: 670876 - DNA, 120 bp, Artificial Sequence
  ENSG00000185591_46 (sequence is synthesized)
ttcaggttttcaggttgcccatttatattcatttacatgtcatttgactgtctcactttttacccagaacagtaacaacccacaccgtcttccttcagggatttccaactggcactctgt

SEQ ID NO: 670877 - DNA, 120 bp, Artificial Sequence
  ENSG00000185591_47 (sequence is synthesized)
gggtgctacacagaatgcaatttaatggatatttctcagcctggttcagaataaattgatcctttgatcccagaaagtatatactgaagtgtgggataaagattatgattaggggagggt

SEQ ID NO: 670878 - DNA, 120 bp, Artificial Sequence
  ENSG00000185591_48 (sequence is synthesized)
tggagacaaaagctgtaaattactatggctgatttatttctactatatacatatatattttttgcttttgtatatcctatataggaaactaagcattgtattttttttaacaaatctaaa

SEQ ID NO: 670879 - DNA, 120 bp, Artificial Sequence
  ENSG00000185591_49 (sequence is synthesized)
aaagcactatgaactacaggtgtttgactttcaaaatatattttgtattgttaatatcttcacattgtgtgaatactggaagctgcagatctttgctaggacgcaataaatttatatact

SEQ ID NO: 670880 - DNA, 120 bp, Artificial Sequence
  ENSG00000185591_50 (sequence is synthesized)
ttttgaggggttcttctggggtgctaatcaggcccctgttatgcttagggggagccctggtgctacttgcttgaagttttcagtgtaagtaccctgatgccttttggaccttgggatcag

SEQ ID NO: 670881 - DNA, 120 bp, Artificial Sequence
  ENSG00000185591_51 (sequence is synthesized)
atcaagagttttggagatcaggtaccaaggaaataaggacagtctagctgcctcaagtgaggggccctttgcatagctctccttccccctcactgaagctgggtagcctattggggttga

SEQ ID NO: 670882 - DNA, 120 bp, Artificial Sequence
  ENSG00000185591_52 (sequence is synthesized)
gagggaaaatgtgaaatctcagaatttatctcccttagaagagagccagtaacttatgtacaaggatgaaagaaaggtcgcagcagtagctttggggaaagggaggaagatatggcactt

SEQ ID NO: 670883 - DNA, 120 bp, Artificial Sequence
  ENSG00000185591_53 (sequence is synthesized)
ctccaaccccggaaaacattgcttttgaaaactgctgataaaatatgagccggttattacttctgtttgggagactgtgctctctgtggtgcctctcttggctctactccacagatacca

SEQ ID NO: 670884 - DNA, 120 bp, Artificial Sequence
  ENSG00000185591_54 (sequence is synthesized)
gacctcttctaagaggatgagcagaccagctttgaggttgacctgtttctctttgtctgccttcccaaaacaccagcccccaggaagacattaagcagccttaagcttaaattcctactc

SEQ ID NO: 670885 - DNA, 120 bp, Artificial Sequence
  ENSG00000185591_55 (sequence is synthesized)
cctcttccaaatttggctcacttgccttagatccaaggcagggaaaggaaaagaaggggggtctctggctttattactcccctaagtctttactctgacttccccaaacccagaaagatt

SEQ ID NO: 670886 - DNA, 120 bp, Artificial Sequence
  ENSG00000185591_56 (sequence is synthesized)
ttctccacagtgttcatttgaaagaggagtattttgtcccattttccccttcctcattatcaaacagccccagtcttccttgtctctgctaagaaagtagaggcatgatgatctgcctct

SEQ ID NO: 670887 - DNA, 120 bp, Artificial Sequence
  ENSG00000185591_57 (sequence is synthesized)
caactgccctaagtcctagctaagtatcaggggaaaaaaaaaaaaaaaaagcctaacaaatgggattagactagggctgcaagtagtgaggattttgttgatacctctgctgggatgtgt

SEQ ID NO: 670888 - DNA, 120 bp, Artificial Sequence
  ENSG00000185591_58 (sequence is synthesized)
gctttcccatatcttgccttcaggaattacactgtgccttttccccagggatatgggctctgtctacccagtgctccagtttcccggtaactgctcttgaacattgtggacaagggcagg

SEQ ID NO: 670889 - DNA, 120 bp, Artificial Sequence
  ENSG00000185591_59 (sequence is synthesized)
tcttcatatttttgatcatccctttctcccagtgaaatcccatagcccttacctagagtctagggcacaaagacttcggggaagatacactgagattgacctgaggagacatctacacac

SEQ ID NO: 670890 - DNA, 120 bp, Artificial Sequence
  ENSG00000185591_60 (sequence is synthesized)
accagtggcagctgccccagggcctgcttccccttcctaagtctgtcatcctctggaagggatgggtggtgctccaatctctggtgcctaaaaacccaagtttatttctctcttaacact

SEQ ID NO: 670891 - DNA, 120 bp, Artificial Sequence
  ENSG00000185591_61 (sequence is synthesized)
ggcaataaccagtccacaccactgttgccttttaaaacctcttaataatctcatgctgtgtttgttttgattccaatccaattatcaccagggctgtgtgggtaaatgcttttaaatgct

SEQ ID NO: 670892 - DNA, 120 bp, Artificial Sequence
  ENSG00000185591_62 (sequence is synthesized)
ctctcatcttgttcttccccctcaccccccactcttaggtatgtatgatgctaatcttgtccctaagtaagtttcttcctgctccttttgtatcttcctttcttgtctttcctcctacct

SEQ ID NO: 670893 - DNA, 120 bp, Artificial Sequence
  ENSG00000185591_63 (sequence is synthesized)
tttgtctcttggtgttttgggacttttttttttttttttttggccttttgtacaaagattagtttcaatgtagtctgtagcctcctttgtaaaccaattaaaaagttttttaataaaaaa

SEQ ID NO: 670894 - DNA, 120 bp, Artificial Sequence
  ENSG00000185591_64 (sequence is synthesized)
gttgttttatgccttacctgtccttttcctttttttcccttaggatactttttcttatttagaaactctcaccatgcctaccgtccttcacatttcctatccccaaagcactttttgaat

SEQ ID NO: 670895 - DNA, 120 bp, Artificial Sequence
  ENSG00000185591_65 (sequence is synthesized)
gttttcttagtttaattttgtacaagggagaattaaggcccacttttggcacattgaacctagttcatgtcctgcatgccctgcagctcccctctgccctccaatccattttctttatac

SEQ ID NO: 670896 - DNA, 120 bp, Artificial Sequence
  ENSG00000185594_0 (sequence is synthesized)
cctgagtgcaggactctcctgaagaaggggcgtctaaaaggccagcccatgcatcttgttcagaccaggctgctccatctccgctaagcccagggatccacttgtgtgtctttctgggat

SEQ ID NO: 670897 - DNA, 120 bp, Artificial Sequence
  ENSG00000185594_1 (sequence is synthesized)
aattgtctttagtggcagcctgggcctcggggaaggaagggcatgaggaatggccccggctgggatgtcaggggcccaggacaactcctgtctctaccaggaaattgccccctcttttca

SEQ ID NO: 670898 - DNA, 120 bp, Artificial Sequence
  ENSG00000185594_2 (sequence is synthesized)
gaggctgccttgtcctaggtatctgatgtcctgcccttggcagttttcaactccagatgtaggtctgactcctattaggctaccatttctttgtgggaagacaggtatgaaattgcagca

SEQ ID NO: 670899 - DNA, 120 bp, Artificial Sequence
  ENSG00000185594_3 (sequence is synthesized)
ttcctaattctcttaatgtgaattgtcagagccccttcagaccggtggctggggccaggcatgagaggcaggtggtaagggcaagaggagcagcccctgtgcacttggggaggctggaag

SEQ ID NO: 670900 - DNA, 120 bp, Artificial Sequence
  ENSG00000185594_4 (sequence is synthesized)
ggttggcgaaaggagctgaaaacaccctagattccccaaatggcatgaagagatcccagccctgaggcacctcccactcaagccggagatgagcttttcccaaaatccaactctatgagg

SEQ ID NO: 670901 - DNA, 120 bp, Artificial Sequence
  ENSG00000185594_5 (sequence is synthesized)
aacctcgtcgcgacatttctcagaagccatgacatgtccctgcggctggaggcctttcaagggtggcccaggaggcctcaagggcccggtgtggcctgcaaaggaagagaacagctgttc

SEQ ID NO: 670902 - DNA, 120 bp, Artificial Sequence
  ENSG00000185594_6 (sequence is synthesized)
tcacggaaggatccaaagggttcaaaggcgaagggtgccatctgcttccccactgattcagaagataaacaggagaagtgtcctgtttcacccatattgctggtcctgatttttcaatag

SEQ ID NO: 670903 - DNA, 120 bp, Artificial Sequence
  ENSG00000185594_7 (sequence is synthesized)
tgtccctaccctgaagctcttccattggtcatcatggagttagctaacagcccagggaactggtctcttttcccttttcccttaccacctggaactcacctggaaagggcaatcagctgg

SEQ ID NO: 670904 - DNA, 120 bp, Artificial Sequence
  ENSG00000185594_8 (sequence is synthesized)
ctctatatcagacgccaccacctggtctttgaagtttctgtcctaccagtgccacagctccctctcccacttctgaactacctccaagagagaccatcctcagcagcctagtatgttatg

SEQ ID NO: 670905 - DNA, 120 bp, Artificial Sequence
  ENSG00000185594_9 (sequence is synthesized)
ctagtcctggaatggtgtattctggatgtctactcaaggccaaaccccagtattgcctttcgtttccctattcaaggccaaggctagattctcttcattgtctccatttctctttctcca

SEQ ID NO: 670906 - DNA, 120 bp, Artificial Sequence
  ENSG00000185594_10 (sequence is synthesized)
gagctcctatagggcaagacactgtttctcatatatttctggatccttggagcttagctcggagcttggcatacatgcccagcatgaacttttctgaataaaataatttcaaatgctgta

SEQ ID NO: 670907 - DNA, 120 bp, Artificial Sequence
  ENSG00000185608_0 (sequence is synthesized)
agttgcaacccgggccgcccgcagaggcaggcggggcccaggtggcgtggaccgcccgtcaccagctctgcctcgccagtctgagtccgacttattaactagcttccgtcattcatcaac

SEQ ID NO: 670908 - DNA, 120 bp, Artificial Sequence
  ENSG00000185608_1 (sequence is synthesized)
acgcgctattgggcatcttgcgagcgccgggctccgcgccggcgccggaatgcgatccgggcttcggactcgaacgaatgcgggggacgagccaaccctggtgggggaggctggggcgga

SEQ ID NO: 670909 - DNA, 120 bp, Artificial Sequence
  ENSG00000185608_2 (sequence is synthesized)
cgcgtttattagaagatcggggccgtttgcctagacatgaacatttggactcggaggagcagagggacgccccctcggccgctccggctgcactgcggagccgaggcccgcgcgagggcg

SEQ ID NO: 670910 - DNA, 120 bp, Artificial Sequence
  ENSG00000185608_3 (sequence is synthesized)
cagaccgaccaaccggctagggcctgactggctagactgtgcccgctgcagaggcgcgctcccagcacagggcggggacggaagggaggaccccgagccgcgtgaaacgcaaggccctcg

SEQ ID NO: 670911 - DNA, 120 bp, Artificial Sequence
  ENSG00000185608_4 (sequence is synthesized)
tgtgtgcgcagctgacaccctaggcggggctgcgtcgggggcggggacaggcgcgtcccagcccacgcagccggaacgcctgagcgctgggcgcctggtctgccggacctcagcaggggg

SEQ ID NO: 670912 - DNA, 120 bp, Artificial Sequence
  ENSG00000185608_5 (sequence is synthesized)
gctgcgaagtatctcgctagccctgcgcccgactagcgggcttctgggaacttggcagacgcagcttagagagactcaccagcgagcgtcattgttgtctttctgggaactcattcccat

SEQ ID NO: 670913 - DNA, 120 bp, Artificial Sequence
  ENSG00000185608_6 (sequence is synthesized)
gagatcagaacctcttcgaaaaaagaagaaggtagatcctaaaaaagaccaagaagcaaaggagcgcttgaaaaggaagatccgaaaactggaaaaggctactcaagagctaattcctat

SEQ ID NO: 670914 - DNA, 120 bp, Artificial Sequence
  ENSG00000185608_7 (sequence is synthesized)
tgaagattttattacccctctaaagttcttggataaagcaagagagcggcctcaggtggagctcacctttgaggagactgagaggagagctctgcttctgaagaagtggtccttgtacaa

SEQ ID NO: 670915 - DNA, 120 bp, Artificial Sequence
  ENSG00000185608_8 (sequence is synthesized)
gcagcaagagcgtaagatggagagggacaccatcagggctatgctagaagcccagcaggaagctctggaggaactgcaactggaatccccgaagctccatgctgaggccatcaagcggga

SEQ ID NO: 670916 - DNA, 120 bp, Artificial Sequence
  ENSG00000185608_9 (sequence is synthesized)
tcctaacctgttcccctttgagaaggaagggccacattacacaccaccgatccctaactaccaaccccctgaaggcaggtacaatgacatcaccaaggtgtacacacaagtggagtttaa

SEQ ID NO: 670917 - DNA, 120 bp, Artificial Sequence
  ENSG00000185608_10 (sequence is synthesized)
gagatagacttgcaggctgctatccttaacatgctgcccctgagagtaggaatgaccagggttcaagtctgctttccacagaatcaggcatgctgttaataaatactggtttaatcaaaa

SEQ ID NO: 670918 - DNA, 120 bp, Artificial Sequence
  ENSG00000185608_11 (sequence is synthesized)
atctcgctagccctgcgcccgactagcgggtgagtgcggacgctggccggatagcggagtgcccagggcgcgtgcggggtcttcgcgactgtccgccaggactcgcctgtgctccctgct

SEQ ID NO: 670919 - DNA, 120 bp, Artificial Sequence
  ENSG00000185608_12 (sequence is synthesized)
cgcctcccagtccacgaatatctcagggatgagccatctggtcgtgactcttatgcatgaaaatctgagcaccctggcgagcagcggtcctgcttaagtcctctgtggtctgaacgaaag

SEQ ID NO: 670920 - DNA, 60 bp, Artificial Sequence
  ENSG00000185608_13 (sequence is synthesized)
gccccggcctcccgagtagctcggattacaggcgcccaacaccacgcccggctaattttt

SEQ ID NO: 670921 - DNA, 120 bp, Artificial Sequence
  ENSG00000185608_14 (sequence is synthesized)
ccaaagtgctgggattacagacgtgagcaaccgcgcctagcctggagaagcagatatttatacatactcttgtatctttcaggcttctgggaacttggcagacgcagcttagagagactc

SEQ ID NO: 670922 - DNA, 120 bp, Artificial Sequence
  ENSG00000185610_0 (sequence is synthesized)
atcgttccaagtccgccgccgtcccgggtggcctttcctccctgcctggctccgcgcgctccagccctgcgggaggcggcggcgagaagctgcggctctgggtgcggtgcggggcgcccg

SEQ ID NO: 670923 - DNA, 120 bp, Artificial Sequence
  ENSG00000185610_1 (sequence is synthesized)
ggcgacaggcgggcgcaaggcgggcgcgcagcagaccggttggcgccgcactatgctccccagcgcggtcgcagcccacgccggtgcgtactgggacgttgtggcttcctccgcgctcct

SEQ ID NO: 670924 - DNA, 120 bp, Artificial Sequence
  ENSG00000185610_2 (sequence is synthesized)
caacctccccgctgcgcccggctttggcaacctgggcaagagtttcctgatcgagaatttgctgcgggtcgggggcgccccaacgcccaggctgcagccgcccgcgccccacgacccggc

SEQ ID NO: 670925 - DNA, 120 bp, Artificial Sequence
  ENSG00000185610_3 (sequence is synthesized)
gaccgccctggccaccgcgggcgcgcagctccggcccctgcctgctagcccagttcccctaaagctgtgccccgcagccgaacaagttagccccgccggggcgccctacggaacgcggtg

SEQ ID NO: 670926 - DNA, 120 bp, Artificial Sequence
  ENSG00000185610_4 (sequence is synthesized)
ggcttttcaagtgctcagtccctctgcggacagtgcgaggctgccgggccgggctccgggggaccgagactgtaccttccagccttcagcgccagcaccttccaaacctttccttctgag

SEQ ID NO: 670927 - DNA, 120 bp, Artificial Sequence
  ENSG00000185610_5 (sequence is synthesized)
caccccgccattctactcggcgtgctgcggtgggtcctgtcggcgccctgcatcctccactgcttttccaagagaagagagcatgctgcctctcctgacacaggactctaattccaaagc

SEQ ID NO: 670928 - DNA, 120 bp, Artificial Sequence
  ENSG00000185610_6 (sequence is synthesized)
tcggaggggcattttaagaagagctgtcttttctgaggaccagagaaaggctctggagaaaatgtttcagaaacagaaatatatcagcaaaacagaccgaaagaaacttgccatcaactt

SEQ ID NO: 670929 - DNA, 120 bp, Artificial Sequence
  ENSG00000185610_7 (sequence is synthesized)
gggactaaaggaatcacaggtgaaaatttggtttcagaacaggaggatgaaatggcggaattccaaagaaaaggaagtgctttccaacaggtgtatccaagaagtaggtcttcaagagga

SEQ ID NO: 670930 - DNA, 120 bp, Artificial Sequence
  ENSG00000185610_8 (sequence is synthesized)
tcccctctcacggtctgctctgggtttcccttctccatgtccttcaatatgggacgtcccccaacagcactcaagtccaagatggagggagaattctccagaaccttcagaaagactaat

SEQ ID NO: 670931 - DNA, 120 bp, Artificial Sequence
  ENSG00000185610_9 (sequence is synthesized)
ccaggagagttcaggggcaccacccccagaagcaaattcactgcaaggtgccttatatttatgttctgaagaagaagctggaagcaagggtgtacttactggggctgtctgaatggaagc

SEQ ID NO: 670932 - DNA, 120 bp, Artificial Sequence
  ENSG00000185610_10 (sequence is synthesized)
attcctccgtgttcatttaaaagaacgcttaatagtaacatctggactctaatgccagctagcttgtacctcatcagtgcttagagcctaacaactttggagcgatgtatgaactaatgc

SEQ ID NO: 670933 - DNA, 120 bp, Artificial Sequence
  ENSG00000185610_11 (sequence is synthesized)
gcttaatttgtaagtggaatagaatctcccagcaagtatgacagaactgaaaagaaggagagcaacagctggctcggtccctgctctgagtatgtgtatatatgtgtttgtctctatgtg

SEQ ID NO: 670934 - DNA, 120 bp, Artificial Sequence
  ENSG00000185610_12 (sequence is synthesized)
tgtgtatatacataaatatccattaaaatgtattagtagaaactagtttctctttaactattgcattgagtaaattcacttccttttatgtgaagaaaactaccattgacagaatgttat

SEQ ID NO: 670935 - DNA, 120 bp, Artificial Sequence
  ENSG00000185610_13 (sequence is synthesized)
taactttttgaaaataatgtaaaatttggactttagtgcaaactttcataccccaaaaacatgtttttaaaaattctctattttctgacttcttttggtatccagctgtaagtgaatttt

SEQ ID NO: 670936 - DNA, 120 bp, Artificial Sequence
  ENSG00000185610_14 (sequence is synthesized)
aacaccttagctcagcagtcctcaacaaatgagccactgctagatacatacactgagaatatatatttaaaatgaacctaacaagcaaattagaagaatttctgtatataactattagta

SEQ ID NO: 670937 - DNA, 120 bp, Artificial Sequence
  ENSG00000185610_15 (sequence is synthesized)
tccttaatctccaagtctctggaccatcgggccatcatgagggagagacccatttaactaataattattttttgatctcttctctgtaaagatgggcctagaccagggtttgcaaaataa

SEQ ID NO: 670938 - DNA, 120 bp, Artificial Sequence
  ENSG00000185610_16 (sequence is synthesized)
aatgcctttaagagcctgtcaggtaaatagagggtatggcccacccagagatatttgagtcaagtaatttttcaaatactgtattggccaaacaaaatgtctatgccaagaagtttgtga

SEQ ID NO: 670939 - DNA, 120 bp, Artificial Sequence
  ENSG00000185610_17 (sequence is synthesized)
cctctggctaagactaaagaaagccgtggtgtcacagttcttaaaatttttctaactggacttaaaaccacaatactaacagaatcaatgatgatttctgtttgcgcttctagttaggga

SEQ ID NO: 670940 - DNA, 120 bp, Artificial Sequence
  ENSG00000185610_18 (sequence is synthesized)
ctcaattttccacttaggtggcatacactttatatatcaggttatttttatgtattaacaaacaccacacagatgttttgtgttttttgactaccctgaaattgtatctttctaaaattg

SEQ ID NO: 670941 - DNA, 120 bp, Artificial Sequence
  ENSG00000185610_19 (sequence is synthesized)
catttctggtaacgatttgctgagttaatccagaagtttttactccaggaccaagaagaaattatgtttcactttgaaggaaatgaaacaaaaataggaaatgatgtggttttgcattaa

SEQ ID NO: 670942 - DNA, 120 bp, Artificial Sequence
  ENSG00000185610_20 (sequence is synthesized)
actcttatcaatctgtggacaagaaacactatcagaagttcattaagtggcattttgttagtgagtaagctgcataatgatggtggcttctaatttgctgaactccactagagtctgaga

SEQ ID NO: 670943 - DNA, 120 bp, Artificial Sequence
  ENSG00000185610_21 (sequence is synthesized)
agttaacgtcttttgagggtttagtgtttagaaaagatatttcaggagataacggttttaatcaacagcaggaaattattttgtacgaatagaattggacttggtatgtcaacctgtgtc

SEQ ID NO: 670944 - DNA, 120 bp, Artificial Sequence
  ENSG00000185610_22 (sequence is synthesized)
tttaccacatgatcttttacttaaaagtcattttagaagtgtgtctcagtgcctcattgtggggaatgggagcagggatctgctgacaaaagttaaaatttaaaacctgtcttaaaatga

SEQ ID NO: 670945 - DNA, 120 bp, Artificial Sequence
  ENSG00000185614_0 (sequence is synthesized)
atggacatgcacagcgctcggcttgacagcttccttagccagctccgctgggaactgttgtgtggtcgggacacaggctcaccctcaatgcctggtcccctgcagccaacctcccaaact

SEQ ID NO: 670946 - DNA, 120 bp, Artificial Sequence
  ENSG00000185614_1 (sequence is synthesized)
ggcccagatgtgcagcccagccaccagcttagggcctcgggtgccttggaagaggactcagtctgctgtgtggaggaggaggaagaggaggaggaggaagcagtggtgacagaagacagg

SEQ ID NO: 670947 - DNA, 120 bp, Artificial Sequence
  ENSG00000185614_2 (sequence is synthesized)
gatgcagccttgggaggccccagggagcatgccctggactgggactctggcttctcggaggtgtcaggcagcacatggcgagaggaagaactgcctgtatcccagcgcccagcaccctca

SEQ ID NO: 670948 - DNA, 120 bp, Artificial Sequence
  ENSG00000185614_3 (sequence is synthesized)
ctctcagtcagtggcctccccatgcccagcagggcccctgtagccagtgtaccacctgtccaccatccacggcccaagtccaccccagacgcctgcctggagcactggcagggactggaa

SEQ ID NO: 670949 - DNA, 120 bp, Artificial Sequence
  ENSG00000185614_4 (sequence is synthesized)
gcagaggactggacagcagccctactgaacaggggtcgcagtcgccagcccctggtactaggggacaattgctttgctgacttggtgcacaactggatggagctgcctgagacagggagt

SEQ ID NO: 670950 - DNA, 120 bp, Artificial Sequence
  ENSG00000185614_5 (sequence is synthesized)
gaagggggtgacggaggtgggcaccgtgcccgtgctcggccccctcagttcctgcttggcctctctgagcagcttcggcgccggctggccagggctcggcggacagctatggcaggaaag

SEQ ID NO: 670951 - DNA, 120 bp, Artificial Sequence
  ENSG00000185614_6 (sequence is synthesized)
cggctgtcatgcccacctcgcccagaacctgaactgcctgcggatgtctcacgctttgcagctctcatgagctgtcgtagccgccagcccatcatctgcaatgatgtcagctacctctga

SEQ ID NO: 670952 - DNA, 120 bp, Artificial Sequence
  ENSG00000185614_7 (sequence is synthesized)
acggagagcgaggagtcgcgcaggcaggcggaggctgagggcgccgctggccggccctcccagccctctccgcgcggctccgccggggttccaagaggagctagtaggttcggtgggggc

SEQ ID NO: 670953 - DNA, 120 bp, Artificial Sequence
  ENSG00000185615_0 (sequence is synthesized)
acgcgccctggcagcaccatgagccgccagcttctgcctgtactgctgctgctgctgctcagggcttcgtgcccatggggtcaggaacagggagcgaggagcccctcggaggagcctcca

SEQ ID NO: 670954 - DNA, 120 bp, Artificial Sequence
  ENSG00000185615_1 (sequence is synthesized)
gaggaggaaatccccaaggaggatgggatcttggtgctgagccgccacaccctgggcctggccctgcgggagcaccctgccctgctggtggaattctatgccccgtggtgtgggcactgc

SEQ ID NO: 670955 - DNA, 120 bp, Artificial Sequence
  ENSG00000185615_2 (sequence is synthesized)
caggccctggcccccgagtacagcaaggcagctgccgtgctcgcggccgagtcaatggtggtcacgctggccaaggtggatgggcccgcgcagcgcgagctggctgaggagtttggtgtg

SEQ ID NO: 670956 - DNA, 120 bp, Artificial Sequence
  ENSG00000185615_3 (sequence is synthesized)
acggagtaccctacgctcaagttcttccgcaatgggaaccgcacgcacccggaggagtacacaggaccacgggacgctgagggcattgccgagtggctgcgacggcgggtggggcccagt

SEQ ID NO: 670957 - DNA, 120 bp, Artificial Sequence
  ENSG00000185615_4 (sequence is synthesized)
gccatgcggctggaggacgaggcggccgcccaggcgctgatcggtggccgggacctagtggtcattggcttcttccaggacctgcaggacgaggacgtggccaccttcttggccttggcc

SEQ ID NO: 670958 - DNA, 120 bp, Artificial Sequence
  ENSG00000185615_5 (sequence is synthesized)
caggacgccctggacatgacctttggcctcacagaccggccgcggctctttcagcagtttggcctcaccaaggacactgtggttctcttcaagaagtttgatgaggggcgggcagacttc

SEQ ID NO: 670959 - DNA, 120 bp, Artificial Sequence
  ENSG00000185615_6 (sequence is synthesized)
cccgtggacgaggagcttggcctggacctgggggatctgtcgcgcttcctggtcacacacagcatgcgcctggtcacggagttcaacagccagacgtctgccaagatcttcgcggccagg

SEQ ID NO: 670960 - DNA, 120 bp, Artificial Sequence
  ENSG00000185615_7 (sequence is synthesized)
ctgtttgtcaaccagacgctggctgcgcaccgggagctcctagcgggctttggggaggcagctccccgcttccgggggcaggtgctgttcgtggtggtggacgtggcggccgacaatgag

SEQ ID NO: 670961 - DNA, 120 bp, Artificial Sequence
  ENSG00000185615_8 (sequence is synthesized)
cacgtgctgcagtactttggactcaaggctgaggcagcccccactctgcgcttggtcaaccttgaaaccactaagaagtatgcgcctgtggatgggggccctgtcaccgcagcgtccatc

SEQ ID NO: 670962 - DNA, 120 bp, Artificial Sequence
  ENSG00000185615_9 (sequence is synthesized)
actgctttctgccatgcagtcctcaacggccaagtcaagccctatctcctgagccaggagataccccctgattgggatcagcggccagttaagaccctcgtgggcaagaattttgagcag

SEQ ID NO: 670963 - DNA, 120 bp, Artificial Sequence
  ENSG00000185615_10 (sequence is synthesized)
gtggcttttgacgaaaccaagaatgtgtttgtcaagttctatgccccgtggtgcacccactgcaaggagatggcccctgcctgggaggcattggctgagaagtaccaagaccacgaggac

SEQ ID NO: 670964 - DNA, 120 bp, Artificial Sequence
  ENSG00000185615_11 (sequence is synthesized)
atcatcattgctgagctggatgccacggccaacgagctggatgccttcgctgtgcacggcttccctactctcaagtacttcccagcagggccaggtcggaaggtgattgaatacaaaagc

SEQ ID NO: 670965 - DNA, 120 bp, Artificial Sequence
  ENSG00000185615_12 (sequence is synthesized)
accagggacctggagactttctccaagttcctggacaacgggggcgtgctgcccacggaggagcccccggaggagccagcagccccgttcccggagccaccggccaactccactatgggg

SEQ ID NO: 670966 - DNA, 120 bp, Artificial Sequence
  ENSG00000185615_13 (sequence is synthesized)
tccaaggaggaactgtagctgcccccgtgtcacccccgccatcactgctggacaggagccacccccttgggtaccagagggagctgtgcattgtgaataaagagtgagcttggttctgga

SEQ ID NO: 670967 - DNA, 120 bp, Artificial Sequence
  ENSG00000185615_14 (sequence is synthesized)
gccactgagcctggctgtggggggagggggggtggtctttcaagctctcccaagccttactggtccctgtgctgcagcctggggggccacgaagaggcactggtgctcggcttgtccacg

SEQ ID NO: 670968 - DNA, 120 bp, Artificial Sequence
  ENSG00000185615_15 (sequence is synthesized)
gccagggctcagggcagaatggagcagcacgcttgttccctgctgggttgtcaggtgtggagagggtgctcctggggttgtggtggcctggggcactcacggccccatcccccagatgcc

SEQ ID NO: 670969 - DNA, 120 bp, Artificial Sequence
  ENSG00000185615_16 (sequence is synthesized)
caggcccaggtgtgggttggggtccggctgcagcgcccgctaacccacctgctgctgtccagtttgatgaggggcgggcagacttccccgtggacgaggagcttggcctggacctggggg

SEQ ID NO: 670970 - DNA, 120 bp, Artificial Sequence
  ENSG00000185615_17 (sequence is synthesized)
atctgtcgcgcttcctggtcacacacagcatgcgcctggtcacggagttcaacagccaggtgcgtaggctgcagtgcctgggctgggggtgtcccagggtagagtcgtccagggatgggg

SEQ ID NO: 670971 - DNA, 120 bp, Artificial Sequence
  ENSG00000185615_18 (sequence is synthesized)
ctccccgcttccgggggcaggtactggggggctgggggaaaggggcagcgggagagtggccggtgccagcatggactccctgccacaggtgctgttcgtggtggtggacgtggcggccga

SEQ ID NO: 670972 - DNA, 120 bp, Artificial Sequence
  ENSG00000185615_19 (sequence is synthesized)
acgctcaagttcttccgcaatgggaaccgcacgcacccggaggagtacacaggtgaggggcaggccggtcattgggggggcggtggccaggccgaggctgagggggactccctgcaggac

SEQ ID NO: 670973 - DNA, 120 bp, Artificial Sequence
  ENSG00000185619_0 (sequence is synthesized)
gcccagacgcacaccgcgcatgctccgagcgcggcgcccccgacgcggcgctcggctcggctcgggcatttccgcctctttgttttaaactccggacgggcttttttctcctcctcttgg

SEQ ID NO: 670974 - DNA, 120 bp, Artificial Sequence
  ENSG00000185619_1 (sequence is synthesized)
gggggacccagagggagcggcgccccctcccccctccggcgcggaccccgcgtgcgccttgctcgcccgcagccccgagaccgcaggcgtcacaatgtagcagggaccccaggcgtcgtg

SEQ ID NO: 670975 - DNA, 120 bp, Artificial Sequence
  ENSG00000185619_2 (sequence is synthesized)
ctcagaaaatggaaaaagagccagggccggaaggagggtgcagaagcgagtccgcgtgcggagccaggaggcagcgtcgcgtgggagtgctggcctgaagcctccatgccccggcagagg

SEQ ID NO: 670976 - DNA, 120 bp, Artificial Sequence
  ENSG00000185619_3 (sequence is synthesized)
gacggacacgcggacgtctagcggagaagccaaagatgttgaccaggaagatcaagctgtgggacatcaacgcccacatcacctgccgcctgtgcagcgggtacctcatcgacgccacca

SEQ ID NO: 670977 - DNA, 120 bp, Artificial Sequence
  ENSG00000185619_4 (sequence is synthesized)
cggtgaccgagtgtctgcacaccttctgcaggagctgcctggtgaagtacctggaggagaacaacacctgccccacctgcaggattgtgatccaccagagccaccccctgcagtacatcg

SEQ ID NO: 670978 - DNA, 120 bp, Artificial Sequence
  ENSG00000185619_5 (sequence is synthesized)
gtcatgacagaaccatgcaagatattgtttacaaattggtaccaggcctccaagaagcggaaatgagaaagcagagggagttctatcacaaattgggcatggaggtgccgggagacatca

SEQ ID NO: 670979 - DNA, 120 bp, Artificial Sequence
  ENSG00000185619_6 (sequence is synthesized)
agggggagacctgctctgcaaaacagcacttagattcccatcggaatggtgaaaccaaagcagacgacagttcaaacaaagaggccgcggaggagaagccggaggaggacaacgactacc

SEQ ID NO: 670980 - DNA, 120 bp, Artificial Sequence
  ENSG00000185619_7 (sequence is synthesized)
accgcagcgacgagcaggtgagcatctgcctggagtgtaacagcagcaaactgcgcgggctgaagcggaagtggatccgctgctcagcccaggcgaccgtcttgcatctgaagaagttca

SEQ ID NO: 670981 - DNA, 120 bp, Artificial Sequence
  ENSG00000185619_8 (sequence is synthesized)
tcgccaaaaaactcaacctttcatcctttaacgagctggacattttatgcaacgaggagatcctgggcaaggaccacacactcaagttcgtggttgtcactaggtggagattcaagaagg

SEQ ID NO: 670982 - DNA, 120 bp, Artificial Sequence
  ENSG00000185619_9 (sequence is synthesized)
cgccgctcctgctgcactacagacccaagatggacttgctgtgaatggtgccacacagcgcccacagactgggccctcgcacccttgggtgctcccggccgccgcgcttaagaacattgc

SEQ ID NO: 670983 - DNA, 120 bp, Artificial Sequence
  ENSG00000185619_10 (sequence is synthesized)
ctctgggtgtcatgtggaccagacttctgaatagagaatatttataacttttgtatgagagagaattcacactcaacaagacactaccagcaccacgtttacagaggatgaaaacacttc

SEQ ID NO: 670984 - DNA, 120 bp, Artificial Sequence
  ENSG00000185619_11 (sequence is synthesized)
acagtctcccagagccgatcgtcctctcccccgccccaccccgtgcttcagccttgcagggagagtgatgctccaggcaacacggttctgagtcaccttctgacacgagctccctctgct

SEQ ID NO: 670985 - DNA, 120 bp, Artificial Sequence
  ENSG00000185619_12 (sequence is synthesized)
tgctttccaggtcttgaaaatctgaattcacttcagtttagtttatgaattttaggtttcatgataagcctcaagtgtagttggacttttattgaatccttcctaagttattgaaaaaat

SEQ ID NO: 670986 - DNA, 120 bp, Artificial Sequence
  ENSG00000185619_13 (sequence is synthesized)
gtcttttcatggtgaatgacaatatttatgttgcctttagcttcttgaagatttagaagttatataaaaaattaatttaaaagcaaaccaaaagaggtttccattaacattatgatttaa

SEQ ID NO: 670987 - DNA, 120 bp, Artificial Sequence
  ENSG00000185619_14 (sequence is synthesized)
ccattgtatttaatttcccaccttatgaaacacaacagcagctccctgactggttcgcctttcattgtgtgaggtcggcacttggactcactcagaactgtcgctcacctgtggctgaca

SEQ ID NO: 670988 - DNA, 120 bp, Artificial Sequence
  ENSG00000185619_15 (sequence is synthesized)
cacccagccctggaaacggggccccagacgccacgtcgggatttctgacatgctcagcaggtagaccagaggccgtgtgaccagctcagtgctggtttacggaacaactcttacttttaa

SEQ ID NO: 670989 - DNA, 120 bp, Artificial Sequence
  ENSG00000185619_16 (sequence is synthesized)
aaattacttgttcccccaaattgttgagtgccgccgtttggtttcctatgttttctttccctgttttgattttgctgaagggagaggtggtggtggttaggatcagagctctcctggcat

SEQ ID NO: 670990 - DNA, 120 bp, Artificial Sequence
  ENSG00000185619_17 (sequence is synthesized)
ccgtggggaggatttgctggtggtggcttcgggctcatgcccagacacactcactgccccgtctgtccaaggcctccccttcccctttgctggtgggaggagctcgtgtgctccttggcc

SEQ ID NO: 670991 - DNA, 120 bp, Artificial Sequence
  ENSG00000185619_18 (sequence is synthesized)
gcttactggaagggcgtttttcagagctgcagggacagggtgagcagctgaagggctaggagggaagccggcccccgctctgcagaagctgcatttcagctgaatctgtgtttcagcctc

SEQ ID NO: 670992 - DNA, 120 bp, Artificial Sequence
  ENSG00000185619_19 (sequence is synthesized)
agttggttgcaccgttagcccctctcctcccggatggtcatgtttttgtcacattagagaataaacagccacacacacatttttttttttcctttaaaacagtaacttggaaatatgaaa

SEQ ID NO: 670993 - DNA, 120 bp, Artificial Sequence
  ENSG00000185619_20 (sequence is synthesized)
aggccagaaggaggagcaagggctgttttctggagtggttgaggtgttgtcctgcagttgtcattgtcttctccaccgggctgttcccatttatttcctgtggaactgaatccctcctcc

SEQ ID NO: 670994 - DNA, 120 bp, Artificial Sequence
  ENSG00000185619_21 (sequence is synthesized)
ctccactccttgggagcccaggtggtccttggccaccattcaggctttccaagaagccaaccaccttggagattttttttcttgaatttcgctgttttcttctgcttcctttagataaaa

SEQ ID NO: 670995 - DNA, 120 bp, Artificial Sequence
  ENSG00000185619_22 (sequence is synthesized)
agcagctcaagagaccttatcttagggatgagaaaaacatgcatattaattccatctgagtgattgtcagtgtaaggccttttaaaacaaaagcaagttctttgttaggaattggtcaaa

SEQ ID NO: 670996 - DNA, 120 bp, Artificial Sequence
  ENSG00000185619_23 (sequence is synthesized)
ttactcagttacctaagcttgctattcatccaaatcattttctagagtcactgtataagggtctatgagtagctgtgtatgaataaatattacctgtctacctcaaaatacacatactgc

SEQ ID NO: 670997 - DNA, 120 bp, Artificial Sequence
  ENSG00000185619_24 (sequence is synthesized)
tgaagcattctgtacaaccgtgtgttatcacagtgcagttttaagtgtaacgttagaacttaggcattttcctgtgtggcggaataagaaaggattaaacagttacaagcctccaaattc

SEQ ID NO: 670998 - DNA, 120 bp, Artificial Sequence
  ENSG00000185619_25 (sequence is synthesized)
aaataaaattaaatcacagttcagatgaaactgaatatcattgtaataatctcataatatatatttgtaactttgtagctatctttgaaatcacttgactttgcaatggtgctaagctga

SEQ ID NO: 670999 - DNA, 120 bp, Artificial Sequence
  ENSG00000185619_26 (sequence is synthesized)
tagatttaaatacacagacgggcgagtggcgcccgtgtcgatgtcttcagccagtggtgaccctgcttttgtaaccgcgttaacctgacaaaacctcagcagcagaagtccctatttttc

SEQ ID NO: 671000 - DNA, 120 bp, Artificial Sequence
  ENSG00000185619_27 (sequence is synthesized)
taggagttcatcgtgcagacagtcttcactacaggactcggccctggggcctctgcctctcgtctgaccttgcagccttagtcgttggaggctggagcgcaatggccctgccgtctgtgg

SEQ ID NO: 671001 - DNA, 120 bp, Artificial Sequence
  ENSG00000185619_28 (sequence is synthesized)
agcctctgggcggccttctttcctttctgtcaacctctcatttcacagaaaaaggctgaatttcattttttccagcatgaaagccaggatcggttagtggttggattctattggtttttt

SEQ ID NO: 671002 - DNA, 120 bp, Artificial Sequence
  ENSG00000185619_29 (sequence is synthesized)
ttttttaaacagatggagttactgtgaagaagttttcacaactatttatgctggtaaaacaaatgctgttaaatcaccttatgcgtcgttttcaacagcagtggggctaattacccggaa

SEQ ID NO: 671003 - DNA, 120 bp, Artificial Sequence
  ENSG00000185619_30 (sequence is synthesized)
tacggtctcaccgatgcagttttcatggacatagaaaattcaaatagaatatataatattgaatttaagatttggggggttaaaaaagaaaacttaactttataaaattatttattctat

SEQ ID NO: 671004 - DNA, 120 bp, Artificial Sequence
  ENSG00000185619_31 (sequence is synthesized)
tttaagccttctatcatattttcccatccaattgtttggtttcagtggtccagctttatttacaggcatataaaatgaaattgtgagatgttttgcaagcttctttttactttgagtagc

SEQ ID NO: 671005 - DNA, 120 bp, Artificial Sequence
  ENSG00000185619_32 (sequence is synthesized)
ttttaatttgtatgtttttatgtggatgaagagcattttttatgcttttgtgcaataggttccaatatgcatttattagacatctgtttaaatggtaatgtagcatttattttgctaaat

SEQ ID NO: 671006 - DNA, 120 bp, Artificial Sequence
  ENSG00000185619_33 (sequence is synthesized)
tgaaagggaacatagatggaattccaaaatatgtacattcagctgtttggtttttcgtttttcattgttattattgtgagaatgctgttattggggttgtgtgtgagtgcccgtcagcca

SEQ ID NO: 671007 - DNA, 120 bp, Artificial Sequence
  ENSG00000185619_34 (sequence is synthesized)
gtgatgcctcgggccacgctgtggggccacctcagtcctgcctgggtcctggtgccttggaccccacgtgcttgtggccaggctgcccctgggcagggccatgtggcctcagaccacaag

SEQ ID NO: 671008 - DNA, 120 bp, Artificial Sequence
  ENSG00000185619_35 (sequence is synthesized)
agcggagctgccctggcccaagcactgcagctgcctgcacccccgggcttcgcagccttgcttgttttctctgaacagcaacagaacagtgttcacagcgattcaaagggtggcattggg

SEQ ID NO: 671009 - DNA, 120 bp, Artificial Sequence
  ENSG00000185619_36 (sequence is synthesized)
ttggacgttctgggtacaagccaacctagtcccacgttgtacgtgaatgtttaatgtgctctcaaaacatggaaaataagtttagtgcacatagctaaatcacaaaacatccaatttctc

SEQ ID NO: 671010 - DNA, 120 bp, Artificial Sequence
  ENSG00000185619_37 (sequence is synthesized)
tgtttcctcaggaagtcattactgcgccaccacatcacatgaccttaacatgatcaatgtatttctctgccttgacatttaaatacataaattgagataagtagattagaaaatcattca

SEQ ID NO: 671011 - DNA, 120 bp, Artificial Sequence
  ENSG00000185619_38 (sequence is synthesized)
aatgataccataatttgtacgggacagggtgcgggcaatggccacgtggccaaggccctgcaggaacgcgccgaggtctccctcaccctccaggtgtccttcgcacccaacagtgcgtct

SEQ ID NO: 671012 - DNA, 120 bp, Artificial Sequence
  ENSG00000185619_39 (sequence is synthesized)
gaggaacgagctgcagtttgagcgttcccctgagatgtgcgtagcctccgtgtaaatgtccactcccatggcttaattgcctatcagacgcattttcccagacgaaagcaatgttgggtt

SEQ ID NO: 671013 - DNA, 120 bp, Artificial Sequence
  ENSG00000185619_40 (sequence is synthesized)
ggggaagacagtgcagccacccagcctttaccagcagcgtacggcagacgaaggcagtcgaggtgtggaggtgatcacgaagatacatgtgtttgactgtttaatttgaaagtttacatt

SEQ ID NO: 671014 - DNA, 120 bp, Artificial Sequence
  ENSG00000185619_41 (sequence is synthesized)
ttttatgctttgtgttggtgtgtaatttttgtactcttggtggctagtttttgtcaaatcttttttggaatattgcttaaatgttttgattttatgatagtgaagcttgtattcagtgtt

SEQ ID NO: 671015 - DNA, 120 bp, Artificial Sequence
  ENSG00000185619_42 (sequence is synthesized)
ttgccaattaatattatatgcttgtaataaaagcaaaagaaaagcttaagtgaaagtgtttctggctggaaatgtattacataaatcatttgtatgagcatgagagatgacttgctcatg

SEQ ID NO: 671016 - DNA, 120 bp, Artificial Sequence
  ENSG00000185619_43 (sequence is synthesized)
ggatgagcaatgctgtgggtattggatggaccactcaggcagcctggccgcacacacacacatgcatgctacatatgtgtacgctcagaccacatgcctgcacatatgtccacacaccag

SEQ ID NO: 671017 - DNA, 120 bp, Artificial Sequence
  ENSG00000185619_44 (sequence is synthesized)
cccacggctcccttcctcaccccagccctccccactcccaggttaaccaatgtctcgatttgcttcaggcggcatttgtaaactgtcaccctgcttgcaaaccctcatttaaattggtcc

SEQ ID NO: 671018 - DNA, 120 bp, Artificial Sequence
  ENSG00000185619_45 (sequence is synthesized)
agcatttgctaccagagtttaggccacaaactttgtaaagctcagtttgtctccttgcagaaagaggttgctgcagtttggagctggttatgccaaggaaaatacggctaaaaaagaact

SEQ ID NO: 671019 - DNA, 120 bp, Artificial Sequence
  ENSG00000185619_46 (sequence is synthesized)
tactgattcccataggtgtgtcaactgacaaatgaatgttccatctccctacgacaatttgctgcccctccccaaaaaaagcactatggccaaaatttcagtttttaaaggttaagtaaa

SEQ ID NO: 671020 - DNA, 120 bp, Artificial Sequence
  ENSG00000185619_47 (sequence is synthesized)
gatcttgaagataagtcagaaaagtcatttcacgctaaaggtcctgtgggtggtgtcagagcagatgaggcctcgcttaggagagcgaaacacaggagagaccccacattcctcccacgg

SEQ ID NO: 671021 - DNA, 120 bp, Artificial Sequence
  ENSG00000185619_48 (sequence is synthesized)
agcagcaaggccagtagccgctgtgacagtgctcactgctggcagtttccaaatctccagaggagttccttagatccttcaaaggggaaccttccagtgtgttcttcacacctgatgtgc

SEQ ID NO: 671022 - DNA, 120 bp, Artificial Sequence
  ENSG00000185619_49 (sequence is synthesized)
gtcctcacacctgatgagtctgtgctttggtgttagaggactcacacctggggctggacctgagtgtttttctaagtgtggctaccgctgacgggcaggtgccatccatcaggctgaggc

SEQ ID NO: 671023 - DNA, 120 bp, Artificial Sequence
  ENSG00000185619_50 (sequence is synthesized)
tcggctcttatgctaacctgaggccccatggctggcggccctgctggtgtggacgaccgctgtgtgcgtctcttgatggctggggagcattttgtttaaacaggatctttaaaatgaagt

SEQ ID NO: 671024 - DNA, 120 bp, Artificial Sequence
  ENSG00000185619_51 (sequence is synthesized)
gtacgcttataatacaagtgatgcttgtgtatttctcactttaggaaataaaatatttgccaatttgatagaattttgactttaacgttaatcgtatttttagatattggttagcatatt

SEQ ID NO: 671025 - DNA, 120 bp, Artificial Sequence
  ENSG00000185619_52 (sequence is synthesized)
ttatgttaggttattttcatttgattttatctagttgtacgtagaagatactgtcatcttttaggacaaagtattgtaaaattatctgttttagcccatgttctgatgacccacagctct

SEQ ID NO: 671026 - DNA, 120 bp, Artificial Sequence
  ENSG00000185619_53 (sequence is synthesized)
tcattgctcctgagaccagaacggcaagatgtttcctttcagaagctgagagccacaaggaggacagcagtgagcatctgcacagaaacgagctcagagacgcccgtgttcagtggagca

SEQ ID NO: 671027 - DNA, 120 bp, Artificial Sequence
  ENSG00000185619_54 (sequence is synthesized)
agtggaaggtgaacttcctgagacttcacttggcttgctttactgtaaaatggcaaaataatggtttggtttctgtgtaaagggaatggtgaaaccaaagcagacgacagttcaaacaaa

SEQ ID NO: 671028 - DNA, 120 bp, Artificial Sequence
  ENSG00000185619_55 (sequence is synthesized)
cggaggtgaggcccacgccccccgaccccgggggtcctgctgactccttgccctgccctgttgctggttgtggcgagggccggcgatcattaggagccagctggtcaggacacgatgcag

SEQ ID NO: 671029 - DNA, 120 bp, Artificial Sequence
  ENSG00000185619_56 (sequence is synthesized)
tgttcacggttcactgccgagttttcctggcccctcctgtgagagtccaaggtccagccagctgtgggggtcccaggcctcgatggcagtgcggggtgcagagggctggtctccttccgt

SEQ ID NO: 671030 - DNA, 120 bp, Artificial Sequence
  ENSG00000185619_57 (sequence is synthesized)
agatgcgggcacaggagggagcttcccacactgttcaggtcaccagagcctgcgcttctgtggttggttttgatgaggactcgtatttcagctcctgtctctccttgtcagaggccgtgt

SEQ ID NO: 671031 - DNA, 120 bp, Artificial Sequence
  ENSG00000185621_0 (sequence is synthesized)
atggtaacgacgctcggcccgaagatggcggccgaatggggcggaggagtgggttactcgggctcaggcccgggccggagccggtggcgctggagcgggtctgtgtgggtccgaagcgtt

SEQ ID NO: 671032 - DNA, 120 bp, Artificial Sequence
  ENSG00000185621_1 (sequence is synthesized)
ttactcctgttgggcgggctccgggccagcgccacatctactcccgtctccttgggcagttcccctccctgccggcaccacgtcccctctgacactgaggtcataaataaagttcatctt

SEQ ID NO: 671033 - DNA, 120 bp, Artificial Sequence
  ENSG00000185621_2 (sequence is synthesized)
aaggcaaatcatgtggtcaagagagatgttgatgagcatttaagaatcaagactgtctatgataaaagtgttgaagagttgctccctgagaaaaagaatcttgtaaagaacaagcttttc

SEQ ID NO: 671034 - DNA, 120 bp, Artificial Sequence
  ENSG00000185621_3 (sequence is synthesized)
ccacaagcgatttcttatttagagaagacttttcaggtccgtcgacctgcgggcactatcttacttagcagacaatgtgcaacaaaccaatacctccggaaggaaaacgatcctcacagg

SEQ ID NO: 671035 - DNA, 120 bp, Artificial Sequence
  ENSG00000185621_4 (sequence is synthesized)
tactgcaccggggagtgtgccgcacacacaaagtgcggccccgttattgttcctgaggaacatctccagcaatgccgggtctaccgtgggggtaagtggcctcatggagcagtgggtgtg

SEQ ID NO: 671036 - DNA, 120 bp, Artificial Sequence
  ENSG00000185621_5 (sequence is synthesized)
ccagaccaagaaggcatctcagatgcagactttgttctttacgttggtgctctggccaccgagagatgcagccatgaaaacatcatctcttatgcagcctattgtcagcaggaagcaaac

SEQ ID NO: 671037 - DNA, 120 bp, Artificial Sequence
  ENSG00000185621_6 (sequence is synthesized)
atggacaggccaatagcaggatatgctaacctgtgtccaaatatgatctctacccagcctcaggagtttgttgggatgctgtccacagtgaaacatgaggttattcatgccctgggtttc

SEQ ID NO: 671038 - DNA, 120 bp, Artificial Sequence
  ENSG00000185621_7 (sequence is synthesized)
tctgctgggctgtttgcattctaccatgataaagatggaaatcctctcacttcaagatttgcagatggcctcccaccttttaattatagtctgggattatatcaatggagtgataaagta

SEQ ID NO: 671039 - DNA, 120 bp, Artificial Sequence
  ENSG00000185621_8 (sequence is synthesized)
gttcgaaaagtggagagattatgggatgttcgagataataagatagttcgtcacactgtgtatctcctggtaacgcctcgtgttgttgaggaagcacgaaaacattttgattgtccagtt

SEQ ID NO: 671040 - DNA, 120 bp, Artificial Sequence
  ENSG00000185621_9 (sequence is synthesized)
ctagagggaatggaacttgaaaatcaaggtggtgtgggcactgagctcaaccattgggaaaaaaggttattagagaatgaagcgatgactggttctcacactcagaatcgagtactctct

SEQ ID NO: 671041 - DNA, 120 bp, Artificial Sequence
  ENSG00000185621_10 (sequence is synthesized)
ggacactggctggtataaagcaaattacagcatggctgagaagttagactggggccgaggaatgggctgtgactttgtcaggaagagctgtaaattctggattgatcagcagagacaaaa

SEQ ID NO: 671042 - DNA, 120 bp, Artificial Sequence
  ENSG00000185621_11 (sequence is synthesized)
gagacagatgctgagcccttactgtgacacgctcagaagtaacccactgcagctaacttgcagacaggaccagagagcagttgccgtgtgtaatttgcagaagttccctaagcctttacc

SEQ ID NO: 671043 - DNA, 120 bp, Artificial Sequence
  ENSG00000185621_12 (sequence is synthesized)
acaggaataccagtactttgatgaactcagtggaatacctgcagaagatttgccttattatggtggctccgtggaaattgctgactactgccctttcagtcaggaattcagttggcattt

SEQ ID NO: 671044 - DNA, 120 bp, Artificial Sequence
  ENSG00000185621_13 (sequence is synthesized)
aagtggtgaatatcagcgcagctcagattgtagaatattggaaaatcaaccagaaatttttaagaactatggcgctgaaaagtatggacctcattccgtttgtctaattcagaaatcagc

SEQ ID NO: 671045 - DNA, 120 bp, Artificial Sequence
  ENSG00000185621_14 (sequence is synthesized)
attcgttatggagaagtgtgagaggaagctgagttacccagactggggaagcggatgctatcaggtttcttgttctcctcaaggtctgaaagtttgggtccaagatacttcatatttgtg

SEQ ID NO: 671046 - DNA, 120 bp, Artificial Sequence
  ENSG00000185621_15 (sequence is synthesized)
tagtcgggctgggcaggtcctccctgtcagtatccagatgaatggctggattcacgatggaaacctgctctgcccatcatgttgggacttctgtgagctctgtcctccagaaacagatcc

SEQ ID NO: 671047 - DNA, 120 bp, Artificial Sequence
  ENSG00000185621_16 (sequence is synthesized)
tccagccactaacctgacccgagctctgccacttgatctttgttcctgttcctcgagcctggtggtcaccctctggcttctgctaggcaatctgtttcctctgctggctggatttcttct

SEQ ID NO: 671048 - DNA, 120 bp, Artificial Sequence
  ENSG00000185621_17 (sequence is synthesized)
gtgtatatggcactaggaatggaaaagtggatcttcaagatattcttttatgttatgttcttgtgaacaaagcacaaagtttgagtgagtgccaacctatgcagatggtagaagtggcat

SEQ ID NO: 671049 - DNA, 120 bp, Artificial Sequence
  ENSG00000185621_18 (sequence is synthesized)
tcctggctttggcttggaagaattgacgaccatcagaccttgaagcagaacttcacagcagcctgtcctcatcagcaacccaaccaccttcatcagcaacccaaccaccttcatcagcaa

SEQ ID NO: 671050 - DNA, 120 bp, Artificial Sequence
  ENSG00000185621_19 (sequence is synthesized)
cccaaccacctcgtcagcaacccaaccacctcgtcagcaacccaaccacctcgtcagcaacccagccaccttcatcagcaacccaaccacctcatcagcaacccagccaccttcatcagc

SEQ ID NO: 671051 - DNA, 120 bp, Artificial Sequence
  ENSG00000185621_20 (sequence is synthesized)
caacaccttcatctgcaacccaaccaccttcatcagcaaaccaaccaccttcttcagcaacccaaccacctcatcttggagaaggagaaggaactgcaagccaccaagtcttcatttttc

SEQ ID NO: 671052 - DNA, 120 bp, Artificial Sequence
  ENSG00000185621_21 (sequence is synthesized)
agggtttgtaatcttcccaaagttttcctttgaaaataggataatgggtggaattttcagagtgattacatacctcaacatttttattaacatacaacaatgggaaagttcatcatccat

SEQ ID NO: 671053 - DNA, 120 bp, Artificial Sequence
  ENSG00000185621_22 (sequence is synthesized)
atactgcagtcacttaaacaacagccaattattgcaagattagaattggagatcttgtcctcaaaagtataaattgtcctttgagttatagaaaataatggaattgggatttctacatat

SEQ ID NO: 671054 - DNA, 81 bp, Artificial Sequence
  ENSG00000185621_23 (sequence is synthesized)
ttgagttatagaaaataatggaattgggatttctacatatcattattatacctattttaaatttaatggcagccaggcatg

SEQ ID NO: 671055 - DNA, 120 bp, Artificial Sequence
  ENSG00000185621_24 (sequence is synthesized)
cactgtattccagcctgcacgatagagttagaccctgtatcttaaaaaaaaaaaaattaatggctggtatatagtaaacttaattcactgttcccattgttctaaagaatttttttaaat

SEQ ID NO: 671056 - DNA, 120 bp, Artificial Sequence
  ENSG00000185621_25 (sequence is synthesized)
aatgtttcattaaatcttatgatttaaccgtgcttgccctttttgccagctatgtggcagtttacggcagaactgctgtcagtgtgctggtagccctctattcatccctcctcagagccc

SEQ ID NO: 671057 - DNA, 120 bp, Artificial Sequence
  ENSG00000185621_26 (sequence is synthesized)
agcttccagaactgctatcactgtgctggtagccctctgtattcatccctcttcagagctcagcttctggttgtattctccatgagtttaataatgacatgaaaaaatgtggaagccgag

SEQ ID NO: 671058 - DNA, 120 bp, Artificial Sequence
  ENSG00000185621_27 (sequence is synthesized)
agagtaaaatactctgccctgtaaaaacatggaagacatgcaaacagaaaaaaaataattgtattgttttagataatacttaagacaactgtgaaacaacaaaaacacaactattccttt

SEQ ID NO: 671059 - DNA, 120 bp, Artificial Sequence
  ENSG00000185621_28 (sequence is synthesized)
gtgaccgatgaagataaaaagaaattctggtaaagacgggtatgcagttttttaaaatgggttaagaaattgttgcagaagaatttctaacatctgaaaatggttttatgtttaagaagg

SEQ ID NO: 671060 - DNA, 120 bp, Artificial Sequence
  ENSG00000185621_29 (sequence is synthesized)
agactcagtccacagaagctggaagattgccttcgctttaaatatcctttaccttctgcatttgacactcctcctgttactacatagattccggtccccagaagcaattttacactggta

SEQ ID NO: 671061 - DNA, 120 bp, Artificial Sequence
  ENSG00000185621_30 (sequence is synthesized)
ctagagcttaccagccccatttagtaatttttaatggctagatgaggtttaacaagaatatgaaaagaaaaaagaaaaaatatattcatgaatgataggcgatgcccattctttctctca

SEQ ID NO: 671062 - DNA, 120 bp, Artificial Sequence
  ENSG00000185621_31 (sequence is synthesized)
agctaatgaagtcctatggcattctaaccacaaccctcggacagactcctcctattcctccatggcattgtaaccacaaccctcggacagactcctcctattcctccatggcattgtaac

SEQ ID NO: 671063 - DNA, 120 bp, Artificial Sequence
  ENSG00000185621_32 (sequence is synthesized)
cacaaccctcggacagactcctcctactcctccatggcattgtaaccacaaccctcggacagactcctcctactcctccatggcattgtaaccacaaccctcggacagactcctcctact

SEQ ID NO: 671064 - DNA, 120 bp, Artificial Sequence
  ENSG00000185621_33 (sequence is synthesized)
cctccatggcattgtaaccacaaccctcggacagactcctcctattcctccatggcattgtaaccacaaccctcggacagactcctcctattcctccatggcattgtaaccacaaccctc

SEQ ID NO: 671065 - DNA, 120 bp, Artificial Sequence
  ENSG00000185621_34 (sequence is synthesized)
ggacagactcctcctattcctccatggcattgtaaccacaaccctcggacagactcctattcctccatggcattgtaaccacaaccctcggacagactcctcctattcctccatggcatt

SEQ ID NO: 671066 - DNA, 120 bp, Artificial Sequence
  ENSG00000185621_35 (sequence is synthesized)
gtaaccacaaccctcggacagactccttctgttcctcctttcctcgtccttccctgcttttcgtccattcagcatatagctattcagtactccattgaagaaattatgctaagtgagcaa

SEQ ID NO: 671067 - DNA, 120 bp, Artificial Sequence
  ENSG00000185621_36 (sequence is synthesized)
agcaacataattactaagaattaattctgattatttggcactagagccaacagcaaccccagcacagaggaaagtcgcttttttttcaaatgcataaatttaaagtatgtatttgcatgc

SEQ ID NO: 671068 - DNA, 120 bp, Artificial Sequence
  ENSG00000185621_37 (sequence is synthesized)
agttttaaatgggaggtatttgtcattgtgaaaagctgggaatctcaaacatagtcaacttaactaaaaagaagctaatacaggttgagcattcctaatccaaaaatccagaatccaaat

SEQ ID NO: 671069 - DNA, 120 bp, Artificial Sequence
  ENSG00000185621_38 (sequence is synthesized)
tgctccaaaatctgaaactttctgaatgctgacctgatactacaagtagaaaattccacatacaagtacttaacacaaactttgtttcatgcacaaactactaaaaatattgtataaaat

SEQ ID NO: 671070 - DNA, 120 bp, Artificial Sequence
  ENSG00000185621_39 (sequence is synthesized)
taccttcaggcagtgtgtgtagttatatatgaaacatgaatttcatgtttagacttgggtccatgcccaagatacctcattaggtatctgtaaatatccgaaatccaaaaaaaagtctga

SEQ ID NO: 671071 - DNA, 120 bp, Artificial Sequence
  ENSG00000185621_40 (sequence is synthesized)
aatctgaaacacttctggtcccaagcatttcagtaagtgatgctcaacctgcgtaatggtctgcgggccagtgctcattttctgcctatgttgtacatactttaaattgtgtaaattaaa

SEQ ID NO: 671072 - DNA, 120 bp, Artificial Sequence
  ENSG00000185621_41 (sequence is synthesized)
agtcaaagcaaagagtctatttttaaagaaacttacaataatctaaacatatacttcttatgattatgaatcatcctgcaaagctgaatgaagaattttaccaaaaatacaatgaattaa

SEQ ID NO: 671073 - DNA, 120 bp, Artificial Sequence
  ENSG00000185621_42 (sequence is synthesized)
tcatatatttgagagtcacagtgataggttcgactatattttgactgttgtgtagtggcaccgtttaggtagtattgtttctgagcatggtgctttttatacttgaaatatatttttgct

SEQ ID NO: 671074 - DNA, 120 bp, Artificial Sequence
  ENSG00000185621_43 (sequence is synthesized)
ttattttttattgatataattatatttgcactaatggctttctgaagaaaatattatagatgacattttttgtatatatatttattaagcttgggaacctggtcgcccagtgttttctct

SEQ ID NO: 671075 - DNA, 120 bp, Artificial Sequence
  ENSG00000185621_44 (sequence is synthesized)
ggacaaatgtgaaactggataaagtatggataaagtcttgagttcctcagggtaactgtgttgatgtctcccgtcctcttcagtaaggcttgaatatgattttactcatcattgattctg

SEQ ID NO: 671076 - DNA, 120 bp, Artificial Sequence
  ENSG00000185621_45 (sequence is synthesized)
catagtgtacccagcaagacttagaaggacactgaacctgtcagagattttaagaggcacattttagtcactttgaatatggtagtggtgggcgcggtgactgaagcctgtaatctcagc

SEQ ID NO: 671077 - DNA, 120 bp, Artificial Sequence
  ENSG00000185621_46 (sequence is synthesized)
acttcgggaggccaaggcaagcagatcacgagatcaggagtttgaggttacagtgagctgatcgcaccactgcactgcagcctggatgacagagtgagactttcttgggaaaaaaaaaaa

SEQ ID NO: 671078 - DNA, 120 bp, Artificial Sequence
  ENSG00000185621_47 (sequence is synthesized)
tgacagtgaagcagacttttagaatccgagatgtcattgcagaattattggtataaaattcagctgcaaagtgaagaaattgaaatggcccacacgttgatatcctgtggcaggttatac

SEQ ID NO: 671079 - DNA, 120 bp, Artificial Sequence
  ENSG00000185621_48 (sequence is synthesized)
ccttcatgttagcaaagacgaagccacgtcgctgtgttaagagggacaggctgggccggctgcagctgtagtggaagtgagggacacagggaaggaatggggagcagcaatttggggaca

SEQ ID NO: 671080 - DNA, 120 bp, Artificial Sequence
  ENSG00000185621_49 (sequence is synthesized)
gtagactggagtcactttctgactcaaaaagggtcaagtacttattaaaaactatcttggttttctgttcagacttaggctcattttgatcattttaaggtcccagttgtcaaaaatatc

SEQ ID NO: 671081 - DNA, 120 bp, Artificial Sequence
  ENSG00000185621_50 (sequence is synthesized)
aagtgaatttgtctcaggttttcagaaacaaaatttacaggaaggaagcaaaagccatgtcagtagccttgagctgacagctttaaagaaactggcaaacaggtaggttgtcctcatata

SEQ ID NO: 671082 - DNA, 120 bp, Artificial Sequence
  ENSG00000185621_51 (sequence is synthesized)
gatccttccagtattctgaaaaacatccttttatttcttaaaaccagtaacccttacatttttcctataggatagttatttttgttgagatcaaatagacattctataaatgttataaat

SEQ ID NO: 671083 - DNA, 120 bp, Artificial Sequence
  ENSG00000185621_52 (sequence is synthesized)
tatgcttgcagttactcagcctatctaggcttaaggtttatcaatatttgaagttgaaacatcatcttatgaggtttagttttaggaagataaataaatatatcaaagtatttcataaag

SEQ ID NO: 671084 - DNA, 120 bp, Artificial Sequence
  ENSG00000185621_53 (sequence is synthesized)
ttgtatcaatgttccttctaacattagaagacttactgactgaggccatctgtgaacgactaggtgatctcagaatccttccagctctaataccctctgactaacactcacccagaattg

SEQ ID NO: 671085 - DNA, 120 bp, Artificial Sequence
  ENSG00000185621_54 (sequence is synthesized)
ctgtctgtgctggctgtgatctgcctccaggagcatacgccatcctgcgtgctgtgtccatcacagtgtctgtgctcggtgccttaccactgtccgtgtccttggacgctgactggacag

SEQ ID NO: 671086 - DNA, 120 bp, Artificial Sequence
  ENSG00000185621_55 (sequence is synthesized)
agaggagcctgtctctcagggcacatgagtcgtcgtggcaggaggagacgggcctcagtcacagtgtcacagacccttgtcacagtggacactagtcattcctgccatgtccttgcagcc

SEQ ID NO: 671087 - DNA, 120 bp, Artificial Sequence
  ENSG00000185621_56 (sequence is synthesized)
caggaggactaaaaagattttaatgaagtctgtgttactcattctgaagaaaagaacttacctgagaggagtaatatttttttaatatatattgggtcagggacagggatggagtggttg

SEQ ID NO: 671088 - DNA, 120 bp, Artificial Sequence
  ENSG00000185621_57 (sequence is synthesized)
atggagtggttgttttatgtttacatttttaataagtaaaatagaagatttaagaactaatatttatggtattgaactttaagtgtgatatattccttagaaaaacacaactttaataaa

SEQ ID NO: 671089 - DNA, 120 bp, Artificial Sequence
  ENSG00000185621_58 (sequence is synthesized)
caattccagcgtaggagaagttcctacagaagcactggcgtggtgcttctacgttcccgttagtatcagtgctctcttttgatcgcaggcctgtaatcagccttgatgtttttcacttga

SEQ ID NO: 671090 - DNA, 120 bp, Artificial Sequence
  ENSG00000185621_59 (sequence is synthesized)
tttcctagactttatttaatgaaaataattcataattatggtaaaacttattcaagcaggttataaactgaaaaatgtttacgtccctttaccccttcagctctccagatgcactttcca

SEQ ID NO: 671091 - DNA, 120 bp, Artificial Sequence
  ENSG00000185621_60 (sequence is synthesized)
gatacagtcactccttactttttttgtatatactttcataaatgttatatatgtatgtgtgtgcaaacacacgctgaattgtctattttttcatgggttcacatatttatgcaacttttt

SEQ ID NO: 671092 - DNA, 120 bp, Artificial Sequence
  ENSG00000185621_61 (sequence is synthesized)
aatctttcctccgggacttagtttccaagatctaatgtgggaactcttaaagcaaactgtatttttagtgttaagattacaggaatcttgcatttgccagattgcctctggtagacagga

SEQ ID NO: 671093 - DNA, 120 bp, Artificial Sequence
  ENSG00000185621_62 (sequence is synthesized)
atagcatgctgcctgggtttggagtggggttaggagaccgtgattagactgttattaatgtgataacccaagtttttagtcaaagtgaaagagagaaaagtgaagcacttcgtttgactt

SEQ ID NO: 671094 - DNA, 120 bp, Artificial Sequence
  ENSG00000185621_63 (sequence is synthesized)
ctctgcctttctcgttctatgaacatggcaaggtatgaaacttatactagaattttattatgcttgttcttagggacctaactgcaaggtatttaaaaagaataaaaaagcacctgctgg

SEQ ID NO: 671095 - DNA, 120 bp, Artificial Sequence
  ENSG00000185621_64 (sequence is synthesized)
ataatcattctttccctgacctttcattgtgagatggtctactgaattttttctgggtgtagttgtcccctgttctccagatcacctttttccctctttcatgtggatacagtgttggct

SEQ ID NO: 671096 - DNA, 120 bp, Artificial Sequence
  ENSG00000185621_65 (sequence is synthesized)
ttatgaagtatttgggtgtttaaaaacccaaatcaagaggatttcctatagaacccaaattctttcttagctactttcctgactaaaatagtaacattattaatgaagtaatatagcagc

SEQ ID NO: 671097 - DNA, 120 bp, Artificial Sequence
  ENSG00000185621_66 (sequence is synthesized)
taccagttggtttccatgtttttaactgctataaaatattctcttttttgtatttaaactttgatgtacaaatggactgaagacaatgtgcaacaaaccaatacctccggaaggaaaacg

SEQ ID NO: 671098 - DNA, 120 bp, Artificial Sequence
  ENSG00000185621_67 (sequence is synthesized)
aatgaaattaatactgagcttatagcttaagaaaatgctgacattttatgctgaagcaaaatatacttattaattatttgaatcttgtacagttagctgtccgttattcataccaactcc

SEQ ID NO: 671099 - DNA, 120 bp, Artificial Sequence
  ENSG00000185621_68 (sequence is synthesized)
attcattcattcgttcattcaataaatacttttgttgttggttttaaaatagggtctcactccttctgcgcaggctggagtgcagtggcaatctggactcactaatcctggacttcccgg

SEQ ID NO: 671100 - DNA, 83 bp, Artificial Sequence
  ENSG00000185621_69 (sequence is synthesized)
tgcagtggcaatctggactcactaatcctggacttcccgggctcaagcagtcctctcacctcagcttcctgcgtgctgtgtat

SEQ ID NO: 671101 - DNA, 120 bp, Artificial Sequence
  ENSG00000185624_0 (sequence is synthesized)
gctctcgtcgcccccgctgtcccggcggcgccaaccgaagcgccccgcctgatccgtgtccgacatgctgcgccgcgctctgctgtgcctggccgtggccgccctggtgcgcgccgacgc

SEQ ID NO: 671102 - DNA, 120 bp, Artificial Sequence
  ENSG00000185624_1 (sequence is synthesized)
ccccgaggaggaggaccacgtcctggtgctgcggaaaagcaacttcgcggaggcgctggcggcccacaagtacctgctggtggagttctatgccccttggtgtggccactgcaaggctct

SEQ ID NO: 671103 - DNA, 120 bp, Artificial Sequence
  ENSG00000185624_2 (sequence is synthesized)
ggcccctgagtatgccaaagccgctgggaagctgaaggcagaaggttccgagatcaggttggccaaggtggacgccacggaggagtctgacctggcccagcagtacggcgtgcgcggcta

SEQ ID NO: 671104 - DNA, 120 bp, Artificial Sequence
  ENSG00000185624_3 (sequence is synthesized)
tcccaccatcaagttcttcaggaatggagacacggcttcccccaaggaatatacagctggcagagaggctgatgacatcgtgaactggctgaagaagcgcacgggcccggctgccaccac

SEQ ID NO: 671105 - DNA, 120 bp, Artificial Sequence
  ENSG00000185624_4 (sequence is synthesized)
cctgcctgacggcgcagctgcagagtccttggtggagtccagcgaggtggctgtcatcggcttcttcaaggacgtggagtcggactctgccaagcagtttttgcaggcagcagaggccat

SEQ ID NO: 671106 - DNA, 120 bp, Artificial Sequence
  ENSG00000185624_5 (sequence is synthesized)
cgatgacataccatttgggatcacttccaacagtgacgtgttctccaaataccagctcgacaaagatggggttgtcctctttaagaagtttgatgaaggccggaacaactttgaagggga

SEQ ID NO: 671107 - DNA, 120 bp, Artificial Sequence
  ENSG00000185624_6 (sequence is synthesized)
ggtcaccaaggagaacctgctggactttatcaaacacaaccagctgccccttgtcatcgagttcaccgagcagacagccccgaagatttttggaggtgaaatcaagactcacatcctgct

SEQ ID NO: 671108 - DNA, 120 bp, Artificial Sequence
  ENSG00000185624_7 (sequence is synthesized)
gttcttgcccaagagtgtgtctgactatgacggcaaactgagcaacttcaaaacagcagccgagagcttcaagggcaagatcctgttcatcttcatcgacagcgaccacaccgacaacca

SEQ ID NO: 671109 - DNA, 120 bp, Artificial Sequence
  ENSG00000185624_8 (sequence is synthesized)
gcgcatcctcgagttctttggcctgaagaaggaagagtgcccggccgtgcgcctcatcaccctggaggaggagatgaccaagtacaagcccgaatcggaggagctgacggcagagaggat

SEQ ID NO: 671110 - DNA, 120 bp, Artificial Sequence
  ENSG00000185624_9 (sequence is synthesized)
cacagagttctgccaccgcttcctggagggcaaaatcaagccccacctgatgagccaggagctgccggaggactgggacaagcagcctgtcaaggtgcttgttgggaagaactttgaaga

SEQ ID NO: 671111 - DNA, 120 bp, Artificial Sequence
  ENSG00000185624_10 (sequence is synthesized)
ttctatgccccatggtgtggtcactgcaaacagttggctcccatttgggataaactgggagagacgtacaaggaccatgagaacatcgtcatcgccaagatggactcgactgccaacgag

SEQ ID NO: 671112 - DNA, 120 bp, Artificial Sequence
  ENSG00000185624_11 (sequence is synthesized)
gtggaggccgtcaaagtgcacagcttccccacactcaagttctttcctgccagtgccgacaggacggtcattgattacaacggggaacgcacgctggatggttttaagaaattcctggag

SEQ ID NO: 671113 - DNA, 120 bp, Artificial Sequence
  ENSG00000185624_12 (sequence is synthesized)
agcggtggccaggatggggcaggggatgatgacgatctcgaggacctggaagaagcagaggagccagacatggaggaagacgatgatcagaaagctgtgaaagatgaactgtaatacgca

SEQ ID NO: 671114 - DNA, 120 bp, Artificial Sequence
  ENSG00000185624_13 (sequence is synthesized)
aagccagacccgggcgctgccgagacccctcgggggctgcacacccagcagcagcgcacgcctccgaagcctgcggcctcgcttgaaggagggcgtcgccggaaacccagggaacctctc

SEQ ID NO: 671115 - DNA, 120 bp, Artificial Sequence
  ENSG00000185624_14 (sequence is synthesized)
tgaagtgacacctcacccctacacaccgtccgttcacccccgtctcttccttctgcttttcggtttttggaaagggatccatctccaggcagcccaccctggtggggcttgtttcctgaa

SEQ ID NO: 671116 - DNA, 120 bp, Artificial Sequence
  ENSG00000185624_15 (sequence is synthesized)
accatgatgtactttttcatacatgagtctgtccagagtgcttgctaccgtgttcggagtctcgctgcctccctcccgcgggaggtttctcctctttttgaaaattccgtctgtgggatt

SEQ ID NO: 671117 - DNA, 120 bp, Artificial Sequence
  ENSG00000185624_16 (sequence is synthesized)
tttagacatttttcgacatcagggtatttgttccaccttggccaggcctcctcggagaagcttgtcccccgtgtgggagggacggagccggactggacatggtcactcagtaccgcctgc

SEQ ID NO: 671118 - DNA, 120 bp, Artificial Sequence
  ENSG00000185624_17 (sequence is synthesized)
agtgtcgccatgactgatcatggctcttgcatttttgggtaaatggagacttccggatcctgtcagggtgtcccccatgcctggaagaggagctggtggctgccagccctggggcccggc

SEQ ID NO: 671119 - DNA, 120 bp, Artificial Sequence
  ENSG00000185624_18 (sequence is synthesized)
acaggcctgggccttccccttccctcaagccagggctcctcctcctgtcgtgggctcattgtgaccactggcctctctacagcacggcctgtggcctgttcaaggcagaaccacgaccct

SEQ ID NO: 671120 - DNA, 120 bp, Artificial Sequence
  ENSG00000185624_19 (sequence is synthesized)
tgactcccgggtggggaggtggccaaggatgctggagctgaatcagacgctgacagttcttcaggcatttctatttcacaatcgaattgaacacattggccaaataaagttgaaatttta

SEQ ID NO: 671121 - DNA, 120 bp, Artificial Sequence
  ENSG00000185624_20 (sequence is synthesized)
tgtaccccagatactcaggaggctgaggttgggaagattgcttgagcccagtgggtggaggctgcagtgagccaagattctgccactaccctccagctgggtaacagagtgagcccctgt

SEQ ID NO: 671122 - DNA, 120 bp, Artificial Sequence
  ENSG00000185624_21 (sequence is synthesized)
gtcaaaagaaaaaagaaaatgcagagagatcagagaaaaaaaatgggtttgtgatcctgttattcagagacagaatcaccctcttccctctccactccccataaacacaaccacagtctc

SEQ ID NO: 671123 - DNA, 120 bp, Artificial Sequence
  ENSG00000185624_22 (sequence is synthesized)
acgtacactggggtttaggaggcgggcggacggcaccgggcctcttccatggtgggagaacatcttacttaggttgattcaggtgtcctcagcctggctggcagagagcagagacgggag

SEQ ID NO: 671124 - DNA, 120 bp, Artificial Sequence
  ENSG00000185624_23 (sequence is synthesized)
tagagaccagagcattccagtcttccttccttccgtcatccattgaggaggggtccacagcctgcagctggcagttctgcacgtgtcccccctggcctgggctctacagggtctgcccta

SEQ ID NO: 671125 - DNA, 120 bp, Artificial Sequence
  ENSG00000185624_24 (sequence is synthesized)
aacagagcgagactgtctcaaaaacaaataaaaaagaaaatagctttgaccacatgggtgccctgaaaaggctaggggccctggggatgggccacacttcaaggttgctggaggaccacg

SEQ ID NO: 671126 - DNA, 120 bp, Artificial Sequence
  ENSG00000185624_25 (sequence is synthesized)
tggaggaccacgtgcgccaggcttgcattgtggatgtgaagccagctgttgaattcacgggcagccataaggccgtgaccagagccagtcttactgtcgaggaacagccatgtcctgtac

SEQ ID NO: 671127 - DNA, 120 bp, Artificial Sequence
  ENSG00000185624_26 (sequence is synthesized)
agggctgctggctgctgtgacttcccacgtccagggagacccgggcccaggggctgtgctcccagcagcaatgctcagtcagggccctctttctgtccacagtttgatgaaggccggaac

SEQ ID NO: 671128 - DNA, 120 bp, Artificial Sequence
  ENSG00000185624_27 (sequence is synthesized)
tgtggcactgcccttgaactgtctttagagagggactggcctgccgacttggaagggcaggggcagctgtctgagcggtggggaggccgggttccagaggcttggagggatcccgttcct

SEQ ID NO: 671129 - DNA, 120 bp, Artificial Sequence
  ENSG00000185624_28 (sequence is synthesized)
caggccgggttctctgtccacttgtgccctgagggtcttgtgaggagttttcatcctggaagaaccttcgaatggagaacctgtcttgtctggtgccatcctgggggcggctggctgagg

SEQ ID NO: 671130 - DNA, 120 bp, Artificial Sequence
  ENSG00000185624_29 (sequence is synthesized)
tctgtttggagactgaccagcgaggagagggagactggtgcctttctggccacatgggctgtttgtgctgccccctgttcctaggagcagcagcatggctgtagctctcggggtgacacc

SEQ ID NO: 671131 - DNA, 120 bp, Artificial Sequence
  ENSG00000185624_30 (sequence is synthesized)
gtagtcttaaagggaaagtctaggggagatccttgccttagttgcctgtggggaataagaagtcagcaaccattgaaaggtttgtctggctgtgctgatggtgacatagcagagtggggg

SEQ ID NO: 671132 - DNA, 120 bp, Artificial Sequence
  ENSG00000185624_31 (sequence is synthesized)
ctggtgttggttggtggtagtttgtcgttcacggcctctgtcctgatattgcccaagaacaccaggctatcagctcagccttgtgcgttaggaggggttatcttggtgagtagataaggt

SEQ ID NO: 671133 - DNA, 120 bp, Artificial Sequence
  ENSG00000185624_32 (sequence is synthesized)
ttttatgaagggaaatgccagaggaaaaagggaagcactgctgagggatcaaggctgctttagggatcaaggctgctttctagcatctcatttccgcttccagatgccccttggtgtggc

SEQ ID NO: 671134 - DNA, 120 bp, Artificial Sequence
  ENSG00000185624_33 (sequence is synthesized)
agggctcccttgctgcccgccttgggggccatgtcaggggctccctgggggtgagagccgggctgggagccggggggccgtcccgatgcccgccctgcgcacggcaggatcttcctgtta

SEQ ID NO: 671135 - DNA, 120 bp, Artificial Sequence
  ENSG00000185624_34 (sequence is synthesized)
gtgcgagaagaacaggatcgacctgtgtgagcaaacagagcaagccagtgtccagccttgccgagtcctccccgggggccgacccggaaggcgccccgctcctgcccaccccaccttcag

SEQ ID NO: 671136 - DNA, 120 bp, Artificial Sequence
  ENSG00000185624_35 (sequence is synthesized)
agcagtccttccgatggtgtctcagaggagaatcccaagccttcctcacgtccataaggatttgagctctgtccctggggtgggaaccttgtgcctgacacagctgctaactctattgac

SEQ ID NO: 671137 - DNA, 120 bp, Artificial Sequence
  ENSG00000185624_36 (sequence is synthesized)
ggagaagagctgtgggagctccttcagaagcacccacctttgtttttcgagagagatgggatctcactatattgcctaggctgtttttgaactcccaatgtgctggattccgggtgtgag

SEQ ID NO: 671138 - DNA, 120 bp, Artificial Sequence
  ENSG00000185624_37 (sequence is synthesized)
ccaccggaccgggcctgctctgcctttctctagggaggaggagccaatgccaggagattggctctgggccgggaccagcccctgcactcatccctgtcttccacaggtcattgattacaa

SEQ ID NO: 671139 - DNA, 120 bp, Artificial Sequence
  ENSG00000185627_0 (sequence is synthesized)
gagcatttccggcagccatccccgcggtgctgacatcccggttgttcttctgtgccgggggtcttcctgctgtcatgaaggacgtaccgggcttcctacagcagagccagaactccgggc

SEQ ID NO: 671140 - DNA, 120 bp, Artificial Sequence
  ENSG00000185627_1 (sequence is synthesized)
ccgggcagcccgctgtgtggcaccgtctggaggagctctacacgaagaagttgtggcatcagctgacacttcaggtgcttgattttgtgcaggatccgtgctttgcccaaggagatggtc

SEQ ID NO: 671141 - DNA, 120 bp, Artificial Sequence
  ENSG00000185627_2 (sequence is synthesized)
tcattaagctttatgaaaactttatcagtgaatttgaacacagggtgaaccctttgtccctcgtggaaatcattcttcatgtagttagacagatgactgatcctaatgtggctcttactt

SEQ ID NO: 671142 - DNA, 120 bp, Artificial Sequence
  ENSG00000185627_3 (sequence is synthesized)
ttctggaaaagactcgtgagaaggtgaaaagtagtgatgaggcagtgatcctgtgtaaaacagcaattggagctctaaaattaaacatcggggacctacaggttacaaaggaaacaattg

SEQ ID NO: 671143 - DNA, 120 bp, Artificial Sequence
  ENSG00000185627_4 (sequence is synthesized)
aagatgttgaagaaatgctcaacaaccttcctggtgtgacatcggttcacagtcgtttctatgatctctccagtaaatactatcaaacaatcggaaaccacgcgtcctactacaaagatg

SEQ ID NO: 671144 - DNA, 120 bp, Artificial Sequence
  ENSG00000185627_5 (sequence is synthesized)
ctctgcggtttttgggctgtgttgacatcaaggatctaccagtgtctgagcagcaggagagagccttcacgctggggctagcaggacttctcggcgagggagtttttaactttggagaac

SEQ ID NO: 671145 - DNA, 120 bp, Artificial Sequence
  ENSG00000185627_6 (sequence is synthesized)
aggaatactgaccggcagtggctgattgacaccctctatgccttcaacagtggcaacgtagagcggttccagactctgaagactgcctggggccagcagcctgatttagcagctaatgaa

SEQ ID NO: 671146 - DNA, 120 bp, Artificial Sequence
  ENSG00000185627_7 (sequence is synthesized)
gcccagcttctgaggaaaattcagttgttgtgcctcatggagatgactttcacacgacctgccaatcacagacaactcacttttgaagaaattgccaaaagtgctaaaatcacagtgaat

SEQ ID NO: 671147 - DNA, 120 bp, Artificial Sequence
  ENSG00000185627_8 (sequence is synthesized)
gaggtggagcttctggtgatgaaggccctttcggtggggctggtgaaaggcagtatagacgaggtggacaaacgagtccacatgacctgggtgcagccccgagtgttggatttgcaacag

SEQ ID NO: 671148 - DNA, 120 bp, Artificial Sequence
  ENSG00000185627_9 (sequence is synthesized)
atcaagggaatgaaggaccgcctggagttctggtgcacggatgtgaagagcatggagatgctggtggagcaccaggcccatgacatcctcacctagggccccctggttccccgtcgtgtc

SEQ ID NO: 671149 - DNA, 120 bp, Artificial Sequence
  ENSG00000185627_10 (sequence is synthesized)
tcctttgactcacctgagagaggcgtttgcagccaatgaagctggctgctcagacggtcgacattgaatttgggtgggggttgggatcctgtctgaagtacagactgttcttgctctaaa

SEQ ID NO: 671150 - DNA, 120 bp, Artificial Sequence
  ENSG00000185627_11 (sequence is synthesized)
aacaggactgtccctgatgggagccaggccacagggaggaggcttctttgtgggtctctcctgcagagggtgggggtctcagggtcttaggtgatacgggagagaaagaacgtgccaggc

SEQ ID NO: 671151 - DNA, 120 bp, Artificial Sequence
  ENSG00000185627_12 (sequence is synthesized)
aggaggccccctgaagtctgtgtactccgaggtggatctccatccccatccacctgtacggacatcttttccgttgcggtttgagaatgttcctataataaacccctctgctttgttctt

SEQ ID NO: 671152 - DNA, 120 bp, Artificial Sequence
  ENSG00000185627_13 (sequence is synthesized)
gtctttctatactttacagcctgatttagcagctaatgaagcccagcttctgaggaaaattcagttgttgtgcctcatggaggtaagcgaacacccaggagccactttgtctgtggtttc

SEQ ID NO: 671153 - DNA, 120 bp, Artificial Sequence
  ENSG00000185627_14 (sequence is synthesized)
agattttggtcaggtgggggcgctgcactctccaagcctgtgctgagcagtgtgagctttcagtggtgctgcttctgctgtgcgccgctctcttcaccaccttccttttcctttgctacc

SEQ ID NO: 671154 - DNA, 120 bp, Artificial Sequence
  ENSG00000185627_15 (sequence is synthesized)
acttgctcttctaagtttatatttggctcttagctcagacgacaccctcccaccccactgccaccaccctgaggccttccctgaccatctgaactgagatgaagtagctgcccctctccc

SEQ ID NO: 671155 - DNA, 120 bp, Artificial Sequence
  ENSG00000185627_16 (sequence is synthesized)
cgtgatgcagttgttgcctcattgcatgtcgcttcttgtgtacacgcacatctgtctttccccactagaacttaagcttcgtcaggaagtggcccttagatttctggtttgccgtggtca

SEQ ID NO: 671156 - DNA, 120 bp, Artificial Sequence
  ENSG00000185627_17 (sequence is synthesized)
cccctggtcaaccctggcaaattgtggcctcaagtacttgttcggggattgaacaatggctactgtcagaaactcctgtaaggcattttgctgttatccttcttatctaagcattaaaag

SEQ ID NO: 671157 - DNA, 120 bp, Artificial Sequence
  ENSG00000185627_18 (sequence is synthesized)
cttgttcttaacaagatatatgtctaatattaggaaactttttagtatgtggggtactaataagatctctattttcagagccaatattgacaaaacatccttatcagttctctattttta

SEQ ID NO: 671158 - DNA, 120 bp, Artificial Sequence
  ENSG00000185627_19 (sequence is synthesized)
tttggaaaaatagtttaaaatagttaataaaattttttccagatgactttcacacgacctgccaatcacagacaactcacttttgaagaaattgccaaaagtgctaaaatcacagtgaat

SEQ ID NO: 671159 - DNA, 120 bp, Artificial Sequence
  ENSG00000185627_20 (sequence is synthesized)
gaggtacggtccctaggctcagggtgttagagcagcaaagctgccacatggaggagtcaaggctcttgtgtgagcgctgtgctccctagacagtaaaaaatgacgggaggagcggcatct

SEQ ID NO: 671160 - DNA, 120 bp, Artificial Sequence
  ENSG00000185627_21 (sequence is synthesized)
ttgggaagacagcattattagacaagaggttttggagaaggaaatactgctgttgggtttttctaagagcctaatttaatgcaagcctagggtttgaaccctgcatttaaaagcttatga

SEQ ID NO: 671161 - DNA, 120 bp, Artificial Sequence
  ENSG00000185627_22 (sequence is synthesized)
tgacaatggcactggttgtgctgacggtgccttttaatcttaagataggagctctgatcagatacgttcctggttctgtgatttgagctcacgtcgctcttacatttgctggaaatgcga

SEQ ID NO: 671162 - DNA, 120 bp, Artificial Sequence
  ENSG00000185627_23 (sequence is synthesized)
tcctgtggatttcctctgtccttgtctgctttctttcatgcaagttttttctaacgttcctgtgaaaagaattaacccggcaagtcccgtcccactcccccagctcagaggtccttttta

SEQ ID NO: 671163 - DNA, 120 bp, Artificial Sequence
  ENSG00000185627_24 (sequence is synthesized)
ctagagctgccctagagagttagctggagatgtagagtcaccccatcaggtgctgtgccggccgctcggcctgtgtctcctgcgtgtcttaacgtcccttgtgtccggatttccatttca

SEQ ID NO: 671164 - DNA, 120 bp, Artificial Sequence
  ENSG00000185627_25 (sequence is synthesized)
cattaagctttatgaaaactttatcagtgaatttgaacacaggtaaaagcctctcatccgtttttcactttgaaaatgagtgcattgatgctcggcggtgctcaaaggctggtggctttt

SEQ ID NO: 671165 - DNA, 120 bp, Artificial Sequence
  ENSG00000185627_26 (sequence is synthesized)
gtctcactttgttttataaaggagcagatccaaatggtggttaaaattgaaatataagttaactgaacttttgtgttttctgtatcagatattatgtttttattatactttatggtcaaa

SEQ ID NO: 671166 - DNA, 120 bp, Artificial Sequence
  ENSG00000185627_27 (sequence is synthesized)
aggaagtggcccttagatttctggtttgccgtggtcacccctggtcaaccctggcaaattgtggcctcaagtacttgttcggggattgaacaatggctactgtcagaaactcctatgact

SEQ ID NO: 671167 - DNA, 120 bp, Artificial Sequence
  ENSG00000185627_28 (sequence is synthesized)
aacaaaaaagaaattactcagatggattcatcctgttttgaagaaaaaaatgggaagatttgtgtaacctttagtttctacattatatttgtctccagcatttaatttacatgaaaatga

SEQ ID NO: 671168 - DNA, 120 bp, Artificial Sequence
  ENSG00000185627_29 (sequence is synthesized)
ggctaattcctcctcgctccttcactgtcccttctccagtccctcactgttacctaagccacaggtatttgtaggaagcaccatgacgccaacaccttctgagccctccccgcccacccc

SEQ ID NO: 671169 - DNA, 120 bp, Artificial Sequence
  ENSG00000185627_30 (sequence is synthesized)
tctgctgcagaataaagggcacgtgaaatccctgtagctgagacccttgttttgaaaactgaaattccagacccatggggacaaattattaaatctttcaaggatttgagagtggaaaga

SEQ ID NO: 671170 - DNA, 120 bp, Artificial Sequence
  ENSG00000185627_31 (sequence is synthesized)
tataatctaagtcaacccaatacttcagaagaggtgactaatgtcaaggctttgtaataacaaccattacaaacaatgtttttttactttttgttatatgagatttttaaagctaaacag

SEQ ID NO: 671171 - DNA, 120 bp, Artificial Sequence
  ENSG00000185627_32 (sequence is synthesized)
gactgattattatgactggattgtaagtgggcctgtgttgctaccatagtgtctgagcagcaggagagagccttcacgctggggctagcaggacttctcggcgagggagtttttaacttt

SEQ ID NO: 671172 - DNA, 120 bp, Artificial Sequence
  ENSG00000185630_0 (sequence is synthesized)
atcctcccaccatcctctaaagaggcaaagggattttttttttcttttggtcttcttttttcccccttccctgtttatcctgaaaaggatttgaagacaagcttgaaggataaaaagcct

SEQ ID NO: 671173 - DNA, 120 bp, Artificial Sequence
  ENSG00000185630_1 (sequence is synthesized)
tggtgcttcccaggagccgagccgaggagcagaagaggaagagccgggggctgccgtagcctttggagatggacgagcagcccaggctgatgcattcccatgctggggtcgggatggccg

SEQ ID NO: 671174 - DNA, 120 bp, Artificial Sequence
  ENSG00000185630_2 (sequence is synthesized)
gacaccccggcctgtcccagcacttgcaggatggggccggagggaccgagggggagggcgggaggaagcaggacattggagacattttacagcaaattatgaccatcacagaccagagtt

SEQ ID NO: 671175 - DNA, 120 bp, Artificial Sequence
  ENSG00000185630_3 (sequence is synthesized)
tggatgaggcgcaggccagaaaacatgctttaaactgccacagaatgaagcctgccttgtttaatgtgttgtgtgaaatcaaagaaaaaacagttttgagtatccgaggagcccaggagg

SEQ ID NO: 671176 - DNA, 120 bp, Artificial Sequence
  ENSG00000185630_4 (sequence is synthesized)
aggaacccacagacccccagctgatgcggctggacaacatgctgttagcggaaggcgtggcggggcctgagaagggcggagggtcggcggcagcggcggcagcggcggcggcttctggag

SEQ ID NO: 671177 - DNA, 120 bp, Artificial Sequence
  ENSG00000185630_5 (sequence is synthesized)
gggcaggttcagacaactcagtggagcattcagattacagagccaaactctcacagatcagacaaatctaccatacggagctggagaaatacgagcaggcctgcaacgagttcaccaccc

SEQ ID NO: 671178 - DNA, 120 bp, Artificial Sequence
  ENSG00000185630_6 (sequence is synthesized)
acgtgatgaatctcctgcgagagcaaagccggaccaggcccatctccccaaaggagattgagcggatggtcagcatcatccaccgcaagttcagctccatccagatgcagctcaagcaga

SEQ ID NO: 671179 - DNA, 120 bp, Artificial Sequence
  ENSG00000185630_7 (sequence is synthesized)
gcacgtgcgaggcggtgatgatcctgcgttcccgatttctggatgcgcggcggaagagacggaatttcaacaagcaagcgacagaaatcctgaatgaatatttctattcccatctcagca

SEQ ID NO: 671180 - DNA, 120 bp, Artificial Sequence
  ENSG00000185630_8 (sequence is synthesized)
acccttaccccagtgaggaagccaaagaggagttagccaagaagtgtggcatcacagtctcccaggtatcaaactggtttggaaataagcgaatccggtacaagaagaacataggtaaat

SEQ ID NO: 671181 - DNA, 120 bp, Artificial Sequence
  ENSG00000185630_9 (sequence is synthesized)
ttcaagaggaagccaatatttatgctgccaaaacagctgtcactgctaccaatgtgtcagcccatggaagccaagctaactcgccctcaactcccaactcggctggttcttccagttctt

SEQ ID NO: 671182 - DNA, 120 bp, Artificial Sequence
  ENSG00000185630_10 (sequence is synthesized)
ttaacatgtcaaactctggagatttgttcatgagcgtgcagtcactcaatggggattcttaccaaggggcccaggttggagccaacgtgcaatcacaggtggatacccttcgccatgtta

SEQ ID NO: 671183 - DNA, 120 bp, Artificial Sequence
  ENSG00000185630_11 (sequence is synthesized)
tcagccagacaggaggatacagtgatggactcgcagccagtcagatgtacagtccgcagggcatcagtgctaatggaggttggcaggatgctactaccccttcatcagtgacctccccta

SEQ ID NO: 671184 - DNA, 120 bp, Artificial Sequence
  ENSG00000185630_12 (sequence is synthesized)
cagaaggccctggcagtgttcactctgatacctccaactgatctcccagcaatcgcatcccggctgaccctgtgccccagttggggcaggggcaggagggagggtttctctcccaacgct

SEQ ID NO: 671185 - DNA, 120 bp, Artificial Sequence
  ENSG00000185630_13 (sequence is synthesized)
gaagcggtcagactggaggtcgaagcaatcagcaaacacaataagagtctccttctcttctcttctttgggatgctatttcagccaatctggacacttctttatactctcttcccttttt

SEQ ID NO: 671186 - DNA, 120 bp, Artificial Sequence
  ENSG00000185630_14 (sequence is synthesized)
tttctgggtagaagccacccttccctgcctccagctgtcagcctggttttcgtcatcttccctgcccctgtgcctctgtcctagactcccggggtccccgccctctctcatatcactgaa

SEQ ID NO: 671187 - DNA, 120 bp, Artificial Sequence
  ENSG00000185630_15 (sequence is synthesized)
ggatattttcaacaattagaggaatttaaagaggaaaaaaattacaaagaaaataataaaagtgtttgtacgttttcatgctggtggtttgaggagccaaatttacctcactcgaatccc

SEQ ID NO: 671188 - DNA, 120 bp, Artificial Sequence
  ENSG00000185630_16 (sequence is synthesized)
tcactccctatgttaacaggcaatccttctctgtttctcttattactctcactacctcttagcaggaatactccacattgccctattcattccaggcctccctgcttcctcttgctcttc

SEQ ID NO: 671189 - DNA, 120 bp, Artificial Sequence
  ENSG00000185630_17 (sequence is synthesized)
ctccctggggacagtactgattggaacactttcctcctcttccttcctagccccagctattcactggggactgtcatagctgggattctaaaggtgccacatttttcagtttcatctcca

SEQ ID NO: 671190 - DNA, 120 bp, Artificial Sequence
  ENSG00000185630_18 (sequence is synthesized)
ctaggttggttcccgggcaggaagtcaggcagcagggaaggacacgggaacagcaggtggagaattcctacagtctttcttaccctgctagcaatagctctcagtttcagaggcacagtc

SEQ ID NO: 671191 - DNA, 120 bp, Artificial Sequence
  ENSG00000185630_19 (sequence is synthesized)
tttggagaccattcagcactgagaaagcaatatttagaacctattgcaaaactgggcctgagttaggcatggtgatgaatgcatcagcaaggaatagaaagttcttatcgtgaaaccctt

SEQ ID NO: 671192 - DNA, 120 bp, Artificial Sequence
  ENSG00000185630_20 (sequence is synthesized)
caacctcaactatgccttcatagacacacacgttcatgcacatgtaggcacatgtaccatctcacatcttcactttcccgagatgccatatacaattacctacattaataactgtagcac

SEQ ID NO: 671193 - DNA, 120 bp, Artificial Sequence
  ENSG00000185630_21 (sequence is synthesized)
tatgccttttgagcccgagagagggaattagtgactctaagtgaaggtcactgacacagagaagcagtatgtgtctggggcttccaggacctgcaggcccactagcgtgcacttaccaga

SEQ ID NO: 671194 - DNA, 120 bp, Artificial Sequence
  ENSG00000185630_22 (sequence is synthesized)
atggcatacacaggacctgatcatgaggaagaccaggtttccagtgtaaactactcttgttcccaccacctctggagcactcagggagccccatacagtacttacaatgtctttaatgga

SEQ ID NO: 671195 - DNA, 120 bp, Artificial Sequence
  ENSG00000185630_23 (sequence is synthesized)
cttgattctgtttaattttttgttttatattaggcacactgtattaattttccaaaatgttataccacactatgttcttggtcctgacctattgctctggaggaaagagttgtataagaa

SEQ ID NO: 671196 - DNA, 120 bp, Artificial Sequence
  ENSG00000185630_24 (sequence is synthesized)
cgtggctcatgtgaacttttgctagcttcatttgaggacctgagaatcatggggaaagggaaggtaatgttttcattgaaatcatcacagtgatttttattccctgggaacacagcgtgt

SEQ ID NO: 671197 - DNA, 120 bp, Artificial Sequence
  ENSG00000185630_25 (sequence is synthesized)
actaaaaatacatgagaaaatagcatgtatatgaaagctattctcaaaagtcacctgagctcaccatcttcatagccaaccctaccagttataaagatggcagctctatcacttgattaa

SEQ ID NO: 671198 - DNA, 120 bp, Artificial Sequence
  ENSG00000185630_26 (sequence is synthesized)
gtgggaggtggtcaaatattttggtgcctcattttcttcatctgtgagatgggaactgttatgcctggcttactaagagtcttgtgagagactgagaagttgattttgttcatatccaat

SEQ ID NO: 671199 - DNA, 120 bp, Artificial Sequence
  ENSG00000185630_27 (sequence is synthesized)
aataaacgggttcatgccatctagggacaataaatggttttcttgttgtaacttctggttaatatcagtaccttgatgtcatcaccgtgatgacaaagagaagagttattgttgatcttc

SEQ ID NO: 671200 - DNA, 120 bp, Artificial Sequence
  ENSG00000185630_28 (sequence is synthesized)
ttggttttggtctgtctcttttcttaggataaagaaaaacttccaaactagaaaaacaggccctggttcccttagtttgcacttgaacccaatatgttgccttgtacatacttggtccct

SEQ ID NO: 671201 - DNA, 120 bp, Artificial Sequence
  ENSG00000185630_29 (sequence is synthesized)
gtcacattgactgcttgggaggcttccagggagaagtatgagaccctgaggggtgagaatgggcagctagcaagaacatggaaattctgcttggcactacagtcataaatagaaaacact

SEQ ID NO: 671202 - DNA, 120 bp, Artificial Sequence
  ENSG00000185630_30 (sequence is synthesized)
gtgtgtgctcaggggagcaggggatgccactgaagaaactcaagggaatgtgtatttgaaggaaatgcaaaaactaagtatttagcaaaatgaaattatgccttgatgactaaaaggcac

SEQ ID NO: 671203 - DNA, 120 bp, Artificial Sequence
  ENSG00000185630_31 (sequence is synthesized)
tagaaaggttgtgtctactaacttcagccctaatcagaacagatgcctagaaggagcatttttgtgacaacttcatagtgattagaatcagtggagaactccatcttagtggcaggaata

SEQ ID NO: 671204 - DNA, 120 bp, Artificial Sequence
  ENSG00000185630_32 (sequence is synthesized)
taatgaaactacccacgcaagaacatggttgaatcacatttgcttgacttagggcaaagtacgaaagagagacaaaagggttctcttggaaacaagaagagtgactccagatgtggcctg

SEQ ID NO: 671205 - DNA, 120 bp, Artificial Sequence
  ENSG00000185630_33 (sequence is synthesized)
aataattgccatgttaagttaatgcaaaagatcagaacagggctacatttgcacaggcagtttctctccgggccgtagttttcactgatgatcacctttcacagcattttccccaaccag

SEQ ID NO: 671206 - DNA, 120 bp, Artificial Sequence
  ENSG00000185630_34 (sequence is synthesized)
catttcacttagtcttctctatacccagcacctcccccggcacccccggcaagcccactatcacttccgacttccaacgtggcatccgtgagatctgtccacattaggcgaagcaggaga

SEQ ID NO: 671207 - DNA, 120 bp, Artificial Sequence
  ENSG00000185630_35 (sequence is synthesized)
acactgagagcagcaggatgggtttggaaagagcatgcctctggaaacacagcttcctgggaattcacatgaggccagtcctacagagagcaagatgcaccccaggatttcttcattttc

SEQ ID NO: 671208 - DNA, 120 bp, Artificial Sequence
  ENSG00000185630_36 (sequence is synthesized)
taatagatgtgggagtgctccattttccccgacagcgaatttcccctgagaaacgatactagaccctgggtttgcccaccttgtaactcttccttatctcctccttttcatccctaatcc

SEQ ID NO: 671209 - DNA, 120 bp, Artificial Sequence
  ENSG00000185630_37 (sequence is synthesized)
atcctccctctggcatggaattgacgcccgtgcagtacatttgccaagtggcaccttctttcaatttatgttttattttgctatggtggtgattctttatttgctggttgtcttttctca

SEQ ID NO: 671210 - DNA, 120 bp, Artificial Sequence
  ENSG00000185630_38 (sequence is synthesized)
cacatctttctctctgtctctctctttcctgctctttgtttttctgcccagaaaaacctgacttcgataccaaaaaagatgaaactacagaaactcaaatttaaaaaaaactttaaaaga

SEQ ID NO: 671211 - DNA, 120 bp, Artificial Sequence
  ENSG00000185630_39 (sequence is synthesized)
aacaaaaaaatactcaacgattctttcagctttattaacattttccattgtttcttgcgacttgtgtctcgttctttgtagtattgatgatgaacatttgataatgaatgttcttgtata

SEQ ID NO: 671212 - DNA, 120 bp, Artificial Sequence
  ENSG00000185630_40 (sequence is synthesized)
ttcagataaagaaaaaaaaaaccaaaaaagcggtctgaatttaatagtgtttataataaaaattttaaaaatgaccctcatagcacgcaaaacaggatggggaatttcccctcttctttc

SEQ ID NO: 671213 - DNA, 120 bp, Artificial Sequence
  ENSG00000185630_41 (sequence is synthesized)
tgtgacaatgcgcatcattcctgcattagtttttaacaccagactacctacattcatcatttccctcatttttcttttattttcttgcatttgtgaattagttcaagaatgctagaaaag

SEQ ID NO: 671214 - DNA, 120 bp, Artificial Sequence
  ENSG00000185630_42 (sequence is synthesized)
tgtcgagttgtgcacatccatttcttgtttcacaatgtttaaaagtgacagtaattcattttgtaaactaaaaaaaaaaaaaaaaaggttggaatagtgagcataataggtacaacctaa

SEQ ID NO: 671215 - DNA, 120 bp, Artificial Sequence
  ENSG00000185630_43 (sequence is synthesized)
cacattattatgtttattaactttgagacccagaaataaattcttttcttttcttgattcttgctcttaaaaatacaaaaaaaaaaatgttttgttttgtgttatttttggtttgtttat

SEQ ID NO: 671216 - DNA, 120 bp, Artificial Sequence
  ENSG00000185630_44 (sequence is synthesized)
tggggggctttttttaattgtcaggattatgatcttgctgtttttcttcaatatgtatacaaggtgatgtgaaaagatgacttgggcagaggagtaagaacaagtaggcttgttcttcta

SEQ ID NO: 671217 - DNA, 120 bp, Artificial Sequence
  ENSG00000185630_45 (sequence is synthesized)
ctttgcttcagaattcagttaatgccaaaagcgaagatcaagcccatgttgatgtctcgttgctcacctgcatttccagagagtgtgacactcatgcagtccctgagaaaaataaaatca

SEQ ID NO: 671218 - DNA, 120 bp, Artificial Sequence
  ENSG00000185630_46 (sequence is synthesized)
gggacatacttctccttttagccttttaaaaattcaaaaacgtttagtccaagggaactttttatgctatcaggaaaggtttttgctgtttttgattctgattatcacagccaagtactt

SEQ ID NO: 671219 - DNA, 120 bp, Artificial Sequence
  ENSG00000185630_47 (sequence is synthesized)
tgttttatttctccctaattaataactacattccatgaggcctcttccaaccaaagaggccttttcttccaggagagtcccgcaggagatgctggtatgatgggcaccattggttaagta

SEQ ID NO: 671220 - DNA, 120 bp, Artificial Sequence
  ENSG00000185630_48 (sequence is synthesized)
aactacatgcaggaagaagtccttggggccagtctgccagctgagtcctggttttggatgaagagttaatgagatattgggccaggctcaatgctgtagttttaatgctaagaggttacg

SEQ ID NO: 671221 - DNA, 120 bp, Artificial Sequence
  ENSG00000185630_49 (sequence is synthesized)
tttacttcacagagtacacctcttagtaacctctgacttaggcagctgcttaaagcaaattgcaaaactggcttgatttggaatgtttttattagaggaaaaaagaaagccatattatct

SEQ ID NO: 671222 - DNA, 120 bp, Artificial Sequence
  ENSG00000185630_50 (sequence is synthesized)
ggaaaaaaattcattttaaataccatcattcaacaaattatgttcagaaagtggtcagaacttaagcaagaaaagtaaagaaagaatgcagaattgtggagcaatgctttaggaaatatt

SEQ ID NO: 671223 - DNA, 120 bp, Artificial Sequence
  ENSG00000185630_51 (sequence is synthesized)
tctacctgaacacttgtactcttgaagtcacaacaaaataatgatgagcttttcacatcacctttatggtttcaatccctagctcaaagcttcctggaatcttttattttttgtaaactt

SEQ ID NO: 671224 - DNA, 120 bp, Artificial Sequence
  ENSG00000185630_52 (sequence is synthesized)
ttttttcttttgttaaaataaataaaacattcaatgtttttctccttttctctcttattacttctttcctttggcattttcaatttgaaatgctttcctttggttgttggttttattctc

SEQ ID NO: 671225 - DNA, 120 bp, Artificial Sequence
  ENSG00000185630_53 (sequence is synthesized)
cccctacccctccccttttcttattattcagaatataaacctgcaaagctctgctctgttttggttttgaaagtttaagcttttctgcttctgtgagagcacaggcttctgtcccttttg

SEQ ID NO: 671226 - DNA, 120 bp, Artificial Sequence
  ENSG00000185630_54 (sequence is synthesized)
attccaactgaacttttgtgttctctaatgatactaacacggtgtaggttttacagtctcctaatttgtactggtaatgcatattccaaataaatagtttcttttgttgcaaaaaaaaat

SEQ ID NO: 671227 - DNA, 120 bp, Artificial Sequence
  ENSG00000185630_55 (sequence is synthesized)
aatgtgggcttggagtcacattcagagcctctgaggcagaggggtgcctgcggtctgttcccagggagccgggcctagggtctgttcctgggaaggatctgttccgtggggcccgctgga

SEQ ID NO: 671228 - DNA, 120 bp, Artificial Sequence
  ENSG00000185630_56 (sequence is synthesized)
gccgcgttttcaatatgcaaagtgccggtgctgtgcagacctcggtggtggtggttttgcatgcagaagtgaaattcagaaggccgcgtgtgagcacgtggttttgagtatccgaggagc

SEQ ID NO: 671229 - DNA, 120 bp, Artificial Sequence
  ENSG00000185630_57 (sequence is synthesized)
agagtactctcctctgcttctacctccgggaaccccgttaccccccagcccacacaccaccaccccagttttgggtggggagaaggcaaagagtgggaagataagaacacatgtagagat

SEQ ID NO: 671230 - DNA, 120 bp, Artificial Sequence
  ENSG00000185630_58 (sequence is synthesized)
gataaaatgtcattggctccaagagacaagcttccgaaatccatggtggttgaagaacatcaaagaggagcaattatttcagtcattagggcagttccacctgttctaattgaacatttt

SEQ ID NO: 671231 - DNA, 120 bp, Artificial Sequence
  ENSG00000185630_59 (sequence is synthesized)
taggatgtagaagatgcatcatacattggtatctattcagaaggtggggacatctgctgtctgtcatgtatctgggagatgtttatctcaacaggaggcaataataatatgttttgagta

SEQ ID NO: 671232 - DNA, 120 bp, Artificial Sequence
  ENSG00000185630_60 (sequence is synthesized)
aaccccgttaccccccagcccacacaccaccaccccagttttgggtggggagaaggcaaagggagagatcatctctcaaaaagctcccatcagagcaaccattctgggactttgagcaga

SEQ ID NO: 671233 - DNA, 120 bp, Artificial Sequence
  ENSG00000185630_61 (sequence is synthesized)
atgcttaaggcagtggttctaaaattccacaccacctgttcttccagttgtgtcctctctgagctgcctctgacggtcacattccatggccatgtgccacagcagacttgtgatactgat

SEQ ID NO: 671234 - DNA, 120 bp, Artificial Sequence
  ENSG00000185630_62 (sequence is synthesized)
tttagtgttgtccttggccattgggggaagggaggaaggagagagaagagaaggggagagaagaagagaaatgggagtggggtccattcatccatctctcttgtcattaggggcccagca

SEQ ID NO: 671235 - DNA, 120 bp, Artificial Sequence
  ENSG00000185630_63 (sequence is synthesized)
gttcccactatggtacctaggaaactagcttggacctggaggccatccagtgacctagtctgggccagtaaagccaccaggccattttcctgcttcggacatgctttctcagctgccctc

SEQ ID NO: 671236 - DNA, 120 bp, Artificial Sequence
  ENSG00000185630_64 (sequence is synthesized)
ccccttagctaaggctgaaatgactcatcttcccgtgccctagttccacggggtttcatctctgtgactcgggacagaggccttggttgccaccaaaggcagcttatggtgtagcttcag

SEQ ID NO: 671237 - DNA, 120 bp, Artificial Sequence
  ENSG00000185630_65 (sequence is synthesized)
gtctggcctgactcagtggccttccctcagctattcactacagaggcagttaatgaagaagacacaagggtagcaggcctgagggataacttcaaggctaacgtgtcttttttccagtac

SEQ ID NO: 671238 - DNA, 120 bp, Artificial Sequence
  ENSG00000185630_66 (sequence is synthesized)
ttactcttcttttgaattttaagaattccagattttattctaagtcagagaatactgtgagaaaggattttattgtatccactctctccaaatggtgtgaacatctggatttgcatcctt

SEQ ID NO: 671239 - DNA, 120 bp, Artificial Sequence
  ENSG00000185630_67 (sequence is synthesized)
taacacccttcctttaaggaagttagaacacttgataaattttaagcttttgatcctcagtagtacccctggaaaattaaggtccagtgaggtaaattgtcttgattaattatatgacat

SEQ ID NO: 671240 - DNA, 120 bp, Artificial Sequence
  ENSG00000185630_68 (sequence is synthesized)
gcactgctttttggtggctcttttgttgtgttttgttttttctttctccttcattttgttaaaatgaattatgtgaatgtccaggttagcagtgttctattttcataggataagccccat

SEQ ID NO: 671241 - DNA, 120 bp, Artificial Sequence
  ENSG00000185630_69 (sequence is synthesized)
ctctagtactgtttatttccattgtgcctatttttcagggaactctgtgcatttccacatttccatcaccagctctaagaagaaaatagaaaatgagatattagaaggaaatagaacaaa

SEQ ID NO: 671242 - DNA, 120 bp, Artificial Sequence
  ENSG00000185630_70 (sequence is synthesized)
aactatttgccttcaaggagctcacagtctagttctggagactggacataagcagtctctgctctctgcttggactggtgtcactgtgatcattctaagttacagagacagttgacggct

SEQ ID NO: 671243 - DNA, 120 bp, Artificial Sequence
  ENSG00000185630_71 (sequence is synthesized)
ttggagtgaaagctaggagccaaggagtcctgagaaaactataaatgggcatggaatgtcctggataattctgtggtggggaaattaattctgaaccactaagtactattaagaagctga

SEQ ID NO: 671244 - DNA, 120 bp, Artificial Sequence
  ENSG00000185630_72 (sequence is synthesized)
tgccaactaaataggcagaaatttttacaaaagctgccagagtttagaaaccacccagtgtgccatagcttcaggggagcaaaactacccactctaccaagttggaaaaaatgaagaatg

SEQ ID NO: 671245 - DNA, 120 bp, Artificial Sequence
  ENSG00000185630_73 (sequence is synthesized)
cttcaaactgaatccagctgatcctggaggccactgaccctgtcctaatggagacaaaaagtgacagtatttcgaaaaaagcctggttttggtacagctcttccagaacccacgggaaga

SEQ ID NO: 671246 - DNA, 120 bp, Artificial Sequence
  ENSG00000185630_74 (sequence is synthesized)
acctgttcatcagctcatccatccgtctgctgagtaaatgcttattgagcatctactgaatgccagcactgttctttgttcttggaatacatcagtaaacaaaataaggaaaacaaaacc

SEQ ID NO: 671247 - DNA, 120 bp, Artificial Sequence
  ENSG00000185630_75 (sequence is synthesized)
gataatgaactagcacatgggctgcatcaggaagccctggggacctcgcagaagttgagagtgtggagtgggagaatgggaggagtaatatattaaccttactgatacacaaagttgctc

SEQ ID NO: 671248 - DNA, 120 bp, Artificial Sequence
  ENSG00000185630_76 (sequence is synthesized)
gaattaaatttgaaaacacacagaccgagaggcagacagttcctaggctgtggtcgttgcatggattttacaaaactgttaacctacacctttggctttgctgtgttcattgtcctggga

SEQ ID NO: 671249 - DNA, 120 bp, Artificial Sequence
  ENSG00000185630_77 (sequence is synthesized)
actcctgggctcaagcaatcctcctatcttggcctcccaaactgctgggattacaagtgtgagtcactgcgcctggcctgaagattctatttcacctatgaaaacatgctttaaactgcc

SEQ ID NO: 671250 - DNA, 120 bp, Artificial Sequence
  ENSG00000185630_78 (sequence is synthesized)
taatgtgttgtgtgaaatcaaagaaaaaacagacctcgtttcgtggactaacacacttataacacatcccaggagggcatttaaattttaaagcaacaattaaaaaatagcagtcatcaa

SEQ ID NO: 671251 - DNA, 120 bp, Artificial Sequence
  ENSG00000185630_79 (sequence is synthesized)
ttgtgtgaaatcaaagaaaaaacagatttattaaaacagatgtgatctaccaataatgttttacatctgatggaaagaattggaatataataatcctacttttctttaatgcattactaa

SEQ ID NO: 671252 - DNA, 120 bp, Artificial Sequence
  ENSG00000185630_80 (sequence is synthesized)
ttcagacaggcccttctggttgttctgaattggagagagagcagacacttcagttggatttggaatcatccacttttttttgcaggtatttcgaaaaaagcctggttttggtacagctct

SEQ ID NO: 671253 - DNA, 120 bp, Artificial Sequence
  ENSG00000185630_81 (sequence is synthesized)
tactttcaacttaaaaaaaaaaaagagaaactaattatgtgccctaaggatcaccaggccttaggttctacctttatttttcttctactgttaaatagcaacctcattcctcaggctgct

SEQ ID NO: 671254 - DNA, 120 bp, Artificial Sequence
  ENSG00000185630_82 (sequence is synthesized)
gatggaattggtaactgagtaatcaggccactgtgctcggggacataaaacctgtggctgctgccattgcagagtcccgtcatggatcagagttcgtccctgggaaacaacttgtgccga

SEQ ID NO: 671255 - DNA, 120 bp, Artificial Sequence
  ENSG00000185630_83 (sequence is synthesized)
cggaaggagttcttcctttgctcccctcatacctcccttccttgcagatgggatccttgcaagggcagagcagctcttagagttgtcaggcccttttctttcattctgcttattttccca

SEQ ID NO: 671256 - DNA, 120 bp, Artificial Sequence
  ENSG00000185630_84 (sequence is synthesized)
taggcgagtactgctcagaacccaggctgtgagttttttgatgtggaaagctatttactaagcatgtcttgacgcagaggatggagggaaagaaagcctccaagagagtggtgattctac

SEQ ID NO: 671257 - DNA, 120 bp, Artificial Sequence
  ENSG00000185630_85 (sequence is synthesized)
aaccatcatcaaattttggttgaaaactcaaagctgctgatatgtattagtaagcagataacagtaacatcctgtatttgcatggccctgtatcagtcaatagcattcagatttgtgtgg

SEQ ID NO: 671258 - DNA, 120 bp, Artificial Sequence
  ENSG00000185630_86 (sequence is synthesized)
tggtgtatagctttccttatttcatatcaggtgttttcatttgatcccaagtggtatgtcctgagacagaagaaatagccccattttacagaagaagaaacccaaaattgcaaggaattt

SEQ ID NO: 671259 - DNA, 120 bp, Artificial Sequence
  ENSG00000185630_87 (sequence is synthesized)
tatcttgacttacgcaacaaaggagataagccaggtacatgtcattaatcttcctatgtatgacaactgaggctccaggaggttaagtgccttgcctaagattacttgggtggtggtaga

SEQ ID NO: 671260 - DNA, 120 bp, Artificial Sequence
  ENSG00000185630_88 (sequence is synthesized)
actggttttcaaaaccagatcatctgaatggaatctaagtctttcttctgtatcaccttgttaatgtgtcaggaactaccaccccaccttccaaaacacatacacactctcacttttaat

SEQ ID NO: 671261 - DNA, 120 bp, Artificial Sequence
  ENSG00000185630_89 (sequence is synthesized)
gcggacccatcttagaataaactagttaaggactgactgctgaacatggtccagaaacttactgtcaaattttgcttttgagatgtgcttgtgttgtgtgaagtcttttttttttttttt

SEQ ID NO: 671262 - DNA, 83 bp, Artificial Sequence
  ENSG00000185630_90 (sequence is synthesized)
gatttcactcttatcacccaggctggagtggagtggcgtgatcatagttcacttcagcctctaactcctgggcaccagcaatc

SEQ ID NO: 671263 - DNA, 120 bp, Artificial Sequence
  ENSG00000185630_91 (sequence is synthesized)
atagttcacttcagcctctaactcctgggcaccagcaatcctcctgagtagctgggaatataggcatgtgccaacacaccaggctaattttatgtattttttagattttcatagagatga

SEQ ID NO: 671264 - DNA, 120 bp, Artificial Sequence
  ENSG00000185630_92 (sequence is synthesized)
attttcatagagatgaaggggtctcagtatgttgctcaggctggtcttgaactcctagcctcaaatgatcctcctgcattggccttcccaaatactgggattacaagcatgagccactgc

SEQ ID NO: 671265 - DNA, 120 bp, Artificial Sequence
  ENSG00000185630_93 (sequence is synthesized)
ttctaaagatttctttcctgtttatgtacagaatatctaacagctatgcttacctttaaagcagccttatgaatatccttgtgaattccttaagctcaagggtcttgtttgcattttgta

SEQ ID NO: 671266 - DNA, 120 bp, Artificial Sequence
  ENSG00000185630_94 (sequence is synthesized)
ggtatatctgtagatagatcttacctatctctggcaggtaacattatcatcatgttttccctgtttctggacactttgtgaaagcattgtagaaataaaagaagtctttattctttgacc

SEQ ID NO: 671267 - DNA, 120 bp, Artificial Sequence
  ENSG00000185630_95 (sequence is synthesized)
tctcttatgcattatgaattctgaaaaactgagggagataaaaggcaatctatgctttactgctttccctaagttttgagaagcaggcttaaaaaaatgctttaaaaattttagatgcca

SEQ ID NO: 671268 - DNA, 120 bp, Artificial Sequence
  ENSG00000185630_96 (sequence is synthesized)
taatacactgaaaatagggatctcaggtatttgaggcagaccaggattcttctttgaccagtcctttcactgaaaagactgtatttagatatttctctgagtgttctagattcatagacc

SEQ ID NO: 671269 - DNA, 120 bp, Artificial Sequence
  ENSG00000185630_97 (sequence is synthesized)
caaatgacctctctgagcatcaagatacatgaagaagttacttcctgaggataataaatatgaaaagagaattatcaccctctgctttcagaaatcacttaaaaaggaagggagtgcttt

SEQ ID NO: 671270 - DNA, 120 bp, Artificial Sequence
  ENSG00000185630_98 (sequence is synthesized)
tcccatgaggttcctgagacagagtccttatgtcaccttgtattggcaaaaagatctggggcactgtgtttgacgatagcacttctttgttcccctcccgatatatttacagaatataat

SEQ ID NO: 671271 - DNA, 120 bp, Artificial Sequence
  ENSG00000185630_99 (sequence is synthesized)
cctattttgcttgcactcatttccataatactgaaagtaaataaaccttatataacgttttatggttaagaactacttagtcttgtgtgtggaacttcagcaagaagcaaaagaaaattc

SEQ ID NO: 671272 - DNA, 120 bp, Artificial Sequence
  ENSG00000185630_100 (sequence is synthesized)
ctgacggggctgctggagtttgcagagacacggaggaggagagagcctgtgctttgcctgccgccgcggctgggggagatctggcttttgcaacagcccaccccctttgagatcactctg

SEQ ID NO: 671273 - DNA, 120 bp, Artificial Sequence
  ENSG00000185630_101 (sequence is synthesized)
ggtggggggcagcggggggtggggggggaaagtttgcattgcaatccccctgccttcctctcctttctcccgatcaatgcatatttgcaaaaggattaagccacagatttaagcgccggg

SEQ ID NO: 671274 - DNA, 120 bp, Artificial Sequence
  ENSG00000185630_102 (sequence is synthesized)
ttaagcgccgggagcccatttctgccttgcaaaggagaccggactgaaaaacctaaagccagctctgatttcttttcgccaagtgggaaggatttgaagacaagcttgaaggataaaaag

SEQ ID NO: 671275 - DNA, 120 bp, Artificial Sequence
  ENSG00000185630_103 (sequence is synthesized)
gtgtgtgtgtgaatataggggtattcatttatatccacacaaacacacaggcatgccgaaaatactgccaactgatccaaaagcggccctcggcactttttactgctttaaaaaagtatc

SEQ ID NO: 671276 - DNA, 120 bp, Artificial Sequence
  ENSG00000185630_104 (sequence is synthesized)
catgagctatgtaataggctttgtttcaggaaatatgcattatatcactaatttaagagtttaggtcaaaatactatattttggggtgtgccttgtgtcatcagttcagaatttctacat

SEQ ID NO: 671277 - DNA, 120 bp, Artificial Sequence
  ENSG00000185630_105 (sequence is synthesized)
gtgaaaaaatgtagttaataatgcaaaaaatataacctttgtgtttgtatgctatggaaggcatgtggtaatttttttttccctttggtaaaggaaagacaagtattttctcattaaata

SEQ ID NO: 671278 - DNA, 120 bp, Artificial Sequence
  ENSG00000185630_106 (sequence is synthesized)
agtttggtttgactttgattagggtgcacagctaagaaaactgatgattctaacttaaaaggttaccaatttaaatatgtttgatcgtaatatgattacaaacctaatgtctaacatttt

SEQ ID NO: 671279 - DNA, 120 bp, Artificial Sequence
  ENSG00000185630_107 (sequence is synthesized)
ttagagtatgtggtatctttgaccacaaagcttgtttgtccactaaaataagttttcttacagcgactcgttactggagaaatgtagggttccacagactgatgtcttctgtgagcttcc

SEQ ID NO: 671280 - DNA, 120 bp, Artificial Sequence
  ENSG00000185630_108 (sequence is synthesized)
agatgcataaatttgttatgataaggtcctccaagtcactgggctatacccagcacttcttttgtggccttcttttatctaaatggaatcatgcatgaagagtagcctgggctttttcaa

SEQ ID NO: 671281 - DNA, 120 bp, Artificial Sequence
  ENSG00000185630_109 (sequence is synthesized)
catggatataataaaacaatgtagaattcaatccagttttaattttcccagcactgcaggttagattcctatgaggagcatatttacttttttagaaatattttgtttttttcttcctcc

SEQ ID NO: 671282 - DNA, 120 bp, Artificial Sequence
  ENSG00000185630_110 (sequence is synthesized)
atcatggtgtgattgacaagggatcaaagctaacaggttcaataaccagagagagttccatcttctccatctggtcaattattaagaatttcagacccaacaacaccagttgaactgtgc

SEQ ID NO: 671283 - DNA, 120 bp, Artificial Sequence
  ENSG00000185630_111 (sequence is synthesized)
tgctaggcagacattttcacttgtctctttggaagaagtacaattctgtcaacattagcaaaaatgcactcaacactcctgcaaaggttatcataatgcaaaacgatatcaaaatgactt

SEQ ID NO: 671284 - DNA, 120 bp, Artificial Sequence
  ENSG00000185630_112 (sequence is synthesized)
tttcctgtccctggtatatctgcatcgcagatggcttagcatgatttatgactagtccttagaaaagccctgtggactttcttcattactaaatttgtaactatttattctttcctaaag

SEQ ID NO: 671285 - DNA, 120 bp, Artificial Sequence
  ENSG00000185630_113 (sequence is synthesized)
cccttaaaagagaaaaataagcattttaaccctctattctgtgtttaagaaatatggttgcctcttatggaatgtcagactatgattacagttttctaaggaatttttttctggtggctt

SEQ ID NO: 671286 - DNA, 120 bp, Artificial Sequence
  ENSG00000185630_114 (sequence is synthesized)
aaacatcatgtgactattctgagcacaaagtaaattattatggaaaatttgagctaagccttccaattgtgcgtaagttgttggaaataatctgcacaggaacccctttgtagtgctttt

SEQ ID NO: 671287 - DNA, 120 bp, Artificial Sequence
  ENSG00000185630_115 (sequence is synthesized)
tctaaagtagaggcaaaagaaaatactattgtatgtgtgcaatagcatggaattttaaaagataaacattttaacaggaaaagttataaatgggcttttctgtattttcttttgctctta

SEQ ID NO: 671288 - DNA, 120 bp, Artificial Sequence
  ENSG00000185630_116 (sequence is synthesized)
accaacctaaatcatccacacaggtaaagtagaactttaaaatgttcaaacttttcacataaggtgtttattatgttatgtacttgctcttcaataatttggaaagataaatgataattg

SEQ ID NO: 671289 - DNA, 120 bp, Artificial Sequence
  ENSG00000185630_117 (sequence is synthesized)
aaataaattttaaataagaggttaatatgtgaaaatatattttggcagagtttgaagtctagagttgtagaacctaggaacttttcataacctcagtattgaagcagaagtttttttttc

SEQ ID NO: 671290 - DNA, 120 bp, Artificial Sequence
  ENSG00000185630_118 (sequence is synthesized)
aagaatcccttgaacctgggaggtgcagattgtagtgagctgagaccgcaccacttactccagcctgggcaacacagcgaaactccaactccaaaaacaaaacaaacaaacaaacaaaaa

SEQ ID NO: 671291 - DNA, 120 bp, Artificial Sequence
  ENSG00000185630_119 (sequence is synthesized)
aaccaaatatatttctttgcaagtaaatcctcttcctgctagaggcttctgtatggagaacagcacttcagtaagattacttccaaatatttctatttattgatatgttccatgtctcct

SEQ ID NO: 671292 - DNA, 120 bp, Artificial Sequence
  ENSG00000185630_120 (sequence is synthesized)
atcttcttaagcataattttttttttaaatcacttaagactaaaacccggggggattagcaagcatttagagacatttagcatgcttcatagtttataccagcaaagtgagacaaaatgg

SEQ ID NO: 671293 - DNA, 120 bp, Artificial Sequence
  ENSG00000185630_121 (sequence is synthesized)
atgaagcaaagaggaagaatagaaggaaggagagaaagttaaattttgaaaaaagaaagcaagaataggggccagttgaagcactggttaaaacctggggtctataattcttctgtagtg

SEQ ID NO: 671294 - DNA, 120 bp, Artificial Sequence
  ENSG00000185630_122 (sequence is synthesized)
gcctagagtaatgcattcttaatttcttaatttcgatgagattataaaacctcagaaaaatgaggccctttcaagaagcttggattatcttctgcagaggattttaacatccaagaagaa

SEQ ID NO: 671295 - DNA, 120 bp, Artificial Sequence
  ENSG00000185630_123 (sequence is synthesized)
agaaattgacttgtgcattacagatgttcactgtggcatgccatcagcgttgaaattatatcacattctgtgattagatcagtggtagtgggcttactgaagctcagaaccccaagattg

SEQ ID NO: 671296 - DNA, 120 bp, Artificial Sequence
  ENSG00000185630_124 (sequence is synthesized)
gaattcttttgcttagctgtgtgtttgtgtcaaggacaacagcaaattcaaccatgaaagttcttcctctagcactattttagtcaatggcaagcccatatacataatcttgtaataccc

SEQ ID NO: 671297 - DNA, 120 bp, Artificial Sequence
  ENSG00000185630_125 (sequence is synthesized)
ctgtattagtccattctcacgctgctatgaggaaatgcctgagactgggtaatttctaaaggaaagaggcttaattgactcaggttagcatggctggagaggcctcaggaaacttgcagt

SEQ ID NO: 671298 - DNA, 90 bp, Artificial Sequence
  ENSG00000185630_126 (sequence is synthesized)
gcagaaggtgaaggggaagcaaggcagcttcttcataaggcagcaggaagaagtgccgagtgaagtagatcttgtgagaactcactcact

SEQ ID NO: 671299 - DNA, 120 bp, Artificial Sequence
  ENSG00000185630_127 (sequence is synthesized)
cttgtgagaactcactcactatcacaacagcatggaggaaactgcccccatgattcaattaagttcacctggtctctcctttgacctggggaccgtggggattatggggattacaattca

SEQ ID NO: 671300 - DNA, 120 bp, Artificial Sequence
  ENSG00000185630_128 (sequence is synthesized)
gggacacaaagtctaatcatatcaacccctaaaaagaggtttggtgtttttcaggattgatgaaaggttattatattaaaactcagagccttcatgccctatgagaagtttttatataat

SEQ ID NO: 671301 - DNA, 120 bp, Artificial Sequence
  ENSG00000185630_129 (sequence is synthesized)
acacacagagagaaggtaacacatacagagaagttgactaaaactttagtaaatccacaggaattcttataattttgttttttaaaaccaagtgaaaatatttatcccactgatgtttta

SEQ ID NO: 671302 - DNA, 120 bp, Artificial Sequence
  ENSG00000185630_130 (sequence is synthesized)
tctcatgtctttcttagtatgattctcctctttatttttgattgaagagtgaaaacaatttgtcctggaattggaactctacaaccttgagatacatacctattgaagggttttcacatt

SEQ ID NO: 671303 - DNA, 120 bp, Artificial Sequence
  ENSG00000185630_131 (sequence is synthesized)
caaccagacaacactttactcttttgctttgtcccaagtagaaagtaacaatgaattttggaattcacaaagggaaatggaaaagcaagcatgcatgggacataatttaagcttacatct

SEQ ID NO: 671304 - DNA, 120 bp, Artificial Sequence
  ENSG00000185630_132 (sequence is synthesized)
agtaaaaagggcctatcctttgagctcccaaatggtatgagagtccaatctaatcaagctgaatcaggctggccacataatctatctgaagtcttgatttctaaactacagaaaatggca

SEQ ID NO: 671305 - DNA, 120 bp, Artificial Sequence
  ENSG00000185630_133 (sequence is synthesized)
actacttcattaaaatactgtaaggaatattgagtgaatacatttaaacactgaattccttaaaaggaaaaagtaaatccgttcttgctctaggtcttttgttctcatctaggggcaaat

SEQ ID NO: 671306 - DNA, 120 bp, Artificial Sequence
  ENSG00000185630_134 (sequence is synthesized)
ttgtactcccaggggacatttggtactatctggagctatctttggttgtcacaattttgaagggaggttgttattggcatctattggatagaggataaccattgtagggctaaccagcct

SEQ ID NO: 671307 - DNA, 120 bp, Artificial Sequence
  ENSG00000185630_135 (sequence is synthesized)
acaatgcataagataatctcccacaataaagaatatttggcccaaaatgtcagtagcaacaaggttgagagatcctattctaggtttaagctttatcattattattattattattatttt

SEQ ID NO: 671308 - DNA, 120 bp, Artificial Sequence
  ENSG00000185630_136 (sequence is synthesized)
tggattatgaagttaactgattttttttattgttttttgcttttaatttttttgtttttctttaacaaatttaagtctcctgaagattctttagagtagaaatgcaattttctggaactt

SEQ ID NO: 671309 - DNA, 120 bp, Artificial Sequence
  ENSG00000185630_137 (sequence is synthesized)
gtctgatgaaaatggatgtggacactttaccacatcatgatgtctgcccaagcaaatgcattataatcataagtgatccagtatttcttctctgcctagttgagtgtagatttagttctg

SEQ ID NO: 671310 - DNA, 120 bp, Artificial Sequence
  ENSG00000185630_138 (sequence is synthesized)
cacatgccccaaatgtctgggtggcagtttaaatgagctgcttgccttccttcccaaaccaaattcagaaccttttaactgacaaccacatcttaaaatgtgcttctaatggtagctgat

SEQ ID NO: 671311 - DNA, 120 bp, Artificial Sequence
  ENSG00000185630_139 (sequence is synthesized)
ggcttcaaaacagcctgcaggtaaggtttctgaatgatcttctcagcaagccaagtctttctgtttcagttctttgagaatgccacagcacctccaagagagcccattcactatttgtca

SEQ ID NO: 671312 - DNA, 120 bp, Artificial Sequence
  ENSG00000185630_140 (sequence is synthesized)
gtggatcgtgtgcttcccaggaggttatccattccatgataaattctttccaacttgcagtgctgggtagagaacatgtcctccccttgtagttcagatgtttttgtggacttccgtctg

SEQ ID NO: 671313 - DNA, 120 bp, Artificial Sequence
  ENSG00000185630_141 (sequence is synthesized)
cttcattgtggtgttagtggcacctggtctcttccctcagcacagtcagtgcttctagatacttatcagagagtgagaagccatggtaatattgtacatgggtgtacagacacaatgaaa

SEQ ID NO: 671314 - DNA, 120 bp, Artificial Sequence
  ENSG00000185630_142 (sequence is synthesized)
tgctgaaacagcacagccaagagcacaagggactgtttcttcaattactgctctgatacaaatgcacttgtatatgaagtacatttatatatgcatatttatctctgtgtacattaggca

SEQ ID NO: 671315 - DNA, 120 bp, Artificial Sequence
  ENSG00000185630_143 (sequence is synthesized)
gccagacatatttacagtttatgcacatgtattttttaaatcacctgtgtcaattgcaatgtgtatcttttaaatgacacattccatgccttcatggttccatggatgccacgtcattgg

SEQ ID NO: 671316 - DNA, 120 bp, Artificial Sequence
  ENSG00000185630_144 (sequence is synthesized)
acatcatgtagccctttgggggtttctcccatttctaagtttgtatactaatttccagaaaaacattggtcaaacttatagtccttatgtttaggctagatttaccacagtggaaccagt

SEQ ID NO: 671317 - DNA, 120 bp, Artificial Sequence
  ENSG00000185630_145 (sequence is synthesized)
ggaatctgggtggtgccaggatggaccttaaggttgactctctgggtgatgagacatcatctagagacgatgggagagaagtaaaatacgtgagcctgaaactgaacactctggggagtt

SEQ ID NO: 671318 - DNA, 120 bp, Artificial Sequence
  ENSG00000185630_146 (sequence is synthesized)
gggtgggggagtctgatgacatataacaaattataatttgggttcttggagctgattcttcttggttctgatgacatctaaatgcaagcatgtattgtaatacattacaaaatgactttt

SEQ ID NO: 671319 - DNA, 120 bp, Artificial Sequence
  ENSG00000185630_147 (sequence is synthesized)
attatttaggttatatctgtgattacaaaaaatatttgagagggatagaactagtatatagagatattatatatctacacgtgagaatgtgatctgtgccacacattgtttcattcatat

SEQ ID NO: 671320 - DNA, 120 bp, Artificial Sequence
  ENSG00000185630_148 (sequence is synthesized)
gttcaggaagacagtttcaaagataggtcccatattaatggaaggaagttacagaccaaaggctttgtcccactgactgggtataagccacacctggccagatcttacacttgttttgct

SEQ ID NO: 671321 - DNA, 120 bp, Artificial Sequence
  ENSG00000185630_149 (sequence is synthesized)
agaaatgtgggccagatgagacaggacaagtcgcagagctatggagatggcatagtcctttggttgatgcttgagtcctcctctaacccccaaagaaagcatttattttttcctgggaaa

SEQ ID NO: 671322 - DNA, 120 bp, Artificial Sequence
  ENSG00000185630_150 (sequence is synthesized)
gaaggaatgagaagggagttaggtggaggattgttttatttagtaaaatagctaggttttttttgcatgcaaatgaacatcccacaggacaaagaaaattggagttttttttttttttta

SEQ ID NO: 671323 - DNA, 120 bp, Artificial Sequence
  ENSG00000185630_151 (sequence is synthesized)
atgttgagttgtccccaggtttataaatcatctgctttctctaaatggctcttgcctttaaagtatgaaaacaccatgaatagcctagatagataccataaataaacagtgcattgtgtc

SEQ ID NO: 671324 - DNA, 120 bp, Artificial Sequence
  ENSG00000185630_152 (sequence is synthesized)
agagtttagagttcatcatttgttaagtggtccttctatgggggaaaaaaagtcctctcttctgcttagctgcacctcttcatgtggggcaggaaagctctcagagctcaaatccctacc

SEQ ID NO: 671325 - DNA, 120 bp, Artificial Sequence
  ENSG00000185630_153 (sequence is synthesized)
ttaggagaaaagaaaagtgtcagagctgaggcatgaatcattgttgggtgattccacactgatgatggctgtctcagaatatgagggcaagagcacaatttgagcaatatagggttggaa

SEQ ID NO: 671326 - DNA, 120 bp, Artificial Sequence
  ENSG00000185630_154 (sequence is synthesized)
ataatagagtgcaactgacctgggtccctaaggtctttccttttccaggctaatgtcatgttttaaccaaaccttgcacgttgagctttctttcctaatgcgctgagctgcacgatgact

SEQ ID NO: 671327 - DNA, 120 bp, Artificial Sequence
  ENSG00000185630_155 (sequence is synthesized)
tcagaataatattaagcttttgcaagcccttatgcttaggttgaatgtgggctaggttcaccgcagtggaaccagtggaacctgggtggtgccaggatggaccttaggctaactcactgg

SEQ ID NO: 671328 - DNA, 120 bp, Artificial Sequence
  ENSG00000185630_156 (sequence is synthesized)
atgatgcttccatccctgggaggtgaaaagcagatggctaatggcccttcttgaggcccacttattattattattactattattattattagcagcgatgtttcatattttatgcatgct

SEQ ID NO: 671329 - DNA, 120 bp, Artificial Sequence
  ENSG00000185630_157 (sequence is synthesized)
tgagaattcctggcccattattttgttttctctgtagtcacaggtggcagagaagggtagatcactcccacatattcttacagtcctcaaggttccttgggctgttgccaccctgcaaga

SEQ ID NO: 671330 - DNA, 120 bp, Artificial Sequence
  ENSG00000185630_158 (sequence is synthesized)
aatttcaccttcattttagaaattaagaatgtcaatagacccatatcatagagccactcctagtaggtgacattgccttcatgcactccctcccaggtgctgctcctcacaggggagggg

SEQ ID NO: 671331 - DNA, 120 bp, Artificial Sequence
  ENSG00000185630_159 (sequence is synthesized)
atggtttagcaatgacatatttagaatccagttgaatagtttatgtgctctatcatggtggcagaagtaccagtgaccagcccatagcctccatcttgtggtcccctggccaaccctaga

SEQ ID NO: 671332 - DNA, 120 bp, Artificial Sequence
  ENSG00000185630_160 (sequence is synthesized)
attttagaggcatagaagagagatcctaggtctagagactacaatccaaatagactaagttgggaagaataaaggttccctttcttggcttgaagttgccaaggggaagcagttctattg

SEQ ID NO: 671333 - DNA, 120 bp, Artificial Sequence
  ENSG00000185630_161 (sequence is synthesized)
acaacttgcagtaaggtatggcttcacataacataaacaatatgcaccctttattgcttgctctgttcttcatgctactaaccagactctgttgatgttatttttattttagtttttatt

SEQ ID NO: 671334 - DNA, 120 bp, Artificial Sequence
  ENSG00000185630_162 (sequence is synthesized)
aaagaacagcaggagacaagtggtgagagcagctcccacaatgctgtgacagtccctttatcttaggacttttaccaaagaattaaccccagggcaagcgatggcagcaagttttgagta

SEQ ID NO: 671335 - DNA, 120 bp, Artificial Sequence
  ENSG00000185630_163 (sequence is synthesized)
gagtgtctgatttctcagatatgaccatatccagttctgggctccagccctgacctgttccttggctatcagaactatcataaggccagatcagcttaactcatctccaagttttgagta

SEQ ID NO: 671336 - DNA, 79 bp, Artificial Sequence
  ENSG00000185630_164 (sequence is synthesized)
aagtagaagccaaatgtgagctcttggtttggtggctctgatcagctgtggaaatctatgtttcaaaatggtagaaaga

SEQ ID NO: 671337 - DNA, 120 bp, Artificial Sequence
  ENSG00000185630_165 (sequence is synthesized)
tcttggtttggtggctctgatcagctgtggaaatctatgtttcaaaatggtagaaagaggaaatcatcacttttttttttttggagagggagtctctgtcaccaggctggagtgcagtgg

SEQ ID NO: 671338 - DNA, 120 bp, Artificial Sequence
  ENSG00000185630_166 (sequence is synthesized)
ggtgagatggaggcttttcttttcctttcttggggttttttgtttttcttcctcttgcagggggaaacaatgggaaccgaatcaccacagcgctttttttgaaaaatgttatttcttttc

SEQ ID NO: 671339 - DNA, 120 bp, Artificial Sequence
  ENSG00000185630_167 (sequence is synthesized)
aagacacataggcagagatctaagaatgaattagagttctccagataaaggggatgtaaggggcagaggggagcagactggccgaagaacatttttgttaaaatccttttttttttgttt

SEQ ID NO: 671340 - DNA, 120 bp, Artificial Sequence
  ENSG00000185630_168 (sequence is synthesized)
tgaagaaatatgacttttgtcctaaaattccacagcagagcttccagggctatggtagggattaaggtattctacaacagatgaacaagtcttttagggacagcctgaattgaaggaggc

SEQ ID NO: 671341 - DNA, 120 bp, Artificial Sequence
  ENSG00000185630_169 (sequence is synthesized)
caggagtcggaactgcccctcattgttctttttggtgactaggatacaaagttctgttcggcacagagtactctcctctgcttctacctccgggaaccccgttaccccccagcccacaca

SEQ ID NO: 671342 - DNA, 120 bp, Artificial Sequence
  ENSG00000185633_0 (sequence is synthesized)
gtctccgcctgcaggtgcagacatctggaggagagagtcggagagcagaaaccacttggctcccagacaattcccctacaggctttgggcctggaattgaggagaaagtgagctaagttg

SEQ ID NO: 671343 - DNA, 120 bp, Artificial Sequence
  ENSG00000185633_1 (sequence is synthesized)
gggtggggtgagtccaaagaagcacgggctgggccaagctaagctgctctgggctgggctgatccctccccactcaggggcgggaccccaggaggagggagaggacagagccactgcaga

SEQ ID NO: 671344 - DNA, 120 bp, Artificial Sequence
  ENSG00000185633_2 (sequence is synthesized)
ggaccagactgggaaaacaacgatatggcaggagccagtcttggggcccgcttctaccggcagatcaaaagacatccggggatcatcccgatgatcggcttaatctgcctgggcatgggc

SEQ ID NO: 671345 - DNA, 120 bp, Artificial Sequence
  ENSG00000185633_3 (sequence is synthesized)
agcgctgcgctttacttgctgcgactcgcccttcgcagccccgacgtctgctgggacagaaagaacaacccggagccctggaaccgcctgagccccaatgaccaatacaagttccttgca

SEQ ID NO: 671346 - DNA, 120 bp, Artificial Sequence
  ENSG00000185633_4 (sequence is synthesized)
cactcctccccgcaggccccaaggcatcactccggccaccctgtcccgctactgcttacacaggccgggttcccacgcagaggggaggctgctccacccctactctcctcccttgctccc

SEQ ID NO: 671347 - DNA, 120 bp, Artificial Sequence
  ENSG00000185633_5 (sequence is synthesized)
agcagcggaagcgcctctgacccttggcttgagtcccacgtgggggaggaggaggcaggcagcaccagcaggggtccaccaagagcccagaccagcccctctgccctcctacccgggcct
